United States Patent Application Publication US 2005/0255487 A1 - sequence listing, part 53

SEQ ID NO: 1451178 - RNA, 19 nt, Homo sapiens
  misc_RNA (1)...(19): siRNA sense strand
agucagagaugagguaggu

SEQ ID NO: 1451179 - RNA, 19 nt, Homo sapiens
  misc_RNA (1)...(19): siRNA sense strand
cggaacaaccauucuaaag

SEQ ID NO: 1451180 - RNA, 19 nt, Homo sapiens
  misc_RNA (1)...(19): siRNA sense strand
gcuucucaguccuaauguu

SEQ ID NO: 1451181 - RNA, 19 nt, Homo sapiens
  misc_RNA (1)...(19): siRNA sense strand
ugauggagacccacuagau

SEQ ID NO: 1451182 - RNA, 19 nt, Homo sapiens
  misc_RNA (1)...(19): siRNA sense strand
gaugggcuucucaguccua

SEQ ID NO: 1451183 - RNA, 19 nt, Homo sapiens
  misc_RNA (1)...(19): siRNA sense strand
cacuagaugugcacaagag

SEQ ID NO: 1451184 - RNA, 19 nt, Homo sapiens
  misc_RNA (1)...(19): siRNA sense strand
ucucaguccuaauguucuu

SEQ ID NO: 1451185 - RNA, 19 nt, Homo sapiens
  misc_RNA (1)...(19): siRNA sense strand
acacaacaccuguccuuac

SEQ ID NO: 1451186 - RNA, 19 nt, Homo sapiens
  misc_RNA (1)...(19): siRNA sense strand
uggcuaucuuccacuguuu

SEQ ID NO: 1451187 - RNA, 19 nt, Homo sapiens
  misc_RNA (1)...(19): siRNA sense strand
cuaagugccaccaagauag

SEQ ID NO: 1451188 - RNA, 19 nt, Homo sapiens
  misc_RNA (1)...(19): siRNA sense strand
ggcuaucuuccacuguuua

SEQ ID NO: 1451189 - RNA, 19 nt, Homo sapiens
  misc_RNA (1)...(19): siRNA sense strand
ccucagggaagaagagaga

SEQ ID NO: 1451190 - RNA, 19 nt, Homo sapiens
  misc_RNA (1)...(19): siRNA sense strand
gaggcuguccagauaaauc

SEQ ID NO: 1451191 - RNA, 19 nt, Homo sapiens
  misc_RNA (1)...(19): siRNA sense strand
auauagaacagcaucaguu

SEQ ID NO: 1451192 - RNA, 19 nt, Homo sapiens
  misc_RNA (1)...(19): siRNA sense strand
guuggcauggugagauuaa

SEQ ID NO: 1451193 - RNA, 19 nt, Homo sapiens
  misc_RNA (1)...(19): siRNA sense strand
aaaggaagagcagagaaau

SEQ ID NO: 1451194 - RNA, 19 nt, Homo sapiens
  misc_RNA (1)...(19): siRNA sense strand
cauccacacagauaucaug

SEQ ID NO: 1451195 - RNA, 19 nt, Homo sapiens
  misc_RNA (1)...(19): siRNA sense strand
caccaagauagaaaugauu

SEQ ID NO: 1451196 - RNA, 19 nt, Homo sapiens
  misc_RNA (1)...(19): siRNA sense strand
agaagagagagacagacua

SEQ ID NO: 1451197 - RNA, 19 nt, Homo sapiens
  misc_RNA (1)...(19): siRNA sense strand
ccacuagaugugcacaaga

SEQ ID NO: 1451198 - RNA, 19 nt, Homo sapiens
  misc_RNA (1)...(19): siRNA sense strand
gcuaucuuccacuguuuau

SEQ ID NO: 1451199 - RNA, 19 nt, Homo sapiens
  misc_RNA (1)...(19): siRNA sense strand
gguggaaaaguaccuuaua

SEQ ID NO: 1451200 - RNA, 19 nt, Homo sapiens
  misc_RNA (1)...(19): siRNA sense strand
agaaagcucuccuacauua

SEQ ID NO: 1451201 - RNA, 19 nt, Homo sapiens
  misc_RNA (1)...(19): siRNA sense strand
ugaagaggcuguccagaua

SEQ ID NO: 1451202 - RNA, 19 nt, Homo sapiens
  misc_RNA (1)...(19): siRNA sense strand
caacagugcucuggacaua

SEQ ID NO: 1451203 - RNA, 19 nt, Homo sapiens
  misc_RNA (1)...(19): siRNA sense strand
ucagaaagcucuccuacau

SEQ ID NO: 1451204 - RNA, 19 nt, Homo sapiens
  misc_RNA (1)...(19): siRNA sense strand
gcacugccauccacacaga

SEQ ID NO: 1451205 - RNA, 19 nt, Homo sapiens
  misc_RNA (1)...(19): siRNA sense strand
caacaccuguccuuacugu

SEQ ID NO: 1451206 - RNA, 19 nt, Homo sapiens
  misc_RNA (1)...(19): siRNA sense strand
gaagaggcuguccagauaa

SEQ ID NO: 1451207 - RNA, 19 nt, Homo sapiens
  misc_RNA (1)...(19): siRNA sense strand
gagaugagguagguggaaa

SEQ ID NO: 1451208 - RNA, 19 nt, Homo sapiens
  misc_RNA (1)...(19): siRNA sense strand
caaaggaagagcagagaaa

SEQ ID NO: 1451209 - RNA, 19 nt, Homo sapiens
  misc_RNA (1)...(19): siRNA sense strand
acagugcucuggacauaaa

SEQ ID NO: 1451210 - RNA, 19 nt, Homo sapiens
  misc_RNA (1)...(19): siRNA sense strand
ggaagaagagagagacaga

SEQ ID NO: 1451211 - RNA, 19 nt, Homo sapiens
  misc_RNA (1)...(19): siRNA sense strand
gcacuguagucagagauga

SEQ ID NO: 1451212 - RNA, 19 nt, Homo sapiens
  misc_RNA (1)...(19): siRNA sense strand
gagacagacuacagugaug

SEQ ID NO: 1451213 - RNA, 19 nt, Homo sapiens
  misc_RNA (1)...(19): siRNA sense strand
gaagagagagacagacuac

SEQ ID NO: 1451214 - RNA, 19 nt, Homo sapiens
  misc_RNA (1)...(19): siRNA sense strand
aaagcucuccuacauuaua

SEQ ID NO: 1451215 - RNA, 19 nt, Homo sapiens
  misc_RNA (1)...(19): siRNA sense strand
ugagguagguggaaaagua

SEQ ID NO: 1451216 - RNA, 19 nt, Homo sapiens
  misc_RNA (1)...(19): siRNA sense strand
gcuagguggugcccugauu

SEQ ID NO: 1451217 - RNA, 19 nt, Homo sapiens
  misc_RNA (1)...(19): siRNA sense strand
ccaccaagauagaaaugau

SEQ ID NO: 1451218 - RNA, 19 nt, Homo sapiens
  misc_RNA (1)...(19): siRNA sense strand
uaacacaacaccuguccuu

SEQ ID NO: 1451219 - RNA, 19 nt, Homo sapiens
  misc_RNA (1)...(19): siRNA sense strand
gcaaaggaagagcagagaa

SEQ ID NO: 1451220 - RNA, 19 nt, Homo sapiens
  misc_RNA (1)...(19): siRNA sense strand
aagaggcuguccagauaaa

SEQ ID NO: 1451221 - RNA, 19 nt, Homo sapiens
  misc_RNA (1)...(19): siRNA sense strand
ggaaaaguaccuuauauag

SEQ ID NO: 1451222 - RNA, 19 nt, Homo sapiens
  misc_RNA (1)...(19): siRNA sense strand
gauggagacccacuagaug

SEQ ID NO: 1451223 - RNA, 19 nt, Homo sapiens
  misc_RNA (1)...(19): siRNA sense strand
ccuaagugccaccaagaua

SEQ ID NO: 1451224 - RNA, 19 nt, Homo sapiens
  misc_RNA (1)...(19): siRNA sense strand
aagcucuccuacauuauaa

SEQ ID NO: 1451225 - RNA, 19 nt, Homo sapiens
  misc_RNA (1)...(19): siRNA sense strand
uucaaacugugcauuauga

SEQ ID NO: 1451226 - RNA, 19 nt, Homo sapiens
  misc_RNA (1)...(19): siRNA sense strand
gagagacagacuacaguga

SEQ ID NO: 1451227 - RNA, 19 nt, Homo sapiens
  misc_RNA (1)...(19): siRNA sense strand
ggaacaaccauucuaaagc

SEQ ID NO: 1451228 - RNA, 19 nt, Homo sapiens
  misc_RNA (1)...(19): siRNA sense strand
auauagcacuguagucaga

SEQ ID NO: 1451229 - RNA, 19 nt, Homo sapiens
  misc_RNA (1)...(19): siRNA sense strand
gggcuucucaguccuaaug

SEQ ID NO: 1451230 - RNA, 19 nt, Homo sapiens
  misc_RNA (1)...(19): siRNA sense strand
gcucagcauucagagagaa

SEQ ID NO: 1451231 - RNA, 19 nt, Homo sapiens
  misc_RNA (1)...(19): siRNA sense strand
gcucggaacaaccauucua

SEQ ID NO: 1451232 - RNA, 19 nt, Homo sapiens
  misc_RNA (1)...(19): siRNA sense strand
gauaaaucccaagugcuuu

SEQ ID NO: 1451233 - RNA, 19 nt, Homo sapiens
  misc_RNA (1)...(19): siRNA sense strand
gguggugcccugauuguug

SEQ ID NO: 1451234 - RNA, 19 nt, Homo sapiens
  misc_RNA (1)...(19): siRNA sense strand
gaaagcucuccuacauuau

SEQ ID NO: 1451235 - RNA, 19 nt, Homo sapiens
  misc_RNA (1)...(19): siRNA sense strand
aaauauagcacuguaguca

SEQ ID NO: 1451236 - RNA, 19 nt, Homo sapiens
  misc_RNA (1)...(19): siRNA sense strand
cagaaagcucuccuacauu

SEQ ID NO: 1451237 - RNA, 19 nt, Homo sapiens
  misc_RNA (1)...(19): siRNA sense strand
cacaacaccuguccuuacu

SEQ ID NO: 1451238 - RNA, 19 nt, Homo sapiens
  misc_RNA (1)...(19): siRNA sense strand
agauaaaucccaagugcuu

SEQ ID NO: 1451239 - RNA, 19 nt, Homo sapiens
  misc_RNA (1)...(19): siRNA sense strand
gagagagacagacuacagu

SEQ ID NO: 1451240 - RNA, 19 nt, Homo sapiens
  misc_RNA (1)...(19): siRNA sense strand
uaagugccaccaagauaga

SEQ ID NO: 1451241 - RNA, 19 nt, Homo sapiens
  misc_RNA (1)...(19): siRNA sense strand
agaauucuucgaucacaaa

SEQ ID NO: 1451242 - RNA, 19 nt, Homo sapiens
  misc_RNA (1)...(19): siRNA sense strand
guggaaaaguaccuuauau

SEQ ID NO: 1451243 - RNA, 19 nt, Homo sapiens
  misc_RNA (1)...(19): siRNA sense strand
gaggaggagcaaaggaaga

SEQ ID NO: 1451244 - RNA, 19 nt, Homo sapiens
  misc_RNA (1)...(19): siRNA sense strand
guucaaacugugcauuaug

SEQ ID NO: 1451245 - RNA, 19 nt, Homo sapiens
  misc_RNA (1)...(19): siRNA sense strand
agucagagaugagguaggu

SEQ ID NO: 1451246 - RNA, 19 nt, Homo sapiens
  misc_RNA (1)...(19): siRNA sense strand
cggaacaaccauucuaaag

SEQ ID NO: 1451247 - RNA, 19 nt, Homo sapiens
  misc_RNA (1)...(19): siRNA sense strand
gcuucucaguccuaauguu

SEQ ID NO: 1451248 - RNA, 19 nt, Homo sapiens
  misc_RNA (1)...(19): siRNA sense strand
ugauggagacccacuagau

SEQ ID NO: 1451249 - RNA, 19 nt, Homo sapiens
  misc_RNA (1)...(19): siRNA sense strand
gaugggcuucucaguccua

SEQ ID NO: 1451250 - RNA, 19 nt, Homo sapiens
  misc_RNA (1)...(19): siRNA sense strand
cacuagaugugcacaagag

SEQ ID NO: 1451251 - RNA, 19 nt, Homo sapiens
  misc_RNA (1)...(19): siRNA sense strand
ucucaguccuaauguucuu

SEQ ID NO: 1451252 - RNA, 19 nt, Homo sapiens
  misc_RNA (1)...(19): siRNA sense strand
acacaacaccuguccuuac

SEQ ID NO: 1451253 - RNA, 19 nt, Homo sapiens
  misc_RNA (1)...(19): siRNA sense strand
uggcuaucuuccacuguuu

SEQ ID NO: 1451254 - RNA, 19 nt, Homo sapiens
  misc_RNA (1)...(19): siRNA sense strand
cuaagugccaccaagauag

SEQ ID NO: 1451255 - RNA, 19 nt, Homo sapiens
  misc_RNA (1)...(19): siRNA sense strand
ggcuaucuuccacuguuua

SEQ ID NO: 1451256 - RNA, 19 nt, Homo sapiens
  misc_RNA (1)...(19): siRNA sense strand
ccucagggaagaagagaga

SEQ ID NO: 1451257 - RNA, 19 nt, Homo sapiens
  misc_RNA (1)...(19): siRNA sense strand
gaggcuguccagauaaauc

SEQ ID NO: 1451258 - RNA, 19 nt, Homo sapiens
  misc_RNA (1)...(19): siRNA sense strand
auauagaacagcaucaguu

SEQ ID NO: 1451259 - RNA, 19 nt, Homo sapiens
  misc_RNA (1)...(19): siRNA sense strand
guuggcauggugagauuaa

SEQ ID NO: 1451260 - RNA, 19 nt, Homo sapiens
  misc_RNA (1)...(19): siRNA sense strand
aaaggaagagcagagaaau

SEQ ID NO: 1451261 - RNA, 19 nt, Homo sapiens
  misc_RNA (1)...(19): siRNA sense strand
cauccacacagauaucaug

SEQ ID NO: 1451262 - RNA, 19 nt, Homo sapiens
  misc_RNA (1)...(19): siRNA sense strand
caccaagauagaaaugauu

SEQ ID NO: 1451263 - RNA, 19 nt, Homo sapiens
  misc_RNA (1)...(19): siRNA sense strand
agaagagagagacagacua

SEQ ID NO: 1451264 - RNA, 19 nt, Homo sapiens
  misc_RNA (1)...(19): siRNA sense strand
ccacuagaugugcacaaga

SEQ ID NO: 1451265 - RNA, 19 nt, Homo sapiens
  misc_RNA (1)...(19): siRNA sense strand
gcuaucuuccacuguuuau

SEQ ID NO: 1451266 - RNA, 19 nt, Homo sapiens
  misc_RNA (1)...(19): siRNA sense strand
gguggaaaaguaccuuaua

SEQ ID NO: 1451267 - RNA, 19 nt, Homo sapiens
  misc_RNA (1)...(19): siRNA sense strand
agaaagcucuccuacauua

SEQ ID NO: 1451268 - RNA, 19 nt, Homo sapiens
  misc_RNA (1)...(19): siRNA sense strand
ugaagaggcuguccagaua

SEQ ID NO: 1451269 - RNA, 19 nt, Homo sapiens
  misc_RNA (1)...(19): siRNA sense strand
caacagugcucuggacaua

SEQ ID NO: 1451270 - RNA, 19 nt, Homo sapiens
  misc_RNA (1)...(19): siRNA sense strand
ucagaaagcucuccuacau

SEQ ID NO: 1451271 - RNA, 19 nt, Homo sapiens
  misc_RNA (1)...(19): siRNA sense strand
gcacugccauccacacaga

SEQ ID NO: 1451272 - RNA, 19 nt, Homo sapiens
  misc_RNA (1)...(19): siRNA sense strand
caacaccuguccuuacugu

SEQ ID NO: 1451273 - RNA, 19 nt, Homo sapiens
  misc_RNA (1)...(19): siRNA sense strand
gaagaggcuguccagauaa

SEQ ID NO: 1451274 - RNA, 19 nt, Homo sapiens
  misc_RNA (1)...(19): siRNA sense strand
gagaugagguagguggaaa

SEQ ID NO: 1451275 - RNA, 19 nt, Homo sapiens
  misc_RNA (1)...(19): siRNA sense strand
caaaggaagagcagagaaa

SEQ ID NO: 1451276 - RNA, 19 nt, Homo sapiens
  misc_RNA (1)...(19): siRNA sense strand
acagugcucuggacauaaa

SEQ ID NO: 1451277 - RNA, 19 nt, Homo sapiens
  misc_RNA (1)...(19): siRNA sense strand
ggaagaagagagagacaga

SEQ ID NO: 1451278 - RNA, 19 nt, Homo sapiens
  misc_RNA (1)...(19): siRNA sense strand
gcacuguagucagagauga

SEQ ID NO: 1451279 - RNA, 19 nt, Homo sapiens
  misc_RNA (1)...(19): siRNA sense strand
gagacagacuacagugaug

SEQ ID NO: 1451280 - RNA, 19 nt, Homo sapiens
  misc_RNA (1)...(19): siRNA sense strand
gaagagagagacagacuac

SEQ ID NO: 1451281 - RNA, 19 nt, Homo sapiens
  misc_RNA (1)...(19): siRNA sense strand
aaagcucuccuacauuaua

SEQ ID NO: 1451282 - RNA, 19 nt, Homo sapiens
  misc_RNA (1)...(19): siRNA sense strand
ugagguagguggaaaagua

SEQ ID NO: 1451283 - RNA, 19 nt, Homo sapiens
  misc_RNA (1)...(19): siRNA sense strand
gcuagguggugcccugauu

SEQ ID NO: 1451284 - RNA, 19 nt, Homo sapiens
  misc_RNA (1)...(19): siRNA sense strand
ccaccaagauagaaaugau

SEQ ID NO: 1451285 - RNA, 19 nt, Homo sapiens
  misc_RNA (1)...(19): siRNA sense strand
uaacacaacaccuguccuu

SEQ ID NO: 1451286 - RNA, 19 nt, Homo sapiens
  misc_RNA (1)...(19): siRNA sense strand
gcaaaggaagagcagagaa

SEQ ID NO: 1451287 - RNA, 19 nt, Homo sapiens
  misc_RNA (1)...(19): siRNA sense strand
aagaggcuguccagauaaa

SEQ ID NO: 1451288 - RNA, 19 nt, Homo sapiens
  misc_RNA (1)...(19): siRNA sense strand
ggaaaaguaccuuauauag

SEQ ID NO: 1451289 - RNA, 19 nt, Homo sapiens
  misc_RNA (1)...(19): siRNA sense strand
gauggagacccacuagaug

SEQ ID NO: 1451290 - RNA, 19 nt, Homo sapiens
  misc_RNA (1)...(19): siRNA sense strand
ccuaagugccaccaagaua

SEQ ID NO: 1451291 - RNA, 19 nt, Homo sapiens
  misc_RNA (1)...(19): siRNA sense strand
aagcucuccuacauuauaa

SEQ ID NO: 1451292 - RNA, 19 nt, Homo sapiens
  misc_RNA (1)...(19): siRNA sense strand
uucaaacugugcauuauga

SEQ ID NO: 1451293 - RNA, 19 nt, Homo sapiens
  misc_RNA (1)...(19): siRNA sense strand
gagagacagacuacaguga

SEQ ID NO: 1451294 - RNA, 19 nt, Homo sapiens
  misc_RNA (1)...(19): siRNA sense strand
ggaacaaccauucuaaagc

SEQ ID NO: 1451295 - RNA, 19 nt, Homo sapiens
  misc_RNA (1)...(19): siRNA sense strand
auauagcacuguagucaga

SEQ ID NO: 1451296 - RNA, 19 nt, Homo sapiens
  misc_RNA (1)...(19): siRNA sense strand
gggcuucucaguccuaaug

SEQ ID NO: 1451297 - RNA, 19 nt, Homo sapiens
  misc_RNA (1)...(19): siRNA sense strand
gcucagcauucagagagaa

SEQ ID NO: 1451298 - RNA, 19 nt, Homo sapiens
  misc_RNA (1)...(19): siRNA sense strand
gcucggaacaaccauucua

SEQ ID NO: 1451299 - RNA, 19 nt, Homo sapiens
  misc_RNA (1)...(19): siRNA sense strand
gauaaaucccaagugcuuu

SEQ ID NO: 1451300 - RNA, 19 nt, Homo sapiens
  misc_RNA (1)...(19): siRNA sense strand
gguggugcccugauuguug

SEQ ID NO: 1451301 - RNA, 19 nt, Homo sapiens
  misc_RNA (1)...(19): siRNA sense strand
gaaagcucuccuacauuau

SEQ ID NO: 1451302 - RNA, 19 nt, Homo sapiens
  misc_RNA (1)...(19): siRNA sense strand
aaauauagcacuguaguca

SEQ ID NO: 1451303 - RNA, 19 nt, Homo sapiens
  misc_RNA (1)...(19): siRNA sense strand
cagaaagcucuccuacauu

SEQ ID NO: 1451304 - RNA, 19 nt, Homo sapiens
  misc_RNA (1)...(19): siRNA sense strand
cacaacaccuguccuuacu

SEQ ID NO: 1451305 - RNA, 19 nt, Homo sapiens
  misc_RNA (1)...(19): siRNA sense strand
agauaaaucccaagugcuu

SEQ ID NO: 1451306 - RNA, 19 nt, Homo sapiens
  misc_RNA (1)...(19): siRNA sense strand
gagagagacagacuacagu

SEQ ID NO: 1451307 - RNA, 19 nt, Homo sapiens
  misc_RNA (1)...(19): siRNA sense strand
uaagugccaccaagauaga

SEQ ID NO: 1451308 - RNA, 19 nt, Homo sapiens
  misc_RNA (1)...(19): siRNA sense strand
agaauucuucgaucacaaa

SEQ ID NO: 1451309 - RNA, 19 nt, Homo sapiens
  misc_RNA (1)...(19): siRNA sense strand
guggaaaaguaccuuauau

SEQ ID NO: 1451310 - RNA, 19 nt, Homo sapiens
  misc_RNA (1)...(19): siRNA sense strand
gaggaggagcaaaggaaga

SEQ ID NO: 1451311 - RNA, 19 nt, Homo sapiens
  misc_RNA (1)...(19): siRNA sense strand
guucaaacugugcauuaug

SEQ ID NO: 1451312 - RNA, 19 nt, Homo sapiens
  misc_RNA (1)...(19): siRNA sense strand
agucagagaugagguaggu

SEQ ID NO: 1451313 - RNA, 19 nt, Homo sapiens
  misc_RNA (1)...(19): siRNA sense strand
cggaacaaccauucuaaag

SEQ ID NO: 1451314 - RNA, 19 nt, Homo sapiens
  misc_RNA (1)...(19): siRNA sense strand
gcuucucaguccuaauguu

SEQ ID NO: 1451315 - RNA, 19 nt, Homo sapiens
  misc_RNA (1)...(19): siRNA sense strand
ugauggagacccacuagau

SEQ ID NO: 1451316 - RNA, 19 nt, Homo sapiens
  misc_RNA (1)...(19): siRNA sense strand
gaugggcuucucaguccua

SEQ ID NO: 1451317 - RNA, 19 nt, Homo sapiens
  misc_RNA (1)...(19): siRNA sense strand
cacuagaugugcacaagag

SEQ ID NO: 1451318 - RNA, 19 nt, Homo sapiens
  misc_RNA (1)...(19): siRNA sense strand
ucucaguccuaauguucuu

SEQ ID NO: 1451319 - RNA, 19 nt, Homo sapiens
  misc_RNA (1)...(19): siRNA sense strand
acacaacaccuguccuuac

SEQ ID NO: 1451320 - RNA, 19 nt, Homo sapiens
  misc_RNA (1)...(19): siRNA sense strand
uggcuaucuuccacuguuu

SEQ ID NO: 1451321 - RNA, 19 nt, Homo sapiens
  misc_RNA (1)...(19): siRNA sense strand
cuaagugccaccaagauag

SEQ ID NO: 1451322 - RNA, 19 nt, Homo sapiens
  misc_RNA (1)...(19): siRNA sense strand
ggcuaucuuccacuguuua

SEQ ID NO: 1451323 - RNA, 19 nt, Homo sapiens
  misc_RNA (1)...(19): siRNA sense strand
ccucagggaagaagagaga

SEQ ID NO: 1451324 - RNA, 19 nt, Homo sapiens
  misc_RNA (1)...(19): siRNA sense strand
gaggcuguccagauaaauc

SEQ ID NO: 1451325 - RNA, 19 nt, Homo sapiens
  misc_RNA (1)...(19): siRNA sense strand
auauagaacagcaucaguu

SEQ ID NO: 1451326 - RNA, 19 nt, Homo sapiens
  misc_RNA (1)...(19): siRNA sense strand
guuggcauggugagauuaa

SEQ ID NO: 1451327 - RNA, 19 nt, Homo sapiens
  misc_RNA (1)...(19): siRNA sense strand
aaaggaagagcagagaaau

SEQ ID NO: 1451328 - RNA, 19 nt, Homo sapiens
  misc_RNA (1)...(19): siRNA sense strand
cauccacacagauaucaug

SEQ ID NO: 1451329 - RNA, 19 nt, Homo sapiens
  misc_RNA (1)...(19): siRNA sense strand
caccaagauagaaaugauu

SEQ ID NO: 1451330 - RNA, 19 nt, Homo sapiens
  misc_RNA (1)...(19): siRNA sense strand
agaagagagagacagacua

SEQ ID NO: 1451331 - RNA, 19 nt, Homo sapiens
  misc_RNA (1)...(19): siRNA sense strand
ccacuagaugugcacaaga

SEQ ID NO: 1451332 - RNA, 19 nt, Homo sapiens
  misc_RNA (1)...(19): siRNA sense strand
gcuaucuuccacuguuuau

SEQ ID NO: 1451333 - RNA, 19 nt, Homo sapiens
  misc_RNA (1)...(19): siRNA sense strand
gguggaaaaguaccuuaua

SEQ ID NO: 1451334 - RNA, 19 nt, Homo sapiens
  misc_RNA (1)...(19): siRNA sense strand
agaaagcucuccuacauua

SEQ ID NO: 1451335 - RNA, 19 nt, Homo sapiens
  misc_RNA (1)...(19): siRNA sense strand
ugaagaggcuguccagaua

SEQ ID NO: 1451336 - RNA, 19 nt, Homo sapiens
  misc_RNA (1)...(19): siRNA sense strand
caacagugcucuggacaua

SEQ ID NO: 1451337 - RNA, 19 nt, Homo sapiens
  misc_RNA (1)...(19): siRNA sense strand
ucagaaagcucuccuacau

SEQ ID NO: 1451338 - RNA, 19 nt, Homo sapiens
  misc_RNA (1)...(19): siRNA sense strand
gcacugccauccacacaga

SEQ ID NO: 1451339 - RNA, 19 nt, Homo sapiens
  misc_RNA (1)...(19): siRNA sense strand
caacaccuguccuuacugu

SEQ ID NO: 1451340 - RNA, 19 nt, Homo sapiens
  misc_RNA (1)...(19): siRNA sense strand
gaagaggcuguccagauaa

SEQ ID NO: 1451341 - RNA, 19 nt, Homo sapiens
  misc_RNA (1)...(19): siRNA sense strand
gagaugagguagguggaaa

SEQ ID NO: 1451342 - RNA, 19 nt, Homo sapiens
  misc_RNA (1)...(19): siRNA sense strand
caaaggaagagcagagaaa

SEQ ID NO: 1451343 - RNA, 19 nt, Homo sapiens
  misc_RNA (1)...(19): siRNA sense strand
acagugcucuggacauaaa

SEQ ID NO: 1451344 - RNA, 19 nt, Homo sapiens
  misc_RNA (1)...(19): siRNA sense strand
ggaagaagagagagacaga

SEQ ID NO: 1451345 - RNA, 19 nt, Homo sapiens
  misc_RNA (1)...(19): siRNA sense strand
gcacuguagucagagauga

SEQ ID NO: 1451346 - RNA, 19 nt, Homo sapiens
  misc_RNA (1)...(19): siRNA sense strand
gagacagacuacagugaug

SEQ ID NO: 1451347 - RNA, 19 nt, Homo sapiens
  misc_RNA (1)...(19): siRNA sense strand
gaagagagagacagacuac

SEQ ID NO: 1451348 - RNA, 19 nt, Homo sapiens
  misc_RNA (1)...(19): siRNA sense strand
aaagcucuccuacauuaua

SEQ ID NO: 1451349 - RNA, 19 nt, Homo sapiens
  misc_RNA (1)...(19): siRNA sense strand
ugagguagguggaaaagua

SEQ ID NO: 1451350 - RNA, 19 nt, Homo sapiens
  misc_RNA (1)...(19): siRNA sense strand
gcuagguggugcccugauu

SEQ ID NO: 1451351 - RNA, 19 nt, Homo sapiens
  misc_RNA (1)...(19): siRNA sense strand
ccaccaagauagaaaugau

SEQ ID NO: 1451352 - RNA, 19 nt, Homo sapiens
  misc_RNA (1)...(19): siRNA sense strand
uaacacaacaccuguccuu

SEQ ID NO: 1451353 - RNA, 19 nt, Homo sapiens
  misc_RNA (1)...(19): siRNA sense strand
gcaaaggaagagcagagaa

SEQ ID NO: 1451354 - RNA, 19 nt, Homo sapiens
  misc_RNA (1)...(19): siRNA sense strand
aagaggcuguccagauaaa

SEQ ID NO: 1451355 - RNA, 19 nt, Homo sapiens
  misc_RNA (1)...(19): siRNA sense strand
ggaaaaguaccuuauauag

SEQ ID NO: 1451356 - RNA, 19 nt, Homo sapiens
  misc_RNA (1)...(19): siRNA sense strand
gauggagacccacuagaug

SEQ ID NO: 1451357 - RNA, 19 nt, Homo sapiens
  misc_RNA (1)...(19): siRNA sense strand
ccuaagugccaccaagaua

SEQ ID NO: 1451358 - RNA, 19 nt, Homo sapiens
  misc_RNA (1)...(19): siRNA sense strand
aagcucuccuacauuauaa

SEQ ID NO: 1451359 - RNA, 19 nt, Homo sapiens
  misc_RNA (1)...(19): siRNA sense strand
uucaaacugugcauuauga

SEQ ID NO: 1451360 - RNA, 19 nt, Homo sapiens
  misc_RNA (1)...(19): siRNA sense strand
gagagacagacuacaguga

SEQ ID NO: 1451361 - RNA, 19 nt, Homo sapiens
  misc_RNA (1)...(19): siRNA sense strand
ggaacaaccauucuaaagc

SEQ ID NO: 1451362 - RNA, 19 nt, Homo sapiens
  misc_RNA (1)...(19): siRNA sense strand
auauagcacuguagucaga

SEQ ID NO: 1451363 - RNA, 19 nt, Homo sapiens
  misc_RNA (1)...(19): siRNA sense strand
gggcuucucaguccuaaug

SEQ ID NO: 1451364 - RNA, 19 nt, Homo sapiens
  misc_RNA (1)...(19): siRNA sense strand
gcucagcauucagagagaa

SEQ ID NO: 1451365 - RNA, 19 nt, Homo sapiens
  misc_RNA (1)...(19): siRNA sense strand
gcucggaacaaccauucua

SEQ ID NO: 1451366 - RNA, 19 nt, Homo sapiens
  misc_RNA (1)...(19): siRNA sense strand
gauaaaucccaagugcuuu

SEQ ID NO: 1451367 - RNA, 19 nt, Homo sapiens
  misc_RNA (1)...(19): siRNA sense strand
gguggugcccugauuguug

SEQ ID NO: 1451368 - RNA, 19 nt, Homo sapiens
  misc_RNA (1)...(19): siRNA sense strand
gaaagcucuccuacauuau

SEQ ID NO: 1451369 - RNA, 19 nt, Homo sapiens
  misc_RNA (1)...(19): siRNA sense strand
aaauauagcacuguaguca

SEQ ID NO: 1451370 - RNA, 19 nt, Homo sapiens
  misc_RNA (1)...(19): siRNA sense strand
cagaaagcucuccuacauu

SEQ ID NO: 1451371 - RNA, 19 nt, Homo sapiens
  misc_RNA (1)...(19): siRNA sense strand
cacaacaccuguccuuacu

SEQ ID NO: 1451372 - RNA, 19 nt, Homo sapiens
  misc_RNA (1)...(19): siRNA sense strand
agauaaaucccaagugcuu

SEQ ID NO: 1451373 - RNA, 19 nt, Homo sapiens
  misc_RNA (1)...(19): siRNA sense strand
gagagagacagacuacagu

SEQ ID NO: 1451374 - RNA, 19 nt, Homo sapiens
  misc_RNA (1)...(19): siRNA sense strand
uaagugccaccaagauaga

SEQ ID NO: 1451375 - RNA, 19 nt, Homo sapiens
  misc_RNA (1)...(19): siRNA sense strand
agaauucuucgaucacaaa

SEQ ID NO: 1451376 - RNA, 19 nt, Homo sapiens
  misc_RNA (1)...(19): siRNA sense strand
guggaaaaguaccuuauau

SEQ ID NO: 1451377 - RNA, 19 nt, Homo sapiens
  misc_RNA (1)...(19): siRNA sense strand
gaggaggagcaaaggaaga

SEQ ID NO: 1451378 - RNA, 19 nt, Homo sapiens
  misc_RNA (1)...(19): siRNA sense strand
guucaaacugugcauuaug

SEQ ID NO: 1451379 - RNA, 19 nt, Homo sapiens
  misc_RNA (1)...(19): siRNA sense strand
agucagagaugagguaggu

SEQ ID NO: 1451380 - RNA, 19 nt, Homo sapiens
  misc_RNA (1)...(19): siRNA sense strand
cggaacaaccauucuaaag

SEQ ID NO: 1451381 - RNA, 19 nt, Homo sapiens
  misc_RNA (1)...(19): siRNA sense strand
gcuucucaguccuaauguu

SEQ ID NO: 1451382 - RNA, 19 nt, Homo sapiens
  misc_RNA (1)...(19): siRNA sense strand
ugauggagacccacuagau

SEQ ID NO: 1451383 - RNA, 19 nt, Homo sapiens
  misc_RNA (1)...(19): siRNA sense strand
gaugggcuucucaguccua

SEQ ID NO: 1451384 - RNA, 19 nt, Homo sapiens
  misc_RNA (1)...(19): siRNA sense strand
cacuagaugugcacaagag

SEQ ID NO: 1451385 - RNA, 19 nt, Homo sapiens
  misc_RNA (1)...(19): siRNA sense strand
ucucaguccuaauguucuu

SEQ ID NO: 1451386 - RNA, 19 nt, Homo sapiens
  misc_RNA (1)...(19): siRNA sense strand
acacaacaccuguccuuac

SEQ ID NO: 1451387 - RNA, 19 nt, Homo sapiens
  misc_RNA (1)...(19): siRNA sense strand
uggcuaucuuccacuguuu

SEQ ID NO: 1451388 - RNA, 19 nt, Homo sapiens
  misc_RNA (1)...(19): siRNA sense strand
cuaagugccaccaagauag

SEQ ID NO: 1451389 - RNA, 19 nt, Homo sapiens
  misc_RNA (1)...(19): siRNA sense strand
ggcuaucuuccacuguuua

SEQ ID NO: 1451390 - RNA, 19 nt, Homo sapiens
  misc_RNA (1)...(19): siRNA sense strand
ccucagggaagaagagaga

SEQ ID NO: 1451391 - RNA, 19 nt, Homo sapiens
  misc_RNA (1)...(19): siRNA sense strand
gaggcuguccagauaaauc

SEQ ID NO: 1451392 - RNA, 19 nt, Homo sapiens
  misc_RNA (1)...(19): siRNA sense strand
auauagaacagcaucaguu

SEQ ID NO: 1451393 - RNA, 19 nt, Homo sapiens
  misc_RNA (1)...(19): siRNA sense strand
guuggcauggugagauuaa

SEQ ID NO: 1451394 - RNA, 19 nt, Homo sapiens
  misc_RNA (1)...(19): siRNA sense strand
aaaggaagagcagagaaau

SEQ ID NO: 1451395 - RNA, 19 nt, Homo sapiens
  misc_RNA (1)...(19): siRNA sense strand
cauccacacagauaucaug

SEQ ID NO: 1451396 - RNA, 19 nt, Homo sapiens
  misc_RNA (1)...(19): siRNA sense strand
caccaagauagaaaugauu

SEQ ID NO: 1451397 - RNA, 19 nt, Homo sapiens
  misc_RNA (1)...(19): siRNA sense strand
agaagagagagacagacua

SEQ ID NO: 1451398 - RNA, 19 nt, Homo sapiens
  misc_RNA (1)...(19): siRNA sense strand
ccacuagaugugcacaaga

SEQ ID NO: 1451399 - RNA, 19 nt, Homo sapiens
  misc_RNA (1)...(19): siRNA sense strand
gcuaucuuccacuguuuau

SEQ ID NO: 1451400 - RNA, 19 nt, Homo sapiens
  misc_RNA (1)...(19): siRNA sense strand
gguggaaaaguaccuuaua

SEQ ID NO: 1451401 - RNA, 19 nt, Homo sapiens
  misc_RNA (1)...(19): siRNA sense strand
agaaagcucuccuacauua

SEQ ID NO: 1451402 - RNA, 19 nt, Homo sapiens
  misc_RNA (1)...(19): siRNA sense strand
ugaagaggcuguccagaua

SEQ ID NO: 1451403 - RNA, 19 nt, Homo sapiens
  misc_RNA (1)...(19): siRNA sense strand
caacagugcucuggacaua

SEQ ID NO: 1451404 - RNA, 19 nt, Homo sapiens
  misc_RNA (1)...(19): siRNA sense strand
ucagaaagcucuccuacau

SEQ ID NO: 1451405 - RNA, 19 nt, Homo sapiens
  misc_RNA (1)...(19): siRNA sense strand
gcacugccauccacacaga

SEQ ID NO: 1451406 - RNA, 19 nt, Homo sapiens
  misc_RNA (1)...(19): siRNA sense strand
caacaccuguccuuacugu

SEQ ID NO: 1451407 - RNA, 19 nt, Homo sapiens
  misc_RNA (1)...(19): siRNA sense strand
gaagaggcuguccagauaa

SEQ ID NO: 1451408 - RNA, 19 nt, Homo sapiens
  misc_RNA (1)...(19): siRNA sense strand
gagaugagguagguggaaa

SEQ ID NO: 1451409 - RNA, 19 nt, Homo sapiens
  misc_RNA (1)...(19): siRNA sense strand
caaaggaagagcagagaaa

SEQ ID NO: 1451410 - RNA, 19 nt, Homo sapiens
  misc_RNA (1)...(19): siRNA sense strand
acagugcucuggacauaaa

SEQ ID NO: 1451411 - RNA, 19 nt, Homo sapiens
  misc_RNA (1)...(19): siRNA sense strand
ggaagaagagagagacaga

SEQ ID NO: 1451412 - RNA, 19 nt, Homo sapiens
  misc_RNA (1)...(19): siRNA sense strand
gcacuguagucagagauga

SEQ ID NO: 1451413 - RNA, 19 nt, Homo sapiens
  misc_RNA (1)...(19): siRNA sense strand
gagacagacuacagugaug

SEQ ID NO: 1451414 - RNA, 19 nt, Homo sapiens
  misc_RNA (1)...(19): siRNA sense strand
gaagagagagacagacuac

SEQ ID NO: 1451415 - RNA, 19 nt, Homo sapiens
  misc_RNA (1)...(19): siRNA sense strand
aaagcucuccuacauuaua

SEQ ID NO: 1451416 - RNA, 19 nt, Homo sapiens
  misc_RNA (1)...(19): siRNA sense strand
ugagguagguggaaaagua

SEQ ID NO: 1451417 - RNA, 19 nt, Homo sapiens
  misc_RNA (1)...(19): siRNA sense strand
gcuagguggugcccugauu

SEQ ID NO: 1451418 - RNA, 19 nt, Homo sapiens
  misc_RNA (1)...(19): siRNA sense strand
ccaccaagauagaaaugau

SEQ ID NO: 1451419 - RNA, 19 nt, Homo sapiens
  misc_RNA (1)...(19): siRNA sense strand
uaacacaacaccuguccuu

SEQ ID NO: 1451420 - RNA, 19 nt, Homo sapiens
  misc_RNA (1)...(19): siRNA sense strand
gcaaaggaagagcagagaa

SEQ ID NO: 1451421 - RNA, 19 nt, Homo sapiens
  misc_RNA (1)...(19): siRNA sense strand
aagaggcuguccagauaaa

SEQ ID NO: 1451422 - RNA, 19 nt, Homo sapiens
  misc_RNA (1)...(19): siRNA sense strand
ggaaaaguaccuuauauag

SEQ ID NO: 1451423 - RNA, 19 nt, Homo sapiens
  misc_RNA (1)...(19): siRNA sense strand
gauggagacccacuagaug

SEQ ID NO: 1451424 - RNA, 19 nt, Homo sapiens
  misc_RNA (1)...(19): siRNA sense strand
ccuaagugccaccaagaua

SEQ ID NO: 1451425 - RNA, 19 nt, Homo sapiens
  misc_RNA (1)...(19): siRNA sense strand
aagcucuccuacauuauaa

SEQ ID NO: 1451426 - RNA, 19 nt, Homo sapiens
  misc_RNA (1)...(19): siRNA sense strand
uucaaacugugcauuauga

SEQ ID NO: 1451427 - RNA, 19 nt, Homo sapiens
  misc_RNA (1)...(19): siRNA sense strand
gagagacagacuacaguga

SEQ ID NO: 1451428 - RNA, 19 nt, Homo sapiens
  misc_RNA (1)...(19): siRNA sense strand
ggaacaaccauucuaaagc

SEQ ID NO: 1451429 - RNA, 19 nt, Homo sapiens
  misc_RNA (1)...(19): siRNA sense strand
auauagcacuguagucaga

SEQ ID NO: 1451430 - RNA, 19 nt, Homo sapiens
  misc_RNA (1)...(19): siRNA sense strand
gggcuucucaguccuaaug

SEQ ID NO: 1451431 - RNA, 19 nt, Homo sapiens
  misc_RNA (1)...(19): siRNA sense strand
gcucagcauucagagagaa

SEQ ID NO: 1451432 - RNA, 19 nt, Homo sapiens
  misc_RNA (1)...(19): siRNA sense strand
gcucggaacaaccauucua

SEQ ID NO: 1451433 - RNA, 19 nt, Homo sapiens
  misc_RNA (1)...(19): siRNA sense strand
gauaaaucccaagugcuuu

SEQ ID NO: 1451434 - RNA, 19 nt, Homo sapiens
  misc_RNA (1)...(19): siRNA sense strand
gguggugcccugauuguug

SEQ ID NO: 1451435 - RNA, 19 nt, Homo sapiens
  misc_RNA (1)...(19): siRNA sense strand
gaaagcucuccuacauuau

SEQ ID NO: 1451436 - RNA, 19 nt, Homo sapiens
  misc_RNA (1)...(19): siRNA sense strand
aaauauagcacuguaguca

SEQ ID NO: 1451437 - RNA, 19 nt, Homo sapiens
  misc_RNA (1)...(19): siRNA sense strand
cagaaagcucuccuacauu

SEQ ID NO: 1451438 - RNA, 19 nt, Homo sapiens
  misc_RNA (1)...(19): siRNA sense strand
cacaacaccuguccuuacu

SEQ ID NO: 1451439 - RNA, 19 nt, Homo sapiens
  misc_RNA (1)...(19): siRNA sense strand
agauaaaucccaagugcuu

SEQ ID NO: 1451440 - RNA, 19 nt, Homo sapiens
  misc_RNA (1)...(19): siRNA sense strand
gagagagacagacuacagu

SEQ ID NO: 1451441 - RNA, 19 nt, Homo sapiens
  misc_RNA (1)...(19): siRNA sense strand
uaagugccaccaagauaga

SEQ ID NO: 1451442 - RNA, 19 nt, Homo sapiens
  misc_RNA (1)...(19): siRNA sense strand
agaauucuucgaucacaaa

SEQ ID NO: 1451443 - RNA, 19 nt, Homo sapiens
  misc_RNA (1)...(19): siRNA sense strand
guggaaaaguaccuuauau

SEQ ID NO: 1451444 - RNA, 19 nt, Homo sapiens
  misc_RNA (1)...(19): siRNA sense strand
gaggaggagcaaaggaaga

SEQ ID NO: 1451445 - RNA, 19 nt, Homo sapiens
  misc_RNA (1)...(19): siRNA sense strand
guucaaacugugcauuaug

SEQ ID NO: 1451446 - RNA, 19 nt, Homo sapiens
  misc_RNA (1)...(19): siRNA sense strand
agucagagaugagguaggu

SEQ ID NO: 1451447 - RNA, 19 nt, Homo sapiens
  misc_RNA (1)...(19): siRNA sense strand
cggaacaaccauucuaaag

SEQ ID NO: 1451448 - RNA, 19 nt, Homo sapiens
  misc_RNA (1)...(19): siRNA sense strand
gcuucucaguccuaauguu

SEQ ID NO: 1451449 - RNA, 19 nt, Homo sapiens
  misc_RNA (1)...(19): siRNA sense strand
ugauggagacccacuagau

SEQ ID NO: 1451450 - RNA, 19 nt, Homo sapiens
  misc_RNA (1)...(19): siRNA sense strand
gaugggcuucucaguccua

SEQ ID NO: 1451451 - RNA, 19 nt, Homo sapiens
  misc_RNA (1)...(19): siRNA sense strand
cacuagaugugcacaagag

SEQ ID NO: 1451452 - RNA, 19 nt, Homo sapiens
  misc_RNA (1)...(19): siRNA sense strand
ucucaguccuaauguucuu

SEQ ID NO: 1451453 - RNA, 19 nt, Homo sapiens
  misc_RNA (1)...(19): siRNA sense strand
acacaacaccuguccuuac

SEQ ID NO: 1451454 - RNA, 19 nt, Homo sapiens
  misc_RNA (1)...(19): siRNA sense strand
uggcuaucuuccacuguuu

SEQ ID NO: 1451455 - RNA, 19 nt, Homo sapiens
  misc_RNA (1)...(19): siRNA sense strand
cuaagugccaccaagauag

SEQ ID NO: 1451456 - RNA, 19 nt, Homo sapiens
  misc_RNA (1)...(19): siRNA sense strand
ggcuaucuuccacuguuua

SEQ ID NO: 1451457 - RNA, 19 nt, Homo sapiens
  misc_RNA (1)...(19): siRNA sense strand
ccucagggaagaagagaga

SEQ ID NO: 1451458 - RNA, 19 nt, Homo sapiens
  misc_RNA (1)...(19): siRNA sense strand
gaggcuguccagauaaauc

SEQ ID NO: 1451459 - RNA, 19 nt, Homo sapiens
  misc_RNA (1)...(19): siRNA sense strand
auauagaacagcaucaguu

SEQ ID NO: 1451460 - RNA, 19 nt, Homo sapiens
  misc_RNA (1)...(19): siRNA sense strand
guuggcauggugagauuaa

SEQ ID NO: 1451461 - RNA, 19 nt, Homo sapiens
  misc_RNA (1)...(19): siRNA sense strand
aaaggaagagcagagaaau

SEQ ID NO: 1451462 - RNA, 19 nt, Homo sapiens
  misc_RNA (1)...(19): siRNA sense strand
cauccacacagauaucaug

SEQ ID NO: 1451463 - RNA, 19 nt, Homo sapiens
  misc_RNA (1)...(19): siRNA sense strand
caccaagauagaaaugauu

SEQ ID NO: 1451464 - RNA, 19 nt, Homo sapiens
  misc_RNA (1)...(19): siRNA sense strand
agaagagagagacagacua

SEQ ID NO: 1451465 - RNA, 19 nt, Homo sapiens
  misc_RNA (1)...(19): siRNA sense strand
ccacuagaugugcacaaga

SEQ ID NO: 1451466 - RNA, 19 nt, Homo sapiens
  misc_RNA (1)...(19): siRNA sense strand
gcuaucuuccacuguuuau

SEQ ID NO: 1451467 - RNA, 19 nt, Homo sapiens
  misc_RNA (1)...(19): siRNA sense strand
gguggaaaaguaccuuaua

SEQ ID NO: 1451468 - RNA, 19 nt, Homo sapiens
  misc_RNA (1)...(19): siRNA sense strand
agaaagcucuccuacauua

SEQ ID NO: 1451469 - RNA, 19 nt, Homo sapiens
  misc_RNA (1)...(19): siRNA sense strand
ugaagaggcuguccagaua

SEQ ID NO: 1451470 - RNA, 19 nt, Homo sapiens
  misc_RNA (1)...(19): siRNA sense strand
caacagugcucuggacaua

SEQ ID NO: 1451471 - RNA, 19 nt, Homo sapiens
  misc_RNA (1)...(19): siRNA sense strand
ucagaaagcucuccuacau

SEQ ID NO: 1451472 - RNA, 19 nt, Homo sapiens
  misc_RNA (1)...(19): siRNA sense strand
gcacugccauccacacaga

SEQ ID NO: 1451473 - RNA, 19 nt, Homo sapiens
  misc_RNA (1)...(19): siRNA sense strand
caacaccuguccuuacugu

SEQ ID NO: 1451474 - RNA, 19 nt, Homo sapiens
  misc_RNA (1)...(19): siRNA sense strand
gaagaggcuguccagauaa

SEQ ID NO: 1451475 - RNA, 19 nt, Homo sapiens
  misc_RNA (1)...(19): siRNA sense strand
gagaugagguagguggaaa

SEQ ID NO: 1451476 - RNA, 19 nt, Homo sapiens
  misc_RNA (1)...(19): siRNA sense strand
caaaggaagagcagagaaa

SEQ ID NO: 1451477 - RNA, 19 nt, Homo sapiens
  misc_RNA (1)...(19): siRNA sense strand
acagugcucuggacauaaa

SEQ ID NO: 1451478 - RNA, 19 nt, Homo sapiens
  misc_RNA (1)...(19): siRNA sense strand
ggaagaagagagagacaga

SEQ ID NO: 1451479 - RNA, 19 nt, Homo sapiens
  misc_RNA (1)...(19): siRNA sense strand
gcacuguagucagagauga

SEQ ID NO: 1451480 - RNA, 19 nt, Homo sapiens
  misc_RNA (1)...(19): siRNA sense strand
gagacagacuacagugaug

SEQ ID NO: 1451481 - RNA, 19 nt, Homo sapiens
  misc_RNA (1)...(19): siRNA sense strand
gaagagagagacagacuac

SEQ ID NO: 1451482 - RNA, 19 nt, Homo sapiens
  misc_RNA (1)...(19): siRNA sense strand
aaagcucuccuacauuaua

SEQ ID NO: 1451483 - RNA, 19 nt, Homo sapiens
  misc_RNA (1)...(19): siRNA sense strand
ugagguagguggaaaagua

SEQ ID NO: 1451484 - RNA, 19 nt, Homo sapiens
  misc_RNA (1)...(19): siRNA sense strand
gcuagguggugcccugauu

SEQ ID NO: 1451485 - RNA, 19 nt, Homo sapiens
  misc_RNA (1)...(19): siRNA sense strand
ccaccaagauagaaaugau

SEQ ID NO: 1451486 - RNA, 19 nt, Homo sapiens
  misc_RNA (1)...(19): siRNA sense strand
uaacacaacaccuguccuu

SEQ ID NO: 1451487 - RNA, 19 nt, Homo sapiens
  misc_RNA (1)...(19): siRNA sense strand
gcaaaggaagagcagagaa

SEQ ID NO: 1451488 - RNA, 19 nt, Homo sapiens
  misc_RNA (1)...(19): siRNA sense strand
aagaggcuguccagauaaa

SEQ ID NO: 1451489 - RNA, 19 nt, Homo sapiens
  misc_RNA (1)...(19): siRNA sense strand
ggaaaaguaccuuauauag

SEQ ID NO: 1451490 - RNA, 19 nt, Homo sapiens
  misc_RNA (1)...(19): siRNA sense strand
gauggagacccacuagaug

SEQ ID NO: 1451491 - RNA, 19 nt, Homo sapiens
  misc_RNA (1)...(19): siRNA sense strand
ccuaagugccaccaagaua

SEQ ID NO: 1451492 - RNA, 19 nt, Homo sapiens
  misc_RNA (1)...(19): siRNA sense strand
aagcucuccuacauuauaa

SEQ ID NO: 1451493 - RNA, 19 nt, Homo sapiens
  misc_RNA (1)...(19): siRNA sense strand
uucaaacugugcauuauga

SEQ ID NO: 1451494 - RNA, 19 nt, Homo sapiens
  misc_RNA (1)...(19): siRNA sense strand
gagagacagacuacaguga

SEQ ID NO: 1451495 - RNA, 19 nt, Homo sapiens
  misc_RNA (1)...(19): siRNA sense strand
ggaacaaccauucuaaagc

SEQ ID NO: 1451496 - RNA, 19 nt, Homo sapiens
  misc_RNA (1)...(19): siRNA sense strand
auauagcacuguagucaga

SEQ ID NO: 1451497 - RNA, 19 nt, Homo sapiens
  misc_RNA (1)...(19): siRNA sense strand
gggcuucucaguccuaaug

SEQ ID NO: 1451498 - RNA, 19 nt, Homo sapiens
  misc_RNA (1)...(19): siRNA sense strand
gcucagcauucagagagaa

SEQ ID NO: 1451499 - RNA, 19 nt, Homo sapiens
  misc_RNA (1)...(19): siRNA sense strand
gcucggaacaaccauucua

SEQ ID NO: 1451500 - RNA, 19 nt, Homo sapiens
  misc_RNA (1)...(19): siRNA sense strand
gauaaaucccaagugcuuu

SEQ ID NO: 1451501 - RNA, 19 nt, Homo sapiens
  misc_RNA (1)...(19): siRNA sense strand
gguggugcccugauuguug

SEQ ID NO: 1451502 - RNA, 19 nt, Homo sapiens
  misc_RNA (1)...(19): siRNA sense strand
gaaagcucuccuacauuau

SEQ ID NO: 1451503 - RNA, 19 nt, Homo sapiens
  misc_RNA (1)...(19): siRNA sense strand
aaauauagcacuguaguca

SEQ ID NO: 1451504 - RNA, 19 nt, Homo sapiens
  misc_RNA (1)...(19): siRNA sense strand
cagaaagcucuccuacauu

SEQ ID NO: 1451505 - RNA, 19 nt, Homo sapiens
  misc_RNA (1)...(19): siRNA sense strand
cacaacaccuguccuuacu

SEQ ID NO: 1451506 - RNA, 19 nt, Homo sapiens
  misc_RNA (1)...(19): siRNA sense strand
agauaaaucccaagugcuu

SEQ ID NO: 1451507 - RNA, 19 nt, Homo sapiens
  misc_RNA (1)...(19): siRNA sense strand
gagagagacagacuacagu

SEQ ID NO: 1451508 - RNA, 19 nt, Homo sapiens
  misc_RNA (1)...(19): siRNA sense strand
uaagugccaccaagauaga

SEQ ID NO: 1451509 - RNA, 19 nt, Homo sapiens
  misc_RNA (1)...(19): siRNA sense strand
agaauucuucgaucacaaa

SEQ ID NO: 1451510 - RNA, 19 nt, Homo sapiens
  misc_RNA (1)...(19): siRNA sense strand
guggaaaaguaccuuauau

SEQ ID NO: 1451511 - RNA, 19 nt, Homo sapiens
  misc_RNA (1)...(19): siRNA sense strand
gaggaggagcaaaggaaga

SEQ ID NO: 1451512 - RNA, 19 nt, Homo sapiens
  misc_RNA (1)...(19): siRNA sense strand
guucaaacugugcauuaug

SEQ ID NO: 1451513 - RNA, 19 nt, Homo sapiens
  misc_RNA (1)...(19): siRNA sense strand
agucagagaugagguaggu

SEQ ID NO: 1451514 - RNA, 19 nt, Homo sapiens
  misc_RNA (1)...(19): siRNA sense strand
cggaacaaccauucuaaag

SEQ ID NO: 1451515 - RNA, 19 nt, Homo sapiens
  misc_RNA (1)...(19): siRNA sense strand
gcuucucaguccuaauguu

SEQ ID NO: 1451516 - RNA, 19 nt, Homo sapiens
  misc_RNA (1)...(19): siRNA sense strand
ugauggagacccacuagau

SEQ ID NO: 1451517 - RNA, 19 nt, Homo sapiens
  misc_RNA (1)...(19): siRNA sense strand
gaugggcuucucaguccua

SEQ ID NO: 1451518 - RNA, 19 nt, Homo sapiens
  misc_RNA (1)...(19): siRNA sense strand
cacuagaugugcacaagag

SEQ ID NO: 1451519 - RNA, 19 nt, Homo sapiens
  misc_RNA (1)...(19): siRNA sense strand
ucucaguccuaauguucuu

SEQ ID NO: 1451520 - RNA, 19 nt, Homo sapiens
  misc_RNA (1)...(19): siRNA sense strand
acacaacaccuguccuuac

SEQ ID NO: 1451521 - RNA, 19 nt, Homo sapiens
  misc_RNA (1)...(19): siRNA sense strand
uggcuaucuuccacuguuu

SEQ ID NO: 1451522 - RNA, 19 nt, Homo sapiens
  misc_RNA (1)...(19): siRNA sense strand
cuaagugccaccaagauag

SEQ ID NO: 1451523 - RNA, 19 nt, Homo sapiens
  misc_RNA (1)...(19): siRNA sense strand
ggcuaucuuccacuguuua

SEQ ID NO: 1451524 - RNA, 19 nt, Homo sapiens
  misc_RNA (1)...(19): siRNA sense strand
ccucagggaagaagagaga

SEQ ID NO: 1451525 - RNA, 19 nt, Homo sapiens
  misc_RNA (1)...(19): siRNA sense strand
gaggcuguccagauaaauc

SEQ ID NO: 1451526 - RNA, 19 nt, Homo sapiens
  misc_RNA (1)...(19): siRNA sense strand
auauagaacagcaucaguu

SEQ ID NO: 1451527 - RNA, 19 nt, Homo sapiens
  misc_RNA (1)...(19): siRNA sense strand
guuggcauggugagauuaa

SEQ ID NO: 1451528 - RNA, 19 nt, Homo sapiens
  misc_RNA (1)...(19): siRNA sense strand
aaaggaagagcagagaaau

SEQ ID NO: 1451529 - RNA, 19 nt, Homo sapiens
  misc_RNA (1)...(19): siRNA sense strand
cauccacacagauaucaug

SEQ ID NO: 1451530 - RNA, 19 nt, Homo sapiens
  misc_RNA (1)...(19): siRNA sense strand
caccaagauagaaaugauu

SEQ ID NO: 1451531 - RNA, 19 nt, Homo sapiens
  misc_RNA (1)...(19): siRNA sense strand
agaagagagagacagacua

SEQ ID NO: 1451532 - RNA, 19 nt, Homo sapiens
  misc_RNA (1)...(19): siRNA sense strand
ccacuagaugugcacaaga

SEQ ID NO: 1451533 - RNA, 19 nt, Homo sapiens
  misc_RNA (1)...(19): siRNA sense strand
gcuaucuuccacuguuuau

SEQ ID NO: 1451534 - RNA, 19 nt, Homo sapiens
  misc_RNA (1)...(19): siRNA sense strand
gguggaaaaguaccuuaua

SEQ ID NO: 1451535 - RNA, 19 nt, Homo sapiens
  misc_RNA (1)...(19): siRNA sense strand
agaaagcucuccuacauua

SEQ ID NO: 1451536 - RNA, 19 nt, Homo sapiens
  misc_RNA (1)...(19): siRNA sense strand
ugaagaggcuguccagaua

SEQ ID NO: 1451537 - RNA, 19 nt, Homo sapiens
  misc_RNA (1)...(19): siRNA sense strand
caacagugcucuggacaua

SEQ ID NO: 1451538 - RNA, 19 nt, Homo sapiens
  misc_RNA (1)...(19): siRNA sense strand
ucagaaagcucuccuacau

SEQ ID NO: 1451539 - RNA, 19 nt, Homo sapiens
  misc_RNA (1)...(19): siRNA sense strand
gcacugccauccacacaga

SEQ ID NO: 1451540 - RNA, 19 nt, Homo sapiens
  misc_RNA (1)...(19): siRNA sense strand
caacaccuguccuuacugu

SEQ ID NO: 1451541 - RNA, 19 nt, Homo sapiens
  misc_RNA (1)...(19): siRNA sense strand
gaagaggcuguccagauaa

SEQ ID NO: 1451542 - RNA, 19 nt, Homo sapiens
  misc_RNA (1)...(19): siRNA sense strand
gagaugagguagguggaaa

SEQ ID NO: 1451543 - RNA, 19 nt, Homo sapiens
  misc_RNA (1)...(19): siRNA sense strand
caaaggaagagcagagaaa

SEQ ID NO: 1451544 - RNA, 19 nt, Homo sapiens
  misc_RNA (1)...(19): siRNA sense strand
acagugcucuggacauaaa

SEQ ID NO: 1451545 - RNA, 19 nt, Homo sapiens
  misc_RNA (1)...(19): siRNA sense strand
ggaagaagagagagacaga

SEQ ID NO: 1451546 - RNA, 19 nt, Homo sapiens
  misc_RNA (1)...(19): siRNA sense strand
gcacuguagucagagauga

SEQ ID NO: 1451547 - RNA, 19 nt, Homo sapiens
  misc_RNA (1)...(19): siRNA sense strand
gagacagacuacagugaug

SEQ ID NO: 1451548 - RNA, 19 nt, Homo sapiens
  misc_RNA (1)...(19): siRNA sense strand
gaagagagagacagacuac

SEQ ID NO: 1451549 - RNA, 19 nt, Homo sapiens
  misc_RNA (1)...(19): siRNA sense strand
aaagcucuccuacauuaua

SEQ ID NO: 1451550 - RNA, 19 nt, Homo sapiens
  misc_RNA (1)...(19): siRNA sense strand
ugagguagguggaaaagua

SEQ ID NO: 1451551 - RNA, 19 nt, Homo sapiens
  misc_RNA (1)...(19): siRNA sense strand
gcuagguggugcccugauu

SEQ ID NO: 1451552 - RNA, 19 nt, Homo sapiens
  misc_RNA (1)...(19): siRNA sense strand
ccaccaagauagaaaugau

SEQ ID NO: 1451553 - RNA, 19 nt, Homo sapiens
  misc_RNA (1)...(19): siRNA sense strand
uaacacaacaccuguccuu

SEQ ID NO: 1451554 - RNA, 19 nt, Homo sapiens
  misc_RNA (1)...(19): siRNA sense strand
gcaaaggaagagcagagaa

SEQ ID NO: 1451555 - RNA, 19 nt, Homo sapiens
  misc_RNA (1)...(19): siRNA sense strand
aagaggcuguccagauaaa

SEQ ID NO: 1451556 - RNA, 19 nt, Homo sapiens
  misc_RNA (1)...(19): siRNA sense strand
ggaaaaguaccuuauauag

SEQ ID NO: 1451557 - RNA, 19 nt, Homo sapiens
  misc_RNA (1)...(19): siRNA sense strand
gauggagacccacuagaug

SEQ ID NO: 1451558 - RNA, 19 nt, Homo sapiens
  misc_RNA (1)...(19): siRNA sense strand
ccuaagugccaccaagaua

SEQ ID NO: 1451559 - RNA, 19 nt, Homo sapiens
  misc_RNA (1)...(19): siRNA sense strand
aagcucuccuacauuauaa

SEQ ID NO: 1451560 - RNA, 19 nt, Homo sapiens
  misc_RNA (1)...(19): siRNA sense strand
uucaaacugugcauuauga

SEQ ID NO: 1451561 - RNA, 19 nt, Homo sapiens
  misc_RNA (1)...(19): siRNA sense strand
gagagacagacuacaguga

SEQ ID NO: 1451562 - RNA, 19 nt, Homo sapiens
  misc_RNA (1)...(19): siRNA sense strand
ggaacaaccauucuaaagc

SEQ ID NO: 1451563 - RNA, 19 nt, Homo sapiens
  misc_RNA (1)...(19): siRNA sense strand
auauagcacuguagucaga

SEQ ID NO: 1451564 - RNA, 19 nt, Homo sapiens
  misc_RNA (1)...(19): siRNA sense strand
gggcuucucaguccuaaug

SEQ ID NO: 1451565 - RNA, 19 nt, Homo sapiens
  misc_RNA (1)...(19): siRNA sense strand
gcucagcauucagagagaa

SEQ ID NO: 1451566 - RNA, 19 nt, Homo sapiens
  misc_RNA (1)...(19): siRNA sense strand
gcucggaacaaccauucua

SEQ ID NO: 1451567 - RNA, 19 nt, Homo sapiens
  misc_RNA (1)...(19): siRNA sense strand
gauaaaucccaagugcuuu

SEQ ID NO: 1451568 - RNA, 19 nt, Homo sapiens
  misc_RNA (1)...(19): siRNA sense strand
gguggugcccugauuguug

SEQ ID NO: 1451569 - RNA, 19 nt, Homo sapiens
  misc_RNA (1)...(19): siRNA sense strand
gaaagcucuccuacauuau

SEQ ID NO: 1451570 - RNA, 19 nt, Homo sapiens
  misc_RNA (1)...(19): siRNA sense strand
aaauauagcacuguaguca

SEQ ID NO: 1451571 - RNA, 19 nt, Homo sapiens
  misc_RNA (1)...(19): siRNA sense strand
cagaaagcucuccuacauu

SEQ ID NO: 1451572 - RNA, 19 nt, Homo sapiens
  misc_RNA (1)...(19): siRNA sense strand
cacaacaccuguccuuacu

SEQ ID NO: 1451573 - RNA, 19 nt, Homo sapiens
  misc_RNA (1)...(19): siRNA sense strand
agauaaaucccaagugcuu

SEQ ID NO: 1451574 - RNA, 19 nt, Homo sapiens
  misc_RNA (1)...(19): siRNA sense strand
gagagagacagacuacagu

SEQ ID NO: 1451575 - RNA, 19 nt, Homo sapiens
  misc_RNA (1)...(19): siRNA sense strand
uaagugccaccaagauaga

SEQ ID NO: 1451576 - RNA, 19 nt, Homo sapiens
  misc_RNA (1)...(19): siRNA sense strand
agaauucuucgaucacaaa

SEQ ID NO: 1451577 - RNA, 19 nt, Homo sapiens
  misc_RNA (1)...(19): siRNA sense strand
guggaaaaguaccuuauau

SEQ ID NO: 1451578 - RNA, 19 nt, Homo sapiens
  misc_RNA (1)...(19): siRNA sense strand
gaggaggagcaaaggaaga

SEQ ID NO: 1451579 - RNA, 19 nt, Homo sapiens
  misc_RNA (1)...(19): siRNA sense strand
guucaaacugugcauuaug

SEQ ID NO: 1451580 - RNA, 19 nt, Homo sapiens
  misc_RNA (1)...(19): siRNA sense strand
agucagagaugagguaggu

SEQ ID NO: 1451581 - RNA, 19 nt, Homo sapiens
  misc_RNA (1)...(19): siRNA sense strand
cggaacaaccauucuaaag

SEQ ID NO: 1451582 - RNA, 19 nt, Homo sapiens
  misc_RNA (1)...(19): siRNA sense strand
gcuucucaguccuaauguu

SEQ ID NO: 1451583 - RNA, 19 nt, Homo sapiens
  misc_RNA (1)...(19): siRNA sense strand
ugauggagacccacuagau

SEQ ID NO: 1451584 - RNA, 19 nt, Homo sapiens
  misc_RNA (1)...(19): siRNA sense strand
gaugggcuucucaguccua

SEQ ID NO: 1451585 - RNA, 19 nt, Homo sapiens
  misc_RNA (1)...(19): siRNA sense strand
cacuagaugugcacaagag

SEQ ID NO: 1451586 - RNA, 19 nt, Homo sapiens
  misc_RNA (1)...(19): siRNA sense strand
ucucaguccuaauguucuu

SEQ ID NO: 1451587 - RNA, 19 nt, Homo sapiens
  misc_RNA (1)...(19): siRNA sense strand
acacaacaccuguccuuac

SEQ ID NO: 1451588 - RNA, 19 nt, Homo sapiens
  misc_RNA (1)...(19): siRNA sense strand
uggcuaucuuccacuguuu

SEQ ID NO: 1451589 - RNA, 19 nt, Homo sapiens
  misc_RNA (1)...(19): siRNA sense strand
cuaagugccaccaagauag

SEQ ID NO: 1451590 - RNA, 19 nt, Homo sapiens
  misc_RNA (1)...(19): siRNA sense strand
ggcuaucuuccacuguuua

SEQ ID NO: 1451591 - RNA, 19 nt, Homo sapiens
  misc_RNA (1)...(19): siRNA sense strand
ccucagggaagaagagaga

SEQ ID NO: 1451592 - RNA, 19 nt, Homo sapiens
  misc_RNA (1)...(19): siRNA sense strand
gaggcuguccagauaaauc

SEQ ID NO: 1451593 - RNA, 19 nt, Homo sapiens
  misc_RNA (1)...(19): siRNA sense strand
auauagaacagcaucaguu

SEQ ID NO: 1451594 - RNA, 19 nt, Homo sapiens
  misc_RNA (1)...(19): siRNA sense strand
guuggcauggugagauuaa

SEQ ID NO: 1451595 - RNA, 19 nt, Homo sapiens
  misc_RNA (1)...(19): siRNA sense strand
aaaggaagagcagagaaau

SEQ ID NO: 1451596 - RNA, 19 nt, Homo sapiens
  misc_RNA (1)...(19): siRNA sense strand
cauccacacagauaucaug

SEQ ID NO: 1451597 - RNA, 19 nt, Homo sapiens
  misc_RNA (1)...(19): siRNA sense strand
caccaagauagaaaugauu

SEQ ID NO: 1451598 - RNA, 19 nt, Homo sapiens
  misc_RNA (1)...(19): siRNA sense strand
agaagagagagacagacua

SEQ ID NO: 1451599 - RNA, 19 nt, Homo sapiens
  misc_RNA (1)...(19): siRNA sense strand
ccacuagaugugcacaaga

SEQ ID NO: 1451600 - RNA, 19 nt, Homo sapiens
  misc_RNA (1)...(19): siRNA sense strand
gcuaucuuccacuguuuau

SEQ ID NO: 1451601 - RNA, 19 nt, Homo sapiens
  misc_RNA (1)...(19): siRNA sense strand
gguggaaaaguaccuuaua

SEQ ID NO: 1451602 - RNA, 19 nt, Homo sapiens
  misc_RNA (1)...(19): siRNA sense strand
agaaagcucuccuacauua

SEQ ID NO: 1451603 - RNA, 19 nt, Homo sapiens
  misc_RNA (1)...(19): siRNA sense strand
ugaagaggcuguccagaua

SEQ ID NO: 1451604 - RNA, 19 nt, Homo sapiens
  misc_RNA (1)...(19): siRNA sense strand
caacagugcucuggacaua

SEQ ID NO: 1451605 - RNA, 19 nt, Homo sapiens
  misc_RNA (1)...(19): siRNA sense strand
ucagaaagcucuccuacau

SEQ ID NO: 1451606 - RNA, 19 nt, Homo sapiens
  misc_RNA (1)...(19): siRNA sense strand
gcacugccauccacacaga

SEQ ID NO: 1451607 - RNA, 19 nt, Homo sapiens
  misc_RNA (1)...(19): siRNA sense strand
caacaccuguccuuacugu

SEQ ID NO: 1451608 - RNA, 19 nt, Homo sapiens
  misc_RNA (1)...(19): siRNA sense strand
gaagaggcuguccagauaa

SEQ ID NO: 1451609 - RNA, 19 nt, Homo sapiens
  misc_RNA (1)...(19): siRNA sense strand
gagaugagguagguggaaa

SEQ ID NO: 1451610 - RNA, 19 nt, Homo sapiens
  misc_RNA (1)...(19): siRNA sense strand
caaaggaagagcagagaaa

SEQ ID NO: 1451611 - RNA, 19 nt, Homo sapiens
  misc_RNA (1)...(19): siRNA sense strand
acagugcucuggacauaaa

SEQ ID NO: 1451612 - RNA, 19 nt, Homo sapiens
  misc_RNA (1)...(19): siRNA sense strand
ggaagaagagagagacaga

SEQ ID NO: 1451613 - RNA, 19 nt, Homo sapiens
  misc_RNA (1)...(19): siRNA sense strand
gcacuguagucagagauga

SEQ ID NO: 1451614 - RNA, 19 nt, Homo sapiens
  misc_RNA (1)...(19): siRNA sense strand
gagacagacuacagugaug

SEQ ID NO: 1451615 - RNA, 19 nt, Homo sapiens
  misc_RNA (1)...(19): siRNA sense strand
gaagagagagacagacuac

SEQ ID NO: 1451616 - RNA, 19 nt, Homo sapiens
  misc_RNA (1)...(19): siRNA sense strand
aaagcucuccuacauuaua

SEQ ID NO: 1451617 - RNA, 19 nt, Homo sapiens
  misc_RNA (1)...(19): siRNA sense strand
ugagguagguggaaaagua

SEQ ID NO: 1451618 - RNA, 19 nt, Homo sapiens
  misc_RNA (1)...(19): siRNA sense strand
gcuagguggugcccugauu

SEQ ID NO: 1451619 - RNA, 19 nt, Homo sapiens
  misc_RNA (1)...(19): siRNA sense strand
ccaccaagauagaaaugau

SEQ ID NO: 1451620 - RNA, 19 nt, Homo sapiens
  misc_RNA (1)...(19): siRNA sense strand
uaacacaacaccuguccuu

SEQ ID NO: 1451621 - RNA, 19 nt, Homo sapiens
  misc_RNA (1)...(19): siRNA sense strand
gcaaaggaagagcagagaa

SEQ ID NO: 1451622 - RNA, 19 nt, Homo sapiens
  misc_RNA (1)...(19): siRNA sense strand
aagaggcuguccagauaaa

SEQ ID NO: 1451623 - RNA, 19 nt, Homo sapiens
  misc_RNA (1)...(19): siRNA sense strand
ggaaaaguaccuuauauag

SEQ ID NO: 1451624 - RNA, 19 nt, Homo sapiens
  misc_RNA (1)...(19): siRNA sense strand
gauggagacccacuagaug

SEQ ID NO: 1451625 - RNA, 19 nt, Homo sapiens
  misc_RNA (1)...(19): siRNA sense strand
ccuaagugccaccaagaua

SEQ ID NO: 1451626 - RNA, 19 nt, Homo sapiens
  misc_RNA (1)...(19): siRNA sense strand
aagcucuccuacauuauaa

SEQ ID NO: 1451627 - RNA, 19 nt, Homo sapiens
  misc_RNA (1)...(19): siRNA sense strand
uucaaacugugcauuauga

SEQ ID NO: 1451628 - RNA, 19 nt, Homo sapiens
  misc_RNA (1)...(19): siRNA sense strand
gagagacagacuacaguga

SEQ ID NO: 1451629 - RNA, 19 nt, Homo sapiens
  misc_RNA (1)...(19): siRNA sense strand
ggaacaaccauucuaaagc

SEQ ID NO: 1451630 - RNA, 19 nt, Homo sapiens
  misc_RNA (1)...(19): siRNA sense strand
auauagcacuguagucaga

SEQ ID NO: 1451631 - RNA, 19 nt, Homo sapiens
  misc_RNA (1)...(19): siRNA sense strand
gggcuucucaguccuaaug

SEQ ID NO: 1451632 - RNA, 19 nt, Homo sapiens
  misc_RNA (1)...(19): siRNA sense strand
gcucagcauucagagagaa

SEQ ID NO: 1451633 - RNA, 19 nt, Homo sapiens
  misc_RNA (1)...(19): siRNA sense strand
gcucggaacaaccauucua

SEQ ID NO: 1451634 - RNA, 19 nt, Homo sapiens
  misc_RNA (1)...(19): siRNA sense strand
gauaaaucccaagugcuuu

SEQ ID NO: 1451635 - RNA, 19 nt, Homo sapiens
  misc_RNA (1)...(19): siRNA sense strand
gguggugcccugauuguug

SEQ ID NO: 1451636 - RNA, 19 nt, Homo sapiens
  misc_RNA (1)...(19): siRNA sense strand
gaaagcucuccuacauuau

SEQ ID NO: 1451637 - RNA, 19 nt, Homo sapiens
  misc_RNA (1)...(19): siRNA sense strand
aaauauagcacuguaguca

SEQ ID NO: 1451638 - RNA, 19 nt, Homo sapiens
  misc_RNA (1)...(19): siRNA sense strand
cagaaagcucuccuacauu

SEQ ID NO: 1451639 - RNA, 19 nt, Homo sapiens
  misc_RNA (1)...(19): siRNA sense strand
cacaacaccuguccuuacu

SEQ ID NO: 1451640 - RNA, 19 nt, Homo sapiens
  misc_RNA (1)...(19): siRNA sense strand
agauaaaucccaagugcuu

SEQ ID NO: 1451641 - RNA, 19 nt, Homo sapiens
  misc_RNA (1)...(19): siRNA sense strand
gagagagacagacuacagu

SEQ ID NO: 1451642 - RNA, 19 nt, Homo sapiens
  misc_RNA (1)...(19): siRNA sense strand
uaagugccaccaagauaga

SEQ ID NO: 1451643 - RNA, 19 nt, Homo sapiens
  misc_RNA (1)...(19): siRNA sense strand
agaauucuucgaucacaaa

SEQ ID NO: 1451644 - RNA, 19 nt, Homo sapiens
  misc_RNA (1)...(19): siRNA sense strand
guggaaaaguaccuuauau

SEQ ID NO: 1451645 - RNA, 19 nt, Homo sapiens
  misc_RNA (1)...(19): siRNA sense strand
gaggaggagcaaaggaaga

SEQ ID NO: 1451646 - RNA, 19 nt, Homo sapiens
  misc_RNA (1)...(19): siRNA sense strand
guucaaacugugcauuaug

SEQ ID NO: 1451647 - RNA, 19 nt, Homo sapiens
  misc_RNA (1)...(19): siRNA sense strand
agucagagaugagguaggu

SEQ ID NO: 1451648 - RNA, 19 nt, Homo sapiens
  misc_RNA (1)...(19): siRNA sense strand
cggaacaaccauucuaaag

SEQ ID NO: 1451649 - RNA, 19 nt, Homo sapiens
  misc_RNA (1)...(19): siRNA sense strand
gcuucucaguccuaauguu

SEQ ID NO: 1451650 - RNA, 19 nt, Homo sapiens
  misc_RNA (1)...(19): siRNA sense strand
ugauggagacccacuagau

SEQ ID NO: 1451651 - RNA, 19 nt, Homo sapiens
  misc_RNA (1)...(19): siRNA sense strand
gaugggcuucucaguccua

SEQ ID NO: 1451652 - RNA, 19 nt, Homo sapiens
  misc_RNA (1)...(19): siRNA sense strand
cacuagaugugcacaagag

SEQ ID NO: 1451653 - RNA, 19 nt, Homo sapiens
  misc_RNA (1)...(19): siRNA sense strand
ucucaguccuaauguucuu

SEQ ID NO: 1451654 - RNA, 19 nt, Homo sapiens
  misc_RNA (1)...(19): siRNA sense strand
acacaacaccuguccuuac

SEQ ID NO: 1451655 - RNA, 19 nt, Homo sapiens
  misc_RNA (1)...(19): siRNA sense strand
uggcuaucuuccacuguuu

SEQ ID NO: 1451656 - RNA, 19 nt, Homo sapiens
  misc_RNA (1)...(19): siRNA sense strand
cuaagugccaccaagauag

SEQ ID NO: 1451657 - RNA, 19 nt, Homo sapiens
  misc_RNA (1)...(19): siRNA sense strand
ggcuaucuuccacuguuua

SEQ ID NO: 1451658 - RNA, 19 nt, Homo sapiens
  misc_RNA (1)...(19): siRNA sense strand
ccucagggaagaagagaga

SEQ ID NO: 1451659 - RNA, 19 nt, Homo sapiens
  misc_RNA (1)...(19): siRNA sense strand
gaggcuguccagauaaauc

SEQ ID NO: 1451660 - RNA, 19 nt, Homo sapiens
  misc_RNA (1)...(19): siRNA sense strand
auauagaacagcaucaguu

SEQ ID NO: 1451661 - RNA, 19 nt, Homo sapiens
  misc_RNA (1)...(19): siRNA sense strand
guuggcauggugagauuaa

SEQ ID NO: 1451662 - RNA, 19 nt, Homo sapiens
  misc_RNA (1)...(19): siRNA sense strand
aaaggaagagcagagaaau

SEQ ID NO: 1451663 - RNA, 19 nt, Homo sapiens
  misc_RNA (1)...(19): siRNA sense strand
cauccacacagauaucaug

SEQ ID NO: 1451664 - RNA, 19 nt, Homo sapiens
  misc_RNA (1)...(19): siRNA sense strand
caccaagauagaaaugauu

SEQ ID NO: 1451665 - RNA, 19 nt, Homo sapiens
  misc_RNA (1)...(19): siRNA sense strand
agaagagagagacagacua

SEQ ID NO: 1451666 - RNA, 19 nt, Homo sapiens
  misc_RNA (1)...(19): siRNA sense strand
ccacuagaugugcacaaga

SEQ ID NO: 1451667 - RNA, 19 nt, Homo sapiens
  misc_RNA (1)...(19): siRNA sense strand
gcuaucuuccacuguuuau

SEQ ID NO: 1451668 - RNA, 19 nt, Homo sapiens
  misc_RNA (1)...(19): siRNA sense strand
gguggaaaaguaccuuaua

SEQ ID NO: 1451669 - RNA, 19 nt, Homo sapiens
  misc_RNA (1)...(19): siRNA sense strand
agaaagcucuccuacauua

SEQ ID NO: 1451670 - RNA, 19 nt, Homo sapiens
  misc_RNA (1)...(19): siRNA sense strand
ugaagaggcuguccagaua

SEQ ID NO: 1451671 - RNA, 19 nt, Homo sapiens
  misc_RNA (1)...(19): siRNA sense strand
caacagugcucuggacaua

SEQ ID NO: 1451672 - RNA, 19 nt, Homo sapiens
  misc_RNA (1)...(19): siRNA sense strand
ucagaaagcucuccuacau

SEQ ID NO: 1451673 - RNA, 19 nt, Homo sapiens
  misc_RNA (1)...(19): siRNA sense strand
gcacugccauccacacaga

SEQ ID NO: 1451674 - RNA, 19 nt, Homo sapiens
  misc_RNA (1)...(19): siRNA sense strand
caacaccuguccuuacugu

SEQ ID NO: 1451675 - RNA, 19 nt, Homo sapiens
  misc_RNA (1)...(19): siRNA sense strand
gaagaggcuguccagauaa

SEQ ID NO: 1451676 - RNA, 19 nt, Homo sapiens
  misc_RNA (1)...(19): siRNA sense strand
gagaugagguagguggaaa

SEQ ID NO: 1451677 - RNA, 19 nt, Homo sapiens
  misc_RNA (1)...(19): siRNA sense strand
caaaggaagagcagagaaa

SEQ ID NO: 1451678 - RNA, 19 nt, Homo sapiens
  misc_RNA (1)...(19): siRNA sense strand
acagugcucuggacauaaa

SEQ ID NO: 1451679 - RNA, 19 nt, Homo sapiens
  misc_RNA (1)...(19): siRNA sense strand
ggaagaagagagagacaga

SEQ ID NO: 1451680 - RNA, 19 nt, Homo sapiens
  misc_RNA (1)...(19): siRNA sense strand
gcacuguagucagagauga

SEQ ID NO: 1451681 - RNA, 19 nt, Homo sapiens
  misc_RNA (1)...(19): siRNA sense strand
gagacagacuacagugaug

SEQ ID NO: 1451682 - RNA, 19 nt, Homo sapiens
  misc_RNA (1)...(19): siRNA sense strand
gaagagagagacagacuac

SEQ ID NO: 1451683 - RNA, 19 nt, Homo sapiens
  misc_RNA (1)...(19): siRNA sense strand
aaagcucuccuacauuaua

SEQ ID NO: 1451684 - RNA, 19 nt, Homo sapiens
  misc_RNA (1)...(19): siRNA sense strand
ugagguagguggaaaagua

SEQ ID NO: 1451685 - RNA, 19 nt, Homo sapiens
  misc_RNA (1)...(19): siRNA sense strand
gcuagguggugcccugauu

SEQ ID NO: 1451686 - RNA, 19 nt, Homo sapiens
  misc_RNA (1)...(19): siRNA sense strand
ccaccaagauagaaaugau

SEQ ID NO: 1451687 - RNA, 19 nt, Homo sapiens
  misc_RNA (1)...(19): siRNA sense strand
uaacacaacaccuguccuu

SEQ ID NO: 1451688 - RNA, 19 nt, Homo sapiens
  misc_RNA (1)...(19): siRNA sense strand
gcaaaggaagagcagagaa

SEQ ID NO: 1451689 - RNA, 19 nt, Homo sapiens
  misc_RNA (1)...(19): siRNA sense strand
aagaggcuguccagauaaa

SEQ ID NO: 1451690 - RNA, 19 nt, Homo sapiens
  misc_RNA (1)...(19): siRNA sense strand
ggaaaaguaccuuauauag

SEQ ID NO: 1451691 - RNA, 19 nt, Homo sapiens
  misc_RNA (1)...(19): siRNA sense strand
gauggagacccacuagaug

SEQ ID NO: 1451692 - RNA, 19 nt, Homo sapiens
  misc_RNA (1)...(19): siRNA sense strand
ccuaagugccaccaagaua

SEQ ID NO: 1451693 - RNA, 19 nt, Homo sapiens
  misc_RNA (1)...(19): siRNA sense strand
aagcucuccuacauuauaa

SEQ ID NO: 1451694 - RNA, 19 nt, Homo sapiens
  misc_RNA (1)...(19): siRNA sense strand
uucaaacugugcauuauga

SEQ ID NO: 1451695 - RNA, 19 nt, Homo sapiens
  misc_RNA (1)...(19): siRNA sense strand
gagagacagacuacaguga

SEQ ID NO: 1451696 - RNA, 19 nt, Homo sapiens
  misc_RNA (1)...(19): siRNA sense strand
ggaacaaccauucuaaagc

SEQ ID NO: 1451697 - RNA, 19 nt, Homo sapiens
  misc_RNA (1)...(19): siRNA sense strand
auauagcacuguagucaga

SEQ ID NO: 1451698 - RNA, 19 nt, Homo sapiens
  misc_RNA (1)...(19): siRNA sense strand
gggcuucucaguccuaaug

SEQ ID NO: 1451699 - RNA, 19 nt, Homo sapiens
  misc_RNA (1)...(19): siRNA sense strand
gcucagcauucagagagaa

SEQ ID NO: 1451700 - RNA, 19 nt, Homo sapiens
  misc_RNA (1)...(19): siRNA sense strand
gcucggaacaaccauucua

SEQ ID NO: 1451701 - RNA, 19 nt, Homo sapiens
  misc_RNA (1)...(19): siRNA sense strand
gauaaaucccaagugcuuu

SEQ ID NO: 1451702 - RNA, 19 nt, Homo sapiens
  misc_RNA (1)...(19): siRNA sense strand
gguggugcccugauuguug

SEQ ID NO: 1451703 - RNA, 19 nt, Homo sapiens
  misc_RNA (1)...(19): siRNA sense strand
gaaagcucuccuacauuau

SEQ ID NO: 1451704 - RNA, 19 nt, Homo sapiens
  misc_RNA (1)...(19): siRNA sense strand
aaauauagcacuguaguca

SEQ ID NO: 1451705 - RNA, 19 nt, Homo sapiens
  misc_RNA (1)...(19): siRNA sense strand
cagaaagcucuccuacauu

SEQ ID NO: 1451706 - RNA, 19 nt, Homo sapiens
  misc_RNA (1)...(19): siRNA sense strand
cacaacaccuguccuuacu

SEQ ID NO: 1451707 - RNA, 19 nt, Homo sapiens
  misc_RNA (1)...(19): siRNA sense strand
agauaaaucccaagugcuu

SEQ ID NO: 1451708 - RNA, 19 nt, Homo sapiens
  misc_RNA (1)...(19): siRNA sense strand
gagagagacagacuacagu

SEQ ID NO: 1451709 - RNA, 19 nt, Homo sapiens
  misc_RNA (1)...(19): siRNA sense strand
uaagugccaccaagauaga

SEQ ID NO: 1451710 - RNA, 19 nt, Homo sapiens
  misc_RNA (1)...(19): siRNA sense strand
agaauucuucgaucacaaa

SEQ ID NO: 1451711 - RNA, 19 nt, Homo sapiens
  misc_RNA (1)...(19): siRNA sense strand
guggaaaaguaccuuauau

SEQ ID NO: 1451712 - RNA, 19 nt, Homo sapiens
  misc_RNA (1)...(19): siRNA sense strand
gaggaggagcaaaggaaga

SEQ ID NO: 1451713 - RNA, 19 nt, Homo sapiens
  misc_RNA (1)...(19): siRNA sense strand
guucaaacugugcauuaug

SEQ ID NO: 1451714 - RNA, 19 nt, Homo sapiens
  misc_RNA (1)...(19): siRNA sense strand
agucagagaugagguaggu

SEQ ID NO: 1451715 - RNA, 19 nt, Homo sapiens
  misc_RNA (1)...(19): siRNA sense strand
cggaacaaccauucuaaag

SEQ ID NO: 1451716 - RNA, 19 nt, Homo sapiens
  misc_RNA (1)...(19): siRNA sense strand
gcuucucaguccuaauguu

SEQ ID NO: 1451717 - RNA, 19 nt, Homo sapiens
  misc_RNA (1)...(19): siRNA sense strand
ugauggagacccacuagau

SEQ ID NO: 1451718 - RNA, 19 nt, Homo sapiens
  misc_RNA (1)...(19): siRNA sense strand
gaugggcuucucaguccua

SEQ ID NO: 1451719 - RNA, 19 nt, Homo sapiens
  misc_RNA (1)...(19): siRNA sense strand
cacuagaugugcacaagag

SEQ ID NO: 1451720 - RNA, 19 nt, Homo sapiens
  misc_RNA (1)...(19): siRNA sense strand
ucucaguccuaauguucuu

SEQ ID NO: 1451721 - RNA, 19 nt, Homo sapiens
  misc_RNA (1)...(19): siRNA sense strand
acacaacaccuguccuuac

SEQ ID NO: 1451722 - RNA, 19 nt, Homo sapiens
  misc_RNA (1)...(19): siRNA sense strand
uggcuaucuuccacuguuu

SEQ ID NO: 1451723 - RNA, 19 nt, Homo sapiens
  misc_RNA (1)...(19): siRNA sense strand
cuaagugccaccaagauag

SEQ ID NO: 1451724 - RNA, 19 nt, Homo sapiens
  misc_RNA (1)...(19): siRNA sense strand
ggcuaucuuccacuguuua

SEQ ID NO: 1451725 - RNA, 19 nt, Homo sapiens
  misc_RNA (1)...(19): siRNA sense strand
ccucagggaagaagagaga

SEQ ID NO: 1451726 - RNA, 19 nt, Homo sapiens
  misc_RNA (1)...(19): siRNA sense strand
gaggcuguccagauaaauc

SEQ ID NO: 1451727 - RNA, 19 nt, Homo sapiens
  misc_RNA (1)...(19): siRNA sense strand
auauagaacagcaucaguu

SEQ ID NO: 1451728 - RNA, 19 nt, Homo sapiens
  misc_RNA (1)...(19): siRNA sense strand
guuggcauggugagauuaa

SEQ ID NO: 1451729 - RNA, 19 nt, Homo sapiens
  misc_RNA (1)...(19): siRNA sense strand
aaaggaagagcagagaaau

SEQ ID NO: 1451730 - RNA, 19 nt, Homo sapiens
  misc_RNA (1)...(19): siRNA sense strand
cauccacacagauaucaug

SEQ ID NO: 1451731 - RNA, 19 nt, Homo sapiens
  misc_RNA (1)...(19): siRNA sense strand
caccaagauagaaaugauu

SEQ ID NO: 1451732 - RNA, 19 nt, Homo sapiens
  misc_RNA (1)...(19): siRNA sense strand
agaagagagagacagacua

SEQ ID NO: 1451733 - RNA, 19 nt, Homo sapiens
  misc_RNA (1)...(19): siRNA sense strand
ccacuagaugugcacaaga

SEQ ID NO: 1451734 - RNA, 19 nt, Homo sapiens
  misc_RNA (1)...(19): siRNA sense strand
gcuaucuuccacuguuuau

SEQ ID NO: 1451735 - RNA, 19 nt, Homo sapiens
  misc_RNA (1)...(19): siRNA sense strand
gguggaaaaguaccuuaua

SEQ ID NO: 1451736 - RNA, 19 nt, Homo sapiens
  misc_RNA (1)...(19): siRNA sense strand
gaaacuggaucuugauauu

SEQ ID NO: 1451737 - RNA, 19 nt, Homo sapiens
  misc_RNA (1)...(19): siRNA sense strand
gaacaaggcgaauuauauu

SEQ ID NO: 1451738 - RNA, 19 nt, Homo sapiens
  misc_RNA (1)...(19): siRNA sense strand
aaacagagcaggagaauga

SEQ ID NO: 1451739 - RNA, 19 nt, Homo sapiens
  misc_RNA (1)...(19): siRNA sense strand
uauaaagccuugaagauga

SEQ ID NO: 1451740 - RNA, 19 nt, Homo sapiens
  misc_RNA (1)...(19): siRNA sense strand
agagagagcuucaggaugu

SEQ ID NO: 1451741 - RNA, 19 nt, Homo sapiens
  misc_RNA (1)...(19): siRNA sense strand
uaaguggaauucgucauua

SEQ ID NO: 1451742 - RNA, 19 nt, Homo sapiens
  misc_RNA (1)...(19): siRNA sense strand
gaagagaaagcuuauaaag

SEQ ID NO: 1451743 - RNA, 19 nt, Homo sapiens
  misc_RNA (1)...(19): siRNA sense strand
gaagccaaaugccggaauu

SEQ ID NO: 1451744 - RNA, 19 nt, Homo sapiens
  misc_RNA (1)...(19): siRNA sense strand
ugaaagaagagaaagcuua

SEQ ID NO: 1451745 - RNA, 19 nt, Homo sapiens
  misc_RNA (1)...(19): siRNA sense strand
gaaagaagagaaagcuuau

SEQ ID NO: 1451746 - RNA, 19 nt, Homo sapiens
  misc_RNA (1)...(19): siRNA sense strand
ggucagaagguuuagguua

SEQ ID NO: 1451747 - RNA, 19 nt, Homo sapiens
  misc_RNA (1)...(19): siRNA sense strand
gcaggagaaugaagccaaa

SEQ ID NO: 1451748 - RNA, 19 nt, Homo sapiens
  misc_RNA (1)...(19): siRNA sense strand
caaggcgaauuauauuuga

SEQ ID NO: 1451749 - RNA, 19 nt, Homo sapiens
  misc_RNA (1)...(19): siRNA sense strand
caacaagauuacugauuuc

SEQ ID NO: 1451750 - RNA, 19 nt, Homo sapiens
  misc_RNA (1)...(19): siRNA sense strand
cagggaaacuggaucuuga

SEQ ID NO: 1451751 - RNA, 19 nt, Homo sapiens
  misc_RNA (1)...(19): siRNA sense strand
gauuacugauuucccauuu

SEQ ID NO: 1451752 - RNA, 19 nt, Homo sapiens
  misc_RNA (1)...(19): siRNA sense strand
ccaaaugccggaauucaaa

SEQ ID NO: 1451753 - RNA, 19 nt, Homo sapiens
  misc_RNA (1)...(19): siRNA sense strand
ugaacaaggcgaauuauau

SEQ ID NO: 1451754 - RNA, 19 nt, Homo sapiens
  misc_RNA (1)...(19): siRNA sense strand
ugaagaugaugaaagagaa

SEQ ID NO: 1451755 - RNA, 19 nt, Homo sapiens
  misc_RNA (1)...(19): siRNA sense strand
gaaaauauuccaugacuug

SEQ ID NO: 1451756 - RNA, 19 nt, Homo sapiens
  misc_RNA (1)...(19): siRNA sense strand
ucaauugaaucccuaagau

SEQ ID NO: 1451757 - RNA, 19 nt, Homo sapiens
  misc_RNA (1)...(19): siRNA sense strand
gucagaagguuuagguuau

SEQ ID NO: 1451758 - RNA, 19 nt, Homo sapiens
  misc_RNA (1)...(19): siRNA sense strand
ccuugaagaugaugaaaga

SEQ ID NO: 1451759 - RNA, 19 nt, Homo sapiens
  misc_RNA (1)...(19): siRNA sense strand
gauauuccaguacaacauu

SEQ ID NO: 1451760 - RNA, 19 nt, Homo sapiens
  misc_RNA (1)...(19): siRNA sense strand
gagagagcuucaggaugua

SEQ ID NO: 1451761 - RNA, 19 nt, Homo sapiens
  misc_RNA (1)...(19): siRNA sense strand
gcuucaggauguaaauauu

SEQ ID NO: 1451762 - RNA, 19 nt, Homo sapiens
  misc_RNA (1)...(19): siRNA sense strand
caugguugcucuugccaaa

SEQ ID NO: 1451763 - RNA, 19 nt, Homo sapiens
  misc_RNA (1)...(19): siRNA sense strand
ugacgacugugcaggaaga

SEQ ID NO: 1451764 - RNA, 19 nt, Homo sapiens
  misc_RNA (1)...(19): siRNA sense strand
ggaucuugauauuccagua

SEQ ID NO: 1451765 - RNA, 19 nt, Homo sapiens
  misc_RNA (1)...(19): siRNA sense strand
ggaaacuggaucuugauau

SEQ ID NO: 1451766 - RNA, 19 nt, Homo sapiens
  misc_RNA (1)...(19): siRNA sense strand
ugagaaccguguaccaugu

SEQ ID NO: 1451767 - RNA, 19 nt, Homo sapiens
  misc_RNA (1)...(19): siRNA sense strand
gagccagugauuuacaaua

SEQ ID NO: 1451768 - RNA, 19 nt, Homo sapiens
  misc_RNA (1)...(19): siRNA sense strand
gcagggaaacuggaucuug

SEQ ID NO: 1451769 - RNA, 19 nt, Homo sapiens
  misc_RNA (1)...(19): siRNA sense strand
gguuggaguuucuguagau

SEQ ID NO: 1451770 - RNA, 19 nt, Homo sapiens
  misc_RNA (1)...(19): siRNA sense strand
gggaaacuggaucuugaua

SEQ ID NO: 1451771 - RNA, 19 nt, Homo sapiens
  misc_RNA (1)...(19): siRNA sense strand
gcaaaagucucaccauggu

SEQ ID NO: 1451772 - RNA, 19 nt, Homo sapiens
  misc_RNA (1)...(19): siRNA sense strand
gagaaccguguaccaugua

SEQ ID NO: 1451773 - RNA, 19 nt, Homo sapiens
  misc_RNA (1)...(19): siRNA sense strand
guagagagagcuucaggau

SEQ ID NO: 1451774 - RNA, 19 nt, Homo sapiens
  misc_RNA (1)...(19): siRNA sense strand
gggcauagugguuggaguu

SEQ ID NO: 1451775 - RNA, 19 nt, Homo sapiens
  misc_RNA (1)...(19): siRNA sense strand
aaaacgagccagugauuua

SEQ ID NO: 1451776 - RNA, 19 nt, Homo sapiens
  misc_RNA (1)...(19): siRNA sense strand
gaagaaaacgagccaguga

SEQ ID NO: 1451777 - RNA, 19 nt, Homo sapiens
  misc_RNA (1)...(19): siRNA sense strand
ucagaagguuuagguuaug

SEQ ID NO: 1451778 - RNA, 19 nt, Homo sapiens
  misc_RNA (1)...(19): siRNA sense strand
gccagugauuuacaauaga

SEQ ID NO: 1451779 - RNA, 19 nt, Homo sapiens
  misc_RNA (1)...(19): siRNA sense strand
aaagguuucugucacaaca

SEQ ID NO: 1451780 - RNA, 19 nt, Homo sapiens
  misc_RNA (1)...(19): siRNA sense strand
cagagacaguuaugcgaau

SEQ ID NO: 1451781 - RNA, 19 nt, Homo sapiens
  misc_RNA (1)...(19): siRNA sense strand
gagcuucaggauguaaaua

SEQ ID NO: 1451782 - RNA, 19 nt, Homo sapiens
  misc_RNA (1)...(19): siRNA sense strand
acaaggcgaauuauauuug

SEQ ID NO: 1451783 - RNA, 19 nt, Homo sapiens
  misc_RNA (1)...(19): siRNA sense strand
ugguugcucuugccaaauu

SEQ ID NO: 1451784 - RNA, 19 nt, Homo sapiens
  misc_RNA (1)...(19): siRNA sense strand
gaagaugaugaaagagaau

SEQ ID NO: 1451785 - RNA, 19 nt, Homo sapiens
  misc_RNA (1)...(19): siRNA sense strand
gcauagugguuggaguuuc

SEQ ID NO: 1451786 - RNA, 19 nt, Homo sapiens
  misc_RNA (1)...(19): siRNA sense strand
acaguuaugcgaauugcua

SEQ ID NO: 1451787 - RNA, 19 nt, Homo sapiens
  misc_RNA (1)...(19): siRNA sense strand
uggauaugcugacgacugu

SEQ ID NO: 1451788 - RNA, 19 nt, Homo sapiens
  misc_RNA (1)...(19): siRNA sense strand
cauagugguuggaguuucu

SEQ ID NO: 1451789 - RNA, 19 nt, Homo sapiens
  misc_RNA (1)...(19): siRNA sense strand
gcugacgacugugcaggaa

SEQ ID NO: 1451790 - RNA, 19 nt, Homo sapiens
  misc_RNA (1)...(19): siRNA sense strand
ccagugauuuacaauagag

SEQ ID NO: 1451791 - RNA, 19 nt, Homo sapiens
  misc_RNA (1)...(19): siRNA sense strand
uuaaguggaauucgucauu

SEQ ID NO: 1451792 - RNA, 19 nt, Homo sapiens
  misc_RNA (1)...(19): siRNA sense strand
gaugaaagagaauguugca

SEQ ID NO: 1451793 - RNA, 19 nt, Homo sapiens
  misc_RNA (1)...(19): siRNA sense strand
uuauaaagccuugaagaug

SEQ ID NO: 1451794 - RNA, 19 nt, Homo sapiens
  misc_RNA (1)...(19): siRNA sense strand
gccaaaugccggaauucaa

SEQ ID NO: 1451795 - RNA, 19 nt, Homo sapiens
  misc_RNA (1)...(19): siRNA sense strand
gaaccguguaccauguaaa

SEQ ID NO: 1451796 - RNA, 19 nt, Homo sapiens
  misc_RNA (1)...(19): siRNA sense strand
guaaaccagagacaguuau

SEQ ID NO: 1451797 - RNA, 19 nt, Homo sapiens
  misc_RNA (1)...(19): siRNA sense strand
uguaaaccagagacaguua

SEQ ID NO: 1451798 - RNA, 19 nt, Homo sapiens
  misc_RNA (1)...(19): siRNA sense strand
cacaacaagauuacugauu

SEQ ID NO: 1451799 - RNA, 19 nt, Homo sapiens
  misc_RNA (1)...(19): siRNA sense strand
aaaggugaaagaagagaaa

SEQ ID NO: 1451800 - RNA, 19 nt, Homo sapiens
  misc_RNA (1)...(19): siRNA sense strand
agagacaguuaugcgaauu

SEQ ID NO: 1451801 - RNA, 19 nt, Homo sapiens
  misc_RNA (1)...(19): siRNA sense strand
ggaagcagggaaacuggau

SEQ ID NO: 1451802 - RNA, 19 nt, Homo sapiens
  misc_RNA (1)...(19): siRNA sense strand
gaaaacgagccagugauuu

SEQ ID NO: 1451803 - RNA, 19 nt, Homo sapiens
  misc_RNA (1)...(19): siRNA sense strand
ggagaaugaagccaaaugc

SEQ ID NO: 1451804 - RNA, 19 nt, Homo sapiens
  misc_RNA (1)...(19): siRNA sense strand
agaaccguguaccauguaa

SEQ ID NO: 1451805 - RNA, 19 nt, Homo sapiens
  misc_RNA (1)...(19): siRNA sense strand
gagacaguuaugcgaauug

SEQ ID NO: 1451806 - RNA, 19 nt, Homo sapiens
  misc_RNA (1)...(19): siRNA sense strand
ccauuuaaguggaauucgu

SEQ ID NO: 1451807 - RNA, 19 nt, Homo sapiens
  misc_RNA (1)...(19): siRNA sense strand
uagguuaugcugauguuga

SEQ ID NO: 1451808 - RNA, 19 nt, Homo sapiens
  misc_RNA (1)...(19): siRNA sense strand
agccagugauuuacaauag

SEQ ID NO: 1451809 - RNA, 19 nt, Homo sapiens
  misc_RNA (1)...(19): siRNA sense strand
guauucaacuuuuggcuau

SEQ ID NO: 1451810 - RNA, 19 nt, Homo sapiens
  misc_RNA (1)...(19): siRNA sense strand
gaaggcaaaaguaaugaaa

SEQ ID NO: 1451811 - RNA, 19 nt, Homo sapiens
  misc_RNA (1)...(19): siRNA sense strand
auaaagccuugaagaugau

SEQ ID NO: 1451812 - RNA, 19 nt, Homo sapiens
  misc_RNA (1)...(19): siRNA sense strand
guucccgaauucccagaaa

SEQ ID NO: 1451813 - RNA, 19 nt, Homo sapiens
  misc_RNA (1)...(19): siRNA sense strand
ugcacaggaucaaggauga

SEQ ID NO: 1451814 - RNA, 19 nt, Homo sapiens
  misc_RNA (1)...(19): siRNA sense strand
aaguggaauucgucauuau

SEQ ID NO: 1451815 - RNA, 19 nt, Homo sapiens
  misc_RNA (1)...(19): siRNA sense strand
uggaguuucuguagaugga

SEQ ID NO: 1451816 - RNA, 19 nt, Homo sapiens
  misc_RNA (1)...(19): siRNA sense strand
aaaugauccuuuguucuuc

SEQ ID NO: 1451817 - RNA, 19 nt, Homo sapiens
  misc_RNA (1)...(19): siRNA sense strand
gaugaugaaagagaauguu

SEQ ID NO: 1451818 - RNA, 19 nt, Homo sapiens
  misc_RNA (1)...(19): siRNA sense strand
cggcucaugucagcaguga

SEQ ID NO: 1451819 - RNA, 19 nt, Homo sapiens
  misc_RNA (1)...(19): siRNA sense strand
uugaacaaggcgaauuaua

SEQ ID NO: 1451820 - RNA, 19 nt, Homo sapiens
  misc_RNA (1)...(19): siRNA sense strand
aaugauccuuuguucuuca

SEQ ID NO: 1451821 - RNA, 19 nt, Homo sapiens
  misc_RNA (1)...(19): siRNA sense strand
gagagcuucaggauguaaa

SEQ ID NO: 1451822 - RNA, 19 nt, Homo sapiens
  misc_RNA (1)...(19): siRNA sense strand
aaacuggaucuugauauuc

SEQ ID NO: 1451823 - RNA, 19 nt, Homo sapiens
  misc_RNA (1)...(19): siRNA sense strand
cagaaaauauuccaugacu

SEQ ID NO: 1451824 - RNA, 19 nt, Homo sapiens
  misc_RNA (1)...(19): siRNA sense strand
uaaaccagagacaguuaug

SEQ ID NO: 1451825 - RNA, 19 nt, Homo sapiens
  misc_RNA (1)...(19): siRNA sense strand
cuuauaaagccuugaagau

SEQ ID NO: 1451826 - RNA, 19 nt, Homo sapiens
  misc_RNA (1)...(19): siRNA sense strand
cauaguagagagagcuuca

SEQ ID NO: 1451827 - RNA, 19 nt, Homo sapiens
  misc_RNA (1)...(19): siRNA sense strand
cauguaaaccagagacagu

SEQ ID NO: 1451828 - RNA, 19 nt, Homo sapiens
  misc_RNA (1)...(19): siRNA sense strand
uucaaaaccuggcaagaaa

SEQ ID NO: 1451829 - RNA, 19 nt, Homo sapiens
  misc_RNA (1)...(19): siRNA sense strand
gcgaauuauauuugagaga

SEQ ID NO: 1451830 - RNA, 19 nt, Homo sapiens
  misc_RNA (1)...(19): siRNA sense strand
guuaugcugauguugagaa

SEQ ID NO: 1451831 - RNA, 19 nt, Homo sapiens
  misc_RNA (1)...(19): siRNA sense strand
gaucuugauauuccaguac

SEQ ID NO: 1451832 - RNA, 19 nt, Homo sapiens
  misc_RNA (1)...(19): siRNA sense strand
uugaagaugaugaaagaga

SEQ ID NO: 1451833 - RNA, 19 nt, Homo sapiens
  misc_RNA (1)...(19): siRNA sense strand
gaaacuggaucuugauauu

SEQ ID NO: 1451834 - RNA, 19 nt, Homo sapiens
  misc_RNA (1)...(19): siRNA sense strand
gaacaaggcgaauuauauu

SEQ ID NO: 1451835 - RNA, 19 nt, Homo sapiens
  misc_RNA (1)...(19): siRNA sense strand
aaacagagcaggagaauga

SEQ ID NO: 1451836 - RNA, 19 nt, Homo sapiens
  misc_RNA (1)...(19): siRNA sense strand
uauaaagccuugaagauga

SEQ ID NO: 1451837 - RNA, 19 nt, Homo sapiens
  misc_RNA (1)...(19): siRNA sense strand
agagagagcuucaggaugu

SEQ ID NO: 1451838 - RNA, 19 nt, Homo sapiens
  misc_RNA (1)...(19): siRNA sense strand
uaaguggaauucgucauua

SEQ ID NO: 1451839 - RNA, 19 nt, Homo sapiens
  misc_RNA (1)...(19): siRNA sense strand
gaagagaaagcuuauaaag

SEQ ID NO: 1451840 - RNA, 19 nt, Homo sapiens
  misc_RNA (1)...(19): siRNA sense strand
gaagccaaaugccggaauu

SEQ ID NO: 1451841 - RNA, 19 nt, Homo sapiens
  misc_RNA (1)...(19): siRNA sense strand
ugaaagaagagaaagcuua

SEQ ID NO: 1451842 - RNA, 19 nt, Homo sapiens
  misc_RNA (1)...(19): siRNA sense strand
gaaagaagagaaagcuuau

SEQ ID NO: 1451843 - RNA, 19 nt, Homo sapiens
  misc_RNA (1)...(19): siRNA sense strand
ggucagaagguuuagguua

SEQ ID NO: 1451844 - RNA, 19 nt, Homo sapiens
  misc_RNA (1)...(19): siRNA sense strand
gcaggagaaugaagccaaa

SEQ ID NO: 1451845 - RNA, 19 nt, Homo sapiens
  misc_RNA (1)...(19): siRNA sense strand
caaggcgaauuauauuuga

SEQ ID NO: 1451846 - RNA, 19 nt, Homo sapiens
  misc_RNA (1)...(19): siRNA sense strand
caacaagauuacugauuuc

SEQ ID NO: 1451847 - RNA, 19 nt, Homo sapiens
  misc_RNA (1)...(19): siRNA sense strand
cagggaaacuggaucuuga

SEQ ID NO: 1451848 - RNA, 19 nt, Homo sapiens
  misc_RNA (1)...(19): siRNA sense strand
gauuacugauuucccauuu

SEQ ID NO: 1451849 - RNA, 19 nt, Homo sapiens
  misc_RNA (1)...(19): siRNA sense strand
ccaaaugccggaauucaaa

SEQ ID NO: 1451850 - RNA, 19 nt, Homo sapiens
  misc_RNA (1)...(19): siRNA sense strand
ugaacaaggcgaauuauau

SEQ ID NO: 1451851 - RNA, 19 nt, Homo sapiens
  misc_RNA (1)...(19): siRNA sense strand
ugaagaugaugaaagagaa

SEQ ID NO: 1451852 - RNA, 19 nt, Homo sapiens
  misc_RNA (1)...(19): siRNA sense strand
gaaaauauuccaugacuug

SEQ ID NO: 1451853 - RNA, 19 nt, Homo sapiens
  misc_RNA (1)...(19): siRNA sense strand
ucaauugaaucccuaagau

SEQ ID NO: 1451854 - RNA, 19 nt, Homo sapiens
  misc_RNA (1)...(19): siRNA sense strand
gucagaagguuuagguuau

SEQ ID NO: 1451855 - RNA, 19 nt, Homo sapiens
  misc_RNA (1)...(19): siRNA sense strand
ccuugaagaugaugaaaga

SEQ ID NO: 1451856 - RNA, 19 nt, Homo sapiens
  misc_RNA (1)...(19): siRNA sense strand
gauauuccaguacaacauu

SEQ ID NO: 1451857 - RNA, 19 nt, Homo sapiens
  misc_RNA (1)...(19): siRNA sense strand
gagagagcuucaggaugua

SEQ ID NO: 1451858 - RNA, 19 nt, Homo sapiens
  misc_RNA (1)...(19): siRNA sense strand
gcuucaggauguaaauauu

SEQ ID NO: 1451859 - RNA, 19 nt, Homo sapiens
  misc_RNA (1)...(19): siRNA sense strand
caugguugcucuugccaaa

SEQ ID NO: 1451860 - RNA, 19 nt, Homo sapiens
  misc_RNA (1)...(19): siRNA sense strand
ugacgacugugcaggaaga

SEQ ID NO: 1451861 - RNA, 19 nt, Homo sapiens
  misc_RNA (1)...(19): siRNA sense strand
ggaucuugauauuccagua

SEQ ID NO: 1451862 - RNA, 19 nt, Homo sapiens
  misc_RNA (1)...(19): siRNA sense strand
ggaaacuggaucuugauau

SEQ ID NO: 1451863 - RNA, 19 nt, Homo sapiens
  misc_RNA (1)...(19): siRNA sense strand
ugagaaccguguaccaugu

SEQ ID NO: 1451864 - RNA, 19 nt, Homo sapiens
  misc_RNA (1)...(19): siRNA sense strand
gagccagugauuuacaaua

SEQ ID NO: 1451865 - RNA, 19 nt, Homo sapiens
  misc_RNA (1)...(19): siRNA sense strand
gcagggaaacuggaucuug

SEQ ID NO: 1451866 - RNA, 19 nt, Homo sapiens
  misc_RNA (1)...(19): siRNA sense strand
gguuggaguuucuguagau

SEQ ID NO: 1451867 - RNA, 19 nt, Homo sapiens
  misc_RNA (1)...(19): siRNA sense strand
gggaaacuggaucuugaua

SEQ ID NO: 1451868 - RNA, 19 nt, Homo sapiens
  misc_RNA (1)...(19): siRNA sense strand
gcaaaagucucaccauggu

SEQ ID NO: 1451869 - RNA, 19 nt, Homo sapiens
  misc_RNA (1)...(19): siRNA sense strand
gagaaccguguaccaugua

SEQ ID NO: 1451870 - RNA, 19 nt, Homo sapiens
  misc_RNA (1)...(19): siRNA sense strand
guagagagagcuucaggau

SEQ ID NO: 1451871 - RNA, 19 nt, Homo sapiens
  misc_RNA (1)...(19): siRNA sense strand
gggcauagugguuggaguu

SEQ ID NO: 1451872 - RNA, 19 nt, Homo sapiens
  misc_RNA (1)...(19): siRNA sense strand
aaaacgagccagugauuua

SEQ ID NO: 1451873 - RNA, 19 nt, Homo sapiens
  misc_RNA (1)...(19): siRNA sense strand
gaagaaaacgagccaguga

SEQ ID NO: 1451874 - RNA, 19 nt, Homo sapiens
  misc_RNA (1)...(19): siRNA sense strand
ucagaagguuuagguuaug

SEQ ID NO: 1451875 - RNA, 19 nt, Homo sapiens
  misc_RNA (1)...(19): siRNA sense strand
gccagugauuuacaauaga

SEQ ID NO: 1451876 - RNA, 19 nt, Homo sapiens
  misc_RNA (1)...(19): siRNA sense strand
aaagguuucugucacaaca

SEQ ID NO: 1451877 - RNA, 19 nt, Homo sapiens
  misc_RNA (1)...(19): siRNA sense strand
cagagacaguuaugcgaau

SEQ ID NO: 1451878 - RNA, 19 nt, Homo sapiens
  misc_RNA (1)...(19): siRNA sense strand
gagcuucaggauguaaaua

SEQ ID NO: 1451879 - RNA, 19 nt, Homo sapiens
  misc_RNA (1)...(19): siRNA sense strand
acaaggcgaauuauauuug

SEQ ID NO: 1451880 - RNA, 19 nt, Homo sapiens
  misc_RNA (1)...(19): siRNA sense strand
ugguugcucuugccaaauu

SEQ ID NO: 1451881 - RNA, 19 nt, Homo sapiens
  misc_RNA (1)...(19): siRNA sense strand
gaagaugaugaaagagaau

SEQ ID NO: 1451882 - RNA, 19 nt, Homo sapiens
  misc_RNA (1)...(19): siRNA sense strand
gcauagugguuggaguuuc

SEQ ID NO: 1451883 - RNA, 19 nt, Homo sapiens
  misc_RNA (1)...(19): siRNA sense strand
acaguuaugcgaauugcua

SEQ ID NO: 1451884 - RNA, 19 nt, Homo sapiens
  misc_RNA (1)...(19): siRNA sense strand
uggauaugcugacgacugu

SEQ ID NO: 1451885 - RNA, 19 nt, Homo sapiens
  misc_RNA (1)...(19): siRNA sense strand
cauagugguuggaguuucu

SEQ ID NO: 1451886 - RNA, 19 nt, Homo sapiens
  misc_RNA (1)...(19): siRNA sense strand
gcugacgacugugcaggaa

SEQ ID NO: 1451887 - RNA, 19 nt, Homo sapiens
  misc_RNA (1)...(19): siRNA sense strand
ccagugauuuacaauagag

SEQ ID NO: 1451888 - RNA, 19 nt, Homo sapiens
  misc_RNA (1)...(19): siRNA sense strand
uuaaguggaauucgucauu

SEQ ID NO: 1451889 - RNA, 19 nt, Homo sapiens
  misc_RNA (1)...(19): siRNA sense strand
gaugaaagagaauguugca

SEQ ID NO: 1451890 - RNA, 19 nt, Homo sapiens
  misc_RNA (1)...(19): siRNA sense strand
uuauaaagccuugaagaug

SEQ ID NO: 1451891 - RNA, 19 nt, Homo sapiens
  misc_RNA (1)...(19): siRNA sense strand
gccaaaugccggaauucaa

SEQ ID NO: 1451892 - RNA, 19 nt, Homo sapiens
  misc_RNA (1)...(19): siRNA sense strand
gaaccguguaccauguaaa

SEQ ID NO: 1451893 - RNA, 19 nt, Homo sapiens
  misc_RNA (1)...(19): siRNA sense strand
guaaaccagagacaguuau

SEQ ID NO: 1451894 - RNA, 19 nt, Homo sapiens
  misc_RNA (1)...(19): siRNA sense strand
uguaaaccagagacaguua

SEQ ID NO: 1451895 - RNA, 19 nt, Homo sapiens
  misc_RNA (1)...(19): siRNA sense strand
cacaacaagauuacugauu

SEQ ID NO: 1451896 - RNA, 19 nt, Homo sapiens
  misc_RNA (1)...(19): siRNA sense strand
aaaggugaaagaagagaaa

SEQ ID NO: 1451897 - RNA, 19 nt, Homo sapiens
  misc_RNA (1)...(19): siRNA sense strand
agagacaguuaugcgaauu

SEQ ID NO: 1451898 - RNA, 19 nt, Homo sapiens
  misc_RNA (1)...(19): siRNA sense strand
ggaagcagggaaacuggau

SEQ ID NO: 1451899 - RNA, 19 nt, Homo sapiens
  misc_RNA (1)...(19): siRNA sense strand
gaaaacgagccagugauuu

SEQ ID NO: 1451900 - RNA, 19 nt, Homo sapiens
  misc_RNA (1)...(19): siRNA sense strand
ggagaaugaagccaaaugc

SEQ ID NO: 1451901 - RNA, 19 nt, Homo sapiens
  misc_RNA (1)...(19): siRNA sense strand
agaaccguguaccauguaa

SEQ ID NO: 1451902 - RNA, 19 nt, Homo sapiens
  misc_RNA (1)...(19): siRNA sense strand
gagacaguuaugcgaauug

SEQ ID NO: 1451903 - RNA, 19 nt, Homo sapiens
  misc_RNA (1)...(19): siRNA sense strand
ccauuuaaguggaauucgu

SEQ ID NO: 1451904 - RNA, 19 nt, Homo sapiens
  misc_RNA (1)...(19): siRNA sense strand
uagguuaugcugauguuga

SEQ ID NO: 1451905 - RNA, 19 nt, Homo sapiens
  misc_RNA (1)...(19): siRNA sense strand
agccagugauuuacaauag

SEQ ID NO: 1451906 - RNA, 19 nt, Homo sapiens
  misc_RNA (1)...(19): siRNA sense strand
guauucaacuuuuggcuau

SEQ ID NO: 1451907 - RNA, 19 nt, Homo sapiens
  misc_RNA (1)...(19): siRNA sense strand
gaaggcaaaaguaaugaaa

SEQ ID NO: 1451908 - RNA, 19 nt, Homo sapiens
  misc_RNA (1)...(19): siRNA sense strand
auaaagccuugaagaugau

SEQ ID NO: 1451909 - RNA, 19 nt, Homo sapiens
  misc_RNA (1)...(19): siRNA sense strand
guucccgaauucccagaaa

SEQ ID NO: 1451910 - RNA, 19 nt, Homo sapiens
  misc_RNA (1)...(19): siRNA sense strand
ugcacaggaucaaggauga

SEQ ID NO: 1451911 - RNA, 19 nt, Homo sapiens
  misc_RNA (1)...(19): siRNA sense strand
aaguggaauucgucauuau

SEQ ID NO: 1451912 - RNA, 19 nt, Homo sapiens
  misc_RNA (1)...(19): siRNA sense strand
uggaguuucuguagaugga

SEQ ID NO: 1451913 - RNA, 19 nt, Homo sapiens
  misc_RNA (1)...(19): siRNA sense strand
aaaugauccuuuguucuuc

SEQ ID NO: 1451914 - RNA, 19 nt, Homo sapiens
  misc_RNA (1)...(19): siRNA sense strand
gaugaugaaagagaauguu

SEQ ID NO: 1451915 - RNA, 19 nt, Homo sapiens
  misc_RNA (1)...(19): siRNA sense strand
cggcucaugucagcaguga

SEQ ID NO: 1451916 - RNA, 19 nt, Homo sapiens
  misc_RNA (1)...(19): siRNA sense strand
uugaacaaggcgaauuaua

SEQ ID NO: 1451917 - RNA, 19 nt, Homo sapiens
  misc_RNA (1)...(19): siRNA sense strand
aaugauccuuuguucuuca

SEQ ID NO: 1451918 - RNA, 19 nt, Homo sapiens
  misc_RNA (1)...(19): siRNA sense strand
gagagcuucaggauguaaa

SEQ ID NO: 1451919 - RNA, 19 nt, Homo sapiens
  misc_RNA (1)...(19): siRNA sense strand
aaacuggaucuugauauuc

SEQ ID NO: 1451920 - RNA, 19 nt, Homo sapiens
  misc_RNA (1)...(19): siRNA sense strand
cagaaaauauuccaugacu

SEQ ID NO: 1451921 - RNA, 19 nt, Homo sapiens
  misc_RNA (1)...(19): siRNA sense strand
uaaaccagagacaguuaug

SEQ ID NO: 1451922 - RNA, 19 nt, Homo sapiens
  misc_RNA (1)...(19): siRNA sense strand
cuuauaaagccuugaagau

SEQ ID NO: 1451923 - RNA, 19 nt, Homo sapiens
  misc_RNA (1)...(19): siRNA sense strand
cauaguagagagagcuuca

SEQ ID NO: 1451924 - RNA, 19 nt, Homo sapiens
  misc_RNA (1)...(19): siRNA sense strand
cauguaaaccagagacagu

SEQ ID NO: 1451925 - RNA, 19 nt, Homo sapiens
  misc_RNA (1)...(19): siRNA sense strand
uucaaaaccuggcaagaaa

SEQ ID NO: 1451926 - RNA, 19 nt, Homo sapiens
  misc_RNA (1)...(19): siRNA sense strand
gcgaauuauauuugagaga

SEQ ID NO: 1451927 - RNA, 19 nt, Homo sapiens
  misc_RNA (1)...(19): siRNA sense strand
guuaugcugauguugagaa

SEQ ID NO: 1451928 - RNA, 19 nt, Homo sapiens
  misc_RNA (1)...(19): siRNA sense strand
gaucuugauauuccaguac

SEQ ID NO: 1451929 - RNA, 19 nt, Homo sapiens
  misc_RNA (1)...(19): siRNA sense strand
uugaagaugaugaaagaga

SEQ ID NO: 1451930 - RNA, 19 nt, Homo sapiens
  misc_RNA (1)...(19): siRNA sense strand
gcacaucagugucaaggaa

SEQ ID NO: 1451931 - RNA, 19 nt, Homo sapiens
  misc_RNA (1)...(19): siRNA sense strand
ggacacugcccacgacuuu

SEQ ID NO: 1451932 - RNA, 19 nt, Homo sapiens
  misc_RNA (1)...(19): siRNA sense strand
ucaacaaccugguggagaa

SEQ ID NO: 1451933 - RNA, 19 nt, Homo sapiens
  misc_RNA (1)...(19): siRNA sense strand
guguggagcuggaguguga

SEQ ID NO: 1451934 - RNA, 19 nt, Homo sapiens
  misc_RNA (1)...(19): siRNA sense strand
gcaggaguuugauaagcuu

SEQ ID NO: 1451935 - RNA, 19 nt, Homo sapiens
  misc_RNA (1)...(19): siRNA sense strand
gaaggaggacgacguuucu

SEQ ID NO: 1451936 - RNA, 19 nt, Homo sapiens
  misc_RNA (1)...(19): siRNA sense strand
gaugaaggaggacgacguu

SEQ ID NO: 1451937 - RNA, 19 nt, Homo sapiens
  misc_RNA (1)...(19): siRNA sense strand
uugauaagcuucgcgaguu

SEQ ID NO: 1451938 - RNA, 19 nt, Homo sapiens
  misc_RNA (1)...(19): siRNA sense strand
ggacagcucagccucuucu

SEQ ID NO: 1451939 - RNA, 19 nt, Homo sapiens
  misc_RNA (1)...(19): siRNA sense strand
agggcgagcugucuuucua

SEQ ID NO: 1451940 - RNA, 19 nt, Homo sapiens
  misc_RNA (1)...(19): siRNA sense strand
gcggacagcucagccucuu

SEQ ID NO: 1451941 - RNA, 19 nt, Homo sapiens
  misc_RNA (1)...(19): siRNA sense strand
gcaccaaccacacccucaa

SEQ ID NO: 1451942 - RNA, 19 nt, Homo sapiens
  misc_RNA (1)...(19): siRNA sense strand
ggcaggaguuugauaagcu

SEQ ID NO: 1451943 - RNA, 19 nt, Homo sapiens
  misc_RNA (1)...(19): siRNA sense strand
ucuguacccuucagcuuug

SEQ ID NO: 1451944 - RNA, 19 nt, Homo sapiens
  misc_RNA (1)...(19): siRNA sense strand
gggcucccgugucuucuca

SEQ ID NO: 1451945 - RNA, 19 nt, Homo sapiens
  misc_RNA (1)...(19): siRNA sense strand
ggcgagcugucuuucuaug

SEQ ID NO: 1451946 - RNA, 19 nt, Homo sapiens
  misc_RNA (1)...(19): siRNA sense strand
ggcugcagauggagaugaa

SEQ ID NO: 1451947 - RNA, 19 nt, Homo sapiens
  misc_RNA (1)...(19): siRNA sense strand
ugauaagcuucgcgaguuc

SEQ ID NO: 1451948 - RNA, 19 nt, Homo sapiens
  misc_RNA (1)...(19): siRNA sense strand
ugaaggaggacgacguuuc

SEQ ID NO: 1451949 - RNA, 19 nt, Homo sapiens
  misc_RNA (1)...(19): siRNA sense strand
gaagaugaagcagcucaca

SEQ ID NO: 1451950 - RNA, 19 nt, Homo sapiens
  misc_RNA (1)...(19): siRNA sense strand
ggaggacgacguuucuuuu

SEQ ID NO: 1451951 - RNA, 19 nt, Homo sapiens
  misc_RNA (1)...(19): siRNA sense strand
ccagagccuuugcgcaucu

SEQ ID NO: 1451952 - RNA, 19 nt, Homo sapiens
  misc_RNA (1)...(19): siRNA sense strand
uuaucgaugucugcaagua

SEQ ID NO: 1451953 - RNA, 19 nt, Homo sapiens
  misc_RNA (1)...(19): siRNA sense strand
ggagcaggccauucuggau

SEQ ID NO: 1451954 - RNA, 19 nt, Homo sapiens
  misc_RNA (1)...(19): siRNA sense strand
uugcaucuguggaaucugu

SEQ ID NO: 1451955 - RNA, 19 nt, Homo sapiens
  misc_RNA (1)...(19): siRNA sense strand
uaccgcgucuggaagaaga

SEQ ID NO: 1451956 - RNA, 19 nt, Homo sapiens
  misc_RNA (1)...(19): siRNA sense strand
cgacguuucuuuucucaug

SEQ ID NO: 1451957 - RNA, 19 nt, Homo sapiens
  misc_RNA (1)...(19): siRNA sense strand
agaugaagcagcucacaga

SEQ ID NO: 1451958 - RNA, 19 nt, Homo sapiens
  misc_RNA (1)...(19): siRNA sense strand
gcucgggcuucugguaugu

SEQ ID NO: 1451959 - RNA, 19 nt, Homo sapiens
  misc_RNA (1)...(19): siRNA sense strand
ggauccggcaggaguuuga

SEQ ID NO: 1451960 - RNA, 19 nt, Homo sapiens
  misc_RNA (1)...(19): siRNA sense strand
gcgagcugucuuucuauga

SEQ ID NO: 1451961 - RNA, 19 nt, Homo sapiens
  misc_RNA (1)...(19): siRNA sense strand
gcuugcaucuguggaaucu

SEQ ID NO: 1451962 - RNA, 19 nt, Homo sapiens
  misc_RNA (1)...(19): siRNA sense strand
ucgagcggcugcagaugga

SEQ ID NO: 1451963 - RNA, 19 nt, Homo sapiens
  misc_RNA (1)...(19): siRNA sense strand
caaccacacccucaacaac

SEQ ID NO: 1451964 - RNA, 19 nt, Homo sapiens
  misc_RNA (1)...(19): siRNA sense strand
cgagcugucuuucuaugac

SEQ ID NO: 1451965 - RNA, 19 nt, Homo sapiens
  misc_RNA (1)...(19): siRNA sense strand
agacaaggcagaagcaacu

SEQ ID NO: 1451966 - RNA, 19 nt, Homo sapiens
  misc_RNA (1)...(19): siRNA sense strand
ccaaccacacccucaacaa

SEQ ID NO: 1451967 - RNA, 19 nt, Homo sapiens
  misc_RNA (1)...(19): siRNA sense strand
ccggcaugcuuaucgaugu

SEQ ID NO: 1451968 - RNA, 19 nt, Homo sapiens
  misc_RNA (1)...(19): siRNA sense strand
ggagacaaggcagaagcaa

SEQ ID NO: 1451969 - RNA, 19 nt, Homo sapiens
  misc_RNA (1)...(19): siRNA sense strand
gaggagggcgagcugucuu

SEQ ID NO: 1451970 - RNA, 19 nt, Homo sapiens
  misc_RNA (1)...(19): siRNA sense strand
ccaagugcaggaacaugga

SEQ ID NO: 1451971 - RNA, 19 nt, Homo sapiens
  misc_RNA (1)...(19): siRNA sense strand
ggacgacguuucuuuucuc

SEQ ID NO: 1451972 - RNA, 19 nt, Homo sapiens
  misc_RNA (1)...(19): siRNA sense strand
aggaggacgacguuucuuu

SEQ ID NO: 1451973 - RNA, 19 nt, Homo sapiens
  misc_RNA (1)...(19): siRNA sense strand
ggacacugcccacgacuuu

SEQ ID NO: 1451974 - RNA, 19 nt, Homo sapiens
  misc_RNA (1)...(19): siRNA sense strand
ucaacaaccugguggagaa

SEQ ID NO: 1451975 - RNA, 19 nt, Homo sapiens
  misc_RNA (1)...(19): siRNA sense strand
ggacagcucagccucuucu

SEQ ID NO: 1451976 - RNA, 19 nt, Homo sapiens
  misc_RNA (1)...(19): siRNA sense strand
gcggacagcucagccucuu

SEQ ID NO: 1451977 - RNA, 19 nt, Homo sapiens
  misc_RNA (1)...(19): siRNA sense strand
gcaccaaccacacccucaa

SEQ ID NO: 1451978 - RNA, 19 nt, Homo sapiens
  misc_RNA (1)...(19): siRNA sense strand
caaccacacccucaacaac

SEQ ID NO: 1451979 - RNA, 19 nt, Homo sapiens
  misc_RNA (1)...(19): siRNA sense strand
ccaaccacacccucaacaa

SEQ ID NO: 1451980 - RNA, 19 nt, Homo sapiens
  misc_RNA (1)...(19): siRNA sense strand
ccaagugcaggaacaugga

SEQ ID NO: 1451981 - RNA, 19 nt, Homo sapiens
  misc_RNA (1)...(19): siRNA sense strand
ggaaagggcuucaaaguag

SEQ ID NO: 1451982 - RNA, 19 nt, Homo sapiens
  misc_RNA (1)...(19): siRNA sense strand
ggacuuggcuggagagaga

SEQ ID NO: 1451983 - RNA, 19 nt, Homo sapiens
  misc_RNA (1)...(19): siRNA sense strand
gcaagcauauguugagaaa

SEQ ID NO: 1451984 - RNA, 19 nt, Homo sapiens
  misc_RNA (1)...(19): siRNA sense strand
gaagaggaguuacgagaga

SEQ ID NO: 1451985 - RNA, 19 nt, Homo sapiens
  misc_RNA (1)...(19): siRNA sense strand
agagaaagaugcuaugauu

SEQ ID NO: 1451986 - RNA, 19 nt, Homo sapiens
  misc_RNA (1)...(19): siRNA sense strand
gcaaaugguggagauauua

SEQ ID NO: 1451987 - RNA, 19 nt, Homo sapiens
  misc_RNA (1)...(19): siRNA sense strand
acgaggaacugcccacuua

SEQ ID NO: 1451988 - RNA, 19 nt, Homo sapiens
  misc_RNA (1)...(19): siRNA sense strand
gaagucgccugaccacaga

SEQ ID NO: 1451989 - RNA, 19 nt, Homo sapiens
  misc_RNA (1)...(19): siRNA sense strand
gagaaagaugcuaugauua

SEQ ID NO: 1451990 - RNA, 19 nt, Homo sapiens
  misc_RNA (1)...(19): siRNA sense strand
cgaagggcaugaagacaaa

SEQ ID NO: 1451991 - RNA, 19 nt, Homo sapiens
  misc_RNA (1)...(19): siRNA sense strand
caaagugggagcagaagua

SEQ ID NO: 1451992 - RNA, 19 nt, Homo sapiens
  misc_RNA (1)...(19): siRNA sense strand
ccgacaagcuccacaaguu

SEQ ID NO: 1451993 - RNA, 19 nt, Homo sapiens
  misc_RNA (1)...(19): siRNA sense strand
gaaagaugcuaugauuaag

SEQ ID NO: 1451994 - RNA, 19 nt, Homo sapiens
  misc_RNA (1)...(19): siRNA sense strand
cagccaacaugccggaaua

SEQ ID NO: 1451995 - RNA, 19 nt, Homo sapiens
  misc_RNA (1)...(19): siRNA sense strand
caaagggaccgcagagaaa

SEQ ID NO: 1451996 - RNA, 19 nt, Homo sapiens
  misc_RNA (1)...(19): siRNA sense strand
caacagagaccuccgagau

SEQ ID NO: 1451997 - RNA, 19 nt, Homo sapiens
  misc_RNA (1)...(19): siRNA sense strand
gagagaagcaagcauaugu

SEQ ID NO: 1451998 - RNA, 19 nt, Homo sapiens
  misc_RNA (1)...(19): siRNA sense strand
ucaagaagacccacaaaug

SEQ ID NO: 1451999 - RNA, 19 nt, Homo sapiens
  misc_RNA (1)...(19): siRNA sense strand
caacuuccguucccaucaa

SEQ ID NO: 1452000 - RNA, 19 nt, Homo sapiens
  misc_RNA (1)...(19): siRNA sense strand
ccagaugccuuugcgauug

SEQ ID NO: 1452001 - RNA, 19 nt, Homo sapiens
  misc_RNA (1)...(19): siRNA sense strand
acaauacggugauggagaa

SEQ ID NO: 1452002 - RNA, 19 nt, Homo sapiens
  misc_RNA (1)...(19): siRNA sense strand
gcacacagacugacaagag

SEQ ID NO: 1452003 - RNA, 19 nt, Homo sapiens
  misc_RNA (1)...(19): siRNA sense strand
cagcagcgaucucguaaag

SEQ ID NO: 1452004 - RNA, 19 nt, Homo sapiens
  misc_RNA (1)...(19): siRNA sense strand
aagcauauguugagaaagu

SEQ ID NO: 1452005 - RNA, 19 nt, Homo sapiens
  misc_RNA (1)...(19): siRNA sense strand
caugaaacaucugcuuuga

SEQ ID NO: 1452006 - RNA, 19 nt, Homo sapiens
  misc_RNA (1)...(19): siRNA sense strand
caacaugccggaauacaau

SEQ ID NO: 1452007 - RNA, 19 nt, Homo sapiens
  misc_RNA (1)...(19): siRNA sense strand
gaauggaaagggcuucaaa

SEQ ID NO: 1452008 - RNA, 19 nt, Homo sapiens
  misc_RNA (1)...(19): siRNA sense strand
caaauuggaaggcgagauu

SEQ ID NO: 1452009 - RNA, 19 nt, Homo sapiens
  misc_RNA (1)...(19): siRNA sense strand
accaggaacuucaggguua

SEQ ID NO: 1452010 - RNA, 19 nt, Homo sapiens
  misc_RNA (1)...(19): siRNA sense strand
caagaagacccacaaaugg

SEQ ID NO: 1452011 - RNA, 19 nt, Homo sapiens
  misc_RNA (1)...(19): siRNA sense strand
cagagaaacuggagaacuc

SEQ ID NO: 1452012 - RNA, 19 nt, Homo sapiens
  misc_RNA (1)...(19): siRNA sense strand
gaaagucuggucaagucua

SEQ ID NO: 1452013 - RNA, 19 nt, Homo sapiens
  misc_RNA (1)...(19): siRNA sense strand
gagaagcaagcauauguug

SEQ ID NO: 1452014 - RNA, 19 nt, Homo sapiens
  misc_RNA (1)...(19): siRNA sense strand
gcaugaaacaucugcuuug

SEQ ID NO: 1452015 - RNA, 19 nt, Homo sapiens
  misc_RNA (1)...(19): siRNA sense strand
ccaaagggaccgcagagaa

SEQ ID NO: 1452016 - RNA, 19 nt, Homo sapiens
  misc_RNA (1)...(19): siRNA sense strand
gaagcaagcauauguugag

SEQ ID NO: 1452017 - RNA, 19 nt, Homo sapiens
  misc_RNA (1)...(19): siRNA sense strand
gaaggaaaaggagaaauua

SEQ ID NO: 1452018 - RNA, 19 nt, Homo sapiens
  misc_RNA (1)...(19): siRNA sense strand
gaauuucggaagccuauga

SEQ ID NO: 1452019 - RNA, 19 nt, Homo sapiens
  misc_RNA (1)...(19): siRNA sense strand
cgacaagcuccacaaguuu

SEQ ID NO: 1452020 - RNA, 19 nt, Homo sapiens
  misc_RNA (1)...(19): siRNA sense strand
caaaugguggagauauuaa

SEQ ID NO: 1452021 - RNA, 19 nt, Homo sapiens
  misc_RNA (1)...(19): siRNA sense strand
uggaaagggcuucaaagua

SEQ ID NO: 1452022 - RNA, 19 nt, Homo sapiens
  misc_RNA (1)...(19): siRNA sense strand
ccacgcagccucagcagaa

SEQ ID NO: 1452023 - RNA, 19 nt, Homo sapiens
  misc_RNA (1)...(19): siRNA sense strand
caaccgagaacaugaacuu

SEQ ID NO: 1452024 - RNA, 19 nt, Homo sapiens
  misc_RNA (1)...(19): siRNA sense strand
ggagcgagcccagcaaaug

SEQ ID NO: 1452025 - RNA, 19 nt, Homo sapiens
  misc_RNA (1)...(19): siRNA sense strand
gaccagcccauccuacaaa

SEQ ID NO: 1452026 - RNA, 19 nt, Homo sapiens
  misc_RNA (1)...(19): siRNA sense strand
gagcggagacugcggacuu

SEQ ID NO: 1452027 - RNA, 19 nt, Homo sapiens
  misc_RNA (1)...(19): siRNA sense strand
ccaaagcacagucgcaguu

SEQ ID NO: 1452028 - RNA, 19 nt, Homo sapiens
  misc_RNA (1)...(19): siRNA sense strand
ggaaggcgagauuagaaga

SEQ ID NO: 1452029 - RNA, 19 nt, Homo sapiens
  misc_RNA (1)...(19): siRNA sense strand
caaaugauguccccaguca

SEQ ID NO: 1452030 - RNA, 19 nt, Homo sapiens
  misc_RNA (1)...(19): siRNA sense strand
aaugagagguuccgaggau

SEQ ID NO: 1452031 - RNA, 19 nt, Homo sapiens
  misc_RNA (1)...(19): siRNA sense strand
ggacgaggcgcugaaggaa

SEQ ID NO: 1452032 - RNA, 19 nt, Homo sapiens
  misc_RNA (1)...(19): siRNA sense strand
ccagucagcacgccaagaa

SEQ ID NO: 1452033 - RNA, 19 nt, Homo sapiens
  misc_RNA (1)...(19): siRNA sense strand
agaagacuccaccuacuuu

SEQ ID NO: 1452034 - RNA, 19 nt, Homo sapiens
  misc_RNA (1)...(19): siRNA sense strand
gagcaccauccgacacuuu

SEQ ID NO: 1452035 - RNA, 19 nt, Homo sapiens
  misc_RNA (1)...(19): siRNA sense strand
ugacaaagugggagcagaa

SEQ ID NO: 1452036 - RNA, 19 nt, Homo sapiens
  misc_RNA (1)...(19): siRNA sense strand
gagaauuucggaagccuau

SEQ ID NO: 1452037 - RNA, 19 nt, Homo sapiens
  misc_RNA (1)...(19): siRNA sense strand
gacaagcuccacaaguuug

SEQ ID NO: 1452038 - RNA, 19 nt, Homo sapiens
  misc_RNA (1)...(19): siRNA sense strand
gacaaggccaugagaaaca

SEQ ID NO: 1452039 - RNA, 19 nt, Homo sapiens
  misc_RNA (1)...(19): siRNA sense strand
ugcggcagcuggaacagua

SEQ ID NO: 1452040 - RNA, 19 nt, Homo sapiens
  misc_RNA (1)...(19): siRNA sense strand
ggaauacgaagggcaugaa

SEQ ID NO: 1452041 - RNA, 19 nt, Homo sapiens
  misc_RNA (1)...(19): siRNA sense strand
aaaccucacucaagaagac

SEQ ID NO: 1452042 - RNA, 19 nt, Homo sapiens
  misc_RNA (1)...(19): siRNA sense strand
cggaaaaccucacucaaga

SEQ ID NO: 1452043 - RNA, 19 nt, Homo sapiens
  misc_RNA (1)...(19): siRNA sense strand
ggaccagcccauccuacaa

SEQ ID NO: 1452044 - RNA, 19 nt, Homo sapiens
  misc_RNA (1)...(19): siRNA sense strand
gagagggacaccacgauca

SEQ ID NO: 1452045 - RNA, 19 nt, Homo sapiens
  misc_RNA (1)...(19): siRNA sense strand
caagcuggaagaggaguua

SEQ ID NO: 1452046 - RNA, 19 nt, Homo sapiens
  misc_RNA (1)...(19): siRNA sense strand
ggaaaaggagaaauuagaa

SEQ ID NO: 1452047 - RNA, 19 nt, Homo sapiens
  misc_RNA (1)...(19): siRNA sense strand
caugagaaacaaauuggaa

SEQ ID NO: 1452048 - RNA, 19 nt, Homo sapiens
  misc_RNA (1)...(19): siRNA sense strand
ggacaaggccaugagaaac

SEQ ID NO: 1452049 - RNA, 19 nt, Homo sapiens
  misc_RNA (1)...(19): siRNA sense strand
cgccagaccucucuuacca

SEQ ID NO: 1452050 - RNA, 19 nt, Homo sapiens
  misc_RNA (1)...(19): siRNA sense strand
gaucucagagguggaaaug

SEQ ID NO: 1452051 - RNA, 19 nt, Homo sapiens
  misc_RNA (1)...(19): siRNA sense strand
ccaacaugccggaauacaa

SEQ ID NO: 1452052 - RNA, 19 nt, Homo sapiens
  misc_RNA (1)...(19): siRNA sense strand
ggagacacaucgagauccu

SEQ ID NO: 1452053 - RNA, 19 nt, Homo sapiens
  misc_RNA (1)...(19): siRNA sense strand
aaggagaaauuagaaaugg

SEQ ID NO: 1452054 - RNA, 19 nt, Homo sapiens
  misc_RNA (1)...(19): siRNA sense strand
ggcaugaaacaucugcuuu

SEQ ID NO: 1452055 - RNA, 19 nt, Homo sapiens
  misc_RNA (1)...(19): siRNA sense strand
ccucagcacuguccuccau

SEQ ID NO: 1452056 - RNA, 19 nt, Homo sapiens
  misc_RNA (1)...(19): siRNA sense strand
uacgagagaagcaagcaua

SEQ ID NO: 1452057 - RNA, 19 nt, Homo sapiens
  misc_RNA (1)...(19): siRNA sense strand
agucagaagucccgaacug

SEQ ID NO: 1452058 - RNA, 19 nt, Homo sapiens
  misc_RNA (1)...(19): siRNA sense strand
gaaacacccagcggccaaa

SEQ ID NO: 1452059 - RNA, 19 nt, Homo sapiens
  misc_RNA (1)...(19): siRNA sense strand
ccgcuccguuccauccaua

SEQ ID NO: 1452060 - RNA, 19 nt, Homo sapiens
  misc_RNA (1)...(19): siRNA sense strand
cagaugccuuugcgauugu

SEQ ID NO: 1452061 - RNA, 19 nt, Homo sapiens
  misc_RNA (1)...(19): siRNA sense strand
cuacgacaaugccgacaag

SEQ ID NO: 1452062 - RNA, 19 nt, Homo sapiens
  misc_RNA (1)...(19): siRNA sense strand
gaaggagcaccaugagcau

SEQ ID NO: 1452063 - RNA, 19 nt, Homo sapiens
  misc_RNA (1)...(19): siRNA sense strand
aagaugcuaugauuaaggu

SEQ ID NO: 1452064 - RNA, 19 nt, Homo sapiens
  misc_RNA (1)...(19): siRNA sense strand
agagcuggaugcacugaga

SEQ ID NO: 1452065 - RNA, 19 nt, Homo sapiens
  misc_RNA (1)...(19): siRNA sense strand
acaaggccaugagaaacaa

SEQ ID NO: 1452066 - RNA, 19 nt, Homo sapiens
  misc_RNA (1)...(19): siRNA sense strand
gaggcaaccaguagcauca

SEQ ID NO: 1452067 - RNA, 19 nt, Homo sapiens
  misc_RNA (1)...(19): siRNA sense strand
uagaagacuccaccuacuu

SEQ ID NO: 1452068 - RNA, 19 nt, Homo sapiens
  misc_RNA (1)...(19): siRNA sense strand
ccacccaccucagcacugu

SEQ ID NO: 1452069 - RNA, 19 nt, Homo sapiens
  misc_RNA (1)...(19): siRNA sense strand
ccuccgagaucgacuagag

SEQ ID NO: 1452070 - RNA, 19 nt, Homo sapiens
  misc_RNA (1)...(19): siRNA sense strand
agcaaaugguggagauauu

SEQ ID NO: 1452071 - RNA, 19 nt, Homo sapiens
  misc_RNA (1)...(19): siRNA sense strand
gagcgagcccagcaaaugg

SEQ ID NO: 1452072 - RNA, 19 nt, Homo sapiens
  misc_RNA (1)...(19): siRNA sense strand
auacggugauggagaaaca

SEQ ID NO: 1452073 - RNA, 19 nt, Homo sapiens
  misc_RNA (1)...(19): siRNA sense strand
cagcagaaacauggaaaug

SEQ ID NO: 1452074 - RNA, 19 nt, Homo sapiens
  misc_RNA (1)...(19): siRNA sense strand
ugagaacccagcagaaaca

SEQ ID NO: 1452075 - RNA, 19 nt, Homo sapiens
  misc_RNA (1)...(19): siRNA sense strand
cuagaagacuccaccuacu

SEQ ID NO: 1452076 - RNA, 19 nt, Homo sapiens
  misc_RNA (1)...(19): siRNA sense strand
caagaccaagcaaaugaug

SEQ ID NO: 1452077 - RNA, 19 nt, Homo sapiens
  misc_RNA (1)...(19): siRNA sense strand
gcucagcgagagaaucaug

SEQ ID NO: 1452078 - RNA, 19 nt, Homo sapiens
  misc_RNA (1)...(19): siRNA sense strand
augaaagucuggucaaguc

SEQ ID NO: 1452079 - RNA, 19 nt, Homo sapiens
  misc_RNA (1)...(19): siRNA sense strand
gcagagaaacuggagaacu

SEQ ID NO: 1452080 - RNA, 19 nt, Homo sapiens
  misc_RNA (1)...(19): siRNA sense strand
ggccaugagaaacaaauug

SEQ ID NO: 1452081 - RNA, 19 nt, Homo sapiens
  misc_RNA (1)...(19): siRNA sense strand
aaacugagagccaucauaa

SEQ ID NO: 1452082 - RNA, 19 nt, Homo sapiens
  misc_RNA (1)...(19): siRNA sense strand
gcaaugacgaggagcuuaa

SEQ ID NO: 1452083 - RNA, 19 nt, Homo sapiens
  misc_RNA (1)...(19): siRNA sense strand
acgaggagcuuaauaaacu

SEQ ID NO: 1452084 - RNA, 19 nt, Homo sapiens
  misc_RNA (1)...(19): siRNA sense strand
caagaagacccgcaucauc

SEQ ID NO: 1452085 - RNA, 19 nt, Homo sapiens
  misc_RNA (1)...(19): siRNA sense strand
ugacgaggagcuuaauaaa

SEQ ID NO: 1452086 - RNA, 19 nt, Homo sapiens
  misc_RNA (1)...(19): siRNA sense strand
ggucuucucgugcagguuu

SEQ ID NO: 1452087 - RNA, 19 nt, Homo sapiens
  misc_RNA (1)...(19): siRNA sense strand
caaacaaggcgguaaagcu

SEQ ID NO: 1452088 - RNA, 19 nt, Homo sapiens
  misc_RNA (1)...(19): siRNA sense strand
guaccugaccgccgagauc

SEQ ID NO: 1452089 - RNA, 19 nt, Homo sapiens
  misc_RNA (1)...(19): siRNA sense strand
cggcaaacaaggcgguaaa

SEQ ID NO: 1452090 - RNA, 19 nt, Homo sapiens
  misc_RNA (1)...(19): siRNA sense strand
gacgaggagcuuaauaaac

SEQ ID NO: 1452091 - RNA, 19 nt, Homo sapiens
  misc_RNA (1)...(19): siRNA sense strand
gcggugcugcugccuaaga

SEQ ID NO: 1452092 - RNA, 19 nt, Homo sapiens
  misc_RNA (1)...(19): siRNA sense strand
augacgaggagcuuaauaa

SEQ ID NO: 1452093 - RNA, 19 nt, Homo sapiens
  misc_RNA (1)...(19): siRNA sense strand
uaaggccaagggaaaguga

SEQ ID NO: 1452094 - RNA, 19 nt, Homo sapiens
  misc_RNA (1)...(19): siRNA sense strand
gggcaaagcuuuagaagua

SEQ ID NO: 1452095 - RNA, 19 nt, Homo sapiens
  misc_RNA (1)...(19): siRNA sense strand
gggcgaagcuuuaaagaua

SEQ ID NO: 1452096 - RNA, 19 nt, Homo sapiens
  misc_RNA (1)...(19): siRNA sense strand
gaacucagaucucaucaaa

SEQ ID NO: 1452097 - RNA, 19 nt, Homo sapiens
  misc_RNA (1)...(19): siRNA sense strand
ggacgaagcuuuugugaua

SEQ ID NO: 1452098 - RNA, 19 nt, Homo sapiens
  misc_RNA (1)...(19): siRNA sense strand
ggaagaagcccuacauuug

SEQ ID NO: 1452099 - RNA, 19 nt, Homo sapiens
  misc_RNA (1)...(19): siRNA sense strand
gggcgaggcuuuagucaua

SEQ ID NO: 1452100 - RNA, 19 nt, Homo sapiens
  misc_RNA (1)...(19): siRNA sense strand
gcagaggaaucuauacaaa

SEQ ID NO: 1452101 - RNA, 19 nt, Homo sapiens
  misc_RNA (1)...(19): siRNA sense strand
ggaaaucacuccuccuugu

SEQ ID NO: 1452102 - RNA, 19 nt, Homo sapiens
  misc_RNA (1)...(19): siRNA sense strand
ggaaaucacuccuccuugu

SEQ ID NO: 1452103 - RNA, 19 nt, Homo sapiens
  misc_RNA (1)...(19): siRNA sense strand
gaagucaaaucucaucaga

SEQ ID NO: 1452104 - RNA, 19 nt, Homo sapiens
  misc_RNA (1)...(19): siRNA sense strand
gcaaucaacuguagagagu

SEQ ID NO: 1452105 - RNA, 19 nt, Homo sapiens
  misc_RNA (1)...(19): siRNA sense strand
uuagaaaccuugagauuug

SEQ ID NO: 1452106 - RNA, 19 nt, Homo sapiens
  misc_RNA (1)...(19): siRNA sense strand
caaaugagaagccuuauau

SEQ ID NO: 1452107 - RNA, 19 nt, Homo sapiens
  misc_RNA (1)...(19): siRNA sense strand
ggagaagcauuauguuugu

SEQ ID NO: 1452108 - RNA, 19 nt, Homo sapiens
  misc_RNA (1)...(19): siRNA sense strand
ccagaaaucuacacuuguu

SEQ ID NO: 1452109 - RNA, 19 nt, Homo sapiens
  misc_RNA (1)...(19): siRNA sense strand
gaagagaagccuuauuugu

SEQ ID NO: 1452110 - RNA, 19 nt, Homo sapiens
  misc_RNA (1)...(19): siRNA sense strand
gaucaacccucaucagaca

SEQ ID NO: 1452111 - RNA, 19 nt, Homo sapiens
  misc_RNA (1)...(19): siRNA sense strand
gacaaaggcuugaaggaau

SEQ ID NO: 1452112 - RNA, 19 nt, Homo sapiens
  misc_RNA (1)...(19): siRNA sense strand
cauguaagcuguugguuug

SEQ ID NO: 1452113 - RNA, 19 nt, Homo sapiens
  misc_RNA (1)...(19): siRNA sense strand
gaugagaagccuuauguuu

SEQ ID NO: 1452114 - RNA, 19 nt, Homo sapiens
  misc_RNA (1)...(19): siRNA sense strand
ggacacacuuggaugagaa

SEQ ID NO: 1452115 - RNA, 19 nt, Homo sapiens
  misc_RNA (1)...(19): siRNA sense strand
cagaagagaagccuuauuu

SEQ ID NO: 1452116 - RNA, 19 nt, Homo sapiens
  misc_RNA (1)...(19): siRNA sense strand
acaggaaucuucucucauu

SEQ ID NO: 1452117 - RNA, 19 nt, Homo sapiens
  misc_RNA (1)...(19): siRNA sense strand
caagucaacccucaucaua

SEQ ID NO: 1452118 - RNA, 19 nt, Homo sapiens
  misc_RNA (1)...(19): siRNA sense strand
caaauagugguaccaguua

SEQ ID NO: 1452119 - RNA, 19 nt, Homo sapiens
  misc_RNA (1)...(19): siRNA sense strand
ggagggaaaggcccaaaua

SEQ ID NO: 1452120 - RNA, 19 nt, Homo sapiens
  misc_RNA (1)...(19): siRNA sense strand
guaaguccauccucaauag

SEQ ID NO: 1452121 - RNA, 19 nt, Homo sapiens
  misc_RNA (1)...(19): siRNA sense strand
gggaagaagcccuacauuu

SEQ ID NO: 1452122 - RNA, 19 nt, Homo sapiens
  misc_RNA (1)...(19): siRNA sense strand
ggagaagccuuauguuugc

SEQ ID NO: 1452123 - RNA, 19 nt, Homo sapiens
  misc_RNA (1)...(19): siRNA sense strand
gaggagaagcccuauguuu

SEQ ID NO: 1452124 - RNA, 19 nt, Homo sapiens
  misc_RNA (1)...(19): siRNA sense strand
gggagaagccuuauguuug

SEQ ID NO: 1452125 - RNA, 19 nt, Homo sapiens
  misc_RNA (1)...(19): siRNA sense strand
gcagcaguauucccaugua

SEQ ID NO: 1452126 - RNA, 19 nt, Homo sapiens
  misc_RNA (1)...(19): siRNA sense strand
agaggaaucuauacaaaga

SEQ ID NO: 1452127 - RNA, 19 nt, Homo sapiens
  misc_RNA (1)...(19): siRNA sense strand
gagaacacauucagaagag

SEQ ID NO: 1452128 - RNA, 19 nt, Homo sapiens
  misc_RNA (1)...(19): siRNA sense strand
caagucaacccucauugua

SEQ ID NO: 1452129 - RNA, 19 nt, Homo sapiens
  misc_RNA (1)...(19): siRNA sense strand
gggaaaggcccaaauagug

SEQ ID NO: 1452130 - RNA, 19 nt, Homo sapiens
  misc_RNA (1)...(19): siRNA sense strand
uaagucaaaucucaucaga

SEQ ID NO: 1452131 - RNA, 19 nt, Homo sapiens
  misc_RNA (1)...(19): siRNA sense strand
ggagagaagccuuaugugu

SEQ ID NO: 1452132 - RNA, 19 nt, Homo sapiens
  misc_RNA (1)...(19): siRNA sense strand
gauguugccuuauccuuca

SEQ ID NO: 1452133 - RNA, 19 nt, Homo sapiens
  misc_RNA (1)...(19): siRNA sense strand
ggaauuagaaaccuugaga

SEQ ID NO: 1452134 - RNA, 19 nt, Homo sapiens
  misc_RNA (1)...(19): siRNA sense strand
aagugaugcuggagaauua

SEQ ID NO: 1452135 - RNA, 19 nt, Homo sapiens
  misc_RNA (1)...(19): siRNA sense strand
caucagacaccaucguaua

SEQ ID NO: 1452136 - RNA, 19 nt, Homo sapiens
  misc_RNA (1)...(19): siRNA sense strand
gggagaagcauuauguuug

SEQ ID NO: 1452137 - RNA, 19 nt, Homo sapiens
  misc_RNA (1)...(19): siRNA sense strand
gaucaauacugggaagaga

SEQ ID NO: 1452138 - RNA, 19 nt, Homo sapiens
  misc_RNA (1)...(19): siRNA sense strand
acucagaucucaucaaaca

SEQ ID NO: 1452139 - RNA, 19 nt, Homo sapiens
  misc_RNA (1)...(19): siRNA sense strand
gaagugaugcuggagaauu

SEQ ID NO: 1452140 - RNA, 19 nt, Homo sapiens
  misc_RNA (1)...(19): siRNA sense strand
gaacacauucagaagagaa

SEQ ID NO: 1452141 - RNA, 19 nt, Homo sapiens
  misc_RNA (1)...(19): siRNA sense strand
gagaagcauuauguuugua

SEQ ID NO: 1452142 - RNA, 19 nt, Homo sapiens
  misc_RNA (1)...(19): siRNA sense strand
acaaaggcuugaaggaauu

SEQ ID NO: 1452143 - RNA, 19 nt, Homo sapiens
  misc_RNA (1)...(19): siRNA sense strand
agagaagccuuaugugugu

SEQ ID NO: 1452144 - RNA, 19 nt, Homo sapiens
  misc_RNA (1)...(19): siRNA sense strand
gaagaagcccuacauuugc

SEQ ID NO: 1452145 - RNA, 19 nt, Homo sapiens
  misc_RNA (1)...(19): siRNA sense strand
ccagagaacacauucagaa

SEQ ID NO: 1452146 - RNA, 19 nt, Homo sapiens
  misc_RNA (1)...(19): siRNA sense strand
gaaguaaguccauccucaa

SEQ ID NO: 1452147 - RNA, 19 nt, Homo sapiens
  misc_RNA (1)...(19): siRNA sense strand
agucaaaucucaucagaca

SEQ ID NO: 1452148 - RNA, 19 nt, Homo sapiens
  misc_RNA (1)...(19): siRNA sense strand
agucaaaucucaucagaca

SEQ ID NO: 1452149 - RNA, 19 nt, Homo sapiens
  misc_RNA (1)...(19): siRNA sense strand
uuacaggaaucuucucuca

SEQ ID NO: 1452150 - RNA, 19 nt, Homo sapiens
  misc_RNA (1)...(19): siRNA sense strand
agucauaagucaaaucuca

SEQ ID NO: 1452151 - RNA, 19 nt, Homo sapiens
  misc_RNA (1)...(19): siRNA sense strand
guaagcuguugguuugaaa

SEQ ID NO: 1452152 - RNA, 19 nt, Homo sapiens
  misc_RNA (1)...(19): siRNA sense strand
ccaaauagugguaccaguu

SEQ ID NO: 1452153 - RNA, 19 nt, Homo sapiens
  misc_RNA (1)...(19): siRNA sense strand
gauugugggcgaagcuuua

SEQ ID NO: 1452154 - RNA, 19 nt, Homo sapiens
  misc_RNA (1)...(19): siRNA sense strand
uaaccuggaaucaaacuuu

SEQ ID NO: 1452155 - RNA, 19 nt, Homo sapiens
  misc_RNA (1)...(19): siRNA sense strand
cagcaguauucccauguaa

SEQ ID NO: 1452156 - RNA, 19 nt, Homo sapiens
  misc_RNA (1)...(19): siRNA sense strand
ggaugugacugugaucuuc

SEQ ID NO: 1452157 - RNA, 19 nt, Homo sapiens
  misc_RNA (1)...(19): siRNA sense strand
accauaaccuggaaucaaa

SEQ ID NO: 1452158 - RNA, 19 nt, Homo sapiens
  misc_RNA (1)...(19): siRNA sense strand
ugagaagccuuauauuugc

SEQ ID NO: 1452159 - RNA, 19 nt, Homo sapiens
  misc_RNA (1)...(19): siRNA sense strand
gcaaagcuuuagaaguaag

SEQ ID NO: 1452160 - RNA, 19 nt, Homo sapiens
  misc_RNA (1)...(19): siRNA sense strand
aaccuggaaucaaacuuua

SEQ ID NO: 1452161 - RNA, 19 nt, Homo sapiens
  misc_RNA (1)...(19): siRNA sense strand
gcgaagcuuuaaagauaga

SEQ ID NO: 1452162 - RNA, 19 nt, Homo sapiens
  misc_RNA (1)...(19): siRNA sense strand
ggcaaagcuuuagaaguaa

SEQ ID NO: 1452163 - RNA, 19 nt, Homo sapiens
  misc_RNA (1)...(19): siRNA sense strand
caacauguacuucagaucu

SEQ ID NO: 1452164 - RNA, 19 nt, Homo sapiens
  misc_RNA (1)...(19): siRNA sense strand
gagaauuacaggaaucuuc

SEQ ID NO: 1452165 - RNA, 19 nt, Homo sapiens
  misc_RNA (1)...(19): siRNA sense strand
ugagaagccuuauguuugc

SEQ ID NO: 1452166 - RNA, 19 nt, Homo sapiens
  misc_RNA (1)...(19): siRNA sense strand
caacauggugguagaaaca

SEQ ID NO: 1452167 - RNA, 19 nt, Homo sapiens
  misc_RNA (1)...(19): siRNA sense strand
guuccucagucaacaugua

SEQ ID NO: 1452168 - RNA, 19 nt, Homo sapiens
  misc_RNA (1)...(19): siRNA sense strand
gagcagaggaaucuauaca

SEQ ID NO: 1452169 - RNA, 19 nt, Homo sapiens
  misc_RNA (1)...(19): siRNA sense strand
ucaaaugagaagccuuaua

SEQ ID NO: 1452170 - RNA, 19 nt, Homo sapiens
  misc_RNA (1)...(19): siRNA sense strand
gaaccaaagccagaaaucu

SEQ ID NO: 1452171 - RNA, 19 nt, Homo sapiens
  misc_RNA (1)...(19): siRNA sense strand
gaaaauguagagacuauga

SEQ ID NO: 1452172 - RNA, 19 nt, Homo sapiens
  misc_RNA (1)...(19): siRNA sense strand
ggagaagcccuauguuugc

SEQ ID NO: 1452173 - RNA, 19 nt, Homo sapiens
  misc_RNA (1)...(19): siRNA sense strand
aagagaagccuuauuugug

SEQ ID NO: 1452174 - RNA, 19 nt, Homo sapiens
  misc_RNA (1)...(19): siRNA sense strand
gaccauaaccuggaaucaa

SEQ ID NO: 1452175 - RNA, 19 nt, Homo sapiens
  misc_RNA (1)...(19): siRNA sense strand
aaucaacuguagagaguau

SEQ ID NO: 1452176 - RNA, 19 nt, Homo sapiens
  misc_RNA (1)...(19): siRNA sense strand
caaagacagucagcaaguc

SEQ ID NO: 1452177 - RNA, 19 nt, Homo sapiens
  misc_RNA (1)...(19): siRNA sense strand
agccagaaaucuacacuug

SEQ ID NO: 1452178 - RNA, 19 nt, Homo sapiens
  misc_RNA (1)...(19): siRNA sense strand
ucacagaagcagaauggaa

SEQ ID NO: 1452179 - RNA, 19 nt, Homo sapiens
  misc_RNA (1)...(19): siRNA sense strand
ggaaugugggcgaggcuuu

SEQ ID NO: 1452180 - RNA, 19 nt, Homo sapiens
  misc_RNA (1)...(19): siRNA sense strand
augaagaaauugacccaaa

SEQ ID NO: 1452181 - RNA, 19 nt, Homo sapiens
  misc_RNA (1)...(19): siRNA sense strand
aagaagugaugcuggagaa

SEQ ID NO: 1452182 - RNA, 19 nt, Homo sapiens
  misc_RNA (1)...(19): siRNA sense strand
cagagcagaggaaucuaua

SEQ ID NO: 1452183 - RNA, 19 nt, Homo sapiens
  misc_RNA (1)...(19): siRNA sense strand
gaguguggccgaggcuuua

SEQ ID NO: 1452184 - RNA, 19 nt, Homo sapiens
  misc_RNA (1)...(19): siRNA sense strand
gagaagccuuauauuugca

SEQ ID NO: 1452185 - RNA, 19 nt, Homo sapiens
  misc_RNA (1)...(19): siRNA sense strand
agaggacgcacucaaauga

SEQ ID NO: 1452186 - RNA, 19 nt, Homo sapiens
  misc_RNA (1)...(19): siRNA sense strand
gaguguggccgaggcuuua

SEQ ID NO: 1452187 - RNA, 19 nt, Homo sapiens
  misc_RNA (1)...(19): siRNA sense strand
ggugagaaacccuaugugu

SEQ ID NO: 1452188 - RNA, 19 nt, Homo sapiens
  misc_RNA (1)...(19): siRNA sense strand
gagaagcccuauguuugca

SEQ ID NO: 1452189 - RNA, 19 nt, Homo sapiens
  misc_RNA (1)...(19): siRNA sense strand
agacaaaggcuugaaggaa

SEQ ID NO: 1452190 - RNA, 19 nt, Homo sapiens
  misc_RNA (1)...(19): siRNA sense strand
gcaacauggugguagaaac

SEQ ID NO: 1452191 - RNA, 19 nt, Homo sapiens
  misc_RNA (1)...(19): siRNA sense strand
aaccaaagccagaaaucua

SEQ ID NO: 1452192 - RNA, 19 nt, Homo sapiens
  misc_RNA (1)...(19): siRNA sense strand
gaaucuauacaaagaagug

SEQ ID NO: 1452193 - RNA, 19 nt, Homo sapiens
  misc_RNA (1)...(19): siRNA sense strand
augagaagccuuauauuug

SEQ ID NO: 1452194 - RNA, 19 nt, Homo sapiens
  misc_RNA (1)...(19): siRNA sense strand
aagaaacacugaagcaaua

SEQ ID NO: 1452195 - RNA, 19 nt, Homo sapiens
  misc_RNA (1)...(19): siRNA sense strand
gaagaacgguggcgaucau

SEQ ID NO: 1452196 - RNA, 19 nt, Homo sapiens
  misc_RNA (1)...(19): siRNA sense strand
gcuaugaaguggacuggaa

SEQ ID NO: 1452197 - RNA, 19 nt, Homo sapiens
  misc_RNA (1)...(19): siRNA sense strand
gaacgguggcgaucaugua

SEQ ID NO: 1452198 - RNA, 19 nt, Homo sapiens
  misc_RNA (1)...(19): siRNA sense strand
gggaaucaccauugcaaua

SEQ ID NO: 1452199 - RNA, 19 nt, Homo sapiens
  misc_RNA (1)...(19): siRNA sense strand
gaaguugccuccugcugau

SEQ ID NO: 1452200 - RNA, 19 nt, Homo sapiens
  misc_RNA (1)...(19): siRNA sense strand
cggaggagcugaacuauac

SEQ ID NO: 1452201 - RNA, 19 nt, Homo sapiens
  misc_RNA (1)...(19): siRNA sense strand
gaccugcacugguuaaaca

SEQ ID NO: 1452202 - RNA, 19 nt, Homo sapiens
  misc_RNA (1)...(19): siRNA sense strand
gcucuuccaucgucacuga

SEQ ID NO: 1452203 - RNA, 19 nt, Homo sapiens
  misc_RNA (1)...(19): siRNA sense strand
gcaagccuuccucaucuua

SEQ ID NO: 1452204 - RNA, 19 nt, Homo sapiens
  misc_RNA (1)...(19): siRNA sense strand
gaaaacacgauuuaccuua

SEQ ID NO: 1452205 - RNA, 19 nt, Homo sapiens
  misc_RNA (1)...(19): siRNA sense strand
ccacaucgcucaaaagaau

SEQ ID NO: 1452206 - RNA, 19 nt, Homo sapiens
  misc_RNA (1)...(19): siRNA sense strand
caccugaccugcacugguu

SEQ ID NO: 1452207 - RNA, 19 nt, Homo sapiens
  misc_RNA (1)...(19): siRNA sense strand
ggagugacgcuacuucuuc

SEQ ID NO: 1452208 - RNA, 19 nt, Homo sapiens
  misc_RNA (1)...(19): siRNA sense strand
aagcugagcccuucauuug

SEQ ID NO: 1452209 - RNA, 19 nt, Homo sapiens
  misc_RNA (1)...(19): siRNA sense strand
gggaaccucuaccuggauu

SEQ ID NO: 1452210 - RNA, 19 nt, Homo sapiens
  misc_RNA (1)...(19): siRNA sense strand
ccgagaaccuugggagaaa

SEQ ID NO: 1452211 - RNA, 19 nt, Homo sapiens
  misc_RNA (1)...(19): siRNA sense strand
gaaucaccauugcaauaca

SEQ ID NO: 1452212 - RNA, 19 nt, Homo sapiens
  misc_RNA (1)...(19): siRNA sense strand
ccaaagaaaacacgauuua

SEQ ID NO: 1452213 - RNA, 19 nt, Homo sapiens
  misc_RNA (1)...(19): siRNA sense strand
gcacugguuaaacaucaua

SEQ ID NO: 1452214 - RNA, 19 nt, Homo sapiens
  misc_RNA (1)...(19): siRNA sense strand
gaaacacugaagcaauaaa

SEQ ID NO: 1452215 - RNA, 19 nt, Homo sapiens
  misc_RNA (1)...(19): siRNA sense strand
gcugagcccuucauuugca

SEQ ID NO: 1452216 - RNA, 19 nt, Homo sapiens
  misc_RNA (1)...(19): siRNA sense strand
gcuacacccuaaucacaga

SEQ ID NO: 1452217 - RNA, 19 nt, Homo sapiens
  misc_RNA (1)...(19): siRNA sense strand
gaagaggaugucaccgaaa

SEQ ID NO: 1452218 - RNA, 19 nt, Homo sapiens
  misc_RNA (1)...(19): siRNA sense strand
gcggaggagcugaacuaua

SEQ ID NO: 1452219 - RNA, 19 nt, Homo sapiens
  misc_RNA (1)...(19): siRNA sense strand
aaagaaacacugaagcaau

SEQ ID NO: 1452220 - RNA, 19 nt, Homo sapiens
  misc_RNA (1)...(19): siRNA sense strand
ccuggaagcuggaccucuu

SEQ ID NO: 1452221 - RNA, 19 nt, Homo sapiens
  misc_RNA (1)...(19): siRNA sense strand
aagcaagccuuccucaucu

SEQ ID NO: 1452222 - RNA, 19 nt, Homo sapiens
  misc_RNA (1)...(19): siRNA sense strand
caggauggcuggguguaug

SEQ ID NO: 1452223 - RNA, 19 nt, Homo sapiens
  misc_RNA (1)...(19): siRNA sense strand
gaaaagcaaagcccaaaga

SEQ ID NO: 1452224 - RNA, 19 nt, Homo sapiens
  misc_RNA (1)...(19): siRNA sense strand
ggaaucaccauugcaauac

SEQ ID NO: 1452225 - RNA, 19 nt, Homo sapiens
  misc_RNA (1)...(19): siRNA sense strand
gaagcaauaaagauaaugg

SEQ ID NO: 1452226 - RNA, 19 nt, Homo sapiens
  misc_RNA (1)...(19): siRNA sense strand
aaacacgauuuaccuuaag

SEQ ID NO: 1452227 - RNA, 19 nt, Homo sapiens
  misc_RNA (1)...(19): siRNA sense strand
ccuaaucacagaauuuguu

SEQ ID NO: 1452228 - RNA, 19 nt, Homo sapiens
  misc_RNA (1)...(19): siRNA sense strand
aaagcaaagcccaaagaaa

SEQ ID NO: 1452229 - RNA, 19 nt, Homo sapiens
  misc_RNA (1)...(19): siRNA sense strand
uaaagauaauggaccacau

SEQ ID NO: 1452230 - RNA, 19 nt, Homo sapiens
  misc_RNA (1)...(19): siRNA sense strand
cacugaagcaauaaagaua

SEQ ID NO: 1452231 - RNA, 19 nt, Homo sapiens
  misc_RNA (1)...(19): siRNA sense strand
cuaccuggauuuccuuuac

SEQ ID NO: 1452232 - RNA, 19 nt, Homo sapiens
  misc_RNA (1)...(19): siRNA sense strand
guugccuccugcugauuua

SEQ ID NO: 1452233 - RNA, 19 nt, Homo sapiens
  misc_RNA (1)...(19): siRNA sense strand
cuacuuugcagacagguuu

SEQ ID NO: 1452234 - RNA, 19 nt, Homo sapiens
  misc_RNA (1)...(19): siRNA sense strand
aagcaaagcccaaagaaaa

SEQ ID NO: 1452235 - RNA, 19 nt, Homo sapiens
  misc_RNA (1)...(19): siRNA sense strand
gaaccucuaccuggauuuc

SEQ ID NO: 1452236 - RNA, 19 nt, Homo sapiens
  misc_RNA (1)...(19): siRNA sense strand
ggugaaugcugagcuguac

SEQ ID NO: 1452237 - RNA, 19 nt, Homo sapiens
  misc_RNA (1)...(19): siRNA sense strand
ggcucgggcuccagaagaa

SEQ ID NO: 1452238 - RNA, 19 nt, Homo sapiens
  misc_RNA (1)...(19): siRNA sense strand
ucauagcccucaucaccau

SEQ ID NO: 1452239 - RNA, 19 nt, Homo sapiens
  misc_RNA (1)...(19): siRNA sense strand
ucucgguguuggcuacuuu

SEQ ID NO: 1452240 - RNA, 19 nt, Homo sapiens
  misc_RNA (1)...(19): siRNA sense strand
uuacuccgcucuggucgaa

SEQ ID NO: 1452241 - RNA, 19 nt, Homo sapiens
  misc_RNA (1)...(19): siRNA sense strand
aaucaccauugcaauacaa

SEQ ID NO: 1452242 - RNA, 19 nt, Homo sapiens
  misc_RNA (1)...(19): siRNA sense strand
aaagcugagcccuucauuu

SEQ ID NO: 1452243 - RNA, 19 nt, Homo sapiens
  misc_RNA (1)...(19): siRNA sense strand
cagccugccucgucaugau

SEQ ID NO: 1452244 - RNA, 19 nt, Homo sapiens
  misc_RNA (1)...(19): siRNA sense strand
cggacucugugcucuauca

SEQ ID NO: 1452245 - RNA, 19 nt, Homo sapiens
  misc_RNA (1)...(19): siRNA sense strand
acacugaagcaauaaagau

SEQ ID NO: 1452246 - RNA, 19 nt, Homo sapiens
  misc_RNA (1)...(19): siRNA sense strand
caccguggaugacauucug

SEQ ID NO: 1452247 - RNA, 19 nt, Homo sapiens
  misc_RNA (1)...(19): siRNA sense strand
cagacagguuuggccguaa

SEQ ID NO: 1452248 - RNA, 19 nt, Homo sapiens
  misc_RNA (1)...(19): siRNA sense strand
ugccagagaccaugaagga

SEQ ID NO: 1452249 - RNA, 19 nt, Homo sapiens
  misc_RNA (1)...(19): siRNA sense strand
cgguggcuguuaucacaaa

SEQ ID NO: 1452250 - RNA, 19 nt, Homo sapiens
  misc_RNA (1)...(19): siRNA sense strand
caucgucacugaguucaac

SEQ ID NO: 1452251 - RNA, 19 nt, Homo sapiens
  misc_RNA (1)...(19): siRNA sense strand
gccgagaaccuugggagaa

SEQ ID NO: 1452252 - RNA, 19 nt, Homo sapiens
  misc_RNA (1)...(19): siRNA sense strand
gggagugacgcuacuucuu

SEQ ID NO: 1452253 - RNA, 19 nt, Homo sapiens
  misc_RNA (1)...(19): siRNA sense strand
ucaaaagaaugggaaguug

SEQ ID NO: 1452254 - RNA, 19 nt, Homo sapiens
  misc_RNA (1)...(19): siRNA sense strand
ggaagcuggaccucuuuca

SEQ ID NO: 1452255 - RNA, 19 nt, Homo sapiens
  misc_RNA (1)...(19): siRNA sense strand
cacggacucugugcucuau

SEQ ID NO: 1452256 - RNA, 19 nt, Homo sapiens
  misc_RNA (1)...(19): siRNA sense strand
ucacggacucugugcucua

SEQ ID NO: 1452257 - RNA, 19 nt, Homo sapiens
  misc_RNA (1)...(19): siRNA sense strand
gugcaggcgcuaugaagug

SEQ ID NO: 1452258 - RNA, 19 nt, Homo sapiens
  misc_RNA (1)...(19): siRNA sense strand
cuaaucacagaauuuguug

SEQ ID NO: 1452259 - RNA, 19 nt, Homo sapiens
  misc_RNA (1)...(19): siRNA sense strand
ccaugaaggacgccgagaa

SEQ ID NO: 1452260 - RNA, 19 nt, Homo sapiens
  misc_RNA (1)...(19): siRNA sense strand
cugcacugguuaaacauca

SEQ ID NO: 1452261 - RNA, 19 nt, Homo sapiens
  misc_RNA (1)...(19): siRNA sense strand
gaagcuggaccucuuucag

SEQ ID NO: 1452262 - RNA, 19 nt, Homo sapiens
  misc_RNA (1)...(19): siRNA sense strand
aagccuuccucaucuuaug

SEQ ID NO: 1452263 - RNA, 19 nt, Homo sapiens
  misc_RNA (1)...(19): siRNA sense strand
aaagauaauggaccacauc

SEQ ID NO: 1452264 - RNA, 19 nt, Homo sapiens
  misc_RNA (1)...(19): siRNA sense strand
acacccuaaucacagaauu

SEQ ID NO: 1452265 - RNA, 19 nt, Homo sapiens
  misc_RNA (1)...(19): siRNA sense strand
cauguguguuggccgaaug

SEQ ID NO: 1452266 - RNA, 19 nt, Homo sapiens
  misc_RNA (1)...(19): siRNA sense strand
aagaggaugucaccgaaaa

SEQ ID NO: 1452267 - RNA, 19 nt, Homo sapiens
  misc_RNA (1)...(19): siRNA sense strand
aaacacugaagcaauaaag

SEQ ID NO: 1452268 - RNA, 19 nt, Homo sapiens
  misc_RNA (1)...(19): siRNA sense strand
cacccuaaucacagaauuu

SEQ ID NO: 1452269 - RNA, 19 nt, Homo sapiens
  misc_RNA (1)...(19): siRNA sense strand
agacagguuuggccguaag

SEQ ID NO: 1452270 - RNA, 19 nt, Homo sapiens
  misc_RNA (1)...(19): siRNA sense strand
cugcggaggagcugaacua

SEQ ID NO: 1452271 - RNA, 19 nt, Homo sapiens
  misc_RNA (1)...(19): siRNA sense strand
gagaaaagcaaagcccaaa

SEQ ID NO: 1452272 - RNA, 19 nt, Homo sapiens
  misc_RNA (1)...(19): siRNA sense strand
agaaacacugaagcaauaa

SEQ ID NO: 1452273 - RNA, 19 nt, Homo sapiens
  misc_RNA (1)...(19): siRNA sense strand
gaccacaucgcucaaaaga

SEQ ID NO: 1452274 - RNA, 19 nt, Homo sapiens
  misc_RNA (1)...(19): siRNA sense strand
aagaaacacugaagcaaua

SEQ ID NO: 1452275 - RNA, 19 nt, Homo sapiens
  misc_RNA (1)...(19): siRNA sense strand
gaagaacgguggcgaucau

SEQ ID NO: 1452276 - RNA, 19 nt, Homo sapiens
  misc_RNA (1)...(19): siRNA sense strand
gcuaugaaguggacuggaa

SEQ ID NO: 1452277 - RNA, 19 nt, Homo sapiens
  misc_RNA (1)...(19): siRNA sense strand
gaacgguggcgaucaugua

SEQ ID NO: 1452278 - RNA, 19 nt, Homo sapiens
  misc_RNA (1)...(19): siRNA sense strand
gggaaucaccauugcaaua

SEQ ID NO: 1452279 - RNA, 19 nt, Homo sapiens
  misc_RNA (1)...(19): siRNA sense strand
gaaguugccuccugcugau

SEQ ID NO: 1452280 - RNA, 19 nt, Homo sapiens
  misc_RNA (1)...(19): siRNA sense strand
cggaggagcugaacuauac

SEQ ID NO: 1452281 - RNA, 19 nt, Homo sapiens
  misc_RNA (1)...(19): siRNA sense strand
gaccugcacugguuaaaca

SEQ ID NO: 1452282 - RNA, 19 nt, Homo sapiens
  misc_RNA (1)...(19): siRNA sense strand
gcucuuccaucgucacuga

SEQ ID NO: 1452283 - RNA, 19 nt, Homo sapiens
  misc_RNA (1)...(19): siRNA sense strand
gcaagccuuccucaucuua

SEQ ID NO: 1452284 - RNA, 19 nt, Homo sapiens
  misc_RNA (1)...(19): siRNA sense strand
gaaaacacgauuuaccuua

SEQ ID NO: 1452285 - RNA, 19 nt, Homo sapiens
  misc_RNA (1)...(19): siRNA sense strand
ccacaucgcucaaaagaau

SEQ ID NO: 1452286 - RNA, 19 nt, Homo sapiens
  misc_RNA (1)...(19): siRNA sense strand
caccugaccugcacugguu

SEQ ID NO: 1452287 - RNA, 19 nt, Homo sapiens
  misc_RNA (1)...(19): siRNA sense strand
ggagugacgcuacuucuuc

SEQ ID NO: 1452288 - RNA, 19 nt, Homo sapiens
  misc_RNA (1)...(19): siRNA sense strand
aagcugagcccuucauuug

SEQ ID NO: 1452289 - RNA, 19 nt, Homo sapiens
  misc_RNA (1)...(19): siRNA sense strand
gggaaccucuaccuggauu

SEQ ID NO: 1452290 - RNA, 19 nt, Homo sapiens
  misc_RNA (1)...(19): siRNA sense strand
ccgagaaccuugggagaaa

SEQ ID NO: 1452291 - RNA, 19 nt, Homo sapiens
  misc_RNA (1)...(19): siRNA sense strand
gaaucaccauugcaauaca

SEQ ID NO: 1452292 - RNA, 19 nt, Homo sapiens
  misc_RNA (1)...(19): siRNA sense strand
ccaaagaaaacacgauuua

SEQ ID NO: 1452293 - RNA, 19 nt, Homo sapiens
  misc_RNA (1)...(19): siRNA sense strand
gcacugguuaaacaucaua

SEQ ID NO: 1452294 - RNA, 19 nt, Homo sapiens
  misc_RNA (1)...(19): siRNA sense strand
gaaacacugaagcaauaaa

SEQ ID NO: 1452295 - RNA, 19 nt, Homo sapiens
  misc_RNA (1)...(19): siRNA sense strand
gcugagcccuucauuugca

SEQ ID NO: 1452296 - RNA, 19 nt, Homo sapiens
  misc_RNA (1)...(19): siRNA sense strand
gcuacacccuaaucacaga

SEQ ID NO: 1452297 - RNA, 19 nt, Homo sapiens
  misc_RNA (1)...(19): siRNA sense strand
gaagaggaugucaccgaaa

SEQ ID NO: 1452298 - RNA, 19 nt, Homo sapiens
  misc_RNA (1)...(19): siRNA sense strand
gcggaggagcugaacuaua

SEQ ID NO: 1452299 - RNA, 19 nt, Homo sapiens
  misc_RNA (1)...(19): siRNA sense strand
aaagaaacacugaagcaau

SEQ ID NO: 1452300 - RNA, 19 nt, Homo sapiens
  misc_RNA (1)...(19): siRNA sense strand
ccuggaagcuggaccucuu

SEQ ID NO: 1452301 - RNA, 19 nt, Homo sapiens
  misc_RNA (1)...(19): siRNA sense strand
aagcaagccuuccucaucu

SEQ ID NO: 1452302 - RNA, 19 nt, Homo sapiens
  misc_RNA (1)...(19): siRNA sense strand
caggauggcuggguguaug

SEQ ID NO: 1452303 - RNA, 19 nt, Homo sapiens
  misc_RNA (1)...(19): siRNA sense strand
gaaaagcaaagcccaaaga

SEQ ID NO: 1452304 - RNA, 19 nt, Homo sapiens
  misc_RNA (1)...(19): siRNA sense strand
ggaaucaccauugcaauac

SEQ ID NO: 1452305 - RNA, 19 nt, Homo sapiens
  misc_RNA (1)...(19): siRNA sense strand
gaagcaauaaagauaaugg

SEQ ID NO: 1452306 - RNA, 19 nt, Homo sapiens
  misc_RNA (1)...(19): siRNA sense strand
ccuaaucacagaauuuguu

SEQ ID NO: 1452307 - RNA, 19 nt, Homo sapiens
  misc_RNA (1)...(19): siRNA sense strand
aaagcaaagcccaaagaaa

SEQ ID NO: 1452308 - RNA, 19 nt, Homo sapiens
  misc_RNA (1)...(19): siRNA sense strand
uaaagauaauggaccacau

SEQ ID NO: 1452309 - RNA, 19 nt, Homo sapiens
  misc_RNA (1)...(19): siRNA sense strand
cacugaagcaauaaagaua

SEQ ID NO: 1452310 - RNA, 19 nt, Homo sapiens
  misc_RNA (1)...(19): siRNA sense strand
cuaccuggauuuccuuuac

SEQ ID NO: 1452311 - RNA, 19 nt, Homo sapiens
  misc_RNA (1)...(19): siRNA sense strand
guugccuccugcugauuua

SEQ ID NO: 1452312 - RNA, 19 nt, Homo sapiens
  misc_RNA (1)...(19): siRNA sense strand
cuacuuugcagacagguuu

SEQ ID NO: 1452313 - RNA, 19 nt, Homo sapiens
  misc_RNA (1)...(19): siRNA sense strand
aagcaaagcccaaagaaaa

SEQ ID NO: 1452314 - RNA, 19 nt, Homo sapiens
  misc_RNA (1)...(19): siRNA sense strand
gaaccucuaccuggauuuc

SEQ ID NO: 1452315 - RNA, 19 nt, Homo sapiens
  misc_RNA (1)...(19): siRNA sense strand
ggugaaugcugagcuguac

SEQ ID NO: 1452316 - RNA, 19 nt, Homo sapiens
  misc_RNA (1)...(19): siRNA sense strand
ggcucgggcuccagaagaa

SEQ ID NO: 1452317 - RNA, 19 nt, Homo sapiens
  misc_RNA (1)...(19): siRNA sense strand
ucauagcccucaucaccau

SEQ ID NO: 1452318 - RNA, 19 nt, Homo sapiens
  misc_RNA (1)...(19): siRNA sense strand
ucucgguguuggcuacuuu

SEQ ID NO: 1452319 - RNA, 19 nt, Homo sapiens
  misc_RNA (1)...(19): siRNA sense strand
uuacuccgcucuggucgaa

SEQ ID NO: 1452320 - RNA, 19 nt, Homo sapiens
  misc_RNA (1)...(19): siRNA sense strand
aaucaccauugcaauacaa

SEQ ID NO: 1452321 - RNA, 19 nt, Homo sapiens
  misc_RNA (1)...(19): siRNA sense strand
aaagcugagcccuucauuu

SEQ ID NO: 1452322 - RNA, 19 nt, Homo sapiens
  misc_RNA (1)...(19): siRNA sense strand
cagccugccucgucaugau

SEQ ID NO: 1452323 - RNA, 19 nt, Homo sapiens
  misc_RNA (1)...(19): siRNA sense strand
cggacucugugcucuauca

SEQ ID NO: 1452324 - RNA, 19 nt, Homo sapiens
  misc_RNA (1)...(19): siRNA sense strand
acacugaagcaauaaagau

SEQ ID NO: 1452325 - RNA, 19 nt, Homo sapiens
  misc_RNA (1)...(19): siRNA sense strand
caccguggaugacauucug

SEQ ID NO: 1452326 - RNA, 19 nt, Homo sapiens
  misc_RNA (1)...(19): siRNA sense strand
cagacagguuuggccguaa

SEQ ID NO: 1452327 - RNA, 19 nt, Homo sapiens
  misc_RNA (1)...(19): siRNA sense strand
ugccagagaccaugaagga

SEQ ID NO: 1452328 - RNA, 19 nt, Homo sapiens
  misc_RNA (1)...(19): siRNA sense strand
cgguggcuguuaucacaaa

SEQ ID NO: 1452329 - RNA, 19 nt, Homo sapiens
  misc_RNA (1)...(19): siRNA sense strand
ucaaaagaaugggaaguug

SEQ ID NO: 1452330 - RNA, 19 nt, Homo sapiens
  misc_RNA (1)...(19): siRNA sense strand
gccgagaaccuugggagaa

SEQ ID NO: 1452331 - RNA, 19 nt, Homo sapiens
  misc_RNA (1)...(19): siRNA sense strand
caucgucacugaguucaac

SEQ ID NO: 1452332 - RNA, 19 nt, Homo sapiens
  misc_RNA (1)...(19): siRNA sense strand
gggagugacgcuacuucuu

SEQ ID NO: 1452333 - RNA, 19 nt, Homo sapiens
  misc_RNA (1)...(19): siRNA sense strand
ggaagcuggaccucuuuca

SEQ ID NO: 1452334 - RNA, 19 nt, Homo sapiens
  misc_RNA (1)...(19): siRNA sense strand
cacggacucugugcucuau

SEQ ID NO: 1452335 - RNA, 19 nt, Homo sapiens
  misc_RNA (1)...(19): siRNA sense strand
ucacggacucugugcucua

SEQ ID NO: 1452336 - RNA, 19 nt, Homo sapiens
  misc_RNA (1)...(19): siRNA sense strand
gugcaggcgcuaugaagug

SEQ ID NO: 1452337 - RNA, 19 nt, Homo sapiens
  misc_RNA (1)...(19): siRNA sense strand
cuaaucacagaauuuguug

SEQ ID NO: 1452338 - RNA, 19 nt, Homo sapiens
  misc_RNA (1)...(19): siRNA sense strand
ccaugaaggacgccgagaa

SEQ ID NO: 1452339 - RNA, 19 nt, Homo sapiens
  misc_RNA (1)...(19): siRNA sense strand
cugcacugguuaaacauca

SEQ ID NO: 1452340 - RNA, 19 nt, Homo sapiens
  misc_RNA (1)...(19): siRNA sense strand
aagccuuccucaucuuaug

SEQ ID NO: 1452341 - RNA, 19 nt, Homo sapiens
  misc_RNA (1)...(19): siRNA sense strand
gaagcuggaccucuuucag

SEQ ID NO: 1452342 - RNA, 19 nt, Homo sapiens
  misc_RNA (1)...(19): siRNA sense strand
aaagauaauggaccacauc

SEQ ID NO: 1452343 - RNA, 19 nt, Homo sapiens
  misc_RNA (1)...(19): siRNA sense strand
acacccuaaucacagaauu

SEQ ID NO: 1452344 - RNA, 19 nt, Homo sapiens
  misc_RNA (1)...(19): siRNA sense strand
cauguguguuggccgaaug

SEQ ID NO: 1452345 - RNA, 19 nt, Homo sapiens
  misc_RNA (1)...(19): siRNA sense strand
aagaggaugucaccgaaaa

SEQ ID NO: 1452346 - RNA, 19 nt, Homo sapiens
  misc_RNA (1)...(19): siRNA sense strand
aaacacugaagcaauaaag

SEQ ID NO: 1452347 - RNA, 19 nt, Homo sapiens
  misc_RNA (1)...(19): siRNA sense strand
cacccuaaucacagaauuu

SEQ ID NO: 1452348 - RNA, 19 nt, Homo sapiens
  misc_RNA (1)...(19): siRNA sense strand
agacagguuuggccguaag

SEQ ID NO: 1452349 - RNA, 19 nt, Homo sapiens
  misc_RNA (1)...(19): siRNA sense strand
cugcggaggagcugaacua

SEQ ID NO: 1452350 - RNA, 19 nt, Homo sapiens
  misc_RNA (1)...(19): siRNA sense strand
gagaaaagcaaagcccaaa

SEQ ID NO: 1452351 - RNA, 19 nt, Homo sapiens
  misc_RNA (1)...(19): siRNA sense strand
agaaacacugaagcaauaa

SEQ ID NO: 1452352 - RNA, 19 nt, Homo sapiens
  misc_RNA (1)...(19): siRNA sense strand
gaccacaucgcucaaaaga

SEQ ID NO: 1452353 - RNA, 19 nt, Homo sapiens
  misc_RNA (1)...(19): siRNA sense strand
gaaaaucacugaaaucauc

SEQ ID NO: 1452354 - RNA, 19 nt, Homo sapiens
  misc_RNA (1)...(19): siRNA sense strand
ccagagaacuuugggaaug

SEQ ID NO: 1452355 - RNA, 19 nt, Homo sapiens
  misc_RNA (1)...(19): siRNA sense strand
caccuucacuuucuccuaa

SEQ ID NO: 1452356 - RNA, 19 nt, Homo sapiens
  misc_RNA (1)...(19): siRNA sense strand
gcacccaccuucacuuucu

SEQ ID NO: 1452357 - RNA, 19 nt, Homo sapiens
  misc_RNA (1)...(19): siRNA sense strand
cagagaacuuugggaauga

SEQ ID NO: 1452358 - RNA, 19 nt, Homo sapiens
  misc_RNA (1)...(19): siRNA sense strand
ccaacaaccuccacugcau

SEQ ID NO: 1452359 - RNA, 19 nt, Homo sapiens
  misc_RNA (1)...(19): siRNA sense strand
gacuguaccuggacaccaa

SEQ ID NO: 1452360 - RNA, 19 nt, Homo sapiens
  misc_RNA (1)...(19): siRNA sense strand
acucacaccuugcccugua

SEQ ID NO: 1452361 - RNA, 19 nt, Homo sapiens
  misc_RNA (1)...(19): siRNA sense strand
caacaaccuccacugcauu

SEQ ID NO: 1452362 - RNA, 19 nt, Homo sapiens
  misc_RNA (1)...(19): siRNA sense strand
gcagcaacccacauacaga

SEQ ID NO: 1452363 - RNA, 19 nt, Homo sapiens
  misc_RNA (1)...(19): siRNA sense strand
caucugguuuguaguuuca

SEQ ID NO: 1452364 - RNA, 19 nt, Homo sapiens
  misc_RNA (1)...(19): siRNA sense strand
ggagggagcccggaaacau

SEQ ID NO: 1452365 - RNA, 19 nt, Homo sapiens
  misc_RNA (1)...(19): siRNA sense strand
cauagcagcagaaggaaga

SEQ ID NO: 1452366 - RNA, 19 nt, Homo sapiens
  misc_RNA (1)...(19): siRNA sense strand
cagcaacccacauacagaa

SEQ ID NO: 1452367 - RNA, 19 nt, Homo sapiens
  misc_RNA (1)...(19): siRNA sense strand
ggccuggucuucgcacuug

SEQ ID NO: 1452368 - RNA, 19 nt, Homo sapiens
  misc_RNA (1)...(19): siRNA sense strand
gagcagcaacccacauaca

SEQ ID NO: 1452369 - RNA, 19 nt, Homo sapiens
  misc_RNA (1)...(19): siRNA sense strand
ggucuucgcacuugauauc

SEQ ID NO: 1452370 - RNA, 19 nt, Homo sapiens
  misc_RNA (1)...(19): siRNA sense strand
ccucagggacccaggauga

SEQ ID NO: 1452371 - RNA, 19 nt, Homo sapiens
  misc_RNA (1)...(19): siRNA sense strand
cggagcagcaacccacaua

SEQ ID NO: 1452372 - RNA, 19 nt, Homo sapiens
  misc_RNA (1)...(19): siRNA sense strand
gacccaggaugaacugcau

SEQ ID NO: 1452373 - RNA, 19 nt, Homo sapiens
  misc_RNA (1)...(19): siRNA sense strand
caacccacauacagaacuc

SEQ ID NO: 1452374 - RNA, 19 nt, Homo sapiens
  misc_RNA (1)...(19): siRNA sense strand
ggugaguuccucccaacaa

SEQ ID NO: 1452375 - RNA, 19 nt, Homo sapiens
  misc_RNA (1)...(19): siRNA sense strand
gagggagcccggaaacauc

SEQ ID NO: 1452376 - RNA, 19 nt, Homo sapiens
  misc_RNA (1)...(19): siRNA sense strand
guuuguaguuucagacucu

SEQ ID NO: 1452377 - RNA, 19 nt, Homo sapiens
  misc_RNA (1)...(19): siRNA sense strand
cucugcaacuccaaucuuu

SEQ ID NO: 1452378 - RNA, 19 nt, Homo sapiens
  misc_RNA (1)...(19): siRNA sense strand
gcccauccgagacuucauu

SEQ ID NO: 1452379 - RNA, 19 nt, Homo sapiens
  misc_RNA (1)...(19): siRNA sense strand
ggacucugcaacuccaauc

SEQ ID NO: 1452380 - RNA, 19 nt, Homo sapiens
  misc_RNA (1)...(19): siRNA sense strand
gugaguuccucccaacaac

SEQ ID NO: 1452381 - RNA, 19 nt, Homo sapiens
  misc_RNA (1)...(19): siRNA sense strand
uggcacccaccuucacuuu

SEQ ID NO: 1452382 - RNA, 19 nt, Homo sapiens
  misc_RNA (1)...(19): siRNA sense strand
gcaggaagcuugacaaaug

SEQ ID NO: 1452383 - RNA, 19 nt, Homo sapiens
  misc_RNA (1)...(19): siRNA sense strand
ucacagggaucuugaauaa

SEQ ID NO: 1452384 - RNA, 19 nt, Homo sapiens
  misc_RNA (1)...(19): siRNA sense strand
ggacaucacugcagaaauc

SEQ ID NO: 1452385 - RNA, 19 nt, Homo sapiens
  misc_RNA (1)...(19): siRNA sense strand
gcagaaaucuuagcuguga

SEQ ID NO: 1452386 - RNA, 19 nt, Homo sapiens
  misc_RNA (1)...(19): siRNA sense strand
gcauaaagcuccaagugaa

SEQ ID NO: 1452387 - RNA, 19 nt, Homo sapiens
  misc_RNA (1)...(19): siRNA sense strand
gaacaacaucauugacaua

SEQ ID NO: 1452388 - RNA, 19 nt, Homo sapiens
  misc_RNA (1)...(19): siRNA sense strand
caacaucauugacauaaag

SEQ ID NO: 1452389 - RNA, 19 nt, Homo sapiens
  misc_RNA (1)...(19): siRNA sense strand
caccaucccucucggcaua

SEQ ID NO: 1452390 - RNA, 19 nt, Homo sapiens
  misc_RNA (1)...(19): siRNA sense strand
ccuggaagccugcaaauuu

SEQ ID NO: 1452391 - RNA, 19 nt, Homo sapiens
  misc_RNA (1)...(19): siRNA sense strand
gcaaauuucucugcuugau

SEQ ID NO: 1452392 - RNA, 19 nt, Homo sapiens
  misc_RNA (1)...(19): siRNA sense strand
ggacuacaguuugucauca

SEQ ID NO: 1452393 - RNA, 19 nt, Homo sapiens
  misc_RNA (1)...(19): siRNA sense strand
acagggaucuugaauaaag

SEQ ID NO: 1452394 - RNA, 19 nt, Homo sapiens
  misc_RNA (1)...(19): siRNA sense strand
caaaugcccucagcaaugg

SEQ ID NO: 1452395 - RNA, 19 nt, Homo sapiens
  misc_RNA (1)...(19): siRNA sense strand
caucacugcagaaaucuua

SEQ ID NO: 1452396 - RNA, 19 nt, Homo sapiens
  misc_RNA (1)...(19): siRNA sense strand
gagauaagcaggagaggau

SEQ ID NO: 1452397 - RNA, 19 nt, Homo sapiens
  misc_RNA (1)...(19): siRNA sense strand
gaccagacccugcccuuga

SEQ ID NO: 1452398 - RNA, 19 nt, Homo sapiens
  misc_RNA (1)...(19): siRNA sense strand
gauccacggacuacaguuu

SEQ ID NO: 1452399 - RNA, 19 nt, Homo sapiens
  misc_RNA (1)...(19): siRNA sense strand
acaaaugcccucagcaaug

SEQ ID NO: 1452400 - RNA, 19 nt, Homo sapiens
  misc_RNA (1)...(19): siRNA sense strand
ugacaaaugcccucagcaa

SEQ ID NO: 1452401 - RNA, 19 nt, Homo sapiens
  misc_RNA (1)...(19): siRNA sense strand
auaaaguccugccugaguu

SEQ ID NO: 1452402 - RNA, 19 nt, Homo sapiens
  misc_RNA (1)...(19): siRNA sense strand
ggcauaaagcuccaaguga

SEQ ID NO: 1452403 - RNA, 19 nt, Homo sapiens
  misc_RNA (1)...(19): siRNA sense strand
aaagugacgucagugauuc

SEQ ID NO: 1452404 - RNA, 19 nt, Homo sapiens
  misc_RNA (1)...(19): siRNA sense strand
ugaacaacaucauugacau

SEQ ID NO: 1452405 - RNA, 19 nt, Homo sapiens
  misc_RNA (1)...(19): siRNA sense strand
gacuacaguuugucaucaa

SEQ ID NO: 1452406 - RNA, 19 nt, Homo sapiens
  misc_RNA (1)...(19): siRNA sense strand
gacaaaugcccucagcaau

SEQ ID NO: 1452407 - RNA, 19 nt, Homo sapiens
  misc_RNA (1)...(19): siRNA sense strand
cuggaagccugcaaauuuc

SEQ ID NO: 1452408 - RNA, 19 nt, Homo sapiens
  misc_RNA (1)...(19): siRNA sense strand
auaaagcuccaagugaaua

SEQ ID NO: 1452409 - RNA, 19 nt, Homo sapiens
  misc_RNA (1)...(19): siRNA sense strand
gaccauggcccaguuugga

SEQ ID NO: 1452410 - RNA, 19 nt, Homo sapiens
  misc_RNA (1)...(19): siRNA sense strand
ggccugaacaacaucauug

SEQ ID NO: 1452411 - RNA, 19 nt, Homo sapiens
  misc_RNA (1)...(19): siRNA sense strand
gcuggaacuuggccuugug

SEQ ID NO: 1452412 - RNA, 19 nt, Homo sapiens
  misc_RNA (1)...(19): siRNA sense strand
acccugcccuugaauguga

SEQ ID NO: 1452413 - RNA, 19 nt, Homo sapiens
  misc_RNA (1)...(19): siRNA sense strand
caaauuucucugcuugaug

SEQ ID NO: 1452414 - RNA, 19 nt, Homo sapiens
  misc_RNA (1)...(19): siRNA sense strand
ggaaaagugacgucaguga

SEQ ID NO: 1452415 - RNA, 19 nt, Homo sapiens
  misc_RNA (1)...(19): siRNA sense strand
ugcaugacauuguuaacau

SEQ ID NO: 1452416 - RNA, 19 nt, Homo sapiens
  misc_RNA (1)...(19): siRNA sense strand
ccuggugcaugacauuguu

SEQ ID NO: 1452417 - RNA, 19 nt, Homo sapiens
  misc_RNA (1)...(19): siRNA sense strand
cauaaagcuccaagugaau

SEQ ID NO: 1452418 - RNA, 19 nt, Homo sapiens
  misc_RNA (1)...(19): siRNA sense strand
uaaaguccugccugaguug

SEQ ID NO: 1452419 - RNA, 19 nt, Homo sapiens
  misc_RNA (1)...(19): siRNA sense strand
caggaagcuugacaaaugc

SEQ ID NO: 1452420 - RNA, 19 nt, Homo sapiens
  misc_RNA (1)...(19): siRNA sense strand
ucuuagcugugagagauaa

SEQ ID NO: 1452421 - RNA, 19 nt, Homo sapiens
  misc_RNA (1)...(19): siRNA sense strand
cggcauaaagcuccaagug

SEQ ID NO: 1452422 - RNA, 19 nt, Homo sapiens
  misc_RNA (1)...(19): siRNA sense strand
aauaaaguccugccugagu

SEQ ID NO: 1452423 - RNA, 19 nt, Homo sapiens
  misc_RNA (1)...(19): siRNA sense strand
ugugcccucuggucaauga

SEQ ID NO: 1452424 - RNA, 19 nt, Homo sapiens
  misc_RNA (1)...(19): siRNA sense strand
ggucggugcaagucuguug

SEQ ID NO: 1452425 - RNA, 19 nt, Homo sapiens
  misc_RNA (1)...(19): siRNA sense strand
ggucuugcaggaagcuuga

SEQ ID NO: 1452426 - RNA, 19 nt, Homo sapiens
  misc_RNA (1)...(19): siRNA sense strand
uguugaggcuggcugugaa

SEQ ID NO: 1452427 - RNA, 19 nt, Homo sapiens
  misc_RNA (1)...(19): siRNA sense strand
gugcaugacauuguuaaca

SEQ ID NO: 1452428 - RNA, 19 nt, Homo sapiens
  misc_RNA (1)...(19): siRNA sense strand
gauggccaccgucucuaug

SEQ ID NO: 1452429 - RNA, 19 nt, Homo sapiens
  misc_RNA (1)...(19): siRNA sense strand
ugucuucuacgggcuguua

SEQ ID NO: 1452430 - RNA, 19 nt, Homo sapiens
  misc_RNA (1)...(19): siRNA sense strand
gaaaagugacgucagugau

SEQ ID NO: 1452431 - RNA, 19 nt, Homo sapiens
  misc_RNA (1)...(19): siRNA sense strand
gggccucauugucuucuac

SEQ ID NO: 1452432 - RNA, 19 nt, Homo sapiens
  misc_RNA (1)...(19): siRNA sense strand
agaaaucuuagcugugaga

SEQ ID NO: 1452433 - RNA, 19 nt, Homo sapiens
  misc_RNA (1)...(19): siRNA sense strand
accagacccugcccuugaa

SEQ ID NO: 1452434 - RNA, 19 nt, Homo sapiens
  misc_RNA (1)...(19): siRNA sense strand
gcaggaagcuugacaaaug

SEQ ID NO: 1452435 - RNA, 19 nt, Homo sapiens
  misc_RNA (1)...(19): siRNA sense strand
ucacagggaucuugaauaa

SEQ ID NO: 1452436 - RNA, 19 nt, Homo sapiens
  misc_RNA (1)...(19): siRNA sense strand
ggacaucacugcagaaauc

SEQ ID NO: 1452437 - RNA, 19 nt, Homo sapiens
  misc_RNA (1)...(19): siRNA sense strand
gcagaaaucuuagcuguga

SEQ ID NO: 1452438 - RNA, 19 nt, Homo sapiens
  misc_RNA (1)...(19): siRNA sense strand
gcauaaagcuccaagugaa

SEQ ID NO: 1452439 - RNA, 19 nt, Homo sapiens
  misc_RNA (1)...(19): siRNA sense strand
gaacaacaucauugacaua

SEQ ID NO: 1452440 - RNA, 19 nt, Homo sapiens
  misc_RNA (1)...(19): siRNA sense strand
caacaucauugacauaaag

SEQ ID NO: 1452441 - RNA, 19 nt, Homo sapiens
  misc_RNA (1)...(19): siRNA sense strand
caccaucccucucggcaua

SEQ ID NO: 1452442 - RNA, 19 nt, Homo sapiens
  misc_RNA (1)...(19): siRNA sense strand
ccuggaagccugcaaauuu

SEQ ID NO: 1452443 - RNA, 19 nt, Homo sapiens
  misc_RNA (1)...(19): siRNA sense strand
gcaaauuucucugcuugau

SEQ ID NO: 1452444 - RNA, 19 nt, Homo sapiens
  misc_RNA (1)...(19): siRNA sense strand
ggacuacaguuugucauca

SEQ ID NO: 1452445 - RNA, 19 nt, Homo sapiens
  misc_RNA (1)...(19): siRNA sense strand
acagggaucuugaauaaag

SEQ ID NO: 1452446 - RNA, 19 nt, Homo sapiens
  misc_RNA (1)...(19): siRNA sense strand
caaaugcccucagcaaugg

SEQ ID NO: 1452447 - RNA, 19 nt, Homo sapiens
  misc_RNA (1)...(19): siRNA sense strand
caucacugcagaaaucuua

SEQ ID NO: 1452448 - RNA, 19 nt, Homo sapiens
  misc_RNA (1)...(19): siRNA sense strand
gagauaagcaggagaggau

SEQ ID NO: 1452449 - RNA, 19 nt, Homo sapiens
  misc_RNA (1)...(19): siRNA sense strand
gaccagacccugcccuuga

SEQ ID NO: 1452450 - RNA, 19 nt, Homo sapiens
  misc_RNA (1)...(19): siRNA sense strand
gauccacggacuacaguuu

SEQ ID NO: 1452451 - RNA, 19 nt, Homo sapiens
  misc_RNA (1)...(19): siRNA sense strand
acaaaugcccucagcaaug

SEQ ID NO: 1452452 - RNA, 19 nt, Homo sapiens
  misc_RNA (1)...(19): siRNA sense strand
ugacaaaugcccucagcaa

SEQ ID NO: 1452453 - RNA, 19 nt, Homo sapiens
  misc_RNA (1)...(19): siRNA sense strand
auaaaguccugccugaguu

SEQ ID NO: 1452454 - RNA, 19 nt, Homo sapiens
  misc_RNA (1)...(19): siRNA sense strand
ggcauaaagcuccaaguga

SEQ ID NO: 1452455 - RNA, 19 nt, Homo sapiens
  misc_RNA (1)...(19): siRNA sense strand
aaagugacgucagugauuc

SEQ ID NO: 1452456 - RNA, 19 nt, Homo sapiens
  misc_RNA (1)...(19): siRNA sense strand
ugaacaacaucauugacau

SEQ ID NO: 1452457 - RNA, 19 nt, Homo sapiens
  misc_RNA (1)...(19): siRNA sense strand
gacuacaguuugucaucaa

SEQ ID NO: 1452458 - RNA, 19 nt, Homo sapiens
  misc_RNA (1)...(19): siRNA sense strand
gacaaaugcccucagcaau

SEQ ID NO: 1452459 - RNA, 19 nt, Homo sapiens
  misc_RNA (1)...(19): siRNA sense strand
cuggaagccugcaaauuuc

SEQ ID NO: 1452460 - RNA, 19 nt, Homo sapiens
  misc_RNA (1)...(19): siRNA sense strand
auaaagcuccaagugaaua

SEQ ID NO: 1452461 - RNA, 19 nt, Homo sapiens
  misc_RNA (1)...(19): siRNA sense strand
gaccauggcccaguuugga

SEQ ID NO: 1452462 - RNA, 19 nt, Homo sapiens
  misc_RNA (1)...(19): siRNA sense strand
ggccugaacaacaucauug

SEQ ID NO: 1452463 - RNA, 19 nt, Homo sapiens
  misc_RNA (1)...(19): siRNA sense strand
gcuggaacuuggccuugug

SEQ ID NO: 1452464 - RNA, 19 nt, Homo sapiens
  misc_RNA (1)...(19): siRNA sense strand
acccugcccuugaauguga

SEQ ID NO: 1452465 - RNA, 19 nt, Homo sapiens
  misc_RNA (1)...(19): siRNA sense strand
caaauuucucugcuugaug

SEQ ID NO: 1452466 - RNA, 19 nt, Homo sapiens
  misc_RNA (1)...(19): siRNA sense strand
ggaaaagugacgucaguga

SEQ ID NO: 1452467 - RNA, 19 nt, Homo sapiens
  misc_RNA (1)...(19): siRNA sense strand
ugcaugacauuguuaacau

SEQ ID NO: 1452468 - RNA, 19 nt, Homo sapiens
  misc_RNA (1)...(19): siRNA sense strand
ccuggugcaugacauuguu

SEQ ID NO: 1452469 - RNA, 19 nt, Homo sapiens
  misc_RNA (1)...(19): siRNA sense strand
cauaaagcuccaagugaau

SEQ ID NO: 1452470 - RNA, 19 nt, Homo sapiens
  misc_RNA (1)...(19): siRNA sense strand
uaaaguccugccugaguug

SEQ ID NO: 1452471 - RNA, 19 nt, Homo sapiens
  misc_RNA (1)...(19): siRNA sense strand
caggaagcuugacaaaugc

SEQ ID NO: 1452472 - RNA, 19 nt, Homo sapiens
  misc_RNA (1)...(19): siRNA sense strand
ucuuagcugugagagauaa

SEQ ID NO: 1452473 - RNA, 19 nt, Homo sapiens
  misc_RNA (1)...(19): siRNA sense strand
cggcauaaagcuccaagug

SEQ ID NO: 1452474 - RNA, 19 nt, Homo sapiens
  misc_RNA (1)...(19): siRNA sense strand
aauaaaguccugccugagu

SEQ ID NO: 1452475 - RNA, 19 nt, Homo sapiens
  misc_RNA (1)...(19): siRNA sense strand
ugugcccucuggucaauga

SEQ ID NO: 1452476 - RNA, 19 nt, Homo sapiens
  misc_RNA (1)...(19): siRNA sense strand
ggucggugcaagucuguug

SEQ ID NO: 1452477 - RNA, 19 nt, Homo sapiens
  misc_RNA (1)...(19): siRNA sense strand
ggucuugcaggaagcuuga

SEQ ID NO: 1452478 - RNA, 19 nt, Homo sapiens
  misc_RNA (1)...(19): siRNA sense strand
uguugaggcuggcugugaa

SEQ ID NO: 1452479 - RNA, 19 nt, Homo sapiens
  misc_RNA (1)...(19): siRNA sense strand
gugcaugacauuguuaaca

SEQ ID NO: 1452480 - RNA, 19 nt, Homo sapiens
  misc_RNA (1)...(19): siRNA sense strand
gauggccaccgucucuaug

SEQ ID NO: 1452481 - RNA, 19 nt, Homo sapiens
  misc_RNA (1)...(19): siRNA sense strand
ugucuucuacgggcuguua

SEQ ID NO: 1452482 - RNA, 19 nt, Homo sapiens
  misc_RNA (1)...(19): siRNA sense strand
gaaaagugacgucagugau

SEQ ID NO: 1452483 - RNA, 19 nt, Homo sapiens
  misc_RNA (1)...(19): siRNA sense strand
gggccucauugucuucuac

SEQ ID NO: 1452484 - RNA, 19 nt, Homo sapiens
  misc_RNA (1)...(19): siRNA sense strand
agaaaucuuagcugugaga

SEQ ID NO: 1452485 - RNA, 19 nt, Homo sapiens
  misc_RNA (1)...(19): siRNA sense strand
accagacccugcccuugaa

SEQ ID NO: 1452486 - RNA, 19 nt, Homo sapiens
  misc_RNA (1)...(19): siRNA sense strand
gaagaacuguggcaagaua

SEQ ID NO: 1452487 - RNA, 19 nt, Homo sapiens
  misc_RNA (1)...(19): siRNA sense strand
gaucaaaucucauaacaca

SEQ ID NO: 1452488 - RNA, 19 nt, Homo sapiens
  misc_RNA (1)...(19): siRNA sense strand
gagaaacccuauauaugua

SEQ ID NO: 1452489 - RNA, 19 nt, Homo sapiens
  misc_RNA (1)...(19): siRNA sense strand
gaucgaaucucauuaaaca

SEQ ID NO: 1452490 - RNA, 19 nt, Homo sapiens
  misc_RNA (1)...(19): siRNA sense strand
ggacaaaccucaccacaca

SEQ ID NO: 1452491 - RNA, 19 nt, Homo sapiens
  misc_RNA (1)...(19): siRNA sense strand
caucagaaaucucauauug

SEQ ID NO: 1452492 - RNA, 19 nt, Homo sapiens
  misc_RNA (1)...(19): siRNA sense strand
gaucagaccucuuuagaca

SEQ ID NO: 1452493 - RNA, 19 nt, Homo sapiens
  misc_RNA (1)...(19): siRNA sense strand
gaaagacacuaugaaugua

SEQ ID NO: 1452494 - RNA, 19 nt, Homo sapiens
  misc_RNA (1)...(19): siRNA sense strand
ggaaauccuucacuaagaa

SEQ ID NO: 1452495 - RNA, 19 nt, Homo sapiens
  misc_RNA (1)...(19): siRNA sense strand
ggaaaugcuucacuaagaa

SEQ ID NO: 1452496 - RNA, 19 nt, Homo sapiens
  misc_RNA (1)...(19): siRNA sense strand
gaacaugaccacuaugaaa

SEQ ID NO: 1452497 - RNA, 19 nt, Homo sapiens
  misc_RNA (1)...(19): siRNA sense strand
ggaaaggucuucacucaca

SEQ ID NO: 1452498 - RNA, 19 nt, Homo sapiens
  misc_RNA (1)...(19): siRNA sense strand
gaacucagaccucaguaua

SEQ ID NO: 1452499 - RNA, 19 nt, Homo sapiens
  misc_RNA (1)...(19): siRNA sense strand
guaaugggcuucacucaga

SEQ ID NO: 1452500 - RNA, 19 nt, Homo sapiens
  misc_RNA (1)...(19): siRNA sense strand
gggaaaugcuucacuaaga

SEQ ID NO: 1452501 - RNA, 19 nt, Homo sapiens
  misc_RNA (1)...(19): siRNA sense strand
ggagaaacccuaugaaugu

SEQ ID NO: 1452502 - RNA, 19 nt, Homo sapiens
  misc_RNA (1)...(19): siRNA sense strand
ggagagaaacccuauauau

SEQ ID NO: 1452503 - RNA, 19 nt, Homo sapiens
  misc_RNA (1)...(19): siRNA sense strand
caauauaugugcugaaugu

SEQ ID NO: 1452504 - RNA, 19 nt, Homo sapiens
  misc_RNA (1)...(19): siRNA sense strand
gagauuugaucaacccaua

SEQ ID NO: 1452505 - RNA, 19 nt, Homo sapiens
  misc_RNA (1)...(19): siRNA sense strand
gagagaagccuuaugaaug

SEQ ID NO: 1452506 - RNA, 19 nt, Homo sapiens
  misc_RNA (1)...(19): siRNA sense strand
ucagaaaucucauauugga

SEQ ID NO: 1452507 - RNA, 19 nt, Homo sapiens
  misc_RNA (1)...(19): siRNA sense strand
ggagagaaaccuuauguau

SEQ ID NO: 1452508 - RNA, 19 nt, Homo sapiens
  misc_RNA (1)...(19): siRNA sense strand
aaagaaaccuuaugcuugu

SEQ ID NO: 1452509 - RNA, 19 nt, Homo sapiens
  misc_RNA (1)...(19): siRNA sense strand
gaagucacgccucaauaua

SEQ ID NO: 1452510 - RNA, 19 nt, Homo sapiens
  misc_RNA (1)...(19): siRNA sense strand
ggaaagccuucauccagaa

SEQ ID NO: 1452511 - RNA, 19 nt, Homo sapiens
  misc_RNA (1)...(19): siRNA sense strand
cauaggagaagauucauua

SEQ ID NO: 1452512 - RNA, 19 nt, Homo sapiens
  misc_RNA (1)...(19): siRNA sense strand
gggaaauccuucacuaaga

SEQ ID NO: 1452513 - RNA, 19 nt, Homo sapiens
  misc_RNA (1)...(19): siRNA sense strand
caacacacaucagagaauu

SEQ ID NO: 1452514 - RNA, 19 nt, Homo sapiens
  misc_RNA (1)...(19): siRNA sense strand
ggagaagauucauuauguu

SEQ ID NO: 1452515 - RNA, 19 nt, Homo sapiens
  misc_RNA (1)...(19): siRNA sense strand
ggaaagaaaccuuaugcuu

SEQ ID NO: 1452516 - RNA, 19 nt, Homo sapiens
  misc_RNA (1)...(19): siRNA sense strand
gaagcauacuuuaaacuca

SEQ ID NO: 1452517 - RNA, 19 nt, Homo sapiens
  misc_RNA (1)...(19): siRNA sense strand
gagagaaacccuauauaug

SEQ ID NO: 1452518 - RNA, 19 nt, Homo sapiens
  misc_RNA (1)...(19): siRNA sense strand
gaaacacuaugaaugcaau

SEQ ID NO: 1452519 - RNA, 19 nt, Homo sapiens
  misc_RNA (1)...(19): siRNA sense strand
gcaaauuccugugaacaug

SEQ ID NO: 1452520 - RNA, 19 nt, Homo sapiens
  misc_RNA (1)...(19): siRNA sense strand
gcaagauaaugaccagcua

SEQ ID NO: 1452521 - RNA, 19 nt, Homo sapiens
  misc_RNA (1)...(19): siRNA sense strand
gagagaaacccuauaagug

SEQ ID NO: 1452522 - RNA, 19 nt, Homo sapiens
  misc_RNA (1)...(19): siRNA sense strand
ggaagucacgccucaauau

SEQ ID NO: 1452523 - RNA, 19 nt, Homo sapiens
  misc_RNA (1)...(19): siRNA sense strand
aaucaaaccucauuacaca

SEQ ID NO: 1452524 - RNA, 19 nt, Homo sapiens
  misc_RNA (1)...(19): siRNA sense strand
ggagaaagacacuaugaau

SEQ ID NO: 1452525 - RNA, 19 nt, Homo sapiens
  misc_RNA (1)...(19): siRNA sense strand
ggaaggccuuuauccagaa

SEQ ID NO: 1452526 - RNA, 19 nt, Homo sapiens
  misc_RNA (1)...(19): siRNA sense strand
ccagucaaaucucauuaaa

SEQ ID NO: 1452527 - RNA, 19 nt, Homo sapiens
  misc_RNA (1)...(19): siRNA sense strand
gcagaaacccuacaaaugc

SEQ ID NO: 1452528 - RNA, 19 nt, Homo sapiens
  misc_RNA (1)...(19): siRNA sense strand
ggagaagcuuuaugugugu

SEQ ID NO: 1452529 - RNA, 19 nt, Homo sapiens
  misc_RNA (1)...(19): siRNA sense strand
ggacgugacuguggacuuc

SEQ ID NO: 1452530 - RNA, 19 nt, Homo sapiens
  misc_RNA (1)...(19): siRNA sense strand
gagagaaaccuuauguaug

SEQ ID NO: 1452531 - RNA, 19 nt, Homo sapiens
  misc_RNA (1)...(19): siRNA sense strand
gagaauucaugcuggagaa

SEQ ID NO: 1452532 - RNA, 19 nt, Homo sapiens
  misc_RNA (1)...(19): siRNA sense strand
ggagagaagccuuaugaau

SEQ ID NO: 1452533 - RNA, 19 nt, Homo sapiens
  misc_RNA (1)...(19): siRNA sense strand
ggagagaaacccuauaagu

SEQ ID NO: 1452534 - RNA, 19 nt, Homo sapiens
  misc_RNA (1)...(19): siRNA sense strand
gagagaaacacuaugaaug

SEQ ID NO: 1452535 - RNA, 19 nt, Homo sapiens
  misc_RNA (1)...(19): siRNA sense strand
caucagaagucucauacug

SEQ ID NO: 1452536 - RNA, 19 nt, Homo sapiens
  misc_RNA (1)...(19): siRNA sense strand
ggagagagacacuaugaau

SEQ ID NO: 1452537 - RNA, 19 nt, Homo sapiens
  misc_RNA (1)...(19): siRNA sense strand
guggaaaggucuucacuca

SEQ ID NO: 1452538 - RNA, 19 nt, Homo sapiens
  misc_RNA (1)...(19): siRNA sense strand
agagaaaccuuauguaugc

SEQ ID NO: 1452539 - RNA, 19 nt, Homo sapiens
  misc_RNA (1)...(19): siRNA sense strand
guacugggaugugacacua

SEQ ID NO: 1452540 - RNA, 19 nt, Homo sapiens
  misc_RNA (1)...(19): siRNA sense strand
ccagaaaucgcacuucauu

SEQ ID NO: 1452541 - RNA, 19 nt, Homo sapiens
  misc_RNA (1)...(19): siRNA sense strand
gggaaggcuuucacaagaa

SEQ ID NO: 1452542 - RNA, 19 nt, Homo sapiens
  misc_RNA (1)...(19): siRNA sense strand
uagaagaacuguggcaaga

SEQ ID NO: 1452543 - RNA, 19 nt, Homo sapiens
  misc_RNA (1)...(19): siRNA sense strand
gagaaagacacuaugaaug

SEQ ID NO: 1452544 - RNA, 19 nt, Homo sapiens
  misc_RNA (1)...(19): siRNA sense strand
agagaaacccuauauaugu

SEQ ID NO: 1452545 - RNA, 19 nt, Homo sapiens
  misc_RNA (1)...(19): siRNA sense strand
cagaaggccuuuacugaca

SEQ ID NO: 1452546 - RNA, 19 nt, Homo sapiens
  misc_RNA (1)...(19): siRNA sense strand
cagaaagccacacuaagua

SEQ ID NO: 1452547 - RNA, 19 nt, Homo sapiens
  misc_RNA (1)...(19): siRNA sense strand
ggaaaagccuucauaugga

SEQ ID NO: 1452548 - RNA, 19 nt, Homo sapiens
  misc_RNA (1)...(19): siRNA sense strand
aggagaagauucauuaugu

SEQ ID NO: 1452549 - RNA, 19 nt, Homo sapiens
  misc_RNA (1)...(19): siRNA sense strand
ggugagaagcccaauauau

SEQ ID NO: 1452550 - RNA, 19 nt, Homo sapiens
  misc_RNA (1)...(19): siRNA sense strand
gaaaagccuucauauggaa

SEQ ID NO: 1452551 - RNA, 19 nt, Homo sapiens
  misc_RNA (1)...(19): siRNA sense strand
gggagaaacccuaugaaug

SEQ ID NO: 1452552 - RNA, 19 nt, Homo sapiens
  misc_RNA (1)...(19): siRNA sense strand
gugagaagcccaauauaug

SEQ ID NO: 1452553 - RNA, 19 nt, Homo sapiens
  misc_RNA (1)...(19): siRNA sense strand
gagaucagaccucuuuaga

SEQ ID NO: 1452554 - RNA, 19 nt, Homo sapiens
  misc_RNA (1)...(19): siRNA sense strand
gaaaaugcauaguggagaa

SEQ ID NO: 1452555 - RNA, 19 nt, Homo sapiens
  misc_RNA (1)...(19): siRNA sense strand
guaaaugugggaaagcuuu

SEQ ID NO: 1452556 - RNA, 19 nt, Homo sapiens
  misc_RNA (1)...(19): siRNA sense strand
agaaagacacuaugaaugu

SEQ ID NO: 1452557 - RNA, 19 nt, Homo sapiens
  misc_RNA (1)...(19): siRNA sense strand
gagaauucauacuggagaa

SEQ ID NO: 1452558 - RNA, 19 nt, Homo sapiens
  misc_RNA (1)...(19): siRNA sense strand
ggagagaaacacuaugaau

SEQ ID NO: 1452559 - RNA, 19 nt, Homo sapiens
  misc_RNA (1)...(19): siRNA sense strand
gagaauucauacaggagaa

SEQ ID NO: 1452560 - RNA, 19 nt, Homo sapiens
  misc_RNA (1)...(19): siRNA sense strand
gaaacagugcaacaaagaa

SEQ ID NO: 1452561 - RNA, 19 nt, Homo sapiens
  misc_RNA (1)...(19): siRNA sense strand
ccagaaagccacacuaagu

SEQ ID NO: 1452562 - RNA, 19 nt, Homo sapiens
  misc_RNA (1)...(19): siRNA sense strand
gagaaaagccguaugaaug

SEQ ID NO: 1452563 - RNA, 19 nt, Homo sapiens
  misc_RNA (1)...(19): siRNA sense strand
guaccaaauucccaaguca

SEQ ID NO: 1452564 - RNA, 19 nt, Homo sapiens
  misc_RNA (1)...(19): siRNA sense strand
gaggagaagcuuuaugugu

SEQ ID NO: 1452565 - RNA, 19 nt, Homo sapiens
  misc_RNA (1)...(19): siRNA sense strand
gagaaacccuaugaaugug

SEQ ID NO: 1452566 - RNA, 19 nt, Homo sapiens
  misc_RNA (1)...(19): siRNA sense strand
gaaggccuuuauccagaaa

SEQ ID NO: 1452567 - RNA, 19 nt, Homo sapiens
  misc_RNA (1)...(19): siRNA sense strand
ugggaaggcuuucacaaga

SEQ ID NO: 1452568 - RNA, 19 nt, Homo sapiens
  misc_RNA (1)...(19): siRNA sense strand
guacauccaaguguuuaua

SEQ ID NO: 1452569 - RNA, 19 nt, Homo sapiens
  misc_RNA (1)...(19): siRNA sense strand
ggcagaaacccuacaaaug

SEQ ID NO: 1452570 - RNA, 19 nt, Homo sapiens
  misc_RNA (1)...(19): siRNA sense strand
gagaagauucauuauguuc

SEQ ID NO: 1452571 - RNA, 19 nt, Homo sapiens
  misc_RNA (1)...(19): siRNA sense strand
ccaugugcaucaaagaauu

SEQ ID NO: 1452572 - RNA, 19 nt, Homo sapiens
  misc_RNA (1)...(19): siRNA sense strand
gcacucaggaugcaucaga

SEQ ID NO: 1452573 - RNA, 19 nt, Homo sapiens
  misc_RNA (1)...(19): siRNA sense strand
gugaaaguauugauuaagg

SEQ ID NO: 1452574 - RNA, 19 nt, Homo sapiens
  misc_RNA (1)...(19): siRNA sense strand
cuaaguaugcaucagauaa

SEQ ID NO: 1452575 - RNA, 19 nt, Homo sapiens
  misc_RNA (1)...(19): siRNA sense strand
acacaucagagaauucaua

SEQ ID NO: 1452576 - RNA, 19 nt, Homo sapiens
  misc_RNA (1)...(19): siRNA sense strand
agacaucugagaauucaua

SEQ ID NO: 1452577 - RNA, 19 nt, Homo sapiens
  misc_RNA (1)...(19): siRNA sense strand
gcuuguuccuucaauuaaa

SEQ ID NO: 1452578 - RNA, 19 nt, Homo sapiens
  misc_RNA (1)...(19): siRNA sense strand
gggcagaaacccuacaaau

SEQ ID NO: 1452579 - RNA, 19 nt, Homo sapiens
  misc_RNA (1)...(19): siRNA sense strand
gaaagccacacuaaguaug

SEQ ID NO: 1452580 - RNA, 19 nt, Homo sapiens
  misc_RNA (1)...(19): siRNA sense strand
ucucauaacacaucagaaa

SEQ ID NO: 1452581 - RNA, 19 nt, Homo sapiens
  misc_RNA (1)...(19): siRNA sense strand
acacuaagcgugcaucaga

SEQ ID NO: 1452582 - RNA, 19 nt, Homo sapiens
  misc_RNA (1)...(19): siRNA sense strand
caauauacaucagaagucu

SEQ ID NO: 1452583 - RNA, 19 nt, Homo sapiens
  misc_RNA (1)...(19): siRNA sense strand
ggccuucacugaccgauca

SEQ ID NO: 1452584 - RNA, 19 nt, Homo sapiens
  misc_RNA (1)...(19): siRNA sense strand
guggaaaggccuucacuga

SEQ ID NO: 1452585 - RNA, 19 nt, Homo sapiens
  misc_RNA (1)...(19): siRNA sense strand
agagaagccuuaugaaugc

SEQ ID NO: 1452586 - RNA, 19 nt, Homo sapiens
  misc_RNA (1)...(19): siRNA sense strand
gaagaacuguggcaagaua

SEQ ID NO: 1452587 - RNA, 19 nt, Homo sapiens
  misc_RNA (1)...(19): siRNA sense strand
gaucaaaucucauaacaca

SEQ ID NO: 1452588 - RNA, 19 nt, Homo sapiens
  misc_RNA (1)...(19): siRNA sense strand
gagaaacccuauauaugua

SEQ ID NO: 1452589 - RNA, 19 nt, Homo sapiens
  misc_RNA (1)...(19): siRNA sense strand
gaucgaaucucauuaaaca

SEQ ID NO: 1452590 - RNA, 19 nt, Homo sapiens
  misc_RNA (1)...(19): siRNA sense strand
ggacaaaccucaccacaca

SEQ ID NO: 1452591 - RNA, 19 nt, Homo sapiens
  misc_RNA (1)...(19): siRNA sense strand
caucagaaaucucauauug

SEQ ID NO: 1452592 - RNA, 19 nt, Homo sapiens
  misc_RNA (1)...(19): siRNA sense strand
gaucagaccucuuuagaca

SEQ ID NO: 1452593 - RNA, 19 nt, Homo sapiens
  misc_RNA (1)...(19): siRNA sense strand
gaaagacacuaugaaugua

SEQ ID NO: 1452594 - RNA, 19 nt, Homo sapiens
  misc_RNA (1)...(19): siRNA sense strand
ggaaauccuucacuaagaa

SEQ ID NO: 1452595 - RNA, 19 nt, Homo sapiens
  misc_RNA (1)...(19): siRNA sense strand
ggaaaugcuucacuaagaa

SEQ ID NO: 1452596 - RNA, 19 nt, Homo sapiens
  misc_RNA (1)...(19): siRNA sense strand
gaacaugaccacuaugaaa

SEQ ID NO: 1452597 - RNA, 19 nt, Homo sapiens
  misc_RNA (1)...(19): siRNA sense strand
ggaaaggucuucacucaca

SEQ ID NO: 1452598 - RNA, 19 nt, Homo sapiens
  misc_RNA (1)...(19): siRNA sense strand
gaacucagaccucaguaua

SEQ ID NO: 1452599 - RNA, 19 nt, Homo sapiens
  misc_RNA (1)...(19): siRNA sense strand
guaaugggcuucacucaga

SEQ ID NO: 1452600 - RNA, 19 nt, Homo sapiens
  misc_RNA (1)...(19): siRNA sense strand
gggaaaugcuucacuaaga

SEQ ID NO: 1452601 - RNA, 19 nt, Homo sapiens
  misc_RNA (1)...(19): siRNA sense strand
ggagaaacccuaugaaugu

SEQ ID NO: 1452602 - RNA, 19 nt, Homo sapiens
  misc_RNA (1)...(19): siRNA sense strand
ggagagaaacccuauauau

SEQ ID NO: 1452603 - RNA, 19 nt, Homo sapiens
  misc_RNA (1)...(19): siRNA sense strand
caauauaugugcugaaugu

SEQ ID NO: 1452604 - RNA, 19 nt, Homo sapiens
  misc_RNA (1)...(19): siRNA sense strand
gagauuugaucaacccaua

SEQ ID NO: 1452605 - RNA, 19 nt, Homo sapiens
  misc_RNA (1)...(19): siRNA sense strand
gagagaagccuuaugaaug

SEQ ID NO: 1452606 - RNA, 19 nt, Homo sapiens
  misc_RNA (1)...(19): siRNA sense strand
ucagaaaucucauauugga

SEQ ID NO: 1452607 - RNA, 19 nt, Homo sapiens
  misc_RNA (1)...(19): siRNA sense strand
ggagagaaaccuuauguau

SEQ ID NO: 1452608 - RNA, 19 nt, Homo sapiens
  misc_RNA (1)...(19): siRNA sense strand
aaagaaaccuuaugcuugu

SEQ ID NO: 1452609 - RNA, 19 nt, Homo sapiens
  misc_RNA (1)...(19): siRNA sense strand
gaagucacgccucaauaua

SEQ ID NO: 1452610 - RNA, 19 nt, Homo sapiens
  misc_RNA (1)...(19): siRNA sense strand
ggaaagccuucauccagaa

SEQ ID NO: 1452611 - RNA, 19 nt, Homo sapiens
  misc_RNA (1)...(19): siRNA sense strand
cauaggagaagauucauua

SEQ ID NO: 1452612 - RNA, 19 nt, Homo sapiens
  misc_RNA (1)...(19): siRNA sense strand
gggaaauccuucacuaaga

SEQ ID NO: 1452613 - RNA, 19 nt, Homo sapiens
  misc_RNA (1)...(19): siRNA sense strand
caacacacaucagagaauu

SEQ ID NO: 1452614 - RNA, 19 nt, Homo sapiens
  misc_RNA (1)...(19): siRNA sense strand
ggagaagauucauuauguu

SEQ ID NO: 1452615 - RNA, 19 nt, Homo sapiens
  misc_RNA (1)...(19): siRNA sense strand
ggaaagaaaccuuaugcuu

SEQ ID NO: 1452616 - RNA, 19 nt, Homo sapiens
  misc_RNA (1)...(19): siRNA sense strand
gaagcauacuuuaaacuca

SEQ ID NO: 1452617 - RNA, 19 nt, Homo sapiens
  misc_RNA (1)...(19): siRNA sense strand
gagagaaacccuauauaug

SEQ ID NO: 1452618 - RNA, 19 nt, Homo sapiens
  misc_RNA (1)...(19): siRNA sense strand
gaaacacuaugaaugcaau

SEQ ID NO: 1452619 - RNA, 19 nt, Homo sapiens
  misc_RNA (1)...(19): siRNA sense strand
gcaaauuccugugaacaug

SEQ ID NO: 1452620 - RNA, 19 nt, Homo sapiens
  misc_RNA (1)...(19): siRNA sense strand
gcaagauaaugaccagcua

SEQ ID NO: 1452621 - RNA, 19 nt, Homo sapiens
  misc_RNA (1)...(19): siRNA sense strand
gagagaaacccuauaagug

SEQ ID NO: 1452622 - RNA, 19 nt, Homo sapiens
  misc_RNA (1)...(19): siRNA sense strand
ggaagucacgccucaauau

SEQ ID NO: 1452623 - RNA, 19 nt, Homo sapiens
  misc_RNA (1)...(19): siRNA sense strand
aaucaaaccucauuacaca

SEQ ID NO: 1452624 - RNA, 19 nt, Homo sapiens
  misc_RNA (1)...(19): siRNA sense strand
ggagaaagacacuaugaau

SEQ ID NO: 1452625 - RNA, 19 nt, Homo sapiens
  misc_RNA (1)...(19): siRNA sense strand
ggaaggccuuuauccagaa

SEQ ID NO: 1452626 - RNA, 19 nt, Homo sapiens
  misc_RNA (1)...(19): siRNA sense strand
ccagucaaaucucauuaaa

SEQ ID NO: 1452627 - RNA, 19 nt, Homo sapiens
  misc_RNA (1)...(19): siRNA sense strand
gcagaaacccuacaaaugc

SEQ ID NO: 1452628 - RNA, 19 nt, Homo sapiens
  misc_RNA (1)...(19): siRNA sense strand
ggagaagcuuuaugugugu

SEQ ID NO: 1452629 - RNA, 19 nt, Homo sapiens
  misc_RNA (1)...(19): siRNA sense strand
ggacgugacuguggacuuc

SEQ ID NO: 1452630 - RNA, 19 nt, Homo sapiens
  misc_RNA (1)...(19): siRNA sense strand
gagagaaaccuuauguaug

SEQ ID NO: 1452631 - RNA, 19 nt, Homo sapiens
  misc_RNA (1)...(19): siRNA sense strand
gagaauucaugcuggagaa

SEQ ID NO: 1452632 - RNA, 19 nt, Homo sapiens
  misc_RNA (1)...(19): siRNA sense strand
ggagagaagccuuaugaau

SEQ ID NO: 1452633 - RNA, 19 nt, Homo sapiens
  misc_RNA (1)...(19): siRNA sense strand
ggagagaaacccuauaagu

SEQ ID NO: 1452634 - RNA, 19 nt, Homo sapiens
  misc_RNA (1)...(19): siRNA sense strand
gagagaaacacuaugaaug

SEQ ID NO: 1452635 - RNA, 19 nt, Homo sapiens
  misc_RNA (1)...(19): siRNA sense strand
caucagaagucucauacug

SEQ ID NO: 1452636 - RNA, 19 nt, Homo sapiens
  misc_RNA (1)...(19): siRNA sense strand
ggagagagacacuaugaau

SEQ ID NO: 1452637 - RNA, 19 nt, Homo sapiens
  misc_RNA (1)...(19): siRNA sense strand
guggaaaggucuucacuca

SEQ ID NO: 1452638 - RNA, 19 nt, Homo sapiens
  misc_RNA (1)...(19): siRNA sense strand
agagaaaccuuauguaugc

SEQ ID NO: 1452639 - RNA, 19 nt, Homo sapiens
  misc_RNA (1)...(19): siRNA sense strand
guacugggaugugacacua

SEQ ID NO: 1452640 - RNA, 19 nt, Homo sapiens
  misc_RNA (1)...(19): siRNA sense strand
ccagaaaucgcacuucauu

SEQ ID NO: 1452641 - RNA, 19 nt, Homo sapiens
  misc_RNA (1)...(19): siRNA sense strand
gggaaggcuuucacaagaa

SEQ ID NO: 1452642 - RNA, 19 nt, Homo sapiens
  misc_RNA (1)...(19): siRNA sense strand
uagaagaacuguggcaaga

SEQ ID NO: 1452643 - RNA, 19 nt, Homo sapiens
  misc_RNA (1)...(19): siRNA sense strand
gagaaagacacuaugaaug

SEQ ID NO: 1452644 - RNA, 19 nt, Homo sapiens
  misc_RNA (1)...(19): siRNA sense strand
agagaaacccuauauaugu

SEQ ID NO: 1452645 - RNA, 19 nt, Homo sapiens
  misc_RNA (1)...(19): siRNA sense strand
cagaaggccuuuacugaca

SEQ ID NO: 1452646 - RNA, 19 nt, Homo sapiens
  misc_RNA (1)...(19): siRNA sense strand
cagaaagccacacuaagua

SEQ ID NO: 1452647 - RNA, 19 nt, Homo sapiens
  misc_RNA (1)...(19): siRNA sense strand
ggaaaagccuucauaugga

SEQ ID NO: 1452648 - RNA, 19 nt, Homo sapiens
  misc_RNA (1)...(19): siRNA sense strand
aggagaagauucauuaugu

SEQ ID NO: 1452649 - RNA, 19 nt, Homo sapiens
  misc_RNA (1)...(19): siRNA sense strand
ggugagaagcccaauauau

SEQ ID NO: 1452650 - RNA, 19 nt, Homo sapiens
  misc_RNA (1)...(19): siRNA sense strand
gaaaagccuucauauggaa

SEQ ID NO: 1452651 - RNA, 19 nt, Homo sapiens
  misc_RNA (1)...(19): siRNA sense strand
gggagaaacccuaugaaug

SEQ ID NO: 1452652 - RNA, 19 nt, Homo sapiens
  misc_RNA (1)...(19): siRNA sense strand
gugagaagcccaauauaug

SEQ ID NO: 1452653 - RNA, 19 nt, Homo sapiens
  misc_RNA (1)...(19): siRNA sense strand
gagaucagaccucuuuaga

SEQ ID NO: 1452654 - RNA, 19 nt, Homo sapiens
  misc_RNA (1)...(19): siRNA sense strand
gaaaaugcauaguggagaa

SEQ ID NO: 1452655 - RNA, 19 nt, Homo sapiens
  misc_RNA (1)...(19): siRNA sense strand
guaaaugugggaaagcuuu

SEQ ID NO: 1452656 - RNA, 19 nt, Homo sapiens
  misc_RNA (1)...(19): siRNA sense strand
agaaagacacuaugaaugu

SEQ ID NO: 1452657 - RNA, 19 nt, Homo sapiens
  misc_RNA (1)...(19): siRNA sense strand
gagaauucauacuggagaa

SEQ ID NO: 1452658 - RNA, 19 nt, Homo sapiens
  misc_RNA (1)...(19): siRNA sense strand
ggagagaaacacuaugaau

SEQ ID NO: 1452659 - RNA, 19 nt, Homo sapiens
  misc_RNA (1)...(19): siRNA sense strand
gagaauucauacaggagaa

SEQ ID NO: 1452660 - RNA, 19 nt, Homo sapiens
  misc_RNA (1)...(19): siRNA sense strand
gaaacagugcaacaaagaa

SEQ ID NO: 1452661 - RNA, 19 nt, Homo sapiens
  misc_RNA (1)...(19): siRNA sense strand
ccagaaagccacacuaagu

SEQ ID NO: 1452662 - RNA, 19 nt, Homo sapiens
  misc_RNA (1)...(19): siRNA sense strand
gagaaaagccguaugaaug

SEQ ID NO: 1452663 - RNA, 19 nt, Homo sapiens
  misc_RNA (1)...(19): siRNA sense strand
guaccaaauucccaaguca

SEQ ID NO: 1452664 - RNA, 19 nt, Homo sapiens
  misc_RNA (1)...(19): siRNA sense strand
gaggagaagcuuuaugugu

SEQ ID NO: 1452665 - RNA, 19 nt, Homo sapiens
  misc_RNA (1)...(19): siRNA sense strand
gagaaacccuaugaaugug

SEQ ID NO: 1452666 - RNA, 19 nt, Homo sapiens
  misc_RNA (1)...(19): siRNA sense strand
gaaggccuuuauccagaaa

SEQ ID NO: 1452667 - RNA, 19 nt, Homo sapiens
  misc_RNA (1)...(19): siRNA sense strand
ugggaaggcuuucacaaga

SEQ ID NO: 1452668 - RNA, 19 nt, Homo sapiens
  misc_RNA (1)...(19): siRNA sense strand
guacauccaaguguuuaua

SEQ ID NO: 1452669 - RNA, 19 nt, Homo sapiens
  misc_RNA (1)...(19): siRNA sense strand
ggcagaaacccuacaaaug

SEQ ID NO: 1452670 - RNA, 19 nt, Homo sapiens
  misc_RNA (1)...(19): siRNA sense strand
gagaagauucauuauguuc

SEQ ID NO: 1452671 - RNA, 19 nt, Homo sapiens
  misc_RNA (1)...(19): siRNA sense strand
ccaugugcaucaaagaauu

SEQ ID NO: 1452672 - RNA, 19 nt, Homo sapiens
  misc_RNA (1)...(19): siRNA sense strand
gcacucaggaugcaucaga

SEQ ID NO: 1452673 - RNA, 19 nt, Homo sapiens
  misc_RNA (1)...(19): siRNA sense strand
gugaaaguauugauuaagg

SEQ ID NO: 1452674 - RNA, 19 nt, Homo sapiens
  misc_RNA (1)...(19): siRNA sense strand
cuaaguaugcaucagauaa

SEQ ID NO: 1452675 - RNA, 19 nt, Homo sapiens
  misc_RNA (1)...(19): siRNA sense strand
acacaucagagaauucaua

SEQ ID NO: 1452676 - RNA, 19 nt, Homo sapiens
  misc_RNA (1)...(19): siRNA sense strand
agacaucugagaauucaua

SEQ ID NO: 1452677 - RNA, 19 nt, Homo sapiens
  misc_RNA (1)...(19): siRNA sense strand
gcuuguuccuucaauuaaa

SEQ ID NO: 1452678 - RNA, 19 nt, Homo sapiens
  misc_RNA (1)...(19): siRNA sense strand
gggcagaaacccuacaaau

SEQ ID NO: 1452679 - RNA, 19 nt, Homo sapiens
  misc_RNA (1)...(19): siRNA sense strand
gaaagccacacuaaguaug

SEQ ID NO: 1452680 - RNA, 19 nt, Homo sapiens
  misc_RNA (1)...(19): siRNA sense strand
ucucauaacacaucagaaa

SEQ ID NO: 1452681 - RNA, 19 nt, Homo sapiens
  misc_RNA (1)...(19): siRNA sense strand
acacuaagcgugcaucaga

SEQ ID NO: 1452682 - RNA, 19 nt, Homo sapiens
  misc_RNA (1)...(19): siRNA sense strand
caauauacaucagaagucu

SEQ ID NO: 1452683 - RNA, 19 nt, Homo sapiens
  misc_RNA (1)...(19): siRNA sense strand
ggccuucacugaccgauca

SEQ ID NO: 1452684 - RNA, 19 nt, Homo sapiens
  misc_RNA (1)...(19): siRNA sense strand
guggaaaggccuucacuga

SEQ ID NO: 1452685 - RNA, 19 nt, Homo sapiens
  misc_RNA (1)...(19): siRNA sense strand
agagaagccuuaugaaugc

SEQ ID NO: 1452686 - RNA, 19 nt, Homo sapiens
  misc_RNA (1)...(19): siRNA sense strand
gaggagcgcuguuugaguu

SEQ ID NO: 1452687 - RNA, 19 nt, Homo sapiens
  misc_RNA (1)...(19): siRNA sense strand
ggacgaggagcgcuguuug

SEQ ID NO: 1452688 - RNA, 19 nt, Homo sapiens
  misc_RNA (1)...(19): siRNA sense strand
gcuccgggaugaagaacug

SEQ ID NO: 1452689 - RNA, 19 nt, Homo sapiens
  misc_RNA (1)...(19): siRNA sense strand
uggaggcacucgaggagaa

SEQ ID NO: 1452690 - RNA, 19 nt, Homo sapiens
  misc_RNA (1)...(19): siRNA sense strand
gaggaugcgcugcgaaauc

SEQ ID NO: 1452691 - RNA, 19 nt, Homo sapiens
  misc_RNA (1)...(19): siRNA sense strand
gacgaggagcgcuguuuga

SEQ ID NO: 1452692 - RNA, 19 nt, Homo sapiens
  misc_RNA (1)...(19): siRNA sense strand
ugaaggaccaacagacguu

SEQ ID NO: 1452693 - RNA, 19 nt, Homo sapiens
  misc_RNA (1)...(19): siRNA sense strand
gaugcgcugcgaaaucuga

SEQ ID NO: 1452694 - RNA, 19 nt, Homo sapiens
  misc_RNA (1)...(19): siRNA sense strand
gggucagccuguagugaau

SEQ ID NO: 1452695 - RNA, 19 nt, Homo sapiens
  misc_RNA (1)...(19): siRNA sense strand
gcucugugggucucaaaug

SEQ ID NO: 1452696 - RNA, 19 nt, Homo sapiens
  misc_RNA (1)...(19): siRNA sense strand
uggacucgcuggccuacga

SEQ ID NO: 1452697 - RNA, 19 nt, Homo sapiens
  misc_RNA (1)...(19): siRNA sense strand
aggaugcgcugcgaaaucu

SEQ ID NO: 1452698 - RNA, 19 nt, Homo sapiens
  misc_RNA (1)...(19): siRNA sense strand
gagcgcuguuugaguugca

SEQ ID NO: 1452699 - RNA, 19 nt, Homo sapiens
  misc_RNA (1)...(19): siRNA sense strand
ggaggaugcgcugcgaaau

SEQ ID NO: 1452700 - RNA, 19 nt, Homo sapiens
  misc_RNA (1)...(19): siRNA sense strand
gaggagcgcuguuugaguu

SEQ ID NO: 1452701 - RNA, 19 nt, Homo sapiens
  misc_RNA (1)...(19): siRNA sense strand
ggacgaggagcgcuguuug

SEQ ID NO: 1452702 - RNA, 19 nt, Homo sapiens
  misc_RNA (1)...(19): siRNA sense strand
gcuccgggaugaagaacug

SEQ ID NO: 1452703 - RNA, 19 nt, Homo sapiens
  misc_RNA (1)...(19): siRNA sense strand
uggaggcacucgaggagaa

SEQ ID NO: 1452704 - RNA, 19 nt, Homo sapiens
  misc_RNA (1)...(19): siRNA sense strand
gaggaugcgcugcgaaauc

SEQ ID NO: 1452705 - RNA, 19 nt, Homo sapiens
  misc_RNA (1)...(19): siRNA sense strand
gacgaggagcgcuguuuga

SEQ ID NO: 1452706 - RNA, 19 nt, Homo sapiens
  misc_RNA (1)...(19): siRNA sense strand
ugaaggaccaacagacguu

SEQ ID NO: 1452707 - RNA, 19 nt, Homo sapiens
  misc_RNA (1)...(19): siRNA sense strand
gaugcgcugcgaaaucuga

SEQ ID NO: 1452708 - RNA, 19 nt, Homo sapiens
  misc_RNA (1)...(19): siRNA sense strand
gggucagccuguagugaau

SEQ ID NO: 1452709 - RNA, 19 nt, Homo sapiens
  misc_RNA (1)...(19): siRNA sense strand
gcucugugggucucaaaug

SEQ ID NO: 1452710 - RNA, 19 nt, Homo sapiens
  misc_RNA (1)...(19): siRNA sense strand
uggacucgcuggccuacga

SEQ ID NO: 1452711 - RNA, 19 nt, Homo sapiens
  misc_RNA (1)...(19): siRNA sense strand
aggaugcgcugcgaaaucu

SEQ ID NO: 1452712 - RNA, 19 nt, Homo sapiens
  misc_RNA (1)...(19): siRNA sense strand
gagcgcuguuugaguugca

SEQ ID NO: 1452713 - RNA, 19 nt, Homo sapiens
  misc_RNA (1)...(19): siRNA sense strand
ggaggaugcgcugcgaaau

SEQ ID NO: 1452714 - RNA, 19 nt, Homo sapiens
  misc_RNA (1)...(19): siRNA sense strand
gaacaggcaucuauccuuu

SEQ ID NO: 1452715 - RNA, 19 nt, Homo sapiens
  misc_RNA (1)...(19): siRNA sense strand
caacgaaacuggcuuugaa

SEQ ID NO: 1452716 - RNA, 19 nt, Homo sapiens
  misc_RNA (1)...(19): siRNA sense strand
gaaacuggcuuugaaauca

SEQ ID NO: 1452717 - RNA, 19 nt, Homo sapiens
  misc_RNA (1)...(19): siRNA sense strand
ccagcuaucuugcuucuga

SEQ ID NO: 1452718 - RNA, 19 nt, Homo sapiens
  misc_RNA (1)...(19): siRNA sense strand
ggaccuggcucccaauucu

SEQ ID NO: 1452719 - RNA, 19 nt, Homo sapiens
  misc_RNA (1)...(19): siRNA sense strand
ggaacaaagucguggaaag

SEQ ID NO: 1452720 - RNA, 19 nt, Homo sapiens
  misc_RNA (1)...(19): siRNA sense strand
gaagaaggaaggagaggaa

SEQ ID NO: 1452721 - RNA, 19 nt, Homo sapiens
  misc_RNA (1)...(19): siRNA sense strand
gauaguaacaccuucagaa

SEQ ID NO: 1452722 - RNA, 19 nt, Homo sapiens
  misc_RNA (1)...(19): siRNA sense strand
caugguggcuuuaggaaga

SEQ ID NO: 1452723 - RNA, 19 nt, Homo sapiens
  misc_RNA (1)...(19): siRNA sense strand
gaagaagaaagcauggaaa

SEQ ID NO: 1452724 - RNA, 19 nt, Homo sapiens
  misc_RNA (1)...(19): siRNA sense strand
cuaucuugcuucugaaaua

SEQ ID NO: 1452725 - RNA, 19 nt, Homo sapiens
  misc_RNA (1)...(19): siRNA sense strand
ggaagaagaaagcauggaa

SEQ ID NO: 1452726 - RNA, 19 nt, Homo sapiens
  misc_RNA (1)...(19): siRNA sense strand
gaagaaagcauggaaacuc

SEQ ID NO: 1452727 - RNA, 19 nt, Homo sapiens
  misc_RNA (1)...(19): siRNA sense strand
gagcacaggauccuucuga

SEQ ID NO: 1452728 - RNA, 19 nt, Homo sapiens
  misc_RNA (1)...(19): siRNA sense strand
gaaggaaggagaggaagaa

SEQ ID NO: 1452729 - RNA, 19 nt, Homo sapiens
  misc_RNA (1)...(19): siRNA sense strand
uaccugggauggagugaua

SEQ ID NO: 1452730 - RNA, 19 nt, Homo sapiens
  misc_RNA (1)...(19): siRNA sense strand
ccauuugacuucuauuugu

SEQ ID NO: 1452731 - RNA, 19 nt, Homo sapiens
  misc_RNA (1)...(19): siRNA sense strand
ucaagauucugccaacguu

SEQ ID NO: 1452732 - RNA, 19 nt, Homo sapiens
  misc_RNA (1)...(19): siRNA sense strand
ucaaggagaggaagaagaa

SEQ ID NO: 1452733 - RNA, 19 nt, Homo sapiens
  misc_RNA (1)...(19): siRNA sense strand
ggagggugaugccagcuau

SEQ ID NO: 1452734 - RNA, 19 nt, Homo sapiens
  misc_RNA (1)...(19): siRNA sense strand
ggacauggucugcuauaca

SEQ ID NO: 1452735 - RNA, 19 nt, Homo sapiens
  misc_RNA (1)...(19): siRNA sense strand
acagugaagauucucauua

SEQ ID NO: 1452736 - RNA, 19 nt, Homo sapiens
  misc_RNA (1)...(19): siRNA sense strand
uaccacauaucccauuuga

SEQ ID NO: 1452737 - RNA, 19 nt, Homo sapiens
  misc_RNA (1)...(19): siRNA sense strand
ggaaggagaggaagaagag

SEQ ID NO: 1452738 - RNA, 19 nt, Homo sapiens
  misc_RNA (1)...(19): siRNA sense strand
ccacauaucccauuugacu

SEQ ID NO: 1452739 - RNA, 19 nt, Homo sapiens
  misc_RNA (1)...(19): siRNA sense strand
uaaccaugcugaccaacga

SEQ ID NO: 1452740 - RNA, 19 nt, Homo sapiens
  misc_RNA (1)...(19): siRNA sense strand
gcuucucaguccacaguua

SEQ ID NO: 1452741 - RNA, 19 nt, Homo sapiens
  misc_RNA (1)...(19): siRNA sense strand
gaacaaagucguggaaagc

SEQ ID NO: 1452742 - RNA, 19 nt, Homo sapiens
  misc_RNA (1)...(19): siRNA sense strand
cugaaggacuugaggauuc

SEQ ID NO: 1452743 - RNA, 19 nt, Homo sapiens
  misc_RNA (1)...(19): siRNA sense strand
aagaaagcauggaaacuca

SEQ ID NO: 1452744 - RNA, 19 nt, Homo sapiens
  misc_RNA (1)...(19): siRNA sense strand
gaugccagcuaucuugcuu

SEQ ID NO: 1452745 - RNA, 19 nt, Homo sapiens
  misc_RNA (1)...(19): siRNA sense strand
gacauggucugcuauacag

SEQ ID NO: 1452746 - RNA, 19 nt, Homo sapiens
  misc_RNA (1)...(19): siRNA sense strand
cgacaggugggauccuaua

SEQ ID NO: 1452747 - RNA, 19 nt, Homo sapiens
  misc_RNA (1)...(19): siRNA sense strand
ggaagaagaggagaauaca

SEQ ID NO: 1452748 - RNA, 19 nt, Homo sapiens
  misc_RNA (1)...(19): siRNA sense strand
cagugaagauucucauuac

SEQ ID NO: 1452749 - RNA, 19 nt, Homo sapiens
  misc_RNA (1)...(19): siRNA sense strand
ggagugauaguaacaccuu

SEQ ID NO: 1452750 - RNA, 19 nt, Homo sapiens
  misc_RNA (1)...(19): siRNA sense strand
ccucucacaugguggcuuu

SEQ ID NO: 1452751 - RNA, 19 nt, Homo sapiens
  misc_RNA (1)...(19): siRNA sense strand
caacagugccacccaaucu

SEQ ID NO: 1452752 - RNA, 19 nt, Homo sapiens
  misc_RNA (1)...(19): siRNA sense strand
gcaaauugaagaaguucga

SEQ ID NO: 1452753 - RNA, 19 nt, Homo sapiens
  misc_RNA (1)...(19): siRNA sense strand
gugaagauucucauuacaa

SEQ ID NO: 1452754 - RNA, 19 nt, Homo sapiens
  misc_RNA (1)...(19): siRNA sense strand
ugaagauucucauuacaac

SEQ ID NO: 1452755 - RNA, 19 nt, Homo sapiens
  misc_RNA (1)...(19): siRNA sense strand
ggugaugccagcuaucuug

SEQ ID NO: 1452756 - RNA, 19 nt, Homo sapiens
  misc_RNA (1)...(19): siRNA sense strand
aagaagaggagaauacaga

SEQ ID NO: 1452757 - RNA, 19 nt, Homo sapiens
  misc_RNA (1)...(19): siRNA sense strand
ugacuucuauuugugugaa

SEQ ID NO: 1452758 - RNA, 19 nt, Homo sapiens
  misc_RNA (1)...(19): siRNA sense strand
agaggagaauacagaagaa

SEQ ID NO: 1452759 - RNA, 19 nt, Homo sapiens
  misc_RNA (1)...(19): siRNA sense strand
gccagcaccugaugaaacu

SEQ ID NO: 1452760 - RNA, 19 nt, Homo sapiens
  misc_RNA (1)...(19): siRNA sense strand
gaguggcaacuuuagagua

SEQ ID NO: 1452761 - RNA, 19 nt, Homo sapiens
  misc_RNA (1)...(19): siRNA sense strand
gaccaacgaaacuggcuuu

SEQ ID NO: 1452762 - RNA, 19 nt, Homo sapiens
  misc_RNA (1)...(19): siRNA sense strand
agaagaaccaccucaagga

SEQ ID NO: 1452763 - RNA, 19 nt, Homo sapiens
  misc_RNA (1)...(19): siRNA sense strand
agaaaaggcuuaugagaag

SEQ ID NO: 1452764 - RNA, 19 nt, Homo sapiens
  misc_RNA (1)...(19): siRNA sense strand
gccauuaugcugugaugaa

SEQ ID NO: 1452765 - RNA, 19 nt, Homo sapiens
  misc_RNA (1)...(19): siRNA sense strand
gcuuugaaaucaguucuuc

SEQ ID NO: 1452766 - RNA, 19 nt, Homo sapiens
  misc_RNA (1)...(19): siRNA sense strand
caagccagcaccugaugaa

SEQ ID NO: 1452767 - RNA, 19 nt, Homo sapiens
  misc_RNA (1)...(19): siRNA sense strand
uuaaaguucucaucagacu

SEQ ID NO: 1452768 - RNA, 19 nt, Homo sapiens
  misc_RNA (1)...(19): siRNA sense strand
aguuaaaguucucaucaga

SEQ ID NO: 1452769 - RNA, 19 nt, Homo sapiens
  misc_RNA (1)...(19): siRNA sense strand
cgaaacuggcuuugaaauc

SEQ ID NO: 1452770 - RNA, 19 nt, Homo sapiens
  misc_RNA (1)...(19): siRNA sense strand
gaagaggagaauacagaag

SEQ ID NO: 1452771 - RNA, 19 nt, Homo sapiens
  misc_RNA (1)...(19): siRNA sense strand
gagaggaagaagaggagaa

SEQ ID NO: 1452772 - RNA, 19 nt, Homo sapiens
  misc_RNA (1)...(19): siRNA sense strand
gagaagccaccagagaaga

SEQ ID NO: 1452773 - RNA, 19 nt, Homo sapiens
  misc_RNA (1)...(19): siRNA sense strand
ugugagaguggcaacuuua

SEQ ID NO: 1452774 - RNA, 19 nt, Homo sapiens
  misc_RNA (1)...(19): siRNA sense strand
caggugggauccuauaaaa

SEQ ID NO: 1452775 - RNA, 19 nt, Homo sapiens
  misc_RNA (1)...(19): siRNA sense strand
acacagucaugacccuaga

SEQ ID NO: 1452776 - RNA, 19 nt, Homo sapiens
  misc_RNA (1)...(19): siRNA sense strand
gagaguggcaacuuuagag

SEQ ID NO: 1452777 - RNA, 19 nt, Homo sapiens
  misc_RNA (1)...(19): siRNA sense strand
agacagccuuuggcccuaa

SEQ ID NO: 1452778 - RNA, 19 nt, Homo sapiens
  misc_RNA (1)...(19): siRNA sense strand
uaucccauuugacuucuau

SEQ ID NO: 1452779 - RNA, 19 nt, Homo sapiens
  misc_RNA (1)...(19): siRNA sense strand
gacaggugggauccuauaa

SEQ ID NO: 1452780 - RNA, 19 nt, Homo sapiens
  misc_RNA (1)...(19): siRNA sense strand
aagaggagaauacagaaga

SEQ ID NO: 1452781 - RNA, 19 nt, Homo sapiens
  misc_RNA (1)...(19): siRNA sense strand
uaugagaagccaccagaga

SEQ ID NO: 1452782 - RNA, 19 nt, Homo sapiens
  misc_RNA (1)...(19): siRNA sense strand
cagaaaaggcuuaugagaa

SEQ ID NO: 1452783 - RNA, 19 nt, Homo sapiens
  misc_RNA (1)...(19): siRNA sense strand
auaguaacaccuucagaaa

SEQ ID NO: 1452784 - RNA, 19 nt, Homo sapiens
  misc_RNA (1)...(19): siRNA sense strand
ucacaugguggcuuuagga

SEQ ID NO: 1452785 - RNA, 19 nt, Homo sapiens
  misc_RNA (1)...(19): siRNA sense strand
guccgaauccucucacaug

SEQ ID NO: 1452786 - RNA, 19 nt, Homo sapiens
  misc_RNA (1)...(19): siRNA sense strand
cauuugacuucuauuugug

SEQ ID NO: 1452787 - RNA, 19 nt, Homo sapiens
  misc_RNA (1)...(19): siRNA sense strand
ccaacgaaacuggcuuuga

SEQ ID NO: 1452788 - RNA, 19 nt, Homo sapiens
  misc_RNA (1)...(19): siRNA sense strand
ggagaauacagaagaacca

SEQ ID NO: 1452789 - RNA, 19 nt, Homo sapiens
  misc_RNA (1)...(19): siRNA sense strand
gaggaagaagaggagaaua

SEQ ID NO: 1452790 - RNA, 19 nt, Homo sapiens
  misc_RNA (1)...(19): siRNA sense strand
ugggauggagugauaguaa

SEQ ID NO: 1452791 - RNA, 19 nt, Homo sapiens
  misc_RNA (1)...(19): siRNA sense strand
uguaccacauaucccauuu

SEQ ID NO: 1452792 - RNA, 19 nt, Homo sapiens
  misc_RNA (1)...(19): siRNA sense strand
ggauccagaacuccauuug

SEQ ID NO: 1452793 - RNA, 19 nt, Homo sapiens
  misc_RNA (1)...(19): siRNA sense strand
gaagauucucauuacaaca

SEQ ID NO: 1452794 - RNA, 19 nt, Homo sapiens
  misc_RNA (1)...(19): siRNA sense strand
uggcugaccugguggugau

SEQ ID NO: 1452795 - RNA, 19 nt, Homo sapiens
  misc_RNA (1)...(19): siRNA sense strand
gggauggagugauaguaac

SEQ ID NO: 1452796 - RNA, 19 nt, Homo sapiens
  misc_RNA (1)...(19): siRNA sense strand
caggacauggucugcuaua

SEQ ID NO: 1452797 - RNA, 19 nt, Homo sapiens
  misc_RNA (1)...(19): siRNA sense strand
gacagccuuuggcccuaaa

SEQ ID NO: 1452798 - RNA, 19 nt, Homo sapiens
  misc_RNA (1)...(19): siRNA sense strand
gaugcuacagugaagauuc

SEQ ID NO: 1452799 - RNA, 19 nt, Homo sapiens
  misc_RNA (1)...(19): siRNA sense strand
guggugauacucaagauuc

SEQ ID NO: 1452800 - RNA, 19 nt, Homo sapiens
  misc_RNA (1)...(19): siRNA sense strand
gaagaagaggagaauacag

SEQ ID NO: 1452801 - RNA, 19 nt, Homo sapiens
  misc_RNA (1)...(19): siRNA sense strand
cuggauccuugaccuacua

SEQ ID NO: 1452802 - RNA, 19 nt, Homo sapiens
  misc_RNA (1)...(19): siRNA sense strand
ugaacaggcaucuauccuu

SEQ ID NO: 1452803 - RNA, 19 nt, Homo sapiens
  misc_RNA (1)...(19): siRNA sense strand
ggauggagugauaguaaca

SEQ ID NO: 1452804 - RNA, 19 nt, Homo sapiens
  misc_RNA (1)...(19): siRNA sense strand
ugaagugcaaauugaagaa

SEQ ID NO: 1452805 - RNA, 19 nt, Homo sapiens
  misc_RNA (1)...(19): siRNA sense strand
ucaguccacaguuaaaguu

SEQ ID NO: 1452806 - RNA, 19 nt, Homo sapiens
  misc_RNA (1)...(19): siRNA sense strand
acaggcaucuauccuuucu

SEQ ID NO: 1452807 - RNA, 19 nt, Homo sapiens
  misc_RNA (1)...(19): siRNA sense strand
acaguuaaaguucucauca

SEQ ID NO: 1452808 - RNA, 19 nt, Homo sapiens
  misc_RNA (1)...(19): siRNA sense strand
acaggugggauccuauaaa

SEQ ID NO: 1452809 - RNA, 19 nt, Homo sapiens
  misc_RNA (1)...(19): siRNA sense strand
gaagugcaaauugaagaag

SEQ ID NO: 1452810 - RNA, 19 nt, Homo sapiens
  misc_RNA (1)...(19): siRNA sense strand
aggcaucuauccuuucucu

SEQ ID NO: 1452811 - RNA, 19 nt, Homo sapiens
  misc_RNA (1)...(19): siRNA sense strand
uccuuucucuggugacaaa

SEQ ID NO: 1452812 - RNA, 19 nt, Homo sapiens
  misc_RNA (1)...(19): siRNA sense strand
aaacuggcuuugaaaucag

SEQ ID NO: 1452813 - RNA, 19 nt, Homo sapiens
  misc_RNA (1)...(19): siRNA sense strand
uagaguacacacagucaug

SEQ ID NO: 1452814 - RNA, 19 nt, Homo sapiens
  misc_RNA (1)...(19): siRNA sense strand
caaagaggauucugaaaga

SEQ ID NO: 1452815 - RNA, 19 nt, Homo sapiens
  misc_RNA (1)...(19): siRNA sense strand
gaagauugauagucuaaug

SEQ ID NO: 1452816 - RNA, 19 nt, Homo sapiens
  misc_RNA (1)...(19): siRNA sense strand
uaacagaucuuguaaacca

SEQ ID NO: 1452817 - RNA, 19 nt, Homo sapiens
  misc_RNA (1)...(19): siRNA sense strand
gaagggagaccgagacaaa

SEQ ID NO: 1452818 - RNA, 19 nt, Homo sapiens
  misc_RNA (1)...(19): siRNA sense strand
uaagugaccucucuacaga

SEQ ID NO: 1452819 - RNA, 19 nt, Homo sapiens
  misc_RNA (1)...(19): siRNA sense strand
ccucugagcuuucuaaauc

SEQ ID NO: 1452820 - RNA, 19 nt, Homo sapiens
  misc_RNA (1)...(19): siRNA sense strand
gcaacucgcugacaaggau

SEQ ID NO: 1452821 - RNA, 19 nt, Homo sapiens
  misc_RNA (1)...(19): siRNA sense strand
aagaugagaugaacaaaga

SEQ ID NO: 1452822 - RNA, 19 nt, Homo sapiens
  misc_RNA (1)...(19): siRNA sense strand
agaacaagauccuuaaaga

SEQ ID NO: 1452823 - RNA, 19 nt, Homo sapiens
  misc_RNA (1)...(19): siRNA sense strand
gaaggcaguuccagucuca

SEQ ID NO: 1452824 - RNA, 19 nt, Homo sapiens
  misc_RNA (1)...(19): siRNA sense strand
gguaacagaucuuguaaac

SEQ ID NO: 1452825 - RNA, 19 nt, Homo sapiens
  misc_RNA (1)...(19): siRNA sense strand
gaacaagauccuuaaagau

SEQ ID NO: 1452826 - RNA, 19 nt, Homo sapiens
  misc_RNA (1)...(19): siRNA sense strand
gagaaggagugccucaugu

SEQ ID NO: 1452827 - RNA, 19 nt, Homo sapiens
  misc_RNA (1)...(19): siRNA sense strand
ggaaauuauuguccugaau

SEQ ID NO: 1452828 - RNA, 19 nt, Homo sapiens
  misc_RNA (1)...(19): siRNA sense strand
uuaugucgcugaagcuuua

SEQ ID NO: 1452829 - RNA, 19 nt, Homo sapiens
  misc_RNA (1)...(19): siRNA sense strand
ugaaggaguugaagcagaa

SEQ ID NO: 1452830 - RNA, 19 nt, Homo sapiens
  misc_RNA (1)...(19): siRNA sense strand
gcaaagaggauucugaaag

SEQ ID NO: 1452831 - RNA, 19 nt, Homo sapiens
  misc_RNA (1)...(19): siRNA sense strand
gaaauuauuguccugaaug

SEQ ID NO: 1452832 - RNA, 19 nt, Homo sapiens
  misc_RNA (1)...(19): siRNA sense strand
aaagagaacaagauccuua

SEQ ID NO: 1452833 - RNA, 19 nt, Homo sapiens
  misc_RNA (1)...(19): siRNA sense strand
ucacagccaucauaucaga

SEQ ID NO: 1452834 - RNA, 19 nt, Homo sapiens
  misc_RNA (1)...(19): siRNA sense strand
caaagaggcugagaacagu

SEQ ID NO: 1452835 - RNA, 19 nt, Homo sapiens
  misc_RNA (1)...(19): siRNA sense strand
acaagauccuuaaagauga

SEQ ID NO: 1452836 - RNA, 19 nt, Homo sapiens
  misc_RNA (1)...(19): siRNA sense strand
ggaaauacaaugugagaag

SEQ ID NO: 1452837 - RNA, 19 nt, Homo sapiens
  misc_RNA (1)...(19): siRNA sense strand
gaagaaacaccuacaacag

SEQ ID NO: 1452838 - RNA, 19 nt, Homo sapiens
  misc_RNA (1)...(19): siRNA sense strand
acaaagagagcuugaagaa

SEQ ID NO: 1452839 - RNA, 19 nt, Homo sapiens
  misc_RNA (1)...(19): siRNA sense strand
ccaagaauccaccucauug

SEQ ID NO: 1452840 - RNA, 19 nt, Homo sapiens
  misc_RNA (1)...(19): siRNA sense strand
uacagaagaugaugacuca

SEQ ID NO: 1452841 - RNA, 19 nt, Homo sapiens
  misc_RNA (1)...(19): siRNA sense strand
gaccuugagcuggaaauua

SEQ ID NO: 1452842 - RNA, 19 nt, Homo sapiens
  misc_RNA (1)...(19): siRNA sense strand
gcuagaacgcugugacaaa

SEQ ID NO: 1452843 - RNA, 19 nt, Homo sapiens
  misc_RNA (1)...(19): siRNA sense strand
uggagcagcugaaggaguu

SEQ ID NO: 1452844 - RNA, 19 nt, Homo sapiens
  misc_RNA (1)...(19): siRNA sense strand
ggagaaggagugccucaug

SEQ ID NO: 1452845 - RNA, 19 nt, Homo sapiens
  misc_RNA (1)...(19): siRNA sense strand
auuggaggcugaugaagua

SEQ ID NO: 1452846 - RNA, 19 nt, Homo sapiens
  misc_RNA (1)...(19): siRNA sense strand
aaagacagccucugagcuu

SEQ ID NO: 1452847 - RNA, 19 nt, Homo sapiens
  misc_RNA (1)...(19): siRNA sense strand
gcuaugagcggaagaacau

SEQ ID NO: 1452848 - RNA, 19 nt, Homo sapiens
  misc_RNA (1)...(19): siRNA sense strand
gcagcgggaaucagcauaa

SEQ ID NO: 1452849 - RNA, 19 nt, Homo sapiens
  misc_RNA (1)...(19): siRNA sense strand
cagaaaagcuggucucagu

SEQ ID NO: 1452850 - RNA, 19 nt, Homo sapiens
  misc_RNA (1)...(19): siRNA sense strand
ugaaugaccggguaacaga

SEQ ID NO: 1452851 - RNA, 19 nt, Homo sapiens
  misc_RNA (1)...(19): siRNA sense strand
ccaaagaggcugagaacag

SEQ ID NO: 1452852 - RNA, 19 nt, Homo sapiens
  misc_RNA (1)...(19): siRNA sense strand
ggaggccgacucagagaaa

SEQ ID NO: 1452853 - RNA, 19 nt, Homo sapiens
  misc_RNA (1)...(19): siRNA sense strand
agaggauucugaaagacua

SEQ ID NO: 1452854 - RNA, 19 nt, Homo sapiens
  misc_RNA (1)...(19): siRNA sense strand
ugcagaagcugagcacauu

SEQ ID NO: 1452855 - RNA, 19 nt, Homo sapiens
  misc_RNA (1)...(19): siRNA sense strand
cgaccucacagccaucaua

SEQ ID NO: 1452856 - RNA, 19 nt, Homo sapiens
  misc_RNA (1)...(19): siRNA sense strand
gaagaacaucgaccucaca

SEQ ID NO: 1452857 - RNA, 19 nt, Homo sapiens
  misc_RNA (1)...(19): siRNA sense strand
gagaugaacaaagagauug

SEQ ID NO: 1452858 - RNA, 19 nt, Homo sapiens
  misc_RNA (1)...(19): siRNA sense strand
gagaacaagauccuuaaag

SEQ ID NO: 1452859 - RNA, 19 nt, Homo sapiens
  misc_RNA (1)...(19): siRNA sense strand
aacaaacccuggaggagaa

SEQ ID NO: 1452860 - RNA, 19 nt, Homo sapiens
  misc_RNA (1)...(19): siRNA sense strand
gggaacagcacugcaaaga

SEQ ID NO: 1452861 - RNA, 19 nt, Homo sapiens
  misc_RNA (1)...(19): siRNA sense strand
ucaggucacuguaaaauga

SEQ ID NO: 1452862 - RNA, 19 nt, Homo sapiens
  misc_RNA (1)...(19): siRNA sense strand
ccucacagccaucauauca

SEQ ID NO: 1452863 - RNA, 19 nt, Homo sapiens
  misc_RNA (1)...(19): siRNA sense strand
aacaagauccuuaaagaug

SEQ ID NO: 1452864 - RNA, 19 nt, Homo sapiens
  misc_RNA (1)...(19): siRNA sense strand
ggaugauugacaacuauaa

SEQ ID NO: 1452865 - RNA, 19 nt, Homo sapiens
  misc_RNA (1)...(19): siRNA sense strand
gcaugaaggaggagaagga

SEQ ID NO: 1452866 - RNA, 19 nt, Homo sapiens
  misc_RNA (1)...(19): siRNA sense strand
caacaucgagcgcaugaag

SEQ ID NO: 1452867 - RNA, 19 nt, Homo sapiens
  misc_RNA (1)...(19): siRNA sense strand
cuagaacgcugugacaaag

SEQ ID NO: 1452868 - RNA, 19 nt, Homo sapiens
  misc_RNA (1)...(19): siRNA sense strand
gcgguuaagugaccucucu

SEQ ID NO: 1452869 - RNA, 19 nt, Homo sapiens
  misc_RNA (1)...(19): siRNA sense strand
gaugagaugaacaaagaga

SEQ ID NO: 1452870 - RNA, 19 nt, Homo sapiens
  misc_RNA (1)...(19): siRNA sense strand
ugaccucucuacagaagau

SEQ ID NO: 1452871 - RNA, 19 nt, Homo sapiens
  misc_RNA (1)...(19): siRNA sense strand
ucacaagcgaggaaugaaa

SEQ ID NO: 1452872 - RNA, 19 nt, Homo sapiens
  misc_RNA (1)...(19): siRNA sense strand
aagcaaagacagccucuga

SEQ ID NO: 1452873 - RNA, 19 nt, Homo sapiens
  misc_RNA (1)...(19): siRNA sense strand
ggacaucaacacccugaca

SEQ ID NO: 1452874 - RNA, 19 nt, Homo sapiens
  misc_RNA (1)...(19): siRNA sense strand
gauaagaagauugauaguc

SEQ ID NO: 1452875 - RNA, 19 nt, Homo sapiens
  misc_RNA (1)...(19): siRNA sense strand
gaaaagcuggucucaguga

SEQ ID NO: 1452876 - RNA, 19 nt, Homo sapiens
  misc_RNA (1)...(19): siRNA sense strand
ugacaaagagaacaagauc

SEQ ID NO: 1452877 - RNA, 19 nt, Homo sapiens
  misc_RNA (1)...(19): siRNA sense strand
gagaagagcgaggaguaug

SEQ ID NO: 1452878 - RNA, 19 nt, Homo sapiens
  misc_RNA (1)...(19): siRNA sense strand
gccugugcaugcagauuaa

SEQ ID NO: 1452879 - RNA, 19 nt, Homo sapiens
  misc_RNA (1)...(19): siRNA sense strand
gcagaagcugagcacauuu

SEQ ID NO: 1452880 - RNA, 19 nt, Homo sapiens
  misc_RNA (1)...(19): siRNA sense strand
ggccagcuuugcuccaaug

SEQ ID NO: 1452881 - RNA, 19 nt, Homo sapiens
  misc_RNA (1)...(19): siRNA sense strand
gcacagcuucgguccaaag

SEQ ID NO: 1452882 - RNA, 19 nt, Homo sapiens
  misc_RNA (1)...(19): siRNA sense strand
ugagaugaacaaagagauu

SEQ ID NO: 1452883 - RNA, 19 nt, Homo sapiens
  misc_RNA (1)...(19): siRNA sense strand
accuugagcuggaaauuau

SEQ ID NO: 1452884 - RNA, 19 nt, Homo sapiens
  misc_RNA (1)...(19): siRNA sense strand
ccgagaagagcgaggagua

SEQ ID NO: 1452885 - RNA, 19 nt, Homo sapiens
  misc_RNA (1)...(19): siRNA sense strand
gacaaagagagcuugaaga

SEQ ID NO: 1452886 - RNA, 19 nt, Homo sapiens
  misc_RNA (1)...(19): siRNA sense strand
uugguugucugaagucuga

SEQ ID NO: 1452887 - RNA, 19 nt, Homo sapiens
  misc_RNA (1)...(19): siRNA sense strand
caagauccuuaaagaugag

SEQ ID NO: 1452888 - RNA, 19 nt, Homo sapiens
  misc_RNA (1)...(19): siRNA sense strand
caggaaauacaaugugaga

SEQ ID NO: 1452889 - RNA, 19 nt, Homo sapiens
  misc_RNA (1)...(19): siRNA sense strand
gagggaacagcacugcaaa

SEQ ID NO: 1452890 - RNA, 19 nt, Homo sapiens
  misc_RNA (1)...(19): siRNA sense strand
agaagaaacaccuacaaca

SEQ ID NO: 1452891 - RNA, 19 nt, Homo sapiens
  misc_RNA (1)...(19): siRNA sense strand
ugaaggaggagaaggacuu

SEQ ID NO: 1452892 - RNA, 19 nt, Homo sapiens
  misc_RNA (1)...(19): siRNA sense strand
gauuggaggcugaugaagu

SEQ ID NO: 1452893 - RNA, 19 nt, Homo sapiens
  misc_RNA (1)...(19): siRNA sense strand
gggaugauugacaacuaua

SEQ ID NO: 1452894 - RNA, 19 nt, Homo sapiens
  misc_RNA (1)...(19): siRNA sense strand
ccggguaacagaucuugua

SEQ ID NO: 1452895 - RNA, 19 nt, Homo sapiens
  misc_RNA (1)...(19): siRNA sense strand
ucgcugacaaggaucuuua

SEQ ID NO: 1452896 - RNA, 19 nt, Homo sapiens
  misc_RNA (1)...(19): siRNA sense strand
gcacauuugaggagaccaa

SEQ ID NO: 1452897 - RNA, 19 nt, Homo sapiens
  misc_RNA (1)...(19): siRNA sense strand
ugaaugcgguugguugucu

SEQ ID NO: 1452898 - RNA, 19 nt, Homo sapiens
  misc_RNA (1)...(19): siRNA sense strand
ccucagugaagaacuauga

SEQ ID NO: 1452899 - RNA, 19 nt, Homo sapiens
  misc_RNA (1)...(19): siRNA sense strand
cagaagcugagcacauuug

SEQ ID NO: 1452900 - RNA, 19 nt, Homo sapiens
  misc_RNA (1)...(19): siRNA sense strand
ucagugaugcgguuaagug

SEQ ID NO: 1452901 - RNA, 19 nt, Homo sapiens
  misc_RNA (1)...(19): siRNA sense strand
gcgguugguugucugaagu

SEQ ID NO: 1452902 - RNA, 19 nt, Homo sapiens
  misc_RNA (1)...(19): siRNA sense strand
gaagucugaggucaagaug

SEQ ID NO: 1452903 - RNA, 19 nt, Homo sapiens
  misc_RNA (1)...(19): siRNA sense strand
aagagaacaagauccuuaa

SEQ ID NO: 1452904 - RNA, 19 nt, Homo sapiens
  misc_RNA (1)...(19): siRNA sense strand
gaucacgccaccaucuuca

SEQ ID NO: 1452905 - RNA, 19 nt, Homo sapiens
  misc_RNA (1)...(19): siRNA sense strand
agaaggagcgagccgagaa

SEQ ID NO: 1452906 - RNA, 19 nt, Homo sapiens
  misc_RNA (1)...(19): siRNA sense strand
ggagaccgagacaaagaga

SEQ ID NO: 1452907 - RNA, 19 nt, Homo sapiens
  misc_RNA (1)...(19): siRNA sense strand
ucauggagcagcugaagga

SEQ ID NO: 1452908 - RNA, 19 nt, Homo sapiens
  misc_RNA (1)...(19): siRNA sense strand
gaaucagcauaaggcagaa

SEQ ID NO: 1452909 - RNA, 19 nt, Homo sapiens
  misc_RNA (1)...(19): siRNA sense strand
ggacaaggagguggaagag

SEQ ID NO: 1452910 - RNA, 19 nt, Homo sapiens
  misc_RNA (1)...(19): siRNA sense strand
gaaaacggagaaacaaaug

SEQ ID NO: 1452911 - RNA, 19 nt, Homo sapiens
  misc_RNA (1)...(19): siRNA sense strand
uggaaauuauuguccugaa

SEQ ID NO: 1452912 - RNA, 19 nt, Homo sapiens
  misc_RNA (1)...(19): siRNA sense strand
ccagauuggaggcugauga

SEQ ID NO: 1452913 - RNA, 19 nt, Homo sapiens
  misc_RNA (1)...(19): siRNA sense strand
gagagacuacaccgucaga

SEQ ID NO: 1452914 - RNA, 19 nt, Homo sapiens
  misc_RNA (1)...(19): siRNA sense strand
caaagaggauucugaaaga

SEQ ID NO: 1452915 - RNA, 19 nt, Homo sapiens
  misc_RNA (1)...(19): siRNA sense strand
gaagauugauagucuaaug

SEQ ID NO: 1452916 - RNA, 19 nt, Homo sapiens
  misc_RNA (1)...(19): siRNA sense strand
uaacagaucuuguaaacca

SEQ ID NO: 1452917 - RNA, 19 nt, Homo sapiens
  misc_RNA (1)...(19): siRNA sense strand
gaagggagaccgagacaaa

SEQ ID NO: 1452918 - RNA, 19 nt, Homo sapiens
  misc_RNA (1)...(19): siRNA sense strand
uaagugaccucucuacaga

SEQ ID NO: 1452919 - RNA, 19 nt, Homo sapiens
  misc_RNA (1)...(19): siRNA sense strand
ccucugagcuuucuaaauc

SEQ ID NO: 1452920 - RNA, 19 nt, Homo sapiens
  misc_RNA (1)...(19): siRNA sense strand
uaacgagucucacgcagaa

SEQ ID NO: 1452921 - RNA, 19 nt, Homo sapiens
  misc_RNA (1)...(19): siRNA sense strand
gcaacucgcugacaaggau

SEQ ID NO: 1452922 - RNA, 19 nt, Homo sapiens
  misc_RNA (1)...(19): siRNA sense strand
aagaugagaugaacaaaga

SEQ ID NO: 1452923 - RNA, 19 nt, Homo sapiens
  misc_RNA (1)...(19): siRNA sense strand
agaacaagauccuuaaaga

SEQ ID NO: 1452924 - RNA, 19 nt, Homo sapiens
  misc_RNA (1)...(19): siRNA sense strand
gaaggcaguuccagucuca

SEQ ID NO: 1452925 - RNA, 19 nt, Homo sapiens
  misc_RNA (1)...(19): siRNA sense strand
gguaacagaucuuguaaac

SEQ ID NO: 1452926 - RNA, 19 nt, Homo sapiens
  misc_RNA (1)...(19): siRNA sense strand
gaacaagauccuuaaagau

SEQ ID NO: 1452927 - RNA, 19 nt, Homo sapiens
  misc_RNA (1)...(19): siRNA sense strand
gagaaggagugccucaugu

SEQ ID NO: 1452928 - RNA, 19 nt, Homo sapiens
  misc_RNA (1)...(19): siRNA sense strand
ggaaauuauuguccugaau

SEQ ID NO: 1452929 - RNA, 19 nt, Homo sapiens
  misc_RNA (1)...(19): siRNA sense strand
uuaugucgcugaagcuuua

SEQ ID NO: 1452930 - RNA, 19 nt, Homo sapiens
  misc_RNA (1)...(19): siRNA sense strand
ugaaggaguugaagcagaa

SEQ ID NO: 1452931 - RNA, 19 nt, Homo sapiens
  misc_RNA (1)...(19): siRNA sense strand
gcaaagaggauucugaaag

SEQ ID NO: 1452932 - RNA, 19 nt, Homo sapiens
  misc_RNA (1)...(19): siRNA sense strand
gaaauuauuguccugaaug

SEQ ID NO: 1452933 - RNA, 19 nt, Homo sapiens
  misc_RNA (1)...(19): siRNA sense strand
aaagagaacaagauccuua

SEQ ID NO: 1452934 - RNA, 19 nt, Homo sapiens
  misc_RNA (1)...(19): siRNA sense strand
ucacagccaucauaucaga

SEQ ID NO: 1452935 - RNA, 19 nt, Homo sapiens
  misc_RNA (1)...(19): siRNA sense strand
caaagaggcugagaacagu

SEQ ID NO: 1452936 - RNA, 19 nt, Homo sapiens
  misc_RNA (1)...(19): siRNA sense strand
acaagauccuuaaagauga

SEQ ID NO: 1452937 - RNA, 19 nt, Homo sapiens
  misc_RNA (1)...(19): siRNA sense strand
ggaaauacaaugugagaag

SEQ ID NO: 1452938 - RNA, 19 nt, Homo sapiens
  misc_RNA (1)...(19): siRNA sense strand
gaagaaacaccuacaacag

SEQ ID NO: 1452939 - RNA, 19 nt, Homo sapiens
  misc_RNA (1)...(19): siRNA sense strand
acaaagagagcuugaagaa

SEQ ID NO: 1452940 - RNA, 19 nt, Homo sapiens
  misc_RNA (1)...(19): siRNA sense strand
ccaagaauccaccucauug

SEQ ID NO: 1452941 - RNA, 19 nt, Homo sapiens
  misc_RNA (1)...(19): siRNA sense strand
uacagaagaugaugacuca

SEQ ID NO: 1452942 - RNA, 19 nt, Homo sapiens
  misc_RNA (1)...(19): siRNA sense strand
gaccuugagcuggaaauua

SEQ ID NO: 1452943 - RNA, 19 nt, Homo sapiens
  misc_RNA (1)...(19): siRNA sense strand
gcuagaacgcugugacaaa

SEQ ID NO: 1452944 - RNA, 19 nt, Homo sapiens
  misc_RNA (1)...(19): siRNA sense strand
uggagcagcugaaggaguu

SEQ ID NO: 1452945 - RNA, 19 nt, Homo sapiens
  misc_RNA (1)...(19): siRNA sense strand
ggagaaggagugccucaug

SEQ ID NO: 1452946 - RNA, 19 nt, Homo sapiens
  misc_RNA (1)...(19): siRNA sense strand
auuggaggcugaugaagua

SEQ ID NO: 1452947 - RNA, 19 nt, Homo sapiens
  misc_RNA (1)...(19): siRNA sense strand
aaagacagccucugagcuu

SEQ ID NO: 1452948 - RNA, 19 nt, Homo sapiens
  misc_RNA (1)...(19): siRNA sense strand
gcuaugagcggaagaacau

SEQ ID NO: 1452949 - RNA, 19 nt, Homo sapiens
  misc_RNA (1)...(19): siRNA sense strand
gcagcgggaaucagcauaa

SEQ ID NO: 1452950 - RNA, 19 nt, Homo sapiens
  misc_RNA (1)...(19): siRNA sense strand
cagaaaagcuggucucagu

SEQ ID NO: 1452951 - RNA, 19 nt, Homo sapiens
  misc_RNA (1)...(19): siRNA sense strand
ugaaugaccggguaacaga

SEQ ID NO: 1452952 - RNA, 19 nt, Homo sapiens
  misc_RNA (1)...(19): siRNA sense strand
ccaaagaggcugagaacag

SEQ ID NO: 1452953 - RNA, 19 nt, Homo sapiens
  misc_RNA (1)...(19): siRNA sense strand
ggaggccgacucagagaaa

SEQ ID NO: 1452954 - RNA, 19 nt, Homo sapiens
  misc_RNA (1)...(19): siRNA sense strand
agaggauucugaaagacua

SEQ ID NO: 1452955 - RNA, 19 nt, Homo sapiens
  misc_RNA (1)...(19): siRNA sense strand
ugcagaagcugagcacauu

SEQ ID NO: 1452956 - RNA, 19 nt, Homo sapiens
  misc_RNA (1)...(19): siRNA sense strand
cgaccucacagccaucaua

SEQ ID NO: 1452957 - RNA, 19 nt, Homo sapiens
  misc_RNA (1)...(19): siRNA sense strand
gaagaacaucgaccucaca

SEQ ID NO: 1452958 - RNA, 19 nt, Homo sapiens
  misc_RNA (1)...(19): siRNA sense strand
gagaugaacaaagagauug

SEQ ID NO: 1452959 - RNA, 19 nt, Homo sapiens
  misc_RNA (1)...(19): siRNA sense strand
gagaacaagauccuuaaag

SEQ ID NO: 1452960 - RNA, 19 nt, Homo sapiens
  misc_RNA (1)...(19): siRNA sense strand
aacaaacccuggaggagaa

SEQ ID NO: 1452961 - RNA, 19 nt, Homo sapiens
  misc_RNA (1)...(19): siRNA sense strand
gggaacagcacugcaaaga

SEQ ID NO: 1452962 - RNA, 19 nt, Homo sapiens
  misc_RNA (1)...(19): siRNA sense strand
ucaggucacuguaaaauga

SEQ ID NO: 1452963 - RNA, 19 nt, Homo sapiens
  misc_RNA (1)...(19): siRNA sense strand
ccucacagccaucauauca

SEQ ID NO: 1452964 - RNA, 19 nt, Homo sapiens
  misc_RNA (1)...(19): siRNA sense strand
aacaagauccuuaaagaug

SEQ ID NO: 1452965 - RNA, 19 nt, Homo sapiens
  misc_RNA (1)...(19): siRNA sense strand
ggaugauugacaacuauaa

SEQ ID NO: 1452966 - RNA, 19 nt, Homo sapiens
  misc_RNA (1)...(19): siRNA sense strand
gcaugaaggaggagaagga

SEQ ID NO: 1452967 - RNA, 19 nt, Homo sapiens
  misc_RNA (1)...(19): siRNA sense strand
caacaucgagcgcaugaag

SEQ ID NO: 1452968 - RNA, 19 nt, Homo sapiens
  misc_RNA (1)...(19): siRNA sense strand
cuagaacgcugugacaaag

SEQ ID NO: 1452969 - RNA, 19 nt, Homo sapiens
  misc_RNA (1)...(19): siRNA sense strand
gcgguuaagugaccucucu

SEQ ID NO: 1452970 - RNA, 19 nt, Homo sapiens
  misc_RNA (1)...(19): siRNA sense strand
gaugagaugaacaaagaga

SEQ ID NO: 1452971 - RNA, 19 nt, Homo sapiens
  misc_RNA (1)...(19): siRNA sense strand
ugaccucucuacagaagau

SEQ ID NO: 1452972 - RNA, 19 nt, Homo sapiens
  misc_RNA (1)...(19): siRNA sense strand
aagcaaagacagccucuga

SEQ ID NO: 1452973 - RNA, 19 nt, Homo sapiens
  misc_RNA (1)...(19): siRNA sense strand
ucacaagcgaggaaugaaa

SEQ ID NO: 1452974 - RNA, 19 nt, Homo sapiens
  misc_RNA (1)...(19): siRNA sense strand
ggacaucaacacccugaca

SEQ ID NO: 1452975 - RNA, 19 nt, Homo sapiens
  misc_RNA (1)...(19): siRNA sense strand
gauaagaagauugauaguc

SEQ ID NO: 1452976 - RNA, 19 nt, Homo sapiens
  misc_RNA (1)...(19): siRNA sense strand
gcagaagcugagcacauuu

SEQ ID NO: 1452977 - RNA, 19 nt, Homo sapiens
  misc_RNA (1)...(19): siRNA sense strand
ugacaaagagaacaagauc

SEQ ID NO: 1452978 - RNA, 19 nt, Homo sapiens
  misc_RNA (1)...(19): siRNA sense strand
gagaagagcgaggaguaug

SEQ ID NO: 1452979 - RNA, 19 nt, Homo sapiens
  misc_RNA (1)...(19): siRNA sense strand
gccugugcaugcagauuaa

SEQ ID NO: 1452980 - RNA, 19 nt, Homo sapiens
  misc_RNA (1)...(19): siRNA sense strand
gaaaagcuggucucaguga

SEQ ID NO: 1452981 - RNA, 19 nt, Homo sapiens
  misc_RNA (1)...(19): siRNA sense strand
ggccagcuuugcuccaaug

SEQ ID NO: 1452982 - RNA, 19 nt, Homo sapiens
  misc_RNA (1)...(19): siRNA sense strand
gcacagcuucgguccaaag

SEQ ID NO: 1452983 - RNA, 19 nt, Homo sapiens
  misc_RNA (1)...(19): siRNA sense strand
ugagaugaacaaagagauu

SEQ ID NO: 1452984 - RNA, 19 nt, Homo sapiens
  misc_RNA (1)...(19): siRNA sense strand
accuugagcuggaaauuau

SEQ ID NO: 1452985 - RNA, 19 nt, Homo sapiens
  misc_RNA (1)...(19): siRNA sense strand
ccgagaagagcgaggagua

SEQ ID NO: 1452986 - RNA, 19 nt, Homo sapiens
  misc_RNA (1)...(19): siRNA sense strand
gacaaagagagcuugaaga

SEQ ID NO: 1452987 - RNA, 19 nt, Homo sapiens
  misc_RNA (1)...(19): siRNA sense strand
uugguugucugaagucuga

SEQ ID NO: 1452988 - RNA, 19 nt, Homo sapiens
  misc_RNA (1)...(19): siRNA sense strand
caagauccuuaaagaugag

SEQ ID NO: 1452989 - RNA, 19 nt, Homo sapiens
  misc_RNA (1)...(19): siRNA sense strand
caggaaauacaaugugaga

SEQ ID NO: 1452990 - RNA, 19 nt, Homo sapiens
  misc_RNA (1)...(19): siRNA sense strand
gagggaacagcacugcaaa

SEQ ID NO: 1452991 - RNA, 19 nt, Homo sapiens
  misc_RNA (1)...(19): siRNA sense strand
agaagaaacaccuacaaca

SEQ ID NO: 1452992 - RNA, 19 nt, Homo sapiens
  misc_RNA (1)...(19): siRNA sense strand
ugaaggaggagaaggacuu

SEQ ID NO: 1452993 - RNA, 19 nt, Homo sapiens
  misc_RNA (1)...(19): siRNA sense strand
gauuggaggcugaugaagu

SEQ ID NO: 1452994 - RNA, 19 nt, Homo sapiens
  misc_RNA (1)...(19): siRNA sense strand
gggaugauugacaacuaua

SEQ ID NO: 1452995 - RNA, 19 nt, Homo sapiens
  misc_RNA (1)...(19): siRNA sense strand
ccggguaacagaucuugua

SEQ ID NO: 1452996 - RNA, 19 nt, Homo sapiens
  misc_RNA (1)...(19): siRNA sense strand
ucgcugacaaggaucuuua

SEQ ID NO: 1452997 - RNA, 19 nt, Homo sapiens
  misc_RNA (1)...(19): siRNA sense strand
gcacauuugaggagaccaa

SEQ ID NO: 1452998 - RNA, 19 nt, Homo sapiens
  misc_RNA (1)...(19): siRNA sense strand
ugaaugcgguugguugucu

SEQ ID NO: 1452999 - RNA, 19 nt, Homo sapiens
  misc_RNA (1)...(19): siRNA sense strand
ccucagugaagaacuauga

SEQ ID NO: 1453000 - RNA, 19 nt, Homo sapiens
  misc_RNA (1)...(19): siRNA sense strand
ucagugaugcgguuaagug

SEQ ID NO: 1453001 - RNA, 19 nt, Homo sapiens
  misc_RNA (1)...(19): siRNA sense strand
gggaagaacggaguaacga

SEQ ID NO: 1453002 - RNA, 19 nt, Homo sapiens
  misc_RNA (1)...(19): siRNA sense strand
cagaagcugagcacauuug

SEQ ID NO: 1453003 - RNA, 19 nt, Homo sapiens
  misc_RNA (1)...(19): siRNA sense strand
gcgguugguugucugaagu

SEQ ID NO: 1453004 - RNA, 19 nt, Homo sapiens
  misc_RNA (1)...(19): siRNA sense strand
gaagucugaggucaagaug

SEQ ID NO: 1453005 - RNA, 19 nt, Homo sapiens
  misc_RNA (1)...(19): siRNA sense strand
aagagaacaagauccuuaa

SEQ ID NO: 1453006 - RNA, 19 nt, Homo sapiens
  misc_RNA (1)...(19): siRNA sense strand
gaucacgccaccaucuuca

SEQ ID NO: 1453007 - RNA, 19 nt, Homo sapiens
  misc_RNA (1)...(19): siRNA sense strand
agaaggagcgagccgagaa

SEQ ID NO: 1453008 - RNA, 19 nt, Homo sapiens
  misc_RNA (1)...(19): siRNA sense strand
ggagaccgagacaaagaga

SEQ ID NO: 1453009 - RNA, 19 nt, Homo sapiens
  misc_RNA (1)...(19): siRNA sense strand
ucauggagcagcugaagga

SEQ ID NO: 1453010 - RNA, 19 nt, Homo sapiens
  misc_RNA (1)...(19): siRNA sense strand
gaaucagcauaaggcagaa

SEQ ID NO: 1453011 - RNA, 19 nt, Homo sapiens
  misc_RNA (1)...(19): siRNA sense strand
ggacaaggagguggaagag

SEQ ID NO: 1453012 - RNA, 19 nt, Homo sapiens
  misc_RNA (1)...(19): siRNA sense strand
gaaaacggagaaacaaaug

SEQ ID NO: 1453013 - RNA, 19 nt, Homo sapiens
  misc_RNA (1)...(19): siRNA sense strand
ccagauuggaggcugauga

SEQ ID NO: 1453014 - RNA, 19 nt, Homo sapiens
  misc_RNA (1)...(19): siRNA sense strand
acaccaaccucugcaaauu

SEQ ID NO: 1453015 - RNA, 19 nt, Homo sapiens
  misc_RNA (1)...(19): siRNA sense strand
ucugguagcugcagccaaa

SEQ ID NO: 1453016 - RNA, 19 nt, Homo sapiens
  misc_RNA (1)...(19): siRNA sense strand
gaggaggucugcaguaagc

SEQ ID NO: 1453017 - RNA, 19 nt, Homo sapiens
  misc_RNA (1)...(19): siRNA sense strand
cugaggaggucugcaguaa

SEQ ID NO: 1453018 - RNA, 19 nt, Homo sapiens
  misc_RNA (1)...(19): siRNA sense strand
ugcagggccuugugucuuu

SEQ ID NO: 1453019 - RNA, 19 nt, Homo sapiens
  misc_RNA (1)...(19): siRNA sense strand
gcacccagaguacaacaga

SEQ ID NO: 1453020 - RNA, 19 nt, Homo sapiens
  misc_RNA (1)...(19): siRNA sense strand
uagcugcagccaaaucaua

SEQ ID NO: 1453021 - RNA, 19 nt, Homo sapiens
  misc_RNA (1)...(19): siRNA sense strand
gcacacuguuuccagaacu

SEQ ID NO: 1453022 - RNA, 19 nt, Homo sapiens
  misc_RNA (1)...(19): siRNA sense strand
gacccuugcucgcuaacga

SEQ ID NO: 1453023 - RNA, 19 nt, Homo sapiens
  misc_RNA (1)...(19): siRNA sense strand
ggaucucucgucucuggua

SEQ ID NO: 1453024 - RNA, 19 nt, Homo sapiens
  misc_RNA (1)...(19): siRNA sense strand
gggaacucuugccucguuu

SEQ ID NO: 1453025 - RNA, 19 nt, Homo sapiens
  misc_RNA (1)...(19): siRNA sense strand
aaaccguccaggccaguua

SEQ ID NO: 1453026 - RNA, 19 nt, Homo sapiens
  misc_RNA (1)...(19): siRNA sense strand
cuaacgaccucaugcucau

SEQ ID NO: 1453027 - RNA, 19 nt, Homo sapiens
  misc_RNA (1)...(19): siRNA sense strand
gaucugcaacggguacuug

SEQ ID NO: 1453028 - RNA, 19 nt, Homo sapiens
  misc_RNA (1)...(19): siRNA sense strand
ggucugcaguaagcucuau

SEQ ID NO: 1453029 - RNA, 19 nt, Homo sapiens
  misc_RNA (1)...(19): siRNA sense strand
gaacgugucgguggugucu

SEQ ID NO: 1453030 - RNA, 19 nt, Homo sapiens
  misc_RNA (1)...(19): siRNA sense strand
cgcaggaucucucgucucu

SEQ ID NO: 1453031 - RNA, 19 nt, Homo sapiens
  misc_RNA (1)...(19): siRNA sense strand
acagacccuugcucgcuaa

SEQ ID NO: 1453032 - RNA, 19 nt, Homo sapiens
  misc_RNA (1)...(19): siRNA sense strand
ggggaacucuugccucguu

SEQ ID NO: 1453033 - RNA, 19 nt, Homo sapiens
  misc_RNA (1)...(19): siRNA sense strand
ucaucaaguuggacgaauc

SEQ ID NO: 1453034 - RNA, 19 nt, Homo sapiens
  misc_RNA (1)...(19): siRNA sense strand
gcagggccuugugucuuuc

SEQ ID NO: 1453035 - RNA, 19 nt, Homo sapiens
  misc_RNA (1)...(19): siRNA sense strand
gcggagggcaagaccagaa

SEQ ID NO: 1453036 - RNA, 19 nt, Homo sapiens
  misc_RNA (1)...(19): siRNA sense strand
gacaccauccggagcauca

SEQ ID NO: 1453037 - RNA, 19 nt, Homo sapiens
  misc_RNA (1)...(19): siRNA sense strand
gguagcugcagccaaauca

SEQ ID NO: 1453038 - RNA, 19 nt, Homo sapiens
  misc_RNA (1)...(19): siRNA sense strand
accaaccucugcaaauuca

SEQ ID NO: 1453039 - RNA, 19 nt, Homo sapiens
  misc_RNA (1)...(19): siRNA sense strand
cuacaccaaccucugcaaa

SEQ ID NO: 1453040 - RNA, 19 nt, Homo sapiens
  misc_RNA (1)...(19): siRNA sense strand
gaacucuugccucguuucu

SEQ ID NO: 1453041 - RNA, 19 nt, Homo sapiens
  misc_RNA (1)...(19): siRNA sense strand
gaccucaugcucaucaagu

SEQ ID NO: 1453042 - RNA, 19 nt, Homo sapiens
  misc_RNA (1)...(19): siRNA sense strand
caccaaccucugcaaauuc

SEQ ID NO: 1453043 - RNA, 19 nt, Homo sapiens
  misc_RNA (1)...(19): siRNA sense strand
gcucaucaaguuggacgaa

SEQ ID NO: 1453044 - RNA, 19 nt, Homo sapiens
  misc_RNA (1)...(19): siRNA sense strand
aggcggcacuggucaugga

SEQ ID NO: 1453045 - RNA, 19 nt, Homo sapiens
  misc_RNA (1)...(19): siRNA sense strand
ugucagccgcacacuguuu

SEQ ID NO: 1453046 - RNA, 19 nt, Homo sapiens
  misc_RNA (1)...(19): siRNA sense strand
guacuugcagggccuugug

SEQ ID NO: 1453047 - RNA, 19 nt, Homo sapiens
  misc_RNA (1)...(19): siRNA sense strand
gagggcaagaccagaagga

SEQ ID NO: 1453048 - RNA, 19 nt, Homo sapiens
  misc_RNA (1)...(19): siRNA sense strand
gcacugggcucucuccaau

SEQ ID NO: 1453049 - RNA, 19 nt, Homo sapiens
  misc_RNA (1)...(19): siRNA sense strand
ugaaggagcuagagaagga

SEQ ID NO: 1453050 - RNA, 19 nt, Homo sapiens
  misc_RNA (1)...(19): siRNA sense strand
gcaaguucaucaccaaaga

SEQ ID NO: 1453051 - RNA, 19 nt, Homo sapiens
  misc_RNA (1)...(19): siRNA sense strand
acacuaaggugcagcugaa

SEQ ID NO: 1453052 - RNA, 19 nt, Homo sapiens
  misc_RNA (1)...(19): siRNA sense strand
agaagaagguggucagcaa

SEQ ID NO: 1453053 - RNA, 19 nt, Homo sapiens
  misc_RNA (1)...(19): siRNA sense strand
gaagaagguggucagcaaa

SEQ ID NO: 1453054 - RNA, 19 nt, Homo sapiens
  misc_RNA (1)...(19): siRNA sense strand
gugacgaccuguccucuag

SEQ ID NO: 1453055 - RNA, 19 nt, Homo sapiens
  misc_RNA (1)...(19): siRNA sense strand
ggccggagagccuuaugua

SEQ ID NO: 1453056 - RNA, 19 nt, Homo sapiens
  misc_RNA (1)...(19): siRNA sense strand
cuagcaaguucaucaccaa

SEQ ID NO: 1453057 - RNA, 19 nt, Homo sapiens
  misc_RNA (1)...(19): siRNA sense strand
auacgcggcuagcaaguuc

SEQ ID NO: 1453058 - RNA, 19 nt, Homo sapiens
  misc_RNA (1)...(19): siRNA sense strand
cggagagccuuauguacgu

SEQ ID NO: 1453059 - RNA, 19 nt, Homo sapiens
  misc_RNA (1)...(19): siRNA sense strand
ccaccacgaaccucucuga

SEQ ID NO: 1453060 - RNA, 19 nt, Homo sapiens
  misc_RNA (1)...(19): siRNA sense strand
gaagguggucagcaaaucg

SEQ ID NO: 1453061 - RNA, 19 nt, Homo sapiens
  misc_RNA (1)...(19): siRNA sense strand
ggugacgaccuguccucua

SEQ ID NO: 1453062 - RNA, 19 nt, Homo sapiens
  misc_RNA (1)...(19): siRNA sense strand
gcugggacagucaggugua

SEQ ID NO: 1453063 - RNA, 19 nt, Homo sapiens
  misc_RNA (1)...(19): siRNA sense strand
guucaucaccaaagagaag

SEQ ID NO: 1453064 - RNA, 19 nt, Homo sapiens
  misc_RNA (1)...(19): siRNA sense strand
agaagguggucagcaaauc

SEQ ID NO: 1453065 - RNA, 19 nt, Homo sapiens
  misc_RNA (1)...(19): siRNA sense strand
aaacgcgugcccuacacua

SEQ ID NO: 1453066 - RNA, 19 nt, Homo sapiens
  misc_RNA (1)...(19): siRNA sense strand
gcggcuagcaaguucauca

SEQ ID NO: 1453067 - RNA, 19 nt, Homo sapiens
  misc_RNA (1)...(19): siRNA sense strand
cuaaggugcagcugaagga

SEQ ID NO: 1453068 - RNA, 19 nt, Homo sapiens
  misc_RNA (1)...(19): siRNA sense strand
ccucuagggccaaggaguu

SEQ ID NO: 1453069 - RNA, 19 nt, Homo sapiens
  misc_RNA (1)...(19): siRNA sense strand
gcugaaggagcuagagaag

SEQ ID NO: 1453070 - RNA, 19 nt, Homo sapiens
  misc_RNA (1)...(19): siRNA sense strand
gaaggagcuagagaaggaa

SEQ ID NO: 1453071 - RNA, 19 nt, Homo sapiens
  misc_RNA (1)...(19): siRNA sense strand
gaacugaccuccaauuuua

SEQ ID NO: 1453072 - RNA, 19 nt, Homo sapiens
  misc_RNA (1)...(19): siRNA sense strand
gagauuagcaagaccauua

SEQ ID NO: 1453073 - RNA, 19 nt, Homo sapiens
  misc_RNA (1)...(19): siRNA sense strand
gcaaagagcggaaggaaga

SEQ ID NO: 1453074 - RNA, 19 nt, Homo sapiens
  misc_RNA (1)...(19): siRNA sense strand
gagaaugucugcugcaugu

SEQ ID NO: 1453075 - RNA, 19 nt, Homo sapiens
  misc_RNA (1)...(19): siRNA sense strand
aaagugaguuucccugaga

SEQ ID NO: 1453076 - RNA, 19 nt, Homo sapiens
  misc_RNA (1)...(19): siRNA sense strand
gcaagaccauuaaccuuac

SEQ ID NO: 1453077 - RNA, 19 nt, Homo sapiens
  misc_RNA (1)...(19): siRNA sense strand
gcccagacaccucggauaa

SEQ ID NO: 1453078 - RNA, 19 nt, Homo sapiens
  misc_RNA (1)...(19): siRNA sense strand
gggaacugaccuccaauuu

SEQ ID NO: 1453079 - RNA, 19 nt, Homo sapiens
  misc_RNA (1)...(19): siRNA sense strand
gucaaaaucugguuucaaa

SEQ ID NO: 1453080 - RNA, 19 nt, Homo sapiens
  misc_RNA (1)...(19): siRNA sense strand
gaaaacaccacaggaaauu

SEQ ID NO: 1453081 - RNA, 19 nt, Homo sapiens
  misc_RNA (1)...(19): siRNA sense strand
gcagaaugaaacucaagaa

SEQ ID NO: 1453082 - RNA, 19 nt, Homo sapiens
  misc_RNA (1)...(19): siRNA sense strand
cagaaugaaacucaagaaa

SEQ ID NO: 1453083 - RNA, 19 nt, Homo sapiens
  misc_RNA (1)...(19): siRNA sense strand
aagaagaggugccccuaua

SEQ ID NO: 1453084 - RNA, 19 nt, Homo sapiens
  misc_RNA (1)...(19): siRNA sense strand
gaaaaugaaccgagagaau

SEQ ID NO: 1453085 - RNA, 19 nt, Homo sapiens
  misc_RNA (1)...(19): siRNA sense strand
agcaagaccauuaaccuua

SEQ ID NO: 1453086 - RNA, 19 nt, Homo sapiens
  misc_RNA (1)...(19): siRNA sense strand
ggaacugaccuccaauuuu

SEQ ID NO: 1453087 - RNA, 19 nt, Homo sapiens
  misc_RNA (1)...(19): siRNA sense strand
gaagcgaaagaggagauaa

SEQ ID NO: 1453088 - RNA, 19 nt, Homo sapiens
  misc_RNA (1)...(19): siRNA sense strand
gcagaaaacaccacaggaa

SEQ ID NO: 1453089 - RNA, 19 nt, Homo sapiens
  misc_RNA (1)...(19): siRNA sense strand
gcauguacagcgcagagaa

SEQ ID NO: 1453090 - RNA, 19 nt, Homo sapiens
  misc_RNA (1)...(19): siRNA sense strand
gaaugucugcugcauguac

SEQ ID NO: 1453091 - RNA, 19 nt, Homo sapiens
  misc_RNA (1)...(19): siRNA sense strand
ggagcgcaggcauguauau

SEQ ID NO: 1453092 - RNA, 19 nt, Homo sapiens
  misc_RNA (1)...(19): siRNA sense strand
caagaccauuaaccuuaca

SEQ ID NO: 1453093 - RNA, 19 nt, Homo sapiens
  misc_RNA (1)...(19): siRNA sense strand
cagcaaagagcggaaggaa

SEQ ID NO: 1453094 - RNA, 19 nt, Homo sapiens
  misc_RNA (1)...(19): siRNA sense strand
gaggagauaaaggcagaaa

SEQ ID NO: 1453095 - RNA, 19 nt, Homo sapiens
  misc_RNA (1)...(19): siRNA sense strand
ccagacaccucggauaacg

SEQ ID NO: 1453096 - RNA, 19 nt, Homo sapiens
  misc_RNA (1)...(19): siRNA sense strand
uagcaagaccauuaaccuu

SEQ ID NO: 1453097 - RNA, 19 nt, Homo sapiens
  misc_RNA (1)...(19): siRNA sense strand
aagcgaaagaggagauaaa

SEQ ID NO: 1453098 - RNA, 19 nt, Homo sapiens
  misc_RNA (1)...(19): siRNA sense strand
gcuccuacccaccuagugu

SEQ ID NO: 1453099 - RNA, 19 nt, Homo sapiens
  misc_RNA (1)...(19): siRNA sense strand
aaucggauccgggaacuga

SEQ ID NO: 1453100 - RNA, 19 nt, Homo sapiens
  misc_RNA (1)...(19): siRNA sense strand
gcaauguaacuccgaacuc

SEQ ID NO: 1453101 - RNA, 19 nt, Homo sapiens
  misc_RNA (1)...(19): siRNA sense strand
agacaccucggauaacgaa

SEQ ID NO: 1453102 - RNA, 19 nt, Homo sapiens
  misc_RNA (1)...(19): siRNA sense strand
aaacaccacaggaaauugg

SEQ ID NO: 1453103 - RNA, 19 nt, Homo sapiens
  misc_RNA (1)...(19): siRNA sense strand
ccggagcgcaggcauguau

SEQ ID NO: 1453104 - RNA, 19 nt, Homo sapiens
  misc_RNA (1)...(19): siRNA sense strand
cauuaaccuuacagacaga

SEQ ID NO: 1453105 - RNA, 19 nt, Homo sapiens
  misc_RNA (1)...(19): siRNA sense strand
cacaggaaauuggcugaca

SEQ ID NO: 1453106 - RNA, 19 nt, Homo sapiens
  misc_RNA (1)...(19): siRNA sense strand
cuacccaccuagugucaag

SEQ ID NO: 1453107 - RNA, 19 nt, Homo sapiens
  misc_RNA (1)...(19): siRNA sense strand
gagcgcaggcauguauaug

SEQ ID NO: 1453108 - RNA, 19 nt, Homo sapiens
  misc_RNA (1)...(19): siRNA sense strand
caaaaucgcagaaugaaac

SEQ ID NO: 1453109 - RNA, 19 nt, Homo sapiens
  misc_RNA (1)...(19): siRNA sense strand
gcgccgaacaucuggaauc

SEQ ID NO: 1453110 - RNA, 19 nt, Homo sapiens
  misc_RNA (1)...(19): siRNA sense strand
uccgggaacugaccuccaa

SEQ ID NO: 1453111 - RNA, 19 nt, Homo sapiens
  misc_RNA (1)...(19): siRNA sense strand
ggacaagacgccccacugu

SEQ ID NO: 1453112 - RNA, 19 nt, Homo sapiens
  misc_RNA (1)...(19): siRNA sense strand
gccucgcccucaacaccua

SEQ ID NO: 1453113 - RNA, 19 nt, Homo sapiens
  misc_RNA (1)...(19): siRNA sense strand
cgaagcgaaagaggagaua

SEQ ID NO: 1453114 - RNA, 19 nt, Homo sapiens
  misc_RNA (1)...(19): siRNA sense strand
caaagagcggaaggaagaa

SEQ ID NO: 1453115 - RNA, 19 nt, Homo sapiens
  misc_RNA (1)...(19): siRNA sense strand
guacgaaucugguccuaua

SEQ ID NO: 1453116 - RNA, 19 nt, Homo sapiens
  misc_RNA (1)...(19): siRNA sense strand
gggaagagccugaagauga

SEQ ID NO: 1453117 - RNA, 19 nt, Homo sapiens
  misc_RNA (1)...(19): siRNA sense strand
ggacaagguucucgaguuc

SEQ ID NO: 1453118 - RNA, 19 nt, Homo sapiens
  misc_RNA (1)...(19): siRNA sense strand
gaaccugacuccguuagga

SEQ ID NO: 1453119 - RNA, 19 nt, Homo sapiens
  misc_RNA (1)...(19): siRNA sense strand
ggaagagccugaagaugag

SEQ ID NO: 1453120 - RNA, 19 nt, Homo sapiens
  misc_RNA (1)...(19): siRNA sense strand
gaccgcagaucauuaccuu

SEQ ID NO: 1453121 - RNA, 19 nt, Homo sapiens
  misc_RNA (1)...(19): siRNA sense strand
ggacaaauacauccacaag

SEQ ID NO: 1453122 - RNA, 19 nt, Homo sapiens
  misc_RNA (1)...(19): siRNA sense strand
cuacgcaccugcagacaga

SEQ ID NO: 1453123 - RNA, 19 nt, Homo sapiens
  misc_RNA (1)...(19): siRNA sense strand
agaaggagaccgacuguga

SEQ ID NO: 1453124 - RNA, 19 nt, Homo sapiens
  misc_RNA (1)...(19): siRNA sense strand
gcuaugggacgaugacuug

SEQ ID NO: 1453125 - RNA, 19 nt, Homo sapiens
  misc_RNA (1)...(19): siRNA sense strand
ccacuggucccaccgcuuu

SEQ ID NO: 1453126 - RNA, 19 nt, Homo sapiens
  misc_RNA (1)...(19): siRNA sense strand
gaccgacugugaccucugu

SEQ ID NO: 1453127 - RNA, 19 nt, Homo sapiens
  misc_RNA (1)...(19): siRNA sense strand
ggagugagguacgaaucug

SEQ ID NO: 1453128 - RNA, 19 nt, Homo sapiens
  misc_RNA (1)...(19): siRNA sense strand
ccgcagaucauuaccuuga

SEQ ID NO: 1453129 - RNA, 19 nt, Homo sapiens
  misc_RNA (1)...(19): siRNA sense strand
ggcugaggcucuugaaaca

SEQ ID NO: 1453130 - RNA, 19 nt, Homo sapiens
  misc_RNA (1)...(19): siRNA sense strand
uggacaagguucucgaguu

SEQ ID NO: 1453131 - RNA, 19 nt, Homo sapiens
  misc_RNA (1)...(19): siRNA sense strand
gcagaucauuaccuugaac

SEQ ID NO: 1453132 - RNA, 19 nt, Homo sapiens
  misc_RNA (1)...(19): siRNA sense strand
gaagcccagugguccuuuc

SEQ ID NO: 1453133 - RNA, 19 nt, Homo sapiens
  misc_RNA (1)...(19): siRNA sense strand
gaaggaacucaaccacaca

SEQ ID NO: 1453134 - RNA, 19 nt, Homo sapiens
  misc_RNA (1)...(19): siRNA sense strand
gaaucugguccuauacuca

SEQ ID NO: 1453135 - RNA, 19 nt, Homo sapiens
  misc_RNA (1)...(19): siRNA sense strand
caacgugcaucugguucug

SEQ ID NO: 1453136 - RNA, 19 nt, Homo sapiens
  misc_RNA (1)...(19): siRNA sense strand
ugacaacgugcaucugguu

SEQ ID NO: 1453137 - RNA, 19 nt, Homo sapiens
  misc_RNA (1)...(19): siRNA sense strand
gcccagugguccuuucucu

SEQ ID NO: 1453138 - RNA, 19 nt, Homo sapiens
  misc_RNA (1)...(19): siRNA sense strand
ugugggcucugugguauau

SEQ ID NO: 1453139 - RNA, 19 nt, Homo sapiens
  misc_RNA (1)...(19): siRNA sense strand
ccuauacucagcccaggua

SEQ ID NO: 1453140 - RNA, 19 nt, Homo sapiens
  misc_RNA (1)...(19): siRNA sense strand
cgaaucugguccuauacuc

SEQ ID NO: 1453141 - RNA, 19 nt, Homo sapiens
  misc_RNA (1)...(19): siRNA sense strand
cugguucccugccucugua

SEQ ID NO: 1453142 - RNA, 19 nt, Homo sapiens
  misc_RNA (1)...(19): siRNA sense strand
ugggcucugugguauauga

SEQ ID NO: 1453143 - RNA, 19 nt, Homo sapiens
  misc_RNA (1)...(19): siRNA sense strand
caacgugucagcagauggu

SEQ ID NO: 1453144 - RNA, 19 nt, Homo sapiens
  misc_RNA (1)...(19): siRNA sense strand
uggaggagcagcugacuca

SEQ ID NO: 1453145 - RNA, 19 nt, Homo sapiens
  misc_RNA (1)...(19): siRNA sense strand
gcacugggaagagccugaa

SEQ ID NO: 1453146 - RNA, 19 nt, Homo sapiens
  misc_RNA (1)...(19): siRNA sense strand
cacccuaaccucuguguuc

SEQ ID NO: 1453147 - RNA, 19 nt, Homo sapiens
  misc_RNA (1)...(19): siRNA sense strand
ccucauccuccuucucaaa

SEQ ID NO: 1453148 - RNA, 19 nt, Homo sapiens
  misc_RNA (1)...(19): siRNA sense strand
ccgcugcgcuuucccucau

SEQ ID NO: 1453149 - RNA, 19 nt, Homo sapiens
  misc_RNA (1)...(19): siRNA sense strand
cgaguucccauugcugaaa

SEQ ID NO: 1453150 - RNA, 19 nt, Homo sapiens
  misc_RNA (1)...(19): siRNA sense strand
ucugugggcucugugguau

SEQ ID NO: 1453151 - RNA, 19 nt, Homo sapiens
  misc_RNA (1)...(19): siRNA sense strand
gcuggccugccuacucuuu

SEQ ID NO: 1453152 - RNA, 19 nt, Homo sapiens
  misc_RNA (1)...(19): siRNA sense strand
gcugaaaggccacccuaac

SEQ ID NO: 1453153 - RNA, 19 nt, Homo sapiens
  misc_RNA (1)...(19): siRNA sense strand
gaguucccauugcugaaag

SEQ ID NO: 1453154 - RNA, 19 nt, Homo sapiens
  misc_RNA (1)...(19): siRNA sense strand
gugcaucugguucugaaug

SEQ ID NO: 1453155 - RNA, 19 nt, Homo sapiens
  misc_RNA (1)...(19): siRNA sense strand
gguacgagaaggaacucaa

SEQ ID NO: 1453156 - RNA, 19 nt, Homo sapiens
  misc_RNA (1)...(19): siRNA sense strand
uggcuggccugccuacucu

SEQ ID NO: 1453157 - RNA, 19 nt, Homo sapiens
  misc_RNA (1)...(19): siRNA sense strand
gccucucccuguacuggaa

SEQ ID NO: 1453158 - RNA, 19 nt, Homo sapiens
  misc_RNA (1)...(19): siRNA sense strand
gcucaacgugucagcagau

SEQ ID NO: 1453159 - RNA, 19 nt, Homo sapiens
  misc_RNA (1)...(19): siRNA sense strand
guacgaaucugguccuaua

SEQ ID NO: 1453160 - RNA, 19 nt, Homo sapiens
  misc_RNA (1)...(19): siRNA sense strand
gggaagagccugaagauga

SEQ ID NO: 1453161 - RNA, 19 nt, Homo sapiens
  misc_RNA (1)...(19): siRNA sense strand
ggacaagguucucgaguuc

SEQ ID NO: 1453162 - RNA, 19 nt, Homo sapiens
  misc_RNA (1)...(19): siRNA sense strand
gaaccugacuccguuagga

SEQ ID NO: 1453163 - RNA, 19 nt, Homo sapiens
  misc_RNA (1)...(19): siRNA sense strand
ggaagagccugaagaugag

SEQ ID NO: 1453164 - RNA, 19 nt, Homo sapiens
  misc_RNA (1)...(19): siRNA sense strand
gaccgcagaucauuaccuu

SEQ ID NO: 1453165 - RNA, 19 nt, Homo sapiens
  misc_RNA (1)...(19): siRNA sense strand
ggacaaauacauccacaag

SEQ ID NO: 1453166 - RNA, 19 nt, Homo sapiens
  misc_RNA (1)...(19): siRNA sense strand
cuacgcaccugcagacaga

SEQ ID NO: 1453167 - RNA, 19 nt, Homo sapiens
  misc_RNA (1)...(19): siRNA sense strand
agaaggagaccgacuguga

SEQ ID NO: 1453168 - RNA, 19 nt, Homo sapiens
  misc_RNA (1)...(19): siRNA sense strand
gcuaugggacgaugacuug

SEQ ID NO: 1453169 - RNA, 19 nt, Homo sapiens
  misc_RNA (1)...(19): siRNA sense strand
ccacuggucccaccgcuuu

SEQ ID NO: 1453170 - RNA, 19 nt, Homo sapiens
  misc_RNA (1)...(19): siRNA sense strand
gaccgacugugaccucugu

SEQ ID NO: 1453171 - RNA, 19 nt, Homo sapiens
  misc_RNA (1)...(19): siRNA sense strand
ggagugagguacgaaucug

SEQ ID NO: 1453172 - RNA, 19 nt, Homo sapiens
  misc_RNA (1)...(19): siRNA sense strand
ccgcagaucauuaccuuga

SEQ ID NO: 1453173 - RNA, 19 nt, Homo sapiens
  misc_RNA (1)...(19): siRNA sense strand
ggcugaggcucuugaaaca

SEQ ID NO: 1453174 - RNA, 19 nt, Homo sapiens
  misc_RNA (1)...(19): siRNA sense strand
uggacaagguucucgaguu

SEQ ID NO: 1453175 - RNA, 19 nt, Homo sapiens
  misc_RNA (1)...(19): siRNA sense strand
gcagaucauuaccuugaac

SEQ ID NO: 1453176 - RNA, 19 nt, Homo sapiens
  misc_RNA (1)...(19): siRNA sense strand
gaagcccagugguccuuuc

SEQ ID NO: 1453177 - RNA, 19 nt, Homo sapiens
  misc_RNA (1)...(19): siRNA sense strand
gaaggaacucaaccacaca

SEQ ID NO: 1453178 - RNA, 19 nt, Homo sapiens
  misc_RNA (1)...(19): siRNA sense strand
gaaucugguccuauacuca

SEQ ID NO: 1453179 - RNA, 19 nt, Homo sapiens
  misc_RNA (1)...(19): siRNA sense strand
caacgugcaucugguucug

SEQ ID NO: 1453180 - RNA, 19 nt, Homo sapiens
  misc_RNA (1)...(19): siRNA sense strand
ugacaacgugcaucugguu

SEQ ID NO: 1453181 - RNA, 19 nt, Homo sapiens
  misc_RNA (1)...(19): siRNA sense strand
gcccagugguccuuucucu

SEQ ID NO: 1453182 - RNA, 19 nt, Homo sapiens
  misc_RNA (1)...(19): siRNA sense strand
ugugggcucugugguauau

SEQ ID NO: 1453183 - RNA, 19 nt, Homo sapiens
  misc_RNA (1)...(19): siRNA sense strand
ccuauacucagcccaggua

SEQ ID NO: 1453184 - RNA, 19 nt, Homo sapiens
  misc_RNA (1)...(19): siRNA sense strand
cgaaucugguccuauacuc

SEQ ID NO: 1453185 - RNA, 19 nt, Homo sapiens
  misc_RNA (1)...(19): siRNA sense strand
cugguucccugccucugua

SEQ ID NO: 1453186 - RNA, 19 nt, Homo sapiens
  misc_RNA (1)...(19): siRNA sense strand
ugggcucugugguauauga

SEQ ID NO: 1453187 - RNA, 19 nt, Homo sapiens
  misc_RNA (1)...(19): siRNA sense strand
caacgugucagcagauggu

SEQ ID NO: 1453188 - RNA, 19 nt, Homo sapiens
  misc_RNA (1)...(19): siRNA sense strand
uggaggagcagcugacuca

SEQ ID NO: 1453189 - RNA, 19 nt, Homo sapiens
  misc_RNA (1)...(19): siRNA sense strand
agagagagcggagcaagug

SEQ ID NO: 1453190 - RNA, 19 nt, Homo sapiens
  misc_RNA (1)...(19): siRNA sense strand
ccucccaacugccagacuu

SEQ ID NO: 1453191 - RNA, 19 nt, Homo sapiens
  misc_RNA (1)...(19): siRNA sense strand
guggagccgucgugaacug

SEQ ID NO: 1453192 - RNA, 19 nt, Homo sapiens
  misc_RNA (1)...(19): siRNA sense strand
gcacugggaagagccugaa

SEQ ID NO: 1453193 - RNA, 19 nt, Homo sapiens
  misc_RNA (1)...(19): siRNA sense strand
cacccuaaccucuguguuc

SEQ ID NO: 1453194 - RNA, 19 nt, Homo sapiens
  misc_RNA (1)...(19): siRNA sense strand
ccucauccuccuucucaaa

SEQ ID NO: 1453195 - RNA, 19 nt, Homo sapiens
  misc_RNA (1)...(19): siRNA sense strand
ccgcugcgcuuucccucau

SEQ ID NO: 1453196 - RNA, 19 nt, Homo sapiens
  misc_RNA (1)...(19): siRNA sense strand
cgaguucccauugcugaaa

SEQ ID NO: 1453197 - RNA, 19 nt, Homo sapiens
  misc_RNA (1)...(19): siRNA sense strand
ucugugggcucugugguau

SEQ ID NO: 1453198 - RNA, 19 nt, Homo sapiens
  misc_RNA (1)...(19): siRNA sense strand
gugguggucuugcucuucu

SEQ ID NO: 1453199 - RNA, 19 nt, Homo sapiens
  misc_RNA (1)...(19): siRNA sense strand
gcuggccugccuacucuuu

SEQ ID NO: 1453200 - RNA, 19 nt, Homo sapiens
  misc_RNA (1)...(19): siRNA sense strand
gcugaaaggccacccuaac

SEQ ID NO: 1453201 - RNA, 19 nt, Homo sapiens
  misc_RNA (1)...(19): siRNA sense strand
gaguucccauugcugaaag

SEQ ID NO: 1453202 - RNA, 19 nt, Homo sapiens
  misc_RNA (1)...(19): siRNA sense strand
gugcaucugguucugaaug

SEQ ID NO: 1453203 - RNA, 19 nt, Homo sapiens
  misc_RNA (1)...(19): siRNA sense strand
gguacgagaaggaacucaa

SEQ ID NO: 1453204 - RNA, 19 nt, Homo sapiens
  misc_RNA (1)...(19): siRNA sense strand
uggcuggccugccuacucu

SEQ ID NO: 1453205 - RNA, 19 nt, Homo sapiens
  misc_RNA (1)...(19): siRNA sense strand
gccucucccuguacuggaa

SEQ ID NO: 1453206 - RNA, 19 nt, Homo sapiens
  misc_RNA (1)...(19): siRNA sense strand
gcucaacgugucagcagau

SEQ ID NO: 1453207 - RNA, 19 nt, Homo sapiens
  misc_RNA (1)...(19): siRNA sense strand
guacgaaucugguccuaua

SEQ ID NO: 1453208 - RNA, 19 nt, Homo sapiens
  misc_RNA (1)...(19): siRNA sense strand
gggaagagccugaagauga

SEQ ID NO: 1453209 - RNA, 19 nt, Homo sapiens
  misc_RNA (1)...(19): siRNA sense strand
ggacaagguucucgaguuc

SEQ ID NO: 1453210 - RNA, 19 nt, Homo sapiens
  misc_RNA (1)...(19): siRNA sense strand
gaaccugacuccguuagga

SEQ ID NO: 1453211 - RNA, 19 nt, Homo sapiens
  misc_RNA (1)...(19): siRNA sense strand
ggaagagccugaagaugag

SEQ ID NO: 1453212 - RNA, 19 nt, Homo sapiens
  misc_RNA (1)...(19): siRNA sense strand
gaccgcagaucauuaccuu

SEQ ID NO: 1453213 - RNA, 19 nt, Homo sapiens
  misc_RNA (1)...(19): siRNA sense strand
ggacaaauacauccacaag

SEQ ID NO: 1453214 - RNA, 19 nt, Homo sapiens
  misc_RNA (1)...(19): siRNA sense strand
cuacgcaccugcagacaga

SEQ ID NO: 1453215 - RNA, 19 nt, Homo sapiens
  misc_RNA (1)...(19): siRNA sense strand
agaaggagaccgacuguga

SEQ ID NO: 1453216 - RNA, 19 nt, Homo sapiens
  misc_RNA (1)...(19): siRNA sense strand
gcuaugggacgaugacuug

SEQ ID NO: 1453217 - RNA, 19 nt, Homo sapiens
  misc_RNA (1)...(19): siRNA sense strand
ccacuggucccaccgcuuu

SEQ ID NO: 1453218 - RNA, 19 nt, Homo sapiens
  misc_RNA (1)...(19): siRNA sense strand
gaccgacugugaccucugu

SEQ ID NO: 1453219 - RNA, 19 nt, Homo sapiens
  misc_RNA (1)...(19): siRNA sense strand
ggagugagguacgaaucug

SEQ ID NO: 1453220 - RNA, 19 nt, Homo sapiens
  misc_RNA (1)...(19): siRNA sense strand
ccgcagaucauuaccuuga

SEQ ID NO: 1453221 - RNA, 19 nt, Homo sapiens
  misc_RNA (1)...(19): siRNA sense strand
ggcugaggcucuugaaaca

SEQ ID NO: 1453222 - RNA, 19 nt, Homo sapiens
  misc_RNA (1)...(19): siRNA sense strand
uggacaagguucucgaguu

SEQ ID NO: 1453223 - RNA, 19 nt, Homo sapiens
  misc_RNA (1)...(19): siRNA sense strand
gcagaucauuaccuugaac

SEQ ID NO: 1453224 - RNA, 19 nt, Homo sapiens
  misc_RNA (1)...(19): siRNA sense strand
gaagcccagugguccuuuc

SEQ ID NO: 1453225 - RNA, 19 nt, Homo sapiens
  misc_RNA (1)...(19): siRNA sense strand
gaaggaacucaaccacaca

SEQ ID NO: 1453226 - RNA, 19 nt, Homo sapiens
  misc_RNA (1)...(19): siRNA sense strand
gaaucugguccuauacuca

SEQ ID NO: 1453227 - RNA, 19 nt, Homo sapiens
  misc_RNA (1)...(19): siRNA sense strand
caacgugcaucugguucug

SEQ ID NO: 1453228 - RNA, 19 nt, Homo sapiens
  misc_RNA (1)...(19): siRNA sense strand
ugacaacgugcaucugguu

SEQ ID NO: 1453229 - RNA, 19 nt, Homo sapiens
  misc_RNA (1)...(19): siRNA sense strand
gcccagugguccuuucucu

SEQ ID NO: 1453230 - RNA, 19 nt, Homo sapiens
  misc_RNA (1)...(19): siRNA sense strand
ugugggcucugugguauau

SEQ ID NO: 1453231 - RNA, 19 nt, Homo sapiens
  misc_RNA (1)...(19): siRNA sense strand
ccuauacucagcccaggua

SEQ ID NO: 1453232 - RNA, 19 nt, Homo sapiens
  misc_RNA (1)...(19): siRNA sense strand
cgaaucugguccuauacuc

SEQ ID NO: 1453233 - RNA, 19 nt, Homo sapiens
  misc_RNA (1)...(19): siRNA sense strand
cugguucccugccucugua

SEQ ID NO: 1453234 - RNA, 19 nt, Homo sapiens
  misc_RNA (1)...(19): siRNA sense strand
ugggcucugugguauauga

SEQ ID NO: 1453235 - RNA, 19 nt, Homo sapiens
  misc_RNA (1)...(19): siRNA sense strand
caacgugucagcagauggu

SEQ ID NO: 1453236 - RNA, 19 nt, Homo sapiens
  misc_RNA (1)...(19): siRNA sense strand
uggaggagcagcugacuca

SEQ ID NO: 1453237 - RNA, 19 nt, Homo sapiens
  misc_RNA (1)...(19): siRNA sense strand
agagagagcggagcaagug

SEQ ID NO: 1453238 - RNA, 19 nt, Homo sapiens
  misc_RNA (1)...(19): siRNA sense strand
ccucccaacugccagacuu

SEQ ID NO: 1453239 - RNA, 19 nt, Homo sapiens
  misc_RNA (1)...(19): siRNA sense strand
guggagccgucgugaacug

SEQ ID NO: 1453240 - RNA, 19 nt, Homo sapiens
  misc_RNA (1)...(19): siRNA sense strand
gcacugggaagagccugaa

SEQ ID NO: 1453241 - RNA, 19 nt, Homo sapiens
  misc_RNA (1)...(19): siRNA sense strand
cacccuaaccucuguguuc

SEQ ID NO: 1453242 - RNA, 19 nt, Homo sapiens
  misc_RNA (1)...(19): siRNA sense strand
ccucauccuccuucucaaa

SEQ ID NO: 1453243 - RNA, 19 nt, Homo sapiens
  misc_RNA (1)...(19): siRNA sense strand
ccgcugcgcuuucccucau

SEQ ID NO: 1453244 - RNA, 19 nt, Homo sapiens
  misc_RNA (1)...(19): siRNA sense strand
cgaguucccauugcugaaa

SEQ ID NO: 1453245 - RNA, 19 nt, Homo sapiens
  misc_RNA (1)...(19): siRNA sense strand
ucugugggcucugugguau

SEQ ID NO: 1453246 - RNA, 19 nt, Homo sapiens
  misc_RNA (1)...(19): siRNA sense strand
gugguggucuugcucuucu

SEQ ID NO: 1453247 - RNA, 19 nt, Homo sapiens
  misc_RNA (1)...(19): siRNA sense strand
gcuggccugccuacucuuu

SEQ ID NO: 1453248 - RNA, 19 nt, Homo sapiens
  misc_RNA (1)...(19): siRNA sense strand
gcugaaaggccacccuaac

SEQ ID NO: 1453249 - RNA, 19 nt, Homo sapiens
  misc_RNA (1)...(19): siRNA sense strand
gaguucccauugcugaaag

SEQ ID NO: 1453250 - RNA, 19 nt, Homo sapiens
  misc_RNA (1)...(19): siRNA sense strand
gugcaucugguucugaaug

SEQ ID NO: 1453251 - RNA, 19 nt, Homo sapiens
  misc_RNA (1)...(19): siRNA sense strand
gguacgagaaggaacucaa

SEQ ID NO: 1453252 - RNA, 19 nt, Homo sapiens
  misc_RNA (1)...(19): siRNA sense strand
uggcuggccugccuacucu

SEQ ID NO: 1453253 - RNA, 19 nt, Homo sapiens
  misc_RNA (1)...(19): siRNA sense strand
gccucucccuguacuggaa

SEQ ID NO: 1453254 - RNA, 19 nt, Homo sapiens
  misc_RNA (1)...(19): siRNA sense strand
gcucaacgugucagcagau

SEQ ID NO: 1453255 - RNA, 19 nt, Homo sapiens
  misc_RNA (1)...(19): siRNA sense strand
guacgaaucugguccuaua

SEQ ID NO: 1453256 - RNA, 19 nt, Homo sapiens
  misc_RNA (1)...(19): siRNA sense strand
gggaagagccugaagauga

SEQ ID NO: 1453257 - RNA, 19 nt, Homo sapiens
  misc_RNA (1)...(19): siRNA sense strand
ggaagagccugaagaugag

SEQ ID NO: 1453258 - RNA, 19 nt, Homo sapiens
  misc_RNA (1)...(19): siRNA sense strand
cuacgcaccugcagacaga

SEQ ID NO: 1453259 - RNA, 19 nt, Homo sapiens
  misc_RNA (1)...(19): siRNA sense strand
agaaggagaccgacuguga

SEQ ID NO: 1453260 - RNA, 19 nt, Homo sapiens
  misc_RNA (1)...(19): siRNA sense strand
gaccgacugugaccucugu

SEQ ID NO: 1453261 - RNA, 19 nt, Homo sapiens
  misc_RNA (1)...(19): siRNA sense strand
ggagugagguacgaaucug

SEQ ID NO: 1453262 - RNA, 19 nt, Homo sapiens
  misc_RNA (1)...(19): siRNA sense strand
gaagcccagugguccuuuc

SEQ ID NO: 1453263 - RNA, 19 nt, Homo sapiens
  misc_RNA (1)...(19): siRNA sense strand
gaaggaacucaaccacaca

SEQ ID NO: 1453264 - RNA, 19 nt, Homo sapiens
  misc_RNA (1)...(19): siRNA sense strand
gaaucugguccuauacuca

SEQ ID NO: 1453265 - RNA, 19 nt, Homo sapiens
  misc_RNA (1)...(19): siRNA sense strand
caacgugcaucugguucug

SEQ ID NO: 1453266 - RNA, 19 nt, Homo sapiens
  misc_RNA (1)...(19): siRNA sense strand
gcccagugguccuuucucu

SEQ ID NO: 1453267 - RNA, 19 nt, Homo sapiens
  misc_RNA (1)...(19): siRNA sense strand
ugacaacgugcaucugguu

SEQ ID NO: 1453268 - RNA, 19 nt, Homo sapiens
  misc_RNA (1)...(19): siRNA sense strand
ugugggcucugugguauau

SEQ ID NO: 1453269 - RNA, 19 nt, Homo sapiens
  misc_RNA (1)...(19): siRNA sense strand
ccuauacucagcccaggua

SEQ ID NO: 1453270 - RNA, 19 nt, Homo sapiens
  misc_RNA (1)...(19): siRNA sense strand
cgaaucugguccuauacuc

SEQ ID NO: 1453271 - RNA, 19 nt, Homo sapiens
  misc_RNA (1)...(19): siRNA sense strand
ugggcucugugguauauga

SEQ ID NO: 1453272 - RNA, 19 nt, Homo sapiens
  misc_RNA (1)...(19): siRNA sense strand
caacgugucagcagauggu

SEQ ID NO: 1453273 - RNA, 19 nt, Homo sapiens
  misc_RNA (1)...(19): siRNA sense strand
gcacugggaagagccugaa

SEQ ID NO: 1453274 - RNA, 19 nt, Homo sapiens
  misc_RNA (1)...(19): siRNA sense strand
uggaggagcagcugacuca

SEQ ID NO: 1453275 - RNA, 19 nt, Homo sapiens
  misc_RNA (1)...(19): siRNA sense strand
ucugugggcucugugguau

SEQ ID NO: 1453276 - RNA, 19 nt, Homo sapiens
  misc_RNA (1)...(19): siRNA sense strand
gugcaucugguucugaaug

SEQ ID NO: 1453277 - RNA, 19 nt, Homo sapiens
  misc_RNA (1)...(19): siRNA sense strand
gguacgagaaggaacucaa

SEQ ID NO: 1453278 - RNA, 19 nt, Homo sapiens
  misc_RNA (1)...(19): siRNA sense strand
gccucucccuguacuggaa

SEQ ID NO: 1453279 - RNA, 19 nt, Homo sapiens
  misc_RNA (1)...(19): siRNA sense strand
gcucaacgugucagcagau

SEQ ID NO: 1453280 - RNA, 19 nt, Homo sapiens
  misc_RNA (1)...(19): siRNA sense strand
cuacgcaccugcagacaga

SEQ ID NO: 1453281 - RNA, 19 nt, Homo sapiens
  misc_RNA (1)...(19): siRNA sense strand
gaagcccagugguccuuuc

SEQ ID NO: 1453282 - RNA, 19 nt, Homo sapiens
  misc_RNA (1)...(19): siRNA sense strand
gcccagugguccuuucucu

SEQ ID NO: 1453283 - RNA, 19 nt, Homo sapiens
  misc_RNA (1)...(19): siRNA sense strand
guacgaaucugguccuaua

SEQ ID NO: 1453284 - RNA, 19 nt, Homo sapiens
  misc_RNA (1)...(19): siRNA sense strand
gggaagagccugaagauga

SEQ ID NO: 1453285 - RNA, 19 nt, Homo sapiens
  misc_RNA (1)...(19): siRNA sense strand
ggacaagguucucgaguuc

SEQ ID NO: 1453286 - RNA, 19 nt, Homo sapiens
  misc_RNA (1)...(19): siRNA sense strand
gaaccugacuccguuagga

SEQ ID NO: 1453287 - RNA, 19 nt, Homo sapiens
  misc_RNA (1)...(19): siRNA sense strand
ggaagagccugaagaugag

SEQ ID NO: 1453288 - RNA, 19 nt, Homo sapiens
  misc_RNA (1)...(19): siRNA sense strand
gaccgcagaucauuaccuu

SEQ ID NO: 1453289 - RNA, 19 nt, Homo sapiens
  misc_RNA (1)...(19): siRNA sense strand
ggacaaauacauccacaag

SEQ ID NO: 1453290 - RNA, 19 nt, Homo sapiens
  misc_RNA (1)...(19): siRNA sense strand
cuacgcaccugcagacaga

SEQ ID NO: 1453291 - RNA, 19 nt, Homo sapiens
  misc_RNA (1)...(19): siRNA sense strand
agaaggagaccgacuguga

SEQ ID NO: 1453292 - RNA, 19 nt, Homo sapiens
  misc_RNA (1)...(19): siRNA sense strand
gcuaugggacgaugacuug

SEQ ID NO: 1453293 - RNA, 19 nt, Homo sapiens
  misc_RNA (1)...(19): siRNA sense strand
ccacuggucccaccgcuuu

SEQ ID NO: 1453294 - RNA, 19 nt, Homo sapiens
  misc_RNA (1)...(19): siRNA sense strand
gaccgacugugaccucugu

SEQ ID NO: 1453295 - RNA, 19 nt, Homo sapiens
  misc_RNA (1)...(19): siRNA sense strand
ggagugagguacgaaucug

SEQ ID NO: 1453296 - RNA, 19 nt, Homo sapiens
  misc_RNA (1)...(19): siRNA sense strand
ccgcagaucauuaccuuga

SEQ ID NO: 1453297 - RNA, 19 nt, Homo sapiens
  misc_RNA (1)...(19): siRNA sense strand
ggcugaggcucuugaaaca

SEQ ID NO: 1453298 - RNA, 19 nt, Homo sapiens
  misc_RNA (1)...(19): siRNA sense strand
uggacaagguucucgaguu

SEQ ID NO: 1453299 - RNA, 19 nt, Homo sapiens
  misc_RNA (1)...(19): siRNA sense strand
gcagaucauuaccuugaac

SEQ ID NO: 1453300 - RNA, 19 nt, Homo sapiens
  misc_RNA (1)...(19): siRNA sense strand
gaagcccagugguccuuuc

SEQ ID NO: 1453301 - RNA, 19 nt, Homo sapiens
  misc_RNA (1)...(19): siRNA sense strand
gaaggaacucaaccacaca

SEQ ID NO: 1453302 - RNA, 19 nt, Homo sapiens
  misc_RNA (1)...(19): siRNA sense strand
gaaucugguccuauacuca

SEQ ID NO: 1453303 - RNA, 19 nt, Homo sapiens
  misc_RNA (1)...(19): siRNA sense strand
caacgugcaucugguucug

SEQ ID NO: 1453304 - RNA, 19 nt, Homo sapiens
  misc_RNA (1)...(19): siRNA sense strand
ugacaacgugcaucugguu

SEQ ID NO: 1453305 - RNA, 19 nt, Homo sapiens
  misc_RNA (1)...(19): siRNA sense strand
gcccagugguccuuucucu

SEQ ID NO: 1453306 - RNA, 19 nt, Homo sapiens
  misc_RNA (1)...(19): siRNA sense strand
ugugggcucugugguauau

SEQ ID NO: 1453307 - RNA, 19 nt, Homo sapiens
  misc_RNA (1)...(19): siRNA sense strand
ccuauacucagcccaggua

SEQ ID NO: 1453308 - RNA, 19 nt, Homo sapiens
  misc_RNA (1)...(19): siRNA sense strand
cgaaucugguccuauacuc

SEQ ID NO: 1453309 - RNA, 19 nt, Homo sapiens
  misc_RNA (1)...(19): siRNA sense strand
cugguucccugccucugua

SEQ ID NO: 1453310 - RNA, 19 nt, Homo sapiens
  misc_RNA (1)...(19): siRNA sense strand
ugggcucugugguauauga

SEQ ID NO: 1453311 - RNA, 19 nt, Homo sapiens
  misc_RNA (1)...(19): siRNA sense strand
caacgugucagcagauggu

SEQ ID NO: 1453312 - RNA, 19 nt, Homo sapiens
  misc_RNA (1)...(19): siRNA sense strand
uggaggagcagcugacuca

SEQ ID NO: 1453313 - RNA, 19 nt, Homo sapiens
  misc_RNA (1)...(19): siRNA sense strand
gcacugggaagagccugaa

SEQ ID NO: 1453314 - RNA, 19 nt, Homo sapiens
  misc_RNA (1)...(19): siRNA sense strand
cacccuaaccucuguguuc

SEQ ID NO: 1453315 - RNA, 19 nt, Homo sapiens
  misc_RNA (1)...(19): siRNA sense strand
ccucauccuccuucucaaa

SEQ ID NO: 1453316 - RNA, 19 nt, Homo sapiens
  misc_RNA (1)...(19): siRNA sense strand
ccgcugcgcuuucccucau

SEQ ID NO: 1453317 - RNA, 19 nt, Homo sapiens
  misc_RNA (1)...(19): siRNA sense strand
cgaguucccauugcugaaa

SEQ ID NO: 1453318 - RNA, 19 nt, Homo sapiens
  misc_RNA (1)...(19): siRNA sense strand
ucugugggcucugugguau

SEQ ID NO: 1453319 - RNA, 19 nt, Homo sapiens
  misc_RNA (1)...(19): siRNA sense strand
gcuggccugccuacucuuu

SEQ ID NO: 1453320 - RNA, 19 nt, Homo sapiens
  misc_RNA (1)...(19): siRNA sense strand
gcugaaaggccacccuaac

SEQ ID NO: 1453321 - RNA, 19 nt, Homo sapiens
  misc_RNA (1)...(19): siRNA sense strand
gaguucccauugcugaaag

SEQ ID NO: 1453322 - RNA, 19 nt, Homo sapiens
  misc_RNA (1)...(19): siRNA sense strand
gugcaucugguucugaaug

SEQ ID NO: 1453323 - RNA, 19 nt, Homo sapiens
  misc_RNA (1)...(19): siRNA sense strand
gguacgagaaggaacucaa

SEQ ID NO: 1453324 - RNA, 19 nt, Homo sapiens
  misc_RNA (1)...(19): siRNA sense strand
uggcuggccugccuacucu

SEQ ID NO: 1453325 - RNA, 19 nt, Homo sapiens
  misc_RNA (1)...(19): siRNA sense strand
gccucucccuguacuggaa

SEQ ID NO: 1453326 - RNA, 19 nt, Homo sapiens
  misc_RNA (1)...(19): siRNA sense strand
gcucaacgugucagcagau

SEQ ID NO: 1453327 - RNA, 19 nt, Homo sapiens
  misc_RNA (1)...(19): siRNA sense strand
guacgaaucugguccuaua

SEQ ID NO: 1453328 - RNA, 19 nt, Homo sapiens
  misc_RNA (1)...(19): siRNA sense strand
gggaagagccugaagauga

SEQ ID NO: 1453329 - RNA, 19 nt, Homo sapiens
  misc_RNA (1)...(19): siRNA sense strand
ggacaagguucucgaguuc

SEQ ID NO: 1453330 - RNA, 19 nt, Homo sapiens
  misc_RNA (1)...(19): siRNA sense strand
gaaccugacuccguuagga

SEQ ID NO: 1453331 - RNA, 19 nt, Homo sapiens
  misc_RNA (1)...(19): siRNA sense strand
ggaagagccugaagaugag

SEQ ID NO: 1453332 - RNA, 19 nt, Homo sapiens
  misc_RNA (1)...(19): siRNA sense strand
gaccgcagaucauuaccuu

SEQ ID NO: 1453333 - RNA, 19 nt, Homo sapiens
  misc_RNA (1)...(19): siRNA sense strand
ggacaaauacauccacaag

SEQ ID NO: 1453334 - RNA, 19 nt, Homo sapiens
  misc_RNA (1)...(19): siRNA sense strand
cuacgcaccugcagacaga

SEQ ID NO: 1453335 - RNA, 19 nt, Homo sapiens
  misc_RNA (1)...(19): siRNA sense strand
agaaggagaccgacuguga

SEQ ID NO: 1453336 - RNA, 19 nt, Homo sapiens
  misc_RNA (1)...(19): siRNA sense strand
gcuaugggacgaugacuug

SEQ ID NO: 1453337 - RNA, 19 nt, Homo sapiens
  misc_RNA (1)...(19): siRNA sense strand
ccacuggucccaccgcuuu

SEQ ID NO: 1453338 - RNA, 19 nt, Homo sapiens
  misc_RNA (1)...(19): siRNA sense strand
gaccgacugugaccucugu

SEQ ID NO: 1453339 - RNA, 19 nt, Homo sapiens
  misc_RNA (1)...(19): siRNA sense strand
ggagugagguacgaaucug

SEQ ID NO: 1453340 - RNA, 19 nt, Homo sapiens
  misc_RNA (1)...(19): siRNA sense strand
ccgcagaucauuaccuuga

SEQ ID NO: 1453341 - RNA, 19 nt, Homo sapiens
  misc_RNA (1)...(19): siRNA sense strand
ggcugaggcucuugaaaca

SEQ ID NO: 1453342 - RNA, 19 nt, Homo sapiens
  misc_RNA (1)...(19): siRNA sense strand
uggacaagguucucgaguu

SEQ ID NO: 1453343 - RNA, 19 nt, Homo sapiens
  misc_RNA (1)...(19): siRNA sense strand
gcagaucauuaccuugaac

SEQ ID NO: 1453344 - RNA, 19 nt, Homo sapiens
  misc_RNA (1)...(19): siRNA sense strand
gaagcccagugguccuuuc

SEQ ID NO: 1453345 - RNA, 19 nt, Homo sapiens
  misc_RNA (1)...(19): siRNA sense strand
gaaggaacucaaccacaca

SEQ ID NO: 1453346 - RNA, 19 nt, Homo sapiens
  misc_RNA (1)...(19): siRNA sense strand
gaaucugguccuauacuca

SEQ ID NO: 1453347 - RNA, 19 nt, Homo sapiens
  misc_RNA (1)...(19): siRNA sense strand
caacgugcaucugguucug

SEQ ID NO: 1453348 - RNA, 19 nt, Homo sapiens
  misc_RNA (1)...(19): siRNA sense strand
ugacaacgugcaucugguu

SEQ ID NO: 1453349 - RNA, 19 nt, Homo sapiens
  misc_RNA (1)...(19): siRNA sense strand
gcccagugguccuuucucu

SEQ ID NO: 1453350 - RNA, 19 nt, Homo sapiens
  misc_RNA (1)...(19): siRNA sense strand
ugugggcucugugguauau

SEQ ID NO: 1453351 - RNA, 19 nt, Homo sapiens
  misc_RNA (1)...(19): siRNA sense strand
ccuauacucagcccaggua

SEQ ID NO: 1453352 - RNA, 19 nt, Homo sapiens
  misc_RNA (1)...(19): siRNA sense strand
cgaaucugguccuauacuc

SEQ ID NO: 1453353 - RNA, 19 nt, Homo sapiens
  misc_RNA (1)...(19): siRNA sense strand
cugguucccugccucugua

SEQ ID NO: 1453354 - RNA, 19 nt, Homo sapiens
  misc_RNA (1)...(19): siRNA sense strand
ugggcucugugguauauga

SEQ ID NO: 1453355 - RNA, 19 nt, Homo sapiens
  misc_RNA (1)...(19): siRNA sense strand
caacgugucagcagauggu

SEQ ID NO: 1453356 - RNA, 19 nt, Homo sapiens
  misc_RNA (1)...(19): siRNA sense strand
uggaggagcagcugacuca

SEQ ID NO: 1453357 - RNA, 19 nt, Homo sapiens
  misc_RNA (1)...(19): siRNA sense strand
agagagagcggagcaagug

SEQ ID NO: 1453358 - RNA, 19 nt, Homo sapiens
  misc_RNA (1)...(19): siRNA sense strand
ccucccaacugccagacuu

SEQ ID NO: 1453359 - RNA, 19 nt, Homo sapiens
  misc_RNA (1)...(19): siRNA sense strand
guggagccgucgugaacug

SEQ ID NO: 1453360 - RNA, 19 nt, Homo sapiens
  misc_RNA (1)...(19): siRNA sense strand
gcacugggaagagccugaa

SEQ ID NO: 1453361 - RNA, 19 nt, Homo sapiens
  misc_RNA (1)...(19): siRNA sense strand
cacccuaaccucuguguuc

SEQ ID NO: 1453362 - RNA, 19 nt, Homo sapiens
  misc_RNA (1)...(19): siRNA sense strand
ccucauccuccuucucaaa

SEQ ID NO: 1453363 - RNA, 19 nt, Homo sapiens
  misc_RNA (1)...(19): siRNA sense strand
ccgcugcgcuuucccucau

SEQ ID NO: 1453364 - RNA, 19 nt, Homo sapiens
  misc_RNA (1)...(19): siRNA sense strand
cgaguucccauugcugaaa

SEQ ID NO: 1453365 - RNA, 19 nt, Homo sapiens
  misc_RNA (1)...(19): siRNA sense strand
ucugugggcucugugguau

SEQ ID NO: 1453366 - RNA, 19 nt, Homo sapiens
  misc_RNA (1)...(19): siRNA sense strand
gugguggucuugcucuucu

SEQ ID NO: 1453367 - RNA, 19 nt, Homo sapiens
  misc_RNA (1)...(19): siRNA sense strand
gcuggccugccuacucuuu

SEQ ID NO: 1453368 - RNA, 19 nt, Homo sapiens
  misc_RNA (1)...(19): siRNA sense strand
gcugaaaggccacccuaac

SEQ ID NO: 1453369 - RNA, 19 nt, Homo sapiens
  misc_RNA (1)...(19): siRNA sense strand
gaguucccauugcugaaag

SEQ ID NO: 1453370 - RNA, 19 nt, Homo sapiens
  misc_RNA (1)...(19): siRNA sense strand
gugcaucugguucugaaug

SEQ ID NO: 1453371 - RNA, 19 nt, Homo sapiens
  misc_RNA (1)...(19): siRNA sense strand
gguacgagaaggaacucaa

SEQ ID NO: 1453372 - RNA, 19 nt, Homo sapiens
  misc_RNA (1)...(19): siRNA sense strand
uggcuggccugccuacucu

SEQ ID NO: 1453373 - RNA, 19 nt, Homo sapiens
  misc_RNA (1)...(19): siRNA sense strand
gccucucccuguacuggaa

SEQ ID NO: 1453374 - RNA, 19 nt, Homo sapiens
  misc_RNA (1)...(19): siRNA sense strand
gcucaacgugucagcagau

SEQ ID NO: 1453375 - RNA, 19 nt, Homo sapiens
  misc_RNA (1)...(19): siRNA sense strand
guacgaaucugguccuaua

SEQ ID NO: 1453376 - RNA, 19 nt, Homo sapiens
  misc_RNA (1)...(19): siRNA sense strand
gggaagagccugaagauga

SEQ ID NO: 1453377 - RNA, 19 nt, Homo sapiens
  misc_RNA (1)...(19): siRNA sense strand
ggacaagguucucgaguuc

SEQ ID NO: 1453378 - RNA, 19 nt, Homo sapiens
  misc_RNA (1)...(19): siRNA sense strand
gaaccugacuccguuagga

SEQ ID NO: 1453379 - RNA, 19 nt, Homo sapiens
  misc_RNA (1)...(19): siRNA sense strand
ggaagagccugaagaugag

SEQ ID NO: 1453380 - RNA, 19 nt, Homo sapiens
  misc_RNA (1)...(19): siRNA sense strand
gaccgcagaucauuaccuu

SEQ ID NO: 1453381 - RNA, 19 nt, Homo sapiens
  misc_RNA (1)...(19): siRNA sense strand
ggacaaauacauccacaag

SEQ ID NO: 1453382 - RNA, 19 nt, Homo sapiens
  misc_RNA (1)...(19): siRNA sense strand
cuacgcaccugcagacaga

SEQ ID NO: 1453383 - RNA, 19 nt, Homo sapiens
  misc_RNA (1)...(19): siRNA sense strand
agaaggagaccgacuguga

SEQ ID NO: 1453384 - RNA, 19 nt, Homo sapiens
  misc_RNA (1)...(19): siRNA sense strand
gcuaugggacgaugacuug

SEQ ID NO: 1453385 - RNA, 19 nt, Homo sapiens
  misc_RNA (1)...(19): siRNA sense strand
ccacuggucccaccgcuuu

SEQ ID NO: 1453386 - RNA, 19 nt, Homo sapiens
  misc_RNA (1)...(19): siRNA sense strand
gaccgacugugaccucugu

SEQ ID NO: 1453387 - RNA, 19 nt, Homo sapiens
  misc_RNA (1)...(19): siRNA sense strand
ggagugagguacgaaucug

SEQ ID NO: 1453388 - RNA, 19 nt, Homo sapiens
  misc_RNA (1)...(19): siRNA sense strand
ccgcagaucauuaccuuga

SEQ ID NO: 1453389 - RNA, 19 nt, Homo sapiens
  misc_RNA (1)...(19): siRNA sense strand
ggcugaggcucuugaaaca

SEQ ID NO: 1453390 - RNA, 19 nt, Homo sapiens
  misc_RNA (1)...(19): siRNA sense strand
uggacaagguucucgaguu

SEQ ID NO: 1453391 - RNA, 19 nt, Homo sapiens
  misc_RNA (1)...(19): siRNA sense strand
gcagaucauuaccuugaac

SEQ ID NO: 1453392 - RNA, 19 nt, Homo sapiens
  misc_RNA (1)...(19): siRNA sense strand
gaagcccagugguccuuuc

SEQ ID NO: 1453393 - RNA, 19 nt, Homo sapiens
  misc_RNA (1)...(19): siRNA sense strand
gaaggaacucaaccacaca

SEQ ID NO: 1453394 - RNA, 19 nt, Homo sapiens
  misc_RNA (1)...(19): siRNA sense strand
gaaucugguccuauacuca

SEQ ID NO: 1453395 - RNA, 19 nt, Homo sapiens
  misc_RNA (1)...(19): siRNA sense strand
caacgugcaucugguucug

SEQ ID NO: 1453396 - RNA, 19 nt, Homo sapiens
  misc_RNA (1)...(19): siRNA sense strand
ugacaacgugcaucugguu

SEQ ID NO: 1453397 - RNA, 19 nt, Homo sapiens
  misc_RNA (1)...(19): siRNA sense strand
gcccagugguccuuucucu

SEQ ID NO: 1453398 - RNA, 19 nt, Homo sapiens
  misc_RNA (1)...(19): siRNA sense strand
ugugggcucugugguauau

SEQ ID NO: 1453399 - RNA, 19 nt, Homo sapiens
  misc_RNA (1)...(19): siRNA sense strand
ccuauacucagcccaggua

SEQ ID NO: 1453400 - RNA, 19 nt, Homo sapiens
  misc_RNA (1)...(19): siRNA sense strand
cgaaucugguccuauacuc

SEQ ID NO: 1453401 - RNA, 19 nt, Homo sapiens
  misc_RNA (1)...(19): siRNA sense strand
cugguucccugccucugua

SEQ ID NO: 1453402 - RNA, 19 nt, Homo sapiens
  misc_RNA (1)...(19): siRNA sense strand
ugggcucugugguauauga

SEQ ID NO: 1453403 - RNA, 19 nt, Homo sapiens
  misc_RNA (1)...(19): siRNA sense strand
caacgugucagcagauggu

SEQ ID NO: 1453404 - RNA, 19 nt, Homo sapiens
  misc_RNA (1)...(19): siRNA sense strand
uggaggagcagcugacuca

SEQ ID NO: 1453405 - RNA, 19 nt, Homo sapiens
  misc_RNA (1)...(19): siRNA sense strand
agagagagcggagcaagug

SEQ ID NO: 1453406 - RNA, 19 nt, Homo sapiens
  misc_RNA (1)...(19): siRNA sense strand
ccucccaacugccagacuu

SEQ ID NO: 1453407 - RNA, 19 nt, Homo sapiens
  misc_RNA (1)...(19): siRNA sense strand
guggagccgucgugaacug

SEQ ID NO: 1453408 - RNA, 19 nt, Homo sapiens
  misc_RNA (1)...(19): siRNA sense strand
gcacugggaagagccugaa

SEQ ID NO: 1453409 - RNA, 19 nt, Homo sapiens
  misc_RNA (1)...(19): siRNA sense strand
cacccuaaccucuguguuc

SEQ ID NO: 1453410 - RNA, 19 nt, Homo sapiens
  misc_RNA (1)...(19): siRNA sense strand
ccucauccuccuucucaaa

SEQ ID NO: 1453411 - RNA, 19 nt, Homo sapiens
  misc_RNA (1)...(19): siRNA sense strand
ccgcugcgcuuucccucau

SEQ ID NO: 1453412 - RNA, 19 nt, Homo sapiens
  misc_RNA (1)...(19): siRNA sense strand
cgaguucccauugcugaaa

SEQ ID NO: 1453413 - RNA, 19 nt, Homo sapiens
  misc_RNA (1)...(19): siRNA sense strand
ucugugggcucugugguau

SEQ ID NO: 1453414 - RNA, 19 nt, Homo sapiens
  misc_RNA (1)...(19): siRNA sense strand
gugguggucuugcucuucu

SEQ ID NO: 1453415 - RNA, 19 nt, Homo sapiens
  misc_RNA (1)...(19): siRNA sense strand
gcuggccugccuacucuuu

SEQ ID NO: 1453416 - RNA, 19 nt, Homo sapiens
  misc_RNA (1)...(19): siRNA sense strand
gcugaaaggccacccuaac

SEQ ID NO: 1453417 - RNA, 19 nt, Homo sapiens
  misc_RNA (1)...(19): siRNA sense strand
gaguucccauugcugaaag

SEQ ID NO: 1453418 - RNA, 19 nt, Homo sapiens
  misc_RNA (1)...(19): siRNA sense strand
gugcaucugguucugaaug

SEQ ID NO: 1453419 - RNA, 19 nt, Homo sapiens
  misc_RNA (1)...(19): siRNA sense strand
gguacgagaaggaacucaa

SEQ ID NO: 1453420 - RNA, 19 nt, Homo sapiens
  misc_RNA (1)...(19): siRNA sense strand
uggcuggccugccuacucu

SEQ ID NO: 1453421 - RNA, 19 nt, Homo sapiens
  misc_RNA (1)...(19): siRNA sense strand
gccucucccuguacuggaa

SEQ ID NO: 1453422 - RNA, 19 nt, Homo sapiens
  misc_RNA (1)...(19): siRNA sense strand
gcucaacgugucagcagau

SEQ ID NO: 1453423 - RNA, 19 nt, Homo sapiens
  misc_RNA (1)...(19): siRNA sense strand
guacgaaucugguccuaua

SEQ ID NO: 1453424 - RNA, 19 nt, Homo sapiens
  misc_RNA (1)...(19): siRNA sense strand
gggaagagccugaagauga

SEQ ID NO: 1453425 - RNA, 19 nt, Homo sapiens
  misc_RNA (1)...(19): siRNA sense strand
ggaagagccugaagaugag

SEQ ID NO: 1453426 - RNA, 19 nt, Homo sapiens
  misc_RNA (1)...(19): siRNA sense strand
cuacgcaccugcagacaga

SEQ ID NO: 1453427 - RNA, 19 nt, Homo sapiens
  misc_RNA (1)...(19): siRNA sense strand
agaaggagaccgacuguga

SEQ ID NO: 1453428 - RNA, 19 nt, Homo sapiens
  misc_RNA (1)...(19): siRNA sense strand
gaccgacugugaccucugu

SEQ ID NO: 1453429 - RNA, 19 nt, Homo sapiens
  misc_RNA (1)...(19): siRNA sense strand
ggagugagguacgaaucug

SEQ ID NO: 1453430 - RNA, 19 nt, Homo sapiens
  misc_RNA (1)...(19): siRNA sense strand
gaagcccagugguccuuuc

SEQ ID NO: 1453431 - RNA, 19 nt, Homo sapiens
  misc_RNA (1)...(19): siRNA sense strand
gaaggaacucaaccacaca

SEQ ID NO: 1453432 - RNA, 19 nt, Homo sapiens
  misc_RNA (1)...(19): siRNA sense strand
gaaucugguccuauacuca

SEQ ID NO: 1453433 - RNA, 19 nt, Homo sapiens
  misc_RNA (1)...(19): siRNA sense strand
caacgugcaucugguucug

SEQ ID NO: 1453434 - RNA, 19 nt, Homo sapiens
  misc_RNA (1)...(19): siRNA sense strand
gcccagugguccuuucucu

SEQ ID NO: 1453435 - RNA, 19 nt, Homo sapiens
  misc_RNA (1)...(19): siRNA sense strand
ugacaacgugcaucugguu

SEQ ID NO: 1453436 - RNA, 19 nt, Homo sapiens
  misc_RNA (1)...(19): siRNA sense strand
ugugggcucugugguauau

SEQ ID NO: 1453437 - RNA, 19 nt, Homo sapiens
  misc_RNA (1)...(19): siRNA sense strand
ccuauacucagcccaggua

SEQ ID NO: 1453438 - RNA, 19 nt, Homo sapiens
  misc_RNA (1)...(19): siRNA sense strand
cgaaucugguccuauacuc

SEQ ID NO: 1453439 - RNA, 19 nt, Homo sapiens
  misc_RNA (1)...(19): siRNA sense strand
ugggcucugugguauauga

SEQ ID NO: 1453440 - RNA, 19 nt, Homo sapiens
  misc_RNA (1)...(19): siRNA sense strand
caacgugucagcagauggu

SEQ ID NO: 1453441 - RNA, 19 nt, Homo sapiens
  misc_RNA (1)...(19): siRNA sense strand
gcacugggaagagccugaa

SEQ ID NO: 1453442 - RNA, 19 nt, Homo sapiens
  misc_RNA (1)...(19): siRNA sense strand
uggaggagcagcugacuca

SEQ ID NO: 1453443 - RNA, 19 nt, Homo sapiens
  misc_RNA (1)...(19): siRNA sense strand
ucugugggcucugugguau

SEQ ID NO: 1453444 - RNA, 19 nt, Homo sapiens
  misc_RNA (1)...(19): siRNA sense strand
gugcaucugguucugaaug

SEQ ID NO: 1453445 - RNA, 19 nt, Homo sapiens
  misc_RNA (1)...(19): siRNA sense strand
gguacgagaaggaacucaa

SEQ ID NO: 1453446 - RNA, 19 nt, Homo sapiens
  misc_RNA (1)...(19): siRNA sense strand
gccucucccuguacuggaa

SEQ ID NO: 1453447 - RNA, 19 nt, Homo sapiens
  misc_RNA (1)...(19): siRNA sense strand
gcucaacgugucagcagau

SEQ ID NO: 1453448 - RNA, 19 nt, Homo sapiens
  misc_RNA (1)...(19): siRNA sense strand
cuacgcaccugcagacaga

SEQ ID NO: 1453449 - RNA, 19 nt, Homo sapiens
  misc_RNA (1)...(19): siRNA sense strand
gaagcccagugguccuuuc

SEQ ID NO: 1453450 - RNA, 19 nt, Homo sapiens
  misc_RNA (1)...(19): siRNA sense strand
gcccagugguccuuucucu

SEQ ID NO: 1453451 - RNA, 19 nt, Homo sapiens
  misc_RNA (1)...(19): siRNA sense strand
guacgaaucugguccuaua

SEQ ID NO: 1453452 - RNA, 19 nt, Homo sapiens
  misc_RNA (1)...(19): siRNA sense strand
gggaagagccugaagauga

SEQ ID NO: 1453453 - RNA, 19 nt, Homo sapiens
  misc_RNA (1)...(19): siRNA sense strand
ggacaagguucucgaguuc

SEQ ID NO: 1453454 - RNA, 19 nt, Homo sapiens
  misc_RNA (1)...(19): siRNA sense strand
gaaccugacuccguuagga

SEQ ID NO: 1453455 - RNA, 19 nt, Homo sapiens
  misc_RNA (1)...(19): siRNA sense strand
ggaagagccugaagaugag

SEQ ID NO: 1453456 - RNA, 19 nt, Homo sapiens
  misc_RNA (1)...(19): siRNA sense strand
gaccgcagaucauuaccuu

SEQ ID NO: 1453457 - RNA, 19 nt, Homo sapiens
  misc_RNA (1)...(19): siRNA sense strand
ggacaaauacauccacaag

SEQ ID NO: 1453458 - RNA, 19 nt, Homo sapiens
  misc_RNA (1)...(19): siRNA sense strand
cuacgcaccugcagacaga

SEQ ID NO: 1453459 - RNA, 19 nt, Homo sapiens
  misc_RNA (1)...(19): siRNA sense strand
agaaggagaccgacuguga

SEQ ID NO: 1453460 - RNA, 19 nt, Homo sapiens
  misc_RNA (1)...(19): siRNA sense strand
gcuaugggacgaugacuug

SEQ ID NO: 1453461 - RNA, 19 nt, Homo sapiens
  misc_RNA (1)...(19): siRNA sense strand
ccacuggucccaccgcuuu

SEQ ID NO: 1453462 - RNA, 19 nt, Homo sapiens
  misc_RNA (1)...(19): siRNA sense strand
gaccgacugugaccucugu

SEQ ID NO: 1453463 - RNA, 19 nt, Homo sapiens
  misc_RNA (1)...(19): siRNA sense strand
ggagugagguacgaaucug

SEQ ID NO: 1453464 - RNA, 19 nt, Homo sapiens
  misc_RNA (1)...(19): siRNA sense strand
ccgcagaucauuaccuuga

SEQ ID NO: 1453465 - RNA, 19 nt, Homo sapiens
  misc_RNA (1)...(19): siRNA sense strand
ggcugaggcucuugaaaca

SEQ ID NO: 1453466 - RNA, 19 nt, Homo sapiens
  misc_RNA (1)...(19): siRNA sense strand
uggacaagguucucgaguu

SEQ ID NO: 1453467 - RNA, 19 nt, Homo sapiens
  misc_RNA (1)...(19): siRNA sense strand
gcagaucauuaccuugaac

SEQ ID NO: 1453468 - RNA, 19 nt, Homo sapiens
  misc_RNA (1)...(19): siRNA sense strand
gaagcccagugguccuuuc

SEQ ID NO: 1453469 - RNA, 19 nt, Homo sapiens
  misc_RNA (1)...(19): siRNA sense strand
gaaggaacucaaccacaca

SEQ ID NO: 1453470 - RNA, 19 nt, Homo sapiens
  misc_RNA (1)...(19): siRNA sense strand
gaaucugguccuauacuca

SEQ ID NO: 1453471 - RNA, 19 nt, Homo sapiens
  misc_RNA (1)...(19): siRNA sense strand
caacgugcaucugguucug

SEQ ID NO: 1453472 - RNA, 19 nt, Homo sapiens
  misc_RNA (1)...(19): siRNA sense strand
ugacaacgugcaucugguu

SEQ ID NO: 1453473 - RNA, 19 nt, Homo sapiens
  misc_RNA (1)...(19): siRNA sense strand
gcccagugguccuuucucu

SEQ ID NO: 1453474 - RNA, 19 nt, Homo sapiens
  misc_RNA (1)...(19): siRNA sense strand
ugugggcucugugguauau

SEQ ID NO: 1453475 - RNA, 19 nt, Homo sapiens
  misc_RNA (1)...(19): siRNA sense strand
ccuauacucagcccaggua

SEQ ID NO: 1453476 - RNA, 19 nt, Homo sapiens
  misc_RNA (1)...(19): siRNA sense strand
cgaaucugguccuauacuc

SEQ ID NO: 1453477 - RNA, 19 nt, Homo sapiens
  misc_RNA (1)...(19): siRNA sense strand
cugguucccugccucugua

SEQ ID NO: 1453478 - RNA, 19 nt, Homo sapiens
  misc_RNA (1)...(19): siRNA sense strand
ugggcucugugguauauga

SEQ ID NO: 1453479 - RNA, 19 nt, Homo sapiens
  misc_RNA (1)...(19): siRNA sense strand
caacgugucagcagauggu

SEQ ID NO: 1453480 - RNA, 19 nt, Homo sapiens
  misc_RNA (1)...(19): siRNA sense strand
uggaggagcagcugacuca

SEQ ID NO: 1453481 - RNA, 19 nt, Homo sapiens
  misc_RNA (1)...(19): siRNA sense strand
gcacugggaagagccugaa

SEQ ID NO: 1453482 - RNA, 19 nt, Homo sapiens
  misc_RNA (1)...(19): siRNA sense strand
cacccuaaccucuguguuc

SEQ ID NO: 1453483 - RNA, 19 nt, Homo sapiens
  misc_RNA (1)...(19): siRNA sense strand
ccucauccuccuucucaaa

SEQ ID NO: 1453484 - RNA, 19 nt, Homo sapiens
  misc_RNA (1)...(19): siRNA sense strand
ccgcugcgcuuucccucau

SEQ ID NO: 1453485 - RNA, 19 nt, Homo sapiens
  misc_RNA (1)...(19): siRNA sense strand
cgaguucccauugcugaaa

SEQ ID NO: 1453486 - RNA, 19 nt, Homo sapiens
  misc_RNA (1)...(19): siRNA sense strand
ucugugggcucugugguau

SEQ ID NO: 1453487 - RNA, 19 nt, Homo sapiens
  misc_RNA (1)...(19): siRNA sense strand
gcuggccugccuacucuuu

SEQ ID NO: 1453488 - RNA, 19 nt, Homo sapiens
  misc_RNA (1)...(19): siRNA sense strand
gcugaaaggccacccuaac

SEQ ID NO: 1453489 - RNA, 19 nt, Homo sapiens
  misc_RNA (1)...(19): siRNA sense strand
gaguucccauugcugaaag

SEQ ID NO: 1453490 - RNA, 19 nt, Homo sapiens
  misc_RNA (1)...(19): siRNA sense strand
gugcaucugguucugaaug

SEQ ID NO: 1453491 - RNA, 19 nt, Homo sapiens
  misc_RNA (1)...(19): siRNA sense strand
gguacgagaaggaacucaa

SEQ ID NO: 1453492 - RNA, 19 nt, Homo sapiens
  misc_RNA (1)...(19): siRNA sense strand
uggcuggccugccuacucu

SEQ ID NO: 1453493 - RNA, 19 nt, Homo sapiens
  misc_RNA (1)...(19): siRNA sense strand
gccucucccuguacuggaa

SEQ ID NO: 1453494 - RNA, 19 nt, Homo sapiens
  misc_RNA (1)...(19): siRNA sense strand
gcucaacgugucagcagau

SEQ ID NO: 1453495 - RNA, 19 nt, Homo sapiens
  misc_RNA (1)...(19): siRNA sense strand
guacgaaucugguccuaua

SEQ ID NO: 1453496 - RNA, 19 nt, Homo sapiens
  misc_RNA (1)...(19): siRNA sense strand
gggaagagccugaagauga

SEQ ID NO: 1453497 - RNA, 19 nt, Homo sapiens
  misc_RNA (1)...(19): siRNA sense strand
ggacaagguucucgaguuc

SEQ ID NO: 1453498 - RNA, 19 nt, Homo sapiens
  misc_RNA (1)...(19): siRNA sense strand
gaaccugacuccguuagga

SEQ ID NO: 1453499 - RNA, 19 nt, Homo sapiens
  misc_RNA (1)...(19): siRNA sense strand
ggaagagccugaagaugag

SEQ ID NO: 1453500 - RNA, 19 nt, Homo sapiens
  misc_RNA (1)...(19): siRNA sense strand
gaccgcagaucauuaccuu

SEQ ID NO: 1453501 - RNA, 19 nt, Homo sapiens
  misc_RNA (1)...(19): siRNA sense strand
ggacaaauacauccacaag

SEQ ID NO: 1453502 - RNA, 19 nt, Homo sapiens
  misc_RNA (1)...(19): siRNA sense strand
cuacgcaccugcagacaga

SEQ ID NO: 1453503 - RNA, 19 nt, Homo sapiens
  misc_RNA (1)...(19): siRNA sense strand
agaaggagaccgacuguga

SEQ ID NO: 1453504 - RNA, 19 nt, Homo sapiens
  misc_RNA (1)...(19): siRNA sense strand
gcuaugggacgaugacuug

SEQ ID NO: 1453505 - RNA, 19 nt, Homo sapiens
  misc_RNA (1)...(19): siRNA sense strand
ccacuggucccaccgcuuu

SEQ ID NO: 1453506 - RNA, 19 nt, Homo sapiens
  misc_RNA (1)...(19): siRNA sense strand
gaccgacugugaccucugu

SEQ ID NO: 1453507 - RNA, 19 nt, Homo sapiens
  misc_RNA (1)...(19): siRNA sense strand
ggagugagguacgaaucug

SEQ ID NO: 1453508 - RNA, 19 nt, Homo sapiens
  misc_RNA (1)...(19): siRNA sense strand
ccgcagaucauuaccuuga

SEQ ID NO: 1453509 - RNA, 19 nt, Homo sapiens
  misc_RNA (1)...(19): siRNA sense strand
ggcugaggcucuugaaaca

SEQ ID NO: 1453510 - RNA, 19 nt, Homo sapiens
  misc_RNA (1)...(19): siRNA sense strand
uggacaagguucucgaguu

SEQ ID NO: 1453511 - RNA, 19 nt, Homo sapiens
  misc_RNA (1)...(19): siRNA sense strand
gcagaucauuaccuugaac

SEQ ID NO: 1453512 - RNA, 19 nt, Homo sapiens
  misc_RNA (1)...(19): siRNA sense strand
gaagcccagugguccuuuc

SEQ ID NO: 1453513 - RNA, 19 nt, Homo sapiens
  misc_RNA (1)...(19): siRNA sense strand
gaaggaacucaaccacaca

SEQ ID NO: 1453514 - RNA, 19 nt, Homo sapiens
  misc_RNA (1)...(19): siRNA sense strand
gaaucugguccuauacuca

SEQ ID NO: 1453515 - RNA, 19 nt, Homo sapiens
  misc_RNA (1)...(19): siRNA sense strand
caacgugcaucugguucug

SEQ ID NO: 1453516 - RNA, 19 nt, Homo sapiens
  misc_RNA (1)...(19): siRNA sense strand
ugacaacgugcaucugguu

SEQ ID NO: 1453517 - RNA, 19 nt, Homo sapiens
  misc_RNA (1)...(19): siRNA sense strand
gcccagugguccuuucucu

SEQ ID NO: 1453518 - RNA, 19 nt, Homo sapiens
  misc_RNA (1)...(19): siRNA sense strand
ugugggcucugugguauau

SEQ ID NO: 1453519 - RNA, 19 nt, Homo sapiens
  misc_RNA (1)...(19): siRNA sense strand
ccuauacucagcccaggua

SEQ ID NO: 1453520 - RNA, 19 nt, Homo sapiens
  misc_RNA (1)...(19): siRNA sense strand
cgaaucugguccuauacuc

SEQ ID NO: 1453521 - RNA, 19 nt, Homo sapiens
  misc_RNA (1)...(19): siRNA sense strand
cugguucccugccucugua

SEQ ID NO: 1453522 - RNA, 19 nt, Homo sapiens
  misc_RNA (1)...(19): siRNA sense strand
ugggcucugugguauauga

SEQ ID NO: 1453523 - RNA, 19 nt, Homo sapiens
  misc_RNA (1)...(19): siRNA sense strand
caacgugucagcagauggu

SEQ ID NO: 1453524 - RNA, 19 nt, Homo sapiens
  misc_RNA (1)...(19): siRNA sense strand
uggaggagcagcugacuca

SEQ ID NO: 1453525 - RNA, 19 nt, Homo sapiens
  misc_RNA (1)...(19): siRNA sense strand
agagagagcggagcaagug

SEQ ID NO: 1453526 - RNA, 19 nt, Homo sapiens
  misc_RNA (1)...(19): siRNA sense strand
ccucccaacugccagacuu

SEQ ID NO: 1453527 - RNA, 19 nt, Homo sapiens
  misc_RNA (1)...(19): siRNA sense strand
guggagccgucgugaacug

SEQ ID NO: 1453528 - RNA, 19 nt, Homo sapiens
  misc_RNA (1)...(19): siRNA sense strand
gcacugggaagagccugaa

SEQ ID NO: 1453529 - RNA, 19 nt, Homo sapiens
  misc_RNA (1)...(19): siRNA sense strand
cacccuaaccucuguguuc

SEQ ID NO: 1453530 - RNA, 19 nt, Homo sapiens
  misc_RNA (1)...(19): siRNA sense strand
ccucauccuccuucucaaa

SEQ ID NO: 1453531 - RNA, 19 nt, Homo sapiens
  misc_RNA (1)...(19): siRNA sense strand
ccgcugcgcuuucccucau

SEQ ID NO: 1453532 - RNA, 19 nt, Homo sapiens
  misc_RNA (1)...(19): siRNA sense strand
cgaguucccauugcugaaa

SEQ ID NO: 1453533 - RNA, 19 nt, Homo sapiens
  misc_RNA (1)...(19): siRNA sense strand
ucugugggcucugugguau

SEQ ID NO: 1453534 - RNA, 19 nt, Homo sapiens
  misc_RNA (1)...(19): siRNA sense strand
gugguggucuugcucuucu

SEQ ID NO: 1453535 - RNA, 19 nt, Homo sapiens
  misc_RNA (1)...(19): siRNA sense strand
gcuggccugccuacucuuu

SEQ ID NO: 1453536 - RNA, 19 nt, Homo sapiens
  misc_RNA (1)...(19): siRNA sense strand
gcugaaaggccacccuaac

SEQ ID NO: 1453537 - RNA, 19 nt, Homo sapiens
  misc_RNA (1)...(19): siRNA sense strand
gaguucccauugcugaaag

SEQ ID NO: 1453538 - RNA, 19 nt, Homo sapiens
  misc_RNA (1)...(19): siRNA sense strand
gugcaucugguucugaaug

SEQ ID NO: 1453539 - RNA, 19 nt, Homo sapiens
  misc_RNA (1)...(19): siRNA sense strand
gguacgagaaggaacucaa

SEQ ID NO: 1453540 - RNA, 19 nt, Homo sapiens
  misc_RNA (1)...(19): siRNA sense strand
uggcuggccugccuacucu

SEQ ID NO: 1453541 - RNA, 19 nt, Homo sapiens
  misc_RNA (1)...(19): siRNA sense strand
gccucucccuguacuggaa

SEQ ID NO: 1453542 - RNA, 19 nt, Homo sapiens
  misc_RNA (1)...(19): siRNA sense strand
gcucaacgugucagcagau

SEQ ID NO: 1453543 - RNA, 19 nt, Homo sapiens
  misc_RNA (1)...(19): siRNA sense strand
guacgaaucugguccuaua

SEQ ID NO: 1453544 - RNA, 19 nt, Homo sapiens
  misc_RNA (1)...(19): siRNA sense strand
gggaagagccugaagauga

SEQ ID NO: 1453545 - RNA, 19 nt, Homo sapiens
  misc_RNA (1)...(19): siRNA sense strand
ggacaagguucucgaguuc

SEQ ID NO: 1453546 - RNA, 19 nt, Homo sapiens
  misc_RNA (1)...(19): siRNA sense strand
gaaccugacuccguuagga

SEQ ID NO: 1453547 - RNA, 19 nt, Homo sapiens
  misc_RNA (1)...(19): siRNA sense strand
ggaagagccugaagaugag

SEQ ID NO: 1453548 - RNA, 19 nt, Homo sapiens
  misc_RNA (1)...(19): siRNA sense strand
gaccgcagaucauuaccuu

SEQ ID NO: 1453549 - RNA, 19 nt, Homo sapiens
  misc_RNA (1)...(19): siRNA sense strand
ggacaaauacauccacaag

SEQ ID NO: 1453550 - RNA, 19 nt, Homo sapiens
  misc_RNA (1)...(19): siRNA sense strand
cuacgcaccugcagacaga

SEQ ID NO: 1453551 - RNA, 19 nt, Homo sapiens
  misc_RNA (1)...(19): siRNA sense strand
agaaggagaccgacuguga

SEQ ID NO: 1453552 - RNA, 19 nt, Homo sapiens
  misc_RNA (1)...(19): siRNA sense strand
gcuaugggacgaugacuug

SEQ ID NO: 1453553 - RNA, 19 nt, Homo sapiens
  misc_RNA (1)...(19): siRNA sense strand
ccacuggucccaccgcuuu

SEQ ID NO: 1453554 - RNA, 19 nt, Homo sapiens
  misc_RNA (1)...(19): siRNA sense strand
gaccgacugugaccucugu

SEQ ID NO: 1453555 - RNA, 19 nt, Homo sapiens
  misc_RNA (1)...(19): siRNA sense strand
ggagugagguacgaaucug

SEQ ID NO: 1453556 - RNA, 19 nt, Homo sapiens
  misc_RNA (1)...(19): siRNA sense strand
ccgcagaucauuaccuuga

SEQ ID NO: 1453557 - RNA, 19 nt, Homo sapiens
  misc_RNA (1)...(19): siRNA sense strand
ggcugaggcucuugaaaca

SEQ ID NO: 1453558 - RNA, 19 nt, Homo sapiens
  misc_RNA (1)...(19): siRNA sense strand
uggacaagguucucgaguu

SEQ ID NO: 1453559 - RNA, 19 nt, Homo sapiens
  misc_RNA (1)...(19): siRNA sense strand
gcagaucauuaccuugaac

SEQ ID NO: 1453560 - RNA, 19 nt, Homo sapiens
  misc_RNA (1)...(19): siRNA sense strand
gaagcccagugguccuuuc

SEQ ID NO: 1453561 - RNA, 19 nt, Homo sapiens
  misc_RNA (1)...(19): siRNA sense strand
gaaggaacucaaccacaca

SEQ ID NO: 1453562 - RNA, 19 nt, Homo sapiens
  misc_RNA (1)...(19): siRNA sense strand
gaaucugguccuauacuca

SEQ ID NO: 1453563 - RNA, 19 nt, Homo sapiens
  misc_RNA (1)...(19): siRNA sense strand
caacgugcaucugguucug

SEQ ID NO: 1453564 - RNA, 19 nt, Homo sapiens
  misc_RNA (1)...(19): siRNA sense strand
ugacaacgugcaucugguu

SEQ ID NO: 1453565 - RNA, 19 nt, Homo sapiens
  misc_RNA (1)...(19): siRNA sense strand
gcccagugguccuuucucu

SEQ ID NO: 1453566 - RNA, 19 nt, Homo sapiens
  misc_RNA (1)...(19): siRNA sense strand
ugugggcucugugguauau

SEQ ID NO: 1453567 - RNA, 19 nt, Homo sapiens
  misc_RNA (1)...(19): siRNA sense strand
ccuauacucagcccaggua

SEQ ID NO: 1453568 - RNA, 19 nt, Homo sapiens
  misc_RNA (1)...(19): siRNA sense strand
cgaaucugguccuauacuc

SEQ ID NO: 1453569 - RNA, 19 nt, Homo sapiens
  misc_RNA (1)...(19): siRNA sense strand
cugguucccugccucugua

SEQ ID NO: 1453570 - RNA, 19 nt, Homo sapiens
  misc_RNA (1)...(19): siRNA sense strand
ugggcucugugguauauga

SEQ ID NO: 1453571 - RNA, 19 nt, Homo sapiens
  misc_RNA (1)...(19): siRNA sense strand
caacgugucagcagauggu

SEQ ID NO: 1453572 - RNA, 19 nt, Homo sapiens
  misc_RNA (1)...(19): siRNA sense strand
uggaggagcagcugacuca

SEQ ID NO: 1453573 - RNA, 19 nt, Homo sapiens
  misc_RNA (1)...(19): siRNA sense strand
agagagagcggagcaagug

SEQ ID NO: 1453574 - RNA, 19 nt, Homo sapiens
  misc_RNA (1)...(19): siRNA sense strand
ccucccaacugccagacuu

SEQ ID NO: 1453575 - RNA, 19 nt, Homo sapiens
  misc_RNA (1)...(19): siRNA sense strand
guggagccgucgugaacug

SEQ ID NO: 1453576 - RNA, 19 nt, Homo sapiens
  misc_RNA (1)...(19): siRNA sense strand
gcacugggaagagccugaa

SEQ ID NO: 1453577 - RNA, 19 nt, Homo sapiens
  misc_RNA (1)...(19): siRNA sense strand
cacccuaaccucuguguuc

SEQ ID NO: 1453578 - RNA, 19 nt, Homo sapiens
  misc_RNA (1)...(19): siRNA sense strand
ccucauccuccuucucaaa

SEQ ID NO: 1453579 - RNA, 19 nt, Homo sapiens
  misc_RNA (1)...(19): siRNA sense strand
ccgcugcgcuuucccucau

SEQ ID NO: 1453580 - RNA, 19 nt, Homo sapiens
  misc_RNA (1)...(19): siRNA sense strand
cgaguucccauugcugaaa

SEQ ID NO: 1453581 - RNA, 19 nt, Homo sapiens
  misc_RNA (1)...(19): siRNA sense strand
ucugugggcucugugguau

SEQ ID NO: 1453582 - RNA, 19 nt, Homo sapiens
  misc_RNA (1)...(19): siRNA sense strand
gugguggucuugcucuucu

SEQ ID NO: 1453583 - RNA, 19 nt, Homo sapiens
  misc_RNA (1)...(19): siRNA sense strand
gcuggccugccuacucuuu

SEQ ID NO: 1453584 - RNA, 19 nt, Homo sapiens
  misc_RNA (1)...(19): siRNA sense strand
gcugaaaggccacccuaac

SEQ ID NO: 1453585 - RNA, 19 nt, Homo sapiens
  misc_RNA (1)...(19): siRNA sense strand
gaguucccauugcugaaag

SEQ ID NO: 1453586 - RNA, 19 nt, Homo sapiens
  misc_RNA (1)...(19): siRNA sense strand
gugcaucugguucugaaug

SEQ ID NO: 1453587 - RNA, 19 nt, Homo sapiens
  misc_RNA (1)...(19): siRNA sense strand
gguacgagaaggaacucaa

SEQ ID NO: 1453588 - RNA, 19 nt, Homo sapiens
  misc_RNA (1)...(19): siRNA sense strand
uggcuggccugccuacucu

SEQ ID NO: 1453589 - RNA, 19 nt, Homo sapiens
  misc_RNA (1)...(19): siRNA sense strand
gccucucccuguacuggaa

SEQ ID NO: 1453590 - RNA, 19 nt, Homo sapiens
  misc_RNA (1)...(19): siRNA sense strand
gcucaacgugucagcagau

SEQ ID NO: 1453591 - RNA, 19 nt, Homo sapiens
  misc_RNA (1)...(19): siRNA sense strand
guacgaaucugguccuaua

SEQ ID NO: 1453592 - RNA, 19 nt, Homo sapiens
  misc_RNA (1)...(19): siRNA sense strand
gggaagagccugaagauga

SEQ ID NO: 1453593 - RNA, 19 nt, Homo sapiens
  misc_RNA (1)...(19): siRNA sense strand
ggaagagccugaagaugag

SEQ ID NO: 1453594 - RNA, 19 nt, Homo sapiens
  misc_RNA (1)...(19): siRNA sense strand
cuacgcaccugcagacaga

SEQ ID NO: 1453595 - RNA, 19 nt, Homo sapiens
  misc_RNA (1)...(19): siRNA sense strand
agaaggagaccgacuguga

SEQ ID NO: 1453596 - RNA, 19 nt, Homo sapiens
  misc_RNA (1)...(19): siRNA sense strand
gaccgacugugaccucugu

SEQ ID NO: 1453597 - RNA, 19 nt, Homo sapiens
  misc_RNA (1)...(19): siRNA sense strand
ggagugagguacgaaucug

SEQ ID NO: 1453598 - RNA, 19 nt, Homo sapiens
  misc_RNA (1)...(19): siRNA sense strand
gaagcccagugguccuuuc

SEQ ID NO: 1453599 - RNA, 19 nt, Homo sapiens
  misc_RNA (1)...(19): siRNA sense strand
gaaggaacucaaccacaca

SEQ ID NO: 1453600 - RNA, 19 nt, Homo sapiens
  misc_RNA (1)...(19): siRNA sense strand
gaaucugguccuauacuca

SEQ ID NO: 1453601 - RNA, 19 nt, Homo sapiens
  misc_RNA (1)...(19): siRNA sense strand
caacgugcaucugguucug

SEQ ID NO: 1453602 - RNA, 19 nt, Homo sapiens
  misc_RNA (1)...(19): siRNA sense strand
gcccagugguccuuucucu

SEQ ID NO: 1453603 - RNA, 19 nt, Homo sapiens
  misc_RNA (1)...(19): siRNA sense strand
ugacaacgugcaucugguu

SEQ ID NO: 1453604 - RNA, 19 nt, Homo sapiens
  misc_RNA (1)...(19): siRNA sense strand
ugugggcucugugguauau

SEQ ID NO: 1453605 - RNA, 19 nt, Homo sapiens
  misc_RNA (1)...(19): siRNA sense strand
ccuauacucagcccaggua

SEQ ID NO: 1453606 - RNA, 19 nt, Homo sapiens
  misc_RNA (1)...(19): siRNA sense strand
cgaaucugguccuauacuc

SEQ ID NO: 1453607 - RNA, 19 nt, Homo sapiens
  misc_RNA (1)...(19): siRNA sense strand
ugggcucugugguauauga

SEQ ID NO: 1453608 - RNA, 19 nt, Homo sapiens
  misc_RNA (1)...(19): siRNA sense strand
caacgugucagcagauggu

SEQ ID NO: 1453609 - RNA, 19 nt, Homo sapiens
  misc_RNA (1)...(19): siRNA sense strand
gcacugggaagagccugaa

SEQ ID NO: 1453610 - RNA, 19 nt, Homo sapiens
  misc_RNA (1)...(19): siRNA sense strand
uggaggagcagcugacuca

SEQ ID NO: 1453611 - RNA, 19 nt, Homo sapiens
  misc_RNA (1)...(19): siRNA sense strand
ucugugggcucugugguau

SEQ ID NO: 1453612 - RNA, 19 nt, Homo sapiens
  misc_RNA (1)...(19): siRNA sense strand
gugcaucugguucugaaug

SEQ ID NO: 1453613 - RNA, 19 nt, Homo sapiens
  misc_RNA (1)...(19): siRNA sense strand
gguacgagaaggaacucaa

SEQ ID NO: 1453614 - RNA, 19 nt, Homo sapiens
  misc_RNA (1)...(19): siRNA sense strand
gccucucccuguacuggaa

SEQ ID NO: 1453615 - RNA, 19 nt, Homo sapiens
  misc_RNA (1)...(19): siRNA sense strand
gcucaacgugucagcagau

SEQ ID NO: 1453616 - RNA, 19 nt, Homo sapiens
  misc_RNA (1)...(19): siRNA sense strand
cuacgcaccugcagacaga

SEQ ID NO: 1453617 - RNA, 19 nt, Homo sapiens
  misc_RNA (1)...(19): siRNA sense strand
gaagcccagugguccuuuc

SEQ ID NO: 1453618 - RNA, 19 nt, Homo sapiens
  misc_RNA (1)...(19): siRNA sense strand
gcccagugguccuuucucu

SEQ ID NO: 1453619 - RNA, 19 nt, Homo sapiens
  misc_RNA (1)...(19): siRNA sense strand
guacgaaucugguccuaua

SEQ ID NO: 1453620 - RNA, 19 nt, Homo sapiens
  misc_RNA (1)...(19): siRNA sense strand
gggaagagccugaagauga

SEQ ID NO: 1453621 - RNA, 19 nt, Homo sapiens
  misc_RNA (1)...(19): siRNA sense strand
ggacaagguucucgaguuc

SEQ ID NO: 1453622 - RNA, 19 nt, Homo sapiens
  misc_RNA (1)...(19): siRNA sense strand
gaaccugacuccguuagga

SEQ ID NO: 1453623 - RNA, 19 nt, Homo sapiens
  misc_RNA (1)...(19): siRNA sense strand
ggaagagccugaagaugag

SEQ ID NO: 1453624 - RNA, 19 nt, Homo sapiens
  misc_RNA (1)...(19): siRNA sense strand
gaccgcagaucauuaccuu

SEQ ID NO: 1453625 - RNA, 19 nt, Homo sapiens
  misc_RNA (1)...(19): siRNA sense strand
ggacaaauacauccacaag

SEQ ID NO: 1453626 - RNA, 19 nt, Homo sapiens
  misc_RNA (1)...(19): siRNA sense strand
cuacgcaccugcagacaga

SEQ ID NO: 1453627 - RNA, 19 nt, Homo sapiens
  misc_RNA (1)...(19): siRNA sense strand
agaaggagaccgacuguga

SEQ ID NO: 1453628 - RNA, 19 nt, Homo sapiens
  misc_RNA (1)...(19): siRNA sense strand
gcuaugggacgaugacuug

SEQ ID NO: 1453629 - RNA, 19 nt, Homo sapiens
  misc_RNA (1)...(19): siRNA sense strand
ccacuggucccaccgcuuu

SEQ ID NO: 1453630 - RNA, 19 nt, Homo sapiens
  misc_RNA (1)...(19): siRNA sense strand
gaccgacugugaccucugu

SEQ ID NO: 1453631 - RNA, 19 nt, Homo sapiens
  misc_RNA (1)...(19): siRNA sense strand
ggagugagguacgaaucug

SEQ ID NO: 1453632 - RNA, 19 nt, Homo sapiens
  misc_RNA (1)...(19): siRNA sense strand
ccgcagaucauuaccuuga

SEQ ID NO: 1453633 - RNA, 19 nt, Homo sapiens
  misc_RNA (1)...(19): siRNA sense strand
ggcugaggcucuugaaaca

SEQ ID NO: 1453634 - RNA, 19 nt, Homo sapiens
  misc_RNA (1)...(19): siRNA sense strand
uggacaagguucucgaguu

SEQ ID NO: 1453635 - RNA, 19 nt, Homo sapiens
  misc_RNA (1)...(19): siRNA sense strand
gcagaucauuaccuugaac

SEQ ID NO: 1453636 - RNA, 19 nt, Homo sapiens
  misc_RNA (1)...(19): siRNA sense strand
gaagcccagugguccuuuc

SEQ ID NO: 1453637 - RNA, 19 nt, Homo sapiens
  misc_RNA (1)...(19): siRNA sense strand
gaaggaacucaaccacaca

SEQ ID NO: 1453638 - RNA, 19 nt, Homo sapiens
  misc_RNA (1)...(19): siRNA sense strand
gaaucugguccuauacuca

SEQ ID NO: 1453639 - RNA, 19 nt, Homo sapiens
  misc_RNA (1)...(19): siRNA sense strand
caacgugcaucugguucug

SEQ ID NO: 1453640 - RNA, 19 nt, Homo sapiens
  misc_RNA (1)...(19): siRNA sense strand
ugacaacgugcaucugguu

SEQ ID NO: 1453641 - RNA, 19 nt, Homo sapiens
  misc_RNA (1)...(19): siRNA sense strand
gcccagugguccuuucucu

SEQ ID NO: 1453642 - RNA, 19 nt, Homo sapiens
  misc_RNA (1)...(19): siRNA sense strand
ugugggcucugugguauau

SEQ ID NO: 1453643 - RNA, 19 nt, Homo sapiens
  misc_RNA (1)...(19): siRNA sense strand
ccuauacucagcccaggua

SEQ ID NO: 1453644 - RNA, 19 nt, Homo sapiens
  misc_RNA (1)...(19): siRNA sense strand
cgaaucugguccuauacuc

SEQ ID NO: 1453645 - RNA, 19 nt, Homo sapiens
  misc_RNA (1)...(19): siRNA sense strand
cugguucccugccucugua

SEQ ID NO: 1453646 - RNA, 19 nt, Homo sapiens
  misc_RNA (1)...(19): siRNA sense strand
ugggcucugugguauauga

SEQ ID NO: 1453647 - RNA, 19 nt, Homo sapiens
  misc_RNA (1)...(19): siRNA sense strand
caacgugucagcagauggu

SEQ ID NO: 1453648 - RNA, 19 nt, Homo sapiens
  misc_RNA (1)...(19): siRNA sense strand
uggaggagcagcugacuca

SEQ ID NO: 1453649 - RNA, 19 nt, Homo sapiens
  misc_RNA (1)...(19): siRNA sense strand
gcacugggaagagccugaa

SEQ ID NO: 1453650 - RNA, 19 nt, Homo sapiens
  misc_RNA (1)...(19): siRNA sense strand
cacccuaaccucuguguuc

SEQ ID NO: 1453651 - RNA, 19 nt, Homo sapiens
  misc_RNA (1)...(19): siRNA sense strand
ccucauccuccuucucaaa

SEQ ID NO: 1453652 - RNA, 19 nt, Homo sapiens
  misc_RNA (1)...(19): siRNA sense strand
ccgcugcgcuuucccucau

SEQ ID NO: 1453653 - RNA, 19 nt, Homo sapiens
  misc_RNA (1)...(19): siRNA sense strand
cgaguucccauugcugaaa

SEQ ID NO: 1453654 - RNA, 19 nt, Homo sapiens
  misc_RNA (1)...(19): siRNA sense strand
ucugugggcucugugguau

SEQ ID NO: 1453655 - RNA, 19 nt, Homo sapiens
  misc_RNA (1)...(19): siRNA sense strand
gcuggccugccuacucuuu

SEQ ID NO: 1453656 - RNA, 19 nt, Homo sapiens
  misc_RNA (1)...(19): siRNA sense strand
gcugaaaggccacccuaac

SEQ ID NO: 1453657 - RNA, 19 nt, Homo sapiens
  misc_RNA (1)...(19): siRNA sense strand
gaguucccauugcugaaag

SEQ ID NO: 1453658 - RNA, 19 nt, Homo sapiens
  misc_RNA (1)...(19): siRNA sense strand
gugcaucugguucugaaug

SEQ ID NO: 1453659 - RNA, 19 nt, Homo sapiens
  misc_RNA (1)...(19): siRNA sense strand
gguacgagaaggaacucaa

SEQ ID NO: 1453660 - RNA, 19 nt, Homo sapiens
  misc_RNA (1)...(19): siRNA sense strand
uggcuggccugccuacucu

SEQ ID NO: 1453661 - RNA, 19 nt, Homo sapiens
  misc_RNA (1)...(19): siRNA sense strand
gccucucccuguacuggaa

SEQ ID NO: 1453662 - RNA, 19 nt, Homo sapiens
  misc_RNA (1)...(19): siRNA sense strand
gcucaacgugucagcagau

SEQ ID NO: 1453663 - RNA, 19 nt, Homo sapiens
  misc_RNA (1)...(19): siRNA sense strand
guacgaaucugguccuaua

SEQ ID NO: 1453664 - RNA, 19 nt, Homo sapiens
  misc_RNA (1)...(19): siRNA sense strand
gggaagagccugaagauga

SEQ ID NO: 1453665 - RNA, 19 nt, Homo sapiens
  misc_RNA (1)...(19): siRNA sense strand
ggacaagguucucgaguuc

SEQ ID NO: 1453666 - RNA, 19 nt, Homo sapiens
  misc_RNA (1)...(19): siRNA sense strand
gaaccugacuccguuagga

SEQ ID NO: 1453667 - RNA, 19 nt, Homo sapiens
  misc_RNA (1)...(19): siRNA sense strand
ggaagagccugaagaugag

SEQ ID NO: 1453668 - RNA, 19 nt, Homo sapiens
  misc_RNA (1)...(19): siRNA sense strand
gaccgcagaucauuaccuu

SEQ ID NO: 1453669 - RNA, 19 nt, Homo sapiens
  misc_RNA (1)...(19): siRNA sense strand
ggacaaauacauccacaag

SEQ ID NO: 1453670 - RNA, 19 nt, Homo sapiens
  misc_RNA (1)...(19): siRNA sense strand
cuacgcaccugcagacaga

SEQ ID NO: 1453671 - RNA, 19 nt, Homo sapiens
  misc_RNA (1)...(19): siRNA sense strand
agaaggagaccgacuguga

SEQ ID NO: 1453672 - RNA, 19 nt, Homo sapiens
  misc_RNA (1)...(19): siRNA sense strand
gcuaugggacgaugacuug

SEQ ID NO: 1453673 - RNA, 19 nt, Homo sapiens
  misc_RNA (1)...(19): siRNA sense strand
ccacuggucccaccgcuuu

SEQ ID NO: 1453674 - RNA, 19 nt, Homo sapiens
  misc_RNA (1)...(19): siRNA sense strand
gaccgacugugaccucugu

SEQ ID NO: 1453675 - RNA, 19 nt, Homo sapiens
  misc_RNA (1)...(19): siRNA sense strand
ggagugagguacgaaucug

SEQ ID NO: 1453676 - RNA, 19 nt, Homo sapiens
  misc_RNA (1)...(19): siRNA sense strand
ccgcagaucauuaccuuga

SEQ ID NO: 1453677 - RNA, 19 nt, Homo sapiens
  misc_RNA (1)...(19): siRNA sense strand
ggcugaggcucuugaaaca

SEQ ID NO: 1453678 - RNA, 19 nt, Homo sapiens
  misc_RNA (1)...(19): siRNA sense strand
uggacaagguucucgaguu

SEQ ID NO: 1453679 - RNA, 19 nt, Homo sapiens
  misc_RNA (1)...(19): siRNA sense strand
gcagaucauuaccuugaac

SEQ ID NO: 1453680 - RNA, 19 nt, Homo sapiens
  misc_RNA (1)...(19): siRNA sense strand
gaagcccagugguccuuuc

SEQ ID NO: 1453681 - RNA, 19 nt, Homo sapiens
  misc_RNA (1)...(19): siRNA sense strand
gaaggaacucaaccacaca

SEQ ID NO: 1453682 - RNA, 19 nt, Homo sapiens
  misc_RNA (1)...(19): siRNA sense strand
gaaucugguccuauacuca

SEQ ID NO: 1453683 - RNA, 19 nt, Homo sapiens
  misc_RNA (1)...(19): siRNA sense strand
caacgugcaucugguucug

SEQ ID NO: 1453684 - RNA, 19 nt, Homo sapiens
  misc_RNA (1)...(19): siRNA sense strand
ugacaacgugcaucugguu

SEQ ID NO: 1453685 - RNA, 19 nt, Homo sapiens
  misc_RNA (1)...(19): siRNA sense strand
gcccagugguccuuucucu

SEQ ID NO: 1453686 - RNA, 19 nt, Homo sapiens
  misc_RNA (1)...(19): siRNA sense strand
ugugggcucugugguauau

SEQ ID NO: 1453687 - RNA, 19 nt, Homo sapiens
  misc_RNA (1)...(19): siRNA sense strand
ccuauacucagcccaggua

SEQ ID NO: 1453688 - RNA, 19 nt, Homo sapiens
  misc_RNA (1)...(19): siRNA sense strand
cgaaucugguccuauacuc

SEQ ID NO: 1453689 - RNA, 19 nt, Homo sapiens
  misc_RNA (1)...(19): siRNA sense strand
cugguucccugccucugua

SEQ ID NO: 1453690 - RNA, 19 nt, Homo sapiens
  misc_RNA (1)...(19): siRNA sense strand
ugggcucugugguauauga

SEQ ID NO: 1453691 - RNA, 19 nt, Homo sapiens
  misc_RNA (1)...(19): siRNA sense strand
caacgugucagcagauggu

SEQ ID NO: 1453692 - RNA, 19 nt, Homo sapiens
  misc_RNA (1)...(19): siRNA sense strand
uggaggagcagcugacuca

SEQ ID NO: 1453693 - RNA, 19 nt, Homo sapiens
  misc_RNA (1)...(19): siRNA sense strand
agagagagcggagcaagug

SEQ ID NO: 1453694 - RNA, 19 nt, Homo sapiens
  misc_RNA (1)...(19): siRNA sense strand
ccucccaacugccagacuu

SEQ ID NO: 1453695 - RNA, 19 nt, Homo sapiens
  misc_RNA (1)...(19): siRNA sense strand
guggagccgucgugaacug

SEQ ID NO: 1453696 - RNA, 19 nt, Homo sapiens
  misc_RNA (1)...(19): siRNA sense strand
gcacugggaagagccugaa

SEQ ID NO: 1453697 - RNA, 19 nt, Homo sapiens
  misc_RNA (1)...(19): siRNA sense strand
cacccuaaccucuguguuc

SEQ ID NO: 1453698 - RNA, 19 nt, Homo sapiens
  misc_RNA (1)...(19): siRNA sense strand
ccucauccuccuucucaaa

SEQ ID NO: 1453699 - RNA, 19 nt, Homo sapiens
  misc_RNA (1)...(19): siRNA sense strand
ccgcugcgcuuucccucau

SEQ ID NO: 1453700 - RNA, 19 nt, Homo sapiens
  misc_RNA (1)...(19): siRNA sense strand
cgaguucccauugcugaaa

SEQ ID NO: 1453701 - RNA, 19 nt, Homo sapiens
  misc_RNA (1)...(19): siRNA sense strand
ucugugggcucugugguau

SEQ ID NO: 1453702 - RNA, 19 nt, Homo sapiens
  misc_RNA (1)...(19): siRNA sense strand
gugguggucuugcucuucu

SEQ ID NO: 1453703 - RNA, 19 nt, Homo sapiens
  misc_RNA (1)...(19): siRNA sense strand
gcuggccugccuacucuuu

SEQ ID NO: 1453704 - RNA, 19 nt, Homo sapiens
  misc_RNA (1)...(19): siRNA sense strand
gcugaaaggccacccuaac

SEQ ID NO: 1453705 - RNA, 19 nt, Homo sapiens
  misc_RNA (1)...(19): siRNA sense strand
gaguucccauugcugaaag

SEQ ID NO: 1453706 - RNA, 19 nt, Homo sapiens
  misc_RNA (1)...(19): siRNA sense strand
gugcaucugguucugaaug

SEQ ID NO: 1453707 - RNA, 19 nt, Homo sapiens
  misc_RNA (1)...(19): siRNA sense strand
gguacgagaaggaacucaa

SEQ ID NO: 1453708 - RNA, 19 nt, Homo sapiens
  misc_RNA (1)...(19): siRNA sense strand
uggcuggccugccuacucu

SEQ ID NO: 1453709 - RNA, 19 nt, Homo sapiens
  misc_RNA (1)...(19): siRNA sense strand
gccucucccuguacuggaa

SEQ ID NO: 1453710 - RNA, 19 nt, Homo sapiens
  misc_RNA (1)...(19): siRNA sense strand
gcucaacgugucagcagau

SEQ ID NO: 1453711 - RNA, 19 nt, Homo sapiens
  misc_RNA (1)...(19): siRNA sense strand
guacgaaucugguccuaua

SEQ ID NO: 1453712 - RNA, 19 nt, Homo sapiens
  misc_RNA (1)...(19): siRNA sense strand
gggaagagccugaagauga

SEQ ID NO: 1453713 - RNA, 19 nt, Homo sapiens
  misc_RNA (1)...(19): siRNA sense strand
ggacaagguucucgaguuc

SEQ ID NO: 1453714 - RNA, 19 nt, Homo sapiens
  misc_RNA (1)...(19): siRNA sense strand
gaaccugacuccguuagga

SEQ ID NO: 1453715 - RNA, 19 nt, Homo sapiens
  misc_RNA (1)...(19): siRNA sense strand
ggaagagccugaagaugag

SEQ ID NO: 1453716 - RNA, 19 nt, Homo sapiens
  misc_RNA (1)...(19): siRNA sense strand
gaccgcagaucauuaccuu

SEQ ID NO: 1453717 - RNA, 19 nt, Homo sapiens
  misc_RNA (1)...(19): siRNA sense strand
ggacaaauacauccacaag

SEQ ID NO: 1453718 - RNA, 19 nt, Homo sapiens
  misc_RNA (1)...(19): siRNA sense strand
cuacgcaccugcagacaga

SEQ ID NO: 1453719 - RNA, 19 nt, Homo sapiens
  misc_RNA (1)...(19): siRNA sense strand
agaaggagaccgacuguga

SEQ ID NO: 1453720 - RNA, 19 nt, Homo sapiens
  misc_RNA (1)...(19): siRNA sense strand
gcuaugggacgaugacuug

SEQ ID NO: 1453721 - RNA, 19 nt, Homo sapiens
  misc_RNA (1)...(19): siRNA sense strand
ccacuggucccaccgcuuu

SEQ ID NO: 1453722 - RNA, 19 nt, Homo sapiens
  misc_RNA (1)...(19): siRNA sense strand
gaccgacugugaccucugu

SEQ ID NO: 1453723 - RNA, 19 nt, Homo sapiens
  misc_RNA (1)...(19): siRNA sense strand
ggagugagguacgaaucug

SEQ ID NO: 1453724 - RNA, 19 nt, Homo sapiens
  misc_RNA (1)...(19): siRNA sense strand
ccgcagaucauuaccuuga

SEQ ID NO: 1453725 - RNA, 19 nt, Homo sapiens
  misc_RNA (1)...(19): siRNA sense strand
ggcugaggcucuugaaaca

SEQ ID NO: 1453726 - RNA, 19 nt, Homo sapiens
  misc_RNA (1)...(19): siRNA sense strand
uggacaagguucucgaguu

SEQ ID NO: 1453727 - RNA, 19 nt, Homo sapiens
  misc_RNA (1)...(19): siRNA sense strand
gcagaucauuaccuugaac

SEQ ID NO: 1453728 - RNA, 19 nt, Homo sapiens
  misc_RNA (1)...(19): siRNA sense strand
gaagcccagugguccuuuc

SEQ ID NO: 1453729 - RNA, 19 nt, Homo sapiens
  misc_RNA (1)...(19): siRNA sense strand
gaaggaacucaaccacaca

SEQ ID NO: 1453730 - RNA, 19 nt, Homo sapiens
  misc_RNA (1)...(19): siRNA sense strand
gaaucugguccuauacuca

SEQ ID NO: 1453731 - RNA, 19 nt, Homo sapiens
  misc_RNA (1)...(19): siRNA sense strand
caacgugcaucugguucug

SEQ ID NO: 1453732 - RNA, 19 nt, Homo sapiens
  misc_RNA (1)...(19): siRNA sense strand
ugacaacgugcaucugguu

SEQ ID NO: 1453733 - RNA, 19 nt, Homo sapiens
  misc_RNA (1)...(19): siRNA sense strand
gcccagugguccuuucucu

SEQ ID NO: 1453734 - RNA, 19 nt, Homo sapiens
  misc_RNA (1)...(19): siRNA sense strand
ugugggcucugugguauau

SEQ ID NO: 1453735 - RNA, 19 nt, Homo sapiens
  misc_RNA (1)...(19): siRNA sense strand
ccuauacucagcccaggua

SEQ ID NO: 1453736 - RNA, 19 nt, Homo sapiens
  misc_RNA (1)...(19): siRNA sense strand
cgaaucugguccuauacuc

SEQ ID NO: 1453737 - RNA, 19 nt, Homo sapiens
  misc_RNA (1)...(19): siRNA sense strand
cugguucccugccucugua

SEQ ID NO: 1453738 - RNA, 19 nt, Homo sapiens
  misc_RNA (1)...(19): siRNA sense strand
ugggcucugugguauauga

SEQ ID NO: 1453739 - RNA, 19 nt, Homo sapiens
  misc_RNA (1)...(19): siRNA sense strand
caacgugucagcagauggu

SEQ ID NO: 1453740 - RNA, 19 nt, Homo sapiens
  misc_RNA (1)...(19): siRNA sense strand
uggaggagcagcugacuca

SEQ ID NO: 1453741 - RNA, 19 nt, Homo sapiens
  misc_RNA (1)...(19): siRNA sense strand
agagagagcggagcaagug

SEQ ID NO: 1453742 - RNA, 19 nt, Homo sapiens
  misc_RNA (1)...(19): siRNA sense strand
ccucccaacugccagacuu

SEQ ID NO: 1453743 - RNA, 19 nt, Homo sapiens
  misc_RNA (1)...(19): siRNA sense strand
guggagccgucgugaacug

SEQ ID NO: 1453744 - RNA, 19 nt, Homo sapiens
  misc_RNA (1)...(19): siRNA sense strand
gcacugggaagagccugaa

SEQ ID NO: 1453745 - RNA, 19 nt, Homo sapiens
  misc_RNA (1)...(19): siRNA sense strand
cacccuaaccucuguguuc

SEQ ID NO: 1453746 - RNA, 19 nt, Homo sapiens
  misc_RNA (1)...(19): siRNA sense strand
ccucauccuccuucucaaa

SEQ ID NO: 1453747 - RNA, 19 nt, Homo sapiens
  misc_RNA (1)...(19): siRNA sense strand
ccgcugcgcuuucccucau

SEQ ID NO: 1453748 - RNA, 19 nt, Homo sapiens
  misc_RNA (1)...(19): siRNA sense strand
cgaguucccauugcugaaa

SEQ ID NO: 1453749 - RNA, 19 nt, Homo sapiens
  misc_RNA (1)...(19): siRNA sense strand
ucugugggcucugugguau

SEQ ID NO: 1453750 - RNA, 19 nt, Homo sapiens
  misc_RNA (1)...(19): siRNA sense strand
gugguggucuugcucuucu

SEQ ID NO: 1453751 - RNA, 19 nt, Homo sapiens
  misc_RNA (1)...(19): siRNA sense strand
gcuggccugccuacucuuu

SEQ ID NO: 1453752 - RNA, 19 nt, Homo sapiens
  misc_RNA (1)...(19): siRNA sense strand
gcugaaaggccacccuaac

SEQ ID NO: 1453753 - RNA, 19 nt, Homo sapiens
  misc_RNA (1)...(19): siRNA sense strand
gaguucccauugcugaaag

SEQ ID NO: 1453754 - RNA, 19 nt, Homo sapiens
  misc_RNA (1)...(19): siRNA sense strand
gugcaucugguucugaaug

SEQ ID NO: 1453755 - RNA, 19 nt, Homo sapiens
  misc_RNA (1)...(19): siRNA sense strand
gguacgagaaggaacucaa

SEQ ID NO: 1453756 - RNA, 19 nt, Homo sapiens
  misc_RNA (1)...(19): siRNA sense strand
uggcuggccugccuacucu

SEQ ID NO: 1453757 - RNA, 19 nt, Homo sapiens
  misc_RNA (1)...(19): siRNA sense strand
gccucucccuguacuggaa

SEQ ID NO: 1453758 - RNA, 19 nt, Homo sapiens
  misc_RNA (1)...(19): siRNA sense strand
gcucaacgugucagcagau

SEQ ID NO: 1453759 - RNA, 19 nt, Homo sapiens
  misc_RNA (1)...(19): siRNA sense strand
guacgaaucugguccuaua

SEQ ID NO: 1453760 - RNA, 19 nt, Homo sapiens
  misc_RNA (1)...(19): siRNA sense strand
gggaagagccugaagauga

SEQ ID NO: 1453761 - RNA, 19 nt, Homo sapiens
  misc_RNA (1)...(19): siRNA sense strand
ggaagagccugaagaugag

SEQ ID NO: 1453762 - RNA, 19 nt, Homo sapiens
  misc_RNA (1)...(19): siRNA sense strand
cuacgcaccugcagacaga

SEQ ID NO: 1453763 - RNA, 19 nt, Homo sapiens
  misc_RNA (1)...(19): siRNA sense strand
agaaggagaccgacuguga

SEQ ID NO: 1453764 - RNA, 19 nt, Homo sapiens
  misc_RNA (1)...(19): siRNA sense strand
gaccgacugugaccucugu

SEQ ID NO: 1453765 - RNA, 19 nt, Homo sapiens
  misc_RNA (1)...(19): siRNA sense strand
ggagugagguacgaaucug

SEQ ID NO: 1453766 - RNA, 19 nt, Homo sapiens
  misc_RNA (1)...(19): siRNA sense strand
gaagcccagugguccuuuc

SEQ ID NO: 1453767 - RNA, 19 nt, Homo sapiens
  misc_RNA (1)...(19): siRNA sense strand
gaaggaacucaaccacaca

SEQ ID NO: 1453768 - RNA, 19 nt, Homo sapiens
  misc_RNA (1)...(19): siRNA sense strand
gaaucugguccuauacuca

SEQ ID NO: 1453769 - RNA, 19 nt, Homo sapiens
  misc_RNA (1)...(19): siRNA sense strand
caacgugcaucugguucug

SEQ ID NO: 1453770 - RNA, 19 nt, Homo sapiens
  misc_RNA (1)...(19): siRNA sense strand
gcccagugguccuuucucu

SEQ ID NO: 1453771 - RNA, 19 nt, Homo sapiens
  misc_RNA (1)...(19): siRNA sense strand
ugacaacgugcaucugguu

SEQ ID NO: 1453772 - RNA, 19 nt, Homo sapiens
  misc_RNA (1)...(19): siRNA sense strand
ugugggcucugugguauau

SEQ ID NO: 1453773 - RNA, 19 nt, Homo sapiens
  misc_RNA (1)...(19): siRNA sense strand
ccuauacucagcccaggua

SEQ ID NO: 1453774 - RNA, 19 nt, Homo sapiens
  misc_RNA (1)...(19): siRNA sense strand
cgaaucugguccuauacuc

SEQ ID NO: 1453775 - RNA, 19 nt, Homo sapiens
  misc_RNA (1)...(19): siRNA sense strand
ugggcucugugguauauga

SEQ ID NO: 1453776 - RNA, 19 nt, Homo sapiens
  misc_RNA (1)...(19): siRNA sense strand
caacgugucagcagauggu

SEQ ID NO: 1453777 - RNA, 19 nt, Homo sapiens
  misc_RNA (1)...(19): siRNA sense strand
gcacugggaagagccugaa

SEQ ID NO: 1453778 - RNA, 19 nt, Homo sapiens
  misc_RNA (1)...(19): siRNA sense strand
uggaggagcagcugacuca

SEQ ID NO: 1453779 - RNA, 19 nt, Homo sapiens
  misc_RNA (1)...(19): siRNA sense strand
ucugugggcucugugguau

SEQ ID NO: 1453780 - RNA, 19 nt, Homo sapiens
  misc_RNA (1)...(19): siRNA sense strand
gugcaucugguucugaaug

SEQ ID NO: 1453781 - RNA, 19 nt, Homo sapiens
  misc_RNA (1)...(19): siRNA sense strand
gguacgagaaggaacucaa

SEQ ID NO: 1453782 - RNA, 19 nt, Homo sapiens
  misc_RNA (1)...(19): siRNA sense strand
gccucucccuguacuggaa

SEQ ID NO: 1453783 - RNA, 19 nt, Homo sapiens
  misc_RNA (1)...(19): siRNA sense strand
gcucaacgugucagcagau

SEQ ID NO: 1453784 - RNA, 19 nt, Homo sapiens
  misc_RNA (1)...(19): siRNA sense strand
cuacgcaccugcagacaga

SEQ ID NO: 1453785 - RNA, 19 nt, Homo sapiens
  misc_RNA (1)...(19): siRNA sense strand
gaagcccagugguccuuuc

SEQ ID NO: 1453786 - RNA, 19 nt, Homo sapiens
  misc_RNA (1)...(19): siRNA sense strand
gcccagugguccuuucucu

SEQ ID NO: 1453787 - RNA, 19 nt, Homo sapiens
  misc_RNA (1)...(19): siRNA sense strand
gagaagaaauggagaaagu

SEQ ID NO: 1453788 - RNA, 19 nt, Homo sapiens
  misc_RNA (1)...(19): siRNA sense strand
gcaaagcauucuuccguuu

SEQ ID NO: 1453789 - RNA, 19 nt, Homo sapiens
  misc_RNA (1)...(19): siRNA sense strand
agaagaagauucagaagaa

SEQ ID NO: 1453790 - RNA, 19 nt, Homo sapiens
  misc_RNA (1)...(19): siRNA sense strand
gcugaagucuugugucauu

SEQ ID NO: 1453791 - RNA, 19 nt, Homo sapiens
  misc_RNA (1)...(19): siRNA sense strand
gaagaagauucagaagaaa

SEQ ID NO: 1453792 - RNA, 19 nt, Homo sapiens
  misc_RNA (1)...(19): siRNA sense strand
gagaaacgcuaucagucaa

SEQ ID NO: 1453793 - RNA, 19 nt, Homo sapiens
  misc_RNA (1)...(19): siRNA sense strand
ccaagaaaccaaagaauga

SEQ ID NO: 1453794 - RNA, 19 nt, Homo sapiens
  misc_RNA (1)...(19): siRNA sense strand
ccaacgggcugaagucuug

SEQ ID NO: 1453795 - RNA, 19 nt, Homo sapiens
  misc_RNA (1)...(19): siRNA sense strand
gaagaaauggagaaaguau

SEQ ID NO: 1453796 - RNA, 19 nt, Homo sapiens
  misc_RNA (1)...(19): siRNA sense strand
gaccgaaauuugcugcuaa

SEQ ID NO: 1453797 - RNA, 19 nt, Homo sapiens
  misc_RNA (1)...(19): siRNA sense strand
ucauggagcugaacgagaa

SEQ ID NO: 1453798 - RNA, 19 nt, Homo sapiens
  misc_RNA (1)...(19): siRNA sense strand
ggagaaacgcuaucaguca

SEQ ID NO: 1453799 - RNA, 19 nt, Homo sapiens
  misc_RNA (1)...(19): siRNA sense strand
ggaccgaaauuugcugcua

SEQ ID NO: 1453800 - RNA, 19 nt, Homo sapiens
  misc_RNA (1)...(19): siRNA sense strand
gaaaguauuagcuggagaa

SEQ ID NO: 1453801 - RNA, 19 nt, Homo sapiens
  misc_RNA (1)...(19): siRNA sense strand
caaagcauucuuccguuua

SEQ ID NO: 1453802 - RNA, 19 nt, Homo sapiens
  misc_RNA (1)...(19): siRNA sense strand
gggcugaagucuuguguca

SEQ ID NO: 1453803 - RNA, 19 nt, Homo sapiens
  misc_RNA (1)...(19): siRNA sense strand
ggagguugauggcaauuca

SEQ ID NO: 1453804 - RNA, 19 nt, Homo sapiens
  misc_RNA (1)...(19): siRNA sense strand
gaagacaaguacgaaauac

SEQ ID NO: 1453805 - RNA, 19 nt, Homo sapiens
  misc_RNA (1)...(19): siRNA sense strand
gcaagaacccagucaugga

SEQ ID NO: 1453806 - RNA, 19 nt, Homo sapiens
  misc_RNA (1)...(19): siRNA sense strand
ggacuacaccguucagauc

SEQ ID NO: 1453807 - RNA, 19 nt, Homo sapiens
  misc_RNA (1)...(19): siRNA sense strand
ugacaaagcacggcaagaa

SEQ ID NO: 1453808 - RNA, 19 nt, Homo sapiens
  misc_RNA (1)...(19): siRNA sense strand
cgaaguggauggacagaag

SEQ ID NO: 1453809 - RNA, 19 nt, Homo sapiens
  misc_RNA (1)...(19): siRNA sense strand
gaaugccggugcuggguau

SEQ ID NO: 1453810 - RNA, 19 nt, Homo sapiens
  misc_RNA (1)...(19): siRNA sense strand
caaccgcccuccuggacaa

SEQ ID NO: 1453811 - RNA, 19 nt, Homo sapiens
  misc_RNA (1)...(19): siRNA sense strand
agaagacaaguacgaaaua

SEQ ID NO: 1453812 - RNA, 19 nt, Homo sapiens
  misc_RNA (1)...(19): siRNA sense strand
uaacagaagacaaguacga

SEQ ID NO: 1453813 - RNA, 19 nt, Homo sapiens
  misc_RNA (1)...(19): siRNA sense strand
gcauuuaugacccuuguga

SEQ ID NO: 1453814 - RNA, 19 nt, Homo sapiens
  misc_RNA (1)...(19): siRNA sense strand
gaagaggcgugggcucaag

SEQ ID NO: 1453815 - RNA, 19 nt, Homo sapiens
  misc_RNA (1)...(19): siRNA sense strand
agaagccacugaugcuauu

SEQ ID NO: 1453816 - RNA, 19 nt, Homo sapiens
  misc_RNA (1)...(19): siRNA sense strand
gaagucuugugucauugug

SEQ ID NO: 1453817 - RNA, 19 nt, Homo sapiens
  misc_RNA (1)...(19): siRNA sense strand
agaagaagaagauucagaa

SEQ ID NO: 1453818 - RNA, 19 nt, Homo sapiens
  misc_RNA (1)...(19): siRNA sense strand
aaagcauucuuccguuuau

SEQ ID NO: 1453819 - RNA, 19 nt, Homo sapiens
  misc_RNA (1)...(19): siRNA sense strand
cuuccaagaugcccaagaa

SEQ ID NO: 1453820 - RNA, 19 nt, Homo sapiens
  misc_RNA (1)...(19): siRNA sense strand
caagaaaccaaagaaugaa

SEQ ID NO: 1453821 - RNA, 19 nt, Homo sapiens
  misc_RNA (1)...(19): siRNA sense strand
guucagaucccaccaagca

SEQ ID NO: 1453822 - RNA, 19 nt, Homo sapiens
  misc_RNA (1)...(19): siRNA sense strand
gagcuggugcugcugugua

SEQ ID NO: 1453823 - RNA, 19 nt, Homo sapiens
  misc_RNA (1)...(19): siRNA sense strand
ggcgugggcucaaguacga

SEQ ID NO: 1453824 - RNA, 19 nt, Homo sapiens
  misc_RNA (1)...(19): siRNA sense strand
caaaagagccuccauuguc

SEQ ID NO: 1453825 - RNA, 19 nt, Homo sapiens
  misc_RNA (1)...(19): siRNA sense strand
cgacaagcgcuucgucaug

SEQ ID NO: 1453826 - RNA, 19 nt, Homo sapiens
  misc_RNA (1)...(19): siRNA sense strand
aguauuagcuggagaaacg

SEQ ID NO: 1453827 - RNA, 19 nt, Homo sapiens
  misc_RNA (1)...(19): siRNA sense strand
cagaagacaaguacgaaau

SEQ ID NO: 1453828 - RNA, 19 nt, Homo sapiens
  misc_RNA (1)...(19): siRNA sense strand
gaagaagaagauucagaag

SEQ ID NO: 1453829 - RNA, 19 nt, Homo sapiens
  misc_RNA (1)...(19): siRNA sense strand
gacagcaacgggaagauau

SEQ ID NO: 1453830 - RNA, 19 nt, Homo sapiens
  misc_RNA (1)...(19): siRNA sense strand
ugucgacgaugcugcgauu

SEQ ID NO: 1453831 - RNA, 19 nt, Homo sapiens
  misc_RNA (1)...(19): siRNA sense strand
gagcaggcagaguccgaua

SEQ ID NO: 1453832 - RNA, 19 nt, Homo sapiens
  misc_RNA (1)...(19): siRNA sense strand
cgacgaugcugcgauugug

SEQ ID NO: 1453833 - RNA, 19 nt, Homo sapiens
  misc_RNA (1)...(19): siRNA sense strand
ccaugucuguggagguuga

SEQ ID NO: 1453834 - RNA, 19 nt, Homo sapiens
  misc_RNA (1)...(19): siRNA sense strand
acgaaauacugcaaucugu

SEQ ID NO: 1453835 - RNA, 19 nt, Homo sapiens
  misc_RNA (1)...(19): siRNA sense strand
ccaccaagcaccaccuaug

SEQ ID NO: 1453836 - RNA, 19 nt, Homo sapiens
  misc_RNA (1)...(19): siRNA sense strand
agacagcaacgggaagaua

SEQ ID NO: 1453837 - RNA, 19 nt, Homo sapiens
  misc_RNA (1)...(19): siRNA sense strand
augcugcgauugugauaaa

SEQ ID NO: 1453838 - RNA, 19 nt, Homo sapiens
  misc_RNA (1)...(19): siRNA sense strand
gcaacgggaagauaucaca

SEQ ID NO: 1453839 - RNA, 19 nt, Homo sapiens
  misc_RNA (1)...(19): siRNA sense strand
uaccaugucuguggagguu

SEQ ID NO: 1453840 - RNA, 19 nt, Homo sapiens
  misc_RNA (1)...(19): siRNA sense strand
gagcuccugugugagaaau

SEQ ID NO: 1453841 - RNA, 19 nt, Homo sapiens
  misc_RNA (1)...(19): siRNA sense strand
aaugaugaccgccauguga

SEQ ID NO: 1453842 - RNA, 19 nt, Homo sapiens
  misc_RNA (1)...(19): siRNA sense strand
aagaagaagauucagaaga

SEQ ID NO: 1453843 - RNA, 19 nt, Homo sapiens
  misc_RNA (1)...(19): siRNA sense strand
gaaauggagaaaguauuag

SEQ ID NO: 1453844 - RNA, 19 nt, Homo sapiens
  misc_RNA (1)...(19): siRNA sense strand
ggcagaguccgauaacaug

SEQ ID NO: 1453845 - RNA, 19 nt, Homo sapiens
  misc_RNA (1)...(19): siRNA sense strand
cagaagacggagcacauga

SEQ ID NO: 1453846 - RNA, 19 nt, Homo sapiens
  misc_RNA (1)...(19): siRNA sense strand
ccagcuccauaaaguccua

SEQ ID NO: 1453847 - RNA, 19 nt, Homo sapiens
  misc_RNA (1)...(19): siRNA sense strand
agaugguucuggcauuuau

SEQ ID NO: 1453848 - RNA, 19 nt, Homo sapiens
  misc_RNA (1)...(19): siRNA sense strand
guaaggagaagcccacaac

SEQ ID NO: 1453849 - RNA, 19 nt, Homo sapiens
  misc_RNA (1)...(19): siRNA sense strand
cccaagaaaccaaagaaug

SEQ ID NO: 1453850 - RNA, 19 nt, Homo sapiens
  misc_RNA (1)...(19): siRNA sense strand
ggcuaugaaugcccugaug

SEQ ID NO: 1453851 - RNA, 19 nt, Homo sapiens
  misc_RNA (1)...(19): siRNA sense strand
agaagauucagaagaaaga

SEQ ID NO: 1453852 - RNA, 19 nt, Homo sapiens
  misc_RNA (1)...(19): siRNA sense strand
agaagaaauggagaaagua

SEQ ID NO: 1453853 - RNA, 19 nt, Homo sapiens
  misc_RNA (1)...(19): siRNA sense strand
gaaugaugaccgccaugug

SEQ ID NO: 1453854 - RNA, 19 nt, Homo sapiens
  misc_RNA (1)...(19): siRNA sense strand
uggacaagguggccgacaa

SEQ ID NO: 1453855 - RNA, 19 nt, Homo sapiens
  misc_RNA (1)...(19): siRNA sense strand
ggccuacgcugcucuugcu

SEQ ID NO: 1453856 - RNA, 19 nt, Homo sapiens
  misc_RNA (1)...(19): siRNA sense strand
ggccgauccugacaaagca

SEQ ID NO: 1453857 - RNA, 19 nt, Homo sapiens
  misc_RNA (1)...(19): siRNA sense strand
ucagagaagaaauggagaa

SEQ ID NO: 1453858 - RNA, 19 nt, Homo sapiens
  misc_RNA (1)...(19): siRNA sense strand
aaagaagccacugaugcua

SEQ ID NO: 1453859 - RNA, 19 nt, Homo sapiens
  misc_RNA (1)...(19): siRNA sense strand
gcaucuagacagacagcaa

SEQ ID NO: 1453860 - RNA, 19 nt, Homo sapiens
  misc_RNA (1)...(19): siRNA sense strand
cagagaagaaauggagaaa

SEQ ID NO: 1453861 - RNA, 19 nt, Homo sapiens
  misc_RNA (1)...(19): siRNA sense strand
ucggccagcuccauaaagu

SEQ ID NO: 1453862 - RNA, 19 nt, Homo sapiens
  misc_RNA (1)...(19): siRNA sense strand
ggacaagguggccgacaac

SEQ ID NO: 1453863 - RNA, 19 nt, Homo sapiens
  misc_RNA (1)...(19): siRNA sense strand
agaggacgacaguaaagaa

SEQ ID NO: 1453864 - RNA, 19 nt, Homo sapiens
  misc_RNA (1)...(19): siRNA sense strand
gaaguggauggacagaagu

SEQ ID NO: 1453865 - RNA, 19 nt, Homo sapiens
  misc_RNA (1)...(19): siRNA sense strand
gugcggccuuucccucaga

SEQ ID NO: 1453866 - RNA, 19 nt, Homo sapiens
  misc_RNA (1)...(19): siRNA sense strand
uauugggcaucuagacaga

SEQ ID NO: 1453867 - RNA, 19 nt, Homo sapiens
  misc_RNA (1)...(19): siRNA sense strand
gcuauugggcaucuagaca

SEQ ID NO: 1453868 - RNA, 19 nt, Homo sapiens
  misc_RNA (1)...(19): siRNA sense strand
caugugauggcaaagcauu

SEQ ID NO: 1453869 - RNA, 19 nt, Homo sapiens
  misc_RNA (1)...(19): siRNA sense strand
gaggacgacaguaaagaag

SEQ ID NO: 1453870 - RNA, 19 nt, Homo sapiens
  misc_RNA (1)...(19): siRNA sense strand
ggaggcaguccagaacaug

SEQ ID NO: 1453871 - RNA, 19 nt, Homo sapiens
  misc_RNA (1)...(19): siRNA sense strand
acagaagacaaguacgaaa

SEQ ID NO: 1453872 - RNA, 19 nt, Homo sapiens
  misc_RNA (1)...(19): siRNA sense strand
ccagaggacgacaguaaag

SEQ ID NO: 1453873 - RNA, 19 nt, Homo sapiens
  misc_RNA (1)...(19): siRNA sense strand
aagaagaagaagauucaga

SEQ ID NO: 1453874 - RNA, 19 nt, Homo sapiens
  misc_RNA (1)...(19): siRNA sense strand
aagcaccaccuaugccauu

SEQ ID NO: 1453875 - RNA, 19 nt, Homo sapiens
  misc_RNA (1)...(19): siRNA sense strand
aagaagccacugaugcuau

SEQ ID NO: 1453876 - RNA, 19 nt, Homo sapiens
  misc_RNA (1)...(19): siRNA sense strand
gaaggccuacgcugcucuu

SEQ ID NO: 1453877 - RNA, 19 nt, Homo sapiens
  misc_RNA (1)...(19): siRNA sense strand
cgucauggaggucgaagug

SEQ ID NO: 1453878 - RNA, 19 nt, Homo sapiens
  misc_RNA (1)...(19): siRNA sense strand
gcccaagaaaccaaagaau

SEQ ID NO: 1453879 - RNA, 19 nt, Homo sapiens
  misc_RNA (1)...(19): siRNA sense strand
gcaggcagaguccgauaac

SEQ ID NO: 1453880 - RNA, 19 nt, Homo sapiens
  misc_RNA (1)...(19): siRNA sense strand
gcucuugcugcccuagaaa

SEQ ID NO: 1453881 - RNA, 19 nt, Homo sapiens
  misc_RNA (1)...(19): siRNA sense strand
cggcaagaacccagucaug

SEQ ID NO: 1453882 - RNA, 19 nt, Homo sapiens
  misc_RNA (1)...(19): siRNA sense strand
cagaggacgacaguaaaga

SEQ ID NO: 1453883 - RNA, 19 nt, Homo sapiens
  misc_RNA (1)...(19): siRNA sense strand
cucucgagcuccuguguga

SEQ ID NO: 1453884 - RNA, 19 nt, Homo sapiens
  misc_RNA (1)...(19): siRNA sense strand
uggcauuuaugacccuugu

SEQ ID NO: 1453885 - RNA, 19 nt, Homo sapiens
  misc_RNA (1)...(19): siRNA sense strand
gacaaagcacggcaagaac

SEQ ID NO: 1453886 - RNA, 19 nt, Homo sapiens
  misc_RNA (1)...(19): siRNA sense strand
gacgaugcugcgauuguga

SEQ ID NO: 1453887 - RNA, 19 nt, Homo sapiens
  misc_RNA (1)...(19): siRNA sense strand
gagaagaaauggagaaagu

SEQ ID NO: 1453888 - RNA, 19 nt, Homo sapiens
  misc_RNA (1)...(19): siRNA sense strand
gcaaagcauucuuccguuu

SEQ ID NO: 1453889 - RNA, 19 nt, Homo sapiens
  misc_RNA (1)...(19): siRNA sense strand
agaagaagauucagaagaa

SEQ ID NO: 1453890 - RNA, 19 nt, Homo sapiens
  misc_RNA (1)...(19): siRNA sense strand
gcugaagucuugugucauu

SEQ ID NO: 1453891 - RNA, 19 nt, Homo sapiens
  misc_RNA (1)...(19): siRNA sense strand
gaagaagauucagaagaaa

SEQ ID NO: 1453892 - RNA, 19 nt, Homo sapiens
  misc_RNA (1)...(19): siRNA sense strand
gagaaacgcuaucagucaa

SEQ ID NO: 1453893 - RNA, 19 nt, Homo sapiens
  misc_RNA (1)...(19): siRNA sense strand
ccaagaaaccaaagaauga

SEQ ID NO: 1453894 - RNA, 19 nt, Homo sapiens
  misc_RNA (1)...(19): siRNA sense strand
ccaacgggcugaagucuug

SEQ ID NO: 1453895 - RNA, 19 nt, Homo sapiens
  misc_RNA (1)...(19): siRNA sense strand
gaagaaauggagaaaguau

SEQ ID NO: 1453896 - RNA, 19 nt, Homo sapiens
  misc_RNA (1)...(19): siRNA sense strand
gaccgaaauuugcugcuaa

SEQ ID NO: 1453897 - RNA, 19 nt, Homo sapiens
  misc_RNA (1)...(19): siRNA sense strand
ucauggagcugaacgagaa

SEQ ID NO: 1453898 - RNA, 19 nt, Homo sapiens
  misc_RNA (1)...(19): siRNA sense strand
ggagaaacgcuaucaguca

SEQ ID NO: 1453899 - RNA, 19 nt, Homo sapiens
  misc_RNA (1)...(19): siRNA sense strand
ggaccgaaauuugcugcua

SEQ ID NO: 1453900 - RNA, 19 nt, Homo sapiens
  misc_RNA (1)...(19): siRNA sense strand
gaaaguauuagcuggagaa

SEQ ID NO: 1453901 - RNA, 19 nt, Homo sapiens
  misc_RNA (1)...(19): siRNA sense strand
caaagcauucuuccguuua

SEQ ID NO: 1453902 - RNA, 19 nt, Homo sapiens
  misc_RNA (1)...(19): siRNA sense strand
gggcugaagucuuguguca

SEQ ID NO: 1453903 - RNA, 19 nt, Homo sapiens
  misc_RNA (1)...(19): siRNA sense strand
ggagguugauggcaauuca

SEQ ID NO: 1453904 - RNA, 19 nt, Homo sapiens
  misc_RNA (1)...(19): siRNA sense strand
gaagacaaguacgaaauac

SEQ ID NO: 1453905 - RNA, 19 nt, Homo sapiens
  misc_RNA (1)...(19): siRNA sense strand
gcaagaacccagucaugga

SEQ ID NO: 1453906 - RNA, 19 nt, Homo sapiens
  misc_RNA (1)...(19): siRNA sense strand
ggacuacaccguucagauc

SEQ ID NO: 1453907 - RNA, 19 nt, Homo sapiens
  misc_RNA (1)...(19): siRNA sense strand
ugacaaagcacggcaagaa

SEQ ID NO: 1453908 - RNA, 19 nt, Homo sapiens
  misc_RNA (1)...(19): siRNA sense strand
cgaaguggauggacagaag

SEQ ID NO: 1453909 - RNA, 19 nt, Homo sapiens
  misc_RNA (1)...(19): siRNA sense strand
gaaugccggugcuggguau

SEQ ID NO: 1453910 - RNA, 19 nt, Homo sapiens
  misc_RNA (1)...(19): siRNA sense strand
caaccgcccuccuggacaa

SEQ ID NO: 1453911 - RNA, 19 nt, Homo sapiens
  misc_RNA (1)...(19): siRNA sense strand
agaagacaaguacgaaaua

SEQ ID NO: 1453912 - RNA, 19 nt, Homo sapiens
  misc_RNA (1)...(19): siRNA sense strand
uaacagaagacaaguacga

SEQ ID NO: 1453913 - RNA, 19 nt, Homo sapiens
  misc_RNA (1)...(19): siRNA sense strand
gcauuuaugacccuuguga

SEQ ID NO: 1453914 - RNA, 19 nt, Homo sapiens
  misc_RNA (1)...(19): siRNA sense strand
gaagaggcgugggcucaag

SEQ ID NO: 1453915 - RNA, 19 nt, Homo sapiens
  misc_RNA (1)...(19): siRNA sense strand
agaagccacugaugcuauu

SEQ ID NO: 1453916 - RNA, 19 nt, Homo sapiens
  misc_RNA (1)...(19): siRNA sense strand
gaagucuugugucauugug

SEQ ID NO: 1453917 - RNA, 19 nt, Homo sapiens
  misc_RNA (1)...(19): siRNA sense strand
agaagaagaagauucagaa

SEQ ID NO: 1453918 - RNA, 19 nt, Homo sapiens
  misc_RNA (1)...(19): siRNA sense strand
aaagcauucuuccguuuau

SEQ ID NO: 1453919 - RNA, 19 nt, Homo sapiens
  misc_RNA (1)...(19): siRNA sense strand
cuuccaagaugcccaagaa

SEQ ID NO: 1453920 - RNA, 19 nt, Homo sapiens
  misc_RNA (1)...(19): siRNA sense strand
caagaaaccaaagaaugaa

SEQ ID NO: 1453921 - RNA, 19 nt, Homo sapiens
  misc_RNA (1)...(19): siRNA sense strand
guucagaucccaccaagca

SEQ ID NO: 1453922 - RNA, 19 nt, Homo sapiens
  misc_RNA (1)...(19): siRNA sense strand
gagcuggugcugcugugua

SEQ ID NO: 1453923 - RNA, 19 nt, Homo sapiens
  misc_RNA (1)...(19): siRNA sense strand
ggcgugggcucaaguacga

SEQ ID NO: 1453924 - RNA, 19 nt, Homo sapiens
  misc_RNA (1)...(19): siRNA sense strand
caaaagagccuccauuguc

SEQ ID NO: 1453925 - RNA, 19 nt, Homo sapiens
  misc_RNA (1)...(19): siRNA sense strand
cgacaagcgcuucgucaug

SEQ ID NO: 1453926 - RNA, 19 nt, Homo sapiens
  misc_RNA (1)...(19): siRNA sense strand
aguauuagcuggagaaacg

SEQ ID NO: 1453927 - RNA, 19 nt, Homo sapiens
  misc_RNA (1)...(19): siRNA sense strand
cagaagacaaguacgaaau

SEQ ID NO: 1453928 - RNA, 19 nt, Homo sapiens
  misc_RNA (1)...(19): siRNA sense strand
gaagaagaagauucagaag

SEQ ID NO: 1453929 - RNA, 19 nt, Homo sapiens
  misc_RNA (1)...(19): siRNA sense strand
gacagcaacgggaagauau

SEQ ID NO: 1453930 - RNA, 19 nt, Homo sapiens
  misc_RNA (1)...(19): siRNA sense strand
ugucgacgaugcugcgauu

SEQ ID NO: 1453931 - RNA, 19 nt, Homo sapiens
  misc_RNA (1)...(19): siRNA sense strand
gagcaggcagaguccgaua

SEQ ID NO: 1453932 - RNA, 19 nt, Homo sapiens
  misc_RNA (1)...(19): siRNA sense strand
cgacgaugcugcgauugug

SEQ ID NO: 1453933 - RNA, 19 nt, Homo sapiens
  misc_RNA (1)...(19): siRNA sense strand
ccaugucuguggagguuga

SEQ ID NO: 1453934 - RNA, 19 nt, Homo sapiens
  misc_RNA (1)...(19): siRNA sense strand
acgaaauacugcaaucugu

SEQ ID NO: 1453935 - RNA, 19 nt, Homo sapiens
  misc_RNA (1)...(19): siRNA sense strand
ccaccaagcaccaccuaug

SEQ ID NO: 1453936 - RNA, 19 nt, Homo sapiens
  misc_RNA (1)...(19): siRNA sense strand
agacagcaacgggaagaua

SEQ ID NO: 1453937 - RNA, 19 nt, Homo sapiens
  misc_RNA (1)...(19): siRNA sense strand
augcugcgauugugauaaa

SEQ ID NO: 1453938 - RNA, 19 nt, Homo sapiens
  misc_RNA (1)...(19): siRNA sense strand
gcaacgggaagauaucaca

SEQ ID NO: 1453939 - RNA, 19 nt, Homo sapiens
  misc_RNA (1)...(19): siRNA sense strand
uaccaugucuguggagguu

SEQ ID NO: 1453940 - RNA, 19 nt, Homo sapiens
  misc_RNA (1)...(19): siRNA sense strand
gagcuccugugugagaaau

SEQ ID NO: 1453941 - RNA, 19 nt, Homo sapiens
  misc_RNA (1)...(19): siRNA sense strand
aaugaugaccgccauguga

SEQ ID NO: 1453942 - RNA, 19 nt, Homo sapiens
  misc_RNA (1)...(19): siRNA sense strand
aagaagaagauucagaaga

SEQ ID NO: 1453943 - RNA, 19 nt, Homo sapiens
  misc_RNA (1)...(19): siRNA sense strand
gaaauggagaaaguauuag

SEQ ID NO: 1453944 - RNA, 19 nt, Homo sapiens
  misc_RNA (1)...(19): siRNA sense strand
ggcagaguccgauaacaug

SEQ ID NO: 1453945 - RNA, 19 nt, Homo sapiens
  misc_RNA (1)...(19): siRNA sense strand
cagaagacggagcacauga

SEQ ID NO: 1453946 - RNA, 19 nt, Homo sapiens
  misc_RNA (1)...(19): siRNA sense strand
ccagcuccauaaaguccua

SEQ ID NO: 1453947 - RNA, 19 nt, Homo sapiens
  misc_RNA (1)...(19): siRNA sense strand
agaugguucuggcauuuau

SEQ ID NO: 1453948 - RNA, 19 nt, Homo sapiens
  misc_RNA (1)...(19): siRNA sense strand
guaaggagaagcccacaac

SEQ ID NO: 1453949 - RNA, 19 nt, Homo sapiens
  misc_RNA (1)...(19): siRNA sense strand
cccaagaaaccaaagaaug

SEQ ID NO: 1453950 - RNA, 19 nt, Homo sapiens
  misc_RNA (1)...(19): siRNA sense strand
ggcuaugaaugcccugaug

SEQ ID NO: 1453951 - RNA, 19 nt, Homo sapiens
  misc_RNA (1)...(19): siRNA sense strand
agaagauucagaagaaaga

SEQ ID NO: 1453952 - RNA, 19 nt, Homo sapiens
  misc_RNA (1)...(19): siRNA sense strand
agaagaaauggagaaagua

SEQ ID NO: 1453953 - RNA, 19 nt, Homo sapiens
  misc_RNA (1)...(19): siRNA sense strand
gaaugaugaccgccaugug

SEQ ID NO: 1453954 - RNA, 19 nt, Homo sapiens
  misc_RNA (1)...(19): siRNA sense strand
uggacaagguggccgacaa

SEQ ID NO: 1453955 - RNA, 19 nt, Homo sapiens
  misc_RNA (1)...(19): siRNA sense strand
ggccuacgcugcucuugcu

SEQ ID NO: 1453956 - RNA, 19 nt, Homo sapiens
  misc_RNA (1)...(19): siRNA sense strand
ggccgauccugacaaagca

SEQ ID NO: 1453957 - RNA, 19 nt, Homo sapiens
  misc_RNA (1)...(19): siRNA sense strand
ucagagaagaaauggagaa

SEQ ID NO: 1453958 - RNA, 19 nt, Homo sapiens
  misc_RNA (1)...(19): siRNA sense strand
aaagaagccacugaugcua

SEQ ID NO: 1453959 - RNA, 19 nt, Homo sapiens
  misc_RNA (1)...(19): siRNA sense strand
gcaucuagacagacagcaa

SEQ ID NO: 1453960 - RNA, 19 nt, Homo sapiens
  misc_RNA (1)...(19): siRNA sense strand
cagagaagaaauggagaaa

SEQ ID NO: 1453961 - RNA, 19 nt, Homo sapiens
  misc_RNA (1)...(19): siRNA sense strand
ucggccagcuccauaaagu

SEQ ID NO: 1453962 - RNA, 19 nt, Homo sapiens
  misc_RNA (1)...(19): siRNA sense strand
ggacaagguggccgacaac

SEQ ID NO: 1453963 - RNA, 19 nt, Homo sapiens
  misc_RNA (1)...(19): siRNA sense strand
agaggacgacaguaaagaa

SEQ ID NO: 1453964 - RNA, 19 nt, Homo sapiens
  misc_RNA (1)...(19): siRNA sense strand
gaaguggauggacagaagu

SEQ ID NO: 1453965 - RNA, 19 nt, Homo sapiens
  misc_RNA (1)...(19): siRNA sense strand
gugcggccuuucccucaga

SEQ ID NO: 1453966 - RNA, 19 nt, Homo sapiens
  misc_RNA (1)...(19): siRNA sense strand
uauugggcaucuagacaga

SEQ ID NO: 1453967 - RNA, 19 nt, Homo sapiens
  misc_RNA (1)...(19): siRNA sense strand
gcuauugggcaucuagaca

SEQ ID NO: 1453968 - RNA, 19 nt, Homo sapiens
  misc_RNA (1)...(19): siRNA sense strand
caugugauggcaaagcauu

SEQ ID NO: 1453969 - RNA, 19 nt, Homo sapiens
  misc_RNA (1)...(19): siRNA sense strand
gaggacgacaguaaagaag

SEQ ID NO: 1453970 - RNA, 19 nt, Homo sapiens
  misc_RNA (1)...(19): siRNA sense strand
ggaggcaguccagaacaug

SEQ ID NO: 1453971 - RNA, 19 nt, Homo sapiens
  misc_RNA (1)...(19): siRNA sense strand
acagaagacaaguacgaaa

SEQ ID NO: 1453972 - RNA, 19 nt, Homo sapiens
  misc_RNA (1)...(19): siRNA sense strand
ccagaggacgacaguaaag

SEQ ID NO: 1453973 - RNA, 19 nt, Homo sapiens
  misc_RNA (1)...(19): siRNA sense strand
aagaagaagaagauucaga

SEQ ID NO: 1453974 - RNA, 19 nt, Homo sapiens
  misc_RNA (1)...(19): siRNA sense strand
aagcaccaccuaugccauu

SEQ ID NO: 1453975 - RNA, 19 nt, Homo sapiens
  misc_RNA (1)...(19): siRNA sense strand
aagaagccacugaugcuau

SEQ ID NO: 1453976 - RNA, 19 nt, Homo sapiens
  misc_RNA (1)...(19): siRNA sense strand
gaaggccuacgcugcucuu

SEQ ID NO: 1453977 - RNA, 19 nt, Homo sapiens
  misc_RNA (1)...(19): siRNA sense strand
cgucauggaggucgaagug

SEQ ID NO: 1453978 - RNA, 19 nt, Homo sapiens
  misc_RNA (1)...(19): siRNA sense strand
gcccaagaaaccaaagaau

SEQ ID NO: 1453979 - RNA, 19 nt, Homo sapiens
  misc_RNA (1)...(19): siRNA sense strand
gcaggcagaguccgauaac

SEQ ID NO: 1453980 - RNA, 19 nt, Homo sapiens
  misc_RNA (1)...(19): siRNA sense strand
gcucuugcugcccuagaaa

SEQ ID NO: 1453981 - RNA, 19 nt, Homo sapiens
  misc_RNA (1)...(19): siRNA sense strand
cggcaagaacccagucaug

SEQ ID NO: 1453982 - RNA, 19 nt, Homo sapiens
  misc_RNA (1)...(19): siRNA sense strand
cagaggacgacaguaaaga

SEQ ID NO: 1453983 - RNA, 19 nt, Homo sapiens
  misc_RNA (1)...(19): siRNA sense strand
cucucgagcuccuguguga

SEQ ID NO: 1453984 - RNA, 19 nt, Homo sapiens
  misc_RNA (1)...(19): siRNA sense strand
uggcauuuaugacccuugu

SEQ ID NO: 1453985 - RNA, 19 nt, Homo sapiens
  misc_RNA (1)...(19): siRNA sense strand
gacaaagcacggcaagaac

SEQ ID NO: 1453986 - RNA, 19 nt, Homo sapiens
  misc_RNA (1)...(19): siRNA sense strand
gacgaugcugcgauuguga

SEQ ID NO: 1453987 - RNA, 19 nt, Homo sapiens
  misc_RNA (1)...(19): siRNA sense strand
gagaagaaauggagaaagu

SEQ ID NO: 1453988 - RNA, 19 nt, Homo sapiens
  misc_RNA (1)...(19): siRNA sense strand
gcaaagcauucuuccguuu

SEQ ID NO: 1453989 - RNA, 19 nt, Homo sapiens
  misc_RNA (1)...(19): siRNA sense strand
agaagaagauucagaagaa

SEQ ID NO: 1453990 - RNA, 19 nt, Homo sapiens
  misc_RNA (1)...(19): siRNA sense strand
gcugaagucuugugucauu

SEQ ID NO: 1453991 - RNA, 19 nt, Homo sapiens
  misc_RNA (1)...(19): siRNA sense strand
gaagaagauucagaagaaa

SEQ ID NO: 1453992 - RNA, 19 nt, Homo sapiens
  misc_RNA (1)...(19): siRNA sense strand
gagaaacgcuaucagucaa

SEQ ID NO: 1453993 - RNA, 19 nt, Homo sapiens
  misc_RNA (1)...(19): siRNA sense strand
ccaagaaaccaaagaauga

SEQ ID NO: 1453994 - RNA, 19 nt, Homo sapiens
  misc_RNA (1)...(19): siRNA sense strand
ccaacgggcugaagucuug

SEQ ID NO: 1453995 - RNA, 19 nt, Homo sapiens
  misc_RNA (1)...(19): siRNA sense strand
gaagaaauggagaaaguau

SEQ ID NO: 1453996 - RNA, 19 nt, Homo sapiens
  misc_RNA (1)...(19): siRNA sense strand
gaccgaaauuugcugcuaa

SEQ ID NO: 1453997 - RNA, 19 nt, Homo sapiens
  misc_RNA (1)...(19): siRNA sense strand
ucauggagcugaacgagaa

SEQ ID NO: 1453998 - RNA, 19 nt, Homo sapiens
  misc_RNA (1)...(19): siRNA sense strand
ggagaaacgcuaucaguca

SEQ ID NO: 1453999 - RNA, 19 nt, Homo sapiens
  misc_RNA (1)...(19): siRNA sense strand
ggaccgaaauuugcugcua

SEQ ID NO: 1454000 - RNA, 19 nt, Homo sapiens
  misc_RNA (1)...(19): siRNA sense strand
gaaaguauuagcuggagaa

SEQ ID NO: 1454001 - RNA, 19 nt, Homo sapiens
  misc_RNA (1)...(19): siRNA sense strand
caaagcauucuuccguuua

SEQ ID NO: 1454002 - RNA, 19 nt, Homo sapiens
  misc_RNA (1)...(19): siRNA sense strand
gggcugaagucuuguguca

SEQ ID NO: 1454003 - RNA, 19 nt, Homo sapiens
  misc_RNA (1)...(19): siRNA sense strand
ggagguugauggcaauuca

SEQ ID NO: 1454004 - RNA, 19 nt, Homo sapiens
  misc_RNA (1)...(19): siRNA sense strand
gaagacaaguacgaaauac

SEQ ID NO: 1454005 - RNA, 19 nt, Homo sapiens
  misc_RNA (1)...(19): siRNA sense strand
gcaagaacccagucaugga

SEQ ID NO: 1454006 - RNA, 19 nt, Homo sapiens
  misc_RNA (1)...(19): siRNA sense strand
ggacuacaccguucagauc

SEQ ID NO: 1454007 - RNA, 19 nt, Homo sapiens
  misc_RNA (1)...(19): siRNA sense strand
ugacaaagcacggcaagaa

SEQ ID NO: 1454008 - RNA, 19 nt, Homo sapiens
  misc_RNA (1)...(19): siRNA sense strand
cgaaguggauggacagaag

SEQ ID NO: 1454009 - RNA, 19 nt, Homo sapiens
  misc_RNA (1)...(19): siRNA sense strand
gaaugccggugcuggguau

SEQ ID NO: 1454010 - RNA, 19 nt, Homo sapiens
  misc_RNA (1)...(19): siRNA sense strand
caaccgcccuccuggacaa

SEQ ID NO: 1454011 - RNA, 19 nt, Homo sapiens
  misc_RNA (1)...(19): siRNA sense strand
agaagacaaguacgaaaua

SEQ ID NO: 1454012 - RNA, 19 nt, Homo sapiens
  misc_RNA (1)...(19): siRNA sense strand
uaacagaagacaaguacga

SEQ ID NO: 1454013 - RNA, 19 nt, Homo sapiens
  misc_RNA (1)...(19): siRNA sense strand
gcauuuaugacccuuguga

SEQ ID NO: 1454014 - RNA, 19 nt, Homo sapiens
  misc_RNA (1)...(19): siRNA sense strand
gaagaggcgugggcucaag

SEQ ID NO: 1454015 - RNA, 19 nt, Homo sapiens
  misc_RNA (1)...(19): siRNA sense strand
agaagccacugaugcuauu

SEQ ID NO: 1454016 - RNA, 19 nt, Homo sapiens
  misc_RNA (1)...(19): siRNA sense strand
gaagucuugugucauugug

SEQ ID NO: 1454017 - RNA, 19 nt, Homo sapiens
  misc_RNA (1)...(19): siRNA sense strand
agaagaagaagauucagaa

SEQ ID NO: 1454018 - RNA, 19 nt, Homo sapiens
  misc_RNA (1)...(19): siRNA sense strand
aaagcauucuuccguuuau

SEQ ID NO: 1454019 - RNA, 19 nt, Homo sapiens
  misc_RNA (1)...(19): siRNA sense strand
cuuccaagaugcccaagaa

SEQ ID NO: 1454020 - RNA, 19 nt, Homo sapiens
  misc_RNA (1)...(19): siRNA sense strand
caagaaaccaaagaaugaa

SEQ ID NO: 1454021 - RNA, 19 nt, Homo sapiens
  misc_RNA (1)...(19): siRNA sense strand
guucagaucccaccaagca

SEQ ID NO: 1454022 - RNA, 19 nt, Homo sapiens
  misc_RNA (1)...(19): siRNA sense strand
gagcuggugcugcugugua

SEQ ID NO: 1454023 - RNA, 19 nt, Homo sapiens
  misc_RNA (1)...(19): siRNA sense strand
ggcgugggcucaaguacga

SEQ ID NO: 1454024 - RNA, 19 nt, Homo sapiens
  misc_RNA (1)...(19): siRNA sense strand
caaaagagccuccauuguc

SEQ ID NO: 1454025 - RNA, 19 nt, Homo sapiens
  misc_RNA (1)...(19): siRNA sense strand
cgacaagcgcuucgucaug

SEQ ID NO: 1454026 - RNA, 19 nt, Homo sapiens
  misc_RNA (1)...(19): siRNA sense strand
aguauuagcuggagaaacg

SEQ ID NO: 1454027 - RNA, 19 nt, Homo sapiens
  misc_RNA (1)...(19): siRNA sense strand
cagaagacaaguacgaaau

SEQ ID NO: 1454028 - RNA, 19 nt, Homo sapiens
  misc_RNA (1)...(19): siRNA sense strand
gaagaagaagauucagaag

SEQ ID NO: 1454029 - RNA, 19 nt, Homo sapiens
  misc_RNA (1)...(19): siRNA sense strand
gacagcaacgggaagauau

SEQ ID NO: 1454030 - RNA, 19 nt, Homo sapiens
  misc_RNA (1)...(19): siRNA sense strand
ugucgacgaugcugcgauu

SEQ ID NO: 1454031 - RNA, 19 nt, Homo sapiens
  misc_RNA (1)...(19): siRNA sense strand
gagcaggcagaguccgaua

SEQ ID NO: 1454032 - RNA, 19 nt, Homo sapiens
  misc_RNA (1)...(19): siRNA sense strand
cgacgaugcugcgauugug

SEQ ID NO: 1454033 - RNA, 19 nt, Homo sapiens
  misc_RNA (1)...(19): siRNA sense strand
ccaugucuguggagguuga

SEQ ID NO: 1454034 - RNA, 19 nt, Homo sapiens
  misc_RNA (1)...(19): siRNA sense strand
acgaaauacugcaaucugu

SEQ ID NO: 1454035 - RNA, 19 nt, Homo sapiens
  misc_RNA (1)...(19): siRNA sense strand
ccaccaagcaccaccuaug

SEQ ID NO: 1454036 - RNA, 19 nt, Homo sapiens
  misc_RNA (1)...(19): siRNA sense strand
agacagcaacgggaagaua

SEQ ID NO: 1454037 - RNA, 19 nt, Homo sapiens
  misc_RNA (1)...(19): siRNA sense strand
augcugcgauugugauaaa

SEQ ID NO: 1454038 - RNA, 19 nt, Homo sapiens
  misc_RNA (1)...(19): siRNA sense strand
gcaacgggaagauaucaca

SEQ ID NO: 1454039 - RNA, 19 nt, Homo sapiens
  misc_RNA (1)...(19): siRNA sense strand
uaccaugucuguggagguu

SEQ ID NO: 1454040 - RNA, 19 nt, Homo sapiens
  misc_RNA (1)...(19): siRNA sense strand
gagcuccugugugagaaau

SEQ ID NO: 1454041 - RNA, 19 nt, Homo sapiens
  misc_RNA (1)...(19): siRNA sense strand
aaugaugaccgccauguga

SEQ ID NO: 1454042 - RNA, 19 nt, Homo sapiens
  misc_RNA (1)...(19): siRNA sense strand
aagaagaagauucagaaga

SEQ ID NO: 1454043 - RNA, 19 nt, Homo sapiens
  misc_RNA (1)...(19): siRNA sense strand
gaaauggagaaaguauuag

SEQ ID NO: 1454044 - RNA, 19 nt, Homo sapiens
  misc_RNA (1)...(19): siRNA sense strand
ggcagaguccgauaacaug

SEQ ID NO: 1454045 - RNA, 19 nt, Homo sapiens
  misc_RNA (1)...(19): siRNA sense strand
cagaagacggagcacauga

SEQ ID NO: 1454046 - RNA, 19 nt, Homo sapiens
  misc_RNA (1)...(19): siRNA sense strand
ccagcuccauaaaguccua

SEQ ID NO: 1454047 - RNA, 19 nt, Homo sapiens
  misc_RNA (1)...(19): siRNA sense strand
agaugguucuggcauuuau

SEQ ID NO: 1454048 - RNA, 19 nt, Homo sapiens
  misc_RNA (1)...(19): siRNA sense strand
guaaggagaagcccacaac

SEQ ID NO: 1454049 - RNA, 19 nt, Homo sapiens
  misc_RNA (1)...(19): siRNA sense strand
cccaagaaaccaaagaaug

SEQ ID NO: 1454050 - RNA, 19 nt, Homo sapiens
  misc_RNA (1)...(19): siRNA sense strand
ggcuaugaaugcccugaug

SEQ ID NO: 1454051 - RNA, 19 nt, Homo sapiens
  misc_RNA (1)...(19): siRNA sense strand
agaagauucagaagaaaga

SEQ ID NO: 1454052 - RNA, 19 nt, Homo sapiens
  misc_RNA (1)...(19): siRNA sense strand
agaagaaauggagaaagua

SEQ ID NO: 1454053 - RNA, 19 nt, Homo sapiens
  misc_RNA (1)...(19): siRNA sense strand
gaaugaugaccgccaugug

SEQ ID NO: 1454054 - RNA, 19 nt, Homo sapiens
  misc_RNA (1)...(19): siRNA sense strand
uggacaagguggccgacaa

SEQ ID NO: 1454055 - RNA, 19 nt, Homo sapiens
  misc_RNA (1)...(19): siRNA sense strand
ggccuacgcugcucuugcu

SEQ ID NO: 1454056 - RNA, 19 nt, Homo sapiens
  misc_RNA (1)...(19): siRNA sense strand
ggccgauccugacaaagca

SEQ ID NO: 1454057 - RNA, 19 nt, Homo sapiens
  misc_RNA (1)...(19): siRNA sense strand
ucagagaagaaauggagaa

SEQ ID NO: 1454058 - RNA, 19 nt, Homo sapiens
  misc_RNA (1)...(19): siRNA sense strand
aaagaagccacugaugcua

SEQ ID NO: 1454059 - RNA, 19 nt, Homo sapiens
  misc_RNA (1)...(19): siRNA sense strand
gcaucuagacagacagcaa

SEQ ID NO: 1454060 - RNA, 19 nt, Homo sapiens
  misc_RNA (1)...(19): siRNA sense strand
cagagaagaaauggagaaa

SEQ ID NO: 1454061 - RNA, 19 nt, Homo sapiens
  misc_RNA (1)...(19): siRNA sense strand
ucggccagcuccauaaagu

SEQ ID NO: 1454062 - RNA, 19 nt, Homo sapiens
  misc_RNA (1)...(19): siRNA sense strand
ggacaagguggccgacaac

SEQ ID NO: 1454063 - RNA, 19 nt, Homo sapiens
  misc_RNA (1)...(19): siRNA sense strand
agaggacgacaguaaagaa

SEQ ID NO: 1454064 - RNA, 19 nt, Homo sapiens
  misc_RNA (1)...(19): siRNA sense strand
gaaguggauggacagaagu

SEQ ID NO: 1454065 - RNA, 19 nt, Homo sapiens
  misc_RNA (1)...(19): siRNA sense strand
gugcggccuuucccucaga

SEQ ID NO: 1454066 - RNA, 19 nt, Homo sapiens
  misc_RNA (1)...(19): siRNA sense strand
uauugggcaucuagacaga

SEQ ID NO: 1454067 - RNA, 19 nt, Homo sapiens
  misc_RNA (1)...(19): siRNA sense strand
gcuauugggcaucuagaca

SEQ ID NO: 1454068 - RNA, 19 nt, Homo sapiens
  misc_RNA (1)...(19): siRNA sense strand
caugugauggcaaagcauu

SEQ ID NO: 1454069 - RNA, 19 nt, Homo sapiens
  misc_RNA (1)...(19): siRNA sense strand
gaggacgacaguaaagaag

SEQ ID NO: 1454070 - RNA, 19 nt, Homo sapiens
  misc_RNA (1)...(19): siRNA sense strand
ggaggcaguccagaacaug

SEQ ID NO: 1454071 - RNA, 19 nt, Homo sapiens
  misc_RNA (1)...(19): siRNA sense strand
acagaagacaaguacgaaa

SEQ ID NO: 1454072 - RNA, 19 nt, Homo sapiens
  misc_RNA (1)...(19): siRNA sense strand
ccagaggacgacaguaaag

SEQ ID NO: 1454073 - RNA, 19 nt, Homo sapiens
  misc_RNA (1)...(19): siRNA sense strand
aagaagaagaagauucaga

SEQ ID NO: 1454074 - RNA, 19 nt, Homo sapiens
  misc_RNA (1)...(19): siRNA sense strand
aagcaccaccuaugccauu

SEQ ID NO: 1454075 - RNA, 19 nt, Homo sapiens
  misc_RNA (1)...(19): siRNA sense strand
aagaagccacugaugcuau

SEQ ID NO: 1454076 - RNA, 19 nt, Homo sapiens
  misc_RNA (1)...(19): siRNA sense strand
gaaggccuacgcugcucuu

SEQ ID NO: 1454077 - RNA, 19 nt, Homo sapiens
  misc_RNA (1)...(19): siRNA sense strand
cgucauggaggucgaagug

SEQ ID NO: 1454078 - RNA, 19 nt, Homo sapiens
  misc_RNA (1)...(19): siRNA sense strand
gcccaagaaaccaaagaau

SEQ ID NO: 1454079 - RNA, 19 nt, Homo sapiens
  misc_RNA (1)...(19): siRNA sense strand
gcaggcagaguccgauaac

SEQ ID NO: 1454080 - RNA, 19 nt, Homo sapiens
  misc_RNA (1)...(19): siRNA sense strand
gcucuugcugcccuagaaa

SEQ ID NO: 1454081 - RNA, 19 nt, Homo sapiens
  misc_RNA (1)...(19): siRNA sense strand
cggcaagaacccagucaug

SEQ ID NO: 1454082 - RNA, 19 nt, Homo sapiens
  misc_RNA (1)...(19): siRNA sense strand
cagaggacgacaguaaaga

SEQ ID NO: 1454083 - RNA, 19 nt, Homo sapiens
  misc_RNA (1)...(19): siRNA sense strand
cucucgagcuccuguguga

SEQ ID NO: 1454084 - RNA, 19 nt, Homo sapiens
  misc_RNA (1)...(19): siRNA sense strand
uggcauuuaugacccuugu

SEQ ID NO: 1454085 - RNA, 19 nt, Homo sapiens
  misc_RNA (1)...(19): siRNA sense strand
gacaaagcacggcaagaac

SEQ ID NO: 1454086 - RNA, 19 nt, Homo sapiens
  misc_RNA (1)...(19): siRNA sense strand
gacgaugcugcgauuguga

SEQ ID NO: 1454087 - RNA, 19 nt, Homo sapiens
  misc_RNA (1)...(19): siRNA sense strand
gagccaugcuaguuugaua

SEQ ID NO: 1454088 - RNA, 19 nt, Homo sapiens
  misc_RNA (1)...(19): siRNA sense strand
gggagaagcagccaaacua

SEQ ID NO: 1454089 - RNA, 19 nt, Homo sapiens
  misc_RNA (1)...(19): siRNA sense strand
ggaagaagaauaagaacug

SEQ ID NO: 1454090 - RNA, 19 nt, Homo sapiens
  misc_RNA (1)...(19): siRNA sense strand
gcacuggucuugaguaucc

SEQ ID NO: 1454091 - RNA, 19 nt, Homo sapiens
  misc_RNA (1)...(19): siRNA sense strand
uagcaagagugccgucauu

SEQ ID NO: 1454092 - RNA, 19 nt, Homo sapiens
  misc_RNA (1)...(19): siRNA sense strand
cgacacuucugcagauguu

SEQ ID NO: 1454093 - RNA, 19 nt, Homo sapiens
  misc_RNA (1)...(19): siRNA sense strand
ccaggaagaagaauaagaa

SEQ ID NO: 1454094 - RNA, 19 nt, Homo sapiens
  misc_RNA (1)...(19): siRNA sense strand
ccacagcacuggucuugag

SEQ ID NO: 1454095 - RNA, 19 nt, Homo sapiens
  misc_RNA (1)...(19): siRNA sense strand
gaugugggcuggaaugacu

SEQ ID NO: 1454096 - RNA, 19 nt, Homo sapiens
  misc_RNA (1)...(19): siRNA sense strand
gggcuggaaugacuggauu

SEQ ID NO: 1454097 - RNA, 19 nt, Homo sapiens
  misc_RNA (1)...(19): siRNA sense strand
aagaacaucuggagaacau

SEQ ID NO: 1454098 - RNA, 19 nt, Homo sapiens
  misc_RNA (1)...(19): siRNA sense strand
ggagaagcagccaaacuau

SEQ ID NO: 1454099 - RNA, 19 nt, Homo sapiens
  misc_RNA (1)...(19): siRNA sense strand
cagcacuggucuugaguau

SEQ ID NO: 1454100 - RNA, 19 nt, Homo sapiens
  misc_RNA (1)...(19): siRNA sense strand
gggccaggaagaagaauaa

SEQ ID NO: 1454101 - RNA, 19 nt, Homo sapiens
  misc_RNA (1)...(19): siRNA sense strand
gcgcgagccaugcuaguuu

SEQ ID NO: 1454102 - RNA, 19 nt, Homo sapiens
  misc_RNA (1)...(19): siRNA sense strand
caaccaaccaugccauugu

SEQ ID NO: 1454103 - RNA, 19 nt, Homo sapiens
  misc_RNA (1)...(19): siRNA sense strand
gagaagcagccaaacuaug

SEQ ID NO: 1454104 - RNA, 19 nt, Homo sapiens
  misc_RNA (1)...(19): siRNA sense strand
gcugauggucguuuuauua

SEQ ID NO: 1454105 - RNA, 19 nt, Homo sapiens
  misc_RNA (1)...(19): siRNA sense strand
gggccagcaugucaggauu

SEQ ID NO: 1454106 - RNA, 19 nt, Homo sapiens
  misc_RNA (1)...(19): siRNA sense strand
guaccuggaugaguaugau

SEQ ID NO: 1454107 - RNA, 19 nt, Homo sapiens
  misc_RNA (1)...(19): siRNA sense strand
ggccagcaugucaggauua

SEQ ID NO: 1454108 - RNA, 19 nt, Homo sapiens
  misc_RNA (1)...(19): siRNA sense strand
cgaagaacaucuggagaac

SEQ ID NO: 1454109 - RNA, 19 nt, Homo sapiens
  misc_RNA (1)...(19): siRNA sense strand
ugcuguaccuggaugagua

SEQ ID NO: 1454110 - RNA, 19 nt, Homo sapiens
  misc_RNA (1)...(19): siRNA sense strand
gcccuaagcaucacucaca

SEQ ID NO: 1454111 - RNA, 19 nt, Homo sapiens
  misc_RNA (1)...(19): siRNA sense strand
ugacacggugggaaacuuu

SEQ ID NO: 1454112 - RNA, 19 nt, Homo sapiens
  misc_RNA (1)...(19): siRNA sense strand
augauaaggugguacugaa

SEQ ID NO: 1454113 - RNA, 19 nt, Homo sapiens
  misc_RNA (1)...(19): siRNA sense strand
caggauuagccgaucguua

SEQ ID NO: 1454114 - RNA, 19 nt, Homo sapiens
  misc_RNA (1)...(19): siRNA sense strand
gaagaacaucuggagaaca

SEQ ID NO: 1454115 - RNA, 19 nt, Homo sapiens
  misc_RNA (1)...(19): siRNA sense strand
ccuguugugugcccacuga

SEQ ID NO: 1454116 - RNA, 19 nt, Homo sapiens
  misc_RNA (1)...(19): siRNA sense strand
gaucuuuaccggcuucagu

SEQ ID NO: 1454117 - RNA, 19 nt, Homo sapiens
  misc_RNA (1)...(19): siRNA sense strand
ugaguaugauaagguggua

SEQ ID NO: 1454118 - RNA, 19 nt, Homo sapiens
  misc_RNA (1)...(19): siRNA sense strand
agaagcagccaaacuaugg

SEQ ID NO: 1454119 - RNA, 19 nt, Homo sapiens
  misc_RNA (1)...(19): siRNA sense strand
acgaagaacaucuggagaa

SEQ ID NO: 1454120 - RNA, 19 nt, Homo sapiens
  misc_RNA (1)...(19): siRNA sense strand
ccuggucaauucugucaau

SEQ ID NO: 1454121 - RNA, 19 nt, Homo sapiens
  misc_RNA (1)...(19): siRNA sense strand
gaggagcuuccaccacgaa

SEQ ID NO: 1454122 - RNA, 19 nt, Homo sapiens
  misc_RNA (1)...(19): siRNA sense strand
ggucaccuuuggccaugau

SEQ ID NO: 1454123 - RNA, 19 nt, Homo sapiens
  misc_RNA (1)...(19): siRNA sense strand
gcuuuucguuuccucuuua

SEQ ID NO: 1454124 - RNA, 19 nt, Homo sapiens
  misc_RNA (1)...(19): siRNA sense strand
gaaugcugauggucguuuu

SEQ ID NO: 1454125 - RNA, 19 nt, Homo sapiens
  misc_RNA (1)...(19): siRNA sense strand
ggacuucgaggcgacacuu

SEQ ID NO: 1454126 - RNA, 19 nt, Homo sapiens
  misc_RNA (1)...(19): siRNA sense strand
caccagggccagcauguca

SEQ ID NO: 1454127 - RNA, 19 nt, Homo sapiens
  misc_RNA (1)...(19): siRNA sense strand
gauaaggugguacugaaaa

SEQ ID NO: 1454128 - RNA, 19 nt, Homo sapiens
  misc_RNA (1)...(19): siRNA sense strand
ugauaaggugguacugaaa

SEQ ID NO: 1454129 - RNA, 19 nt, Homo sapiens
  misc_RNA (1)...(19): siRNA sense strand
gccaggaagaagaauaaga

SEQ ID NO: 1454130 - RNA, 19 nt, Homo sapiens
  misc_RNA (1)...(19): siRNA sense strand
gcaccucaucacacgacua

SEQ ID NO: 1454131 - RNA, 19 nt, Homo sapiens
  misc_RNA (1)...(19): siRNA sense strand
aaccaaccaugccauugug

SEQ ID NO: 1454132 - RNA, 19 nt, Homo sapiens
  misc_RNA (1)...(19): siRNA sense strand
guaaccgaaugcugauggu

SEQ ID NO: 1454133 - RNA, 19 nt, Homo sapiens
  misc_RNA (1)...(19): siRNA sense strand
aggcgacacuucugcagau

SEQ ID NO: 1454134 - RNA, 19 nt, Homo sapiens
  misc_RNA (1)...(19): siRNA sense strand
gugacacggugggaaacuu

SEQ ID NO: 1454135 - RNA, 19 nt, Homo sapiens
  misc_RNA (1)...(19): siRNA sense strand
cgcgagccaugcuaguuug

SEQ ID NO: 1454136 - RNA, 19 nt, Homo sapiens
  misc_RNA (1)...(19): siRNA sense strand
uaugauaaggugguacuga

SEQ ID NO: 1454137 - RNA, 19 nt, Homo sapiens
  misc_RNA (1)...(19): siRNA sense strand
ucaagggagugggaauugg

SEQ ID NO: 1454138 - RNA, 19 nt, Homo sapiens
  misc_RNA (1)...(19): siRNA sense strand
gccagcaugucaggauuag

SEQ ID NO: 1454139 - RNA, 19 nt, Homo sapiens
  misc_RNA (1)...(19): siRNA sense strand
gacuacaugcgggaucuuu

SEQ ID NO: 1454140 - RNA, 19 nt, Homo sapiens
  misc_RNA (1)...(19): siRNA sense strand
cgaaugcugauggucguuu

SEQ ID NO: 1454141 - RNA, 19 nt, Homo sapiens
  misc_RNA (1)...(19): siRNA sense strand
gugggaaacuuuugaugug

SEQ ID NO: 1454142 - RNA, 19 nt, Homo sapiens
  misc_RNA (1)...(19): siRNA sense strand
gcagcaucccugagaacga

SEQ ID NO: 1454143 - RNA, 19 nt, Homo sapiens
  misc_RNA (1)...(19): siRNA sense strand
gggcuuccaccguauaaac

SEQ ID NO: 1454144 - RNA, 19 nt, Homo sapiens
  misc_RNA (1)...(19): siRNA sense strand
aucaggagaugguaguaga

SEQ ID NO: 1454145 - RNA, 19 nt, Homo sapiens
  misc_RNA (1)...(19): siRNA sense strand
gcuaccaggccuucuacug

SEQ ID NO: 1454146 - RNA, 19 nt, Homo sapiens
  misc_RNA (1)...(19): siRNA sense strand
gcaagagugccgucauucc

SEQ ID NO: 1454147 - RNA, 19 nt, Homo sapiens
  misc_RNA (1)...(19): siRNA sense strand
gagccaugcuaguuugaua

SEQ ID NO: 1454148 - RNA, 19 nt, Homo sapiens
  misc_RNA (1)...(19): siRNA sense strand
gggagaagcagccaaacua

SEQ ID NO: 1454149 - RNA, 19 nt, Homo sapiens
  misc_RNA (1)...(19): siRNA sense strand
ggaagaagaauaagaacug

SEQ ID NO: 1454150 - RNA, 19 nt, Homo sapiens
  misc_RNA (1)...(19): siRNA sense strand
gcacuggucuugaguaucc

SEQ ID NO: 1454151 - RNA, 19 nt, Homo sapiens
  misc_RNA (1)...(19): siRNA sense strand
uagcaagagugccgucauu

SEQ ID NO: 1454152 - RNA, 19 nt, Homo sapiens
  misc_RNA (1)...(19): siRNA sense strand
cgacacuucugcagauguu

SEQ ID NO: 1454153 - RNA, 19 nt, Homo sapiens
  misc_RNA (1)...(19): siRNA sense strand
ccaggaagaagaauaagaa

SEQ ID NO: 1454154 - RNA, 19 nt, Homo sapiens
  misc_RNA (1)...(19): siRNA sense strand
ccacagcacuggucuugag

SEQ ID NO: 1454155 - RNA, 19 nt, Homo sapiens
  misc_RNA (1)...(19): siRNA sense strand
gaugugggcuggaaugacu

SEQ ID NO: 1454156 - RNA, 19 nt, Homo sapiens
  misc_RNA (1)...(19): siRNA sense strand
gggcuggaaugacuggauu

SEQ ID NO: 1454157 - RNA, 19 nt, Homo sapiens
  misc_RNA (1)...(19): siRNA sense strand
aagaacaucuggagaacau

SEQ ID NO: 1454158 - RNA, 19 nt, Homo sapiens
  misc_RNA (1)...(19): siRNA sense strand
ggagaagcagccaaacuau

SEQ ID NO: 1454159 - RNA, 19 nt, Homo sapiens
  misc_RNA (1)...(19): siRNA sense strand
cagcacuggucuugaguau

SEQ ID NO: 1454160 - RNA, 19 nt, Homo sapiens
  misc_RNA (1)...(19): siRNA sense strand
gggccaggaagaagaauaa

SEQ ID NO: 1454161 - RNA, 19 nt, Homo sapiens
  misc_RNA (1)...(19): siRNA sense strand
gcgcgagccaugcuaguuu

SEQ ID NO: 1454162 - RNA, 19 nt, Homo sapiens
  misc_RNA (1)...(19): siRNA sense strand
caaccaaccaugccauugu

SEQ ID NO: 1454163 - RNA, 19 nt, Homo sapiens
  misc_RNA (1)...(19): siRNA sense strand
gagaagcagccaaacuaug

SEQ ID NO: 1454164 - RNA, 19 nt, Homo sapiens
  misc_RNA (1)...(19): siRNA sense strand
gcugauggucguuuuauua

SEQ ID NO: 1454165 - RNA, 19 nt, Homo sapiens
  misc_RNA (1)...(19): siRNA sense strand
gggccagcaugucaggauu

SEQ ID NO: 1454166 - RNA, 19 nt, Homo sapiens
  misc_RNA (1)...(19): siRNA sense strand
guaccuggaugaguaugau

SEQ ID NO: 1454167 - RNA, 19 nt, Homo sapiens
  misc_RNA (1)...(19): siRNA sense strand
ggccagcaugucaggauua

SEQ ID NO: 1454168 - RNA, 19 nt, Homo sapiens
  misc_RNA (1)...(19): siRNA sense strand
cgaagaacaucuggagaac

SEQ ID NO: 1454169 - RNA, 19 nt, Homo sapiens
  misc_RNA (1)...(19): siRNA sense strand
ugcuguaccuggaugagua

SEQ ID NO: 1454170 - RNA, 19 nt, Homo sapiens
  misc_RNA (1)...(19): siRNA sense strand
gcccuaagcaucacucaca

SEQ ID NO: 1454171 - RNA, 19 nt, Homo sapiens
  misc_RNA (1)...(19): siRNA sense strand
ugacacggugggaaacuuu

SEQ ID NO: 1454172 - RNA, 19 nt, Homo sapiens
  misc_RNA (1)...(19): siRNA sense strand
augauaaggugguacugaa

SEQ ID NO: 1454173 - RNA, 19 nt, Homo sapiens
  misc_RNA (1)...(19): siRNA sense strand
caggauuagccgaucguua

SEQ ID NO: 1454174 - RNA, 19 nt, Homo sapiens
  misc_RNA (1)...(19): siRNA sense strand
gaagaacaucuggagaaca

SEQ ID NO: 1454175 - RNA, 19 nt, Homo sapiens
  misc_RNA (1)...(19): siRNA sense strand
ccuguugugugcccacuga

SEQ ID NO: 1454176 - RNA, 19 nt, Homo sapiens
  misc_RNA (1)...(19): siRNA sense strand
gaucuuuaccggcuucagu

SEQ ID NO: 1454177 - RNA, 19 nt, Homo sapiens
  misc_RNA (1)...(19): siRNA sense strand
ugaguaugauaagguggua

SEQ ID NO: 1454178 - RNA, 19 nt, Homo sapiens
  misc_RNA (1)...(19): siRNA sense strand
agaagcagccaaacuaugg

SEQ ID NO: 1454179 - RNA, 19 nt, Homo sapiens
  misc_RNA (1)...(19): siRNA sense strand
acgaagaacaucuggagaa

SEQ ID NO: 1454180 - RNA, 19 nt, Homo sapiens
  misc_RNA (1)...(19): siRNA sense strand
ccuggucaauucugucaau

SEQ ID NO: 1454181 - RNA, 19 nt, Homo sapiens
  misc_RNA (1)...(19): siRNA sense strand
gaggagcuuccaccacgaa

SEQ ID NO: 1454182 - RNA, 19 nt, Homo sapiens
  misc_RNA (1)...(19): siRNA sense strand
ggucaccuuuggccaugau

SEQ ID NO: 1454183 - RNA, 19 nt, Homo sapiens
  misc_RNA (1)...(19): siRNA sense strand
gcuuuucguuuccucuuua

SEQ ID NO: 1454184 - RNA, 19 nt, Homo sapiens
  misc_RNA (1)...(19): siRNA sense strand
gaaugcugauggucguuuu

SEQ ID NO: 1454185 - RNA, 19 nt, Homo sapiens
  misc_RNA (1)...(19): siRNA sense strand
ggacuucgaggcgacacuu

SEQ ID NO: 1454186 - RNA, 19 nt, Homo sapiens
  misc_RNA (1)...(19): siRNA sense strand
caccagggccagcauguca

SEQ ID NO: 1454187 - RNA, 19 nt, Homo sapiens
  misc_RNA (1)...(19): siRNA sense strand
gauaaggugguacugaaaa

SEQ ID NO: 1454188 - RNA, 19 nt, Homo sapiens
  misc_RNA (1)...(19): siRNA sense strand
ugauaaggugguacugaaa

SEQ ID NO: 1454189 - RNA, 19 nt, Homo sapiens
  misc_RNA (1)...(19): siRNA sense strand
gccaggaagaagaauaaga

SEQ ID NO: 1454190 - RNA, 19 nt, Homo sapiens
  misc_RNA (1)...(19): siRNA sense strand
gcaccucaucacacgacua

SEQ ID NO: 1454191 - RNA, 19 nt, Homo sapiens
  misc_RNA (1)...(19): siRNA sense strand
aaccaaccaugccauugug

SEQ ID NO: 1454192 - RNA, 19 nt, Homo sapiens
  misc_RNA (1)...(19): siRNA sense strand
guaaccgaaugcugauggu

SEQ ID NO: 1454193 - RNA, 19 nt, Homo sapiens
  misc_RNA (1)...(19): siRNA sense strand
aggcgacacuucugcagau

SEQ ID NO: 1454194 - RNA, 19 nt, Homo sapiens
  misc_RNA (1)...(19): siRNA sense strand
gugacacggugggaaacuu

SEQ ID NO: 1454195 - RNA, 19 nt, Homo sapiens
  misc_RNA (1)...(19): siRNA sense strand
cgcgagccaugcuaguuug

SEQ ID NO: 1454196 - RNA, 19 nt, Homo sapiens
  misc_RNA (1)...(19): siRNA sense strand
uaugauaaggugguacuga

SEQ ID NO: 1454197 - RNA, 19 nt, Homo sapiens
  misc_RNA (1)...(19): siRNA sense strand
ucaagggagugggaauugg

SEQ ID NO: 1454198 - RNA, 19 nt, Homo sapiens
  misc_RNA (1)...(19): siRNA sense strand
gccagcaugucaggauuag

SEQ ID NO: 1454199 - RNA, 19 nt, Homo sapiens
  misc_RNA (1)...(19): siRNA sense strand
gacuacaugcgggaucuuu

SEQ ID NO: 1454200 - RNA, 19 nt, Homo sapiens
  misc_RNA (1)...(19): siRNA sense strand
cgaaugcugauggucguuu

SEQ ID NO: 1454201 - RNA, 19 nt, Homo sapiens
  misc_RNA (1)...(19): siRNA sense strand
gugggaaacuuuugaugug

SEQ ID NO: 1454202 - RNA, 19 nt, Homo sapiens
  misc_RNA (1)...(19): siRNA sense strand
gcagcaucccugagaacga

SEQ ID NO: 1454203 - RNA, 19 nt, Homo sapiens
  misc_RNA (1)...(19): siRNA sense strand
gggcuuccaccguauaaac

SEQ ID NO: 1454204 - RNA, 19 nt, Homo sapiens
  misc_RNA (1)...(19): siRNA sense strand
aucaggagaugguaguaga

SEQ ID NO: 1454205 - RNA, 19 nt, Homo sapiens
  misc_RNA (1)...(19): siRNA sense strand
gcuaccaggccuucuacug

SEQ ID NO: 1454206 - RNA, 19 nt, Homo sapiens
  misc_RNA (1)...(19): siRNA sense strand
gcaagagugccgucauucc

SEQ ID NO: 1454207 - RNA, 19 nt, Homo sapiens
  misc_RNA (1)...(19): siRNA sense strand
gagccaugcuaguuugaua

SEQ ID NO: 1454208 - RNA, 19 nt, Homo sapiens
  misc_RNA (1)...(19): siRNA sense strand
gggagaagcagccaaacua

SEQ ID NO: 1454209 - RNA, 19 nt, Homo sapiens
  misc_RNA (1)...(19): siRNA sense strand
ggaagaagaauaagaacug

SEQ ID NO: 1454210 - RNA, 19 nt, Homo sapiens
  misc_RNA (1)...(19): siRNA sense strand
gcacuggucuugaguaucc

SEQ ID NO: 1454211 - RNA, 19 nt, Homo sapiens
  misc_RNA (1)...(19): siRNA sense strand
uagcaagagugccgucauu

SEQ ID NO: 1454212 - RNA, 19 nt, Homo sapiens
  misc_RNA (1)...(19): siRNA sense strand
cgacacuucugcagauguu

SEQ ID NO: 1454213 - RNA, 19 nt, Homo sapiens
  misc_RNA (1)...(19): siRNA sense strand
ccaggaagaagaauaagaa

SEQ ID NO: 1454214 - RNA, 19 nt, Homo sapiens
  misc_RNA (1)...(19): siRNA sense strand
ccacagcacuggucuugag

SEQ ID NO: 1454215 - RNA, 19 nt, Homo sapiens
  misc_RNA (1)...(19): siRNA sense strand
gaugugggcuggaaugacu

SEQ ID NO: 1454216 - RNA, 19 nt, Homo sapiens
  misc_RNA (1)...(19): siRNA sense strand
gggcuggaaugacuggauu

SEQ ID NO: 1454217 - RNA, 19 nt, Homo sapiens
  misc_RNA (1)...(19): siRNA sense strand
aagaacaucuggagaacau

SEQ ID NO: 1454218 - RNA, 19 nt, Homo sapiens
  misc_RNA (1)...(19): siRNA sense strand
ggagaagcagccaaacuau

SEQ ID NO: 1454219 - RNA, 19 nt, Homo sapiens
  misc_RNA (1)...(19): siRNA sense strand
cagcacuggucuugaguau

SEQ ID NO: 1454220 - RNA, 19 nt, Homo sapiens
  misc_RNA (1)...(19): siRNA sense strand
gggccaggaagaagaauaa

SEQ ID NO: 1454221 - RNA, 19 nt, Homo sapiens
  misc_RNA (1)...(19): siRNA sense strand
gcgcgagccaugcuaguuu

SEQ ID NO: 1454222 - RNA, 19 nt, Homo sapiens
  misc_RNA (1)...(19): siRNA sense strand
caaccaaccaugccauugu

SEQ ID NO: 1454223 - RNA, 19 nt, Homo sapiens
  misc_RNA (1)...(19): siRNA sense strand
gagaagcagccaaacuaug

SEQ ID NO: 1454224 - RNA, 19 nt, Homo sapiens
  misc_RNA (1)...(19): siRNA sense strand
gcugauggucguuuuauua

SEQ ID NO: 1454225 - RNA, 19 nt, Homo sapiens
  misc_RNA (1)...(19): siRNA sense strand
gggccagcaugucaggauu

SEQ ID NO: 1454226 - RNA, 19 nt, Homo sapiens
  misc_RNA (1)...(19): siRNA sense strand
guaccuggaugaguaugau

SEQ ID NO: 1454227 - RNA, 19 nt, Homo sapiens
  misc_RNA (1)...(19): siRNA sense strand
ggccagcaugucaggauua

SEQ ID NO: 1454228 - RNA, 19 nt, Homo sapiens
  misc_RNA (1)...(19): siRNA sense strand
cgaagaacaucuggagaac

SEQ ID NO: 1454229 - RNA, 19 nt, Homo sapiens
  misc_RNA (1)...(19): siRNA sense strand
ugcuguaccuggaugagua

SEQ ID NO: 1454230 - RNA, 19 nt, Homo sapiens
  misc_RNA (1)...(19): siRNA sense strand
gcccuaagcaucacucaca

SEQ ID NO: 1454231 - RNA, 19 nt, Homo sapiens
  misc_RNA (1)...(19): siRNA sense strand
ugacacggugggaaacuuu

SEQ ID NO: 1454232 - RNA, 19 nt, Homo sapiens
  misc_RNA (1)...(19): siRNA sense strand
augauaaggugguacugaa

SEQ ID NO: 1454233 - RNA, 19 nt, Homo sapiens
  misc_RNA (1)...(19): siRNA sense strand
caggauuagccgaucguua

SEQ ID NO: 1454234 - RNA, 19 nt, Homo sapiens
  misc_RNA (1)...(19): siRNA sense strand
gaagaacaucuggagaaca

SEQ ID NO: 1454235 - RNA, 19 nt, Homo sapiens
  misc_RNA (1)...(19): siRNA sense strand
ccuguugugugcccacuga

SEQ ID NO: 1454236 - RNA, 19 nt, Homo sapiens
  misc_RNA (1)...(19): siRNA sense strand
gaucuuuaccggcuucagu

SEQ ID NO: 1454237 - RNA, 19 nt, Homo sapiens
  misc_RNA (1)...(19): siRNA sense strand
ugaguaugauaagguggua

SEQ ID NO: 1454238 - RNA, 19 nt, Homo sapiens
  misc_RNA (1)...(19): siRNA sense strand
agaagcagccaaacuaugg

SEQ ID NO: 1454239 - RNA, 19 nt, Homo sapiens
  misc_RNA (1)...(19): siRNA sense strand
acgaagaacaucuggagaa

SEQ ID NO: 1454240 - RNA, 19 nt, Homo sapiens
  misc_RNA (1)...(19): siRNA sense strand
ccuggucaauucugucaau

SEQ ID NO: 1454241 - RNA, 19 nt, Homo sapiens
  misc_RNA (1)...(19): siRNA sense strand
gaggagcuuccaccacgaa

SEQ ID NO: 1454242 - RNA, 19 nt, Homo sapiens
  misc_RNA (1)...(19): siRNA sense strand
ggucaccuuuggccaugau

SEQ ID NO: 1454243 - RNA, 19 nt, Homo sapiens
  misc_RNA (1)...(19): siRNA sense strand
gcuuuucguuuccucuuua

SEQ ID NO: 1454244 - RNA, 19 nt, Homo sapiens
  misc_RNA (1)...(19): siRNA sense strand
gaaugcugauggucguuuu

SEQ ID NO: 1454245 - RNA, 19 nt, Homo sapiens
  misc_RNA (1)...(19): siRNA sense strand
ggacuucgaggcgacacuu

SEQ ID NO: 1454246 - RNA, 19 nt, Homo sapiens
  misc_RNA (1)...(19): siRNA sense strand
caccagggccagcauguca

SEQ ID NO: 1454247 - RNA, 19 nt, Homo sapiens
  misc_RNA (1)...(19): siRNA sense strand
gauaaggugguacugaaaa

SEQ ID NO: 1454248 - RNA, 19 nt, Homo sapiens
  misc_RNA (1)...(19): siRNA sense strand
ugauaaggugguacugaaa

SEQ ID NO: 1454249 - RNA, 19 nt, Homo sapiens
  misc_RNA (1)...(19): siRNA sense strand
gccaggaagaagaauaaga

SEQ ID NO: 1454250 - RNA, 19 nt, Homo sapiens
  misc_RNA (1)...(19): siRNA sense strand
gcaccucaucacacgacua

SEQ ID NO: 1454251 - RNA, 19 nt, Homo sapiens
  misc_RNA (1)...(19): siRNA sense strand
aaccaaccaugccauugug

SEQ ID NO: 1454252 - RNA, 19 nt, Homo sapiens
  misc_RNA (1)...(19): siRNA sense strand
guaaccgaaugcugauggu

SEQ ID NO: 1454253 - RNA, 19 nt, Homo sapiens
  misc_RNA (1)...(19): siRNA sense strand
aggcgacacuucugcagau

SEQ ID NO: 1454254 - RNA, 19 nt, Homo sapiens
  misc_RNA (1)...(19): siRNA sense strand
gugacacggugggaaacuu

SEQ ID NO: 1454255 - RNA, 19 nt, Homo sapiens
  misc_RNA (1)...(19): siRNA sense strand
cgcgagccaugcuaguuug

SEQ ID NO: 1454256 - RNA, 19 nt, Homo sapiens
  misc_RNA (1)...(19): siRNA sense strand
uaugauaaggugguacuga

SEQ ID NO: 1454257 - RNA, 19 nt, Homo sapiens
  misc_RNA (1)...(19): siRNA sense strand
ucaagggagugggaauugg

SEQ ID NO: 1454258 - RNA, 19 nt, Homo sapiens
  misc_RNA (1)...(19): siRNA sense strand
gccagcaugucaggauuag

SEQ ID NO: 1454259 - RNA, 19 nt, Homo sapiens
  misc_RNA (1)...(19): siRNA sense strand
gacuacaugcgggaucuuu

SEQ ID NO: 1454260 - RNA, 19 nt, Homo sapiens
  misc_RNA (1)...(19): siRNA sense strand
cgaaugcugauggucguuu

SEQ ID NO: 1454261 - RNA, 19 nt, Homo sapiens
  misc_RNA (1)...(19): siRNA sense strand
gugggaaacuuuugaugug

SEQ ID NO: 1454262 - RNA, 19 nt, Homo sapiens
  misc_RNA (1)...(19): siRNA sense strand
gcagcaucccugagaacga

SEQ ID NO: 1454263 - RNA, 19 nt, Homo sapiens
  misc_RNA (1)...(19): siRNA sense strand
gggcuuccaccguauaaac

SEQ ID NO: 1454264 - RNA, 19 nt, Homo sapiens
  misc_RNA (1)...(19): siRNA sense strand
aucaggagaugguaguaga

SEQ ID NO: 1454265 - RNA, 19 nt, Homo sapiens
  misc_RNA (1)...(19): siRNA sense strand
gcuaccaggccuucuacug

SEQ ID NO: 1454266 - RNA, 19 nt, Homo sapiens
  misc_RNA (1)...(19): siRNA sense strand
gcaagagugccgucauucc

SEQ ID NO: 1454267 - RNA, 19 nt, Homo sapiens
  misc_RNA (1)...(19): siRNA sense strand
gagccaugcuaguuugaua

SEQ ID NO: 1454268 - RNA, 19 nt, Homo sapiens
  misc_RNA (1)...(19): siRNA sense strand
gggagaagcagccaaacua

SEQ ID NO: 1454269 - RNA, 19 nt, Homo sapiens
  misc_RNA (1)...(19): siRNA sense strand
ggaagaagaauaagaacug

SEQ ID NO: 1454270 - RNA, 19 nt, Homo sapiens
  misc_RNA (1)...(19): siRNA sense strand
gcacuggucuugaguaucc

SEQ ID NO: 1454271 - RNA, 19 nt, Homo sapiens
  misc_RNA (1)...(19): siRNA sense strand
uagcaagagugccgucauu

SEQ ID NO: 1454272 - RNA, 19 nt, Homo sapiens
  misc_RNA (1)...(19): siRNA sense strand
cgacacuucugcagauguu

SEQ ID NO: 1454273 - RNA, 19 nt, Homo sapiens
  misc_RNA (1)...(19): siRNA sense strand
ccaggaagaagaauaagaa

SEQ ID NO: 1454274 - RNA, 19 nt, Homo sapiens
  misc_RNA (1)...(19): siRNA sense strand
ccacagcacuggucuugag

SEQ ID NO: 1454275 - RNA, 19 nt, Homo sapiens
  misc_RNA (1)...(19): siRNA sense strand
gaugugggcuggaaugacu

SEQ ID NO: 1454276 - RNA, 19 nt, Homo sapiens
  misc_RNA (1)...(19): siRNA sense strand
gggcuggaaugacuggauu

SEQ ID NO: 1454277 - RNA, 19 nt, Homo sapiens
  misc_RNA (1)...(19): siRNA sense strand
aagaacaucuggagaacau

SEQ ID NO: 1454278 - RNA, 19 nt, Homo sapiens
  misc_RNA (1)...(19): siRNA sense strand
ggagaagcagccaaacuau

SEQ ID NO: 1454279 - RNA, 19 nt, Homo sapiens
  misc_RNA (1)...(19): siRNA sense strand
cagcacuggucuugaguau

SEQ ID NO: 1454280 - RNA, 19 nt, Homo sapiens
  misc_RNA (1)...(19): siRNA sense strand
gggccaggaagaagaauaa

SEQ ID NO: 1454281 - RNA, 19 nt, Homo sapiens
  misc_RNA (1)...(19): siRNA sense strand
gcgcgagccaugcuaguuu

SEQ ID NO: 1454282 - RNA, 19 nt, Homo sapiens
  misc_RNA (1)...(19): siRNA sense strand
caaccaaccaugccauugu

SEQ ID NO: 1454283 - RNA, 19 nt, Homo sapiens
  misc_RNA (1)...(19): siRNA sense strand
gagaagcagccaaacuaug

SEQ ID NO: 1454284 - RNA, 19 nt, Homo sapiens
  misc_RNA (1)...(19): siRNA sense strand
gcugauggucguuuuauua

SEQ ID NO: 1454285 - RNA, 19 nt, Homo sapiens
  misc_RNA (1)...(19): siRNA sense strand
gggccagcaugucaggauu

SEQ ID NO: 1454286 - RNA, 19 nt, Homo sapiens
  misc_RNA (1)...(19): siRNA sense strand
guaccuggaugaguaugau

SEQ ID NO: 1454287 - RNA, 19 nt, Homo sapiens
  misc_RNA (1)...(19): siRNA sense strand
ggccagcaugucaggauua

SEQ ID NO: 1454288 - RNA, 19 nt, Homo sapiens
  misc_RNA (1)...(19): siRNA sense strand
cgaagaacaucuggagaac

SEQ ID NO: 1454289 - RNA, 19 nt, Homo sapiens
  misc_RNA (1)...(19): siRNA sense strand
ugcuguaccuggaugagua

SEQ ID NO: 1454290 - RNA, 19 nt, Homo sapiens
  misc_RNA (1)...(19): siRNA sense strand
gcccuaagcaucacucaca

SEQ ID NO: 1454291 - RNA, 19 nt, Homo sapiens
  misc_RNA (1)...(19): siRNA sense strand
ugacacggugggaaacuuu

SEQ ID NO: 1454292 - RNA, 19 nt, Homo sapiens
  misc_RNA (1)...(19): siRNA sense strand
augauaaggugguacugaa

SEQ ID NO: 1454293 - RNA, 19 nt, Homo sapiens
  misc_RNA (1)...(19): siRNA sense strand
caggauuagccgaucguua

SEQ ID NO: 1454294 - RNA, 19 nt, Homo sapiens
  misc_RNA (1)...(19): siRNA sense strand
gaagaacaucuggagaaca

SEQ ID NO: 1454295 - RNA, 19 nt, Homo sapiens
  misc_RNA (1)...(19): siRNA sense strand
ccuguugugugcccacuga

SEQ ID NO: 1454296 - RNA, 19 nt, Homo sapiens
  misc_RNA (1)...(19): siRNA sense strand
gaucuuuaccggcuucagu

SEQ ID NO: 1454297 - RNA, 19 nt, Homo sapiens
  misc_RNA (1)...(19): siRNA sense strand
ugaguaugauaagguggua

SEQ ID NO: 1454298 - RNA, 19 nt, Homo sapiens
  misc_RNA (1)...(19): siRNA sense strand
agaagcagccaaacuaugg

SEQ ID NO: 1454299 - RNA, 19 nt, Homo sapiens
  misc_RNA (1)...(19): siRNA sense strand
acgaagaacaucuggagaa

SEQ ID NO: 1454300 - RNA, 19 nt, Homo sapiens
  misc_RNA (1)...(19): siRNA sense strand
ccuggucaauucugucaau

SEQ ID NO: 1454301 - RNA, 19 nt, Homo sapiens
  misc_RNA (1)...(19): siRNA sense strand
gaggagcuuccaccacgaa

SEQ ID NO: 1454302 - RNA, 19 nt, Homo sapiens
  misc_RNA (1)...(19): siRNA sense strand
ggucaccuuuggccaugau

SEQ ID NO: 1454303 - RNA, 19 nt, Homo sapiens
  misc_RNA (1)...(19): siRNA sense strand
gcuuuucguuuccucuuua

SEQ ID NO: 1454304 - RNA, 19 nt, Homo sapiens
  misc_RNA (1)...(19): siRNA sense strand
gaaugcugauggucguuuu

SEQ ID NO: 1454305 - RNA, 19 nt, Homo sapiens
  misc_RNA (1)...(19): siRNA sense strand
ggacuucgaggcgacacuu

SEQ ID NO: 1454306 - RNA, 19 nt, Homo sapiens
  misc_RNA (1)...(19): siRNA sense strand
caccagggccagcauguca

SEQ ID NO: 1454307 - RNA, 19 nt, Homo sapiens
  misc_RNA (1)...(19): siRNA sense strand
gauaaggugguacugaaaa

SEQ ID NO: 1454308 - RNA, 19 nt, Homo sapiens
  misc_RNA (1)...(19): siRNA sense strand
ugauaaggugguacugaaa

SEQ ID NO: 1454309 - RNA, 19 nt, Homo sapiens
  misc_RNA (1)...(19): siRNA sense strand
gccaggaagaagaauaaga

SEQ ID NO: 1454310 - RNA, 19 nt, Homo sapiens
  misc_RNA (1)...(19): siRNA sense strand
gcaccucaucacacgacua

SEQ ID NO: 1454311 - RNA, 19 nt, Homo sapiens
  misc_RNA (1)...(19): siRNA sense strand
aaccaaccaugccauugug

SEQ ID NO: 1454312 - RNA, 19 nt, Homo sapiens
  misc_RNA (1)...(19): siRNA sense strand
guaaccgaaugcugauggu

SEQ ID NO: 1454313 - RNA, 19 nt, Homo sapiens
  misc_RNA (1)...(19): siRNA sense strand
aggcgacacuucugcagau

SEQ ID NO: 1454314 - RNA, 19 nt, Homo sapiens
  misc_RNA (1)...(19): siRNA sense strand
gugacacggugggaaacuu

SEQ ID NO: 1454315 - RNA, 19 nt, Homo sapiens
  misc_RNA (1)...(19): siRNA sense strand
cgcgagccaugcuaguuug

SEQ ID NO: 1454316 - RNA, 19 nt, Homo sapiens
  misc_RNA (1)...(19): siRNA sense strand
uaugauaaggugguacuga

SEQ ID NO: 1454317 - RNA, 19 nt, Homo sapiens
  misc_RNA (1)...(19): siRNA sense strand
ucaagggagugggaauugg

SEQ ID NO: 1454318 - RNA, 19 nt, Homo sapiens
  misc_RNA (1)...(19): siRNA sense strand
gccagcaugucaggauuag

SEQ ID NO: 1454319 - RNA, 19 nt, Homo sapiens
  misc_RNA (1)...(19): siRNA sense strand
gacuacaugcgggaucuuu

SEQ ID NO: 1454320 - RNA, 19 nt, Homo sapiens
  misc_RNA (1)...(19): siRNA sense strand
cgaaugcugauggucguuu

SEQ ID NO: 1454321 - RNA, 19 nt, Homo sapiens
  misc_RNA (1)...(19): siRNA sense strand
gugggaaacuuuugaugug

SEQ ID NO: 1454322 - RNA, 19 nt, Homo sapiens
  misc_RNA (1)...(19): siRNA sense strand
gcagcaucccugagaacga

SEQ ID NO: 1454323 - RNA, 19 nt, Homo sapiens
  misc_RNA (1)...(19): siRNA sense strand
gggcuuccaccguauaaac

SEQ ID NO: 1454324 - RNA, 19 nt, Homo sapiens
  misc_RNA (1)...(19): siRNA sense strand
aucaggagaugguaguaga

SEQ ID NO: 1454325 - RNA, 19 nt, Homo sapiens
  misc_RNA (1)...(19): siRNA sense strand
gcuaccaggccuucuacug

SEQ ID NO: 1454326 - RNA, 19 nt, Homo sapiens
  misc_RNA (1)...(19): siRNA sense strand
gcaagagugccgucauucc

SEQ ID NO: 1454327 - RNA, 19 nt, Homo sapiens
  misc_RNA (1)...(19): siRNA sense strand
gagccaugcuaguuugaua

SEQ ID NO: 1454328 - RNA, 19 nt, Homo sapiens
  misc_RNA (1)...(19): siRNA sense strand
gggagaagcagccaaacua

SEQ ID NO: 1454329 - RNA, 19 nt, Homo sapiens
  misc_RNA (1)...(19): siRNA sense strand
ggaagaagaauaagaacug

SEQ ID NO: 1454330 - RNA, 19 nt, Homo sapiens
  misc_RNA (1)...(19): siRNA sense strand
gcacuggucuugaguaucc

SEQ ID NO: 1454331 - RNA, 19 nt, Homo sapiens
  misc_RNA (1)...(19): siRNA sense strand
uagcaagagugccgucauu

SEQ ID NO: 1454332 - RNA, 19 nt, Homo sapiens
  misc_RNA (1)...(19): siRNA sense strand
cgacacuucugcagauguu

SEQ ID NO: 1454333 - RNA, 19 nt, Homo sapiens
  misc_RNA (1)...(19): siRNA sense strand
ccaggaagaagaauaagaa

SEQ ID NO: 1454334 - RNA, 19 nt, Homo sapiens
  misc_RNA (1)...(19): siRNA sense strand
ccacagcacuggucuugag

SEQ ID NO: 1454335 - RNA, 19 nt, Homo sapiens
  misc_RNA (1)...(19): siRNA sense strand
gaugugggcuggaaugacu

SEQ ID NO: 1454336 - RNA, 19 nt, Homo sapiens
  misc_RNA (1)...(19): siRNA sense strand
gggcuggaaugacuggauu

SEQ ID NO: 1454337 - RNA, 19 nt, Homo sapiens
  misc_RNA (1)...(19): siRNA sense strand
aagaacaucuggagaacau

SEQ ID NO: 1454338 - RNA, 19 nt, Homo sapiens
  misc_RNA (1)...(19): siRNA sense strand
ggagaagcagccaaacuau

SEQ ID NO: 1454339 - RNA, 19 nt, Homo sapiens
  misc_RNA (1)...(19): siRNA sense strand
cagcacuggucuugaguau

SEQ ID NO: 1454340 - RNA, 19 nt, Homo sapiens
  misc_RNA (1)...(19): siRNA sense strand
gggccaggaagaagaauaa

SEQ ID NO: 1454341 - RNA, 19 nt, Homo sapiens
  misc_RNA (1)...(19): siRNA sense strand
gcgcgagccaugcuaguuu

SEQ ID NO: 1454342 - RNA, 19 nt, Homo sapiens
  misc_RNA (1)...(19): siRNA sense strand
caaccaaccaugccauugu

SEQ ID NO: 1454343 - RNA, 19 nt, Homo sapiens
  misc_RNA (1)...(19): siRNA sense strand
gagaagcagccaaacuaug

SEQ ID NO: 1454344 - RNA, 19 nt, Homo sapiens
  misc_RNA (1)...(19): siRNA sense strand
gcugauggucguuuuauua

SEQ ID NO: 1454345 - RNA, 19 nt, Homo sapiens
  misc_RNA (1)...(19): siRNA sense strand
gggccagcaugucaggauu

SEQ ID NO: 1454346 - RNA, 19 nt, Homo sapiens
  misc_RNA (1)...(19): siRNA sense strand
guaccuggaugaguaugau

SEQ ID NO: 1454347 - RNA, 19 nt, Homo sapiens
  misc_RNA (1)...(19): siRNA sense strand
ggccagcaugucaggauua

SEQ ID NO: 1454348 - RNA, 19 nt, Homo sapiens
  misc_RNA (1)...(19): siRNA sense strand
cgaagaacaucuggagaac

SEQ ID NO: 1454349 - RNA, 19 nt, Homo sapiens
  misc_RNA (1)...(19): siRNA sense strand
ugcuguaccuggaugagua

SEQ ID NO: 1454350 - RNA, 19 nt, Homo sapiens
  misc_RNA (1)...(19): siRNA sense strand
gcccuaagcaucacucaca

SEQ ID NO: 1454351 - RNA, 19 nt, Homo sapiens
  misc_RNA (1)...(19): siRNA sense strand
ugacacggugggaaacuuu

SEQ ID NO: 1454352 - RNA, 19 nt, Homo sapiens
  misc_RNA (1)...(19): siRNA sense strand
augauaaggugguacugaa

SEQ ID NO: 1454353 - RNA, 19 nt, Homo sapiens
  misc_RNA (1)...(19): siRNA sense strand
caggauuagccgaucguua

SEQ ID NO: 1454354 - RNA, 19 nt, Homo sapiens
  misc_RNA (1)...(19): siRNA sense strand
gaagaacaucuggagaaca

SEQ ID NO: 1454355 - RNA, 19 nt, Homo sapiens
  misc_RNA (1)...(19): siRNA sense strand
ccuguugugugcccacuga

SEQ ID NO: 1454356 - RNA, 19 nt, Homo sapiens
  misc_RNA (1)...(19): siRNA sense strand
gaucuuuaccggcuucagu

SEQ ID NO: 1454357 - RNA, 19 nt, Homo sapiens
  misc_RNA (1)...(19): siRNA sense strand
ugaguaugauaagguggua

SEQ ID NO: 1454358 - RNA, 19 nt, Homo sapiens
  misc_RNA (1)...(19): siRNA sense strand
agaagcagccaaacuaugg

SEQ ID NO: 1454359 - RNA, 19 nt, Homo sapiens
  misc_RNA (1)...(19): siRNA sense strand
acgaagaacaucuggagaa

SEQ ID NO: 1454360 - RNA, 19 nt, Homo sapiens
  misc_RNA (1)...(19): siRNA sense strand
ccuggucaauucugucaau

SEQ ID NO: 1454361 - RNA, 19 nt, Homo sapiens
  misc_RNA (1)...(19): siRNA sense strand
gaggagcuuccaccacgaa

SEQ ID NO: 1454362 - RNA, 19 nt, Homo sapiens
  misc_RNA (1)...(19): siRNA sense strand
ggucaccuuuggccaugau

SEQ ID NO: 1454363 - RNA, 19 nt, Homo sapiens
  misc_RNA (1)...(19): siRNA sense strand
gcuuuucguuuccucuuua

SEQ ID NO: 1454364 - RNA, 19 nt, Homo sapiens
  misc_RNA (1)...(19): siRNA sense strand
gaaugcugauggucguuuu

SEQ ID NO: 1454365 - RNA, 19 nt, Homo sapiens
  misc_RNA (1)...(19): siRNA sense strand
ggacuucgaggcgacacuu

SEQ ID NO: 1454366 - RNA, 19 nt, Homo sapiens
  misc_RNA (1)...(19): siRNA sense strand
caccagggccagcauguca

SEQ ID NO: 1454367 - RNA, 19 nt, Homo sapiens
  misc_RNA (1)...(19): siRNA sense strand
gauaaggugguacugaaaa

SEQ ID NO: 1454368 - RNA, 19 nt, Homo sapiens
  misc_RNA (1)...(19): siRNA sense strand
ugauaaggugguacugaaa

SEQ ID NO: 1454369 - RNA, 19 nt, Homo sapiens
  misc_RNA (1)...(19): siRNA sense strand
gccaggaagaagaauaaga

SEQ ID NO: 1454370 - RNA, 19 nt, Homo sapiens
  misc_RNA (1)...(19): siRNA sense strand
gcaccucaucacacgacua

SEQ ID NO: 1454371 - RNA, 19 nt, Homo sapiens
  misc_RNA (1)...(19): siRNA sense strand
aaccaaccaugccauugug

SEQ ID NO: 1454372 - RNA, 19 nt, Homo sapiens
  misc_RNA (1)...(19): siRNA sense strand
guaaccgaaugcugauggu

SEQ ID NO: 1454373 - RNA, 19 nt, Homo sapiens
  misc_RNA (1)...(19): siRNA sense strand
aggcgacacuucugcagau

SEQ ID NO: 1454374 - RNA, 19 nt, Homo sapiens
  misc_RNA (1)...(19): siRNA sense strand
gugacacggugggaaacuu

SEQ ID NO: 1454375 - RNA, 19 nt, Homo sapiens
  misc_RNA (1)...(19): siRNA sense strand
cgcgagccaugcuaguuug

SEQ ID NO: 1454376 - RNA, 19 nt, Homo sapiens
  misc_RNA (1)...(19): siRNA sense strand
uaugauaaggugguacuga

SEQ ID NO: 1454377 - RNA, 19 nt, Homo sapiens
  misc_RNA (1)...(19): siRNA sense strand
ucaagggagugggaauugg

SEQ ID NO: 1454378 - RNA, 19 nt, Homo sapiens
  misc_RNA (1)...(19): siRNA sense strand
gccagcaugucaggauuag

SEQ ID NO: 1454379 - RNA, 19 nt, Homo sapiens
  misc_RNA (1)...(19): siRNA sense strand
gacuacaugcgggaucuuu

SEQ ID NO: 1454380 - RNA, 19 nt, Homo sapiens
  misc_RNA (1)...(19): siRNA sense strand
cgaaugcugauggucguuu

SEQ ID NO: 1454381 - RNA, 19 nt, Homo sapiens
  misc_RNA (1)...(19): siRNA sense strand
gugggaaacuuuugaugug

SEQ ID NO: 1454382 - RNA, 19 nt, Homo sapiens
  misc_RNA (1)...(19): siRNA sense strand
gcagcaucccugagaacga

SEQ ID NO: 1454383 - RNA, 19 nt, Homo sapiens
  misc_RNA (1)...(19): siRNA sense strand
gggcuuccaccguauaaac

SEQ ID NO: 1454384 - RNA, 19 nt, Homo sapiens
  misc_RNA (1)...(19): siRNA sense strand
aucaggagaugguaguaga

SEQ ID NO: 1454385 - RNA, 19 nt, Homo sapiens
  misc_RNA (1)...(19): siRNA sense strand
gcuaccaggccuucuacug

SEQ ID NO: 1454386 - RNA, 19 nt, Homo sapiens
  misc_RNA (1)...(19): siRNA sense strand
gcaagagugccgucauucc

SEQ ID NO: 1454387 - RNA, 19 nt, Homo sapiens
  misc_RNA (1)...(19): siRNA sense strand
gagccaugcuaguuugaua

SEQ ID NO: 1454388 - RNA, 19 nt, Homo sapiens
  misc_RNA (1)...(19): siRNA sense strand
gggagaagcagccaaacua

SEQ ID NO: 1454389 - RNA, 19 nt, Homo sapiens
  misc_RNA (1)...(19): siRNA sense strand
ggaagaagaauaagaacug

SEQ ID NO: 1454390 - RNA, 19 nt, Homo sapiens
  misc_RNA (1)...(19): siRNA sense strand
gcacuggucuugaguaucc

SEQ ID NO: 1454391 - RNA, 19 nt, Homo sapiens
  misc_RNA (1)...(19): siRNA sense strand
uagcaagagugccgucauu

SEQ ID NO: 1454392 - RNA, 19 nt, Homo sapiens
  misc_RNA (1)...(19): siRNA sense strand
cgacacuucugcagauguu

SEQ ID NO: 1454393 - RNA, 19 nt, Homo sapiens
  misc_RNA (1)...(19): siRNA sense strand
ccaggaagaagaauaagaa

SEQ ID NO: 1454394 - RNA, 19 nt, Homo sapiens
  misc_RNA (1)...(19): siRNA sense strand
ccacagcacuggucuugag

SEQ ID NO: 1454395 - RNA, 19 nt, Homo sapiens
  misc_RNA (1)...(19): siRNA sense strand
gaugugggcuggaaugacu

SEQ ID NO: 1454396 - RNA, 19 nt, Homo sapiens
  misc_RNA (1)...(19): siRNA sense strand
gggcuggaaugacuggauu

SEQ ID NO: 1454397 - RNA, 19 nt, Homo sapiens
  misc_RNA (1)...(19): siRNA sense strand
aagaacaucuggagaacau

SEQ ID NO: 1454398 - RNA, 19 nt, Homo sapiens
  misc_RNA (1)...(19): siRNA sense strand
ggagaagcagccaaacuau

SEQ ID NO: 1454399 - RNA, 19 nt, Homo sapiens
  misc_RNA (1)...(19): siRNA sense strand
cagcacuggucuugaguau

SEQ ID NO: 1454400 - RNA, 19 nt, Homo sapiens
  misc_RNA (1)...(19): siRNA sense strand
gggccaggaagaagaauaa

SEQ ID NO: 1454401 - RNA, 19 nt, Homo sapiens
  misc_RNA (1)...(19): siRNA sense strand
gcgcgagccaugcuaguuu

SEQ ID NO: 1454402 - RNA, 19 nt, Homo sapiens
  misc_RNA (1)...(19): siRNA sense strand
caaccaaccaugccauugu

SEQ ID NO: 1454403 - RNA, 19 nt, Homo sapiens
  misc_RNA (1)...(19): siRNA sense strand
gagaagcagccaaacuaug

SEQ ID NO: 1454404 - RNA, 19 nt, Homo sapiens
  misc_RNA (1)...(19): siRNA sense strand
gcugauggucguuuuauua

SEQ ID NO: 1454405 - RNA, 19 nt, Homo sapiens
  misc_RNA (1)...(19): siRNA sense strand
gggccagcaugucaggauu

SEQ ID NO: 1454406 - RNA, 19 nt, Homo sapiens
  misc_RNA (1)...(19): siRNA sense strand
guaccuggaugaguaugau

SEQ ID NO: 1454407 - RNA, 19 nt, Homo sapiens
  misc_RNA (1)...(19): siRNA sense strand
ggccagcaugucaggauua

SEQ ID NO: 1454408 - RNA, 19 nt, Homo sapiens
  misc_RNA (1)...(19): siRNA sense strand
cgaagaacaucuggagaac

SEQ ID NO: 1454409 - RNA, 19 nt, Homo sapiens
  misc_RNA (1)...(19): siRNA sense strand
ugcuguaccuggaugagua

SEQ ID NO: 1454410 - RNA, 19 nt, Homo sapiens
  misc_RNA (1)...(19): siRNA sense strand
gcccuaagcaucacucaca

SEQ ID NO: 1454411 - RNA, 19 nt, Homo sapiens
  misc_RNA (1)...(19): siRNA sense strand
ugacacggugggaaacuuu

SEQ ID NO: 1454412 - RNA, 19 nt, Homo sapiens
  misc_RNA (1)...(19): siRNA sense strand
augauaaggugguacugaa

SEQ ID NO: 1454413 - RNA, 19 nt, Homo sapiens
  misc_RNA (1)...(19): siRNA sense strand
caggauuagccgaucguua

SEQ ID NO: 1454414 - RNA, 19 nt, Homo sapiens
  misc_RNA (1)...(19): siRNA sense strand
gaagaacaucuggagaaca

SEQ ID NO: 1454415 - RNA, 19 nt, Homo sapiens
  misc_RNA (1)...(19): siRNA sense strand
ccuguugugugcccacuga

SEQ ID NO: 1454416 - RNA, 19 nt, Homo sapiens
  misc_RNA (1)...(19): siRNA sense strand
gaucuuuaccggcuucagu

SEQ ID NO: 1454417 - RNA, 19 nt, Homo sapiens
  misc_RNA (1)...(19): siRNA sense strand
ugaguaugauaagguggua

SEQ ID NO: 1454418 - RNA, 19 nt, Homo sapiens
  misc_RNA (1)...(19): siRNA sense strand
agaagcagccaaacuaugg

SEQ ID NO: 1454419 - RNA, 19 nt, Homo sapiens
  misc_RNA (1)...(19): siRNA sense strand
acgaagaacaucuggagaa

SEQ ID NO: 1454420 - RNA, 19 nt, Homo sapiens
  misc_RNA (1)...(19): siRNA sense strand
ccuggucaauucugucaau

SEQ ID NO: 1454421 - RNA, 19 nt, Homo sapiens
  misc_RNA (1)...(19): siRNA sense strand
gaggagcuuccaccacgaa

SEQ ID NO: 1454422 - RNA, 19 nt, Homo sapiens
  misc_RNA (1)...(19): siRNA sense strand
ggucaccuuuggccaugau

SEQ ID NO: 1454423 - RNA, 19 nt, Homo sapiens
  misc_RNA (1)...(19): siRNA sense strand
gcuuuucguuuccucuuua

SEQ ID NO: 1454424 - RNA, 19 nt, Homo sapiens
  misc_RNA (1)...(19): siRNA sense strand
gaaugcugauggucguuuu

SEQ ID NO: 1454425 - RNA, 19 nt, Homo sapiens
  misc_RNA (1)...(19): siRNA sense strand
ggacuucgaggcgacacuu

SEQ ID NO: 1454426 - RNA, 19 nt, Homo sapiens
  misc_RNA (1)...(19): siRNA sense strand
caccagggccagcauguca

SEQ ID NO: 1454427 - RNA, 19 nt, Homo sapiens
  misc_RNA (1)...(19): siRNA sense strand
gauaaggugguacugaaaa

SEQ ID NO: 1454428 - RNA, 19 nt, Homo sapiens
  misc_RNA (1)...(19): siRNA sense strand
ugauaaggugguacugaaa

SEQ ID NO: 1454429 - RNA, 19 nt, Homo sapiens
  misc_RNA (1)...(19): siRNA sense strand
gccaggaagaagaauaaga

SEQ ID NO: 1454430 - RNA, 19 nt, Homo sapiens
  misc_RNA (1)...(19): siRNA sense strand
gcaccucaucacacgacua

SEQ ID NO: 1454431 - RNA, 19 nt, Homo sapiens
  misc_RNA (1)...(19): siRNA sense strand
aaccaaccaugccauugug

SEQ ID NO: 1454432 - RNA, 19 nt, Homo sapiens
  misc_RNA (1)...(19): siRNA sense strand
guaaccgaaugcugauggu

SEQ ID NO: 1454433 - RNA, 19 nt, Homo sapiens
  misc_RNA (1)...(19): siRNA sense strand
aggcgacacuucugcagau

SEQ ID NO: 1454434 - RNA, 19 nt, Homo sapiens
  misc_RNA (1)...(19): siRNA sense strand
gugacacggugggaaacuu

SEQ ID NO: 1454435 - RNA, 19 nt, Homo sapiens
  misc_RNA (1)...(19): siRNA sense strand
cgcgagccaugcuaguuug

SEQ ID NO: 1454436 - RNA, 19 nt, Homo sapiens
  misc_RNA (1)...(19): siRNA sense strand
uaugauaaggugguacuga

SEQ ID NO: 1454437 - RNA, 19 nt, Homo sapiens
  misc_RNA (1)...(19): siRNA sense strand
ucaagggagugggaauugg

SEQ ID NO: 1454438 - RNA, 19 nt, Homo sapiens
  misc_RNA (1)...(19): siRNA sense strand
gccagcaugucaggauuag

SEQ ID NO: 1454439 - RNA, 19 nt, Homo sapiens
  misc_RNA (1)...(19): siRNA sense strand
gacuacaugcgggaucuuu

SEQ ID NO: 1454440 - RNA, 19 nt, Homo sapiens
  misc_RNA (1)...(19): siRNA sense strand
cgaaugcugauggucguuu

SEQ ID NO: 1454441 - RNA, 19 nt, Homo sapiens
  misc_RNA (1)...(19): siRNA sense strand
gugggaaacuuuugaugug

SEQ ID NO: 1454442 - RNA, 19 nt, Homo sapiens
  misc_RNA (1)...(19): siRNA sense strand
gcagcaucccugagaacga

SEQ ID NO: 1454443 - RNA, 19 nt, Homo sapiens
  misc_RNA (1)...(19): siRNA sense strand
gggcuuccaccguauaaac

SEQ ID NO: 1454444 - RNA, 19 nt, Homo sapiens
  misc_RNA (1)...(19): siRNA sense strand
aucaggagaugguaguaga

SEQ ID NO: 1454445 - RNA, 19 nt, Homo sapiens
  misc_RNA (1)...(19): siRNA sense strand
gcuaccaggccuucuacug

SEQ ID NO: 1454446 - RNA, 19 nt, Homo sapiens
  misc_RNA (1)...(19): siRNA sense strand
gcaagagugccgucauucc

SEQ ID NO: 1454447 - RNA, 19 nt, Homo sapiens
  misc_RNA (1)...(19): siRNA sense strand
gagaagaaauggagaaagu

SEQ ID NO: 1454448 - RNA, 19 nt, Homo sapiens
  misc_RNA (1)...(19): siRNA sense strand
gcaaagcauucuuccguuu

SEQ ID NO: 1454449 - RNA, 19 nt, Homo sapiens
  misc_RNA (1)...(19): siRNA sense strand
agaagaagauucagaagaa

SEQ ID NO: 1454450 - RNA, 19 nt, Homo sapiens
  misc_RNA (1)...(19): siRNA sense strand
gcugaagucuugugucauu

SEQ ID NO: 1454451 - RNA, 19 nt, Homo sapiens
  misc_RNA (1)...(19): siRNA sense strand
gaagaagauucagaagaaa

SEQ ID NO: 1454452 - RNA, 19 nt, Homo sapiens
  misc_RNA (1)...(19): siRNA sense strand
gagaaacgcuaucagucaa

SEQ ID NO: 1454453 - RNA, 19 nt, Homo sapiens
  misc_RNA (1)...(19): siRNA sense strand
ccaagaaaccaaagaauga

SEQ ID NO: 1454454 - RNA, 19 nt, Homo sapiens
  misc_RNA (1)...(19): siRNA sense strand
ccaacgggcugaagucuug

SEQ ID NO: 1454455 - RNA, 19 nt, Homo sapiens
  misc_RNA (1)...(19): siRNA sense strand
gaagaaauggagaaaguau

SEQ ID NO: 1454456 - RNA, 19 nt, Homo sapiens
  misc_RNA (1)...(19): siRNA sense strand
gaccgaaauuugcugcuaa

SEQ ID NO: 1454457 - RNA, 19 nt, Homo sapiens
  misc_RNA (1)...(19): siRNA sense strand
ucauggagcugaacgagaa

SEQ ID NO: 1454458 - RNA, 19 nt, Homo sapiens
  misc_RNA (1)...(19): siRNA sense strand
ggagaaacgcuaucaguca

SEQ ID NO: 1454459 - RNA, 19 nt, Homo sapiens
  misc_RNA (1)...(19): siRNA sense strand
ggaccgaaauuugcugcua

SEQ ID NO: 1454460 - RNA, 19 nt, Homo sapiens
  misc_RNA (1)...(19): siRNA sense strand
gaaaguauuagcuggagaa

SEQ ID NO: 1454461 - RNA, 19 nt, Homo sapiens
  misc_RNA (1)...(19): siRNA sense strand
caaagcauucuuccguuua

SEQ ID NO: 1454462 - RNA, 19 nt, Homo sapiens
  misc_RNA (1)...(19): siRNA sense strand
gggcugaagucuuguguca

SEQ ID NO: 1454463 - RNA, 19 nt, Homo sapiens
  misc_RNA (1)...(19): siRNA sense strand
ggagguugauggcaauuca

SEQ ID NO: 1454464 - RNA, 19 nt, Homo sapiens
  misc_RNA (1)...(19): siRNA sense strand
gaagacaaguacgaaauac

SEQ ID NO: 1454465 - RNA, 19 nt, Homo sapiens
  misc_RNA (1)...(19): siRNA sense strand
gcaagaacccagucaugga

SEQ ID NO: 1454466 - RNA, 19 nt, Homo sapiens
  misc_RNA (1)...(19): siRNA sense strand
ggacuacaccguucagauc

SEQ ID NO: 1454467 - RNA, 19 nt, Homo sapiens
  misc_RNA (1)...(19): siRNA sense strand
ugacaaagcacggcaagaa

SEQ ID NO: 1454468 - RNA, 19 nt, Homo sapiens
  misc_RNA (1)...(19): siRNA sense strand
cgaaguggauggacagaag

SEQ ID NO: 1454469 - RNA, 19 nt, Homo sapiens
  misc_RNA (1)...(19): siRNA sense strand
gaaugccggugcuggguau

SEQ ID NO: 1454470 - RNA, 19 nt, Homo sapiens
  misc_RNA (1)...(19): siRNA sense strand
caaccgcccuccuggacaa

SEQ ID NO: 1454471 - RNA, 19 nt, Homo sapiens
  misc_RNA (1)...(19): siRNA sense strand
agaagacaaguacgaaaua

SEQ ID NO: 1454472 - RNA, 19 nt, Homo sapiens
  misc_RNA (1)...(19): siRNA sense strand
uaacagaagacaaguacga

SEQ ID NO: 1454473 - RNA, 19 nt, Homo sapiens
  misc_RNA (1)...(19): siRNA sense strand
gcauuuaugacccuuguga

SEQ ID NO: 1454474 - RNA, 19 nt, Homo sapiens
  misc_RNA (1)...(19): siRNA sense strand
gaagaggcgugggcucaag

SEQ ID NO: 1454475 - RNA, 19 nt, Homo sapiens
  misc_RNA (1)...(19): siRNA sense strand
agaagccacugaugcuauu

SEQ ID NO: 1454476 - RNA, 19 nt, Homo sapiens
  misc_RNA (1)...(19): siRNA sense strand
gaagucuugugucauugug

SEQ ID NO: 1454477 - RNA, 19 nt, Homo sapiens
  misc_RNA (1)...(19): siRNA sense strand
agaagaagaagauucagaa

SEQ ID NO: 1454478 - RNA, 19 nt, Homo sapiens
  misc_RNA (1)...(19): siRNA sense strand
aaagcauucuuccguuuau

SEQ ID NO: 1454479 - RNA, 19 nt, Homo sapiens
  misc_RNA (1)...(19): siRNA sense strand
cuuccaagaugcccaagaa

SEQ ID NO: 1454480 - RNA, 19 nt, Homo sapiens
  misc_RNA (1)...(19): siRNA sense strand
caagaaaccaaagaaugaa

SEQ ID NO: 1454481 - RNA, 19 nt, Homo sapiens
  misc_RNA (1)...(19): siRNA sense strand
guucagaucccaccaagca

SEQ ID NO: 1454482 - RNA, 19 nt, Homo sapiens
  misc_RNA (1)...(19): siRNA sense strand
gagcuggugcugcugugua

SEQ ID NO: 1454483 - RNA, 19 nt, Homo sapiens
  misc_RNA (1)...(19): siRNA sense strand
ggcgugggcucaaguacga

SEQ ID NO: 1454484 - RNA, 19 nt, Homo sapiens
  misc_RNA (1)...(19): siRNA sense strand
caaaagagccuccauuguc

SEQ ID NO: 1454485 - RNA, 19 nt, Homo sapiens
  misc_RNA (1)...(19): siRNA sense strand
cgacaagcgcuucgucaug

SEQ ID NO: 1454486 - RNA, 19 nt, Homo sapiens
  misc_RNA (1)...(19): siRNA sense strand
aguauuagcuggagaaacg

SEQ ID NO: 1454487 - RNA, 19 nt, Homo sapiens
  misc_RNA (1)...(19): siRNA sense strand
cagaagacaaguacgaaau

SEQ ID NO: 1454488 - RNA, 19 nt, Homo sapiens
  misc_RNA (1)...(19): siRNA sense strand
gaagaagaagauucagaag

SEQ ID NO: 1454489 - RNA, 19 nt, Homo sapiens
  misc_RNA (1)...(19): siRNA sense strand
gacagcaacgggaagauau

SEQ ID NO: 1454490 - RNA, 19 nt, Homo sapiens
  misc_RNA (1)...(19): siRNA sense strand
ugucgacgaugcugcgauu

SEQ ID NO: 1454491 - RNA, 19 nt, Homo sapiens
  misc_RNA (1)...(19): siRNA sense strand
gagcaggcagaguccgaua

SEQ ID NO: 1454492 - RNA, 19 nt, Homo sapiens
  misc_RNA (1)...(19): siRNA sense strand
cgacgaugcugcgauugug

SEQ ID NO: 1454493 - RNA, 19 nt, Homo sapiens
  misc_RNA (1)...(19): siRNA sense strand
ccaugucuguggagguuga

SEQ ID NO: 1454494 - RNA, 19 nt, Homo sapiens
  misc_RNA (1)...(19): siRNA sense strand
acgaaauacugcaaucugu

SEQ ID NO: 1454495 - RNA, 19 nt, Homo sapiens
  misc_RNA (1)...(19): siRNA sense strand
ccaccaagcaccaccuaug

SEQ ID NO: 1454496 - RNA, 19 nt, Homo sapiens
  misc_RNA (1)...(19): siRNA sense strand
agacagcaacgggaagaua

SEQ ID NO: 1454497 - RNA, 19 nt, Homo sapiens
  misc_RNA (1)...(19): siRNA sense strand
augcugcgauugugauaaa

SEQ ID NO: 1454498 - RNA, 19 nt, Homo sapiens
  misc_RNA (1)...(19): siRNA sense strand
gcaacgggaagauaucaca

SEQ ID NO: 1454499 - RNA, 19 nt, Homo sapiens
  misc_RNA (1)...(19): siRNA sense strand
uaccaugucuguggagguu

SEQ ID NO: 1454500 - RNA, 19 nt, Homo sapiens
  misc_RNA (1)...(19): siRNA sense strand
gagcuccugugugagaaau

SEQ ID NO: 1454501 - RNA, 19 nt, Homo sapiens
  misc_RNA (1)...(19): siRNA sense strand
aaugaugaccgccauguga

SEQ ID NO: 1454502 - RNA, 19 nt, Homo sapiens
  misc_RNA (1)...(19): siRNA sense strand
aagaagaagauucagaaga

SEQ ID NO: 1454503 - RNA, 19 nt, Homo sapiens
  misc_RNA (1)...(19): siRNA sense strand
gaaauggagaaaguauuag

SEQ ID NO: 1454504 - RNA, 19 nt, Homo sapiens
  misc_RNA (1)...(19): siRNA sense strand
ggcagaguccgauaacaug

SEQ ID NO: 1454505 - RNA, 19 nt, Homo sapiens
  misc_RNA (1)...(19): siRNA sense strand
cagaagacggagcacauga

SEQ ID NO: 1454506 - RNA, 19 nt, Homo sapiens
  misc_RNA (1)...(19): siRNA sense strand
ccagcuccauaaaguccua

SEQ ID NO: 1454507 - RNA, 19 nt, Homo sapiens
  misc_RNA (1)...(19): siRNA sense strand
agaugguucuggcauuuau

SEQ ID NO: 1454508 - RNA, 19 nt, Homo sapiens
  misc_RNA (1)...(19): siRNA sense strand
guaaggagaagcccacaac

SEQ ID NO: 1454509 - RNA, 19 nt, Homo sapiens
  misc_RNA (1)...(19): siRNA sense strand
cccaagaaaccaaagaaug

SEQ ID NO: 1454510 - RNA, 19 nt, Homo sapiens
  misc_RNA (1)...(19): siRNA sense strand
ggcuaugaaugcccugaug

SEQ ID NO: 1454511 - RNA, 19 nt, Homo sapiens
  misc_RNA (1)...(19): siRNA sense strand
agaagauucagaagaaaga

SEQ ID NO: 1454512 - RNA, 19 nt, Homo sapiens
  misc_RNA (1)...(19): siRNA sense strand
agaagaaauggagaaagua

SEQ ID NO: 1454513 - RNA, 19 nt, Homo sapiens
  misc_RNA (1)...(19): siRNA sense strand
gaaugaugaccgccaugug

SEQ ID NO: 1454514 - RNA, 19 nt, Homo sapiens
  misc_RNA (1)...(19): siRNA sense strand
uggacaagguggccgacaa

SEQ ID NO: 1454515 - RNA, 19 nt, Homo sapiens
  misc_RNA (1)...(19): siRNA sense strand
ggccuacgcugcucuugcu

SEQ ID NO: 1454516 - RNA, 19 nt, Homo sapiens
  misc_RNA (1)...(19): siRNA sense strand
ggccgauccugacaaagca

SEQ ID NO: 1454517 - RNA, 19 nt, Homo sapiens
  misc_RNA (1)...(19): siRNA sense strand
ucagagaagaaauggagaa

SEQ ID NO: 1454518 - RNA, 19 nt, Homo sapiens
  misc_RNA (1)...(19): siRNA sense strand
aaagaagccacugaugcua

SEQ ID NO: 1454519 - RNA, 19 nt, Homo sapiens
  misc_RNA (1)...(19): siRNA sense strand
gcaucuagacagacagcaa

SEQ ID NO: 1454520 - RNA, 19 nt, Homo sapiens
  misc_RNA (1)...(19): siRNA sense strand
cagagaagaaauggagaaa

SEQ ID NO: 1454521 - RNA, 19 nt, Homo sapiens
  misc_RNA (1)...(19): siRNA sense strand
ucggccagcuccauaaagu

SEQ ID NO: 1454522 - RNA, 19 nt, Homo sapiens
  misc_RNA (1)...(19): siRNA sense strand
ggacaagguggccgacaac

SEQ ID NO: 1454523 - RNA, 19 nt, Homo sapiens
  misc_RNA (1)...(19): siRNA sense strand
agaggacgacaguaaagaa

SEQ ID NO: 1454524 - RNA, 19 nt, Homo sapiens
  misc_RNA (1)...(19): siRNA sense strand
gaaguggauggacagaagu

SEQ ID NO: 1454525 - RNA, 19 nt, Homo sapiens
  misc_RNA (1)...(19): siRNA sense strand
gugcggccuuucccucaga

SEQ ID NO: 1454526 - RNA, 19 nt, Homo sapiens
  misc_RNA (1)...(19): siRNA sense strand
uauugggcaucuagacaga

SEQ ID NO: 1454527 - RNA, 19 nt, Homo sapiens
  misc_RNA (1)...(19): siRNA sense strand
gcuauugggcaucuagaca

SEQ ID NO: 1454528 - RNA, 19 nt, Homo sapiens
  misc_RNA (1)...(19): siRNA sense strand
caugugauggcaaagcauu

SEQ ID NO: 1454529 - RNA, 19 nt, Homo sapiens
  misc_RNA (1)...(19): siRNA sense strand
gaggacgacaguaaagaag

SEQ ID NO: 1454530 - RNA, 19 nt, Homo sapiens
  misc_RNA (1)...(19): siRNA sense strand
ggaggcaguccagaacaug

SEQ ID NO: 1454531 - RNA, 19 nt, Homo sapiens
  misc_RNA (1)...(19): siRNA sense strand
acagaagacaaguacgaaa

SEQ ID NO: 1454532 - RNA, 19 nt, Homo sapiens
  misc_RNA (1)...(19): siRNA sense strand
ccagaggacgacaguaaag

SEQ ID NO: 1454533 - RNA, 19 nt, Homo sapiens
  misc_RNA (1)...(19): siRNA sense strand
aagaagaagaagauucaga

SEQ ID NO: 1454534 - RNA, 19 nt, Homo sapiens
  misc_RNA (1)...(19): siRNA sense strand
aagcaccaccuaugccauu

SEQ ID NO: 1454535 - RNA, 19 nt, Homo sapiens
  misc_RNA (1)...(19): siRNA sense strand
aagaagccacugaugcuau

SEQ ID NO: 1454536 - RNA, 19 nt, Homo sapiens
  misc_RNA (1)...(19): siRNA sense strand
gaaggccuacgcugcucuu

SEQ ID NO: 1454537 - RNA, 19 nt, Homo sapiens
  misc_RNA (1)...(19): siRNA sense strand
cgucauggaggucgaagug

SEQ ID NO: 1454538 - RNA, 19 nt, Homo sapiens
  misc_RNA (1)...(19): siRNA sense strand
gcccaagaaaccaaagaau

SEQ ID NO: 1454539 - RNA, 19 nt, Homo sapiens
  misc_RNA (1)...(19): siRNA sense strand
gcaggcagaguccgauaac

SEQ ID NO: 1454540 - RNA, 19 nt, Homo sapiens
  misc_RNA (1)...(19): siRNA sense strand
gcucuugcugcccuagaaa

SEQ ID NO: 1454541 - RNA, 19 nt, Homo sapiens
  misc_RNA (1)...(19): siRNA sense strand
cggcaagaacccagucaug

SEQ ID NO: 1454542 - RNA, 19 nt, Homo sapiens
  misc_RNA (1)...(19): siRNA sense strand
cagaggacgacaguaaaga

SEQ ID NO: 1454543 - RNA, 19 nt, Homo sapiens
  misc_RNA (1)...(19): siRNA sense strand
cucucgagcuccuguguga

SEQ ID NO: 1454544 - RNA, 19 nt, Homo sapiens
  misc_RNA (1)...(19): siRNA sense strand
uggcauuuaugacccuugu

SEQ ID NO: 1454545 - RNA, 19 nt, Homo sapiens
  misc_RNA (1)...(19): siRNA sense strand
gacaaagcacggcaagaac

SEQ ID NO: 1454546 - RNA, 19 nt, Homo sapiens
  misc_RNA (1)...(19): siRNA sense strand
gacgaugcugcgauuguga

SEQ ID NO: 1454547 - RNA, 19 nt, Homo sapiens
  misc_RNA (1)...(19): siRNA sense strand
gagaagaaauggagaaagu

SEQ ID NO: 1454548 - RNA, 19 nt, Homo sapiens
  misc_RNA (1)...(19): siRNA sense strand
gcaaagcauucuuccguuu

SEQ ID NO: 1454549 - RNA, 19 nt, Homo sapiens
  misc_RNA (1)...(19): siRNA sense strand
agaagaagauucagaagaa

SEQ ID NO: 1454550 - RNA, 19 nt, Homo sapiens
  misc_RNA (1)...(19): siRNA sense strand
gcugaagucuugugucauu

SEQ ID NO: 1454551 - RNA, 19 nt, Homo sapiens
  misc_RNA (1)...(19): siRNA sense strand
gaagaagauucagaagaaa

SEQ ID NO: 1454552 - RNA, 19 nt, Homo sapiens
  misc_RNA (1)...(19): siRNA sense strand
gagaaacgcuaucagucaa

SEQ ID NO: 1454553 - RNA, 19 nt, Homo sapiens
  misc_RNA (1)...(19): siRNA sense strand
ccaagaaaccaaagaauga

SEQ ID NO: 1454554 - RNA, 19 nt, Homo sapiens
  misc_RNA (1)...(19): siRNA sense strand
ccaacgggcugaagucuug

SEQ ID NO: 1454555 - RNA, 19 nt, Homo sapiens
  misc_RNA (1)...(19): siRNA sense strand
gaagaaauggagaaaguau

SEQ ID NO: 1454556 - RNA, 19 nt, Homo sapiens
  misc_RNA (1)...(19): siRNA sense strand
gaccgaaauuugcugcuaa

SEQ ID NO: 1454557 - RNA, 19 nt, Homo sapiens
  misc_RNA (1)...(19): siRNA sense strand
ucauggagcugaacgagaa

SEQ ID NO: 1454558 - RNA, 19 nt, Homo sapiens
  misc_RNA (1)...(19): siRNA sense strand
ggagaaacgcuaucaguca

SEQ ID NO: 1454559 - RNA, 19 nt, Homo sapiens
  misc_RNA (1)...(19): siRNA sense strand
ggaccgaaauuugcugcua

SEQ ID NO: 1454560 - RNA, 19 nt, Homo sapiens
  misc_RNA (1)...(19): siRNA sense strand
gaaaguauuagcuggagaa

SEQ ID NO: 1454561 - RNA, 19 nt, Homo sapiens
  misc_RNA (1)...(19): siRNA sense strand
caaagcauucuuccguuua

SEQ ID NO: 1454562 - RNA, 19 nt, Homo sapiens
  misc_RNA (1)...(19): siRNA sense strand
gggcugaagucuuguguca

SEQ ID NO: 1454563 - RNA, 19 nt, Homo sapiens
  misc_RNA (1)...(19): siRNA sense strand
ggagguugauggcaauuca

SEQ ID NO: 1454564 - RNA, 19 nt, Homo sapiens
  misc_RNA (1)...(19): siRNA sense strand
gaagacaaguacgaaauac

SEQ ID NO: 1454565 - RNA, 19 nt, Homo sapiens
  misc_RNA (1)...(19): siRNA sense strand
gcaagaacccagucaugga

SEQ ID NO: 1454566 - RNA, 19 nt, Homo sapiens
  misc_RNA (1)...(19): siRNA sense strand
ggacuacaccguucagauc

SEQ ID NO: 1454567 - RNA, 19 nt, Homo sapiens
  misc_RNA (1)...(19): siRNA sense strand
ugacaaagcacggcaagaa

SEQ ID NO: 1454568 - RNA, 19 nt, Homo sapiens
  misc_RNA (1)...(19): siRNA sense strand
cgaaguggauggacagaag

SEQ ID NO: 1454569 - RNA, 19 nt, Homo sapiens
  misc_RNA (1)...(19): siRNA sense strand
gaaugccggugcuggguau

SEQ ID NO: 1454570 - RNA, 19 nt, Homo sapiens
  misc_RNA (1)...(19): siRNA sense strand
caaccgcccuccuggacaa

SEQ ID NO: 1454571 - RNA, 19 nt, Homo sapiens
  misc_RNA (1)...(19): siRNA sense strand
agaagacaaguacgaaaua

SEQ ID NO: 1454572 - RNA, 19 nt, Homo sapiens
  misc_RNA (1)...(19): siRNA sense strand
uaacagaagacaaguacga

SEQ ID NO: 1454573 - RNA, 19 nt, Homo sapiens
  misc_RNA (1)...(19): siRNA sense strand
gcauuuaugacccuuguga

SEQ ID NO: 1454574 - RNA, 19 nt, Homo sapiens
  misc_RNA (1)...(19): siRNA sense strand
gaagaggcgugggcucaag

SEQ ID NO: 1454575 - RNA, 19 nt, Homo sapiens
  misc_RNA (1)...(19): siRNA sense strand
agaagccacugaugcuauu

SEQ ID NO: 1454576 - RNA, 19 nt, Homo sapiens
  misc_RNA (1)...(19): siRNA sense strand
gaagucuugugucauugug

SEQ ID NO: 1454577 - RNA, 19 nt, Homo sapiens
  misc_RNA (1)...(19): siRNA sense strand
agaagaagaagauucagaa

SEQ ID NO: 1454578 - RNA, 19 nt, Homo sapiens
  misc_RNA (1)...(19): siRNA sense strand
aaagcauucuuccguuuau

SEQ ID NO: 1454579 - RNA, 19 nt, Homo sapiens
  misc_RNA (1)...(19): siRNA sense strand
cuuccaagaugcccaagaa

SEQ ID NO: 1454580 - RNA, 19 nt, Homo sapiens
  misc_RNA (1)...(19): siRNA sense strand
caagaaaccaaagaaugaa

SEQ ID NO: 1454581 - RNA, 19 nt, Homo sapiens
  misc_RNA (1)...(19): siRNA sense strand
guucagaucccaccaagca

SEQ ID NO: 1454582 - RNA, 19 nt, Homo sapiens
  misc_RNA (1)...(19): siRNA sense strand
gagcuggugcugcugugua

SEQ ID NO: 1454583 - RNA, 19 nt, Homo sapiens
  misc_RNA (1)...(19): siRNA sense strand
ggcgugggcucaaguacga

SEQ ID NO: 1454584 - RNA, 19 nt, Homo sapiens
  misc_RNA (1)...(19): siRNA sense strand
caaaagagccuccauuguc

SEQ ID NO: 1454585 - RNA, 19 nt, Homo sapiens
  misc_RNA (1)...(19): siRNA sense strand
cgacaagcgcuucgucaug

SEQ ID NO: 1454586 - RNA, 19 nt, Homo sapiens
  misc_RNA (1)...(19): siRNA sense strand
aguauuagcuggagaaacg

SEQ ID NO: 1454587 - RNA, 19 nt, Homo sapiens
  misc_RNA (1)...(19): siRNA sense strand
cagaagacaaguacgaaau

SEQ ID NO: 1454588 - RNA, 19 nt, Homo sapiens
  misc_RNA (1)...(19): siRNA sense strand
gaagaagaagauucagaag

SEQ ID NO: 1454589 - RNA, 19 nt, Homo sapiens
  misc_RNA (1)...(19): siRNA sense strand
gacagcaacgggaagauau

SEQ ID NO: 1454590 - RNA, 19 nt, Homo sapiens
  misc_RNA (1)...(19): siRNA sense strand
ugucgacgaugcugcgauu

SEQ ID NO: 1454591 - RNA, 19 nt, Homo sapiens
  misc_RNA (1)...(19): siRNA sense strand
gagcaggcagaguccgaua

SEQ ID NO: 1454592 - RNA, 19 nt, Homo sapiens
  misc_RNA (1)...(19): siRNA sense strand
cgacgaugcugcgauugug

SEQ ID NO: 1454593 - RNA, 19 nt, Homo sapiens
  misc_RNA (1)...(19): siRNA sense strand
ccaugucuguggagguuga

SEQ ID NO: 1454594 - RNA, 19 nt, Homo sapiens
  misc_RNA (1)...(19): siRNA sense strand
acgaaauacugcaaucugu

SEQ ID NO: 1454595 - RNA, 19 nt, Homo sapiens
  misc_RNA (1)...(19): siRNA sense strand
ccaccaagcaccaccuaug

SEQ ID NO: 1454596 - RNA, 19 nt, Homo sapiens
  misc_RNA (1)...(19): siRNA sense strand
agacagcaacgggaagaua

SEQ ID NO: 1454597 - RNA, 19 nt, Homo sapiens
  misc_RNA (1)...(19): siRNA sense strand
augcugcgauugugauaaa

SEQ ID NO: 1454598 - RNA, 19 nt, Homo sapiens
  misc_RNA (1)...(19): siRNA sense strand
gcaacgggaagauaucaca

SEQ ID NO: 1454599 - RNA, 19 nt, Homo sapiens
  misc_RNA (1)...(19): siRNA sense strand
uaccaugucuguggagguu

SEQ ID NO: 1454600 - RNA, 19 nt, Homo sapiens
  misc_RNA (1)...(19): siRNA sense strand
gagcuccugugugagaaau

SEQ ID NO: 1454601 - RNA, 19 nt, Homo sapiens
  misc_RNA (1)...(19): siRNA sense strand
aaugaugaccgccauguga

SEQ ID NO: 1454602 - RNA, 19 nt, Homo sapiens
  misc_RNA (1)...(19): siRNA sense strand
aagaagaagauucagaaga

SEQ ID NO: 1454603 - RNA, 19 nt, Homo sapiens
  misc_RNA (1)...(19): siRNA sense strand
gaaauggagaaaguauuag

SEQ ID NO: 1454604 - RNA, 19 nt, Homo sapiens
  misc_RNA (1)...(19): siRNA sense strand
ggcagaguccgauaacaug

SEQ ID NO: 1454605 - RNA, 19 nt, Homo sapiens
  misc_RNA (1)...(19): siRNA sense strand
cagaagacggagcacauga

SEQ ID NO: 1454606 - RNA, 19 nt, Homo sapiens
  misc_RNA (1)...(19): siRNA sense strand
ccagcuccauaaaguccua

SEQ ID NO: 1454607 - RNA, 19 nt, Homo sapiens
  misc_RNA (1)...(19): siRNA sense strand
agaugguucuggcauuuau

SEQ ID NO: 1454608 - RNA, 19 nt, Homo sapiens
  misc_RNA (1)...(19): siRNA sense strand
guaaggagaagcccacaac

SEQ ID NO: 1454609 - RNA, 19 nt, Homo sapiens
  misc_RNA (1)...(19): siRNA sense strand
cccaagaaaccaaagaaug

SEQ ID NO: 1454610 - RNA, 19 nt, Homo sapiens
  misc_RNA (1)...(19): siRNA sense strand
ggcuaugaaugcccugaug

SEQ ID NO: 1454611 - RNA, 19 nt, Homo sapiens
  misc_RNA (1)...(19): siRNA sense strand
agaagauucagaagaaaga

SEQ ID NO: 1454612 - RNA, 19 nt, Homo sapiens
  misc_RNA (1)...(19): siRNA sense strand
agaagaaauggagaaagua

SEQ ID NO: 1454613 - RNA, 19 nt, Homo sapiens
  misc_RNA (1)...(19): siRNA sense strand
gaaugaugaccgccaugug

SEQ ID NO: 1454614 - RNA, 19 nt, Homo sapiens
  misc_RNA (1)...(19): siRNA sense strand
uggacaagguggccgacaa

SEQ ID NO: 1454615 - RNA, 19 nt, Homo sapiens
  misc_RNA (1)...(19): siRNA sense strand
ggccuacgcugcucuugcu

SEQ ID NO: 1454616 - RNA, 19 nt, Homo sapiens
  misc_RNA (1)...(19): siRNA sense strand
ggccgauccugacaaagca

SEQ ID NO: 1454617 - RNA, 19 nt, Homo sapiens
  misc_RNA (1)...(19): siRNA sense strand
ucagagaagaaauggagaa

SEQ ID NO: 1454618 - RNA, 19 nt, Homo sapiens
  misc_RNA (1)...(19): siRNA sense strand
aaagaagccacugaugcua

SEQ ID NO: 1454619 - RNA, 19 nt, Homo sapiens
  misc_RNA (1)...(19): siRNA sense strand
gcaucuagacagacagcaa

SEQ ID NO: 1454620 - RNA, 19 nt, Homo sapiens
  misc_RNA (1)...(19): siRNA sense strand
cagagaagaaauggagaaa

SEQ ID NO: 1454621 - RNA, 19 nt, Homo sapiens
  misc_RNA (1)...(19): siRNA sense strand
ucggccagcuccauaaagu

SEQ ID NO: 1454622 - RNA, 19 nt, Homo sapiens
  misc_RNA (1)...(19): siRNA sense strand
ggacaagguggccgacaac

SEQ ID NO: 1454623 - RNA, 19 nt, Homo sapiens
  misc_RNA (1)...(19): siRNA sense strand
agaggacgacaguaaagaa

SEQ ID NO: 1454624 - RNA, 19 nt, Homo sapiens
  misc_RNA (1)...(19): siRNA sense strand
gaaguggauggacagaagu

SEQ ID NO: 1454625 - RNA, 19 nt, Homo sapiens
  misc_RNA (1)...(19): siRNA sense strand
gugcggccuuucccucaga

SEQ ID NO: 1454626 - RNA, 19 nt, Homo sapiens
  misc_RNA (1)...(19): siRNA sense strand
uauugggcaucuagacaga

SEQ ID NO: 1454627 - RNA, 19 nt, Homo sapiens
  misc_RNA (1)...(19): siRNA sense strand
gcuauugggcaucuagaca

SEQ ID NO: 1454628 - RNA, 19 nt, Homo sapiens
  misc_RNA (1)...(19): siRNA sense strand
caugugauggcaaagcauu

SEQ ID NO: 1454629 - RNA, 19 nt, Homo sapiens
  misc_RNA (1)...(19): siRNA sense strand
gaggacgacaguaaagaag

SEQ ID NO: 1454630 - RNA, 19 nt, Homo sapiens
  misc_RNA (1)...(19): siRNA sense strand
ggaggcaguccagaacaug

SEQ ID NO: 1454631 - RNA, 19 nt, Homo sapiens
  misc_RNA (1)...(19): siRNA sense strand
acagaagacaaguacgaaa

SEQ ID NO: 1454632 - RNA, 19 nt, Homo sapiens
  misc_RNA (1)...(19): siRNA sense strand
ccagaggacgacaguaaag

SEQ ID NO: 1454633 - RNA, 19 nt, Homo sapiens
  misc_RNA (1)...(19): siRNA sense strand
aagaagaagaagauucaga

SEQ ID NO: 1454634 - RNA, 19 nt, Homo sapiens
  misc_RNA (1)...(19): siRNA sense strand
aagcaccaccuaugccauu

SEQ ID NO: 1454635 - RNA, 19 nt, Homo sapiens
  misc_RNA (1)...(19): siRNA sense strand
aagaagccacugaugcuau

SEQ ID NO: 1454636 - RNA, 19 nt, Homo sapiens
  misc_RNA (1)...(19): siRNA sense strand
gaaggccuacgcugcucuu

SEQ ID NO: 1454637 - RNA, 19 nt, Homo sapiens
  misc_RNA (1)...(19): siRNA sense strand
cgucauggaggucgaagug

SEQ ID NO: 1454638 - RNA, 19 nt, Homo sapiens
  misc_RNA (1)...(19): siRNA sense strand
gcccaagaaaccaaagaau

SEQ ID NO: 1454639 - RNA, 19 nt, Homo sapiens
  misc_RNA (1)...(19): siRNA sense strand
gcaggcagaguccgauaac

SEQ ID NO: 1454640 - RNA, 19 nt, Homo sapiens
  misc_RNA (1)...(19): siRNA sense strand
gcucuugcugcccuagaaa

SEQ ID NO: 1454641 - RNA, 19 nt, Homo sapiens
  misc_RNA (1)...(19): siRNA sense strand
cggcaagaacccagucaug

SEQ ID NO: 1454642 - RNA, 19 nt, Homo sapiens
  misc_RNA (1)...(19): siRNA sense strand
cagaggacgacaguaaaga

SEQ ID NO: 1454643 - RNA, 19 nt, Homo sapiens
  misc_RNA (1)...(19): siRNA sense strand
cucucgagcuccuguguga

SEQ ID NO: 1454644 - RNA, 19 nt, Homo sapiens
  misc_RNA (1)...(19): siRNA sense strand
uggcauuuaugacccuugu

SEQ ID NO: 1454645 - RNA, 19 nt, Homo sapiens
  misc_RNA (1)...(19): siRNA sense strand
gacaaagcacggcaagaac

SEQ ID NO: 1454646 - RNA, 19 nt, Homo sapiens
  misc_RNA (1)...(19): siRNA sense strand
gacgaugcugcgauuguga

SEQ ID NO: 1454647 - RNA, 19 nt, Homo sapiens
  misc_RNA (1)...(19): siRNA sense strand
gagaagaaauggagaaagu

SEQ ID NO: 1454648 - RNA, 19 nt, Homo sapiens
  misc_RNA (1)...(19): siRNA sense strand
gcaaagcauucuuccguuu

SEQ ID NO: 1454649 - RNA, 19 nt, Homo sapiens
  misc_RNA (1)...(19): siRNA sense strand
agaagaagauucagaagaa

SEQ ID NO: 1454650 - RNA, 19 nt, Homo sapiens
  misc_RNA (1)...(19): siRNA sense strand
gcugaagucuugugucauu

SEQ ID NO: 1454651 - RNA, 19 nt, Homo sapiens
  misc_RNA (1)...(19): siRNA sense strand
gaagaagauucagaagaaa

SEQ ID NO: 1454652 - RNA, 19 nt, Homo sapiens
  misc_RNA (1)...(19): siRNA sense strand
gagaaacgcuaucagucaa

SEQ ID NO: 1454653 - RNA, 19 nt, Homo sapiens
  misc_RNA (1)...(19): siRNA sense strand
ccaagaaaccaaagaauga

SEQ ID NO: 1454654 - RNA, 19 nt, Homo sapiens
  misc_RNA (1)...(19): siRNA sense strand
ccaacgggcugaagucuug

SEQ ID NO: 1454655 - RNA, 19 nt, Homo sapiens
  misc_RNA (1)...(19): siRNA sense strand
gaagaaauggagaaaguau

SEQ ID NO: 1454656 - RNA, 19 nt, Homo sapiens
  misc_RNA (1)...(19): siRNA sense strand
gaccgaaauuugcugcuaa

SEQ ID NO: 1454657 - RNA, 19 nt, Homo sapiens
  misc_RNA (1)...(19): siRNA sense strand
ucauggagcugaacgagaa

SEQ ID NO: 1454658 - RNA, 19 nt, Homo sapiens
  misc_RNA (1)...(19): siRNA sense strand
ggagaaacgcuaucaguca

SEQ ID NO: 1454659 - RNA, 19 nt, Homo sapiens
  misc_RNA (1)...(19): siRNA sense strand
ggaccgaaauuugcugcua

SEQ ID NO: 1454660 - RNA, 19 nt, Homo sapiens
  misc_RNA (1)...(19): siRNA sense strand
gaaaguauuagcuggagaa

SEQ ID NO: 1454661 - RNA, 19 nt, Homo sapiens
  misc_RNA (1)...(19): siRNA sense strand
caaagcauucuuccguuua

SEQ ID NO: 1454662 - RNA, 19 nt, Homo sapiens
  misc_RNA (1)...(19): siRNA sense strand
gggcugaagucuuguguca

SEQ ID NO: 1454663 - RNA, 19 nt, Homo sapiens
  misc_RNA (1)...(19): siRNA sense strand
ggagguugauggcaauuca

SEQ ID NO: 1454664 - RNA, 19 nt, Homo sapiens
  misc_RNA (1)...(19): siRNA sense strand
gaagacaaguacgaaauac

SEQ ID NO: 1454665 - RNA, 19 nt, Homo sapiens
  misc_RNA (1)...(19): siRNA sense strand
gcaagaacccagucaugga

SEQ ID NO: 1454666 - RNA, 19 nt, Homo sapiens
  misc_RNA (1)...(19): siRNA sense strand
ggacuacaccguucagauc

SEQ ID NO: 1454667 - RNA, 19 nt, Homo sapiens
  misc_RNA (1)...(19): siRNA sense strand
ugacaaagcacggcaagaa

SEQ ID NO: 1454668 - RNA, 19 nt, Homo sapiens
  misc_RNA (1)...(19): siRNA sense strand
cgaaguggauggacagaag

SEQ ID NO: 1454669 - RNA, 19 nt, Homo sapiens
  misc_RNA (1)...(19): siRNA sense strand
gaaugccggugcuggguau

SEQ ID NO: 1454670 - RNA, 19 nt, Homo sapiens
  misc_RNA (1)...(19): siRNA sense strand
caaccgcccuccuggacaa

SEQ ID NO: 1454671 - RNA, 19 nt, Homo sapiens
  misc_RNA (1)...(19): siRNA sense strand
agaagacaaguacgaaaua

SEQ ID NO: 1454672 - RNA, 19 nt, Homo sapiens
  misc_RNA (1)...(19): siRNA sense strand
uaacagaagacaaguacga

SEQ ID NO: 1454673 - RNA, 19 nt, Homo sapiens
  misc_RNA (1)...(19): siRNA sense strand
gcauuuaugacccuuguga

SEQ ID NO: 1454674 - RNA, 19 nt, Homo sapiens
  misc_RNA (1)...(19): siRNA sense strand
gaagaggcgugggcucaag

SEQ ID NO: 1454675 - RNA, 19 nt, Homo sapiens
  misc_RNA (1)...(19): siRNA sense strand
agaagccacugaugcuauu

SEQ ID NO: 1454676 - RNA, 19 nt, Homo sapiens
  misc_RNA (1)...(19): siRNA sense strand
gaagucuugugucauugug

SEQ ID NO: 1454677 - RNA, 19 nt, Homo sapiens
  misc_RNA (1)...(19): siRNA sense strand
agaagaagaagauucagaa

SEQ ID NO: 1454678 - RNA, 19 nt, Homo sapiens
  misc_RNA (1)...(19): siRNA sense strand
aaagcauucuuccguuuau

SEQ ID NO: 1454679 - RNA, 19 nt, Homo sapiens
  misc_RNA (1)...(19): siRNA sense strand
cuuccaagaugcccaagaa

SEQ ID NO: 1454680 - RNA, 19 nt, Homo sapiens
  misc_RNA (1)...(19): siRNA sense strand
caagaaaccaaagaaugaa

SEQ ID NO: 1454681 - RNA, 19 nt, Homo sapiens
  misc_RNA (1)...(19): siRNA sense strand
guucagaucccaccaagca

SEQ ID NO: 1454682 - RNA, 19 nt, Homo sapiens
  misc_RNA (1)...(19): siRNA sense strand
gagcuggugcugcugugua

SEQ ID NO: 1454683 - RNA, 19 nt, Homo sapiens
  misc_RNA (1)...(19): siRNA sense strand
ggcgugggcucaaguacga

SEQ ID NO: 1454684 - RNA, 19 nt, Homo sapiens
  misc_RNA (1)...(19): siRNA sense strand
caaaagagccuccauuguc

SEQ ID NO: 1454685 - RNA, 19 nt, Homo sapiens
  misc_RNA (1)...(19): siRNA sense strand
cgacaagcgcuucgucaug

SEQ ID NO: 1454686 - RNA, 19 nt, Homo sapiens
  misc_RNA (1)...(19): siRNA sense strand
aguauuagcuggagaaacg

SEQ ID NO: 1454687 - RNA, 19 nt, Homo sapiens
  misc_RNA (1)...(19): siRNA sense strand
cagaagacaaguacgaaau

SEQ ID NO: 1454688 - RNA, 19 nt, Homo sapiens
  misc_RNA (1)...(19): siRNA sense strand
gaagaagaagauucagaag

SEQ ID NO: 1454689 - RNA, 19 nt, Homo sapiens
  misc_RNA (1)...(19): siRNA sense strand
gacagcaacgggaagauau

SEQ ID NO: 1454690 - RNA, 19 nt, Homo sapiens
  misc_RNA (1)...(19): siRNA sense strand
ugucgacgaugcugcgauu

SEQ ID NO: 1454691 - RNA, 19 nt, Homo sapiens
  misc_RNA (1)...(19): siRNA sense strand
gagcaggcagaguccgaua

SEQ ID NO: 1454692 - RNA, 19 nt, Homo sapiens
  misc_RNA (1)...(19): siRNA sense strand
cgacgaugcugcgauugug

SEQ ID NO: 1454693 - RNA, 19 nt, Homo sapiens
  misc_RNA (1)...(19): siRNA sense strand
ccaugucuguggagguuga

SEQ ID NO: 1454694 - RNA, 19 nt, Homo sapiens
  misc_RNA (1)...(19): siRNA sense strand
acgaaauacugcaaucugu

SEQ ID NO: 1454695 - RNA, 19 nt, Homo sapiens
  misc_RNA (1)...(19): siRNA sense strand
ccaccaagcaccaccuaug

SEQ ID NO: 1454696 - RNA, 19 nt, Homo sapiens
  misc_RNA (1)...(19): siRNA sense strand
agacagcaacgggaagaua

SEQ ID NO: 1454697 - RNA, 19 nt, Homo sapiens
  misc_RNA (1)...(19): siRNA sense strand
augcugcgauugugauaaa

SEQ ID NO: 1454698 - RNA, 19 nt, Homo sapiens
  misc_RNA (1)...(19): siRNA sense strand
gcaacgggaagauaucaca

SEQ ID NO: 1454699 - RNA, 19 nt, Homo sapiens
  misc_RNA (1)...(19): siRNA sense strand
uaccaugucuguggagguu

SEQ ID NO: 1454700 - RNA, 19 nt, Homo sapiens
  misc_RNA (1)...(19): siRNA sense strand
gagcuccugugugagaaau

SEQ ID NO: 1454701 - RNA, 19 nt, Homo sapiens
  misc_RNA (1)...(19): siRNA sense strand
aaugaugaccgccauguga

SEQ ID NO: 1454702 - RNA, 19 nt, Homo sapiens
  misc_RNA (1)...(19): siRNA sense strand
aagaagaagauucagaaga

SEQ ID NO: 1454703 - RNA, 19 nt, Homo sapiens
  misc_RNA (1)...(19): siRNA sense strand
gaaauggagaaaguauuag

SEQ ID NO: 1454704 - RNA, 19 nt, Homo sapiens
  misc_RNA (1)...(19): siRNA sense strand
ggcagaguccgauaacaug

SEQ ID NO: 1454705 - RNA, 19 nt, Homo sapiens
  misc_RNA (1)...(19): siRNA sense strand
cagaagacggagcacauga

SEQ ID NO: 1454706 - RNA, 19 nt, Homo sapiens
  misc_RNA (1)...(19): siRNA sense strand
ccagcuccauaaaguccua

SEQ ID NO: 1454707 - RNA, 19 nt, Homo sapiens
  misc_RNA (1)...(19): siRNA sense strand
agaugguucuggcauuuau

SEQ ID NO: 1454708 - RNA, 19 nt, Homo sapiens
  misc_RNA (1)...(19): siRNA sense strand
guaaggagaagcccacaac

SEQ ID NO: 1454709 - RNA, 19 nt, Homo sapiens
  misc_RNA (1)...(19): siRNA sense strand
cccaagaaaccaaagaaug

SEQ ID NO: 1454710 - RNA, 19 nt, Homo sapiens
  misc_RNA (1)...(19): siRNA sense strand
ggcuaugaaugcccugaug

SEQ ID NO: 1454711 - RNA, 19 nt, Homo sapiens
  misc_RNA (1)...(19): siRNA sense strand
agaagauucagaagaaaga

SEQ ID NO: 1454712 - RNA, 19 nt, Homo sapiens
  misc_RNA (1)...(19): siRNA sense strand
agaagaaauggagaaagua

SEQ ID NO: 1454713 - RNA, 19 nt, Homo sapiens
  misc_RNA (1)...(19): siRNA sense strand
gaaugaugaccgccaugug

SEQ ID NO: 1454714 - RNA, 19 nt, Homo sapiens
  misc_RNA (1)...(19): siRNA sense strand
uggacaagguggccgacaa

SEQ ID NO: 1454715 - RNA, 19 nt, Homo sapiens
  misc_RNA (1)...(19): siRNA sense strand
ggccuacgcugcucuugcu

SEQ ID NO: 1454716 - RNA, 19 nt, Homo sapiens
  misc_RNA (1)...(19): siRNA sense strand
ggccgauccugacaaagca

SEQ ID NO: 1454717 - RNA, 19 nt, Homo sapiens
  misc_RNA (1)...(19): siRNA sense strand
ucagagaagaaauggagaa

SEQ ID NO: 1454718 - RNA, 19 nt, Homo sapiens
  misc_RNA (1)...(19): siRNA sense strand
aaagaagccacugaugcua

SEQ ID NO: 1454719 - RNA, 19 nt, Homo sapiens
  misc_RNA (1)...(19): siRNA sense strand
gcaucuagacagacagcaa

SEQ ID NO: 1454720 - RNA, 19 nt, Homo sapiens
  misc_RNA (1)...(19): siRNA sense strand
cagagaagaaauggagaaa

SEQ ID NO: 1454721 - RNA, 19 nt, Homo sapiens
  misc_RNA (1)...(19): siRNA sense strand
ucggccagcuccauaaagu

SEQ ID NO: 1454722 - RNA, 19 nt, Homo sapiens
  misc_RNA (1)...(19): siRNA sense strand
ggacaagguggccgacaac

SEQ ID NO: 1454723 - RNA, 19 nt, Homo sapiens
  misc_RNA (1)...(19): siRNA sense strand
agaggacgacaguaaagaa

SEQ ID NO: 1454724 - RNA, 19 nt, Homo sapiens
  misc_RNA (1)...(19): siRNA sense strand
gaaguggauggacagaagu

SEQ ID NO: 1454725 - RNA, 19 nt, Homo sapiens
  misc_RNA (1)...(19): siRNA sense strand
gugcggccuuucccucaga

SEQ ID NO: 1454726 - RNA, 19 nt, Homo sapiens
  misc_RNA (1)...(19): siRNA sense strand
uauugggcaucuagacaga

SEQ ID NO: 1454727 - RNA, 19 nt, Homo sapiens
  misc_RNA (1)...(19): siRNA sense strand
gcuauugggcaucuagaca

SEQ ID NO: 1454728 - RNA, 19 nt, Homo sapiens
  misc_RNA (1)...(19): siRNA sense strand
caugugauggcaaagcauu

SEQ ID NO: 1454729 - RNA, 19 nt, Homo sapiens
  misc_RNA (1)...(19): siRNA sense strand
gaggacgacaguaaagaag

SEQ ID NO: 1454730 - RNA, 19 nt, Homo sapiens
  misc_RNA (1)...(19): siRNA sense strand
ggaggcaguccagaacaug

SEQ ID NO: 1454731 - RNA, 19 nt, Homo sapiens
  misc_RNA (1)...(19): siRNA sense strand
acagaagacaaguacgaaa

SEQ ID NO: 1454732 - RNA, 19 nt, Homo sapiens
  misc_RNA (1)...(19): siRNA sense strand
ccagaggacgacaguaaag

SEQ ID NO: 1454733 - RNA, 19 nt, Homo sapiens
  misc_RNA (1)...(19): siRNA sense strand
aagaagaagaagauucaga

SEQ ID NO: 1454734 - RNA, 19 nt, Homo sapiens
  misc_RNA (1)...(19): siRNA sense strand
aagcaccaccuaugccauu

SEQ ID NO: 1454735 - RNA, 19 nt, Homo sapiens
  misc_RNA (1)...(19): siRNA sense strand
aagaagccacugaugcuau

SEQ ID NO: 1454736 - RNA, 19 nt, Homo sapiens
  misc_RNA (1)...(19): siRNA sense strand
gaaggccuacgcugcucuu

SEQ ID NO: 1454737 - RNA, 19 nt, Homo sapiens
  misc_RNA (1)...(19): siRNA sense strand
cgucauggaggucgaagug

SEQ ID NO: 1454738 - RNA, 19 nt, Homo sapiens
  misc_RNA (1)...(19): siRNA sense strand
gcccaagaaaccaaagaau

SEQ ID NO: 1454739 - RNA, 19 nt, Homo sapiens
  misc_RNA (1)...(19): siRNA sense strand
gcaggcagaguccgauaac

SEQ ID NO: 1454740 - RNA, 19 nt, Homo sapiens
  misc_RNA (1)...(19): siRNA sense strand
gcucuugcugcccuagaaa

SEQ ID NO: 1454741 - RNA, 19 nt, Homo sapiens
  misc_RNA (1)...(19): siRNA sense strand
cggcaagaacccagucaug

SEQ ID NO: 1454742 - RNA, 19 nt, Homo sapiens
  misc_RNA (1)...(19): siRNA sense strand
cagaggacgacaguaaaga

SEQ ID NO: 1454743 - RNA, 19 nt, Homo sapiens
  misc_RNA (1)...(19): siRNA sense strand
cucucgagcuccuguguga

SEQ ID NO: 1454744 - RNA, 19 nt, Homo sapiens
  misc_RNA (1)...(19): siRNA sense strand
uggcauuuaugacccuugu

SEQ ID NO: 1454745 - RNA, 19 nt, Homo sapiens
  misc_RNA (1)...(19): siRNA sense strand
gacaaagcacggcaagaac

SEQ ID NO: 1454746 - RNA, 19 nt, Homo sapiens
  misc_RNA (1)...(19): siRNA sense strand
gacgaugcugcgauuguga

SEQ ID NO: 1454747 - RNA, 19 nt, Homo sapiens
  misc_RNA (1)...(19): siRNA sense strand
gagaccggcugcaguauuu

SEQ ID NO: 1454748 - RNA, 19 nt, Homo sapiens
  misc_RNA (1)...(19): siRNA sense strand
gcaagaagcgcugcccuua

SEQ ID NO: 1454749 - RNA, 19 nt, Homo sapiens
  misc_RNA (1)...(19): siRNA sense strand
caacguguauaucaacaaa

SEQ ID NO: 1454750 - RNA, 19 nt, Homo sapiens
  misc_RNA (1)...(19): siRNA sense strand
aagaagcgcugcccuuauu

SEQ ID NO: 1454751 - RNA, 19 nt, Homo sapiens
  misc_RNA (1)...(19): siRNA sense strand
gcgcugcccuuauucgaaa

SEQ ID NO: 1454752 - RNA, 19 nt, Homo sapiens
  misc_RNA (1)...(19): siRNA sense strand
gggaaauccucugcuguaa

SEQ ID NO: 1454753 - RNA, 19 nt, Homo sapiens
  misc_RNA (1)...(19): siRNA sense strand
gaacagaaggaugaaagaa

SEQ ID NO: 1454754 - RNA, 19 nt, Homo sapiens
  misc_RNA (1)...(19): siRNA sense strand
ucaccgagauccucaugaa

SEQ ID NO: 1454755 - RNA, 19 nt, Homo sapiens
  misc_RNA (1)...(19): siRNA sense strand
caguugcacuuacuacaug

SEQ ID NO: 1454756 - RNA, 19 nt, Homo sapiens
  misc_RNA (1)...(19): siRNA sense strand
gaaccugacggaccgacaa

SEQ ID NO: 1454757 - RNA, 19 nt, Homo sapiens
  misc_RNA (1)...(19): siRNA sense strand
cgggaaauccucugcugua

SEQ ID NO: 1454758 - RNA, 19 nt, Homo sapiens
  misc_RNA (1)...(19): siRNA sense strand
caagaagcgcugcccuuau

SEQ ID NO: 1454759 - RNA, 19 nt, Homo sapiens
  misc_RNA (1)...(19): siRNA sense strand
acagaaggaugaaagaaaa

SEQ ID NO: 1454760 - RNA, 19 nt, Homo sapiens
  misc_RNA (1)...(19): siRNA sense strand
gaacagcguccugccucaa

SEQ ID NO: 1454761 - RNA, 19 nt, Homo sapiens
  misc_RNA (1)...(19): siRNA sense strand
aaaagaaacugagcagaga

SEQ ID NO: 1454762 - RNA, 19 nt, Homo sapiens
  misc_RNA (1)...(19): siRNA sense strand
uuucagaacagaaggauga

SEQ ID NO: 1454763 - RNA, 19 nt, Homo sapiens
  misc_RNA (1)...(19): siRNA sense strand
acguguauaucaacaaaga

SEQ ID NO: 1454764 - RNA, 19 nt, Homo sapiens
  misc_RNA (1)...(19): siRNA sense strand
cagcuacuccuccugcuau

SEQ ID NO: 1454765 - RNA, 19 nt, Homo sapiens
  misc_RNA (1)...(19): siRNA sense strand
aacagaaggaugaaagaaa

SEQ ID NO: 1454766 - RNA, 19 nt, Homo sapiens
  misc_RNA (1)...(19): siRNA sense strand
cagaacagaaggaugaaag

SEQ ID NO: 1454767 - RNA, 19 nt, Homo sapiens
  misc_RNA (1)...(19): siRNA sense strand
cuuacuacaugcccgaguu

SEQ ID NO: 1454768 - RNA, 19 nt, Homo sapiens
  misc_RNA (1)...(19): siRNA sense strand
acuccucagucaacaagaa

SEQ ID NO: 1454769 - RNA, 19 nt, Homo sapiens
  misc_RNA (1)...(19): siRNA sense strand
aaauuugguuucagaacag

SEQ ID NO: 1454770 - RNA, 19 nt, Homo sapiens
  misc_RNA (1)...(19): siRNA sense strand
guguauaucaacaaagaga

SEQ ID NO: 1454771 - RNA, 19 nt, Homo sapiens
  misc_RNA (1)...(19): siRNA sense strand
cugaggaggagaacacaaa

SEQ ID NO: 1454772 - RNA, 19 nt, Homo sapiens
  misc_RNA (1)...(19): siRNA sense strand
ugacggaccgacaagugaa

SEQ ID NO: 1454773 - RNA, 19 nt, Homo sapiens
  misc_RNA (1)...(19): siRNA sense strand
gaggaggagaacacaaauc

SEQ ID NO: 1454774 - RNA, 19 nt, Homo sapiens
  misc_RNA (1)...(19): siRNA sense strand
ccaguugcacuuacuacau

SEQ ID NO: 1454775 - RNA, 19 nt, Homo sapiens
  misc_RNA (1)...(19): siRNA sense strand
cucaagccuucgaccguuu

SEQ ID NO: 1454776 - RNA, 19 nt, Homo sapiens
  misc_RNA (1)...(19): siRNA sense strand
guauaucaacaaagagaag

SEQ ID NO: 1454777 - RNA, 19 nt, Homo sapiens
  misc_RNA (1)...(19): siRNA sense strand
ucagaaggcucuuuggaua

SEQ ID NO: 1454778 - RNA, 19 nt, Homo sapiens
  misc_RNA (1)...(19): siRNA sense strand
gggcaaaucucacacuguu

SEQ ID NO: 1454779 - RNA, 19 nt, Homo sapiens
  misc_RNA (1)...(19): siRNA sense strand
guucauggauguuaauuga

SEQ ID NO: 1454780 - RNA, 19 nt, Homo sapiens
  misc_RNA (1)...(19): siRNA sense strand
gaacaagguuggccauuuu

SEQ ID NO: 1454781 - RNA, 19 nt, Homo sapiens
  misc_RNA (1)...(19): siRNA sense strand
ugaagaagcguuacuauga

SEQ ID NO: 1454782 - RNA, 19 nt, Homo sapiens
  misc_RNA (1)...(19): siRNA sense strand
gaugguggcugaugucuuc

SEQ ID NO: 1454783 - RNA, 19 nt, Homo sapiens
  misc_RNA (1)...(19): siRNA sense strand
caacaaugccacacucuuu

SEQ ID NO: 1454784 - RNA, 19 nt, Homo sapiens
  misc_RNA (1)...(19): siRNA sense strand
gaugauaucuucgucuaug

SEQ ID NO: 1454785 - RNA, 19 nt, Homo sapiens
  misc_RNA (1)...(19): siRNA sense strand
gagaagcacugguauaagc

SEQ ID NO: 1454786 - RNA, 19 nt, Homo sapiens
  misc_RNA (1)...(19): siRNA sense strand
gaacucagaaggcucuuug

SEQ ID NO: 1454787 - RNA, 19 nt, Homo sapiens
  misc_RNA (1)...(19): siRNA sense strand
gcucugaguucauggaugu

SEQ ID NO: 1454788 - RNA, 19 nt, Homo sapiens
  misc_RNA (1)...(19): siRNA sense strand
auccggagcuguacaaaua

SEQ ID NO: 1454789 - RNA, 19 nt, Homo sapiens
  misc_RNA (1)...(19): siRNA sense strand
ucauagagcugcccaacau

SEQ ID NO: 1454790 - RNA, 19 nt, Homo sapiens
  misc_RNA (1)...(19): siRNA sense strand
gaagaagcguuacuaugac

SEQ ID NO: 1454791 - RNA, 19 nt, Homo sapiens
  misc_RNA (1)...(19): siRNA sense strand
ggaccgugaugauaucuuc

SEQ ID NO: 1454792 - RNA, 19 nt, Homo sapiens
  misc_RNA (1)...(19): siRNA sense strand
gcaaaucucacacuguuca

SEQ ID NO: 1454793 - RNA, 19 nt, Homo sapiens
  misc_RNA (1)...(19): siRNA sense strand
uguauaacguccugaugua

SEQ ID NO: 1454794 - RNA, 19 nt, Homo sapiens
  misc_RNA (1)...(19): siRNA sense strand
ggcaacacgugcuucauga

SEQ ID NO: 1454795 - RNA, 19 nt, Homo sapiens
  misc_RNA (1)...(19): siRNA sense strand
gugaugauaucuucgucua

SEQ ID NO: 1454796 - RNA, 19 nt, Homo sapiens
  misc_RNA (1)...(19): siRNA sense strand
ugccacagcucaccgagua

SEQ ID NO: 1454797 - RNA, 19 nt, Homo sapiens
  misc_RNA (1)...(19): siRNA sense strand
ggacuucucugaguuuguc

SEQ ID NO: 1454798 - RNA, 19 nt, Homo sapiens
  misc_RNA (1)...(19): siRNA sense strand
agaacaagguuggccauuu

SEQ ID NO: 1454799 - RNA, 19 nt, Homo sapiens
  misc_RNA (1)...(19): siRNA sense strand
ggaagacacucggcuuugg

SEQ ID NO: 1454800 - RNA, 19 nt, Homo sapiens
  misc_RNA (1)...(19): siRNA sense strand
gcggaacgauucugugauc

SEQ ID NO: 1454801 - RNA, 19 nt, Homo sapiens
  misc_RNA (1)...(19): siRNA sense strand
gcgcacagcugcaugucau

SEQ ID NO: 1454802 - RNA, 19 nt, Homo sapiens
  misc_RNA (1)...(19): siRNA sense strand
cucaggagcugcugucauu

SEQ ID NO: 1454803 - RNA, 19 nt, Homo sapiens
  misc_RNA (1)...(19): siRNA sense strand
gaagaugacgaggaggaua

SEQ ID NO: 1454804 - RNA, 19 nt, Homo sapiens
  misc_RNA (1)...(19): siRNA sense strand
uuaaucgggugaagaagaa

SEQ ID NO: 1454805 - RNA, 19 nt, Homo sapiens
  misc_RNA (1)...(19): siRNA sense strand
ugaagaagaaggaguaugu

SEQ ID NO: 1454806 - RNA, 19 nt, Homo sapiens
  misc_RNA (1)...(19): siRNA sense strand
cagccuauguccucuucua

SEQ ID NO: 1454807 - RNA, 19 nt, Homo sapiens
  misc_RNA (1)...(19): siRNA sense strand
agaaucagaucgaguccaa

SEQ ID NO: 1454808 - RNA, 19 nt, Homo sapiens
  misc_RNA (1)...(19): siRNA sense strand
ggacacuacacaacauuug

SEQ ID NO: 1454809 - RNA, 19 nt, Homo sapiens
  misc_RNA (1)...(19): siRNA sense strand
gaccuggacuucucugagu

SEQ ID NO: 1454810 - RNA, 19 nt, Homo sapiens
  misc_RNA (1)...(19): siRNA sense strand
ggucuuggaggucuucuuu

SEQ ID NO: 1454811 - RNA, 19 nt, Homo sapiens
  misc_RNA (1)...(19): siRNA sense strand
gcacuacuuugaugacaac

SEQ ID NO: 1454812 - RNA, 19 nt, Homo sapiens
  misc_RNA (1)...(19): siRNA sense strand
ucagucaccgcuucuauaa

SEQ ID NO: 1454813 - RNA, 19 nt, Homo sapiens
  misc_RNA (1)...(19): siRNA sense strand
acaacaacaugucggaaga

SEQ ID NO: 1454814 - RNA, 19 nt, Homo sapiens
  misc_RNA (1)...(19): siRNA sense strand
gcacaggaggcauggcaaa

SEQ ID NO: 1454815 - RNA, 19 nt, Homo sapiens
  misc_RNA (1)...(19): siRNA sense strand
caacaugucggaagaggau

SEQ ID NO: 1454816 - RNA, 19 nt, Homo sapiens
  misc_RNA (1)...(19): siRNA sense strand
gauggacacuacacaacau

SEQ ID NO: 1454817 - RNA, 19 nt, Homo sapiens
  misc_RNA (1)...(19): siRNA sense strand
gcguuacuaugacgaggua

SEQ ID NO: 1454818 - RNA, 19 nt, Homo sapiens
  misc_RNA (1)...(19): siRNA sense strand
gggaugagaaagaagauga

SEQ ID NO: 1454819 - RNA, 19 nt, Homo sapiens
  misc_RNA (1)...(19): siRNA sense strand
uccagaaggucgaagugua

SEQ ID NO: 1454820 - RNA, 19 nt, Homo sapiens
  misc_RNA (1)...(19): siRNA sense strand
ggaugaugguggcugaugu

SEQ ID NO: 1454821 - RNA, 19 nt, Homo sapiens
  misc_RNA (1)...(19): siRNA sense strand
cgaaguguacccaguagaa

SEQ ID NO: 1454822 - RNA, 19 nt, Homo sapiens
  misc_RNA (1)...(19): siRNA sense strand
ggucgaaguguacccagua

SEQ ID NO: 1454823 - RNA, 19 nt, Homo sapiens
  misc_RNA (1)...(19): siRNA sense strand
ggaaggcgaggauuaugug

SEQ ID NO: 1454824 - RNA, 19 nt, Homo sapiens
  misc_RNA (1)...(19): siRNA sense strand
gaugaagaagcguuacuau

SEQ ID NO: 1454825 - RNA, 19 nt, Homo sapiens
  misc_RNA (1)...(19): siRNA sense strand
uggagaagcacugguauaa

SEQ ID NO: 1454826 - RNA, 19 nt, Homo sapiens
  misc_RNA (1)...(19): siRNA sense strand
ugaccaaacccaacucaga

SEQ ID NO: 1454827 - RNA, 19 nt, Homo sapiens
  misc_RNA (1)...(19): siRNA sense strand
gcugguuccuuguggagaa

SEQ ID NO: 1454828 - RNA, 19 nt, Homo sapiens
  misc_RNA (1)...(19): siRNA sense strand
ggaccagaauccggaagug

SEQ ID NO: 1454829 - RNA, 19 nt, Homo sapiens
  misc_RNA (1)...(19): siRNA sense strand
aaacccaacucagaugaug

SEQ ID NO: 1454830 - RNA, 19 nt, Homo sapiens
  misc_RNA (1)...(19): siRNA sense strand
gaccaaacccaacucagau

SEQ ID NO: 1454831 - RNA, 19 nt, Homo sapiens
  misc_RNA (1)...(19): siRNA sense strand
gggagggccuguauaacgu

SEQ ID NO: 1454832 - RNA, 19 nt, Homo sapiens
  misc_RNA (1)...(19): siRNA sense strand
ucuuggaggucuucuuuau

SEQ ID NO: 1454833 - RNA, 19 nt, Homo sapiens
  misc_RNA (1)...(19): siRNA sense strand
ucggguacgugaugaagaa

SEQ ID NO: 1454834 - RNA, 19 nt, Homo sapiens
  misc_RNA (1)...(19): siRNA sense strand
gggcaacacgugcuucaug

SEQ ID NO: 1454835 - RNA, 19 nt, Homo sapiens
  misc_RNA (1)...(19): siRNA sense strand
gcccagccguacauugcua

SEQ ID NO: 1454836 - RNA, 19 nt, Homo sapiens
  misc_RNA (1)...(19): siRNA sense strand
ugccacauguguucaagaa

SEQ ID NO: 1454837 - RNA, 19 nt, Homo sapiens
  misc_RNA (1)...(19): siRNA sense strand
ccgaguacuuccucaacaa

SEQ ID NO: 1454838 - RNA, 19 nt, Homo sapiens
  misc_RNA (1)...(19): siRNA sense strand
uaaacuggcgccucaagga

SEQ ID NO: 1454839 - RNA, 19 nt, Homo sapiens
  misc_RNA (1)...(19): siRNA sense strand
ccacccagcucugaguuca

SEQ ID NO: 1454840 - RNA, 19 nt, Homo sapiens
  misc_RNA (1)...(19): siRNA sense strand
uuggauagguuguaugaca

SEQ ID NO: 1454841 - RNA, 19 nt, Homo sapiens
  misc_RNA (1)...(19): siRNA sense strand
uggagacccuggagaagga

SEQ ID NO: 1454842 - RNA, 19 nt, Homo sapiens
  misc_RNA (1)...(19): siRNA sense strand
ggagugcauugagcucuuc

SEQ ID NO: 1454843 - RNA, 19 nt, Homo sapiens
  misc_RNA (1)...(19): siRNA sense strand
gggugaagaagaaggagua

SEQ ID NO: 1454844 - RNA, 19 nt, Homo sapiens
  misc_RNA (1)...(19): siRNA sense strand
ccugggagggccuguauaa

SEQ ID NO: 1454845 - RNA, 19 nt, Homo sapiens
  misc_RNA (1)...(19): siRNA sense strand
cagagaugaagaagcguua

SEQ ID NO: 1454846 - RNA, 19 nt, Homo sapiens
  misc_RNA (1)...(19): siRNA sense strand
cauggagacccgcaagaaa

SEQ ID NO: 1454847 - RNA, 19 nt, Homo sapiens
  misc_RNA (1)...(19): siRNA sense strand
ggacacccucguggaguuu

SEQ ID NO: 1454848 - RNA, 19 nt, Homo sapiens
  misc_RNA (1)...(19): siRNA sense strand
ccaaacccaacucagauga

SEQ ID NO: 1454849 - RNA, 19 nt, Homo sapiens
  misc_RNA (1)...(19): siRNA sense strand
gaagaagaaggaguaugug

SEQ ID NO: 1454850 - RNA, 19 nt, Homo sapiens
  misc_RNA (1)...(19): siRNA sense strand
gcaacacgugcuucaugaa

SEQ ID NO: 1454851 - RNA, 19 nt, Homo sapiens
  misc_RNA (1)...(19): siRNA sense strand
cagcugguauggucuagag

SEQ ID NO: 1454852 - RNA, 19 nt, Homo sapiens
  misc_RNA (1)...(19): siRNA sense strand
ucaaugagaaucagaucga

SEQ ID NO: 1454853 - RNA, 19 nt, Homo sapiens
  misc_RNA (1)...(19): siRNA sense strand
guggagaagcacugguaua

SEQ ID NO: 1454854 - RNA, 19 nt, Homo sapiens
  misc_RNA (1)...(19): siRNA sense strand
caucgugguuccugucuac

SEQ ID NO: 1454855 - RNA, 19 nt, Homo sapiens
  misc_RNA (1)...(19): siRNA sense strand
caggaagacacucggcuuu

SEQ ID NO: 1454856 - RNA, 19 nt, Homo sapiens
  misc_RNA (1)...(19): siRNA sense strand
acacacacaucacgguucu

SEQ ID NO: 1454857 - RNA, 19 nt, Homo sapiens
  misc_RNA (1)...(19): siRNA sense strand
aagaugacgaggaggauaa

SEQ ID NO: 1454858 - RNA, 19 nt, Homo sapiens
  misc_RNA (1)...(19): siRNA sense strand
augcagaccuggugaagca

SEQ ID NO: 1454859 - RNA, 19 nt, Homo sapiens
  misc_RNA (1)...(19): siRNA sense strand
cacaaacggcggaacgauu

SEQ ID NO: 1454860 - RNA, 19 nt, Homo sapiens
  misc_RNA (1)...(19): siRNA sense strand
ggcacuacuuugaugacaa

SEQ ID NO: 1454861 - RNA, 19 nt, Homo sapiens
  misc_RNA (1)...(19): siRNA sense strand
ggugucaggucgcauugag

SEQ ID NO: 1454862 - RNA, 19 nt, Homo sapiens
  misc_RNA (1)...(19): siRNA sense strand
acaaacggcggaacgauuc

SEQ ID NO: 1454863 - RNA, 19 nt, Homo sapiens
  misc_RNA (1)...(19): siRNA sense strand
guguggcucuguccaaaca

SEQ ID NO: 1454864 - RNA, 19 nt, Homo sapiens
  misc_RNA (1)...(19): siRNA sense strand
gguggaaggcgaggauuau

SEQ ID NO: 1454865 - RNA, 19 nt, Homo sapiens
  misc_RNA (1)...(19): siRNA sense strand
gcucuggagucacgaacag

SEQ ID NO: 1454866 - RNA, 19 nt, Homo sapiens
  misc_RNA (1)...(19): siRNA sense strand
ugacgaggaggauaaagau

SEQ ID NO: 1454867 - RNA, 19 nt, Homo sapiens
  misc_RNA (1)...(19): siRNA sense strand
gauaaacuggcgccucaag

SEQ ID NO: 1454868 - RNA, 19 nt, Homo sapiens
  misc_RNA (1)...(19): siRNA sense strand
ggucagcugguauggucua

SEQ ID NO: 1454869 - RNA, 19 nt, Homo sapiens
  misc_RNA (1)...(19): siRNA sense strand
cugaguucauggauguuaa

SEQ ID NO: 1454870 - RNA, 19 nt, Homo sapiens
  misc_RNA (1)...(19): siRNA sense strand
agucgaauccggagcugua

SEQ ID NO: 1454871 - RNA, 19 nt, Homo sapiens
  misc_RNA (1)...(19): siRNA sense strand
cgaaagcugguuccuugug

SEQ ID NO: 1454872 - RNA, 19 nt, Homo sapiens
  misc_RNA (1)...(19): siRNA sense strand
ggcagccuauguccucuuc

SEQ ID NO: 1454873 - RNA, 19 nt, Homo sapiens
  misc_RNA (1)...(19): siRNA sense strand
ccggagcuguacaaauaug

SEQ ID NO: 1454874 - RNA, 19 nt, Homo sapiens
  misc_RNA (1)...(19): siRNA sense strand
gcccguuccuccuggacaa

SEQ ID NO: 1454875 - RNA, 19 nt, Homo sapiens
  misc_RNA (1)...(19): siRNA sense strand
acgaggaggauaaagauga

SEQ ID NO: 1454876 - RNA, 19 nt, Homo sapiens
  misc_RNA (1)...(19): siRNA sense strand
cuacaacaacuccuacuac

SEQ ID NO: 1454877 - RNA, 19 nt, Homo sapiens
  misc_RNA (1)...(19): siRNA sense strand
ggcagaagcucucaaguuc

SEQ ID NO: 1454878 - RNA, 19 nt, Homo sapiens
  misc_RNA (1)...(19): siRNA sense strand
uacaaggccugcagaauuu

SEQ ID NO: 1454879 - RNA, 19 nt, Homo sapiens
  misc_RNA (1)...(19): siRNA sense strand
gcaacagccucaccaagga

SEQ ID NO: 1454880 - RNA, 19 nt, Homo sapiens
  misc_RNA (1)...(19): siRNA sense strand
caaauaccuucaacugaga

SEQ ID NO: 1454881 - RNA, 19 nt, Homo sapiens
  misc_RNA (1)...(19): siRNA sense strand
cagagaagccucaccauug

SEQ ID NO: 1454882 - RNA, 19 nt, Homo sapiens
  misc_RNA (1)...(19): siRNA sense strand
agagaagccucaccauuga

SEQ ID NO: 1454883 - RNA, 19 nt, Homo sapiens
  misc_RNA (1)...(19): siRNA sense strand
cuacaaggccugcagaauu

SEQ ID NO: 1454884 - RNA, 19 nt, Homo sapiens
  misc_RNA (1)...(19): siRNA sense strand
augagcagcuggccaaaua

SEQ ID NO: 1454885 - RNA, 19 nt, Homo sapiens
  misc_RNA (1)...(19): siRNA sense strand
accaaggacuccaugaaua

SEQ ID NO: 1454886 - RNA, 19 nt, Homo sapiens
  misc_RNA (1)...(19): siRNA sense strand
ucacagagcucagcaacag

SEQ ID NO: 1454887 - RNA, 19 nt, Homo sapiens
  misc_RNA (1)...(19): siRNA sense strand
gcuguaacuucuucguuga

SEQ ID NO: 1454888 - RNA, 19 nt, Homo sapiens
  misc_RNA (1)...(19): siRNA sense strand
ccaaggacuccaugaauau

SEQ ID NO: 1454889 - RNA, 19 nt, Homo sapiens
  misc_RNA (1)...(19): siRNA sense strand
cagaagcucucaaguucau

SEQ ID NO: 1454890 - RNA, 19 nt, Homo sapiens
  misc_RNA (1)...(19): siRNA sense strand
gauuugggcuguaacuucu

SEQ ID NO: 1454891 - RNA, 19 nt, Homo sapiens
  misc_RNA (1)...(19): siRNA sense strand
gaagcucucaaguucauug

SEQ ID NO: 1454892 - RNA, 19 nt, Homo sapiens
  misc_RNA (1)...(19): siRNA sense strand
ccagagaagccucaccauu

SEQ ID NO: 1454893 - RNA, 19 nt, Homo sapiens
  misc_RNA (1)...(19): siRNA sense strand
caaagcccauauccacaug

SEQ ID NO: 1454894 - RNA, 19 nt, Homo sapiens
  misc_RNA (1)...(19): siRNA sense strand
ggauuugggcuguaacuuc

SEQ ID NO: 1454895 - RNA, 19 nt, Homo sapiens
  misc_RNA (1)...(19): siRNA sense strand
gccaaauaccuucaacuga

SEQ ID NO: 1454896 - RNA, 19 nt, Homo sapiens
  misc_RNA (1)...(19): siRNA sense strand
uauauaugcagguggauuu

SEQ ID NO: 1454897 - RNA, 19 nt, Homo sapiens
  misc_RNA (1)...(19): siRNA sense strand
cagcgggacuugcgaaagg

SEQ ID NO: 1454898 - RNA, 19 nt, Homo sapiens
  misc_RNA (1)...(19): siRNA sense strand
cugcagaauuucccagaga

SEQ ID NO: 1454899 - RNA, 19 nt, Homo sapiens
  misc_RNA (1)...(19): siRNA sense strand
uggcagaagcucucaaguu

SEQ ID NO: 1454900 - RNA, 19 nt, Homo sapiens
  misc_RNA (1)...(19): siRNA sense strand
agaaagugcugcgcuacga

SEQ ID NO: 1454901 - RNA, 19 nt, Homo sapiens
  misc_RNA (1)...(19): siRNA sense strand
caaguucauugaucguaag

SEQ ID NO: 1454902 - RNA, 19 nt, Homo sapiens
  misc_RNA (1)...(19): siRNA sense strand
ggccaaauaccuucaacug

SEQ ID NO: 1454903 - RNA, 19 nt, Homo sapiens
  misc_RNA (1)...(19): siRNA sense strand
gcagaagcucucaaguuca

SEQ ID NO: 1454904 - RNA, 19 nt, Homo sapiens
  misc_RNA (1)...(19): siRNA sense strand
acacaguggucccagauac

SEQ ID NO: 1454905 - RNA, 19 nt, Homo sapiens
  misc_RNA (1)...(19): siRNA sense strand
gcagcuggccaaauaccuu

SEQ ID NO: 1454906 - RNA, 19 nt, Homo sapiens
  misc_RNA (1)...(19): siRNA sense strand
ggaguugacacuggcagaa

SEQ ID NO: 1454907 - RNA, 19 nt, Homo sapiens
  misc_RNA (1)...(19): siRNA sense strand
caccaaggacuccaugaau

SEQ ID NO: 1454908 - RNA, 19 nt, Homo sapiens
  misc_RNA (1)...(19): siRNA sense strand
ucaccaaggacuccaugaa

SEQ ID NO: 1454909 - RNA, 19 nt, Homo sapiens
  misc_RNA (1)...(19): siRNA sense strand
gcuggaccaucgagacaag

SEQ ID NO: 1454910 - RNA, 19 nt, Homo sapiens
  misc_RNA (1)...(19): siRNA sense strand
ggaccaucgagacaaggua

SEQ ID NO: 1454911 - RNA, 19 nt, Homo sapiens
  misc_RNA (1)...(19): siRNA sense strand
gacacaguggucccagaua

SEQ ID NO: 1454912 - RNA, 19 nt, Homo sapiens
  misc_RNA (1)...(19): siRNA sense strand
gaccaucgagacaagguau

SEQ ID NO: 1454913 - RNA, 19 nt, Homo sapiens
  misc_RNA (1)...(19): siRNA sense strand
ggacuccaugaauaucaaa

SEQ ID NO: 1454914 - RNA, 19 nt, Homo sapiens
  misc_RNA (1)...(19): siRNA sense strand
gagcgacuccaggaagcua

SEQ ID NO: 1454915 - RNA, 19 nt, Homo sapiens
  misc_RNA (1)...(19): siRNA sense strand
cuacgagaccuucaucagu

SEQ ID NO: 1454916 - RNA, 19 nt, Homo sapiens
  misc_RNA (1)...(19): siRNA sense strand
uaacuucuucguugacaca

SEQ ID NO: 1454917 - RNA, 19 nt, Homo sapiens
  misc_RNA (1)...(19): siRNA sense strand
ucaaagcccauauccacau

SEQ ID NO: 1454918 - RNA, 19 nt, Homo sapiens
  misc_RNA (1)...(19): siRNA sense strand
ugcagaauuucccagagaa

SEQ ID NO: 1454919 - RNA, 19 nt, Homo sapiens
  misc_RNA (1)...(19): siRNA sense strand
auacuucacgcaucuaugu

SEQ ID NO: 1454920 - RNA, 19 nt, Homo sapiens
  misc_RNA (1)...(19): siRNA sense strand
gggcuuagagaacuacaag

SEQ ID NO: 1454921 - RNA, 19 nt, Homo sapiens
  misc_RNA (1)...(19): siRNA sense strand
aagcccauauccacauguu

SEQ ID NO: 1454922 - RNA, 19 nt, Homo sapiens
  misc_RNA (1)...(19): siRNA sense strand
acgagaccuucaucaguga

SEQ ID NO: 1454923 - RNA, 19 nt, Homo sapiens
  misc_RNA (1)...(19): siRNA sense strand
gggcuguaacuucuucguu

SEQ ID NO: 1454924 - RNA, 19 nt, Homo sapiens
  misc_RNA (1)...(19): siRNA sense strand
uaccuucaacugagaaaug

SEQ ID NO: 1454925 - RNA, 19 nt, Homo sapiens
  misc_RNA (1)...(19): siRNA sense strand
gcagaauuucccagagaag

SEQ ID NO: 1454926 - RNA, 19 nt, Homo sapiens
  misc_RNA (1)...(19): siRNA sense strand
ggcagaagcucucaaguuc

SEQ ID NO: 1454927 - RNA, 19 nt, Homo sapiens
  misc_RNA (1)...(19): siRNA sense strand
uacaaggccugcagaauuu

SEQ ID NO: 1454928 - RNA, 19 nt, Homo sapiens
  misc_RNA (1)...(19): siRNA sense strand
gcaacagccucaccaagga

SEQ ID NO: 1454929 - RNA, 19 nt, Homo sapiens
  misc_RNA (1)...(19): siRNA sense strand
caaauaccuucaacugaga

SEQ ID NO: 1454930 - RNA, 19 nt, Homo sapiens
  misc_RNA (1)...(19): siRNA sense strand
cagagaagccucaccauug

SEQ ID NO: 1454931 - RNA, 19 nt, Homo sapiens
  misc_RNA (1)...(19): siRNA sense strand
agagaagccucaccauuga

SEQ ID NO: 1454932 - RNA, 19 nt, Homo sapiens
  misc_RNA (1)...(19): siRNA sense strand
cuacaaggccugcagaauu

SEQ ID NO: 1454933 - RNA, 19 nt, Homo sapiens
  misc_RNA (1)...(19): siRNA sense strand
augagcagcuggccaaaua

SEQ ID NO: 1454934 - RNA, 19 nt, Homo sapiens
  misc_RNA (1)...(19): siRNA sense strand
accaaggacuccaugaaua

SEQ ID NO: 1454935 - RNA, 19 nt, Homo sapiens
  misc_RNA (1)...(19): siRNA sense strand
ucacagagcucagcaacag

SEQ ID NO: 1454936 - RNA, 19 nt, Homo sapiens
  misc_RNA (1)...(19): siRNA sense strand
gcuguaacuucuucguuga

SEQ ID NO: 1454937 - RNA, 19 nt, Homo sapiens
  misc_RNA (1)...(19): siRNA sense strand
ccaaggacuccaugaauau

SEQ ID NO: 1454938 - RNA, 19 nt, Homo sapiens
  misc_RNA (1)...(19): siRNA sense strand
cagaagcucucaaguucau

SEQ ID NO: 1454939 - RNA, 19 nt, Homo sapiens
  misc_RNA (1)...(19): siRNA sense strand
gauuugggcuguaacuucu

SEQ ID NO: 1454940 - RNA, 19 nt, Homo sapiens
  misc_RNA (1)...(19): siRNA sense strand
gaagcucucaaguucauug

SEQ ID NO: 1454941 - RNA, 19 nt, Homo sapiens
  misc_RNA (1)...(19): siRNA sense strand
ccagagaagccucaccauu

SEQ ID NO: 1454942 - RNA, 19 nt, Homo sapiens
  misc_RNA (1)...(19): siRNA sense strand
caaagcccauauccacaug

SEQ ID NO: 1454943 - RNA, 19 nt, Homo sapiens
  misc_RNA (1)...(19): siRNA sense strand
ggauuugggcuguaacuuc

SEQ ID NO: 1454944 - RNA, 19 nt, Homo sapiens
  misc_RNA (1)...(19): siRNA sense strand
gccaaauaccuucaacuga

SEQ ID NO: 1454945 - RNA, 19 nt, Homo sapiens
  misc_RNA (1)...(19): siRNA sense strand
uauauaugcagguggauuu

SEQ ID NO: 1454946 - RNA, 19 nt, Homo sapiens
  misc_RNA (1)...(19): siRNA sense strand
cagcgggacuugcgaaagg

SEQ ID NO: 1454947 - RNA, 19 nt, Homo sapiens
  misc_RNA (1)...(19): siRNA sense strand
cugcagaauuucccagaga

SEQ ID NO: 1454948 - RNA, 19 nt, Homo sapiens
  misc_RNA (1)...(19): siRNA sense strand
uggcagaagcucucaaguu

SEQ ID NO: 1454949 - RNA, 19 nt, Homo sapiens
  misc_RNA (1)...(19): siRNA sense strand
agaaagugcugcgcuacga

SEQ ID NO: 1454950 - RNA, 19 nt, Homo sapiens
  misc_RNA (1)...(19): siRNA sense strand
caaguucauugaucguaag

SEQ ID NO: 1454951 - RNA, 19 nt, Homo sapiens
  misc_RNA (1)...(19): siRNA sense strand
ggccaaauaccuucaacug

SEQ ID NO: 1454952 - RNA, 19 nt, Homo sapiens
  misc_RNA (1)...(19): siRNA sense strand
gcagaagcucucaaguuca

SEQ ID NO: 1454953 - RNA, 19 nt, Homo sapiens
  misc_RNA (1)...(19): siRNA sense strand
acacaguggucccagauac

SEQ ID NO: 1454954 - RNA, 19 nt, Homo sapiens
  misc_RNA (1)...(19): siRNA sense strand
gcagcuggccaaauaccuu

SEQ ID NO: 1454955 - RNA, 19 nt, Homo sapiens
  misc_RNA (1)...(19): siRNA sense strand
ggaguugacacuggcagaa

SEQ ID NO: 1454956 - RNA, 19 nt, Homo sapiens
  misc_RNA (1)...(19): siRNA sense strand
caccaaggacuccaugaau

SEQ ID NO: 1454957 - RNA, 19 nt, Homo sapiens
  misc_RNA (1)...(19): siRNA sense strand
ucaccaaggacuccaugaa

SEQ ID NO: 1454958 - RNA, 19 nt, Homo sapiens
  misc_RNA (1)...(19): siRNA sense strand
gcuggaccaucgagacaag

SEQ ID NO: 1454959 - RNA, 19 nt, Homo sapiens
  misc_RNA (1)...(19): siRNA sense strand
ggaccaucgagacaaggua

SEQ ID NO: 1454960 - RNA, 19 nt, Homo sapiens
  misc_RNA (1)...(19): siRNA sense strand
gacacaguggucccagaua

SEQ ID NO: 1454961 - RNA, 19 nt, Homo sapiens
  misc_RNA (1)...(19): siRNA sense strand
gaccaucgagacaagguau

SEQ ID NO: 1454962 - RNA, 19 nt, Homo sapiens
  misc_RNA (1)...(19): siRNA sense strand
ggacuccaugaauaucaaa

SEQ ID NO: 1454963 - RNA, 19 nt, Homo sapiens
  misc_RNA (1)...(19): siRNA sense strand
gagcgacuccaggaagcua

SEQ ID NO: 1454964 - RNA, 19 nt, Homo sapiens
  misc_RNA (1)...(19): siRNA sense strand
cuacgagaccuucaucagu

SEQ ID NO: 1454965 - RNA, 19 nt, Homo sapiens
  misc_RNA (1)...(19): siRNA sense strand
uaacuucuucguugacaca

SEQ ID NO: 1454966 - RNA, 19 nt, Homo sapiens
  misc_RNA (1)...(19): siRNA sense strand
ucaaagcccauauccacau

SEQ ID NO: 1454967 - RNA, 19 nt, Homo sapiens
  misc_RNA (1)...(19): siRNA sense strand
ugcagaauuucccagagaa

SEQ ID NO: 1454968 - RNA, 19 nt, Homo sapiens
  misc_RNA (1)...(19): siRNA sense strand
auacuucacgcaucuaugu

SEQ ID NO: 1454969 - RNA, 19 nt, Homo sapiens
  misc_RNA (1)...(19): siRNA sense strand
gggcuuagagaacuacaag

SEQ ID NO: 1454970 - RNA, 19 nt, Homo sapiens
  misc_RNA (1)...(19): siRNA sense strand
aagcccauauccacauguu

SEQ ID NO: 1454971 - RNA, 19 nt, Homo sapiens
  misc_RNA (1)...(19): siRNA sense strand
acgagaccuucaucaguga

SEQ ID NO: 1454972 - RNA, 19 nt, Homo sapiens
  misc_RNA (1)...(19): siRNA sense strand
gggcuguaacuucuucguu

SEQ ID NO: 1454973 - RNA, 19 nt, Homo sapiens
  misc_RNA (1)...(19): siRNA sense strand
uaccuucaacugagaaaug

SEQ ID NO: 1454974 - RNA, 19 nt, Homo sapiens
  misc_RNA (1)...(19): siRNA sense strand
gcagaauuucccagagaag

SEQ ID NO: 1454975 - RNA, 19 nt, Homo sapiens
  misc_RNA (1)...(19): siRNA sense strand
ggaguagacuguacagaga

SEQ ID NO: 1454976 - RNA, 19 nt, Homo sapiens
  misc_RNA (1)...(19): siRNA sense strand
ccaaagagguucccaagac

SEQ ID NO: 1454977 - RNA, 19 nt, Homo sapiens
  misc_RNA (1)...(19): siRNA sense strand
caaagagguucccaagaca

SEQ ID NO: 1454978 - RNA, 19 nt, Homo sapiens
  misc_RNA (1)...(19): siRNA sense strand
acacuggucuggugaagau

SEQ ID NO: 1454979 - RNA, 19 nt, Homo sapiens
  misc_RNA (1)...(19): siRNA sense strand
ggacuggaguagacuguac

SEQ ID NO: 1454980 - RNA, 19 nt, Homo sapiens
  misc_RNA (1)...(19): siRNA sense strand
caacaaccacccaucaaca

SEQ ID NO: 1454981 - RNA, 19 nt, Homo sapiens
  misc_RNA (1)...(19): siRNA sense strand
gugaagauguccaggaaac

SEQ ID NO: 1454982 - RNA, 19 nt, Homo sapiens
  misc_RNA (1)...(19): siRNA sense strand
aaagggacccgucaaggaa

SEQ ID NO: 1454983 - RNA, 19 nt, Homo sapiens
  misc_RNA (1)...(19): siRNA sense strand
caucaacaccaaagagguu

SEQ ID NO: 1454984 - RNA, 19 nt, Homo sapiens
  misc_RNA (1)...(19): siRNA sense strand
uggugaagauguccaggaa

SEQ ID NO: 1454985 - RNA, 19 nt, Homo sapiens
  misc_RNA (1)...(19): siRNA sense strand
gaagauguccaggaaacca

SEQ ID NO: 1454986 - RNA, 19 nt, Homo sapiens
  misc_RNA (1)...(19): siRNA sense strand
cagguggacuggaguagac

SEQ ID NO: 1454987 - RNA, 19 nt, Homo sapiens
  misc_RNA (1)...(19): siRNA sense strand
aaagagguucccaagacaa

SEQ ID NO: 1454988 - RNA, 19 nt, Homo sapiens
  misc_RNA (1)...(19): siRNA sense strand
ccaaagagguucccaagac

SEQ ID NO: 1454989 - RNA, 19 nt, Homo sapiens
  misc_RNA (1)...(19): siRNA sense strand
caaagagguucccaagaca

SEQ ID NO: 1454990 - RNA, 19 nt, Homo sapiens
  misc_RNA (1)...(19): siRNA sense strand
caacaaccacccaucaaca

SEQ ID NO: 1454991 - RNA, 19 nt, Homo sapiens
  misc_RNA (1)...(19): siRNA sense strand
aaagggacccgucaaggaa

SEQ ID NO: 1454992 - RNA, 19 nt, Homo sapiens
  misc_RNA (1)...(19): siRNA sense strand
caucaacaccaaagagguu

SEQ ID NO: 1454993 - RNA, 19 nt, Homo sapiens
  misc_RNA (1)...(19): siRNA sense strand
aaagagguucccaagacaa

SEQ ID NO: 1454994 - RNA, 19 nt, Homo sapiens
  misc_RNA (1)...(19): siRNA sense strand
ggacaucuaugacaaauau

SEQ ID NO: 1454995 - RNA, 19 nt, Homo sapiens
  misc_RNA (1)...(19): siRNA sense strand
ugaagaagauggccaguua

SEQ ID NO: 1454996 - RNA, 19 nt, Homo sapiens
  misc_RNA (1)...(19): siRNA sense strand
ugacaaauauggcaaagaa

SEQ ID NO: 1454997 - RNA, 19 nt, Homo sapiens
  misc_RNA (1)...(19): siRNA sense strand
gaaguggcauccagauaaa

SEQ ID NO: 1454998 - RNA, 19 nt, Homo sapiens
  misc_RNA (1)...(19): siRNA sense strand
cgagaacggucaagaaaga

SEQ ID NO: 1454999 - RNA, 19 nt, Homo sapiens
  misc_RNA (1)...(19): siRNA sense strand
caaagagaauugucgagaa

SEQ ID NO: 1455000 - RNA, 19 nt, Homo sapiens
  misc_RNA (1)...(19): siRNA sense strand
gaagauggccaguuaaagu

SEQ ID NO: 1455001 - RNA, 19 nt, Homo sapiens
  misc_RNA (1)...(19): siRNA sense strand
gaguagaaguugaagaaga

SEQ ID NO: 1455002 - RNA, 19 nt, Homo sapiens
  misc_RNA (1)...(19): siRNA sense strand
ggauuacuaugaaguucua

SEQ ID NO: 1455003 - RNA, 19 nt, Homo sapiens
  misc_RNA (1)...(19): siRNA sense strand
ucaaaucgauaucaacuuc

SEQ ID NO: 1455004 - RNA, 19 nt, Homo sapiens
  misc_RNA (1)...(19): siRNA sense strand
gaugaugucuucagggaau

SEQ ID NO: 1455005 - RNA, 19 nt, Homo sapiens
  misc_RNA (1)...(19): siRNA sense strand
gcaaguagcggaggcauau

SEQ ID NO: 1455006 - RNA, 19 nt, Homo sapiens
  misc_RNA (1)...(19): siRNA sense strand
uaacccagaugaugucuuc

SEQ ID NO: 1455007 - RNA, 19 nt, Homo sapiens
  misc_RNA (1)...(19): siRNA sense strand
ugaaguggcauccagauaa

SEQ ID NO: 1455008 - RNA, 19 nt, Homo sapiens
  misc_RNA (1)...(19): siRNA sense strand
gaagugcugucggaugcua

SEQ ID NO: 1455009 - RNA, 19 nt, Homo sapiens
  misc_RNA (1)...(19): siRNA sense strand
ugacaguccauuugaauuu

SEQ ID NO: 1455010 - RNA, 19 nt, Homo sapiens
  misc_RNA (1)...(19): siRNA sense strand
uaaagaagaagcagagaga

SEQ ID NO: 1455011 - RNA, 19 nt, Homo sapiens
  misc_RNA (1)...(19): siRNA sense strand
caagaaagaguagaaguug

SEQ ID NO: 1455012 - RNA, 19 nt, Homo sapiens
  misc_RNA (1)...(19): siRNA sense strand
gcaaagaaggauuaaaugg

SEQ ID NO: 1455013 - RNA, 19 nt, Homo sapiens
  misc_RNA (1)...(19): siRNA sense strand
gaacggucaagaaagagua

SEQ ID NO: 1455014 - RNA, 19 nt, Homo sapiens
  misc_RNA (1)...(19): siRNA sense strand
gaagaagauggccaguuaa

SEQ ID NO: 1455015 - RNA, 19 nt, Homo sapiens
  misc_RNA (1)...(19): siRNA sense strand
gcugucggaugcuaagaaa

SEQ ID NO: 1455016 - RNA, 19 nt, Homo sapiens
  misc_RNA (1)...(19): siRNA sense strand
gauacaggauuuacuucau

SEQ ID NO: 1455017 - RNA, 19 nt, Homo sapiens
  misc_RNA (1)...(19): siRNA sense strand
cgauaucaacuucaacuaa

SEQ ID NO: 1455018 - RNA, 19 nt, Homo sapiens
  misc_RNA (1)...(19): siRNA sense strand
caacuaaaaugguuaaugg

SEQ ID NO: 1455019 - RNA, 19 nt, Homo sapiens
  misc_RNA (1)...(19): siRNA sense strand
uaagaaacgggacaucuau

SEQ ID NO: 1455020 - RNA, 19 nt, Homo sapiens
  misc_RNA (1)...(19): siRNA sense strand
gacaguccauuugaauuug

SEQ ID NO: 1455021 - RNA, 19 nt, Homo sapiens
  misc_RNA (1)...(19): siRNA sense strand
ucaguggauuuccgucuuu

SEQ ID NO: 1455022 - RNA, 19 nt, Homo sapiens
  misc_RNA (1)...(19): siRNA sense strand
caaagaaggauuaaauggu

SEQ ID NO: 1455023 - RNA, 19 nt, Homo sapiens
  misc_RNA (1)...(19): siRNA sense strand
ucaagaaagaguagaaguu

SEQ ID NO: 1455024 - RNA, 19 nt, Homo sapiens
  misc_RNA (1)...(19): siRNA sense strand
cuaagaaacgggacaucua

SEQ ID NO: 1455025 - RNA, 19 nt, Homo sapiens
  misc_RNA (1)...(19): siRNA sense strand
gaagggacccauuuucauu

SEQ ID NO: 1455026 - RNA, 19 nt, Homo sapiens
  misc_RNA (1)...(19): siRNA sense strand
agaaagaguagaaguugaa

SEQ ID NO: 1455027 - RNA, 19 nt, Homo sapiens
  misc_RNA (1)...(19): siRNA sense strand
uggcaaagaaggauuaaau

SEQ ID NO: 1455028 - RNA, 19 nt, Homo sapiens
  misc_RNA (1)...(19): siRNA sense strand
aagaaagaguagaaguuga

SEQ ID NO: 1455029 - RNA, 19 nt, Homo sapiens
  misc_RNA (1)...(19): siRNA sense strand
aaagagaauugucgagaac

SEQ ID NO: 1455030 - RNA, 19 nt, Homo sapiens
  misc_RNA (1)...(19): siRNA sense strand
aagaguagaaguugaagaa

SEQ ID NO: 1455031 - RNA, 19 nt, Homo sapiens
  misc_RNA (1)...(19): siRNA sense strand
aguagaaguugaagaagau

SEQ ID NO: 1455032 - RNA, 19 nt, Homo sapiens
  misc_RNA (1)...(19): siRNA sense strand
agaaacgggacaucuauga

SEQ ID NO: 1455033 - RNA, 19 nt, Homo sapiens
  misc_RNA (1)...(19): siRNA sense strand
gggccucacuucauucucu

SEQ ID NO: 1455034 - RNA, 19 nt, Homo sapiens
  misc_RNA (1)...(19): siRNA sense strand
ggaggagguggaagucauu

SEQ ID NO: 1455035 - RNA, 19 nt, Homo sapiens
  misc_RNA (1)...(19): siRNA sense strand
caaauauggcaaagaagga

SEQ ID NO: 1455036 - RNA, 19 nt, Homo sapiens
  misc_RNA (1)...(19): siRNA sense strand
gggcaacuucaaaucgaua

SEQ ID NO: 1455037 - RNA, 19 nt, Homo sapiens
  misc_RNA (1)...(19): siRNA sense strand
ggcaaagaaggauuaaaug

SEQ ID NO: 1455038 - RNA, 19 nt, Homo sapiens
  misc_RNA (1)...(19): siRNA sense strand
aagaagauggccaguuaaa

SEQ ID NO: 1455039 - RNA, 19 nt, Homo sapiens
  misc_RNA (1)...(19): siRNA sense strand
caacuucaaaucgauauca

SEQ ID NO: 1455040 - RNA, 19 nt, Homo sapiens
  misc_RNA (1)...(19): siRNA sense strand
aagaagaagcagagagaaa

SEQ ID NO: 1455041 - RNA, 19 nt, Homo sapiens
  misc_RNA (1)...(19): siRNA sense strand
ggacuucuuugggaaucga

SEQ ID NO: 1455042 - RNA, 19 nt, Homo sapiens
  misc_RNA (1)...(19): siRNA sense strand
guaguggcaugggcaacuu

SEQ ID NO: 1455043 - RNA, 19 nt, Homo sapiens
  misc_RNA (1)...(19): siRNA sense strand
gucgagaacggucaagaaa

SEQ ID NO: 1455044 - RNA, 19 nt, Homo sapiens
  misc_RNA (1)...(19): siRNA sense strand
aaacgggacaucuaugaca

SEQ ID NO: 1455045 - RNA, 19 nt, Homo sapiens
  misc_RNA (1)...(19): siRNA sense strand
gaggacuucuuugggaauc

SEQ ID NO: 1455046 - RNA, 19 nt, Homo sapiens
  misc_RNA (1)...(19): siRNA sense strand
gcuaagaaacgggacaucu

SEQ ID NO: 1455047 - RNA, 19 nt, Homo sapiens
  misc_RNA (1)...(19): siRNA sense strand
uggcaugggcaacuucaaa

SEQ ID NO: 1455048 - RNA, 19 nt, Homo sapiens
  misc_RNA (1)...(19): siRNA sense strand
gguggauuacuaugaaguu

SEQ ID NO: 1455049 - RNA, 19 nt, Homo sapiens
  misc_RNA (1)...(19): siRNA sense strand
gaaacgggacaucuaugac

SEQ ID NO: 1455050 - RNA, 19 nt, Homo sapiens
  misc_RNA (1)...(19): siRNA sense strand
aaaggcauaucggaaacug

SEQ ID NO: 1455051 - RNA, 19 nt, Homo sapiens
  misc_RNA (1)...(19): siRNA sense strand
cgggacaucuaugacaaau

SEQ ID NO: 1455052 - RNA, 19 nt, Homo sapiens
  misc_RNA (1)...(19): siRNA sense strand
gaaagaguagaaguugaag

SEQ ID NO: 1455053 - RNA, 19 nt, Homo sapiens
  misc_RNA (1)...(19): siRNA sense strand
gcaugggcaacuucaaauc

SEQ ID NO: 1455054 - RNA, 19 nt, Homo sapiens
  misc_RNA (1)...(19): siRNA sense strand
uaucggaaacuggcacuga

SEQ ID NO: 1455055 - RNA, 19 nt, Homo sapiens
  misc_RNA (1)...(19): siRNA sense strand
gagaaaauucaagcaagua

SEQ ID NO: 1455056 - RNA, 19 nt, Homo sapiens
  misc_RNA (1)...(19): siRNA sense strand
guggauuacuaugaaguuc

SEQ ID NO: 1455057 - RNA, 19 nt, Homo sapiens
  misc_RNA (1)...(19): siRNA sense strand
gaggagguggaagucauuu

SEQ ID NO: 1455058 - RNA, 19 nt, Homo sapiens
  misc_RNA (1)...(19): siRNA sense strand
gggacaucuaugacaaaua

SEQ ID NO: 1455059 - RNA, 19 nt, Homo sapiens
  misc_RNA (1)...(19): siRNA sense strand
aacgggacaucuaugacaa

SEQ ID NO: 1455060 - RNA, 19 nt, Homo sapiens
  misc_RNA (1)...(19): siRNA sense strand
ugauacaggauuuacuuca

SEQ ID NO: 1455061 - RNA, 19 nt, Homo sapiens
  misc_RNA (1)...(19): siRNA sense strand
ggcaugggcaacuucaaau

SEQ ID NO: 1455062 - RNA, 19 nt, Homo sapiens
  misc_RNA (1)...(19): siRNA sense strand
cugaaguggcauccagaua

SEQ ID NO: 1455063 - RNA, 19 nt, Homo sapiens
  misc_RNA (1)...(19): siRNA sense strand
ggccucacuucauucucuu

SEQ ID NO: 1455064 - RNA, 19 nt, Homo sapiens
  misc_RNA (1)...(19): siRNA sense strand
gaagaagcagagagaaaau

SEQ ID NO: 1455065 - RNA, 19 nt, Homo sapiens
  misc_RNA (1)...(19): siRNA sense strand
ggagguggaagucauuuug

SEQ ID NO: 1455066 - RNA, 19 nt, Homo sapiens
  misc_RNA (1)...(19): siRNA sense strand
ggacaucuaugacaaauau

SEQ ID NO: 1455067 - RNA, 19 nt, Homo sapiens
  misc_RNA (1)...(19): siRNA sense strand
ugaagaagauggccaguua

SEQ ID NO: 1455068 - RNA, 19 nt, Homo sapiens
  misc_RNA (1)...(19): siRNA sense strand
ugacaaauauggcaaagaa

SEQ ID NO: 1455069 - RNA, 19 nt, Homo sapiens
  misc_RNA (1)...(19): siRNA sense strand
gaaguggcauccagauaaa

SEQ ID NO: 1455070 - RNA, 19 nt, Homo sapiens
  misc_RNA (1)...(19): siRNA sense strand
cgagaacggucaagaaaga

SEQ ID NO: 1455071 - RNA, 19 nt, Homo sapiens
  misc_RNA (1)...(19): siRNA sense strand
caaagagaauugucgagaa

SEQ ID NO: 1455072 - RNA, 19 nt, Homo sapiens
  misc_RNA (1)...(19): siRNA sense strand
gaagauggccaguuaaagu

SEQ ID NO: 1455073 - RNA, 19 nt, Homo sapiens
  misc_RNA (1)...(19): siRNA sense strand
gaguagaaguugaagaaga

SEQ ID NO: 1455074 - RNA, 19 nt, Homo sapiens
  misc_RNA (1)...(19): siRNA sense strand
ggauuacuaugaaguucua

SEQ ID NO: 1455075 - RNA, 19 nt, Homo sapiens
  misc_RNA (1)...(19): siRNA sense strand
ucaaaucgauaucaacuuc

SEQ ID NO: 1455076 - RNA, 19 nt, Homo sapiens
  misc_RNA (1)...(19): siRNA sense strand
gaugaugucuucagggaau

SEQ ID NO: 1455077 - RNA, 19 nt, Homo sapiens
  misc_RNA (1)...(19): siRNA sense strand
gcaaguagcggaggcauau

SEQ ID NO: 1455078 - RNA, 19 nt, Homo sapiens
  misc_RNA (1)...(19): siRNA sense strand
uaacccagaugaugucuuc

SEQ ID NO: 1455079 - RNA, 19 nt, Homo sapiens
  misc_RNA (1)...(19): siRNA sense strand
ugaaguggcauccagauaa

SEQ ID NO: 1455080 - RNA, 19 nt, Homo sapiens
  misc_RNA (1)...(19): siRNA sense strand
gaagugcugucggaugcua

SEQ ID NO: 1455081 - RNA, 19 nt, Homo sapiens
  misc_RNA (1)...(19): siRNA sense strand
ugacaguccauuugaauuu

SEQ ID NO: 1455082 - RNA, 19 nt, Homo sapiens
  misc_RNA (1)...(19): siRNA sense strand
uaaagaagaagcagagaga

SEQ ID NO: 1455083 - RNA, 19 nt, Homo sapiens
  misc_RNA (1)...(19): siRNA sense strand
caagaaagaguagaaguug

SEQ ID NO: 1455084 - RNA, 19 nt, Homo sapiens
  misc_RNA (1)...(19): siRNA sense strand
gcaaagaaggauuaaaugg

SEQ ID NO: 1455085 - RNA, 19 nt, Homo sapiens
  misc_RNA (1)...(19): siRNA sense strand
gaacggucaagaaagagua

SEQ ID NO: 1455086 - RNA, 19 nt, Homo sapiens
  misc_RNA (1)...(19): siRNA sense strand
gaagaagauggccaguuaa

SEQ ID NO: 1455087 - RNA, 19 nt, Homo sapiens
  misc_RNA (1)...(19): siRNA sense strand
gcugucggaugcuaagaaa

SEQ ID NO: 1455088 - RNA, 19 nt, Homo sapiens
  misc_RNA (1)...(19): siRNA sense strand
gauacaggauuuacuucau

SEQ ID NO: 1455089 - RNA, 19 nt, Homo sapiens
  misc_RNA (1)...(19): siRNA sense strand
cgauaucaacuucaacuaa

SEQ ID NO: 1455090 - RNA, 19 nt, Homo sapiens
  misc_RNA (1)...(19): siRNA sense strand
caacuaaaaugguuaaugg

SEQ ID NO: 1455091 - RNA, 19 nt, Homo sapiens
  misc_RNA (1)...(19): siRNA sense strand
uaagaaacgggacaucuau

SEQ ID NO: 1455092 - RNA, 19 nt, Homo sapiens
  misc_RNA (1)...(19): siRNA sense strand
gacaguccauuugaauuug

SEQ ID NO: 1455093 - RNA, 19 nt, Homo sapiens
  misc_RNA (1)...(19): siRNA sense strand
ucaguggauuuccgucuuu

SEQ ID NO: 1455094 - RNA, 19 nt, Homo sapiens
  misc_RNA (1)...(19): siRNA sense strand
caaagaaggauuaaauggu

SEQ ID NO: 1455095 - RNA, 19 nt, Homo sapiens
  misc_RNA (1)...(19): siRNA sense strand
ucaagaaagaguagaaguu

SEQ ID NO: 1455096 - RNA, 19 nt, Homo sapiens
  misc_RNA (1)...(19): siRNA sense strand
cuaagaaacgggacaucua

SEQ ID NO: 1455097 - RNA, 19 nt, Homo sapiens
  misc_RNA (1)...(19): siRNA sense strand
gaagggacccauuuucauu

SEQ ID NO: 1455098 - RNA, 19 nt, Homo sapiens
  misc_RNA (1)...(19): siRNA sense strand
agaaagaguagaaguugaa

SEQ ID NO: 1455099 - RNA, 19 nt, Homo sapiens
  misc_RNA (1)...(19): siRNA sense strand
uggcaaagaaggauuaaau

SEQ ID NO: 1455100 - RNA, 19 nt, Homo sapiens
  misc_RNA (1)...(19): siRNA sense strand
aagaaagaguagaaguuga

SEQ ID NO: 1455101 - RNA, 19 nt, Homo sapiens
  misc_RNA (1)...(19): siRNA sense strand
aaagagaauugucgagaac

SEQ ID NO: 1455102 - RNA, 19 nt, Homo sapiens
  misc_RNA (1)...(19): siRNA sense strand
aagaguagaaguugaagaa

SEQ ID NO: 1455103 - RNA, 19 nt, Homo sapiens
  misc_RNA (1)...(19): siRNA sense strand
aguagaaguugaagaagau

SEQ ID NO: 1455104 - RNA, 19 nt, Homo sapiens
  misc_RNA (1)...(19): siRNA sense strand
agaaacgggacaucuauga

SEQ ID NO: 1455105 - RNA, 19 nt, Homo sapiens
  misc_RNA (1)...(19): siRNA sense strand
gggccucacuucauucucu

SEQ ID NO: 1455106 - RNA, 19 nt, Homo sapiens
  misc_RNA (1)...(19): siRNA sense strand
ggaggagguggaagucauu

SEQ ID NO: 1455107 - RNA, 19 nt, Homo sapiens
  misc_RNA (1)...(19): siRNA sense strand
caaauauggcaaagaagga

SEQ ID NO: 1455108 - RNA, 19 nt, Homo sapiens
  misc_RNA (1)...(19): siRNA sense strand
gggcaacuucaaaucgaua

SEQ ID NO: 1455109 - RNA, 19 nt, Homo sapiens
  misc_RNA (1)...(19): siRNA sense strand
ggcaaagaaggauuaaaug

SEQ ID NO: 1455110 - RNA, 19 nt, Homo sapiens
  misc_RNA (1)...(19): siRNA sense strand
aagaagauggccaguuaaa

SEQ ID NO: 1455111 - RNA, 19 nt, Homo sapiens
  misc_RNA (1)...(19): siRNA sense strand
caacuucaaaucgauauca

SEQ ID NO: 1455112 - RNA, 19 nt, Homo sapiens
  misc_RNA (1)...(19): siRNA sense strand
aagaagaagcagagagaaa

SEQ ID NO: 1455113 - RNA, 19 nt, Homo sapiens
  misc_RNA (1)...(19): siRNA sense strand
ggacuucuuugggaaucga

SEQ ID NO: 1455114 - RNA, 19 nt, Homo sapiens
  misc_RNA (1)...(19): siRNA sense strand
guaguggcaugggcaacuu

SEQ ID NO: 1455115 - RNA, 19 nt, Homo sapiens
  misc_RNA (1)...(19): siRNA sense strand
gucgagaacggucaagaaa

SEQ ID NO: 1455116 - RNA, 19 nt, Homo sapiens
  misc_RNA (1)...(19): siRNA sense strand
aaacgggacaucuaugaca

SEQ ID NO: 1455117 - RNA, 19 nt, Homo sapiens
  misc_RNA (1)...(19): siRNA sense strand
gaggacuucuuugggaauc

SEQ ID NO: 1455118 - RNA, 19 nt, Homo sapiens
  misc_RNA (1)...(19): siRNA sense strand
gcuaagaaacgggacaucu

SEQ ID NO: 1455119 - RNA, 19 nt, Homo sapiens
  misc_RNA (1)...(19): siRNA sense strand
uggcaugggcaacuucaaa

SEQ ID NO: 1455120 - RNA, 19 nt, Homo sapiens
  misc_RNA (1)...(19): siRNA sense strand
gguggauuacuaugaaguu

SEQ ID NO: 1455121 - RNA, 19 nt, Homo sapiens
  misc_RNA (1)...(19): siRNA sense strand
gaaacgggacaucuaugac

SEQ ID NO: 1455122 - RNA, 19 nt, Homo sapiens
  misc_RNA (1)...(19): siRNA sense strand
aaaggcauaucggaaacug

SEQ ID NO: 1455123 - RNA, 19 nt, Homo sapiens
  misc_RNA (1)...(19): siRNA sense strand
cgggacaucuaugacaaau

SEQ ID NO: 1455124 - RNA, 19 nt, Homo sapiens
  misc_RNA (1)...(19): siRNA sense strand
gaaagaguagaaguugaag

SEQ ID NO: 1455125 - RNA, 19 nt, Homo sapiens
  misc_RNA (1)...(19): siRNA sense strand
gcaugggcaacuucaaauc

SEQ ID NO: 1455126 - RNA, 19 nt, Homo sapiens
  misc_RNA (1)...(19): siRNA sense strand
uaucggaaacuggcacuga

SEQ ID NO: 1455127 - RNA, 19 nt, Homo sapiens
  misc_RNA (1)...(19): siRNA sense strand
gagaaaauucaagcaagua

SEQ ID NO: 1455128 - RNA, 19 nt, Homo sapiens
  misc_RNA (1)...(19): siRNA sense strand
guggauuacuaugaaguuc

SEQ ID NO: 1455129 - RNA, 19 nt, Homo sapiens
  misc_RNA (1)...(19): siRNA sense strand
gaggagguggaagucauuu

SEQ ID NO: 1455130 - RNA, 19 nt, Homo sapiens
  misc_RNA (1)...(19): siRNA sense strand
gggacaucuaugacaaaua

SEQ ID NO: 1455131 - RNA, 19 nt, Homo sapiens
  misc_RNA (1)...(19): siRNA sense strand
aacgggacaucuaugacaa

SEQ ID NO: 1455132 - RNA, 19 nt, Homo sapiens
  misc_RNA (1)...(19): siRNA sense strand
ugauacaggauuuacuuca

SEQ ID NO: 1455133 - RNA, 19 nt, Homo sapiens
  misc_RNA (1)...(19): siRNA sense strand
ggcaugggcaacuucaaau

SEQ ID NO: 1455134 - RNA, 19 nt, Homo sapiens
  misc_RNA (1)...(19): siRNA sense strand
cugaaguggcauccagaua

SEQ ID NO: 1455135 - RNA, 19 nt, Homo sapiens
  misc_RNA (1)...(19): siRNA sense strand
ggccucacuucauucucuu

SEQ ID NO: 1455136 - RNA, 19 nt, Homo sapiens
  misc_RNA (1)...(19): siRNA sense strand
gaagaagcagagagaaaau

SEQ ID NO: 1455137 - RNA, 19 nt, Homo sapiens
  misc_RNA (1)...(19): siRNA sense strand
ggagguggaagucauuuug

SEQ ID NO: 1455138 - RNA, 19 nt, Homo sapiens
  misc_RNA (1)...(19): siRNA sense strand
gagaagagccaucacauuu

SEQ ID NO: 1455139 - RNA, 19 nt, Homo sapiens
  misc_RNA (1)...(19): siRNA sense strand
gcaaagaccucccgaaugc

SEQ ID NO: 1455140 - RNA, 19 nt, Homo sapiens
  misc_RNA (1)...(19): siRNA sense strand
ucagaugggugguauguuu

SEQ ID NO: 1455141 - RNA, 19 nt, Homo sapiens
  misc_RNA (1)...(19): siRNA sense strand
gcggucagauguccaguuu

SEQ ID NO: 1455142 - RNA, 19 nt, Homo sapiens
  misc_RNA (1)...(19): siRNA sense strand
ggacuucgcucuaaaagga

SEQ ID NO: 1455143 - RNA, 19 nt, Homo sapiens
  misc_RNA (1)...(19): siRNA sense strand
cuguagagcugccuuauga

SEQ ID NO: 1455144 - RNA, 19 nt, Homo sapiens
  misc_RNA (1)...(19): siRNA sense strand
caagggacuucgcucuaaa

SEQ ID NO: 1455145 - RNA, 19 nt, Homo sapiens
  misc_RNA (1)...(19): siRNA sense strand
gacccgaguucuccuuuga

SEQ ID NO: 1455146 - RNA, 19 nt, Homo sapiens
  misc_RNA (1)...(19): siRNA sense strand
acaagggacuucgcucuaa

SEQ ID NO: 1455147 - RNA, 19 nt, Homo sapiens
  misc_RNA (1)...(19): siRNA sense strand
gaagagccaucacauuucc

SEQ ID NO: 1455148 - RNA, 19 nt, Homo sapiens
  misc_RNA (1)...(19): siRNA sense strand
gaggucagcgugcgucuuu

SEQ ID NO: 1455149 - RNA, 19 nt, Homo sapiens
  misc_RNA (1)...(19): siRNA sense strand
acacuccgcugcccacuga

SEQ ID NO: 1455150 - RNA, 19 nt, Homo sapiens
  misc_RNA (1)...(19): siRNA sense strand
ggucagauguccaguuugc

SEQ ID NO: 1455151 - RNA, 19 nt, Homo sapiens
  misc_RNA (1)...(19): siRNA sense strand
gagcugagcagucccuaug

SEQ ID NO: 1455152 - RNA, 19 nt, Homo sapiens
  misc_RNA (1)...(19): siRNA sense strand
cgaguucuccuuugauuug

SEQ ID NO: 1455153 - RNA, 19 nt, Homo sapiens
  misc_RNA (1)...(19): siRNA sense strand
ggacccgaguucuccuuug

SEQ ID NO: 1455154 - RNA, 19 nt, Homo sapiens
  misc_RNA (1)...(19): siRNA sense strand
agagcugccuuaugaauuc

SEQ ID NO: 1455155 - RNA, 19 nt, Homo sapiens
  misc_RNA (1)...(19): siRNA sense strand
gcagcugauucuucacuuc

SEQ ID NO: 1455156 - RNA, 19 nt, Homo sapiens
  misc_RNA (1)...(19): siRNA sense strand
ucacuagaccucaucauuc

SEQ ID NO: 1455157 - RNA, 19 nt, Homo sapiens
  misc_RNA (1)...(19): siRNA sense strand
ccagagacaugggaaaguc

SEQ ID NO: 1455158 - RNA, 19 nt, Homo sapiens
  misc_RNA (1)...(19): siRNA sense strand
ugccacagcucgagaguca

SEQ ID NO: 1455159 - RNA, 19 nt, Homo sapiens
  misc_RNA (1)...(19): siRNA sense strand
gaaagucuucccagauugg

SEQ ID NO: 1455160 - RNA, 19 nt, Homo sapiens
  misc_RNA (1)...(19): siRNA sense strand
cagcagccauguugaaugc

SEQ ID NO: 1455161 - RNA, 19 nt, Homo sapiens
  misc_RNA (1)...(19): siRNA sense strand
guagagcugccuuaugaau

SEQ ID NO: 1455162 - RNA, 19 nt, Homo sapiens
  misc_RNA (1)...(19): siRNA sense strand
ugagaagagccaucacauu

SEQ ID NO: 1455163 - RNA, 19 nt, Homo sapiens
  misc_RNA (1)...(19): siRNA sense strand
gcugagcagucccuaugau

SEQ ID NO: 1455164 - RNA, 19 nt, Homo sapiens
  misc_RNA (1)...(19): siRNA sense strand
gcuauucgggugaccauau

SEQ ID NO: 1455165 - RNA, 19 nt, Homo sapiens
  misc_RNA (1)...(19): siRNA sense strand
caagaaugcaugccaccuu

SEQ ID NO: 1455166 - RNA, 19 nt, Homo sapiens
  misc_RNA (1)...(19): siRNA sense strand
acauucaaguucuauagga

SEQ ID NO: 1455167 - RNA, 19 nt, Homo sapiens
  misc_RNA (1)...(19): siRNA sense strand
gagcuggccagaagccuau

SEQ ID NO: 1455168 - RNA, 19 nt, Homo sapiens
  misc_RNA (1)...(19): siRNA sense strand
gcauggaggacccgaguuc

SEQ ID NO: 1455169 - RNA, 19 nt, Homo sapiens
  misc_RNA (1)...(19): siRNA sense strand
ccacauucaaguucuauag

SEQ ID NO: 1455170 - RNA, 19 nt, Homo sapiens
  misc_RNA (1)...(19): siRNA sense strand
ccacagcucgagagucaga

SEQ ID NO: 1455171 - RNA, 19 nt, Homo sapiens
  misc_RNA (1)...(19): siRNA sense strand
cccgaguucuccuuugauu

SEQ ID NO: 1455172 - RNA, 19 nt, Homo sapiens
  misc_RNA (1)...(19): siRNA sense strand
gucgucaccugucugagaa

SEQ ID NO: 1455173 - RNA, 19 nt, Homo sapiens
  misc_RNA (1)...(19): siRNA sense strand
gagcagucccuaugauguc

SEQ ID NO: 1455174 - RNA, 19 nt, Homo sapiens
  misc_RNA (1)...(19): siRNA sense strand
ucucucacauccuggaaug

SEQ ID NO: 1455175 - RNA, 19 nt, Homo sapiens
  misc_RNA (1)...(19): siRNA sense strand
gucacuagaccucaucauu

SEQ ID NO: 1455176 - RNA, 19 nt, Homo sapiens
  misc_RNA (1)...(19): siRNA sense strand
uagagcugccuuaugaauu

SEQ ID NO: 1455177 - RNA, 19 nt, Homo sapiens
  misc_RNA (1)...(19): siRNA sense strand
ggugguauguuuuggagaa

SEQ ID NO: 1455178 - RNA, 19 nt, Homo sapiens
  misc_RNA (1)...(19): siRNA sense strand
agaagagccaucacauuuc

SEQ ID NO: 1455179 - RNA, 19 nt, Homo sapiens
  misc_RNA (1)...(19): siRNA sense strand
uggaauguaagcauggaua

SEQ ID NO: 1455180 - RNA, 19 nt, Homo sapiens
  misc_RNA (1)...(19): siRNA sense strand
ucccuaugauguccagaaa

SEQ ID NO: 1455181 - RNA, 19 nt, Homo sapiens
  misc_RNA (1)...(19): siRNA sense strand
cacaagggacuucgcucua

SEQ ID NO: 1455182 - RNA, 19 nt, Homo sapiens
  misc_RNA (1)...(19): siRNA sense strand
gagagucagauggguggua

SEQ ID NO: 1455183 - RNA, 19 nt, Homo sapiens
  misc_RNA (1)...(19): siRNA sense strand
agagucagaugggugguau

SEQ ID NO: 1455184 - RNA, 19 nt, Homo sapiens
  misc_RNA (1)...(19): siRNA sense strand
cagauuggacucacaaagg

SEQ ID NO: 1455185 - RNA, 19 nt, Homo sapiens
  misc_RNA (1)...(19): siRNA sense strand
caaguucucuuuuggaaac

SEQ ID NO: 1455186 - RNA, 19 nt, Homo sapiens
  misc_RNA (1)...(19): siRNA sense strand
ccuaugauguccagaaaau

SEQ ID NO: 1455187 - RNA, 19 nt, Homo sapiens
  misc_RNA (1)...(19): siRNA sense strand
cgucgucaccugucugaga

SEQ ID NO: 1455188 - RNA, 19 nt, Homo sapiens
  misc_RNA (1)...(19): siRNA sense strand
ggaauguaagcauggauac

SEQ ID NO: 1455189 - RNA, 19 nt, Homo sapiens
  misc_RNA (1)...(19): siRNA sense strand
cagcucugcuucaaguucu

SEQ ID NO: 1455190 - RNA, 19 nt, Homo sapiens
  misc_RNA (1)...(19): siRNA sense strand
cagaggcacgacuggcaua

SEQ ID NO: 1455191 - RNA, 19 nt, Homo sapiens
  misc_RNA (1)...(19): siRNA sense strand
gauccagagacaugggaaa

SEQ ID NO: 1455192 - RNA, 19 nt, Homo sapiens
  misc_RNA (1)...(19): siRNA sense strand
ggucagcgugcgucuuugu

SEQ ID NO: 1455193 - RNA, 19 nt, Homo sapiens
  misc_RNA (1)...(19): siRNA sense strand
cgacuggcauacccuuugc

SEQ ID NO: 1455194 - RNA, 19 nt, Homo sapiens
  misc_RNA (1)...(19): siRNA sense strand
gcauagaggcauccuaccu

SEQ ID NO: 1455195 - RNA, 19 nt, Homo sapiens
  misc_RNA (1)...(19): siRNA sense strand
guccggaugucucuuacag

SEQ ID NO: 1455196 - RNA, 19 nt, Homo sapiens
  misc_RNA (1)...(19): siRNA sense strand
acacuguagagcugccuua

SEQ ID NO: 1455197 - RNA, 19 nt, Homo sapiens
  misc_RNA (1)...(19): siRNA sense strand
cacuagaccucaucauucc

SEQ ID NO: 1455198 - RNA, 19 nt, Homo sapiens
  misc_RNA (1)...(19): siRNA sense strand
gacccaaccuucggaucca

SEQ ID NO: 1455199 - RNA, 19 nt, Homo sapiens
  misc_RNA (1)...(19): siRNA sense strand
cgucaccugucugagaaga

SEQ ID NO: 1455200 - RNA, 19 nt, Homo sapiens
  misc_RNA (1)...(19): siRNA sense strand
ugagcagucccuaugaugu

SEQ ID NO: 1455201 - RNA, 19 nt, Homo sapiens
  misc_RNA (1)...(19): siRNA sense strand
gagaagagccaucacauuu

SEQ ID NO: 1455202 - RNA, 19 nt, Homo sapiens
  misc_RNA (1)...(19): siRNA sense strand
gcaaagaccucccgaaugc

SEQ ID NO: 1455203 - RNA, 19 nt, Homo sapiens
  misc_RNA (1)...(19): siRNA sense strand
ucagaugggugguauguuu

SEQ ID NO: 1455204 - RNA, 19 nt, Homo sapiens
  misc_RNA (1)...(19): siRNA sense strand
gcggucagauguccaguuu

SEQ ID NO: 1455205 - RNA, 19 nt, Homo sapiens
  misc_RNA (1)...(19): siRNA sense strand
ggacuucgcucuaaaagga

SEQ ID NO: 1455206 - RNA, 19 nt, Homo sapiens
  misc_RNA (1)...(19): siRNA sense strand
cuguagagcugccuuauga

SEQ ID NO: 1455207 - RNA, 19 nt, Homo sapiens
  misc_RNA (1)...(19): siRNA sense strand
caagggacuucgcucuaaa

SEQ ID NO: 1455208 - RNA, 19 nt, Homo sapiens
  misc_RNA (1)...(19): siRNA sense strand
gacccgaguucuccuuuga

SEQ ID NO: 1455209 - RNA, 19 nt, Homo sapiens
  misc_RNA (1)...(19): siRNA sense strand
acaagggacuucgcucuaa

SEQ ID NO: 1455210 - RNA, 19 nt, Homo sapiens
  misc_RNA (1)...(19): siRNA sense strand
gaagagccaucacauuucc

SEQ ID NO: 1455211 - RNA, 19 nt, Homo sapiens
  misc_RNA (1)...(19): siRNA sense strand
gaggucagcgugcgucuuu

SEQ ID NO: 1455212 - RNA, 19 nt, Homo sapiens
  misc_RNA (1)...(19): siRNA sense strand
acacuccgcugcccacuga

SEQ ID NO: 1455213 - RNA, 19 nt, Homo sapiens
  misc_RNA (1)...(19): siRNA sense strand
ggucagauguccaguuugc

SEQ ID NO: 1455214 - RNA, 19 nt, Homo sapiens
  misc_RNA (1)...(19): siRNA sense strand
gagcugagcagucccuaug

SEQ ID NO: 1455215 - RNA, 19 nt, Homo sapiens
  misc_RNA (1)...(19): siRNA sense strand
cgaguucuccuuugauuug

SEQ ID NO: 1455216 - RNA, 19 nt, Homo sapiens
  misc_RNA (1)...(19): siRNA sense strand
ggacccgaguucuccuuug

SEQ ID NO: 1455217 - RNA, 19 nt, Homo sapiens
  misc_RNA (1)...(19): siRNA sense strand
agagcugccuuaugaauuc

SEQ ID NO: 1455218 - RNA, 19 nt, Homo sapiens
  misc_RNA (1)...(19): siRNA sense strand
gcagcugauucuucacuuc

SEQ ID NO: 1455219 - RNA, 19 nt, Homo sapiens
  misc_RNA (1)...(19): siRNA sense strand
ucacuagaccucaucauuc

SEQ ID NO: 1455220 - RNA, 19 nt, Homo sapiens
  misc_RNA (1)...(19): siRNA sense strand
ccagagacaugggaaaguc

SEQ ID NO: 1455221 - RNA, 19 nt, Homo sapiens
  misc_RNA (1)...(19): siRNA sense strand
gcugcucgcuuacuucagu

SEQ ID NO: 1455222 - RNA, 19 nt, Homo sapiens
  misc_RNA (1)...(19): siRNA sense strand
gaaagucuucccagauugg

SEQ ID NO: 1455223 - RNA, 19 nt, Homo sapiens
  misc_RNA (1)...(19): siRNA sense strand
cagcagccauguugaaugc

SEQ ID NO: 1455224 - RNA, 19 nt, Homo sapiens
  misc_RNA (1)...(19): siRNA sense strand
guagagcugccuuaugaau

SEQ ID NO: 1455225 - RNA, 19 nt, Homo sapiens
  misc_RNA (1)...(19): siRNA sense strand
ugagaagagccaucacauu

SEQ ID NO: 1455226 - RNA, 19 nt, Homo sapiens
  misc_RNA (1)...(19): siRNA sense strand
gcugagcagucccuaugau

SEQ ID NO: 1455227 - RNA, 19 nt, Homo sapiens
  misc_RNA (1)...(19): siRNA sense strand
gcuauucgggugaccauau

SEQ ID NO: 1455228 - RNA, 19 nt, Homo sapiens
  misc_RNA (1)...(19): siRNA sense strand
caagaaugcaugccaccuu

SEQ ID NO: 1455229 - RNA, 19 nt, Homo sapiens
  misc_RNA (1)...(19): siRNA sense strand
acauucaaguucuauagga

SEQ ID NO: 1455230 - RNA, 19 nt, Homo sapiens
  misc_RNA (1)...(19): siRNA sense strand
gagcuggccagaagccuau

SEQ ID NO: 1455231 - RNA, 19 nt, Homo sapiens
  misc_RNA (1)...(19): siRNA sense strand
gcauggaggacccgaguuc

SEQ ID NO: 1455232 - RNA, 19 nt, Homo sapiens
  misc_RNA (1)...(19): siRNA sense strand
ccacauucaaguucuauag

SEQ ID NO: 1455233 - RNA, 19 nt, Homo sapiens
  misc_RNA (1)...(19): siRNA sense strand
cccgaguucuccuuugauu

SEQ ID NO: 1455234 - RNA, 19 nt, Homo sapiens
  misc_RNA (1)...(19): siRNA sense strand
gucgucaccugucugagaa

SEQ ID NO: 1455235 - RNA, 19 nt, Homo sapiens
  misc_RNA (1)...(19): siRNA sense strand
gagcagucccuaugauguc

SEQ ID NO: 1455236 - RNA, 19 nt, Homo sapiens
  misc_RNA (1)...(19): siRNA sense strand
ucucucacauccuggaaug

SEQ ID NO: 1455237 - RNA, 19 nt, Homo sapiens
  misc_RNA (1)...(19): siRNA sense strand
gucacuagaccucaucauu

SEQ ID NO: 1455238 - RNA, 19 nt, Homo sapiens
  misc_RNA (1)...(19): siRNA sense strand
uagagcugccuuaugaauu

SEQ ID NO: 1455239 - RNA, 19 nt, Homo sapiens
  misc_RNA (1)...(19): siRNA sense strand
ggugguauguuuuggagaa

SEQ ID NO: 1455240 - RNA, 19 nt, Homo sapiens
  misc_RNA (1)...(19): siRNA sense strand
agaagagccaucacauuuc

SEQ ID NO: 1455241 - RNA, 19 nt, Homo sapiens
  misc_RNA (1)...(19): siRNA sense strand
uggaauguaagcauggaua

SEQ ID NO: 1455242 - RNA, 19 nt, Homo sapiens
  misc_RNA (1)...(19): siRNA sense strand
ucccuaugauguccagaaa

SEQ ID NO: 1455243 - RNA, 19 nt, Homo sapiens
  misc_RNA (1)...(19): siRNA sense strand
cacaagggacuucgcucua

SEQ ID NO: 1455244 - RNA, 19 nt, Homo sapiens
  misc_RNA (1)...(19): siRNA sense strand
gagagucagauggguggua

SEQ ID NO: 1455245 - RNA, 19 nt, Homo sapiens
  misc_RNA (1)...(19): siRNA sense strand
agagucagaugggugguau

SEQ ID NO: 1455246 - RNA, 19 nt, Homo sapiens
  misc_RNA (1)...(19): siRNA sense strand
cagauuggacucacaaagg

SEQ ID NO: 1455247 - RNA, 19 nt, Homo sapiens
  misc_RNA (1)...(19): siRNA sense strand
caaguucucuuuuggaaac

SEQ ID NO: 1455248 - RNA, 19 nt, Homo sapiens
  misc_RNA (1)...(19): siRNA sense strand
ccuaugauguccagaaaau

SEQ ID NO: 1455249 - RNA, 19 nt, Homo sapiens
  misc_RNA (1)...(19): siRNA sense strand
cagaggcacgacuggcaua

SEQ ID NO: 1455250 - RNA, 19 nt, Homo sapiens
  misc_RNA (1)...(19): siRNA sense strand
ggaauguaagcauggauac

SEQ ID NO: 1455251 - RNA, 19 nt, Homo sapiens
  misc_RNA (1)...(19): siRNA sense strand
cgucgucaccugucugaga

SEQ ID NO: 1455252 - RNA, 19 nt, Homo sapiens
  misc_RNA (1)...(19): siRNA sense strand
cagcucugcuucaaguucu

SEQ ID NO: 1455253 - RNA, 19 nt, Homo sapiens
  misc_RNA (1)...(19): siRNA sense strand
gauccagagacaugggaaa

SEQ ID NO: 1455254 - RNA, 19 nt, Homo sapiens
  misc_RNA (1)...(19): siRNA sense strand
ggucagcgugcgucuuugu

SEQ ID NO: 1455255 - RNA, 19 nt, Homo sapiens
  misc_RNA (1)...(19): siRNA sense strand
cgacuggcauacccuuugc

SEQ ID NO: 1455256 - RNA, 19 nt, Homo sapiens
  misc_RNA (1)...(19): siRNA sense strand
ugggagcgcuggcugaacu

SEQ ID NO: 1455257 - RNA, 19 nt, Homo sapiens
  misc_RNA (1)...(19): siRNA sense strand
gcauagaggcauccuaccu

SEQ ID NO: 1455258 - RNA, 19 nt, Homo sapiens
  misc_RNA (1)...(19): siRNA sense strand
acacuguagagcugccuua

SEQ ID NO: 1455259 - RNA, 19 nt, Homo sapiens
  misc_RNA (1)...(19): siRNA sense strand
cacuagaccucaucauucc

SEQ ID NO: 1455260 - RNA, 19 nt, Homo sapiens
  misc_RNA (1)...(19): siRNA sense strand
gacccaaccuucggaucca

SEQ ID NO: 1455261 - RNA, 19 nt, Homo sapiens
  misc_RNA (1)...(19): siRNA sense strand
ccuacuggguguuguucug

SEQ ID NO: 1455262 - RNA, 19 nt, Homo sapiens
  misc_RNA (1)...(19): siRNA sense strand
cgucaccugucugagaaga

SEQ ID NO: 1455263 - RNA, 19 nt, Homo sapiens
  misc_RNA (1)...(19): siRNA sense strand
ugagcagucccuaugaugu

SEQ ID NO: 1455264 - RNA, 19 nt, Homo sapiens
  misc_RNA (1)...(19): siRNA sense strand
gagaagagccaucacauuu

SEQ ID NO: 1455265 - RNA, 19 nt, Homo sapiens
  misc_RNA (1)...(19): siRNA sense strand
gcaaagaccucccgaaugc

SEQ ID NO: 1455266 - RNA, 19 nt, Homo sapiens
  misc_RNA (1)...(19): siRNA sense strand
ucagaugggugguauguuu

SEQ ID NO: 1455267 - RNA, 19 nt, Homo sapiens
  misc_RNA (1)...(19): siRNA sense strand
gcggucagauguccaguuu

SEQ ID NO: 1455268 - RNA, 19 nt, Homo sapiens
  misc_RNA (1)...(19): siRNA sense strand
ggacuucgcucuaaaagga

SEQ ID NO: 1455269 - RNA, 19 nt, Homo sapiens
  misc_RNA (1)...(19): siRNA sense strand
cuguagagcugccuuauga

SEQ ID NO: 1455270 - RNA, 19 nt, Homo sapiens
  misc_RNA (1)...(19): siRNA sense strand
caagggacuucgcucuaaa

SEQ ID NO: 1455271 - RNA, 19 nt, Homo sapiens
  misc_RNA (1)...(19): siRNA sense strand
gacccgaguucuccuuuga

SEQ ID NO: 1455272 - RNA, 19 nt, Homo sapiens
  misc_RNA (1)...(19): siRNA sense strand
acaagggacuucgcucuaa

SEQ ID NO: 1455273 - RNA, 19 nt, Homo sapiens
  misc_RNA (1)...(19): siRNA sense strand
gaagagccaucacauuucc

SEQ ID NO: 1455274 - RNA, 19 nt, Homo sapiens
  misc_RNA (1)...(19): siRNA sense strand
gaggucagcgugcgucuuu

SEQ ID NO: 1455275 - RNA, 19 nt, Homo sapiens
  misc_RNA (1)...(19): siRNA sense strand
acacuccgcugcccacuga

SEQ ID NO: 1455276 - RNA, 19 nt, Homo sapiens
  misc_RNA (1)...(19): siRNA sense strand
ggucagauguccaguuugc

SEQ ID NO: 1455277 - RNA, 19 nt, Homo sapiens
  misc_RNA (1)...(19): siRNA sense strand
gagcugagcagucccuaug

SEQ ID NO: 1455278 - RNA, 19 nt, Homo sapiens
  misc_RNA (1)...(19): siRNA sense strand
cgaguucuccuuugauuug

SEQ ID NO: 1455279 - RNA, 19 nt, Homo sapiens
  misc_RNA (1)...(19): siRNA sense strand
ggacccgaguucuccuuug

SEQ ID NO: 1455280 - RNA, 19 nt, Homo sapiens
  misc_RNA (1)...(19): siRNA sense strand
agagcugccuuaugaauuc

SEQ ID NO: 1455281 - RNA, 19 nt, Homo sapiens
  misc_RNA (1)...(19): siRNA sense strand
gcagcugauucuucacuuc

SEQ ID NO: 1455282 - RNA, 19 nt, Homo sapiens
  misc_RNA (1)...(19): siRNA sense strand
ucacuagaccucaucauuc

SEQ ID NO: 1455283 - RNA, 19 nt, Homo sapiens
  misc_RNA (1)...(19): siRNA sense strand
ccagagacaugggaaaguc

SEQ ID NO: 1455284 - RNA, 19 nt, Homo sapiens
  misc_RNA (1)...(19): siRNA sense strand
gcugcucgcuuacuucagu

SEQ ID NO: 1455285 - RNA, 19 nt, Homo sapiens
  misc_RNA (1)...(19): siRNA sense strand
gaaagucuucccagauugg

SEQ ID NO: 1455286 - RNA, 19 nt, Homo sapiens
  misc_RNA (1)...(19): siRNA sense strand
cagcagccauguugaaugc

SEQ ID NO: 1455287 - RNA, 19 nt, Homo sapiens
  misc_RNA (1)...(19): siRNA sense strand
guagagcugccuuaugaau

SEQ ID NO: 1455288 - RNA, 19 nt, Homo sapiens
  misc_RNA (1)...(19): siRNA sense strand
gcugagcagucccuaugau

SEQ ID NO: 1455289 - RNA, 19 nt, Homo sapiens
  misc_RNA (1)...(19): siRNA sense strand
ugagaagagccaucacauu

SEQ ID NO: 1455290 - RNA, 19 nt, Homo sapiens
  misc_RNA (1)...(19): siRNA sense strand
gcuauucgggugaccauau

SEQ ID NO: 1455291 - RNA, 19 nt, Homo sapiens
  misc_RNA (1)...(19): siRNA sense strand
caagaaugcaugccaccuu

SEQ ID NO: 1455292 - RNA, 19 nt, Homo sapiens
  misc_RNA (1)...(19): siRNA sense strand
gcauggaggacccgaguuc

SEQ ID NO: 1455293 - RNA, 19 nt, Homo sapiens
  misc_RNA (1)...(19): siRNA sense strand
gagcuggccagaagccuau

SEQ ID NO: 1455294 - RNA, 19 nt, Homo sapiens
  misc_RNA (1)...(19): siRNA sense strand
gucgucaccugucugagaa

SEQ ID NO: 1455295 - RNA, 19 nt, Homo sapiens
  misc_RNA (1)...(19): siRNA sense strand
cccgaguucuccuuugauu

SEQ ID NO: 1455296 - RNA, 19 nt, Homo sapiens
  misc_RNA (1)...(19): siRNA sense strand
gagcagucccuaugauguc

SEQ ID NO: 1455297 - RNA, 19 nt, Homo sapiens
  misc_RNA (1)...(19): siRNA sense strand
ucucucacauccuggaaug

SEQ ID NO: 1455298 - RNA, 19 nt, Homo sapiens
  misc_RNA (1)...(19): siRNA sense strand
gucacuagaccucaucauu

SEQ ID NO: 1455299 - RNA, 19 nt, Homo sapiens
  misc_RNA (1)...(19): siRNA sense strand
uagagcugccuuaugaauu

SEQ ID NO: 1455300 - RNA, 19 nt, Homo sapiens
  misc_RNA (1)...(19): siRNA sense strand
ggugguauguuuuggagaa

SEQ ID NO: 1455301 - RNA, 19 nt, Homo sapiens
  misc_RNA (1)...(19): siRNA sense strand
agaagagccaucacauuuc

SEQ ID NO: 1455302 - RNA, 19 nt, Homo sapiens
  misc_RNA (1)...(19): siRNA sense strand
uggaauguaagcauggaua

SEQ ID NO: 1455303 - RNA, 19 nt, Homo sapiens
  misc_RNA (1)...(19): siRNA sense strand
ucccuaugauguccagaaa

SEQ ID NO: 1455304 - RNA, 19 nt, Homo sapiens
  misc_RNA (1)...(19): siRNA sense strand
cacaagggacuucgcucua

SEQ ID NO: 1455305 - RNA, 19 nt, Homo sapiens
  misc_RNA (1)...(19): siRNA sense strand
gagagucagauggguggua

SEQ ID NO: 1455306 - RNA, 19 nt, Homo sapiens
  misc_RNA (1)...(19): siRNA sense strand
agagucagaugggugguau

SEQ ID NO: 1455307 - RNA, 19 nt, Homo sapiens
  misc_RNA (1)...(19): siRNA sense strand
cagauuggacucacaaagg

SEQ ID NO: 1455308 - RNA, 19 nt, Homo sapiens
  misc_RNA (1)...(19): siRNA sense strand
caaguucucuuuuggaaac

SEQ ID NO: 1455309 - RNA, 19 nt, Homo sapiens
  misc_RNA (1)...(19): siRNA sense strand
ccuaugauguccagaaaau

SEQ ID NO: 1455310 - RNA, 19 nt, Homo sapiens
  misc_RNA (1)...(19): siRNA sense strand
cagaggcacgacuggcaua

SEQ ID NO: 1455311 - RNA, 19 nt, Homo sapiens
  misc_RNA (1)...(19): siRNA sense strand
cgucgucaccugucugaga

SEQ ID NO: 1455312 - RNA, 19 nt, Homo sapiens
  misc_RNA (1)...(19): siRNA sense strand
ggaauguaagcauggauac

SEQ ID NO: 1455313 - RNA, 19 nt, Homo sapiens
  misc_RNA (1)...(19): siRNA sense strand
cagcucugcuucaaguucu

SEQ ID NO: 1455314 - RNA, 19 nt, Homo sapiens
  misc_RNA (1)...(19): siRNA sense strand
ggucagcgugcgucuuugu

SEQ ID NO: 1455315 - RNA, 19 nt, Homo sapiens
  misc_RNA (1)...(19): siRNA sense strand
gauccagagacaugggaaa

SEQ ID NO: 1455316 - RNA, 19 nt, Homo sapiens
  misc_RNA (1)...(19): siRNA sense strand
cgacuggcauacccuuugc

SEQ ID NO: 1455317 - RNA, 19 nt, Homo sapiens
  misc_RNA (1)...(19): siRNA sense strand
ugggagcgcuggcugaacu

SEQ ID NO: 1455318 - RNA, 19 nt, Homo sapiens
  misc_RNA (1)...(19): siRNA sense strand
gcauagaggcauccuaccu

SEQ ID NO: 1455319 - RNA, 19 nt, Homo sapiens
  misc_RNA (1)...(19): siRNA sense strand
acacuguagagcugccuua

SEQ ID NO: 1455320 - RNA, 19 nt, Homo sapiens
  misc_RNA (1)...(19): siRNA sense strand
cacuagaccucaucauucc

SEQ ID NO: 1455321 - RNA, 19 nt, Homo sapiens
  misc_RNA (1)...(19): siRNA sense strand
ugagcagucccuaugaugu

SEQ ID NO: 1455322 - RNA, 19 nt, Homo sapiens
  misc_RNA (1)...(19): siRNA sense strand
ccuacuggguguuguucug

SEQ ID NO: 1455323 - RNA, 19 nt, Homo sapiens
  misc_RNA (1)...(19): siRNA sense strand
gacccaaccuucggaucca

SEQ ID NO: 1455324 - RNA, 19 nt, Homo sapiens
  misc_RNA (1)...(19): siRNA sense strand
cgucaccugucugagaaga

SEQ ID NO: 1455325 - RNA, 19 nt, Homo sapiens
  misc_RNA (1)...(19): siRNA sense strand
gagaagagccaucacauuu

SEQ ID NO: 1455326 - RNA, 19 nt, Homo sapiens
  misc_RNA (1)...(19): siRNA sense strand
gcaaagaccucccgaaugc

SEQ ID NO: 1455327 - RNA, 19 nt, Homo sapiens
  misc_RNA (1)...(19): siRNA sense strand
ucagaugggugguauguuu

SEQ ID NO: 1455328 - RNA, 19 nt, Homo sapiens
  misc_RNA (1)...(19): siRNA sense strand
gcggucagauguccaguuu

SEQ ID NO: 1455329 - RNA, 19 nt, Homo sapiens
  misc_RNA (1)...(19): siRNA sense strand
ggacuucgcucuaaaagga

SEQ ID NO: 1455330 - RNA, 19 nt, Homo sapiens
  misc_RNA (1)...(19): siRNA sense strand
cuguagagcugccuuauga

SEQ ID NO: 1455331 - RNA, 19 nt, Homo sapiens
  misc_RNA (1)...(19): siRNA sense strand
caagggacuucgcucuaaa

SEQ ID NO: 1455332 - RNA, 19 nt, Homo sapiens
  misc_RNA (1)...(19): siRNA sense strand
gacccgaguucuccuuuga

SEQ ID NO: 1455333 - RNA, 19 nt, Homo sapiens
  misc_RNA (1)...(19): siRNA sense strand
acaagggacuucgcucuaa

SEQ ID NO: 1455334 - RNA, 19 nt, Homo sapiens
  misc_RNA (1)...(19): siRNA sense strand
gaagagccaucacauuucc

SEQ ID NO: 1455335 - RNA, 19 nt, Homo sapiens
  misc_RNA (1)...(19): siRNA sense strand
gaggucagcgugcgucuuu

SEQ ID NO: 1455336 - RNA, 19 nt, Homo sapiens
  misc_RNA (1)...(19): siRNA sense strand
acacuccgcugcccacuga

SEQ ID NO: 1455337 - RNA, 19 nt, Homo sapiens
  misc_RNA (1)...(19): siRNA sense strand
ggucagauguccaguuugc

SEQ ID NO: 1455338 - RNA, 19 nt, Homo sapiens
  misc_RNA (1)...(19): siRNA sense strand
gagcugagcagucccuaug

SEQ ID NO: 1455339 - RNA, 19 nt, Homo sapiens
  misc_RNA (1)...(19): siRNA sense strand
cgaguucuccuuugauuug

SEQ ID NO: 1455340 - RNA, 19 nt, Homo sapiens
  misc_RNA (1)...(19): siRNA sense strand
ggacccgaguucuccuuug

SEQ ID NO: 1455341 - RNA, 19 nt, Homo sapiens
  misc_RNA (1)...(19): siRNA sense strand
agagcugccuuaugaauuc

SEQ ID NO: 1455342 - RNA, 19 nt, Homo sapiens
  misc_RNA (1)...(19): siRNA sense strand
gcagcugauucuucacuuc

SEQ ID NO: 1455343 - RNA, 19 nt, Homo sapiens
  misc_RNA (1)...(19): siRNA sense strand
ucacuagaccucaucauuc

SEQ ID NO: 1455344 - RNA, 19 nt, Homo sapiens
  misc_RNA (1)...(19): siRNA sense strand
ccagagacaugggaaaguc

SEQ ID NO: 1455345 - RNA, 19 nt, Homo sapiens
  misc_RNA (1)...(19): siRNA sense strand
gaaagucuucccagauugg

SEQ ID NO: 1455346 - RNA, 19 nt, Homo sapiens
  misc_RNA (1)...(19): siRNA sense strand
cagcagccauguugaaugc

SEQ ID NO: 1455347 - RNA, 19 nt, Homo sapiens
  misc_RNA (1)...(19): siRNA sense strand
guagagcugccuuaugaau

SEQ ID NO: 1455348 - RNA, 19 nt, Homo sapiens
  misc_RNA (1)...(19): siRNA sense strand
gcugagcagucccuaugau

SEQ ID NO: 1455349 - RNA, 19 nt, Homo sapiens
  misc_RNA (1)...(19): siRNA sense strand
ugagaagagccaucacauu

SEQ ID NO: 1455350 - RNA, 19 nt, Homo sapiens
  misc_RNA (1)...(19): siRNA sense strand
gcuauucgggugaccauau

SEQ ID NO: 1455351 - RNA, 19 nt, Homo sapiens
  misc_RNA (1)...(19): siRNA sense strand
caagaaugcaugccaccuu

SEQ ID NO: 1455352 - RNA, 19 nt, Homo sapiens
  misc_RNA (1)...(19): siRNA sense strand
gcauggaggacccgaguuc

SEQ ID NO: 1455353 - RNA, 19 nt, Homo sapiens
  misc_RNA (1)...(19): siRNA sense strand
gagcuggccagaagccuau

SEQ ID NO: 1455354 - RNA, 19 nt, Homo sapiens
  misc_RNA (1)...(19): siRNA sense strand
gucgucaccugucugagaa

SEQ ID NO: 1455355 - RNA, 19 nt, Homo sapiens
  misc_RNA (1)...(19): siRNA sense strand
cccgaguucuccuuugauu

SEQ ID NO: 1455356 - RNA, 19 nt, Homo sapiens
  misc_RNA (1)...(19): siRNA sense strand
gagcagucccuaugauguc

SEQ ID NO: 1455357 - RNA, 19 nt, Homo sapiens
  misc_RNA (1)...(19): siRNA sense strand
ucucucacauccuggaaug

SEQ ID NO: 1455358 - RNA, 19 nt, Homo sapiens
  misc_RNA (1)...(19): siRNA sense strand
gucacuagaccucaucauu

SEQ ID NO: 1455359 - RNA, 19 nt, Homo sapiens
  misc_RNA (1)...(19): siRNA sense strand
uagagcugccuuaugaauu

SEQ ID NO: 1455360 - RNA, 19 nt, Homo sapiens
  misc_RNA (1)...(19): siRNA sense strand
ggugguauguuuuggagaa

SEQ ID NO: 1455361 - RNA, 19 nt, Homo sapiens
  misc_RNA (1)...(19): siRNA sense strand
agaagagccaucacauuuc

SEQ ID NO: 1455362 - RNA, 19 nt, Homo sapiens
  misc_RNA (1)...(19): siRNA sense strand
uggaauguaagcauggaua

SEQ ID NO: 1455363 - RNA, 19 nt, Homo sapiens
  misc_RNA (1)...(19): siRNA sense strand
ucccuaugauguccagaaa

SEQ ID NO: 1455364 - RNA, 19 nt, Homo sapiens
  misc_RNA (1)...(19): siRNA sense strand
cacaagggacuucgcucua

SEQ ID NO: 1455365 - RNA, 19 nt, Homo sapiens
  misc_RNA (1)...(19): siRNA sense strand
gagagucagauggguggua

SEQ ID NO: 1455366 - RNA, 19 nt, Homo sapiens
  misc_RNA (1)...(19): siRNA sense strand
agagucagaugggugguau

SEQ ID NO: 1455367 - RNA, 19 nt, Homo sapiens
  misc_RNA (1)...(19): siRNA sense strand
cagauuggacucacaaagg

SEQ ID NO: 1455368 - RNA, 19 nt, Homo sapiens
  misc_RNA (1)...(19): siRNA sense strand
caaguucucuuuuggaaac

SEQ ID NO: 1455369 - RNA, 19 nt, Homo sapiens
  misc_RNA (1)...(19): siRNA sense strand
ccuaugauguccagaaaau

SEQ ID NO: 1455370 - RNA, 19 nt, Homo sapiens
  misc_RNA (1)...(19): siRNA sense strand
cagaggcacgacuggcaua

SEQ ID NO: 1455371 - RNA, 19 nt, Homo sapiens
  misc_RNA (1)...(19): siRNA sense strand
cgucgucaccugucugaga

SEQ ID NO: 1455372 - RNA, 19 nt, Homo sapiens
  misc_RNA (1)...(19): siRNA sense strand
ggaauguaagcauggauac

SEQ ID NO: 1455373 - RNA, 19 nt, Homo sapiens
  misc_RNA (1)...(19): siRNA sense strand
cagcucugcuucaaguucu

SEQ ID NO: 1455374 - RNA, 19 nt, Homo sapiens
  misc_RNA (1)...(19): siRNA sense strand
gauccagagacaugggaaa

SEQ ID NO: 1455375 - RNA, 19 nt, Homo sapiens
  misc_RNA (1)...(19): siRNA sense strand
ggucagcgugcgucuuugu

SEQ ID NO: 1455376 - RNA, 19 nt, Homo sapiens
  misc_RNA (1)...(19): siRNA sense strand
cgacuggcauacccuuugc

SEQ ID NO: 1455377 - RNA, 19 nt, Homo sapiens
  misc_RNA (1)...(19): siRNA sense strand
gcauagaggcauccuaccu

SEQ ID NO: 1455378 - RNA, 19 nt, Homo sapiens
  misc_RNA (1)...(19): siRNA sense strand
acacuguagagcugccuua

SEQ ID NO: 1455379 - RNA, 19 nt, Homo sapiens
  misc_RNA (1)...(19): siRNA sense strand
cacuagaccucaucauucc

SEQ ID NO: 1455380 - RNA, 19 nt, Homo sapiens
  misc_RNA (1)...(19): siRNA sense strand
ugagcagucccuaugaugu

SEQ ID NO: 1455381 - RNA, 19 nt, Homo sapiens
  misc_RNA (1)...(19): siRNA sense strand
gacccaaccuucggaucca

SEQ ID NO: 1455382 - RNA, 19 nt, Homo sapiens
  misc_RNA (1)...(19): siRNA sense strand
cgucaccugucugagaaga

SEQ ID NO: 1455383 - RNA, 19 nt, Homo sapiens
  misc_RNA (1)...(19): siRNA sense strand
gagaagagccaucacauuu

SEQ ID NO: 1455384 - RNA, 19 nt, Homo sapiens
  misc_RNA (1)...(19): siRNA sense strand
gcaaagaccucccgaaugc

SEQ ID NO: 1455385 - RNA, 19 nt, Homo sapiens
  misc_RNA (1)...(19): siRNA sense strand
ucagaugggugguauguuu

SEQ ID NO: 1455386 - RNA, 19 nt, Homo sapiens
  misc_RNA (1)...(19): siRNA sense strand
gcggucagauguccaguuu

SEQ ID NO: 1455387 - RNA, 19 nt, Homo sapiens
  misc_RNA (1)...(19): siRNA sense strand
ggacuucgcucuaaaagga

SEQ ID NO: 1455388 - RNA, 19 nt, Homo sapiens
  misc_RNA (1)...(19): siRNA sense strand
cuguagagcugccuuauga

SEQ ID NO: 1455389 - RNA, 19 nt, Homo sapiens
  misc_RNA (1)...(19): siRNA sense strand
caagggacuucgcucuaaa

SEQ ID NO: 1455390 - RNA, 19 nt, Homo sapiens
  misc_RNA (1)...(19): siRNA sense strand
gacccgaguucuccuuuga

SEQ ID NO: 1455391 - RNA, 19 nt, Homo sapiens
  misc_RNA (1)...(19): siRNA sense strand
acaagggacuucgcucuaa

SEQ ID NO: 1455392 - RNA, 19 nt, Homo sapiens
  misc_RNA (1)...(19): siRNA sense strand
gaagagccaucacauuucc

SEQ ID NO: 1455393 - RNA, 19 nt, Homo sapiens
  misc_RNA (1)...(19): siRNA sense strand
gaggucagcgugcgucuuu

SEQ ID NO: 1455394 - RNA, 19 nt, Homo sapiens
  misc_RNA (1)...(19): siRNA sense strand
acacuccgcugcccacuga

SEQ ID NO: 1455395 - RNA, 19 nt, Homo sapiens
  misc_RNA (1)...(19): siRNA sense strand
ggucagauguccaguuugc

SEQ ID NO: 1455396 - RNA, 19 nt, Homo sapiens
  misc_RNA (1)...(19): siRNA sense strand
gagcugagcagucccuaug

SEQ ID NO: 1455397 - RNA, 19 nt, Homo sapiens
  misc_RNA (1)...(19): siRNA sense strand
cgaguucuccuuugauuug

SEQ ID NO: 1455398 - RNA, 19 nt, Homo sapiens
  misc_RNA (1)...(19): siRNA sense strand
ggacccgaguucuccuuug

SEQ ID NO: 1455399 - RNA, 19 nt, Homo sapiens
  misc_RNA (1)...(19): siRNA sense strand
agagcugccuuaugaauuc

SEQ ID NO: 1455400 - RNA, 19 nt, Homo sapiens
  misc_RNA (1)...(19): siRNA sense strand
gcagcugauucuucacuuc

SEQ ID NO: 1455401 - RNA, 19 nt, Homo sapiens
  misc_RNA (1)...(19): siRNA sense strand
ucacuagaccucaucauuc

SEQ ID NO: 1455402 - RNA, 19 nt, Homo sapiens
  misc_RNA (1)...(19): siRNA sense strand
ccagagacaugggaaaguc

SEQ ID NO: 1455403 - RNA, 19 nt, Homo sapiens
  misc_RNA (1)...(19): siRNA sense strand
gcugcucgcuuacuucagu

SEQ ID NO: 1455404 - RNA, 19 nt, Homo sapiens
  misc_RNA (1)...(19): siRNA sense strand
gaaagucuucccagauugg

SEQ ID NO: 1455405 - RNA, 19 nt, Homo sapiens
  misc_RNA (1)...(19): siRNA sense strand
cagcagccauguugaaugc

SEQ ID NO: 1455406 - RNA, 19 nt, Homo sapiens
  misc_RNA (1)...(19): siRNA sense strand
guagagcugccuuaugaau

SEQ ID NO: 1455407 - RNA, 19 nt, Homo sapiens
  misc_RNA (1)...(19): siRNA sense strand
ugagaagagccaucacauu

SEQ ID NO: 1455408 - RNA, 19 nt, Homo sapiens
  misc_RNA (1)...(19): siRNA sense strand
gcugagcagucccuaugau

SEQ ID NO: 1455409 - RNA, 19 nt, Homo sapiens
  misc_RNA (1)...(19): siRNA sense strand
gcuauucgggugaccauau

SEQ ID NO: 1455410 - RNA, 19 nt, Homo sapiens
  misc_RNA (1)...(19): siRNA sense strand
caagaaugcaugccaccuu

SEQ ID NO: 1455411 - RNA, 19 nt, Homo sapiens
  misc_RNA (1)...(19): siRNA sense strand
acauucaaguucuauagga

SEQ ID NO: 1455412 - RNA, 19 nt, Homo sapiens
  misc_RNA (1)...(19): siRNA sense strand
gagcuggccagaagccuau

SEQ ID NO: 1455413 - RNA, 19 nt, Homo sapiens
  misc_RNA (1)...(19): siRNA sense strand
gcauggaggacccgaguuc

SEQ ID NO: 1455414 - RNA, 19 nt, Homo sapiens
  misc_RNA (1)...(19): siRNA sense strand
ccacauucaaguucuauag

SEQ ID NO: 1455415 - RNA, 19 nt, Homo sapiens
  misc_RNA (1)...(19): siRNA sense strand
cccgaguucuccuuugauu

SEQ ID NO: 1455416 - RNA, 19 nt, Homo sapiens
  misc_RNA (1)...(19): siRNA sense strand
gucgucaccugucugagaa

SEQ ID NO: 1455417 - RNA, 19 nt, Homo sapiens
  misc_RNA (1)...(19): siRNA sense strand
gagcagucccuaugauguc

SEQ ID NO: 1455418 - RNA, 19 nt, Homo sapiens
  misc_RNA (1)...(19): siRNA sense strand
ucucucacauccuggaaug

SEQ ID NO: 1455419 - RNA, 19 nt, Homo sapiens
  misc_RNA (1)...(19): siRNA sense strand
gucacuagaccucaucauu

SEQ ID NO: 1455420 - RNA, 19 nt, Homo sapiens
  misc_RNA (1)...(19): siRNA sense strand
uagagcugccuuaugaauu

SEQ ID NO: 1455421 - RNA, 19 nt, Homo sapiens
  misc_RNA (1)...(19): siRNA sense strand
ggugguauguuuuggagaa

SEQ ID NO: 1455422 - RNA, 19 nt, Homo sapiens
  misc_RNA (1)...(19): siRNA sense strand
agaagagccaucacauuuc

SEQ ID NO: 1455423 - RNA, 19 nt, Homo sapiens
  misc_RNA (1)...(19): siRNA sense strand
uggaauguaagcauggaua

SEQ ID NO: 1455424 - RNA, 19 nt, Homo sapiens
  misc_RNA (1)...(19): siRNA sense strand
ucccuaugauguccagaaa

SEQ ID NO: 1455425 - RNA, 19 nt, Homo sapiens
  misc_RNA (1)...(19): siRNA sense strand
cacaagggacuucgcucua

SEQ ID NO: 1455426 - RNA, 19 nt, Homo sapiens
  misc_RNA (1)...(19): siRNA sense strand
gagagucagauggguggua

SEQ ID NO: 1455427 - RNA, 19 nt, Homo sapiens
  misc_RNA (1)...(19): siRNA sense strand
agagucagaugggugguau

SEQ ID NO: 1455428 - RNA, 19 nt, Homo sapiens
  misc_RNA (1)...(19): siRNA sense strand
cagauuggacucacaaagg

SEQ ID NO: 1455429 - RNA, 19 nt, Homo sapiens
  misc_RNA (1)...(19): siRNA sense strand
caaguucucuuuuggaaac

SEQ ID NO: 1455430 - RNA, 19 nt, Homo sapiens
  misc_RNA (1)...(19): siRNA sense strand
ccuaugauguccagaaaau

SEQ ID NO: 1455431 - RNA, 19 nt, Homo sapiens
  misc_RNA (1)...(19): siRNA sense strand
cagaggcacgacuggcaua

SEQ ID NO: 1455432 - RNA, 19 nt, Homo sapiens
  misc_RNA (1)...(19): siRNA sense strand
ggaauguaagcauggauac

SEQ ID NO: 1455433 - RNA, 19 nt, Homo sapiens
  misc_RNA (1)...(19): siRNA sense strand
cgucgucaccugucugaga

SEQ ID NO: 1455434 - RNA, 19 nt, Homo sapiens
  misc_RNA (1)...(19): siRNA sense strand
cagcucugcuucaaguucu

SEQ ID NO: 1455435 - RNA, 19 nt, Homo sapiens
  misc_RNA (1)...(19): siRNA sense strand
gauccagagacaugggaaa

SEQ ID NO: 1455436 - RNA, 19 nt, Homo sapiens
  misc_RNA (1)...(19): siRNA sense strand
ggucagcgugcgucuuugu

SEQ ID NO: 1455437 - RNA, 19 nt, Homo sapiens
  misc_RNA (1)...(19): siRNA sense strand
cgacuggcauacccuuugc

SEQ ID NO: 1455438 - RNA, 19 nt, Homo sapiens
  misc_RNA (1)...(19): siRNA sense strand
ugggagcgcuggcugaacu

SEQ ID NO: 1455439 - RNA, 19 nt, Homo sapiens
  misc_RNA (1)...(19): siRNA sense strand
gcauagaggcauccuaccu

SEQ ID NO: 1455440 - RNA, 19 nt, Homo sapiens
  misc_RNA (1)...(19): siRNA sense strand
acacuguagagcugccuua

SEQ ID NO: 1455441 - RNA, 19 nt, Homo sapiens
  misc_RNA (1)...(19): siRNA sense strand
cacuagaccucaucauucc

SEQ ID NO: 1455442 - RNA, 19 nt, Homo sapiens
  misc_RNA (1)...(19): siRNA sense strand
gacccaaccuucggaucca

SEQ ID NO: 1455443 - RNA, 19 nt, Homo sapiens
  misc_RNA (1)...(19): siRNA sense strand
ccuacuggguguuguucug

SEQ ID NO: 1455444 - RNA, 19 nt, Homo sapiens
  misc_RNA (1)...(19): siRNA sense strand
cgucaccugucugagaaga

SEQ ID NO: 1455445 - RNA, 19 nt, Homo sapiens
  misc_RNA (1)...(19): siRNA sense strand
ugagcagucccuaugaugu

SEQ ID NO: 1455446 - RNA, 19 nt, Homo sapiens
  misc_RNA (1)...(19): siRNA sense strand
gagaagagccaucacauuu

SEQ ID NO: 1455447 - RNA, 19 nt, Homo sapiens
  misc_RNA (1)...(19): siRNA sense strand
gcaaagaccucccgaaugc

SEQ ID NO: 1455448 - RNA, 19 nt, Homo sapiens
  misc_RNA (1)...(19): siRNA sense strand
ucagaugggugguauguuu

SEQ ID NO: 1455449 - RNA, 19 nt, Homo sapiens
  misc_RNA (1)...(19): siRNA sense strand
gcggucagauguccaguuu

SEQ ID NO: 1455450 - RNA, 19 nt, Homo sapiens
  misc_RNA (1)...(19): siRNA sense strand
ggacuucgcucuaaaagga

SEQ ID NO: 1455451 - RNA, 19 nt, Homo sapiens
  misc_RNA (1)...(19): siRNA sense strand
cuguagagcugccuuauga

SEQ ID NO: 1455452 - RNA, 19 nt, Homo sapiens
  misc_RNA (1)...(19): siRNA sense strand
caagggacuucgcucuaaa

SEQ ID NO: 1455453 - RNA, 19 nt, Homo sapiens
  misc_RNA (1)...(19): siRNA sense strand
gacccgaguucuccuuuga

SEQ ID NO: 1455454 - RNA, 19 nt, Homo sapiens
  misc_RNA (1)...(19): siRNA sense strand
acaagggacuucgcucuaa

SEQ ID NO: 1455455 - RNA, 19 nt, Homo sapiens
  misc_RNA (1)...(19): siRNA sense strand
gaagagccaucacauuucc

SEQ ID NO: 1455456 - RNA, 19 nt, Homo sapiens
  misc_RNA (1)...(19): siRNA sense strand
gaggucagcgugcgucuuu

SEQ ID NO: 1455457 - RNA, 19 nt, Homo sapiens
  misc_RNA (1)...(19): siRNA sense strand
acacuccgcugcccacuga

SEQ ID NO: 1455458 - RNA, 19 nt, Homo sapiens
  misc_RNA (1)...(19): siRNA sense strand
ggucagauguccaguuugc

SEQ ID NO: 1455459 - RNA, 19 nt, Homo sapiens
  misc_RNA (1)...(19): siRNA sense strand
gagcugagcagucccuaug

SEQ ID NO: 1455460 - RNA, 19 nt, Homo sapiens
  misc_RNA (1)...(19): siRNA sense strand
cgaguucuccuuugauuug

SEQ ID NO: 1455461 - RNA, 19 nt, Homo sapiens
  misc_RNA (1)...(19): siRNA sense strand
ggacccgaguucuccuuug

SEQ ID NO: 1455462 - RNA, 19 nt, Homo sapiens
  misc_RNA (1)...(19): siRNA sense strand
agagcugccuuaugaauuc

SEQ ID NO: 1455463 - RNA, 19 nt, Homo sapiens
  misc_RNA (1)...(19): siRNA sense strand
gcagcugauucuucacuuc

SEQ ID NO: 1455464 - RNA, 19 nt, Homo sapiens
  misc_RNA (1)...(19): siRNA sense strand
ucacuagaccucaucauuc

SEQ ID NO: 1455465 - RNA, 19 nt, Homo sapiens
  misc_RNA (1)...(19): siRNA sense strand
ccagagacaugggaaaguc

SEQ ID NO: 1455466 - RNA, 19 nt, Homo sapiens
  misc_RNA (1)...(19): siRNA sense strand
ugccacagcucgagaguca

SEQ ID NO: 1455467 - RNA, 19 nt, Homo sapiens
  misc_RNA (1)...(19): siRNA sense strand
gaaagucuucccagauugg

SEQ ID NO: 1455468 - RNA, 19 nt, Homo sapiens
  misc_RNA (1)...(19): siRNA sense strand
cagcagccauguugaaugc

SEQ ID NO: 1455469 - RNA, 19 nt, Homo sapiens
  misc_RNA (1)...(19): siRNA sense strand
guagagcugccuuaugaau

SEQ ID NO: 1455470 - RNA, 19 nt, Homo sapiens
  misc_RNA (1)...(19): siRNA sense strand
ugagaagagccaucacauu

SEQ ID NO: 1455471 - RNA, 19 nt, Homo sapiens
  misc_RNA (1)...(19): siRNA sense strand
gcugagcagucccuaugau

SEQ ID NO: 1455472 - RNA, 19 nt, Homo sapiens
  misc_RNA (1)...(19): siRNA sense strand
gcuauucgggugaccauau

SEQ ID NO: 1455473 - RNA, 19 nt, Homo sapiens
  misc_RNA (1)...(19): siRNA sense strand
caagaaugcaugccaccuu

SEQ ID NO: 1455474 - RNA, 19 nt, Homo sapiens
  misc_RNA (1)...(19): siRNA sense strand
acauucaaguucuauagga

SEQ ID NO: 1455475 - RNA, 19 nt, Homo sapiens
  misc_RNA (1)...(19): siRNA sense strand
gagcuggccagaagccuau

SEQ ID NO: 1455476 - RNA, 19 nt, Homo sapiens
  misc_RNA (1)...(19): siRNA sense strand
gcauggaggacccgaguuc

SEQ ID NO: 1455477 - RNA, 19 nt, Homo sapiens
  misc_RNA (1)...(19): siRNA sense strand
ccacauucaaguucuauag

SEQ ID NO: 1455478 - RNA, 19 nt, Homo sapiens
  misc_RNA (1)...(19): siRNA sense strand
ccacagcucgagagucaga

SEQ ID NO: 1455479 - RNA, 19 nt, Homo sapiens
  misc_RNA (1)...(19): siRNA sense strand
cccgaguucuccuuugauu

SEQ ID NO: 1455480 - RNA, 19 nt, Homo sapiens
  misc_RNA (1)...(19): siRNA sense strand
gucgucaccugucugagaa

SEQ ID NO: 1455481 - RNA, 19 nt, Homo sapiens
  misc_RNA (1)...(19): siRNA sense strand
gagcagucccuaugauguc

SEQ ID NO: 1455482 - RNA, 19 nt, Homo sapiens
  misc_RNA (1)...(19): siRNA sense strand
ucucucacauccuggaaug

SEQ ID NO: 1455483 - RNA, 19 nt, Homo sapiens
  misc_RNA (1)...(19): siRNA sense strand
gucacuagaccucaucauu

SEQ ID NO: 1455484 - RNA, 19 nt, Homo sapiens
  misc_RNA (1)...(19): siRNA sense strand
uagagcugccuuaugaauu

SEQ ID NO: 1455485 - RNA, 19 nt, Homo sapiens
  misc_RNA (1)...(19): siRNA sense strand
ggugguauguuuuggagaa

SEQ ID NO: 1455486 - RNA, 19 nt, Homo sapiens
  misc_RNA (1)...(19): siRNA sense strand
agaagagccaucacauuuc

SEQ ID NO: 1455487 - RNA, 19 nt, Homo sapiens
  misc_RNA (1)...(19): siRNA sense strand
uggaauguaagcauggaua

SEQ ID NO: 1455488 - RNA, 19 nt, Homo sapiens
  misc_RNA (1)...(19): siRNA sense strand
ucccuaugauguccagaaa

SEQ ID NO: 1455489 - RNA, 19 nt, Homo sapiens
  misc_RNA (1)...(19): siRNA sense strand
cacaagggacuucgcucua

SEQ ID NO: 1455490 - RNA, 19 nt, Homo sapiens
  misc_RNA (1)...(19): siRNA sense strand
gagagucagauggguggua

SEQ ID NO: 1455491 - RNA, 19 nt, Homo sapiens
  misc_RNA (1)...(19): siRNA sense strand
agagucagaugggugguau

SEQ ID NO: 1455492 - RNA, 19 nt, Homo sapiens
  misc_RNA (1)...(19): siRNA sense strand
cagauuggacucacaaagg

SEQ ID NO: 1455493 - RNA, 19 nt, Homo sapiens
  misc_RNA (1)...(19): siRNA sense strand
caaguucucuuuuggaaac

SEQ ID NO: 1455494 - RNA, 19 nt, Homo sapiens
  misc_RNA (1)...(19): siRNA sense strand
ccuaugauguccagaaaau

SEQ ID NO: 1455495 - RNA, 19 nt, Homo sapiens
  misc_RNA (1)...(19): siRNA sense strand
cgucgucaccugucugaga

SEQ ID NO: 1455496 - RNA, 19 nt, Homo sapiens
  misc_RNA (1)...(19): siRNA sense strand
ggaauguaagcauggauac

SEQ ID NO: 1455497 - RNA, 19 nt, Homo sapiens
  misc_RNA (1)...(19): siRNA sense strand
cagcucugcuucaaguucu

SEQ ID NO: 1455498 - RNA, 19 nt, Homo sapiens
  misc_RNA (1)...(19): siRNA sense strand
cagaggcacgacuggcaua

SEQ ID NO: 1455499 - RNA, 19 nt, Homo sapiens
  misc_RNA (1)...(19): siRNA sense strand
gauccagagacaugggaaa

SEQ ID NO: 1455500 - RNA, 19 nt, Homo sapiens
  misc_RNA (1)...(19): siRNA sense strand
ggucagcgugcgucuuugu

SEQ ID NO: 1455501 - RNA, 19 nt, Homo sapiens
  misc_RNA (1)...(19): siRNA sense strand
cgacuggcauacccuuugc

SEQ ID NO: 1455502 - RNA, 19 nt, Homo sapiens
  misc_RNA (1)...(19): siRNA sense strand
gcauagaggcauccuaccu

SEQ ID NO: 1455503 - RNA, 19 nt, Homo sapiens
  misc_RNA (1)...(19): siRNA sense strand
guccggaugucucuuacag

SEQ ID NO: 1455504 - RNA, 19 nt, Homo sapiens
  misc_RNA (1)...(19): siRNA sense strand
acacuguagagcugccuua

SEQ ID NO: 1455505 - RNA, 19 nt, Homo sapiens
  misc_RNA (1)...(19): siRNA sense strand
cacuagaccucaucauucc

SEQ ID NO: 1455506 - RNA, 19 nt, Homo sapiens
  misc_RNA (1)...(19): siRNA sense strand
gacccaaccuucggaucca

SEQ ID NO: 1455507 - RNA, 19 nt, Homo sapiens
  misc_RNA (1)...(19): siRNA sense strand
cgucaccugucugagaaga

SEQ ID NO: 1455508 - RNA, 19 nt, Homo sapiens
  misc_RNA (1)...(19): siRNA sense strand
ugagcagucccuaugaugu

SEQ ID NO: 1455509 - RNA, 19 nt, Homo sapiens
  misc_RNA (1)...(19): siRNA sense strand
gagaagagccaucacauuu

SEQ ID NO: 1455510 - RNA, 19 nt, Homo sapiens
  misc_RNA (1)...(19): siRNA sense strand
gcaaagaccucccgaaugc

SEQ ID NO: 1455511 - RNA, 19 nt, Homo sapiens
  misc_RNA (1)...(19): siRNA sense strand
ucagaugggugguauguuu

SEQ ID NO: 1455512 - RNA, 19 nt, Homo sapiens
  misc_RNA (1)...(19): siRNA sense strand
gcggucagauguccaguuu

SEQ ID NO: 1455513 - RNA, 19 nt, Homo sapiens
  misc_RNA (1)...(19): siRNA sense strand
ggacuucgcucuaaaagga

SEQ ID NO: 1455514 - RNA, 19 nt, Homo sapiens
  misc_RNA (1)...(19): siRNA sense strand
cuguagagcugccuuauga

SEQ ID NO: 1455515 - RNA, 19 nt, Homo sapiens
  misc_RNA (1)...(19): siRNA sense strand
caagggacuucgcucuaaa

SEQ ID NO: 1455516 - RNA, 19 nt, Homo sapiens
  misc_RNA (1)...(19): siRNA sense strand
gacccgaguucuccuuuga

SEQ ID NO: 1455517 - RNA, 19 nt, Homo sapiens
  misc_RNA (1)...(19): siRNA sense strand
acaagggacuucgcucuaa

SEQ ID NO: 1455518 - RNA, 19 nt, Homo sapiens
  misc_RNA (1)...(19): siRNA sense strand
gaagagccaucacauuucc

SEQ ID NO: 1455519 - RNA, 19 nt, Homo sapiens
  misc_RNA (1)...(19): siRNA sense strand
gaggucagcgugcgucuuu

SEQ ID NO: 1455520 - RNA, 19 nt, Homo sapiens
  misc_RNA (1)...(19): siRNA sense strand
acacuccgcugcccacuga

SEQ ID NO: 1455521 - RNA, 19 nt, Homo sapiens
  misc_RNA (1)...(19): siRNA sense strand
ggucagauguccaguuugc

SEQ ID NO: 1455522 - RNA, 19 nt, Homo sapiens
  misc_RNA (1)...(19): siRNA sense strand
gagcugagcagucccuaug

SEQ ID NO: 1455523 - RNA, 19 nt, Homo sapiens
  misc_RNA (1)...(19): siRNA sense strand
cgaguucuccuuugauuug

SEQ ID NO: 1455524 - RNA, 19 nt, Homo sapiens
  misc_RNA (1)...(19): siRNA sense strand
ggacccgaguucuccuuug

SEQ ID NO: 1455525 - RNA, 19 nt, Homo sapiens
  misc_RNA (1)...(19): siRNA sense strand
agagcugccuuaugaauuc

SEQ ID NO: 1455526 - RNA, 19 nt, Homo sapiens
  misc_RNA (1)...(19): siRNA sense strand
gcagcugauucuucacuuc

SEQ ID NO: 1455527 - RNA, 19 nt, Homo sapiens
  misc_RNA (1)...(19): siRNA sense strand
ucacuagaccucaucauuc

SEQ ID NO: 1455528 - RNA, 19 nt, Homo sapiens
  misc_RNA (1)...(19): siRNA sense strand
ccagagacaugggaaaguc

SEQ ID NO: 1455529 - RNA, 19 nt, Homo sapiens
  misc_RNA (1)...(19): siRNA sense strand
gcugcucgcuuacuucagu

SEQ ID NO: 1455530 - RNA, 19 nt, Homo sapiens
  misc_RNA (1)...(19): siRNA sense strand
gaaagucuucccagauugg

SEQ ID NO: 1455531 - RNA, 19 nt, Homo sapiens
  misc_RNA (1)...(19): siRNA sense strand
cagcagccauguugaaugc

SEQ ID NO: 1455532 - RNA, 19 nt, Homo sapiens
  misc_RNA (1)...(19): siRNA sense strand
guagagcugccuuaugaau

SEQ ID NO: 1455533 - RNA, 19 nt, Homo sapiens
  misc_RNA (1)...(19): siRNA sense strand
ugagaagagccaucacauu

SEQ ID NO: 1455534 - RNA, 19 nt, Homo sapiens
  misc_RNA (1)...(19): siRNA sense strand
gcugagcagucccuaugau

SEQ ID NO: 1455535 - RNA, 19 nt, Homo sapiens
  misc_RNA (1)...(19): siRNA sense strand
gcuauucgggugaccauau

SEQ ID NO: 1455536 - RNA, 19 nt, Homo sapiens
  misc_RNA (1)...(19): siRNA sense strand
caagaaugcaugccaccuu

SEQ ID NO: 1455537 - RNA, 19 nt, Homo sapiens
  misc_RNA (1)...(19): siRNA sense strand
acauucaaguucuauagga

SEQ ID NO: 1455538 - RNA, 19 nt, Homo sapiens
  misc_RNA (1)...(19): siRNA sense strand
gagcuggccagaagccuau

SEQ ID NO: 1455539 - RNA, 19 nt, Homo sapiens
  misc_RNA (1)...(19): siRNA sense strand
gcauggaggacccgaguuc

SEQ ID NO: 1455540 - RNA, 19 nt, Homo sapiens
  misc_RNA (1)...(19): siRNA sense strand
ccacauucaaguucuauag

SEQ ID NO: 1455541 - RNA, 19 nt, Homo sapiens
  misc_RNA (1)...(19): siRNA sense strand
cccgaguucuccuuugauu

SEQ ID NO: 1455542 - RNA, 19 nt, Homo sapiens
  misc_RNA (1)...(19): siRNA sense strand
gucgucaccugucugagaa

SEQ ID NO: 1455543 - RNA, 19 nt, Homo sapiens
  misc_RNA (1)...(19): siRNA sense strand
gagcagucccuaugauguc

SEQ ID NO: 1455544 - RNA, 19 nt, Homo sapiens
  misc_RNA (1)...(19): siRNA sense strand
ucucucacauccuggaaug

SEQ ID NO: 1455545 - RNA, 19 nt, Homo sapiens
  misc_RNA (1)...(19): siRNA sense strand
gucacuagaccucaucauu

SEQ ID NO: 1455546 - RNA, 19 nt, Homo sapiens
  misc_RNA (1)...(19): siRNA sense strand
uagagcugccuuaugaauu

SEQ ID NO: 1455547 - RNA, 19 nt, Homo sapiens
  misc_RNA (1)...(19): siRNA sense strand
ggugguauguuuuggagaa

SEQ ID NO: 1455548 - RNA, 19 nt, Homo sapiens
  misc_RNA (1)...(19): siRNA sense strand
agaagagccaucacauuuc

SEQ ID NO: 1455549 - RNA, 19 nt, Homo sapiens
  misc_RNA (1)...(19): siRNA sense strand
uggaauguaagcauggaua

SEQ ID NO: 1455550 - RNA, 19 nt, Homo sapiens
  misc_RNA (1)...(19): siRNA sense strand
ucccuaugauguccagaaa

SEQ ID NO: 1455551 - RNA, 19 nt, Homo sapiens
  misc_RNA (1)...(19): siRNA sense strand
cacaagggacuucgcucua

SEQ ID NO: 1455552 - RNA, 19 nt, Homo sapiens
  misc_RNA (1)...(19): siRNA sense strand
gagagucagauggguggua

SEQ ID NO: 1455553 - RNA, 19 nt, Homo sapiens
  misc_RNA (1)...(19): siRNA sense strand
agagucagaugggugguau

SEQ ID NO: 1455554 - RNA, 19 nt, Homo sapiens
  misc_RNA (1)...(19): siRNA sense strand
cagauuggacucacaaagg

SEQ ID NO: 1455555 - RNA, 19 nt, Homo sapiens
  misc_RNA (1)...(19): siRNA sense strand
caaguucucuuuuggaaac

SEQ ID NO: 1455556 - RNA, 19 nt, Homo sapiens
  misc_RNA (1)...(19): siRNA sense strand
ccuaugauguccagaaaau

SEQ ID NO: 1455557 - RNA, 19 nt, Homo sapiens
  misc_RNA (1)...(19): siRNA sense strand
cagaggcacgacuggcaua

SEQ ID NO: 1455558 - RNA, 19 nt, Homo sapiens
  misc_RNA (1)...(19): siRNA sense strand
ggaauguaagcauggauac

SEQ ID NO: 1455559 - RNA, 19 nt, Homo sapiens
  misc_RNA (1)...(19): siRNA sense strand
cgucgucaccugucugaga

SEQ ID NO: 1455560 - RNA, 19 nt, Homo sapiens
  misc_RNA (1)...(19): siRNA sense strand
cagcucugcuucaaguucu

SEQ ID NO: 1455561 - RNA, 19 nt, Homo sapiens
  misc_RNA (1)...(19): siRNA sense strand
gauccagagacaugggaaa

SEQ ID NO: 1455562 - RNA, 19 nt, Homo sapiens
  misc_RNA (1)...(19): siRNA sense strand
ggucagcgugcgucuuugu

SEQ ID NO: 1455563 - RNA, 19 nt, Homo sapiens
  misc_RNA (1)...(19): siRNA sense strand
cgacuggcauacccuuugc

SEQ ID NO: 1455564 - RNA, 19 nt, Homo sapiens
  misc_RNA (1)...(19): siRNA sense strand
ugggagcgcuggcugaacu

SEQ ID NO: 1455565 - RNA, 19 nt, Homo sapiens
  misc_RNA (1)...(19): siRNA sense strand
gcauagaggcauccuaccu

SEQ ID NO: 1455566 - RNA, 19 nt, Homo sapiens
  misc_RNA (1)...(19): siRNA sense strand
acacuguagagcugccuua

SEQ ID NO: 1455567 - RNA, 19 nt, Homo sapiens
  misc_RNA (1)...(19): siRNA sense strand
cacuagaccucaucauucc

SEQ ID NO: 1455568 - RNA, 19 nt, Homo sapiens
  misc_RNA (1)...(19): siRNA sense strand
gacccaaccuucggaucca

SEQ ID NO: 1455569 - RNA, 19 nt, Homo sapiens
  misc_RNA (1)...(19): siRNA sense strand
ccuacuggguguuguucug

SEQ ID NO: 1455570 - RNA, 19 nt, Homo sapiens
  misc_RNA (1)...(19): siRNA sense strand
cgucaccugucugagaaga

SEQ ID NO: 1455571 - RNA, 19 nt, Homo sapiens
  misc_RNA (1)...(19): siRNA sense strand
ugagcagucccuaugaugu

SEQ ID NO: 1455572 - RNA, 19 nt, Homo sapiens
  misc_RNA (1)...(19): siRNA sense strand
gagaagagccaucacauuu

SEQ ID NO: 1455573 - RNA, 19 nt, Homo sapiens
  misc_RNA (1)...(19): siRNA sense strand
gcaaagaccucccgaaugc

SEQ ID NO: 1455574 - RNA, 19 nt, Homo sapiens
  misc_RNA (1)...(19): siRNA sense strand
ucagaugggugguauguuu

SEQ ID NO: 1455575 - RNA, 19 nt, Homo sapiens
  misc_RNA (1)...(19): siRNA sense strand
gcggucagauguccaguuu

SEQ ID NO: 1455576 - RNA, 19 nt, Homo sapiens
  misc_RNA (1)...(19): siRNA sense strand
ggacuucgcucuaaaagga

SEQ ID NO: 1455577 - RNA, 19 nt, Homo sapiens
  misc_RNA (1)...(19): siRNA sense strand
cuguagagcugccuuauga

SEQ ID NO: 1455578 - RNA, 19 nt, Homo sapiens
  misc_RNA (1)...(19): siRNA sense strand
caagggacuucgcucuaaa

SEQ ID NO: 1455579 - RNA, 19 nt, Homo sapiens
  misc_RNA (1)...(19): siRNA sense strand
gacccgaguucuccuuuga

SEQ ID NO: 1455580 - RNA, 19 nt, Homo sapiens
  misc_RNA (1)...(19): siRNA sense strand
acaagggacuucgcucuaa

SEQ ID NO: 1455581 - RNA, 19 nt, Homo sapiens
  misc_RNA (1)...(19): siRNA sense strand
gaagagccaucacauuucc

SEQ ID NO: 1455582 - RNA, 19 nt, Homo sapiens
  misc_RNA (1)...(19): siRNA sense strand
gaggucagcgugcgucuuu

SEQ ID NO: 1455583 - RNA, 19 nt, Homo sapiens
  misc_RNA (1)...(19): siRNA sense strand
acacuccgcugcccacuga

SEQ ID NO: 1455584 - RNA, 19 nt, Homo sapiens
  misc_RNA (1)...(19): siRNA sense strand
ggucagauguccaguuugc

SEQ ID NO: 1455585 - RNA, 19 nt, Homo sapiens
  misc_RNA (1)...(19): siRNA sense strand
gagcugagcagucccuaug

SEQ ID NO: 1455586 - RNA, 19 nt, Homo sapiens
  misc_RNA (1)...(19): siRNA sense strand
cgaguucuccuuugauuug

SEQ ID NO: 1455587 - RNA, 19 nt, Homo sapiens
  misc_RNA (1)...(19): siRNA sense strand
ggacccgaguucuccuuug

SEQ ID NO: 1455588 - RNA, 19 nt, Homo sapiens
  misc_RNA (1)...(19): siRNA sense strand
agagcugccuuaugaauuc

SEQ ID NO: 1455589 - RNA, 19 nt, Homo sapiens
  misc_RNA (1)...(19): siRNA sense strand
gcagcugauucuucacuuc

SEQ ID NO: 1455590 - RNA, 19 nt, Homo sapiens
  misc_RNA (1)...(19): siRNA sense strand
ucacuagaccucaucauuc

SEQ ID NO: 1455591 - RNA, 19 nt, Homo sapiens
  misc_RNA (1)...(19): siRNA sense strand
ccagagacaugggaaaguc

SEQ ID NO: 1455592 - RNA, 19 nt, Homo sapiens
  misc_RNA (1)...(19): siRNA sense strand
gcugcucgcuuacuucagu

SEQ ID NO: 1455593 - RNA, 19 nt, Homo sapiens
  misc_RNA (1)...(19): siRNA sense strand
gaaagucuucccagauugg

SEQ ID NO: 1455594 - RNA, 19 nt, Homo sapiens
  misc_RNA (1)...(19): siRNA sense strand
cagcagccauguugaaugc

SEQ ID NO: 1455595 - RNA, 19 nt, Homo sapiens
  misc_RNA (1)...(19): siRNA sense strand
guagagcugccuuaugaau

SEQ ID NO: 1455596 - RNA, 19 nt, Homo sapiens
  misc_RNA (1)...(19): siRNA sense strand
gcugagcagucccuaugau

SEQ ID NO: 1455597 - RNA, 19 nt, Homo sapiens
  misc_RNA (1)...(19): siRNA sense strand
ugagaagagccaucacauu

SEQ ID NO: 1455598 - RNA, 19 nt, Homo sapiens
  misc_RNA (1)...(19): siRNA sense strand
gcuauucgggugaccauau

SEQ ID NO: 1455599 - RNA, 19 nt, Homo sapiens
  misc_RNA (1)...(19): siRNA sense strand
caagaaugcaugccaccuu

SEQ ID NO: 1455600 - RNA, 19 nt, Homo sapiens
  misc_RNA (1)...(19): siRNA sense strand
gcauggaggacccgaguuc

SEQ ID NO: 1455601 - RNA, 19 nt, Homo sapiens
  misc_RNA (1)...(19): siRNA sense strand
gagcuggccagaagccuau

SEQ ID NO: 1455602 - RNA, 19 nt, Homo sapiens
  misc_RNA (1)...(19): siRNA sense strand
gucgucaccugucugagaa

SEQ ID NO: 1455603 - RNA, 19 nt, Homo sapiens
  misc_RNA (1)...(19): siRNA sense strand
cccgaguucuccuuugauu

SEQ ID NO: 1455604 - RNA, 19 nt, Homo sapiens
  misc_RNA (1)...(19): siRNA sense strand
gagcagucccuaugauguc

SEQ ID NO: 1455605 - RNA, 19 nt, Homo sapiens
  misc_RNA (1)...(19): siRNA sense strand
ucucucacauccuggaaug

SEQ ID NO: 1455606 - RNA, 19 nt, Homo sapiens
  misc_RNA (1)...(19): siRNA sense strand
gucacuagaccucaucauu

SEQ ID NO: 1455607 - RNA, 19 nt, Homo sapiens
  misc_RNA (1)...(19): siRNA sense strand
uagagcugccuuaugaauu

SEQ ID NO: 1455608 - RNA, 19 nt, Homo sapiens
  misc_RNA (1)...(19): siRNA sense strand
ggugguauguuuuggagaa

SEQ ID NO: 1455609 - RNA, 19 nt, Homo sapiens
  misc_RNA (1)...(19): siRNA sense strand
agaagagccaucacauuuc

SEQ ID NO: 1455610 - RNA, 19 nt, Homo sapiens
  misc_RNA (1)...(19): siRNA sense strand
uggaauguaagcauggaua

SEQ ID NO: 1455611 - RNA, 19 nt, Homo sapiens
  misc_RNA (1)...(19): siRNA sense strand
ucccuaugauguccagaaa

SEQ ID NO: 1455612 - RNA, 19 nt, Homo sapiens
  misc_RNA (1)...(19): siRNA sense strand
cacaagggacuucgcucua

SEQ ID NO: 1455613 - RNA, 19 nt, Homo sapiens
  misc_RNA (1)...(19): siRNA sense strand
gagagucagauggguggua

SEQ ID NO: 1455614 - RNA, 19 nt, Homo sapiens
  misc_RNA (1)...(19): siRNA sense strand
agagucagaugggugguau

SEQ ID NO: 1455615 - RNA, 19 nt, Homo sapiens
  misc_RNA (1)...(19): siRNA sense strand
cagauuggacucacaaagg

SEQ ID NO: 1455616 - RNA, 19 nt, Homo sapiens
  misc_RNA (1)...(19): siRNA sense strand
caaguucucuuuuggaaac

SEQ ID NO: 1455617 - RNA, 19 nt, Homo sapiens
  misc_RNA (1)...(19): siRNA sense strand
ccuaugauguccagaaaau

SEQ ID NO: 1455618 - RNA, 19 nt, Homo sapiens
  misc_RNA (1)...(19): siRNA sense strand
cagaggcacgacuggcaua

SEQ ID NO: 1455619 - RNA, 19 nt, Homo sapiens
  misc_RNA (1)...(19): siRNA sense strand
cgucgucaccugucugaga

SEQ ID NO: 1455620 - RNA, 19 nt, Homo sapiens
  misc_RNA (1)...(19): siRNA sense strand
ggaauguaagcauggauac

SEQ ID NO: 1455621 - RNA, 19 nt, Homo sapiens
  misc_RNA (1)...(19): siRNA sense strand
cagcucugcuucaaguucu

SEQ ID NO: 1455622 - RNA, 19 nt, Homo sapiens
  misc_RNA (1)...(19): siRNA sense strand
ggucagcgugcgucuuugu

SEQ ID NO: 1455623 - RNA, 19 nt, Homo sapiens
  misc_RNA (1)...(19): siRNA sense strand
gauccagagacaugggaaa

SEQ ID NO: 1455624 - RNA, 19 nt, Homo sapiens
  misc_RNA (1)...(19): siRNA sense strand
cgacuggcauacccuuugc

SEQ ID NO: 1455625 - RNA, 19 nt, Homo sapiens
  misc_RNA (1)...(19): siRNA sense strand
ugggagcgcuggcugaacu

SEQ ID NO: 1455626 - RNA, 19 nt, Homo sapiens
  misc_RNA (1)...(19): siRNA sense strand
gcauagaggcauccuaccu

SEQ ID NO: 1455627 - RNA, 19 nt, Homo sapiens
  misc_RNA (1)...(19): siRNA sense strand
acacuguagagcugccuua

SEQ ID NO: 1455628 - RNA, 19 nt, Homo sapiens
  misc_RNA (1)...(19): siRNA sense strand
cacuagaccucaucauucc

SEQ ID NO: 1455629 - RNA, 19 nt, Homo sapiens
  misc_RNA (1)...(19): siRNA sense strand
ugagcagucccuaugaugu

SEQ ID NO: 1455630 - RNA, 19 nt, Homo sapiens
  misc_RNA (1)...(19): siRNA sense strand
ccuacuggguguuguucug

SEQ ID NO: 1455631 - RNA, 19 nt, Homo sapiens
  misc_RNA (1)...(19): siRNA sense strand
gacccaaccuucggaucca

SEQ ID NO: 1455632 - RNA, 19 nt, Homo sapiens
  misc_RNA (1)...(19): siRNA sense strand
cgucaccugucugagaaga

SEQ ID NO: 1455633 - RNA, 19 nt, Homo sapiens
  misc_RNA (1)...(19): siRNA sense strand
gagaagagccaucacauuu

SEQ ID NO: 1455634 - RNA, 19 nt, Homo sapiens
  misc_RNA (1)...(19): siRNA sense strand
gcaaagaccucccgaaugc

SEQ ID NO: 1455635 - RNA, 19 nt, Homo sapiens
  misc_RNA (1)...(19): siRNA sense strand
ucagaugggugguauguuu

SEQ ID NO: 1455636 - RNA, 19 nt, Homo sapiens
  misc_RNA (1)...(19): siRNA sense strand
gcggucagauguccaguuu

SEQ ID NO: 1455637 - RNA, 19 nt, Homo sapiens
  misc_RNA (1)...(19): siRNA sense strand
ggacuucgcucuaaaagga

SEQ ID NO: 1455638 - RNA, 19 nt, Homo sapiens
  misc_RNA (1)...(19): siRNA sense strand
cuguagagcugccuuauga

SEQ ID NO: 1455639 - RNA, 19 nt, Homo sapiens
  misc_RNA (1)...(19): siRNA sense strand
caagggacuucgcucuaaa

SEQ ID NO: 1455640 - RNA, 19 nt, Homo sapiens
  misc_RNA (1)...(19): siRNA sense strand
gacccgaguucuccuuuga

SEQ ID NO: 1455641 - RNA, 19 nt, Homo sapiens
  misc_RNA (1)...(19): siRNA sense strand
acaagggacuucgcucuaa

SEQ ID NO: 1455642 - RNA, 19 nt, Homo sapiens
  misc_RNA (1)...(19): siRNA sense strand
gaagagccaucacauuucc

SEQ ID NO: 1455643 - RNA, 19 nt, Homo sapiens
  misc_RNA (1)...(19): siRNA sense strand
gaggucagcgugcgucuuu

SEQ ID NO: 1455644 - RNA, 19 nt, Homo sapiens
  misc_RNA (1)...(19): siRNA sense strand
acacuccgcugcccacuga

SEQ ID NO: 1455645 - RNA, 19 nt, Homo sapiens
  misc_RNA (1)...(19): siRNA sense strand
ggucagauguccaguuugc

SEQ ID NO: 1455646 - RNA, 19 nt, Homo sapiens
  misc_RNA (1)...(19): siRNA sense strand
gagcugagcagucccuaug

SEQ ID NO: 1455647 - RNA, 19 nt, Homo sapiens
  misc_RNA (1)...(19): siRNA sense strand
cgaguucuccuuugauuug

SEQ ID NO: 1455648 - RNA, 19 nt, Homo sapiens
  misc_RNA (1)...(19): siRNA sense strand
ggacccgaguucuccuuug

SEQ ID NO: 1455649 - RNA, 19 nt, Homo sapiens
  misc_RNA (1)...(19): siRNA sense strand
agagcugccuuaugaauuc

SEQ ID NO: 1455650 - RNA, 19 nt, Homo sapiens
  misc_RNA (1)...(19): siRNA sense strand
gcagcugauucuucacuuc

SEQ ID NO: 1455651 - RNA, 19 nt, Homo sapiens
  misc_RNA (1)...(19): siRNA sense strand
ucacuagaccucaucauuc

SEQ ID NO: 1455652 - RNA, 19 nt, Homo sapiens
  misc_RNA (1)...(19): siRNA sense strand
ccagagacaugggaaaguc

SEQ ID NO: 1455653 - RNA, 19 nt, Homo sapiens
  misc_RNA (1)...(19): siRNA sense strand
gaaagucuucccagauugg

SEQ ID NO: 1455654 - RNA, 19 nt, Homo sapiens
  misc_RNA (1)...(19): siRNA sense strand
cagcagccauguugaaugc

SEQ ID NO: 1455655 - RNA, 19 nt, Homo sapiens
  misc_RNA (1)...(19): siRNA sense strand
guagagcugccuuaugaau

SEQ ID NO: 1455656 - RNA, 19 nt, Homo sapiens
  misc_RNA (1)...(19): siRNA sense strand
gcugagcagucccuaugau

SEQ ID NO: 1455657 - RNA, 19 nt, Homo sapiens
  misc_RNA (1)...(19): siRNA sense strand
ugagaagagccaucacauu

SEQ ID NO: 1455658 - RNA, 19 nt, Homo sapiens
  misc_RNA (1)...(19): siRNA sense strand
gcuauucgggugaccauau

SEQ ID NO: 1455659 - RNA, 19 nt, Homo sapiens
  misc_RNA (1)...(19): siRNA sense strand
caagaaugcaugccaccuu

SEQ ID NO: 1455660 - RNA, 19 nt, Homo sapiens
  misc_RNA (1)...(19): siRNA sense strand
gcauggaggacccgaguuc

SEQ ID NO: 1455661 - RNA, 19 nt, Homo sapiens
  misc_RNA (1)...(19): siRNA sense strand
gagcuggccagaagccuau

SEQ ID NO: 1455662 - RNA, 19 nt, Homo sapiens
  misc_RNA (1)...(19): siRNA sense strand
gucgucaccugucugagaa

SEQ ID NO: 1455663 - RNA, 19 nt, Homo sapiens
  misc_RNA (1)...(19): siRNA sense strand
cccgaguucuccuuugauu

SEQ ID NO: 1455664 - RNA, 19 nt, Homo sapiens
  misc_RNA (1)...(19): siRNA sense strand
gagcagucccuaugauguc

SEQ ID NO: 1455665 - RNA, 19 nt, Homo sapiens
  misc_RNA (1)...(19): siRNA sense strand
ucucucacauccuggaaug

SEQ ID NO: 1455666 - RNA, 19 nt, Homo sapiens
  misc_RNA (1)...(19): siRNA sense strand
gucacuagaccucaucauu

SEQ ID NO: 1455667 - RNA, 19 nt, Homo sapiens
  misc_RNA (1)...(19): siRNA sense strand
uagagcugccuuaugaauu

SEQ ID NO: 1455668 - RNA, 19 nt, Homo sapiens
  misc_RNA (1)...(19): siRNA sense strand
ggugguauguuuuggagaa

SEQ ID NO: 1455669 - RNA, 19 nt, Homo sapiens
  misc_RNA (1)...(19): siRNA sense strand
agaagagccaucacauuuc

SEQ ID NO: 1455670 - RNA, 19 nt, Homo sapiens
  misc_RNA (1)...(19): siRNA sense strand
uggaauguaagcauggaua

SEQ ID NO: 1455671 - RNA, 19 nt, Homo sapiens
  misc_RNA (1)...(19): siRNA sense strand
ucccuaugauguccagaaa

SEQ ID NO: 1455672 - RNA, 19 nt, Homo sapiens
  misc_RNA (1)...(19): siRNA sense strand
cacaagggacuucgcucua

SEQ ID NO: 1455673 - RNA, 19 nt, Homo sapiens
  misc_RNA (1)...(19): siRNA sense strand
gagagucagauggguggua

SEQ ID NO: 1455674 - RNA, 19 nt, Homo sapiens
  misc_RNA (1)...(19): siRNA sense strand
agagucagaugggugguau

SEQ ID NO: 1455675 - RNA, 19 nt, Homo sapiens
  misc_RNA (1)...(19): siRNA sense strand
cagauuggacucacaaagg

SEQ ID NO: 1455676 - RNA, 19 nt, Homo sapiens
  misc_RNA (1)...(19): siRNA sense strand
caaguucucuuuuggaaac

SEQ ID NO: 1455677 - RNA, 19 nt, Homo sapiens
  misc_RNA (1)...(19): siRNA sense strand
ccuaugauguccagaaaau

SEQ ID NO: 1455678 - RNA, 19 nt, Homo sapiens
  misc_RNA (1)...(19): siRNA sense strand
cagaggcacgacuggcaua

SEQ ID NO: 1455679 - RNA, 19 nt, Homo sapiens
  misc_RNA (1)...(19): siRNA sense strand
cgucgucaccugucugaga

SEQ ID NO: 1455680 - RNA, 19 nt, Homo sapiens
  misc_RNA (1)...(19): siRNA sense strand
ggaauguaagcauggauac

SEQ ID NO: 1455681 - RNA, 19 nt, Homo sapiens
  misc_RNA (1)...(19): siRNA sense strand
cagcucugcuucaaguucu

SEQ ID NO: 1455682 - RNA, 19 nt, Homo sapiens
  misc_RNA (1)...(19): siRNA sense strand
gauccagagacaugggaaa

SEQ ID NO: 1455683 - RNA, 19 nt, Homo sapiens
  misc_RNA (1)...(19): siRNA sense strand
ggucagcgugcgucuuugu

SEQ ID NO: 1455684 - RNA, 19 nt, Homo sapiens
  misc_RNA (1)...(19): siRNA sense strand
cgacuggcauacccuuugc

SEQ ID NO: 1455685 - RNA, 19 nt, Homo sapiens
  misc_RNA (1)...(19): siRNA sense strand
gcauagaggcauccuaccu

SEQ ID NO: 1455686 - RNA, 19 nt, Homo sapiens
  misc_RNA (1)...(19): siRNA sense strand
acacuguagagcugccuua

SEQ ID NO: 1455687 - RNA, 19 nt, Homo sapiens
  misc_RNA (1)...(19): siRNA sense strand
cacuagaccucaucauucc

SEQ ID NO: 1455688 - RNA, 19 nt, Homo sapiens
  misc_RNA (1)...(19): siRNA sense strand
ugagcagucccuaugaugu

SEQ ID NO: 1455689 - RNA, 19 nt, Homo sapiens
  misc_RNA (1)...(19): siRNA sense strand
gacccaaccuucggaucca

SEQ ID NO: 1455690 - RNA, 19 nt, Homo sapiens
  misc_RNA (1)...(19): siRNA sense strand
cgucaccugucugagaaga

SEQ ID NO: 1455691 - RNA, 19 nt, Homo sapiens
  misc_RNA (1)...(19): siRNA sense strand
gagaagagccaucacauuu

SEQ ID NO: 1455692 - RNA, 19 nt, Homo sapiens
  misc_RNA (1)...(19): siRNA sense strand
gcaaagaccucccgaaugc

SEQ ID NO: 1455693 - RNA, 19 nt, Homo sapiens
  misc_RNA (1)...(19): siRNA sense strand
ucagaugggugguauguuu

SEQ ID NO: 1455694 - RNA, 19 nt, Homo sapiens
  misc_RNA (1)...(19): siRNA sense strand
gcggucagauguccaguuu

SEQ ID NO: 1455695 - RNA, 19 nt, Homo sapiens
  misc_RNA (1)...(19): siRNA sense strand
ggacuucgcucuaaaagga

SEQ ID NO: 1455696 - RNA, 19 nt, Homo sapiens
  misc_RNA (1)...(19): siRNA sense strand
cuguagagcugccuuauga

SEQ ID NO: 1455697 - RNA, 19 nt, Homo sapiens
  misc_RNA (1)...(19): siRNA sense strand
caagggacuucgcucuaaa

SEQ ID NO: 1455698 - RNA, 19 nt, Homo sapiens
  misc_RNA (1)...(19): siRNA sense strand
gacccgaguucuccuuuga

SEQ ID NO: 1455699 - RNA, 19 nt, Homo sapiens
  misc_RNA (1)...(19): siRNA sense strand
acaagggacuucgcucuaa

SEQ ID NO: 1455700 - RNA, 19 nt, Homo sapiens
  misc_RNA (1)...(19): siRNA sense strand
gaagagccaucacauuucc

SEQ ID NO: 1455701 - RNA, 19 nt, Homo sapiens
  misc_RNA (1)...(19): siRNA sense strand
gaggucagcgugcgucuuu

SEQ ID NO: 1455702 - RNA, 19 nt, Homo sapiens
  misc_RNA (1)...(19): siRNA sense strand
acacuccgcugcccacuga

SEQ ID NO: 1455703 - RNA, 19 nt, Homo sapiens
  misc_RNA (1)...(19): siRNA sense strand
ggucagauguccaguuugc

SEQ ID NO: 1455704 - RNA, 19 nt, Homo sapiens
  misc_RNA (1)...(19): siRNA sense strand
gagcugagcagucccuaug

SEQ ID NO: 1455705 - RNA, 19 nt, Homo sapiens
  misc_RNA (1)...(19): siRNA sense strand
cgaguucuccuuugauuug

SEQ ID NO: 1455706 - RNA, 19 nt, Homo sapiens
  misc_RNA (1)...(19): siRNA sense strand
ggacccgaguucuccuuug

SEQ ID NO: 1455707 - RNA, 19 nt, Homo sapiens
  misc_RNA (1)...(19): siRNA sense strand
agagcugccuuaugaauuc

SEQ ID NO: 1455708 - RNA, 19 nt, Homo sapiens
  misc_RNA (1)...(19): siRNA sense strand
gcagcugauucuucacuuc

SEQ ID NO: 1455709 - RNA, 19 nt, Homo sapiens
  misc_RNA (1)...(19): siRNA sense strand
ucacuagaccucaucauuc

SEQ ID NO: 1455710 - RNA, 19 nt, Homo sapiens
  misc_RNA (1)...(19): siRNA sense strand
ccagagacaugggaaaguc

SEQ ID NO: 1455711 - RNA, 19 nt, Homo sapiens
  misc_RNA (1)...(19): siRNA sense strand
gcugcucgcuuacuucagu

SEQ ID NO: 1455712 - RNA, 19 nt, Homo sapiens
  misc_RNA (1)...(19): siRNA sense strand
gaaagucuucccagauugg

SEQ ID NO: 1455713 - RNA, 19 nt, Homo sapiens
  misc_RNA (1)...(19): siRNA sense strand
cagcagccauguugaaugc

SEQ ID NO: 1455714 - RNA, 19 nt, Homo sapiens
  misc_RNA (1)...(19): siRNA sense strand
guagagcugccuuaugaau

SEQ ID NO: 1455715 - RNA, 19 nt, Homo sapiens
  misc_RNA (1)...(19): siRNA sense strand
ugagaagagccaucacauu

SEQ ID NO: 1455716 - RNA, 19 nt, Homo sapiens
  misc_RNA (1)...(19): siRNA sense strand
gcugagcagucccuaugau

SEQ ID NO: 1455717 - RNA, 19 nt, Homo sapiens
  misc_RNA (1)...(19): siRNA sense strand
gcuauucgggugaccauau

SEQ ID NO: 1455718 - RNA, 19 nt, Homo sapiens
  misc_RNA (1)...(19): siRNA sense strand
caagaaugcaugccaccuu

SEQ ID NO: 1455719 - RNA, 19 nt, Homo sapiens
  misc_RNA (1)...(19): siRNA sense strand
acauucaaguucuauagga

SEQ ID NO: 1455720 - RNA, 19 nt, Homo sapiens
  misc_RNA (1)...(19): siRNA sense strand
gagcuggccagaagccuau

SEQ ID NO: 1455721 - RNA, 19 nt, Homo sapiens
  misc_RNA (1)...(19): siRNA sense strand
gcauggaggacccgaguuc

SEQ ID NO: 1455722 - RNA, 19 nt, Homo sapiens
  misc_RNA (1)...(19): siRNA sense strand
ccacauucaaguucuauag

SEQ ID NO: 1455723 - RNA, 19 nt, Homo sapiens
  misc_RNA (1)...(19): siRNA sense strand
cccgaguucuccuuugauu

SEQ ID NO: 1455724 - RNA, 19 nt, Homo sapiens
  misc_RNA (1)...(19): siRNA sense strand
gucgucaccugucugagaa

SEQ ID NO: 1455725 - RNA, 19 nt, Homo sapiens
  misc_RNA (1)...(19): siRNA sense strand
gagcagucccuaugauguc

SEQ ID NO: 1455726 - RNA, 19 nt, Homo sapiens
  misc_RNA (1)...(19): siRNA sense strand
ucucucacauccuggaaug

SEQ ID NO: 1455727 - RNA, 19 nt, Homo sapiens
  misc_RNA (1)...(19): siRNA sense strand
gucacuagaccucaucauu

SEQ ID NO: 1455728 - RNA, 19 nt, Homo sapiens
  misc_RNA (1)...(19): siRNA sense strand
uagagcugccuuaugaauu

SEQ ID NO: 1455729 - RNA, 19 nt, Homo sapiens
  misc_RNA (1)...(19): siRNA sense strand
ggugguauguuuuggagaa

SEQ ID NO: 1455730 - RNA, 19 nt, Homo sapiens
  misc_RNA (1)...(19): siRNA sense strand
agaagagccaucacauuuc

SEQ ID NO: 1455731 - RNA, 19 nt, Homo sapiens
  misc_RNA (1)...(19): siRNA sense strand
uggaauguaagcauggaua

SEQ ID NO: 1455732 - RNA, 19 nt, Homo sapiens
  misc_RNA (1)...(19): siRNA sense strand
ucccuaugauguccagaaa

SEQ ID NO: 1455733 - RNA, 19 nt, Homo sapiens
  misc_RNA (1)...(19): siRNA sense strand
cacaagggacuucgcucua

SEQ ID NO: 1455734 - RNA, 19 nt, Homo sapiens
  misc_RNA (1)...(19): siRNA sense strand
gagagucagauggguggua

SEQ ID NO: 1455735 - RNA, 19 nt, Homo sapiens
  misc_RNA (1)...(19): siRNA sense strand
agagucagaugggugguau

SEQ ID NO: 1455736 - RNA, 19 nt, Homo sapiens
  misc_RNA (1)...(19): siRNA sense strand
cagauuggacucacaaagg

SEQ ID NO: 1455737 - RNA, 19 nt, Homo sapiens
  misc_RNA (1)...(19): siRNA sense strand
caaguucucuuuuggaaac

SEQ ID NO: 1455738 - RNA, 19 nt, Homo sapiens
  misc_RNA (1)...(19): siRNA sense strand
ccuaugauguccagaaaau

SEQ ID NO: 1455739 - RNA, 19 nt, Homo sapiens
  misc_RNA (1)...(19): siRNA sense strand
cagaggcacgacuggcaua

SEQ ID NO: 1455740 - RNA, 19 nt, Homo sapiens
  misc_RNA (1)...(19): siRNA sense strand
ggaauguaagcauggauac

SEQ ID NO: 1455741 - RNA, 19 nt, Homo sapiens
  misc_RNA (1)...(19): siRNA sense strand
cgucgucaccugucugaga

SEQ ID NO: 1455742 - RNA, 19 nt, Homo sapiens
  misc_RNA (1)...(19): siRNA sense strand
cagcucugcuucaaguucu

SEQ ID NO: 1455743 - RNA, 19 nt, Homo sapiens
  misc_RNA (1)...(19): siRNA sense strand
gauccagagacaugggaaa

SEQ ID NO: 1455744 - RNA, 19 nt, Homo sapiens
  misc_RNA (1)...(19): siRNA sense strand
ggucagcgugcgucuuugu

SEQ ID NO: 1455745 - RNA, 19 nt, Homo sapiens
  misc_RNA (1)...(19): siRNA sense strand
cgacuggcauacccuuugc

SEQ ID NO: 1455746 - RNA, 19 nt, Homo sapiens
  misc_RNA (1)...(19): siRNA sense strand
ugggagcgcuggcugaacu

SEQ ID NO: 1455747 - RNA, 19 nt, Homo sapiens
  misc_RNA (1)...(19): siRNA sense strand
gcauagaggcauccuaccu

SEQ ID NO: 1455748 - RNA, 19 nt, Homo sapiens
  misc_RNA (1)...(19): siRNA sense strand
acacuguagagcugccuua

SEQ ID NO: 1455749 - RNA, 19 nt, Homo sapiens
  misc_RNA (1)...(19): siRNA sense strand
cacuagaccucaucauucc

SEQ ID NO: 1455750 - RNA, 19 nt, Homo sapiens
  misc_RNA (1)...(19): siRNA sense strand
gacccaaccuucggaucca

SEQ ID NO: 1455751 - RNA, 19 nt, Homo sapiens
  misc_RNA (1)...(19): siRNA sense strand
ccuacuggguguuguucug

SEQ ID NO: 1455752 - RNA, 19 nt, Homo sapiens
  misc_RNA (1)...(19): siRNA sense strand
cgucaccugucugagaaga

SEQ ID NO: 1455753 - RNA, 19 nt, Homo sapiens
  misc_RNA (1)...(19): siRNA sense strand
ugagcagucccuaugaugu

SEQ ID NO: 1455754 - RNA, 19 nt, Homo sapiens
  misc_RNA (1)...(19): siRNA sense strand
gagaagagccaucacauuu

SEQ ID NO: 1455755 - RNA, 19 nt, Homo sapiens
  misc_RNA (1)...(19): siRNA sense strand
gcaaagaccucccgaaugc

SEQ ID NO: 1455756 - RNA, 19 nt, Homo sapiens
  misc_RNA (1)...(19): siRNA sense strand
ucagaugggugguauguuu

SEQ ID NO: 1455757 - RNA, 19 nt, Homo sapiens
  misc_RNA (1)...(19): siRNA sense strand
gcggucagauguccaguuu

SEQ ID NO: 1455758 - RNA, 19 nt, Homo sapiens
  misc_RNA (1)...(19): siRNA sense strand
ggacuucgcucuaaaagga

SEQ ID NO: 1455759 - RNA, 19 nt, Homo sapiens
  misc_RNA (1)...(19): siRNA sense strand
cuguagagcugccuuauga

SEQ ID NO: 1455760 - RNA, 19 nt, Homo sapiens
  misc_RNA (1)...(19): siRNA sense strand
caagggacuucgcucuaaa

SEQ ID NO: 1455761 - RNA, 19 nt, Homo sapiens
  misc_RNA (1)...(19): siRNA sense strand
gacccgaguucuccuuuga

SEQ ID NO: 1455762 - RNA, 19 nt, Homo sapiens
  misc_RNA (1)...(19): siRNA sense strand
acaagggacuucgcucuaa

SEQ ID NO: 1455763 - RNA, 19 nt, Homo sapiens
  misc_RNA (1)...(19): siRNA sense strand
gaagagccaucacauuucc

SEQ ID NO: 1455764 - RNA, 19 nt, Homo sapiens
  misc_RNA (1)...(19): siRNA sense strand
gaggucagcgugcgucuuu

SEQ ID NO: 1455765 - RNA, 19 nt, Homo sapiens
  misc_RNA (1)...(19): siRNA sense strand
acacuccgcugcccacuga

SEQ ID NO: 1455766 - RNA, 19 nt, Homo sapiens
  misc_RNA (1)...(19): siRNA sense strand
ggucagauguccaguuugc

SEQ ID NO: 1455767 - RNA, 19 nt, Homo sapiens
  misc_RNA (1)...(19): siRNA sense strand
gagcugagcagucccuaug

SEQ ID NO: 1455768 - RNA, 19 nt, Homo sapiens
  misc_RNA (1)...(19): siRNA sense strand
cgaguucuccuuugauuug

SEQ ID NO: 1455769 - RNA, 19 nt, Homo sapiens
  misc_RNA (1)...(19): siRNA sense strand
ggacccgaguucuccuuug

SEQ ID NO: 1455770 - RNA, 19 nt, Homo sapiens
  misc_RNA (1)...(19): siRNA sense strand
agagcugccuuaugaauuc

SEQ ID NO: 1455771 - RNA, 19 nt, Homo sapiens
  misc_RNA (1)...(19): siRNA sense strand
gcagcugauucuucacuuc

SEQ ID NO: 1455772 - RNA, 19 nt, Homo sapiens
  misc_RNA (1)...(19): siRNA sense strand
ucacuagaccucaucauuc

SEQ ID NO: 1455773 - RNA, 19 nt, Homo sapiens
  misc_RNA (1)...(19): siRNA sense strand
ccagagacaugggaaaguc

SEQ ID NO: 1455774 - RNA, 19 nt, Homo sapiens
  misc_RNA (1)...(19): siRNA sense strand
ugccacagcucgagaguca

SEQ ID NO: 1455775 - RNA, 19 nt, Homo sapiens
  misc_RNA (1)...(19): siRNA sense strand
gaaagucuucccagauugg

SEQ ID NO: 1455776 - RNA, 19 nt, Homo sapiens
  misc_RNA (1)...(19): siRNA sense strand
cagcagccauguugaaugc

SEQ ID NO: 1455777 - RNA, 19 nt, Homo sapiens
  misc_RNA (1)...(19): siRNA sense strand
guagagcugccuuaugaau

SEQ ID NO: 1455778 - RNA, 19 nt, Homo sapiens
  misc_RNA (1)...(19): siRNA sense strand
ugagaagagccaucacauu

SEQ ID NO: 1455779 - RNA, 19 nt, Homo sapiens
  misc_RNA (1)...(19): siRNA sense strand
gcugagcagucccuaugau

SEQ ID NO: 1455780 - RNA, 19 nt, Homo sapiens
  misc_RNA (1)...(19): siRNA sense strand
gcuauucgggugaccauau

SEQ ID NO: 1455781 - RNA, 19 nt, Homo sapiens
  misc_RNA (1)...(19): siRNA sense strand
caagaaugcaugccaccuu

SEQ ID NO: 1455782 - RNA, 19 nt, Homo sapiens
  misc_RNA (1)...(19): siRNA sense strand
acauucaaguucuauagga

SEQ ID NO: 1455783 - RNA, 19 nt, Homo sapiens
  misc_RNA (1)...(19): siRNA sense strand
gagcuggccagaagccuau

SEQ ID NO: 1455784 - RNA, 19 nt, Homo sapiens
  misc_RNA (1)...(19): siRNA sense strand
gcauggaggacccgaguuc

SEQ ID NO: 1455785 - RNA, 19 nt, Homo sapiens
  misc_RNA (1)...(19): siRNA sense strand
ccacauucaaguucuauag

SEQ ID NO: 1455786 - RNA, 19 nt, Homo sapiens
  misc_RNA (1)...(19): siRNA sense strand
ccacagcucgagagucaga

SEQ ID NO: 1455787 - RNA, 19 nt, Homo sapiens
  misc_RNA (1)...(19): siRNA sense strand
cccgaguucuccuuugauu

SEQ ID NO: 1455788 - RNA, 19 nt, Homo sapiens
  misc_RNA (1)...(19): siRNA sense strand
gucgucaccugucugagaa

SEQ ID NO: 1455789 - RNA, 19 nt, Homo sapiens
  misc_RNA (1)...(19): siRNA sense strand
gagcagucccuaugauguc

SEQ ID NO: 1455790 - RNA, 19 nt, Homo sapiens
  misc_RNA (1)...(19): siRNA sense strand
ucucucacauccuggaaug

SEQ ID NO: 1455791 - RNA, 19 nt, Homo sapiens
  misc_RNA (1)...(19): siRNA sense strand
gucacuagaccucaucauu

SEQ ID NO: 1455792 - RNA, 19 nt, Homo sapiens
  misc_RNA (1)...(19): siRNA sense strand
uagagcugccuuaugaauu

SEQ ID NO: 1455793 - RNA, 19 nt, Homo sapiens
  misc_RNA (1)...(19): siRNA sense strand
ggugguauguuuuggagaa

SEQ ID NO: 1455794 - RNA, 19 nt, Homo sapiens
  misc_RNA (1)...(19): siRNA sense strand
agaagagccaucacauuuc

SEQ ID NO: 1455795 - RNA, 19 nt, Homo sapiens
  misc_RNA (1)...(19): siRNA sense strand
uggaauguaagcauggaua

SEQ ID NO: 1455796 - RNA, 19 nt, Homo sapiens
  misc_RNA (1)...(19): siRNA sense strand
ucccuaugauguccagaaa

SEQ ID NO: 1455797 - RNA, 19 nt, Homo sapiens
  misc_RNA (1)...(19): siRNA sense strand
cacaagggacuucgcucua

SEQ ID NO: 1455798 - RNA, 19 nt, Homo sapiens
  misc_RNA (1)...(19): siRNA sense strand
gagagucagauggguggua

SEQ ID NO: 1455799 - RNA, 19 nt, Homo sapiens
  misc_RNA (1)...(19): siRNA sense strand
agagucagaugggugguau

SEQ ID NO: 1455800 - RNA, 19 nt, Homo sapiens
  misc_RNA (1)...(19): siRNA sense strand
cagauuggacucacaaagg

SEQ ID NO: 1455801 - RNA, 19 nt, Homo sapiens
  misc_RNA (1)...(19): siRNA sense strand
caaguucucuuuuggaaac

SEQ ID NO: 1455802 - RNA, 19 nt, Homo sapiens
  misc_RNA (1)...(19): siRNA sense strand
ccuaugauguccagaaaau

SEQ ID NO: 1455803 - RNA, 19 nt, Homo sapiens
  misc_RNA (1)...(19): siRNA sense strand
cgucgucaccugucugaga

SEQ ID NO: 1455804 - RNA, 19 nt, Homo sapiens
  misc_RNA (1)...(19): siRNA sense strand
ggaauguaagcauggauac

SEQ ID NO: 1455805 - RNA, 19 nt, Homo sapiens
  misc_RNA (1)...(19): siRNA sense strand
cagcucugcuucaaguucu

SEQ ID NO: 1455806 - RNA, 19 nt, Homo sapiens
  misc_RNA (1)...(19): siRNA sense strand
cagaggcacgacuggcaua

SEQ ID NO: 1455807 - RNA, 19 nt, Homo sapiens
  misc_RNA (1)...(19): siRNA sense strand
gauccagagacaugggaaa

SEQ ID NO: 1455808 - RNA, 19 nt, Homo sapiens
  misc_RNA (1)...(19): siRNA sense strand
ggucagcgugcgucuuugu

SEQ ID NO: 1455809 - RNA, 19 nt, Homo sapiens
  misc_RNA (1)...(19): siRNA sense strand
cgacuggcauacccuuugc

SEQ ID NO: 1455810 - RNA, 19 nt, Homo sapiens
  misc_RNA (1)...(19): siRNA sense strand
gcauagaggcauccuaccu

SEQ ID NO: 1455811 - RNA, 19 nt, Homo sapiens
  misc_RNA (1)...(19): siRNA sense strand
guccggaugucucuuacag

SEQ ID NO: 1455812 - RNA, 19 nt, Homo sapiens
  misc_RNA (1)...(19): siRNA sense strand
acacuguagagcugccuua

SEQ ID NO: 1455813 - RNA, 19 nt, Homo sapiens
  misc_RNA (1)...(19): siRNA sense strand
cacuagaccucaucauucc

SEQ ID NO: 1455814 - RNA, 19 nt, Homo sapiens
  misc_RNA (1)...(19): siRNA sense strand
gacccaaccuucggaucca

SEQ ID NO: 1455815 - RNA, 19 nt, Homo sapiens
  misc_RNA (1)...(19): siRNA sense strand
cgucaccugucugagaaga

SEQ ID NO: 1455816 - RNA, 19 nt, Homo sapiens
  misc_RNA (1)...(19): siRNA sense strand
ugagcagucccuaugaugu

SEQ ID NO: 1455817 - RNA, 19 nt, Homo sapiens
  misc_RNA (1)...(19): siRNA sense strand
gagaagagccaucacauuu

SEQ ID NO: 1455818 - RNA, 19 nt, Homo sapiens
  misc_RNA (1)...(19): siRNA sense strand
gcaaagaccucccgaaugc

SEQ ID NO: 1455819 - RNA, 19 nt, Homo sapiens
  misc_RNA (1)...(19): siRNA sense strand
ucagaugggugguauguuu

SEQ ID NO: 1455820 - RNA, 19 nt, Homo sapiens
  misc_RNA (1)...(19): siRNA sense strand
gcggucagauguccaguuu

SEQ ID NO: 1455821 - RNA, 19 nt, Homo sapiens
  misc_RNA (1)...(19): siRNA sense strand
ggacuucgcucuaaaagga

SEQ ID NO: 1455822 - RNA, 19 nt, Homo sapiens
  misc_RNA (1)...(19): siRNA sense strand
cuguagagcugccuuauga

SEQ ID NO: 1455823 - RNA, 19 nt, Homo sapiens
  misc_RNA (1)...(19): siRNA sense strand
caagggacuucgcucuaaa

SEQ ID NO: 1455824 - RNA, 19 nt, Homo sapiens
  misc_RNA (1)...(19): siRNA sense strand
gacccgaguucuccuuuga

SEQ ID NO: 1455825 - RNA, 19 nt, Homo sapiens
  misc_RNA (1)...(19): siRNA sense strand
acaagggacuucgcucuaa

SEQ ID NO: 1455826 - RNA, 19 nt, Homo sapiens
  misc_RNA (1)...(19): siRNA sense strand
gaagagccaucacauuucc

SEQ ID NO: 1455827 - RNA, 19 nt, Homo sapiens
  misc_RNA (1)...(19): siRNA sense strand
gaggucagcgugcgucuuu

SEQ ID NO: 1455828 - RNA, 19 nt, Homo sapiens
  misc_RNA (1)...(19): siRNA sense strand
acacuccgcugcccacuga

SEQ ID NO: 1455829 - RNA, 19 nt, Homo sapiens
  misc_RNA (1)...(19): siRNA sense strand
ggucagauguccaguuugc

SEQ ID NO: 1455830 - RNA, 19 nt, Homo sapiens
  misc_RNA (1)...(19): siRNA sense strand
gagcugagcagucccuaug

SEQ ID NO: 1455831 - RNA, 19 nt, Homo sapiens
  misc_RNA (1)...(19): siRNA sense strand
cgaguucuccuuugauuug

SEQ ID NO: 1455832 - RNA, 19 nt, Homo sapiens
  misc_RNA (1)...(19): siRNA sense strand
ggacccgaguucuccuuug

SEQ ID NO: 1455833 - RNA, 19 nt, Homo sapiens
  misc_RNA (1)...(19): siRNA sense strand
agagcugccuuaugaauuc

SEQ ID NO: 1455834 - RNA, 19 nt, Homo sapiens
  misc_RNA (1)...(19): siRNA sense strand
gcagcugauucuucacuuc

SEQ ID NO: 1455835 - RNA, 19 nt, Homo sapiens
  misc_RNA (1)...(19): siRNA sense strand
ucacuagaccucaucauuc

SEQ ID NO: 1455836 - RNA, 19 nt, Homo sapiens
  misc_RNA (1)...(19): siRNA sense strand
ccagagacaugggaaaguc

SEQ ID NO: 1455837 - RNA, 19 nt, Homo sapiens
  misc_RNA (1)...(19): siRNA sense strand
gcugcucgcuuacuucagu

SEQ ID NO: 1455838 - RNA, 19 nt, Homo sapiens
  misc_RNA (1)...(19): siRNA sense strand
gaaagucuucccagauugg

SEQ ID NO: 1455839 - RNA, 19 nt, Homo sapiens
  misc_RNA (1)...(19): siRNA sense strand
cagcagccauguugaaugc

SEQ ID NO: 1455840 - RNA, 19 nt, Homo sapiens
  misc_RNA (1)...(19): siRNA sense strand
guagagcugccuuaugaau

SEQ ID NO: 1455841 - RNA, 19 nt, Homo sapiens
  misc_RNA (1)...(19): siRNA sense strand
ugagaagagccaucacauu

SEQ ID NO: 1455842 - RNA, 19 nt, Homo sapiens
  misc_RNA (1)...(19): siRNA sense strand
gcugagcagucccuaugau

SEQ ID NO: 1455843 - RNA, 19 nt, Homo sapiens
  misc_RNA (1)...(19): siRNA sense strand
gcuauucgggugaccauau

SEQ ID NO: 1455844 - RNA, 19 nt, Homo sapiens
  misc_RNA (1)...(19): siRNA sense strand
caagaaugcaugccaccuu

SEQ ID NO: 1455845 - RNA, 19 nt, Homo sapiens
  misc_RNA (1)...(19): siRNA sense strand
acauucaaguucuauagga

SEQ ID NO: 1455846 - RNA, 19 nt, Homo sapiens
  misc_RNA (1)...(19): siRNA sense strand
gagcuggccagaagccuau

SEQ ID NO: 1455847 - RNA, 19 nt, Homo sapiens
  misc_RNA (1)...(19): siRNA sense strand
gcauggaggacccgaguuc

SEQ ID NO: 1455848 - RNA, 19 nt, Homo sapiens
  misc_RNA (1)...(19): siRNA sense strand
ccacauucaaguucuauag

SEQ ID NO: 1455849 - RNA, 19 nt, Homo sapiens
  misc_RNA (1)...(19): siRNA sense strand
cccgaguucuccuuugauu

SEQ ID NO: 1455850 - RNA, 19 nt, Homo sapiens
  misc_RNA (1)...(19): siRNA sense strand
gucgucaccugucugagaa

SEQ ID NO: 1455851 - RNA, 19 nt, Homo sapiens
  misc_RNA (1)...(19): siRNA sense strand
gagcagucccuaugauguc

SEQ ID NO: 1455852 - RNA, 19 nt, Homo sapiens
  misc_RNA (1)...(19): siRNA sense strand
ucucucacauccuggaaug

SEQ ID NO: 1455853 - RNA, 19 nt, Homo sapiens
  misc_RNA (1)...(19): siRNA sense strand
gucacuagaccucaucauu

SEQ ID NO: 1455854 - RNA, 19 nt, Homo sapiens
  misc_RNA (1)...(19): siRNA sense strand
uagagcugccuuaugaauu

SEQ ID NO: 1455855 - RNA, 19 nt, Homo sapiens
  misc_RNA (1)...(19): siRNA sense strand
ggugguauguuuuggagaa

SEQ ID NO: 1455856 - RNA, 19 nt, Homo sapiens
  misc_RNA (1)...(19): siRNA sense strand
agaagagccaucacauuuc

SEQ ID NO: 1455857 - RNA, 19 nt, Homo sapiens
  misc_RNA (1)...(19): siRNA sense strand
uggaauguaagcauggaua

SEQ ID NO: 1455858 - RNA, 19 nt, Homo sapiens
  misc_RNA (1)...(19): siRNA sense strand
ucccuaugauguccagaaa

SEQ ID NO: 1455859 - RNA, 19 nt, Homo sapiens
  misc_RNA (1)...(19): siRNA sense strand
cacaagggacuucgcucua

SEQ ID NO: 1455860 - RNA, 19 nt, Homo sapiens
  misc_RNA (1)...(19): siRNA sense strand
gagagucagauggguggua

SEQ ID NO: 1455861 - RNA, 19 nt, Homo sapiens
  misc_RNA (1)...(19): siRNA sense strand
agagucagaugggugguau

SEQ ID NO: 1455862 - RNA, 19 nt, Homo sapiens
  misc_RNA (1)...(19): siRNA sense strand
cagauuggacucacaaagg

SEQ ID NO: 1455863 - RNA, 19 nt, Homo sapiens
  misc_RNA (1)...(19): siRNA sense strand
caaguucucuuuuggaaac

SEQ ID NO: 1455864 - RNA, 19 nt, Homo sapiens
  misc_RNA (1)...(19): siRNA sense strand
ccuaugauguccagaaaau

SEQ ID NO: 1455865 - RNA, 19 nt, Homo sapiens
  misc_RNA (1)...(19): siRNA sense strand
cagaggcacgacuggcaua

SEQ ID NO: 1455866 - RNA, 19 nt, Homo sapiens
  misc_RNA (1)...(19): siRNA sense strand
ggaauguaagcauggauac

SEQ ID NO: 1455867 - RNA, 19 nt, Homo sapiens
  misc_RNA (1)...(19): siRNA sense strand
cgucgucaccugucugaga

SEQ ID NO: 1455868 - RNA, 19 nt, Homo sapiens
  misc_RNA (1)...(19): siRNA sense strand
cagcucugcuucaaguucu

SEQ ID NO: 1455869 - RNA, 19 nt, Homo sapiens
  misc_RNA (1)...(19): siRNA sense strand
gauccagagacaugggaaa

SEQ ID NO: 1455870 - RNA, 19 nt, Homo sapiens
  misc_RNA (1)...(19): siRNA sense strand
ggucagcgugcgucuuugu

SEQ ID NO: 1455871 - RNA, 19 nt, Homo sapiens
  misc_RNA (1)...(19): siRNA sense strand
cgacuggcauacccuuugc

SEQ ID NO: 1455872 - RNA, 19 nt, Homo sapiens
  misc_RNA (1)...(19): siRNA sense strand
ugggagcgcuggcugaacu

SEQ ID NO: 1455873 - RNA, 19 nt, Homo sapiens
  misc_RNA (1)...(19): siRNA sense strand
gcauagaggcauccuaccu

SEQ ID NO: 1455874 - RNA, 19 nt, Homo sapiens
  misc_RNA (1)...(19): siRNA sense strand
acacuguagagcugccuua

SEQ ID NO: 1455875 - RNA, 19 nt, Homo sapiens
  misc_RNA (1)...(19): siRNA sense strand
cacuagaccucaucauucc

SEQ ID NO: 1455876 - RNA, 19 nt, Homo sapiens
  misc_RNA (1)...(19): siRNA sense strand
gacccaaccuucggaucca

SEQ ID NO: 1455877 - RNA, 19 nt, Homo sapiens
  misc_RNA (1)...(19): siRNA sense strand
ccuacuggguguuguucug

SEQ ID NO: 1455878 - RNA, 19 nt, Homo sapiens
  misc_RNA (1)...(19): siRNA sense strand
cgucaccugucugagaaga

SEQ ID NO: 1455879 - RNA, 19 nt, Homo sapiens
  misc_RNA (1)...(19): siRNA sense strand
ugagcagucccuaugaugu

SEQ ID NO: 1455880 - RNA, 19 nt, Homo sapiens
  misc_RNA (1)...(19): siRNA sense strand
gagaagagccaucacauuu

SEQ ID NO: 1455881 - RNA, 19 nt, Homo sapiens
  misc_RNA (1)...(19): siRNA sense strand
gcaaagaccucccgaaugc

SEQ ID NO: 1455882 - RNA, 19 nt, Homo sapiens
  misc_RNA (1)...(19): siRNA sense strand
ucagaugggugguauguuu

SEQ ID NO: 1455883 - RNA, 19 nt, Homo sapiens
  misc_RNA (1)...(19): siRNA sense strand
gcggucagauguccaguuu

SEQ ID NO: 1455884 - RNA, 19 nt, Homo sapiens
  misc_RNA (1)...(19): siRNA sense strand
ggacuucgcucuaaaagga

SEQ ID NO: 1455885 - RNA, 19 nt, Homo sapiens
  misc_RNA (1)...(19): siRNA sense strand
cuguagagcugccuuauga

SEQ ID NO: 1455886 - RNA, 19 nt, Homo sapiens
  misc_RNA (1)...(19): siRNA sense strand
caagggacuucgcucuaaa

SEQ ID NO: 1455887 - RNA, 19 nt, Homo sapiens
  misc_RNA (1)...(19): siRNA sense strand
gacccgaguucuccuuuga

SEQ ID NO: 1455888 - RNA, 19 nt, Homo sapiens
  misc_RNA (1)...(19): siRNA sense strand
acaagggacuucgcucuaa

SEQ ID NO: 1455889 - RNA, 19 nt, Homo sapiens
  misc_RNA (1)...(19): siRNA sense strand
gaagagccaucacauuucc

SEQ ID NO: 1455890 - RNA, 19 nt, Homo sapiens
  misc_RNA (1)...(19): siRNA sense strand
gaggucagcgugcgucuuu

SEQ ID NO: 1455891 - RNA, 19 nt, Homo sapiens
  misc_RNA (1)...(19): siRNA sense strand
acacuccgcugcccacuga

SEQ ID NO: 1455892 - RNA, 19 nt, Homo sapiens
  misc_RNA (1)...(19): siRNA sense strand
ggucagauguccaguuugc

SEQ ID NO: 1455893 - RNA, 19 nt, Homo sapiens
  misc_RNA (1)...(19): siRNA sense strand
gagcugagcagucccuaug

SEQ ID NO: 1455894 - RNA, 19 nt, Homo sapiens
  misc_RNA (1)...(19): siRNA sense strand
cgaguucuccuuugauuug

SEQ ID NO: 1455895 - RNA, 19 nt, Homo sapiens
  misc_RNA (1)...(19): siRNA sense strand
ggacccgaguucuccuuug

SEQ ID NO: 1455896 - RNA, 19 nt, Homo sapiens
  misc_RNA (1)...(19): siRNA sense strand
agagcugccuuaugaauuc

SEQ ID NO: 1455897 - RNA, 19 nt, Homo sapiens
  misc_RNA (1)...(19): siRNA sense strand
gcagcugauucuucacuuc

SEQ ID NO: 1455898 - RNA, 19 nt, Homo sapiens
  misc_RNA (1)...(19): siRNA sense strand
ucacuagaccucaucauuc

SEQ ID NO: 1455899 - RNA, 19 nt, Homo sapiens
  misc_RNA (1)...(19): siRNA sense strand
ccagagacaugggaaaguc

SEQ ID NO: 1455900 - RNA, 19 nt, Homo sapiens
  misc_RNA (1)...(19): siRNA sense strand
gcugcucgcuuacuucagu

SEQ ID NO: 1455901 - RNA, 19 nt, Homo sapiens
  misc_RNA (1)...(19): siRNA sense strand
gaaagucuucccagauugg

SEQ ID NO: 1455902 - RNA, 19 nt, Homo sapiens
  misc_RNA (1)...(19): siRNA sense strand
cagcagccauguugaaugc

SEQ ID NO: 1455903 - RNA, 19 nt, Homo sapiens
  misc_RNA (1)...(19): siRNA sense strand
guagagcugccuuaugaau

SEQ ID NO: 1455904 - RNA, 19 nt, Homo sapiens
  misc_RNA (1)...(19): siRNA sense strand
gcugagcagucccuaugau

SEQ ID NO: 1455905 - RNA, 19 nt, Homo sapiens
  misc_RNA (1)...(19): siRNA sense strand
ugagaagagccaucacauu

SEQ ID NO: 1455906 - RNA, 19 nt, Homo sapiens
  misc_RNA (1)...(19): siRNA sense strand
gcuauucgggugaccauau

SEQ ID NO: 1455907 - RNA, 19 nt, Homo sapiens
  misc_RNA (1)...(19): siRNA sense strand
caagaaugcaugccaccuu

SEQ ID NO: 1455908 - RNA, 19 nt, Homo sapiens
  misc_RNA (1)...(19): siRNA sense strand
gcauggaggacccgaguuc

SEQ ID NO: 1455909 - RNA, 19 nt, Homo sapiens
  misc_RNA (1)...(19): siRNA sense strand
gagcuggccagaagccuau

SEQ ID NO: 1455910 - RNA, 19 nt, Homo sapiens
  misc_RNA (1)...(19): siRNA sense strand
gucgucaccugucugagaa

SEQ ID NO: 1455911 - RNA, 19 nt, Homo sapiens
  misc_RNA (1)...(19): siRNA sense strand
cccgaguucuccuuugauu

SEQ ID NO: 1455912 - RNA, 19 nt, Homo sapiens
  misc_RNA (1)...(19): siRNA sense strand
gagcagucccuaugauguc

SEQ ID NO: 1455913 - RNA, 19 nt, Homo sapiens
  misc_RNA (1)...(19): siRNA sense strand
ucucucacauccuggaaug

SEQ ID NO: 1455914 - RNA, 19 nt, Homo sapiens
  misc_RNA (1)...(19): siRNA sense strand
gucacuagaccucaucauu

SEQ ID NO: 1455915 - RNA, 19 nt, Homo sapiens
  misc_RNA (1)...(19): siRNA sense strand
uagagcugccuuaugaauu

SEQ ID NO: 1455916 - RNA, 19 nt, Homo sapiens
  misc_RNA (1)...(19): siRNA sense strand
ggugguauguuuuggagaa

SEQ ID NO: 1455917 - RNA, 19 nt, Homo sapiens
  misc_RNA (1)...(19): siRNA sense strand
agaagagccaucacauuuc

SEQ ID NO: 1455918 - RNA, 19 nt, Homo sapiens
  misc_RNA (1)...(19): siRNA sense strand
uggaauguaagcauggaua

SEQ ID NO: 1455919 - RNA, 19 nt, Homo sapiens
  misc_RNA (1)...(19): siRNA sense strand
ucccuaugauguccagaaa

SEQ ID NO: 1455920 - RNA, 19 nt, Homo sapiens
  misc_RNA (1)...(19): siRNA sense strand
cacaagggacuucgcucua

SEQ ID NO: 1455921 - RNA, 19 nt, Homo sapiens
  misc_RNA (1)...(19): siRNA sense strand
gagagucagauggguggua

SEQ ID NO: 1455922 - RNA, 19 nt, Homo sapiens
  misc_RNA (1)...(19): siRNA sense strand
agagucagaugggugguau

SEQ ID NO: 1455923 - RNA, 19 nt, Homo sapiens
  misc_RNA (1)...(19): siRNA sense strand
cagauuggacucacaaagg

SEQ ID NO: 1455924 - RNA, 19 nt, Homo sapiens
  misc_RNA (1)...(19): siRNA sense strand
caaguucucuuuuggaaac

SEQ ID NO: 1455925 - RNA, 19 nt, Homo sapiens
  misc_RNA (1)...(19): siRNA sense strand
ccuaugauguccagaaaau

SEQ ID NO: 1455926 - RNA, 19 nt, Homo sapiens
  misc_RNA (1)...(19): siRNA sense strand
cagaggcacgacuggcaua

SEQ ID NO: 1455927 - RNA, 19 nt, Homo sapiens
  misc_RNA (1)...(19): siRNA sense strand
cgucgucaccugucugaga

SEQ ID NO: 1455928 - RNA, 19 nt, Homo sapiens
  misc_RNA (1)...(19): siRNA sense strand
ggaauguaagcauggauac

SEQ ID NO: 1455929 - RNA, 19 nt, Homo sapiens
  misc_RNA (1)...(19): siRNA sense strand
cagcucugcuucaaguucu

SEQ ID NO: 1455930 - RNA, 19 nt, Homo sapiens
  misc_RNA (1)...(19): siRNA sense strand
ggucagcgugcgucuuugu

SEQ ID NO: 1455931 - RNA, 19 nt, Homo sapiens
  misc_RNA (1)...(19): siRNA sense strand
gauccagagacaugggaaa

SEQ ID NO: 1455932 - RNA, 19 nt, Homo sapiens
  misc_RNA (1)...(19): siRNA sense strand
cgacuggcauacccuuugc

SEQ ID NO: 1455933 - RNA, 19 nt, Homo sapiens
  misc_RNA (1)...(19): siRNA sense strand
ugggagcgcuggcugaacu

SEQ ID NO: 1455934 - RNA, 19 nt, Homo sapiens
  misc_RNA (1)...(19): siRNA sense strand
gcauagaggcauccuaccu

SEQ ID NO: 1455935 - RNA, 19 nt, Homo sapiens
  misc_RNA (1)...(19): siRNA sense strand
acacuguagagcugccuua

SEQ ID NO: 1455936 - RNA, 19 nt, Homo sapiens
  misc_RNA (1)...(19): siRNA sense strand
cacuagaccucaucauucc

SEQ ID NO: 1455937 - RNA, 19 nt, Homo sapiens
  misc_RNA (1)...(19): siRNA sense strand
ugagcagucccuaugaugu

SEQ ID NO: 1455938 - RNA, 19 nt, Homo sapiens
  misc_RNA (1)...(19): siRNA sense strand
ccuacuggguguuguucug

SEQ ID NO: 1455939 - RNA, 19 nt, Homo sapiens
  misc_RNA (1)...(19): siRNA sense strand
gacccaaccuucggaucca

SEQ ID NO: 1455940 - RNA, 19 nt, Homo sapiens
  misc_RNA (1)...(19): siRNA sense strand
cgucaccugucugagaaga

SEQ ID NO: 1455941 - RNA, 19 nt, Homo sapiens
  misc_RNA (1)...(19): siRNA sense strand
gagaagagccaucacauuu

SEQ ID NO: 1455942 - RNA, 19 nt, Homo sapiens
  misc_RNA (1)...(19): siRNA sense strand
gcaaagaccucccgaaugc

SEQ ID NO: 1455943 - RNA, 19 nt, Homo sapiens
  misc_RNA (1)...(19): siRNA sense strand
ucagaugggugguauguuu

SEQ ID NO: 1455944 - RNA, 19 nt, Homo sapiens
  misc_RNA (1)...(19): siRNA sense strand
gcggucagauguccaguuu

SEQ ID NO: 1455945 - RNA, 19 nt, Homo sapiens
  misc_RNA (1)...(19): siRNA sense strand
ggacuucgcucuaaaagga

SEQ ID NO: 1455946 - RNA, 19 nt, Homo sapiens
  misc_RNA (1)...(19): siRNA sense strand
cuguagagcugccuuauga

SEQ ID NO: 1455947 - RNA, 19 nt, Homo sapiens
  misc_RNA (1)...(19): siRNA sense strand
caagggacuucgcucuaaa

SEQ ID NO: 1455948 - RNA, 19 nt, Homo sapiens
  misc_RNA (1)...(19): siRNA sense strand
gacccgaguucuccuuuga

SEQ ID NO: 1455949 - RNA, 19 nt, Homo sapiens
  misc_RNA (1)...(19): siRNA sense strand
acaagggacuucgcucuaa

SEQ ID NO: 1455950 - RNA, 19 nt, Homo sapiens
  misc_RNA (1)...(19): siRNA sense strand
gaagagccaucacauuucc

SEQ ID NO: 1455951 - RNA, 19 nt, Homo sapiens
  misc_RNA (1)...(19): siRNA sense strand
gaggucagcgugcgucuuu

SEQ ID NO: 1455952 - RNA, 19 nt, Homo sapiens
  misc_RNA (1)...(19): siRNA sense strand
acacuccgcugcccacuga

SEQ ID NO: 1455953 - RNA, 19 nt, Homo sapiens
  misc_RNA (1)...(19): siRNA sense strand
ggucagauguccaguuugc

SEQ ID NO: 1455954 - RNA, 19 nt, Homo sapiens
  misc_RNA (1)...(19): siRNA sense strand
gagcugagcagucccuaug

SEQ ID NO: 1455955 - RNA, 19 nt, Homo sapiens
  misc_RNA (1)...(19): siRNA sense strand
cgaguucuccuuugauuug

SEQ ID NO: 1455956 - RNA, 19 nt, Homo sapiens
  misc_RNA (1)...(19): siRNA sense strand
ggacccgaguucuccuuug

SEQ ID NO: 1455957 - RNA, 19 nt, Homo sapiens
  misc_RNA (1)...(19): siRNA sense strand
agagcugccuuaugaauuc

SEQ ID NO: 1455958 - RNA, 19 nt, Homo sapiens
  misc_RNA (1)...(19): siRNA sense strand
gcagcugauucuucacuuc

SEQ ID NO: 1455959 - RNA, 19 nt, Homo sapiens
  misc_RNA (1)...(19): siRNA sense strand
ucacuagaccucaucauuc

SEQ ID NO: 1455960 - RNA, 19 nt, Homo sapiens
  misc_RNA (1)...(19): siRNA sense strand
ccagagacaugggaaaguc

SEQ ID NO: 1455961 - RNA, 19 nt, Homo sapiens
  misc_RNA (1)...(19): siRNA sense strand
gaaagucuucccagauugg

SEQ ID NO: 1455962 - RNA, 19 nt, Homo sapiens
  misc_RNA (1)...(19): siRNA sense strand
cagcagccauguugaaugc

SEQ ID NO: 1455963 - RNA, 19 nt, Homo sapiens
  misc_RNA (1)...(19): siRNA sense strand
guagagcugccuuaugaau

SEQ ID NO: 1455964 - RNA, 19 nt, Homo sapiens
  misc_RNA (1)...(19): siRNA sense strand
gcugagcagucccuaugau

SEQ ID NO: 1455965 - RNA, 19 nt, Homo sapiens
  misc_RNA (1)...(19): siRNA sense strand
ugagaagagccaucacauu

SEQ ID NO: 1455966 - RNA, 19 nt, Homo sapiens
  misc_RNA (1)...(19): siRNA sense strand
gcuauucgggugaccauau

SEQ ID NO: 1455967 - RNA, 19 nt, Homo sapiens
  misc_RNA (1)...(19): siRNA sense strand
caagaaugcaugccaccuu

SEQ ID NO: 1455968 - RNA, 19 nt, Homo sapiens
  misc_RNA (1)...(19): siRNA sense strand
gcauggaggacccgaguuc

SEQ ID NO: 1455969 - RNA, 19 nt, Homo sapiens
  misc_RNA (1)...(19): siRNA sense strand
gagcuggccagaagccuau

SEQ ID NO: 1455970 - RNA, 19 nt, Homo sapiens
  misc_RNA (1)...(19): siRNA sense strand
gucgucaccugucugagaa

SEQ ID NO: 1455971 - RNA, 19 nt, Homo sapiens
  misc_RNA (1)...(19): siRNA sense strand
cccgaguucuccuuugauu

SEQ ID NO: 1455972 - RNA, 19 nt, Homo sapiens
  misc_RNA (1)...(19): siRNA sense strand
gagcagucccuaugauguc

SEQ ID NO: 1455973 - RNA, 19 nt, Homo sapiens
  misc_RNA (1)...(19): siRNA sense strand
ucucucacauccuggaaug

SEQ ID NO: 1455974 - RNA, 19 nt, Homo sapiens
  misc_RNA (1)...(19): siRNA sense strand
gucacuagaccucaucauu

SEQ ID NO: 1455975 - RNA, 19 nt, Homo sapiens
  misc_RNA (1)...(19): siRNA sense strand
uagagcugccuuaugaauu

SEQ ID NO: 1455976 - RNA, 19 nt, Homo sapiens
  misc_RNA (1)...(19): siRNA sense strand
ggugguauguuuuggagaa

SEQ ID NO: 1455977 - RNA, 19 nt, Homo sapiens
  misc_RNA (1)...(19): siRNA sense strand
agaagagccaucacauuuc

SEQ ID NO: 1455978 - RNA, 19 nt, Homo sapiens
  misc_RNA (1)...(19): siRNA sense strand
uggaauguaagcauggaua

SEQ ID NO: 1455979 - RNA, 19 nt, Homo sapiens
  misc_RNA (1)...(19): siRNA sense strand
ucccuaugauguccagaaa

SEQ ID NO: 1455980 - RNA, 19 nt, Homo sapiens
  misc_RNA (1)...(19): siRNA sense strand
cacaagggacuucgcucua

SEQ ID NO: 1455981 - RNA, 19 nt, Homo sapiens
  misc_RNA (1)...(19): siRNA sense strand
gagagucagauggguggua

SEQ ID NO: 1455982 - RNA, 19 nt, Homo sapiens
  misc_RNA (1)...(19): siRNA sense strand
agagucagaugggugguau

SEQ ID NO: 1455983 - RNA, 19 nt, Homo sapiens
  misc_RNA (1)...(19): siRNA sense strand
cagauuggacucacaaagg

SEQ ID NO: 1455984 - RNA, 19 nt, Homo sapiens
  misc_RNA (1)...(19): siRNA sense strand
caaguucucuuuuggaaac

SEQ ID NO: 1455985 - RNA, 19 nt, Homo sapiens
  misc_RNA (1)...(19): siRNA sense strand
ccuaugauguccagaaaau

SEQ ID NO: 1455986 - RNA, 19 nt, Homo sapiens
  misc_RNA (1)...(19): siRNA sense strand
cagaggcacgacuggcaua

SEQ ID NO: 1455987 - RNA, 19 nt, Homo sapiens
  misc_RNA (1)...(19): siRNA sense strand
cgucgucaccugucugaga

SEQ ID NO: 1455988 - RNA, 19 nt, Homo sapiens
  misc_RNA (1)...(19): siRNA sense strand
ggaauguaagcauggauac

SEQ ID NO: 1455989 - RNA, 19 nt, Homo sapiens
  misc_RNA (1)...(19): siRNA sense strand
cagcucugcuucaaguucu

SEQ ID NO: 1455990 - RNA, 19 nt, Homo sapiens
  misc_RNA (1)...(19): siRNA sense strand
gauccagagacaugggaaa

SEQ ID NO: 1455991 - RNA, 19 nt, Homo sapiens
  misc_RNA (1)...(19): siRNA sense strand
ggucagcgugcgucuuugu

SEQ ID NO: 1455992 - RNA, 19 nt, Homo sapiens
  misc_RNA (1)...(19): siRNA sense strand
cgacuggcauacccuuugc

SEQ ID NO: 1455993 - RNA, 19 nt, Homo sapiens
  misc_RNA (1)...(19): siRNA sense strand
gcauagaggcauccuaccu

SEQ ID NO: 1455994 - RNA, 19 nt, Homo sapiens
  misc_RNA (1)...(19): siRNA sense strand
acacuguagagcugccuua

SEQ ID NO: 1455995 - RNA, 19 nt, Homo sapiens
  misc_RNA (1)...(19): siRNA sense strand
cacuagaccucaucauucc

SEQ ID NO: 1455996 - RNA, 19 nt, Homo sapiens
  misc_RNA (1)...(19): siRNA sense strand
ugagcagucccuaugaugu

SEQ ID NO: 1455997 - RNA, 19 nt, Homo sapiens
  misc_RNA (1)...(19): siRNA sense strand
gacccaaccuucggaucca

SEQ ID NO: 1455998 - RNA, 19 nt, Homo sapiens
  misc_RNA (1)...(19): siRNA sense strand
cgucaccugucugagaaga

SEQ ID NO: 1455999 - RNA, 19 nt, Homo sapiens
  misc_RNA (1)...(19): siRNA sense strand
gagaagagccaucacauuu

SEQ ID NO: 1456000 - RNA, 19 nt, Homo sapiens
  misc_RNA (1)...(19): siRNA sense strand
gcaaagaccucccgaaugc

SEQ ID NO: 1456001 - RNA, 19 nt, Homo sapiens
  misc_RNA (1)...(19): siRNA sense strand
ucagaugggugguauguuu

SEQ ID NO: 1456002 - RNA, 19 nt, Homo sapiens
  misc_RNA (1)...(19): siRNA sense strand
gcggucagauguccaguuu

SEQ ID NO: 1456003 - RNA, 19 nt, Homo sapiens
  misc_RNA (1)...(19): siRNA sense strand
ggacuucgcucuaaaagga

SEQ ID NO: 1456004 - RNA, 19 nt, Homo sapiens
  misc_RNA (1)...(19): siRNA sense strand
cuguagagcugccuuauga

SEQ ID NO: 1456005 - RNA, 19 nt, Homo sapiens
  misc_RNA (1)...(19): siRNA sense strand
caagggacuucgcucuaaa

SEQ ID NO: 1456006 - RNA, 19 nt, Homo sapiens
  misc_RNA (1)...(19): siRNA sense strand
gacccgaguucuccuuuga

SEQ ID NO: 1456007 - RNA, 19 nt, Homo sapiens
  misc_RNA (1)...(19): siRNA sense strand
acaagggacuucgcucuaa

SEQ ID NO: 1456008 - RNA, 19 nt, Homo sapiens
  misc_RNA (1)...(19): siRNA sense strand
gaagagccaucacauuucc

SEQ ID NO: 1456009 - RNA, 19 nt, Homo sapiens
  misc_RNA (1)...(19): siRNA sense strand
gaggucagcgugcgucuuu

SEQ ID NO: 1456010 - RNA, 19 nt, Homo sapiens
  misc_RNA (1)...(19): siRNA sense strand
acacuccgcugcccacuga

SEQ ID NO: 1456011 - RNA, 19 nt, Homo sapiens
  misc_RNA (1)...(19): siRNA sense strand
ggucagauguccaguuugc

SEQ ID NO: 1456012 - RNA, 19 nt, Homo sapiens
  misc_RNA (1)...(19): siRNA sense strand
gagcugagcagucccuaug

SEQ ID NO: 1456013 - RNA, 19 nt, Homo sapiens
  misc_RNA (1)...(19): siRNA sense strand
cgaguucuccuuugauuug

SEQ ID NO: 1456014 - RNA, 19 nt, Homo sapiens
  misc_RNA (1)...(19): siRNA sense strand
ggacccgaguucuccuuug

SEQ ID NO: 1456015 - RNA, 19 nt, Homo sapiens
  misc_RNA (1)...(19): siRNA sense strand
agagcugccuuaugaauuc

SEQ ID NO: 1456016 - RNA, 19 nt, Homo sapiens
  misc_RNA (1)...(19): siRNA sense strand
gcagcugauucuucacuuc

SEQ ID NO: 1456017 - RNA, 19 nt, Homo sapiens
  misc_RNA (1)...(19): siRNA sense strand
ucacuagaccucaucauuc

SEQ ID NO: 1456018 - RNA, 19 nt, Homo sapiens
  misc_RNA (1)...(19): siRNA sense strand
ccagagacaugggaaaguc

SEQ ID NO: 1456019 - RNA, 19 nt, Homo sapiens
  misc_RNA (1)...(19): siRNA sense strand
gcugcucgcuuacuucagu

SEQ ID NO: 1456020 - RNA, 19 nt, Homo sapiens
  misc_RNA (1)...(19): siRNA sense strand
gaaagucuucccagauugg

SEQ ID NO: 1456021 - RNA, 19 nt, Homo sapiens
  misc_RNA (1)...(19): siRNA sense strand
cagcagccauguugaaugc

SEQ ID NO: 1456022 - RNA, 19 nt, Homo sapiens
  misc_RNA (1)...(19): siRNA sense strand
guagagcugccuuaugaau

SEQ ID NO: 1456023 - RNA, 19 nt, Homo sapiens
  misc_RNA (1)...(19): siRNA sense strand
ugagaagagccaucacauu

SEQ ID NO: 1456024 - RNA, 19 nt, Homo sapiens
  misc_RNA (1)...(19): siRNA sense strand
gcugagcagucccuaugau

SEQ ID NO: 1456025 - RNA, 19 nt, Homo sapiens
  misc_RNA (1)...(19): siRNA sense strand
gcuauucgggugaccauau

SEQ ID NO: 1456026 - RNA, 19 nt, Homo sapiens
  misc_RNA (1)...(19): siRNA sense strand
caagaaugcaugccaccuu

SEQ ID NO: 1456027 - RNA, 19 nt, Homo sapiens
  misc_RNA (1)...(19): siRNA sense strand
acauucaaguucuauagga

SEQ ID NO: 1456028 - RNA, 19 nt, Homo sapiens
  misc_RNA (1)...(19): siRNA sense strand
gagcuggccagaagccuau

SEQ ID NO: 1456029 - RNA, 19 nt, Homo sapiens
  misc_RNA (1)...(19): siRNA sense strand
gcauggaggacccgaguuc

SEQ ID NO: 1456030 - RNA, 19 nt, Homo sapiens
  misc_RNA (1)...(19): siRNA sense strand
ccacauucaaguucuauag

SEQ ID NO: 1456031 - RNA, 19 nt, Homo sapiens
  misc_RNA (1)...(19): siRNA sense strand
cccgaguucuccuuugauu

SEQ ID NO: 1456032 - RNA, 19 nt, Homo sapiens
  misc_RNA (1)...(19): siRNA sense strand
gucgucaccugucugagaa

SEQ ID NO: 1456033 - RNA, 19 nt, Homo sapiens
  misc_RNA (1)...(19): siRNA sense strand
gagcagucccuaugauguc

SEQ ID NO: 1456034 - RNA, 19 nt, Homo sapiens
  misc_RNA (1)...(19): siRNA sense strand
ucucucacauccuggaaug

SEQ ID NO: 1456035 - RNA, 19 nt, Homo sapiens
  misc_RNA (1)...(19): siRNA sense strand
gucacuagaccucaucauu

SEQ ID NO: 1456036 - RNA, 19 nt, Homo sapiens
  misc_RNA (1)...(19): siRNA sense strand
uagagcugccuuaugaauu

SEQ ID NO: 1456037 - RNA, 19 nt, Homo sapiens
  misc_RNA (1)...(19): siRNA sense strand
ggugguauguuuuggagaa

SEQ ID NO: 1456038 - RNA, 19 nt, Homo sapiens
  misc_RNA (1)...(19): siRNA sense strand
agaagagccaucacauuuc

SEQ ID NO: 1456039 - RNA, 19 nt, Homo sapiens
  misc_RNA (1)...(19): siRNA sense strand
uggaauguaagcauggaua

SEQ ID NO: 1456040 - RNA, 19 nt, Homo sapiens
  misc_RNA (1)...(19): siRNA sense strand
ucccuaugauguccagaaa

SEQ ID NO: 1456041 - RNA, 19 nt, Homo sapiens
  misc_RNA (1)...(19): siRNA sense strand
cacaagggacuucgcucua

SEQ ID NO: 1456042 - RNA, 19 nt, Homo sapiens
  misc_RNA (1)...(19): siRNA sense strand
gagagucagauggguggua

SEQ ID NO: 1456043 - RNA, 19 nt, Homo sapiens
  misc_RNA (1)...(19): siRNA sense strand
agagucagaugggugguau

SEQ ID NO: 1456044 - RNA, 19 nt, Homo sapiens
  misc_RNA (1)...(19): siRNA sense strand
cagauuggacucacaaagg

SEQ ID NO: 1456045 - RNA, 19 nt, Homo sapiens
  misc_RNA (1)...(19): siRNA sense strand
caaguucucuuuuggaaac

SEQ ID NO: 1456046 - RNA, 19 nt, Homo sapiens
  misc_RNA (1)...(19): siRNA sense strand
ccuaugauguccagaaaau

SEQ ID NO: 1456047 - RNA, 19 nt, Homo sapiens
  misc_RNA (1)...(19): siRNA sense strand
cagaggcacgacuggcaua

SEQ ID NO: 1456048 - RNA, 19 nt, Homo sapiens
  misc_RNA (1)...(19): siRNA sense strand
ggaauguaagcauggauac

SEQ ID NO: 1456049 - RNA, 19 nt, Homo sapiens
  misc_RNA (1)...(19): siRNA sense strand
cgucgucaccugucugaga

SEQ ID NO: 1456050 - RNA, 19 nt, Homo sapiens
  misc_RNA (1)...(19): siRNA sense strand
cagcucugcuucaaguucu

SEQ ID NO: 1456051 - RNA, 19 nt, Homo sapiens
  misc_RNA (1)...(19): siRNA sense strand
gauccagagacaugggaaa

SEQ ID NO: 1456052 - RNA, 19 nt, Homo sapiens
  misc_RNA (1)...(19): siRNA sense strand
ggucagcgugcgucuuugu

SEQ ID NO: 1456053 - RNA, 19 nt, Homo sapiens
  misc_RNA (1)...(19): siRNA sense strand
cgacuggcauacccuuugc

SEQ ID NO: 1456054 - RNA, 19 nt, Homo sapiens
  misc_RNA (1)...(19): siRNA sense strand
ugggagcgcuggcugaacu

SEQ ID NO: 1456055 - RNA, 19 nt, Homo sapiens
  misc_RNA (1)...(19): siRNA sense strand
gcauagaggcauccuaccu

SEQ ID NO: 1456056 - RNA, 19 nt, Homo sapiens
  misc_RNA (1)...(19): siRNA sense strand
acacuguagagcugccuua

SEQ ID NO: 1456057 - RNA, 19 nt, Homo sapiens
  misc_RNA (1)...(19): siRNA sense strand
cacuagaccucaucauucc

SEQ ID NO: 1456058 - RNA, 19 nt, Homo sapiens
  misc_RNA (1)...(19): siRNA sense strand
gacccaaccuucggaucca

SEQ ID NO: 1456059 - RNA, 19 nt, Homo sapiens
  misc_RNA (1)...(19): siRNA sense strand
ccuacuggguguuguucug

SEQ ID NO: 1456060 - RNA, 19 nt, Homo sapiens
  misc_RNA (1)...(19): siRNA sense strand
cgucaccugucugagaaga

SEQ ID NO: 1456061 - RNA, 19 nt, Homo sapiens
  misc_RNA (1)...(19): siRNA sense strand
ugagcagucccuaugaugu

SEQ ID NO: 1456062 - RNA, 19 nt, Homo sapiens
  misc_RNA (1)...(19): siRNA sense strand
gagaagagccaucacauuu

SEQ ID NO: 1456063 - RNA, 19 nt, Homo sapiens
  misc_RNA (1)...(19): siRNA sense strand
gcaaagaccucccgaaugc

SEQ ID NO: 1456064 - RNA, 19 nt, Homo sapiens
  misc_RNA (1)...(19): siRNA sense strand
ucagaugggugguauguuu

SEQ ID NO: 1456065 - RNA, 19 nt, Homo sapiens
  misc_RNA (1)...(19): siRNA sense strand
gcggucagauguccaguuu

SEQ ID NO: 1456066 - RNA, 19 nt, Homo sapiens
  misc_RNA (1)...(19): siRNA sense strand
ggacuucgcucuaaaagga

SEQ ID NO: 1456067 - RNA, 19 nt, Homo sapiens
  misc_RNA (1)...(19): siRNA sense strand
cuguagagcugccuuauga

SEQ ID NO: 1456068 - RNA, 19 nt, Homo sapiens
  misc_RNA (1)...(19): siRNA sense strand
caagggacuucgcucuaaa

SEQ ID NO: 1456069 - RNA, 19 nt, Homo sapiens
  misc_RNA (1)...(19): siRNA sense strand
gacccgaguucuccuuuga

SEQ ID NO: 1456070 - RNA, 19 nt, Homo sapiens
  misc_RNA (1)...(19): siRNA sense strand
acaagggacuucgcucuaa

SEQ ID NO: 1456071 - RNA, 19 nt, Homo sapiens
  misc_RNA (1)...(19): siRNA sense strand
gaagagccaucacauuucc

SEQ ID NO: 1456072 - RNA, 19 nt, Homo sapiens
  misc_RNA (1)...(19): siRNA sense strand
gaggucagcgugcgucuuu

SEQ ID NO: 1456073 - RNA, 19 nt, Homo sapiens
  misc_RNA (1)...(19): siRNA sense strand
acacuccgcugcccacuga

SEQ ID NO: 1456074 - RNA, 19 nt, Homo sapiens
  misc_RNA (1)...(19): siRNA sense strand
ggucagauguccaguuugc

SEQ ID NO: 1456075 - RNA, 19 nt, Homo sapiens
  misc_RNA (1)...(19): siRNA sense strand
gagcugagcagucccuaug

SEQ ID NO: 1456076 - RNA, 19 nt, Homo sapiens
  misc_RNA (1)...(19): siRNA sense strand
cgaguucuccuuugauuug

SEQ ID NO: 1456077 - RNA, 19 nt, Homo sapiens
  misc_RNA (1)...(19): siRNA sense strand
ggacccgaguucuccuuug

SEQ ID NO: 1456078 - RNA, 19 nt, Homo sapiens
  misc_RNA (1)...(19): siRNA sense strand
agagcugccuuaugaauuc

SEQ ID NO: 1456079 - RNA, 19 nt, Homo sapiens
  misc_RNA (1)...(19): siRNA sense strand
gcagcugauucuucacuuc

SEQ ID NO: 1456080 - RNA, 19 nt, Homo sapiens
  misc_RNA (1)...(19): siRNA sense strand
ucacuagaccucaucauuc

SEQ ID NO: 1456081 - RNA, 19 nt, Homo sapiens
  misc_RNA (1)...(19): siRNA sense strand
ccagagacaugggaaaguc

SEQ ID NO: 1456082 - RNA, 19 nt, Homo sapiens
  misc_RNA (1)...(19): siRNA sense strand
ugccacagcucgagaguca

SEQ ID NO: 1456083 - RNA, 19 nt, Homo sapiens
  misc_RNA (1)...(19): siRNA sense strand
gaaagucuucccagauugg

SEQ ID NO: 1456084 - RNA, 19 nt, Homo sapiens
  misc_RNA (1)...(19): siRNA sense strand
cagcagccauguugaaugc

SEQ ID NO: 1456085 - RNA, 19 nt, Homo sapiens
  misc_RNA (1)...(19): siRNA sense strand
guagagcugccuuaugaau

SEQ ID NO: 1456086 - RNA, 19 nt, Homo sapiens
  misc_RNA (1)...(19): siRNA sense strand
ugagaagagccaucacauu

SEQ ID NO: 1456087 - RNA, 19 nt, Homo sapiens
  misc_RNA (1)...(19): siRNA sense strand
gcugagcagucccuaugau

SEQ ID NO: 1456088 - RNA, 19 nt, Homo sapiens
  misc_RNA (1)...(19): siRNA sense strand
gcuauucgggugaccauau

SEQ ID NO: 1456089 - RNA, 19 nt, Homo sapiens
  misc_RNA (1)...(19): siRNA sense strand
caagaaugcaugccaccuu

SEQ ID NO: 1456090 - RNA, 19 nt, Homo sapiens
  misc_RNA (1)...(19): siRNA sense strand
acauucaaguucuauagga

SEQ ID NO: 1456091 - RNA, 19 nt, Homo sapiens
  misc_RNA (1)...(19): siRNA sense strand
gagcuggccagaagccuau

SEQ ID NO: 1456092 - RNA, 19 nt, Homo sapiens
  misc_RNA (1)...(19): siRNA sense strand
gcauggaggacccgaguuc

SEQ ID NO: 1456093 - RNA, 19 nt, Homo sapiens
  misc_RNA (1)...(19): siRNA sense strand
ccacauucaaguucuauag

SEQ ID NO: 1456094 - RNA, 19 nt, Homo sapiens
  misc_RNA (1)...(19): siRNA sense strand
ccacagcucgagagucaga

SEQ ID NO: 1456095 - RNA, 19 nt, Homo sapiens
  misc_RNA (1)...(19): siRNA sense strand
cccgaguucuccuuugauu

SEQ ID NO: 1456096 - RNA, 19 nt, Homo sapiens
  misc_RNA (1)...(19): siRNA sense strand
gucgucaccugucugagaa

SEQ ID NO: 1456097 - RNA, 19 nt, Homo sapiens
  misc_RNA (1)...(19): siRNA sense strand
gagcagucccuaugauguc

SEQ ID NO: 1456098 - RNA, 19 nt, Homo sapiens
  misc_RNA (1)...(19): siRNA sense strand
ucucucacauccuggaaug

SEQ ID NO: 1456099 - RNA, 19 nt, Homo sapiens
  misc_RNA (1)...(19): siRNA sense strand
gucacuagaccucaucauu

SEQ ID NO: 1456100 - RNA, 19 nt, Homo sapiens
  misc_RNA (1)...(19): siRNA sense strand
uagagcugccuuaugaauu

SEQ ID NO: 1456101 - RNA, 19 nt, Homo sapiens
  misc_RNA (1)...(19): siRNA sense strand
ggugguauguuuuggagaa

SEQ ID NO: 1456102 - RNA, 19 nt, Homo sapiens
  misc_RNA (1)...(19): siRNA sense strand
agaagagccaucacauuuc

SEQ ID NO: 1456103 - RNA, 19 nt, Homo sapiens
  misc_RNA (1)...(19): siRNA sense strand
uggaauguaagcauggaua

SEQ ID NO: 1456104 - RNA, 19 nt, Homo sapiens
  misc_RNA (1)...(19): siRNA sense strand
ucccuaugauguccagaaa

SEQ ID NO: 1456105 - RNA, 19 nt, Homo sapiens
  misc_RNA (1)...(19): siRNA sense strand
cacaagggacuucgcucua

SEQ ID NO: 1456106 - RNA, 19 nt, Homo sapiens
  misc_RNA (1)...(19): siRNA sense strand
gagagucagauggguggua

SEQ ID NO: 1456107 - RNA, 19 nt, Homo sapiens
  misc_RNA (1)...(19): siRNA sense strand
agagucagaugggugguau

SEQ ID NO: 1456108 - RNA, 19 nt, Homo sapiens
  misc_RNA (1)...(19): siRNA sense strand
cagauuggacucacaaagg

SEQ ID NO: 1456109 - RNA, 19 nt, Homo sapiens
  misc_RNA (1)...(19): siRNA sense strand
caaguucucuuuuggaaac

SEQ ID NO: 1456110 - RNA, 19 nt, Homo sapiens
  misc_RNA (1)...(19): siRNA sense strand
ccuaugauguccagaaaau

SEQ ID NO: 1456111 - RNA, 19 nt, Homo sapiens
  misc_RNA (1)...(19): siRNA sense strand
cgucgucaccugucugaga

SEQ ID NO: 1456112 - RNA, 19 nt, Homo sapiens
  misc_RNA (1)...(19): siRNA sense strand
ggaauguaagcauggauac

SEQ ID NO: 1456113 - RNA, 19 nt, Homo sapiens
  misc_RNA (1)...(19): siRNA sense strand
cagcucugcuucaaguucu

SEQ ID NO: 1456114 - RNA, 19 nt, Homo sapiens
  misc_RNA (1)...(19): siRNA sense strand
cagaggcacgacuggcaua

SEQ ID NO: 1456115 - RNA, 19 nt, Homo sapiens
  misc_RNA (1)...(19): siRNA sense strand
gauccagagacaugggaaa

SEQ ID NO: 1456116 - RNA, 19 nt, Homo sapiens
  misc_RNA (1)...(19): siRNA sense strand
ggucagcgugcgucuuugu

SEQ ID NO: 1456117 - RNA, 19 nt, Homo sapiens
  misc_RNA (1)...(19): siRNA sense strand
cgacuggcauacccuuugc

SEQ ID NO: 1456118 - RNA, 19 nt, Homo sapiens
  misc_RNA (1)...(19): siRNA sense strand
gcauagaggcauccuaccu

SEQ ID NO: 1456119 - RNA, 19 nt, Homo sapiens
  misc_RNA (1)...(19): siRNA sense strand
guccggaugucucuuacag

SEQ ID NO: 1456120 - RNA, 19 nt, Homo sapiens
  misc_RNA (1)...(19): siRNA sense strand
acacuguagagcugccuua

SEQ ID NO: 1456121 - RNA, 19 nt, Homo sapiens
  misc_RNA (1)...(19): siRNA sense strand
cacuagaccucaucauucc

SEQ ID NO: 1456122 - RNA, 19 nt, Homo sapiens
  misc_RNA (1)...(19): siRNA sense strand
gacccaaccuucggaucca

SEQ ID NO: 1456123 - RNA, 19 nt, Homo sapiens
  misc_RNA (1)...(19): siRNA sense strand
cgucaccugucugagaaga

SEQ ID NO: 1456124 - RNA, 19 nt, Homo sapiens
  misc_RNA (1)...(19): siRNA sense strand
ugagcagucccuaugaugu

SEQ ID NO: 1456125 - RNA, 19 nt, Homo sapiens
  misc_RNA (1)...(19): siRNA sense strand
gagaagagccaucacauuu

SEQ ID NO: 1456126 - RNA, 19 nt, Homo sapiens
  misc_RNA (1)...(19): siRNA sense strand
gcaaagaccucccgaaugc

SEQ ID NO: 1456127 - RNA, 19 nt, Homo sapiens
  misc_RNA (1)...(19): siRNA sense strand
ucagaugggugguauguuu

SEQ ID NO: 1456128 - RNA, 19 nt, Homo sapiens
  misc_RNA (1)...(19): siRNA sense strand
gcggucagauguccaguuu

SEQ ID NO: 1456129 - RNA, 19 nt, Homo sapiens
  misc_RNA (1)...(19): siRNA sense strand
ggacuucgcucuaaaagga

SEQ ID NO: 1456130 - RNA, 19 nt, Homo sapiens
  misc_RNA (1)...(19): siRNA sense strand
cuguagagcugccuuauga

SEQ ID NO: 1456131 - RNA, 19 nt, Homo sapiens
  misc_RNA (1)...(19): siRNA sense strand
caagggacuucgcucuaaa

SEQ ID NO: 1456132 - RNA, 19 nt, Homo sapiens
  misc_RNA (1)...(19): siRNA sense strand
gacccgaguucuccuuuga

SEQ ID NO: 1456133 - RNA, 19 nt, Homo sapiens
  misc_RNA (1)...(19): siRNA sense strand
acaagggacuucgcucuaa

SEQ ID NO: 1456134 - RNA, 19 nt, Homo sapiens
  misc_RNA (1)...(19): siRNA sense strand
gaagagccaucacauuucc

SEQ ID NO: 1456135 - RNA, 19 nt, Homo sapiens
  misc_RNA (1)...(19): siRNA sense strand
gaggucagcgugcgucuuu

SEQ ID NO: 1456136 - RNA, 19 nt, Homo sapiens
  misc_RNA (1)...(19): siRNA sense strand
acacuccgcugcccacuga

SEQ ID NO: 1456137 - RNA, 19 nt, Homo sapiens
  misc_RNA (1)...(19): siRNA sense strand
ggucagauguccaguuugc

SEQ ID NO: 1456138 - RNA, 19 nt, Homo sapiens
  misc_RNA (1)...(19): siRNA sense strand
gagcugagcagucccuaug

SEQ ID NO: 1456139 - RNA, 19 nt, Homo sapiens
  misc_RNA (1)...(19): siRNA sense strand
cgaguucuccuuugauuug

SEQ ID NO: 1456140 - RNA, 19 nt, Homo sapiens
  misc_RNA (1)...(19): siRNA sense strand
ggacccgaguucuccuuug

SEQ ID NO: 1456141 - RNA, 19 nt, Homo sapiens
  misc_RNA (1)...(19): siRNA sense strand
agagcugccuuaugaauuc

SEQ ID NO: 1456142 - RNA, 19 nt, Homo sapiens
  misc_RNA (1)...(19): siRNA sense strand
gcagcugauucuucacuuc

SEQ ID NO: 1456143 - RNA, 19 nt, Homo sapiens
  misc_RNA (1)...(19): siRNA sense strand
ucacuagaccucaucauuc

SEQ ID NO: 1456144 - RNA, 19 nt, Homo sapiens
  misc_RNA (1)...(19): siRNA sense strand
ccagagacaugggaaaguc

SEQ ID NO: 1456145 - RNA, 19 nt, Homo sapiens
  misc_RNA (1)...(19): siRNA sense strand
gcugcucgcuuacuucagu

SEQ ID NO: 1456146 - RNA, 19 nt, Homo sapiens
  misc_RNA (1)...(19): siRNA sense strand
gaaagucuucccagauugg

SEQ ID NO: 1456147 - RNA, 19 nt, Homo sapiens
  misc_RNA (1)...(19): siRNA sense strand
cagcagccauguugaaugc

SEQ ID NO: 1456148 - RNA, 19 nt, Homo sapiens
  misc_RNA (1)...(19): siRNA sense strand
guagagcugccuuaugaau

SEQ ID NO: 1456149 - RNA, 19 nt, Homo sapiens
  misc_RNA (1)...(19): siRNA sense strand
ugagaagagccaucacauu

SEQ ID NO: 1456150 - RNA, 19 nt, Homo sapiens
  misc_RNA (1)...(19): siRNA sense strand
gcugagcagucccuaugau

SEQ ID NO: 1456151 - RNA, 19 nt, Homo sapiens
  misc_RNA (1)...(19): siRNA sense strand
gcuauucgggugaccauau

SEQ ID NO: 1456152 - RNA, 19 nt, Homo sapiens
  misc_RNA (1)...(19): siRNA sense strand
caagaaugcaugccaccuu

SEQ ID NO: 1456153 - RNA, 19 nt, Homo sapiens
  misc_RNA (1)...(19): siRNA sense strand
acauucaaguucuauagga

SEQ ID NO: 1456154 - RNA, 19 nt, Homo sapiens
  misc_RNA (1)...(19): siRNA sense strand
gagcuggccagaagccuau

SEQ ID NO: 1456155 - RNA, 19 nt, Homo sapiens
  misc_RNA (1)...(19): siRNA sense strand
gcauggaggacccgaguuc

SEQ ID NO: 1456156 - RNA, 19 nt, Homo sapiens
  misc_RNA (1)...(19): siRNA sense strand
ccacauucaaguucuauag

SEQ ID NO: 1456157 - RNA, 19 nt, Homo sapiens
  misc_RNA (1)...(19): siRNA sense strand
cccgaguucuccuuugauu

SEQ ID NO: 1456158 - RNA, 19 nt, Homo sapiens
  misc_RNA (1)...(19): siRNA sense strand
gucgucaccugucugagaa

SEQ ID NO: 1456159 - RNA, 19 nt, Homo sapiens
  misc_RNA (1)...(19): siRNA sense strand
gagcagucccuaugauguc

SEQ ID NO: 1456160 - RNA, 19 nt, Homo sapiens
  misc_RNA (1)...(19): siRNA sense strand
ucucucacauccuggaaug

SEQ ID NO: 1456161 - RNA, 19 nt, Homo sapiens
  misc_RNA (1)...(19): siRNA sense strand
gucacuagaccucaucauu

SEQ ID NO: 1456162 - RNA, 19 nt, Homo sapiens
  misc_RNA (1)...(19): siRNA sense strand
uagagcugccuuaugaauu

SEQ ID NO: 1456163 - RNA, 19 nt, Homo sapiens
  misc_RNA (1)...(19): siRNA sense strand
ggugguauguuuuggagaa

SEQ ID NO: 1456164 - RNA, 19 nt, Homo sapiens
  misc_RNA (1)...(19): siRNA sense strand
agaagagccaucacauuuc

SEQ ID NO: 1456165 - RNA, 19 nt, Homo sapiens
  misc_RNA (1)...(19): siRNA sense strand
uggaauguaagcauggaua

SEQ ID NO: 1456166 - RNA, 19 nt, Homo sapiens
  misc_RNA (1)...(19): siRNA sense strand
ucccuaugauguccagaaa

SEQ ID NO: 1456167 - RNA, 19 nt, Homo sapiens
  misc_RNA (1)...(19): siRNA sense strand
cacaagggacuucgcucua

SEQ ID NO: 1456168 - RNA, 19 nt, Homo sapiens
  misc_RNA (1)...(19): siRNA sense strand
gagagucagauggguggua

SEQ ID NO: 1456169 - RNA, 19 nt, Homo sapiens
  misc_RNA (1)...(19): siRNA sense strand
agagucagaugggugguau

SEQ ID NO: 1456170 - RNA, 19 nt, Homo sapiens
  misc_RNA (1)...(19): siRNA sense strand
cagauuggacucacaaagg

SEQ ID NO: 1456171 - RNA, 19 nt, Homo sapiens
  misc_RNA (1)...(19): siRNA sense strand
caaguucucuuuuggaaac

SEQ ID NO: 1456172 - RNA, 19 nt, Homo sapiens
  misc_RNA (1)...(19): siRNA sense strand
ccuaugauguccagaaaau

SEQ ID NO: 1456173 - RNA, 19 nt, Homo sapiens
  misc_RNA (1)...(19): siRNA sense strand
cagaggcacgacuggcaua

SEQ ID NO: 1456174 - RNA, 19 nt, Homo sapiens
  misc_RNA (1)...(19): siRNA sense strand
ggaauguaagcauggauac

SEQ ID NO: 1456175 - RNA, 19 nt, Homo sapiens
  misc_RNA (1)...(19): siRNA sense strand
cgucgucaccugucugaga

SEQ ID NO: 1456176 - RNA, 19 nt, Homo sapiens
  misc_RNA (1)...(19): siRNA sense strand
cagcucugcuucaaguucu

SEQ ID NO: 1456177 - RNA, 19 nt, Homo sapiens
  misc_RNA (1)...(19): siRNA sense strand
gauccagagacaugggaaa

SEQ ID NO: 1456178 - RNA, 19 nt, Homo sapiens
  misc_RNA (1)...(19): siRNA sense strand
ggucagcgugcgucuuugu

SEQ ID NO: 1456179 - RNA, 19 nt, Homo sapiens
  misc_RNA (1)...(19): siRNA sense strand
cgacuggcauacccuuugc

SEQ ID NO: 1456180 - RNA, 19 nt, Homo sapiens
  misc_RNA (1)...(19): siRNA sense strand
ugggagcgcuggcugaacu

SEQ ID NO: 1456181 - RNA, 19 nt, Homo sapiens
  misc_RNA (1)...(19): siRNA sense strand
gcauagaggcauccuaccu

SEQ ID NO: 1456182 - RNA, 19 nt, Homo sapiens
  misc_RNA (1)...(19): siRNA sense strand
acacuguagagcugccuua

SEQ ID NO: 1456183 - RNA, 19 nt, Homo sapiens
  misc_RNA (1)...(19): siRNA sense strand
cacuagaccucaucauucc

SEQ ID NO: 1456184 - RNA, 19 nt, Homo sapiens
  misc_RNA (1)...(19): siRNA sense strand
gacccaaccuucggaucca

SEQ ID NO: 1456185 - RNA, 19 nt, Homo sapiens
  misc_RNA (1)...(19): siRNA sense strand
ccuacuggguguuguucug

SEQ ID NO: 1456186 - RNA, 19 nt, Homo sapiens
  misc_RNA (1)...(19): siRNA sense strand
cgucaccugucugagaaga

SEQ ID NO: 1456187 - RNA, 19 nt, Homo sapiens
  misc_RNA (1)...(19): siRNA sense strand
ugagcagucccuaugaugu

SEQ ID NO: 1456188 - RNA, 19 nt, Homo sapiens
  misc_RNA (1)...(19): siRNA sense strand
gagaagagccaucacauuu

SEQ ID NO: 1456189 - RNA, 19 nt, Homo sapiens
  misc_RNA (1)...(19): siRNA sense strand
gcaaagaccucccgaaugc

SEQ ID NO: 1456190 - RNA, 19 nt, Homo sapiens
  misc_RNA (1)...(19): siRNA sense strand
ucagaugggugguauguuu

SEQ ID NO: 1456191 - RNA, 19 nt, Homo sapiens
  misc_RNA (1)...(19): siRNA sense strand
gcggucagauguccaguuu

SEQ ID NO: 1456192 - RNA, 19 nt, Homo sapiens
  misc_RNA (1)...(19): siRNA sense strand
ggacuucgcucuaaaagga

SEQ ID NO: 1456193 - RNA, 19 nt, Homo sapiens
  misc_RNA (1)...(19): siRNA sense strand
cuguagagcugccuuauga

SEQ ID NO: 1456194 - RNA, 19 nt, Homo sapiens
  misc_RNA (1)...(19): siRNA sense strand
caagggacuucgcucuaaa

SEQ ID NO: 1456195 - RNA, 19 nt, Homo sapiens
  misc_RNA (1)...(19): siRNA sense strand
gacccgaguucuccuuuga

SEQ ID NO: 1456196 - RNA, 19 nt, Homo sapiens
  misc_RNA (1)...(19): siRNA sense strand
acaagggacuucgcucuaa

SEQ ID NO: 1456197 - RNA, 19 nt, Homo sapiens
  misc_RNA (1)...(19): siRNA sense strand
gaagagccaucacauuucc

SEQ ID NO: 1456198 - RNA, 19 nt, Homo sapiens
  misc_RNA (1)...(19): siRNA sense strand
gaggucagcgugcgucuuu

SEQ ID NO: 1456199 - RNA, 19 nt, Homo sapiens
  misc_RNA (1)...(19): siRNA sense strand
acacuccgcugcccacuga

SEQ ID NO: 1456200 - RNA, 19 nt, Homo sapiens
  misc_RNA (1)...(19): siRNA sense strand
ggucagauguccaguuugc

SEQ ID NO: 1456201 - RNA, 19 nt, Homo sapiens
  misc_RNA (1)...(19): siRNA sense strand
gagcugagcagucccuaug

SEQ ID NO: 1456202 - RNA, 19 nt, Homo sapiens
  misc_RNA (1)...(19): siRNA sense strand
cgaguucuccuuugauuug

SEQ ID NO: 1456203 - RNA, 19 nt, Homo sapiens
  misc_RNA (1)...(19): siRNA sense strand
ggacccgaguucuccuuug

SEQ ID NO: 1456204 - RNA, 19 nt, Homo sapiens
  misc_RNA (1)...(19): siRNA sense strand
agagcugccuuaugaauuc

SEQ ID NO: 1456205 - RNA, 19 nt, Homo sapiens
  misc_RNA (1)...(19): siRNA sense strand
gcagcugauucuucacuuc

SEQ ID NO: 1456206 - RNA, 19 nt, Homo sapiens
  misc_RNA (1)...(19): siRNA sense strand
ucacuagaccucaucauuc

SEQ ID NO: 1456207 - RNA, 19 nt, Homo sapiens
  misc_RNA (1)...(19): siRNA sense strand
ccagagacaugggaaaguc

SEQ ID NO: 1456208 - RNA, 19 nt, Homo sapiens
  misc_RNA (1)...(19): siRNA sense strand
gcugcucgcuuacuucagu

SEQ ID NO: 1456209 - RNA, 19 nt, Homo sapiens
  misc_RNA (1)...(19): siRNA sense strand
gaaagucuucccagauugg

SEQ ID NO: 1456210 - RNA, 19 nt, Homo sapiens
  misc_RNA (1)...(19): siRNA sense strand
cagcagccauguugaaugc

SEQ ID NO: 1456211 - RNA, 19 nt, Homo sapiens
  misc_RNA (1)...(19): siRNA sense strand
guagagcugccuuaugaau

SEQ ID NO: 1456212 - RNA, 19 nt, Homo sapiens
  misc_RNA (1)...(19): siRNA sense strand
gcugagcagucccuaugau

SEQ ID NO: 1456213 - RNA, 19 nt, Homo sapiens
  misc_RNA (1)...(19): siRNA sense strand
ugagaagagccaucacauu

SEQ ID NO: 1456214 - RNA, 19 nt, Homo sapiens
  misc_RNA (1)...(19): siRNA sense strand
gcuauucgggugaccauau

SEQ ID NO: 1456215 - RNA, 19 nt, Homo sapiens
  misc_RNA (1)...(19): siRNA sense strand
caagaaugcaugccaccuu

SEQ ID NO: 1456216 - RNA, 19 nt, Homo sapiens
  misc_RNA (1)...(19): siRNA sense strand
gcauggaggacccgaguuc

SEQ ID NO: 1456217 - RNA, 19 nt, Homo sapiens
  misc_RNA (1)...(19): siRNA sense strand
gagcuggccagaagccuau

SEQ ID NO: 1456218 - RNA, 19 nt, Homo sapiens
  misc_RNA (1)...(19): siRNA sense strand
gucgucaccugucugagaa

SEQ ID NO: 1456219 - RNA, 19 nt, Homo sapiens
  misc_RNA (1)...(19): siRNA sense strand
cccgaguucuccuuugauu

SEQ ID NO: 1456220 - RNA, 19 nt, Homo sapiens
  misc_RNA (1)...(19): siRNA sense strand
gagcagucccuaugauguc

SEQ ID NO: 1456221 - RNA, 19 nt, Homo sapiens
  misc_RNA (1)...(19): siRNA sense strand
ucucucacauccuggaaug

SEQ ID NO: 1456222 - RNA, 19 nt, Homo sapiens
  misc_RNA (1)...(19): siRNA sense strand
gucacuagaccucaucauu

SEQ ID NO: 1456223 - RNA, 19 nt, Homo sapiens
  misc_RNA (1)...(19): siRNA sense strand
uagagcugccuuaugaauu

SEQ ID NO: 1456224 - RNA, 19 nt, Homo sapiens
  misc_RNA (1)...(19): siRNA sense strand
ggugguauguuuuggagaa

SEQ ID NO: 1456225 - RNA, 19 nt, Homo sapiens
  misc_RNA (1)...(19): siRNA sense strand
agaagagccaucacauuuc

SEQ ID NO: 1456226 - RNA, 19 nt, Homo sapiens
  misc_RNA (1)...(19): siRNA sense strand
uggaauguaagcauggaua

SEQ ID NO: 1456227 - RNA, 19 nt, Homo sapiens
  misc_RNA (1)...(19): siRNA sense strand
ucccuaugauguccagaaa

SEQ ID NO: 1456228 - RNA, 19 nt, Homo sapiens
  misc_RNA (1)...(19): siRNA sense strand
cacaagggacuucgcucua

SEQ ID NO: 1456229 - RNA, 19 nt, Homo sapiens
  misc_RNA (1)...(19): siRNA sense strand
gagagucagauggguggua

SEQ ID NO: 1456230 - RNA, 19 nt, Homo sapiens
  misc_RNA (1)...(19): siRNA sense strand
agagucagaugggugguau

SEQ ID NO: 1456231 - RNA, 19 nt, Homo sapiens
  misc_RNA (1)...(19): siRNA sense strand
cagauuggacucacaaagg

SEQ ID NO: 1456232 - RNA, 19 nt, Homo sapiens
  misc_RNA (1)...(19): siRNA sense strand
caaguucucuuuuggaaac

SEQ ID NO: 1456233 - RNA, 19 nt, Homo sapiens
  misc_RNA (1)...(19): siRNA sense strand
ccuaugauguccagaaaau

SEQ ID NO: 1456234 - RNA, 19 nt, Homo sapiens
  misc_RNA (1)...(19): siRNA sense strand
cagaggcacgacuggcaua

SEQ ID NO: 1456235 - RNA, 19 nt, Homo sapiens
  misc_RNA (1)...(19): siRNA sense strand
cgucgucaccugucugaga

SEQ ID NO: 1456236 - RNA, 19 nt, Homo sapiens
  misc_RNA (1)...(19): siRNA sense strand
ggaauguaagcauggauac

SEQ ID NO: 1456237 - RNA, 19 nt, Homo sapiens
  misc_RNA (1)...(19): siRNA sense strand
cagcucugcuucaaguucu

SEQ ID NO: 1456238 - RNA, 19 nt, Homo sapiens
  misc_RNA (1)...(19): siRNA sense strand
ggucagcgugcgucuuugu

SEQ ID NO: 1456239 - RNA, 19 nt, Homo sapiens
  misc_RNA (1)...(19): siRNA sense strand
gauccagagacaugggaaa

SEQ ID NO: 1456240 - RNA, 19 nt, Homo sapiens
  misc_RNA (1)...(19): siRNA sense strand
cgacuggcauacccuuugc

SEQ ID NO: 1456241 - RNA, 19 nt, Homo sapiens
  misc_RNA (1)...(19): siRNA sense strand
ugggagcgcuggcugaacu

SEQ ID NO: 1456242 - RNA, 19 nt, Homo sapiens
  misc_RNA (1)...(19): siRNA sense strand
gcauagaggcauccuaccu

SEQ ID NO: 1456243 - RNA, 19 nt, Homo sapiens
  misc_RNA (1)...(19): siRNA sense strand
acacuguagagcugccuua

SEQ ID NO: 1456244 - RNA, 19 nt, Homo sapiens
  misc_RNA (1)...(19): siRNA sense strand
cacuagaccucaucauucc

SEQ ID NO: 1456245 - RNA, 19 nt, Homo sapiens
  misc_RNA (1)...(19): siRNA sense strand
ugagcagucccuaugaugu

SEQ ID NO: 1456246 - RNA, 19 nt, Homo sapiens
  misc_RNA (1)...(19): siRNA sense strand
ccuacuggguguuguucug

SEQ ID NO: 1456247 - RNA, 19 nt, Homo sapiens
  misc_RNA (1)...(19): siRNA sense strand
gacccaaccuucggaucca

SEQ ID NO: 1456248 - RNA, 19 nt, Homo sapiens
  misc_RNA (1)...(19): siRNA sense strand
cgucaccugucugagaaga

SEQ ID NO: 1456249 - RNA, 19 nt, Homo sapiens
  misc_RNA (1)...(19): siRNA sense strand
gagaagagccaucacauuu

SEQ ID NO: 1456250 - RNA, 19 nt, Homo sapiens
  misc_RNA (1)...(19): siRNA sense strand
gcaaagaccucccgaaugc

SEQ ID NO: 1456251 - RNA, 19 nt, Homo sapiens
  misc_RNA (1)...(19): siRNA sense strand
ucagaugggugguauguuu

SEQ ID NO: 1456252 - RNA, 19 nt, Homo sapiens
  misc_RNA (1)...(19): siRNA sense strand
gcggucagauguccaguuu

SEQ ID NO: 1456253 - RNA, 19 nt, Homo sapiens
  misc_RNA (1)...(19): siRNA sense strand
ggacuucgcucuaaaagga

SEQ ID NO: 1456254 - RNA, 19 nt, Homo sapiens
  misc_RNA (1)...(19): siRNA sense strand
cuguagagcugccuuauga

SEQ ID NO: 1456255 - RNA, 19 nt, Homo sapiens
  misc_RNA (1)...(19): siRNA sense strand
caagggacuucgcucuaaa

SEQ ID NO: 1456256 - RNA, 19 nt, Homo sapiens
  misc_RNA (1)...(19): siRNA sense strand
gacccgaguucuccuuuga

SEQ ID NO: 1456257 - RNA, 19 nt, Homo sapiens
  misc_RNA (1)...(19): siRNA sense strand
acaagggacuucgcucuaa

SEQ ID NO: 1456258 - RNA, 19 nt, Homo sapiens
  misc_RNA (1)...(19): siRNA sense strand
gaagagccaucacauuucc

SEQ ID NO: 1456259 - RNA, 19 nt, Homo sapiens
  misc_RNA (1)...(19): siRNA sense strand
gaggucagcgugcgucuuu

SEQ ID NO: 1456260 - RNA, 19 nt, Homo sapiens
  misc_RNA (1)...(19): siRNA sense strand
acacuccgcugcccacuga

SEQ ID NO: 1456261 - RNA, 19 nt, Homo sapiens
  misc_RNA (1)...(19): siRNA sense strand
ggucagauguccaguuugc

SEQ ID NO: 1456262 - RNA, 19 nt, Homo sapiens
  misc_RNA (1)...(19): siRNA sense strand
gagcugagcagucccuaug

SEQ ID NO: 1456263 - RNA, 19 nt, Homo sapiens
  misc_RNA (1)...(19): siRNA sense strand
cgaguucuccuuugauuug

SEQ ID NO: 1456264 - RNA, 19 nt, Homo sapiens
  misc_RNA (1)...(19): siRNA sense strand
ggacccgaguucuccuuug

SEQ ID NO: 1456265 - RNA, 19 nt, Homo sapiens
  misc_RNA (1)...(19): siRNA sense strand
agagcugccuuaugaauuc

SEQ ID NO: 1456266 - RNA, 19 nt, Homo sapiens
  misc_RNA (1)...(19): siRNA sense strand
gcagcugauucuucacuuc

SEQ ID NO: 1456267 - RNA, 19 nt, Homo sapiens
  misc_RNA (1)...(19): siRNA sense strand
ucacuagaccucaucauuc

SEQ ID NO: 1456268 - RNA, 19 nt, Homo sapiens
  misc_RNA (1)...(19): siRNA sense strand
ccagagacaugggaaaguc

SEQ ID NO: 1456269 - RNA, 19 nt, Homo sapiens
  misc_RNA (1)...(19): siRNA sense strand
gaaagucuucccagauugg

SEQ ID NO: 1456270 - RNA, 19 nt, Homo sapiens
  misc_RNA (1)...(19): siRNA sense strand
cagcagccauguugaaugc

SEQ ID NO: 1456271 - RNA, 19 nt, Homo sapiens
  misc_RNA (1)...(19): siRNA sense strand
guagagcugccuuaugaau

SEQ ID NO: 1456272 - RNA, 19 nt, Homo sapiens
  misc_RNA (1)...(19): siRNA sense strand
gcugagcagucccuaugau

SEQ ID NO: 1456273 - RNA, 19 nt, Homo sapiens
  misc_RNA (1)...(19): siRNA sense strand
ugagaagagccaucacauu

SEQ ID NO: 1456274 - RNA, 19 nt, Homo sapiens
  misc_RNA (1)...(19): siRNA sense strand
gcuauucgggugaccauau

SEQ ID NO: 1456275 - RNA, 19 nt, Homo sapiens
  misc_RNA (1)...(19): siRNA sense strand
caagaaugcaugccaccuu

SEQ ID NO: 1456276 - RNA, 19 nt, Homo sapiens
  misc_RNA (1)...(19): siRNA sense strand
gcauggaggacccgaguuc

SEQ ID NO: 1456277 - RNA, 19 nt, Homo sapiens
  misc_RNA (1)...(19): siRNA sense strand
gagcuggccagaagccuau

SEQ ID NO: 1456278 - RNA, 19 nt, Homo sapiens
  misc_RNA (1)...(19): siRNA sense strand
gucgucaccugucugagaa

SEQ ID NO: 1456279 - RNA, 19 nt, Homo sapiens
  misc_RNA (1)...(19): siRNA sense strand
cccgaguucuccuuugauu

SEQ ID NO: 1456280 - RNA, 19 nt, Homo sapiens
  misc_RNA (1)...(19): siRNA sense strand
gagcagucccuaugauguc

SEQ ID NO: 1456281 - RNA, 19 nt, Homo sapiens
  misc_RNA (1)...(19): siRNA sense strand
ucucucacauccuggaaug

SEQ ID NO: 1456282 - RNA, 19 nt, Homo sapiens
  misc_RNA (1)...(19): siRNA sense strand
gucacuagaccucaucauu

SEQ ID NO: 1456283 - RNA, 19 nt, Homo sapiens
  misc_RNA (1)...(19): siRNA sense strand
uagagcugccuuaugaauu

SEQ ID NO: 1456284 - RNA, 19 nt, Homo sapiens
  misc_RNA (1)...(19): siRNA sense strand
ggugguauguuuuggagaa

SEQ ID NO: 1456285 - RNA, 19 nt, Homo sapiens
  misc_RNA (1)...(19): siRNA sense strand
agaagagccaucacauuuc

SEQ ID NO: 1456286 - RNA, 19 nt, Homo sapiens
  misc_RNA (1)...(19): siRNA sense strand
uggaauguaagcauggaua

SEQ ID NO: 1456287 - RNA, 19 nt, Homo sapiens
  misc_RNA (1)...(19): siRNA sense strand
ucccuaugauguccagaaa

SEQ ID NO: 1456288 - RNA, 19 nt, Homo sapiens
  misc_RNA (1)...(19): siRNA sense strand
cacaagggacuucgcucua

SEQ ID NO: 1456289 - RNA, 19 nt, Homo sapiens
  misc_RNA (1)...(19): siRNA sense strand
gagagucagauggguggua

SEQ ID NO: 1456290 - RNA, 19 nt, Homo sapiens
  misc_RNA (1)...(19): siRNA sense strand
agagucagaugggugguau

SEQ ID NO: 1456291 - RNA, 19 nt, Homo sapiens
  misc_RNA (1)...(19): siRNA sense strand
cagauuggacucacaaagg

SEQ ID NO: 1456292 - RNA, 19 nt, Homo sapiens
  misc_RNA (1)...(19): siRNA sense strand
caaguucucuuuuggaaac

SEQ ID NO: 1456293 - RNA, 19 nt, Homo sapiens
  misc_RNA (1)...(19): siRNA sense strand
ccuaugauguccagaaaau

SEQ ID NO: 1456294 - RNA, 19 nt, Homo sapiens
  misc_RNA (1)...(19): siRNA sense strand
cagaggcacgacuggcaua

SEQ ID NO: 1456295 - RNA, 19 nt, Homo sapiens
  misc_RNA (1)...(19): siRNA sense strand
cgucgucaccugucugaga

SEQ ID NO: 1456296 - RNA, 19 nt, Homo sapiens
  misc_RNA (1)...(19): siRNA sense strand
ggaauguaagcauggauac

SEQ ID NO: 1456297 - RNA, 19 nt, Homo sapiens
  misc_RNA (1)...(19): siRNA sense strand
cagcucugcuucaaguucu

SEQ ID NO: 1456298 - RNA, 19 nt, Homo sapiens
  misc_RNA (1)...(19): siRNA sense strand
gauccagagacaugggaaa

SEQ ID NO: 1456299 - RNA, 19 nt, Homo sapiens
  misc_RNA (1)...(19): siRNA sense strand
ggucagcgugcgucuuugu

SEQ ID NO: 1456300 - RNA, 19 nt, Homo sapiens
  misc_RNA (1)...(19): siRNA sense strand
cgacuggcauacccuuugc

SEQ ID NO: 1456301 - RNA, 19 nt, Homo sapiens
  misc_RNA (1)...(19): siRNA sense strand
gcauagaggcauccuaccu

SEQ ID NO: 1456302 - RNA, 19 nt, Homo sapiens
  misc_RNA (1)...(19): siRNA sense strand
acacuguagagcugccuua

SEQ ID NO: 1456303 - RNA, 19 nt, Homo sapiens
  misc_RNA (1)...(19): siRNA sense strand
cacuagaccucaucauucc

SEQ ID NO: 1456304 - RNA, 19 nt, Homo sapiens
  misc_RNA (1)...(19): siRNA sense strand
ugagcagucccuaugaugu

SEQ ID NO: 1456305 - RNA, 19 nt, Homo sapiens
  misc_RNA (1)...(19): siRNA sense strand
gacccaaccuucggaucca

SEQ ID NO: 1456306 - RNA, 19 nt, Homo sapiens
  misc_RNA (1)...(19): siRNA sense strand
cgucaccugucugagaaga

SEQ ID NO: 1456307 - RNA, 19 nt, Homo sapiens
  misc_RNA (1)...(19): siRNA sense strand
gagaagagccaucacauuu

SEQ ID NO: 1456308 - RNA, 19 nt, Homo sapiens
  misc_RNA (1)...(19): siRNA sense strand
gcaaagaccucccgaaugc

SEQ ID NO: 1456309 - RNA, 19 nt, Homo sapiens
  misc_RNA (1)...(19): siRNA sense strand
ucagaugggugguauguuu

SEQ ID NO: 1456310 - RNA, 19 nt, Homo sapiens
  misc_RNA (1)...(19): siRNA sense strand
gcggucagauguccaguuu

SEQ ID NO: 1456311 - RNA, 19 nt, Homo sapiens
  misc_RNA (1)...(19): siRNA sense strand
ggacuucgcucuaaaagga

SEQ ID NO: 1456312 - RNA, 19 nt, Homo sapiens
  misc_RNA (1)...(19): siRNA sense strand
cuguagagcugccuuauga

SEQ ID NO: 1456313 - RNA, 19 nt, Homo sapiens
  misc_RNA (1)...(19): siRNA sense strand
caagggacuucgcucuaaa

SEQ ID NO: 1456314 - RNA, 19 nt, Homo sapiens
  misc_RNA (1)...(19): siRNA sense strand
gacccgaguucuccuuuga

SEQ ID NO: 1456315 - RNA, 19 nt, Homo sapiens
  misc_RNA (1)...(19): siRNA sense strand
acaagggacuucgcucuaa

SEQ ID NO: 1456316 - RNA, 19 nt, Homo sapiens
  misc_RNA (1)...(19): siRNA sense strand
gaagagccaucacauuucc

SEQ ID NO: 1456317 - RNA, 19 nt, Homo sapiens
  misc_RNA (1)...(19): siRNA sense strand
gaggucagcgugcgucuuu

SEQ ID NO: 1456318 - RNA, 19 nt, Homo sapiens
  misc_RNA (1)...(19): siRNA sense strand
acacuccgcugcccacuga

SEQ ID NO: 1456319 - RNA, 19 nt, Homo sapiens
  misc_RNA (1)...(19): siRNA sense strand
ggucagauguccaguuugc

SEQ ID NO: 1456320 - RNA, 19 nt, Homo sapiens
  misc_RNA (1)...(19): siRNA sense strand
gagcugagcagucccuaug

SEQ ID NO: 1456321 - RNA, 19 nt, Homo sapiens
  misc_RNA (1)...(19): siRNA sense strand
cgaguucuccuuugauuug

SEQ ID NO: 1456322 - RNA, 19 nt, Homo sapiens
  misc_RNA (1)...(19): siRNA sense strand
ggacccgaguucuccuuug

SEQ ID NO: 1456323 - RNA, 19 nt, Homo sapiens
  misc_RNA (1)...(19): siRNA sense strand
agagcugccuuaugaauuc

SEQ ID NO: 1456324 - RNA, 19 nt, Homo sapiens
  misc_RNA (1)...(19): siRNA sense strand
gcagcugauucuucacuuc

SEQ ID NO: 1456325 - RNA, 19 nt, Homo sapiens
  misc_RNA (1)...(19): siRNA sense strand
ucacuagaccucaucauuc

SEQ ID NO: 1456326 - RNA, 19 nt, Homo sapiens
  misc_RNA (1)...(19): siRNA sense strand
ccagagacaugggaaaguc

SEQ ID NO: 1456327 - RNA, 19 nt, Homo sapiens
  misc_RNA (1)...(19): siRNA sense strand
gcugcucgcuuacuucagu

SEQ ID NO: 1456328 - RNA, 19 nt, Homo sapiens
  misc_RNA (1)...(19): siRNA sense strand
gaaagucuucccagauugg

SEQ ID NO: 1456329 - RNA, 19 nt, Homo sapiens
  misc_RNA (1)...(19): siRNA sense strand
cagcagccauguugaaugc

SEQ ID NO: 1456330 - RNA, 19 nt, Homo sapiens
  misc_RNA (1)...(19): siRNA sense strand
guagagcugccuuaugaau

SEQ ID NO: 1456331 - RNA, 19 nt, Homo sapiens
  misc_RNA (1)...(19): siRNA sense strand
ugagaagagccaucacauu

SEQ ID NO: 1456332 - RNA, 19 nt, Homo sapiens
  misc_RNA (1)...(19): siRNA sense strand
gcugagcagucccuaugau

SEQ ID NO: 1456333 - RNA, 19 nt, Homo sapiens
  misc_RNA (1)...(19): siRNA sense strand
gcuauucgggugaccauau

SEQ ID NO: 1456334 - RNA, 19 nt, Homo sapiens
  misc_RNA (1)...(19): siRNA sense strand
caagaaugcaugccaccuu

SEQ ID NO: 1456335 - RNA, 19 nt, Homo sapiens
  misc_RNA (1)...(19): siRNA sense strand
acauucaaguucuauagga

SEQ ID NO: 1456336 - RNA, 19 nt, Homo sapiens
  misc_RNA (1)...(19): siRNA sense strand
gagcuggccagaagccuau

SEQ ID NO: 1456337 - RNA, 19 nt, Homo sapiens
  misc_RNA (1)...(19): siRNA sense strand
gcauggaggacccgaguuc

SEQ ID NO: 1456338 - RNA, 19 nt, Homo sapiens
  misc_RNA (1)...(19): siRNA sense strand
ccacauucaaguucuauag

SEQ ID NO: 1456339 - RNA, 19 nt, Homo sapiens
  misc_RNA (1)...(19): siRNA sense strand
cccgaguucuccuuugauu

SEQ ID NO: 1456340 - RNA, 19 nt, Homo sapiens
  misc_RNA (1)...(19): siRNA sense strand
gucgucaccugucugagaa

SEQ ID NO: 1456341 - RNA, 19 nt, Homo sapiens
  misc_RNA (1)...(19): siRNA sense strand
gagcagucccuaugauguc

SEQ ID NO: 1456342 - RNA, 19 nt, Homo sapiens
  misc_RNA (1)...(19): siRNA sense strand
ucucucacauccuggaaug

SEQ ID NO: 1456343 - RNA, 19 nt, Homo sapiens
  misc_RNA (1)...(19): siRNA sense strand
gucacuagaccucaucauu

SEQ ID NO: 1456344 - RNA, 19 nt, Homo sapiens
  misc_RNA (1)...(19): siRNA sense strand
uagagcugccuuaugaauu

SEQ ID NO: 1456345 - RNA, 19 nt, Homo sapiens
  misc_RNA (1)...(19): siRNA sense strand
ggugguauguuuuggagaa

SEQ ID NO: 1456346 - RNA, 19 nt, Homo sapiens
  misc_RNA (1)...(19): siRNA sense strand
agaagagccaucacauuuc

SEQ ID NO: 1456347 - RNA, 19 nt, Homo sapiens
  misc_RNA (1)...(19): siRNA sense strand
uggaauguaagcauggaua

SEQ ID NO: 1456348 - RNA, 19 nt, Homo sapiens
  misc_RNA (1)...(19): siRNA sense strand
ucccuaugauguccagaaa

SEQ ID NO: 1456349 - RNA, 19 nt, Homo sapiens
  misc_RNA (1)...(19): siRNA sense strand
cacaagggacuucgcucua

SEQ ID NO: 1456350 - RNA, 19 nt, Homo sapiens
  misc_RNA (1)...(19): siRNA sense strand
gagagucagauggguggua

SEQ ID NO: 1456351 - RNA, 19 nt, Homo sapiens
  misc_RNA (1)...(19): siRNA sense strand
agagucagaugggugguau

SEQ ID NO: 1456352 - RNA, 19 nt, Homo sapiens
  misc_RNA (1)...(19): siRNA sense strand
cagauuggacucacaaagg

SEQ ID NO: 1456353 - RNA, 19 nt, Homo sapiens
  misc_RNA (1)...(19): siRNA sense strand
caaguucucuuuuggaaac

SEQ ID NO: 1456354 - RNA, 19 nt, Homo sapiens
  misc_RNA (1)...(19): siRNA sense strand
ccuaugauguccagaaaau

SEQ ID NO: 1456355 - RNA, 19 nt, Homo sapiens
  misc_RNA (1)...(19): siRNA sense strand
cagaggcacgacuggcaua

SEQ ID NO: 1456356 - RNA, 19 nt, Homo sapiens
  misc_RNA (1)...(19): siRNA sense strand
ggaauguaagcauggauac

SEQ ID NO: 1456357 - RNA, 19 nt, Homo sapiens
  misc_RNA (1)...(19): siRNA sense strand
cgucgucaccugucugaga

SEQ ID NO: 1456358 - RNA, 19 nt, Homo sapiens
  misc_RNA (1)...(19): siRNA sense strand
cagcucugcuucaaguucu

SEQ ID NO: 1456359 - RNA, 19 nt, Homo sapiens
  misc_RNA (1)...(19): siRNA sense strand
gauccagagacaugggaaa

SEQ ID NO: 1456360 - RNA, 19 nt, Homo sapiens
  misc_RNA (1)...(19): siRNA sense strand
ggucagcgugcgucuuugu

SEQ ID NO: 1456361 - RNA, 19 nt, Homo sapiens
  misc_RNA (1)...(19): siRNA sense strand
cgacuggcauacccuuugc

SEQ ID NO: 1456362 - RNA, 19 nt, Homo sapiens
  misc_RNA (1)...(19): siRNA sense strand
ugggagcgcuggcugaacu

SEQ ID NO: 1456363 - RNA, 19 nt, Homo sapiens
  misc_RNA (1)...(19): siRNA sense strand
gcauagaggcauccuaccu

SEQ ID NO: 1456364 - RNA, 19 nt, Homo sapiens
  misc_RNA (1)...(19): siRNA sense strand
acacuguagagcugccuua

SEQ ID NO: 1456365 - RNA, 19 nt, Homo sapiens
  misc_RNA (1)...(19): siRNA sense strand
cacuagaccucaucauucc

SEQ ID NO: 1456366 - RNA, 19 nt, Homo sapiens
  misc_RNA (1)...(19): siRNA sense strand
gacccaaccuucggaucca

SEQ ID NO: 1456367 - RNA, 19 nt, Homo sapiens
  misc_RNA (1)...(19): siRNA sense strand
ccuacuggguguuguucug

SEQ ID NO: 1456368 - RNA, 19 nt, Homo sapiens
  misc_RNA (1)...(19): siRNA sense strand
cgucaccugucugagaaga

SEQ ID NO: 1456369 - RNA, 19 nt, Homo sapiens
  misc_RNA (1)...(19): siRNA sense strand
ugagcagucccuaugaugu

SEQ ID NO: 1456370 - RNA, 19 nt, Homo sapiens
  misc_RNA (1)...(19): siRNA sense strand
gagaagagauugaaagauu

SEQ ID NO: 1456371 - RNA, 19 nt, Homo sapiens
  misc_RNA (1)...(19): siRNA sense strand
gaggagaccuugccuauuu

SEQ ID NO: 1456372 - RNA, 19 nt, Homo sapiens
  misc_RNA (1)...(19): siRNA sense strand
gaacaucaauucacuauca

SEQ ID NO: 1456373 - RNA, 19 nt, Homo sapiens
  misc_RNA (1)...(19): siRNA sense strand
gaacagaaguuucaguaau

SEQ ID NO: 1456374 - RNA, 19 nt, Homo sapiens
  misc_RNA (1)...(19): siRNA sense strand
ggaauuugcugacccauuu

SEQ ID NO: 1456375 - RNA, 19 nt, Homo sapiens
  misc_RNA (1)...(19): siRNA sense strand
gaugagcucuuuaguauug

SEQ ID NO: 1456376 - RNA, 19 nt, Homo sapiens
  misc_RNA (1)...(19): siRNA sense strand
gcaaacagguucuggaguu

SEQ ID NO: 1456377 - RNA, 19 nt, Homo sapiens
  misc_RNA (1)...(19): siRNA sense strand
gaaagaauguuaagggaau

SEQ ID NO: 1456378 - RNA, 19 nt, Homo sapiens
  misc_RNA (1)...(19): siRNA sense strand
gcacagaaauuucacuuca

SEQ ID NO: 1456379 - RNA, 19 nt, Homo sapiens
  misc_RNA (1)...(19): siRNA sense strand
guacauagagcucuuuaua

SEQ ID NO: 1456380 - RNA, 19 nt, Homo sapiens
  misc_RNA (1)...(19): siRNA sense strand
ggaaaagccuucaaaagua

SEQ ID NO: 1456381 - RNA, 19 nt, Homo sapiens
  misc_RNA (1)...(19): siRNA sense strand
ggacucagcuaugcuaauu

SEQ ID NO: 1456382 - RNA, 19 nt, Homo sapiens
  misc_RNA (1)...(19): siRNA sense strand
caaauaugcugaguaauga

SEQ ID NO: 1456383 - RNA, 19 nt, Homo sapiens
  misc_RNA (1)...(19): siRNA sense strand
gaaaggagaagauuuacaa

SEQ ID NO: 1456384 - RNA, 19 nt, Homo sapiens
  misc_RNA (1)...(19): siRNA sense strand
ggacauaugcaguguaauu

SEQ ID NO: 1456385 - RNA, 19 nt, Homo sapiens
  misc_RNA (1)...(19): siRNA sense strand
aaacagaguucguuauaug

SEQ ID NO: 1456386 - RNA, 19 nt, Homo sapiens
  misc_RNA (1)...(19): siRNA sense strand
guacauugcucgagccauu

SEQ ID NO: 1456387 - RNA, 19 nt, Homo sapiens
  misc_RNA (1)...(19): siRNA sense strand
guauugcccuuuauaauug

SEQ ID NO: 1456388 - RNA, 19 nt, Homo sapiens
  misc_RNA (1)...(19): siRNA sense strand
gaagaucaccaccuuuaaa

SEQ ID NO: 1456389 - RNA, 19 nt, Homo sapiens
  misc_RNA (1)...(19): siRNA sense strand
gaaauuuguucuccucuca

SEQ ID NO: 1456390 - RNA, 19 nt, Homo sapiens
  misc_RNA (1)...(19): siRNA sense strand
acaauaacuuccacugaua

SEQ ID NO: 1456391 - RNA, 19 nt, Homo sapiens
  misc_RNA (1)...(19): siRNA sense strand
gaugacagcugguguugau

SEQ ID NO: 1456392 - RNA, 19 nt, Homo sapiens
  misc_RNA (1)...(19): siRNA sense strand
gaaaggauggcuguuuaua

SEQ ID NO: 1456393 - RNA, 19 nt, Homo sapiens
  misc_RNA (1)...(19): siRNA sense strand
ggaacaccgucucauggua

SEQ ID NO: 1456394 - RNA, 19 nt, Homo sapiens
  misc_RNA (1)...(19): siRNA sense strand
uauggaaacuucuuuguga

SEQ ID NO: 1456395 - RNA, 19 nt, Homo sapiens
  misc_RNA (1)...(19): siRNA sense strand
uggaaaggauggcuguuua

SEQ ID NO: 1456396 - RNA, 19 nt, Homo sapiens
  misc_RNA (1)...(19): siRNA sense strand
ggcaagauaucauagagaa

SEQ ID NO: 1456397 - RNA, 19 nt, Homo sapiens
  misc_RNA (1)...(19): siRNA sense strand
gggaaucauuaaaggaaua

SEQ ID NO: 1456398 - RNA, 19 nt, Homo sapiens
  misc_RNA (1)...(19): siRNA sense strand
gcaggaauuucuagacaga

SEQ ID NO: 1456399 - RNA, 19 nt, Homo sapiens
  misc_RNA (1)...(19): siRNA sense strand
uauauucucuuccuacuga

SEQ ID NO: 1456400 - RNA, 19 nt, Homo sapiens
  misc_RNA (1)...(19): siRNA sense strand
gagaaagaauugagugaca

SEQ ID NO: 1456401 - RNA, 19 nt, Homo sapiens
  misc_RNA (1)...(19): siRNA sense strand
ccaaauaugcugaguaaug

SEQ ID NO: 1456402 - RNA, 19 nt, Homo sapiens
  misc_RNA (1)...(19): siRNA sense strand
gaacugguaaaucaaagua

SEQ ID NO: 1456403 - RNA, 19 nt, Homo sapiens
  misc_RNA (1)...(19): siRNA sense strand
caacucaggccacaaauau

SEQ ID NO: 1456404 - RNA, 19 nt, Homo sapiens
  misc_RNA (1)...(19): siRNA sense strand
ggaugugggcuucguaaua

SEQ ID NO: 1456405 - RNA, 19 nt, Homo sapiens
  misc_RNA (1)...(19): siRNA sense strand
acauugagcuccucggaua

SEQ ID NO: 1456406 - RNA, 19 nt, Homo sapiens
  misc_RNA (1)...(19): siRNA sense strand
gagaagaacagaaguuuca

SEQ ID NO: 1456407 - RNA, 19 nt, Homo sapiens
  misc_RNA (1)...(19): siRNA sense strand
gagaaucccagccaaguuu

SEQ ID NO: 1456408 - RNA, 19 nt, Homo sapiens
  misc_RNA (1)...(19): siRNA sense strand
gaccagagauuguguacuc

SEQ ID NO: 1456409 - RNA, 19 nt, Homo sapiens
  misc_RNA (1)...(19): siRNA sense strand
aggaugagcucuuuaguau

SEQ ID NO: 1456410 - RNA, 19 nt, Homo sapiens
  misc_RNA (1)...(19): siRNA sense strand
gcaaucaaguggaccuuuc

SEQ ID NO: 1456411 - RNA, 19 nt, Homo sapiens
  misc_RNA (1)...(19): siRNA sense strand
caggauaucugcccacuuc

SEQ ID NO: 1456412 - RNA, 19 nt, Homo sapiens
  misc_RNA (1)...(19): siRNA sense strand
uacaagaacuaaaggguuu

SEQ ID NO: 1456413 - RNA, 19 nt, Homo sapiens
  misc_RNA (1)...(19): siRNA sense strand
guucuggaguucuuaauga

SEQ ID NO: 1456414 - RNA, 19 nt, Homo sapiens
  misc_RNA (1)...(19): siRNA sense strand
gaacagcagguuuguacuu

SEQ ID NO: 1456415 - RNA, 19 nt, Homo sapiens
  misc_RNA (1)...(19): siRNA sense strand
gcacugaugaugcaauuug

SEQ ID NO: 1456416 - RNA, 19 nt, Homo sapiens
  misc_RNA (1)...(19): siRNA sense strand
gaccaucgaucguucuguu

SEQ ID NO: 1456417 - RNA, 19 nt, Homo sapiens
  misc_RNA (1)...(19): siRNA sense strand
gaagaagcaggacaucauu

SEQ ID NO: 1456418 - RNA, 19 nt, Homo sapiens
  misc_RNA (1)...(19): siRNA sense strand
caacugaggcaucuacuug

SEQ ID NO: 1456419 - RNA, 19 nt, Homo sapiens
  misc_RNA (1)...(19): siRNA sense strand
acauagagcucuuuauagu

SEQ ID NO: 1456420 - RNA, 19 nt, Homo sapiens
  misc_RNA (1)...(19): siRNA sense strand
gggacaagauggacaagga

SEQ ID NO: 1456421 - RNA, 19 nt, Homo sapiens
  misc_RNA (1)...(19): siRNA sense strand
gcauuaauugcuucucuua

SEQ ID NO: 1456422 - RNA, 19 nt, Homo sapiens
  misc_RNA (1)...(19): siRNA sense strand
uaaaggguuugcaggaauu

SEQ ID NO: 1456423 - RNA, 19 nt, Homo sapiens
  misc_RNA (1)...(19): siRNA sense strand
agagaucacugcaauugaa

SEQ ID NO: 1456424 - RNA, 19 nt, Homo sapiens
  misc_RNA (1)...(19): siRNA sense strand
ggauggcuguuuauaugaa

SEQ ID NO: 1456425 - RNA, 19 nt, Homo sapiens
  misc_RNA (1)...(19): siRNA sense strand
acagguugcuucuccauuu

SEQ ID NO: 1456426 - RNA, 19 nt, Homo sapiens
  misc_RNA (1)...(19): siRNA sense strand
aaggauggcuguuuauaug

SEQ ID NO: 1456427 - RNA, 19 nt, Homo sapiens
  misc_RNA (1)...(19): siRNA sense strand
ucuaugagcucgucaguag

SEQ ID NO: 1456428 - RNA, 19 nt, Homo sapiens
  misc_RNA (1)...(19): siRNA sense strand
gauagaaugcaugcucuua

SEQ ID NO: 1456429 - RNA, 19 nt, Homo sapiens
  misc_RNA (1)...(19): siRNA sense strand
cauuugggaugcaagcuua

SEQ ID NO: 1456430 - RNA, 19 nt, Homo sapiens
  misc_RNA (1)...(19): siRNA sense strand
gcacagaugagauuuccaa

SEQ ID NO: 1456431 - RNA, 19 nt, Homo sapiens
  misc_RNA (1)...(19): siRNA sense strand
ccaaauagcagugauugaa

SEQ ID NO: 1456432 - RNA, 19 nt, Homo sapiens
  misc_RNA (1)...(19): siRNA sense strand
gcagggugguuuagccaaa

SEQ ID NO: 1456433 - RNA, 19 nt, Homo sapiens
  misc_RNA (1)...(19): siRNA sense strand
gcaacucaggccacaaaua

SEQ ID NO: 1456434 - RNA, 19 nt, Homo sapiens
  misc_RNA (1)...(19): siRNA sense strand
uaagauauguugagaaucc

SEQ ID NO: 1456435 - RNA, 19 nt, Homo sapiens
  misc_RNA (1)...(19): siRNA sense strand
ggucauuccugggcucuuu

SEQ ID NO: 1456436 - RNA, 19 nt, Homo sapiens
  misc_RNA (1)...(19): siRNA sense strand
gauuuacucuggcgguauu

SEQ ID NO: 1456437 - RNA, 19 nt, Homo sapiens
  misc_RNA (1)...(19): siRNA sense strand
gggaggagauggagaagag

SEQ ID NO: 1456438 - RNA, 19 nt, Homo sapiens
  misc_RNA (1)...(19): siRNA sense strand
ugcgauagaugaauugaaa

SEQ ID NO: 1456439 - RNA, 19 nt, Homo sapiens
  misc_RNA (1)...(19): siRNA sense strand
gauccuauucuucaaauug

SEQ ID NO: 1456440 - RNA, 19 nt, Homo sapiens
  misc_RNA (1)...(19): siRNA sense strand
gaugugggcuucguaauac

SEQ ID NO: 1456441 - RNA, 19 nt, Homo sapiens
  misc_RNA (1)...(19): siRNA sense strand
cagcagguuuguacuuuga

SEQ ID NO: 1456442 - RNA, 19 nt, Homo sapiens
  misc_RNA (1)...(19): siRNA sense strand
ccacugccauuucaucaau

SEQ ID NO: 1456443 - RNA, 19 nt, Homo sapiens
  misc_RNA (1)...(19): siRNA sense strand
acagagagaucacugcaau

SEQ ID NO: 1456444 - RNA, 19 nt, Homo sapiens
  misc_RNA (1)...(19): siRNA sense strand
gagauuguguacucuggaa

SEQ ID NO: 1456445 - RNA, 19 nt, Homo sapiens
  misc_RNA (1)...(19): siRNA sense strand
gaacaccgucucaugguau

SEQ ID NO: 1456446 - RNA, 19 nt, Homo sapiens
  misc_RNA (1)...(19): siRNA sense strand
cauguuaccuccgaagaaa

SEQ ID NO: 1456447 - RNA, 19 nt, Homo sapiens
  misc_RNA (1)...(19): siRNA sense strand
aaacaaggaucauauucca

SEQ ID NO: 1456448 - RNA, 19 nt, Homo sapiens
  misc_RNA (1)...(19): siRNA sense strand
acaugcagguguuagguua

SEQ ID NO: 1456449 - RNA, 19 nt, Homo sapiens
  misc_RNA (1)...(19): siRNA sense strand
gcaguguaauugcaugaug

SEQ ID NO: 1456450 - RNA, 19 nt, Homo sapiens
  misc_RNA (1)...(19): siRNA sense strand
ugugaaaggagaagauuua

SEQ ID NO: 1456451 - RNA, 19 nt, Homo sapiens
  misc_RNA (1)...(19): siRNA sense strand
caaauagcagugauugaaa

SEQ ID NO: 1456452 - RNA, 19 nt, Homo sapiens
  misc_RNA (1)...(19): siRNA sense strand
ugacagugauauauucaug

SEQ ID NO: 1456453 - RNA, 19 nt, Homo sapiens
  misc_RNA (1)...(19): siRNA sense strand
gaaugaaauuggaguacca

SEQ ID NO: 1456454 - RNA, 19 nt, Homo sapiens
  misc_RNA (1)...(19): siRNA sense strand
gcugacccauuuaaacuug

SEQ ID NO: 1456455 - RNA, 19 nt, Homo sapiens
  misc_RNA (1)...(19): siRNA sense strand
caagaacugguaaaucaaa

SEQ ID NO: 1456456 - RNA, 19 nt, Homo sapiens
  misc_RNA (1)...(19): siRNA sense strand
uucaagaacugguaaauca

SEQ ID NO: 1456457 - RNA, 19 nt, Homo sapiens
  misc_RNA (1)...(19): siRNA sense strand
cuucaggccuuccaagaaa

SEQ ID NO: 1456458 - RNA, 19 nt, Homo sapiens
  misc_RNA (1)...(19): siRNA sense strand
gagauaaugccgcuguuga

SEQ ID NO: 1456459 - RNA, 19 nt, Homo sapiens
  misc_RNA (1)...(19): siRNA sense strand
gaucaccaccuuuaaagau

SEQ ID NO: 1456460 - RNA, 19 nt, Homo sapiens
  misc_RNA (1)...(19): siRNA sense strand
ggaaacauuugggaugcaa

SEQ ID NO: 1456461 - RNA, 19 nt, Homo sapiens
  misc_RNA (1)...(19): siRNA sense strand
gguagucccuauccaaauc

SEQ ID NO: 1456462 - RNA, 19 nt, Homo sapiens
  misc_RNA (1)...(19): siRNA sense strand
cagaugagauuuccaacca

SEQ ID NO: 1456463 - RNA, 19 nt, Homo sapiens
  misc_RNA (1)...(19): siRNA sense strand
ccgcuuaccuccuggauuc

SEQ ID NO: 1456464 - RNA, 19 nt, Homo sapiens
  misc_RNA (1)...(19): siRNA sense strand
ccaaagauguaggaaaaua

SEQ ID NO: 1456465 - RNA, 19 nt, Homo sapiens
  misc_RNA (1)...(19): siRNA sense strand
ggaaacuucuuugugaaca

SEQ ID NO: 1456466 - RNA, 19 nt, Homo sapiens
  misc_RNA (1)...(19): siRNA sense strand
ucacugcaauugaaaguag

SEQ ID NO: 1456467 - RNA, 19 nt, Homo sapiens
  misc_RNA (1)...(19): siRNA sense strand
gcaggaggaccauuaggaa

SEQ ID NO: 1456468 - RNA, 19 nt, Homo sapiens
  misc_RNA (1)...(19): siRNA sense strand
ugacaugcauagcacagaa

SEQ ID NO: 1456469 - RNA, 19 nt, Homo sapiens
  misc_RNA (1)...(19): siRNA sense strand
ggcauuaguuuacauuuac

SEQ ID NO: 1456470 - RNA, 19 nt, Homo sapiens
  misc_RNA (1)...(19): siRNA sense strand
gagaagagauugaaagauu

SEQ ID NO: 1456471 - RNA, 19 nt, Homo sapiens
  misc_RNA (1)...(19): siRNA sense strand
gaggagaccuugccuauuu

SEQ ID NO: 1456472 - RNA, 19 nt, Homo sapiens
  misc_RNA (1)...(19): siRNA sense strand
gaacaucaauucacuauca

SEQ ID NO: 1456473 - RNA, 19 nt, Homo sapiens
  misc_RNA (1)...(19): siRNA sense strand
gaacagaaguuucaguaau

SEQ ID NO: 1456474 - RNA, 19 nt, Homo sapiens
  misc_RNA (1)...(19): siRNA sense strand
ggaauuugcugacccauuu

SEQ ID NO: 1456475 - RNA, 19 nt, Homo sapiens
  misc_RNA (1)...(19): siRNA sense strand
gaugagcucuuuaguauug

SEQ ID NO: 1456476 - RNA, 19 nt, Homo sapiens
  misc_RNA (1)...(19): siRNA sense strand
gcaaacagguucuggaguu

SEQ ID NO: 1456477 - RNA, 19 nt, Homo sapiens
  misc_RNA (1)...(19): siRNA sense strand
gaaagaauguuaagggaau

SEQ ID NO: 1456478 - RNA, 19 nt, Homo sapiens
  misc_RNA (1)...(19): siRNA sense strand
gcacagaaauuucacuuca

SEQ ID NO: 1456479 - RNA, 19 nt, Homo sapiens
  misc_RNA (1)...(19): siRNA sense strand
guacauagagcucuuuaua

SEQ ID NO: 1456480 - RNA, 19 nt, Homo sapiens
  misc_RNA (1)...(19): siRNA sense strand
ggaaaagccuucaaaagua

SEQ ID NO: 1456481 - RNA, 19 nt, Homo sapiens
  misc_RNA (1)...(19): siRNA sense strand
ggacucagcuaugcuaauu

SEQ ID NO: 1456482 - RNA, 19 nt, Homo sapiens
  misc_RNA (1)...(19): siRNA sense strand
caaauaugcugaguaauga

SEQ ID NO: 1456483 - RNA, 19 nt, Homo sapiens
  misc_RNA (1)...(19): siRNA sense strand
gaaaggagaagauuuacaa

SEQ ID NO: 1456484 - RNA, 19 nt, Homo sapiens
  misc_RNA (1)...(19): siRNA sense strand
ggacauaugcaguguaauu

SEQ ID NO: 1456485 - RNA, 19 nt, Homo sapiens
  misc_RNA (1)...(19): siRNA sense strand
aaacagaguucguuauaug

SEQ ID NO: 1456486 - RNA, 19 nt, Homo sapiens
  misc_RNA (1)...(19): siRNA sense strand
guacauugcucgagccauu

SEQ ID NO: 1456487 - RNA, 19 nt, Homo sapiens
  misc_RNA (1)...(19): siRNA sense strand
guauugcccuuuauaauug

SEQ ID NO: 1456488 - RNA, 19 nt, Homo sapiens
  misc_RNA (1)...(19): siRNA sense strand
gaagaucaccaccuuuaaa

SEQ ID NO: 1456489 - RNA, 19 nt, Homo sapiens
  misc_RNA (1)...(19): siRNA sense strand
gaaauuuguucuccucuca

SEQ ID NO: 1456490 - RNA, 19 nt, Homo sapiens
  misc_RNA (1)...(19): siRNA sense strand
acaauaacuuccacugaua

SEQ ID NO: 1456491 - RNA, 19 nt, Homo sapiens
  misc_RNA (1)...(19): siRNA sense strand
gaugacagcugguguugau

SEQ ID NO: 1456492 - RNA, 19 nt, Homo sapiens
  misc_RNA (1)...(19): siRNA sense strand
gaaaggauggcuguuuaua

SEQ ID NO: 1456493 - RNA, 19 nt, Homo sapiens
  misc_RNA (1)...(19): siRNA sense strand
ggaacaccgucucauggua

SEQ ID NO: 1456494 - RNA, 19 nt, Homo sapiens
  misc_RNA (1)...(19): siRNA sense strand
uauggaaacuucuuuguga

SEQ ID NO: 1456495 - RNA, 19 nt, Homo sapiens
  misc_RNA (1)...(19): siRNA sense strand
uggaaaggauggcuguuua

SEQ ID NO: 1456496 - RNA, 19 nt, Homo sapiens
  misc_RNA (1)...(19): siRNA sense strand
ggcaagauaucauagagaa

SEQ ID NO: 1456497 - RNA, 19 nt, Homo sapiens
  misc_RNA (1)...(19): siRNA sense strand
gggaaucauuaaaggaaua

SEQ ID NO: 1456498 - RNA, 19 nt, Homo sapiens
  misc_RNA (1)...(19): siRNA sense strand
gcaggaauuucuagacaga

SEQ ID NO: 1456499 - RNA, 19 nt, Homo sapiens
  misc_RNA (1)...(19): siRNA sense strand
uauauucucuuccuacuga

SEQ ID NO: 1456500 - RNA, 19 nt, Homo sapiens
  misc_RNA (1)...(19): siRNA sense strand
gagaaagaauugagugaca

SEQ ID NO: 1456501 - RNA, 19 nt, Homo sapiens
  misc_RNA (1)...(19): siRNA sense strand
ccaaauaugcugaguaaug

SEQ ID NO: 1456502 - RNA, 19 nt, Homo sapiens
  misc_RNA (1)...(19): siRNA sense strand
gaacugguaaaucaaagua

SEQ ID NO: 1456503 - RNA, 19 nt, Homo sapiens
  misc_RNA (1)...(19): siRNA sense strand
caacucaggccacaaauau

SEQ ID NO: 1456504 - RNA, 19 nt, Homo sapiens
  misc_RNA (1)...(19): siRNA sense strand
ggaugugggcuucguaaua

SEQ ID NO: 1456505 - RNA, 19 nt, Homo sapiens
  misc_RNA (1)...(19): siRNA sense strand
acauugagcuccucggaua

SEQ ID NO: 1456506 - RNA, 19 nt, Homo sapiens
  misc_RNA (1)...(19): siRNA sense strand
gagaagaacagaaguuuca

SEQ ID NO: 1456507 - RNA, 19 nt, Homo sapiens
  misc_RNA (1)...(19): siRNA sense strand
gagaaucccagccaaguuu

SEQ ID NO: 1456508 - RNA, 19 nt, Homo sapiens
  misc_RNA (1)...(19): siRNA sense strand
gaccagagauuguguacuc

SEQ ID NO: 1456509 - RNA, 19 nt, Homo sapiens
  misc_RNA (1)...(19): siRNA sense strand
aggaugagcucuuuaguau

SEQ ID NO: 1456510 - RNA, 19 nt, Homo sapiens
  misc_RNA (1)...(19): siRNA sense strand
gcaaucaaguggaccuuuc

SEQ ID NO: 1456511 - RNA, 19 nt, Homo sapiens
  misc_RNA (1)...(19): siRNA sense strand
caggauaucugcccacuuc

SEQ ID NO: 1456512 - RNA, 19 nt, Homo sapiens
  misc_RNA (1)...(19): siRNA sense strand
uacaagaacuaaaggguuu

SEQ ID NO: 1456513 - RNA, 19 nt, Homo sapiens
  misc_RNA (1)...(19): siRNA sense strand
guucuggaguucuuaauga

SEQ ID NO: 1456514 - RNA, 19 nt, Homo sapiens
  misc_RNA (1)...(19): siRNA sense strand
gaacagcagguuuguacuu

SEQ ID NO: 1456515 - RNA, 19 nt, Homo sapiens
  misc_RNA (1)...(19): siRNA sense strand
gcacugaugaugcaauuug

SEQ ID NO: 1456516 - RNA, 19 nt, Homo sapiens
  misc_RNA (1)...(19): siRNA sense strand
gaccaucgaucguucuguu

SEQ ID NO: 1456517 - RNA, 19 nt, Homo sapiens
  misc_RNA (1)...(19): siRNA sense strand
gaagaagcaggacaucauu

SEQ ID NO: 1456518 - RNA, 19 nt, Homo sapiens
  misc_RNA (1)...(19): siRNA sense strand
caacugaggcaucuacuug

SEQ ID NO: 1456519 - RNA, 19 nt, Homo sapiens
  misc_RNA (1)...(19): siRNA sense strand
acauagagcucuuuauagu

SEQ ID NO: 1456520 - RNA, 19 nt, Homo sapiens
  misc_RNA (1)...(19): siRNA sense strand
gggacaagauggacaagga

SEQ ID NO: 1456521 - RNA, 19 nt, Homo sapiens
  misc_RNA (1)...(19): siRNA sense strand
gcauuaauugcuucucuua

SEQ ID NO: 1456522 - RNA, 19 nt, Homo sapiens
  misc_RNA (1)...(19): siRNA sense strand
uaaaggguuugcaggaauu

SEQ ID NO: 1456523 - RNA, 19 nt, Homo sapiens
  misc_RNA (1)...(19): siRNA sense strand
agagaucacugcaauugaa

SEQ ID NO: 1456524 - RNA, 19 nt, Homo sapiens
  misc_RNA (1)...(19): siRNA sense strand
ggauggcuguuuauaugaa

SEQ ID NO: 1456525 - RNA, 19 nt, Homo sapiens
  misc_RNA (1)...(19): siRNA sense strand
acagguugcuucuccauuu

SEQ ID NO: 1456526 - RNA, 19 nt, Homo sapiens
  misc_RNA (1)...(19): siRNA sense strand
aaggauggcuguuuauaug

SEQ ID NO: 1456527 - RNA, 19 nt, Homo sapiens
  misc_RNA (1)...(19): siRNA sense strand
ucuaugagcucgucaguag

SEQ ID NO: 1456528 - RNA, 19 nt, Homo sapiens
  misc_RNA (1)...(19): siRNA sense strand
gauagaaugcaugcucuua

SEQ ID NO: 1456529 - RNA, 19 nt, Homo sapiens
  misc_RNA (1)...(19): siRNA sense strand
cauuugggaugcaagcuua

SEQ ID NO: 1456530 - RNA, 19 nt, Homo sapiens
  misc_RNA (1)...(19): siRNA sense strand
gcacagaugagauuuccaa

SEQ ID NO: 1456531 - RNA, 19 nt, Homo sapiens
  misc_RNA (1)...(19): siRNA sense strand
ccaaauagcagugauugaa

SEQ ID NO: 1456532 - RNA, 19 nt, Homo sapiens
  misc_RNA (1)...(19): siRNA sense strand
gcagggugguuuagccaaa

SEQ ID NO: 1456533 - RNA, 19 nt, Homo sapiens
  misc_RNA (1)...(19): siRNA sense strand
gcaacucaggccacaaaua

SEQ ID NO: 1456534 - RNA, 19 nt, Homo sapiens
  misc_RNA (1)...(19): siRNA sense strand
uaagauauguugagaaucc

SEQ ID NO: 1456535 - RNA, 19 nt, Homo sapiens
  misc_RNA (1)...(19): siRNA sense strand
ggucauuccugggcucuuu

SEQ ID NO: 1456536 - RNA, 19 nt, Homo sapiens
  misc_RNA (1)...(19): siRNA sense strand
gauuuacucuggcgguauu

SEQ ID NO: 1456537 - RNA, 19 nt, Homo sapiens
  misc_RNA (1)...(19): siRNA sense strand
gggaggagauggagaagag

SEQ ID NO: 1456538 - RNA, 19 nt, Homo sapiens
  misc_RNA (1)...(19): siRNA sense strand
ugcgauagaugaauugaaa

SEQ ID NO: 1456539 - RNA, 19 nt, Homo sapiens
  misc_RNA (1)...(19): siRNA sense strand
gauccuauucuucaaauug

SEQ ID NO: 1456540 - RNA, 19 nt, Homo sapiens
  misc_RNA (1)...(19): siRNA sense strand
gaugugggcuucguaauac

SEQ ID NO: 1456541 - RNA, 19 nt, Homo sapiens
  misc_RNA (1)...(19): siRNA sense strand
cagcagguuuguacuuuga

SEQ ID NO: 1456542 - RNA, 19 nt, Homo sapiens
  misc_RNA (1)...(19): siRNA sense strand
ccacugccauuucaucaau

SEQ ID NO: 1456543 - RNA, 19 nt, Homo sapiens
  misc_RNA (1)...(19): siRNA sense strand
gcaugucagauauggauua

SEQ ID NO: 1456544 - RNA, 19 nt, Homo sapiens
  misc_RNA (1)...(19): siRNA sense strand
acagagagaucacugcaau

SEQ ID NO: 1456545 - RNA, 19 nt, Homo sapiens
  misc_RNA (1)...(19): siRNA sense strand
gagauuguguacucuggaa

SEQ ID NO: 1456546 - RNA, 19 nt, Homo sapiens
  misc_RNA (1)...(19): siRNA sense strand
gaacaccgucucaugguau

SEQ ID NO: 1456547 - RNA, 19 nt, Homo sapiens
  misc_RNA (1)...(19): siRNA sense strand
cauguuaccuccgaagaaa

SEQ ID NO: 1456548 - RNA, 19 nt, Homo sapiens
  misc_RNA (1)...(19): siRNA sense strand
aaacaaggaucauauucca

SEQ ID NO: 1456549 - RNA, 19 nt, Homo sapiens
  misc_RNA (1)...(19): siRNA sense strand
acaugcagguguuagguua

SEQ ID NO: 1456550 - RNA, 19 nt, Homo sapiens
  misc_RNA (1)...(19): siRNA sense strand
gcaguguaauugcaugaug

SEQ ID NO: 1456551 - RNA, 19 nt, Homo sapiens
  misc_RNA (1)...(19): siRNA sense strand
ugugaaaggagaagauuua

SEQ ID NO: 1456552 - RNA, 19 nt, Homo sapiens
  misc_RNA (1)...(19): siRNA sense strand
caaauagcagugauugaaa

SEQ ID NO: 1456553 - RNA, 19 nt, Homo sapiens
  misc_RNA (1)...(19): siRNA sense strand
gaaugaaauuggaguacca

SEQ ID NO: 1456554 - RNA, 19 nt, Homo sapiens
  misc_RNA (1)...(19): siRNA sense strand
gcugacccauuuaaacuug

SEQ ID NO: 1456555 - RNA, 19 nt, Homo sapiens
  misc_RNA (1)...(19): siRNA sense strand
caagaacugguaaaucaaa

SEQ ID NO: 1456556 - RNA, 19 nt, Homo sapiens
  misc_RNA (1)...(19): siRNA sense strand
uucaagaacugguaaauca

SEQ ID NO: 1456557 - RNA, 19 nt, Homo sapiens
  misc_RNA (1)...(19): siRNA sense strand
cuucaggccuuccaagaaa

SEQ ID NO: 1456558 - RNA, 19 nt, Homo sapiens
  misc_RNA (1)...(19): siRNA sense strand
gagauaaugccgcuguuga

SEQ ID NO: 1456559 - RNA, 19 nt, Homo sapiens
  misc_RNA (1)...(19): siRNA sense strand
gaucaccaccuuuaaagau

SEQ ID NO: 1456560 - RNA, 19 nt, Homo sapiens
  misc_RNA (1)...(19): siRNA sense strand
ggaaacauuugggaugcaa

SEQ ID NO: 1456561 - RNA, 19 nt, Homo sapiens
  misc_RNA (1)...(19): siRNA sense strand
ugacagugauauauucaug

SEQ ID NO: 1456562 - RNA, 19 nt, Homo sapiens
  misc_RNA (1)...(19): siRNA sense strand
gguagucccuauccaaauc

SEQ ID NO: 1456563 - RNA, 19 nt, Homo sapiens
  misc_RNA (1)...(19): siRNA sense strand
cagaugagauuuccaacca

SEQ ID NO: 1456564 - RNA, 19 nt, Homo sapiens
  misc_RNA (1)...(19): siRNA sense strand
ccgcuuaccuccuggauuc

SEQ ID NO: 1456565 - RNA, 19 nt, Homo sapiens
  misc_RNA (1)...(19): siRNA sense strand
ccaaagauguaggaaaaua

SEQ ID NO: 1456566 - RNA, 19 nt, Homo sapiens
  misc_RNA (1)...(19): siRNA sense strand
ggaaacuucuuugugaaca

SEQ ID NO: 1456567 - RNA, 19 nt, Homo sapiens
  misc_RNA (1)...(19): siRNA sense strand
ucacugcaauugaaaguag

SEQ ID NO: 1456568 - RNA, 19 nt, Homo sapiens
  misc_RNA (1)...(19): siRNA sense strand
ggcauuaguuuacauuuac

SEQ ID NO: 1456569 - RNA, 19 nt, Homo sapiens
  misc_RNA (1)...(19): siRNA sense strand
ugacaugcauagcacagaa

SEQ ID NO: 1456570 - RNA, 19 nt, Homo sapiens
  misc_RNA (1)...(19): siRNA sense strand
gcaacuagauucuucagua

SEQ ID NO: 1456571 - RNA, 19 nt, Homo sapiens
  misc_RNA (1)...(19): siRNA sense strand
gaucuaaucuguaguaaug

SEQ ID NO: 1456572 - RNA, 19 nt, Homo sapiens
  misc_RNA (1)...(19): siRNA sense strand
ucaaagaacugaugaagaa

SEQ ID NO: 1456573 - RNA, 19 nt, Homo sapiens
  misc_RNA (1)...(19): siRNA sense strand
gcacagaauucuucagauu

SEQ ID NO: 1456574 - RNA, 19 nt, Homo sapiens
  misc_RNA (1)...(19): siRNA sense strand
gcauagagccugugcuuua

SEQ ID NO: 1456575 - RNA, 19 nt, Homo sapiens
  misc_RNA (1)...(19): siRNA sense strand
gaaaggugcugauugucua

SEQ ID NO: 1456576 - RNA, 19 nt, Homo sapiens
  misc_RNA (1)...(19): siRNA sense strand
ccacagaucuauaccacua

SEQ ID NO: 1456577 - RNA, 19 nt, Homo sapiens
  misc_RNA (1)...(19): siRNA sense strand
cagaagaggugcaagaauu

SEQ ID NO: 1456578 - RNA, 19 nt, Homo sapiens
  misc_RNA (1)...(19): siRNA sense strand
ugaagaagauggagaagaa

SEQ ID NO: 1456579 - RNA, 19 nt, Homo sapiens
  misc_RNA (1)...(19): siRNA sense strand
gaagauacauuuagagaac

SEQ ID NO: 1456580 - RNA, 19 nt, Homo sapiens
  misc_RNA (1)...(19): siRNA sense strand
ccaaagagcugugacauca

SEQ ID NO: 1456581 - RNA, 19 nt, Homo sapiens
  misc_RNA (1)...(19): siRNA sense strand
guaaucagccaauguauuu

SEQ ID NO: 1456582 - RNA, 19 nt, Homo sapiens
  misc_RNA (1)...(19): siRNA sense strand
ccagagcacuugccaauga

SEQ ID NO: 1456583 - RNA, 19 nt, Homo sapiens
  misc_RNA (1)...(19): siRNA sense strand
gagaaagcccaacauauuu

SEQ ID NO: 1456584 - RNA, 19 nt, Homo sapiens
  misc_RNA (1)...(19): siRNA sense strand
gaggaaaggugcugauugu

SEQ ID NO: 1456585 - RNA, 19 nt, Homo sapiens
  misc_RNA (1)...(19): siRNA sense strand
guacagaacacuuacauga

SEQ ID NO: 1456586 - RNA, 19 nt, Homo sapiens
  misc_RNA (1)...(19): siRNA sense strand
cgucgaaguuguaggauua

SEQ ID NO: 1456587 - RNA, 19 nt, Homo sapiens
  misc_RNA (1)...(19): siRNA sense strand
gcagaauucagaacaaaua

SEQ ID NO: 1456588 - RNA, 19 nt, Homo sapiens
  misc_RNA (1)...(19): siRNA sense strand
gagaacagcaccaaguaua

SEQ ID NO: 1456589 - RNA, 19 nt, Homo sapiens
  misc_RNA (1)...(19): siRNA sense strand
cugaugagguuccugauua

SEQ ID NO: 1456590 - RNA, 19 nt, Homo sapiens
  misc_RNA (1)...(19): siRNA sense strand
gagagaacuugaagacuug

SEQ ID NO: 1456591 - RNA, 19 nt, Homo sapiens
  misc_RNA (1)...(19): siRNA sense strand
gcuucuagcucucagauaa

SEQ ID NO: 1456592 - RNA, 19 nt, Homo sapiens
  misc_RNA (1)...(19): siRNA sense strand
aagaagaacuugaugaaga

SEQ ID NO: 1456593 - RNA, 19 nt, Homo sapiens
  misc_RNA (1)...(19): siRNA sense strand
ccaagaauauugauaguag

SEQ ID NO: 1456594 - RNA, 19 nt, Homo sapiens
  misc_RNA (1)...(19): siRNA sense strand
cccaagagguuguuuguuu

SEQ ID NO: 1456595 - RNA, 19 nt, Homo sapiens
  misc_RNA (1)...(19): siRNA sense strand
gaauagaaaugcuuguuac

SEQ ID NO: 1456596 - RNA, 19 nt, Homo sapiens
  misc_RNA (1)...(19): siRNA sense strand
ccaaaccacuggacacauu

SEQ ID NO: 1456597 - RNA, 19 nt, Homo sapiens
  misc_RNA (1)...(19): siRNA sense strand
gcacagagaagacaaagug

SEQ ID NO: 1456598 - RNA, 19 nt, Homo sapiens
  misc_RNA (1)...(19): siRNA sense strand
uuggaucucucuucaauua

SEQ ID NO: 1456599 - RNA, 19 nt, Homo sapiens
  misc_RNA (1)...(19): siRNA sense strand
uaacacugcugaagcugua

SEQ ID NO: 1456600 - RNA, 19 nt, Homo sapiens
  misc_RNA (1)...(19): siRNA sense strand
ugagagaacuugaagacuu

SEQ ID NO: 1456601 - RNA, 19 nt, Homo sapiens
  misc_RNA (1)...(19): siRNA sense strand
gcaguaaucagccaaugua

SEQ ID NO: 1456602 - RNA, 19 nt, Homo sapiens
  misc_RNA (1)...(19): siRNA sense strand
guaguaaugccuuagaaua

SEQ ID NO: 1456603 - RNA, 19 nt, Homo sapiens
  misc_RNA (1)...(19): siRNA sense strand
gcagcucugugaagaaauu

SEQ ID NO: 1456604 - RNA, 19 nt, Homo sapiens
  misc_RNA (1)...(19): siRNA sense strand
ucaggaaucuagaaagaaa

SEQ ID NO: 1456605 - RNA, 19 nt, Homo sapiens
  misc_RNA (1)...(19): siRNA sense strand
ugagaagaauguggaaaua

SEQ ID NO: 1456606 - RNA, 19 nt, Homo sapiens
  misc_RNA (1)...(19): siRNA sense strand
caauggaccuuucaucugu

SEQ ID NO: 1456607 - RNA, 19 nt, Homo sapiens
  misc_RNA (1)...(19): siRNA sense strand
agagaaagcccaacauauu

SEQ ID NO: 1456608 - RNA, 19 nt, Homo sapiens
  misc_RNA (1)...(19): siRNA sense strand
gcaguuggaucucucuuca

SEQ ID NO: 1456609 - RNA, 19 nt, Homo sapiens
  misc_RNA (1)...(19): siRNA sense strand
gcucucagauaauacauau

SEQ ID NO: 1456610 - RNA, 19 nt, Homo sapiens
  misc_RNA (1)...(19): siRNA sense strand
gaaagacuauuugagagau

SEQ ID NO: 1456611 - RNA, 19 nt, Homo sapiens
  misc_RNA (1)...(19): siRNA sense strand
acaaguaucugacugugaa

SEQ ID NO: 1456612 - RNA, 19 nt, Homo sapiens
  misc_RNA (1)...(19): siRNA sense strand
gcuuuaagaucuuugagaa

SEQ ID NO: 1456613 - RNA, 19 nt, Homo sapiens
  misc_RNA (1)...(19): siRNA sense strand
gcgaaugacucgagcuaga

SEQ ID NO: 1456614 - RNA, 19 nt, Homo sapiens
  misc_RNA (1)...(19): siRNA sense strand
gaaauaacggagcaacuug

SEQ ID NO: 1456615 - RNA, 19 nt, Homo sapiens
  misc_RNA (1)...(19): siRNA sense strand
gacaagcgauuccgagugu

SEQ ID NO: 1456616 - RNA, 19 nt, Homo sapiens
  misc_RNA (1)...(19): siRNA sense strand
gaagugcgucgaaguugua

SEQ ID NO: 1456617 - RNA, 19 nt, Homo sapiens
  misc_RNA (1)...(19): siRNA sense strand
ggaaauaacggagcaacuu

SEQ ID NO: 1456618 - RNA, 19 nt, Homo sapiens
  misc_RNA (1)...(19): siRNA sense strand
gguuguagcuccuccaaau

SEQ ID NO: 1456619 - RNA, 19 nt, Homo sapiens
  misc_RNA (1)...(19): siRNA sense strand
uuaaggaaguugaaaccua

SEQ ID NO: 1456620 - RNA, 19 nt, Homo sapiens
  misc_RNA (1)...(19): siRNA sense strand
ccaagaacaugaagaugau

SEQ ID NO: 1456621 - RNA, 19 nt, Homo sapiens
  misc_RNA (1)...(19): siRNA sense strand
agaaacaucguucaaagua

SEQ ID NO: 1456622 - RNA, 19 nt, Homo sapiens
  misc_RNA (1)...(19): siRNA sense strand
gacaaagugauuccaguua

SEQ ID NO: 1456623 - RNA, 19 nt, Homo sapiens
  misc_RNA (1)...(19): siRNA sense strand
gagaaaagaugcacagaau

SEQ ID NO: 1456624 - RNA, 19 nt, Homo sapiens
  misc_RNA (1)...(19): siRNA sense strand
gauuagaagucguuauagu

SEQ ID NO: 1456625 - RNA, 19 nt, Homo sapiens
  misc_RNA (1)...(19): siRNA sense strand
gaaagcaaacuggaauuga

SEQ ID NO: 1456626 - RNA, 19 nt, Homo sapiens
  misc_RNA (1)...(19): siRNA sense strand
gaucagacccagagcagaa

SEQ ID NO: 1456627 - RNA, 19 nt, Homo sapiens
  misc_RNA (1)...(19): siRNA sense strand
cauagagccugugcuuuaa

SEQ ID NO: 1456628 - RNA, 19 nt, Homo sapiens
  misc_RNA (1)...(19): siRNA sense strand
gaugaagaaacaacugaua

SEQ ID NO: 1456629 - RNA, 19 nt, Homo sapiens
  misc_RNA (1)...(19): siRNA sense strand
gagaagaauguggaaauaa

SEQ ID NO: 1456630 - RNA, 19 nt, Homo sapiens
  misc_RNA (1)...(19): siRNA sense strand
uagaaaugcuuguuaccaa

SEQ ID NO: 1456631 - RNA, 19 nt, Homo sapiens
  misc_RNA (1)...(19): siRNA sense strand
ggaucucucuucaauuaau

SEQ ID NO: 1456632 - RNA, 19 nt, Homo sapiens
  misc_RNA (1)...(19): siRNA sense strand
cgacgacgcuacccacaga

SEQ ID NO: 1456633 - RNA, 19 nt, Homo sapiens
  misc_RNA (1)...(19): siRNA sense strand
gagaagaagagaaucagaa

SEQ ID NO: 1456634 - RNA, 19 nt, Homo sapiens
  misc_RNA (1)...(19): siRNA sense strand
gaaaagcuacuguuuacua

SEQ ID NO: 1456635 - RNA, 19 nt, Homo sapiens
  misc_RNA (1)...(19): siRNA sense strand
ccagagaaagcccaacaua

SEQ ID NO: 1456636 - RNA, 19 nt, Homo sapiens
  misc_RNA (1)...(19): siRNA sense strand
gaauugagagacaagauug

SEQ ID NO: 1456637 - RNA, 19 nt, Homo sapiens
  misc_RNA (1)...(19): siRNA sense strand
gaacugaggauuuucuuaa

SEQ ID NO: 1456638 - RNA, 19 nt, Homo sapiens
  misc_RNA (1)...(19): siRNA sense strand
gauaccagccucccaaaga

SEQ ID NO: 1456639 - RNA, 19 nt, Homo sapiens
  misc_RNA (1)...(19): siRNA sense strand
gaagaaacaacugauaauc

SEQ ID NO: 1456640 - RNA, 19 nt, Homo sapiens
  misc_RNA (1)...(19): siRNA sense strand
guacagaauugagagacaa

SEQ ID NO: 1456641 - RNA, 19 nt, Homo sapiens
  misc_RNA (1)...(19): siRNA sense strand
gaagugaaacgacuagaag

SEQ ID NO: 1456642 - RNA, 19 nt, Homo sapiens
  misc_RNA (1)...(19): siRNA sense strand
ugacuuggcuuacagugau

SEQ ID NO: 1456643 - RNA, 19 nt, Homo sapiens
  misc_RNA (1)...(19): siRNA sense strand
ugaugaagaugaagaagau

SEQ ID NO: 1456644 - RNA, 19 nt, Homo sapiens
  misc_RNA (1)...(19): siRNA sense strand
ugaagaugaugaagaugaa

SEQ ID NO: 1456645 - RNA, 19 nt, Homo sapiens
  misc_RNA (1)...(19): siRNA sense strand
ugaugaagaugaugaagau

SEQ ID NO: 1456646 - RNA, 19 nt, Homo sapiens
  misc_RNA (1)...(19): siRNA sense strand
ggucaucaguuaaggaagu

SEQ ID NO: 1456647 - RNA, 19 nt, Homo sapiens
  misc_RNA (1)...(19): siRNA sense strand
gaacagcagcagcucauca

SEQ ID NO: 1456648 - RNA, 19 nt, Homo sapiens
  misc_RNA (1)...(19): siRNA sense strand
gaagaacaagaagaagaua

SEQ ID NO: 1456649 - RNA, 19 nt, Homo sapiens
  misc_RNA (1)...(19): siRNA sense strand
gguaggagaaucugaaaga

SEQ ID NO: 1456650 - RNA, 19 nt, Homo sapiens
  misc_RNA (1)...(19): siRNA sense strand
ccaagaaguccuuacugua

SEQ ID NO: 1456651 - RNA, 19 nt, Homo sapiens
  misc_RNA (1)...(19): siRNA sense strand
gagaaaagcuacuguuuac

SEQ ID NO: 1456652 - RNA, 19 nt, Homo sapiens
  misc_RNA (1)...(19): siRNA sense strand
gaaacaucguucaaaguac

SEQ ID NO: 1456653 - RNA, 19 nt, Homo sapiens
  misc_RNA (1)...(19): siRNA sense strand
gaaaauggagcaagaggua

SEQ ID NO: 1456654 - RNA, 19 nt, Homo sapiens
  misc_RNA (1)...(19): siRNA sense strand
uaaaagagauggugguguu

SEQ ID NO: 1456655 - RNA, 19 nt, Homo sapiens
  misc_RNA (1)...(19): siRNA sense strand
caaugcaacuagauucuuc

SEQ ID NO: 1456656 - RNA, 19 nt, Homo sapiens
  misc_RNA (1)...(19): siRNA sense strand
gaagaugaacagcacuuug

SEQ ID NO: 1456657 - RNA, 19 nt, Homo sapiens
  misc_RNA (1)...(19): siRNA sense strand
aaacaucguucaaaguaca

SEQ ID NO: 1456658 - RNA, 19 nt, Homo sapiens
  misc_RNA (1)...(19): siRNA sense strand
gaagauaauggugauguug

SEQ ID NO: 1456659 - RNA, 19 nt, Homo sapiens
  misc_RNA (1)...(19): siRNA sense strand
agaacuugaugaagacuuu

SEQ ID NO: 1456660 - RNA, 19 nt, Homo sapiens
  misc_RNA (1)...(19): siRNA sense strand
agaauacaauccagauaga

SEQ ID NO: 1456661 - RNA, 19 nt, Homo sapiens
  misc_RNA (1)...(19): siRNA sense strand
ccaguuaccggauaaagaa

SEQ ID NO: 1456662 - RNA, 19 nt, Homo sapiens
  misc_RNA (1)...(19): siRNA sense strand
gguggccugucuaaucaua

SEQ ID NO: 1456663 - RNA, 19 nt, Homo sapiens
  misc_RNA (1)...(19): siRNA sense strand
ugaagagggugaagaccaa

SEQ ID NO: 1456664 - RNA, 19 nt, Homo sapiens
  misc_RNA (1)...(19): siRNA sense strand
caacuagauucuucaguac

SEQ ID NO: 1456665 - RNA, 19 nt, Homo sapiens
  misc_RNA (1)...(19): siRNA sense strand
agaggaaacucaagacaca

SEQ ID NO: 1456666 - RNA, 19 nt, Homo sapiens
  misc_RNA (1)...(19): siRNA sense strand
gaagaacggacaaaauuuu

SEQ ID NO: 1456667 - RNA, 19 nt, Homo sapiens
  misc_RNA (1)...(19): siRNA sense strand
gaauauuccuucauuugcu

SEQ ID NO: 1456668 - RNA, 19 nt, Homo sapiens
  misc_RNA (1)...(19): siRNA sense strand
cagaauauuccuucauuug

SEQ ID NO: 1456669 - RNA, 19 nt, Homo sapiens
  misc_RNA (1)...(19): siRNA sense strand
uuacagugaugaugauguu

SEQ ID NO: 1456670 - RNA, 19 nt, Homo sapiens
  misc_RNA (1)...(19): siRNA sense strand
caacaucaguagcaucgua

SEQ ID NO: 1456671 - RNA, 19 nt, Homo sapiens
  misc_RNA (1)...(19): siRNA sense strand
ggacaagauuacugaaaug

SEQ ID NO: 1456672 - RNA, 19 nt, Homo sapiens
  misc_RNA (1)...(19): siRNA sense strand
gaagauaguggauacauca

SEQ ID NO: 1456673 - RNA, 19 nt, Homo sapiens
  misc_RNA (1)...(19): siRNA sense strand
caagauuacugaaaugauc

SEQ ID NO: 1456674 - RNA, 19 nt, Homo sapiens
  misc_RNA (1)...(19): siRNA sense strand
ggaagucacuggaggucuu

SEQ ID NO: 1456675 - RNA, 19 nt, Homo sapiens
  misc_RNA (1)...(19): siRNA sense strand
caacacccaugacacagaa

SEQ ID NO: 1456676 - RNA, 19 nt, Homo sapiens
  misc_RNA (1)...(19): siRNA sense strand
gaaagugguggacaagauu

SEQ ID NO: 1456677 - RNA, 19 nt, Homo sapiens
  misc_RNA (1)...(19): siRNA sense strand
gacaugggauccgcuguaa

SEQ ID NO: 1456678 - RNA, 19 nt, Homo sapiens
  misc_RNA (1)...(19): siRNA sense strand
gcacaugucugaggaugac

SEQ ID NO: 1456679 - RNA, 19 nt, Homo sapiens
  misc_RNA (1)...(19): siRNA sense strand
gaaagugccacagaaagug

SEQ ID NO: 1456680 - RNA, 19 nt, Homo sapiens
  misc_RNA (1)...(19): siRNA sense strand
cacagaaagugccacagaa

SEQ ID NO: 1456681 - RNA, 19 nt, Homo sapiens
  misc_RNA (1)...(19): siRNA sense strand
agaaagugguggacaagau

SEQ ID NO: 1456682 - RNA, 19 nt, Homo sapiens
  misc_RNA (1)...(19): siRNA sense strand
gcaccuuccuagucacuca

SEQ ID NO: 1456683 - RNA, 19 nt, Homo sapiens
  misc_RNA (1)...(19): siRNA sense strand
uggcagauguggucgcauu

SEQ ID NO: 1456684 - RNA, 19 nt, Homo sapiens
  misc_RNA (1)...(19): siRNA sense strand
gaggaugacugggacaaag

SEQ ID NO: 1456685 - RNA, 19 nt, Homo sapiens
  misc_RNA (1)...(19): siRNA sense strand
uggacaagauuacugaaau

SEQ ID NO: 1456686 - RNA, 19 nt, Homo sapiens
  misc_RNA (1)...(19): siRNA sense strand
ucaguagcaucguaggaaa

SEQ ID NO: 1456687 - RNA, 19 nt, Homo sapiens
  misc_RNA (1)...(19): siRNA sense strand
cacaagcccugguguccaa

SEQ ID NO: 1456688 - RNA, 19 nt, Homo sapiens
  misc_RNA (1)...(19): siRNA sense strand
cgacaugggauccgcugua

SEQ ID NO: 1456689 - RNA, 19 nt, Homo sapiens
  misc_RNA (1)...(19): siRNA sense strand
gcaacacccaugacacaga

SEQ ID NO: 1456690 - RNA, 19 nt, Homo sapiens
  misc_RNA (1)...(19): siRNA sense strand
gacaagauuacugaaauga

SEQ ID NO: 1456691 - RNA, 19 nt, Homo sapiens
  misc_RNA (1)...(19): siRNA sense strand
cacagaaagugguggacaa

SEQ ID NO: 1456692 - RNA, 19 nt, Homo sapiens
  misc_RNA (1)...(19): siRNA sense strand
gcccugguguccaaugguu

SEQ ID NO: 1456693 - RNA, 19 nt, Homo sapiens
  misc_RNA (1)...(19): siRNA sense strand
acagaaagugccacagaaa

SEQ ID NO: 1456694 - RNA, 19 nt, Homo sapiens
  misc_RNA (1)...(19): siRNA sense strand
ugaagauaguggauacauc

SEQ ID NO: 1456695 - RNA, 19 nt, Homo sapiens
  misc_RNA (1)...(19): siRNA sense strand
aaagugguggacaagauua

SEQ ID NO: 1456696 - RNA, 19 nt, Homo sapiens
  misc_RNA (1)...(19): siRNA sense strand
acacagaaagugccacaga

SEQ ID NO: 1456697 - RNA, 19 nt, Homo sapiens
  misc_RNA (1)...(19): siRNA sense strand
cagauguggucgcauucuu

SEQ ID NO: 1456698 - RNA, 19 nt, Homo sapiens
  misc_RNA (1)...(19): siRNA sense strand
gaagucacuggaggucuuu

SEQ ID NO: 1456699 - RNA, 19 nt, Homo sapiens
  misc_RNA (1)...(19): siRNA sense strand
cugaggauguggcagaugu

SEQ ID NO: 1456700 - RNA, 19 nt, Homo sapiens
  misc_RNA (1)...(19): siRNA sense strand
ugucgugguuccaucauca

SEQ ID NO: 1456701 - RNA, 19 nt, Homo sapiens
  misc_RNA (1)...(19): siRNA sense strand
ucauagcugucaaccucaa

SEQ ID NO: 1456702 - RNA, 19 nt, Homo sapiens
  misc_RNA (1)...(19): siRNA sense strand
agaaagugccacagaaagu

SEQ ID NO: 1456703 - RNA, 19 nt, Homo sapiens
  misc_RNA (1)...(19): siRNA sense strand
uccaaugguugucgugguu

SEQ ID NO: 1456704 - RNA, 19 nt, Homo sapiens
  misc_RNA (1)...(19): siRNA sense strand
guggacaagauuacugaaa

SEQ ID NO: 1456705 - RNA, 19 nt, Homo sapiens
  misc_RNA (1)...(19): siRNA sense strand
gugguuccaucaucaacau

SEQ ID NO: 1456706 - RNA, 19 nt, Homo sapiens
  misc_RNA (1)...(19): siRNA sense strand
ucgcauucuuggcaucuga

SEQ ID NO: 1456707 - RNA, 19 nt, Homo sapiens
  misc_RNA (1)...(19): siRNA sense strand
cagaaagugccacagaaag

SEQ ID NO: 1456708 - RNA, 19 nt, Homo sapiens
  misc_RNA (1)...(19): siRNA sense strand
caugggauccgcuguaacu

SEQ ID NO: 1456709 - RNA, 19 nt, Homo sapiens
  misc_RNA (1)...(19): siRNA sense strand
cacagggaccucaguggaa

SEQ ID NO: 1456710 - RNA, 19 nt, Homo sapiens
  misc_RNA (1)...(19): siRNA sense strand
acaaagucauagcugucaa

SEQ ID NO: 1456711 - RNA, 19 nt, Homo sapiens
  misc_RNA (1)...(19): siRNA sense strand
gaguuucugcugcacaugu

SEQ ID NO: 1456712 - RNA, 19 nt, Homo sapiens
  misc_RNA (1)...(19): siRNA sense strand
cuggaggucuuuucaugua

SEQ ID NO: 1456713 - RNA, 19 nt, Homo sapiens
  misc_RNA (1)...(19): siRNA sense strand
gcaggaagcuugacaaaug

SEQ ID NO: 1456714 - RNA, 19 nt, Homo sapiens
  misc_RNA (1)...(19): siRNA sense strand
ucacagggaucuugaauaa

SEQ ID NO: 1456715 - RNA, 19 nt, Homo sapiens
  misc_RNA (1)...(19): siRNA sense strand
ggacaucacugcagaaauc

SEQ ID NO: 1456716 - RNA, 19 nt, Homo sapiens
  misc_RNA (1)...(19): siRNA sense strand
gcagaaaucuuagcuguga

SEQ ID NO: 1456717 - RNA, 19 nt, Homo sapiens
  misc_RNA (1)...(19): siRNA sense strand
gcauaaagcuccaagugaa

SEQ ID NO: 1456718 - RNA, 19 nt, Homo sapiens
  misc_RNA (1)...(19): siRNA sense strand
gaacaacaucauugacaua

SEQ ID NO: 1456719 - RNA, 19 nt, Homo sapiens
  misc_RNA (1)...(19): siRNA sense strand
caacaucauugacauaaag

SEQ ID NO: 1456720 - RNA, 19 nt, Homo sapiens
  misc_RNA (1)...(19): siRNA sense strand
caccaucccucucggcaua

SEQ ID NO: 1456721 - RNA, 19 nt, Homo sapiens
  misc_RNA (1)...(19): siRNA sense strand
ccuggaagccugcaaauuu

SEQ ID NO: 1456722 - RNA, 19 nt, Homo sapiens
  misc_RNA (1)...(19): siRNA sense strand
gcaaauuucucugcuugau

SEQ ID NO: 1456723 - RNA, 19 nt, Homo sapiens
  misc_RNA (1)...(19): siRNA sense strand
ggacuacaguuugucauca

SEQ ID NO: 1456724 - RNA, 19 nt, Homo sapiens
  misc_RNA (1)...(19): siRNA sense strand
acagggaucuugaauaaag

SEQ ID NO: 1456725 - RNA, 19 nt, Homo sapiens
  misc_RNA (1)...(19): siRNA sense strand
caaaugcccucagcaaugg

SEQ ID NO: 1456726 - RNA, 19 nt, Homo sapiens
  misc_RNA (1)...(19): siRNA sense strand
caucacugcagaaaucuua

SEQ ID NO: 1456727 - RNA, 19 nt, Homo sapiens
  misc_RNA (1)...(19): siRNA sense strand
gagauaagcaggagaggau

SEQ ID NO: 1456728 - RNA, 19 nt, Homo sapiens
  misc_RNA (1)...(19): siRNA sense strand
gaccagacccugcccuuga

SEQ ID NO: 1456729 - RNA, 19 nt, Homo sapiens
  misc_RNA (1)...(19): siRNA sense strand
gauccacggacuacaguuu

SEQ ID NO: 1456730 - RNA, 19 nt, Homo sapiens
  misc_RNA (1)...(19): siRNA sense strand
acaaaugcccucagcaaug

SEQ ID NO: 1456731 - RNA, 19 nt, Homo sapiens
  misc_RNA (1)...(19): siRNA sense strand
ugacaaaugcccucagcaa

SEQ ID NO: 1456732 - RNA, 19 nt, Homo sapiens
  misc_RNA (1)...(19): siRNA sense strand
auaaaguccugccugaguu

SEQ ID NO: 1456733 - RNA, 19 nt, Homo sapiens
  misc_RNA (1)...(19): siRNA sense strand
ggcauaaagcuccaaguga

SEQ ID NO: 1456734 - RNA, 19 nt, Homo sapiens
  misc_RNA (1)...(19): siRNA sense strand
aaagugacgucagugauuc

SEQ ID NO: 1456735 - RNA, 19 nt, Homo sapiens
  misc_RNA (1)...(19): siRNA sense strand
ugaacaacaucauugacau

SEQ ID NO: 1456736 - RNA, 19 nt, Homo sapiens
  misc_RNA (1)...(19): siRNA sense strand
gacuacaguuugucaucaa

SEQ ID NO: 1456737 - RNA, 19 nt, Homo sapiens
  misc_RNA (1)...(19): siRNA sense strand
gacaaaugcccucagcaau

SEQ ID NO: 1456738 - RNA, 19 nt, Homo sapiens
  misc_RNA (1)...(19): siRNA sense strand
cuggaagccugcaaauuuc

SEQ ID NO: 1456739 - RNA, 19 nt, Homo sapiens
  misc_RNA (1)...(19): siRNA sense strand
auaaagcuccaagugaaua

SEQ ID NO: 1456740 - RNA, 19 nt, Homo sapiens
  misc_RNA (1)...(19): siRNA sense strand
gaccauggcccaguuugga

SEQ ID NO: 1456741 - RNA, 19 nt, Homo sapiens
  misc_RNA (1)...(19): siRNA sense strand
ggccugaacaacaucauug

SEQ ID NO: 1456742 - RNA, 19 nt, Homo sapiens
  misc_RNA (1)...(19): siRNA sense strand
gcuggaacuuggccuugug

SEQ ID NO: 1456743 - RNA, 19 nt, Homo sapiens
  misc_RNA (1)...(19): siRNA sense strand
acccugcccuugaauguga

SEQ ID NO: 1456744 - RNA, 19 nt, Homo sapiens
  misc_RNA (1)...(19): siRNA sense strand
caaauuucucugcuugaug

SEQ ID NO: 1456745 - RNA, 19 nt, Homo sapiens
  misc_RNA (1)...(19): siRNA sense strand
ggaaaagugacgucaguga

SEQ ID NO: 1456746 - RNA, 19 nt, Homo sapiens
  misc_RNA (1)...(19): siRNA sense strand
ugcaugacauuguuaacau

SEQ ID NO: 1456747 - RNA, 19 nt, Homo sapiens
  misc_RNA (1)...(19): siRNA sense strand
ccuggugcaugacauuguu

SEQ ID NO: 1456748 - RNA, 19 nt, Homo sapiens
  misc_RNA (1)...(19): siRNA sense strand
cauaaagcuccaagugaau

SEQ ID NO: 1456749 - RNA, 19 nt, Homo sapiens
  misc_RNA (1)...(19): siRNA sense strand
uaaaguccugccugaguug

SEQ ID NO: 1456750 - RNA, 19 nt, Homo sapiens
  misc_RNA (1)...(19): siRNA sense strand
caggaagcuugacaaaugc

SEQ ID NO: 1456751 - RNA, 19 nt, Homo sapiens
  misc_RNA (1)...(19): siRNA sense strand
ucuuagcugugagagauaa

SEQ ID NO: 1456752 - RNA, 19 nt, Homo sapiens
  misc_RNA (1)...(19): siRNA sense strand
cggcauaaagcuccaagug

SEQ ID NO: 1456753 - RNA, 19 nt, Homo sapiens
  misc_RNA (1)...(19): siRNA sense strand
aauaaaguccugccugagu

SEQ ID NO: 1456754 - RNA, 19 nt, Homo sapiens
  misc_RNA (1)...(19): siRNA sense strand
ugugcccucuggucaauga

SEQ ID NO: 1456755 - RNA, 19 nt, Homo sapiens
  misc_RNA (1)...(19): siRNA sense strand
ggucggugcaagucuguug

SEQ ID NO: 1456756 - RNA, 19 nt, Homo sapiens
  misc_RNA (1)...(19): siRNA sense strand
ggucuugcaggaagcuuga

SEQ ID NO: 1456757 - RNA, 19 nt, Homo sapiens
  misc_RNA (1)...(19): siRNA sense strand
uguugaggcuggcugugaa

SEQ ID NO: 1456758 - RNA, 19 nt, Homo sapiens
  misc_RNA (1)...(19): siRNA sense strand
gugcaugacauuguuaaca

SEQ ID NO: 1456759 - RNA, 19 nt, Homo sapiens
  misc_RNA (1)...(19): siRNA sense strand
gauggccaccgucucuaug

SEQ ID NO: 1456760 - RNA, 19 nt, Homo sapiens
  misc_RNA (1)...(19): siRNA sense strand
ugucuucuacgggcuguua

SEQ ID NO: 1456761 - RNA, 19 nt, Homo sapiens
  misc_RNA (1)...(19): siRNA sense strand
gaaaagugacgucagugau

SEQ ID NO: 1456762 - RNA, 19 nt, Homo sapiens
  misc_RNA (1)...(19): siRNA sense strand
gggccucauugucuucuac

SEQ ID NO: 1456763 - RNA, 19 nt, Homo sapiens
  misc_RNA (1)...(19): siRNA sense strand
agaaaucuuagcugugaga

SEQ ID NO: 1456764 - RNA, 19 nt, Homo sapiens
  misc_RNA (1)...(19): siRNA sense strand
accagacccugcccuugaa

SEQ ID NO: 1456765 - RNA, 19 nt, Homo sapiens
  misc_RNA (1)...(19): siRNA sense strand
gcaggaagcuugacaaaug

SEQ ID NO: 1456766 - RNA, 19 nt, Homo sapiens
  misc_RNA (1)...(19): siRNA sense strand
ucacagggaucuugaauaa

SEQ ID NO: 1456767 - RNA, 19 nt, Homo sapiens
  misc_RNA (1)...(19): siRNA sense strand
ggacaucacugcagaaauc

SEQ ID NO: 1456768 - RNA, 19 nt, Homo sapiens
  misc_RNA (1)...(19): siRNA sense strand
gcagaaaucuuagcuguga

SEQ ID NO: 1456769 - RNA, 19 nt, Homo sapiens
  misc_RNA (1)...(19): siRNA sense strand
gcauaaagcuccaagugaa

SEQ ID NO: 1456770 - RNA, 19 nt, Homo sapiens
  misc_RNA (1)...(19): siRNA sense strand
gaacaacaucauugacaua

SEQ ID NO: 1456771 - RNA, 19 nt, Homo sapiens
  misc_RNA (1)...(19): siRNA sense strand
caacaucauugacauaaag

SEQ ID NO: 1456772 - RNA, 19 nt, Homo sapiens
  misc_RNA (1)...(19): siRNA sense strand
caccaucccucucggcaua

SEQ ID NO: 1456773 - RNA, 19 nt, Homo sapiens
  misc_RNA (1)...(19): siRNA sense strand
ccuggaagccugcaaauuu

SEQ ID NO: 1456774 - RNA, 19 nt, Homo sapiens
  misc_RNA (1)...(19): siRNA sense strand
gcaaauuucucugcuugau

SEQ ID NO: 1456775 - RNA, 19 nt, Homo sapiens
  misc_RNA (1)...(19): siRNA sense strand
ggacuacaguuugucauca

SEQ ID NO: 1456776 - RNA, 19 nt, Homo sapiens
  misc_RNA (1)...(19): siRNA sense strand
acagggaucuugaauaaag

SEQ ID NO: 1456777 - RNA, 19 nt, Homo sapiens
  misc_RNA (1)...(19): siRNA sense strand
caaaugcccucagcaaugg

SEQ ID NO: 1456778 - RNA, 19 nt, Homo sapiens
  misc_RNA (1)...(19): siRNA sense strand
caucacugcagaaaucuua

SEQ ID NO: 1456779 - RNA, 19 nt, Homo sapiens
  misc_RNA (1)...(19): siRNA sense strand
gagauaagcaggagaggau

SEQ ID NO: 1456780 - RNA, 19 nt, Homo sapiens
  misc_RNA (1)...(19): siRNA sense strand
gaccagacccugcccuuga

SEQ ID NO: 1456781 - RNA, 19 nt, Homo sapiens
  misc_RNA (1)...(19): siRNA sense strand
gauccacggacuacaguuu

SEQ ID NO: 1456782 - RNA, 19 nt, Homo sapiens
  misc_RNA (1)...(19): siRNA sense strand
acaaaugcccucagcaaug

SEQ ID NO: 1456783 - RNA, 19 nt, Homo sapiens
  misc_RNA (1)...(19): siRNA sense strand
ugacaaaugcccucagcaa

SEQ ID NO: 1456784 - RNA, 19 nt, Homo sapiens
  misc_RNA (1)...(19): siRNA sense strand
auaaaguccugccugaguu

SEQ ID NO: 1456785 - RNA, 19 nt, Homo sapiens
  misc_RNA (1)...(19): siRNA sense strand
ggcauaaagcuccaaguga

SEQ ID NO: 1456786 - RNA, 19 nt, Homo sapiens
  misc_RNA (1)...(19): siRNA sense strand
aaagugacgucagugauuc

SEQ ID NO: 1456787 - RNA, 19 nt, Homo sapiens
  misc_RNA (1)...(19): siRNA sense strand
ugaacaacaucauugacau

SEQ ID NO: 1456788 - RNA, 19 nt, Homo sapiens
  misc_RNA (1)...(19): siRNA sense strand
gacuacaguuugucaucaa

SEQ ID NO: 1456789 - RNA, 19 nt, Homo sapiens
  misc_RNA (1)...(19): siRNA sense strand
gacaaaugcccucagcaau

SEQ ID NO: 1456790 - RNA, 19 nt, Homo sapiens
  misc_RNA (1)...(19): siRNA sense strand
cuggaagccugcaaauuuc

SEQ ID NO: 1456791 - RNA, 19 nt, Homo sapiens
  misc_RNA (1)...(19): siRNA sense strand
auaaagcuccaagugaaua

SEQ ID NO: 1456792 - RNA, 19 nt, Homo sapiens
  misc_RNA (1)...(19): siRNA sense strand
gaccauggcccaguuugga

SEQ ID NO: 1456793 - RNA, 19 nt, Homo sapiens
  misc_RNA (1)...(19): siRNA sense strand
ggccugaacaacaucauug

SEQ ID NO: 1456794 - RNA, 19 nt, Homo sapiens
  misc_RNA (1)...(19): siRNA sense strand
gcuggaacuuggccuugug

SEQ ID NO: 1456795 - RNA, 19 nt, Homo sapiens
  misc_RNA (1)...(19): siRNA sense strand
acccugcccuugaauguga

SEQ ID NO: 1456796 - RNA, 19 nt, Homo sapiens
  misc_RNA (1)...(19): siRNA sense strand
caaauuucucugcuugaug

SEQ ID NO: 1456797 - RNA, 19 nt, Homo sapiens
  misc_RNA (1)...(19): siRNA sense strand
ggaaaagugacgucaguga

SEQ ID NO: 1456798 - RNA, 19 nt, Homo sapiens
  misc_RNA (1)...(19): siRNA sense strand
ugcaugacauuguuaacau

SEQ ID NO: 1456799 - RNA, 19 nt, Homo sapiens
  misc_RNA (1)...(19): siRNA sense strand
ccuggugcaugacauuguu

SEQ ID NO: 1456800 - RNA, 19 nt, Homo sapiens
  misc_RNA (1)...(19): siRNA sense strand
cauaaagcuccaagugaau

SEQ ID NO: 1456801 - RNA, 19 nt, Homo sapiens
  misc_RNA (1)...(19): siRNA sense strand
uaaaguccugccugaguug

SEQ ID NO: 1456802 - RNA, 19 nt, Homo sapiens
  misc_RNA (1)...(19): siRNA sense strand
caggaagcuugacaaaugc

SEQ ID NO: 1456803 - RNA, 19 nt, Homo sapiens
  misc_RNA (1)...(19): siRNA sense strand
ucuuagcugugagagauaa

SEQ ID NO: 1456804 - RNA, 19 nt, Homo sapiens
  misc_RNA (1)...(19): siRNA sense strand
cggcauaaagcuccaagug

SEQ ID NO: 1456805 - RNA, 19 nt, Homo sapiens
  misc_RNA (1)...(19): siRNA sense strand
aauaaaguccugccugagu

SEQ ID NO: 1456806 - RNA, 19 nt, Homo sapiens
  misc_RNA (1)...(19): siRNA sense strand
ugugcccucuggucaauga

SEQ ID NO: 1456807 - RNA, 19 nt, Homo sapiens
  misc_RNA (1)...(19): siRNA sense strand
ggucggugcaagucuguug

SEQ ID NO: 1456808 - RNA, 19 nt, Homo sapiens
  misc_RNA (1)...(19): siRNA sense strand
ggucuugcaggaagcuuga

SEQ ID NO: 1456809 - RNA, 19 nt, Homo sapiens
  misc_RNA (1)...(19): siRNA sense strand
uguugaggcuggcugugaa

SEQ ID NO: 1456810 - RNA, 19 nt, Homo sapiens
  misc_RNA (1)...(19): siRNA sense strand
gugcaugacauuguuaaca

SEQ ID NO: 1456811 - RNA, 19 nt, Homo sapiens
  misc_RNA (1)...(19): siRNA sense strand
gauggccaccgucucuaug

SEQ ID NO: 1456812 - RNA, 19 nt, Homo sapiens
  misc_RNA (1)...(19): siRNA sense strand
ugucuucuacgggcuguua

SEQ ID NO: 1456813 - RNA, 19 nt, Homo sapiens
  misc_RNA (1)...(19): siRNA sense strand
gaaaagugacgucagugau

SEQ ID NO: 1456814 - RNA, 19 nt, Homo sapiens
  misc_RNA (1)...(19): siRNA sense strand
gggccucauugucuucuac

SEQ ID NO: 1456815 - RNA, 19 nt, Homo sapiens
  misc_RNA (1)...(19): siRNA sense strand
agaaaucuuagcugugaga

SEQ ID NO: 1456816 - RNA, 19 nt, Homo sapiens
  misc_RNA (1)...(19): siRNA sense strand
accagacccugcccuugaa

SEQ ID NO: 1456817 - RNA, 19 nt, Homo sapiens
  misc_RNA (1)...(19): siRNA sense strand
gaaggaacuuucuugauua

SEQ ID NO: 1456818 - RNA, 19 nt, Homo sapiens
  misc_RNA (1)...(19): siRNA sense strand
guucagaugugcaaggaua

SEQ ID NO: 1456819 - RNA, 19 nt, Homo sapiens
  misc_RNA (1)...(19): siRNA sense strand
gaaguaugacuguuaauga

SEQ ID NO: 1456820 - RNA, 19 nt, Homo sapiens
  misc_RNA (1)...(19): siRNA sense strand
gaacuuucuugauuagaga

SEQ ID NO: 1456821 - RNA, 19 nt, Homo sapiens
  misc_RNA (1)...(19): siRNA sense strand
ggacugccuuuaccaacaa

SEQ ID NO: 1456822 - RNA, 19 nt, Homo sapiens
  misc_RNA (1)...(19): siRNA sense strand
cagauuggacucuaucaua

SEQ ID NO: 1456823 - RNA, 19 nt, Homo sapiens
  misc_RNA (1)...(19): siRNA sense strand
ucuguaggcucaccauuaa

SEQ ID NO: 1456824 - RNA, 19 nt, Homo sapiens
  misc_RNA (1)...(19): siRNA sense strand
cgacuacuauguucagaug

SEQ ID NO: 1456825 - RNA, 19 nt, Homo sapiens
  misc_RNA (1)...(19): siRNA sense strand
uaaugaagccaaagagaaa

SEQ ID NO: 1456826 - RNA, 19 nt, Homo sapiens
  misc_RNA (1)...(19): siRNA sense strand
gcauucagacuaccuacua

SEQ ID NO: 1456827 - RNA, 19 nt, Homo sapiens
  misc_RNA (1)...(19): siRNA sense strand
ggaacuuucuugauuagag

SEQ ID NO: 1456828 - RNA, 19 nt, Homo sapiens
  misc_RNA (1)...(19): siRNA sense strand
ggaaguaugacuguuaaug

SEQ ID NO: 1456829 - RNA, 19 nt, Homo sapiens
  misc_RNA (1)...(19): siRNA sense strand
agagauagcucgcauucag

SEQ ID NO: 1456830 - RNA, 19 nt, Homo sapiens
  misc_RNA (1)...(19): siRNA sense strand
cagacuaccuacuaacaau

SEQ ID NO: 1456831 - RNA, 19 nt, Homo sapiens
  misc_RNA (1)...(19): siRNA sense strand
agauuggacucuaucauau

SEQ ID NO: 1456832 - RNA, 19 nt, Homo sapiens
  misc_RNA (1)...(19): siRNA sense strand
uaucauaugugucaaaucc

SEQ ID NO: 1456833 - RNA, 19 nt, Homo sapiens
  misc_RNA (1)...(19): siRNA sense strand
ugugucaaauccaagcuua

SEQ ID NO: 1456834 - RNA, 19 nt, Homo sapiens
  misc_RNA (1)...(19): siRNA sense strand
gaagccaaagagaaauuaa

SEQ ID NO: 1456835 - RNA, 19 nt, Homo sapiens
  misc_RNA (1)...(19): siRNA sense strand
gggacugccuuuaccaaca

SEQ ID NO: 1456836 - RNA, 19 nt, Homo sapiens
  misc_RNA (1)...(19): siRNA sense strand
ucauaugugucaaauccaa

SEQ ID NO: 1456837 - RNA, 19 nt, Homo sapiens
  misc_RNA (1)...(19): siRNA sense strand
caccaucucugcagcaucu

SEQ ID NO: 1456838 - RNA, 19 nt, Homo sapiens
  misc_RNA (1)...(19): siRNA sense strand
cauucagacuaccuacuaa

SEQ ID NO: 1456839 - RNA, 19 nt, Homo sapiens
  misc_RNA (1)...(19): siRNA sense strand
gcacuguucaccuuuaucu

SEQ ID NO: 1456840 - RNA, 19 nt, Homo sapiens
  misc_RNA (1)...(19): siRNA sense strand
uuaaugaagccaaagagaa

SEQ ID NO: 1456841 - RNA, 19 nt, Homo sapiens
  misc_RNA (1)...(19): siRNA sense strand
ugaagccaaagagaaauua

SEQ ID NO: 1456842 - RNA, 19 nt, Homo sapiens
  misc_RNA (1)...(19): siRNA sense strand
caaauccaagcuuaaacaa

SEQ ID NO: 1456843 - RNA, 19 nt, Homo sapiens
  misc_RNA (1)...(19): siRNA sense strand
ucaaauccaagcuuaaaca

SEQ ID NO: 1456844 - RNA, 19 nt, Homo sapiens
  misc_RNA (1)...(19): siRNA sense strand
gagauagcucgcauucaga

SEQ ID NO: 1456845 - RNA, 19 nt, Homo sapiens
  misc_RNA (1)...(19): siRNA sense strand
aaauucagauuggacucua

SEQ ID NO: 1456846 - RNA, 19 nt, Homo sapiens
  misc_RNA (1)...(19): siRNA sense strand
ggggaaguaugacuguuaa

SEQ ID NO: 1456847 - RNA, 19 nt, Homo sapiens
  misc_RNA (1)...(19): siRNA sense strand
agacuaccuacuaacaaua

SEQ ID NO: 1456848 - RNA, 19 nt, Homo sapiens
  misc_RNA (1)...(19): siRNA sense strand
gacagugugguucaucuga

SEQ ID NO: 1456849 - RNA, 19 nt, Homo sapiens
  misc_RNA (1)...(19): siRNA sense strand
ugucaaauccaagcuuaaa

SEQ ID NO: 1456850 - RNA, 19 nt, Homo sapiens
  misc_RNA (1)...(19): siRNA sense strand
caucagcuggaccaacuaa

SEQ ID NO: 1456851 - RNA, 19 nt, Homo sapiens
  misc_RNA (1)...(19): siRNA sense strand
ccaacaagacuaaaagauu

SEQ ID NO: 1456852 - RNA, 19 nt, Homo sapiens
  misc_RNA (1)...(19): siRNA sense strand
ugguucaucugaucgacua

SEQ ID NO: 1456853 - RNA, 19 nt, Homo sapiens
  misc_RNA (1)...(19): siRNA sense strand
gacuaccuacuaacaauau

SEQ ID NO: 1456854 - RNA, 19 nt, Homo sapiens
  misc_RNA (1)...(19): siRNA sense strand
guuaaugaagccaaagaga

SEQ ID NO: 1456855 - RNA, 19 nt, Homo sapiens
  misc_RNA (1)...(19): siRNA sense strand
gauuggacucuaucauaug

SEQ ID NO: 1456856 - RNA, 19 nt, Homo sapiens
  misc_RNA (1)...(19): siRNA sense strand
aaggaacuuucuugauuag

SEQ ID NO: 1456857 - RNA, 19 nt, Homo sapiens
  misc_RNA (1)...(19): siRNA sense strand
ggaccaacuaaucuucgaa

SEQ ID NO: 1456858 - RNA, 19 nt, Homo sapiens
  misc_RNA (1)...(19): siRNA sense strand
gacuguuaaugaagccaaa

SEQ ID NO: 1456859 - RNA, 19 nt, Homo sapiens
  misc_RNA (1)...(19): siRNA sense strand
gaccaacuaaucuucgaau

SEQ ID NO: 1456860 - RNA, 19 nt, Homo sapiens
  misc_RNA (1)...(19): siRNA sense strand
ucgaauaccaagacggaaa

SEQ ID NO: 1456861 - RNA, 19 nt, Homo sapiens
  misc_RNA (1)...(19): siRNA sense strand
cggcacuguucaccuuuau

SEQ ID NO: 1456862 - RNA, 19 nt, Homo sapiens
  misc_RNA (1)...(19): siRNA sense strand
ucugaucgacuacuauguu

SEQ ID NO: 1456863 - RNA, 19 nt, Homo sapiens
  misc_RNA (1)...(19): siRNA sense strand
caucugaucgacuacuaug

SEQ ID NO: 1456864 - RNA, 19 nt, Homo sapiens
  misc_RNA (1)...(19): siRNA sense strand
ucagacuaccuacuaacaa

SEQ ID NO: 1456865 - RNA, 19 nt, Homo sapiens
  misc_RNA (1)...(19): siRNA sense strand
aacaucagcuggaccaacu

SEQ ID NO: 1456866 - RNA, 19 nt, Homo sapiens
  misc_RNA (1)...(19): siRNA sense strand
uuagagauagcucgcauuc

SEQ ID NO: 1456867 - RNA, 19 nt, Homo sapiens
  misc_RNA (1)...(19): siRNA sense strand
acggcacuguucaccuuua

SEQ ID NO: 1456868 - RNA, 19 nt, Homo sapiens
  misc_RNA (1)...(19): siRNA sense strand
acuacuauguucagaugug

SEQ ID NO: 1456869 - RNA, 19 nt, Homo sapiens
  misc_RNA (1)...(19): siRNA sense strand
gcuuaaacaauuugacagu

SEQ ID NO: 1456870 - RNA, 19 nt, Homo sapiens
  misc_RNA (1)...(19): siRNA sense strand
uggacucuaucauaugugu

SEQ ID NO: 1456871 - RNA, 19 nt, Homo sapiens
  misc_RNA (1)...(19): siRNA sense strand
acuguucaccuuuaucuga

SEQ ID NO: 1456872 - RNA, 19 nt, Homo sapiens
  misc_RNA (1)...(19): siRNA sense strand
cucuguaggcucaccauua

SEQ ID NO: 1456873 - RNA, 19 nt, Homo sapiens
  misc_RNA (1)...(19): siRNA sense strand
cagcuggaccaacuaaucu

SEQ ID NO: 1456874 - RNA, 19 nt, Homo sapiens
  misc_RNA (1)...(19): siRNA sense strand
gacucuaucauauguguca

SEQ ID NO: 1456875 - RNA, 19 nt, Homo sapiens
  misc_RNA (1)...(19): siRNA sense strand
gaucgacuacuauguucag

SEQ ID NO: 1456876 - RNA, 19 nt, Homo sapiens
  misc_RNA (1)...(19): siRNA sense strand
cugaucgacuacuauguuc

SEQ ID NO: 1456877 - RNA, 19 nt, Homo sapiens
  misc_RNA (1)...(19): siRNA sense strand
cagugugguucaucugauc

SEQ ID NO: 1456878 - RNA, 19 nt, Homo sapiens
  misc_RNA (1)...(19): siRNA sense strand
ucagcuggaccaacuaauc

SEQ ID NO: 1456879 - RNA, 19 nt, Homo sapiens
  misc_RNA (1)...(19): siRNA sense strand
ucaccuuuaucugaccaaa

SEQ ID NO: 1456880 - RNA, 19 nt, Homo sapiens
  misc_RNA (1)...(19): siRNA sense strand
gaacaaacccgacaguaaa

SEQ ID NO: 1456881 - RNA, 19 nt, Homo sapiens
  misc_RNA (1)...(19): siRNA sense strand
gcaagaaggucaacucuca

SEQ ID NO: 1456882 - RNA, 19 nt, Homo sapiens
  misc_RNA (1)...(19): siRNA sense strand
ccaaaugccuccugaacaa

SEQ ID NO: 1456883 - RNA, 19 nt, Homo sapiens
  misc_RNA (1)...(19): siRNA sense strand
guccagagcuauuucauug

SEQ ID NO: 1456884 - RNA, 19 nt, Homo sapiens
  misc_RNA (1)...(19): siRNA sense strand
cagauccuguguccuauua

SEQ ID NO: 1456885 - RNA, 19 nt, Homo sapiens
  misc_RNA (1)...(19): siRNA sense strand
cgagugaccuggaacaaga

SEQ ID NO: 1456886 - RNA, 19 nt, Homo sapiens
  misc_RNA (1)...(19): siRNA sense strand
gugccaaucugccuuguaa

SEQ ID NO: 1456887 - RNA, 19 nt, Homo sapiens
  misc_RNA (1)...(19): siRNA sense strand
gaggagaagucacggauca

SEQ ID NO: 1456888 - RNA, 19 nt, Homo sapiens
  misc_RNA (1)...(19): siRNA sense strand
gaagagcgagccuaccuuu

SEQ ID NO: 1456889 - RNA, 19 nt, Homo sapiens
  misc_RNA (1)...(19): siRNA sense strand
caacaugccucaguauauc

SEQ ID NO: 1456890 - RNA, 19 nt, Homo sapiens
  misc_RNA (1)...(19): siRNA sense strand
ggacucccauggugacuga

SEQ ID NO: 1456891 - RNA, 19 nt, Homo sapiens
  misc_RNA (1)...(19): siRNA sense strand
ggucaacucucagcgcuuu

SEQ ID NO: 1456892 - RNA, 19 nt, Homo sapiens
  misc_RNA (1)...(19): siRNA sense strand
aagaauggcuccagugaga

SEQ ID NO: 1456893 - RNA, 19 nt, Homo sapiens
  misc_RNA (1)...(19): siRNA sense strand
ggacauggaucuggaagag

SEQ ID NO: 1456894 - RNA, 19 nt, Homo sapiens
  misc_RNA (1)...(19): siRNA sense strand
ggagggcucugacuacauc

SEQ ID NO: 1456895 - RNA, 19 nt, Homo sapiens
  misc_RNA (1)...(19): siRNA sense strand
ccaucgagcuggccacauu

SEQ ID NO: 1456896 - RNA, 19 nt, Homo sapiens
  misc_RNA (1)...(19): siRNA sense strand
uagauccgauggcagaaua

SEQ ID NO: 1456897 - RNA, 19 nt, Homo sapiens
  misc_RNA (1)...(19): siRNA sense strand
ggagaagugucaccaguac

SEQ ID NO: 1456898 - RNA, 19 nt, Homo sapiens
  misc_RNA (1)...(19): siRNA sense strand
caaggacccuguggaaaug

SEQ ID NO: 1456899 - RNA, 19 nt, Homo sapiens
  misc_RNA (1)...(19): siRNA sense strand
gaagugaacaagccgaaga

SEQ ID NO: 1456900 - RNA, 19 nt, Homo sapiens
  misc_RNA (1)...(19): siRNA sense strand
caggucacguugcuagaua

SEQ ID NO: 1456901 - RNA, 19 nt, Homo sapiens
  misc_RNA (1)...(19): siRNA sense strand
gcaauggacgcaucaaaca

SEQ ID NO: 1456902 - RNA, 19 nt, Homo sapiens
  misc_RNA (1)...(19): siRNA sense strand
gaacagggugugccaaagu

SEQ ID NO: 1456903 - RNA, 19 nt, Homo sapiens
  misc_RNA (1)...(19): siRNA sense strand
cgacaugggcccacaguug

SEQ ID NO: 1456904 - RNA, 19 nt, Homo sapiens
  misc_RNA (1)...(19): siRNA sense strand
acacgucacuggcauggaa

SEQ ID NO: 1456905 - RNA, 19 nt, Homo sapiens
  misc_RNA (1)...(19): siRNA sense strand
agaacaaacccgacaguaa

SEQ ID NO: 1456906 - RNA, 19 nt, Homo sapiens
  misc_RNA (1)...(19): siRNA sense strand
ccagagcuauuucauugug

SEQ ID NO: 1456907 - RNA, 19 nt, Homo sapiens
  misc_RNA (1)...(19): siRNA sense strand
ccaaggacccuguggaaau

SEQ ID NO: 1456908 - RNA, 19 nt, Homo sapiens
  misc_RNA (1)...(19): siRNA sense strand
caucaacgccagcuucauu

SEQ ID NO: 1456909 - RNA, 19 nt, Homo sapiens
  misc_RNA (1)...(19): siRNA sense strand
ugacgcggcuggaggagaa

SEQ ID NO: 1456910 - RNA, 19 nt, Homo sapiens
  misc_RNA (1)...(19): siRNA sense strand
ccuacaagauccaguacaa

SEQ ID NO: 1456911 - RNA, 19 nt, Homo sapiens
  misc_RNA (1)...(19): siRNA sense strand
ugaccacuaugcaaccuaa

SEQ ID NO: 1456912 - RNA, 19 nt, Homo sapiens
  misc_RNA (1)...(19): siRNA sense strand
aauacaacaugccucagua

SEQ ID NO: 1456913 - RNA, 19 nt, Homo sapiens
  misc_RNA (1)...(19): siRNA sense strand
gaauggcuccagugagaaa

SEQ ID NO: 1456914 - RNA, 19 nt, Homo sapiens
  misc_RNA (1)...(19): siRNA sense strand
gaacaagaagggcaagaag

SEQ ID NO: 1456915 - RNA, 19 nt, Homo sapiens
  misc_RNA (1)...(19): siRNA sense strand
aggagaguaucaucaagua

SEQ ID NO: 1456916 - RNA, 19 nt, Homo sapiens
  misc_RNA (1)...(19): siRNA sense strand
gccaagugcauaagacuaa

SEQ ID NO: 1456917 - RNA, 19 nt, Homo sapiens
  misc_RNA (1)...(19): siRNA sense strand
gacaugggcccacaguuga

SEQ ID NO: 1456918 - RNA, 19 nt, Homo sapiens
  misc_RNA (1)...(19): siRNA sense strand
ggccguaucagauuaaaga

SEQ ID NO: 1456919 - RNA, 19 nt, Homo sapiens
  misc_RNA (1)...(19): siRNA sense strand
caacgcccuuccuggcuuu

SEQ ID NO: 1456920 - RNA, 19 nt, Homo sapiens
  misc_RNA (1)...(19): siRNA sense strand
ggugaaaucucuccccaaa

SEQ ID NO: 1456921 - RNA, 19 nt, Homo sapiens
  misc_RNA (1)...(19): siRNA sense strand
gaauacaacaugccucagu

SEQ ID NO: 1456922 - RNA, 19 nt, Homo sapiens
  misc_RNA (1)...(19): siRNA sense strand
ggaacaagaagggcaagaa

SEQ ID NO: 1456923 - RNA, 19 nt, Homo sapiens
  misc_RNA (1)...(19): siRNA sense strand
gcaacuggcagaagcacaa

SEQ ID NO: 1456924 - RNA, 19 nt, Homo sapiens
  misc_RNA (1)...(19): siRNA sense strand
gggagaagugucaccagua

SEQ ID NO: 1456925 - RNA, 19 nt, Homo sapiens
  misc_RNA (1)...(19): siRNA sense strand
cgucagaacgcguacauug

SEQ ID NO: 1456926 - RNA, 19 nt, Homo sapiens
  misc_RNA (1)...(19): siRNA sense strand
aaaccgaccagggcaaaua

SEQ ID NO: 1456927 - RNA, 19 nt, Homo sapiens
  misc_RNA (1)...(19): siRNA sense strand
gcaggagaguaucaucaag

SEQ ID NO: 1456928 - RNA, 19 nt, Homo sapiens
  misc_RNA (1)...(19): siRNA sense strand
uugagacgauugaguuuga

SEQ ID NO: 1456929 - RNA, 19 nt, Homo sapiens
  misc_RNA (1)...(19): siRNA sense strand
gagcgagccuaccuuugca

SEQ ID NO: 1456930 - RNA, 19 nt, Homo sapiens
  misc_RNA (1)...(19): siRNA sense strand
ggaaaccgaccagggcaaa

SEQ ID NO: 1456931 - RNA, 19 nt, Homo sapiens
  misc_RNA (1)...(19): siRNA sense strand
cggaagcuuugaccacuau

SEQ ID NO: 1456932 - RNA, 19 nt, Homo sapiens
  misc_RNA (1)...(19): siRNA sense strand
gcagacagaggaugaguac

SEQ ID NO: 1456933 - RNA, 19 nt, Homo sapiens
  misc_RNA (1)...(19): siRNA sense strand
ggaacagggugugccaaag

SEQ ID NO: 1456934 - RNA, 19 nt, Homo sapiens
  misc_RNA (1)...(19): siRNA sense strand
ucaagugugaucaguauug

SEQ ID NO: 1456935 - RNA, 19 nt, Homo sapiens
  misc_RNA (1)...(19): siRNA sense strand
cauaaucugcauugucauu

SEQ ID NO: 1456936 - RNA, 19 nt, Homo sapiens
  misc_RNA (1)...(19): siRNA sense strand
gccguggucuucauaaucu

SEQ ID NO: 1456937 - RNA, 19 nt, Homo sapiens
  misc_RNA (1)...(19): siRNA sense strand
ccaccgcuauguccucuuc

SEQ ID NO: 1456938 - RNA, 19 nt, Homo sapiens
  misc_RNA (1)...(19): siRNA sense strand
uucauaaucugcauuguca

SEQ ID NO: 1456939 - RNA, 19 nt, Homo sapiens
  misc_RNA (1)...(19): siRNA sense strand
ggaguaccucggaagcuuu

SEQ ID NO: 1456940 - RNA, 19 nt, Homo sapiens
  misc_RNA (1)...(19): siRNA sense strand
gcucugcccgcuaccagua

SEQ ID NO: 1456941 - RNA, 19 nt, Homo sapiens
  misc_RNA (1)...(19): siRNA sense strand
ugaccaagcugcgggagau

SEQ ID NO: 1456942 - RNA, 19 nt, Homo sapiens
  misc_RNA (1)...(19): siRNA sense strand
ucaagcggcuggcuaacuc

SEQ ID NO: 1456943 - RNA, 19 nt, Homo sapiens
  misc_RNA (1)...(19): siRNA sense strand
gagcggaucaagccagaga

SEQ ID NO: 1456944 - RNA, 19 nt, Homo sapiens
  misc_RNA (1)...(19): siRNA sense strand
ucaaggacucggccaacua

SEQ ID NO: 1456945 - RNA, 19 nt, Homo sapiens
  misc_RNA (1)...(19): siRNA sense strand
gcuuugagacgauugaguu

SEQ ID NO: 1456946 - RNA, 19 nt, Homo sapiens
  misc_RNA (1)...(19): siRNA sense strand
gacauucucucugcacaag

SEQ ID NO: 1456947 - RNA, 19 nt, Homo sapiens
  misc_RNA (1)...(19): siRNA sense strand
gaucaugaagacaucaguu

SEQ ID NO: 1456948 - RNA, 19 nt, Homo sapiens
  misc_RNA (1)...(19): siRNA sense strand
caguauggcggcuucgaua

SEQ ID NO: 1456949 - RNA, 19 nt, Homo sapiens
  misc_RNA (1)...(19): siRNA sense strand
augaguaccaguucuguua

SEQ ID NO: 1456950 - RNA, 19 nt, Homo sapiens
  misc_RNA (1)...(19): siRNA sense strand
acaacaugccucaguauau

SEQ ID NO: 1456951 - RNA, 19 nt, Homo sapiens
  misc_RNA (1)...(19): siRNA sense strand
gauggcagaauacaacaug

SEQ ID NO: 1456952 - RNA, 19 nt, Homo sapiens
  misc_RNA (1)...(19): siRNA sense strand
guccgccaguuccaguuua

SEQ ID NO: 1456953 - RNA, 19 nt, Homo sapiens
  misc_RNA (1)...(19): siRNA sense strand
gagcggaugcgguaugaag

SEQ ID NO: 1456954 - RNA, 19 nt, Homo sapiens
  misc_RNA (1)...(19): siRNA sense strand
caaguacgagcuccucuuc

SEQ ID NO: 1456955 - RNA, 19 nt, Homo sapiens
  misc_RNA (1)...(19): siRNA sense strand
uacaagauccaguacaaug

SEQ ID NO: 1456956 - RNA, 19 nt, Homo sapiens
  misc_RNA (1)...(19): siRNA sense strand
ggaacucacagaugucaag

SEQ ID NO: 1456957 - RNA, 19 nt, Homo sapiens
  misc_RNA (1)...(19): siRNA sense strand
uacaacaugccucaguaua

SEQ ID NO: 1456958 - RNA, 19 nt, Homo sapiens
  misc_RNA (1)...(19): siRNA sense strand
ucaagaaccgccuggugaa

SEQ ID NO: 1456959 - RNA, 19 nt, Homo sapiens
  misc_RNA (1)...(19): siRNA sense strand
gcccacacgucacgcuuca

SEQ ID NO: 1456960 - RNA, 19 nt, Homo sapiens
  misc_RNA (1)...(19): siRNA sense strand
acaagaauggcuccaguga

SEQ ID NO: 1456961 - RNA, 19 nt, Homo sapiens
  misc_RNA (1)...(19): siRNA sense strand
ucacguugcuagauaccau

SEQ ID NO: 1456962 - RNA, 19 nt, Homo sapiens
  misc_RNA (1)...(19): siRNA sense strand
cagagaagacagucgaugu

SEQ ID NO: 1456963 - RNA, 19 nt, Homo sapiens
  misc_RNA (1)...(19): siRNA sense strand
gaccauggcgugcccgaau

SEQ ID NO: 1456964 - RNA, 19 nt, Homo sapiens
  misc_RNA (1)...(19): siRNA sense strand
ggacauucucucugcacaa

SEQ ID NO: 1456965 - RNA, 19 nt, Homo sapiens
  misc_RNA (1)...(19): siRNA sense strand
ucaccugguucaaggacuu

SEQ ID NO: 1456966 - RNA, 19 nt, Homo sapiens
  misc_RNA (1)...(19): siRNA sense strand
gaggaugaguaccaguucu

SEQ ID NO: 1456967 - RNA, 19 nt, Homo sapiens
  misc_RNA (1)...(19): siRNA sense strand
caagugugaucaguauugg

SEQ ID NO: 1456968 - RNA, 19 nt, Homo sapiens
  misc_RNA (1)...(19): siRNA sense strand
gaacgugcuggaacucaca

SEQ ID NO: 1456969 - RNA, 19 nt, Homo sapiens
  misc_RNA (1)...(19): siRNA sense strand
gauccuagugccagcaaug

SEQ ID NO: 1456970 - RNA, 19 nt, Homo sapiens
  misc_RNA (1)...(19): siRNA sense strand
gggcuucaucgacuucauu

SEQ ID NO: 1456971 - RNA, 19 nt, Homo sapiens
  misc_RNA (1)...(19): siRNA sense strand
gggagggcuucaucgacuu

SEQ ID NO: 1456972 - RNA, 19 nt, Homo sapiens
  misc_RNA (1)...(19): siRNA sense strand
gaagucacggaucaagugu

SEQ ID NO: 1456973 - RNA, 19 nt, Homo sapiens
  misc_RNA (1)...(19): siRNA sense strand
caugggcagugauuacauc

SEQ ID NO: 1456974 - RNA, 19 nt, Homo sapiens
  misc_RNA (1)...(19): siRNA sense strand
guaaacgcaaggacucaga

SEQ ID NO: 1456975 - RNA, 19 nt, Homo sapiens
  misc_RNA (1)...(19): siRNA sense strand
gcccuggcauggugucugu

SEQ ID NO: 1456976 - RNA, 19 nt, Homo sapiens
  misc_RNA (1)...(19): siRNA sense strand
acccugagaucaccugguu

SEQ ID NO: 1456977 - RNA, 19 nt, Homo sapiens
  misc_RNA (1)...(19): siRNA sense strand
ucauugcuauccugcucua

SEQ ID NO: 1456978 - RNA, 19 nt, Homo sapiens
  misc_RNA (1)...(19): siRNA sense strand
gacaucaccaccacacguu

SEQ ID NO: 1456979 - RNA, 19 nt, Homo sapiens
  misc_RNA (1)...(19): siRNA sense strand
gaccagggcaaauaugagu

SEQ ID NO: 1456980 - RNA, 19 nt, Homo sapiens
  misc_RNA (1)...(19): siRNA sense strand
gaacaaacccgacaguaaa

SEQ ID NO: 1456981 - RNA, 19 nt, Homo sapiens
  misc_RNA (1)...(19): siRNA sense strand
gcaagaaggucaacucuca

SEQ ID NO: 1456982 - RNA, 19 nt, Homo sapiens
  misc_RNA (1)...(19): siRNA sense strand
ccaaaugccuccugaacaa

SEQ ID NO: 1456983 - RNA, 19 nt, Homo sapiens
  misc_RNA (1)...(19): siRNA sense strand
guccagagcuauuucauug

SEQ ID NO: 1456984 - RNA, 19 nt, Homo sapiens
  misc_RNA (1)...(19): siRNA sense strand
cagauccuguguccuauua

SEQ ID NO: 1456985 - RNA, 19 nt, Homo sapiens
  misc_RNA (1)...(19): siRNA sense strand
cgagugaccuggaacaaga

SEQ ID NO: 1456986 - RNA, 19 nt, Homo sapiens
  misc_RNA (1)...(19): siRNA sense strand
gugccaaucugccuuguaa

SEQ ID NO: 1456987 - RNA, 19 nt, Homo sapiens
  misc_RNA (1)...(19): siRNA sense strand
gaggagaagucacggauca

SEQ ID NO: 1456988 - RNA, 19 nt, Homo sapiens
  misc_RNA (1)...(19): siRNA sense strand
gaagagcgagccuaccuuu

SEQ ID NO: 1456989 - RNA, 19 nt, Homo sapiens
  misc_RNA (1)...(19): siRNA sense strand
caacaugccucaguauauc

SEQ ID NO: 1456990 - RNA, 19 nt, Homo sapiens
  misc_RNA (1)...(19): siRNA sense strand
ggacucccauggugacuga

SEQ ID NO: 1456991 - RNA, 19 nt, Homo sapiens
  misc_RNA (1)...(19): siRNA sense strand
ggucaacucucagcgcuuu

SEQ ID NO: 1456992 - RNA, 19 nt, Homo sapiens
  misc_RNA (1)...(19): siRNA sense strand
aagaauggcuccagugaga

SEQ ID NO: 1456993 - RNA, 19 nt, Homo sapiens
  misc_RNA (1)...(19): siRNA sense strand
ggacauggaucuggaagag

SEQ ID NO: 1456994 - RNA, 19 nt, Homo sapiens
  misc_RNA (1)...(19): siRNA sense strand
ggagggcucugacuacauc

SEQ ID NO: 1456995 - RNA, 19 nt, Homo sapiens
  misc_RNA (1)...(19): siRNA sense strand
ccaucgagcuggccacauu

SEQ ID NO: 1456996 - RNA, 19 nt, Homo sapiens
  misc_RNA (1)...(19): siRNA sense strand
uagauccgauggcagaaua

SEQ ID NO: 1456997 - RNA, 19 nt, Homo sapiens
  misc_RNA (1)...(19): siRNA sense strand
ggagaagugucaccaguac

SEQ ID NO: 1456998 - RNA, 19 nt, Homo sapiens
  misc_RNA (1)...(19): siRNA sense strand
caaggacccuguggaaaug

SEQ ID NO: 1456999 - RNA, 19 nt, Homo sapiens
  misc_RNA (1)...(19): siRNA sense strand
gaagugaacaagccgaaga

SEQ ID NO: 1457000 - RNA, 19 nt, Homo sapiens
  misc_RNA (1)...(19): siRNA sense strand
caggucacguugcuagaua

SEQ ID NO: 1457001 - RNA, 19 nt, Homo sapiens
  misc_RNA (1)...(19): siRNA sense strand
gcaauggacgcaucaaaca

SEQ ID NO: 1457002 - RNA, 19 nt, Homo sapiens
  misc_RNA (1)...(19): siRNA sense strand
gaacagggugugccaaagu

SEQ ID NO: 1457003 - RNA, 19 nt, Homo sapiens
  misc_RNA (1)...(19): siRNA sense strand
cgacaugggcccacaguug

SEQ ID NO: 1457004 - RNA, 19 nt, Homo sapiens
  misc_RNA (1)...(19): siRNA sense strand
acacgucacuggcauggaa

SEQ ID NO: 1457005 - RNA, 19 nt, Homo sapiens
  misc_RNA (1)...(19): siRNA sense strand
agaacaaacccgacaguaa

SEQ ID NO: 1457006 - RNA, 19 nt, Homo sapiens
  misc_RNA (1)...(19): siRNA sense strand
ccagagcuauuucauugug

SEQ ID NO: 1457007 - RNA, 19 nt, Homo sapiens
  misc_RNA (1)...(19): siRNA sense strand
ccaaggacccuguggaaau

SEQ ID NO: 1457008 - RNA, 19 nt, Homo sapiens
  misc_RNA (1)...(19): siRNA sense strand
caucaacgccagcuucauu

SEQ ID NO: 1457009 - RNA, 19 nt, Homo sapiens
  misc_RNA (1)...(19): siRNA sense strand
ugacgcggcuggaggagaa

SEQ ID NO: 1457010 - RNA, 19 nt, Homo sapiens
  misc_RNA (1)...(19): siRNA sense strand
ccuacaagauccaguacaa

SEQ ID NO: 1457011 - RNA, 19 nt, Homo sapiens
  misc_RNA (1)...(19): siRNA sense strand
ugaccacuaugcaaccuaa

SEQ ID NO: 1457012 - RNA, 19 nt, Homo sapiens
  misc_RNA (1)...(19): siRNA sense strand
aauacaacaugccucagua

SEQ ID NO: 1457013 - RNA, 19 nt, Homo sapiens
  misc_RNA (1)...(19): siRNA sense strand
gaauggcuccagugagaaa

SEQ ID NO: 1457014 - RNA, 19 nt, Homo sapiens
  misc_RNA (1)...(19): siRNA sense strand
gaacaagaagggcaagaag

SEQ ID NO: 1457015 - RNA, 19 nt, Homo sapiens
  misc_RNA (1)...(19): siRNA sense strand
aggagaguaucaucaagua

SEQ ID NO: 1457016 - RNA, 19 nt, Homo sapiens
  misc_RNA (1)...(19): siRNA sense strand
gccaagugcauaagacuaa

SEQ ID NO: 1457017 - RNA, 19 nt, Homo sapiens
  misc_RNA (1)...(19): siRNA sense strand
gacaugggcccacaguuga

SEQ ID NO: 1457018 - RNA, 19 nt, Homo sapiens
  misc_RNA (1)...(19): siRNA sense strand
ggccguaucagauuaaaga

SEQ ID NO: 1457019 - RNA, 19 nt, Homo sapiens
  misc_RNA (1)...(19): siRNA sense strand
caacgcccuuccuggcuuu

SEQ ID NO: 1457020 - RNA, 19 nt, Homo sapiens
  misc_RNA (1)...(19): siRNA sense strand
ggugaaaucucuccccaaa

SEQ ID NO: 1457021 - RNA, 19 nt, Homo sapiens
  misc_RNA (1)...(19): siRNA sense strand
gaauacaacaugccucagu

SEQ ID NO: 1457022 - RNA, 19 nt, Homo sapiens
  misc_RNA (1)...(19): siRNA sense strand
ggaacaagaagggcaagaa

SEQ ID NO: 1457023 - RNA, 19 nt, Homo sapiens
  misc_RNA (1)...(19): siRNA sense strand
gcaacuggcagaagcacaa

SEQ ID NO: 1457024 - RNA, 19 nt, Homo sapiens
  misc_RNA (1)...(19): siRNA sense strand
gggagaagugucaccagua

SEQ ID NO: 1457025 - RNA, 19 nt, Homo sapiens
  misc_RNA (1)...(19): siRNA sense strand
cgucagaacgcguacauug

SEQ ID NO: 1457026 - RNA, 19 nt, Homo sapiens
  misc_RNA (1)...(19): siRNA sense strand
aaaccgaccagggcaaaua

SEQ ID NO: 1457027 - RNA, 19 nt, Homo sapiens
  misc_RNA (1)...(19): siRNA sense strand
gcaggagaguaucaucaag

SEQ ID NO: 1457028 - RNA, 19 nt, Homo sapiens
  misc_RNA (1)...(19): siRNA sense strand
uugagacgauugaguuuga

SEQ ID NO: 1457029 - RNA, 19 nt, Homo sapiens
  misc_RNA (1)...(19): siRNA sense strand
gagcgagccuaccuuugca

SEQ ID NO: 1457030 - RNA, 19 nt, Homo sapiens
  misc_RNA (1)...(19): siRNA sense strand
ggaaaccgaccagggcaaa

SEQ ID NO: 1457031 - RNA, 19 nt, Homo sapiens
  misc_RNA (1)...(19): siRNA sense strand
cggaagcuuugaccacuau

SEQ ID NO: 1457032 - RNA, 19 nt, Homo sapiens
  misc_RNA (1)...(19): siRNA sense strand
gcagacagaggaugaguac

SEQ ID NO: 1457033 - RNA, 19 nt, Homo sapiens
  misc_RNA (1)...(19): siRNA sense strand
ggaacagggugugccaaag

SEQ ID NO: 1457034 - RNA, 19 nt, Homo sapiens
  misc_RNA (1)...(19): siRNA sense strand
ucaagugugaucaguauug

SEQ ID NO: 1457035 - RNA, 19 nt, Homo sapiens
  misc_RNA (1)...(19): siRNA sense strand
cauaaucugcauugucauu

SEQ ID NO: 1457036 - RNA, 19 nt, Homo sapiens
  misc_RNA (1)...(19): siRNA sense strand
gccguggucuucauaaucu

SEQ ID NO: 1457037 - RNA, 19 nt, Homo sapiens
  misc_RNA (1)...(19): siRNA sense strand
ccaccgcuauguccucuuc

SEQ ID NO: 1457038 - RNA, 19 nt, Homo sapiens
  misc_RNA (1)...(19): siRNA sense strand
uucauaaucugcauuguca

SEQ ID NO: 1457039 - RNA, 19 nt, Homo sapiens
  misc_RNA (1)...(19): siRNA sense strand
ggaguaccucggaagcuuu

SEQ ID NO: 1457040 - RNA, 19 nt, Homo sapiens
  misc_RNA (1)...(19): siRNA sense strand
gcucugcccgcuaccagua

SEQ ID NO: 1457041 - RNA, 19 nt, Homo sapiens
  misc_RNA (1)...(19): siRNA sense strand
ugaccaagcugcgggagau

SEQ ID NO: 1457042 - RNA, 19 nt, Homo sapiens
  misc_RNA (1)...(19): siRNA sense strand
ucaagcggcuggcuaacuc

SEQ ID NO: 1457043 - RNA, 19 nt, Homo sapiens
  misc_RNA (1)...(19): siRNA sense strand
gagcggaucaagccagaga

SEQ ID NO: 1457044 - RNA, 19 nt, Homo sapiens
  misc_RNA (1)...(19): siRNA sense strand
ucaaggacucggccaacua

SEQ ID NO: 1457045 - RNA, 19 nt, Homo sapiens
  misc_RNA (1)...(19): siRNA sense strand
gcuuugagacgauugaguu

SEQ ID NO: 1457046 - RNA, 19 nt, Homo sapiens
  misc_RNA (1)...(19): siRNA sense strand
gacauucucucugcacaag

SEQ ID NO: 1457047 - RNA, 19 nt, Homo sapiens
  misc_RNA (1)...(19): siRNA sense strand
gaucaugaagacaucaguu

SEQ ID NO: 1457048 - RNA, 19 nt, Homo sapiens
  misc_RNA (1)...(19): siRNA sense strand
caguauggcggcuucgaua

SEQ ID NO: 1457049 - RNA, 19 nt, Homo sapiens
  misc_RNA (1)...(19): siRNA sense strand
augaguaccaguucuguua

SEQ ID NO: 1457050 - RNA, 19 nt, Homo sapiens
  misc_RNA (1)...(19): siRNA sense strand
acaacaugccucaguauau

SEQ ID NO: 1457051 - RNA, 19 nt, Homo sapiens
  misc_RNA (1)...(19): siRNA sense strand
gauggcagaauacaacaug

SEQ ID NO: 1457052 - RNA, 19 nt, Homo sapiens
  misc_RNA (1)...(19): siRNA sense strand
guccgccaguuccaguuua

SEQ ID NO: 1457053 - RNA, 19 nt, Homo sapiens
  misc_RNA (1)...(19): siRNA sense strand
gagcggaugcgguaugaag

SEQ ID NO: 1457054 - RNA, 19 nt, Homo sapiens
  misc_RNA (1)...(19): siRNA sense strand
caaguacgagcuccucuuc

SEQ ID NO: 1457055 - RNA, 19 nt, Homo sapiens
  misc_RNA (1)...(19): siRNA sense strand
uacaagauccaguacaaug

SEQ ID NO: 1457056 - RNA, 19 nt, Homo sapiens
  misc_RNA (1)...(19): siRNA sense strand
ggaacucacagaugucaag

SEQ ID NO: 1457057 - RNA, 19 nt, Homo sapiens
  misc_RNA (1)...(19): siRNA sense strand
uacaacaugccucaguaua

SEQ ID NO: 1457058 - RNA, 19 nt, Homo sapiens
  misc_RNA (1)...(19): siRNA sense strand
ucaagaaccgccuggugaa

SEQ ID NO: 1457059 - RNA, 19 nt, Homo sapiens
  misc_RNA (1)...(19): siRNA sense strand
gcccacacgucacgcuuca

SEQ ID NO: 1457060 - RNA, 19 nt, Homo sapiens
  misc_RNA (1)...(19): siRNA sense strand
acaagaauggcuccaguga

SEQ ID NO: 1457061 - RNA, 19 nt, Homo sapiens
  misc_RNA (1)...(19): siRNA sense strand
ucacguugcuagauaccau

SEQ ID NO: 1457062 - RNA, 19 nt, Homo sapiens
  misc_RNA (1)...(19): siRNA sense strand
cagagaagacagucgaugu

SEQ ID NO: 1457063 - RNA, 19 nt, Homo sapiens
  misc_RNA (1)...(19): siRNA sense strand
gaccauggcgugcccgaau

SEQ ID NO: 1457064 - RNA, 19 nt, Homo sapiens
  misc_RNA (1)...(19): siRNA sense strand
ggacauucucucugcacaa

SEQ ID NO: 1457065 - RNA, 19 nt, Homo sapiens
  misc_RNA (1)...(19): siRNA sense strand
ucaccugguucaaggacuu

SEQ ID NO: 1457066 - RNA, 19 nt, Homo sapiens
  misc_RNA (1)...(19): siRNA sense strand
gaggaugaguaccaguucu

SEQ ID NO: 1457067 - RNA, 19 nt, Homo sapiens
  misc_RNA (1)...(19): siRNA sense strand
caagugugaucaguauugg

SEQ ID NO: 1457068 - RNA, 19 nt, Homo sapiens
  misc_RNA (1)...(19): siRNA sense strand
gaacgugcuggaacucaca

SEQ ID NO: 1457069 - RNA, 19 nt, Homo sapiens
  misc_RNA (1)...(19): siRNA sense strand
gauccuagugccagcaaug

SEQ ID NO: 1457070 - RNA, 19 nt, Homo sapiens
  misc_RNA (1)...(19): siRNA sense strand
gggcuucaucgacuucauu

SEQ ID NO: 1457071 - RNA, 19 nt, Homo sapiens
  misc_RNA (1)...(19): siRNA sense strand
gggagggcuucaucgacuu

SEQ ID NO: 1457072 - RNA, 19 nt, Homo sapiens
  misc_RNA (1)...(19): siRNA sense strand
gaagucacggaucaagugu

SEQ ID NO: 1457073 - RNA, 19 nt, Homo sapiens
  misc_RNA (1)...(19): siRNA sense strand
caugggcagugauuacauc

SEQ ID NO: 1457074 - RNA, 19 nt, Homo sapiens
  misc_RNA (1)...(19): siRNA sense strand
guaaacgcaaggacucaga

SEQ ID NO: 1457075 - RNA, 19 nt, Homo sapiens
  misc_RNA (1)...(19): siRNA sense strand
gcccuggcauggugucugu

SEQ ID NO: 1457076 - RNA, 19 nt, Homo sapiens
  misc_RNA (1)...(19): siRNA sense strand
acccugagaucaccugguu

SEQ ID NO: 1457077 - RNA, 19 nt, Homo sapiens
  misc_RNA (1)...(19): siRNA sense strand
ucauugcuauccugcucua

SEQ ID NO: 1457078 - RNA, 19 nt, Homo sapiens
  misc_RNA (1)...(19): siRNA sense strand
gacaucaccaccacacguu

SEQ ID NO: 1457079 - RNA, 19 nt, Homo sapiens
  misc_RNA (1)...(19): siRNA sense strand
gaccagggcaaauaugagu

SEQ ID NO: 1457080 - RNA, 19 nt, Homo sapiens
  misc_RNA (1)...(19): siRNA sense strand
gaacaaacccgacaguaaa

SEQ ID NO: 1457081 - RNA, 19 nt, Homo sapiens
  misc_RNA (1)...(19): siRNA sense strand
gcaagaaggucaacucuca

SEQ ID NO: 1457082 - RNA, 19 nt, Homo sapiens
  misc_RNA (1)...(19): siRNA sense strand
ccaaaugccuccugaacaa

SEQ ID NO: 1457083 - RNA, 19 nt, Homo sapiens
  misc_RNA (1)...(19): siRNA sense strand
guccagagcuauuucauug

SEQ ID NO: 1457084 - RNA, 19 nt, Homo sapiens
  misc_RNA (1)...(19): siRNA sense strand
cagauccuguguccuauua

SEQ ID NO: 1457085 - RNA, 19 nt, Homo sapiens
  misc_RNA (1)...(19): siRNA sense strand
cgagugaccuggaacaaga

SEQ ID NO: 1457086 - RNA, 19 nt, Homo sapiens
  misc_RNA (1)...(19): siRNA sense strand
gugccaaucugccuuguaa

SEQ ID NO: 1457087 - RNA, 19 nt, Homo sapiens
  misc_RNA (1)...(19): siRNA sense strand
gaggagaagucacggauca

SEQ ID NO: 1457088 - RNA, 19 nt, Homo sapiens
  misc_RNA (1)...(19): siRNA sense strand
gaagagcgagccuaccuuu

SEQ ID NO: 1457089 - RNA, 19 nt, Homo sapiens
  misc_RNA (1)...(19): siRNA sense strand
caacaugccucaguauauc

SEQ ID NO: 1457090 - RNA, 19 nt, Homo sapiens
  misc_RNA (1)...(19): siRNA sense strand
ggacucccauggugacuga

SEQ ID NO: 1457091 - RNA, 19 nt, Homo sapiens
  misc_RNA (1)...(19): siRNA sense strand
ggucaacucucagcgcuuu

SEQ ID NO: 1457092 - RNA, 19 nt, Homo sapiens
  misc_RNA (1)...(19): siRNA sense strand
aagaauggcuccagugaga

SEQ ID NO: 1457093 - RNA, 19 nt, Homo sapiens
  misc_RNA (1)...(19): siRNA sense strand
ggacauggaucuggaagag

SEQ ID NO: 1457094 - RNA, 19 nt, Homo sapiens
  misc_RNA (1)...(19): siRNA sense strand
ggagggcucugacuacauc

SEQ ID NO: 1457095 - RNA, 19 nt, Homo sapiens
  misc_RNA (1)...(19): siRNA sense strand
ccaucgagcuggccacauu

SEQ ID NO: 1457096 - RNA, 19 nt, Homo sapiens
  misc_RNA (1)...(19): siRNA sense strand
uagauccgauggcagaaua

SEQ ID NO: 1457097 - RNA, 19 nt, Homo sapiens
  misc_RNA (1)...(19): siRNA sense strand
ggagaagugucaccaguac

SEQ ID NO: 1457098 - RNA, 19 nt, Homo sapiens
  misc_RNA (1)...(19): siRNA sense strand
caaggacccuguggaaaug

SEQ ID NO: 1457099 - RNA, 19 nt, Homo sapiens
  misc_RNA (1)...(19): siRNA sense strand
gaagugaacaagccgaaga

SEQ ID NO: 1457100 - RNA, 19 nt, Homo sapiens
  misc_RNA (1)...(19): siRNA sense strand
caggucacguugcuagaua

SEQ ID NO: 1457101 - RNA, 19 nt, Homo sapiens
  misc_RNA (1)...(19): siRNA sense strand
gcaauggacgcaucaaaca

SEQ ID NO: 1457102 - RNA, 19 nt, Homo sapiens
  misc_RNA (1)...(19): siRNA sense strand
gaacagggugugccaaagu

SEQ ID NO: 1457103 - RNA, 19 nt, Homo sapiens
  misc_RNA (1)...(19): siRNA sense strand
cgacaugggcccacaguug

SEQ ID NO: 1457104 - RNA, 19 nt, Homo sapiens
  misc_RNA (1)...(19): siRNA sense strand
acacgucacuggcauggaa

SEQ ID NO: 1457105 - RNA, 19 nt, Homo sapiens
  misc_RNA (1)...(19): siRNA sense strand
agaacaaacccgacaguaa

SEQ ID NO: 1457106 - RNA, 19 nt, Homo sapiens
  misc_RNA (1)...(19): siRNA sense strand
ccagagcuauuucauugug

SEQ ID NO: 1457107 - RNA, 19 nt, Homo sapiens
  misc_RNA (1)...(19): siRNA sense strand
ccaaggacccuguggaaau

SEQ ID NO: 1457108 - RNA, 19 nt, Homo sapiens
  misc_RNA (1)...(19): siRNA sense strand
caucaacgccagcuucauu

SEQ ID NO: 1457109 - RNA, 19 nt, Homo sapiens
  misc_RNA (1)...(19): siRNA sense strand
ugacgcggcuggaggagaa

SEQ ID NO: 1457110 - RNA, 19 nt, Homo sapiens
  misc_RNA (1)...(19): siRNA sense strand
ccuacaagauccaguacaa

SEQ ID NO: 1457111 - RNA, 19 nt, Homo sapiens
  misc_RNA (1)...(19): siRNA sense strand
ugaccacuaugcaaccuaa

SEQ ID NO: 1457112 - RNA, 19 nt, Homo sapiens
  misc_RNA (1)...(19): siRNA sense strand
aauacaacaugccucagua

SEQ ID NO: 1457113 - RNA, 19 nt, Homo sapiens
  misc_RNA (1)...(19): siRNA sense strand
gaauggcuccagugagaaa

SEQ ID NO: 1457114 - RNA, 19 nt, Homo sapiens
  misc_RNA (1)...(19): siRNA sense strand
gaacaagaagggcaagaag

SEQ ID NO: 1457115 - RNA, 19 nt, Homo sapiens
  misc_RNA (1)...(19): siRNA sense strand
aggagaguaucaucaagua

SEQ ID NO: 1457116 - RNA, 19 nt, Homo sapiens
  misc_RNA (1)...(19): siRNA sense strand
gccaagugcauaagacuaa

SEQ ID NO: 1457117 - RNA, 19 nt, Homo sapiens
  misc_RNA (1)...(19): siRNA sense strand
gacaugggcccacaguuga

SEQ ID NO: 1457118 - RNA, 19 nt, Homo sapiens
  misc_RNA (1)...(19): siRNA sense strand
ggccguaucagauuaaaga

SEQ ID NO: 1457119 - RNA, 19 nt, Homo sapiens
  misc_RNA (1)...(19): siRNA sense strand
caacgcccuuccuggcuuu

SEQ ID NO: 1457120 - RNA, 19 nt, Homo sapiens
  misc_RNA (1)...(19): siRNA sense strand
ggugaaaucucuccccaaa

SEQ ID NO: 1457121 - RNA, 19 nt, Homo sapiens
  misc_RNA (1)...(19): siRNA sense strand
gaauacaacaugccucagu

SEQ ID NO: 1457122 - RNA, 19 nt, Homo sapiens
  misc_RNA (1)...(19): siRNA sense strand
ggaacaagaagggcaagaa

SEQ ID NO: 1457123 - RNA, 19 nt, Homo sapiens
  misc_RNA (1)...(19): siRNA sense strand
gcaacuggcagaagcacaa

SEQ ID NO: 1457124 - RNA, 19 nt, Homo sapiens
  misc_RNA (1)...(19): siRNA sense strand
gggagaagugucaccagua

SEQ ID NO: 1457125 - RNA, 19 nt, Homo sapiens
  misc_RNA (1)...(19): siRNA sense strand
cgucagaacgcguacauug

SEQ ID NO: 1457126 - RNA, 19 nt, Homo sapiens
  misc_RNA (1)...(19): siRNA sense strand
aaaccgaccagggcaaaua

SEQ ID NO: 1457127 - RNA, 19 nt, Homo sapiens
  misc_RNA (1)...(19): siRNA sense strand
gcaggagaguaucaucaag

SEQ ID NO: 1457128 - RNA, 19 nt, Homo sapiens
  misc_RNA (1)...(19): siRNA sense strand
uugagacgauugaguuuga

SEQ ID NO: 1457129 - RNA, 19 nt, Homo sapiens
  misc_RNA (1)...(19): siRNA sense strand
gagcgagccuaccuuugca

SEQ ID NO: 1457130 - RNA, 19 nt, Homo sapiens
  misc_RNA (1)...(19): siRNA sense strand
ggaaaccgaccagggcaaa

SEQ ID NO: 1457131 - RNA, 19 nt, Homo sapiens
  misc_RNA (1)...(19): siRNA sense strand
cggaagcuuugaccacuau

SEQ ID NO: 1457132 - RNA, 19 nt, Homo sapiens
  misc_RNA (1)...(19): siRNA sense strand
gcagacagaggaugaguac

SEQ ID NO: 1457133 - RNA, 19 nt, Homo sapiens
  misc_RNA (1)...(19): siRNA sense strand
ggaacagggugugccaaag

SEQ ID NO: 1457134 - RNA, 19 nt, Homo sapiens
  misc_RNA (1)...(19): siRNA sense strand
ucaagugugaucaguauug

SEQ ID NO: 1457135 - RNA, 19 nt, Homo sapiens
  misc_RNA (1)...(19): siRNA sense strand
cauaaucugcauugucauu

SEQ ID NO: 1457136 - RNA, 19 nt, Homo sapiens
  misc_RNA (1)...(19): siRNA sense strand
gccguggucuucauaaucu

SEQ ID NO: 1457137 - RNA, 19 nt, Homo sapiens
  misc_RNA (1)...(19): siRNA sense strand
ccaccgcuauguccucuuc

SEQ ID NO: 1457138 - RNA, 19 nt, Homo sapiens
  misc_RNA (1)...(19): siRNA sense strand
uucauaaucugcauuguca

SEQ ID NO: 1457139 - RNA, 19 nt, Homo sapiens
  misc_RNA (1)...(19): siRNA sense strand
ggaguaccucggaagcuuu

SEQ ID NO: 1457140 - RNA, 19 nt, Homo sapiens
  misc_RNA (1)...(19): siRNA sense strand
gcucugcccgcuaccagua

SEQ ID NO: 1457141 - RNA, 19 nt, Homo sapiens
  misc_RNA (1)...(19): siRNA sense strand
ugaccaagcugcgggagau

SEQ ID NO: 1457142 - RNA, 19 nt, Homo sapiens
  misc_RNA (1)...(19): siRNA sense strand
ucaagcggcuggcuaacuc

SEQ ID NO: 1457143 - RNA, 19 nt, Homo sapiens
  misc_RNA (1)...(19): siRNA sense strand
gagcggaucaagccagaga

SEQ ID NO: 1457144 - RNA, 19 nt, Homo sapiens
  misc_RNA (1)...(19): siRNA sense strand
ucaaggacucggccaacua

SEQ ID NO: 1457145 - RNA, 19 nt, Homo sapiens
  misc_RNA (1)...(19): siRNA sense strand
gcuuugagacgauugaguu

SEQ ID NO: 1457146 - RNA, 19 nt, Homo sapiens
  misc_RNA (1)...(19): siRNA sense strand
gacauucucucugcacaag

SEQ ID NO: 1457147 - RNA, 19 nt, Homo sapiens
  misc_RNA (1)...(19): siRNA sense strand
gaucaugaagacaucaguu

SEQ ID NO: 1457148 - RNA, 19 nt, Homo sapiens
  misc_RNA (1)...(19): siRNA sense strand
caguauggcggcuucgaua

SEQ ID NO: 1457149 - RNA, 19 nt, Homo sapiens
  misc_RNA (1)...(19): siRNA sense strand
augaguaccaguucuguua

SEQ ID NO: 1457150 - RNA, 19 nt, Homo sapiens
  misc_RNA (1)...(19): siRNA sense strand
acaacaugccucaguauau

SEQ ID NO: 1457151 - RNA, 19 nt, Homo sapiens
  misc_RNA (1)...(19): siRNA sense strand
gauggcagaauacaacaug

SEQ ID NO: 1457152 - RNA, 19 nt, Homo sapiens
  misc_RNA (1)...(19): siRNA sense strand
guccgccaguuccaguuua

SEQ ID NO: 1457153 - RNA, 19 nt, Homo sapiens
  misc_RNA (1)...(19): siRNA sense strand
gagcggaugcgguaugaag

SEQ ID NO: 1457154 - RNA, 19 nt, Homo sapiens
  misc_RNA (1)...(19): siRNA sense strand
caaguacgagcuccucuuc

SEQ ID NO: 1457155 - RNA, 19 nt, Homo sapiens
  misc_RNA (1)...(19): siRNA sense strand
uacaagauccaguacaaug

SEQ ID NO: 1457156 - RNA, 19 nt, Homo sapiens
  misc_RNA (1)...(19): siRNA sense strand
ggaacucacagaugucaag

SEQ ID NO: 1457157 - RNA, 19 nt, Homo sapiens
  misc_RNA (1)...(19): siRNA sense strand
uacaacaugccucaguaua

SEQ ID NO: 1457158 - RNA, 19 nt, Homo sapiens
  misc_RNA (1)...(19): siRNA sense strand
ucaagaaccgccuggugaa

SEQ ID NO: 1457159 - RNA, 19 nt, Homo sapiens
  misc_RNA (1)...(19): siRNA sense strand
gcccacacgucacgcuuca

SEQ ID NO: 1457160 - RNA, 19 nt, Homo sapiens
  misc_RNA (1)...(19): siRNA sense strand
acaagaauggcuccaguga

SEQ ID NO: 1457161 - RNA, 19 nt, Homo sapiens
  misc_RNA (1)...(19): siRNA sense strand
ucacguugcuagauaccau

SEQ ID NO: 1457162 - RNA, 19 nt, Homo sapiens
  misc_RNA (1)...(19): siRNA sense strand
cagagaagacagucgaugu

SEQ ID NO: 1457163 - RNA, 19 nt, Homo sapiens
  misc_RNA (1)...(19): siRNA sense strand
gaccauggcgugcccgaau

SEQ ID NO: 1457164 - RNA, 19 nt, Homo sapiens
  misc_RNA (1)...(19): siRNA sense strand
ggacauucucucugcacaa

SEQ ID NO: 1457165 - RNA, 19 nt, Homo sapiens
  misc_RNA (1)...(19): siRNA sense strand
ucaccugguucaaggacuu

SEQ ID NO: 1457166 - RNA, 19 nt, Homo sapiens
  misc_RNA (1)...(19): siRNA sense strand
gaggaugaguaccaguucu

SEQ ID NO: 1457167 - RNA, 19 nt, Homo sapiens
  misc_RNA (1)...(19): siRNA sense strand
caagugugaucaguauugg

SEQ ID NO: 1457168 - RNA, 19 nt, Homo sapiens
  misc_RNA (1)...(19): siRNA sense strand
gaacgugcuggaacucaca

SEQ ID NO: 1457169 - RNA, 19 nt, Homo sapiens
  misc_RNA (1)...(19): siRNA sense strand
gauccuagugccagcaaug

SEQ ID NO: 1457170 - RNA, 19 nt, Homo sapiens
  misc_RNA (1)...(19): siRNA sense strand
gggcuucaucgacuucauu

SEQ ID NO: 1457171 - RNA, 19 nt, Homo sapiens
  misc_RNA (1)...(19): siRNA sense strand
gggagggcuucaucgacuu

SEQ ID NO: 1457172 - RNA, 19 nt, Homo sapiens
  misc_RNA (1)...(19): siRNA sense strand
gaagucacggaucaagugu

SEQ ID NO: 1457173 - RNA, 19 nt, Homo sapiens
  misc_RNA (1)...(19): siRNA sense strand
caugggcagugauuacauc

SEQ ID NO: 1457174 - RNA, 19 nt, Homo sapiens
  misc_RNA (1)...(19): siRNA sense strand
guaaacgcaaggacucaga

SEQ ID NO: 1457175 - RNA, 19 nt, Homo sapiens
  misc_RNA (1)...(19): siRNA sense strand
gcccuggcauggugucugu

SEQ ID NO: 1457176 - RNA, 19 nt, Homo sapiens
  misc_RNA (1)...(19): siRNA sense strand
acccugagaucaccugguu

SEQ ID NO: 1457177 - RNA, 19 nt, Homo sapiens
  misc_RNA (1)...(19): siRNA sense strand
ucauugcuauccugcucua

SEQ ID NO: 1457178 - RNA, 19 nt, Homo sapiens
  misc_RNA (1)...(19): siRNA sense strand
gacaucaccaccacacguu

SEQ ID NO: 1457179 - RNA, 19 nt, Homo sapiens
  misc_RNA (1)...(19): siRNA sense strand
gaccagggcaaauaugagu

SEQ ID NO: 1457180 - RNA, 19 nt, Homo sapiens
  misc_RNA (1)...(19): siRNA sense strand
gaacaaacccgacaguaaa

SEQ ID NO: 1457181 - RNA, 19 nt, Homo sapiens
  misc_RNA (1)...(19): siRNA sense strand
gcaagaaggucaacucuca

SEQ ID NO: 1457182 - RNA, 19 nt, Homo sapiens
  misc_RNA (1)...(19): siRNA sense strand
ccaaaugccuccugaacaa

SEQ ID NO: 1457183 - RNA, 19 nt, Homo sapiens
  misc_RNA (1)...(19): siRNA sense strand
guccagagcuauuucauug

SEQ ID NO: 1457184 - RNA, 19 nt, Homo sapiens
  misc_RNA (1)...(19): siRNA sense strand
cagauccuguguccuauua

SEQ ID NO: 1457185 - RNA, 19 nt, Homo sapiens
  misc_RNA (1)...(19): siRNA sense strand
cgagugaccuggaacaaga

SEQ ID NO: 1457186 - RNA, 19 nt, Homo sapiens
  misc_RNA (1)...(19): siRNA sense strand
gugccaaucugccuuguaa

SEQ ID NO: 1457187 - RNA, 19 nt, Homo sapiens
  misc_RNA (1)...(19): siRNA sense strand
gaggagaagucacggauca

SEQ ID NO: 1457188 - RNA, 19 nt, Homo sapiens
  misc_RNA (1)...(19): siRNA sense strand
gaagagcgagccuaccuuu

SEQ ID NO: 1457189 - RNA, 19 nt, Homo sapiens
  misc_RNA (1)...(19): siRNA sense strand
caacaugccucaguauauc

SEQ ID NO: 1457190 - RNA, 19 nt, Homo sapiens
  misc_RNA (1)...(19): siRNA sense strand
ggacucccauggugacuga

SEQ ID NO: 1457191 - RNA, 19 nt, Homo sapiens
  misc_RNA (1)...(19): siRNA sense strand
ggucaacucucagcgcuuu

SEQ ID NO: 1457192 - RNA, 19 nt, Homo sapiens
  misc_RNA (1)...(19): siRNA sense strand
aagaauggcuccagugaga

SEQ ID NO: 1457193 - RNA, 19 nt, Homo sapiens
  misc_RNA (1)...(19): siRNA sense strand
ggacauggaucuggaagag

SEQ ID NO: 1457194 - RNA, 19 nt, Homo sapiens
  misc_RNA (1)...(19): siRNA sense strand
ggagggcucugacuacauc

SEQ ID NO: 1457195 - RNA, 19 nt, Homo sapiens
  misc_RNA (1)...(19): siRNA sense strand
ccaucgagcuggccacauu

SEQ ID NO: 1457196 - RNA, 19 nt, Homo sapiens
  misc_RNA (1)...(19): siRNA sense strand
uagauccgauggcagaaua

SEQ ID NO: 1457197 - RNA, 19 nt, Homo sapiens
  misc_RNA (1)...(19): siRNA sense strand
ggagaagugucaccaguac

SEQ ID NO: 1457198 - RNA, 19 nt, Homo sapiens
  misc_RNA (1)...(19): siRNA sense strand
caaggacccuguggaaaug

SEQ ID NO: 1457199 - RNA, 19 nt, Homo sapiens
  misc_RNA (1)...(19): siRNA sense strand
gaagugaacaagccgaaga

SEQ ID NO: 1457200 - RNA, 19 nt, Homo sapiens
  misc_RNA (1)...(19): siRNA sense strand
caggucacguugcuagaua

SEQ ID NO: 1457201 - RNA, 19 nt, Homo sapiens
  misc_RNA (1)...(19): siRNA sense strand
gcaauggacgcaucaaaca

SEQ ID NO: 1457202 - RNA, 19 nt, Homo sapiens
  misc_RNA (1)...(19): siRNA sense strand
gaacagggugugccaaagu

SEQ ID NO: 1457203 - RNA, 19 nt, Homo sapiens
  misc_RNA (1)...(19): siRNA sense strand
cgacaugggcccacaguug

SEQ ID NO: 1457204 - RNA, 19 nt, Homo sapiens
  misc_RNA (1)...(19): siRNA sense strand
acacgucacuggcauggaa

SEQ ID NO: 1457205 - RNA, 19 nt, Homo sapiens
  misc_RNA (1)...(19): siRNA sense strand
agaacaaacccgacaguaa

SEQ ID NO: 1457206 - RNA, 19 nt, Homo sapiens
  misc_RNA (1)...(19): siRNA sense strand
ccagagcuauuucauugug

SEQ ID NO: 1457207 - RNA, 19 nt, Homo sapiens
  misc_RNA (1)...(19): siRNA sense strand
ccaaggacccuguggaaau

SEQ ID NO: 1457208 - RNA, 19 nt, Homo sapiens
  misc_RNA (1)...(19): siRNA sense strand
caucaacgccagcuucauu

SEQ ID NO: 1457209 - RNA, 19 nt, Homo sapiens
  misc_RNA (1)...(19): siRNA sense strand
ugacgcggcuggaggagaa

SEQ ID NO: 1457210 - RNA, 19 nt, Homo sapiens
  misc_RNA (1)...(19): siRNA sense strand
ccuacaagauccaguacaa

SEQ ID NO: 1457211 - RNA, 19 nt, Homo sapiens
  misc_RNA (1)...(19): siRNA sense strand
ugaccacuaugcaaccuaa

SEQ ID NO: 1457212 - RNA, 19 nt, Homo sapiens
  misc_RNA (1)...(19): siRNA sense strand
aauacaacaugccucagua

SEQ ID NO: 1457213 - RNA, 19 nt, Homo sapiens
  misc_RNA (1)...(19): siRNA sense strand
gaauggcuccagugagaaa

SEQ ID NO: 1457214 - RNA, 19 nt, Homo sapiens
  misc_RNA (1)...(19): siRNA sense strand
gaacaagaagggcaagaag

SEQ ID NO: 1457215 - RNA, 19 nt, Homo sapiens
  misc_RNA (1)...(19): siRNA sense strand
aggagaguaucaucaagua

SEQ ID NO: 1457216 - RNA, 19 nt, Homo sapiens
  misc_RNA (1)...(19): siRNA sense strand
gccaagugcauaagacuaa

SEQ ID NO: 1457217 - RNA, 19 nt, Homo sapiens
  misc_RNA (1)...(19): siRNA sense strand
gacaugggcccacaguuga

SEQ ID NO: 1457218 - RNA, 19 nt, Homo sapiens
  misc_RNA (1)...(19): siRNA sense strand
ggccguaucagauuaaaga

SEQ ID NO: 1457219 - RNA, 19 nt, Homo sapiens
  misc_RNA (1)...(19): siRNA sense strand
caacgcccuuccuggcuuu

SEQ ID NO: 1457220 - RNA, 19 nt, Homo sapiens
  misc_RNA (1)...(19): siRNA sense strand
ggugaaaucucuccccaaa

SEQ ID NO: 1457221 - RNA, 19 nt, Homo sapiens
  misc_RNA (1)...(19): siRNA sense strand
gaauacaacaugccucagu

SEQ ID NO: 1457222 - RNA, 19 nt, Homo sapiens
  misc_RNA (1)...(19): siRNA sense strand
ggaacaagaagggcaagaa

SEQ ID NO: 1457223 - RNA, 19 nt, Homo sapiens
  misc_RNA (1)...(19): siRNA sense strand
gcaacuggcagaagcacaa

SEQ ID NO: 1457224 - RNA, 19 nt, Homo sapiens
  misc_RNA (1)...(19): siRNA sense strand
gggagaagugucaccagua

SEQ ID NO: 1457225 - RNA, 19 nt, Homo sapiens
  misc_RNA (1)...(19): siRNA sense strand
cgucagaacgcguacauug

SEQ ID NO: 1457226 - RNA, 19 nt, Homo sapiens
  misc_RNA (1)...(19): siRNA sense strand
aaaccgaccagggcaaaua

SEQ ID NO: 1457227 - RNA, 19 nt, Homo sapiens
  misc_RNA (1)...(19): siRNA sense strand
gcaggagaguaucaucaag

SEQ ID NO: 1457228 - RNA, 19 nt, Homo sapiens
  misc_RNA (1)...(19): siRNA sense strand
uugagacgauugaguuuga

SEQ ID NO: 1457229 - RNA, 19 nt, Homo sapiens
  misc_RNA (1)...(19): siRNA sense strand
gagcgagccuaccuuugca

SEQ ID NO: 1457230 - RNA, 19 nt, Homo sapiens
  misc_RNA (1)...(19): siRNA sense strand
ggaaaccgaccagggcaaa

SEQ ID NO: 1457231 - RNA, 19 nt, Homo sapiens
  misc_RNA (1)...(19): siRNA sense strand
cggaagcuuugaccacuau

SEQ ID NO: 1457232 - RNA, 19 nt, Homo sapiens
  misc_RNA (1)...(19): siRNA sense strand
gcagacagaggaugaguac

SEQ ID NO: 1457233 - RNA, 19 nt, Homo sapiens
  misc_RNA (1)...(19): siRNA sense strand
ggaacagggugugccaaag

SEQ ID NO: 1457234 - RNA, 19 nt, Homo sapiens
  misc_RNA (1)...(19): siRNA sense strand
ucaagugugaucaguauug

SEQ ID NO: 1457235 - RNA, 19 nt, Homo sapiens
  misc_RNA (1)...(19): siRNA sense strand
cauaaucugcauugucauu

SEQ ID NO: 1457236 - RNA, 19 nt, Homo sapiens
  misc_RNA (1)...(19): siRNA sense strand
gccguggucuucauaaucu

SEQ ID NO: 1457237 - RNA, 19 nt, Homo sapiens
  misc_RNA (1)...(19): siRNA sense strand
ccaccgcuauguccucuuc

SEQ ID NO: 1457238 - RNA, 19 nt, Homo sapiens
  misc_RNA (1)...(19): siRNA sense strand
uucauaaucugcauuguca

SEQ ID NO: 1457239 - RNA, 19 nt, Homo sapiens
  misc_RNA (1)...(19): siRNA sense strand
ggaguaccucggaagcuuu

SEQ ID NO: 1457240 - RNA, 19 nt, Homo sapiens
  misc_RNA (1)...(19): siRNA sense strand
gcucugcccgcuaccagua

SEQ ID NO: 1457241 - RNA, 19 nt, Homo sapiens
  misc_RNA (1)...(19): siRNA sense strand
ugaccaagcugcgggagau

SEQ ID NO: 1457242 - RNA, 19 nt, Homo sapiens
  misc_RNA (1)...(19): siRNA sense strand
ucaagcggcuggcuaacuc

SEQ ID NO: 1457243 - RNA, 19 nt, Homo sapiens
  misc_RNA (1)...(19): siRNA sense strand
gagcggaucaagccagaga

SEQ ID NO: 1457244 - RNA, 19 nt, Homo sapiens
  misc_RNA (1)...(19): siRNA sense strand
ucaaggacucggccaacua

SEQ ID NO: 1457245 - RNA, 19 nt, Homo sapiens
  misc_RNA (1)...(19): siRNA sense strand
gcuuugagacgauugaguu

SEQ ID NO: 1457246 - RNA, 19 nt, Homo sapiens
  misc_RNA (1)...(19): siRNA sense strand
gacauucucucugcacaag

SEQ ID NO: 1457247 - RNA, 19 nt, Homo sapiens
  misc_RNA (1)...(19): siRNA sense strand
gaucaugaagacaucaguu

SEQ ID NO: 1457248 - RNA, 19 nt, Homo sapiens
  misc_RNA (1)...(19): siRNA sense strand
caguauggcggcuucgaua

SEQ ID NO: 1457249 - RNA, 19 nt, Homo sapiens
  misc_RNA (1)...(19): siRNA sense strand
augaguaccaguucuguua

SEQ ID NO: 1457250 - RNA, 19 nt, Homo sapiens
  misc_RNA (1)...(19): siRNA sense strand
acaacaugccucaguauau

SEQ ID NO: 1457251 - RNA, 19 nt, Homo sapiens
  misc_RNA (1)...(19): siRNA sense strand
gauggcagaauacaacaug

SEQ ID NO: 1457252 - RNA, 19 nt, Homo sapiens
  misc_RNA (1)...(19): siRNA sense strand
guccgccaguuccaguuua

SEQ ID NO: 1457253 - RNA, 19 nt, Homo sapiens
  misc_RNA (1)...(19): siRNA sense strand
gagcggaugcgguaugaag

SEQ ID NO: 1457254 - RNA, 19 nt, Homo sapiens
  misc_RNA (1)...(19): siRNA sense strand
caaguacgagcuccucuuc

SEQ ID NO: 1457255 - RNA, 19 nt, Homo sapiens
  misc_RNA (1)...(19): siRNA sense strand
uacaagauccaguacaaug

SEQ ID NO: 1457256 - RNA, 19 nt, Homo sapiens
  misc_RNA (1)...(19): siRNA sense strand
ggaacucacagaugucaag

SEQ ID NO: 1457257 - RNA, 19 nt, Homo sapiens
  misc_RNA (1)...(19): siRNA sense strand
uacaacaugccucaguaua

SEQ ID NO: 1457258 - RNA, 19 nt, Homo sapiens
  misc_RNA (1)...(19): siRNA sense strand
ucaagaaccgccuggugaa

SEQ ID NO: 1457259 - RNA, 19 nt, Homo sapiens
  misc_RNA (1)...(19): siRNA sense strand
gcccacacgucacgcuuca

SEQ ID NO: 1457260 - RNA, 19 nt, Homo sapiens
  misc_RNA (1)...(19): siRNA sense strand
acaagaauggcuccaguga

SEQ ID NO: 1457261 - RNA, 19 nt, Homo sapiens
  misc_RNA (1)...(19): siRNA sense strand
ucacguugcuagauaccau

SEQ ID NO: 1457262 - RNA, 19 nt, Homo sapiens
  misc_RNA (1)...(19): siRNA sense strand
cagagaagacagucgaugu

SEQ ID NO: 1457263 - RNA, 19 nt, Homo sapiens
  misc_RNA (1)...(19): siRNA sense strand
gaccauggcgugcccgaau

SEQ ID NO: 1457264 - RNA, 19 nt, Homo sapiens
  misc_RNA (1)...(19): siRNA sense strand
ggacauucucucugcacaa

SEQ ID NO: 1457265 - RNA, 19 nt, Homo sapiens
  misc_RNA (1)...(19): siRNA sense strand
ucaccugguucaaggacuu

SEQ ID NO: 1457266 - RNA, 19 nt, Homo sapiens
  misc_RNA (1)...(19): siRNA sense strand
gaggaugaguaccaguucu

SEQ ID NO: 1457267 - RNA, 19 nt, Homo sapiens
  misc_RNA (1)...(19): siRNA sense strand
caagugugaucaguauugg

SEQ ID NO: 1457268 - RNA, 19 nt, Homo sapiens
  misc_RNA (1)...(19): siRNA sense strand
gaacgugcuggaacucaca

SEQ ID NO: 1457269 - RNA, 19 nt, Homo sapiens
  misc_RNA (1)...(19): siRNA sense strand
gauccuagugccagcaaug

SEQ ID NO: 1457270 - RNA, 19 nt, Homo sapiens
  misc_RNA (1)...(19): siRNA sense strand
gggcuucaucgacuucauu

SEQ ID NO: 1457271 - RNA, 19 nt, Homo sapiens
  misc_RNA (1)...(19): siRNA sense strand
gggagggcuucaucgacuu

SEQ ID NO: 1457272 - RNA, 19 nt, Homo sapiens
  misc_RNA (1)...(19): siRNA sense strand
gaagucacggaucaagugu

SEQ ID NO: 1457273 - RNA, 19 nt, Homo sapiens
  misc_RNA (1)...(19): siRNA sense strand
caugggcagugauuacauc

SEQ ID NO: 1457274 - RNA, 19 nt, Homo sapiens
  misc_RNA (1)...(19): siRNA sense strand
guaaacgcaaggacucaga

SEQ ID NO: 1457275 - RNA, 19 nt, Homo sapiens
  misc_RNA (1)...(19): siRNA sense strand
gcccuggcauggugucugu

SEQ ID NO: 1457276 - RNA, 19 nt, Homo sapiens
  misc_RNA (1)...(19): siRNA sense strand
acccugagaucaccugguu

SEQ ID NO: 1457277 - RNA, 19 nt, Homo sapiens
  misc_RNA (1)...(19): siRNA sense strand
ucauugcuauccugcucua

SEQ ID NO: 1457278 - RNA, 19 nt, Homo sapiens
  misc_RNA (1)...(19): siRNA sense strand
gacaucaccaccacacguu

SEQ ID NO: 1457279 - RNA, 19 nt, Homo sapiens
  misc_RNA (1)...(19): siRNA sense strand
gaccagggcaaauaugagu

SEQ ID NO: 1457280 - RNA, 19 nt, Homo sapiens
  misc_RNA (1)...(19): siRNA sense strand
aggaggagcuggacucuua

SEQ ID NO: 1457281 - RNA, 19 nt, Homo sapiens
  misc_RNA (1)...(19): siRNA sense strand
gcaaagaccagcaggaaga

SEQ ID NO: 1457282 - RNA, 19 nt, Homo sapiens
  misc_RNA (1)...(19): siRNA sense strand
ggugguggcuggugaagaa

SEQ ID NO: 1457283 - RNA, 19 nt, Homo sapiens
  misc_RNA (1)...(19): siRNA sense strand
ggacggagcggcuacauuc

SEQ ID NO: 1457284 - RNA, 19 nt, Homo sapiens
  misc_RNA (1)...(19): siRNA sense strand
cagcagagccauuuacuug

SEQ ID NO: 1457285 - RNA, 19 nt, Homo sapiens
  misc_RNA (1)...(19): siRNA sense strand
gaagaagaaauuugggaaa

SEQ ID NO: 1457286 - RNA, 19 nt, Homo sapiens
  misc_RNA (1)...(19): siRNA sense strand
ucagaugacuggcaacuuc

SEQ ID NO: 1457287 - RNA, 19 nt, Homo sapiens
  misc_RNA (1)...(19): siRNA sense strand
gcagagccauuuacuugca

SEQ ID NO: 1457288 - RNA, 19 nt, Homo sapiens
  misc_RNA (1)...(19): siRNA sense strand
uaagggacauugagcuguu

SEQ ID NO: 1457289 - RNA, 19 nt, Homo sapiens
  misc_RNA (1)...(19): siRNA sense strand
caacccacauucucagaug

SEQ ID NO: 1457290 - RNA, 19 nt, Homo sapiens
  misc_RNA (1)...(19): siRNA sense strand
guacacauccucuucaagu

SEQ ID NO: 1457291 - RNA, 19 nt, Homo sapiens
  misc_RNA (1)...(19): siRNA sense strand
agaaggcucuggaggaaga

SEQ ID NO: 1457292 - RNA, 19 nt, Homo sapiens
  misc_RNA (1)...(19): siRNA sense strand
gccaagcacccuuaggaua

SEQ ID NO: 1457293 - RNA, 19 nt, Homo sapiens
  misc_RNA (1)...(19): siRNA sense strand
aggaagagcuggagcaaag

SEQ ID NO: 1457294 - RNA, 19 nt, Homo sapiens
  misc_RNA (1)...(19): siRNA sense strand
guuccaaugcuucgacuua

SEQ ID NO: 1457295 - RNA, 19 nt, Homo sapiens
  misc_RNA (1)...(19): siRNA sense strand
gaaaggccgcucccuaugg

SEQ ID NO: 1457296 - RNA, 19 nt, Homo sapiens
  misc_RNA (1)...(19): siRNA sense strand
ggaaaggccgcucccuaug

SEQ ID NO: 1457297 - RNA, 19 nt, Homo sapiens
  misc_RNA (1)...(19): siRNA sense strand
gcaggaagaagaaauuugg

SEQ ID NO: 1457298 - RNA, 19 nt, Homo sapiens
  misc_RNA (1)...(19): siRNA sense strand
ccacaccagugcccgagaa

SEQ ID NO: 1457299 - RNA, 19 nt, Homo sapiens
  misc_RNA (1)...(19): siRNA sense strand
ccagcuacuucgcauaaga

SEQ ID NO: 1457300 - RNA, 19 nt, Homo sapiens
  misc_RNA (1)...(19): siRNA sense strand
gagcacagccucccaccau

SEQ ID NO: 1457301 - RNA, 19 nt, Homo sapiens
  misc_RNA (1)...(19): siRNA sense strand
cccagaaccucaccucaga

SEQ ID NO: 1457302 - RNA, 19 nt, Homo sapiens
  misc_RNA (1)...(19): siRNA sense strand
gguggcuggugaagaauga

SEQ ID NO: 1457303 - RNA, 19 nt, Homo sapiens
  misc_RNA (1)...(19): siRNA sense strand
ugcagaagcuguucgagau

SEQ ID NO: 1457304 - RNA, 19 nt, Homo sapiens
  misc_RNA (1)...(19): siRNA sense strand
aaaggccgcucccuaugga

SEQ ID NO: 1457305 - RNA, 19 nt, Homo sapiens
  misc_RNA (1)...(19): siRNA sense strand
gcugaaccauguccuaagg

SEQ ID NO: 1457306 - RNA, 19 nt, Homo sapiens
  misc_RNA (1)...(19): siRNA sense strand
ugucuaagcccaccugaga

SEQ ID NO: 1457307 - RNA, 19 nt, Homo sapiens
  misc_RNA (1)...(19): siRNA sense strand
ggagaaggcccaggcaaag

SEQ ID NO: 1457308 - RNA, 19 nt, Homo sapiens
  misc_RNA (1)...(19): siRNA sense strand
gaaccaagugccuuuacuc

SEQ ID NO: 1457309 - RNA, 19 nt, Homo sapiens
  misc_RNA (1)...(19): siRNA sense strand
gagaaggcccaggcaaaga

SEQ ID NO: 1457310 - RNA, 19 nt, Homo sapiens
  misc_RNA (1)...(19): siRNA sense strand
aggaagugcugaaccaugu

SEQ ID NO: 1457311 - RNA, 19 nt, Homo sapiens
  misc_RNA (1)...(19): siRNA sense strand
gcacaggguggagcacuug

SEQ ID NO: 1457312 - RNA, 19 nt, Homo sapiens
  misc_RNA (1)...(19): siRNA sense strand
gcggcuacauuccaagcaa

SEQ ID NO: 1457313 - RNA, 19 nt, Homo sapiens
  misc_RNA (1)...(19): siRNA sense strand
guggagcacuugaugacau

SEQ ID NO: 1457314 - RNA, 19 nt, Homo sapiens
  misc_RNA (1)...(19): siRNA sense strand
ggacauugagcuguucaug

SEQ ID NO: 1457315 - RNA, 19 nt, Homo sapiens
  misc_RNA (1)...(19): siRNA sense strand
ccaagcacccuuaggauac

SEQ ID NO: 1457316 - RNA, 19 nt, Homo sapiens
  misc_RNA (1)...(19): siRNA sense strand
uaagcccaccugagaguaa

SEQ ID NO: 1457317 - RNA, 19 nt, Homo sapiens
  misc_RNA (1)...(19): siRNA sense strand
gcuaucaaccugcuacagu

SEQ ID NO: 1457318 - RNA, 19 nt, Homo sapiens
  misc_RNA (1)...(19): siRNA sense strand
ccagcaggaagaagaaauu

SEQ ID NO: 1457319 - RNA, 19 nt, Homo sapiens
  misc_RNA (1)...(19): siRNA sense strand
gcauccaggccaugaaugu

SEQ ID NO: 1457320 - RNA, 19 nt, Homo sapiens
  misc_RNA (1)...(19): siRNA sense strand
cagccaagcacccuuagga

SEQ ID NO: 1457321 - RNA, 19 nt, Homo sapiens
  misc_RNA (1)...(19): siRNA sense strand
gcagcagagccauuuacuu

SEQ ID NO: 1457322 - RNA, 19 nt, Homo sapiens
  misc_RNA (1)...(19): siRNA sense strand
ccaugaauguggcgcucaa

SEQ ID NO: 1457323 - RNA, 19 nt, Homo sapiens
  misc_RNA (1)...(19): siRNA sense strand
cauaagaccuggggagcua

SEQ ID NO: 1457324 - RNA, 19 nt, Homo sapiens
  misc_RNA (1)...(19): siRNA sense strand
gcagaagcuguucgagaug

SEQ ID NO: 1457325 - RNA, 19 nt, Homo sapiens
  misc_RNA (1)...(19): siRNA sense strand
uggaaaggccgcucccuau

SEQ ID NO: 1457326 - RNA, 19 nt, Homo sapiens
  misc_RNA (1)...(19): siRNA sense strand
gcucguacacauccucuuc

SEQ ID NO: 1457327 - RNA, 19 nt, Homo sapiens
  misc_RNA (1)...(19): siRNA sense strand
cgagaaccaagugccuuua

SEQ ID NO: 1457328 - RNA, 19 nt, Homo sapiens
  misc_RNA (1)...(19): siRNA sense strand
caaagaccagcaggaagaa

SEQ ID NO: 1457329 - RNA, 19 nt, Homo sapiens
  misc_RNA (1)...(19): siRNA sense strand
ggaggaagagcuggagcaa

SEQ ID NO: 1457330 - RNA, 19 nt, Homo sapiens
  misc_RNA (1)...(19): siRNA sense strand
gggcagagcgacugaagac

SEQ ID NO: 1457331 - RNA, 19 nt, Homo sapiens
  misc_RNA (1)...(19): siRNA sense strand
caccugagaguaaccuuug

SEQ ID NO: 1457332 - RNA, 19 nt, Homo sapiens
  misc_RNA (1)...(19): siRNA sense strand
cagcaggaagaagaaauuu

SEQ ID NO: 1457333 - RNA, 19 nt, Homo sapiens
  misc_RNA (1)...(19): siRNA sense strand
gugcugaaccauguccuaa

SEQ ID NO: 1457334 - RNA, 19 nt, Homo sapiens
  misc_RNA (1)...(19): siRNA sense strand
gaggaagagcuggagcaaa

SEQ ID NO: 1457335 - RNA, 19 nt, Homo sapiens
  misc_RNA (1)...(19): siRNA sense strand
cggagcggcuacauuccaa

SEQ ID NO: 1457336 - RNA, 19 nt, Homo sapiens
  misc_RNA (1)...(19): siRNA sense strand
cuaccaacccacauucuca

SEQ ID NO: 1457337 - RNA, 19 nt, Homo sapiens
  misc_RNA (1)...(19): siRNA sense strand
ccuagcagcccaagugauc

SEQ ID NO: 1457338 - RNA, 19 nt, Homo sapiens
  misc_RNA (1)...(19): siRNA sense strand
uggagaaggcccaggcaaa

SEQ ID NO: 1457339 - RNA, 19 nt, Homo sapiens
  misc_RNA (1)...(19): siRNA sense strand
ccgagaaccaagugccuuu

SEQ ID NO: 1457340 - RNA, 19 nt, Homo sapiens
  misc_RNA (1)...(19): siRNA sense strand
ccaccugagaguaaccuuu

SEQ ID NO: 1457341 - RNA, 19 nt, Homo sapiens
  misc_RNA (1)...(19): siRNA sense strand
ccgaggaugccuugcagaa

SEQ ID NO: 1457342 - RNA, 19 nt, Homo sapiens
  misc_RNA (1)...(19): siRNA sense strand
uggagcacuugaugacaug

SEQ ID NO: 1457343 - RNA, 19 nt, Homo sapiens
  misc_RNA (1)...(19): siRNA sense strand
gagccagcuacuucgcaua

SEQ ID NO: 1457344 - RNA, 19 nt, Homo sapiens
  misc_RNA (1)...(19): siRNA sense strand
ggagcaggcacgcuaucug

SEQ ID NO: 1457345 - RNA, 19 nt, Homo sapiens
  misc_RNA (1)...(19): siRNA sense strand
gagaaccaagugccuuuac

SEQ ID NO: 1457346 - RNA, 19 nt, Homo sapiens
  misc_RNA (1)...(19): siRNA sense strand
gaaggaugcuggggauaag

SEQ ID NO: 1457347 - RNA, 19 nt, Homo sapiens
  misc_RNA (1)...(19): siRNA sense strand
gggacggagcggcuacauu

SEQ ID NO: 1457348 - RNA, 19 nt, Homo sapiens
  misc_RNA (1)...(19): siRNA sense strand
ccagcagcagagccauuua

SEQ ID NO: 1457349 - RNA, 19 nt, Homo sapiens
  misc_RNA (1)...(19): siRNA sense strand
gacagcauccaggccauga

SEQ ID NO: 1457350 - RNA, 19 nt, Homo sapiens
  misc_RNA (1)...(19): siRNA sense strand
ugaagaccagccugcagaa

SEQ ID NO: 1457351 - RNA, 19 nt, Homo sapiens
  misc_RNA (1)...(19): siRNA sense strand
ggccugaagaggucacaga

SEQ ID NO: 1457352 - RNA, 19 nt, Homo sapiens
  misc_RNA (1)...(19): siRNA sense strand
cagcauccaggccaugaau

SEQ ID NO: 1457353 - RNA, 19 nt, Homo sapiens
  misc_RNA (1)...(19): siRNA sense strand
gaagaccagccugcagaag

SEQ ID NO: 1457354 - RNA, 19 nt, Homo sapiens
  misc_RNA (1)...(19): siRNA sense strand
aggaggagcuggacucuua

SEQ ID NO: 1457355 - RNA, 19 nt, Homo sapiens
  misc_RNA (1)...(19): siRNA sense strand
gcaaagaccagcaggaaga

SEQ ID NO: 1457356 - RNA, 19 nt, Homo sapiens
  misc_RNA (1)...(19): siRNA sense strand
ggugguggcuggugaagaa

SEQ ID NO: 1457357 - RNA, 19 nt, Homo sapiens
  misc_RNA (1)...(19): siRNA sense strand
ggacggagcggcuacauuc

SEQ ID NO: 1457358 - RNA, 19 nt, Homo sapiens
  misc_RNA (1)...(19): siRNA sense strand
cagcagagccauuuacuug

SEQ ID NO: 1457359 - RNA, 19 nt, Homo sapiens
  misc_RNA (1)...(19): siRNA sense strand
gaagaagaaauuugggaaa

SEQ ID NO: 1457360 - RNA, 19 nt, Homo sapiens
  misc_RNA (1)...(19): siRNA sense strand
ucagaugacuggcaacuuc

SEQ ID NO: 1457361 - RNA, 19 nt, Homo sapiens
  misc_RNA (1)...(19): siRNA sense strand
gcagagccauuuacuugca

SEQ ID NO: 1457362 - RNA, 19 nt, Homo sapiens
  misc_RNA (1)...(19): siRNA sense strand
uaagggacauugagcuguu

SEQ ID NO: 1457363 - RNA, 19 nt, Homo sapiens
  misc_RNA (1)...(19): siRNA sense strand
caacccacauucucagaug

SEQ ID NO: 1457364 - RNA, 19 nt, Homo sapiens
  misc_RNA (1)...(19): siRNA sense strand
guacacauccucuucaagu

SEQ ID NO: 1457365 - RNA, 19 nt, Homo sapiens
  misc_RNA (1)...(19): siRNA sense strand
agaaggcucuggaggaaga

SEQ ID NO: 1457366 - RNA, 19 nt, Homo sapiens
  misc_RNA (1)...(19): siRNA sense strand
gccaagcacccuuaggaua

SEQ ID NO: 1457367 - RNA, 19 nt, Homo sapiens
  misc_RNA (1)...(19): siRNA sense strand
aggaagagcuggagcaaag

SEQ ID NO: 1457368 - RNA, 19 nt, Homo sapiens
  misc_RNA (1)...(19): siRNA sense strand
guuccaaugcuucgacuua

SEQ ID NO: 1457369 - RNA, 19 nt, Homo sapiens
  misc_RNA (1)...(19): siRNA sense strand
gaaaggccgcucccuaugg

SEQ ID NO: 1457370 - RNA, 19 nt, Homo sapiens
  misc_RNA (1)...(19): siRNA sense strand
ggaaaggccgcucccuaug

SEQ ID NO: 1457371 - RNA, 19 nt, Homo sapiens
  misc_RNA (1)...(19): siRNA sense strand
gcaggaagaagaaauuugg

SEQ ID NO: 1457372 - RNA, 19 nt, Homo sapiens
  misc_RNA (1)...(19): siRNA sense strand
ccacaccagugcccgagaa

SEQ ID NO: 1457373 - RNA, 19 nt, Homo sapiens
  misc_RNA (1)...(19): siRNA sense strand
ccagcuacuucgcauaaga

SEQ ID NO: 1457374 - RNA, 19 nt, Homo sapiens
  misc_RNA (1)...(19): siRNA sense strand
gagcacagccucccaccau

SEQ ID NO: 1457375 - RNA, 19 nt, Homo sapiens
  misc_RNA (1)...(19): siRNA sense strand
cccagaaccucaccucaga

SEQ ID NO: 1457376 - RNA, 19 nt, Homo sapiens
  misc_RNA (1)...(19): siRNA sense strand
gguggcuggugaagaauga

SEQ ID NO: 1457377 - RNA, 19 nt, Homo sapiens
  misc_RNA (1)...(19): siRNA sense strand
ugcagaagcuguucgagau

SEQ ID NO: 1457378 - RNA, 19 nt, Homo sapiens
  misc_RNA (1)...(19): siRNA sense strand
aaaggccgcucccuaugga

SEQ ID NO: 1457379 - RNA, 19 nt, Homo sapiens
  misc_RNA (1)...(19): siRNA sense strand
gcugaaccauguccuaagg

SEQ ID NO: 1457380 - RNA, 19 nt, Homo sapiens
  misc_RNA (1)...(19): siRNA sense strand
ugucuaagcccaccugaga

SEQ ID NO: 1457381 - RNA, 19 nt, Homo sapiens
  misc_RNA (1)...(19): siRNA sense strand
ggagaaggcccaggcaaag

SEQ ID NO: 1457382 - RNA, 19 nt, Homo sapiens
  misc_RNA (1)...(19): siRNA sense strand
gaaccaagugccuuuacuc

SEQ ID NO: 1457383 - RNA, 19 nt, Homo sapiens
  misc_RNA (1)...(19): siRNA sense strand
gagaaggcccaggcaaaga

SEQ ID NO: 1457384 - RNA, 19 nt, Homo sapiens
  misc_RNA (1)...(19): siRNA sense strand
aggaagugcugaaccaugu

SEQ ID NO: 1457385 - RNA, 19 nt, Homo sapiens
  misc_RNA (1)...(19): siRNA sense strand
gcacaggguggagcacuug

SEQ ID NO: 1457386 - RNA, 19 nt, Homo sapiens
  misc_RNA (1)...(19): siRNA sense strand
gcggcuacauuccaagcaa

SEQ ID NO: 1457387 - RNA, 19 nt, Homo sapiens
  misc_RNA (1)...(19): siRNA sense strand
guggagcacuugaugacau

SEQ ID NO: 1457388 - RNA, 19 nt, Homo sapiens
  misc_RNA (1)...(19): siRNA sense strand
ggacauugagcuguucaug

SEQ ID NO: 1457389 - RNA, 19 nt, Homo sapiens
  misc_RNA (1)...(19): siRNA sense strand
ccaagcacccuuaggauac

SEQ ID NO: 1457390 - RNA, 19 nt, Homo sapiens
  misc_RNA (1)...(19): siRNA sense strand
uaagcccaccugagaguaa

SEQ ID NO: 1457391 - RNA, 19 nt, Homo sapiens
  misc_RNA (1)...(19): siRNA sense strand
gcuaucaaccugcuacagu

SEQ ID NO: 1457392 - RNA, 19 nt, Homo sapiens
  misc_RNA (1)...(19): siRNA sense strand
ccagcaggaagaagaaauu

SEQ ID NO: 1457393 - RNA, 19 nt, Homo sapiens
  misc_RNA (1)...(19): siRNA sense strand
gcauccaggccaugaaugu

SEQ ID NO: 1457394 - RNA, 19 nt, Homo sapiens
  misc_RNA (1)...(19): siRNA sense strand
cagccaagcacccuuagga

SEQ ID NO: 1457395 - RNA, 19 nt, Homo sapiens
  misc_RNA (1)...(19): siRNA sense strand
gcagcagagccauuuacuu

SEQ ID NO: 1457396 - RNA, 19 nt, Homo sapiens
  misc_RNA (1)...(19): siRNA sense strand
ccaugaauguggcgcucaa

SEQ ID NO: 1457397 - RNA, 19 nt, Homo sapiens
  misc_RNA (1)...(19): siRNA sense strand
cauaagaccuggggagcua

SEQ ID NO: 1457398 - RNA, 19 nt, Homo sapiens
  misc_RNA (1)...(19): siRNA sense strand
gcagaagcuguucgagaug

SEQ ID NO: 1457399 - RNA, 19 nt, Homo sapiens
  misc_RNA (1)...(19): siRNA sense strand
uggaaaggccgcucccuau

SEQ ID NO: 1457400 - RNA, 19 nt, Homo sapiens
  misc_RNA (1)...(19): siRNA sense strand
gcucguacacauccucuuc

SEQ ID NO: 1457401 - RNA, 19 nt, Homo sapiens
  misc_RNA (1)...(19): siRNA sense strand
cgagaaccaagugccuuua

SEQ ID NO: 1457402 - RNA, 19 nt, Homo sapiens
  misc_RNA (1)...(19): siRNA sense strand
caaagaccagcaggaagaa

SEQ ID NO: 1457403 - RNA, 19 nt, Homo sapiens
  misc_RNA (1)...(19): siRNA sense strand
ggaggaagagcuggagcaa

SEQ ID NO: 1457404 - RNA, 19 nt, Homo sapiens
  misc_RNA (1)...(19): siRNA sense strand
gggcagagcgacugaagac

SEQ ID NO: 1457405 - RNA, 19 nt, Homo sapiens
  misc_RNA (1)...(19): siRNA sense strand
caccugagaguaaccuuug

SEQ ID NO: 1457406 - RNA, 19 nt, Homo sapiens
  misc_RNA (1)...(19): siRNA sense strand
cagcaggaagaagaaauuu

SEQ ID NO: 1457407 - RNA, 19 nt, Homo sapiens
  misc_RNA (1)...(19): siRNA sense strand
gugcugaaccauguccuaa

SEQ ID NO: 1457408 - RNA, 19 nt, Homo sapiens
  misc_RNA (1)...(19): siRNA sense strand
gaggaagagcuggagcaaa

SEQ ID NO: 1457409 - RNA, 19 nt, Homo sapiens
  misc_RNA (1)...(19): siRNA sense strand
cggagcggcuacauuccaa

SEQ ID NO: 1457410 - RNA, 19 nt, Homo sapiens
  misc_RNA (1)...(19): siRNA sense strand
cuaccaacccacauucuca

SEQ ID NO: 1457411 - RNA, 19 nt, Homo sapiens
  misc_RNA (1)...(19): siRNA sense strand
ccuagcagcccaagugauc

SEQ ID NO: 1457412 - RNA, 19 nt, Homo sapiens
  misc_RNA (1)...(19): siRNA sense strand
uggagaaggcccaggcaaa

SEQ ID NO: 1457413 - RNA, 19 nt, Homo sapiens
  misc_RNA (1)...(19): siRNA sense strand
ccgagaaccaagugccuuu

SEQ ID NO: 1457414 - RNA, 19 nt, Homo sapiens
  misc_RNA (1)...(19): siRNA sense strand
ccaccugagaguaaccuuu

SEQ ID NO: 1457415 - RNA, 19 nt, Homo sapiens
  misc_RNA (1)...(19): siRNA sense strand
ccgaggaugccuugcagaa

SEQ ID NO: 1457416 - RNA, 19 nt, Homo sapiens
  misc_RNA (1)...(19): siRNA sense strand
uggagcacuugaugacaug

SEQ ID NO: 1457417 - RNA, 19 nt, Homo sapiens
  misc_RNA (1)...(19): siRNA sense strand
gagccagcuacuucgcaua

SEQ ID NO: 1457418 - RNA, 19 nt, Homo sapiens
  misc_RNA (1)...(19): siRNA sense strand
ggagcaggcacgcuaucug

SEQ ID NO: 1457419 - RNA, 19 nt, Homo sapiens
  misc_RNA (1)...(19): siRNA sense strand
gagaaccaagugccuuuac

SEQ ID NO: 1457420 - RNA, 19 nt, Homo sapiens
  misc_RNA (1)...(19): siRNA sense strand
gaaggaugcuggggauaag

SEQ ID NO: 1457421 - RNA, 19 nt, Homo sapiens
  misc_RNA (1)...(19): siRNA sense strand
gggacggagcggcuacauu

SEQ ID NO: 1457422 - RNA, 19 nt, Homo sapiens
  misc_RNA (1)...(19): siRNA sense strand
ccagcagcagagccauuua

SEQ ID NO: 1457423 - RNA, 19 nt, Homo sapiens
  misc_RNA (1)...(19): siRNA sense strand
gacagcauccaggccauga

SEQ ID NO: 1457424 - RNA, 19 nt, Homo sapiens
  misc_RNA (1)...(19): siRNA sense strand
ugaagaccagccugcagaa

SEQ ID NO: 1457425 - RNA, 19 nt, Homo sapiens
  misc_RNA (1)...(19): siRNA sense strand
ggccugaagaggucacaga

SEQ ID NO: 1457426 - RNA, 19 nt, Homo sapiens
  misc_RNA (1)...(19): siRNA sense strand
cagcauccaggccaugaau

SEQ ID NO: 1457427 - RNA, 19 nt, Homo sapiens
  misc_RNA (1)...(19): siRNA sense strand
gaagaccagccugcagaag

SEQ ID NO: 1457428 - RNA, 19 nt, Homo sapiens
  misc_RNA (1)...(19): siRNA sense strand
aggaggagcuggacucuua

SEQ ID NO: 1457429 - RNA, 19 nt, Homo sapiens
  misc_RNA (1)...(19): siRNA sense strand
gcaaagaccagcaggaaga

SEQ ID NO: 1457430 - RNA, 19 nt, Homo sapiens
  misc_RNA (1)...(19): siRNA sense strand
ggugguggcuggugaagaa

SEQ ID NO: 1457431 - RNA, 19 nt, Homo sapiens
  misc_RNA (1)...(19): siRNA sense strand
ggacggagcggcuacauuc

SEQ ID NO: 1457432 - RNA, 19 nt, Homo sapiens
  misc_RNA (1)...(19): siRNA sense strand
cagcagagccauuuacuug

SEQ ID NO: 1457433 - RNA, 19 nt, Homo sapiens
  misc_RNA (1)...(19): siRNA sense strand
gaagaagaaauuugggaaa

SEQ ID NO: 1457434 - RNA, 19 nt, Homo sapiens
  misc_RNA (1)...(19): siRNA sense strand
ucagaugacuggcaacuuc

SEQ ID NO: 1457435 - RNA, 19 nt, Homo sapiens
  misc_RNA (1)...(19): siRNA sense strand
gcagagccauuuacuugca

SEQ ID NO: 1457436 - RNA, 19 nt, Homo sapiens
  misc_RNA (1)...(19): siRNA sense strand
uaagggacauugagcuguu

SEQ ID NO: 1457437 - RNA, 19 nt, Homo sapiens
  misc_RNA (1)...(19): siRNA sense strand
caacccacauucucagaug

SEQ ID NO: 1457438 - RNA, 19 nt, Homo sapiens
  misc_RNA (1)...(19): siRNA sense strand
guacacauccucuucaagu

SEQ ID NO: 1457439 - RNA, 19 nt, Homo sapiens
  misc_RNA (1)...(19): siRNA sense strand
agaaggcucuggaggaaga

SEQ ID NO: 1457440 - RNA, 19 nt, Homo sapiens
  misc_RNA (1)...(19): siRNA sense strand
gccaagcacccuuaggaua

SEQ ID NO: 1457441 - RNA, 19 nt, Homo sapiens
  misc_RNA (1)...(19): siRNA sense strand
aggaagagcuggagcaaag

SEQ ID NO: 1457442 - RNA, 19 nt, Homo sapiens
  misc_RNA (1)...(19): siRNA sense strand
guuccaaugcuucgacuua

SEQ ID NO: 1457443 - RNA, 19 nt, Homo sapiens
  misc_RNA (1)...(19): siRNA sense strand
gaaaggccgcucccuaugg

SEQ ID NO: 1457444 - RNA, 19 nt, Homo sapiens
  misc_RNA (1)...(19): siRNA sense strand
ggaaaggccgcucccuaug

SEQ ID NO: 1457445 - RNA, 19 nt, Homo sapiens
  misc_RNA (1)...(19): siRNA sense strand
gcaggaagaagaaauuugg

SEQ ID NO: 1457446 - RNA, 19 nt, Homo sapiens
  misc_RNA (1)...(19): siRNA sense strand
ccacaccagugcccgagaa

SEQ ID NO: 1457447 - RNA, 19 nt, Homo sapiens
  misc_RNA (1)...(19): siRNA sense strand
ccagcuacuucgcauaaga

SEQ ID NO: 1457448 - RNA, 19 nt, Homo sapiens
  misc_RNA (1)...(19): siRNA sense strand
gagcacagccucccaccau

SEQ ID NO: 1457449 - RNA, 19 nt, Homo sapiens
  misc_RNA (1)...(19): siRNA sense strand
cccagaaccucaccucaga

SEQ ID NO: 1457450 - RNA, 19 nt, Homo sapiens
  misc_RNA (1)...(19): siRNA sense strand
gguggcuggugaagaauga

SEQ ID NO: 1457451 - RNA, 19 nt, Homo sapiens
  misc_RNA (1)...(19): siRNA sense strand
ugcagaagcuguucgagau

SEQ ID NO: 1457452 - RNA, 19 nt, Homo sapiens
  misc_RNA (1)...(19): siRNA sense strand
aaaggccgcucccuaugga

SEQ ID NO: 1457453 - RNA, 19 nt, Homo sapiens
  misc_RNA (1)...(19): siRNA sense strand
gcugaaccauguccuaagg

SEQ ID NO: 1457454 - RNA, 19 nt, Homo sapiens
  misc_RNA (1)...(19): siRNA sense strand
ugucuaagcccaccugaga

SEQ ID NO: 1457455 - RNA, 19 nt, Homo sapiens
  misc_RNA (1)...(19): siRNA sense strand
ggagaaggcccaggcaaag

SEQ ID NO: 1457456 - RNA, 19 nt, Homo sapiens
  misc_RNA (1)...(19): siRNA sense strand
gaaccaagugccuuuacuc

SEQ ID NO: 1457457 - RNA, 19 nt, Homo sapiens
  misc_RNA (1)...(19): siRNA sense strand
gagaaggcccaggcaaaga

SEQ ID NO: 1457458 - RNA, 19 nt, Homo sapiens
  misc_RNA (1)...(19): siRNA sense strand
aggaagugcugaaccaugu

SEQ ID NO: 1457459 - RNA, 19 nt, Homo sapiens
  misc_RNA (1)...(19): siRNA sense strand
gcacaggguggagcacuug

SEQ ID NO: 1457460 - RNA, 19 nt, Homo sapiens
  misc_RNA (1)...(19): siRNA sense strand
gcggcuacauuccaagcaa

SEQ ID NO: 1457461 - RNA, 19 nt, Homo sapiens
  misc_RNA (1)...(19): siRNA sense strand
guggagcacuugaugacau

SEQ ID NO: 1457462 - RNA, 19 nt, Homo sapiens
  misc_RNA (1)...(19): siRNA sense strand
ggacauugagcuguucaug

SEQ ID NO: 1457463 - RNA, 19 nt, Homo sapiens
  misc_RNA (1)...(19): siRNA sense strand
ccaagcacccuuaggauac

SEQ ID NO: 1457464 - RNA, 19 nt, Homo sapiens
  misc_RNA (1)...(19): siRNA sense strand
uaagcccaccugagaguaa

SEQ ID NO: 1457465 - RNA, 19 nt, Homo sapiens
  misc_RNA (1)...(19): siRNA sense strand
gcuaucaaccugcuacagu

SEQ ID NO: 1457466 - RNA, 19 nt, Homo sapiens
  misc_RNA (1)...(19): siRNA sense strand
ccagcaggaagaagaaauu

SEQ ID NO: 1457467 - RNA, 19 nt, Homo sapiens
  misc_RNA (1)...(19): siRNA sense strand
gcauccaggccaugaaugu

SEQ ID NO: 1457468 - RNA, 19 nt, Homo sapiens
  misc_RNA (1)...(19): siRNA sense strand
cagccaagcacccuuagga

SEQ ID NO: 1457469 - RNA, 19 nt, Homo sapiens
  misc_RNA (1)...(19): siRNA sense strand
gcagcagagccauuuacuu

SEQ ID NO: 1457470 - RNA, 19 nt, Homo sapiens
  misc_RNA (1)...(19): siRNA sense strand
ccaugaauguggcgcucaa

SEQ ID NO: 1457471 - RNA, 19 nt, Homo sapiens
  misc_RNA (1)...(19): siRNA sense strand
cauaagaccuggggagcua

SEQ ID NO: 1457472 - RNA, 19 nt, Homo sapiens
  misc_RNA (1)...(19): siRNA sense strand
gcagaagcuguucgagaug

SEQ ID NO: 1457473 - RNA, 19 nt, Homo sapiens
  misc_RNA (1)...(19): siRNA sense strand
uggaaaggccgcucccuau

SEQ ID NO: 1457474 - RNA, 19 nt, Homo sapiens
  misc_RNA (1)...(19): siRNA sense strand
gcucguacacauccucuuc

SEQ ID NO: 1457475 - RNA, 19 nt, Homo sapiens
  misc_RNA (1)...(19): siRNA sense strand
cgagaaccaagugccuuua

SEQ ID NO: 1457476 - RNA, 19 nt, Homo sapiens
  misc_RNA (1)...(19): siRNA sense strand
caaagaccagcaggaagaa

SEQ ID NO: 1457477 - RNA, 19 nt, Homo sapiens
  misc_RNA (1)...(19): siRNA sense strand
ggaggaagagcuggagcaa

SEQ ID NO: 1457478 - RNA, 19 nt, Homo sapiens
  misc_RNA (1)...(19): siRNA sense strand
gggcagagcgacugaagac

SEQ ID NO: 1457479 - RNA, 19 nt, Homo sapiens
  misc_RNA (1)...(19): siRNA sense strand
caccugagaguaaccuuug

SEQ ID NO: 1457480 - RNA, 19 nt, Homo sapiens
  misc_RNA (1)...(19): siRNA sense strand
cagcaggaagaagaaauuu

SEQ ID NO: 1457481 - RNA, 19 nt, Homo sapiens
  misc_RNA (1)...(19): siRNA sense strand
gugcugaaccauguccuaa

SEQ ID NO: 1457482 - RNA, 19 nt, Homo sapiens
  misc_RNA (1)...(19): siRNA sense strand
gaggaagagcuggagcaaa

SEQ ID NO: 1457483 - RNA, 19 nt, Homo sapiens
  misc_RNA (1)...(19): siRNA sense strand
cggagcggcuacauuccaa

SEQ ID NO: 1457484 - RNA, 19 nt, Homo sapiens
  misc_RNA (1)...(19): siRNA sense strand
cuaccaacccacauucuca

SEQ ID NO: 1457485 - RNA, 19 nt, Homo sapiens
  misc_RNA (1)...(19): siRNA sense strand
ccuagcagcccaagugauc

SEQ ID NO: 1457486 - RNA, 19 nt, Homo sapiens
  misc_RNA (1)...(19): siRNA sense strand
uggagaaggcccaggcaaa

SEQ ID NO: 1457487 - RNA, 19 nt, Homo sapiens
  misc_RNA (1)...(19): siRNA sense strand
ccgagaaccaagugccuuu

SEQ ID NO: 1457488 - RNA, 19 nt, Homo sapiens
  misc_RNA (1)...(19): siRNA sense strand
ccaccugagaguaaccuuu

SEQ ID NO: 1457489 - RNA, 19 nt, Homo sapiens
  misc_RNA (1)...(19): siRNA sense strand
ccgaggaugccuugcagaa

SEQ ID NO: 1457490 - RNA, 19 nt, Homo sapiens
  misc_RNA (1)...(19): siRNA sense strand
uggagcacuugaugacaug

SEQ ID NO: 1457491 - RNA, 19 nt, Homo sapiens
  misc_RNA (1)...(19): siRNA sense strand
gagccagcuacuucgcaua

SEQ ID NO: 1457492 - RNA, 19 nt, Homo sapiens
  misc_RNA (1)...(19): siRNA sense strand
ggagcaggcacgcuaucug

SEQ ID NO: 1457493 - RNA, 19 nt, Homo sapiens
  misc_RNA (1)...(19): siRNA sense strand
gagaaccaagugccuuuac

SEQ ID NO: 1457494 - RNA, 19 nt, Homo sapiens
  misc_RNA (1)...(19): siRNA sense strand
gaaggaugcuggggauaag

SEQ ID NO: 1457495 - RNA, 19 nt, Homo sapiens
  misc_RNA (1)...(19): siRNA sense strand
gggacggagcggcuacauu

SEQ ID NO: 1457496 - RNA, 19 nt, Homo sapiens
  misc_RNA (1)...(19): siRNA sense strand
ccagcagcagagccauuua

SEQ ID NO: 1457497 - RNA, 19 nt, Homo sapiens
  misc_RNA (1)...(19): siRNA sense strand
gacagcauccaggccauga

SEQ ID NO: 1457498 - RNA, 19 nt, Homo sapiens
  misc_RNA (1)...(19): siRNA sense strand
ugaagaccagccugcagaa

SEQ ID NO: 1457499 - RNA, 19 nt, Homo sapiens
  misc_RNA (1)...(19): siRNA sense strand
ggccugaagaggucacaga

SEQ ID NO: 1457500 - RNA, 19 nt, Homo sapiens
  misc_RNA (1)...(19): siRNA sense strand
cagcauccaggccaugaau

SEQ ID NO: 1457501 - RNA, 19 nt, Homo sapiens
  misc_RNA (1)...(19): siRNA sense strand
gaagaccagccugcagaag

SEQ ID NO: 1457502 - RNA, 19 nt, Homo sapiens
  misc_RNA (1)...(19): siRNA sense strand
gaagaaagaugguaacaaa

SEQ ID NO: 1457503 - RNA, 19 nt, Homo sapiens
  misc_RNA (1)...(19): siRNA sense strand
gauaugagguucugucuga

SEQ ID NO: 1457504 - RNA, 19 nt, Homo sapiens
  misc_RNA (1)...(19): siRNA sense strand
ggagaugacuaaacugaaa

SEQ ID NO: 1457505 - RNA, 19 nt, Homo sapiens
  misc_RNA (1)...(19): siRNA sense strand
ggacaucgcuguucuucug

SEQ ID NO: 1457506 - RNA, 19 nt, Homo sapiens
  misc_RNA (1)...(19): siRNA sense strand
ugacuaaacugaaacaaga

SEQ ID NO: 1457507 - RNA, 19 nt, Homo sapiens
  misc_RNA (1)...(19): siRNA sense strand
ggaaaugcaugaccgaugu

SEQ ID NO: 1457508 - RNA, 19 nt, Homo sapiens
  misc_RNA (1)...(19): siRNA sense strand
uaucaacucugucaugaaa

SEQ ID NO: 1457509 - RNA, 19 nt, Homo sapiens
  misc_RNA (1)...(19): siRNA sense strand
gacugaagcugacaaagaa

SEQ ID NO: 1457510 - RNA, 19 nt, Homo sapiens
  misc_RNA (1)...(19): siRNA sense strand
ggaaaugugugacaagagu

SEQ ID NO: 1457511 - RNA, 19 nt, Homo sapiens
  misc_RNA (1)...(19): siRNA sense strand
gaaagaugguaacaaagau

SEQ ID NO: 1457512 - RNA, 19 nt, Homo sapiens
  misc_RNA (1)...(19): siRNA sense strand
caagcucccucccuucuuu

SEQ ID NO: 1457513 - RNA, 19 nt, Homo sapiens
  misc_RNA (1)...(19): siRNA sense strand
ggccugagcugccuaugaa

SEQ ID NO: 1457514 - RNA, 19 nt, Homo sapiens
  misc_RNA (1)...(19): siRNA sense strand
gguggaagcugccgucaug

SEQ ID NO: 1457515 - RNA, 19 nt, Homo sapiens
  misc_RNA (1)...(19): siRNA sense strand
gaaguacagcuuagagaaa

SEQ ID NO: 1457516 - RNA, 19 nt, Homo sapiens
  misc_RNA (1)...(19): siRNA sense strand
gaucgccgcuggccucuau

SEQ ID NO: 1457517 - RNA, 19 nt, Homo sapiens
  misc_RNA (1)...(19): siRNA sense strand
ggaccuccguggaaacaaa

SEQ ID NO: 1457518 - RNA, 19 nt, Homo sapiens
  misc_RNA (1)...(19): siRNA sense strand
acacugaaguccaucauga

SEQ ID NO: 1457519 - RNA, 19 nt, Homo sapiens
  misc_RNA (1)...(19): siRNA sense strand
gcaaagauaugagguucug

SEQ ID NO: 1457520 - RNA, 19 nt, Homo sapiens
  misc_RNA (1)...(19): siRNA sense strand
gcaauuauuugggauauac

SEQ ID NO: 1457521 - RNA, 19 nt, Homo sapiens
  misc_RNA (1)...(19): siRNA sense strand
gcaacacagcccuccauua

SEQ ID NO: 1457522 - RNA, 19 nt, Homo sapiens
  misc_RNA (1)...(19): siRNA sense strand
gaagucagcgucugcgaaa

SEQ ID NO: 1457523 - RNA, 19 nt, Homo sapiens
  misc_RNA (1)...(19): siRNA sense strand
ugaaguccaucaugaagaa

SEQ ID NO: 1457524 - RNA, 19 nt, Homo sapiens
  misc_RNA (1)...(19): siRNA sense strand
ugacuggccuggaucacua

SEQ ID NO: 1457525 - RNA, 19 nt, Homo sapiens
  misc_RNA (1)...(19): siRNA sense strand
gaagggcaccaugcaguua

SEQ ID NO: 1457526 - RNA, 19 nt, Homo sapiens
  misc_RNA (1)...(19): siRNA sense strand
agagagagguaugaauuaa

SEQ ID NO: 1457527 - RNA, 19 nt, Homo sapiens
  misc_RNA (1)...(19): siRNA sense strand
cagccugaauguaagaaua

SEQ ID NO: 1457528 - RNA, 19 nt, Homo sapiens
  misc_RNA (1)...(19): siRNA sense strand
caacacagcccuccauuac

SEQ ID NO: 1457529 - RNA, 19 nt, Homo sapiens
  misc_RNA (1)...(19): siRNA sense strand
ucaaagaagugcggucuau

SEQ ID NO: 1457530 - RNA, 19 nt, Homo sapiens
  misc_RNA (1)...(19): siRNA sense strand
ccucagagcucagggagaa

SEQ ID NO: 1457531 - RNA, 19 nt, Homo sapiens
  misc_RNA (1)...(19): siRNA sense strand
ucacacuccucaagacaaa

SEQ ID NO: 1457532 - RNA, 19 nt, Homo sapiens
  misc_RNA (1)...(19): siRNA sense strand
gagaaggacaugcggauug

SEQ ID NO: 1457533 - RNA, 19 nt, Homo sapiens
  misc_RNA (1)...(19): siRNA sense strand
gaaaagauguugucugcau

SEQ ID NO: 1457534 - RNA, 19 nt, Homo sapiens
  misc_RNA (1)...(19): siRNA sense strand
cagagagagguaugaauua

SEQ ID NO: 1457535 - RNA, 19 nt, Homo sapiens
  misc_RNA (1)...(19): siRNA sense strand
gaaaugcagguucaagaau

SEQ ID NO: 1457536 - RNA, 19 nt, Homo sapiens
  misc_RNA (1)...(19): siRNA sense strand
ccaccgagguucauuugau

SEQ ID NO: 1457537 - RNA, 19 nt, Homo sapiens
  misc_RNA (1)...(19): siRNA sense strand
gcuguuagaugccgaugug

SEQ ID NO: 1457538 - RNA, 19 nt, Homo sapiens
  misc_RNA (1)...(19): siRNA sense strand
ggaggucuguggaaaugug

SEQ ID NO: 1457539 - RNA, 19 nt, Homo sapiens
  misc_RNA (1)...(19): siRNA sense strand
ucagagagagguaugaauu

SEQ ID NO: 1457540 - RNA, 19 nt, Homo sapiens
  misc_RNA (1)...(19): siRNA sense strand
augaauugguggauuguua

SEQ ID NO: 1457541 - RNA, 19 nt, Homo sapiens
  misc_RNA (1)...(19): siRNA sense strand
gcaccaugcaguuaauauu

SEQ ID NO: 1457542 - RNA, 19 nt, Homo sapiens
  misc_RNA (1)...(19): siRNA sense strand
aagacaaacuugaaucuca

SEQ ID NO: 1457543 - RNA, 19 nt, Homo sapiens
  misc_RNA (1)...(19): siRNA sense strand
gcacgcagaggauaaagga

SEQ ID NO: 1457544 - RNA, 19 nt, Homo sapiens
  misc_RNA (1)...(19): siRNA sense strand
gcacugaagagcugaggaa

SEQ ID NO: 1457545 - RNA, 19 nt, Homo sapiens
  misc_RNA (1)...(19): siRNA sense strand
caaagaaauugagcugcaa

SEQ ID NO: 1457546 - RNA, 19 nt, Homo sapiens
  misc_RNA (1)...(19): siRNA sense strand
ugacugaagcugacaaaga

SEQ ID NO: 1457547 - RNA, 19 nt, Homo sapiens
  misc_RNA (1)...(19): siRNA sense strand
gggacuacauagcugcuuu

SEQ ID NO: 1457548 - RNA, 19 nt, Homo sapiens
  misc_RNA (1)...(19): siRNA sense strand
ggaggaggaugaagacacu

SEQ ID NO: 1457549 - RNA, 19 nt, Homo sapiens
  misc_RNA (1)...(19): siRNA sense strand
agaaagaugguaacaaaga

SEQ ID NO: 1457550 - RNA, 19 nt, Homo sapiens
  misc_RNA (1)...(19): siRNA sense strand
ccuaugaauugguggauug

SEQ ID NO: 1457551 - RNA, 19 nt, Homo sapiens
  misc_RNA (1)...(19): siRNA sense strand
gauuccagcucagaugaaa

SEQ ID NO: 1457552 - RNA, 19 nt, Homo sapiens
  misc_RNA (1)...(19): siRNA sense strand
acacuugucuaagcacuuu

SEQ ID NO: 1457553 - RNA, 19 nt, Homo sapiens
  misc_RNA (1)...(19): siRNA sense strand
gagaaggccgugucaagga

SEQ ID NO: 1457554 - RNA, 19 nt, Homo sapiens
  misc_RNA (1)...(19): siRNA sense strand
guaugcccaugucaacuuu

SEQ ID NO: 1457555 - RNA, 19 nt, Homo sapiens
  misc_RNA (1)...(19): siRNA sense strand
agagagguaugaauuaagu

SEQ ID NO: 1457556 - RNA, 19 nt, Homo sapiens
  misc_RNA (1)...(19): siRNA sense strand
aaaugcagguucaagaaug

SEQ ID NO: 1457557 - RNA, 19 nt, Homo sapiens
  misc_RNA (1)...(19): siRNA sense strand
caucagcugugaagaccaa

SEQ ID NO: 1457558 - RNA, 19 nt, Homo sapiens
  misc_RNA (1)...(19): siRNA sense strand
agacacugcuggcugagaa

SEQ ID NO: 1457559 - RNA, 19 nt, Homo sapiens
  misc_RNA (1)...(19): siRNA sense strand
gcaugcaacuuacugaaaa

SEQ ID NO: 1457560 - RNA, 19 nt, Homo sapiens
  misc_RNA (1)...(19): siRNA sense strand
gaaaucagagagagguaug

SEQ ID NO: 1457561 - RNA, 19 nt, Homo sapiens
  misc_RNA (1)...(19): siRNA sense strand
ugaagaagaaagaugguaa

SEQ ID NO: 1457562 - RNA, 19 nt, Homo sapiens
  misc_RNA (1)...(19): siRNA sense strand
gcugggaggucuguggaaa

SEQ ID NO: 1457563 - RNA, 19 nt, Homo sapiens
  misc_RNA (1)...(19): siRNA sense strand
caccgagguucauuugauu

SEQ ID NO: 1457564 - RNA, 19 nt, Homo sapiens
  misc_RNA (1)...(19): siRNA sense strand
gguacgcugucuccaguga

SEQ ID NO: 1457565 - RNA, 19 nt, Homo sapiens
  misc_RNA (1)...(19): siRNA sense strand
cgagacggccacccucaua

SEQ ID NO: 1457566 - RNA, 19 nt, Homo sapiens
  misc_RNA (1)...(19): siRNA sense strand
uggaacaggugcaccaguu

SEQ ID NO: 1457567 - RNA, 19 nt, Homo sapiens
  misc_RNA (1)...(19): siRNA sense strand
uaacgacaacuaucugguu

SEQ ID NO: 1457568 - RNA, 19 nt, Homo sapiens
  misc_RNA (1)...(19): siRNA sense strand
agugugaugucauugagua

SEQ ID NO: 1457569 - RNA, 19 nt, Homo sapiens
  misc_RNA (1)...(19): siRNA sense strand
gaacccugacuuccagaaa

SEQ ID NO: 1457570 - RNA, 19 nt, Homo sapiens
  misc_RNA (1)...(19): siRNA sense strand
ucaacucugucaugaaauc

SEQ ID NO: 1457571 - RNA, 19 nt, Homo sapiens
  misc_RNA (1)...(19): siRNA sense strand
caacagcagaccauagaau

SEQ ID NO: 1457572 - RNA, 19 nt, Homo sapiens
  misc_RNA (1)...(19): siRNA sense strand
aaaguacacugaaguccau

SEQ ID NO: 1457573 - RNA, 19 nt, Homo sapiens
  misc_RNA (1)...(19): siRNA sense strand
gaccauagaauccuugaag

SEQ ID NO: 1457574 - RNA, 19 nt, Homo sapiens
  misc_RNA (1)...(19): siRNA sense strand
guggaaaugugugacaaga

SEQ ID NO: 1457575 - RNA, 19 nt, Homo sapiens
  misc_RNA (1)...(19): siRNA sense strand
acacagcccuccauuacag

SEQ ID NO: 1457576 - RNA, 19 nt, Homo sapiens
  misc_RNA (1)...(19): siRNA sense strand
uaaaugaccccaaagcuuu

SEQ ID NO: 1457577 - RNA, 19 nt, Homo sapiens
  misc_RNA (1)...(19): siRNA sense strand
caaugaaaguacacugaag

SEQ ID NO: 1457578 - RNA, 19 nt, Homo sapiens
  misc_RNA (1)...(19): siRNA sense strand
ucuaucaacucugucauga

SEQ ID NO: 1457579 - RNA, 19 nt, Homo sapiens
  misc_RNA (1)...(19): siRNA sense strand
ucagcacccugucgucuau

SEQ ID NO: 1457580 - RNA, 19 nt, Homo sapiens
  misc_RNA (1)...(19): siRNA sense strand
cagaugggcucccucaacu

SEQ ID NO: 1457581 - RNA, 19 nt, Homo sapiens
  misc_RNA (1)...(19): siRNA sense strand
gauggccauugcucugaaa

SEQ ID NO: 1457582 - RNA, 19 nt, Homo sapiens
  misc_RNA (1)...(19): siRNA sense strand
gcauguacaaacaaugaaa

SEQ ID NO: 1457583 - RNA, 19 nt, Homo sapiens
  misc_RNA (1)...(19): siRNA sense strand
ggcaauuauuugggauaua

SEQ ID NO: 1457584 - RNA, 19 nt, Homo sapiens
  misc_RNA (1)...(19): siRNA sense strand
uuagagaaaccacccauga

SEQ ID NO: 1457585 - RNA, 19 nt, Homo sapiens
  misc_RNA (1)...(19): siRNA sense strand
ggacaugcggauuguggaa

SEQ ID NO: 1457586 - RNA, 19 nt, Homo sapiens
  misc_RNA (1)...(19): siRNA sense strand
gaacgccucccagcuggaa

SEQ ID NO: 1457587 - RNA, 19 nt, Homo sapiens
  misc_RNA (1)...(19): siRNA sense strand
cuacauagcugcuuuugag

SEQ ID NO: 1457588 - RNA, 19 nt, Homo sapiens
  misc_RNA (1)...(19): siRNA sense strand
gguaacaaagauucaaaug

SEQ ID NO: 1457589 - RNA, 19 nt, Homo sapiens
  misc_RNA (1)...(19): siRNA sense strand
gaagcugacaaagaaauug

SEQ ID NO: 1457590 - RNA, 19 nt, Homo sapiens
  misc_RNA (1)...(19): siRNA sense strand
ugaauugguggauuguuaa

SEQ ID NO: 1457591 - RNA, 19 nt, Homo sapiens
  misc_RNA (1)...(19): siRNA sense strand
guaacaaagauucaaaugg

SEQ ID NO: 1457592 - RNA, 19 nt, Homo sapiens
  misc_RNA (1)...(19): siRNA sense strand
caccaacacuugucuaagc

SEQ ID NO: 1457593 - RNA, 19 nt, Homo sapiens
  misc_RNA (1)...(19): siRNA sense strand
caaauggucggcagucaca

SEQ ID NO: 1457594 - RNA, 19 nt, Homo sapiens
  misc_RNA (1)...(19): siRNA sense strand
ggaaaucagagagagguau

SEQ ID NO: 1457595 - RNA, 19 nt, Homo sapiens
  misc_RNA (1)...(19): siRNA sense strand
ccaugcaguuaauauugaa

SEQ ID NO: 1457596 - RNA, 19 nt, Homo sapiens
  misc_RNA (1)...(19): siRNA sense strand
ccaggacacuagcacagau

SEQ ID NO: 1457597 - RNA, 19 nt, Homo sapiens
  misc_RNA (1)...(19): siRNA sense strand
caccaugcaguuaauauug

SEQ ID NO: 1457598 - RNA, 19 nt, Homo sapiens
  misc_RNA (1)...(19): siRNA sense strand
aaucacaggcaauuauuug

SEQ ID NO: 1457599 - RNA, 19 nt, Homo sapiens
  misc_RNA (1)...(19): siRNA sense strand
gaaaucugcaagcacugaa

SEQ ID NO: 1457600 - RNA, 19 nt, Homo sapiens
  misc_RNA (1)...(19): siRNA sense strand
uggccuggaucacuacauu

SEQ ID NO: 1457601 - RNA, 19 nt, Homo sapiens
  misc_RNA (1)...(19): siRNA sense strand
gcgagcagauggccauugc

SEQ ID NO: 1457602 - RNA, 19 nt, Homo sapiens
  misc_RNA (1)...(19): siRNA sense strand
gaagaaagaugguaacaaa

SEQ ID NO: 1457603 - RNA, 19 nt, Homo sapiens
  misc_RNA (1)...(19): siRNA sense strand
gauaugagguucugucuga

SEQ ID NO: 1457604 - RNA, 19 nt, Homo sapiens
  misc_RNA (1)...(19): siRNA sense strand
ggagaugacuaaacugaaa

SEQ ID NO: 1457605 - RNA, 19 nt, Homo sapiens
  misc_RNA (1)...(19): siRNA sense strand
ggacaucgcuguucuucug

SEQ ID NO: 1457606 - RNA, 19 nt, Homo sapiens
  misc_RNA (1)...(19): siRNA sense strand
ugacuaaacugaaacaaga

SEQ ID NO: 1457607 - RNA, 19 nt, Homo sapiens
  misc_RNA (1)...(19): siRNA sense strand
ggaaaugcaugaccgaugu

SEQ ID NO: 1457608 - RNA, 19 nt, Homo sapiens
  misc_RNA (1)...(19): siRNA sense strand
uaucaacucugucaugaaa

SEQ ID NO: 1457609 - RNA, 19 nt, Homo sapiens
  misc_RNA (1)...(19): siRNA sense strand
gacugaagcugacaaagaa

SEQ ID NO: 1457610 - RNA, 19 nt, Homo sapiens
  misc_RNA (1)...(19): siRNA sense strand
ggaaaugugugacaagagu

SEQ ID NO: 1457611 - RNA, 19 nt, Homo sapiens
  misc_RNA (1)...(19): siRNA sense strand
gaaagaugguaacaaagau

SEQ ID NO: 1457612 - RNA, 19 nt, Homo sapiens
  misc_RNA (1)...(19): siRNA sense strand
caagcucccucccuucuuu

SEQ ID NO: 1457613 - RNA, 19 nt, Homo sapiens
  misc_RNA (1)...(19): siRNA sense strand
ggccugagcugccuaugaa

SEQ ID NO: 1457614 - RNA, 19 nt, Homo sapiens
  misc_RNA (1)...(19): siRNA sense strand
gguggaagcugccgucaug

SEQ ID NO: 1457615 - RNA, 19 nt, Homo sapiens
  misc_RNA (1)...(19): siRNA sense strand
gaaguacagcuuagagaaa

SEQ ID NO: 1457616 - RNA, 19 nt, Homo sapiens
  misc_RNA (1)...(19): siRNA sense strand
gaucgccgcuggccucuau

SEQ ID NO: 1457617 - RNA, 19 nt, Homo sapiens
  misc_RNA (1)...(19): siRNA sense strand
ggaccuccguggaaacaaa

SEQ ID NO: 1457618 - RNA, 19 nt, Homo sapiens
  misc_RNA (1)...(19): siRNA sense strand
acacugaaguccaucauga

SEQ ID NO: 1457619 - RNA, 19 nt, Homo sapiens
  misc_RNA (1)...(19): siRNA sense strand
gcaaagauaugagguucug

SEQ ID NO: 1457620 - RNA, 19 nt, Homo sapiens
  misc_RNA (1)...(19): siRNA sense strand
gcaauuauuugggauauac

SEQ ID NO: 1457621 - RNA, 19 nt, Homo sapiens
  misc_RNA (1)...(19): siRNA sense strand
gcaacacagcccuccauua

SEQ ID NO: 1457622 - RNA, 19 nt, Homo sapiens
  misc_RNA (1)...(19): siRNA sense strand
gaagucagcgucugcgaaa

SEQ ID NO: 1457623 - RNA, 19 nt, Homo sapiens
  misc_RNA (1)...(19): siRNA sense strand
ugaaguccaucaugaagaa

SEQ ID NO: 1457624 - RNA, 19 nt, Homo sapiens
  misc_RNA (1)...(19): siRNA sense strand
ugacuggccuggaucacua

SEQ ID NO: 1457625 - RNA, 19 nt, Homo sapiens
  misc_RNA (1)...(19): siRNA sense strand
gaagggcaccaugcaguua

SEQ ID NO: 1457626 - RNA, 19 nt, Homo sapiens
  misc_RNA (1)...(19): siRNA sense strand
agagagagguaugaauuaa

SEQ ID NO: 1457627 - RNA, 19 nt, Homo sapiens
  misc_RNA (1)...(19): siRNA sense strand
cagccugaauguaagaaua

SEQ ID NO: 1457628 - RNA, 19 nt, Homo sapiens
  misc_RNA (1)...(19): siRNA sense strand
caacacagcccuccauuac

SEQ ID NO: 1457629 - RNA, 19 nt, Homo sapiens
  misc_RNA (1)...(19): siRNA sense strand
ucaaagaagugcggucuau

SEQ ID NO: 1457630 - RNA, 19 nt, Homo sapiens
  misc_RNA (1)...(19): siRNA sense strand
ccucagagcucagggagaa

SEQ ID NO: 1457631 - RNA, 19 nt, Homo sapiens
  misc_RNA (1)...(19): siRNA sense strand
ucacacuccucaagacaaa

SEQ ID NO: 1457632 - RNA, 19 nt, Homo sapiens
  misc_RNA (1)...(19): siRNA sense strand
gagaaggacaugcggauug

SEQ ID NO: 1457633 - RNA, 19 nt, Homo sapiens
  misc_RNA (1)...(19): siRNA sense strand
gaaaagauguugucugcau

SEQ ID NO: 1457634 - RNA, 19 nt, Homo sapiens
  misc_RNA (1)...(19): siRNA sense strand
cagagagagguaugaauua

SEQ ID NO: 1457635 - RNA, 19 nt, Homo sapiens
  misc_RNA (1)...(19): siRNA sense strand
gaaaugcagguucaagaau

SEQ ID NO: 1457636 - RNA, 19 nt, Homo sapiens
  misc_RNA (1)...(19): siRNA sense strand
ccaccgagguucauuugau

SEQ ID NO: 1457637 - RNA, 19 nt, Homo sapiens
  misc_RNA (1)...(19): siRNA sense strand
gcuguuagaugccgaugug

SEQ ID NO: 1457638 - RNA, 19 nt, Homo sapiens
  misc_RNA (1)...(19): siRNA sense strand
ggaggucuguggaaaugug

SEQ ID NO: 1457639 - RNA, 19 nt, Homo sapiens
  misc_RNA (1)...(19): siRNA sense strand
ucagagagagguaugaauu

SEQ ID NO: 1457640 - RNA, 19 nt, Homo sapiens
  misc_RNA (1)...(19): siRNA sense strand
augaauugguggauuguua

SEQ ID NO: 1457641 - RNA, 19 nt, Homo sapiens
  misc_RNA (1)...(19): siRNA sense strand
gcaccaugcaguuaauauu

SEQ ID NO: 1457642 - RNA, 19 nt, Homo sapiens
  misc_RNA (1)...(19): siRNA sense strand
aagacaaacuugaaucuca

SEQ ID NO: 1457643 - RNA, 19 nt, Homo sapiens
  misc_RNA (1)...(19): siRNA sense strand
gcacgcagaggauaaagga

SEQ ID NO: 1457644 - RNA, 19 nt, Homo sapiens
  misc_RNA (1)...(19): siRNA sense strand
gcacugaagagcugaggaa

SEQ ID NO: 1457645 - RNA, 19 nt, Homo sapiens
  misc_RNA (1)...(19): siRNA sense strand
caaagaaauugagcugcaa

SEQ ID NO: 1457646 - RNA, 19 nt, Homo sapiens
  misc_RNA (1)...(19): siRNA sense strand
ugacugaagcugacaaaga

SEQ ID NO: 1457647 - RNA, 19 nt, Homo sapiens
  misc_RNA (1)...(19): siRNA sense strand
gggacuacauagcugcuuu

SEQ ID NO: 1457648 - RNA, 19 nt, Homo sapiens
  misc_RNA (1)...(19): siRNA sense strand
ggaggaggaugaagacacu

SEQ ID NO: 1457649 - RNA, 19 nt, Homo sapiens
  misc_RNA (1)...(19): siRNA sense strand
agaaagaugguaacaaaga

SEQ ID NO: 1457650 - RNA, 19 nt, Homo sapiens
  misc_RNA (1)...(19): siRNA sense strand
ccuaugaauugguggauug

SEQ ID NO: 1457651 - RNA, 19 nt, Homo sapiens
  misc_RNA (1)...(19): siRNA sense strand
gauuccagcucagaugaaa

SEQ ID NO: 1457652 - RNA, 19 nt, Homo sapiens
  misc_RNA (1)...(19): siRNA sense strand
acacuugucuaagcacuuu

SEQ ID NO: 1457653 - RNA, 19 nt, Homo sapiens
  misc_RNA (1)...(19): siRNA sense strand
gagaaggccgugucaagga

SEQ ID NO: 1457654 - RNA, 19 nt, Homo sapiens
  misc_RNA (1)...(19): siRNA sense strand
guaugcccaugucaacuuu

SEQ ID NO: 1457655 - RNA, 19 nt, Homo sapiens
  misc_RNA (1)...(19): siRNA sense strand
agagagguaugaauuaagu

SEQ ID NO: 1457656 - RNA, 19 nt, Homo sapiens
  misc_RNA (1)...(19): siRNA sense strand
aaaugcagguucaagaaug

SEQ ID NO: 1457657 - RNA, 19 nt, Homo sapiens
  misc_RNA (1)...(19): siRNA sense strand
caucagcugugaagaccaa

SEQ ID NO: 1457658 - RNA, 19 nt, Homo sapiens
  misc_RNA (1)...(19): siRNA sense strand
agacacugcuggcugagaa

SEQ ID NO: 1457659 - RNA, 19 nt, Homo sapiens
  misc_RNA (1)...(19): siRNA sense strand
gcaugcaacuuacugaaaa

SEQ ID NO: 1457660 - RNA, 19 nt, Homo sapiens
  misc_RNA (1)...(19): siRNA sense strand
gaaaucagagagagguaug

SEQ ID NO: 1457661 - RNA, 19 nt, Homo sapiens
  misc_RNA (1)...(19): siRNA sense strand
ugaagaagaaagaugguaa

SEQ ID NO: 1457662 - RNA, 19 nt, Homo sapiens
  misc_RNA (1)...(19): siRNA sense strand
gcugggaggucuguggaaa

SEQ ID NO: 1457663 - RNA, 19 nt, Homo sapiens
  misc_RNA (1)...(19): siRNA sense strand
caccgagguucauuugauu

SEQ ID NO: 1457664 - RNA, 19 nt, Homo sapiens
  misc_RNA (1)...(19): siRNA sense strand
gguacgcugucuccaguga

SEQ ID NO: 1457665 - RNA, 19 nt, Homo sapiens
  misc_RNA (1)...(19): siRNA sense strand
cgagacggccacccucaua

SEQ ID NO: 1457666 - RNA, 19 nt, Homo sapiens
  misc_RNA (1)...(19): siRNA sense strand
uggaacaggugcaccaguu

SEQ ID NO: 1457667 - RNA, 19 nt, Homo sapiens
  misc_RNA (1)...(19): siRNA sense strand
uaacgacaacuaucugguu

SEQ ID NO: 1457668 - RNA, 19 nt, Homo sapiens
  misc_RNA (1)...(19): siRNA sense strand
agugugaugucauugagua

SEQ ID NO: 1457669 - RNA, 19 nt, Homo sapiens
  misc_RNA (1)...(19): siRNA sense strand
gaacccugacuuccagaaa

SEQ ID NO: 1457670 - RNA, 19 nt, Homo sapiens
  misc_RNA (1)...(19): siRNA sense strand
ucaacucugucaugaaauc

SEQ ID NO: 1457671 - RNA, 19 nt, Homo sapiens
  misc_RNA (1)...(19): siRNA sense strand
caacagcagaccauagaau

SEQ ID NO: 1457672 - RNA, 19 nt, Homo sapiens
  misc_RNA (1)...(19): siRNA sense strand
aaaguacacugaaguccau

SEQ ID NO: 1457673 - RNA, 19 nt, Homo sapiens
  misc_RNA (1)...(19): siRNA sense strand
gaccauagaauccuugaag

SEQ ID NO: 1457674 - RNA, 19 nt, Homo sapiens
  misc_RNA (1)...(19): siRNA sense strand
guggaaaugugugacaaga

SEQ ID NO: 1457675 - RNA, 19 nt, Homo sapiens
  misc_RNA (1)...(19): siRNA sense strand
acacagcccuccauuacag

SEQ ID NO: 1457676 - RNA, 19 nt, Homo sapiens
  misc_RNA (1)...(19): siRNA sense strand
uaaaugaccccaaagcuuu

SEQ ID NO: 1457677 - RNA, 19 nt, Homo sapiens
  misc_RNA (1)...(19): siRNA sense strand
caaugaaaguacacugaag

SEQ ID NO: 1457678 - RNA, 19 nt, Homo sapiens
  misc_RNA (1)...(19): siRNA sense strand
ucuaucaacucugucauga

SEQ ID NO: 1457679 - RNA, 19 nt, Homo sapiens
  misc_RNA (1)...(19): siRNA sense strand
ucagcacccugucgucuau

SEQ ID NO: 1457680 - RNA, 19 nt, Homo sapiens
  misc_RNA (1)...(19): siRNA sense strand
cagaugggcucccucaacu

SEQ ID NO: 1457681 - RNA, 19 nt, Homo sapiens
  misc_RNA (1)...(19): siRNA sense strand
gauggccauugcucugaaa

SEQ ID NO: 1457682 - RNA, 19 nt, Homo sapiens
  misc_RNA (1)...(19): siRNA sense strand
gcauguacaaacaaugaaa

SEQ ID NO: 1457683 - RNA, 19 nt, Homo sapiens
  misc_RNA (1)...(19): siRNA sense strand
ggcaauuauuugggauaua

SEQ ID NO: 1457684 - RNA, 19 nt, Homo sapiens
  misc_RNA (1)...(19): siRNA sense strand
uuagagaaaccacccauga

SEQ ID NO: 1457685 - RNA, 19 nt, Homo sapiens
  misc_RNA (1)...(19): siRNA sense strand
ggacaugcggauuguggaa

SEQ ID NO: 1457686 - RNA, 19 nt, Homo sapiens
  misc_RNA (1)...(19): siRNA sense strand
gaacgccucccagcuggaa

SEQ ID NO: 1457687 - RNA, 19 nt, Homo sapiens
  misc_RNA (1)...(19): siRNA sense strand
cuacauagcugcuuuugag

SEQ ID NO: 1457688 - RNA, 19 nt, Homo sapiens
  misc_RNA (1)...(19): siRNA sense strand
gguaacaaagauucaaaug

SEQ ID NO: 1457689 - RNA, 19 nt, Homo sapiens
  misc_RNA (1)...(19): siRNA sense strand
gaagcugacaaagaaauug

SEQ ID NO: 1457690 - RNA, 19 nt, Homo sapiens
  misc_RNA (1)...(19): siRNA sense strand
ugaauugguggauuguuaa

SEQ ID NO: 1457691 - RNA, 19 nt, Homo sapiens
  misc_RNA (1)...(19): siRNA sense strand
guaacaaagauucaaaugg

SEQ ID NO: 1457692 - RNA, 19 nt, Homo sapiens
  misc_RNA (1)...(19): siRNA sense strand
caccaacacuugucuaagc

SEQ ID NO: 1457693 - RNA, 19 nt, Homo sapiens
  misc_RNA (1)...(19): siRNA sense strand
caaauggucggcagucaca

SEQ ID NO: 1457694 - RNA, 19 nt, Homo sapiens
  misc_RNA (1)...(19): siRNA sense strand
ggaaaucagagagagguau

SEQ ID NO: 1457695 - RNA, 19 nt, Homo sapiens
  misc_RNA (1)...(19): siRNA sense strand
ccaugcaguuaauauugaa

SEQ ID NO: 1457696 - RNA, 19 nt, Homo sapiens
  misc_RNA (1)...(19): siRNA sense strand
ccaggacacuagcacagau

SEQ ID NO: 1457697 - RNA, 19 nt, Homo sapiens
  misc_RNA (1)...(19): siRNA sense strand
caccaugcaguuaauauug

SEQ ID NO: 1457698 - RNA, 19 nt, Homo sapiens
  misc_RNA (1)...(19): siRNA sense strand
aaucacaggcaauuauuug

SEQ ID NO: 1457699 - RNA, 19 nt, Homo sapiens
  misc_RNA (1)...(19): siRNA sense strand
gaaaucugcaagcacugaa

SEQ ID NO: 1457700 - RNA, 19 nt, Homo sapiens
  misc_RNA (1)...(19): siRNA sense strand
uggccuggaucacuacauu

SEQ ID NO: 1457701 - RNA, 19 nt, Homo sapiens
  misc_RNA (1)...(19): siRNA sense strand
gcgagcagauggccauugc

SEQ ID NO: 1457702 - RNA, 19 nt, Homo sapiens
  misc_RNA (1)...(19): siRNA sense strand
aagaaacacugaagcaaua

SEQ ID NO: 1457703 - RNA, 19 nt, Homo sapiens
  misc_RNA (1)...(19): siRNA sense strand
gaagaacgguggcgaucau

SEQ ID NO: 1457704 - RNA, 19 nt, Homo sapiens
  misc_RNA (1)...(19): siRNA sense strand
gcuaugaaguggacuggaa

SEQ ID NO: 1457705 - RNA, 19 nt, Homo sapiens
  misc_RNA (1)...(19): siRNA sense strand
gaacgguggcgaucaugua

SEQ ID NO: 1457706 - RNA, 19 nt, Homo sapiens
  misc_RNA (1)...(19): siRNA sense strand
gggaaucaccauugcaaua

SEQ ID NO: 1457707 - RNA, 19 nt, Homo sapiens
  misc_RNA (1)...(19): siRNA sense strand
gaaguugccuccugcugau

SEQ ID NO: 1457708 - RNA, 19 nt, Homo sapiens
  misc_RNA (1)...(19): siRNA sense strand
cggaggagcugaacuauac

SEQ ID NO: 1457709 - RNA, 19 nt, Homo sapiens
  misc_RNA (1)...(19): siRNA sense strand
gaccugcacugguuaaaca

SEQ ID NO: 1457710 - RNA, 19 nt, Homo sapiens
  misc_RNA (1)...(19): siRNA sense strand
gcucuuccaucgucacuga

SEQ ID NO: 1457711 - RNA, 19 nt, Homo sapiens
  misc_RNA (1)...(19): siRNA sense strand
gcaagccuuccucaucuua

SEQ ID NO: 1457712 - RNA, 19 nt, Homo sapiens
  misc_RNA (1)...(19): siRNA sense strand
gaaaacacgauuuaccuua

SEQ ID NO: 1457713 - RNA, 19 nt, Homo sapiens
  misc_RNA (1)...(19): siRNA sense strand
ccacaucgcucaaaagaau

SEQ ID NO: 1457714 - RNA, 19 nt, Homo sapiens
  misc_RNA (1)...(19): siRNA sense strand
caccugaccugcacugguu

SEQ ID NO: 1457715 - RNA, 19 nt, Homo sapiens
  misc_RNA (1)...(19): siRNA sense strand
ggagugacgcuacuucuuc

SEQ ID NO: 1457716 - RNA, 19 nt, Homo sapiens
  misc_RNA (1)...(19): siRNA sense strand
aagcugagcccuucauuug

SEQ ID NO: 1457717 - RNA, 19 nt, Homo sapiens
  misc_RNA (1)...(19): siRNA sense strand
gggaaccucuaccuggauu

SEQ ID NO: 1457718 - RNA, 19 nt, Homo sapiens
  misc_RNA (1)...(19): siRNA sense strand
ccgagaaccuugggagaaa

SEQ ID NO: 1457719 - RNA, 19 nt, Homo sapiens
  misc_RNA (1)...(19): siRNA sense strand
gaaucaccauugcaauaca

SEQ ID NO: 1457720 - RNA, 19 nt, Homo sapiens
  misc_RNA (1)...(19): siRNA sense strand
ccaaagaaaacacgauuua

SEQ ID NO: 1457721 - RNA, 19 nt, Homo sapiens
  misc_RNA (1)...(19): siRNA sense strand
gcacugguuaaacaucaua

SEQ ID NO: 1457722 - RNA, 19 nt, Homo sapiens
  misc_RNA (1)...(19): siRNA sense strand
gaaacacugaagcaauaaa

SEQ ID NO: 1457723 - RNA, 19 nt, Homo sapiens
  misc_RNA (1)...(19): siRNA sense strand
gcugagcccuucauuugca

SEQ ID NO: 1457724 - RNA, 19 nt, Homo sapiens
  misc_RNA (1)...(19): siRNA sense strand
gcuacacccuaaucacaga

SEQ ID NO: 1457725 - RNA, 19 nt, Homo sapiens
  misc_RNA (1)...(19): siRNA sense strand
gaagaggaugucaccgaaa

SEQ ID NO: 1457726 - RNA, 19 nt, Homo sapiens
  misc_RNA (1)...(19): siRNA sense strand
gcggaggagcugaacuaua

SEQ ID NO: 1457727 - RNA, 19 nt, Homo sapiens
  misc_RNA (1)...(19): siRNA sense strand
aaagaaacacugaagcaau

SEQ ID NO: 1457728 - RNA, 19 nt, Homo sapiens
  misc_RNA (1)...(19): siRNA sense strand
ccuggaagcuggaccucuu

SEQ ID NO: 1457729 - RNA, 19 nt, Homo sapiens
  misc_RNA (1)...(19): siRNA sense strand
aagcaagccuuccucaucu

SEQ ID NO: 1457730 - RNA, 19 nt, Homo sapiens
  misc_RNA (1)...(19): siRNA sense strand
caggauggcuggguguaug

SEQ ID NO: 1457731 - RNA, 19 nt, Homo sapiens
  misc_RNA (1)...(19): siRNA sense strand
gaaaagcaaagcccaaaga

SEQ ID NO: 1457732 - RNA, 19 nt, Homo sapiens
  misc_RNA (1)...(19): siRNA sense strand
ggaaucaccauugcaauac

SEQ ID NO: 1457733 - RNA, 19 nt, Homo sapiens
  misc_RNA (1)...(19): siRNA sense strand
gaagcaauaaagauaaugg

SEQ ID NO: 1457734 - RNA, 19 nt, Homo sapiens
  misc_RNA (1)...(19): siRNA sense strand
aaacacgauuuaccuuaag

SEQ ID NO: 1457735 - RNA, 19 nt, Homo sapiens
  misc_RNA (1)...(19): siRNA sense strand
ccuaaucacagaauuuguu

SEQ ID NO: 1457736 - RNA, 19 nt, Homo sapiens
  misc_RNA (1)...(19): siRNA sense strand
aaagcaaagcccaaagaaa

SEQ ID NO: 1457737 - RNA, 19 nt, Homo sapiens
  misc_RNA (1)...(19): siRNA sense strand
uaaagauaauggaccacau

SEQ ID NO: 1457738 - RNA, 19 nt, Homo sapiens
  misc_RNA (1)...(19): siRNA sense strand
cacugaagcaauaaagaua

SEQ ID NO: 1457739 - RNA, 19 nt, Homo sapiens
  misc_RNA (1)...(19): siRNA sense strand
cuaccuggauuuccuuuac

SEQ ID NO: 1457740 - RNA, 19 nt, Homo sapiens
  misc_RNA (1)...(19): siRNA sense strand
guugccuccugcugauuua

SEQ ID NO: 1457741 - RNA, 19 nt, Homo sapiens
  misc_RNA (1)...(19): siRNA sense strand
cuacuuugcagacagguuu

SEQ ID NO: 1457742 - RNA, 19 nt, Homo sapiens
  misc_RNA (1)...(19): siRNA sense strand
aagcaaagcccaaagaaaa

SEQ ID NO: 1457743 - RNA, 19 nt, Homo sapiens
  misc_RNA (1)...(19): siRNA sense strand
gaaccucuaccuggauuuc

SEQ ID NO: 1457744 - RNA, 19 nt, Homo sapiens
  misc_RNA (1)...(19): siRNA sense strand
ggugaaugcugagcuguac

SEQ ID NO: 1457745 - RNA, 19 nt, Homo sapiens
  misc_RNA (1)...(19): siRNA sense strand
ggcucgggcuccagaagaa

SEQ ID NO: 1457746 - RNA, 19 nt, Homo sapiens
  misc_RNA (1)...(19): siRNA sense strand
ucauagcccucaucaccau

SEQ ID NO: 1457747 - RNA, 19 nt, Homo sapiens
  misc_RNA (1)...(19): siRNA sense strand
ucucgguguuggcuacuuu

SEQ ID NO: 1457748 - RNA, 19 nt, Homo sapiens
  misc_RNA (1)...(19): siRNA sense strand
uuacuccgcucuggucgaa

SEQ ID NO: 1457749 - RNA, 19 nt, Homo sapiens
  misc_RNA (1)...(19): siRNA sense strand
aaucaccauugcaauacaa

SEQ ID NO: 1457750 - RNA, 19 nt, Homo sapiens
  misc_RNA (1)...(19): siRNA sense strand
aaagcugagcccuucauuu

SEQ ID NO: 1457751 - RNA, 19 nt, Homo sapiens
  misc_RNA (1)...(19): siRNA sense strand
cagccugccucgucaugau

SEQ ID NO: 1457752 - RNA, 19 nt, Homo sapiens
  misc_RNA (1)...(19): siRNA sense strand
cggacucugugcucuauca

SEQ ID NO: 1457753 - RNA, 19 nt, Homo sapiens
  misc_RNA (1)...(19): siRNA sense strand
acacugaagcaauaaagau

SEQ ID NO: 1457754 - RNA, 19 nt, Homo sapiens
  misc_RNA (1)...(19): siRNA sense strand
caccguggaugacauucug

SEQ ID NO: 1457755 - RNA, 19 nt, Homo sapiens
  misc_RNA (1)...(19): siRNA sense strand
cagacagguuuggccguaa

SEQ ID NO: 1457756 - RNA, 19 nt, Homo sapiens
  misc_RNA (1)...(19): siRNA sense strand
ugccagagaccaugaagga

SEQ ID NO: 1457757 - RNA, 19 nt, Homo sapiens
  misc_RNA (1)...(19): siRNA sense strand
cgguggcuguuaucacaaa

SEQ ID NO: 1457758 - RNA, 19 nt, Homo sapiens
  misc_RNA (1)...(19): siRNA sense strand
caucgucacugaguucaac

SEQ ID NO: 1457759 - RNA, 19 nt, Homo sapiens
  misc_RNA (1)...(19): siRNA sense strand
gccgagaaccuugggagaa

SEQ ID NO: 1457760 - RNA, 19 nt, Homo sapiens
  misc_RNA (1)...(19): siRNA sense strand
gggagugacgcuacuucuu

SEQ ID NO: 1457761 - RNA, 19 nt, Homo sapiens
  misc_RNA (1)...(19): siRNA sense strand
ucaaaagaaugggaaguug

SEQ ID NO: 1457762 - RNA, 19 nt, Homo sapiens
  misc_RNA (1)...(19): siRNA sense strand
ggaagcuggaccucuuuca

SEQ ID NO: 1457763 - RNA, 19 nt, Homo sapiens
  misc_RNA (1)...(19): siRNA sense strand
cacggacucugugcucuau

SEQ ID NO: 1457764 - RNA, 19 nt, Homo sapiens
  misc_RNA (1)...(19): siRNA sense strand
ucacggacucugugcucua

SEQ ID NO: 1457765 - RNA, 19 nt, Homo sapiens
  misc_RNA (1)...(19): siRNA sense strand
gugcaggcgcuaugaagug

SEQ ID NO: 1457766 - RNA, 19 nt, Homo sapiens
  misc_RNA (1)...(19): siRNA sense strand
cuaaucacagaauuuguug

SEQ ID NO: 1457767 - RNA, 19 nt, Homo sapiens
  misc_RNA (1)...(19): siRNA sense strand
ccaugaaggacgccgagaa

SEQ ID NO: 1457768 - RNA, 19 nt, Homo sapiens
  misc_RNA (1)...(19): siRNA sense strand
cugcacugguuaaacauca

SEQ ID NO: 1457769 - RNA, 19 nt, Homo sapiens
  misc_RNA (1)...(19): siRNA sense strand
gaagcuggaccucuuucag

SEQ ID NO: 1457770 - RNA, 19 nt, Homo sapiens
  misc_RNA (1)...(19): siRNA sense strand
aagccuuccucaucuuaug

SEQ ID NO: 1457771 - RNA, 19 nt, Homo sapiens
  misc_RNA (1)...(19): siRNA sense strand
aaagauaauggaccacauc

SEQ ID NO: 1457772 - RNA, 19 nt, Homo sapiens
  misc_RNA (1)...(19): siRNA sense strand
acacccuaaucacagaauu

SEQ ID NO: 1457773 - RNA, 19 nt, Homo sapiens
  misc_RNA (1)...(19): siRNA sense strand
cauguguguuggccgaaug

SEQ ID NO: 1457774 - RNA, 19 nt, Homo sapiens
  misc_RNA (1)...(19): siRNA sense strand
aagaggaugucaccgaaaa

SEQ ID NO: 1457775 - RNA, 19 nt, Homo sapiens
  misc_RNA (1)...(19): siRNA sense strand
aaacacugaagcaauaaag

SEQ ID NO: 1457776 - RNA, 19 nt, Homo sapiens
  misc_RNA (1)...(19): siRNA sense strand
cacccuaaucacagaauuu

SEQ ID NO: 1457777 - RNA, 19 nt, Homo sapiens
  misc_RNA (1)...(19): siRNA sense strand
agacagguuuggccguaag

SEQ ID NO: 1457778 - RNA, 19 nt, Homo sapiens
  misc_RNA (1)...(19): siRNA sense strand
cugcggaggagcugaacua

SEQ ID NO: 1457779 - RNA, 19 nt, Homo sapiens
  misc_RNA (1)...(19): siRNA sense strand
gagaaaagcaaagcccaaa

SEQ ID NO: 1457780 - RNA, 19 nt, Homo sapiens
  misc_RNA (1)...(19): siRNA sense strand
agaaacacugaagcaauaa

SEQ ID NO: 1457781 - RNA, 19 nt, Homo sapiens
  misc_RNA (1)...(19): siRNA sense strand
gaccacaucgcucaaaaga

SEQ ID NO: 1457782 - RNA, 19 nt, Homo sapiens
  misc_RNA (1)...(19): siRNA sense strand
aagaaacacugaagcaaua

SEQ ID NO: 1457783 - RNA, 19 nt, Homo sapiens
  misc_RNA (1)...(19): siRNA sense strand
gaagaacgguggcgaucau

SEQ ID NO: 1457784 - RNA, 19 nt, Homo sapiens
  misc_RNA (1)...(19): siRNA sense strand
gcuaugaaguggacuggaa

SEQ ID NO: 1457785 - RNA, 19 nt, Homo sapiens
  misc_RNA (1)...(19): siRNA sense strand
gaacgguggcgaucaugua

SEQ ID NO: 1457786 - RNA, 19 nt, Homo sapiens
  misc_RNA (1)...(19): siRNA sense strand
gggaaucaccauugcaaua

SEQ ID NO: 1457787 - RNA, 19 nt, Homo sapiens
  misc_RNA (1)...(19): siRNA sense strand
gaaguugccuccugcugau

SEQ ID NO: 1457788 - RNA, 19 nt, Homo sapiens
  misc_RNA (1)...(19): siRNA sense strand
cggaggagcugaacuauac

SEQ ID NO: 1457789 - RNA, 19 nt, Homo sapiens
  misc_RNA (1)...(19): siRNA sense strand
gaccugcacugguuaaaca

SEQ ID NO: 1457790 - RNA, 19 nt, Homo sapiens
  misc_RNA (1)...(19): siRNA sense strand
gcucuuccaucgucacuga

SEQ ID NO: 1457791 - RNA, 19 nt, Homo sapiens
  misc_RNA (1)...(19): siRNA sense strand
gcaagccuuccucaucuua

SEQ ID NO: 1457792 - RNA, 19 nt, Homo sapiens
  misc_RNA (1)...(19): siRNA sense strand
gaaaacacgauuuaccuua

SEQ ID NO: 1457793 - RNA, 19 nt, Homo sapiens
  misc_RNA (1)...(19): siRNA sense strand
ccacaucgcucaaaagaau

SEQ ID NO: 1457794 - RNA, 19 nt, Homo sapiens
  misc_RNA (1)...(19): siRNA sense strand
caccugaccugcacugguu

SEQ ID NO: 1457795 - RNA, 19 nt, Homo sapiens
  misc_RNA (1)...(19): siRNA sense strand
ggagugacgcuacuucuuc

SEQ ID NO: 1457796 - RNA, 19 nt, Homo sapiens
  misc_RNA (1)...(19): siRNA sense strand
aagcugagcccuucauuug

SEQ ID NO: 1457797 - RNA, 19 nt, Homo sapiens
  misc_RNA (1)...(19): siRNA sense strand
gggaaccucuaccuggauu

SEQ ID NO: 1457798 - RNA, 19 nt, Homo sapiens
  misc_RNA (1)...(19): siRNA sense strand
ccgagaaccuugggagaaa

SEQ ID NO: 1457799 - RNA, 19 nt, Homo sapiens
  misc_RNA (1)...(19): siRNA sense strand
gaaucaccauugcaauaca

SEQ ID NO: 1457800 - RNA, 19 nt, Homo sapiens
  misc_RNA (1)...(19): siRNA sense strand
ccaaagaaaacacgauuua

SEQ ID NO: 1457801 - RNA, 19 nt, Homo sapiens
  misc_RNA (1)...(19): siRNA sense strand
gcacugguuaaacaucaua

SEQ ID NO: 1457802 - RNA, 19 nt, Homo sapiens
  misc_RNA (1)...(19): siRNA sense strand
gaaacacugaagcaauaaa

SEQ ID NO: 1457803 - RNA, 19 nt, Homo sapiens
  misc_RNA (1)...(19): siRNA sense strand
gcugagcccuucauuugca

SEQ ID NO: 1457804 - RNA, 19 nt, Homo sapiens
  misc_RNA (1)...(19): siRNA sense strand
gcuacacccuaaucacaga

SEQ ID NO: 1457805 - RNA, 19 nt, Homo sapiens
  misc_RNA (1)...(19): siRNA sense strand
gaagaggaugucaccgaaa

SEQ ID NO: 1457806 - RNA, 19 nt, Homo sapiens
  misc_RNA (1)...(19): siRNA sense strand
gcggaggagcugaacuaua

SEQ ID NO: 1457807 - RNA, 19 nt, Homo sapiens
  misc_RNA (1)...(19): siRNA sense strand
aaagaaacacugaagcaau

SEQ ID NO: 1457808 - RNA, 19 nt, Homo sapiens
  misc_RNA (1)...(19): siRNA sense strand
ccuggaagcuggaccucuu

SEQ ID NO: 1457809 - RNA, 19 nt, Homo sapiens
  misc_RNA (1)...(19): siRNA sense strand
aagcaagccuuccucaucu

SEQ ID NO: 1457810 - RNA, 19 nt, Homo sapiens
  misc_RNA (1)...(19): siRNA sense strand
caggauggcuggguguaug

SEQ ID NO: 1457811 - RNA, 19 nt, Homo sapiens
  misc_RNA (1)...(19): siRNA sense strand
gaaaagcaaagcccaaaga

SEQ ID NO: 1457812 - RNA, 19 nt, Homo sapiens
  misc_RNA (1)...(19): siRNA sense strand
ggaaucaccauugcaauac

SEQ ID NO: 1457813 - RNA, 19 nt, Homo sapiens
  misc_RNA (1)...(19): siRNA sense strand
gaagcaauaaagauaaugg

SEQ ID NO: 1457814 - RNA, 19 nt, Homo sapiens
  misc_RNA (1)...(19): siRNA sense strand
ccuaaucacagaauuuguu

SEQ ID NO: 1457815 - RNA, 19 nt, Homo sapiens
  misc_RNA (1)...(19): siRNA sense strand
aaagcaaagcccaaagaaa

SEQ ID NO: 1457816 - RNA, 19 nt, Homo sapiens
  misc_RNA (1)...(19): siRNA sense strand
uaaagauaauggaccacau

SEQ ID NO: 1457817 - RNA, 19 nt, Homo sapiens
  misc_RNA (1)...(19): siRNA sense strand
cacugaagcaauaaagaua

SEQ ID NO: 1457818 - RNA, 19 nt, Homo sapiens
  misc_RNA (1)...(19): siRNA sense strand
cuaccuggauuuccuuuac

SEQ ID NO: 1457819 - RNA, 19 nt, Homo sapiens
  misc_RNA (1)...(19): siRNA sense strand
guugccuccugcugauuua

SEQ ID NO: 1457820 - RNA, 19 nt, Homo sapiens
  misc_RNA (1)...(19): siRNA sense strand
cuacuuugcagacagguuu

SEQ ID NO: 1457821 - RNA, 19 nt, Homo sapiens
  misc_RNA (1)...(19): siRNA sense strand
aagcaaagcccaaagaaaa

SEQ ID NO: 1457822 - RNA, 19 nt, Homo sapiens
  misc_RNA (1)...(19): siRNA sense strand
gaaccucuaccuggauuuc

SEQ ID NO: 1457823 - RNA, 19 nt, Homo sapiens
  misc_RNA (1)...(19): siRNA sense strand
ggugaaugcugagcuguac

SEQ ID NO: 1457824 - RNA, 19 nt, Homo sapiens
  misc_RNA (1)...(19): siRNA sense strand
ggcucgggcuccagaagaa

SEQ ID NO: 1457825 - RNA, 19 nt, Homo sapiens
  misc_RNA (1)...(19): siRNA sense strand
ucauagcccucaucaccau

SEQ ID NO: 1457826 - RNA, 19 nt, Homo sapiens
  misc_RNA (1)...(19): siRNA sense strand
ucucgguguuggcuacuuu

SEQ ID NO: 1457827 - RNA, 19 nt, Homo sapiens
  misc_RNA (1)...(19): siRNA sense strand
uuacuccgcucuggucgaa

SEQ ID NO: 1457828 - RNA, 19 nt, Homo sapiens
  misc_RNA (1)...(19): siRNA sense strand
aaucaccauugcaauacaa

SEQ ID NO: 1457829 - RNA, 19 nt, Homo sapiens
  misc_RNA (1)...(19): siRNA sense strand
aaagcugagcccuucauuu

SEQ ID NO: 1457830 - RNA, 19 nt, Homo sapiens
  misc_RNA (1)...(19): siRNA sense strand
cagccugccucgucaugau

SEQ ID NO: 1457831 - RNA, 19 nt, Homo sapiens
  misc_RNA (1)...(19): siRNA sense strand
cggacucugugcucuauca

SEQ ID NO: 1457832 - RNA, 19 nt, Homo sapiens
  misc_RNA (1)...(19): siRNA sense strand
acacugaagcaauaaagau

SEQ ID NO: 1457833 - RNA, 19 nt, Homo sapiens
  misc_RNA (1)...(19): siRNA sense strand
caccguggaugacauucug

SEQ ID NO: 1457834 - RNA, 19 nt, Homo sapiens
  misc_RNA (1)...(19): siRNA sense strand
cagacagguuuggccguaa

SEQ ID NO: 1457835 - RNA, 19 nt, Homo sapiens
  misc_RNA (1)...(19): siRNA sense strand
ugccagagaccaugaagga

SEQ ID NO: 1457836 - RNA, 19 nt, Homo sapiens
  misc_RNA (1)...(19): siRNA sense strand
cgguggcuguuaucacaaa

SEQ ID NO: 1457837 - RNA, 19 nt, Homo sapiens
  misc_RNA (1)...(19): siRNA sense strand
ucaaaagaaugggaaguug

SEQ ID NO: 1457838 - RNA, 19 nt, Homo sapiens
  misc_RNA (1)...(19): siRNA sense strand
gccgagaaccuugggagaa

SEQ ID NO: 1457839 - RNA, 19 nt, Homo sapiens
  misc_RNA (1)...(19): siRNA sense strand
caucgucacugaguucaac

SEQ ID NO: 1457840 - RNA, 19 nt, Homo sapiens
  misc_RNA (1)...(19): siRNA sense strand
gggagugacgcuacuucuu

SEQ ID NO: 1457841 - RNA, 19 nt, Homo sapiens
  misc_RNA (1)...(19): siRNA sense strand
ggaagcuggaccucuuuca

SEQ ID NO: 1457842 - RNA, 19 nt, Homo sapiens
  misc_RNA (1)...(19): siRNA sense strand
cacggacucugugcucuau

SEQ ID NO: 1457843 - RNA, 19 nt, Homo sapiens
  misc_RNA (1)...(19): siRNA sense strand
ucacggacucugugcucua

SEQ ID NO: 1457844 - RNA, 19 nt, Homo sapiens
  misc_RNA (1)...(19): siRNA sense strand
gugcaggcgcuaugaagug

SEQ ID NO: 1457845 - RNA, 19 nt, Homo sapiens
  misc_RNA (1)...(19): siRNA sense strand
cuaaucacagaauuuguug

SEQ ID NO: 1457846 - RNA, 19 nt, Homo sapiens
  misc_RNA (1)...(19): siRNA sense strand
ccaugaaggacgccgagaa

SEQ ID NO: 1457847 - RNA, 19 nt, Homo sapiens
  misc_RNA (1)...(19): siRNA sense strand
cugcacugguuaaacauca

SEQ ID NO: 1457848 - RNA, 19 nt, Homo sapiens
  misc_RNA (1)...(19): siRNA sense strand
aagccuuccucaucuuaug

SEQ ID NO: 1457849 - RNA, 19 nt, Homo sapiens
  misc_RNA (1)...(19): siRNA sense strand
gaagcuggaccucuuucag

SEQ ID NO: 1457850 - RNA, 19 nt, Homo sapiens
  misc_RNA (1)...(19): siRNA sense strand
aaagauaauggaccacauc

SEQ ID NO: 1457851 - RNA, 19 nt, Homo sapiens
  misc_RNA (1)...(19): siRNA sense strand
acacccuaaucacagaauu

SEQ ID NO: 1457852 - RNA, 19 nt, Homo sapiens
  misc_RNA (1)...(19): siRNA sense strand
cauguguguuggccgaaug

SEQ ID NO: 1457853 - RNA, 19 nt, Homo sapiens
  misc_RNA (1)...(19): siRNA sense strand
aagaggaugucaccgaaaa

SEQ ID NO: 1457854 - RNA, 19 nt, Homo sapiens
  misc_RNA (1)...(19): siRNA sense strand
aaacacugaagcaauaaag

SEQ ID NO: 1457855 - RNA, 19 nt, Homo sapiens
  misc_RNA (1)...(19): siRNA sense strand
cacccuaaucacagaauuu

SEQ ID NO: 1457856 - RNA, 19 nt, Homo sapiens
  misc_RNA (1)...(19): siRNA sense strand
agacagguuuggccguaag

SEQ ID NO: 1457857 - RNA, 19 nt, Homo sapiens
  misc_RNA (1)...(19): siRNA sense strand
cugcggaggagcugaacua

SEQ ID NO: 1457858 - RNA, 19 nt, Homo sapiens
  misc_RNA (1)...(19): siRNA sense strand
gagaaaagcaaagcccaaa

SEQ ID NO: 1457859 - RNA, 19 nt, Homo sapiens
  misc_RNA (1)...(19): siRNA sense strand
agaaacacugaagcaauaa

SEQ ID NO: 1457860 - RNA, 19 nt, Homo sapiens
  misc_RNA (1)...(19): siRNA sense strand
gaccacaucgcucaaaaga

SEQ ID NO: 1457861 - RNA, 19 nt, Homo sapiens
  misc_RNA (1)...(19): siRNA sense strand
gauaguggcucuugauuua

SEQ ID NO: 1457862 - RNA, 19 nt, Homo sapiens
  misc_RNA (1)...(19): siRNA sense strand
gaauuggccugaccucuua

SEQ ID NO: 1457863 - RNA, 19 nt, Homo sapiens
  misc_RNA (1)...(19): siRNA sense strand
guauagagaugcagccuua

SEQ ID NO: 1457864 - RNA, 19 nt, Homo sapiens
  misc_RNA (1)...(19): siRNA sense strand
gaacugcugccacauauuu

SEQ ID NO: 1457865 - RNA, 19 nt, Homo sapiens
  misc_RNA (1)...(19): siRNA sense strand
ccaaagacguuguuagaga

SEQ ID NO: 1457866 - RNA, 19 nt, Homo sapiens
  misc_RNA (1)...(19): siRNA sense strand
guaaauaccagcauaagaa

SEQ ID NO: 1457867 - RNA, 19 nt, Homo sapiens
  misc_RNA (1)...(19): siRNA sense strand
caaccuaaauccagaauuc

SEQ ID NO: 1457868 - RNA, 19 nt, Homo sapiens
  misc_RNA (1)...(19): siRNA sense strand
caucaugauucccaaauuu

SEQ ID NO: 1457869 - RNA, 19 nt, Homo sapiens
  misc_RNA (1)...(19): siRNA sense strand
uaaguugauuccuguguua

SEQ ID NO: 1457870 - RNA, 19 nt, Homo sapiens
  misc_RNA (1)...(19): siRNA sense strand
uaaggcaucuuccuaaguu

SEQ ID NO: 1457871 - RNA, 19 nt, Homo sapiens
  misc_RNA (1)...(19): siRNA sense strand
gcaaauguguaucgugaug

SEQ ID NO: 1457872 - RNA, 19 nt, Homo sapiens
  misc_RNA (1)...(19): siRNA sense strand
caaagacguuguuagagaa

SEQ ID NO: 1457873 - RNA, 19 nt, Homo sapiens
  misc_RNA (1)...(19): siRNA sense strand
uggaacaacuuaaucagua

SEQ ID NO: 1457874 - RNA, 19 nt, Homo sapiens
  misc_RNA (1)...(19): siRNA sense strand
caucauggauuaacccaaa

SEQ ID NO: 1457875 - RNA, 19 nt, Homo sapiens
  misc_RNA (1)...(19): siRNA sense strand
caucaugaauggguuguua

SEQ ID NO: 1457876 - RNA, 19 nt, Homo sapiens
  misc_RNA (1)...(19): siRNA sense strand
uuacaguucuucaagcaua

SEQ ID NO: 1457877 - RNA, 19 nt, Homo sapiens
  misc_RNA (1)...(19): siRNA sense strand
ccaguuuccucuucccuua

SEQ ID NO: 1457878 - RNA, 19 nt, Homo sapiens
  misc_RNA (1)...(19): siRNA sense strand
gaaguaacauccugacacu

SEQ ID NO: 1457879 - RNA, 19 nt, Homo sapiens
  misc_RNA (1)...(19): siRNA sense strand
ugaauggguuguuaaagaa

SEQ ID NO: 1457880 - RNA, 19 nt, Homo sapiens
  misc_RNA (1)...(19): siRNA sense strand
gcaaagauguacucguaag

SEQ ID NO: 1457881 - RNA, 19 nt, Homo sapiens
  misc_RNA (1)...(19): siRNA sense strand
ggaacaacuuaaucaguau

SEQ ID NO: 1457882 - RNA, 19 nt, Homo sapiens
  misc_RNA (1)...(19): siRNA sense strand
acacguaccugaagccauu

SEQ ID NO: 1457883 - RNA, 19 nt, Homo sapiens
  misc_RNA (1)...(19): siRNA sense strand
gagcuuauuccucaccuua

SEQ ID NO: 1457884 - RNA, 19 nt, Homo sapiens
  misc_RNA (1)...(19): siRNA sense strand
gaagauuugugaagauucu

SEQ ID NO: 1457885 - RNA, 19 nt, Homo sapiens
  misc_RNA (1)...(19): siRNA sense strand
aaacaaugcucaaccagau

SEQ ID NO: 1457886 - RNA, 19 nt, Homo sapiens
  misc_RNA (1)...(19): siRNA sense strand
gacucaagcucuaauguug

SEQ ID NO: 1457887 - RNA, 19 nt, Homo sapiens
  misc_RNA (1)...(19): siRNA sense strand
ggccugaccucuuaccaaa

SEQ ID NO: 1457888 - RNA, 19 nt, Homo sapiens
  misc_RNA (1)...(19): siRNA sense strand
ucaaauggguauagagaug

SEQ ID NO: 1457889 - RNA, 19 nt, Homo sapiens
  misc_RNA (1)...(19): siRNA sense strand
gcuaaugccuccacugauc

SEQ ID NO: 1457890 - RNA, 19 nt, Homo sapiens
  misc_RNA (1)...(19): siRNA sense strand
ggacaucauuuaaacaaac

SEQ ID NO: 1457891 - RNA, 19 nt, Homo sapiens
  misc_RNA (1)...(19): siRNA sense strand
uuucagaacuucccaaaug

SEQ ID NO: 1457892 - RNA, 19 nt, Homo sapiens
  misc_RNA (1)...(19): siRNA sense strand
ggaaaaggauucagcauuc

SEQ ID NO: 1457893 - RNA, 19 nt, Homo sapiens
  misc_RNA (1)...(19): siRNA sense strand
gagaauacagcaauaacaa

SEQ ID NO: 1457894 - RNA, 19 nt, Homo sapiens
  misc_RNA (1)...(19): siRNA sense strand
ugaagauucugcugagauu

SEQ ID NO: 1457895 - RNA, 19 nt, Homo sapiens
  misc_RNA (1)...(19): siRNA sense strand
gcacaagccaugcuaaaca

SEQ ID NO: 1457896 - RNA, 19 nt, Homo sapiens
  misc_RNA (1)...(19): siRNA sense strand
auaacaugcuggacucuua

SEQ ID NO: 1457897 - RNA, 19 nt, Homo sapiens
  misc_RNA (1)...(19): siRNA sense strand
gaagaugaacccacaagau

SEQ ID NO: 1457898 - RNA, 19 nt, Homo sapiens
  misc_RNA (1)...(19): siRNA sense strand
gccguugcaucauggauua

SEQ ID NO: 1457899 - RNA, 19 nt, Homo sapiens
  misc_RNA (1)...(19): siRNA sense strand
auaugaagcuccagauaaa

SEQ ID NO: 1457900 - RNA, 19 nt, Homo sapiens
  misc_RNA (1)...(19): siRNA sense strand
ccagaaauggaacauguua

SEQ ID NO: 1457901 - RNA, 19 nt, Homo sapiens
  misc_RNA (1)...(19): siRNA sense strand
cauaagaaccugcucauuc

SEQ ID NO: 1457902 - RNA, 19 nt, Homo sapiens
  misc_RNA (1)...(19): siRNA sense strand
gggcaugauuccauacuug

SEQ ID NO: 1457903 - RNA, 19 nt, Homo sapiens
  misc_RNA (1)...(19): siRNA sense strand
gaugaacugcugccacaua

SEQ ID NO: 1457904 - RNA, 19 nt, Homo sapiens
  misc_RNA (1)...(19): siRNA sense strand
ugaugaagauggaauugaa

SEQ ID NO: 1457905 - RNA, 19 nt, Homo sapiens
  misc_RNA (1)...(19): siRNA sense strand
uaagggugauguugaagaa

SEQ ID NO: 1457906 - RNA, 19 nt, Homo sapiens
  misc_RNA (1)...(19): siRNA sense strand
uuuagaagccugugaauuu

SEQ ID NO: 1457907 - RNA, 19 nt, Homo sapiens
  misc_RNA (1)...(19): siRNA sense strand
gaacuucccaaauggugua

SEQ ID NO: 1457908 - RNA, 19 nt, Homo sapiens
  misc_RNA (1)...(19): siRNA sense strand
ugaguggucuuaucuugaa

SEQ ID NO: 1457909 - RNA, 19 nt, Homo sapiens
  misc_RNA (1)...(19): siRNA sense strand
guuagagaauacagcaaua

SEQ ID NO: 1457910 - RNA, 19 nt, Homo sapiens
  misc_RNA (1)...(19): siRNA sense strand
guuaaagaaucaggcauuu

SEQ ID NO: 1457911 - RNA, 19 nt, Homo sapiens
  misc_RNA (1)...(19): siRNA sense strand
augcaaagauguacucgua

SEQ ID NO: 1457912 - RNA, 19 nt, Homo sapiens
  misc_RNA (1)...(19): siRNA sense strand
gguguaacagacuuuauua

SEQ ID NO: 1457913 - RNA, 19 nt, Homo sapiens
  misc_RNA (1)...(19): siRNA sense strand
ggacuuggaggcaacauug

SEQ ID NO: 1457914 - RNA, 19 nt, Homo sapiens
  misc_RNA (1)...(19): siRNA sense strand
ucaaccagaucaauaugaa

SEQ ID NO: 1457915 - RNA, 19 nt, Homo sapiens
  misc_RNA (1)...(19): siRNA sense strand
gagcaagggcuucagcaaa

SEQ ID NO: 1457916 - RNA, 19 nt, Homo sapiens
  misc_RNA (1)...(19): siRNA sense strand
caacaagagaguacaagaa

SEQ ID NO: 1457917 - RNA, 19 nt, Homo sapiens
  misc_RNA (1)...(19): siRNA sense strand
ugacuccucuccucugauu

SEQ ID NO: 1457918 - RNA, 19 nt, Homo sapiens
  misc_RNA (1)...(19): siRNA sense strand
agagacauguucuguaaga

SEQ ID NO: 1457919 - RNA, 19 nt, Homo sapiens
  misc_RNA (1)...(19): siRNA sense strand
agaggaggcuuguacagaa

SEQ ID NO: 1457920 - RNA, 19 nt, Homo sapiens
  misc_RNA (1)...(19): siRNA sense strand
gaagaagacgaaacgauuc

SEQ ID NO: 1457921 - RNA, 19 nt, Homo sapiens
  misc_RNA (1)...(19): siRNA sense strand
gaaguacucagacauagau

SEQ ID NO: 1457922 - RNA, 19 nt, Homo sapiens
  misc_RNA (1)...(19): siRNA sense strand
cagaagauuugugaagauu

SEQ ID NO: 1457923 - RNA, 19 nt, Homo sapiens
  misc_RNA (1)...(19): siRNA sense strand
ugaagaagacgaaacgauu

SEQ ID NO: 1457924 - RNA, 19 nt, Homo sapiens
  misc_RNA (1)...(19): siRNA sense strand
guggaaaccugacgagcaa

SEQ ID NO: 1457925 - RNA, 19 nt, Homo sapiens
  misc_RNA (1)...(19): siRNA sense strand
guacucagacauagauauu

SEQ ID NO: 1457926 - RNA, 19 nt, Homo sapiens
  misc_RNA (1)...(19): siRNA sense strand
ggacucaagaucaagauga

SEQ ID NO: 1457927 - RNA, 19 nt, Homo sapiens
  misc_RNA (1)...(19): siRNA sense strand
ugcauuagcuggugaugaa

SEQ ID NO: 1457928 - RNA, 19 nt, Homo sapiens
  misc_RNA (1)...(19): siRNA sense strand
gaagaauaaugugaaagca

SEQ ID NO: 1457929 - RNA, 19 nt, Homo sapiens
  misc_RNA (1)...(19): siRNA sense strand
ggacucaagcucuaauguu

SEQ ID NO: 1457930 - RNA, 19 nt, Homo sapiens
  misc_RNA (1)...(19): siRNA sense strand
caaaugguguaacagacuu

SEQ ID NO: 1457931 - RNA, 19 nt, Homo sapiens
  misc_RNA (1)...(19): siRNA sense strand
ggaacauguuaaaggauga

SEQ ID NO: 1457932 - RNA, 19 nt, Homo sapiens
  misc_RNA (1)...(19): siRNA sense strand
gcuuauuccucaccuuauu

SEQ ID NO: 1457933 - RNA, 19 nt, Homo sapiens
  misc_RNA (1)...(19): siRNA sense strand
gacgaaacgauuccugaua

SEQ ID NO: 1457934 - RNA, 19 nt, Homo sapiens
  misc_RNA (1)...(19): siRNA sense strand
gaacagccaauaugcaaag

SEQ ID NO: 1457935 - RNA, 19 nt, Homo sapiens
  misc_RNA (1)...(19): siRNA sense strand
gaacccacaagaucauuga

SEQ ID NO: 1457936 - RNA, 19 nt, Homo sapiens
  misc_RNA (1)...(19): siRNA sense strand
cauaagagacaaugaggaa

SEQ ID NO: 1457937 - RNA, 19 nt, Homo sapiens
  misc_RNA (1)...(19): siRNA sense strand
caauuggucgucuugguua

SEQ ID NO: 1457938 - RNA, 19 nt, Homo sapiens
  misc_RNA (1)...(19): siRNA sense strand
uaaucaguauccagacuuu

SEQ ID NO: 1457939 - RNA, 19 nt, Homo sapiens
  misc_RNA (1)...(19): siRNA sense strand
gcaccagcuuguagaaauc

SEQ ID NO: 1457940 - RNA, 19 nt, Homo sapiens
  misc_RNA (1)...(19): siRNA sense strand
gagaugcagccuuauauuc

SEQ ID NO: 1457941 - RNA, 19 nt, Homo sapiens
  misc_RNA (1)...(19): siRNA sense strand
gccgagcacuugugauguu

SEQ ID NO: 1457942 - RNA, 19 nt, Homo sapiens
  misc_RNA (1)...(19): siRNA sense strand
caauaugaagcuccagaua

SEQ ID NO: 1457943 - RNA, 19 nt, Homo sapiens
  misc_RNA (1)...(19): siRNA sense strand
caugaaguacucagacaua

SEQ ID NO: 1457944 - RNA, 19 nt, Homo sapiens
  misc_RNA (1)...(19): siRNA sense strand
acagaggacucaagaucaa

SEQ ID NO: 1457945 - RNA, 19 nt, Homo sapiens
  misc_RNA (1)...(19): siRNA sense strand
gcaugugucaaucaguuua

SEQ ID NO: 1457946 - RNA, 19 nt, Homo sapiens
  misc_RNA (1)...(19): siRNA sense strand
uuguauagcugauuucaug

SEQ ID NO: 1457947 - RNA, 19 nt, Homo sapiens
  misc_RNA (1)...(19): siRNA sense strand
gcuaaacaaugcucaacca

SEQ ID NO: 1457948 - RNA, 19 nt, Homo sapiens
  misc_RNA (1)...(19): siRNA sense strand
uuccuuaccuugcuuauau

SEQ ID NO: 1457949 - RNA, 19 nt, Homo sapiens
  misc_RNA (1)...(19): siRNA sense strand
cagccaauaugcaaagaug

SEQ ID NO: 1457950 - RNA, 19 nt, Homo sapiens
  misc_RNA (1)...(19): siRNA sense strand
aauaaggucucacgcuguu

SEQ ID NO: 1457951 - RNA, 19 nt, Homo sapiens
  misc_RNA (1)...(19): siRNA sense strand
gcucuugugcguuccauaa

SEQ ID NO: 1457952 - RNA, 19 nt, Homo sapiens
  misc_RNA (1)...(19): siRNA sense strand
gccaauaugcaaagaugua

SEQ ID NO: 1457953 - RNA, 19 nt, Homo sapiens
  misc_RNA (1)...(19): siRNA sense strand
gacucaagaucaagaugaa

SEQ ID NO: 1457954 - RNA, 19 nt, Homo sapiens
  misc_RNA (1)...(19): siRNA sense strand
gucaaucaguuuaucauca

SEQ ID NO: 1457955 - RNA, 19 nt, Homo sapiens
  misc_RNA (1)...(19): siRNA sense strand
cagagaaccgugcaacaaa

SEQ ID NO: 1457956 - RNA, 19 nt, Homo sapiens
  misc_RNA (1)...(19): siRNA sense strand
caccaaagacguuguuaga

SEQ ID NO: 1457957 - RNA, 19 nt, Homo sapiens
  misc_RNA (1)...(19): siRNA sense strand
aauaugaagcuccagauaa

SEQ ID NO: 1457958 - RNA, 19 nt, Homo sapiens
  misc_RNA (1)...(19): siRNA sense strand
cacaagccaugcuaaacaa

SEQ ID NO: 1457959 - RNA, 19 nt, Homo sapiens
  misc_RNA (1)...(19): siRNA sense strand
gcaacaagagaguacaaga

SEQ ID NO: 1457960 - RNA, 19 nt, Homo sapiens
  misc_RNA (1)...(19): siRNA sense strand
augaauggguuguuaaaga

SEQ ID NO: 1457961 - RNA, 19 nt, Homo sapiens
  misc_RNA (1)...(19): siRNA sense strand
gauaguggcucuugauuua

SEQ ID NO: 1457962 - RNA, 19 nt, Homo sapiens
  misc_RNA (1)...(19): siRNA sense strand
gaauuggccugaccucuua

SEQ ID NO: 1457963 - RNA, 19 nt, Homo sapiens
  misc_RNA (1)...(19): siRNA sense strand
guauagagaugcagccuua

SEQ ID NO: 1457964 - RNA, 19 nt, Homo sapiens
  misc_RNA (1)...(19): siRNA sense strand
gaacugcugccacauauuu

SEQ ID NO: 1457965 - RNA, 19 nt, Homo sapiens
  misc_RNA (1)...(19): siRNA sense strand
ccaaagacguuguuagaga

SEQ ID NO: 1457966 - RNA, 19 nt, Homo sapiens
  misc_RNA (1)...(19): siRNA sense strand
guaaauaccagcauaagaa

SEQ ID NO: 1457967 - RNA, 19 nt, Homo sapiens
  misc_RNA (1)...(19): siRNA sense strand
caaccuaaauccagaauuc

SEQ ID NO: 1457968 - RNA, 19 nt, Homo sapiens
  misc_RNA (1)...(19): siRNA sense strand
caucaugauucccaaauuu

SEQ ID NO: 1457969 - RNA, 19 nt, Homo sapiens
  misc_RNA (1)...(19): siRNA sense strand
uaaguugauuccuguguua

SEQ ID NO: 1457970 - RNA, 19 nt, Homo sapiens
  misc_RNA (1)...(19): siRNA sense strand
uaaggcaucuuccuaaguu

SEQ ID NO: 1457971 - RNA, 19 nt, Homo sapiens
  misc_RNA (1)...(19): siRNA sense strand
gcaaauguguaucgugaug

SEQ ID NO: 1457972 - RNA, 19 nt, Homo sapiens
  misc_RNA (1)...(19): siRNA sense strand
caaagacguuguuagagaa

SEQ ID NO: 1457973 - RNA, 19 nt, Homo sapiens
  misc_RNA (1)...(19): siRNA sense strand
uggaacaacuuaaucagua

SEQ ID NO: 1457974 - RNA, 19 nt, Homo sapiens
  misc_RNA (1)...(19): siRNA sense strand
caucauggauuaacccaaa

SEQ ID NO: 1457975 - RNA, 19 nt, Homo sapiens
  misc_RNA (1)...(19): siRNA sense strand
caucaugaauggguuguua

SEQ ID NO: 1457976 - RNA, 19 nt, Homo sapiens
  misc_RNA (1)...(19): siRNA sense strand
uuacaguucuucaagcaua

SEQ ID NO: 1457977 - RNA, 19 nt, Homo sapiens
  misc_RNA (1)...(19): siRNA sense strand
ccaguuuccucuucccuua

SEQ ID NO: 1457978 - RNA, 19 nt, Homo sapiens
  misc_RNA (1)...(19): siRNA sense strand
gaaguaacauccugacacu

SEQ ID NO: 1457979 - RNA, 19 nt, Homo sapiens
  misc_RNA (1)...(19): siRNA sense strand
ugaauggguuguuaaagaa

SEQ ID NO: 1457980 - RNA, 19 nt, Homo sapiens
  misc_RNA (1)...(19): siRNA sense strand
gcaaagauguacucguaag

SEQ ID NO: 1457981 - RNA, 19 nt, Homo sapiens
  misc_RNA (1)...(19): siRNA sense strand
ggaacaacuuaaucaguau

SEQ ID NO: 1457982 - RNA, 19 nt, Homo sapiens
  misc_RNA (1)...(19): siRNA sense strand
acacguaccugaagccauu

SEQ ID NO: 1457983 - RNA, 19 nt, Homo sapiens
  misc_RNA (1)...(19): siRNA sense strand
gagcuuauuccucaccuua

SEQ ID NO: 1457984 - RNA, 19 nt, Homo sapiens
  misc_RNA (1)...(19): siRNA sense strand
gaagauuugugaagauucu

SEQ ID NO: 1457985 - RNA, 19 nt, Homo sapiens
  misc_RNA (1)...(19): siRNA sense strand
aaacaaugcucaaccagau

SEQ ID NO: 1457986 - RNA, 19 nt, Homo sapiens
  misc_RNA (1)...(19): siRNA sense strand
gacucaagcucuaauguug

SEQ ID NO: 1457987 - RNA, 19 nt, Homo sapiens
  misc_RNA (1)...(19): siRNA sense strand
ggccugaccucuuaccaaa

SEQ ID NO: 1457988 - RNA, 19 nt, Homo sapiens
  misc_RNA (1)...(19): siRNA sense strand
ucaaauggguauagagaug

SEQ ID NO: 1457989 - RNA, 19 nt, Homo sapiens
  misc_RNA (1)...(19): siRNA sense strand
gcuaaugccuccacugauc

SEQ ID NO: 1457990 - RNA, 19 nt, Homo sapiens
  misc_RNA (1)...(19): siRNA sense strand
ggacaucauuuaaacaaac

SEQ ID NO: 1457991 - RNA, 19 nt, Homo sapiens
  misc_RNA (1)...(19): siRNA sense strand
uuucagaacuucccaaaug

SEQ ID NO: 1457992 - RNA, 19 nt, Homo sapiens
  misc_RNA (1)...(19): siRNA sense strand
ggaaaaggauucagcauuc

SEQ ID NO: 1457993 - RNA, 19 nt, Homo sapiens
  misc_RNA (1)...(19): siRNA sense strand
gagaauacagcaauaacaa

SEQ ID NO: 1457994 - RNA, 19 nt, Homo sapiens
  misc_RNA (1)...(19): siRNA sense strand
ugaagauucugcugagauu

SEQ ID NO: 1457995 - RNA, 19 nt, Homo sapiens
  misc_RNA (1)...(19): siRNA sense strand
gcacaagccaugcuaaaca

SEQ ID NO: 1457996 - RNA, 19 nt, Homo sapiens
  misc_RNA (1)...(19): siRNA sense strand
auaacaugcuggacucuua

SEQ ID NO: 1457997 - RNA, 19 nt, Homo sapiens
  misc_RNA (1)...(19): siRNA sense strand
gaagaugaacccacaagau

SEQ ID NO: 1457998 - RNA, 19 nt, Homo sapiens
  misc_RNA (1)...(19): siRNA sense strand
gccguugcaucauggauua

SEQ ID NO: 1457999 - RNA, 19 nt, Homo sapiens
  misc_RNA (1)...(19): siRNA sense strand
auaugaagcuccagauaaa

SEQ ID NO: 1458000 - RNA, 19 nt, Homo sapiens
  misc_RNA (1)...(19): siRNA sense strand
ccagaaauggaacauguua

SEQ ID NO: 1458001 - RNA, 19 nt, Homo sapiens
  misc_RNA (1)...(19): siRNA sense strand
cauaagaaccugcucauuc

SEQ ID NO: 1458002 - RNA, 19 nt, Homo sapiens
  misc_RNA (1)...(19): siRNA sense strand
gggcaugauuccauacuug

SEQ ID NO: 1458003 - RNA, 19 nt, Homo sapiens
  misc_RNA (1)...(19): siRNA sense strand
gaugaacugcugccacaua

SEQ ID NO: 1458004 - RNA, 19 nt, Homo sapiens
  misc_RNA (1)...(19): siRNA sense strand
ugaugaagauggaauugaa

SEQ ID NO: 1458005 - RNA, 19 nt, Homo sapiens
  misc_RNA (1)...(19): siRNA sense strand
uaagggugauguugaagaa

SEQ ID NO: 1458006 - RNA, 19 nt, Homo sapiens
  misc_RNA (1)...(19): siRNA sense strand
uuuagaagccugugaauuu

SEQ ID NO: 1458007 - RNA, 19 nt, Homo sapiens
  misc_RNA (1)...(19): siRNA sense strand
gaacuucccaaauggugua

SEQ ID NO: 1458008 - RNA, 19 nt, Homo sapiens
  misc_RNA (1)...(19): siRNA sense strand
ugaguggucuuaucuugaa

SEQ ID NO: 1458009 - RNA, 19 nt, Homo sapiens
  misc_RNA (1)...(19): siRNA sense strand
guuagagaauacagcaaua

SEQ ID NO: 1458010 - RNA, 19 nt, Homo sapiens
  misc_RNA (1)...(19): siRNA sense strand
guuaaagaaucaggcauuu

SEQ ID NO: 1458011 - RNA, 19 nt, Homo sapiens
  misc_RNA (1)...(19): siRNA sense strand
augcaaagauguacucgua

SEQ ID NO: 1458012 - RNA, 19 nt, Homo sapiens
  misc_RNA (1)...(19): siRNA sense strand
gguguaacagacuuuauua

SEQ ID NO: 1458013 - RNA, 19 nt, Homo sapiens
  misc_RNA (1)...(19): siRNA sense strand
ggacuuggaggcaacauug

SEQ ID NO: 1458014 - RNA, 19 nt, Homo sapiens
  misc_RNA (1)...(19): siRNA sense strand
ucaaccagaucaauaugaa

SEQ ID NO: 1458015 - RNA, 19 nt, Homo sapiens
  misc_RNA (1)...(19): siRNA sense strand
gagcaagggcuucagcaaa

SEQ ID NO: 1458016 - RNA, 19 nt, Homo sapiens
  misc_RNA (1)...(19): siRNA sense strand
caacaagagaguacaagaa

SEQ ID NO: 1458017 - RNA, 19 nt, Homo sapiens
  misc_RNA (1)...(19): siRNA sense strand
ugacuccucuccucugauu

SEQ ID NO: 1458018 - RNA, 19 nt, Homo sapiens
  misc_RNA (1)...(19): siRNA sense strand
agagacauguucuguaaga

SEQ ID NO: 1458019 - RNA, 19 nt, Homo sapiens
  misc_RNA (1)...(19): siRNA sense strand
agaggaggcuuguacagaa

SEQ ID NO: 1458020 - RNA, 19 nt, Homo sapiens
  misc_RNA (1)...(19): siRNA sense strand
gaagaagacgaaacgauuc

SEQ ID NO: 1458021 - RNA, 19 nt, Homo sapiens
  misc_RNA (1)...(19): siRNA sense strand
gaaguacucagacauagau

SEQ ID NO: 1458022 - RNA, 19 nt, Homo sapiens
  misc_RNA (1)...(19): siRNA sense strand
cagaagauuugugaagauu

SEQ ID NO: 1458023 - RNA, 19 nt, Homo sapiens
  misc_RNA (1)...(19): siRNA sense strand
ugaagaagacgaaacgauu

SEQ ID NO: 1458024 - RNA, 19 nt, Homo sapiens
  misc_RNA (1)...(19): siRNA sense strand
guggaaaccugacgagcaa

SEQ ID NO: 1458025 - RNA, 19 nt, Homo sapiens
  misc_RNA (1)...(19): siRNA sense strand
guacucagacauagauauu

SEQ ID NO: 1458026 - RNA, 19 nt, Homo sapiens
  misc_RNA (1)...(19): siRNA sense strand
ggacucaagaucaagauga

SEQ ID NO: 1458027 - RNA, 19 nt, Homo sapiens
  misc_RNA (1)...(19): siRNA sense strand
ugcauuagcuggugaugaa

SEQ ID NO: 1458028 - RNA, 19 nt, Homo sapiens
  misc_RNA (1)...(19): siRNA sense strand
gaagaauaaugugaaagca

SEQ ID NO: 1458029 - RNA, 19 nt, Homo sapiens
  misc_RNA (1)...(19): siRNA sense strand
ggacucaagcucuaauguu

SEQ ID NO: 1458030 - RNA, 19 nt, Homo sapiens
  misc_RNA (1)...(19): siRNA sense strand
caaaugguguaacagacuu

SEQ ID NO: 1458031 - RNA, 19 nt, Homo sapiens
  misc_RNA (1)...(19): siRNA sense strand
ggaacauguuaaaggauga

SEQ ID NO: 1458032 - RNA, 19 nt, Homo sapiens
  misc_RNA (1)...(19): siRNA sense strand
gcuuauuccucaccuuauu

SEQ ID NO: 1458033 - RNA, 19 nt, Homo sapiens
  misc_RNA (1)...(19): siRNA sense strand
gacgaaacgauuccugaua

SEQ ID NO: 1458034 - RNA, 19 nt, Homo sapiens
  misc_RNA (1)...(19): siRNA sense strand
gaacagccaauaugcaaag

SEQ ID NO: 1458035 - RNA, 19 nt, Homo sapiens
  misc_RNA (1)...(19): siRNA sense strand
gaacccacaagaucauuga

SEQ ID NO: 1458036 - RNA, 19 nt, Homo sapiens
  misc_RNA (1)...(19): siRNA sense strand
cauaagagacaaugaggaa

SEQ ID NO: 1458037 - RNA, 19 nt, Homo sapiens
  misc_RNA (1)...(19): siRNA sense strand
caauuggucgucuugguua

SEQ ID NO: 1458038 - RNA, 19 nt, Homo sapiens
  misc_RNA (1)...(19): siRNA sense strand
uaaucaguauccagacuuu

SEQ ID NO: 1458039 - RNA, 19 nt, Homo sapiens
  misc_RNA (1)...(19): siRNA sense strand
gcaccagcuuguagaaauc

SEQ ID NO: 1458040 - RNA, 19 nt, Homo sapiens
  misc_RNA (1)...(19): siRNA sense strand
gagaugcagccuuauauuc

SEQ ID NO: 1458041 - RNA, 19 nt, Homo sapiens
  misc_RNA (1)...(19): siRNA sense strand
gccgagcacuugugauguu

SEQ ID NO: 1458042 - RNA, 19 nt, Homo sapiens
  misc_RNA (1)...(19): siRNA sense strand
caauaugaagcuccagaua

SEQ ID NO: 1458043 - RNA, 19 nt, Homo sapiens
  misc_RNA (1)...(19): siRNA sense strand
caugaaguacucagacaua

SEQ ID NO: 1458044 - RNA, 19 nt, Homo sapiens
  misc_RNA (1)...(19): siRNA sense strand
acagaggacucaagaucaa

SEQ ID NO: 1458045 - RNA, 19 nt, Homo sapiens
  misc_RNA (1)...(19): siRNA sense strand
gcaugugucaaucaguuua

SEQ ID NO: 1458046 - RNA, 19 nt, Homo sapiens
  misc_RNA (1)...(19): siRNA sense strand
uuguauagcugauuucaug

SEQ ID NO: 1458047 - RNA, 19 nt, Homo sapiens
  misc_RNA (1)...(19): siRNA sense strand
gcuaaacaaugcucaacca

SEQ ID NO: 1458048 - RNA, 19 nt, Homo sapiens
  misc_RNA (1)...(19): siRNA sense strand
uuccuuaccuugcuuauau

SEQ ID NO: 1458049 - RNA, 19 nt, Homo sapiens
  misc_RNA (1)...(19): siRNA sense strand
cagccaauaugcaaagaug

SEQ ID NO: 1458050 - RNA, 19 nt, Homo sapiens
  misc_RNA (1)...(19): siRNA sense strand
aauaaggucucacgcuguu

SEQ ID NO: 1458051 - RNA, 19 nt, Homo sapiens
  misc_RNA (1)...(19): siRNA sense strand
gcucuugugcguuccauaa

SEQ ID NO: 1458052 - RNA, 19 nt, Homo sapiens
  misc_RNA (1)...(19): siRNA sense strand
gccaauaugcaaagaugua

SEQ ID NO: 1458053 - RNA, 19 nt, Homo sapiens
  misc_RNA (1)...(19): siRNA sense strand
gacucaagaucaagaugaa

SEQ ID NO: 1458054 - RNA, 19 nt, Homo sapiens
  misc_RNA (1)...(19): siRNA sense strand
gucaaucaguuuaucauca

SEQ ID NO: 1458055 - RNA, 19 nt, Homo sapiens
  misc_RNA (1)...(19): siRNA sense strand
cagagaaccgugcaacaaa

SEQ ID NO: 1458056 - RNA, 19 nt, Homo sapiens
  misc_RNA (1)...(19): siRNA sense strand
caccaaagacguuguuaga

SEQ ID NO: 1458057 - RNA, 19 nt, Homo sapiens
  misc_RNA (1)...(19): siRNA sense strand
aauaugaagcuccagauaa

SEQ ID NO: 1458058 - RNA, 19 nt, Homo sapiens
  misc_RNA (1)...(19): siRNA sense strand
cacaagccaugcuaaacaa

SEQ ID NO: 1458059 - RNA, 19 nt, Homo sapiens
  misc_RNA (1)...(19): siRNA sense strand
gcaacaagagaguacaaga

SEQ ID NO: 1458060 - RNA, 19 nt, Homo sapiens
  misc_RNA (1)...(19): siRNA sense strand
augaauggguuguuaaaga

SEQ ID NO: 1458061 - RNA, 19 nt, Homo sapiens
  misc_RNA (1)...(19): siRNA sense strand
gcaagaaacuggaaaccua

SEQ ID NO: 1458062 - RNA, 19 nt, Homo sapiens
  misc_RNA (1)...(19): siRNA sense strand
ggagaaagcugauguaaaa

SEQ ID NO: 1458063 - RNA, 19 nt, Homo sapiens
  misc_RNA (1)...(19): siRNA sense strand
gaacuuguguauacauuug

SEQ ID NO: 1458064 - RNA, 19 nt, Homo sapiens
  misc_RNA (1)...(19): siRNA sense strand
caaaauaccugaugcaaaa

SEQ ID NO: 1458065 - RNA, 19 nt, Homo sapiens
  misc_RNA (1)...(19): siRNA sense strand
gcauauacccgcauaguuu

SEQ ID NO: 1458066 - RNA, 19 nt, Homo sapiens
  misc_RNA (1)...(19): siRNA sense strand
gcaagguguuacaauauuu

SEQ ID NO: 1458067 - RNA, 19 nt, Homo sapiens
  misc_RNA (1)...(19): siRNA sense strand
gagcaaggaguguguauaa

SEQ ID NO: 1458068 - RNA, 19 nt, Homo sapiens
  misc_RNA (1)...(19): siRNA sense strand
ggacaaagcuaagaaagac

SEQ ID NO: 1458069 - RNA, 19 nt, Homo sapiens
  misc_RNA (1)...(19): siRNA sense strand
ugagaaagguggaaaguuc

SEQ ID NO: 1458070 - RNA, 19 nt, Homo sapiens
  misc_RNA (1)...(19): siRNA sense strand
agacuauacugaauccuua

SEQ ID NO: 1458071 - RNA, 19 nt, Homo sapiens
  misc_RNA (1)...(19): siRNA sense strand
gauggugucuguauagaug

SEQ ID NO: 1458072 - RNA, 19 nt, Homo sapiens
  misc_RNA (1)...(19): siRNA sense strand
caucagaguuuccaaaaua

SEQ ID NO: 1458073 - RNA, 19 nt, Homo sapiens
  misc_RNA (1)...(19): siRNA sense strand
uauagcaccuugaguugua

SEQ ID NO: 1458074 - RNA, 19 nt, Homo sapiens
  misc_RNA (1)...(19): siRNA sense strand
acaauuacauggagacuau

SEQ ID NO: 1458075 - RNA, 19 nt, Homo sapiens
  misc_RNA (1)...(19): siRNA sense strand
cagagcaccuccuguuauu

SEQ ID NO: 1458076 - RNA, 19 nt, Homo sapiens
  misc_RNA (1)...(19): siRNA sense strand
gaauucaagugacuaucuu

SEQ ID NO: 1458077 - RNA, 19 nt, Homo sapiens
  misc_RNA (1)...(19): siRNA sense strand
ggcaagguguuacaauauu

SEQ ID NO: 1458078 - RNA, 19 nt, Homo sapiens
  misc_RNA (1)...(19): siRNA sense strand
gauaugagccucuucucuu

SEQ ID NO: 1458079 - RNA, 19 nt, Homo sapiens
  misc_RNA (1)...(19): siRNA sense strand
caaggaguguguauaagga

SEQ ID NO: 1458080 - RNA, 19 nt, Homo sapiens
  misc_RNA (1)...(19): siRNA sense strand
gacagaagaaccucaaauu

SEQ ID NO: 1458081 - RNA, 19 nt, Homo sapiens
  misc_RNA (1)...(19): siRNA sense strand
cagaagcuuuguuaaauca

SEQ ID NO: 1458082 - RNA, 19 nt, Homo sapiens
  misc_RNA (1)...(19): siRNA sense strand
aagaugaacuuguguauac

SEQ ID NO: 1458083 - RNA, 19 nt, Homo sapiens
  misc_RNA (1)...(19): siRNA sense strand
uugaagaccuggagcaauu

SEQ ID NO: 1458084 - RNA, 19 nt, Homo sapiens
  misc_RNA (1)...(19): siRNA sense strand
gggaauggcuguuauugac

SEQ ID NO: 1458085 - RNA, 19 nt, Homo sapiens
  misc_RNA (1)...(19): siRNA sense strand
cgggcaagguguuacaaua

SEQ ID NO: 1458086 - RNA, 19 nt, Homo sapiens
  misc_RNA (1)...(19): siRNA sense strand
ucacagaggccacugagaa

SEQ ID NO: 1458087 - RNA, 19 nt, Homo sapiens
  misc_RNA (1)...(19): siRNA sense strand
ccauguugcuugacucuga

SEQ ID NO: 1458088 - RNA, 19 nt, Homo sapiens
  misc_RNA (1)...(19): siRNA sense strand
guuacaaccaucacuauaa

SEQ ID NO: 1458089 - RNA, 19 nt, Homo sapiens
  misc_RNA (1)...(19): siRNA sense strand
uggcuacuauccuuacaua

SEQ ID NO: 1458090 - RNA, 19 nt, Homo sapiens
  misc_RNA (1)...(19): siRNA sense strand
ccucuucucuuucauagga

SEQ ID NO: 1458091 - RNA, 19 nt, Homo sapiens
  misc_RNA (1)...(19): siRNA sense strand
gaaacuggaaaccuaaaga

SEQ ID NO: 1458092 - RNA, 19 nt, Homo sapiens
  misc_RNA (1)...(19): siRNA sense strand
ccagaagauuuccuuacaa

SEQ ID NO: 1458093 - RNA, 19 nt, Homo sapiens
  misc_RNA (1)...(19): siRNA sense strand
caagaaacuggaaaccuaa

SEQ ID NO: 1458094 - RNA, 19 nt, Homo sapiens
  misc_RNA (1)...(19): siRNA sense strand
acagaagaaccucaaauuu

SEQ ID NO: 1458095 - RNA, 19 nt, Homo sapiens
  misc_RNA (1)...(19): siRNA sense strand
cagaagauuuccuuacaag

SEQ ID NO: 1458096 - RNA, 19 nt, Homo sapiens
  misc_RNA (1)...(19): siRNA sense strand
agacuuggcuacuauccuu

SEQ ID NO: 1458097 - RNA, 19 nt, Homo sapiens
  misc_RNA (1)...(19): siRNA sense strand
gcucuuuacccauccauuu

SEQ ID NO: 1458098 - RNA, 19 nt, Homo sapiens
  misc_RNA (1)...(19): siRNA sense strand
gaaaauuacuucggccaaa

SEQ ID NO: 1458099 - RNA, 19 nt, Homo sapiens
  misc_RNA (1)...(19): siRNA sense strand
gcaacaaaauguacaacuu

SEQ ID NO: 1458100 - RNA, 19 nt, Homo sapiens
  misc_RNA (1)...(19): siRNA sense strand
gaagcuuuguuaaaucaag

SEQ ID NO: 1458101 - RNA, 19 nt, Homo sapiens
  misc_RNA (1)...(19): siRNA sense strand
ucagaagcuuuguuaaauc

SEQ ID NO: 1458102 - RNA, 19 nt, Homo sapiens
  misc_RNA (1)...(19): siRNA sense strand
gaagauuuccuuacaagac

SEQ ID NO: 1458103 - RNA, 19 nt, Homo sapiens
  misc_RNA (1)...(19): siRNA sense strand
ccauuuauuugaacacuca

SEQ ID NO: 1458104 - RNA, 19 nt, Homo sapiens
  misc_RNA (1)...(19): siRNA sense strand
cacacuaucugccacaaug

SEQ ID NO: 1458105 - RNA, 19 nt, Homo sapiens
  misc_RNA (1)...(19): siRNA sense strand
cagaagaaccucaaauuuu

SEQ ID NO: 1458106 - RNA, 19 nt, Homo sapiens
  misc_RNA (1)...(19): siRNA sense strand
gcuugcuccuagacaauua

SEQ ID NO: 1458107 - RNA, 19 nt, Homo sapiens
  misc_RNA (1)...(19): siRNA sense strand
gggcaagguguuacaauau

SEQ ID NO: 1458108 - RNA, 19 nt, Homo sapiens
  misc_RNA (1)...(19): siRNA sense strand
gguagagacuauaaaauug

SEQ ID NO: 1458109 - RNA, 19 nt, Homo sapiens
  misc_RNA (1)...(19): siRNA sense strand
gaugagccacuagauauga

SEQ ID NO: 1458110 - RNA, 19 nt, Homo sapiens
  misc_RNA (1)...(19): siRNA sense strand
gguggaaaguucacaguac

SEQ ID NO: 1458111 - RNA, 19 nt, Homo sapiens
  misc_RNA (1)...(19): siRNA sense strand
cauaaucaacgucacacua

SEQ ID NO: 1458112 - RNA, 19 nt, Homo sapiens
  misc_RNA (1)...(19): siRNA sense strand
auaugagccucuucucuuu

SEQ ID NO: 1458113 - RNA, 19 nt, Homo sapiens
  misc_RNA (1)...(19): siRNA sense strand
uaaaucaaguggaguaucc

SEQ ID NO: 1458114 - RNA, 19 nt, Homo sapiens
  misc_RNA (1)...(19): siRNA sense strand
ggaauucaagugacuaucu

SEQ ID NO: 1458115 - RNA, 19 nt, Homo sapiens
  misc_RNA (1)...(19): siRNA sense strand
gcaaggaguguguauaagg

SEQ ID NO: 1458116 - RNA, 19 nt, Homo sapiens
  misc_RNA (1)...(19): siRNA sense strand
uuacaaccaucacuauaag

SEQ ID NO: 1458117 - RNA, 19 nt, Homo sapiens
  misc_RNA (1)...(19): siRNA sense strand
gagccucuucucuuucaua

SEQ ID NO: 1458118 - RNA, 19 nt, Homo sapiens
  misc_RNA (1)...(19): siRNA sense strand
cuggaaaccuaaagauguu

SEQ ID NO: 1458119 - RNA, 19 nt, Homo sapiens
  misc_RNA (1)...(19): siRNA sense strand
agaagaaccucaaauuuuc

SEQ ID NO: 1458120 - RNA, 19 nt, Homo sapiens
  misc_RNA (1)...(19): siRNA sense strand
cccagaagauuuccuuaca

SEQ ID NO: 1458121 - RNA, 19 nt, Homo sapiens
  misc_RNA (1)...(19): siRNA sense strand
guaaggagaaagcugaugu

SEQ ID NO: 1458122 - RNA, 19 nt, Homo sapiens
  misc_RNA (1)...(19): siRNA sense strand
gagacuauacugaauccuu

SEQ ID NO: 1458123 - RNA, 19 nt, Homo sapiens
  misc_RNA (1)...(19): siRNA sense strand
cauggagacuauacugaau

SEQ ID NO: 1458124 - RNA, 19 nt, Homo sapiens
  misc_RNA (1)...(19): siRNA sense strand
gaagaauggagacccacuu

SEQ ID NO: 1458125 - RNA, 19 nt, Homo sapiens
  misc_RNA (1)...(19): siRNA sense strand
guuauugacugggaagaau

SEQ ID NO: 1458126 - RNA, 19 nt, Homo sapiens
  misc_RNA (1)...(19): siRNA sense strand
ggagcaaggaguguguaua

SEQ ID NO: 1458127 - RNA, 19 nt, Homo sapiens
  misc_RNA (1)...(19): siRNA sense strand
acaagaccaucuggacaaa

SEQ ID NO: 1458128 - RNA, 19 nt, Homo sapiens
  misc_RNA (1)...(19): siRNA sense strand
ggagacagaagaaccucaa

SEQ ID NO: 1458129 - RNA, 19 nt, Homo sapiens
  misc_RNA (1)...(19): siRNA sense strand
uauugcagcuguuauagca

SEQ ID NO: 1458130 - RNA, 19 nt, Homo sapiens
  misc_RNA (1)...(19): siRNA sense strand
aguauaaugcgaaguauga

SEQ ID NO: 1458131 - RNA, 19 nt, Homo sapiens
  misc_RNA (1)...(19): siRNA sense strand
caaccaucacuauaagaaa

SEQ ID NO: 1458132 - RNA, 19 nt, Homo sapiens
  misc_RNA (1)...(19): siRNA sense strand
ucagagcaccuccuguuau

SEQ ID NO: 1458133 - RNA, 19 nt, Homo sapiens
  misc_RNA (1)...(19): siRNA sense strand
uaaggagaaagcugaugua

SEQ ID NO: 1458134 - RNA, 19 nt, Homo sapiens
  misc_RNA (1)...(19): siRNA sense strand
gagaaagguggaaaguuca

SEQ ID NO: 1458135 - RNA, 19 nt, Homo sapiens
  misc_RNA (1)...(19): siRNA sense strand
ucugggugcuucuggaauu

SEQ ID NO: 1458136 - RNA, 19 nt, Homo sapiens
  misc_RNA (1)...(19): siRNA sense strand
gggaagccaucagaguuuc

SEQ ID NO: 1458137 - RNA, 19 nt, Homo sapiens
  misc_RNA (1)...(19): siRNA sense strand
guagacaauuugggaaugg

SEQ ID NO: 1458138 - RNA, 19 nt, Homo sapiens
  misc_RNA (1)...(19): siRNA sense strand
gaauugguucagcaacaaa

SEQ ID NO: 1458139 - RNA, 19 nt, Homo sapiens
  misc_RNA (1)...(19): siRNA sense strand
gcuucacccuccacacuau

SEQ ID NO: 1458140 - RNA, 19 nt, Homo sapiens
  misc_RNA (1)...(19): siRNA sense strand
caaguggaguaucccagau

SEQ ID NO: 1458141 - RNA, 19 nt, Homo sapiens
  misc_RNA (1)...(19): siRNA sense strand
gcuccuagacaauuacaug

SEQ ID NO: 1458142 - RNA, 19 nt, Homo sapiens
  misc_RNA (1)...(19): siRNA sense strand
guguauacauuuggcgaaa

SEQ ID NO: 1458143 - RNA, 19 nt, Homo sapiens
  misc_RNA (1)...(19): siRNA sense strand
caaaauguguagccaagug

SEQ ID NO: 1458144 - RNA, 19 nt, Homo sapiens
  misc_RNA (1)...(19): siRNA sense strand
cuucuggaauuguaauaug

SEQ ID NO: 1458145 - RNA, 19 nt, Homo sapiens
  misc_RNA (1)...(19): siRNA sense strand
gaugaucucagcugguugu

SEQ ID NO: 1458146 - RNA, 19 nt, Homo sapiens
  misc_RNA (1)...(19): siRNA sense strand
acacugaugcuguugaugu

SEQ ID NO: 1458147 - RNA, 19 nt, Homo sapiens
  misc_RNA (1)...(19): siRNA sense strand
ugcgaaguaugaaaucuug

SEQ ID NO: 1458148 - RNA, 19 nt, Homo sapiens
  misc_RNA (1)...(19): siRNA sense strand
gggugcuucuggaauugua

SEQ ID NO: 1458149 - RNA, 19 nt, Homo sapiens
  misc_RNA (1)...(19): siRNA sense strand
guauacauuuggcgaaacu

SEQ ID NO: 1458150 - RNA, 19 nt, Homo sapiens
  misc_RNA (1)...(19): siRNA sense strand
uugauagacuuggcuacua

SEQ ID NO: 1458151 - RNA, 19 nt, Homo sapiens
  misc_RNA (1)...(19): siRNA sense strand
guuauagcaccuugaguug

SEQ ID NO: 1458152 - RNA, 19 nt, Homo sapiens
  misc_RNA (1)...(19): siRNA sense strand
gcuaagaaagacauuacau

SEQ ID NO: 1458153 - RNA, 19 nt, Homo sapiens
  misc_RNA (1)...(19): siRNA sense strand
acugaauccuuacauaauc

SEQ ID NO: 1458154 - RNA, 19 nt, Homo sapiens
  misc_RNA (1)...(19): siRNA sense strand
gaaguaugaaaucuugcuu

SEQ ID NO: 1458155 - RNA, 19 nt, Homo sapiens
  misc_RNA (1)...(19): siRNA sense strand
acccauccauuuauuugaa

SEQ ID NO: 1458156 - RNA, 19 nt, Homo sapiens
  misc_RNA (1)...(19): siRNA sense strand
acaaccaucacuauaagaa

SEQ ID NO: 1458157 - RNA, 19 nt, Homo sapiens
  misc_RNA (1)...(19): siRNA sense strand
caaaucacuugugggguua

SEQ ID NO: 1458158 - RNA, 19 nt, Homo sapiens
  misc_RNA (1)...(19): siRNA sense strand
gaaaucuugcuugcuccua

SEQ ID NO: 1458159 - RNA, 19 nt, Homo sapiens
  misc_RNA (1)...(19): siRNA sense strand
aaaagacacugaugcuguu

SEQ ID NO: 1458160 - RNA, 19 nt, Homo sapiens
  misc_RNA (1)...(19): siRNA sense strand
gaaaaccgacacuugaaga

SEQ ID NO: 1458161 - RNA, 19 nt, Homo sapiens
  misc_RNA (1)...(19): siRNA sense strand
gcaagaaacuggaaaccua

SEQ ID NO: 1458162 - RNA, 19 nt, Homo sapiens
  misc_RNA (1)...(19): siRNA sense strand
ggagaaagcugauguaaaa

SEQ ID NO: 1458163 - RNA, 19 nt, Homo sapiens
  misc_RNA (1)...(19): siRNA sense strand
gaacuuguguauacauuug

SEQ ID NO: 1458164 - RNA, 19 nt, Homo sapiens
  misc_RNA (1)...(19): siRNA sense strand
caaaauaccugaugcaaaa

SEQ ID NO: 1458165 - RNA, 19 nt, Homo sapiens
  misc_RNA (1)...(19): siRNA sense strand
gcauauacccgcauaguuu

SEQ ID NO: 1458166 - RNA, 19 nt, Homo sapiens
  misc_RNA (1)...(19): siRNA sense strand
gcaagguguuacaauauuu

SEQ ID NO: 1458167 - RNA, 19 nt, Homo sapiens
  misc_RNA (1)...(19): siRNA sense strand
gagcaaggaguguguauaa

SEQ ID NO: 1458168 - RNA, 19 nt, Homo sapiens
  misc_RNA (1)...(19): siRNA sense strand
ggacaaagcuaagaaagac

SEQ ID NO: 1458169 - RNA, 19 nt, Homo sapiens
  misc_RNA (1)...(19): siRNA sense strand
ugagaaagguggaaaguuc

SEQ ID NO: 1458170 - RNA, 19 nt, Homo sapiens
  misc_RNA (1)...(19): siRNA sense strand
agacuauacugaauccuua

SEQ ID NO: 1458171 - RNA, 19 nt, Homo sapiens
  misc_RNA (1)...(19): siRNA sense strand
gauggugucuguauagaug

SEQ ID NO: 1458172 - RNA, 19 nt, Homo sapiens
  misc_RNA (1)...(19): siRNA sense strand
caucagaguuuccaaaaua

SEQ ID NO: 1458173 - RNA, 19 nt, Homo sapiens
  misc_RNA (1)...(19): siRNA sense strand
uauagcaccuugaguugua

SEQ ID NO: 1458174 - RNA, 19 nt, Homo sapiens
  misc_RNA (1)...(19): siRNA sense strand
acaauuacauggagacuau

SEQ ID NO: 1458175 - RNA, 19 nt, Homo sapiens
  misc_RNA (1)...(19): siRNA sense strand
cagagcaccuccuguuauu

SEQ ID NO: 1458176 - RNA, 19 nt, Homo sapiens
  misc_RNA (1)...(19): siRNA sense strand
gaauucaagugacuaucuu

SEQ ID NO: 1458177 - RNA, 19 nt, Homo sapiens
  misc_RNA (1)...(19): siRNA sense strand
ggcaagguguuacaauauu

SEQ ID NO: 1458178 - RNA, 19 nt, Homo sapiens
  misc_RNA (1)...(19): siRNA sense strand
gauaugagccucuucucuu

SEQ ID NO: 1458179 - RNA, 19 nt, Homo sapiens
  misc_RNA (1)...(19): siRNA sense strand
caaggaguguguauaagga

SEQ ID NO: 1458180 - RNA, 19 nt, Homo sapiens
  misc_RNA (1)...(19): siRNA sense strand
gacagaagaaccucaaauu

SEQ ID NO: 1458181 - RNA, 19 nt, Homo sapiens
  misc_RNA (1)...(19): siRNA sense strand
cagaagcuuuguuaaauca

SEQ ID NO: 1458182 - RNA, 19 nt, Homo sapiens
  misc_RNA (1)...(19): siRNA sense strand
aagaugaacuuguguauac

SEQ ID NO: 1458183 - RNA, 19 nt, Homo sapiens
  misc_RNA (1)...(19): siRNA sense strand
uugaagaccuggagcaauu

SEQ ID NO: 1458184 - RNA, 19 nt, Homo sapiens
  misc_RNA (1)...(19): siRNA sense strand
gggaauggcuguuauugac

SEQ ID NO: 1458185 - RNA, 19 nt, Homo sapiens
  misc_RNA (1)...(19): siRNA sense strand
cgggcaagguguuacaaua

SEQ ID NO: 1458186 - RNA, 19 nt, Homo sapiens
  misc_RNA (1)...(19): siRNA sense strand
ucacagaggccacugagaa

SEQ ID NO: 1458187 - RNA, 19 nt, Homo sapiens
  misc_RNA (1)...(19): siRNA sense strand
ccauguugcuugacucuga

SEQ ID NO: 1458188 - RNA, 19 nt, Homo sapiens
  misc_RNA (1)...(19): siRNA sense strand
guuacaaccaucacuauaa

SEQ ID NO: 1458189 - RNA, 19 nt, Homo sapiens
  misc_RNA (1)...(19): siRNA sense strand
uggcuacuauccuuacaua

SEQ ID NO: 1458190 - RNA, 19 nt, Homo sapiens
  misc_RNA (1)...(19): siRNA sense strand
ccucuucucuuucauagga

SEQ ID NO: 1458191 - RNA, 19 nt, Homo sapiens
  misc_RNA (1)...(19): siRNA sense strand
gaaacuggaaaccuaaaga

SEQ ID NO: 1458192 - RNA, 19 nt, Homo sapiens
  misc_RNA (1)...(19): siRNA sense strand
ccagaagauuuccuuacaa

SEQ ID NO: 1458193 - RNA, 19 nt, Homo sapiens
  misc_RNA (1)...(19): siRNA sense strand
caagaaacuggaaaccuaa

SEQ ID NO: 1458194 - RNA, 19 nt, Homo sapiens
  misc_RNA (1)...(19): siRNA sense strand
acagaagaaccucaaauuu

SEQ ID NO: 1458195 - RNA, 19 nt, Homo sapiens
  misc_RNA (1)...(19): siRNA sense strand
cagaagauuuccuuacaag

SEQ ID NO: 1458196 - RNA, 19 nt, Homo sapiens
  misc_RNA (1)...(19): siRNA sense strand
agacuuggcuacuauccuu

SEQ ID NO: 1458197 - RNA, 19 nt, Homo sapiens
  misc_RNA (1)...(19): siRNA sense strand
gcucuuuacccauccauuu

SEQ ID NO: 1458198 - RNA, 19 nt, Homo sapiens
  misc_RNA (1)...(19): siRNA sense strand
gaaaauuacuucggccaaa

SEQ ID NO: 1458199 - RNA, 19 nt, Homo sapiens
  misc_RNA (1)...(19): siRNA sense strand
gcaacaaaauguacaacuu

SEQ ID NO: 1458200 - RNA, 19 nt, Homo sapiens
  misc_RNA (1)...(19): siRNA sense strand
gaagcuuuguuaaaucaag

SEQ ID NO: 1458201 - RNA, 19 nt, Homo sapiens
  misc_RNA (1)...(19): siRNA sense strand
ucagaagcuuuguuaaauc

SEQ ID NO: 1458202 - RNA, 19 nt, Homo sapiens
  misc_RNA (1)...(19): siRNA sense strand
gaagauuuccuuacaagac

SEQ ID NO: 1458203 - RNA, 19 nt, Homo sapiens
  misc_RNA (1)...(19): siRNA sense strand
ccauuuauuugaacacuca

SEQ ID NO: 1458204 - RNA, 19 nt, Homo sapiens
  misc_RNA (1)...(19): siRNA sense strand
cacacuaucugccacaaug

SEQ ID NO: 1458205 - RNA, 19 nt, Homo sapiens
  misc_RNA (1)...(19): siRNA sense strand
cagaagaaccucaaauuuu

SEQ ID NO: 1458206 - RNA, 19 nt, Homo sapiens
  misc_RNA (1)...(19): siRNA sense strand
gcuugcuccuagacaauua

SEQ ID NO: 1458207 - RNA, 19 nt, Homo sapiens
  misc_RNA (1)...(19): siRNA sense strand
gggcaagguguuacaauau

SEQ ID NO: 1458208 - RNA, 19 nt, Homo sapiens
  misc_RNA (1)...(19): siRNA sense strand
gguagagacuauaaaauug

SEQ ID NO: 1458209 - RNA, 19 nt, Homo sapiens
  misc_RNA (1)...(19): siRNA sense strand
gaugagccacuagauauga

SEQ ID NO: 1458210 - RNA, 19 nt, Homo sapiens
  misc_RNA (1)...(19): siRNA sense strand
gguggaaaguucacaguac

SEQ ID NO: 1458211 - RNA, 19 nt, Homo sapiens
  misc_RNA (1)...(19): siRNA sense strand
cauaaucaacgucacacua

SEQ ID NO: 1458212 - RNA, 19 nt, Homo sapiens
  misc_RNA (1)...(19): siRNA sense strand
auaugagccucuucucuuu

SEQ ID NO: 1458213 - RNA, 19 nt, Homo sapiens
  misc_RNA (1)...(19): siRNA sense strand
uaaaucaaguggaguaucc

SEQ ID NO: 1458214 - RNA, 19 nt, Homo sapiens
  misc_RNA (1)...(19): siRNA sense strand
ggaauucaagugacuaucu

SEQ ID NO: 1458215 - RNA, 19 nt, Homo sapiens
  misc_RNA (1)...(19): siRNA sense strand
gcaaggaguguguauaagg

SEQ ID NO: 1458216 - RNA, 19 nt, Homo sapiens
  misc_RNA (1)...(19): siRNA sense strand
uuacaaccaucacuauaag

SEQ ID NO: 1458217 - RNA, 19 nt, Homo sapiens
  misc_RNA (1)...(19): siRNA sense strand
gagccucuucucuuucaua

SEQ ID NO: 1458218 - RNA, 19 nt, Homo sapiens
  misc_RNA (1)...(19): siRNA sense strand
cuggaaaccuaaagauguu

SEQ ID NO: 1458219 - RNA, 19 nt, Homo sapiens
  misc_RNA (1)...(19): siRNA sense strand
agaagaaccucaaauuuuc

SEQ ID NO: 1458220 - RNA, 19 nt, Homo sapiens
  misc_RNA (1)...(19): siRNA sense strand
cccagaagauuuccuuaca

SEQ ID NO: 1458221 - RNA, 19 nt, Homo sapiens
  misc_RNA (1)...(19): siRNA sense strand
guaaggagaaagcugaugu

SEQ ID NO: 1458222 - RNA, 19 nt, Homo sapiens
  misc_RNA (1)...(19): siRNA sense strand
gagacuauacugaauccuu

SEQ ID NO: 1458223 - RNA, 19 nt, Homo sapiens
  misc_RNA (1)...(19): siRNA sense strand
cauggagacuauacugaau

SEQ ID NO: 1458224 - RNA, 19 nt, Homo sapiens
  misc_RNA (1)...(19): siRNA sense strand
gaagaauggagacccacuu

SEQ ID NO: 1458225 - RNA, 19 nt, Homo sapiens
  misc_RNA (1)...(19): siRNA sense strand
guuauugacugggaagaau

SEQ ID NO: 1458226 - RNA, 19 nt, Homo sapiens
  misc_RNA (1)...(19): siRNA sense strand
ggagcaaggaguguguaua

SEQ ID NO: 1458227 - RNA, 19 nt, Homo sapiens
  misc_RNA (1)...(19): siRNA sense strand
acaagaccaucuggacaaa

SEQ ID NO: 1458228 - RNA, 19 nt, Homo sapiens
  misc_RNA (1)...(19): siRNA sense strand
ggagacagaagaaccucaa

SEQ ID NO: 1458229 - RNA, 19 nt, Homo sapiens
  misc_RNA (1)...(19): siRNA sense strand
uauugcagcuguuauagca

SEQ ID NO: 1458230 - RNA, 19 nt, Homo sapiens
  misc_RNA (1)...(19): siRNA sense strand
aguauaaugcgaaguauga

SEQ ID NO: 1458231 - RNA, 19 nt, Homo sapiens
  misc_RNA (1)...(19): siRNA sense strand
caaccaucacuauaagaaa

SEQ ID NO: 1458232 - RNA, 19 nt, Homo sapiens
  misc_RNA (1)...(19): siRNA sense strand
ucagagcaccuccuguuau

SEQ ID NO: 1458233 - RNA, 19 nt, Homo sapiens
  misc_RNA (1)...(19): siRNA sense strand
uaaggagaaagcugaugua

SEQ ID NO: 1458234 - RNA, 19 nt, Homo sapiens
  misc_RNA (1)...(19): siRNA sense strand
gagaaagguggaaaguuca

SEQ ID NO: 1458235 - RNA, 19 nt, Homo sapiens
  misc_RNA (1)...(19): siRNA sense strand
ucugggugcuucuggaauu

SEQ ID NO: 1458236 - RNA, 19 nt, Homo sapiens
  misc_RNA (1)...(19): siRNA sense strand
gggaagccaucagaguuuc

SEQ ID NO: 1458237 - RNA, 19 nt, Homo sapiens
  misc_RNA (1)...(19): siRNA sense strand
guagacaauuugggaaugg

SEQ ID NO: 1458238 - RNA, 19 nt, Homo sapiens
  misc_RNA (1)...(19): siRNA sense strand
gaauugguucagcaacaaa

SEQ ID NO: 1458239 - RNA, 19 nt, Homo sapiens
  misc_RNA (1)...(19): siRNA sense strand
gcuucacccuccacacuau

SEQ ID NO: 1458240 - RNA, 19 nt, Homo sapiens
  misc_RNA (1)...(19): siRNA sense strand
caaguggaguaucccagau

SEQ ID NO: 1458241 - RNA, 19 nt, Homo sapiens
  misc_RNA (1)...(19): siRNA sense strand
gcuccuagacaauuacaug

SEQ ID NO: 1458242 - RNA, 19 nt, Homo sapiens
  misc_RNA (1)...(19): siRNA sense strand
guguauacauuuggcgaaa

SEQ ID NO: 1458243 - RNA, 19 nt, Homo sapiens
  misc_RNA (1)...(19): siRNA sense strand
caaaauguguagccaagug

SEQ ID NO: 1458244 - RNA, 19 nt, Homo sapiens
  misc_RNA (1)...(19): siRNA sense strand
cuucuggaauuguaauaug

SEQ ID NO: 1458245 - RNA, 19 nt, Homo sapiens
  misc_RNA (1)...(19): siRNA sense strand
gaugaucucagcugguugu

SEQ ID NO: 1458246 - RNA, 19 nt, Homo sapiens
  misc_RNA (1)...(19): siRNA sense strand
acacugaugcuguugaugu

SEQ ID NO: 1458247 - RNA, 19 nt, Homo sapiens
  misc_RNA (1)...(19): siRNA sense strand
ugcgaaguaugaaaucuug

SEQ ID NO: 1458248 - RNA, 19 nt, Homo sapiens
  misc_RNA (1)...(19): siRNA sense strand
gggugcuucuggaauugua

SEQ ID NO: 1458249 - RNA, 19 nt, Homo sapiens
  misc_RNA (1)...(19): siRNA sense strand
guauacauuuggcgaaacu

SEQ ID NO: 1458250 - RNA, 19 nt, Homo sapiens
  misc_RNA (1)...(19): siRNA sense strand
uugauagacuuggcuacua

SEQ ID NO: 1458251 - RNA, 19 nt, Homo sapiens
  misc_RNA (1)...(19): siRNA sense strand
guuauagcaccuugaguug

SEQ ID NO: 1458252 - RNA, 19 nt, Homo sapiens
  misc_RNA (1)...(19): siRNA sense strand
gcuaagaaagacauuacau

SEQ ID NO: 1458253 - RNA, 19 nt, Homo sapiens
  misc_RNA (1)...(19): siRNA sense strand
acugaauccuuacauaauc

SEQ ID NO: 1458254 - RNA, 19 nt, Homo sapiens
  misc_RNA (1)...(19): siRNA sense strand
gaaguaugaaaucuugcuu

SEQ ID NO: 1458255 - RNA, 19 nt, Homo sapiens
  misc_RNA (1)...(19): siRNA sense strand
acccauccauuuauuugaa

SEQ ID NO: 1458256 - RNA, 19 nt, Homo sapiens
  misc_RNA (1)...(19): siRNA sense strand
acaaccaucacuauaagaa

SEQ ID NO: 1458257 - RNA, 19 nt, Homo sapiens
  misc_RNA (1)...(19): siRNA sense strand
caaaucacuugugggguua

SEQ ID NO: 1458258 - RNA, 19 nt, Homo sapiens
  misc_RNA (1)...(19): siRNA sense strand
gaaaucuugcuugcuccua

SEQ ID NO: 1458259 - RNA, 19 nt, Homo sapiens
  misc_RNA (1)...(19): siRNA sense strand
aaaagacacugaugcuguu

SEQ ID NO: 1458260 - RNA, 19 nt, Homo sapiens
  misc_RNA (1)...(19): siRNA sense strand
gaaaaccgacacuugaaga

SEQ ID NO: 1458261 - RNA, 19 nt, Homo sapiens
  misc_RNA (1)...(19): siRNA sense strand
ggacguaacuaguaacuuu

SEQ ID NO: 1458262 - RNA, 19 nt, Homo sapiens
  misc_RNA (1)...(19): siRNA sense strand
acacaaagcugcuaaagaa

SEQ ID NO: 1458263 - RNA, 19 nt, Homo sapiens
  misc_RNA (1)...(19): siRNA sense strand
gcgaagaccuggagaagca

SEQ ID NO: 1458264 - RNA, 19 nt, Homo sapiens
  misc_RNA (1)...(19): siRNA sense strand
ggaaacaugguuaaucuau

SEQ ID NO: 1458265 - RNA, 19 nt, Homo sapiens
  misc_RNA (1)...(19): siRNA sense strand
ugaaaugccuuaucagucu

SEQ ID NO: 1458266 - RNA, 19 nt, Homo sapiens
  misc_RNA (1)...(19): siRNA sense strand
caagaaugcugcagccaau

SEQ ID NO: 1458267 - RNA, 19 nt, Homo sapiens
  misc_RNA (1)...(19): siRNA sense strand
gaagauugaccaugccaaa

SEQ ID NO: 1458268 - RNA, 19 nt, Homo sapiens
  misc_RNA (1)...(19): siRNA sense strand
ucaacaagaucaacuucaa

SEQ ID NO: 1458269 - RNA, 19 nt, Homo sapiens
  misc_RNA (1)...(19): siRNA sense strand
gaucaucgccuaccacaca

SEQ ID NO: 1458270 - RNA, 19 nt, Homo sapiens
  misc_RNA (1)...(19): siRNA sense strand
gcccugaaaugccuuauca

SEQ ID NO: 1458271 - RNA, 19 nt, Homo sapiens
  misc_RNA (1)...(19): siRNA sense strand
cagcaggacguaacuagua

SEQ ID NO: 1458272 - RNA, 19 nt, Homo sapiens
  misc_RNA (1)...(19): siRNA sense strand
cggagaagcacguucauaa

SEQ ID NO: 1458273 - RNA, 19 nt, Homo sapiens
  misc_RNA (1)...(19): siRNA sense strand
ggaaacaccagaggaaguu

SEQ ID NO: 1458274 - RNA, 19 nt, Homo sapiens
  misc_RNA (1)...(19): siRNA sense strand
caaagcugcuaaagaagau

SEQ ID NO: 1458275 - RNA, 19 nt, Homo sapiens
  misc_RNA (1)...(19): siRNA sense strand
gcggaugacuggcggauag

SEQ ID NO: 1458276 - RNA, 19 nt, Homo sapiens
  misc_RNA (1)...(19): siRNA sense strand
gaugcagaaugucauguau

SEQ ID NO: 1458277 - RNA, 19 nt, Homo sapiens
  misc_RNA (1)...(19): siRNA sense strand
gcacguucauaacuucaug

SEQ ID NO: 1458278 - RNA, 19 nt, Homo sapiens
  misc_RNA (1)...(19): siRNA sense strand
ugaagacgcucaugaccau

SEQ ID NO: 1458279 - RNA, 19 nt, Homo sapiens
  misc_RNA (1)...(19): siRNA sense strand
ggauagccaugaccuacga

SEQ ID NO: 1458280 - RNA, 19 nt, Homo sapiens
  misc_RNA (1)...(19): siRNA sense strand
ucacauuccuuuccauugg

SEQ ID NO: 1458281 - RNA, 19 nt, Homo sapiens
  misc_RNA (1)...(19): siRNA sense strand
ucaccaagcggaucaagaa

SEQ ID NO: 1458282 - RNA, 19 nt, Homo sapiens
  misc_RNA (1)...(19): siRNA sense strand
agaagcacguucauaacuu

SEQ ID NO: 1458283 - RNA, 19 nt, Homo sapiens
  misc_RNA (1)...(19): siRNA sense strand
cgggaaacaugguuaaucu

SEQ ID NO: 1458284 - RNA, 19 nt, Homo sapiens
  misc_RNA (1)...(19): siRNA sense strand
gcucaucuccaucacauuc

SEQ ID NO: 1458285 - RNA, 19 nt, Homo sapiens
  misc_RNA (1)...(19): siRNA sense strand
gauugaccaugccaaagug

SEQ ID NO: 1458286 - RNA, 19 nt, Homo sapiens
  misc_RNA (1)...(19): siRNA sense strand
gagaagcacguucauaacu

SEQ ID NO: 1458287 - RNA, 19 nt, Homo sapiens
  misc_RNA (1)...(19): siRNA sense strand
caacuucaacacccgcuuu

SEQ ID NO: 1458288 - RNA, 19 nt, Homo sapiens
  misc_RNA (1)...(19): siRNA sense strand
ccaagcggaucaagaaugc

SEQ ID NO: 1458289 - RNA, 19 nt, Homo sapiens
  misc_RNA (1)...(19): siRNA sense strand
gccaauguccuucgggaaa

SEQ ID NO: 1458290 - RNA, 19 nt, Homo sapiens
  misc_RNA (1)...(19): siRNA sense strand
gcuccugucugccaucauc

SEQ ID NO: 1458291 - RNA, 19 nt, Homo sapiens
  misc_RNA (1)...(19): siRNA sense strand
caacacccgcuuugucaug

SEQ ID NO: 1458292 - RNA, 19 nt, Homo sapiens
  misc_RNA (1)...(19): siRNA sense strand
agucgaagcuggagcaucu

SEQ ID NO: 1458293 - RNA, 19 nt, Homo sapiens
  misc_RNA (1)...(19): siRNA sense strand
acaaagcugcuaaagaaga

SEQ ID NO: 1458294 - RNA, 19 nt, Homo sapiens
  misc_RNA (1)...(19): siRNA sense strand
caagcuauccaccaguuga

SEQ ID NO: 1458295 - RNA, 19 nt, Homo sapiens
  misc_RNA (1)...(19): siRNA sense strand
ccauguggcucaucuccau

SEQ ID NO: 1458296 - RNA, 19 nt, Homo sapiens
  misc_RNA (1)...(19): siRNA sense strand
uuuccaagaugcagaaugu

SEQ ID NO: 1458297 - RNA, 19 nt, Homo sapiens
  misc_RNA (1)...(19): siRNA sense strand
aaacacacaaagcugcuaa

SEQ ID NO: 1458298 - RNA, 19 nt, Homo sapiens
  misc_RNA (1)...(19): siRNA sense strand
uacacaaguucaagcaguu

SEQ ID NO: 1458299 - RNA, 19 nt, Homo sapiens
  misc_RNA (1)...(19): siRNA sense strand
ugaggaaacaccagaggaa

SEQ ID NO: 1458300 - RNA, 19 nt, Homo sapiens
  misc_RNA (1)...(19): siRNA sense strand
gcggagaagcacguucaua

SEQ ID NO: 1458301 - RNA, 19 nt, Homo sapiens
  misc_RNA (1)...(19): siRNA sense strand
gggaaacaugguuaaucua

SEQ ID NO: 1458302 - RNA, 19 nt, Homo sapiens
  misc_RNA (1)...(19): siRNA sense strand
ggagaagcacguucauaac

SEQ ID NO: 1458303 - RNA, 19 nt, Homo sapiens
  misc_RNA (1)...(19): siRNA sense strand
agcaggacguaacuaguaa

SEQ ID NO: 1458304 - RNA, 19 nt, Homo sapiens
  misc_RNA (1)...(19): siRNA sense strand
uguaugacuuaaucacaga

SEQ ID NO: 1458305 - RNA, 19 nt, Homo sapiens
  misc_RNA (1)...(19): siRNA sense strand
ugaggagcgucaagaugga

SEQ ID NO: 1458306 - RNA, 19 nt, Homo sapiens
  misc_RNA (1)...(19): siRNA sense strand
caucacauuccuuuccauu

SEQ ID NO: 1458307 - RNA, 19 nt, Homo sapiens
  misc_RNA (1)...(19): siRNA sense strand
gagcgaagaccuggagaag

SEQ ID NO: 1458308 - RNA, 19 nt, Homo sapiens
  misc_RNA (1)...(19): siRNA sense strand
ccugaucgcccgagucaug

SEQ ID NO: 1458309 - RNA, 19 nt, Homo sapiens
  misc_RNA (1)...(19): siRNA sense strand
ggagcgaagaccuggagaa

SEQ ID NO: 1458310 - RNA, 19 nt, Homo sapiens
  misc_RNA (1)...(19): siRNA sense strand
caagaugcagaaugucaug

SEQ ID NO: 1458311 - RNA, 19 nt, Homo sapiens
  misc_RNA (1)...(19): siRNA sense strand
ucuccucacuggcaucaug

SEQ ID NO: 1458312 - RNA, 19 nt, Homo sapiens
  misc_RNA (1)...(19): siRNA sense strand
uccaagcuauccaccaguu

SEQ ID NO: 1458313 - RNA, 19 nt, Homo sapiens
  misc_RNA (1)...(19): siRNA sense strand
gaaguuccuccaagcuauc

SEQ ID NO: 1458314 - RNA, 19 nt, Homo sapiens
  misc_RNA (1)...(19): siRNA sense strand
cacacaaagcugcuaaaga

SEQ ID NO: 1458315 - RNA, 19 nt, Homo sapiens
  misc_RNA (1)...(19): siRNA sense strand
ucaaugaccggagcgaaga

SEQ ID NO: 1458316 - RNA, 19 nt, Homo sapiens
  misc_RNA (1)...(19): siRNA sense strand
uggcucaucuccaucacau

SEQ ID NO: 1458317 - RNA, 19 nt, Homo sapiens
  misc_RNA (1)...(19): siRNA sense strand
caacaagaucaacuucaac

SEQ ID NO: 1458318 - RNA, 19 nt, Homo sapiens
  misc_RNA (1)...(19): siRNA sense strand
cuuaaucacagaacucaau

SEQ ID NO: 1458319 - RNA, 19 nt, Homo sapiens
  misc_RNA (1)...(19): siRNA sense strand
gcaucucucuguggaucau

SEQ ID NO: 1458320 - RNA, 19 nt, Homo sapiens
  misc_RNA (1)...(19): siRNA sense strand
agaugcagaaugucaugua

SEQ ID NO: 1458321 - RNA, 19 nt, Homo sapiens
  misc_RNA (1)...(19): siRNA sense strand
gaaagcuggaacucaccaa

SEQ ID NO: 1458322 - RNA, 19 nt, Homo sapiens
  misc_RNA (1)...(19): siRNA sense strand
ccaauguccuucgggaaac

SEQ ID NO: 1458323 - RNA, 19 nt, Homo sapiens
  misc_RNA (1)...(19): siRNA sense strand
gcgaguacaaguucuucug

SEQ ID NO: 1458324 - RNA, 19 nt, Homo sapiens
  misc_RNA (1)...(19): siRNA sense strand
caauguccuucgggaaaca

SEQ ID NO: 1458325 - RNA, 19 nt, Homo sapiens
  misc_RNA (1)...(19): siRNA sense strand
ccauguuccugcgccugua

SEQ ID NO: 1458326 - RNA, 19 nt, Homo sapiens
  misc_RNA (1)...(19): siRNA sense strand
aggcugcacugcccuugug

SEQ ID NO: 1458327 - RNA, 19 nt, Homo sapiens
  misc_RNA (1)...(19): siRNA sense strand
acacucugguggaccuuuc

SEQ ID NO: 1458328 - RNA, 19 nt, Homo sapiens
  misc_RNA (1)...(19): siRNA sense strand
ggacguaacuaguaacuuu

SEQ ID NO: 1458329 - RNA, 19 nt, Homo sapiens
  misc_RNA (1)...(19): siRNA sense strand
acacaaagcugcuaaagaa

SEQ ID NO: 1458330 - RNA, 19 nt, Homo sapiens
  misc_RNA (1)...(19): siRNA sense strand
gcgaagaccuggagaagca

SEQ ID NO: 1458331 - RNA, 19 nt, Homo sapiens
  misc_RNA (1)...(19): siRNA sense strand
ggaaacaugguuaaucuau

SEQ ID NO: 1458332 - RNA, 19 nt, Homo sapiens
  misc_RNA (1)...(19): siRNA sense strand
ugaaaugccuuaucagucu

SEQ ID NO: 1458333 - RNA, 19 nt, Homo sapiens
  misc_RNA (1)...(19): siRNA sense strand
caagaaugcugcagccaau

SEQ ID NO: 1458334 - RNA, 19 nt, Homo sapiens
  misc_RNA (1)...(19): siRNA sense strand
gaagauugaccaugccaaa

SEQ ID NO: 1458335 - RNA, 19 nt, Homo sapiens
  misc_RNA (1)...(19): siRNA sense strand
ucaacaagaucaacuucaa

SEQ ID NO: 1458336 - RNA, 19 nt, Homo sapiens
  misc_RNA (1)...(19): siRNA sense strand
gaucaucgccuaccacaca

SEQ ID NO: 1458337 - RNA, 19 nt, Homo sapiens
  misc_RNA (1)...(19): siRNA sense strand
gcccugaaaugccuuauca

SEQ ID NO: 1458338 - RNA, 19 nt, Homo sapiens
  misc_RNA (1)...(19): siRNA sense strand
cagcaggacguaacuagua

SEQ ID NO: 1458339 - RNA, 19 nt, Homo sapiens
  misc_RNA (1)...(19): siRNA sense strand
cggagaagcacguucauaa

SEQ ID NO: 1458340 - RNA, 19 nt, Homo sapiens
  misc_RNA (1)...(19): siRNA sense strand
ggaaacaccagaggaaguu

SEQ ID NO: 1458341 - RNA, 19 nt, Homo sapiens
  misc_RNA (1)...(19): siRNA sense strand
caaagcugcuaaagaagau

SEQ ID NO: 1458342 - RNA, 19 nt, Homo sapiens
  misc_RNA (1)...(19): siRNA sense strand
gcggaugacuggcggauag

SEQ ID NO: 1458343 - RNA, 19 nt, Homo sapiens
  misc_RNA (1)...(19): siRNA sense strand
gaugcagaaugucauguau

SEQ ID NO: 1458344 - RNA, 19 nt, Homo sapiens
  misc_RNA (1)...(19): siRNA sense strand
gcacguucauaacuucaug

SEQ ID NO: 1458345 - RNA, 19 nt, Homo sapiens
  misc_RNA (1)...(19): siRNA sense strand
ugaagacgcucaugaccau

SEQ ID NO: 1458346 - RNA, 19 nt, Homo sapiens
  misc_RNA (1)...(19): siRNA sense strand
ggauagccaugaccuacga

SEQ ID NO: 1458347 - RNA, 19 nt, Homo sapiens
  misc_RNA (1)...(19): siRNA sense strand
ucacauuccuuuccauugg

SEQ ID NO: 1458348 - RNA, 19 nt, Homo sapiens
  misc_RNA (1)...(19): siRNA sense strand
ucaccaagcggaucaagaa

SEQ ID NO: 1458349 - RNA, 19 nt, Homo sapiens
  misc_RNA (1)...(19): siRNA sense strand
agaagcacguucauaacuu

SEQ ID NO: 1458350 - RNA, 19 nt, Homo sapiens
  misc_RNA (1)...(19): siRNA sense strand
cgggaaacaugguuaaucu

SEQ ID NO: 1458351 - RNA, 19 nt, Homo sapiens
  misc_RNA (1)...(19): siRNA sense strand
gcucaucuccaucacauuc

SEQ ID NO: 1458352 - RNA, 19 nt, Homo sapiens
  misc_RNA (1)...(19): siRNA sense strand
gauugaccaugccaaagug

SEQ ID NO: 1458353 - RNA, 19 nt, Homo sapiens
  misc_RNA (1)...(19): siRNA sense strand
gagaagcacguucauaacu

SEQ ID NO: 1458354 - RNA, 19 nt, Homo sapiens
  misc_RNA (1)...(19): siRNA sense strand
caacuucaacacccgcuuu

SEQ ID NO: 1458355 - RNA, 19 nt, Homo sapiens
  misc_RNA (1)...(19): siRNA sense strand
ccaagcggaucaagaaugc

SEQ ID NO: 1458356 - RNA, 19 nt, Homo sapiens
  misc_RNA (1)...(19): siRNA sense strand
gccaauguccuucgggaaa

SEQ ID NO: 1458357 - RNA, 19 nt, Homo sapiens
  misc_RNA (1)...(19): siRNA sense strand
gcuccugucugccaucauc

SEQ ID NO: 1458358 - RNA, 19 nt, Homo sapiens
  misc_RNA (1)...(19): siRNA sense strand
caacacccgcuuugucaug

SEQ ID NO: 1458359 - RNA, 19 nt, Homo sapiens
  misc_RNA (1)...(19): siRNA sense strand
agucgaagcuggagcaucu

SEQ ID NO: 1458360 - RNA, 19 nt, Homo sapiens
  misc_RNA (1)...(19): siRNA sense strand
acaaagcugcuaaagaaga

SEQ ID NO: 1458361 - RNA, 19 nt, Homo sapiens
  misc_RNA (1)...(19): siRNA sense strand
caagcuauccaccaguuga

SEQ ID NO: 1458362 - RNA, 19 nt, Homo sapiens
  misc_RNA (1)...(19): siRNA sense strand
ccauguggcucaucuccau

SEQ ID NO: 1458363 - RNA, 19 nt, Homo sapiens
  misc_RNA (1)...(19): siRNA sense strand
uuuccaagaugcagaaugu

SEQ ID NO: 1458364 - RNA, 19 nt, Homo sapiens
  misc_RNA (1)...(19): siRNA sense strand
aaacacacaaagcugcuaa

SEQ ID NO: 1458365 - RNA, 19 nt, Homo sapiens
  misc_RNA (1)...(19): siRNA sense strand
uacacaaguucaagcaguu

SEQ ID NO: 1458366 - RNA, 19 nt, Homo sapiens
  misc_RNA (1)...(19): siRNA sense strand
ugaggaaacaccagaggaa

SEQ ID NO: 1458367 - RNA, 19 nt, Homo sapiens
  misc_RNA (1)...(19): siRNA sense strand
gcggagaagcacguucaua

SEQ ID NO: 1458368 - RNA, 19 nt, Homo sapiens
  misc_RNA (1)...(19): siRNA sense strand
gggaaacaugguuaaucua

SEQ ID NO: 1458369 - RNA, 19 nt, Homo sapiens
  misc_RNA (1)...(19): siRNA sense strand
ggagaagcacguucauaac

SEQ ID NO: 1458370 - RNA, 19 nt, Homo sapiens
  misc_RNA (1)...(19): siRNA sense strand
agcaggacguaacuaguaa

SEQ ID NO: 1458371 - RNA, 19 nt, Homo sapiens
  misc_RNA (1)...(19): siRNA sense strand
uguaugacuuaaucacaga

SEQ ID NO: 1458372 - RNA, 19 nt, Homo sapiens
  misc_RNA (1)...(19): siRNA sense strand
ugaggagcgucaagaugga

SEQ ID NO: 1458373 - RNA, 19 nt, Homo sapiens
  misc_RNA (1)...(19): siRNA sense strand
caucacauuccuuuccauu

SEQ ID NO: 1458374 - RNA, 19 nt, Homo sapiens
  misc_RNA (1)...(19): siRNA sense strand
gagcgaagaccuggagaag

SEQ ID NO: 1458375 - RNA, 19 nt, Homo sapiens
  misc_RNA (1)...(19): siRNA sense strand
ccugaucgcccgagucaug

SEQ ID NO: 1458376 - RNA, 19 nt, Homo sapiens
  misc_RNA (1)...(19): siRNA sense strand
ggagcgaagaccuggagaa

SEQ ID NO: 1458377 - RNA, 19 nt, Homo sapiens
  misc_RNA (1)...(19): siRNA sense strand
caagaugcagaaugucaug

SEQ ID NO: 1458378 - RNA, 19 nt, Homo sapiens
  misc_RNA (1)...(19): siRNA sense strand
ucuccucacuggcaucaug

SEQ ID NO: 1458379 - RNA, 19 nt, Homo sapiens
  misc_RNA (1)...(19): siRNA sense strand
uccaagcuauccaccaguu

SEQ ID NO: 1458380 - RNA, 19 nt, Homo sapiens
  misc_RNA (1)...(19): siRNA sense strand
gaaguuccuccaagcuauc

SEQ ID NO: 1458381 - RNA, 19 nt, Homo sapiens
  misc_RNA (1)...(19): siRNA sense strand
cacacaaagcugcuaaaga

SEQ ID NO: 1458382 - RNA, 19 nt, Homo sapiens
  misc_RNA (1)...(19): siRNA sense strand
ucaaugaccggagcgaaga

SEQ ID NO: 1458383 - RNA, 19 nt, Homo sapiens
  misc_RNA (1)...(19): siRNA sense strand
uggcucaucuccaucacau

SEQ ID NO: 1458384 - RNA, 19 nt, Homo sapiens
  misc_RNA (1)...(19): siRNA sense strand
caacaagaucaacuucaac

SEQ ID NO: 1458385 - RNA, 19 nt, Homo sapiens
  misc_RNA (1)...(19): siRNA sense strand
cuuaaucacagaacucaau

SEQ ID NO: 1458386 - RNA, 19 nt, Homo sapiens
  misc_RNA (1)...(19): siRNA sense strand
gcaucucucuguggaucau

SEQ ID NO: 1458387 - RNA, 19 nt, Homo sapiens
  misc_RNA (1)...(19): siRNA sense strand
agaugcagaaugucaugua

SEQ ID NO: 1458388 - RNA, 19 nt, Homo sapiens
  misc_RNA (1)...(19): siRNA sense strand
gaaagcuggaacucaccaa

SEQ ID NO: 1458389 - RNA, 19 nt, Homo sapiens
  misc_RNA (1)...(19): siRNA sense strand
ccaauguccuucgggaaac

SEQ ID NO: 1458390 - RNA, 19 nt, Homo sapiens
  misc_RNA (1)...(19): siRNA sense strand
gcgaguacaaguucuucug

SEQ ID NO: 1458391 - RNA, 19 nt, Homo sapiens
  misc_RNA (1)...(19): siRNA sense strand
caauguccuucgggaaaca

SEQ ID NO: 1458392 - RNA, 19 nt, Homo sapiens
  misc_RNA (1)...(19): siRNA sense strand
ccauguuccugcgccugua

SEQ ID NO: 1458393 - RNA, 19 nt, Homo sapiens
  misc_RNA (1)...(19): siRNA sense strand
aggcugcacugcccuugug

SEQ ID NO: 1458394 - RNA, 19 nt, Homo sapiens
  misc_RNA (1)...(19): siRNA sense strand
acacucugguggaccuuuc

SEQ ID NO: 1458395 - RNA, 19 nt, Homo sapiens
  misc_RNA (1)...(19): siRNA sense strand
ggcaagaaaucaaggaauu

SEQ ID NO: 1458396 - RNA, 19 nt, Homo sapiens
  misc_RNA (1)...(19): siRNA sense strand
ugaauuaccuccgagauga

SEQ ID NO: 1458397 - RNA, 19 nt, Homo sapiens
  misc_RNA (1)...(19): siRNA sense strand
gaagcaacaacaaguauuc

SEQ ID NO: 1458398 - RNA, 19 nt, Homo sapiens
  misc_RNA (1)...(19): siRNA sense strand
gcaacaacaaguauuccua

SEQ ID NO: 1458399 - RNA, 19 nt, Homo sapiens
  misc_RNA (1)...(19): siRNA sense strand
ccucagaaccggcaagaaa

SEQ ID NO: 1458400 - RNA, 19 nt, Homo sapiens
  misc_RNA (1)...(19): siRNA sense strand
gcaagaaaucaaggaauug

SEQ ID NO: 1458401 - RNA, 19 nt, Homo sapiens
  misc_RNA (1)...(19): siRNA sense strand
uggcugaagcaaaguauua

SEQ ID NO: 1458402 - RNA, 19 nt, Homo sapiens
  misc_RNA (1)...(19): siRNA sense strand
caacagaagcaacaacaag

SEQ ID NO: 1458403 - RNA, 19 nt, Homo sapiens
  misc_RNA (1)...(19): siRNA sense strand
ucaacguccuacucuauga

SEQ ID NO: 1458404 - RNA, 19 nt, Homo sapiens
  misc_RNA (1)...(19): siRNA sense strand
acaaguauguccagcucaa

SEQ ID NO: 1458405 - RNA, 19 nt, Homo sapiens
  misc_RNA (1)...(19): siRNA sense strand
uggugaagcugcuguacaa

SEQ ID NO: 1458406 - RNA, 19 nt, Homo sapiens
  misc_RNA (1)...(19): siRNA sense strand
acaucgagcuguuugacaa

SEQ ID NO: 1458407 - RNA, 19 nt, Homo sapiens
  misc_RNA (1)...(19): siRNA sense strand
gaagaugaggagaccuuug

SEQ ID NO: 1458408 - RNA, 19 nt, Homo sapiens
  misc_RNA (1)...(19): siRNA sense strand
gucaagcgcuacagcacuu

SEQ ID NO: 1458409 - RNA, 19 nt, Homo sapiens
  misc_RNA (1)...(19): siRNA sense strand
cuacagcacuuacgaugac

SEQ ID NO: 1458410 - RNA, 19 nt, Homo sapiens
  misc_RNA (1)...(19): siRNA sense strand
acagaagcaacaacaagua

SEQ ID NO: 1458411 - RNA, 19 nt, Homo sapiens
  misc_RNA (1)...(19): siRNA sense strand
guaccuccaucguguaugc

SEQ ID NO: 1458412 - RNA, 19 nt, Homo sapiens
  misc_RNA (1)...(19): siRNA sense strand
cauagaccguuguggaaag

SEQ ID NO: 1458413 - RNA, 19 nt, Homo sapiens
  misc_RNA (1)...(19): siRNA sense strand
caucaucacaucccuaaag

SEQ ID NO: 1458414 - RNA, 19 nt, Homo sapiens
  misc_RNA (1)...(19): siRNA sense strand
agaagaagcagaccaaggu

SEQ ID NO: 1458415 - RNA, 19 nt, Homo sapiens
  misc_RNA (1)...(19): siRNA sense strand
ccagaggcccgaaucuaug

SEQ ID NO: 1458416 - RNA, 19 nt, Homo sapiens
  misc_RNA (1)...(19): siRNA sense strand
ccaucacccucccucagaa

SEQ ID NO: 1458417 - RNA, 19 nt, Homo sapiens
  misc_RNA (1)...(19): siRNA sense strand
aagaugaggagaccuuuga

SEQ ID NO: 1458418 - RNA, 19 nt, Homo sapiens
  misc_RNA (1)...(19): siRNA sense strand
ggagacacucaacguccua

SEQ ID NO: 1458419 - RNA, 19 nt, Homo sapiens
  misc_RNA (1)...(19): siRNA sense strand
cagaagcaacaacaaguau

SEQ ID NO: 1458420 - RNA, 19 nt, Homo sapiens
  misc_RNA (1)...(19): siRNA sense strand
agagugcccugcaggacaa

SEQ ID NO: 1458421 - RNA, 19 nt, Homo sapiens
  misc_RNA (1)...(19): siRNA sense strand
gaucugcugcugguccuuu

SEQ ID NO: 1458422 - RNA, 19 nt, Homo sapiens
  misc_RNA (1)...(19): siRNA sense strand
gcuacagcacuuacgauga

SEQ ID NO: 1458423 - RNA, 19 nt, Homo sapiens
  misc_RNA (1)...(19): siRNA sense strand
gaaccggcaagaaaucaag

SEQ ID NO: 1458424 - RNA, 19 nt, Homo sapiens
  misc_RNA (1)...(19): siRNA sense strand
cagaggcccgaaucuauga

SEQ ID NO: 1458425 - RNA, 19 nt, Homo sapiens
  misc_RNA (1)...(19): siRNA sense strand
ggugcugaccgacaaagaa

SEQ ID NO: 1458426 - RNA, 19 nt, Homo sapiens
  misc_RNA (1)...(19): siRNA sense strand
uggcagaggugugcuguac

SEQ ID NO: 1458427 - RNA, 19 nt, Homo sapiens
  misc_RNA (1)...(19): siRNA sense strand
ggaauugauggcugaagca

SEQ ID NO: 1458428 - RNA, 19 nt, Homo sapiens
  misc_RNA (1)...(19): siRNA sense strand
uggaggugcugaccgacaa

SEQ ID NO: 1458429 - RNA, 19 nt, Homo sapiens
  misc_RNA (1)...(19): siRNA sense strand
gaagcagaccaagguggaa

SEQ ID NO: 1458430 - RNA, 19 nt, Homo sapiens
  misc_RNA (1)...(19): siRNA sense strand
auugauggcugaagcaaag

SEQ ID NO: 1458431 - RNA, 19 nt, Homo sapiens
  misc_RNA (1)...(19): siRNA sense strand
gaauugauggcugaagcaa

SEQ ID NO: 1458432 - RNA, 19 nt, Homo sapiens
  misc_RNA (1)...(19): siRNA sense strand
cccagaggcccgaaucuau

SEQ ID NO: 1458433 - RNA, 19 nt, Homo sapiens
  misc_RNA (1)...(19): siRNA sense strand
ugaggagaccuuugaacug

SEQ ID NO: 1458434 - RNA, 19 nt, Homo sapiens
  misc_RNA (1)...(19): siRNA sense strand
gcucaaggccauguucagu

SEQ ID NO: 1458435 - RNA, 19 nt, Homo sapiens
  misc_RNA (1)...(19): siRNA sense strand
gugaagaugaggagaccuu

SEQ ID NO: 1458436 - RNA, 19 nt, Homo sapiens
  misc_RNA (1)...(19): siRNA sense strand
agaagcaacaacaaguauu

SEQ ID NO: 1458437 - RNA, 19 nt, Homo sapiens
  misc_RNA (1)...(19): siRNA sense strand
gaaggcuggauccucauag

SEQ ID NO: 1458438 - RNA, 19 nt, Homo sapiens
  misc_RNA (1)...(19): siRNA sense strand
aaggcuggauccucauaga

SEQ ID NO: 1458439 - RNA, 19 nt, Homo sapiens
  misc_RNA (1)...(19): siRNA sense strand
ccgaaucuaugaggagaca

SEQ ID NO: 1458440 - RNA, 19 nt, Homo sapiens
  misc_RNA (1)...(19): siRNA sense strand
gugaagcugcuguacaaca

SEQ ID NO: 1458441 - RNA, 19 nt, Homo sapiens
  misc_RNA (1)...(19): siRNA sense strand
gcagaccaagguggaauuc

SEQ ID NO: 1458442 - RNA, 19 nt, Homo sapiens
  misc_RNA (1)...(19): siRNA sense strand
agaaggcuggauccucaua

SEQ ID NO: 1458443 - RNA, 19 nt, Homo sapiens
  misc_RNA (1)...(19): siRNA sense strand
ucauagaccguuguggaaa

SEQ ID NO: 1458444 - RNA, 19 nt, Homo sapiens
  misc_RNA (1)...(19): siRNA sense strand
agcaaaguauuaccucauc

SEQ ID NO: 1458445 - RNA, 19 nt, Homo sapiens
  misc_RNA (1)...(19): siRNA sense strand
ucagaaccggcaagaaauc

SEQ ID NO: 1458446 - RNA, 19 nt, Homo sapiens
  misc_RNA (1)...(19): siRNA sense strand
caaaguauuaccucaucca

SEQ ID NO: 1458447 - RNA, 19 nt, Homo sapiens
  misc_RNA (1)...(19): siRNA sense strand
ugacgaccaccugcugaaa

SEQ ID NO: 1458448 - RNA, 19 nt, Homo sapiens
  misc_RNA (1)...(19): siRNA sense strand
acucaacguccuacucuau

SEQ ID NO: 1458449 - RNA, 19 nt, Homo sapiens
  misc_RNA (1)...(19): siRNA sense strand
cggagaagaagcagaccaa

SEQ ID NO: 1458450 - RNA, 19 nt, Homo sapiens
  misc_RNA (1)...(19): siRNA sense strand
gccgcgugcucuucaucaa

SEQ ID NO: 1458451 - RNA, 19 nt, Homo sapiens
  misc_RNA (1)...(19): siRNA sense strand
ggaccuggauuucuguuca

SEQ ID NO: 1458452 - RNA, 19 nt, Homo sapiens
  misc_RNA (1)...(19): siRNA sense strand
caucaacguucgggacuuu

SEQ ID NO: 1458453 - RNA, 19 nt, Homo sapiens
  misc_RNA (1)...(19): siRNA sense strand
ucauggaccucgccaauac

SEQ ID NO: 1458454 - RNA, 19 nt, Homo sapiens
  misc_RNA (1)...(19): siRNA sense strand
gcaaguuccaggagaagga

SEQ ID NO: 1458455 - RNA, 19 nt, Homo sapiens
  misc_RNA (1)...(19): siRNA sense strand
gcauaccacaccagacaga

SEQ ID NO: 1458456 - RNA, 19 nt, Homo sapiens
  misc_RNA (1)...(19): siRNA sense strand
agacuucgguuguguucca

SEQ ID NO: 1458457 - RNA, 19 nt, Homo sapiens
  misc_RNA (1)...(19): siRNA sense strand
agucggaccuggauuucug

SEQ ID NO: 1458458 - RNA, 19 nt, Homo sapiens
  misc_RNA (1)...(19): siRNA sense strand
gaugaagggcaaacugucu

SEQ ID NO: 1458459 - RNA, 19 nt, Homo sapiens
  misc_RNA (1)...(19): siRNA sense strand
gauguggucaugaaggaau

SEQ ID NO: 1458460 - RNA, 19 nt, Homo sapiens
  misc_RNA (1)...(19): siRNA sense strand
ucgauguggucaugaagga

SEQ ID NO: 1458461 - RNA, 19 nt, Homo sapiens
  misc_RNA (1)...(19): siRNA sense strand
gcuguggcuucaacaucaa

SEQ ID NO: 1458462 - RNA, 19 nt, Homo sapiens
  misc_RNA (1)...(19): siRNA sense strand
uguauucgcuguggcuuca

SEQ ID NO: 1458463 - RNA, 19 nt, Homo sapiens
  misc_RNA (1)...(19): siRNA sense strand
aauacuugcuccagcuuuc

SEQ ID NO: 1458464 - RNA, 19 nt, Homo sapiens
  misc_RNA (1)...(19): siRNA sense strand
ggcaaacugucuucuacac

SEQ ID NO: 1458465 - RNA, 19 nt, Homo sapiens
  misc_RNA (1)...(19): siRNA sense strand
cgcuguggcuucaacauca

SEQ ID NO: 1458466 - RNA, 19 nt, Homo sapiens
  misc_RNA (1)...(19): siRNA sense strand
gucauggaccucgccaaua

SEQ ID NO: 1458467 - RNA, 19 nt, Homo sapiens
  misc_RNA (1)...(19): siRNA sense strand
gggacagccaugccuaugu

SEQ ID NO: 1458468 - RNA, 19 nt, Homo sapiens
  misc_RNA (1)...(19): siRNA sense strand
caauacuugcuccagcuuu

SEQ ID NO: 1458469 - RNA, 19 nt, Homo sapiens
  misc_RNA (1)...(19): siRNA sense strand
uggcauaccacaccagaca

SEQ ID NO: 1458470 - RNA, 19 nt, Homo sapiens
  misc_RNA (1)...(19): siRNA sense strand
gggcaaacugucuucuaca

SEQ ID NO: 1458471 - RNA, 19 nt, Homo sapiens
  misc_RNA (1)...(19): siRNA sense strand
ggaccuggauuucuguuca

SEQ ID NO: 1458472 - RNA, 19 nt, Homo sapiens
  misc_RNA (1)...(19): siRNA sense strand
caucaacguucgggacuuu

SEQ ID NO: 1458473 - RNA, 19 nt, Homo sapiens
  misc_RNA (1)...(19): siRNA sense strand
ucauggaccucgccaauac

SEQ ID NO: 1458474 - RNA, 19 nt, Homo sapiens
  misc_RNA (1)...(19): siRNA sense strand
gcaaguuccaggagaagga

SEQ ID NO: 1458475 - RNA, 19 nt, Homo sapiens
  misc_RNA (1)...(19): siRNA sense strand
gcauaccacaccagacaga

SEQ ID NO: 1458476 - RNA, 19 nt, Homo sapiens
  misc_RNA (1)...(19): siRNA sense strand
agacuucgguuguguucca

SEQ ID NO: 1458477 - RNA, 19 nt, Homo sapiens
  misc_RNA (1)...(19): siRNA sense strand
agucggaccuggauuucug

SEQ ID NO: 1458478 - RNA, 19 nt, Homo sapiens
  misc_RNA (1)...(19): siRNA sense strand
gaugaagggcaaacugucu

SEQ ID NO: 1458479 - RNA, 19 nt, Homo sapiens
  misc_RNA (1)...(19): siRNA sense strand
gauguggucaugaaggaau

SEQ ID NO: 1458480 - RNA, 19 nt, Homo sapiens
  misc_RNA (1)...(19): siRNA sense strand
ucgauguggucaugaagga

SEQ ID NO: 1458481 - RNA, 19 nt, Homo sapiens
  misc_RNA (1)...(19): siRNA sense strand
gcuguggcuucaacaucaa

SEQ ID NO: 1458482 - RNA, 19 nt, Homo sapiens
  misc_RNA (1)...(19): siRNA sense strand
uguauucgcuguggcuuca

SEQ ID NO: 1458483 - RNA, 19 nt, Homo sapiens
  misc_RNA (1)...(19): siRNA sense strand
aauacuugcuccagcuuuc

SEQ ID NO: 1458484 - RNA, 19 nt, Homo sapiens
  misc_RNA (1)...(19): siRNA sense strand
ggcaaacugucuucuacac

SEQ ID NO: 1458485 - RNA, 19 nt, Homo sapiens
  misc_RNA (1)...(19): siRNA sense strand
cgcuguggcuucaacauca

SEQ ID NO: 1458486 - RNA, 19 nt, Homo sapiens
  misc_RNA (1)...(19): siRNA sense strand
gucauggaccucgccaaua

SEQ ID NO: 1458487 - RNA, 19 nt, Homo sapiens
  misc_RNA (1)...(19): siRNA sense strand
gggacagccaugccuaugu

SEQ ID NO: 1458488 - RNA, 19 nt, Homo sapiens
  misc_RNA (1)...(19): siRNA sense strand
caauacuugcuccagcuuu

SEQ ID NO: 1458489 - RNA, 19 nt, Homo sapiens
  misc_RNA (1)...(19): siRNA sense strand
uggcauaccacaccagaca

SEQ ID NO: 1458490 - RNA, 19 nt, Homo sapiens
  misc_RNA (1)...(19): siRNA sense strand
gggcaaacugucuucuaca

SEQ ID NO: 1458491 - RNA, 19 nt, Homo sapiens
  misc_RNA (1)...(19): siRNA sense strand
gaaggcagcuaaucaguga

SEQ ID NO: 1458492 - RNA, 19 nt, Homo sapiens
  misc_RNA (1)...(19): siRNA sense strand
ggaaagaguuuaauuguac

SEQ ID NO: 1458493 - RNA, 19 nt, Homo sapiens
  misc_RNA (1)...(19): siRNA sense strand
ggagguggcuguacugaaa

SEQ ID NO: 1458494 - RNA, 19 nt, Homo sapiens
  misc_RNA (1)...(19): siRNA sense strand
gaacucaacuggucuuucu

SEQ ID NO: 1458495 - RNA, 19 nt, Homo sapiens
  misc_RNA (1)...(19): siRNA sense strand
ccaguggacuuuaguagua

SEQ ID NO: 1458496 - RNA, 19 nt, Homo sapiens
  misc_RNA (1)...(19): siRNA sense strand
gaugaugaauguacucaaa

SEQ ID NO: 1458497 - RNA, 19 nt, Homo sapiens
  misc_RNA (1)...(19): siRNA sense strand
gcuaaucagugaccacgua

SEQ ID NO: 1458498 - RNA, 19 nt, Homo sapiens
  misc_RNA (1)...(19): siRNA sense strand
ucucaaagaugaugaaugu

SEQ ID NO: 1458499 - RNA, 19 nt, Homo sapiens
  misc_RNA (1)...(19): siRNA sense strand
guacucagauccuccuuug

SEQ ID NO: 1458500 - RNA, 19 nt, Homo sapiens
  misc_RNA (1)...(19): siRNA sense strand
ggucaaagaguuauagauu

SEQ ID NO: 1458501 - RNA, 19 nt, Homo sapiens
  misc_RNA (1)...(19): siRNA sense strand
ugaagcaguuucucaauau

SEQ ID NO: 1458502 - RNA, 19 nt, Homo sapiens
  misc_RNA (1)...(19): siRNA sense strand
caaguaaaccugccuguau

SEQ ID NO: 1458503 - RNA, 19 nt, Homo sapiens
  misc_RNA (1)...(19): siRNA sense strand
ugaagcagcugcacaaugg

SEQ ID NO: 1458504 - RNA, 19 nt, Homo sapiens
  misc_RNA (1)...(19): siRNA sense strand
gaaauucucacugacauga

SEQ ID NO: 1458505 - RNA, 19 nt, Homo sapiens
  misc_RNA (1)...(19): siRNA sense strand
gcauauaucagacacaaga

SEQ ID NO: 1458506 - RNA, 19 nt, Homo sapiens
  misc_RNA (1)...(19): siRNA sense strand
gaaaggaaacagagcaugu

SEQ ID NO: 1458507 - RNA, 19 nt, Homo sapiens
  misc_RNA (1)...(19): siRNA sense strand
gcaguuaacacucaaggaa

SEQ ID NO: 1458508 - RNA, 19 nt, Homo sapiens
  misc_RNA (1)...(19): siRNA sense strand
gugaaccacugacaacuga

SEQ ID NO: 1458509 - RNA, 19 nt, Homo sapiens
  misc_RNA (1)...(19): siRNA sense strand
ucacugacaugaaguaugg

SEQ ID NO: 1458510 - RNA, 19 nt, Homo sapiens
  misc_RNA (1)...(19): siRNA sense strand
aaacucauuuggcugcaua

SEQ ID NO: 1458511 - RNA, 19 nt, Homo sapiens
  misc_RNA (1)...(19): siRNA sense strand
guucagagauuaggcuuga

SEQ ID NO: 1458512 - RNA, 19 nt, Homo sapiens
  misc_RNA (1)...(19): siRNA sense strand
ggaccacacuuucugucuu

SEQ ID NO: 1458513 - RNA, 19 nt, Homo sapiens
  misc_RNA (1)...(19): siRNA sense strand
gcagugcccuagaaucugu

SEQ ID NO: 1458514 - RNA, 19 nt, Homo sapiens
  misc_RNA (1)...(19): siRNA sense strand
ugaauguacucaaacagaa

SEQ ID NO: 1458515 - RNA, 19 nt, Homo sapiens
  misc_RNA (1)...(19): siRNA sense strand
gaccacacuuucugucuug

SEQ ID NO: 1458516 - RNA, 19 nt, Homo sapiens
  misc_RNA (1)...(19): siRNA sense strand
ggcuguggauuauacaaua

SEQ ID NO: 1458517 - RNA, 19 nt, Homo sapiens
  misc_RNA (1)...(19): siRNA sense strand
ggacaccuuuggucaguuc

SEQ ID NO: 1458518 - RNA, 19 nt, Homo sapiens
  misc_RNA (1)...(19): siRNA sense strand
gaaagcauucucaaagaug

SEQ ID NO: 1458519 - RNA, 19 nt, Homo sapiens
  misc_RNA (1)...(19): siRNA sense strand
gaagcaguuucucaauaug

SEQ ID NO: 1458520 - RNA, 19 nt, Homo sapiens
  misc_RNA (1)...(19): siRNA sense strand
gucagaaguucaauuaaug

SEQ ID NO: 1458521 - RNA, 19 nt, Homo sapiens
  misc_RNA (1)...(19): siRNA sense strand
gcugaaggccacaucauuu

SEQ ID NO: 1458522 - RNA, 19 nt, Homo sapiens
  misc_RNA (1)...(19): siRNA sense strand
ggucacacaucccauuuua

SEQ ID NO: 1458523 - RNA, 19 nt, Homo sapiens
  misc_RNA (1)...(19): siRNA sense strand
ccaccacugucauuagauu

SEQ ID NO: 1458524 - RNA, 19 nt, Homo sapiens
  misc_RNA (1)...(19): siRNA sense strand
gaucuuguccugugccaaa

SEQ ID NO: 1458525 - RNA, 19 nt, Homo sapiens
  misc_RNA (1)...(19): siRNA sense strand
aagcacacgucguccauuu

SEQ ID NO: 1458526 - RNA, 19 nt, Homo sapiens
  misc_RNA (1)...(19): siRNA sense strand
ggcucaauauguccuaaua

SEQ ID NO: 1458527 - RNA, 19 nt, Homo sapiens
  misc_RNA (1)...(19): siRNA sense strand
gugucaagcuucagugauu

SEQ ID NO: 1458528 - RNA, 19 nt, Homo sapiens
  misc_RNA (1)...(19): siRNA sense strand
guagagacagccaauuuga

SEQ ID NO: 1458529 - RNA, 19 nt, Homo sapiens
  misc_RNA (1)...(19): siRNA sense strand
cuucagugauuguggcuua

SEQ ID NO: 1458530 - RNA, 19 nt, Homo sapiens
  misc_RNA (1)...(19): siRNA sense strand
aaagcugccuuccacauga

SEQ ID NO: 1458531 - RNA, 19 nt, Homo sapiens
  misc_RNA (1)...(19): siRNA sense strand
gcuaagaagccaucauugu

SEQ ID NO: 1458532 - RNA, 19 nt, Homo sapiens
  misc_RNA (1)...(19): siRNA sense strand
guugcuaacuggccagauu

SEQ ID NO: 1458533 - RNA, 19 nt, Homo sapiens
  misc_RNA (1)...(19): siRNA sense strand
ggaaacagagcaugucagu

SEQ ID NO: 1458534 - RNA, 19 nt, Homo sapiens
  misc_RNA (1)...(19): siRNA sense strand
aagaagccaucauugugua

SEQ ID NO: 1458535 - RNA, 19 nt, Homo sapiens
  misc_RNA (1)...(19): siRNA sense strand
cacaauggcuuuggagguu

SEQ ID NO: 1458536 - RNA, 19 nt, Homo sapiens
  misc_RNA (1)...(19): siRNA sense strand
ccucagcucugcucaguca

SEQ ID NO: 1458537 - RNA, 19 nt, Homo sapiens
  misc_RNA (1)...(19): siRNA sense strand
gucaaagaguuauagauuc

SEQ ID NO: 1458538 - RNA, 19 nt, Homo sapiens
  misc_RNA (1)...(19): siRNA sense strand
aaagcauucucaaagauga

SEQ ID NO: 1458539 - RNA, 19 nt, Homo sapiens
  misc_RNA (1)...(19): siRNA sense strand
ucauuuggcugcauauauc

SEQ ID NO: 1458540 - RNA, 19 nt, Homo sapiens
  misc_RNA (1)...(19): siRNA sense strand
aguuauagauuccacugua

SEQ ID NO: 1458541 - RNA, 19 nt, Homo sapiens
  misc_RNA (1)...(19): siRNA sense strand
ccagcaaccugaccuugga

SEQ ID NO: 1458542 - RNA, 19 nt, Homo sapiens
  misc_RNA (1)...(19): siRNA sense strand
gaacaugauggaggugaaa

SEQ ID NO: 1458543 - RNA, 19 nt, Homo sapiens
  misc_RNA (1)...(19): siRNA sense strand
caacgacccagaaagcauu

SEQ ID NO: 1458544 - RNA, 19 nt, Homo sapiens
  misc_RNA (1)...(19): siRNA sense strand
gcaugucagugcuuugauc

SEQ ID NO: 1458545 - RNA, 19 nt, Homo sapiens
  misc_RNA (1)...(19): siRNA sense strand
agagacagccaauuugauu

SEQ ID NO: 1458546 - RNA, 19 nt, Homo sapiens
  misc_RNA (1)...(19): siRNA sense strand
gcacacgucguccauuugu

SEQ ID NO: 1458547 - RNA, 19 nt, Homo sapiens
  misc_RNA (1)...(19): siRNA sense strand
ccacugucauuagauuaaa

SEQ ID NO: 1458548 - RNA, 19 nt, Homo sapiens
  misc_RNA (1)...(19): siRNA sense strand
guuauagauuccacuguau

SEQ ID NO: 1458549 - RNA, 19 nt, Homo sapiens
  misc_RNA (1)...(19): siRNA sense strand
ccuguaugcucaccagaaa

SEQ ID NO: 1458550 - RNA, 19 nt, Homo sapiens
  misc_RNA (1)...(19): siRNA sense strand
caaagaugaugaauguacu

SEQ ID NO: 1458551 - RNA, 19 nt, Homo sapiens
  misc_RNA (1)...(19): siRNA sense strand
ggccagauuugcuuucaca

SEQ ID NO: 1458552 - RNA, 19 nt, Homo sapiens
  misc_RNA (1)...(19): siRNA sense strand
uaagaagccaucauugugu

SEQ ID NO: 1458553 - RNA, 19 nt, Homo sapiens
  misc_RNA (1)...(19): siRNA sense strand
gagacagccaauuugauuu

SEQ ID NO: 1458554 - RNA, 19 nt, Homo sapiens
  misc_RNA (1)...(19): siRNA sense strand
gauccugacagccuccaua

SEQ ID NO: 1458555 - RNA, 19 nt, Homo sapiens
  misc_RNA (1)...(19): siRNA sense strand
caugaaguauggacaccuu

SEQ ID NO: 1458556 - RNA, 19 nt, Homo sapiens
  misc_RNA (1)...(19): siRNA sense strand
gaaccacugacaacugaga

SEQ ID NO: 1458557 - RNA, 19 nt, Homo sapiens
  misc_RNA (1)...(19): siRNA sense strand
cuaagaagccaucauugug

SEQ ID NO: 1458558 - RNA, 19 nt, Homo sapiens
  misc_RNA (1)...(19): siRNA sense strand
agaaucaugugucaagcuu

SEQ ID NO: 1458559 - RNA, 19 nt, Homo sapiens
  misc_RNA (1)...(19): siRNA sense strand
cauacagaaucauguguca

SEQ ID NO: 1458560 - RNA, 19 nt, Homo sapiens
  misc_RNA (1)...(19): siRNA sense strand
acaauggcuuuggagguua

SEQ ID NO: 1458561 - RNA, 19 nt, Homo sapiens
  misc_RNA (1)...(19): siRNA sense strand
uuuggugcguaguauauua

SEQ ID NO: 1458562 - RNA, 19 nt, Homo sapiens
  misc_RNA (1)...(19): siRNA sense strand
aaguaaaccugccuguaug

SEQ ID NO: 1458563 - RNA, 19 nt, Homo sapiens
  misc_RNA (1)...(19): siRNA sense strand
caaagcugccuuccacaug

SEQ ID NO: 1458564 - RNA, 19 nt, Homo sapiens
  misc_RNA (1)...(19): siRNA sense strand
guuguuggcucuuuagaac

SEQ ID NO: 1458565 - RNA, 19 nt, Homo sapiens
  misc_RNA (1)...(19): siRNA sense strand
gcucugcucagucaccuuu

SEQ ID NO: 1458566 - RNA, 19 nt, Homo sapiens
  misc_RNA (1)...(19): siRNA sense strand
ucaaagaguuauagauucc

SEQ ID NO: 1458567 - RNA, 19 nt, Homo sapiens
  misc_RNA (1)...(19): siRNA sense strand
aaucaugugucaagcuuca

SEQ ID NO: 1458568 - RNA, 19 nt, Homo sapiens
  misc_RNA (1)...(19): siRNA sense strand
gaccugugguugucgaauc

SEQ ID NO: 1458569 - RNA, 19 nt, Homo sapiens
  misc_RNA (1)...(19): siRNA sense strand
ugaugaauguacucaaaca

SEQ ID NO: 1458570 - RNA, 19 nt, Homo sapiens
  misc_RNA (1)...(19): siRNA sense strand
ucaaagaugaugaauguac

SEQ ID NO: 1458571 - RNA, 19 nt, Homo sapiens
  misc_RNA (1)...(19): siRNA sense strand
ggaaccaugggcuuuguug

SEQ ID NO: 1458572 - RNA, 19 nt, Homo sapiens
  misc_RNA (1)...(19): siRNA sense strand
ccuaauaguuauggaagug

SEQ ID NO: 1458573 - RNA, 19 nt, Homo sapiens
  misc_RNA (1)...(19): siRNA sense strand
uaccugggauacucauuga

SEQ ID NO: 1458574 - RNA, 19 nt, Homo sapiens
  misc_RNA (1)...(19): siRNA sense strand
gaaucccaguggacuuuag

SEQ ID NO: 1458575 - RNA, 19 nt, Homo sapiens
  misc_RNA (1)...(19): siRNA sense strand
acucagauccuccuuuguu

SEQ ID NO: 1458576 - RNA, 19 nt, Homo sapiens
  misc_RNA (1)...(19): siRNA sense strand
gcugcaaccugauugaaaa

SEQ ID NO: 1458577 - RNA, 19 nt, Homo sapiens
  misc_RNA (1)...(19): siRNA sense strand
acucaacuggucuuucuua

SEQ ID NO: 1458578 - RNA, 19 nt, Homo sapiens
  misc_RNA (1)...(19): siRNA sense strand
caguguggcuguggauuau

SEQ ID NO: 1458579 - RNA, 19 nt, Homo sapiens
  misc_RNA (1)...(19): siRNA sense strand
uaacuggccagauuugcuu

SEQ ID NO: 1458580 - RNA, 19 nt, Homo sapiens
  misc_RNA (1)...(19): siRNA sense strand
gcccuagaaucuguuguug

SEQ ID NO: 1458581 - RNA, 19 nt, Homo sapiens
  misc_RNA (1)...(19): siRNA sense strand
agacagaauuggagugacu

SEQ ID NO: 1458582 - RNA, 19 nt, Homo sapiens
  misc_RNA (1)...(19): siRNA sense strand
aagcuaagaagccaucauu

SEQ ID NO: 1458583 - RNA, 19 nt, Homo sapiens
  misc_RNA (1)...(19): siRNA sense strand
caucaguuaucucaagucu

SEQ ID NO: 1458584 - RNA, 19 nt, Homo sapiens
  misc_RNA (1)...(19): siRNA sense strand
ggagguuacguguguacaa

SEQ ID NO: 1458585 - RNA, 19 nt, Homo sapiens
  misc_RNA (1)...(19): siRNA sense strand
gcuguggauuauacaauag

SEQ ID NO: 1458586 - RNA, 19 nt, Homo sapiens
  misc_RNA (1)...(19): siRNA sense strand
gcagauucucccuguguug

SEQ ID NO: 1458587 - RNA, 19 nt, Homo sapiens
  misc_RNA (1)...(19): siRNA sense strand
gacacaagacucacaacga

SEQ ID NO: 1458588 - RNA, 19 nt, Homo sapiens
  misc_RNA (1)...(19): siRNA sense strand
aguuauacauccaucuuug

SEQ ID NO: 1458589 - RNA, 19 nt, Homo sapiens
  misc_RNA (1)...(19): siRNA sense strand
gauucucccuguguugcua

SEQ ID NO: 1458590 - RNA, 19 nt, Homo sapiens
  misc_RNA (1)...(19): siRNA sense strand
ucaaggaaccaugggcuuu

SEQ ID NO: 1458591 - RNA, 19 nt, Homo sapiens
  misc_RNA (1)...(19): siRNA sense strand
gaaggcagcuaaucaguga

SEQ ID NO: 1458592 - RNA, 19 nt, Homo sapiens
  misc_RNA (1)...(19): siRNA sense strand
ggaaagaguuuaauuguac

SEQ ID NO: 1458593 - RNA, 19 nt, Homo sapiens
  misc_RNA (1)...(19): siRNA sense strand
ggagguggcuguacugaaa

SEQ ID NO: 1458594 - RNA, 19 nt, Homo sapiens
  misc_RNA (1)...(19): siRNA sense strand
gaacucaacuggucuuucu

SEQ ID NO: 1458595 - RNA, 19 nt, Homo sapiens
  misc_RNA (1)...(19): siRNA sense strand
ccaguggacuuuaguagua

SEQ ID NO: 1458596 - RNA, 19 nt, Homo sapiens
  misc_RNA (1)...(19): siRNA sense strand
gaugaugaauguacucaaa

SEQ ID NO: 1458597 - RNA, 19 nt, Homo sapiens
  misc_RNA (1)...(19): siRNA sense strand
gcuaaucagugaccacgua

SEQ ID NO: 1458598 - RNA, 19 nt, Homo sapiens
  misc_RNA (1)...(19): siRNA sense strand
ucucaaagaugaugaaugu

SEQ ID NO: 1458599 - RNA, 19 nt, Homo sapiens
  misc_RNA (1)...(19): siRNA sense strand
guacucagauccuccuuug

SEQ ID NO: 1458600 - RNA, 19 nt, Homo sapiens
  misc_RNA (1)...(19): siRNA sense strand
ggucaaagaguuauagauu

SEQ ID NO: 1458601 - RNA, 19 nt, Homo sapiens
  misc_RNA (1)...(19): siRNA sense strand
ugaagcaguuucucaauau

SEQ ID NO: 1458602 - RNA, 19 nt, Homo sapiens
  misc_RNA (1)...(19): siRNA sense strand
caaguaaaccugccuguau

SEQ ID NO: 1458603 - RNA, 19 nt, Homo sapiens
  misc_RNA (1)...(19): siRNA sense strand
ugaagcagcugcacaaugg

SEQ ID NO: 1458604 - RNA, 19 nt, Homo sapiens
  misc_RNA (1)...(19): siRNA sense strand
gaaauucucacugacauga

SEQ ID NO: 1458605 - RNA, 19 nt, Homo sapiens
  misc_RNA (1)...(19): siRNA sense strand
gcauauaucagacacaaga

SEQ ID NO: 1458606 - RNA, 19 nt, Homo sapiens
  misc_RNA (1)...(19): siRNA sense strand
gaaaggaaacagagcaugu

SEQ ID NO: 1458607 - RNA, 19 nt, Homo sapiens
  misc_RNA (1)...(19): siRNA sense strand
gcaguuaacacucaaggaa

SEQ ID NO: 1458608 - RNA, 19 nt, Homo sapiens
  misc_RNA (1)...(19): siRNA sense strand
gugaaccacugacaacuga

SEQ ID NO: 1458609 - RNA, 19 nt, Homo sapiens
  misc_RNA (1)...(19): siRNA sense strand
ucacugacaugaaguaugg

SEQ ID NO: 1458610 - RNA, 19 nt, Homo sapiens
  misc_RNA (1)...(19): siRNA sense strand
aaacucauuuggcugcaua

SEQ ID NO: 1458611 - RNA, 19 nt, Homo sapiens
  misc_RNA (1)...(19): siRNA sense strand
guucagagauuaggcuuga

SEQ ID NO: 1458612 - RNA, 19 nt, Homo sapiens
  misc_RNA (1)...(19): siRNA sense strand
ggaccacacuuucugucuu

SEQ ID NO: 1458613 - RNA, 19 nt, Homo sapiens
  misc_RNA (1)...(19): siRNA sense strand
gcagugcccuagaaucugu

SEQ ID NO: 1458614 - RNA, 19 nt, Homo sapiens
  misc_RNA (1)...(19): siRNA sense strand
ugaauguacucaaacagaa

SEQ ID NO: 1458615 - RNA, 19 nt, Homo sapiens
  misc_RNA (1)...(19): siRNA sense strand
gaccacacuuucugucuug

SEQ ID NO: 1458616 - RNA, 19 nt, Homo sapiens
  misc_RNA (1)...(19): siRNA sense strand
ggcuguggauuauacaaua

SEQ ID NO: 1458617 - RNA, 19 nt, Homo sapiens
  misc_RNA (1)...(19): siRNA sense strand
ggacaccuuuggucaguuc

SEQ ID NO: 1458618 - RNA, 19 nt, Homo sapiens
  misc_RNA (1)...(19): siRNA sense strand
gaaagcauucucaaagaug

SEQ ID NO: 1458619 - RNA, 19 nt, Homo sapiens
  misc_RNA (1)...(19): siRNA sense strand
gaagcaguuucucaauaug

SEQ ID NO: 1458620 - RNA, 19 nt, Homo sapiens
  misc_RNA (1)...(19): siRNA sense strand
gucagaaguucaauuaaug

SEQ ID NO: 1458621 - RNA, 19 nt, Homo sapiens
  misc_RNA (1)...(19): siRNA sense strand
gcugaaggccacaucauuu

SEQ ID NO: 1458622 - RNA, 19 nt, Homo sapiens
  misc_RNA (1)...(19): siRNA sense strand
ggucacacaucccauuuua

SEQ ID NO: 1458623 - RNA, 19 nt, Homo sapiens
  misc_RNA (1)...(19): siRNA sense strand
ccaccacugucauuagauu

SEQ ID NO: 1458624 - RNA, 19 nt, Homo sapiens
  misc_RNA (1)...(19): siRNA sense strand
gaucuuguccugugccaaa

SEQ ID NO: 1458625 - RNA, 19 nt, Homo sapiens
  misc_RNA (1)...(19): siRNA sense strand
aagcacacgucguccauuu

SEQ ID NO: 1458626 - RNA, 19 nt, Homo sapiens
  misc_RNA (1)...(19): siRNA sense strand
ggcucaauauguccuaaua

SEQ ID NO: 1458627 - RNA, 19 nt, Homo sapiens
  misc_RNA (1)...(19): siRNA sense strand
gugucaagcuucagugauu

SEQ ID NO: 1458628 - RNA, 19 nt, Homo sapiens
  misc_RNA (1)...(19): siRNA sense strand
guagagacagccaauuuga

SEQ ID NO: 1458629 - RNA, 19 nt, Homo sapiens
  misc_RNA (1)...(19): siRNA sense strand
cuucagugauuguggcuua

SEQ ID NO: 1458630 - RNA, 19 nt, Homo sapiens
  misc_RNA (1)...(19): siRNA sense strand
aaagcugccuuccacauga

SEQ ID NO: 1458631 - RNA, 19 nt, Homo sapiens
  misc_RNA (1)...(19): siRNA sense strand
gcuaagaagccaucauugu

SEQ ID NO: 1458632 - RNA, 19 nt, Homo sapiens
  misc_RNA (1)...(19): siRNA sense strand
guugcuaacuggccagauu

SEQ ID NO: 1458633 - RNA, 19 nt, Homo sapiens
  misc_RNA (1)...(19): siRNA sense strand
ggaaacagagcaugucagu

SEQ ID NO: 1458634 - RNA, 19 nt, Homo sapiens
  misc_RNA (1)...(19): siRNA sense strand
aagaagccaucauugugua

SEQ ID NO: 1458635 - RNA, 19 nt, Homo sapiens
  misc_RNA (1)...(19): siRNA sense strand
cacaauggcuuuggagguu

SEQ ID NO: 1458636 - RNA, 19 nt, Homo sapiens
  misc_RNA (1)...(19): siRNA sense strand
ccucagcucugcucaguca

SEQ ID NO: 1458637 - RNA, 19 nt, Homo sapiens
  misc_RNA (1)...(19): siRNA sense strand
gucaaagaguuauagauuc

SEQ ID NO: 1458638 - RNA, 19 nt, Homo sapiens
  misc_RNA (1)...(19): siRNA sense strand
aaagcauucucaaagauga

SEQ ID NO: 1458639 - RNA, 19 nt, Homo sapiens
  misc_RNA (1)...(19): siRNA sense strand
ucauuuggcugcauauauc

SEQ ID NO: 1458640 - RNA, 19 nt, Homo sapiens
  misc_RNA (1)...(19): siRNA sense strand
aguuauagauuccacugua

SEQ ID NO: 1458641 - RNA, 19 nt, Homo sapiens
  misc_RNA (1)...(19): siRNA sense strand
ccagcaaccugaccuugga

SEQ ID NO: 1458642 - RNA, 19 nt, Homo sapiens
  misc_RNA (1)...(19): siRNA sense strand
gaacaugauggaggugaaa

SEQ ID NO: 1458643 - RNA, 19 nt, Homo sapiens
  misc_RNA (1)...(19): siRNA sense strand
caacgacccagaaagcauu

SEQ ID NO: 1458644 - RNA, 19 nt, Homo sapiens
  misc_RNA (1)...(19): siRNA sense strand
gcaugucagugcuuugauc

SEQ ID NO: 1458645 - RNA, 19 nt, Homo sapiens
  misc_RNA (1)...(19): siRNA sense strand
agagacagccaauuugauu

SEQ ID NO: 1458646 - RNA, 19 nt, Homo sapiens
  misc_RNA (1)...(19): siRNA sense strand
gcacacgucguccauuugu

SEQ ID NO: 1458647 - RNA, 19 nt, Homo sapiens
  misc_RNA (1)...(19): siRNA sense strand
ccacugucauuagauuaaa

SEQ ID NO: 1458648 - RNA, 19 nt, Homo sapiens
  misc_RNA (1)...(19): siRNA sense strand
guuauagauuccacuguau

SEQ ID NO: 1458649 - RNA, 19 nt, Homo sapiens
  misc_RNA (1)...(19): siRNA sense strand
ccuguaugcucaccagaaa

SEQ ID NO: 1458650 - RNA, 19 nt, Homo sapiens
  misc_RNA (1)...(19): siRNA sense strand
caaagaugaugaauguacu

SEQ ID NO: 1458651 - RNA, 19 nt, Homo sapiens
  misc_RNA (1)...(19): siRNA sense strand
ggccagauuugcuuucaca

SEQ ID NO: 1458652 - RNA, 19 nt, Homo sapiens
  misc_RNA (1)...(19): siRNA sense strand
uaagaagccaucauugugu

SEQ ID NO: 1458653 - RNA, 19 nt, Homo sapiens
  misc_RNA (1)...(19): siRNA sense strand
gagacagccaauuugauuu

SEQ ID NO: 1458654 - RNA, 19 nt, Homo sapiens
  misc_RNA (1)...(19): siRNA sense strand
gauccugacagccuccaua

SEQ ID NO: 1458655 - RNA, 19 nt, Homo sapiens
  misc_RNA (1)...(19): siRNA sense strand
caugaaguauggacaccuu

SEQ ID NO: 1458656 - RNA, 19 nt, Homo sapiens
  misc_RNA (1)...(19): siRNA sense strand
gaaccacugacaacugaga

SEQ ID NO: 1458657 - RNA, 19 nt, Homo sapiens
  misc_RNA (1)...(19): siRNA sense strand
cuaagaagccaucauugug

SEQ ID NO: 1458658 - RNA, 19 nt, Homo sapiens
  misc_RNA (1)...(19): siRNA sense strand
agaaucaugugucaagcuu

SEQ ID NO: 1458659 - RNA, 19 nt, Homo sapiens
  misc_RNA (1)...(19): siRNA sense strand
cauacagaaucauguguca

SEQ ID NO: 1458660 - RNA, 19 nt, Homo sapiens
  misc_RNA (1)...(19): siRNA sense strand
acaauggcuuuggagguua

SEQ ID NO: 1458661 - RNA, 19 nt, Homo sapiens
  misc_RNA (1)...(19): siRNA sense strand
uuuggugcguaguauauua

SEQ ID NO: 1458662 - RNA, 19 nt, Homo sapiens
  misc_RNA (1)...(19): siRNA sense strand
aaguaaaccugccuguaug

SEQ ID NO: 1458663 - RNA, 19 nt, Homo sapiens
  misc_RNA (1)...(19): siRNA sense strand
caaagcugccuuccacaug

SEQ ID NO: 1458664 - RNA, 19 nt, Homo sapiens
  misc_RNA (1)...(19): siRNA sense strand
guuguuggcucuuuagaac

SEQ ID NO: 1458665 - RNA, 19 nt, Homo sapiens
  misc_RNA (1)...(19): siRNA sense strand
gcucugcucagucaccuuu

SEQ ID NO: 1458666 - RNA, 19 nt, Homo sapiens
  misc_RNA (1)...(19): siRNA sense strand
ucaaagaguuauagauucc

SEQ ID NO: 1458667 - RNA, 19 nt, Homo sapiens
  misc_RNA (1)...(19): siRNA sense strand
aaucaugugucaagcuuca

SEQ ID NO: 1458668 - RNA, 19 nt, Homo sapiens
  misc_RNA (1)...(19): siRNA sense strand
gaccugugguugucgaauc

SEQ ID NO: 1458669 - RNA, 19 nt, Homo sapiens
  misc_RNA (1)...(19): siRNA sense strand
ugaugaauguacucaaaca

SEQ ID NO: 1458670 - RNA, 19 nt, Homo sapiens
  misc_RNA (1)...(19): siRNA sense strand
ucaaagaugaugaauguac

SEQ ID NO: 1458671 - RNA, 19 nt, Homo sapiens
  misc_RNA (1)...(19): siRNA sense strand
ggaaccaugggcuuuguug

SEQ ID NO: 1458672 - RNA, 19 nt, Homo sapiens
  misc_RNA (1)...(19): siRNA sense strand
ccuaauaguuauggaagug

SEQ ID NO: 1458673 - RNA, 19 nt, Homo sapiens
  misc_RNA (1)...(19): siRNA sense strand
uaccugggauacucauuga

SEQ ID NO: 1458674 - RNA, 19 nt, Homo sapiens
  misc_RNA (1)...(19): siRNA sense strand
gaaucccaguggacuuuag

SEQ ID NO: 1458675 - RNA, 19 nt, Homo sapiens
  misc_RNA (1)...(19): siRNA sense strand
acucagauccuccuuuguu

SEQ ID NO: 1458676 - RNA, 19 nt, Homo sapiens
  misc_RNA (1)...(19): siRNA sense strand
gcugcaaccugauugaaaa

SEQ ID NO: 1458677 - RNA, 19 nt, Homo sapiens
  misc_RNA (1)...(19): siRNA sense strand
acucaacuggucuuucuua

SEQ ID NO: 1458678 - RNA, 19 nt, Homo sapiens
  misc_RNA (1)...(19): siRNA sense strand
caguguggcuguggauuau

SEQ ID NO: 1458679 - RNA, 19 nt, Homo sapiens
  misc_RNA (1)...(19): siRNA sense strand
uaacuggccagauuugcuu

SEQ ID NO: 1458680 - RNA, 19 nt, Homo sapiens
  misc_RNA (1)...(19): siRNA sense strand
gcccuagaaucuguuguug

SEQ ID NO: 1458681 - RNA, 19 nt, Homo sapiens
  misc_RNA (1)...(19): siRNA sense strand
agacagaauuggagugacu

SEQ ID NO: 1458682 - RNA, 19 nt, Homo sapiens
  misc_RNA (1)...(19): siRNA sense strand
aagcuaagaagccaucauu

SEQ ID NO: 1458683 - RNA, 19 nt, Homo sapiens
  misc_RNA (1)...(19): siRNA sense strand
caucaguuaucucaagucu

SEQ ID NO: 1458684 - RNA, 19 nt, Homo sapiens
  misc_RNA (1)...(19): siRNA sense strand
ggagguuacguguguacaa

SEQ ID NO: 1458685 - RNA, 19 nt, Homo sapiens
  misc_RNA (1)...(19): siRNA sense strand
gcuguggauuauacaauag

SEQ ID NO: 1458686 - RNA, 19 nt, Homo sapiens
  misc_RNA (1)...(19): siRNA sense strand
gcagauucucccuguguug

SEQ ID NO: 1458687 - RNA, 19 nt, Homo sapiens
  misc_RNA (1)...(19): siRNA sense strand
gacacaagacucacaacga

SEQ ID NO: 1458688 - RNA, 19 nt, Homo sapiens
  misc_RNA (1)...(19): siRNA sense strand
aguuauacauccaucuuug

SEQ ID NO: 1458689 - RNA, 19 nt, Homo sapiens
  misc_RNA (1)...(19): siRNA sense strand
gauucucccuguguugcua

SEQ ID NO: 1458690 - RNA, 19 nt, Homo sapiens
  misc_RNA (1)...(19): siRNA sense strand
ucaaggaaccaugggcuuu

SEQ ID NO: 1458691 - RNA, 19 nt, Homo sapiens
  misc_RNA (1)...(19): siRNA sense strand
cgaggaagaucaacauaua

SEQ ID NO: 1458692 - RNA, 19 nt, Homo sapiens
  misc_RNA (1)...(19): siRNA sense strand
ucaagugccugaccuggaa

SEQ ID NO: 1458693 - RNA, 19 nt, Homo sapiens
  misc_RNA (1)...(19): siRNA sense strand
gaggaaccaccaacugaaa

SEQ ID NO: 1458694 - RNA, 19 nt, Homo sapiens
  misc_RNA (1)...(19): siRNA sense strand
gcgaggaagaucaacauau

SEQ ID NO: 1458695 - RNA, 19 nt, Homo sapiens
  misc_RNA (1)...(19): siRNA sense strand
ggagagagaagaagaucag

SEQ ID NO: 1458696 - RNA, 19 nt, Homo sapiens
  misc_RNA (1)...(19): siRNA sense strand
ggagcugucucagucaaag

SEQ ID NO: 1458697 - RNA, 19 nt, Homo sapiens
  misc_RNA (1)...(19): siRNA sense strand
caagaggaaccaccaacug

SEQ ID NO: 1458698 - RNA, 19 nt, Homo sapiens
  misc_RNA (1)...(19): siRNA sense strand
aagaggaaccaccaacuga

SEQ ID NO: 1458699 - RNA, 19 nt, Homo sapiens
  misc_RNA (1)...(19): siRNA sense strand
guggaaaugguccugauga

SEQ ID NO: 1458700 - RNA, 19 nt, Homo sapiens
  misc_RNA (1)...(19): siRNA sense strand
gaggaagaucaacauauag

SEQ ID NO: 1458701 - RNA, 19 nt, Homo sapiens
  misc_RNA (1)...(19): siRNA sense strand
gcaagaggaaccaccaacu

SEQ ID NO: 1458702 - RNA, 19 nt, Homo sapiens
  misc_RNA (1)...(19): siRNA sense strand
caggagcugucucagucaa

SEQ ID NO: 1458703 - RNA, 19 nt, Homo sapiens
  misc_RNA (1)...(19): siRNA sense strand
ggaaccaccaacugaaagu

SEQ ID NO: 1458704 - RNA, 19 nt, Homo sapiens
  misc_RNA (1)...(19): siRNA sense strand
gggugaauguggaaauggu

SEQ ID NO: 1458705 - RNA, 19 nt, Homo sapiens
  misc_RNA (1)...(19): siRNA sense strand
ggcgaggaagaucaacaua

SEQ ID NO: 1458706 - RNA, 19 nt, Homo sapiens
  misc_RNA (1)...(19): siRNA sense strand
agaggaaccaccaacugaa

SEQ ID NO: 1458707 - RNA, 19 nt, Homo sapiens
  misc_RNA (1)...(19): siRNA sense strand
gaaccaccaacugaaaguc

SEQ ID NO: 1458708 - RNA, 19 nt, Homo sapiens
  misc_RNA (1)...(19): siRNA sense strand
cgaggaagaucaacauaua

SEQ ID NO: 1458709 - RNA, 19 nt, Homo sapiens
  misc_RNA (1)...(19): siRNA sense strand
ucaagugccugaccuggaa

SEQ ID NO: 1458710 - RNA, 19 nt, Homo sapiens
  misc_RNA (1)...(19): siRNA sense strand
gaggaaccaccaacugaaa

SEQ ID NO: 1458711 - RNA, 19 nt, Homo sapiens
  misc_RNA (1)...(19): siRNA sense strand
gcgaggaagaucaacauau

SEQ ID NO: 1458712 - RNA, 19 nt, Homo sapiens
  misc_RNA (1)...(19): siRNA sense strand
ggagagagaagaagaucag

SEQ ID NO: 1458713 - RNA, 19 nt, Homo sapiens
  misc_RNA (1)...(19): siRNA sense strand
ggagcugucucagucaaag

SEQ ID NO: 1458714 - RNA, 19 nt, Homo sapiens
  misc_RNA (1)...(19): siRNA sense strand
caagaggaaccaccaacug

SEQ ID NO: 1458715 - RNA, 19 nt, Homo sapiens
  misc_RNA (1)...(19): siRNA sense strand
aagaggaaccaccaacuga

SEQ ID NO: 1458716 - RNA, 19 nt, Homo sapiens
  misc_RNA (1)...(19): siRNA sense strand
guggaaaugguccugauga

SEQ ID NO: 1458717 - RNA, 19 nt, Homo sapiens
  misc_RNA (1)...(19): siRNA sense strand
gaggaagaucaacauauag

SEQ ID NO: 1458718 - RNA, 19 nt, Homo sapiens
  misc_RNA (1)...(19): siRNA sense strand
gcaagaggaaccaccaacu

SEQ ID NO: 1458719 - RNA, 19 nt, Homo sapiens
  misc_RNA (1)...(19): siRNA sense strand
caggagcugucucagucaa

SEQ ID NO: 1458720 - RNA, 19 nt, Homo sapiens
  misc_RNA (1)...(19): siRNA sense strand
ggaaccaccaacugaaagu

SEQ ID NO: 1458721 - RNA, 19 nt, Homo sapiens
  misc_RNA (1)...(19): siRNA sense strand
gggugaauguggaaauggu

SEQ ID NO: 1458722 - RNA, 19 nt, Homo sapiens
  misc_RNA (1)...(19): siRNA sense strand
ggcgaggaagaucaacaua

SEQ ID NO: 1458723 - RNA, 19 nt, Homo sapiens
  misc_RNA (1)...(19): siRNA sense strand
agaggaaccaccaacugaa

SEQ ID NO: 1458724 - RNA, 19 nt, Homo sapiens
  misc_RNA (1)...(19): siRNA sense strand
gaaccaccaacugaaaguc

SEQ ID NO: 1458725 - RNA, 19 nt, Homo sapiens
  misc_RNA (1)...(19): siRNA sense strand
gaaaauggguccuguguaa

SEQ ID NO: 1458726 - RNA, 19 nt, Homo sapiens
  misc_RNA (1)...(19): siRNA sense strand
gcagugagcugucggucaa

SEQ ID NO: 1458727 - RNA, 19 nt, Homo sapiens
  misc_RNA (1)...(19): siRNA sense strand
guagagagcuuuguaucga

SEQ ID NO: 1458728 - RNA, 19 nt, Homo sapiens
  misc_RNA (1)...(19): siRNA sense strand
ggaggacccaguugagaaa

SEQ ID NO: 1458729 - RNA, 19 nt, Homo sapiens
  misc_RNA (1)...(19): siRNA sense strand
uaucgaggcugcagaaguc

SEQ ID NO: 1458730 - RNA, 19 nt, Homo sapiens
  misc_RNA (1)...(19): siRNA sense strand
cgacguagagagcuuugua

SEQ ID NO: 1458731 - RNA, 19 nt, Homo sapiens
  misc_RNA (1)...(19): siRNA sense strand
aauggguccuguguaauua

SEQ ID NO: 1458732 - RNA, 19 nt, Homo sapiens
  misc_RNA (1)...(19): siRNA sense strand
ccaggucgcugucaauggu

SEQ ID NO: 1458733 - RNA, 19 nt, Homo sapiens
  misc_RNA (1)...(19): siRNA sense strand
aaauggguccuguguaauu

SEQ ID NO: 1458734 - RNA, 19 nt, Homo sapiens
  misc_RNA (1)...(19): siRNA sense strand
gggaggacccaguugagaa

SEQ ID NO: 1458735 - RNA, 19 nt, Homo sapiens
  misc_RNA (1)...(19): siRNA sense strand
acaaagagaaagugucaga

SEQ ID NO: 1458736 - RNA, 19 nt, Homo sapiens
  misc_RNA (1)...(19): siRNA sense strand
ggaaggcgagguggaaaug

SEQ ID NO: 1458737 - RNA, 19 nt, Homo sapiens
  misc_RNA (1)...(19): siRNA sense strand
acaccgacgugcugcagaa

SEQ ID NO: 1458738 - RNA, 19 nt, Homo sapiens
  misc_RNA (1)...(19): siRNA sense strand
gcagugauggagaagcaaa

SEQ ID NO: 1458739 - RNA, 19 nt, Homo sapiens
  misc_RNA (1)...(19): siRNA sense strand
cuccggagcuguugcacuu

SEQ ID NO: 1458740 - RNA, 19 nt, Homo sapiens
  misc_RNA (1)...(19): siRNA sense strand
ggaaguggacauccugaac

SEQ ID NO: 1458741 - RNA, 19 nt, Homo sapiens
  misc_RNA (1)...(19): siRNA sense strand
agccucagcuggagucaga

SEQ ID NO: 1458742 - RNA, 19 nt, Homo sapiens
  misc_RNA (1)...(19): siRNA sense strand
uggaggcagugauggagaa

SEQ ID NO: 1458743 - RNA, 19 nt, Homo sapiens
  misc_RNA (1)...(19): siRNA sense strand
auacagacccgaguucuuc

SEQ ID NO: 1458744 - RNA, 19 nt, Homo sapiens
  misc_RNA (1)...(19): siRNA sense strand
gagcuguugcacuuccuuu

SEQ ID NO: 1458745 - RNA, 19 nt, Homo sapiens
  misc_RNA (1)...(19): siRNA sense strand
ggacccaguugagaaacag

SEQ ID NO: 1458746 - RNA, 19 nt, Homo sapiens
  misc_RNA (1)...(19): siRNA sense strand
ccgacgugcugcagaagau

SEQ ID NO: 1458747 - RNA, 19 nt, Homo sapiens
  misc_RNA (1)...(19): siRNA sense strand
guccugaccuggcgguucu

SEQ ID NO: 1458748 - RNA, 19 nt, Homo sapiens
  misc_RNA (1)...(19): siRNA sense strand
aaggcgagguggaaaugga

SEQ ID NO: 1458749 - RNA, 19 nt, Homo sapiens
  misc_RNA (1)...(19): siRNA sense strand
agucagagacagcaggaaa

SEQ ID NO: 1458750 - RNA, 19 nt, Homo sapiens
  misc_RNA (1)...(19): siRNA sense strand
gaggacaaagagaaagugu

SEQ ID NO: 1458751 - RNA, 19 nt, Homo sapiens
  misc_RNA (1)...(19): siRNA sense strand
ccuguguaauuaugacuuc

SEQ ID NO: 1458752 - RNA, 19 nt, Homo sapiens
  misc_RNA (1)...(19): siRNA sense strand
ggaaaauggguccugugua

SEQ ID NO: 1458753 - RNA, 19 nt, Homo sapiens
  misc_RNA (1)...(19): siRNA sense strand
gguggaaggcgagguggaa

SEQ ID NO: 1458754 - RNA, 19 nt, Homo sapiens
  misc_RNA (1)...(19): siRNA sense strand
ggucaagcagcgggacgua

SEQ ID NO: 1458755 - RNA, 19 nt, Homo sapiens
  misc_RNA (1)...(19): siRNA sense strand
gggaaguggacauccugaa

SEQ ID NO: 1458756 - RNA, 19 nt, Homo sapiens
  misc_RNA (1)...(19): siRNA sense strand
ggaggacaaagagaaagug

SEQ ID NO: 1458757 - RNA, 19 nt, Homo sapiens
  misc_RNA (1)...(19): siRNA sense strand
gacguagagagcuuuguau

SEQ ID NO: 1458758 - RNA, 19 nt, Homo sapiens
  misc_RNA (1)...(19): siRNA sense strand
cauacagacccgaguucuu

SEQ ID NO: 1458759 - RNA, 19 nt, Homo sapiens
  misc_RNA (1)...(19): siRNA sense strand
gaaaauggguccuguguaa

SEQ ID NO: 1458760 - RNA, 19 nt, Homo sapiens
  misc_RNA (1)...(19): siRNA sense strand
gcagugagcugucggucaa

SEQ ID NO: 1458761 - RNA, 19 nt, Homo sapiens
  misc_RNA (1)...(19): siRNA sense strand
guagagagcuuuguaucga

SEQ ID NO: 1458762 - RNA, 19 nt, Homo sapiens
  misc_RNA (1)...(19): siRNA sense strand
ggaggacccaguugagaaa

SEQ ID NO: 1458763 - RNA, 19 nt, Homo sapiens
  misc_RNA (1)...(19): siRNA sense strand
uaucgaggcugcagaaguc

SEQ ID NO: 1458764 - RNA, 19 nt, Homo sapiens
  misc_RNA (1)...(19): siRNA sense strand
cgacguagagagcuuugua

SEQ ID NO: 1458765 - RNA, 19 nt, Homo sapiens
  misc_RNA (1)...(19): siRNA sense strand
aauggguccuguguaauua

SEQ ID NO: 1458766 - RNA, 19 nt, Homo sapiens
  misc_RNA (1)...(19): siRNA sense strand
ccaggucgcugucaauggu

SEQ ID NO: 1458767 - RNA, 19 nt, Homo sapiens
  misc_RNA (1)...(19): siRNA sense strand
aaauggguccuguguaauu

SEQ ID NO: 1458768 - RNA, 19 nt, Homo sapiens
  misc_RNA (1)...(19): siRNA sense strand
gggaggacccaguugagaa

SEQ ID NO: 1458769 - RNA, 19 nt, Homo sapiens
  misc_RNA (1)...(19): siRNA sense strand
acaaagagaaagugucaga

SEQ ID NO: 1458770 - RNA, 19 nt, Homo sapiens
  misc_RNA (1)...(19): siRNA sense strand
ggaaggcgagguggaaaug

SEQ ID NO: 1458771 - RNA, 19 nt, Homo sapiens
  misc_RNA (1)...(19): siRNA sense strand
acaccgacgugcugcagaa

SEQ ID NO: 1458772 - RNA, 19 nt, Homo sapiens
  misc_RNA (1)...(19): siRNA sense strand
gcagugauggagaagcaaa

SEQ ID NO: 1458773 - RNA, 19 nt, Homo sapiens
  misc_RNA (1)...(19): siRNA sense strand
cuccggagcuguugcacuu

SEQ ID NO: 1458774 - RNA, 19 nt, Homo sapiens
  misc_RNA (1)...(19): siRNA sense strand
ggaaguggacauccugaac

SEQ ID NO: 1458775 - RNA, 19 nt, Homo sapiens
  misc_RNA (1)...(19): siRNA sense strand
agccucagcuggagucaga

SEQ ID NO: 1458776 - RNA, 19 nt, Homo sapiens
  misc_RNA (1)...(19): siRNA sense strand
uggaggcagugauggagaa

SEQ ID NO: 1458777 - RNA, 19 nt, Homo sapiens
  misc_RNA (1)...(19): siRNA sense strand
auacagacccgaguucuuc

SEQ ID NO: 1458778 - RNA, 19 nt, Homo sapiens
  misc_RNA (1)...(19): siRNA sense strand
gagcuguugcacuuccuuu

SEQ ID NO: 1458779 - RNA, 19 nt, Homo sapiens
  misc_RNA (1)...(19): siRNA sense strand
ggacccaguugagaaacag

SEQ ID NO: 1458780 - RNA, 19 nt, Homo sapiens
  misc_RNA (1)...(19): siRNA sense strand
ccgacgugcugcagaagau

SEQ ID NO: 1458781 - RNA, 19 nt, Homo sapiens
  misc_RNA (1)...(19): siRNA sense strand
guccugaccuggcgguucu

SEQ ID NO: 1458782 - RNA, 19 nt, Homo sapiens
  misc_RNA (1)...(19): siRNA sense strand
aaggcgagguggaaaugga

SEQ ID NO: 1458783 - RNA, 19 nt, Homo sapiens
  misc_RNA (1)...(19): siRNA sense strand
agucagagacagcaggaaa

SEQ ID NO: 1458784 - RNA, 19 nt, Homo sapiens
  misc_RNA (1)...(19): siRNA sense strand
gaggacaaagagaaagugu

SEQ ID NO: 1458785 - RNA, 19 nt, Homo sapiens
  misc_RNA (1)...(19): siRNA sense strand
ccuguguaauuaugacuuc

SEQ ID NO: 1458786 - RNA, 19 nt, Homo sapiens
  misc_RNA (1)...(19): siRNA sense strand
ggaaaauggguccugugua

SEQ ID NO: 1458787 - RNA, 19 nt, Homo sapiens
  misc_RNA (1)...(19): siRNA sense strand
gguggaaggcgagguggaa

SEQ ID NO: 1458788 - RNA, 19 nt, Homo sapiens
  misc_RNA (1)...(19): siRNA sense strand
ggucaagcagcgggacgua

SEQ ID NO: 1458789 - RNA, 19 nt, Homo sapiens
  misc_RNA (1)...(19): siRNA sense strand
gggaaguggacauccugaa

SEQ ID NO: 1458790 - RNA, 19 nt, Homo sapiens
  misc_RNA (1)...(19): siRNA sense strand
ggaggacaaagagaaagug

SEQ ID NO: 1458791 - RNA, 19 nt, Homo sapiens
  misc_RNA (1)...(19): siRNA sense strand
gacguagagagcuuuguau

SEQ ID NO: 1458792 - RNA, 19 nt, Homo sapiens
  misc_RNA (1)...(19): siRNA sense strand
cauacagacccgaguucuu

SEQ ID NO: 1458793 - RNA, 19 nt, Homo sapiens
  misc_RNA (1)...(19): siRNA sense strand
gaaaauggguccuguguaa

SEQ ID NO: 1458794 - RNA, 19 nt, Homo sapiens
  misc_RNA (1)...(19): siRNA sense strand
gcagugagcugucggucaa

SEQ ID NO: 1458795 - RNA, 19 nt, Homo sapiens
  misc_RNA (1)...(19): siRNA sense strand
guagagagcuuuguaucga

SEQ ID NO: 1458796 - RNA, 19 nt, Homo sapiens
  misc_RNA (1)...(19): siRNA sense strand
ggaggacccaguugagaaa

SEQ ID NO: 1458797 - RNA, 19 nt, Homo sapiens
  misc_RNA (1)...(19): siRNA sense strand
uaucgaggcugcagaaguc

SEQ ID NO: 1458798 - RNA, 19 nt, Homo sapiens
  misc_RNA (1)...(19): siRNA sense strand
cgacguagagagcuuugua

SEQ ID NO: 1458799 - RNA, 19 nt, Homo sapiens
  misc_RNA (1)...(19): siRNA sense strand
aauggguccuguguaauua

SEQ ID NO: 1458800 - RNA, 19 nt, Homo sapiens
  misc_RNA (1)...(19): siRNA sense strand
ccaggucgcugucaauggu

SEQ ID NO: 1458801 - RNA, 19 nt, Homo sapiens
  misc_RNA (1)...(19): siRNA sense strand
aaauggguccuguguaauu

SEQ ID NO: 1458802 - RNA, 19 nt, Homo sapiens
  misc_RNA (1)...(19): siRNA sense strand
gggaggacccaguugagaa

SEQ ID NO: 1458803 - RNA, 19 nt, Homo sapiens
  misc_RNA (1)...(19): siRNA sense strand
acaaagagaaagugucaga

SEQ ID NO: 1458804 - RNA, 19 nt, Homo sapiens
  misc_RNA (1)...(19): siRNA sense strand
ggaaggcgagguggaaaug

SEQ ID NO: 1458805 - RNA, 19 nt, Homo sapiens
  misc_RNA (1)...(19): siRNA sense strand
acaccgacgugcugcagaa

SEQ ID NO: 1458806 - RNA, 19 nt, Homo sapiens
  misc_RNA (1)...(19): siRNA sense strand
gcagugauggagaagcaaa

SEQ ID NO: 1458807 - RNA, 19 nt, Homo sapiens
  misc_RNA (1)...(19): siRNA sense strand
cuccggagcuguugcacuu

SEQ ID NO: 1458808 - RNA, 19 nt, Homo sapiens
  misc_RNA (1)...(19): siRNA sense strand
ggaaguggacauccugaac

SEQ ID NO: 1458809 - RNA, 19 nt, Homo sapiens
  misc_RNA (1)...(19): siRNA sense strand
agccucagcuggagucaga

SEQ ID NO: 1458810 - RNA, 19 nt, Homo sapiens
  misc_RNA (1)...(19): siRNA sense strand
uggaggcagugauggagaa

SEQ ID NO: 1458811 - RNA, 19 nt, Homo sapiens
  misc_RNA (1)...(19): siRNA sense strand
auacagacccgaguucuuc

SEQ ID NO: 1458812 - RNA, 19 nt, Homo sapiens
  misc_RNA (1)...(19): siRNA sense strand
gagcuguugcacuuccuuu

SEQ ID NO: 1458813 - RNA, 19 nt, Homo sapiens
  misc_RNA (1)...(19): siRNA sense strand
ggacccaguugagaaacag

SEQ ID NO: 1458814 - RNA, 19 nt, Homo sapiens
  misc_RNA (1)...(19): siRNA sense strand
ccgacgugcugcagaagau

SEQ ID NO: 1458815 - RNA, 19 nt, Homo sapiens
  misc_RNA (1)...(19): siRNA sense strand
guccugaccuggcgguucu

SEQ ID NO: 1458816 - RNA, 19 nt, Homo sapiens
  misc_RNA (1)...(19): siRNA sense strand
aaggcgagguggaaaugga

SEQ ID NO: 1458817 - RNA, 19 nt, Homo sapiens
  misc_RNA (1)...(19): siRNA sense strand
agucagagacagcaggaaa

SEQ ID NO: 1458818 - RNA, 19 nt, Homo sapiens
  misc_RNA (1)...(19): siRNA sense strand
gaggacaaagagaaagugu

SEQ ID NO: 1458819 - RNA, 19 nt, Homo sapiens
  misc_RNA (1)...(19): siRNA sense strand
ccuguguaauuaugacuuc

SEQ ID NO: 1458820 - RNA, 19 nt, Homo sapiens
  misc_RNA (1)...(19): siRNA sense strand
ggaaaauggguccugugua

SEQ ID NO: 1458821 - RNA, 19 nt, Homo sapiens
  misc_RNA (1)...(19): siRNA sense strand
gguggaaggcgagguggaa

SEQ ID NO: 1458822 - RNA, 19 nt, Homo sapiens
  misc_RNA (1)...(19): siRNA sense strand
ggucaagcagcgggacgua

SEQ ID NO: 1458823 - RNA, 19 nt, Homo sapiens
  misc_RNA (1)...(19): siRNA sense strand
gggaaguggacauccugaa

SEQ ID NO: 1458824 - RNA, 19 nt, Homo sapiens
  misc_RNA (1)...(19): siRNA sense strand
ggaggacaaagagaaagug

SEQ ID NO: 1458825 - RNA, 19 nt, Homo sapiens
  misc_RNA (1)...(19): siRNA sense strand
gacguagagagcuuuguau

SEQ ID NO: 1458826 - RNA, 19 nt, Homo sapiens
  misc_RNA (1)...(19): siRNA sense strand
cauacagacccgaguucuu

SEQ ID NO: 1458827 - RNA, 19 nt, Homo sapiens
  misc_RNA (1)...(19): siRNA sense strand
ggucagaacuccucagaua

SEQ ID NO: 1458828 - RNA, 19 nt, Homo sapiens
  misc_RNA (1)...(19): siRNA sense strand
gacaauaucuaccuggauu

SEQ ID NO: 1458829 - RNA, 19 nt, Homo sapiens
  misc_RNA (1)...(19): siRNA sense strand
uaacuacaguccucauaaa

SEQ ID NO: 1458830 - RNA, 19 nt, Homo sapiens
  misc_RNA (1)...(19): siRNA sense strand
gaaacuagacauuccauug

SEQ ID NO: 1458831 - RNA, 19 nt, Homo sapiens
  misc_RNA (1)...(19): siRNA sense strand
uggcugaucucccagaaua

SEQ ID NO: 1458832 - RNA, 19 nt, Homo sapiens
  misc_RNA (1)...(19): siRNA sense strand
caaguugccuauacaguug

SEQ ID NO: 1458833 - RNA, 19 nt, Homo sapiens
  misc_RNA (1)...(19): siRNA sense strand
caaagcaggcugguuaaua

SEQ ID NO: 1458834 - RNA, 19 nt, Homo sapiens
  misc_RNA (1)...(19): siRNA sense strand
agaggaaacuggcaagaaa

SEQ ID NO: 1458835 - RNA, 19 nt, Homo sapiens
  misc_RNA (1)...(19): siRNA sense strand
cuacauagcagacagguuu

SEQ ID NO: 1458836 - RNA, 19 nt, Homo sapiens
  misc_RNA (1)...(19): siRNA sense strand
cacaauggccuaugagaua

SEQ ID NO: 1458837 - RNA, 19 nt, Homo sapiens
  misc_RNA (1)...(19): siRNA sense strand
gaaacuggcaagaaauuga

SEQ ID NO: 1458838 - RNA, 19 nt, Homo sapiens
  misc_RNA (1)...(19): siRNA sense strand
ccacaucuguuccucaaug

SEQ ID NO: 1458839 - RNA, 19 nt, Homo sapiens
  misc_RNA (1)...(19): siRNA sense strand
cguaagcucugccuccuaa

SEQ ID NO: 1458840 - RNA, 19 nt, Homo sapiens
  misc_RNA (1)...(19): siRNA sense strand
uuuauuggcucuaugagua

SEQ ID NO: 1458841 - RNA, 19 nt, Homo sapiens
  misc_RNA (1)...(19): siRNA sense strand
aaagcaggcugguuaauag

SEQ ID NO: 1458842 - RNA, 19 nt, Homo sapiens
  misc_RNA (1)...(19): siRNA sense strand
gcuacgagguggacuggaa

SEQ ID NO: 1458843 - RNA, 19 nt, Homo sapiens
  misc_RNA (1)...(19): siRNA sense strand
ggaucacaauggccuauga

SEQ ID NO: 1458844 - RNA, 19 nt, Homo sapiens
  misc_RNA (1)...(19): siRNA sense strand
gggcggagauaucggagaa

SEQ ID NO: 1458845 - RNA, 19 nt, Homo sapiens
  misc_RNA (1)...(19): siRNA sense strand
uuaagcacaucgcaaagaa

SEQ ID NO: 1458846 - RNA, 19 nt, Homo sapiens
  misc_RNA (1)...(19): siRNA sense strand
gaaacuaaagggaaagcuu

SEQ ID NO: 1458847 - RNA, 19 nt, Homo sapiens
  misc_RNA (1)...(19): siRNA sense strand
ccucagauaaggaaacaua

SEQ ID NO: 1458848 - RNA, 19 nt, Homo sapiens
  misc_RNA (1)...(19): siRNA sense strand
gggaaagcuuugccugaga

SEQ ID NO: 1458849 - RNA, 19 nt, Homo sapiens
  misc_RNA (1)...(19): siRNA sense strand
aaacuagacauuccauuga

SEQ ID NO: 1458850 - RNA, 19 nt, Homo sapiens
  misc_RNA (1)...(19): siRNA sense strand
ugauuuaccuccaaguuca

SEQ ID NO: 1458851 - RNA, 19 nt, Homo sapiens
  misc_RNA (1)...(19): siRNA sense strand
ucacuaacaucuggcuuga

SEQ ID NO: 1458852 - RNA, 19 nt, Homo sapiens
  misc_RNA (1)...(19): siRNA sense strand
ccaaguugccuauacaguu

SEQ ID NO: 1458853 - RNA, 19 nt, Homo sapiens
  misc_RNA (1)...(19): siRNA sense strand
ugacauugguggcaucauc

SEQ ID NO: 1458854 - RNA, 19 nt, Homo sapiens
  misc_RNA (1)...(19): siRNA sense strand
cagauaaggaaacauacua

SEQ ID NO: 1458855 - RNA, 19 nt, Homo sapiens
  misc_RNA (1)...(19): siRNA sense strand
cuacaguccucauaaaugc

SEQ ID NO: 1458856 - RNA, 19 nt, Homo sapiens
  misc_RNA (1)...(19): siRNA sense strand
aaagaugauuuaccuccaa

SEQ ID NO: 1458857 - RNA, 19 nt, Homo sapiens
  misc_RNA (1)...(19): siRNA sense strand
ccagcugccuucaugauca

SEQ ID NO: 1458858 - RNA, 19 nt, Homo sapiens
  misc_RNA (1)...(19): siRNA sense strand
ggaguucucauggccauuu

SEQ ID NO: 1458859 - RNA, 19 nt, Homo sapiens
  misc_RNA (1)...(19): siRNA sense strand
cagaggaacugaacuacac

SEQ ID NO: 1458860 - RNA, 19 nt, Homo sapiens
  misc_RNA (1)...(19): siRNA sense strand
acucugcccugguugaauu

SEQ ID NO: 1458861 - RNA, 19 nt, Homo sapiens
  misc_RNA (1)...(19): siRNA sense strand
gaugauuuaccuccaaguu

SEQ ID NO: 1458862 - RNA, 19 nt, Homo sapiens
  misc_RNA (1)...(19): siRNA sense strand
ggucaaugcugagcuguac

SEQ ID NO: 1458863 - RNA, 19 nt, Homo sapiens
  misc_RNA (1)...(19): siRNA sense strand
ggagauaucggagaacagu

SEQ ID NO: 1458864 - RNA, 19 nt, Homo sapiens
  misc_RNA (1)...(19): siRNA sense strand
gaaaauaugcaaagaccaa

SEQ ID NO: 1458865 - RNA, 19 nt, Homo sapiens
  misc_RNA (1)...(19): siRNA sense strand
gcugaagccaugagaauca

SEQ ID NO: 1458866 - RNA, 19 nt, Homo sapiens
  misc_RNA (1)...(19): siRNA sense strand
ucauuaagcacaucgcaaa

SEQ ID NO: 1458867 - RNA, 19 nt, Homo sapiens
  misc_RNA (1)...(19): siRNA sense strand
ccugagacuugaagaggaa

SEQ ID NO: 1458868 - RNA, 19 nt, Homo sapiens
  misc_RNA (1)...(19): siRNA sense strand
ggaggggaguuucacuuuu

SEQ ID NO: 1458869 - RNA, 19 nt, Homo sapiens
  misc_RNA (1)...(19): siRNA sense strand
uccagaaacuaaagggaaa

SEQ ID NO: 1458870 - RNA, 19 nt, Homo sapiens
  misc_RNA (1)...(19): siRNA sense strand
ggaaacuggcaagaaauug

SEQ ID NO: 1458871 - RNA, 19 nt, Homo sapiens
  misc_RNA (1)...(19): siRNA sense strand
ggagaacaguggggauuuu

SEQ ID NO: 1458872 - RNA, 19 nt, Homo sapiens
  misc_RNA (1)...(19): siRNA sense strand
cuaacuacaguccucauaa

SEQ ID NO: 1458873 - RNA, 19 nt, Homo sapiens
  misc_RNA (1)...(19): siRNA sense strand
guccacaucuguuccucaa

SEQ ID NO: 1458874 - RNA, 19 nt, Homo sapiens
  misc_RNA (1)...(19): siRNA sense strand
ugauauugauguacaacug

SEQ ID NO: 1458875 - RNA, 19 nt, Homo sapiens
  misc_RNA (1)...(19): siRNA sense strand
gaagaggaaacuggcaaga

SEQ ID NO: 1458876 - RNA, 19 nt, Homo sapiens
  misc_RNA (1)...(19): siRNA sense strand
gcggagauaucggagaaca

SEQ ID NO: 1458877 - RNA, 19 nt, Homo sapiens
  misc_RNA (1)...(19): siRNA sense strand
cuaccuggauuucuucuac

SEQ ID NO: 1458878 - RNA, 19 nt, Homo sapiens
  misc_RNA (1)...(19): siRNA sense strand
gcagaggaacugaacuaca

SEQ ID NO: 1458879 - RNA, 19 nt, Homo sapiens
  misc_RNA (1)...(19): siRNA sense strand
uuaccaaguugccuauaca

SEQ ID NO: 1458880 - RNA, 19 nt, Homo sapiens
  misc_RNA (1)...(19): siRNA sense strand
cuucuacucugcccugguu

SEQ ID NO: 1458881 - RNA, 19 nt, Homo sapiens
  misc_RNA (1)...(19): siRNA sense strand
gagaaucauuaagcacauc

SEQ ID NO: 1458882 - RNA, 19 nt, Homo sapiens
  misc_RNA (1)...(19): siRNA sense strand
gaggaaacuggcaagaaau

SEQ ID NO: 1458883 - RNA, 19 nt, Homo sapiens
  misc_RNA (1)...(19): siRNA sense strand
caaccuauacguggauguu

SEQ ID NO: 1458884 - RNA, 19 nt, Homo sapiens
  misc_RNA (1)...(19): siRNA sense strand
guucagaaacuagacauuc

SEQ ID NO: 1458885 - RNA, 19 nt, Homo sapiens
  misc_RNA (1)...(19): siRNA sense strand
gagcucccgcugaugguuu

SEQ ID NO: 1458886 - RNA, 19 nt, Homo sapiens
  misc_RNA (1)...(19): siRNA sense strand
ucagaacuccucagauaag

SEQ ID NO: 1458887 - RNA, 19 nt, Homo sapiens
  misc_RNA (1)...(19): siRNA sense strand
gcaaagcaggcugguuaau

SEQ ID NO: 1458888 - RNA, 19 nt, Homo sapiens
  misc_RNA (1)...(19): siRNA sense strand
aaacuggcaagaaauugaa

SEQ ID NO: 1458889 - RNA, 19 nt, Homo sapiens
  misc_RNA (1)...(19): siRNA sense strand
aacuagacauuccauugaa

SEQ ID NO: 1458890 - RNA, 19 nt, Homo sapiens
  misc_RNA (1)...(19): siRNA sense strand
uccaaggacuggucagcaa

SEQ ID NO: 1458891 - RNA, 19 nt, Homo sapiens
  misc_RNA (1)...(19): siRNA sense strand
agacauuccauugaacuaa

SEQ ID NO: 1458892 - RNA, 19 nt, Homo sapiens
  misc_RNA (1)...(19): siRNA sense strand
gucagaacuccucagauaa

SEQ ID NO: 1458893 - RNA, 19 nt, Homo sapiens
  misc_RNA (1)...(19): siRNA sense strand
gcccaacuucuucuucuug

SEQ ID NO: 1458894 - RNA, 19 nt, Homo sapiens
  misc_RNA (1)...(19): siRNA sense strand
ccagucaucagugaaugua

SEQ ID NO: 1458895 - RNA, 19 nt, Homo sapiens
  misc_RNA (1)...(19): siRNA sense strand
ugagaaucauuaagcacau

SEQ ID NO: 1458896 - RNA, 19 nt, Homo sapiens
  misc_RNA (1)...(19): siRNA sense strand
ggcuugagcucccgcugau

SEQ ID NO: 1458897 - RNA, 19 nt, Homo sapiens
  misc_RNA (1)...(19): siRNA sense strand
caucagugaauguaggauu

SEQ ID NO: 1458898 - RNA, 19 nt, Homo sapiens
  misc_RNA (1)...(19): siRNA sense strand
accuauacguggauguuaa

SEQ ID NO: 1458899 - RNA, 19 nt, Homo sapiens
  misc_RNA (1)...(19): siRNA sense strand
cgaggaagccgaaaauaug

SEQ ID NO: 1458900 - RNA, 19 nt, Homo sapiens
  misc_RNA (1)...(19): siRNA sense strand
ucacaauggccuaugagau

SEQ ID NO: 1458901 - RNA, 19 nt, Homo sapiens
  misc_RNA (1)...(19): siRNA sense strand
cagccugucuggccucagu

SEQ ID NO: 1458902 - RNA, 19 nt, Homo sapiens
  misc_RNA (1)...(19): siRNA sense strand
cuauuccagucaucaguga

SEQ ID NO: 1458903 - RNA, 19 nt, Homo sapiens
  misc_RNA (1)...(19): siRNA sense strand
ggaccuauuccagucauca

SEQ ID NO: 1458904 - RNA, 19 nt, Homo sapiens
  misc_RNA (1)...(19): siRNA sense strand
caccgaguuuaaccuggua

SEQ ID NO: 1458905 - RNA, 19 nt, Homo sapiens
  misc_RNA (1)...(19): siRNA sense strand
ccaaggacuggucagcaaa

SEQ ID NO: 1458906 - RNA, 19 nt, Homo sapiens
  misc_RNA (1)...(19): siRNA sense strand
gaguuuaaccugguaugug

SEQ ID NO: 1458907 - RNA, 19 nt, Homo sapiens
  misc_RNA (1)...(19): siRNA sense strand
gguggcugaucucccagaa

SEQ ID NO: 1458908 - RNA, 19 nt, Homo sapiens
  misc_RNA (1)...(19): siRNA sense strand
ccuaacuacaguccucaua

SEQ ID NO: 1458909 - RNA, 19 nt, Homo sapiens
  misc_RNA (1)...(19): siRNA sense strand
cagacagguuuggccguaa

SEQ ID NO: 1458910 - RNA, 19 nt, Homo sapiens
  misc_RNA (1)...(19): siRNA sense strand
ggaggugguugcaguucac

SEQ ID NO: 1458911 - RNA, 19 nt, Homo sapiens
  misc_RNA (1)...(19): siRNA sense strand
cugcagaggaacugaacua

SEQ ID NO: 1458912 - RNA, 19 nt, Homo sapiens
  misc_RNA (1)...(19): siRNA sense strand
caucuguuccucaaugugu

SEQ ID NO: 1458913 - RNA, 19 nt, Homo sapiens
  misc_RNA (1)...(19): siRNA sense strand
auaucuaccuggauuucuu

SEQ ID NO: 1458914 - RNA, 19 nt, Homo sapiens
  misc_RNA (1)...(19): siRNA sense strand
caauaucuaccuggauuuc

SEQ ID NO: 1458915 - RNA, 19 nt, Homo sapiens
  misc_RNA (1)...(19): siRNA sense strand
cuggaggucuggugcuguu

SEQ ID NO: 1458916 - RNA, 19 nt, Homo sapiens
  misc_RNA (1)...(19): siRNA sense strand
uaagcacaucgcaaagaaa

SEQ ID NO: 1458917 - RNA, 19 nt, Homo sapiens
  misc_RNA (1)...(19): siRNA sense strand
ggaaccagagcaccuucga

SEQ ID NO: 1458918 - RNA, 19 nt, Homo sapiens
  misc_RNA (1)...(19): siRNA sense strand
ucacgccauuccuggucua

SEQ ID NO: 1458919 - RNA, 19 nt, Homo sapiens
  misc_RNA (1)...(19): siRNA sense strand
gauagucugccuggucaau

SEQ ID NO: 1458920 - RNA, 19 nt, Homo sapiens
  misc_RNA (1)...(19): siRNA sense strand
aggaaacuggcaagaaauu

SEQ ID NO: 1458921 - RNA, 19 nt, Homo sapiens
  misc_RNA (1)...(19): siRNA sense strand
cuucauuucuugacuuggu

SEQ ID NO: 1458922 - RNA, 19 nt, Homo sapiens
  misc_RNA (1)...(19): siRNA sense strand
gcuguugcuuccagaaacu

SEQ ID NO: 1458923 - RNA, 19 nt, Homo sapiens
  misc_RNA (1)...(19): siRNA sense strand
gacauugguggcaucauca

SEQ ID NO: 1458924 - RNA, 19 nt, Homo sapiens
  misc_RNA (1)...(19): siRNA sense strand
cccuugggcugcaucaaau

SEQ ID NO: 1458925 - RNA, 19 nt, Homo sapiens
  misc_RNA (1)...(19): siRNA sense strand
aagcucugccuccuaacua

SEQ ID NO: 1458926 - RNA, 19 nt, Homo sapiens
  misc_RNA (1)...(19): siRNA sense strand
agacagguuuggccguaag

SEQ ID NO: 1458927 - RNA, 19 nt, Homo sapiens
  misc_RNA (1)...(19): siRNA sense strand
ggucagaacuccucagaua

SEQ ID NO: 1458928 - RNA, 19 nt, Homo sapiens
  misc_RNA (1)...(19): siRNA sense strand
gacaauaucuaccuggauu

SEQ ID NO: 1458929 - RNA, 19 nt, Homo sapiens
  misc_RNA (1)...(19): siRNA sense strand
uaacuacaguccucauaaa

SEQ ID NO: 1458930 - RNA, 19 nt, Homo sapiens
  misc_RNA (1)...(19): siRNA sense strand
uggcugaucucccagaaua

SEQ ID NO: 1458931 - RNA, 19 nt, Homo sapiens
  misc_RNA (1)...(19): siRNA sense strand
caaguugccuauacaguug

SEQ ID NO: 1458932 - RNA, 19 nt, Homo sapiens
  misc_RNA (1)...(19): siRNA sense strand
caaagcaggcugguuaaua

SEQ ID NO: 1458933 - RNA, 19 nt, Homo sapiens
  misc_RNA (1)...(19): siRNA sense strand
agaggaaacuggcaagaaa

SEQ ID NO: 1458934 - RNA, 19 nt, Homo sapiens
  misc_RNA (1)...(19): siRNA sense strand
cuacauagcagacagguuu

SEQ ID NO: 1458935 - RNA, 19 nt, Homo sapiens
  misc_RNA (1)...(19): siRNA sense strand
gaaacuggcaagaaauuga

SEQ ID NO: 1458936 - RNA, 19 nt, Homo sapiens
  misc_RNA (1)...(19): siRNA sense strand
cguaagcucugccuccuaa

SEQ ID NO: 1458937 - RNA, 19 nt, Homo sapiens
  misc_RNA (1)...(19): siRNA sense strand
uuuauuggcucuaugagua

SEQ ID NO: 1458938 - RNA, 19 nt, Homo sapiens
  misc_RNA (1)...(19): siRNA sense strand
aaagcaggcugguuaauag

SEQ ID NO: 1458939 - RNA, 19 nt, Homo sapiens
  misc_RNA (1)...(19): siRNA sense strand
gcuacgagguggacuggaa

SEQ ID NO: 1458940 - RNA, 19 nt, Homo sapiens
  misc_RNA (1)...(19): siRNA sense strand
gggcggagauaucggagaa

SEQ ID NO: 1458941 - RNA, 19 nt, Homo sapiens
  misc_RNA (1)...(19): siRNA sense strand
uuaagcacaucgcaaagaa

SEQ ID NO: 1458942 - RNA, 19 nt, Homo sapiens
  misc_RNA (1)...(19): siRNA sense strand
ccucagauaaggaaacaua

SEQ ID NO: 1458943 - RNA, 19 nt, Homo sapiens
  misc_RNA (1)...(19): siRNA sense strand
ccaaguugccuauacaguu

SEQ ID NO: 1458944 - RNA, 19 nt, Homo sapiens
  misc_RNA (1)...(19): siRNA sense strand
cagauaaggaaacauacua

SEQ ID NO: 1458945 - RNA, 19 nt, Homo sapiens
  misc_RNA (1)...(19): siRNA sense strand
cuacaguccucauaaaugc

SEQ ID NO: 1458946 - RNA, 19 nt, Homo sapiens
  misc_RNA (1)...(19): siRNA sense strand
ccagcugccuucaugauca

SEQ ID NO: 1458947 - RNA, 19 nt, Homo sapiens
  misc_RNA (1)...(19): siRNA sense strand
ggaguucucauggccauuu

SEQ ID NO: 1458948 - RNA, 19 nt, Homo sapiens
  misc_RNA (1)...(19): siRNA sense strand
cagaggaacugaacuacac

SEQ ID NO: 1458949 - RNA, 19 nt, Homo sapiens
  misc_RNA (1)...(19): siRNA sense strand
acucugcccugguugaauu

SEQ ID NO: 1458950 - RNA, 19 nt, Homo sapiens
  misc_RNA (1)...(19): siRNA sense strand
ggagauaucggagaacagu

SEQ ID NO: 1458951 - RNA, 19 nt, Homo sapiens
  misc_RNA (1)...(19): siRNA sense strand
gcugaagccaugagaauca

SEQ ID NO: 1458952 - RNA, 19 nt, Homo sapiens
  misc_RNA (1)...(19): siRNA sense strand
ucauuaagcacaucgcaaa

SEQ ID NO: 1458953 - RNA, 19 nt, Homo sapiens
  misc_RNA (1)...(19): siRNA sense strand
ccugagacuugaagaggaa

SEQ ID NO: 1458954 - RNA, 19 nt, Homo sapiens
  misc_RNA (1)...(19): siRNA sense strand
ggaggggaguuucacuuuu

SEQ ID NO: 1458955 - RNA, 19 nt, Homo sapiens
  misc_RNA (1)...(19): siRNA sense strand
ggaaacuggcaagaaauug

SEQ ID NO: 1458956 - RNA, 19 nt, Homo sapiens
  misc_RNA (1)...(19): siRNA sense strand
ggagaacaguggggauuuu

SEQ ID NO: 1458957 - RNA, 19 nt, Homo sapiens
  misc_RNA (1)...(19): siRNA sense strand
cuaacuacaguccucauaa

SEQ ID NO: 1458958 - RNA, 19 nt, Homo sapiens
  misc_RNA (1)...(19): siRNA sense strand
ugauauugauguacaacug

SEQ ID NO: 1458959 - RNA, 19 nt, Homo sapiens
  misc_RNA (1)...(19): siRNA sense strand
gaagaggaaacuggcaaga

SEQ ID NO: 1458960 - RNA, 19 nt, Homo sapiens
  misc_RNA (1)...(19): siRNA sense strand
gcggagauaucggagaaca

SEQ ID NO: 1458961 - RNA, 19 nt, Homo sapiens
  misc_RNA (1)...(19): siRNA sense strand
gcagaggaacugaacuaca

SEQ ID NO: 1458962 - RNA, 19 nt, Homo sapiens
  misc_RNA (1)...(19): siRNA sense strand
cuaccuggauuucuucuac

SEQ ID NO: 1458963 - RNA, 19 nt, Homo sapiens
  misc_RNA (1)...(19): siRNA sense strand
uuaccaaguugccuauaca

SEQ ID NO: 1458964 - RNA, 19 nt, Homo sapiens
  misc_RNA (1)...(19): siRNA sense strand
cuucuacucugcccugguu

SEQ ID NO: 1458965 - RNA, 19 nt, Homo sapiens
  misc_RNA (1)...(19): siRNA sense strand
gagaaucauuaagcacauc

SEQ ID NO: 1458966 - RNA, 19 nt, Homo sapiens
  misc_RNA (1)...(19): siRNA sense strand
gaggaaacuggcaagaaau

SEQ ID NO: 1458967 - RNA, 19 nt, Homo sapiens
  misc_RNA (1)...(19): siRNA sense strand
caaccuauacguggauguu

SEQ ID NO: 1458968 - RNA, 19 nt, Homo sapiens
  misc_RNA (1)...(19): siRNA sense strand
ucagaacuccucagauaag

SEQ ID NO: 1458969 - RNA, 19 nt, Homo sapiens
  misc_RNA (1)...(19): siRNA sense strand
gcaaagcaggcugguuaau

SEQ ID NO: 1458970 - RNA, 19 nt, Homo sapiens
  misc_RNA (1)...(19): siRNA sense strand
aaacuggcaagaaauugaa

SEQ ID NO: 1458971 - RNA, 19 nt, Homo sapiens
  misc_RNA (1)...(19): siRNA sense strand
uccaaggacuggucagcaa

SEQ ID NO: 1458972 - RNA, 19 nt, Homo sapiens
  misc_RNA (1)...(19): siRNA sense strand
gucagaacuccucagauaa

SEQ ID NO: 1458973 - RNA, 19 nt, Homo sapiens
  misc_RNA (1)...(19): siRNA sense strand
ccagucaucagugaaugua

SEQ ID NO: 1458974 - RNA, 19 nt, Homo sapiens
  misc_RNA (1)...(19): siRNA sense strand
gcccaacuucuucuucuug

SEQ ID NO: 1458975 - RNA, 19 nt, Homo sapiens
  misc_RNA (1)...(19): siRNA sense strand
caucagugaauguaggauu

SEQ ID NO: 1458976 - RNA, 19 nt, Homo sapiens
  misc_RNA (1)...(19): siRNA sense strand
ugagaaucauuaagcacau

SEQ ID NO: 1458977 - RNA, 19 nt, Homo sapiens
  misc_RNA (1)...(19): siRNA sense strand
ggaccuauuccagucauca

SEQ ID NO: 1458978 - RNA, 19 nt, Homo sapiens
  misc_RNA (1)...(19): siRNA sense strand
cagccugucuggccucagu

SEQ ID NO: 1458979 - RNA, 19 nt, Homo sapiens
  misc_RNA (1)...(19): siRNA sense strand
caccgaguuuaaccuggua

SEQ ID NO: 1458980 - RNA, 19 nt, Homo sapiens
  misc_RNA (1)...(19): siRNA sense strand
ccaaggacuggucagcaaa

SEQ ID NO: 1458981 - RNA, 19 nt, Homo sapiens
  misc_RNA (1)...(19): siRNA sense strand
accuauacguggauguuaa

SEQ ID NO: 1458982 - RNA, 19 nt, Homo sapiens
  misc_RNA (1)...(19): siRNA sense strand
cuauuccagucaucaguga

SEQ ID NO: 1458983 - RNA, 19 nt, Homo sapiens
  misc_RNA (1)...(19): siRNA sense strand
cagacagguuuggccguaa

SEQ ID NO: 1458984 - RNA, 19 nt, Homo sapiens
  misc_RNA (1)...(19): siRNA sense strand
gaguuuaaccugguaugug

SEQ ID NO: 1458985 - RNA, 19 nt, Homo sapiens
  misc_RNA (1)...(19): siRNA sense strand
gguggcugaucucccagaa

SEQ ID NO: 1458986 - RNA, 19 nt, Homo sapiens
  misc_RNA (1)...(19): siRNA sense strand
ccuaacuacaguccucaua

SEQ ID NO: 1458987 - RNA, 19 nt, Homo sapiens
  misc_RNA (1)...(19): siRNA sense strand
cugcagaggaacugaacua

SEQ ID NO: 1458988 - RNA, 19 nt, Homo sapiens
  misc_RNA (1)...(19): siRNA sense strand
auaucuaccuggauuucuu

SEQ ID NO: 1458989 - RNA, 19 nt, Homo sapiens
  misc_RNA (1)...(19): siRNA sense strand
caauaucuaccuggauuuc

SEQ ID NO: 1458990 - RNA, 19 nt, Homo sapiens
  misc_RNA (1)...(19): siRNA sense strand
ggaggugguugcaguucac

SEQ ID NO: 1458991 - RNA, 19 nt, Homo sapiens
  misc_RNA (1)...(19): siRNA sense strand
ggaaccagagcaccuucga

SEQ ID NO: 1458992 - RNA, 19 nt, Homo sapiens
  misc_RNA (1)...(19): siRNA sense strand
aggaaacuggcaagaaauu

SEQ ID NO: 1458993 - RNA, 19 nt, Homo sapiens
  misc_RNA (1)...(19): siRNA sense strand
uaagcacaucgcaaagaaa

SEQ ID NO: 1458994 - RNA, 19 nt, Homo sapiens
  misc_RNA (1)...(19): siRNA sense strand
cuucauuucuugacuuggu

SEQ ID NO: 1458995 - RNA, 19 nt, Homo sapiens
  misc_RNA (1)...(19): siRNA sense strand
cccuugggcugcaucaaau

SEQ ID NO: 1458996 - RNA, 19 nt, Homo sapiens
  misc_RNA (1)...(19): siRNA sense strand
agacagguuuggccguaag

SEQ ID NO: 1458997 - RNA, 19 nt, Homo sapiens
  misc_RNA (1)...(19): siRNA sense strand
gcucuauuacuggugcaua

SEQ ID NO: 1458998 - RNA, 19 nt, Homo sapiens
  misc_RNA (1)...(19): siRNA sense strand
aagcucugccuccuaacua

SEQ ID NO: 1458999 - RNA, 19 nt, Homo sapiens
  misc_RNA (1)...(19): siRNA sense strand
ucuucuucuugcucuauua

SEQ ID NO: 1459000 - RNA, 19 nt, Homo sapiens
  misc_RNA (1)...(19): siRNA sense strand
auucccagcugccuucaug

SEQ ID NO: 1459001 - RNA, 19 nt, Homo sapiens
  misc_RNA (1)...(19): siRNA sense strand
guccaucgucaccgaguuu

SEQ ID NO: 1459002 - RNA, 19 nt, Homo sapiens
  misc_RNA (1)...(19): siRNA sense strand
ccuugcaggugacaauauc

SEQ ID NO: 1459003 - RNA, 19 nt, Homo sapiens
  misc_RNA (1)...(19): siRNA sense strand
gaaugcugaagccaugaga

SEQ ID NO: 1459004 - RNA, 19 nt, Homo sapiens
  misc_RNA (1)...(19): siRNA sense strand
gaguucucauggccauuuc

SEQ ID NO: 1459005 - RNA, 19 nt, Homo sapiens
  misc_RNA (1)...(19): siRNA sense strand
aagaggaaacuggcaagaa

SEQ ID NO: 1459006 - RNA, 19 nt, Homo sapiens
  misc_RNA (1)...(19): siRNA sense strand
gcugaucucccagaauaag

SEQ ID NO: 1459007 - RNA, 19 nt, Homo sapiens
  misc_RNA (1)...(19): siRNA sense strand
ugguugcaguucacaguug

SEQ ID NO: 1459008 - RNA, 19 nt, Homo sapiens
  misc_RNA (1)...(19): siRNA sense strand
cagaggagcugcaccauga

SEQ ID NO: 1459009 - RNA, 19 nt, Homo sapiens
  misc_RNA (1)...(19): siRNA sense strand
ggacgggccauacccaaua

SEQ ID NO: 1459010 - RNA, 19 nt, Homo sapiens
  misc_RNA (1)...(19): siRNA sense strand
agaaggaccuggccacgaa

SEQ ID NO: 1459011 - RNA, 19 nt, Homo sapiens
  misc_RNA (1)...(19): siRNA sense strand
gcaaggggcuuacgcagaa

SEQ ID NO: 1459012 - RNA, 19 nt, Homo sapiens
  misc_RNA (1)...(19): siRNA sense strand
gacgggccauacccaauaa

SEQ ID NO: 1459013 - RNA, 19 nt, Homo sapiens
  misc_RNA (1)...(19): siRNA sense strand
gcacagagacgaggagaag

SEQ ID NO: 1459014 - RNA, 19 nt, Homo sapiens
  misc_RNA (1)...(19): siRNA sense strand
ugacggugcugcgcaagaa

SEQ ID NO: 1459015 - RNA, 19 nt, Homo sapiens
  misc_RNA (1)...(19): siRNA sense strand
uaucuuagcggcacagaga

SEQ ID NO: 1459016 - RNA, 19 nt, Homo sapiens
  misc_RNA (1)...(19): siRNA sense strand
ccacgaaaaucaaugagaa

SEQ ID NO: 1459017 - RNA, 19 nt, Homo sapiens
  misc_RNA (1)...(19): siRNA sense strand
ggccagaacaaacaacauu

SEQ ID NO: 1459018 - RNA, 19 nt, Homo sapiens
  misc_RNA (1)...(19): siRNA sense strand
caaacaacauucuauuacc

SEQ ID NO: 1459019 - RNA, 19 nt, Homo sapiens
  misc_RNA (1)...(19): siRNA sense strand
ccaaauccaagcaggcuau

SEQ ID NO: 1459020 - RNA, 19 nt, Homo sapiens
  misc_RNA (1)...(19): siRNA sense strand
caacauucuauuaccaaga

SEQ ID NO: 1459021 - RNA, 19 nt, Homo sapiens
  misc_RNA (1)...(19): siRNA sense strand
gagacgaggagaagaugug

SEQ ID NO: 1459022 - RNA, 19 nt, Homo sapiens
  misc_RNA (1)...(19): siRNA sense strand
cacaggugaucgcggacua

SEQ ID NO: 1459023 - RNA, 19 nt, Homo sapiens
  misc_RNA (1)...(19): siRNA sense strand
gaaggaccuggccacgaaa

SEQ ID NO: 1459024 - RNA, 19 nt, Homo sapiens
  misc_RNA (1)...(19): siRNA sense strand
ggugaucgcggacuaugag

SEQ ID NO: 1459025 - RNA, 19 nt, Homo sapiens
  misc_RNA (1)...(19): siRNA sense strand
ccaagaacacggccaagcu

SEQ ID NO: 1459026 - RNA, 19 nt, Homo sapiens
  misc_RNA (1)...(19): siRNA sense strand
acagagacgaggagaagau

SEQ ID NO: 1459027 - RNA, 19 nt, Homo sapiens
  misc_RNA (1)...(19): siRNA sense strand
uaaccaggugcuuggcaaa

SEQ ID NO: 1459028 - RNA, 19 nt, Homo sapiens
  misc_RNA (1)...(19): siRNA sense strand
aauccaagcaggcuaucuu

SEQ ID NO: 1459029 - RNA, 19 nt, Homo sapiens
  misc_RNA (1)...(19): siRNA sense strand
cagaggagcugcaccauga

SEQ ID NO: 1459030 - RNA, 19 nt, Homo sapiens
  misc_RNA (1)...(19): siRNA sense strand
ggacgggccauacccaaua

SEQ ID NO: 1459031 - RNA, 19 nt, Homo sapiens
  misc_RNA (1)...(19): siRNA sense strand
agaaggaccuggccacgaa

SEQ ID NO: 1459032 - RNA, 19 nt, Homo sapiens
  misc_RNA (1)...(19): siRNA sense strand
gcaaggggcuuacgcagaa

SEQ ID NO: 1459033 - RNA, 19 nt, Homo sapiens
  misc_RNA (1)...(19): siRNA sense strand
gacgggccauacccaauaa

SEQ ID NO: 1459034 - RNA, 19 nt, Homo sapiens
  misc_RNA (1)...(19): siRNA sense strand
gcacagagacgaggagaag

SEQ ID NO: 1459035 - RNA, 19 nt, Homo sapiens
  misc_RNA (1)...(19): siRNA sense strand
ugacggugcugcgcaagaa

SEQ ID NO: 1459036 - RNA, 19 nt, Homo sapiens
  misc_RNA (1)...(19): siRNA sense strand
uaucuuagcggcacagaga

SEQ ID NO: 1459037 - RNA, 19 nt, Homo sapiens
  misc_RNA (1)...(19): siRNA sense strand
ccacgaaaaucaaugagaa

SEQ ID NO: 1459038 - RNA, 19 nt, Homo sapiens
  misc_RNA (1)...(19): siRNA sense strand
ggccagaacaaacaacauu

SEQ ID NO: 1459039 - RNA, 19 nt, Homo sapiens
  misc_RNA (1)...(19): siRNA sense strand
caaacaacauucuauuacc

SEQ ID NO: 1459040 - RNA, 19 nt, Homo sapiens
  misc_RNA (1)...(19): siRNA sense strand
ccaaauccaagcaggcuau

SEQ ID NO: 1459041 - RNA, 19 nt, Homo sapiens
  misc_RNA (1)...(19): siRNA sense strand
caacauucuauuaccaaga

SEQ ID NO: 1459042 - RNA, 19 nt, Homo sapiens
  misc_RNA (1)...(19): siRNA sense strand
gagacgaggagaagaugug

SEQ ID NO: 1459043 - RNA, 19 nt, Homo sapiens
  misc_RNA (1)...(19): siRNA sense strand
cacaggugaucgcggacua

SEQ ID NO: 1459044 - RNA, 19 nt, Homo sapiens
  misc_RNA (1)...(19): siRNA sense strand
gaaggaccuggccacgaaa

SEQ ID NO: 1459045 - RNA, 19 nt, Homo sapiens
  misc_RNA (1)...(19): siRNA sense strand
ggugaucgcggacuaugag

SEQ ID NO: 1459046 - RNA, 19 nt, Homo sapiens
  misc_RNA (1)...(19): siRNA sense strand
ccaagaacacggccaagcu

SEQ ID NO: 1459047 - RNA, 19 nt, Homo sapiens
  misc_RNA (1)...(19): siRNA sense strand
acagagacgaggagaagau

SEQ ID NO: 1459048 - RNA, 19 nt, Homo sapiens
  misc_RNA (1)...(19): siRNA sense strand
uaaccaggugcuuggcaaa

SEQ ID NO: 1459049 - RNA, 19 nt, Homo sapiens
  misc_RNA (1)...(19): siRNA sense strand
aauccaagcaggcuaucuu

SEQ ID NO: 1459050 - RNA, 19 nt, Homo sapiens
  misc_RNA (1)...(19): siRNA sense strand
ggaagaagaucgggaagua

SEQ ID NO: 1459051 - RNA, 19 nt, Homo sapiens
  misc_RNA (1)...(19): siRNA sense strand
gagcagaucuccaaagugu

SEQ ID NO: 1459052 - RNA, 19 nt, Homo sapiens
  misc_RNA (1)...(19): siRNA sense strand
cagaggaguuugccuugua

SEQ ID NO: 1459053 - RNA, 19 nt, Homo sapiens
  misc_RNA (1)...(19): siRNA sense strand
cgacguggcccaguauaua

SEQ ID NO: 1459054 - RNA, 19 nt, Homo sapiens
  misc_RNA (1)...(19): siRNA sense strand
gaauucagcagaggaguuu

SEQ ID NO: 1459055 - RNA, 19 nt, Homo sapiens
  misc_RNA (1)...(19): siRNA sense strand
gacagaggcuggaggagau

SEQ ID NO: 1459056 - RNA, 19 nt, Homo sapiens
  misc_RNA (1)...(19): siRNA sense strand
ggccauuucuacaaccaua

SEQ ID NO: 1459057 - RNA, 19 nt, Homo sapiens
  misc_RNA (1)...(19): siRNA sense strand
gaagaagaucgggaaguaa

SEQ ID NO: 1459058 - RNA, 19 nt, Homo sapiens
  misc_RNA (1)...(19): siRNA sense strand
gcagaucuccaaaguguuc

SEQ ID NO: 1459059 - RNA, 19 nt, Homo sapiens
  misc_RNA (1)...(19): siRNA sense strand
ccaaaguguuccuaaugga

SEQ ID NO: 1459060 - RNA, 19 nt, Homo sapiens
  misc_RNA (1)...(19): siRNA sense strand
caacggccauuucuacaac

SEQ ID NO: 1459061 - RNA, 19 nt, Homo sapiens
  misc_RNA (1)...(19): siRNA sense strand
gaagaucgggaaguaaaga

SEQ ID NO: 1459062 - RNA, 19 nt, Homo sapiens
  misc_RNA (1)...(19): siRNA sense strand
gugagcagaucuccaaagu

SEQ ID NO: 1459063 - RNA, 19 nt, Homo sapiens
  misc_RNA (1)...(19): siRNA sense strand
ugaagcugcugcucaacaa

SEQ ID NO: 1459064 - RNA, 19 nt, Homo sapiens
  misc_RNA (1)...(19): siRNA sense strand
gcccaaaguucagaucuca

SEQ ID NO: 1459065 - RNA, 19 nt, Homo sapiens
  misc_RNA (1)...(19): siRNA sense strand
cgagaugccgguacuuaaa

SEQ ID NO: 1459066 - RNA, 19 nt, Homo sapiens
  misc_RNA (1)...(19): siRNA sense strand
cauaagacauccguguuca

SEQ ID NO: 1459067 - RNA, 19 nt, Homo sapiens
  misc_RNA (1)...(19): siRNA sense strand
cuuaaaagcuucauucaga

SEQ ID NO: 1459068 - RNA, 19 nt, Homo sapiens
  misc_RNA (1)...(19): siRNA sense strand
gacguggcccaguauauaa

SEQ ID NO: 1459069 - RNA, 19 nt, Homo sapiens
  misc_RNA (1)...(19): siRNA sense strand
gcagaggaguuugccuugu

SEQ ID NO: 1459070 - RNA, 19 nt, Homo sapiens
  misc_RNA (1)...(19): siRNA sense strand
guauauaaaguucgagaug

SEQ ID NO: 1459071 - RNA, 19 nt, Homo sapiens
  misc_RNA (1)...(19): siRNA sense strand
aagaagaucgggaaguaaa

SEQ ID NO: 1459072 - RNA, 19 nt, Homo sapiens
  misc_RNA (1)...(19): siRNA sense strand
ccuacgacguggcccagua

SEQ ID NO: 1459073 - RNA, 19 nt, Homo sapiens
  misc_RNA (1)...(19): siRNA sense strand
ccaaaguucagaucucaga

SEQ ID NO: 1459074 - RNA, 19 nt, Homo sapiens
  misc_RNA (1)...(19): siRNA sense strand
cgccaccgcuucuccauca

SEQ ID NO: 1459075 - RNA, 19 nt, Homo sapiens
  misc_RNA (1)...(19): siRNA sense strand
caucaacggccauuucuac

SEQ ID NO: 1459076 - RNA, 19 nt, Homo sapiens
  misc_RNA (1)...(19): siRNA sense strand
caugugagcagaucuccaa

SEQ ID NO: 1459077 - RNA, 19 nt, Homo sapiens
  misc_RNA (1)...(19): siRNA sense strand
ggaaguaaagaagcugaug

SEQ ID NO: 1459078 - RNA, 19 nt, Homo sapiens
  misc_RNA (1)...(19): siRNA sense strand
agaagcugaugcgcaagua

SEQ ID NO: 1459079 - RNA, 19 nt, Homo sapiens
  misc_RNA (1)...(19): siRNA sense strand
gaagcugcugcucaacaaa

SEQ ID NO: 1459080 - RNA, 19 nt, Homo sapiens
  misc_RNA (1)...(19): siRNA sense strand
uggaggaagucaccuacga

SEQ ID NO: 1459081 - RNA, 19 nt, Homo sapiens
  misc_RNA (1)...(19): siRNA sense strand
ugacugugcccaaaguuca

SEQ ID NO: 1459082 - RNA, 19 nt, Homo sapiens
  misc_RNA (1)...(19): siRNA sense strand
uaagacauccguguucaca

SEQ ID NO: 1459083 - RNA, 19 nt, Homo sapiens
  misc_RNA (1)...(19): siRNA sense strand
ccauaagacauccguguuc

SEQ ID NO: 1459084 - RNA, 19 nt, Homo sapiens
  misc_RNA (1)...(19): siRNA sense strand
uccaaaguguuccuaaugg

SEQ ID NO: 1459085 - RNA, 19 nt, Homo sapiens
  misc_RNA (1)...(19): siRNA sense strand
cugcugcucaacaaauuua

SEQ ID NO: 1459086 - RNA, 19 nt, Homo sapiens
  misc_RNA (1)...(19): siRNA sense strand
ucgagaugccgguacuuaa

SEQ ID NO: 1459087 - RNA, 19 nt, Homo sapiens
  misc_RNA (1)...(19): siRNA sense strand
ucuccaaaguguuccuaau

SEQ ID NO: 1459088 - RNA, 19 nt, Homo sapiens
  misc_RNA (1)...(19): siRNA sense strand
ggcccaguauauaaaguuc

SEQ ID NO: 1459089 - RNA, 19 nt, Homo sapiens
  misc_RNA (1)...(19): siRNA sense strand
ucaacggccauuucuacaa

SEQ ID NO: 1459090 - RNA, 19 nt, Homo sapiens
  misc_RNA (1)...(19): siRNA sense strand
gcgcacacgcagugauguu

SEQ ID NO: 1459091 - RNA, 19 nt, Homo sapiens
  misc_RNA (1)...(19): siRNA sense strand
gaaggaccagguggaggaa

SEQ ID NO: 1459092 - RNA, 19 nt, Homo sapiens
  misc_RNA (1)...(19): siRNA sense strand
ucaccaacguccgcaucaa

SEQ ID NO: 1459093 - RNA, 19 nt, Homo sapiens
  misc_RNA (1)...(19): siRNA sense strand
cccaguauauaaaguucga

SEQ ID NO: 1459094 - RNA, 19 nt, Homo sapiens
  misc_RNA (1)...(19): siRNA sense strand
cggcuaaugauucgacaga

SEQ ID NO: 1459095 - RNA, 19 nt, Homo sapiens
  misc_RNA (1)...(19): siRNA sense strand
guacuuaaaagcuucauuc

SEQ ID NO: 1459096 - RNA, 19 nt, Homo sapiens
  misc_RNA (1)...(19): siRNA sense strand
gagaugccgguacuuaaaa

SEQ ID NO: 1459097 - RNA, 19 nt, Homo sapiens
  misc_RNA (1)...(19): siRNA sense strand
cagaggaguuugccuugua

SEQ ID NO: 1459098 - RNA, 19 nt, Homo sapiens
  misc_RNA (1)...(19): siRNA sense strand
gaauucagcagaggaguuu

SEQ ID NO: 1459099 - RNA, 19 nt, Homo sapiens
  misc_RNA (1)...(19): siRNA sense strand
ggccauuucuacaaccaua

SEQ ID NO: 1459100 - RNA, 19 nt, Homo sapiens
  misc_RNA (1)...(19): siRNA sense strand
caacggccauuucuacaac

SEQ ID NO: 1459101 - RNA, 19 nt, Homo sapiens
  misc_RNA (1)...(19): siRNA sense strand
ugaagcugcugcucaacaa

SEQ ID NO: 1459102 - RNA, 19 nt, Homo sapiens
  misc_RNA (1)...(19): siRNA sense strand
gcccaaaguucagaucuca

SEQ ID NO: 1459103 - RNA, 19 nt, Homo sapiens
  misc_RNA (1)...(19): siRNA sense strand
cauaagacauccguguuca

SEQ ID NO: 1459104 - RNA, 19 nt, Homo sapiens
  misc_RNA (1)...(19): siRNA sense strand
gcagaggaguuugccuugu

SEQ ID NO: 1459105 - RNA, 19 nt, Homo sapiens
  misc_RNA (1)...(19): siRNA sense strand
ccaaaguucagaucucaga

SEQ ID NO: 1459106 - RNA, 19 nt, Homo sapiens
  misc_RNA (1)...(19): siRNA sense strand
cgccaccgcuucuccauca

SEQ ID NO: 1459107 - RNA, 19 nt, Homo sapiens
  misc_RNA (1)...(19): siRNA sense strand
caucaacggccauuucuac

SEQ ID NO: 1459108 - RNA, 19 nt, Homo sapiens
  misc_RNA (1)...(19): siRNA sense strand
gaagcugcugcucaacaaa

SEQ ID NO: 1459109 - RNA, 19 nt, Homo sapiens
  misc_RNA (1)...(19): siRNA sense strand
uaagacauccguguucaca

SEQ ID NO: 1459110 - RNA, 19 nt, Homo sapiens
  misc_RNA (1)...(19): siRNA sense strand
ugacugugcccaaaguuca

SEQ ID NO: 1459111 - RNA, 19 nt, Homo sapiens
  misc_RNA (1)...(19): siRNA sense strand
ccauaagacauccguguuc

SEQ ID NO: 1459112 - RNA, 19 nt, Homo sapiens
  misc_RNA (1)...(19): siRNA sense strand
cugcugcucaacaaauuua

SEQ ID NO: 1459113 - RNA, 19 nt, Homo sapiens
  misc_RNA (1)...(19): siRNA sense strand
gcgcacacgcagugauguu

SEQ ID NO: 1459114 - RNA, 19 nt, Homo sapiens
  misc_RNA (1)...(19): siRNA sense strand
ucaccaacguccgcaucaa

SEQ ID NO: 1459115 - RNA, 19 nt, Homo sapiens
  misc_RNA (1)...(19): siRNA sense strand
ucaacggccauuucuacaa

SEQ ID NO: 1459116 - RNA, 19 nt, Homo sapiens
  misc_RNA (1)...(19): siRNA sense strand
ggaagaagaucgggaagua

SEQ ID NO: 1459117 - RNA, 19 nt, Homo sapiens
  misc_RNA (1)...(19): siRNA sense strand
gagcagaucuccaaagugu

SEQ ID NO: 1459118 - RNA, 19 nt, Homo sapiens
  misc_RNA (1)...(19): siRNA sense strand
cagaggaguuugccuugua

SEQ ID NO: 1459119 - RNA, 19 nt, Homo sapiens
  misc_RNA (1)...(19): siRNA sense strand
cgacguggcccaguauaua

SEQ ID NO: 1459120 - RNA, 19 nt, Homo sapiens
  misc_RNA (1)...(19): siRNA sense strand
gaauucagcagaggaguuu

SEQ ID NO: 1459121 - RNA, 19 nt, Homo sapiens
  misc_RNA (1)...(19): siRNA sense strand
gacagaggcuggaggagau

SEQ ID NO: 1459122 - RNA, 19 nt, Homo sapiens
  misc_RNA (1)...(19): siRNA sense strand
ggccauuucuacaaccaua

SEQ ID NO: 1459123 - RNA, 19 nt, Homo sapiens
  misc_RNA (1)...(19): siRNA sense strand
gaagaagaucgggaaguaa

SEQ ID NO: 1459124 - RNA, 19 nt, Homo sapiens
  misc_RNA (1)...(19): siRNA sense strand
gcagaucuccaaaguguuc

SEQ ID NO: 1459125 - RNA, 19 nt, Homo sapiens
  misc_RNA (1)...(19): siRNA sense strand
ccaaaguguuccuaaugga

SEQ ID NO: 1459126 - RNA, 19 nt, Homo sapiens
  misc_RNA (1)...(19): siRNA sense strand
caacggccauuucuacaac

SEQ ID NO: 1459127 - RNA, 19 nt, Homo sapiens
  misc_RNA (1)...(19): siRNA sense strand
gaagaucgggaaguaaaga

SEQ ID NO: 1459128 - RNA, 19 nt, Homo sapiens
  misc_RNA (1)...(19): siRNA sense strand
gugagcagaucuccaaagu

SEQ ID NO: 1459129 - RNA, 19 nt, Homo sapiens
  misc_RNA (1)...(19): siRNA sense strand
ugaagcugcugcucaacaa

SEQ ID NO: 1459130 - RNA, 19 nt, Homo sapiens
  misc_RNA (1)...(19): siRNA sense strand
gcccaaaguucagaucuca

SEQ ID NO: 1459131 - RNA, 19 nt, Homo sapiens
  misc_RNA (1)...(19): siRNA sense strand
cgagaugccgguacuuaaa

SEQ ID NO: 1459132 - RNA, 19 nt, Homo sapiens
  misc_RNA (1)...(19): siRNA sense strand
cauaagacauccguguuca

SEQ ID NO: 1459133 - RNA, 19 nt, Homo sapiens
  misc_RNA (1)...(19): siRNA sense strand
cuuaaaagcuucauucaga

SEQ ID NO: 1459134 - RNA, 19 nt, Homo sapiens
  misc_RNA (1)...(19): siRNA sense strand
gacguggcccaguauauaa

SEQ ID NO: 1459135 - RNA, 19 nt, Homo sapiens
  misc_RNA (1)...(19): siRNA sense strand
gcagaggaguuugccuugu

SEQ ID NO: 1459136 - RNA, 19 nt, Homo sapiens
  misc_RNA (1)...(19): siRNA sense strand
guauauaaaguucgagaug

SEQ ID NO: 1459137 - RNA, 19 nt, Homo sapiens
  misc_RNA (1)...(19): siRNA sense strand
aagaagaucgggaaguaaa

SEQ ID NO: 1459138 - RNA, 19 nt, Homo sapiens
  misc_RNA (1)...(19): siRNA sense strand
ccuacgacguggcccagua

SEQ ID NO: 1459139 - RNA, 19 nt, Homo sapiens
  misc_RNA (1)...(19): siRNA sense strand
ccaaaguucagaucucaga

SEQ ID NO: 1459140 - RNA, 19 nt, Homo sapiens
  misc_RNA (1)...(19): siRNA sense strand
cgccaccgcuucuccauca

SEQ ID NO: 1459141 - RNA, 19 nt, Homo sapiens
  misc_RNA (1)...(19): siRNA sense strand
caucaacggccauuucuac

SEQ ID NO: 1459142 - RNA, 19 nt, Homo sapiens
  misc_RNA (1)...(19): siRNA sense strand
caugugagcagaucuccaa

SEQ ID NO: 1459143 - RNA, 19 nt, Homo sapiens
  misc_RNA (1)...(19): siRNA sense strand
ggaaguaaagaagcugaug

SEQ ID NO: 1459144 - RNA, 19 nt, Homo sapiens
  misc_RNA (1)...(19): siRNA sense strand
agaagcugaugcgcaagua

SEQ ID NO: 1459145 - RNA, 19 nt, Homo sapiens
  misc_RNA (1)...(19): siRNA sense strand
gaagcugcugcucaacaaa

SEQ ID NO: 1459146 - RNA, 19 nt, Homo sapiens
  misc_RNA (1)...(19): siRNA sense strand
uggaggaagucaccuacga

SEQ ID NO: 1459147 - RNA, 19 nt, Homo sapiens
  misc_RNA (1)...(19): siRNA sense strand
ugacugugcccaaaguuca

SEQ ID NO: 1459148 - RNA, 19 nt, Homo sapiens
  misc_RNA (1)...(19): siRNA sense strand
uaagacauccguguucaca

SEQ ID NO: 1459149 - RNA, 19 nt, Homo sapiens
  misc_RNA (1)...(19): siRNA sense strand
ccauaagacauccguguuc

SEQ ID NO: 1459150 - RNA, 19 nt, Homo sapiens
  misc_RNA (1)...(19): siRNA sense strand
uccaaaguguuccuaaugg

SEQ ID NO: 1459151 - RNA, 19 nt, Homo sapiens
  misc_RNA (1)...(19): siRNA sense strand
cugcugcucaacaaauuua

SEQ ID NO: 1459152 - RNA, 19 nt, Homo sapiens
  misc_RNA (1)...(19): siRNA sense strand
ucgagaugccgguacuuaa

SEQ ID NO: 1459153 - RNA, 19 nt, Homo sapiens
  misc_RNA (1)...(19): siRNA sense strand
ucuccaaaguguuccuaau

SEQ ID NO: 1459154 - RNA, 19 nt, Homo sapiens
  misc_RNA (1)...(19): siRNA sense strand
ggcccaguauauaaaguuc

SEQ ID NO: 1459155 - RNA, 19 nt, Homo sapiens
  misc_RNA (1)...(19): siRNA sense strand
ucaacggccauuucuacaa

SEQ ID NO: 1459156 - RNA, 19 nt, Homo sapiens
  misc_RNA (1)...(19): siRNA sense strand
gcgcacacgcagugauguu

SEQ ID NO: 1459157 - RNA, 19 nt, Homo sapiens
  misc_RNA (1)...(19): siRNA sense strand
gaaggaccagguggaggaa

SEQ ID NO: 1459158 - RNA, 19 nt, Homo sapiens
  misc_RNA (1)...(19): siRNA sense strand
ucaccaacguccgcaucaa

SEQ ID NO: 1459159 - RNA, 19 nt, Homo sapiens
  misc_RNA (1)...(19): siRNA sense strand
cccaguauauaaaguucga

SEQ ID NO: 1459160 - RNA, 19 nt, Homo sapiens
  misc_RNA (1)...(19): siRNA sense strand
cggcuaaugauucgacaga

SEQ ID NO: 1459161 - RNA, 19 nt, Homo sapiens
  misc_RNA (1)...(19): siRNA sense strand
guacuuaaaagcuucauuc

SEQ ID NO: 1459162 - RNA, 19 nt, Homo sapiens
  misc_RNA (1)...(19): siRNA sense strand
gagaugccgguacuuaaaa

SEQ ID NO: 1459163 - RNA, 19 nt, Homo sapiens
  misc_RNA (1)...(19): siRNA sense strand
aaaggagucugcuuacuua

SEQ ID NO: 1459164 - RNA, 19 nt, Homo sapiens
  misc_RNA (1)...(19): siRNA sense strand
gcaagcuauucaucaauua

SEQ ID NO: 1459165 - RNA, 19 nt, Homo sapiens
  misc_RNA (1)...(19): siRNA sense strand
gcagagagauuucauugag

SEQ ID NO: 1459166 - RNA, 19 nt, Homo sapiens
  misc_RNA (1)...(19): siRNA sense strand
gcaaggaagcuagaacuua

SEQ ID NO: 1459167 - RNA, 19 nt, Homo sapiens
  misc_RNA (1)...(19): siRNA sense strand
gcaaagacccagaacauca

SEQ ID NO: 1459168 - RNA, 19 nt, Homo sapiens
  misc_RNA (1)...(19): siRNA sense strand
ggagcgaugugguugauau

SEQ ID NO: 1459169 - RNA, 19 nt, Homo sapiens
  misc_RNA (1)...(19): siRNA sense strand
aaaugcagcugccaaugua

SEQ ID NO: 1459170 - RNA, 19 nt, Homo sapiens
  misc_RNA (1)...(19): siRNA sense strand
gaaacugaaugaccaagca

SEQ ID NO: 1459171 - RNA, 19 nt, Homo sapiens
  misc_RNA (1)...(19): siRNA sense strand
cuagagacuuugauuggua

SEQ ID NO: 1459172 - RNA, 19 nt, Homo sapiens
  misc_RNA (1)...(19): siRNA sense strand
caaggaagcuagaacuuac

SEQ ID NO: 1459173 - RNA, 19 nt, Homo sapiens
  misc_RNA (1)...(19): siRNA sense strand
gaacuuaccaaagcagaaa

SEQ ID NO: 1459174 - RNA, 19 nt, Homo sapiens
  misc_RNA (1)...(19): siRNA sense strand
agggaaacauggcuaauuu

SEQ ID NO: 1459175 - RNA, 19 nt, Homo sapiens
  misc_RNA (1)...(19): siRNA sense strand
gaagcuagaacuuaccaaa

SEQ ID NO: 1459176 - RNA, 19 nt, Homo sapiens
  misc_RNA (1)...(19): siRNA sense strand
gaaaauuccugcaagcuau

SEQ ID NO: 1459177 - RNA, 19 nt, Homo sapiens
  misc_RNA (1)...(19): siRNA sense strand
gcacgucacuuacaaugcu

SEQ ID NO: 1459178 - RNA, 19 nt, Homo sapiens
  misc_RNA (1)...(19): siRNA sense strand
ggagucugcuuacuuacug

SEQ ID NO: 1459179 - RNA, 19 nt, Homo sapiens
  misc_RNA (1)...(19): siRNA sense strand
gggaaacauggcuaauuua

SEQ ID NO: 1459180 - RNA, 19 nt, Homo sapiens
  misc_RNA (1)...(19): siRNA sense strand
gagcagaggaaacugaaug

SEQ ID NO: 1459181 - RNA, 19 nt, Homo sapiens
  misc_RNA (1)...(19): siRNA sense strand
ccaccaacuucaucagaga

SEQ ID NO: 1459182 - RNA, 19 nt, Homo sapiens
  misc_RNA (1)...(19): siRNA sense strand
ggaaacauggcuaauuuac

SEQ ID NO: 1459183 - RNA, 19 nt, Homo sapiens
  misc_RNA (1)...(19): siRNA sense strand
gaaacauggcuaauuuaca

SEQ ID NO: 1459184 - RNA, 19 nt, Homo sapiens
  misc_RNA (1)...(19): siRNA sense strand
cagcagagagauuucauug

SEQ ID NO: 1459185 - RNA, 19 nt, Homo sapiens
  misc_RNA (1)...(19): siRNA sense strand
acaagcacgucacuuacaa

SEQ ID NO: 1459186 - RNA, 19 nt, Homo sapiens
  misc_RNA (1)...(19): siRNA sense strand
gauagaucaugcaaaagua

SEQ ID NO: 1459187 - RNA, 19 nt, Homo sapiens
  misc_RNA (1)...(19): siRNA sense strand
ggauguuacuagcaacuuc

SEQ ID NO: 1459188 - RNA, 19 nt, Homo sapiens
  misc_RNA (1)...(19): siRNA sense strand
ugcaagcuauucaucaauu

SEQ ID NO: 1459189 - RNA, 19 nt, Homo sapiens
  misc_RNA (1)...(19): siRNA sense strand
caugguaccuaacacauac

SEQ ID NO: 1459190 - RNA, 19 nt, Homo sapiens
  misc_RNA (1)...(19): siRNA sense strand
acgacaagcacgucacuua

SEQ ID NO: 1459191 - RNA, 19 nt, Homo sapiens
  misc_RNA (1)...(19): siRNA sense strand
guaccaugaucaacaggau

SEQ ID NO: 1459192 - RNA, 19 nt, Homo sapiens
  misc_RNA (1)...(19): siRNA sense strand
ccacagcaccaccaacuuc

SEQ ID NO: 1459193 - RNA, 19 nt, Homo sapiens
  misc_RNA (1)...(19): siRNA sense strand
gaggauuguuacccuggaa

SEQ ID NO: 1459194 - RNA, 19 nt, Homo sapiens
  misc_RNA (1)...(19): siRNA sense strand
ggaauuaugggugcugguu

SEQ ID NO: 1459195 - RNA, 19 nt, Homo sapiens
  misc_RNA (1)...(19): siRNA sense strand
gcuagaacuuaccaaagca

SEQ ID NO: 1459196 - RNA, 19 nt, Homo sapiens
  misc_RNA (1)...(19): siRNA sense strand
aaacuagagacuuugauug

SEQ ID NO: 1459197 - RNA, 19 nt, Homo sapiens
  misc_RNA (1)...(19): siRNA sense strand
ccugcaagcuauucaucaa

SEQ ID NO: 1459198 - RNA, 19 nt, Homo sapiens
  misc_RNA (1)...(19): siRNA sense strand
cacaauuucaugauggaua

SEQ ID NO: 1459199 - RNA, 19 nt, Homo sapiens
  misc_RNA (1)...(19): siRNA sense strand
gcagcagagagauuucauu

SEQ ID NO: 1459200 - RNA, 19 nt, Homo sapiens
  misc_RNA (1)...(19): siRNA sense strand
ccaacuucaucagagagua

SEQ ID NO: 1459201 - RNA, 19 nt, Homo sapiens
  misc_RNA (1)...(19): siRNA sense strand
gacaagcacgucacuuaca

SEQ ID NO: 1459202 - RNA, 19 nt, Homo sapiens
  misc_RNA (1)...(19): siRNA sense strand
gccaauguacucagggaaa

SEQ ID NO: 1459203 - RNA, 19 nt, Homo sapiens
  misc_RNA (1)...(19): siRNA sense strand
cagggaaacauggcuaauu

SEQ ID NO: 1459204 - RNA, 19 nt, Homo sapiens
  misc_RNA (1)...(19): siRNA sense strand
caaagacccagaacaucau

SEQ ID NO: 1459205 - RNA, 19 nt, Homo sapiens
  misc_RNA (1)...(19): siRNA sense strand
uggauacucagcugacuaa

SEQ ID NO: 1459206 - RNA, 19 nt, Homo sapiens
  misc_RNA (1)...(19): siRNA sense strand
ggcagcagcagagagauuu

SEQ ID NO: 1459207 - RNA, 19 nt, Homo sapiens
  misc_RNA (1)...(19): siRNA sense strand
cugcuuacuuacuggaauu

SEQ ID NO: 1459208 - RNA, 19 nt, Homo sapiens
  misc_RNA (1)...(19): siRNA sense strand
acaauuucaugauggauac

SEQ ID NO: 1459209 - RNA, 19 nt, Homo sapiens
  misc_RNA (1)...(19): siRNA sense strand
uagcuguaguggcaaggaa

SEQ ID NO: 1459210 - RNA, 19 nt, Homo sapiens
  misc_RNA (1)...(19): siRNA sense strand
acaugguaccuaacacaua

SEQ ID NO: 1459211 - RNA, 19 nt, Homo sapiens
  misc_RNA (1)...(19): siRNA sense strand
ucaggcagcagcagagaga

SEQ ID NO: 1459212 - RNA, 19 nt, Homo sapiens
  misc_RNA (1)...(19): siRNA sense strand
uggcaaagacccagaacau

SEQ ID NO: 1459213 - RNA, 19 nt, Homo sapiens
  misc_RNA (1)...(19): siRNA sense strand
auggugacaugguaccuaa

SEQ ID NO: 1459214 - RNA, 19 nt, Homo sapiens
  misc_RNA (1)...(19): siRNA sense strand
gaaaaggagucugcuuacu

SEQ ID NO: 1459215 - RNA, 19 nt, Homo sapiens
  misc_RNA (1)...(19): siRNA sense strand
caacuucaucagagaguag

SEQ ID NO: 1459216 - RNA, 19 nt, Homo sapiens
  misc_RNA (1)...(19): siRNA sense strand
cgacaagcacgucacuuac

SEQ ID NO: 1459217 - RNA, 19 nt, Homo sapiens
  misc_RNA (1)...(19): siRNA sense strand
aaacacgugcacaauuuca

SEQ ID NO: 1459218 - RNA, 19 nt, Homo sapiens
  misc_RNA (1)...(19): siRNA sense strand
ugguuauggugacauggua

SEQ ID NO: 1459219 - RNA, 19 nt, Homo sapiens
  misc_RNA (1)...(19): siRNA sense strand
ggugacaugguaccuaaca

SEQ ID NO: 1459220 - RNA, 19 nt, Homo sapiens
  misc_RNA (1)...(19): siRNA sense strand
ugacaugguaccuaacaca

SEQ ID NO: 1459221 - RNA, 19 nt, Homo sapiens
  misc_RNA (1)...(19): siRNA sense strand
cuuacuuacuggaauuaug

SEQ ID NO: 1459222 - RNA, 19 nt, Homo sapiens
  misc_RNA (1)...(19): siRNA sense strand
ccaauguacucagggaaac

SEQ ID NO: 1459223 - RNA, 19 nt, Homo sapiens
  misc_RNA (1)...(19): siRNA sense strand
auacucagcugacuaaaag

SEQ ID NO: 1459224 - RNA, 19 nt, Homo sapiens
  misc_RNA (1)...(19): siRNA sense strand
ggcaaggaagcuagaacuu

SEQ ID NO: 1459225 - RNA, 19 nt, Homo sapiens
  misc_RNA (1)...(19): siRNA sense strand
uaaacgaaaggagugaaga

SEQ ID NO: 1459226 - RNA, 19 nt, Homo sapiens
  misc_RNA (1)...(19): siRNA sense strand
gcaaaaguaagaaaacauc

SEQ ID NO: 1459227 - RNA, 19 nt, Homo sapiens
  misc_RNA (1)...(19): siRNA sense strand
cgugcacaauuucaugaug

SEQ ID NO: 1459228 - RNA, 19 nt, Homo sapiens
  misc_RNA (1)...(19): siRNA sense strand
uaacuuuucucuccauugg

SEQ ID NO: 1459229 - RNA, 19 nt, Homo sapiens
  misc_RNA (1)...(19): siRNA sense strand
uucgagaagaggauuguua

SEQ ID NO: 1459230 - RNA, 19 nt, Homo sapiens
  misc_RNA (1)...(19): siRNA sense strand
gaggaaacugaaugaccaa

SEQ ID NO: 1459231 - RNA, 19 nt, Homo sapiens
  misc_RNA (1)...(19): siRNA sense strand
uggaaaaggagucugcuua

SEQ ID NO: 1459232 - RNA, 19 nt, Homo sapiens
  misc_RNA (1)...(19): siRNA sense strand
gauggagagcuacgacaag

SEQ ID NO: 1459233 - RNA, 19 nt, Homo sapiens
  misc_RNA (1)...(19): siRNA sense strand
gauuucugacuuaaacgaa

SEQ ID NO: 1459234 - RNA, 19 nt, Homo sapiens
  misc_RNA (1)...(19): siRNA sense strand
cgaaaauuccugcaagcua

SEQ ID NO: 1459235 - RNA, 19 nt, Homo sapiens
  misc_RNA (1)...(19): siRNA sense strand
guaagaaaacaucaacgaa

SEQ ID NO: 1459236 - RNA, 19 nt, Homo sapiens
  misc_RNA (1)...(19): siRNA sense strand
gauacucagcugacuaaaa

SEQ ID NO: 1459237 - RNA, 19 nt, Homo sapiens
  misc_RNA (1)...(19): siRNA sense strand
uugcacagcccugguggua

SEQ ID NO: 1459238 - RNA, 19 nt, Homo sapiens
  misc_RNA (1)...(19): siRNA sense strand
aaaggagucugcuuacuua

SEQ ID NO: 1459239 - RNA, 19 nt, Homo sapiens
  misc_RNA (1)...(19): siRNA sense strand
gcaagcuauucaucaauua

SEQ ID NO: 1459240 - RNA, 19 nt, Homo sapiens
  misc_RNA (1)...(19): siRNA sense strand
gcagagagauuucauugag

SEQ ID NO: 1459241 - RNA, 19 nt, Homo sapiens
  misc_RNA (1)...(19): siRNA sense strand
gcaaggaagcuagaacuua

SEQ ID NO: 1459242 - RNA, 19 nt, Homo sapiens
  misc_RNA (1)...(19): siRNA sense strand
gcaaagacccagaacauca

SEQ ID NO: 1459243 - RNA, 19 nt, Homo sapiens
  misc_RNA (1)...(19): siRNA sense strand
aaaugcagcugccaaugua

SEQ ID NO: 1459244 - RNA, 19 nt, Homo sapiens
  misc_RNA (1)...(19): siRNA sense strand
gaaacugaaugaccaagca

SEQ ID NO: 1459245 - RNA, 19 nt, Homo sapiens
  misc_RNA (1)...(19): siRNA sense strand
cuagagacuuugauuggua

SEQ ID NO: 1459246 - RNA, 19 nt, Homo sapiens
  misc_RNA (1)...(19): siRNA sense strand
caaggaagcuagaacuuac

SEQ ID NO: 1459247 - RNA, 19 nt, Homo sapiens
  misc_RNA (1)...(19): siRNA sense strand
gaacuuaccaaagcagaaa

SEQ ID NO: 1459248 - RNA, 19 nt, Homo sapiens
  misc_RNA (1)...(19): siRNA sense strand
agggaaacauggcuaauuu

SEQ ID NO: 1459249 - RNA, 19 nt, Homo sapiens
  misc_RNA (1)...(19): siRNA sense strand
gaagcuagaacuuaccaaa

SEQ ID NO: 1459250 - RNA, 19 nt, Homo sapiens
  misc_RNA (1)...(19): siRNA sense strand
gaaaauuccugcaagcuau

SEQ ID NO: 1459251 - RNA, 19 nt, Homo sapiens
  misc_RNA (1)...(19): siRNA sense strand
gcacgucacuuacaaugcu

SEQ ID NO: 1459252 - RNA, 19 nt, Homo sapiens
  misc_RNA (1)...(19): siRNA sense strand
ggagucugcuuacuuacug

SEQ ID NO: 1459253 - RNA, 19 nt, Homo sapiens
  misc_RNA (1)...(19): siRNA sense strand
gggaaacauggcuaauuua

SEQ ID NO: 1459254 - RNA, 19 nt, Homo sapiens
  misc_RNA (1)...(19): siRNA sense strand
gagcagaggaaacugaaug

SEQ ID NO: 1459255 - RNA, 19 nt, Homo sapiens
  misc_RNA (1)...(19): siRNA sense strand
ccaccaacuucaucagaga

SEQ ID NO: 1459256 - RNA, 19 nt, Homo sapiens
  misc_RNA (1)...(19): siRNA sense strand
ggaaacauggcuaauuuac

SEQ ID NO: 1459257 - RNA, 19 nt, Homo sapiens
  misc_RNA (1)...(19): siRNA sense strand
gaaacauggcuaauuuaca

SEQ ID NO: 1459258 - RNA, 19 nt, Homo sapiens
  misc_RNA (1)...(19): siRNA sense strand
cagcagagagauuucauug

SEQ ID NO: 1459259 - RNA, 19 nt, Homo sapiens
  misc_RNA (1)...(19): siRNA sense strand
acaagcacgucacuuacaa

SEQ ID NO: 1459260 - RNA, 19 nt, Homo sapiens
  misc_RNA (1)...(19): siRNA sense strand
gauagaucaugcaaaagua

SEQ ID NO: 1459261 - RNA, 19 nt, Homo sapiens
  misc_RNA (1)...(19): siRNA sense strand
ugcaagcuauucaucaauu

SEQ ID NO: 1459262 - RNA, 19 nt, Homo sapiens
  misc_RNA (1)...(19): siRNA sense strand
caugguaccuaacacauac

SEQ ID NO: 1459263 - RNA, 19 nt, Homo sapiens
  misc_RNA (1)...(19): siRNA sense strand
acgacaagcacgucacuua

SEQ ID NO: 1459264 - RNA, 19 nt, Homo sapiens
  misc_RNA (1)...(19): siRNA sense strand
ggaauuaugggugcugguu

SEQ ID NO: 1459265 - RNA, 19 nt, Homo sapiens
  misc_RNA (1)...(19): siRNA sense strand
ccacagcaccaccaacuuc

SEQ ID NO: 1459266 - RNA, 19 nt, Homo sapiens
  misc_RNA (1)...(19): siRNA sense strand
gaggauuguuacccuggaa

SEQ ID NO: 1459267 - RNA, 19 nt, Homo sapiens
  misc_RNA (1)...(19): siRNA sense strand
gcuagaacuuaccaaagca

SEQ ID NO: 1459268 - RNA, 19 nt, Homo sapiens
  misc_RNA (1)...(19): siRNA sense strand
aaacuagagacuuugauug

SEQ ID NO: 1459269 - RNA, 19 nt, Homo sapiens
  misc_RNA (1)...(19): siRNA sense strand
ccugcaagcuauucaucaa

SEQ ID NO: 1459270 - RNA, 19 nt, Homo sapiens
  misc_RNA (1)...(19): siRNA sense strand
cacaauuucaugauggaua

SEQ ID NO: 1459271 - RNA, 19 nt, Homo sapiens
  misc_RNA (1)...(19): siRNA sense strand
gcagcagagagauuucauu

SEQ ID NO: 1459272 - RNA, 19 nt, Homo sapiens
  misc_RNA (1)...(19): siRNA sense strand
ccaacuucaucagagagua

SEQ ID NO: 1459273 - RNA, 19 nt, Homo sapiens
  misc_RNA (1)...(19): siRNA sense strand
gacaagcacgucacuuaca

SEQ ID NO: 1459274 - RNA, 19 nt, Homo sapiens
  misc_RNA (1)...(19): siRNA sense strand
gccaauguacucagggaaa

SEQ ID NO: 1459275 - RNA, 19 nt, Homo sapiens
  misc_RNA (1)...(19): siRNA sense strand
cagggaaacauggcuaauu

SEQ ID NO: 1459276 - RNA, 19 nt, Homo sapiens
  misc_RNA (1)...(19): siRNA sense strand
caaagacccagaacaucau

SEQ ID NO: 1459277 - RNA, 19 nt, Homo sapiens
  misc_RNA (1)...(19): siRNA sense strand
uggauacucagcugacuaa

SEQ ID NO: 1459278 - RNA, 19 nt, Homo sapiens
  misc_RNA (1)...(19): siRNA sense strand
ggcagcagcagagagauuu

SEQ ID NO: 1459279 - RNA, 19 nt, Homo sapiens
  misc_RNA (1)...(19): siRNA sense strand
acaauuucaugauggauac

SEQ ID NO: 1459280 - RNA, 19 nt, Homo sapiens
  misc_RNA (1)...(19): siRNA sense strand
cugcuuacuuacuggaauu

SEQ ID NO: 1459281 - RNA, 19 nt, Homo sapiens
  misc_RNA (1)...(19): siRNA sense strand
uagcuguaguggcaaggaa

SEQ ID NO: 1459282 - RNA, 19 nt, Homo sapiens
  misc_RNA (1)...(19): siRNA sense strand
ucaggcagcagcagagaga

SEQ ID NO: 1459283 - RNA, 19 nt, Homo sapiens
  misc_RNA (1)...(19): siRNA sense strand
uggcaaagacccagaacau

SEQ ID NO: 1459284 - RNA, 19 nt, Homo sapiens
  misc_RNA (1)...(19): siRNA sense strand
acaugguaccuaacacaua

SEQ ID NO: 1459285 - RNA, 19 nt, Homo sapiens
  misc_RNA (1)...(19): siRNA sense strand
auggugacaugguaccuaa

SEQ ID NO: 1459286 - RNA, 19 nt, Homo sapiens
  misc_RNA (1)...(19): siRNA sense strand
gaaaaggagucugcuuacu

SEQ ID NO: 1459287 - RNA, 19 nt, Homo sapiens
  misc_RNA (1)...(19): siRNA sense strand
caacuucaucagagaguag

SEQ ID NO: 1459288 - RNA, 19 nt, Homo sapiens
  misc_RNA (1)...(19): siRNA sense strand
cgacaagcacgucacuuac

SEQ ID NO: 1459289 - RNA, 19 nt, Homo sapiens
  misc_RNA (1)...(19): siRNA sense strand
aaacacgugcacaauuuca

SEQ ID NO: 1459290 - RNA, 19 nt, Homo sapiens
  misc_RNA (1)...(19): siRNA sense strand
ggugacaugguaccuaaca

SEQ ID NO: 1459291 - RNA, 19 nt, Homo sapiens
  misc_RNA (1)...(19): siRNA sense strand
ugacaugguaccuaacaca

SEQ ID NO: 1459292 - RNA, 19 nt, Homo sapiens
  misc_RNA (1)...(19): siRNA sense strand
cuuacuuacuggaauuaug

SEQ ID NO: 1459293 - RNA, 19 nt, Homo sapiens
  misc_RNA (1)...(19): siRNA sense strand
ugguuauggugacauggua

SEQ ID NO: 1459294 - RNA, 19 nt, Homo sapiens
  misc_RNA (1)...(19): siRNA sense strand
ccaauguacucagggaaac

SEQ ID NO: 1459295 - RNA, 19 nt, Homo sapiens
  misc_RNA (1)...(19): siRNA sense strand
auacucagcugacuaaaag

SEQ ID NO: 1459296 - RNA, 19 nt, Homo sapiens
  misc_RNA (1)...(19): siRNA sense strand
ggcaaggaagcuagaacuu

SEQ ID NO: 1459297 - RNA, 19 nt, Homo sapiens
  misc_RNA (1)...(19): siRNA sense strand
uaaacgaaaggagugaaga

SEQ ID NO: 1459298 - RNA, 19 nt, Homo sapiens
  misc_RNA (1)...(19): siRNA sense strand
gcaaaaguaagaaaacauc

SEQ ID NO: 1459299 - RNA, 19 nt, Homo sapiens
  misc_RNA (1)...(19): siRNA sense strand
cgugcacaauuucaugaug

SEQ ID NO: 1459300 - RNA, 19 nt, Homo sapiens
  misc_RNA (1)...(19): siRNA sense strand
gaggaaacugaaugaccaa

SEQ ID NO: 1459301 - RNA, 19 nt, Homo sapiens
  misc_RNA (1)...(19): siRNA sense strand
uaacuuuucucuccauugg

SEQ ID NO: 1459302 - RNA, 19 nt, Homo sapiens
  misc_RNA (1)...(19): siRNA sense strand
uucgagaagaggauuguua

SEQ ID NO: 1459303 - RNA, 19 nt, Homo sapiens
  misc_RNA (1)...(19): siRNA sense strand
gauacucagcugacuaaaa

SEQ ID NO: 1459304 - RNA, 19 nt, Homo sapiens
  misc_RNA (1)...(19): siRNA sense strand
uggaaaaggagucugcuua

SEQ ID NO: 1459305 - RNA, 19 nt, Homo sapiens
  misc_RNA (1)...(19): siRNA sense strand
gauggagagcuacgacaag

SEQ ID NO: 1459306 - RNA, 19 nt, Homo sapiens
  misc_RNA (1)...(19): siRNA sense strand
gauuucugacuuaaacgaa

SEQ ID NO: 1459307 - RNA, 19 nt, Homo sapiens
  misc_RNA (1)...(19): siRNA sense strand
cgaaaauuccugcaagcua

SEQ ID NO: 1459308 - RNA, 19 nt, Homo sapiens
  misc_RNA (1)...(19): siRNA sense strand
guaagaaaacaucaacgaa

SEQ ID NO: 1459309 - RNA, 19 nt, Homo sapiens
  misc_RNA (1)...(19): siRNA sense strand
uugcacagcccugguggua

SEQ ID NO: 1459310 - RNA, 19 nt, Homo sapiens
  misc_RNA (1)...(19): siRNA sense strand
gcaagacaguucaauauga

SEQ ID NO: 1459311 - RNA, 19 nt, Homo sapiens
  misc_RNA (1)...(19): siRNA sense strand
gaacaugggugacauuugg

SEQ ID NO: 1459312 - RNA, 19 nt, Homo sapiens
  misc_RNA (1)...(19): siRNA sense strand
gaaggacuauagaucauaa

SEQ ID NO: 1459313 - RNA, 19 nt, Homo sapiens
  misc_RNA (1)...(19): siRNA sense strand
aaagagggcugucaagaaa

SEQ ID NO: 1459314 - RNA, 19 nt, Homo sapiens
  misc_RNA (1)...(19): siRNA sense strand
gaaagagggcugucaagaa

SEQ ID NO: 1459315 - RNA, 19 nt, Homo sapiens
  misc_RNA (1)...(19): siRNA sense strand
caucacaugugguaaauga

SEQ ID NO: 1459316 - RNA, 19 nt, Homo sapiens
  misc_RNA (1)...(19): siRNA sense strand
gguguuaaccucuuugaua

SEQ ID NO: 1459317 - RNA, 19 nt, Homo sapiens
  misc_RNA (1)...(19): siRNA sense strand
uggaaaggcugaagugauu

SEQ ID NO: 1459318 - RNA, 19 nt, Homo sapiens
  misc_RNA (1)...(19): siRNA sense strand
gaggucaaauuucagauga

SEQ ID NO: 1459319 - RNA, 19 nt, Homo sapiens
  misc_RNA (1)...(19): siRNA sense strand
gaaauuguccgagccauga

SEQ ID NO: 1459320 - RNA, 19 nt, Homo sapiens
  misc_RNA (1)...(19): siRNA sense strand
gaaaugaaggugugaguuc

SEQ ID NO: 1459321 - RNA, 19 nt, Homo sapiens
  misc_RNA (1)...(19): siRNA sense strand
gcaaaucgaccggacagua

SEQ ID NO: 1459322 - RNA, 19 nt, Homo sapiens
  misc_RNA (1)...(19): siRNA sense strand
gcaacaagcccuacagcaa

SEQ ID NO: 1459323 - RNA, 19 nt, Homo sapiens
  misc_RNA (1)...(19): siRNA sense strand
caagacaguucaauaugau

SEQ ID NO: 1459324 - RNA, 19 nt, Homo sapiens
  misc_RNA (1)...(19): siRNA sense strand
caaaucgaccggacaguaa

SEQ ID NO: 1459325 - RNA, 19 nt, Homo sapiens
  misc_RNA (1)...(19): siRNA sense strand
caagaaggacuauagauca

SEQ ID NO: 1459326 - RNA, 19 nt, Homo sapiens
  misc_RNA (1)...(19): siRNA sense strand
gcaagaaggacuauagauc

SEQ ID NO: 1459327 - RNA, 19 nt, Homo sapiens
  misc_RNA (1)...(19): siRNA sense strand
gaccaucgccuaugaaagu

SEQ ID NO: 1459328 - RNA, 19 nt, Homo sapiens
  misc_RNA (1)...(19): siRNA sense strand
cauggaagccuauucugua

SEQ ID NO: 1459329 - RNA, 19 nt, Homo sapiens
  misc_RNA (1)...(19): siRNA sense strand
gcauauuauugaaggauug

SEQ ID NO: 1459330 - RNA, 19 nt, Homo sapiens
  misc_RNA (1)...(19): siRNA sense strand
guagcaagacaguucaaua

SEQ ID NO: 1459331 - RNA, 19 nt, Homo sapiens
  misc_RNA (1)...(19): siRNA sense strand
guauguggauguggucuuu

SEQ ID NO: 1459332 - RNA, 19 nt, Homo sapiens
  misc_RNA (1)...(19): siRNA sense strand
ggaagccuauucuguagca

SEQ ID NO: 1459333 - RNA, 19 nt, Homo sapiens
  misc_RNA (1)...(19): siRNA sense strand
gauguggucuuugcaaauc

SEQ ID NO: 1459334 - RNA, 19 nt, Homo sapiens
  misc_RNA (1)...(19): siRNA sense strand
gaaagaauuguaagugaag

SEQ ID NO: 1459335 - RNA, 19 nt, Homo sapiens
  misc_RNA (1)...(19): siRNA sense strand
caagcugaguaccaucuuu

SEQ ID NO: 1459336 - RNA, 19 nt, Homo sapiens
  misc_RNA (1)...(19): siRNA sense strand
ggagcaucaucaagaagaa

SEQ ID NO: 1459337 - RNA, 19 nt, Homo sapiens
  misc_RNA (1)...(19): siRNA sense strand
ugccagagcucuaccacaa

SEQ ID NO: 1459338 - RNA, 19 nt, Homo sapiens
  misc_RNA (1)...(19): siRNA sense strand
caguaacacucccauggaa

SEQ ID NO: 1459339 - RNA, 19 nt, Homo sapiens
  misc_RNA (1)...(19): siRNA sense strand
ccauucagguucucccaaa

SEQ ID NO: 1459340 - RNA, 19 nt, Homo sapiens
  misc_RNA (1)...(19): siRNA sense strand
uagcaagacaguucaauau

SEQ ID NO: 1459341 - RNA, 19 nt, Homo sapiens
  misc_RNA (1)...(19): siRNA sense strand
ugacacaugugauaaacca

SEQ ID NO: 1459342 - RNA, 19 nt, Homo sapiens
  misc_RNA (1)...(19): siRNA sense strand
uggaaaagcugaaacagaa

SEQ ID NO: 1459343 - RNA, 19 nt, Homo sapiens
  misc_RNA (1)...(19): siRNA sense strand
ggaaucaucucaggaaaau

SEQ ID NO: 1459344 - RNA, 19 nt, Homo sapiens
  misc_RNA (1)...(19): siRNA sense strand
ggagugcuauggagaucau

SEQ ID NO: 1459345 - RNA, 19 nt, Homo sapiens
  misc_RNA (1)...(19): siRNA sense strand
gauaacauacugcgcaaca

SEQ ID NO: 1459346 - RNA, 19 nt, Homo sapiens
  misc_RNA (1)...(19): siRNA sense strand
guaacacucccauggaaga

SEQ ID NO: 1459347 - RNA, 19 nt, Homo sapiens
  misc_RNA (1)...(19): siRNA sense strand
ggcugcagcucgaguaugu

SEQ ID NO: 1459348 - RNA, 19 nt, Homo sapiens
  misc_RNA (1)...(19): siRNA sense strand
gaucauccacuccugaaca

SEQ ID NO: 1459349 - RNA, 19 nt, Homo sapiens
  misc_RNA (1)...(19): siRNA sense strand
guguuaaccucuuugauac

SEQ ID NO: 1459350 - RNA, 19 nt, Homo sapiens
  misc_RNA (1)...(19): siRNA sense strand
ugaacaagcugaguaccau

SEQ ID NO: 1459351 - RNA, 19 nt, Homo sapiens
  misc_RNA (1)...(19): siRNA sense strand
gaucauggaagccuauucu

SEQ ID NO: 1459352 - RNA, 19 nt, Homo sapiens
  misc_RNA (1)...(19): siRNA sense strand
ggagaaaacagcaaaacaa

SEQ ID NO: 1459353 - RNA, 19 nt, Homo sapiens
  misc_RNA (1)...(19): siRNA sense strand
ggaggucaaauuucagaug

SEQ ID NO: 1459354 - RNA, 19 nt, Homo sapiens
  misc_RNA (1)...(19): siRNA sense strand
ugagauugauaacauacug

SEQ ID NO: 1459355 - RNA, 19 nt, Homo sapiens
  misc_RNA (1)...(19): siRNA sense strand
cagguucucccaaagauga

SEQ ID NO: 1459356 - RNA, 19 nt, Homo sapiens
  misc_RNA (1)...(19): siRNA sense strand
cguggugccugagaaauga

SEQ ID NO: 1459357 - RNA, 19 nt, Homo sapiens
  misc_RNA (1)...(19): siRNA sense strand
gggagcaucaucaagaaga

SEQ ID NO: 1459358 - RNA, 19 nt, Homo sapiens
  misc_RNA (1)...(19): siRNA sense strand
ucacaugugguaaaugaga

SEQ ID NO: 1459359 - RNA, 19 nt, Homo sapiens
  misc_RNA (1)...(19): siRNA sense strand
ggaacaugggugacauuug

SEQ ID NO: 1459360 - RNA, 19 nt, Homo sapiens
  misc_RNA (1)...(19): siRNA sense strand
ucaaauuucagaugagguu

SEQ ID NO: 1459361 - RNA, 19 nt, Homo sapiens
  misc_RNA (1)...(19): siRNA sense strand
guuaaccucuuugauacug

SEQ ID NO: 1459362 - RNA, 19 nt, Homo sapiens
  misc_RNA (1)...(19): siRNA sense strand
aaagugguguuaaccucuu

SEQ ID NO: 1459363 - RNA, 19 nt, Homo sapiens
  misc_RNA (1)...(19): siRNA sense strand
ccagagcucuaccacaaaa

SEQ ID NO: 1459364 - RNA, 19 nt, Homo sapiens
  misc_RNA (1)...(19): siRNA sense strand
guggaaucaucucaggaaa

SEQ ID NO: 1459365 - RNA, 19 nt, Homo sapiens
  misc_RNA (1)...(19): siRNA sense strand
ggucauaacaaccaaacuc

SEQ ID NO: 1459366 - RNA, 19 nt, Homo sapiens
  misc_RNA (1)...(19): siRNA sense strand
aagaaggacuauagaucau

SEQ ID NO: 1459367 - RNA, 19 nt, Homo sapiens
  misc_RNA (1)...(19): siRNA sense strand
aacaagcccuacagcaaga

SEQ ID NO: 1459368 - RNA, 19 nt, Homo sapiens
  misc_RNA (1)...(19): siRNA sense strand
ggauguggucuuugcaaau

SEQ ID NO: 1459369 - RNA, 19 nt, Homo sapiens
  misc_RNA (1)...(19): siRNA sense strand
cauaacaaccaaacucuac

SEQ ID NO: 1459370 - RNA, 19 nt, Homo sapiens
  misc_RNA (1)...(19): siRNA sense strand
uaacauacugcgcaacaag

SEQ ID NO: 1459371 - RNA, 19 nt, Homo sapiens
  misc_RNA (1)...(19): siRNA sense strand
cugaacaacucauugaaaa

SEQ ID NO: 1459372 - RNA, 19 nt, Homo sapiens
  misc_RNA (1)...(19): siRNA sense strand
ccugaacaacucauugaaa

SEQ ID NO: 1459373 - RNA, 19 nt, Homo sapiens
  misc_RNA (1)...(19): siRNA sense strand
gaaacggggugccugaaag

SEQ ID NO: 1459374 - RNA, 19 nt, Homo sapiens
  misc_RNA (1)...(19): siRNA sense strand
ggagaucauggaagccuau

SEQ ID NO: 1459375 - RNA, 19 nt, Homo sapiens
  misc_RNA (1)...(19): siRNA sense strand
acacucccauggaagaaau

SEQ ID NO: 1459376 - RNA, 19 nt, Homo sapiens
  misc_RNA (1)...(19): siRNA sense strand
uggauguggucuuugcaaa

SEQ ID NO: 1459377 - RNA, 19 nt, Homo sapiens
  misc_RNA (1)...(19): siRNA sense strand
gaaaggcugaagugauucu

SEQ ID NO: 1459378 - RNA, 19 nt, Homo sapiens
  misc_RNA (1)...(19): siRNA sense strand
gagaaaugaaggugugagu

SEQ ID NO: 1459379 - RNA, 19 nt, Homo sapiens
  misc_RNA (1)...(19): siRNA sense strand
cgucugggaugcacacuac

SEQ ID NO: 1459380 - RNA, 19 nt, Homo sapiens
  misc_RNA (1)...(19): siRNA sense strand
gagcaucaucaagaagaaa

SEQ ID NO: 1459381 - RNA, 19 nt, Homo sapiens
  misc_RNA (1)...(19): siRNA sense strand
cagcaagaaggacuauaga

SEQ ID NO: 1459382 - RNA, 19 nt, Homo sapiens
  misc_RNA (1)...(19): siRNA sense strand
accaaggcauggcgaugua

SEQ ID NO: 1459383 - RNA, 19 nt, Homo sapiens
  misc_RNA (1)...(19): siRNA sense strand
agaaagagggcugucaaga

SEQ ID NO: 1459384 - RNA, 19 nt, Homo sapiens
  misc_RNA (1)...(19): siRNA sense strand
gcucgaguauguggaugug

SEQ ID NO: 1459385 - RNA, 19 nt, Homo sapiens
  misc_RNA (1)...(19): siRNA sense strand
gcuugggucuuggaacaug

SEQ ID NO: 1459386 - RNA, 19 nt, Homo sapiens
  misc_RNA (1)...(19): siRNA sense strand
cgagauggagugcuaugga

SEQ ID NO: 1459387 - RNA, 19 nt, Homo sapiens
  misc_RNA (1)...(19): siRNA sense strand
agaaggacuauagaucaua

SEQ ID NO: 1459388 - RNA, 19 nt, Homo sapiens
  misc_RNA (1)...(19): siRNA sense strand
ccaccggucugugaacaag

SEQ ID NO: 1459389 - RNA, 19 nt, Homo sapiens
  misc_RNA (1)...(19): siRNA sense strand
ucauaacaaccaaacucua

SEQ ID NO: 1459390 - RNA, 19 nt, Homo sapiens
  misc_RNA (1)...(19): siRNA sense strand
gaaaacagcaaaacaagcu

SEQ ID NO: 1459391 - RNA, 19 nt, Homo sapiens
  misc_RNA (1)...(19): siRNA sense strand
gaagggagaaaacagcaaa

SEQ ID NO: 1459392 - RNA, 19 nt, Homo sapiens
  misc_RNA (1)...(19): siRNA sense strand
uaacaaccaaacucuacug

SEQ ID NO: 1459393 - RNA, 19 nt, Homo sapiens
  misc_RNA (1)...(19): siRNA sense strand
cuaugaaagugguguuaac

SEQ ID NO: 1459394 - RNA, 19 nt, Homo sapiens
  misc_RNA (1)...(19): siRNA sense strand
cugaacggcugaugaccau

SEQ ID NO: 1459395 - RNA, 19 nt, Homo sapiens
  misc_RNA (1)...(19): siRNA sense strand
aaaugaaggugugaguucu

SEQ ID NO: 1459396 - RNA, 19 nt, Homo sapiens
  misc_RNA (1)...(19): siRNA sense strand
gggcugucaagaaagcaua

SEQ ID NO: 1459397 - RNA, 19 nt, Homo sapiens
  misc_RNA (1)...(19): siRNA sense strand
gugguaaaugagauugaua

SEQ ID NO: 1459398 - RNA, 19 nt, Homo sapiens
  misc_RNA (1)...(19): siRNA sense strand
gcguggugccugagaaaug

SEQ ID NO: 1459399 - RNA, 19 nt, Homo sapiens
  misc_RNA (1)...(19): siRNA sense strand
ugauacugccgaagucuau

SEQ ID NO: 1459400 - RNA, 19 nt, Homo sapiens
  misc_RNA (1)...(19): siRNA sense strand
gauggagugcuauggagau

SEQ ID NO: 1459401 - RNA, 19 nt, Homo sapiens
  misc_RNA (1)...(19): siRNA sense strand
ccuauucuguagcaagaca

SEQ ID NO: 1459402 - RNA, 19 nt, Homo sapiens
  misc_RNA (1)...(19): siRNA sense strand
agucuaugcugcuggaaag

SEQ ID NO: 1459403 - RNA, 19 nt, Homo sapiens
  misc_RNA (1)...(19): siRNA sense strand
gaucccaccggucugugaa

SEQ ID NO: 1459404 - RNA, 19 nt, Homo sapiens
  misc_RNA (1)...(19): siRNA sense strand
gcagcucgaguauguggau

SEQ ID NO: 1459405 - RNA, 19 nt, Homo sapiens
  misc_RNA (1)...(19): siRNA sense strand
acagcaagaaggacuauag

SEQ ID NO: 1459406 - RNA, 19 nt, Homo sapiens
  misc_RNA (1)...(19): siRNA sense strand
ggaaacggggugccugaaa

SEQ ID NO: 1459407 - RNA, 19 nt, Homo sapiens
  misc_RNA (1)...(19): siRNA sense strand
ucauggaagccuauucugu

SEQ ID NO: 1459408 - RNA, 19 nt, Homo sapiens
  misc_RNA (1)...(19): siRNA sense strand
ugaaaaccuuggugccauu

SEQ ID NO: 1459409 - RNA, 19 nt, Homo sapiens
  misc_RNA (1)...(19): siRNA sense strand
uugcuugggucuuggaaca

SEQ ID NO: 1459410 - RNA, 19 nt, Homo sapiens
  misc_RNA (1)...(19): siRNA sense strand
gcaagacaguucaauauga

SEQ ID NO: 1459411 - RNA, 19 nt, Homo sapiens
  misc_RNA (1)...(19): siRNA sense strand
gaacaugggugacauuugg

SEQ ID NO: 1459412 - RNA, 19 nt, Homo sapiens
  misc_RNA (1)...(19): siRNA sense strand
gaaggacuauagaucauaa

SEQ ID NO: 1459413 - RNA, 19 nt, Homo sapiens
  misc_RNA (1)...(19): siRNA sense strand
aaagagggcugucaagaaa

SEQ ID NO: 1459414 - RNA, 19 nt, Homo sapiens
  misc_RNA (1)...(19): siRNA sense strand
gaaagagggcugucaagaa

SEQ ID NO: 1459415 - RNA, 19 nt, Homo sapiens
  misc_RNA (1)...(19): siRNA sense strand
caucacaugugguaaauga

SEQ ID NO: 1459416 - RNA, 19 nt, Homo sapiens
  misc_RNA (1)...(19): siRNA sense strand
gguguuaaccucuuugaua

SEQ ID NO: 1459417 - RNA, 19 nt, Homo sapiens
  misc_RNA (1)...(19): siRNA sense strand
uggaaaggcugaagugauu

SEQ ID NO: 1459418 - RNA, 19 nt, Homo sapiens
  misc_RNA (1)...(19): siRNA sense strand
gaggucaaauuucagauga

SEQ ID NO: 1459419 - RNA, 19 nt, Homo sapiens
  misc_RNA (1)...(19): siRNA sense strand
gaaauuguccgagccauga

SEQ ID NO: 1459420 - RNA, 19 nt, Homo sapiens
  misc_RNA (1)...(19): siRNA sense strand
gaaaugaaggugugaguuc

SEQ ID NO: 1459421 - RNA, 19 nt, Homo sapiens
  misc_RNA (1)...(19): siRNA sense strand
gcaaaucgaccggacagua

SEQ ID NO: 1459422 - RNA, 19 nt, Homo sapiens
  misc_RNA (1)...(19): siRNA sense strand
gcaacaagcccuacagcaa

SEQ ID NO: 1459423 - RNA, 19 nt, Homo sapiens
  misc_RNA (1)...(19): siRNA sense strand
caagacaguucaauaugau

SEQ ID NO: 1459424 - RNA, 19 nt, Homo sapiens
  misc_RNA (1)...(19): siRNA sense strand
caaaucgaccggacaguaa

SEQ ID NO: 1459425 - RNA, 19 nt, Homo sapiens
  misc_RNA (1)...(19): siRNA sense strand
caagaaggacuauagauca

SEQ ID NO: 1459426 - RNA, 19 nt, Homo sapiens
  misc_RNA (1)...(19): siRNA sense strand
gcaagaaggacuauagauc

SEQ ID NO: 1459427 - RNA, 19 nt, Homo sapiens
  misc_RNA (1)...(19): siRNA sense strand
gaccaucgccuaugaaagu

SEQ ID NO: 1459428 - RNA, 19 nt, Homo sapiens
  misc_RNA (1)...(19): siRNA sense strand
cauggaagccuauucugua

SEQ ID NO: 1459429 - RNA, 19 nt, Homo sapiens
  misc_RNA (1)...(19): siRNA sense strand
gcauauuauugaaggauug

SEQ ID NO: 1459430 - RNA, 19 nt, Homo sapiens
  misc_RNA (1)...(19): siRNA sense strand
guagcaagacaguucaaua

SEQ ID NO: 1459431 - RNA, 19 nt, Homo sapiens
  misc_RNA (1)...(19): siRNA sense strand
guauguggauguggucuuu

SEQ ID NO: 1459432 - RNA, 19 nt, Homo sapiens
  misc_RNA (1)...(19): siRNA sense strand
ggaagccuauucuguagca

SEQ ID NO: 1459433 - RNA, 19 nt, Homo sapiens
  misc_RNA (1)...(19): siRNA sense strand
gauguggucuuugcaaauc

SEQ ID NO: 1459434 - RNA, 19 nt, Homo sapiens
  misc_RNA (1)...(19): siRNA sense strand
gaaagaauuguaagugaag

SEQ ID NO: 1459435 - RNA, 19 nt, Homo sapiens
  misc_RNA (1)...(19): siRNA sense strand
caagcugaguaccaucuuu

SEQ ID NO: 1459436 - RNA, 19 nt, Homo sapiens
  misc_RNA (1)...(19): siRNA sense strand
ggagcaucaucaagaagaa

SEQ ID NO: 1459437 - RNA, 19 nt, Homo sapiens
  misc_RNA (1)...(19): siRNA sense strand
ugccagagcucuaccacaa

SEQ ID NO: 1459438 - RNA, 19 nt, Homo sapiens
  misc_RNA (1)...(19): siRNA sense strand
caguaacacucccauggaa

SEQ ID NO: 1459439 - RNA, 19 nt, Homo sapiens
  misc_RNA (1)...(19): siRNA sense strand
ccauucagguucucccaaa

SEQ ID NO: 1459440 - RNA, 19 nt, Homo sapiens
  misc_RNA (1)...(19): siRNA sense strand
uagcaagacaguucaauau

SEQ ID NO: 1459441 - RNA, 19 nt, Homo sapiens
  misc_RNA (1)...(19): siRNA sense strand
ugacacaugugauaaacca

SEQ ID NO: 1459442 - RNA, 19 nt, Homo sapiens
  misc_RNA (1)...(19): siRNA sense strand
uggaaaagcugaaacagaa

SEQ ID NO: 1459443 - RNA, 19 nt, Homo sapiens
  misc_RNA (1)...(19): siRNA sense strand
ggaaucaucucaggaaaau

SEQ ID NO: 1459444 - RNA, 19 nt, Homo sapiens
  misc_RNA (1)...(19): siRNA sense strand
ggagugcuauggagaucau

SEQ ID NO: 1459445 - RNA, 19 nt, Homo sapiens
  misc_RNA (1)...(19): siRNA sense strand
gauaacauacugcgcaaca

SEQ ID NO: 1459446 - RNA, 19 nt, Homo sapiens
  misc_RNA (1)...(19): siRNA sense strand
guaacacucccauggaaga

SEQ ID NO: 1459447 - RNA, 19 nt, Homo sapiens
  misc_RNA (1)...(19): siRNA sense strand
ggcugcagcucgaguaugu

SEQ ID NO: 1459448 - RNA, 19 nt, Homo sapiens
  misc_RNA (1)...(19): siRNA sense strand
gaucauccacuccugaaca

SEQ ID NO: 1459449 - RNA, 19 nt, Homo sapiens
  misc_RNA (1)...(19): siRNA sense strand
guguuaaccucuuugauac

SEQ ID NO: 1459450 - RNA, 19 nt, Homo sapiens
  misc_RNA (1)...(19): siRNA sense strand
ugaacaagcugaguaccau

SEQ ID NO: 1459451 - RNA, 19 nt, Homo sapiens
  misc_RNA (1)...(19): siRNA sense strand
gaucauggaagccuauucu

SEQ ID NO: 1459452 - RNA, 19 nt, Homo sapiens
  misc_RNA (1)...(19): siRNA sense strand
ggagaaaacagcaaaacaa

SEQ ID NO: 1459453 - RNA, 19 nt, Homo sapiens
  misc_RNA (1)...(19): siRNA sense strand
ggaggucaaauuucagaug

SEQ ID NO: 1459454 - RNA, 19 nt, Homo sapiens
  misc_RNA (1)...(19): siRNA sense strand
ugagauugauaacauacug

SEQ ID NO: 1459455 - RNA, 19 nt, Homo sapiens
  misc_RNA (1)...(19): siRNA sense strand
cagguucucccaaagauga

SEQ ID NO: 1459456 - RNA, 19 nt, Homo sapiens
  misc_RNA (1)...(19): siRNA sense strand
cguggugccugagaaauga

SEQ ID NO: 1459457 - RNA, 19 nt, Homo sapiens
  misc_RNA (1)...(19): siRNA sense strand
gggagcaucaucaagaaga

SEQ ID NO: 1459458 - RNA, 19 nt, Homo sapiens
  misc_RNA (1)...(19): siRNA sense strand
ucacaugugguaaaugaga

SEQ ID NO: 1459459 - RNA, 19 nt, Homo sapiens
  misc_RNA (1)...(19): siRNA sense strand
ggaacaugggugacauuug

SEQ ID NO: 1459460 - RNA, 19 nt, Homo sapiens
  misc_RNA (1)...(19): siRNA sense strand
ucaaauuucagaugagguu

SEQ ID NO: 1459461 - RNA, 19 nt, Homo sapiens
  misc_RNA (1)...(19): siRNA sense strand
guuaaccucuuugauacug

SEQ ID NO: 1459462 - RNA, 19 nt, Homo sapiens
  misc_RNA (1)...(19): siRNA sense strand
aaagugguguuaaccucuu

SEQ ID NO: 1459463 - RNA, 19 nt, Homo sapiens
  misc_RNA (1)...(19): siRNA sense strand
ccagagcucuaccacaaaa

SEQ ID NO: 1459464 - RNA, 19 nt, Homo sapiens
  misc_RNA (1)...(19): siRNA sense strand
guggaaucaucucaggaaa

SEQ ID NO: 1459465 - RNA, 19 nt, Homo sapiens
  misc_RNA (1)...(19): siRNA sense strand
ggucauaacaaccaaacuc

SEQ ID NO: 1459466 - RNA, 19 nt, Homo sapiens
  misc_RNA (1)...(19): siRNA sense strand
aagaaggacuauagaucau

SEQ ID NO: 1459467 - RNA, 19 nt, Homo sapiens
  misc_RNA (1)...(19): siRNA sense strand
aacaagcccuacagcaaga

SEQ ID NO: 1459468 - RNA, 19 nt, Homo sapiens
  misc_RNA (1)...(19): siRNA sense strand
ggauguggucuuugcaaau

SEQ ID NO: 1459469 - RNA, 19 nt, Homo sapiens
  misc_RNA (1)...(19): siRNA sense strand
cauaacaaccaaacucuac

SEQ ID NO: 1459470 - RNA, 19 nt, Homo sapiens
  misc_RNA (1)...(19): siRNA sense strand
uaacauacugcgcaacaag

SEQ ID NO: 1459471 - RNA, 19 nt, Homo sapiens
  misc_RNA (1)...(19): siRNA sense strand
cugaacaacucauugaaaa

SEQ ID NO: 1459472 - RNA, 19 nt, Homo sapiens
  misc_RNA (1)...(19): siRNA sense strand
ccugaacaacucauugaaa

SEQ ID NO: 1459473 - RNA, 19 nt, Homo sapiens
  misc_RNA (1)...(19): siRNA sense strand
gaaacggggugccugaaag

SEQ ID NO: 1459474 - RNA, 19 nt, Homo sapiens
  misc_RNA (1)...(19): siRNA sense strand
ggagaucauggaagccuau

SEQ ID NO: 1459475 - RNA, 19 nt, Homo sapiens
  misc_RNA (1)...(19): siRNA sense strand
acacucccauggaagaaau

SEQ ID NO: 1459476 - RNA, 19 nt, Homo sapiens
  misc_RNA (1)...(19): siRNA sense strand
uggauguggucuuugcaaa

SEQ ID NO: 1459477 - RNA, 19 nt, Homo sapiens
  misc_RNA (1)...(19): siRNA sense strand
gaaaggcugaagugauucu

SEQ ID NO: 1459478 - RNA, 19 nt, Homo sapiens
  misc_RNA (1)...(19): siRNA sense strand
gagaaaugaaggugugagu

SEQ ID NO: 1459479 - RNA, 19 nt, Homo sapiens
  misc_RNA (1)...(19): siRNA sense strand
cgucugggaugcacacuac

SEQ ID NO: 1459480 - RNA, 19 nt, Homo sapiens
  misc_RNA (1)...(19): siRNA sense strand
gagcaucaucaagaagaaa

SEQ ID NO: 1459481 - RNA, 19 nt, Homo sapiens
  misc_RNA (1)...(19): siRNA sense strand
cagcaagaaggacuauaga

SEQ ID NO: 1459482 - RNA, 19 nt, Homo sapiens
  misc_RNA (1)...(19): siRNA sense strand
accaaggcauggcgaugua

SEQ ID NO: 1459483 - RNA, 19 nt, Homo sapiens
  misc_RNA (1)...(19): siRNA sense strand
agaaagagggcugucaaga

SEQ ID NO: 1459484 - RNA, 19 nt, Homo sapiens
  misc_RNA (1)...(19): siRNA sense strand
gcucgaguauguggaugug

SEQ ID NO: 1459485 - RNA, 19 nt, Homo sapiens
  misc_RNA (1)...(19): siRNA sense strand
gcuugggucuuggaacaug

SEQ ID NO: 1459486 - RNA, 19 nt, Homo sapiens
  misc_RNA (1)...(19): siRNA sense strand
cgagauggagugcuaugga

SEQ ID NO: 1459487 - RNA, 19 nt, Homo sapiens
  misc_RNA (1)...(19): siRNA sense strand
agaaggacuauagaucaua

SEQ ID NO: 1459488 - RNA, 19 nt, Homo sapiens
  misc_RNA (1)...(19): siRNA sense strand
ccaccggucugugaacaag

SEQ ID NO: 1459489 - RNA, 19 nt, Homo sapiens
  misc_RNA (1)...(19): siRNA sense strand
ucauaacaaccaaacucua

SEQ ID NO: 1459490 - RNA, 19 nt, Homo sapiens
  misc_RNA (1)...(19): siRNA sense strand
gaaaacagcaaaacaagcu

SEQ ID NO: 1459491 - RNA, 19 nt, Homo sapiens
  misc_RNA (1)...(19): siRNA sense strand
gaagggagaaaacagcaaa

SEQ ID NO: 1459492 - RNA, 19 nt, Homo sapiens
  misc_RNA (1)...(19): siRNA sense strand
uaacaaccaaacucuacug

SEQ ID NO: 1459493 - RNA, 19 nt, Homo sapiens
  misc_RNA (1)...(19): siRNA sense strand
cuaugaaagugguguuaac

SEQ ID NO: 1459494 - RNA, 19 nt, Homo sapiens
  misc_RNA (1)...(19): siRNA sense strand
cugaacggcugaugaccau

SEQ ID NO: 1459495 - RNA, 19 nt, Homo sapiens
  misc_RNA (1)...(19): siRNA sense strand
aaaugaaggugugaguucu

SEQ ID NO: 1459496 - RNA, 19 nt, Homo sapiens
  misc_RNA (1)...(19): siRNA sense strand
gggcugucaagaaagcaua

SEQ ID NO: 1459497 - RNA, 19 nt, Homo sapiens
  misc_RNA (1)...(19): siRNA sense strand
gugguaaaugagauugaua

SEQ ID NO: 1459498 - RNA, 19 nt, Homo sapiens
  misc_RNA (1)...(19): siRNA sense strand
gcguggugccugagaaaug

SEQ ID NO: 1459499 - RNA, 19 nt, Homo sapiens
  misc_RNA (1)...(19): siRNA sense strand
ugauacugccgaagucuau

SEQ ID NO: 1459500 - RNA, 19 nt, Homo sapiens
  misc_RNA (1)...(19): siRNA sense strand
gauggagugcuauggagau

SEQ ID NO: 1459501 - RNA, 19 nt, Homo sapiens
  misc_RNA (1)...(19): siRNA sense strand
ccuauucuguagcaagaca

SEQ ID NO: 1459502 - RNA, 19 nt, Homo sapiens
  misc_RNA (1)...(19): siRNA sense strand
agucuaugcugcuggaaag

SEQ ID NO: 1459503 - RNA, 19 nt, Homo sapiens
  misc_RNA (1)...(19): siRNA sense strand
gaucccaccggucugugaa

SEQ ID NO: 1459504 - RNA, 19 nt, Homo sapiens
  misc_RNA (1)...(19): siRNA sense strand
gcagcucgaguauguggau

SEQ ID NO: 1459505 - RNA, 19 nt, Homo sapiens
  misc_RNA (1)...(19): siRNA sense strand
acagcaagaaggacuauag

SEQ ID NO: 1459506 - RNA, 19 nt, Homo sapiens
  misc_RNA (1)...(19): siRNA sense strand
ggaaacggggugccugaaa

SEQ ID NO: 1459507 - RNA, 19 nt, Homo sapiens
  misc_RNA (1)...(19): siRNA sense strand
ucauggaagccuauucugu

SEQ ID NO: 1459508 - RNA, 19 nt, Homo sapiens
  misc_RNA (1)...(19): siRNA sense strand
ugaaaaccuuggugccauu

SEQ ID NO: 1459509 - RNA, 19 nt, Homo sapiens
  misc_RNA (1)...(19): siRNA sense strand
uugcuugggucuuggaaca

SEQ ID NO: 1459510 - RNA, 19 nt, Homo sapiens
  misc_RNA (1)...(19): siRNA sense strand
gcaagacaguucaauauga

SEQ ID NO: 1459511 - RNA, 19 nt, Homo sapiens
  misc_RNA (1)...(19): siRNA sense strand
gaacaugggugacauuugg

SEQ ID NO: 1459512 - RNA, 19 nt, Homo sapiens
  misc_RNA (1)...(19): siRNA sense strand
gaaggacuauagaucauaa

SEQ ID NO: 1459513 - RNA, 19 nt, Homo sapiens
  misc_RNA (1)...(19): siRNA sense strand
aaagagggcugucaagaaa

SEQ ID NO: 1459514 - RNA, 19 nt, Homo sapiens
  misc_RNA (1)...(19): siRNA sense strand
gaaagagggcugucaagaa

SEQ ID NO: 1459515 - RNA, 19 nt, Homo sapiens
  misc_RNA (1)...(19): siRNA sense strand
caucacaugugguaaauga

SEQ ID NO: 1459516 - RNA, 19 nt, Homo sapiens
  misc_RNA (1)...(19): siRNA sense strand
gguguuaaccucuuugaua

SEQ ID NO: 1459517 - RNA, 19 nt, Homo sapiens
  misc_RNA (1)...(19): siRNA sense strand
uggaaaggcugaagugauu

SEQ ID NO: 1459518 - RNA, 19 nt, Homo sapiens
  misc_RNA (1)...(19): siRNA sense strand
gaggucaaauuucagauga

SEQ ID NO: 1459519 - RNA, 19 nt, Homo sapiens
  misc_RNA (1)...(19): siRNA sense strand
gaaauuguccgagccauga

SEQ ID NO: 1459520 - RNA, 19 nt, Homo sapiens
  misc_RNA (1)...(19): siRNA sense strand
gaaaugaaggugugaguuc

SEQ ID NO: 1459521 - RNA, 19 nt, Homo sapiens
  misc_RNA (1)...(19): siRNA sense strand
gcaaaucgaccggacagua

SEQ ID NO: 1459522 - RNA, 19 nt, Homo sapiens
  misc_RNA (1)...(19): siRNA sense strand
gcaacaagcccuacagcaa

SEQ ID NO: 1459523 - RNA, 19 nt, Homo sapiens
  misc_RNA (1)...(19): siRNA sense strand
caagacaguucaauaugau

SEQ ID NO: 1459524 - RNA, 19 nt, Homo sapiens
  misc_RNA (1)...(19): siRNA sense strand
caaaucgaccggacaguaa

SEQ ID NO: 1459525 - RNA, 19 nt, Homo sapiens
  misc_RNA (1)...(19): siRNA sense strand
caagaaggacuauagauca

SEQ ID NO: 1459526 - RNA, 19 nt, Homo sapiens
  misc_RNA (1)...(19): siRNA sense strand
gcaagaaggacuauagauc

SEQ ID NO: 1459527 - RNA, 19 nt, Homo sapiens
  misc_RNA (1)...(19): siRNA sense strand
gaccaucgccuaugaaagu

SEQ ID NO: 1459528 - RNA, 19 nt, Homo sapiens
  misc_RNA (1)...(19): siRNA sense strand
cauggaagccuauucugua

SEQ ID NO: 1459529 - RNA, 19 nt, Homo sapiens
  misc_RNA (1)...(19): siRNA sense strand
gcauauuauugaaggauug

SEQ ID NO: 1459530 - RNA, 19 nt, Homo sapiens
  misc_RNA (1)...(19): siRNA sense strand
guagcaagacaguucaaua

SEQ ID NO: 1459531 - RNA, 19 nt, Homo sapiens
  misc_RNA (1)...(19): siRNA sense strand
guauguggauguggucuuu

SEQ ID NO: 1459532 - RNA, 19 nt, Homo sapiens
  misc_RNA (1)...(19): siRNA sense strand
ggaagccuauucuguagca

SEQ ID NO: 1459533 - RNA, 19 nt, Homo sapiens
  misc_RNA (1)...(19): siRNA sense strand
gauguggucuuugcaaauc

SEQ ID NO: 1459534 - RNA, 19 nt, Homo sapiens
  misc_RNA (1)...(19): siRNA sense strand
gaaagaauuguaagugaag

SEQ ID NO: 1459535 - RNA, 19 nt, Homo sapiens
  misc_RNA (1)...(19): siRNA sense strand
caagcugaguaccaucuuu

SEQ ID NO: 1459536 - RNA, 19 nt, Homo sapiens
  misc_RNA (1)...(19): siRNA sense strand
ggagcaucaucaagaagaa

SEQ ID NO: 1459537 - RNA, 19 nt, Homo sapiens
  misc_RNA (1)...(19): siRNA sense strand
ugccagagcucuaccacaa

SEQ ID NO: 1459538 - RNA, 19 nt, Homo sapiens
  misc_RNA (1)...(19): siRNA sense strand
caguaacacucccauggaa

SEQ ID NO: 1459539 - RNA, 19 nt, Homo sapiens
  misc_RNA (1)...(19): siRNA sense strand
ccauucagguucucccaaa

SEQ ID NO: 1459540 - RNA, 19 nt, Homo sapiens
  misc_RNA (1)...(19): siRNA sense strand
uagcaagacaguucaauau

SEQ ID NO: 1459541 - RNA, 19 nt, Homo sapiens
  misc_RNA (1)...(19): siRNA sense strand
ugacacaugugauaaacca

SEQ ID NO: 1459542 - RNA, 19 nt, Homo sapiens
  misc_RNA (1)...(19): siRNA sense strand
uggaaaagcugaaacagaa

SEQ ID NO: 1459543 - RNA, 19 nt, Homo sapiens
  misc_RNA (1)...(19): siRNA sense strand
ggaaucaucucaggaaaau

SEQ ID NO: 1459544 - RNA, 19 nt, Homo sapiens
  misc_RNA (1)...(19): siRNA sense strand
ggagugcuauggagaucau

SEQ ID NO: 1459545 - RNA, 19 nt, Homo sapiens
  misc_RNA (1)...(19): siRNA sense strand
gauaacauacugcgcaaca

SEQ ID NO: 1459546 - RNA, 19 nt, Homo sapiens
  misc_RNA (1)...(19): siRNA sense strand
guaacacucccauggaaga

SEQ ID NO: 1459547 - RNA, 19 nt, Homo sapiens
  misc_RNA (1)...(19): siRNA sense strand
ggcugcagcucgaguaugu

SEQ ID NO: 1459548 - RNA, 19 nt, Homo sapiens
  misc_RNA (1)...(19): siRNA sense strand
gaucauccacuccugaaca

SEQ ID NO: 1459549 - RNA, 19 nt, Homo sapiens
  misc_RNA (1)...(19): siRNA sense strand
guguuaaccucuuugauac

SEQ ID NO: 1459550 - RNA, 19 nt, Homo sapiens
  misc_RNA (1)...(19): siRNA sense strand
ugaacaagcugaguaccau

SEQ ID NO: 1459551 - RNA, 19 nt, Homo sapiens
  misc_RNA (1)...(19): siRNA sense strand
gaucauggaagccuauucu

SEQ ID NO: 1459552 - RNA, 19 nt, Homo sapiens
  misc_RNA (1)...(19): siRNA sense strand
ggagaaaacagcaaaacaa

SEQ ID NO: 1459553 - RNA, 19 nt, Homo sapiens
  misc_RNA (1)...(19): siRNA sense strand
ggaggucaaauuucagaug

SEQ ID NO: 1459554 - RNA, 19 nt, Homo sapiens
  misc_RNA (1)...(19): siRNA sense strand
ugagauugauaacauacug

SEQ ID NO: 1459555 - RNA, 19 nt, Homo sapiens
  misc_RNA (1)...(19): siRNA sense strand
cagguucucccaaagauga

SEQ ID NO: 1459556 - RNA, 19 nt, Homo sapiens
  misc_RNA (1)...(19): siRNA sense strand
cguggugccugagaaauga

SEQ ID NO: 1459557 - RNA, 19 nt, Homo sapiens
  misc_RNA (1)...(19): siRNA sense strand
gggagcaucaucaagaaga

SEQ ID NO: 1459558 - RNA, 19 nt, Homo sapiens
  misc_RNA (1)...(19): siRNA sense strand
ucacaugugguaaaugaga

SEQ ID NO: 1459559 - RNA, 19 nt, Homo sapiens
  misc_RNA (1)...(19): siRNA sense strand
ggaacaugggugacauuug

SEQ ID NO: 1459560 - RNA, 19 nt, Homo sapiens
  misc_RNA (1)...(19): siRNA sense strand
ucaaauuucagaugagguu

SEQ ID NO: 1459561 - RNA, 19 nt, Homo sapiens
  misc_RNA (1)...(19): siRNA sense strand
guuaaccucuuugauacug

SEQ ID NO: 1459562 - RNA, 19 nt, Homo sapiens
  misc_RNA (1)...(19): siRNA sense strand
aaagugguguuaaccucuu

SEQ ID NO: 1459563 - RNA, 19 nt, Homo sapiens
  misc_RNA (1)...(19): siRNA sense strand
ccagagcucuaccacaaaa

SEQ ID NO: 1459564 - RNA, 19 nt, Homo sapiens
  misc_RNA (1)...(19): siRNA sense strand
guggaaucaucucaggaaa

SEQ ID NO: 1459565 - RNA, 19 nt, Homo sapiens
  misc_RNA (1)...(19): siRNA sense strand
ggucauaacaaccaaacuc

SEQ ID NO: 1459566 - RNA, 19 nt, Homo sapiens
  misc_RNA (1)...(19): siRNA sense strand
aagaaggacuauagaucau

SEQ ID NO: 1459567 - RNA, 19 nt, Homo sapiens
  misc_RNA (1)...(19): siRNA sense strand
aacaagcccuacagcaaga

SEQ ID NO: 1459568 - RNA, 19 nt, Homo sapiens
  misc_RNA (1)...(19): siRNA sense strand
ggauguggucuuugcaaau

SEQ ID NO: 1459569 - RNA, 19 nt, Homo sapiens
  misc_RNA (1)...(19): siRNA sense strand
cauaacaaccaaacucuac

SEQ ID NO: 1459570 - RNA, 19 nt, Homo sapiens
  misc_RNA (1)...(19): siRNA sense strand
uaacauacugcgcaacaag

SEQ ID NO: 1459571 - RNA, 19 nt, Homo sapiens
  misc_RNA (1)...(19): siRNA sense strand
cugaacaacucauugaaaa

SEQ ID NO: 1459572 - RNA, 19 nt, Homo sapiens
  misc_RNA (1)...(19): siRNA sense strand
ccugaacaacucauugaaa

SEQ ID NO: 1459573 - RNA, 19 nt, Homo sapiens
  misc_RNA (1)...(19): siRNA sense strand
gaaacggggugccugaaag

SEQ ID NO: 1459574 - RNA, 19 nt, Homo sapiens
  misc_RNA (1)...(19): siRNA sense strand
ggagaucauggaagccuau

SEQ ID NO: 1459575 - RNA, 19 nt, Homo sapiens
  misc_RNA (1)...(19): siRNA sense strand
acacucccauggaagaaau

SEQ ID NO: 1459576 - RNA, 19 nt, Homo sapiens
  misc_RNA (1)...(19): siRNA sense strand
uggauguggucuuugcaaa

SEQ ID NO: 1459577 - RNA, 19 nt, Homo sapiens
  misc_RNA (1)...(19): siRNA sense strand
gaaaggcugaagugauucu

SEQ ID NO: 1459578 - RNA, 19 nt, Homo sapiens
  misc_RNA (1)...(19): siRNA sense strand
gagaaaugaaggugugagu

SEQ ID NO: 1459579 - RNA, 19 nt, Homo sapiens
  misc_RNA (1)...(19): siRNA sense strand
cgucugggaugcacacuac

SEQ ID NO: 1459580 - RNA, 19 nt, Homo sapiens
  misc_RNA (1)...(19): siRNA sense strand
gagcaucaucaagaagaaa

SEQ ID NO: 1459581 - RNA, 19 nt, Homo sapiens
  misc_RNA (1)...(19): siRNA sense strand
cagcaagaaggacuauaga

SEQ ID NO: 1459582 - RNA, 19 nt, Homo sapiens
  misc_RNA (1)...(19): siRNA sense strand
accaaggcauggcgaugua

SEQ ID NO: 1459583 - RNA, 19 nt, Homo sapiens
  misc_RNA (1)...(19): siRNA sense strand
agaaagagggcugucaaga

SEQ ID NO: 1459584 - RNA, 19 nt, Homo sapiens
  misc_RNA (1)...(19): siRNA sense strand
gcucgaguauguggaugug

SEQ ID NO: 1459585 - RNA, 19 nt, Homo sapiens
  misc_RNA (1)...(19): siRNA sense strand
gcuugggucuuggaacaug

SEQ ID NO: 1459586 - RNA, 19 nt, Homo sapiens
  misc_RNA (1)...(19): siRNA sense strand
cgagauggagugcuaugga

SEQ ID NO: 1459587 - RNA, 19 nt, Homo sapiens
  misc_RNA (1)...(19): siRNA sense strand
agaaggacuauagaucaua

SEQ ID NO: 1459588 - RNA, 19 nt, Homo sapiens
  misc_RNA (1)...(19): siRNA sense strand
ccaccggucugugaacaag

SEQ ID NO: 1459589 - RNA, 19 nt, Homo sapiens
  misc_RNA (1)...(19): siRNA sense strand
ucauaacaaccaaacucua

SEQ ID NO: 1459590 - RNA, 19 nt, Homo sapiens
  misc_RNA (1)...(19): siRNA sense strand
gaaaacagcaaaacaagcu

SEQ ID NO: 1459591 - RNA, 19 nt, Homo sapiens
  misc_RNA (1)...(19): siRNA sense strand
gaagggagaaaacagcaaa

SEQ ID NO: 1459592 - RNA, 19 nt, Homo sapiens
  misc_RNA (1)...(19): siRNA sense strand
uaacaaccaaacucuacug

SEQ ID NO: 1459593 - RNA, 19 nt, Homo sapiens
  misc_RNA (1)...(19): siRNA sense strand
cuaugaaagugguguuaac

SEQ ID NO: 1459594 - RNA, 19 nt, Homo sapiens
  misc_RNA (1)...(19): siRNA sense strand
cugaacggcugaugaccau

SEQ ID NO: 1459595 - RNA, 19 nt, Homo sapiens
  misc_RNA (1)...(19): siRNA sense strand
aaaugaaggugugaguucu

SEQ ID NO: 1459596 - RNA, 19 nt, Homo sapiens
  misc_RNA (1)...(19): siRNA sense strand
gggcugucaagaaagcaua

SEQ ID NO: 1459597 - RNA, 19 nt, Homo sapiens
  misc_RNA (1)...(19): siRNA sense strand
gugguaaaugagauugaua

SEQ ID NO: 1459598 - RNA, 19 nt, Homo sapiens
  misc_RNA (1)...(19): siRNA sense strand
gcguggugccugagaaaug

SEQ ID NO: 1459599 - RNA, 19 nt, Homo sapiens
  misc_RNA (1)...(19): siRNA sense strand
ugauacugccgaagucuau

SEQ ID NO: 1459600 - RNA, 19 nt, Homo sapiens
  misc_RNA (1)...(19): siRNA sense strand
gauggagugcuauggagau

SEQ ID NO: 1459601 - RNA, 19 nt, Homo sapiens
  misc_RNA (1)...(19): siRNA sense strand
ccuauucuguagcaagaca

SEQ ID NO: 1459602 - RNA, 19 nt, Homo sapiens
  misc_RNA (1)...(19): siRNA sense strand
agucuaugcugcuggaaag

SEQ ID NO: 1459603 - RNA, 19 nt, Homo sapiens
  misc_RNA (1)...(19): siRNA sense strand
gaucccaccggucugugaa

SEQ ID NO: 1459604 - RNA, 19 nt, Homo sapiens
  misc_RNA (1)...(19): siRNA sense strand
gcagcucgaguauguggau

SEQ ID NO: 1459605 - RNA, 19 nt, Homo sapiens
  misc_RNA (1)...(19): siRNA sense strand
acagcaagaaggacuauag

SEQ ID NO: 1459606 - RNA, 19 nt, Homo sapiens
  misc_RNA (1)...(19): siRNA sense strand
ggaaacggggugccugaaa

SEQ ID NO: 1459607 - RNA, 19 nt, Homo sapiens
  misc_RNA (1)...(19): siRNA sense strand
ucauggaagccuauucugu

SEQ ID NO: 1459608 - RNA, 19 nt, Homo sapiens
  misc_RNA (1)...(19): siRNA sense strand
ugaaaaccuuggugccauu

SEQ ID NO: 1459609 - RNA, 19 nt, Homo sapiens
  misc_RNA (1)...(19): siRNA sense strand
uugcuugggucuuggaaca

SEQ ID NO: 1459610 - RNA, 19 nt, Homo sapiens
  misc_RNA (1)...(19): siRNA sense strand
gaaaccaacuguacugaug

SEQ ID NO: 1459611 - RNA, 19 nt, Homo sapiens
  misc_RNA (1)...(19): siRNA sense strand
gaauagaacugcaguaugc

SEQ ID NO: 1459612 - RNA, 19 nt, Homo sapiens
  misc_RNA (1)...(19): siRNA sense strand
gaagugacccuguuucaaa

SEQ ID NO: 1459613 - RNA, 19 nt, Homo sapiens
  misc_RNA (1)...(19): siRNA sense strand
gaaaguacucgcagaaguu

SEQ ID NO: 1459614 - RNA, 19 nt, Homo sapiens
  misc_RNA (1)...(19): siRNA sense strand
gauaucaccuccaaguguu

SEQ ID NO: 1459615 - RNA, 19 nt, Homo sapiens
  misc_RNA (1)...(19): siRNA sense strand
caacuguacugaugagaga

SEQ ID NO: 1459616 - RNA, 19 nt, Homo sapiens
  misc_RNA (1)...(19): siRNA sense strand
caagaauacuggagcaaug

SEQ ID NO: 1459617 - RNA, 19 nt, Homo sapiens
  misc_RNA (1)...(19): siRNA sense strand
guaaagauggcuacaaaug

SEQ ID NO: 1459618 - RNA, 19 nt, Homo sapiens
  misc_RNA (1)...(19): siRNA sense strand
gguaacaccugaugggaau

SEQ ID NO: 1459619 - RNA, 19 nt, Homo sapiens
  misc_RNA (1)...(19): siRNA sense strand
acacagaacuacucgaaag

SEQ ID NO: 1459620 - RNA, 19 nt, Homo sapiens
  misc_RNA (1)...(19): siRNA sense strand
cgaaaguacucgcagaagu

SEQ ID NO: 1459621 - RNA, 19 nt, Homo sapiens
  misc_RNA (1)...(19): siRNA sense strand
gaagccagcugcgcauauc

SEQ ID NO: 1459622 - RNA, 19 nt, Homo sapiens
  misc_RNA (1)...(19): siRNA sense strand
ucaagcaguuuauguaugg

SEQ ID NO: 1459623 - RNA, 19 nt, Homo sapiens
  misc_RNA (1)...(19): siRNA sense strand
gcacaaaagccuacaagaa

SEQ ID NO: 1459624 - RNA, 19 nt, Homo sapiens
  misc_RNA (1)...(19): siRNA sense strand
ggauaucaccuccaagugu

SEQ ID NO: 1459625 - RNA, 19 nt, Homo sapiens
  misc_RNA (1)...(19): siRNA sense strand
gaauucggaccuucagauu

SEQ ID NO: 1459626 - RNA, 19 nt, Homo sapiens
  misc_RNA (1)...(19): siRNA sense strand
caaaugagaccaaggaaac

SEQ ID NO: 1459627 - RNA, 19 nt, Homo sapiens
  misc_RNA (1)...(19): siRNA sense strand
ccuaucgcauuaagaaauu

SEQ ID NO: 1459628 - RNA, 19 nt, Homo sapiens
  misc_RNA (1)...(19): siRNA sense strand
uuggagaacugcuaaccua

SEQ ID NO: 1459629 - RNA, 19 nt, Homo sapiens
  misc_RNA (1)...(19): siRNA sense strand
ggaauagaacugcaguaug

SEQ ID NO: 1459630 - RNA, 19 nt, Homo sapiens
  misc_RNA (1)...(19): siRNA sense strand
aaacaaaugagaccaagga

SEQ ID NO: 1459631 - RNA, 19 nt, Homo sapiens
  misc_RNA (1)...(19): siRNA sense strand
uuacagaugcauaauggua

SEQ ID NO: 1459632 - RNA, 19 nt, Homo sapiens
  misc_RNA (1)...(19): siRNA sense strand
uaaccuagggcuacuguug

SEQ ID NO: 1459633 - RNA, 19 nt, Homo sapiens
  misc_RNA (1)...(19): siRNA sense strand
ccacuaagcaagaauacug

SEQ ID NO: 1459634 - RNA, 19 nt, Homo sapiens
  misc_RNA (1)...(19): siRNA sense strand
aaaguacucgcagaaguua

SEQ ID NO: 1459635 - RNA, 19 nt, Homo sapiens
  misc_RNA (1)...(19): siRNA sense strand
cuccagaccugaucagaau

SEQ ID NO: 1459636 - RNA, 19 nt, Homo sapiens
  misc_RNA (1)...(19): siRNA sense strand
aaagauggcuacaaaugcu

SEQ ID NO: 1459637 - RNA, 19 nt, Homo sapiens
  misc_RNA (1)...(19): siRNA sense strand
gcaagaauacuggagcaau

SEQ ID NO: 1459638 - RNA, 19 nt, Homo sapiens
  misc_RNA (1)...(19): siRNA sense strand
ucacucaugacggguauua

SEQ ID NO: 1459639 - RNA, 19 nt, Homo sapiens
  misc_RNA (1)...(19): siRNA sense strand
ggaagccagcugcgcauau

SEQ ID NO: 1459640 - RNA, 19 nt, Homo sapiens
  misc_RNA (1)...(19): siRNA sense strand
cacaaaagccuacaagaaa

SEQ ID NO: 1459641 - RNA, 19 nt, Homo sapiens
  misc_RNA (1)...(19): siRNA sense strand
uaacaccugaugggaauuu

SEQ ID NO: 1459642 - RNA, 19 nt, Homo sapiens
  misc_RNA (1)...(19): siRNA sense strand
caagaaagaaacaaaugag

SEQ ID NO: 1459643 - RNA, 19 nt, Homo sapiens
  misc_RNA (1)...(19): siRNA sense strand
ccaaggaaaccaacuguac

SEQ ID NO: 1459644 - RNA, 19 nt, Homo sapiens
  misc_RNA (1)...(19): siRNA sense strand
ggaaaccaacuguacugau

SEQ ID NO: 1459645 - RNA, 19 nt, Homo sapiens
  misc_RNA (1)...(19): siRNA sense strand
caccugaagugacccuguu

SEQ ID NO: 1459646 - RNA, 19 nt, Homo sapiens
  misc_RNA (1)...(19): siRNA sense strand
cuucauggccuguaaagau

SEQ ID NO: 1459647 - RNA, 19 nt, Homo sapiens
  misc_RNA (1)...(19): siRNA sense strand
uuacacagaacuacucgaa

SEQ ID NO: 1459648 - RNA, 19 nt, Homo sapiens
  misc_RNA (1)...(19): siRNA sense strand
ggguauuacagaugcauaa

SEQ ID NO: 1459649 - RNA, 19 nt, Homo sapiens
  misc_RNA (1)...(19): siRNA sense strand
cuagggcuacuguugauuu

SEQ ID NO: 1459650 - RNA, 19 nt, Homo sapiens
  misc_RNA (1)...(19): siRNA sense strand
gggcuacuguugauuuuga

SEQ ID NO: 1459651 - RNA, 19 nt, Homo sapiens
  misc_RNA (1)...(19): siRNA sense strand
ccuccuaucgcauuaagaa

SEQ ID NO: 1459652 - RNA, 19 nt, Homo sapiens
  misc_RNA (1)...(19): siRNA sense strand
uaaagauggcuacaaaugc

SEQ ID NO: 1459653 - RNA, 19 nt, Homo sapiens
  misc_RNA (1)...(19): siRNA sense strand
gugcuuuguugcccuccua

SEQ ID NO: 1459654 - RNA, 19 nt, Homo sapiens
  misc_RNA (1)...(19): siRNA sense strand
acaaaugagaccaaggaaa

SEQ ID NO: 1459655 - RNA, 19 nt, Homo sapiens
  misc_RNA (1)...(19): siRNA sense strand
gcaguuuauguauggauga

SEQ ID NO: 1459656 - RNA, 19 nt, Homo sapiens
  misc_RNA (1)...(19): siRNA sense strand
caucacucaugacggguau

SEQ ID NO: 1459657 - RNA, 19 nt, Homo sapiens
  misc_RNA (1)...(19): siRNA sense strand
aaaccaacuguacugauga

SEQ ID NO: 1459658 - RNA, 19 nt, Homo sapiens
  misc_RNA (1)...(19): siRNA sense strand
caugacggguauuacagau

SEQ ID NO: 1459659 - RNA, 19 nt, Homo sapiens
  misc_RNA (1)...(19): siRNA sense strand
ggccagccuuccugcacaa

SEQ ID NO: 1459660 - RNA, 19 nt, Homo sapiens
  misc_RNA (1)...(19): siRNA sense strand
gaccaaggaaaccaacugu

SEQ ID NO: 1459661 - RNA, 19 nt, Homo sapiens
  misc_RNA (1)...(19): siRNA sense strand
ggcuacaaaugcugugcuu

SEQ ID NO: 1459662 - RNA, 19 nt, Homo sapiens
  misc_RNA (1)...(19): siRNA sense strand
uacagaugcauaaugguaa

SEQ ID NO: 1459663 - RNA, 19 nt, Homo sapiens
  misc_RNA (1)...(19): siRNA sense strand
ccuacaagaaagaaacaaa

SEQ ID NO: 1459664 - RNA, 19 nt, Homo sapiens
  misc_RNA (1)...(19): siRNA sense strand
gcucugcccuuggagaacu

SEQ ID NO: 1459665 - RNA, 19 nt, Homo sapiens
  misc_RNA (1)...(19): siRNA sense strand
caaggaaaccaacuguacu

SEQ ID NO: 1459666 - RNA, 19 nt, Homo sapiens
  misc_RNA (1)...(19): siRNA sense strand
uucauggccuguaaagaug

SEQ ID NO: 1459667 - RNA, 19 nt, Homo sapiens
  misc_RNA (1)...(19): siRNA sense strand
gugccacuaagcaagaaua

SEQ ID NO: 1459668 - RNA, 19 nt, Homo sapiens
  misc_RNA (1)...(19): siRNA sense strand
ccagaccugaucagaauuc

SEQ ID NO: 1459669 - RNA, 19 nt, Homo sapiens
  misc_RNA (1)...(19): siRNA sense strand
caguuuauguauggaugaa

SEQ ID NO: 1459670 - RNA, 19 nt, Homo sapiens
  misc_RNA (1)...(19): siRNA sense strand
gcgauugugccacuaagca

SEQ ID NO: 1459671 - RNA, 19 nt, Homo sapiens
  misc_RNA (1)...(19): siRNA sense strand
gaucccagagggcgauugu

SEQ ID NO: 1459672 - RNA, 19 nt, Homo sapiens
  misc_RNA (1)...(19): siRNA sense strand
gcaguaugcaaggcaguug

SEQ ID NO: 1459673 - RNA, 19 nt, Homo sapiens
  misc_RNA (1)...(19): siRNA sense strand
ccguggccaucacucauga

SEQ ID NO: 1459674 - RNA, 19 nt, Homo sapiens
  misc_RNA (1)...(19): siRNA sense strand
gggaagccagcugcgcaua

SEQ ID NO: 1459675 - RNA, 19 nt, Homo sapiens
  misc_RNA (1)...(19): siRNA sense strand
aaacagauuacacagaacu

SEQ ID NO: 1459676 - RNA, 19 nt, Homo sapiens
  misc_RNA (1)...(19): siRNA sense strand
guaccguggccaucacuca

SEQ ID NO: 1459677 - RNA, 19 nt, Homo sapiens
  misc_RNA (1)...(19): siRNA sense strand
uucaagcaguuuauguaug

SEQ ID NO: 1459678 - RNA, 19 nt, Homo sapiens
  misc_RNA (1)...(19): siRNA sense strand
cuucaagcaguuuauguau

SEQ ID NO: 1459679 - RNA, 19 nt, Homo sapiens
  misc_RNA (1)...(19): siRNA sense strand
gcccuuggagaacugcuaa

SEQ ID NO: 1459680 - RNA, 19 nt, Homo sapiens
  misc_RNA (1)...(19): siRNA sense strand
gaaaccaacuguacugaug

SEQ ID NO: 1459681 - RNA, 19 nt, Homo sapiens
  misc_RNA (1)...(19): siRNA sense strand
gaaaguacucgcagaaguu

SEQ ID NO: 1459682 - RNA, 19 nt, Homo sapiens
  misc_RNA (1)...(19): siRNA sense strand
gauaucaccuccaaguguu

SEQ ID NO: 1459683 - RNA, 19 nt, Homo sapiens
  misc_RNA (1)...(19): siRNA sense strand
caacuguacugaugagaga

SEQ ID NO: 1459684 - RNA, 19 nt, Homo sapiens
  misc_RNA (1)...(19): siRNA sense strand
guaaagauggcuacaaaug

SEQ ID NO: 1459685 - RNA, 19 nt, Homo sapiens
  misc_RNA (1)...(19): siRNA sense strand
gguaacaccugaugggaau

SEQ ID NO: 1459686 - RNA, 19 nt, Homo sapiens
  misc_RNA (1)...(19): siRNA sense strand
acacagaacuacucgaaag

SEQ ID NO: 1459687 - RNA, 19 nt, Homo sapiens
  misc_RNA (1)...(19): siRNA sense strand
cgaaaguacucgcagaagu

SEQ ID NO: 1459688 - RNA, 19 nt, Homo sapiens
  misc_RNA (1)...(19): siRNA sense strand
ucaagcaguuuauguaugg

SEQ ID NO: 1459689 - RNA, 19 nt, Homo sapiens
  misc_RNA (1)...(19): siRNA sense strand
gcacaaaagccuacaagaa

SEQ ID NO: 1459690 - RNA, 19 nt, Homo sapiens
  misc_RNA (1)...(19): siRNA sense strand
ggauaucaccuccaagugu

SEQ ID NO: 1459691 - RNA, 19 nt, Homo sapiens
  misc_RNA (1)...(19): siRNA sense strand
gaauucggaccuucagauu

SEQ ID NO: 1459692 - RNA, 19 nt, Homo sapiens
  misc_RNA (1)...(19): siRNA sense strand
caaaugagaccaaggaaac

SEQ ID NO: 1459693 - RNA, 19 nt, Homo sapiens
  misc_RNA (1)...(19): siRNA sense strand
ccuaucgcauuaagaaauu

SEQ ID NO: 1459694 - RNA, 19 nt, Homo sapiens
  misc_RNA (1)...(19): siRNA sense strand
uuggagaacugcuaaccua

SEQ ID NO: 1459695 - RNA, 19 nt, Homo sapiens
  misc_RNA (1)...(19): siRNA sense strand
aaacaaaugagaccaagga

SEQ ID NO: 1459696 - RNA, 19 nt, Homo sapiens
  misc_RNA (1)...(19): siRNA sense strand
uuacagaugcauaauggua

SEQ ID NO: 1459697 - RNA, 19 nt, Homo sapiens
  misc_RNA (1)...(19): siRNA sense strand
uaaccuagggcuacuguug

SEQ ID NO: 1459698 - RNA, 19 nt, Homo sapiens
  misc_RNA (1)...(19): siRNA sense strand
aaaguacucgcagaaguua

SEQ ID NO: 1459699 - RNA, 19 nt, Homo sapiens
  misc_RNA (1)...(19): siRNA sense strand
cuccagaccugaucagaau

SEQ ID NO: 1459700 - RNA, 19 nt, Homo sapiens
  misc_RNA (1)...(19): siRNA sense strand
aaagauggcuacaaaugcu

SEQ ID NO: 1459701 - RNA, 19 nt, Homo sapiens
  misc_RNA (1)...(19): siRNA sense strand
ucacucaugacggguauua

SEQ ID NO: 1459702 - RNA, 19 nt, Homo sapiens
  misc_RNA (1)...(19): siRNA sense strand
cacaaaagccuacaagaaa

SEQ ID NO: 1459703 - RNA, 19 nt, Homo sapiens
  misc_RNA (1)...(19): siRNA sense strand
uaacaccugaugggaauuu

SEQ ID NO: 1459704 - RNA, 19 nt, Homo sapiens
  misc_RNA (1)...(19): siRNA sense strand
caagaaagaaacaaaugag

SEQ ID NO: 1459705 - RNA, 19 nt, Homo sapiens
  misc_RNA (1)...(19): siRNA sense strand
ccaaggaaaccaacuguac

SEQ ID NO: 1459706 - RNA, 19 nt, Homo sapiens
  misc_RNA (1)...(19): siRNA sense strand
ggaaaccaacuguacugau

SEQ ID NO: 1459707 - RNA, 19 nt, Homo sapiens
  misc_RNA (1)...(19): siRNA sense strand
cuucauggccuguaaagau

SEQ ID NO: 1459708 - RNA, 19 nt, Homo sapiens
  misc_RNA (1)...(19): siRNA sense strand
uuacacagaacuacucgaa

SEQ ID NO: 1459709 - RNA, 19 nt, Homo sapiens
  misc_RNA (1)...(19): siRNA sense strand
cuagggcuacuguugauuu

SEQ ID NO: 1459710 - RNA, 19 nt, Homo sapiens
  misc_RNA (1)...(19): siRNA sense strand
ggguauuacagaugcauaa

SEQ ID NO: 1459711 - RNA, 19 nt, Homo sapiens
  misc_RNA (1)...(19): siRNA sense strand
gggcuacuguugauuuuga

SEQ ID NO: 1459712 - RNA, 19 nt, Homo sapiens
  misc_RNA (1)...(19): siRNA sense strand
ccuccuaucgcauuaagaa

SEQ ID NO: 1459713 - RNA, 19 nt, Homo sapiens
  misc_RNA (1)...(19): siRNA sense strand
uaaagauggcuacaaaugc

SEQ ID NO: 1459714 - RNA, 19 nt, Homo sapiens
  misc_RNA (1)...(19): siRNA sense strand
gugcuuuguugcccuccua

SEQ ID NO: 1459715 - RNA, 19 nt, Homo sapiens
  misc_RNA (1)...(19): siRNA sense strand
acaaaugagaccaaggaaa

SEQ ID NO: 1459716 - RNA, 19 nt, Homo sapiens
  misc_RNA (1)...(19): siRNA sense strand
aaaccaacuguacugauga

SEQ ID NO: 1459717 - RNA, 19 nt, Homo sapiens
  misc_RNA (1)...(19): siRNA sense strand
caucacucaugacggguau

SEQ ID NO: 1459718 - RNA, 19 nt, Homo sapiens
  misc_RNA (1)...(19): siRNA sense strand
gcaguuuauguauggauga

SEQ ID NO: 1459719 - RNA, 19 nt, Homo sapiens
  misc_RNA (1)...(19): siRNA sense strand
caugacggguauuacagau

SEQ ID NO: 1459720 - RNA, 19 nt, Homo sapiens
  misc_RNA (1)...(19): siRNA sense strand
ggccagccuuccugcacaa

SEQ ID NO: 1459721 - RNA, 19 nt, Homo sapiens
  misc_RNA (1)...(19): siRNA sense strand
gaccaaggaaaccaacugu

SEQ ID NO: 1459722 - RNA, 19 nt, Homo sapiens
  misc_RNA (1)...(19): siRNA sense strand
ggcuacaaaugcugugcuu

SEQ ID NO: 1459723 - RNA, 19 nt, Homo sapiens
  misc_RNA (1)...(19): siRNA sense strand
uacagaugcauaaugguaa

SEQ ID NO: 1459724 - RNA, 19 nt, Homo sapiens
  misc_RNA (1)...(19): siRNA sense strand
ccuacaagaaagaaacaaa

SEQ ID NO: 1459725 - RNA, 19 nt, Homo sapiens
  misc_RNA (1)...(19): siRNA sense strand
gcucugcccuuggagaacu

SEQ ID NO: 1459726 - RNA, 19 nt, Homo sapiens
  misc_RNA (1)...(19): siRNA sense strand
caaggaaaccaacuguacu

SEQ ID NO: 1459727 - RNA, 19 nt, Homo sapiens
  misc_RNA (1)...(19): siRNA sense strand
uucauggccuguaaagaug

SEQ ID NO: 1459728 - RNA, 19 nt, Homo sapiens
  misc_RNA (1)...(19): siRNA sense strand
ccagaccugaucagaauuc

SEQ ID NO: 1459729 - RNA, 19 nt, Homo sapiens
  misc_RNA (1)...(19): siRNA sense strand
caguuuauguauggaugaa

SEQ ID NO: 1459730 - RNA, 19 nt, Homo sapiens
  misc_RNA (1)...(19): siRNA sense strand
aaacagauuacacagaacu

SEQ ID NO: 1459731 - RNA, 19 nt, Homo sapiens
  misc_RNA (1)...(19): siRNA sense strand
ccguggccaucacucauga

SEQ ID NO: 1459732 - RNA, 19 nt, Homo sapiens
  misc_RNA (1)...(19): siRNA sense strand
guaccguggccaucacuca

SEQ ID NO: 1459733 - RNA, 19 nt, Homo sapiens
  misc_RNA (1)...(19): siRNA sense strand
uucaagcaguuuauguaug

SEQ ID NO: 1459734 - RNA, 19 nt, Homo sapiens
  misc_RNA (1)...(19): siRNA sense strand
gcccuuggagaacugcuaa

SEQ ID NO: 1459735 - RNA, 19 nt, Homo sapiens
  misc_RNA (1)...(19): siRNA sense strand
cuucaagcaguuuauguau

SEQ ID NO: 1459736 - RNA, 19 nt, Homo sapiens
  misc_RNA (1)...(19): siRNA sense strand
gaaaccaacuguacugaug

SEQ ID NO: 1459737 - RNA, 19 nt, Homo sapiens
  misc_RNA (1)...(19): siRNA sense strand
gaaaguacucgcagaaguu

SEQ ID NO: 1459738 - RNA, 19 nt, Homo sapiens
  misc_RNA (1)...(19): siRNA sense strand
gauaucaccuccaaguguu

SEQ ID NO: 1459739 - RNA, 19 nt, Homo sapiens
  misc_RNA (1)...(19): siRNA sense strand
caacuguacugaugagaga

SEQ ID NO: 1459740 - RNA, 19 nt, Homo sapiens
  misc_RNA (1)...(19): siRNA sense strand
guaaagauggcuacaaaug

SEQ ID NO: 1459741 - RNA, 19 nt, Homo sapiens
  misc_RNA (1)...(19): siRNA sense strand
gguaacaccugaugggaau

SEQ ID NO: 1459742 - RNA, 19 nt, Homo sapiens
  misc_RNA (1)...(19): siRNA sense strand
acacagaacuacucgaaag

SEQ ID NO: 1459743 - RNA, 19 nt, Homo sapiens
  misc_RNA (1)...(19): siRNA sense strand
cgaaaguacucgcagaagu

SEQ ID NO: 1459744 - RNA, 19 nt, Homo sapiens
  misc_RNA (1)...(19): siRNA sense strand
ucaagcaguuuauguaugg

SEQ ID NO: 1459745 - RNA, 19 nt, Homo sapiens
  misc_RNA (1)...(19): siRNA sense strand
gcacaaaagccuacaagaa

SEQ ID NO: 1459746 - RNA, 19 nt, Homo sapiens
  misc_RNA (1)...(19): siRNA sense strand
ggauaucaccuccaagugu

SEQ ID NO: 1459747 - RNA, 19 nt, Homo sapiens
  misc_RNA (1)...(19): siRNA sense strand
gaauucggaccuucagauu

SEQ ID NO: 1459748 - RNA, 19 nt, Homo sapiens
  misc_RNA (1)...(19): siRNA sense strand
caaaugagaccaaggaaac

SEQ ID NO: 1459749 - RNA, 19 nt, Homo sapiens
  misc_RNA (1)...(19): siRNA sense strand
ccuaucgcauuaagaaauu

SEQ ID NO: 1459750 - RNA, 19 nt, Homo sapiens
  misc_RNA (1)...(19): siRNA sense strand
uuggagaacugcuaaccua

SEQ ID NO: 1459751 - RNA, 19 nt, Homo sapiens
  misc_RNA (1)...(19): siRNA sense strand
aaacaaaugagaccaagga

SEQ ID NO: 1459752 - RNA, 19 nt, Homo sapiens
  misc_RNA (1)...(19): siRNA sense strand
uuacagaugcauaauggua

SEQ ID NO: 1459753 - RNA, 19 nt, Homo sapiens
  misc_RNA (1)...(19): siRNA sense strand
uaaccuagggcuacuguug

SEQ ID NO: 1459754 - RNA, 19 nt, Homo sapiens
  misc_RNA (1)...(19): siRNA sense strand
aaaguacucgcagaaguua

SEQ ID NO: 1459755 - RNA, 19 nt, Homo sapiens
  misc_RNA (1)...(19): siRNA sense strand
cuccagaccugaucagaau

SEQ ID NO: 1459756 - RNA, 19 nt, Homo sapiens
  misc_RNA (1)...(19): siRNA sense strand
aaagauggcuacaaaugcu

SEQ ID NO: 1459757 - RNA, 19 nt, Homo sapiens
  misc_RNA (1)...(19): siRNA sense strand
ucacucaugacggguauua

SEQ ID NO: 1459758 - RNA, 19 nt, Homo sapiens
  misc_RNA (1)...(19): siRNA sense strand
cacaaaagccuacaagaaa

SEQ ID NO: 1459759 - RNA, 19 nt, Homo sapiens
  misc_RNA (1)...(19): siRNA sense strand
uaacaccugaugggaauuu

SEQ ID NO: 1459760 - RNA, 19 nt, Homo sapiens
  misc_RNA (1)...(19): siRNA sense strand
caagaaagaaacaaaugag

SEQ ID NO: 1459761 - RNA, 19 nt, Homo sapiens
  misc_RNA (1)...(19): siRNA sense strand
ccaaggaaaccaacuguac

SEQ ID NO: 1459762 - RNA, 19 nt, Homo sapiens
  misc_RNA (1)...(19): siRNA sense strand
ggaaaccaacuguacugau

SEQ ID NO: 1459763 - RNA, 19 nt, Homo sapiens
  misc_RNA (1)...(19): siRNA sense strand
cuucauggccuguaaagau

SEQ ID NO: 1459764 - RNA, 19 nt, Homo sapiens
  misc_RNA (1)...(19): siRNA sense strand
uuacacagaacuacucgaa

SEQ ID NO: 1459765 - RNA, 19 nt, Homo sapiens
  misc_RNA (1)...(19): siRNA sense strand
cuagggcuacuguugauuu

SEQ ID NO: 1459766 - RNA, 19 nt, Homo sapiens
  misc_RNA (1)...(19): siRNA sense strand
ggguauuacagaugcauaa

SEQ ID NO: 1459767 - RNA, 19 nt, Homo sapiens
  misc_RNA (1)...(19): siRNA sense strand
gggcuacuguugauuuuga

SEQ ID NO: 1459768 - RNA, 19 nt, Homo sapiens
  misc_RNA (1)...(19): siRNA sense strand
ccuccuaucgcauuaagaa

SEQ ID NO: 1459769 - RNA, 19 nt, Homo sapiens
  misc_RNA (1)...(19): siRNA sense strand
uaaagauggcuacaaaugc

SEQ ID NO: 1459770 - RNA, 19 nt, Homo sapiens
  misc_RNA (1)...(19): siRNA sense strand
gugcuuuguugcccuccua

SEQ ID NO: 1459771 - RNA, 19 nt, Homo sapiens
  misc_RNA (1)...(19): siRNA sense strand
acaaaugagaccaaggaaa

SEQ ID NO: 1459772 - RNA, 19 nt, Homo sapiens
  misc_RNA (1)...(19): siRNA sense strand
aaaccaacuguacugauga

SEQ ID NO: 1459773 - RNA, 19 nt, Homo sapiens
  misc_RNA (1)...(19): siRNA sense strand
caucacucaugacggguau

SEQ ID NO: 1459774 - RNA, 19 nt, Homo sapiens
  misc_RNA (1)...(19): siRNA sense strand
gcaguuuauguauggauga

SEQ ID NO: 1459775 - RNA, 19 nt, Homo sapiens
  misc_RNA (1)...(19): siRNA sense strand
caugacggguauuacagau

SEQ ID NO: 1459776 - RNA, 19 nt, Homo sapiens
  misc_RNA (1)...(19): siRNA sense strand
ggccagccuuccugcacaa

SEQ ID NO: 1459777 - RNA, 19 nt, Homo sapiens
  misc_RNA (1)...(19): siRNA sense strand
gaccaaggaaaccaacugu

SEQ ID NO: 1459778 - RNA, 19 nt, Homo sapiens
  misc_RNA (1)...(19): siRNA sense strand
ggcuacaaaugcugugcuu

SEQ ID NO: 1459779 - RNA, 19 nt, Homo sapiens
  misc_RNA (1)...(19): siRNA sense strand
uacagaugcauaaugguaa

SEQ ID NO: 1459780 - RNA, 19 nt, Homo sapiens
  misc_RNA (1)...(19): siRNA sense strand
ccuacaagaaagaaacaaa

SEQ ID NO: 1459781 - RNA, 19 nt, Homo sapiens
  misc_RNA (1)...(19): siRNA sense strand
gcucugcccuuggagaacu

SEQ ID NO: 1459782 - RNA, 19 nt, Homo sapiens
  misc_RNA (1)...(19): siRNA sense strand
caaggaaaccaacuguacu

SEQ ID NO: 1459783 - RNA, 19 nt, Homo sapiens
  misc_RNA (1)...(19): siRNA sense strand
uucauggccuguaaagaug

SEQ ID NO: 1459784 - RNA, 19 nt, Homo sapiens
  misc_RNA (1)...(19): siRNA sense strand
ccagaccugaucagaauuc

SEQ ID NO: 1459785 - RNA, 19 nt, Homo sapiens
  misc_RNA (1)...(19): siRNA sense strand
caguuuauguauggaugaa

SEQ ID NO: 1459786 - RNA, 19 nt, Homo sapiens
  misc_RNA (1)...(19): siRNA sense strand
aaacagauuacacagaacu

SEQ ID NO: 1459787 - RNA, 19 nt, Homo sapiens
  misc_RNA (1)...(19): siRNA sense strand
ccguggccaucacucauga

SEQ ID NO: 1459788 - RNA, 19 nt, Homo sapiens
  misc_RNA (1)...(19): siRNA sense strand
guaccguggccaucacuca

SEQ ID NO: 1459789 - RNA, 19 nt, Homo sapiens
  misc_RNA (1)...(19): siRNA sense strand
uucaagcaguuuauguaug

SEQ ID NO: 1459790 - RNA, 19 nt, Homo sapiens
  misc_RNA (1)...(19): siRNA sense strand
gcccuuggagaacugcuaa

SEQ ID NO: 1459791 - RNA, 19 nt, Homo sapiens
  misc_RNA (1)...(19): siRNA sense strand
cuucaagcaguuuauguau

SEQ ID NO: 1459792 - RNA, 19 nt, Homo sapiens
  misc_RNA (1)...(19): siRNA sense strand
gaaaccaacuguacugaug

SEQ ID NO: 1459793 - RNA, 19 nt, Homo sapiens
  misc_RNA (1)...(19): siRNA sense strand
gaauagaacugcaguaugc

SEQ ID NO: 1459794 - RNA, 19 nt, Homo sapiens
  misc_RNA (1)...(19): siRNA sense strand
gaagugacccuguuucaaa

SEQ ID NO: 1459795 - RNA, 19 nt, Homo sapiens
  misc_RNA (1)...(19): siRNA sense strand
gaaaguacucgcagaaguu

SEQ ID NO: 1459796 - RNA, 19 nt, Homo sapiens
  misc_RNA (1)...(19): siRNA sense strand
gauaucaccuccaaguguu

SEQ ID NO: 1459797 - RNA, 19 nt, Homo sapiens
  misc_RNA (1)...(19): siRNA sense strand
caacuguacugaugagaga

SEQ ID NO: 1459798 - RNA, 19 nt, Homo sapiens
  misc_RNA (1)...(19): siRNA sense strand
caagaauacuggagcaaug

SEQ ID NO: 1459799 - RNA, 19 nt, Homo sapiens
  misc_RNA (1)...(19): siRNA sense strand
guaaagauggcuacaaaug

SEQ ID NO: 1459800 - RNA, 19 nt, Homo sapiens
  misc_RNA (1)...(19): siRNA sense strand
gguaacaccugaugggaau

SEQ ID NO: 1459801 - RNA, 19 nt, Homo sapiens
  misc_RNA (1)...(19): siRNA sense strand
acacagaacuacucgaaag

SEQ ID NO: 1459802 - RNA, 19 nt, Homo sapiens
  misc_RNA (1)...(19): siRNA sense strand
cgaaaguacucgcagaagu

SEQ ID NO: 1459803 - RNA, 19 nt, Homo sapiens
  misc_RNA (1)...(19): siRNA sense strand
gaagccagcugcgcauauc

SEQ ID NO: 1459804 - RNA, 19 nt, Homo sapiens
  misc_RNA (1)...(19): siRNA sense strand
ucaagcaguuuauguaugg

SEQ ID NO: 1459805 - RNA, 19 nt, Homo sapiens
  misc_RNA (1)...(19): siRNA sense strand
gcacaaaagccuacaagaa

SEQ ID NO: 1459806 - RNA, 19 nt, Homo sapiens
  misc_RNA (1)...(19): siRNA sense strand
ggauaucaccuccaagugu

SEQ ID NO: 1459807 - RNA, 19 nt, Homo sapiens
  misc_RNA (1)...(19): siRNA sense strand
gaauucggaccuucagauu

SEQ ID NO: 1459808 - RNA, 19 nt, Homo sapiens
  misc_RNA (1)...(19): siRNA sense strand
caaaugagaccaaggaaac

SEQ ID NO: 1459809 - RNA, 19 nt, Homo sapiens
  misc_RNA (1)...(19): siRNA sense strand
ccuaucgcauuaagaaauu

SEQ ID NO: 1459810 - RNA, 19 nt, Homo sapiens
  misc_RNA (1)...(19): siRNA sense strand
uuggagaacugcuaaccua

SEQ ID NO: 1459811 - RNA, 19 nt, Homo sapiens
  misc_RNA (1)...(19): siRNA sense strand
ggaauagaacugcaguaug

SEQ ID NO: 1459812 - RNA, 19 nt, Homo sapiens
  misc_RNA (1)...(19): siRNA sense strand
aaacaaaugagaccaagga

SEQ ID NO: 1459813 - RNA, 19 nt, Homo sapiens
  misc_RNA (1)...(19): siRNA sense strand
uuacagaugcauaauggua

SEQ ID NO: 1459814 - RNA, 19 nt, Homo sapiens
  misc_RNA (1)...(19): siRNA sense strand
uaaccuagggcuacuguug

SEQ ID NO: 1459815 - RNA, 19 nt, Homo sapiens
  misc_RNA (1)...(19): siRNA sense strand
ccacuaagcaagaauacug

SEQ ID NO: 1459816 - RNA, 19 nt, Homo sapiens
  misc_RNA (1)...(19): siRNA sense strand
aaaguacucgcagaaguua

SEQ ID NO: 1459817 - RNA, 19 nt, Homo sapiens
  misc_RNA (1)...(19): siRNA sense strand
cuccagaccugaucagaau

SEQ ID NO: 1459818 - RNA, 19 nt, Homo sapiens
  misc_RNA (1)...(19): siRNA sense strand
aaagauggcuacaaaugcu

SEQ ID NO: 1459819 - RNA, 19 nt, Homo sapiens
  misc_RNA (1)...(19): siRNA sense strand
gcaagaauacuggagcaau

SEQ ID NO: 1459820 - RNA, 19 nt, Homo sapiens
  misc_RNA (1)...(19): siRNA sense strand
ucacucaugacggguauua

SEQ ID NO: 1459821 - RNA, 19 nt, Homo sapiens
  misc_RNA (1)...(19): siRNA sense strand
ggaagccagcugcgcauau

SEQ ID NO: 1459822 - RNA, 19 nt, Homo sapiens
  misc_RNA (1)...(19): siRNA sense strand
cacaaaagccuacaagaaa

SEQ ID NO: 1459823 - RNA, 19 nt, Homo sapiens
  misc_RNA (1)...(19): siRNA sense strand
uaacaccugaugggaauuu

SEQ ID NO: 1459824 - RNA, 19 nt, Homo sapiens
  misc_RNA (1)...(19): siRNA sense strand
caagaaagaaacaaaugag

SEQ ID NO: 1459825 - RNA, 19 nt, Homo sapiens
  misc_RNA (1)...(19): siRNA sense strand
ccaaggaaaccaacuguac

SEQ ID NO: 1459826 - RNA, 19 nt, Homo sapiens
  misc_RNA (1)...(19): siRNA sense strand
ggaaaccaacuguacugau

SEQ ID NO: 1459827 - RNA, 19 nt, Homo sapiens
  misc_RNA (1)...(19): siRNA sense strand
caccugaagugacccuguu

SEQ ID NO: 1459828 - RNA, 19 nt, Homo sapiens
  misc_RNA (1)...(19): siRNA sense strand
cuucauggccuguaaagau

SEQ ID NO: 1459829 - RNA, 19 nt, Homo sapiens
  misc_RNA (1)...(19): siRNA sense strand
uuacacagaacuacucgaa

SEQ ID NO: 1459830 - RNA, 19 nt, Homo sapiens
  misc_RNA (1)...(19): siRNA sense strand
ggguauuacagaugcauaa

SEQ ID NO: 1459831 - RNA, 19 nt, Homo sapiens
  misc_RNA (1)...(19): siRNA sense strand
cuagggcuacuguugauuu

SEQ ID NO: 1459832 - RNA, 19 nt, Homo sapiens
  misc_RNA (1)...(19): siRNA sense strand
gggcuacuguugauuuuga

SEQ ID NO: 1459833 - RNA, 19 nt, Homo sapiens
  misc_RNA (1)...(19): siRNA sense strand
ccuccuaucgcauuaagaa

SEQ ID NO: 1459834 - RNA, 19 nt, Homo sapiens
  misc_RNA (1)...(19): siRNA sense strand
uaaagauggcuacaaaugc

SEQ ID NO: 1459835 - RNA, 19 nt, Homo sapiens
  misc_RNA (1)...(19): siRNA sense strand
gugcuuuguugcccuccua

SEQ ID NO: 1459836 - RNA, 19 nt, Homo sapiens
  misc_RNA (1)...(19): siRNA sense strand
acaaaugagaccaaggaaa

SEQ ID NO: 1459837 - RNA, 19 nt, Homo sapiens
  misc_RNA (1)...(19): siRNA sense strand
gcaguuuauguauggauga

SEQ ID NO: 1459838 - RNA, 19 nt, Homo sapiens
  misc_RNA (1)...(19): siRNA sense strand
caucacucaugacggguau

SEQ ID NO: 1459839 - RNA, 19 nt, Homo sapiens
  misc_RNA (1)...(19): siRNA sense strand
aaaccaacuguacugauga

SEQ ID NO: 1459840 - RNA, 19 nt, Homo sapiens
  misc_RNA (1)...(19): siRNA sense strand
caugacggguauuacagau

SEQ ID NO: 1459841 - RNA, 19 nt, Homo sapiens
  misc_RNA (1)...(19): siRNA sense strand
ggccagccuuccugcacaa

SEQ ID NO: 1459842 - RNA, 19 nt, Homo sapiens
  misc_RNA (1)...(19): siRNA sense strand
gaccaaggaaaccaacugu

SEQ ID NO: 1459843 - RNA, 19 nt, Homo sapiens
  misc_RNA (1)...(19): siRNA sense strand
ggcuacaaaugcugugcuu

SEQ ID NO: 1459844 - RNA, 19 nt, Homo sapiens
  misc_RNA (1)...(19): siRNA sense strand
uacagaugcauaaugguaa

SEQ ID NO: 1459845 - RNA, 19 nt, Homo sapiens
  misc_RNA (1)...(19): siRNA sense strand
ccuacaagaaagaaacaaa

SEQ ID NO: 1459846 - RNA, 19 nt, Homo sapiens
  misc_RNA (1)...(19): siRNA sense strand
gcucugcccuuggagaacu

SEQ ID NO: 1459847 - RNA, 19 nt, Homo sapiens
  misc_RNA (1)...(19): siRNA sense strand
caaggaaaccaacuguacu

SEQ ID NO: 1459848 - RNA, 19 nt, Homo sapiens
  misc_RNA (1)...(19): siRNA sense strand
uucauggccuguaaagaug

SEQ ID NO: 1459849 - RNA, 19 nt, Homo sapiens
  misc_RNA (1)...(19): siRNA sense strand
gugccacuaagcaagaaua

SEQ ID NO: 1459850 - RNA, 19 nt, Homo sapiens
  misc_RNA (1)...(19): siRNA sense strand
ccagaccugaucagaauuc

SEQ ID NO: 1459851 - RNA, 19 nt, Homo sapiens
  misc_RNA (1)...(19): siRNA sense strand
caguuuauguauggaugaa

SEQ ID NO: 1459852 - RNA, 19 nt, Homo sapiens
  misc_RNA (1)...(19): siRNA sense strand
gcgauugugccacuaagca

SEQ ID NO: 1459853 - RNA, 19 nt, Homo sapiens
  misc_RNA (1)...(19): siRNA sense strand
gaucccagagggcgauugu

SEQ ID NO: 1459854 - RNA, 19 nt, Homo sapiens
  misc_RNA (1)...(19): siRNA sense strand
gcaguaugcaaggcaguug

SEQ ID NO: 1459855 - RNA, 19 nt, Homo sapiens
  misc_RNA (1)...(19): siRNA sense strand
ccguggccaucacucauga

SEQ ID NO: 1459856 - RNA, 19 nt, Homo sapiens
  misc_RNA (1)...(19): siRNA sense strand
gggaagccagcugcgcaua

SEQ ID NO: 1459857 - RNA, 19 nt, Homo sapiens
  misc_RNA (1)...(19): siRNA sense strand
aaacagauuacacagaacu

SEQ ID NO: 1459858 - RNA, 19 nt, Homo sapiens
  misc_RNA (1)...(19): siRNA sense strand
guaccguggccaucacuca

SEQ ID NO: 1459859 - RNA, 19 nt, Homo sapiens
  misc_RNA (1)...(19): siRNA sense strand
uucaagcaguuuauguaug

SEQ ID NO: 1459860 - RNA, 19 nt, Homo sapiens
  misc_RNA (1)...(19): siRNA sense strand
cuucaagcaguuuauguau

SEQ ID NO: 1459861 - RNA, 19 nt, Homo sapiens
  misc_RNA (1)...(19): siRNA sense strand
gcccuuggagaacugcuaa

SEQ ID NO: 1459862 - RNA, 19 nt, Homo sapiens
  misc_RNA (1)...(19): siRNA sense strand
gaagagggcuguggucaua

SEQ ID NO: 1459863 - RNA, 19 nt, Homo sapiens
  misc_RNA (1)...(19): siRNA sense strand
ggcgagagcuccacggaaa

SEQ ID NO: 1459864 - RNA, 19 nt, Homo sapiens
  misc_RNA (1)...(19): siRNA sense strand
ggaaagugaugaggaggaa

SEQ ID NO: 1459865 - RNA, 19 nt, Homo sapiens
  misc_RNA (1)...(19): siRNA sense strand
ugagaaaccucgggccuuu

SEQ ID NO: 1459866 - RNA, 19 nt, Homo sapiens
  misc_RNA (1)...(19): siRNA sense strand
gaaacggaagccagagaaa

SEQ ID NO: 1459867 - RNA, 19 nt, Homo sapiens
  misc_RNA (1)...(19): siRNA sense strand
ggaaacggaagccagagaa

SEQ ID NO: 1459868 - RNA, 19 nt, Homo sapiens
  misc_RNA (1)...(19): siRNA sense strand
gugacacuguggacaauga

SEQ ID NO: 1459869 - RNA, 19 nt, Homo sapiens
  misc_RNA (1)...(19): siRNA sense strand
gcugcuguauuuaugagaa

SEQ ID NO: 1459870 - RNA, 19 nt, Homo sapiens
  misc_RNA (1)...(19): siRNA sense strand
gugaugaggaggaagaaga

SEQ ID NO: 1459871 - RNA, 19 nt, Homo sapiens
  misc_RNA (1)...(19): siRNA sense strand
ugagcgagaccgucacuga

SEQ ID NO: 1459872 - RNA, 19 nt, Homo sapiens
  misc_RNA (1)...(19): siRNA sense strand
guacguggccaccgcaaag

SEQ ID NO: 1459873 - RNA, 19 nt, Homo sapiens
  misc_RNA (1)...(19): siRNA sense strand
aaccggagccuuaccauca

SEQ ID NO: 1459874 - RNA, 19 nt, Homo sapiens
  misc_RNA (1)...(19): siRNA sense strand
aaagugaugaggaggaaga

SEQ ID NO: 1459875 - RNA, 19 nt, Homo sapiens
  misc_RNA (1)...(19): siRNA sense strand
aagguagaauggacaagug

SEQ ID NO: 1459876 - RNA, 19 nt, Homo sapiens
  misc_RNA (1)...(19): siRNA sense strand
ucauccaaaugcugcugua

SEQ ID NO: 1459877 - RNA, 19 nt, Homo sapiens
  misc_RNA (1)...(19): siRNA sense strand
cagggccaaugcagcacua

SEQ ID NO: 1459878 - RNA, 19 nt, Homo sapiens
  misc_RNA (1)...(19): siRNA sense strand
guagaauggacaagugaca

SEQ ID NO: 1459879 - RNA, 19 nt, Homo sapiens
  misc_RNA (1)...(19): siRNA sense strand
gagccuuaccaucaaacuu

SEQ ID NO: 1459880 - RNA, 19 nt, Homo sapiens
  misc_RNA (1)...(19): siRNA sense strand
agagggcuguggucauaca

SEQ ID NO: 1459881 - RNA, 19 nt, Homo sapiens
  misc_RNA (1)...(19): siRNA sense strand
ccggagccuuaccaucaaa

SEQ ID NO: 1459882 - RNA, 19 nt, Homo sapiens
  misc_RNA (1)...(19): siRNA sense strand
ucacugagacaacgguuac

SEQ ID NO: 1459883 - RNA, 19 nt, Homo sapiens
  misc_RNA (1)...(19): siRNA sense strand
cugcuguauuuaugagaaa

SEQ ID NO: 1459884 - RNA, 19 nt, Homo sapiens
  misc_RNA (1)...(19): siRNA sense strand
gagaaaccucgggccuuug

SEQ ID NO: 1459885 - RNA, 19 nt, Homo sapiens
  misc_RNA (1)...(19): siRNA sense strand
ugagcgagaccgucacuga

SEQ ID NO: 1459886 - RNA, 19 nt, Homo sapiens
  misc_RNA (1)...(19): siRNA sense strand
ucacugagacaacgguuac

SEQ ID NO: 1459887 - RNA, 19 nt, Homo sapiens
  misc_RNA (1)...(19): siRNA sense strand
ggaaagagcucuacaucaa

SEQ ID NO: 1459888 - RNA, 19 nt, Homo sapiens
  misc_RNA (1)...(19): siRNA sense strand
ggaaauagaugauucugau

SEQ ID NO: 1459889 - RNA, 19 nt, Homo sapiens
  misc_RNA (1)...(19): siRNA sense strand
gaaaacagauuccaaauga

SEQ ID NO: 1459890 - RNA, 19 nt, Homo sapiens
  misc_RNA (1)...(19): siRNA sense strand
gcaaggaggugacaauguu

SEQ ID NO: 1459891 - RNA, 19 nt, Homo sapiens
  misc_RNA (1)...(19): siRNA sense strand
ggaaagacacugacaauga

SEQ ID NO: 1459892 - RNA, 19 nt, Homo sapiens
  misc_RNA (1)...(19): siRNA sense strand
ggacucggcugaucaaaug

SEQ ID NO: 1459893 - RNA, 19 nt, Homo sapiens
  misc_RNA (1)...(19): siRNA sense strand
gcaagaagauccggaaaga

SEQ ID NO: 1459894 - RNA, 19 nt, Homo sapiens
  misc_RNA (1)...(19): siRNA sense strand
ggaaagaaacgcgcuauuu

SEQ ID NO: 1459895 - RNA, 19 nt, Homo sapiens
  misc_RNA (1)...(19): siRNA sense strand
gaagcuauauguacuuugu

SEQ ID NO: 1459896 - RNA, 19 nt, Homo sapiens
  misc_RNA (1)...(19): siRNA sense strand
gacacaagguuugguauaa

SEQ ID NO: 1459897 - RNA, 19 nt, Homo sapiens
  misc_RNA (1)...(19): siRNA sense strand
gauuuggucugaagcuaua

SEQ ID NO: 1459898 - RNA, 19 nt, Homo sapiens
  misc_RNA (1)...(19): siRNA sense strand
uaauauaucucccaugcuu

SEQ ID NO: 1459899 - RNA, 19 nt, Homo sapiens
  misc_RNA (1)...(19): siRNA sense strand
gaaagacacugacaaugac

SEQ ID NO: 1459900 - RNA, 19 nt, Homo sapiens
  misc_RNA (1)...(19): siRNA sense strand
gcgaauggauaaauggaaa

SEQ ID NO: 1459901 - RNA, 19 nt, Homo sapiens
  misc_RNA (1)...(19): siRNA sense strand
gaaaucaucacgcauuguu

SEQ ID NO: 1459902 - RNA, 19 nt, Homo sapiens
  misc_RNA (1)...(19): siRNA sense strand
gaaagucagucugguuaug

SEQ ID NO: 1459903 - RNA, 19 nt, Homo sapiens
  misc_RNA (1)...(19): siRNA sense strand
guucuuuacugaggaauua

SEQ ID NO: 1459904 - RNA, 19 nt, Homo sapiens
  misc_RNA (1)...(19): siRNA sense strand
ggacgacuguagccagauu

SEQ ID NO: 1459905 - RNA, 19 nt, Homo sapiens
  misc_RNA (1)...(19): siRNA sense strand
gaacuuauggcacugaaau

SEQ ID NO: 1459906 - RNA, 19 nt, Homo sapiens
  misc_RNA (1)...(19): siRNA sense strand
gaucaaaugcuuacuucuu

SEQ ID NO: 1459907 - RNA, 19 nt, Homo sapiens
  misc_RNA (1)...(19): siRNA sense strand
gaaagaaacgcgcuauuuu

SEQ ID NO: 1459908 - RNA, 19 nt, Homo sapiens
  misc_RNA (1)...(19): siRNA sense strand
uuacagugcugaacuccua

SEQ ID NO: 1459909 - RNA, 19 nt, Homo sapiens
  misc_RNA (1)...(19): siRNA sense strand
ugauaucacugacccauug

SEQ ID NO: 1459910 - RNA, 19 nt, Homo sapiens
  misc_RNA (1)...(19): siRNA sense strand
cgacaaggauggcaagaag

SEQ ID NO: 1459911 - RNA, 19 nt, Homo sapiens
  misc_RNA (1)...(19): siRNA sense strand
acagaaacauugcaguuga

SEQ ID NO: 1459912 - RNA, 19 nt, Homo sapiens
  misc_RNA (1)...(19): siRNA sense strand
gauaagaucaggccucugu

SEQ ID NO: 1459913 - RNA, 19 nt, Homo sapiens
  misc_RNA (1)...(19): siRNA sense strand
ggcaugaauuugaaagauu

SEQ ID NO: 1459914 - RNA, 19 nt, Homo sapiens
  misc_RNA (1)...(19): siRNA sense strand
gaugagccauauaaacuuc

SEQ ID NO: 1459915 - RNA, 19 nt, Homo sapiens
  misc_RNA (1)...(19): siRNA sense strand
caaaggcccagauuucauu

SEQ ID NO: 1459916 - RNA, 19 nt, Homo sapiens
  misc_RNA (1)...(19): siRNA sense strand
aagaagauccggaaagaaa

SEQ ID NO: 1459917 - RNA, 19 nt, Homo sapiens
  misc_RNA (1)...(19): siRNA sense strand
agacuggcauugauugaaa

SEQ ID NO: 1459918 - RNA, 19 nt, Homo sapiens
  misc_RNA (1)...(19): siRNA sense strand
ccaaggguauugugucuuc

SEQ ID NO: 1459919 - RNA, 19 nt, Homo sapiens
  misc_RNA (1)...(19): siRNA sense strand
ucagggcgcuccaugaaau

SEQ ID NO: 1459920 - RNA, 19 nt, Homo sapiens
  misc_RNA (1)...(19): siRNA sense strand
gugaaagucagucugguua

SEQ ID NO: 1459921 - RNA, 19 nt, Homo sapiens
  misc_RNA (1)...(19): siRNA sense strand
gaagaucaaaccuguguuc

SEQ ID NO: 1459922 - RNA, 19 nt, Homo sapiens
  misc_RNA (1)...(19): siRNA sense strand
cauuagcuaugaagcagua

SEQ ID NO: 1459923 - RNA, 19 nt, Homo sapiens
  misc_RNA (1)...(19): siRNA sense strand
aaccugagcuggagauguu

SEQ ID NO: 1459924 - RNA, 19 nt, Homo sapiens
  misc_RNA (1)...(19): siRNA sense strand
guucuuaccuuggucaaug

SEQ ID NO: 1459925 - RNA, 19 nt, Homo sapiens
  misc_RNA (1)...(19): siRNA sense strand
ucaggccucugucccauuu

SEQ ID NO: 1459926 - RNA, 19 nt, Homo sapiens
  misc_RNA (1)...(19): siRNA sense strand
cgaguacgauuuggucuga

SEQ ID NO: 1459927 - RNA, 19 nt, Homo sapiens
  misc_RNA (1)...(19): siRNA sense strand
guuccgugcuuugaaauuu

SEQ ID NO: 1459928 - RNA, 19 nt, Homo sapiens
  misc_RNA (1)...(19): siRNA sense strand
aauuaugacuggugaaaga

SEQ ID NO: 1459929 - RNA, 19 nt, Homo sapiens
  misc_RNA (1)...(19): siRNA sense strand
aaacagaaacauugcaguu

SEQ ID NO: 1459930 - RNA, 19 nt, Homo sapiens
  misc_RNA (1)...(19): siRNA sense strand
gagcacacgaugagccaua

SEQ ID NO: 1459931 - RNA, 19 nt, Homo sapiens
  misc_RNA (1)...(19): siRNA sense strand
gauuccaaaugaucugaaa

SEQ ID NO: 1459932 - RNA, 19 nt, Homo sapiens
  misc_RNA (1)...(19): siRNA sense strand
uauugugucuuccucgaua

SEQ ID NO: 1459933 - RNA, 19 nt, Homo sapiens
  misc_RNA (1)...(19): siRNA sense strand
aaagagcucuacaucaagu

SEQ ID NO: 1459934 - RNA, 19 nt, Homo sapiens
  misc_RNA (1)...(19): siRNA sense strand
cacaagguuugguauaaga

SEQ ID NO: 1459935 - RNA, 19 nt, Homo sapiens
  misc_RNA (1)...(19): siRNA sense strand
aaacauugcaguugaugaa

SEQ ID NO: 1459936 - RNA, 19 nt, Homo sapiens
  misc_RNA (1)...(19): siRNA sense strand
uauaucugcuggucaauca

SEQ ID NO: 1459937 - RNA, 19 nt, Homo sapiens
  misc_RNA (1)...(19): siRNA sense strand
uaugacuggugaaagauuu

SEQ ID NO: 1459938 - RNA, 19 nt, Homo sapiens
  misc_RNA (1)...(19): siRNA sense strand
caaauuaugacuggugaaa

SEQ ID NO: 1459939 - RNA, 19 nt, Homo sapiens
  misc_RNA (1)...(19): siRNA sense strand
ccuuaucucaggcaaauua

SEQ ID NO: 1459940 - RNA, 19 nt, Homo sapiens
  misc_RNA (1)...(19): siRNA sense strand
gcaagguauugugcagaaa

SEQ ID NO: 1459941 - RNA, 19 nt, Homo sapiens
  misc_RNA (1)...(19): siRNA sense strand
caccaucuucuacacauua

SEQ ID NO: 1459942 - RNA, 19 nt, Homo sapiens
  misc_RNA (1)...(19): siRNA sense strand
gcuaugauuccacgucaaa

SEQ ID NO: 1459943 - RNA, 19 nt, Homo sapiens
  misc_RNA (1)...(19): siRNA sense strand
guguucgacuuucuuguaa

SEQ ID NO: 1459944 - RNA, 19 nt, Homo sapiens
  misc_RNA (1)...(19): siRNA sense strand
uaauguuacugcaagguau

SEQ ID NO: 1459945 - RNA, 19 nt, Homo sapiens
  misc_RNA (1)...(19): siRNA sense strand
guuguuccgugcuuugaaa

SEQ ID NO: 1459946 - RNA, 19 nt, Homo sapiens
  misc_RNA (1)...(19): siRNA sense strand
gaugaugucacaccucuuc

SEQ ID NO: 1459947 - RNA, 19 nt, Homo sapiens
  misc_RNA (1)...(19): siRNA sense strand
gcaguggacucggcugauc

SEQ ID NO: 1459948 - RNA, 19 nt, Homo sapiens
  misc_RNA (1)...(19): siRNA sense strand
gaaagagcucuacaucaag

SEQ ID NO: 1459949 - RNA, 19 nt, Homo sapiens
  misc_RNA (1)...(19): siRNA sense strand
guucgacuuucuuguaaau

SEQ ID NO: 1459950 - RNA, 19 nt, Homo sapiens
  misc_RNA (1)...(19): siRNA sense strand
ucaaaccuguguucgacuu

SEQ ID NO: 1459951 - RNA, 19 nt, Homo sapiens
  misc_RNA (1)...(19): siRNA sense strand
cacgugucauuguggauua

SEQ ID NO: 1459952 - RNA, 19 nt, Homo sapiens
  misc_RNA (1)...(19): siRNA sense strand
aaacagauuccaaaugauc

SEQ ID NO: 1459953 - RNA, 19 nt, Homo sapiens
  misc_RNA (1)...(19): siRNA sense strand
ggacagcucguuugaacag

SEQ ID NO: 1459954 - RNA, 19 nt, Homo sapiens
  misc_RNA (1)...(19): siRNA sense strand
ggccuggcaugaauuugaa

SEQ ID NO: 1459955 - RNA, 19 nt, Homo sapiens
  misc_RNA (1)...(19): siRNA sense strand
caccuuaucucaggcaaau

SEQ ID NO: 1459956 - RNA, 19 nt, Homo sapiens
  misc_RNA (1)...(19): siRNA sense strand
gaaacauugcaguugauga

SEQ ID NO: 1459957 - RNA, 19 nt, Homo sapiens
  misc_RNA (1)...(19): siRNA sense strand
guauauacuccaaacagaa

SEQ ID NO: 1459958 - RNA, 19 nt, Homo sapiens
  misc_RNA (1)...(19): siRNA sense strand
uaucucaggcaaauuauga

SEQ ID NO: 1459959 - RNA, 19 nt, Homo sapiens
  misc_RNA (1)...(19): siRNA sense strand
cagauuucauugcagaaga

SEQ ID NO: 1459960 - RNA, 19 nt, Homo sapiens
  misc_RNA (1)...(19): siRNA sense strand
gauguuccgcuuuguguug

SEQ ID NO: 1459961 - RNA, 19 nt, Homo sapiens
  misc_RNA (1)...(19): siRNA sense strand
uggcauugauugaaagaau

SEQ ID NO: 1459962 - RNA, 19 nt, Homo sapiens
  misc_RNA (1)...(19): siRNA sense strand
gauuauaacgagaauaugg

SEQ ID NO: 1459963 - RNA, 19 nt, Homo sapiens
  misc_RNA (1)...(19): siRNA sense strand
uuuagaaucugauggaaag

SEQ ID NO: 1459964 - RNA, 19 nt, Homo sapiens
  misc_RNA (1)...(19): siRNA sense strand
agacacaagguuugguaua

SEQ ID NO: 1459965 - RNA, 19 nt, Homo sapiens
  misc_RNA (1)...(19): siRNA sense strand
aaagacacaagguuuggua

SEQ ID NO: 1459966 - RNA, 19 nt, Homo sapiens
  misc_RNA (1)...(19): siRNA sense strand
agcaguaccucccgacaaa

SEQ ID NO: 1459967 - RNA, 19 nt, Homo sapiens
  misc_RNA (1)...(19): siRNA sense strand
cagaaacauugcaguugau

SEQ ID NO: 1459968 - RNA, 19 nt, Homo sapiens
  misc_RNA (1)...(19): siRNA sense strand
uguauauacuccaaacaga

SEQ ID NO: 1459969 - RNA, 19 nt, Homo sapiens
  misc_RNA (1)...(19): siRNA sense strand
gggccuggcaugaauuuga

SEQ ID NO: 1459970 - RNA, 19 nt, Homo sapiens
  misc_RNA (1)...(19): siRNA sense strand
gcacacgaugagccauaua

SEQ ID NO: 1459971 - RNA, 19 nt, Homo sapiens
  misc_RNA (1)...(19): siRNA sense strand
gcauuguucuuaccuuggu

SEQ ID NO: 1459972 - RNA, 19 nt, Homo sapiens
  misc_RNA (1)...(19): siRNA sense strand
aaugugauguuccgcuuug

SEQ ID NO: 1459973 - RNA, 19 nt, Homo sapiens
  misc_RNA (1)...(19): siRNA sense strand
caacaaggccucuuuugga

SEQ ID NO: 1459974 - RNA, 19 nt, Homo sapiens
  misc_RNA (1)...(19): siRNA sense strand
ccuacauccuguucaagaa

SEQ ID NO: 1459975 - RNA, 19 nt, Homo sapiens
  misc_RNA (1)...(19): siRNA sense strand
cagcucguuugaacagaaa

SEQ ID NO: 1459976 - RNA, 19 nt, Homo sapiens
  misc_RNA (1)...(19): siRNA sense strand
ggucugaagcuauauguac

SEQ ID NO: 1459977 - RNA, 19 nt, Homo sapiens
  misc_RNA (1)...(19): siRNA sense strand
cagaagaucaaaccugugu

SEQ ID NO: 1459978 - RNA, 19 nt, Homo sapiens
  misc_RNA (1)...(19): siRNA sense strand
ugaaauuuaccacacgaaa

SEQ ID NO: 1459979 - RNA, 19 nt, Homo sapiens
  misc_RNA (1)...(19): siRNA sense strand
agaaacaaaugcccaagcu

SEQ ID NO: 1459980 - RNA, 19 nt, Homo sapiens
  misc_RNA (1)...(19): siRNA sense strand
gaaauuuaccacacgaaaa

SEQ ID NO: 1459981 - RNA, 19 nt, Homo sapiens
  misc_RNA (1)...(19): siRNA sense strand
gaaugugauguuccgcuuu

SEQ ID NO: 1459982 - RNA, 19 nt, Homo sapiens
  misc_RNA (1)...(19): siRNA sense strand
caacguccgggaaacagaa

SEQ ID NO: 1459983 - RNA, 19 nt, Homo sapiens
  misc_RNA (1)...(19): siRNA sense strand
ggccaaggguauugugucu

SEQ ID NO: 1459984 - RNA, 19 nt, Homo sapiens
  misc_RNA (1)...(19): siRNA sense strand
gaauggauaaauggaaaga

SEQ ID NO: 1459985 - RNA, 19 nt, Homo sapiens
  misc_RNA (1)...(19): siRNA sense strand
gaaugcgcuuguucacaca

SEQ ID NO: 1459986 - RNA, 19 nt, Homo sapiens
  misc_RNA (1)...(19): siRNA sense strand
ccugaaaucaucacgcauu

SEQ ID NO: 1459987 - RNA, 19 nt, Homo sapiens
  misc_RNA (1)...(19): siRNA sense strand
gaacaaacccgacaguaaa

SEQ ID NO: 1459988 - RNA, 19 nt, Homo sapiens
  misc_RNA (1)...(19): siRNA sense strand
gcaagaaggucaacucuca

SEQ ID NO: 1459989 - RNA, 19 nt, Homo sapiens
  misc_RNA (1)...(19): siRNA sense strand
ccaaaugccuccugaacaa

SEQ ID NO: 1459990 - RNA, 19 nt, Homo sapiens
  misc_RNA (1)...(19): siRNA sense strand
guccagagcuauuucauug

SEQ ID NO: 1459991 - RNA, 19 nt, Homo sapiens
  misc_RNA (1)...(19): siRNA sense strand
cagauccuguguccuauua

SEQ ID NO: 1459992 - RNA, 19 nt, Homo sapiens
  misc_RNA (1)...(19): siRNA sense strand
cgagugaccuggaacaaga

SEQ ID NO: 1459993 - RNA, 19 nt, Homo sapiens
  misc_RNA (1)...(19): siRNA sense strand
gugccaaucugccuuguaa

SEQ ID NO: 1459994 - RNA, 19 nt, Homo sapiens
  misc_RNA (1)...(19): siRNA sense strand
gaggagaagucacggauca

SEQ ID NO: 1459995 - RNA, 19 nt, Homo sapiens
  misc_RNA (1)...(19): siRNA sense strand
gaagagcgagccuaccuuu

SEQ ID NO: 1459996 - RNA, 19 nt, Homo sapiens
  misc_RNA (1)...(19): siRNA sense strand
caacaugccucaguauauc

SEQ ID NO: 1459997 - RNA, 19 nt, Homo sapiens
  misc_RNA (1)...(19): siRNA sense strand
ggacucccauggugacuga

SEQ ID NO: 1459998 - RNA, 19 nt, Homo sapiens
  misc_RNA (1)...(19): siRNA sense strand
ggucaacucucagcgcuuu

SEQ ID NO: 1459999 - RNA, 19 nt, Homo sapiens
  misc_RNA (1)...(19): siRNA sense strand
aagaauggcuccagugaga

SEQ ID NO: 1460000 - RNA, 19 nt, Homo sapiens
  misc_RNA (1)...(19): siRNA sense strand
ggacauggaucuggaagag

SEQ ID NO: 1460001 - RNA, 19 nt, Homo sapiens
  misc_RNA (1)...(19): siRNA sense strand
ggagggcucugacuacauc

SEQ ID NO: 1460002 - RNA, 19 nt, Homo sapiens
  misc_RNA (1)...(19): siRNA sense strand
ccaucgagcuggccacauu

SEQ ID NO: 1460003 - RNA, 19 nt, Homo sapiens
  misc_RNA (1)...(19): siRNA sense strand
uagauccgauggcagaaua

SEQ ID NO: 1460004 - RNA, 19 nt, Homo sapiens
  misc_RNA (1)...(19): siRNA sense strand
ggagaagugucaccaguac

SEQ ID NO: 1460005 - RNA, 19 nt, Homo sapiens
  misc_RNA (1)...(19): siRNA sense strand
caaggacccuguggaaaug

SEQ ID NO: 1460006 - RNA, 19 nt, Homo sapiens
  misc_RNA (1)...(19): siRNA sense strand
gaagugaacaagccgaaga

SEQ ID NO: 1460007 - RNA, 19 nt, Homo sapiens
  misc_RNA (1)...(19): siRNA sense strand
caggucacguugcuagaua

SEQ ID NO: 1460008 - RNA, 19 nt, Homo sapiens
  misc_RNA (1)...(19): siRNA sense strand
gcaauggacgcaucaaaca

SEQ ID NO: 1460009 - RNA, 19 nt, Homo sapiens
  misc_RNA (1)...(19): siRNA sense strand
gaacagggugugccaaagu

SEQ ID NO: 1460010 - RNA, 19 nt, Homo sapiens
  misc_RNA (1)...(19): siRNA sense strand
cgacaugggcccacaguug

SEQ ID NO: 1460011 - RNA, 19 nt, Homo sapiens
  misc_RNA (1)...(19): siRNA sense strand
acacgucacuggcauggaa

SEQ ID NO: 1460012 - RNA, 19 nt, Homo sapiens
  misc_RNA (1)...(19): siRNA sense strand
agaacaaacccgacaguaa

SEQ ID NO: 1460013 - RNA, 19 nt, Homo sapiens
  misc_RNA (1)...(19): siRNA sense strand
ccagagcuauuucauugug

SEQ ID NO: 1460014 - RNA, 19 nt, Homo sapiens
  misc_RNA (1)...(19): siRNA sense strand
ccaaggacccuguggaaau

SEQ ID NO: 1460015 - RNA, 19 nt, Homo sapiens
  misc_RNA (1)...(19): siRNA sense strand
caucaacgccagcuucauu

SEQ ID NO: 1460016 - RNA, 19 nt, Homo sapiens
  misc_RNA (1)...(19): siRNA sense strand
ugacgcggcuggaggagaa

SEQ ID NO: 1460017 - RNA, 19 nt, Homo sapiens
  misc_RNA (1)...(19): siRNA sense strand
ccuacaagauccaguacaa

SEQ ID NO: 1460018 - RNA, 19 nt, Homo sapiens
  misc_RNA (1)...(19): siRNA sense strand
ugaccacuaugcaaccuaa

SEQ ID NO: 1460019 - RNA, 19 nt, Homo sapiens
  misc_RNA (1)...(19): siRNA sense strand
aauacaacaugccucagua

SEQ ID NO: 1460020 - RNA, 19 nt, Homo sapiens
  misc_RNA (1)...(19): siRNA sense strand
gaauggcuccagugagaaa

SEQ ID NO: 1460021 - RNA, 19 nt, Homo sapiens
  misc_RNA (1)...(19): siRNA sense strand
gaacaagaagggcaagaag

SEQ ID NO: 1460022 - RNA, 19 nt, Homo sapiens
  misc_RNA (1)...(19): siRNA sense strand
aggagaguaucaucaagua

SEQ ID NO: 1460023 - RNA, 19 nt, Homo sapiens
  misc_RNA (1)...(19): siRNA sense strand
gccaagugcauaagacuaa

SEQ ID NO: 1460024 - RNA, 19 nt, Homo sapiens
  misc_RNA (1)...(19): siRNA sense strand
gacaugggcccacaguuga

SEQ ID NO: 1460025 - RNA, 19 nt, Homo sapiens
  misc_RNA (1)...(19): siRNA sense strand
ggccguaucagauuaaaga

SEQ ID NO: 1460026 - RNA, 19 nt, Homo sapiens
  misc_RNA (1)...(19): siRNA sense strand
caacgcccuuccuggcuuu

SEQ ID NO: 1460027 - RNA, 19 nt, Homo sapiens
  misc_RNA (1)...(19): siRNA sense strand
ggugaaaucucuccccaaa

SEQ ID NO: 1460028 - RNA, 19 nt, Homo sapiens
  misc_RNA (1)...(19): siRNA sense strand
gaauacaacaugccucagu

SEQ ID NO: 1460029 - RNA, 19 nt, Homo sapiens
  misc_RNA (1)...(19): siRNA sense strand
ggaacaagaagggcaagaa

SEQ ID NO: 1460030 - RNA, 19 nt, Homo sapiens
  misc_RNA (1)...(19): siRNA sense strand
gcaacuggcagaagcacaa

SEQ ID NO: 1460031 - RNA, 19 nt, Homo sapiens
  misc_RNA (1)...(19): siRNA sense strand
gggagaagugucaccagua

SEQ ID NO: 1460032 - RNA, 19 nt, Homo sapiens
  misc_RNA (1)...(19): siRNA sense strand
cgucagaacgcguacauug

SEQ ID NO: 1460033 - RNA, 19 nt, Homo sapiens
  misc_RNA (1)...(19): siRNA sense strand
aaaccgaccagggcaaaua

SEQ ID NO: 1460034 - RNA, 19 nt, Homo sapiens
  misc_RNA (1)...(19): siRNA sense strand
gcaggagaguaucaucaag

SEQ ID NO: 1460035 - RNA, 19 nt, Homo sapiens
  misc_RNA (1)...(19): siRNA sense strand
uugagacgauugaguuuga

SEQ ID NO: 1460036 - RNA, 19 nt, Homo sapiens
  misc_RNA (1)...(19): siRNA sense strand
gagcgagccuaccuuugca

SEQ ID NO: 1460037 - RNA, 19 nt, Homo sapiens
  misc_RNA (1)...(19): siRNA sense strand
ggaaaccgaccagggcaaa

SEQ ID NO: 1460038 - RNA, 19 nt, Homo sapiens
  misc_RNA (1)...(19): siRNA sense strand
cggaagcuuugaccacuau

SEQ ID NO: 1460039 - RNA, 19 nt, Homo sapiens
  misc_RNA (1)...(19): siRNA sense strand
gcagacagaggaugaguac

SEQ ID NO: 1460040 - RNA, 19 nt, Homo sapiens
  misc_RNA (1)...(19): siRNA sense strand
ggaacagggugugccaaag

SEQ ID NO: 1460041 - RNA, 19 nt, Homo sapiens
  misc_RNA (1)...(19): siRNA sense strand
ucaagugugaucaguauug

SEQ ID NO: 1460042 - RNA, 19 nt, Homo sapiens
  misc_RNA (1)...(19): siRNA sense strand
cauaaucugcauugucauu

SEQ ID NO: 1460043 - RNA, 19 nt, Homo sapiens
  misc_RNA (1)...(19): siRNA sense strand
gccguggucuucauaaucu

SEQ ID NO: 1460044 - RNA, 19 nt, Homo sapiens
  misc_RNA (1)...(19): siRNA sense strand
ccaccgcuauguccucuuc

SEQ ID NO: 1460045 - RNA, 19 nt, Homo sapiens
  misc_RNA (1)...(19): siRNA sense strand
uucauaaucugcauuguca

SEQ ID NO: 1460046 - RNA, 19 nt, Homo sapiens
  misc_RNA (1)...(19): siRNA sense strand
ggaguaccucggaagcuuu

SEQ ID NO: 1460047 - RNA, 19 nt, Homo sapiens
  misc_RNA (1)...(19): siRNA sense strand
gcucugcccgcuaccagua

SEQ ID NO: 1460048 - RNA, 19 nt, Homo sapiens
  misc_RNA (1)...(19): siRNA sense strand
ugaccaagcugcgggagau

SEQ ID NO: 1460049 - RNA, 19 nt, Homo sapiens
  misc_RNA (1)...(19): siRNA sense strand
ucaagcggcuggcuaacuc

SEQ ID NO: 1460050 - RNA, 19 nt, Homo sapiens
  misc_RNA (1)...(19): siRNA sense strand
gagcggaucaagccagaga

SEQ ID NO: 1460051 - RNA, 19 nt, Homo sapiens
  misc_RNA (1)...(19): siRNA sense strand
ucaaggacucggccaacua

SEQ ID NO: 1460052 - RNA, 19 nt, Homo sapiens
  misc_RNA (1)...(19): siRNA sense strand
gcuuugagacgauugaguu

SEQ ID NO: 1460053 - RNA, 19 nt, Homo sapiens
  misc_RNA (1)...(19): siRNA sense strand
gacauucucucugcacaag

SEQ ID NO: 1460054 - RNA, 19 nt, Homo sapiens
  misc_RNA (1)...(19): siRNA sense strand
gaucaugaagacaucaguu

SEQ ID NO: 1460055 - RNA, 19 nt, Homo sapiens
  misc_RNA (1)...(19): siRNA sense strand
caguauggcggcuucgaua

SEQ ID NO: 1460056 - RNA, 19 nt, Homo sapiens
  misc_RNA (1)...(19): siRNA sense strand
augaguaccaguucuguua

SEQ ID NO: 1460057 - RNA, 19 nt, Homo sapiens
  misc_RNA (1)...(19): siRNA sense strand
acaacaugccucaguauau

SEQ ID NO: 1460058 - RNA, 19 nt, Homo sapiens
  misc_RNA (1)...(19): siRNA sense strand
gauggcagaauacaacaug

SEQ ID NO: 1460059 - RNA, 19 nt, Homo sapiens
  misc_RNA (1)...(19): siRNA sense strand
guccgccaguuccaguuua

SEQ ID NO: 1460060 - RNA, 19 nt, Homo sapiens
  misc_RNA (1)...(19): siRNA sense strand
gagcggaugcgguaugaag

SEQ ID NO: 1460061 - RNA, 19 nt, Homo sapiens
  misc_RNA (1)...(19): siRNA sense strand
caaguacgagcuccucuuc

SEQ ID NO: 1460062 - RNA, 19 nt, Homo sapiens
  misc_RNA (1)...(19): siRNA sense strand
uacaagauccaguacaaug

SEQ ID NO: 1460063 - RNA, 19 nt, Homo sapiens
  misc_RNA (1)...(19): siRNA sense strand
ggaacucacagaugucaag

SEQ ID NO: 1460064 - RNA, 19 nt, Homo sapiens
  misc_RNA (1)...(19): siRNA sense strand
uacaacaugccucaguaua

SEQ ID NO: 1460065 - RNA, 19 nt, Homo sapiens
  misc_RNA (1)...(19): siRNA sense strand
ucaagaaccgccuggugaa

SEQ ID NO: 1460066 - RNA, 19 nt, Homo sapiens
  misc_RNA (1)...(19): siRNA sense strand
gcccacacgucacgcuuca

SEQ ID NO: 1460067 - RNA, 19 nt, Homo sapiens
  misc_RNA (1)...(19): siRNA sense strand
acaagaauggcuccaguga

SEQ ID NO: 1460068 - RNA, 19 nt, Homo sapiens
  misc_RNA (1)...(19): siRNA sense strand
ucacguugcuagauaccau

SEQ ID NO: 1460069 - RNA, 19 nt, Homo sapiens
  misc_RNA (1)...(19): siRNA sense strand
cagagaagacagucgaugu

SEQ ID NO: 1460070 - RNA, 19 nt, Homo sapiens
  misc_RNA (1)...(19): siRNA sense strand
gaccauggcgugcccgaau

SEQ ID NO: 1460071 - RNA, 19 nt, Homo sapiens
  misc_RNA (1)...(19): siRNA sense strand
ggacauucucucugcacaa

SEQ ID NO: 1460072 - RNA, 19 nt, Homo sapiens
  misc_RNA (1)...(19): siRNA sense strand
ucaccugguucaaggacuu

SEQ ID NO: 1460073 - RNA, 19 nt, Homo sapiens
  misc_RNA (1)...(19): siRNA sense strand
gaggaugaguaccaguucu

SEQ ID NO: 1460074 - RNA, 19 nt, Homo sapiens
  misc_RNA (1)...(19): siRNA sense strand
caagugugaucaguauugg

SEQ ID NO: 1460075 - RNA, 19 nt, Homo sapiens
  misc_RNA (1)...(19): siRNA sense strand
gaacgugcuggaacucaca

SEQ ID NO: 1460076 - RNA, 19 nt, Homo sapiens
  misc_RNA (1)...(19): siRNA sense strand
gauccuagugccagcaaug

SEQ ID NO: 1460077 - RNA, 19 nt, Homo sapiens
  misc_RNA (1)...(19): siRNA sense strand
gggcuucaucgacuucauu

SEQ ID NO: 1460078 - RNA, 19 nt, Homo sapiens
  misc_RNA (1)...(19): siRNA sense strand
gggagggcuucaucgacuu

SEQ ID NO: 1460079 - RNA, 19 nt, Homo sapiens
  misc_RNA (1)...(19): siRNA sense strand
gaagucacggaucaagugu

SEQ ID NO: 1460080 - RNA, 19 nt, Homo sapiens
  misc_RNA (1)...(19): siRNA sense strand
caugggcagugauuacauc

SEQ ID NO: 1460081 - RNA, 19 nt, Homo sapiens
  misc_RNA (1)...(19): siRNA sense strand
guaaacgcaaggacucaga

SEQ ID NO: 1460082 - RNA, 19 nt, Homo sapiens
  misc_RNA (1)...(19): siRNA sense strand
gcccuggcauggugucugu

SEQ ID NO: 1460083 - RNA, 19 nt, Homo sapiens
  misc_RNA (1)...(19): siRNA sense strand
acccugagaucaccugguu

SEQ ID NO: 1460084 - RNA, 19 nt, Homo sapiens
  misc_RNA (1)...(19): siRNA sense strand
ucauugcuauccugcucua

SEQ ID NO: 1460085 - RNA, 19 nt, Homo sapiens
  misc_RNA (1)...(19): siRNA sense strand
gacaucaccaccacacguu

SEQ ID NO: 1460086 - RNA, 19 nt, Homo sapiens
  misc_RNA (1)...(19): siRNA sense strand
gaccagggcaaauaugagu

SEQ ID NO: 1460087 - RNA, 19 nt, Homo sapiens
  misc_RNA (1)...(19): siRNA sense strand
gaacaaacccgacaguaaa

SEQ ID NO: 1460088 - RNA, 19 nt, Homo sapiens
  misc_RNA (1)...(19): siRNA sense strand
gcaagaaggucaacucuca

SEQ ID NO: 1460089 - RNA, 19 nt, Homo sapiens
  misc_RNA (1)...(19): siRNA sense strand
ccaaaugccuccugaacaa

SEQ ID NO: 1460090 - RNA, 19 nt, Homo sapiens
  misc_RNA (1)...(19): siRNA sense strand
guccagagcuauuucauug

SEQ ID NO: 1460091 - RNA, 19 nt, Homo sapiens
  misc_RNA (1)...(19): siRNA sense strand
cagauccuguguccuauua

SEQ ID NO: 1460092 - RNA, 19 nt, Homo sapiens
  misc_RNA (1)...(19): siRNA sense strand
cgagugaccuggaacaaga

SEQ ID NO: 1460093 - RNA, 19 nt, Homo sapiens
  misc_RNA (1)...(19): siRNA sense strand
gugccaaucugccuuguaa

SEQ ID NO: 1460094 - RNA, 19 nt, Homo sapiens
  misc_RNA (1)...(19): siRNA sense strand
gaggagaagucacggauca

SEQ ID NO: 1460095 - RNA, 19 nt, Homo sapiens
  misc_RNA (1)...(19): siRNA sense strand
gaagagcgagccuaccuuu

SEQ ID NO: 1460096 - RNA, 19 nt, Homo sapiens
  misc_RNA (1)...(19): siRNA sense strand
caacaugccucaguauauc

SEQ ID NO: 1460097 - RNA, 19 nt, Homo sapiens
  misc_RNA (1)...(19): siRNA sense strand
ggacucccauggugacuga

SEQ ID NO: 1460098 - RNA, 19 nt, Homo sapiens
  misc_RNA (1)...(19): siRNA sense strand
ggucaacucucagcgcuuu

SEQ ID NO: 1460099 - RNA, 19 nt, Homo sapiens
  misc_RNA (1)...(19): siRNA sense strand
aagaauggcuccagugaga

SEQ ID NO: 1460100 - RNA, 19 nt, Homo sapiens
  misc_RNA (1)...(19): siRNA sense strand
ggacauggaucuggaagag

SEQ ID NO: 1460101 - RNA, 19 nt, Homo sapiens
  misc_RNA (1)...(19): siRNA sense strand
ggagggcucugacuacauc

SEQ ID NO: 1460102 - RNA, 19 nt, Homo sapiens
  misc_RNA (1)...(19): siRNA sense strand
ccaucgagcuggccacauu

SEQ ID NO: 1460103 - RNA, 19 nt, Homo sapiens
  misc_RNA (1)...(19): siRNA sense strand
uagauccgauggcagaaua

SEQ ID NO: 1460104 - RNA, 19 nt, Homo sapiens
  misc_RNA (1)...(19): siRNA sense strand
ggagaagugucaccaguac

SEQ ID NO: 1460105 - RNA, 19 nt, Homo sapiens
  misc_RNA (1)...(19): siRNA sense strand
caaggacccuguggaaaug

SEQ ID NO: 1460106 - RNA, 19 nt, Homo sapiens
  misc_RNA (1)...(19): siRNA sense strand
gaagugaacaagccgaaga

SEQ ID NO: 1460107 - RNA, 19 nt, Homo sapiens
  misc_RNA (1)...(19): siRNA sense strand
caggucacguugcuagaua

SEQ ID NO: 1460108 - RNA, 19 nt, Homo sapiens
  misc_RNA (1)...(19): siRNA sense strand
gcaauggacgcaucaaaca

SEQ ID NO: 1460109 - RNA, 19 nt, Homo sapiens
  misc_RNA (1)...(19): siRNA sense strand
gaacagggugugccaaagu

SEQ ID NO: 1460110 - RNA, 19 nt, Homo sapiens
  misc_RNA (1)...(19): siRNA sense strand
cgacaugggcccacaguug

SEQ ID NO: 1460111 - RNA, 19 nt, Homo sapiens
  misc_RNA (1)...(19): siRNA sense strand
acacgucacuggcauggaa

SEQ ID NO: 1460112 - RNA, 19 nt, Homo sapiens
  misc_RNA (1)...(19): siRNA sense strand
agaacaaacccgacaguaa

SEQ ID NO: 1460113 - RNA, 19 nt, Homo sapiens
  misc_RNA (1)...(19): siRNA sense strand
ccagagcuauuucauugug

SEQ ID NO: 1460114 - RNA, 19 nt, Homo sapiens
  misc_RNA (1)...(19): siRNA sense strand
ccaaggacccuguggaaau

SEQ ID NO: 1460115 - RNA, 19 nt, Homo sapiens
  misc_RNA (1)...(19): siRNA sense strand
caucaacgccagcuucauu

SEQ ID NO: 1460116 - RNA, 19 nt, Homo sapiens
  misc_RNA (1)...(19): siRNA sense strand
ugacgcggcuggaggagaa

SEQ ID NO: 1460117 - RNA, 19 nt, Homo sapiens
  misc_RNA (1)...(19): siRNA sense strand
ccuacaagauccaguacaa

SEQ ID NO: 1460118 - RNA, 19 nt, Homo sapiens
  misc_RNA (1)...(19): siRNA sense strand
ugaccacuaugcaaccuaa

SEQ ID NO: 1460119 - RNA, 19 nt, Homo sapiens
  misc_RNA (1)...(19): siRNA sense strand
aauacaacaugccucagua

SEQ ID NO: 1460120 - RNA, 19 nt, Homo sapiens
  misc_RNA (1)...(19): siRNA sense strand
gaauggcuccagugagaaa

SEQ ID NO: 1460121 - RNA, 19 nt, Homo sapiens
  misc_RNA (1)...(19): siRNA sense strand
gaacaagaagggcaagaag

SEQ ID NO: 1460122 - RNA, 19 nt, Homo sapiens
  misc_RNA (1)...(19): siRNA sense strand
aggagaguaucaucaagua

SEQ ID NO: 1460123 - RNA, 19 nt, Homo sapiens
  misc_RNA (1)...(19): siRNA sense strand
gccaagugcauaagacuaa

SEQ ID NO: 1460124 - RNA, 19 nt, Homo sapiens
  misc_RNA (1)...(19): siRNA sense strand
gacaugggcccacaguuga

SEQ ID NO: 1460125 - RNA, 19 nt, Homo sapiens
  misc_RNA (1)...(19): siRNA sense strand
ggccguaucagauuaaaga

SEQ ID NO: 1460126 - RNA, 19 nt, Homo sapiens
  misc_RNA (1)...(19): siRNA sense strand
caacgcccuuccuggcuuu

SEQ ID NO: 1460127 - RNA, 19 nt, Homo sapiens
  misc_RNA (1)...(19): siRNA sense strand
ggugaaaucucuccccaaa

SEQ ID NO: 1460128 - RNA, 19 nt, Homo sapiens
  misc_RNA (1)...(19): siRNA sense strand
gaauacaacaugccucagu

SEQ ID NO: 1460129 - RNA, 19 nt, Homo sapiens
  misc_RNA (1)...(19): siRNA sense strand
ggaacaagaagggcaagaa

SEQ ID NO: 1460130 - RNA, 19 nt, Homo sapiens
  misc_RNA (1)...(19): siRNA sense strand
gcaacuggcagaagcacaa

SEQ ID NO: 1460131 - RNA, 19 nt, Homo sapiens
  misc_RNA (1)...(19): siRNA sense strand
gggagaagugucaccagua

SEQ ID NO: 1460132 - RNA, 19 nt, Homo sapiens
  misc_RNA (1)...(19): siRNA sense strand
cgucagaacgcguacauug

SEQ ID NO: 1460133 - RNA, 19 nt, Homo sapiens
  misc_RNA (1)...(19): siRNA sense strand
aaaccgaccagggcaaaua

SEQ ID NO: 1460134 - RNA, 19 nt, Homo sapiens
  misc_RNA (1)...(19): siRNA sense strand
gcaggagaguaucaucaag

SEQ ID NO: 1460135 - RNA, 19 nt, Homo sapiens
  misc_RNA (1)...(19): siRNA sense strand
uugagacgauugaguuuga

SEQ ID NO: 1460136 - RNA, 19 nt, Homo sapiens
  misc_RNA (1)...(19): siRNA sense strand
gagcgagccuaccuuugca

SEQ ID NO: 1460137 - RNA, 19 nt, Homo sapiens
  misc_RNA (1)...(19): siRNA sense strand
ggaaaccgaccagggcaaa

SEQ ID NO: 1460138 - RNA, 19 nt, Homo sapiens
  misc_RNA (1)...(19): siRNA sense strand
cggaagcuuugaccacuau

SEQ ID NO: 1460139 - RNA, 19 nt, Homo sapiens
  misc_RNA (1)...(19): siRNA sense strand
gcagacagaggaugaguac

SEQ ID NO: 1460140 - RNA, 19 nt, Homo sapiens
  misc_RNA (1)...(19): siRNA sense strand
ggaacagggugugccaaag

SEQ ID NO: 1460141 - RNA, 19 nt, Homo sapiens
  misc_RNA (1)...(19): siRNA sense strand
ucaagugugaucaguauug

SEQ ID NO: 1460142 - RNA, 19 nt, Homo sapiens
  misc_RNA (1)...(19): siRNA sense strand
cauaaucugcauugucauu

SEQ ID NO: 1460143 - RNA, 19 nt, Homo sapiens
  misc_RNA (1)...(19): siRNA sense strand
gccguggucuucauaaucu

SEQ ID NO: 1460144 - RNA, 19 nt, Homo sapiens
  misc_RNA (1)...(19): siRNA sense strand
ccaccgcuauguccucuuc

SEQ ID NO: 1460145 - RNA, 19 nt, Homo sapiens
  misc_RNA (1)...(19): siRNA sense strand
uucauaaucugcauuguca

SEQ ID NO: 1460146 - RNA, 19 nt, Homo sapiens
  misc_RNA (1)...(19): siRNA sense strand
ggaguaccucggaagcuuu

SEQ ID NO: 1460147 - RNA, 19 nt, Homo sapiens
  misc_RNA (1)...(19): siRNA sense strand
gcucugcccgcuaccagua

SEQ ID NO: 1460148 - RNA, 19 nt, Homo sapiens
  misc_RNA (1)...(19): siRNA sense strand
ugaccaagcugcgggagau

SEQ ID NO: 1460149 - RNA, 19 nt, Homo sapiens
  misc_RNA (1)...(19): siRNA sense strand
ucaagcggcuggcuaacuc

SEQ ID NO: 1460150 - RNA, 19 nt, Homo sapiens
  misc_RNA (1)...(19): siRNA sense strand
gagcggaucaagccagaga

SEQ ID NO: 1460151 - RNA, 19 nt, Homo sapiens
  misc_RNA (1)...(19): siRNA sense strand
ucaaggacucggccaacua

SEQ ID NO: 1460152 - RNA, 19 nt, Homo sapiens
  misc_RNA (1)...(19): siRNA sense strand
gcuuugagacgauugaguu

SEQ ID NO: 1460153 - RNA, 19 nt, Homo sapiens
  misc_RNA (1)...(19): siRNA sense strand
gacauucucucugcacaag

SEQ ID NO: 1460154 - RNA, 19 nt, Homo sapiens
  misc_RNA (1)...(19): siRNA sense strand
gaucaugaagacaucaguu

SEQ ID NO: 1460155 - RNA, 19 nt, Homo sapiens
  misc_RNA (1)...(19): siRNA sense strand
caguauggcggcuucgaua

SEQ ID NO: 1460156 - RNA, 19 nt, Homo sapiens
  misc_RNA (1)...(19): siRNA sense strand
augaguaccaguucuguua

SEQ ID NO: 1460157 - RNA, 19 nt, Homo sapiens
  misc_RNA (1)...(19): siRNA sense strand
acaacaugccucaguauau

SEQ ID NO: 1460158 - RNA, 19 nt, Homo sapiens
  misc_RNA (1)...(19): siRNA sense strand
gauggcagaauacaacaug

SEQ ID NO: 1460159 - RNA, 19 nt, Homo sapiens
  misc_RNA (1)...(19): siRNA sense strand
guccgccaguuccaguuua

SEQ ID NO: 1460160 - RNA, 19 nt, Homo sapiens
  misc_RNA (1)...(19): siRNA sense strand
gagcggaugcgguaugaag

SEQ ID NO: 1460161 - RNA, 19 nt, Homo sapiens
  misc_RNA (1)...(19): siRNA sense strand
caaguacgagcuccucuuc

SEQ ID NO: 1460162 - RNA, 19 nt, Homo sapiens
  misc_RNA (1)...(19): siRNA sense strand
uacaagauccaguacaaug

SEQ ID NO: 1460163 - RNA, 19 nt, Homo sapiens
  misc_RNA (1)...(19): siRNA sense strand
ggaacucacagaugucaag

SEQ ID NO: 1460164 - RNA, 19 nt, Homo sapiens
  misc_RNA (1)...(19): siRNA sense strand
uacaacaugccucaguaua

SEQ ID NO: 1460165 - RNA, 19 nt, Homo sapiens
  misc_RNA (1)...(19): siRNA sense strand
ucaagaaccgccuggugaa

SEQ ID NO: 1460166 - RNA, 19 nt, Homo sapiens
  misc_RNA (1)...(19): siRNA sense strand
gcccacacgucacgcuuca

SEQ ID NO: 1460167 - RNA, 19 nt, Homo sapiens
  misc_RNA (1)...(19): siRNA sense strand
acaagaauggcuccaguga

SEQ ID NO: 1460168 - RNA, 19 nt, Homo sapiens
  misc_RNA (1)...(19): siRNA sense strand
ucacguugcuagauaccau

SEQ ID NO: 1460169 - RNA, 19 nt, Homo sapiens
  misc_RNA (1)...(19): siRNA sense strand
cagagaagacagucgaugu

SEQ ID NO: 1460170 - RNA, 19 nt, Homo sapiens
  misc_RNA (1)...(19): siRNA sense strand
gaccauggcgugcccgaau

SEQ ID NO: 1460171 - RNA, 19 nt, Homo sapiens
  misc_RNA (1)...(19): siRNA sense strand
ggacauucucucugcacaa

SEQ ID NO: 1460172 - RNA, 19 nt, Homo sapiens
  misc_RNA (1)...(19): siRNA sense strand
ucaccugguucaaggacuu

SEQ ID NO: 1460173 - RNA, 19 nt, Homo sapiens
  misc_RNA (1)...(19): siRNA sense strand
gaggaugaguaccaguucu

SEQ ID NO: 1460174 - RNA, 19 nt, Homo sapiens
  misc_RNA (1)...(19): siRNA sense strand
caagugugaucaguauugg

SEQ ID NO: 1460175 - RNA, 19 nt, Homo sapiens
  misc_RNA (1)...(19): siRNA sense strand
gaacgugcuggaacucaca

SEQ ID NO: 1460176 - RNA, 19 nt, Homo sapiens
  misc_RNA (1)...(19): siRNA sense strand
gauccuagugccagcaaug

SEQ ID NO: 1460177 - RNA, 19 nt, Homo sapiens
  misc_RNA (1)...(19): siRNA sense strand
gggcuucaucgacuucauu

SEQ ID NO: 1460178 - RNA, 19 nt, Homo sapiens
  misc_RNA (1)...(19): siRNA sense strand
gggagggcuucaucgacuu

SEQ ID NO: 1460179 - RNA, 19 nt, Homo sapiens
  misc_RNA (1)...(19): siRNA sense strand
gaagucacggaucaagugu

SEQ ID NO: 1460180 - RNA, 19 nt, Homo sapiens
  misc_RNA (1)...(19): siRNA sense strand
caugggcagugauuacauc

SEQ ID NO: 1460181 - RNA, 19 nt, Homo sapiens
  misc_RNA (1)...(19): siRNA sense strand
guaaacgcaaggacucaga

SEQ ID NO: 1460182 - RNA, 19 nt, Homo sapiens
  misc_RNA (1)...(19): siRNA sense strand
gcccuggcauggugucugu

SEQ ID NO: 1460183 - RNA, 19 nt, Homo sapiens
  misc_RNA (1)...(19): siRNA sense strand
acccugagaucaccugguu

SEQ ID NO: 1460184 - RNA, 19 nt, Homo sapiens
  misc_RNA (1)...(19): siRNA sense strand
ucauugcuauccugcucua

SEQ ID NO: 1460185 - RNA, 19 nt, Homo sapiens
  misc_RNA (1)...(19): siRNA sense strand
gacaucaccaccacacguu

SEQ ID NO: 1460186 - RNA, 19 nt, Homo sapiens
  misc_RNA (1)...(19): siRNA sense strand
gaccagggcaaauaugagu

SEQ ID NO: 1460187 - RNA, 19 nt, Homo sapiens
  misc_RNA (1)...(19): siRNA sense strand
gaacaaacccgacaguaaa

SEQ ID NO: 1460188 - RNA, 19 nt, Homo sapiens
  misc_RNA (1)...(19): siRNA sense strand
gcaagaaggucaacucuca

SEQ ID NO: 1460189 - RNA, 19 nt, Homo sapiens
  misc_RNA (1)...(19): siRNA sense strand
ccaaaugccuccugaacaa

SEQ ID NO: 1460190 - RNA, 19 nt, Homo sapiens
  misc_RNA (1)...(19): siRNA sense strand
guccagagcuauuucauug

SEQ ID NO: 1460191 - RNA, 19 nt, Homo sapiens
  misc_RNA (1)...(19): siRNA sense strand
cagauccuguguccuauua

SEQ ID NO: 1460192 - RNA, 19 nt, Homo sapiens
  misc_RNA (1)...(19): siRNA sense strand
cgagugaccuggaacaaga

SEQ ID NO: 1460193 - RNA, 19 nt, Homo sapiens
  misc_RNA (1)...(19): siRNA sense strand
gugccaaucugccuuguaa

SEQ ID NO: 1460194 - RNA, 19 nt, Homo sapiens
  misc_RNA (1)...(19): siRNA sense strand
gaggagaagucacggauca

SEQ ID NO: 1460195 - RNA, 19 nt, Homo sapiens
  misc_RNA (1)...(19): siRNA sense strand
gaagagcgagccuaccuuu

SEQ ID NO: 1460196 - RNA, 19 nt, Homo sapiens
  misc_RNA (1)...(19): siRNA sense strand
caacaugccucaguauauc

SEQ ID NO: 1460197 - RNA, 19 nt, Homo sapiens
  misc_RNA (1)...(19): siRNA sense strand
ggacucccauggugacuga

SEQ ID NO: 1460198 - RNA, 19 nt, Homo sapiens
  misc_RNA (1)...(19): siRNA sense strand
ggucaacucucagcgcuuu

SEQ ID NO: 1460199 - RNA, 19 nt, Homo sapiens
  misc_RNA (1)...(19): siRNA sense strand
aagaauggcuccagugaga

SEQ ID NO: 1460200 - RNA, 19 nt, Homo sapiens
  misc_RNA (1)...(19): siRNA sense strand
ggacauggaucuggaagag

SEQ ID NO: 1460201 - RNA, 19 nt, Homo sapiens
  misc_RNA (1)...(19): siRNA sense strand
ggagggcucugacuacauc

SEQ ID NO: 1460202 - RNA, 19 nt, Homo sapiens
  misc_RNA (1)...(19): siRNA sense strand
ccaucgagcuggccacauu

SEQ ID NO: 1460203 - RNA, 19 nt, Homo sapiens
  misc_RNA (1)...(19): siRNA sense strand
uagauccgauggcagaaua

SEQ ID NO: 1460204 - RNA, 19 nt, Homo sapiens
  misc_RNA (1)...(19): siRNA sense strand
ggagaagugucaccaguac

SEQ ID NO: 1460205 - RNA, 19 nt, Homo sapiens
  misc_RNA (1)...(19): siRNA sense strand
caaggacccuguggaaaug

SEQ ID NO: 1460206 - RNA, 19 nt, Homo sapiens
  misc_RNA (1)...(19): siRNA sense strand
gaagugaacaagccgaaga

SEQ ID NO: 1460207 - RNA, 19 nt, Homo sapiens
  misc_RNA (1)...(19): siRNA sense strand
caggucacguugcuagaua

SEQ ID NO: 1460208 - RNA, 19 nt, Homo sapiens
  misc_RNA (1)...(19): siRNA sense strand
gcaauggacgcaucaaaca

SEQ ID NO: 1460209 - RNA, 19 nt, Homo sapiens
  misc_RNA (1)...(19): siRNA sense strand
gaacagggugugccaaagu

SEQ ID NO: 1460210 - RNA, 19 nt, Homo sapiens
  misc_RNA (1)...(19): siRNA sense strand
cgacaugggcccacaguug

SEQ ID NO: 1460211 - RNA, 19 nt, Homo sapiens
  misc_RNA (1)...(19): siRNA sense strand
acacgucacuggcauggaa

SEQ ID NO: 1460212 - RNA, 19 nt, Homo sapiens
  misc_RNA (1)...(19): siRNA sense strand
agaacaaacccgacaguaa

SEQ ID NO: 1460213 - RNA, 19 nt, Homo sapiens
  misc_RNA (1)...(19): siRNA sense strand
ccagagcuauuucauugug

SEQ ID NO: 1460214 - RNA, 19 nt, Homo sapiens
  misc_RNA (1)...(19): siRNA sense strand
ccaaggacccuguggaaau

SEQ ID NO: 1460215 - RNA, 19 nt, Homo sapiens
  misc_RNA (1)...(19): siRNA sense strand
caucaacgccagcuucauu

SEQ ID NO: 1460216 - RNA, 19 nt, Homo sapiens
  misc_RNA (1)...(19): siRNA sense strand
ugacgcggcuggaggagaa

SEQ ID NO: 1460217 - RNA, 19 nt, Homo sapiens
  misc_RNA (1)...(19): siRNA sense strand
ccuacaagauccaguacaa

SEQ ID NO: 1460218 - RNA, 19 nt, Homo sapiens
  misc_RNA (1)...(19): siRNA sense strand
ugaccacuaugcaaccuaa

SEQ ID NO: 1460219 - RNA, 19 nt, Homo sapiens
  misc_RNA (1)...(19): siRNA sense strand
aauacaacaugccucagua

SEQ ID NO: 1460220 - RNA, 19 nt, Homo sapiens
  misc_RNA (1)...(19): siRNA sense strand
gaauggcuccagugagaaa

SEQ ID NO: 1460221 - RNA, 19 nt, Homo sapiens
  misc_RNA (1)...(19): siRNA sense strand
gaacaagaagggcaagaag

SEQ ID NO: 1460222 - RNA, 19 nt, Homo sapiens
  misc_RNA (1)...(19): siRNA sense strand
aggagaguaucaucaagua

SEQ ID NO: 1460223 - RNA, 19 nt, Homo sapiens
  misc_RNA (1)...(19): siRNA sense strand
gccaagugcauaagacuaa

SEQ ID NO: 1460224 - RNA, 19 nt, Homo sapiens
  misc_RNA (1)...(19): siRNA sense strand
gacaugggcccacaguuga

SEQ ID NO: 1460225 - RNA, 19 nt, Homo sapiens
  misc_RNA (1)...(19): siRNA sense strand
ggccguaucagauuaaaga

SEQ ID NO: 1460226 - RNA, 19 nt, Homo sapiens
  misc_RNA (1)...(19): siRNA sense strand
caacgcccuuccuggcuuu

SEQ ID NO: 1460227 - RNA, 19 nt, Homo sapiens
  misc_RNA (1)...(19): siRNA sense strand
ggugaaaucucuccccaaa

SEQ ID NO: 1460228 - RNA, 19 nt, Homo sapiens
  misc_RNA (1)...(19): siRNA sense strand
gaauacaacaugccucagu

SEQ ID NO: 1460229 - RNA, 19 nt, Homo sapiens
  misc_RNA (1)...(19): siRNA sense strand
ggaacaagaagggcaagaa

SEQ ID NO: 1460230 - RNA, 19 nt, Homo sapiens
  misc_RNA (1)...(19): siRNA sense strand
gcaacuggcagaagcacaa

SEQ ID NO: 1460231 - RNA, 19 nt, Homo sapiens
  misc_RNA (1)...(19): siRNA sense strand
gggagaagugucaccagua

SEQ ID NO: 1460232 - RNA, 19 nt, Homo sapiens
  misc_RNA (1)...(19): siRNA sense strand
cgucagaacgcguacauug

SEQ ID NO: 1460233 - RNA, 19 nt, Homo sapiens
  misc_RNA (1)...(19): siRNA sense strand
aaaccgaccagggcaaaua

SEQ ID NO: 1460234 - RNA, 19 nt, Homo sapiens
  misc_RNA (1)...(19): siRNA sense strand
gcaggagaguaucaucaag

SEQ ID NO: 1460235 - RNA, 19 nt, Homo sapiens
  misc_RNA (1)...(19): siRNA sense strand
uugagacgauugaguuuga

SEQ ID NO: 1460236 - RNA, 19 nt, Homo sapiens
  misc_RNA (1)...(19): siRNA sense strand
gagcgagccuaccuuugca

SEQ ID NO: 1460237 - RNA, 19 nt, Homo sapiens
  misc_RNA (1)...(19): siRNA sense strand
ggaaaccgaccagggcaaa

SEQ ID NO: 1460238 - RNA, 19 nt, Homo sapiens
  misc_RNA (1)...(19): siRNA sense strand
cggaagcuuugaccacuau

SEQ ID NO: 1460239 - RNA, 19 nt, Homo sapiens
  misc_RNA (1)...(19): siRNA sense strand
gcagacagaggaugaguac

SEQ ID NO: 1460240 - RNA, 19 nt, Homo sapiens
  misc_RNA (1)...(19): siRNA sense strand
ggaacagggugugccaaag

SEQ ID NO: 1460241 - RNA, 19 nt, Homo sapiens
  misc_RNA (1)...(19): siRNA sense strand
ucaagugugaucaguauug

SEQ ID NO: 1460242 - RNA, 19 nt, Homo sapiens
  misc_RNA (1)...(19): siRNA sense strand
cauaaucugcauugucauu

SEQ ID NO: 1460243 - RNA, 19 nt, Homo sapiens
  misc_RNA (1)...(19): siRNA sense strand
gccguggucuucauaaucu

SEQ ID NO: 1460244 - RNA, 19 nt, Homo sapiens
  misc_RNA (1)...(19): siRNA sense strand
ccaccgcuauguccucuuc

SEQ ID NO: 1460245 - RNA, 19 nt, Homo sapiens
  misc_RNA (1)...(19): siRNA sense strand
uucauaaucugcauuguca

SEQ ID NO: 1460246 - RNA, 19 nt, Homo sapiens
  misc_RNA (1)...(19): siRNA sense strand
ggaguaccucggaagcuuu

SEQ ID NO: 1460247 - RNA, 19 nt, Homo sapiens
  misc_RNA (1)...(19): siRNA sense strand
gcucugcccgcuaccagua

SEQ ID NO: 1460248 - RNA, 19 nt, Homo sapiens
  misc_RNA (1)...(19): siRNA sense strand
ugaccaagcugcgggagau

SEQ ID NO: 1460249 - RNA, 19 nt, Homo sapiens
  misc_RNA (1)...(19): siRNA sense strand
ucaagcggcuggcuaacuc

SEQ ID NO: 1460250 - RNA, 19 nt, Homo sapiens
  misc_RNA (1)...(19): siRNA sense strand
gagcggaucaagccagaga

SEQ ID NO: 1460251 - RNA, 19 nt, Homo sapiens
  misc_RNA (1)...(19): siRNA sense strand
ucaaggacucggccaacua

SEQ ID NO: 1460252 - RNA, 19 nt, Homo sapiens
  misc_RNA (1)...(19): siRNA sense strand
gcuuugagacgauugaguu

SEQ ID NO: 1460253 - RNA, 19 nt, Homo sapiens
  misc_RNA (1)...(19): siRNA sense strand
gacauucucucugcacaag

SEQ ID NO: 1460254 - RNA, 19 nt, Homo sapiens
  misc_RNA (1)...(19): siRNA sense strand
gaucaugaagacaucaguu

SEQ ID NO: 1460255 - RNA, 19 nt, Homo sapiens
  misc_RNA (1)...(19): siRNA sense strand
caguauggcggcuucgaua

SEQ ID NO: 1460256 - RNA, 19 nt, Homo sapiens
  misc_RNA (1)...(19): siRNA sense strand
augaguaccaguucuguua

SEQ ID NO: 1460257 - RNA, 19 nt, Homo sapiens
  misc_RNA (1)...(19): siRNA sense strand
acaacaugccucaguauau

SEQ ID NO: 1460258 - RNA, 19 nt, Homo sapiens
  misc_RNA (1)...(19): siRNA sense strand
gauggcagaauacaacaug

SEQ ID NO: 1460259 - RNA, 19 nt, Homo sapiens
  misc_RNA (1)...(19): siRNA sense strand
guccgccaguuccaguuua

SEQ ID NO: 1460260 - RNA, 19 nt, Homo sapiens
  misc_RNA (1)...(19): siRNA sense strand
gagcggaugcgguaugaag

SEQ ID NO: 1460261 - RNA, 19 nt, Homo sapiens
  misc_RNA (1)...(19): siRNA sense strand
caaguacgagcuccucuuc

SEQ ID NO: 1460262 - RNA, 19 nt, Homo sapiens
  misc_RNA (1)...(19): siRNA sense strand
uacaagauccaguacaaug

SEQ ID NO: 1460263 - RNA, 19 nt, Homo sapiens
  misc_RNA (1)...(19): siRNA sense strand
ggaacucacagaugucaag

SEQ ID NO: 1460264 - RNA, 19 nt, Homo sapiens
  misc_RNA (1)...(19): siRNA sense strand
uacaacaugccucaguaua

SEQ ID NO: 1460265 - RNA, 19 nt, Homo sapiens
  misc_RNA (1)...(19): siRNA sense strand
ucaagaaccgccuggugaa

SEQ ID NO: 1460266 - RNA, 19 nt, Homo sapiens
  misc_RNA (1)...(19): siRNA sense strand
gcccacacgucacgcuuca

SEQ ID NO: 1460267 - RNA, 19 nt, Homo sapiens
  misc_RNA (1)...(19): siRNA sense strand
acaagaauggcuccaguga

SEQ ID NO: 1460268 - RNA, 19 nt, Homo sapiens
  misc_RNA (1)...(19): siRNA sense strand
ucacguugcuagauaccau

SEQ ID NO: 1460269 - RNA, 19 nt, Homo sapiens
  misc_RNA (1)...(19): siRNA sense strand
cagagaagacagucgaugu

SEQ ID NO: 1460270 - RNA, 19 nt, Homo sapiens
  misc_RNA (1)...(19): siRNA sense strand
gaccauggcgugcccgaau

SEQ ID NO: 1460271 - RNA, 19 nt, Homo sapiens
  misc_RNA (1)...(19): siRNA sense strand
ggacauucucucugcacaa

SEQ ID NO: 1460272 - RNA, 19 nt, Homo sapiens
  misc_RNA (1)...(19): siRNA sense strand
ucaccugguucaaggacuu

SEQ ID NO: 1460273 - RNA, 19 nt, Homo sapiens
  misc_RNA (1)...(19): siRNA sense strand
gaggaugaguaccaguucu

SEQ ID NO: 1460274 - RNA, 19 nt, Homo sapiens
  misc_RNA (1)...(19): siRNA sense strand
caagugugaucaguauugg

SEQ ID NO: 1460275 - RNA, 19 nt, Homo sapiens
  misc_RNA (1)...(19): siRNA sense strand
gaacgugcuggaacucaca

SEQ ID NO: 1460276 - RNA, 19 nt, Homo sapiens
  misc_RNA (1)...(19): siRNA sense strand
gauccuagugccagcaaug

SEQ ID NO: 1460277 - RNA, 19 nt, Homo sapiens
  misc_RNA (1)...(19): siRNA sense strand
gggcuucaucgacuucauu

SEQ ID NO: 1460278 - RNA, 19 nt, Homo sapiens
  misc_RNA (1)...(19): siRNA sense strand
gggagggcuucaucgacuu

SEQ ID NO: 1460279 - RNA, 19 nt, Homo sapiens
  misc_RNA (1)...(19): siRNA sense strand
gaagucacggaucaagugu

SEQ ID NO: 1460280 - RNA, 19 nt, Homo sapiens
  misc_RNA (1)...(19): siRNA sense strand
caugggcagugauuacauc

SEQ ID NO: 1460281 - RNA, 19 nt, Homo sapiens
  misc_RNA (1)...(19): siRNA sense strand
guaaacgcaaggacucaga

SEQ ID NO: 1460282 - RNA, 19 nt, Homo sapiens
  misc_RNA (1)...(19): siRNA sense strand
gcccuggcauggugucugu

SEQ ID NO: 1460283 - RNA, 19 nt, Homo sapiens
  misc_RNA (1)...(19): siRNA sense strand
acccugagaucaccugguu

SEQ ID NO: 1460284 - RNA, 19 nt, Homo sapiens
  misc_RNA (1)...(19): siRNA sense strand
ucauugcuauccugcucua

SEQ ID NO: 1460285 - RNA, 19 nt, Homo sapiens
  misc_RNA (1)...(19): siRNA sense strand
gacaucaccaccacacguu

SEQ ID NO: 1460286 - RNA, 19 nt, Homo sapiens
  misc_RNA (1)...(19): siRNA sense strand
gaccagggcaaauaugagu

SEQ ID NO: 1460287 - RNA, 19 nt, Homo sapiens
  misc_RNA (1)...(19): siRNA sense strand
gaacaaacccgacaguaaa

SEQ ID NO: 1460288 - RNA, 19 nt, Homo sapiens
  misc_RNA (1)...(19): siRNA sense strand
gcaagaaggucaacucuca

SEQ ID NO: 1460289 - RNA, 19 nt, Homo sapiens
  misc_RNA (1)...(19): siRNA sense strand
ccaaaugccuccugaacaa

SEQ ID NO: 1460290 - RNA, 19 nt, Homo sapiens
  misc_RNA (1)...(19): siRNA sense strand
guccagagcuauuucauug

SEQ ID NO: 1460291 - RNA, 19 nt, Homo sapiens
  misc_RNA (1)...(19): siRNA sense strand
cagauccuguguccuauua

SEQ ID NO: 1460292 - RNA, 19 nt, Homo sapiens
  misc_RNA (1)...(19): siRNA sense strand
cgagugaccuggaacaaga

SEQ ID NO: 1460293 - RNA, 19 nt, Homo sapiens
  misc_RNA (1)...(19): siRNA sense strand
gugccaaucugccuuguaa

SEQ ID NO: 1460294 - RNA, 19 nt, Homo sapiens
  misc_RNA (1)...(19): siRNA sense strand
gaggagaagucacggauca

SEQ ID NO: 1460295 - RNA, 19 nt, Homo sapiens
  misc_RNA (1)...(19): siRNA sense strand
gaagagcgagccuaccuuu

SEQ ID NO: 1460296 - RNA, 19 nt, Homo sapiens
  misc_RNA (1)...(19): siRNA sense strand
caacaugccucaguauauc

SEQ ID NO: 1460297 - RNA, 19 nt, Homo sapiens
  misc_RNA (1)...(19): siRNA sense strand
ggacucccauggugacuga

SEQ ID NO: 1460298 - RNA, 19 nt, Homo sapiens
  misc_RNA (1)...(19): siRNA sense strand
ggucaacucucagcgcuuu

SEQ ID NO: 1460299 - RNA, 19 nt, Homo sapiens
  misc_RNA (1)...(19): siRNA sense strand
aagaauggcuccagugaga

SEQ ID NO: 1460300 - RNA, 19 nt, Homo sapiens
  misc_RNA (1)...(19): siRNA sense strand
ggacauggaucuggaagag

SEQ ID NO: 1460301 - RNA, 19 nt, Homo sapiens
  misc_RNA (1)...(19): siRNA sense strand
ggagggcucugacuacauc

SEQ ID NO: 1460302 - RNA, 19 nt, Homo sapiens
  misc_RNA (1)...(19): siRNA sense strand
ccaucgagcuggccacauu

SEQ ID NO: 1460303 - RNA, 19 nt, Homo sapiens
  misc_RNA (1)...(19): siRNA sense strand
uagauccgauggcagaaua

SEQ ID NO: 1460304 - RNA, 19 nt, Homo sapiens
  misc_RNA (1)...(19): siRNA sense strand
ggagaagugucaccaguac

SEQ ID NO: 1460305 - RNA, 19 nt, Homo sapiens
  misc_RNA (1)...(19): siRNA sense strand
caaggacccuguggaaaug

SEQ ID NO: 1460306 - RNA, 19 nt, Homo sapiens
  misc_RNA (1)...(19): siRNA sense strand
gaagugaacaagccgaaga

SEQ ID NO: 1460307 - RNA, 19 nt, Homo sapiens
  misc_RNA (1)...(19): siRNA sense strand
caggucacguugcuagaua

SEQ ID NO: 1460308 - RNA, 19 nt, Homo sapiens
  misc_RNA (1)...(19): siRNA sense strand
gcaauggacgcaucaaaca

SEQ ID NO: 1460309 - RNA, 19 nt, Homo sapiens
  misc_RNA (1)...(19): siRNA sense strand
gaacagggugugccaaagu

SEQ ID NO: 1460310 - RNA, 19 nt, Homo sapiens
  misc_RNA (1)...(19): siRNA sense strand
cgacaugggcccacaguug

SEQ ID NO: 1460311 - RNA, 19 nt, Homo sapiens
  misc_RNA (1)...(19): siRNA sense strand
acacgucacuggcauggaa

SEQ ID NO: 1460312 - RNA, 19 nt, Homo sapiens
  misc_RNA (1)...(19): siRNA sense strand
agaacaaacccgacaguaa

SEQ ID NO: 1460313 - RNA, 19 nt, Homo sapiens
  misc_RNA (1)...(19): siRNA sense strand
ccagagcuauuucauugug

SEQ ID NO: 1460314 - RNA, 19 nt, Homo sapiens
  misc_RNA (1)...(19): siRNA sense strand
ccaaggacccuguggaaau

SEQ ID NO: 1460315 - RNA, 19 nt, Homo sapiens
  misc_RNA (1)...(19): siRNA sense strand
caucaacgccagcuucauu

SEQ ID NO: 1460316 - RNA, 19 nt, Homo sapiens
  misc_RNA (1)...(19): siRNA sense strand
ugacgcggcuggaggagaa

SEQ ID NO: 1460317 - RNA, 19 nt, Homo sapiens
  misc_RNA (1)...(19): siRNA sense strand
ccuacaagauccaguacaa

SEQ ID NO: 1460318 - RNA, 19 nt, Homo sapiens
  misc_RNA (1)...(19): siRNA sense strand
ugaccacuaugcaaccuaa

SEQ ID NO: 1460319 - RNA, 19 nt, Homo sapiens
  misc_RNA (1)...(19): siRNA sense strand
aauacaacaugccucagua

SEQ ID NO: 1460320 - RNA, 19 nt, Homo sapiens
  misc_RNA (1)...(19): siRNA sense strand
gaauggcuccagugagaaa

SEQ ID NO: 1460321 - RNA, 19 nt, Homo sapiens
  misc_RNA (1)...(19): siRNA sense strand
gaacaagaagggcaagaag

SEQ ID NO: 1460322 - RNA, 19 nt, Homo sapiens
  misc_RNA (1)...(19): siRNA sense strand
aggagaguaucaucaagua

SEQ ID NO: 1460323 - RNA, 19 nt, Homo sapiens
  misc_RNA (1)...(19): siRNA sense strand
gccaagugcauaagacuaa

SEQ ID NO: 1460324 - RNA, 19 nt, Homo sapiens
  misc_RNA (1)...(19): siRNA sense strand
gacaugggcccacaguuga

SEQ ID NO: 1460325 - RNA, 19 nt, Homo sapiens
  misc_RNA (1)...(19): siRNA sense strand
ggccguaucagauuaaaga

SEQ ID NO: 1460326 - RNA, 19 nt, Homo sapiens
  misc_RNA (1)...(19): siRNA sense strand
caacgcccuuccuggcuuu

SEQ ID NO: 1460327 - RNA, 19 nt, Homo sapiens
  misc_RNA (1)...(19): siRNA sense strand
ggugaaaucucuccccaaa

SEQ ID NO: 1460328 - RNA, 19 nt, Homo sapiens
  misc_RNA (1)...(19): siRNA sense strand
gaauacaacaugccucagu

SEQ ID NO: 1460329 - RNA, 19 nt, Homo sapiens
  misc_RNA (1)...(19): siRNA sense strand
ggaacaagaagggcaagaa

SEQ ID NO: 1460330 - RNA, 19 nt, Homo sapiens
  misc_RNA (1)...(19): siRNA sense strand
gcaacuggcagaagcacaa

SEQ ID NO: 1460331 - RNA, 19 nt, Homo sapiens
  misc_RNA (1)...(19): siRNA sense strand
gggagaagugucaccagua

SEQ ID NO: 1460332 - RNA, 19 nt, Homo sapiens
  misc_RNA (1)...(19): siRNA sense strand
cgucagaacgcguacauug

SEQ ID NO: 1460333 - RNA, 19 nt, Homo sapiens
  misc_RNA (1)...(19): siRNA sense strand
aaaccgaccagggcaaaua

SEQ ID NO: 1460334 - RNA, 19 nt, Homo sapiens
  misc_RNA (1)...(19): siRNA sense strand
gcaggagaguaucaucaag

SEQ ID NO: 1460335 - RNA, 19 nt, Homo sapiens
  misc_RNA (1)...(19): siRNA sense strand
uugagacgauugaguuuga

SEQ ID NO: 1460336 - RNA, 19 nt, Homo sapiens
  misc_RNA (1)...(19): siRNA sense strand
gagcgagccuaccuuugca

SEQ ID NO: 1460337 - RNA, 19 nt, Homo sapiens
  misc_RNA (1)...(19): siRNA sense strand
ggaaaccgaccagggcaaa

SEQ ID NO: 1460338 - RNA, 19 nt, Homo sapiens
  misc_RNA (1)...(19): siRNA sense strand
cggaagcuuugaccacuau

SEQ ID NO: 1460339 - RNA, 19 nt, Homo sapiens
  misc_RNA (1)...(19): siRNA sense strand
gcagacagaggaugaguac

SEQ ID NO: 1460340 - RNA, 19 nt, Homo sapiens
  misc_RNA (1)...(19): siRNA sense strand
ggaacagggugugccaaag

SEQ ID NO: 1460341 - RNA, 19 nt, Homo sapiens
  misc_RNA (1)...(19): siRNA sense strand
ucaagugugaucaguauug

SEQ ID NO: 1460342 - RNA, 19 nt, Homo sapiens
  misc_RNA (1)...(19): siRNA sense strand
cauaaucugcauugucauu

SEQ ID NO: 1460343 - RNA, 19 nt, Homo sapiens
  misc_RNA (1)...(19): siRNA sense strand
gccguggucuucauaaucu

SEQ ID NO: 1460344 - RNA, 19 nt, Homo sapiens
  misc_RNA (1)...(19): siRNA sense strand
ccaccgcuauguccucuuc

SEQ ID NO: 1460345 - RNA, 19 nt, Homo sapiens
  misc_RNA (1)...(19): siRNA sense strand
uucauaaucugcauuguca

SEQ ID NO: 1460346 - RNA, 19 nt, Homo sapiens
  misc_RNA (1)...(19): siRNA sense strand
ggaguaccucggaagcuuu

SEQ ID NO: 1460347 - RNA, 19 nt, Homo sapiens
  misc_RNA (1)...(19): siRNA sense strand
gcucugcccgcuaccagua

SEQ ID NO: 1460348 - RNA, 19 nt, Homo sapiens
  misc_RNA (1)...(19): siRNA sense strand
ugaccaagcugcgggagau

SEQ ID NO: 1460349 - RNA, 19 nt, Homo sapiens
  misc_RNA (1)...(19): siRNA sense strand
ucaagcggcuggcuaacuc

SEQ ID NO: 1460350 - RNA, 19 nt, Homo sapiens
  misc_RNA (1)...(19): siRNA sense strand
gagcggaucaagccagaga

SEQ ID NO: 1460351 - RNA, 19 nt, Homo sapiens
  misc_RNA (1)...(19): siRNA sense strand
ucaaggacucggccaacua

SEQ ID NO: 1460352 - RNA, 19 nt, Homo sapiens
  misc_RNA (1)...(19): siRNA sense strand
gcuuugagacgauugaguu

SEQ ID NO: 1460353 - RNA, 19 nt, Homo sapiens
  misc_RNA (1)...(19): siRNA sense strand
gacauucucucugcacaag

SEQ ID NO: 1460354 - RNA, 19 nt, Homo sapiens
  misc_RNA (1)...(19): siRNA sense strand
gaucaugaagacaucaguu

SEQ ID NO: 1460355 - RNA, 19 nt, Homo sapiens
  misc_RNA (1)...(19): siRNA sense strand
caguauggcggcuucgaua

SEQ ID NO: 1460356 - RNA, 19 nt, Homo sapiens
  misc_RNA (1)...(19): siRNA sense strand
augaguaccaguucuguua

SEQ ID NO: 1460357 - RNA, 19 nt, Homo sapiens
  misc_RNA (1)...(19): siRNA sense strand
acaacaugccucaguauau

SEQ ID NO: 1460358 - RNA, 19 nt, Homo sapiens
  misc_RNA (1)...(19): siRNA sense strand
gauggcagaauacaacaug

SEQ ID NO: 1460359 - RNA, 19 nt, Homo sapiens
  misc_RNA (1)...(19): siRNA sense strand
guccgccaguuccaguuua

SEQ ID NO: 1460360 - RNA, 19 nt, Homo sapiens
  misc_RNA (1)...(19): siRNA sense strand
gagcggaugcgguaugaag

SEQ ID NO: 1460361 - RNA, 19 nt, Homo sapiens
  misc_RNA (1)...(19): siRNA sense strand
caaguacgagcuccucuuc

SEQ ID NO: 1460362 - RNA, 19 nt, Homo sapiens
  misc_RNA (1)...(19): siRNA sense strand
uacaagauccaguacaaug

SEQ ID NO: 1460363 - RNA, 19 nt, Homo sapiens
  misc_RNA (1)...(19): siRNA sense strand
ggaacucacagaugucaag

SEQ ID NO: 1460364 - RNA, 19 nt, Homo sapiens
  misc_RNA (1)...(19): siRNA sense strand
uacaacaugccucaguaua

SEQ ID NO: 1460365 - RNA, 19 nt, Homo sapiens
  misc_RNA (1)...(19): siRNA sense strand
ucaagaaccgccuggugaa

SEQ ID NO: 1460366 - RNA, 19 nt, Homo sapiens
  misc_RNA (1)...(19): siRNA sense strand
gcccacacgucacgcuuca

SEQ ID NO: 1460367 - RNA, 19 nt, Homo sapiens
  misc_RNA (1)...(19): siRNA sense strand
acaagaauggcuccaguga

SEQ ID NO: 1460368 - RNA, 19 nt, Homo sapiens
  misc_RNA (1)...(19): siRNA sense strand
ucacguugcuagauaccau

SEQ ID NO: 1460369 - RNA, 19 nt, Homo sapiens
  misc_RNA (1)...(19): siRNA sense strand
cagagaagacagucgaugu

SEQ ID NO: 1460370 - RNA, 19 nt, Homo sapiens
  misc_RNA (1)...(19): siRNA sense strand
gaccauggcgugcccgaau

SEQ ID NO: 1460371 - RNA, 19 nt, Homo sapiens
  misc_RNA (1)...(19): siRNA sense strand
ggacauucucucugcacaa

SEQ ID NO: 1460372 - RNA, 19 nt, Homo sapiens
  misc_RNA (1)...(19): siRNA sense strand
ucaccugguucaaggacuu

SEQ ID NO: 1460373 - RNA, 19 nt, Homo sapiens
  misc_RNA (1)...(19): siRNA sense strand
gaggaugaguaccaguucu

SEQ ID NO: 1460374 - RNA, 19 nt, Homo sapiens
  misc_RNA (1)...(19): siRNA sense strand
caagugugaucaguauugg

SEQ ID NO: 1460375 - RNA, 19 nt, Homo sapiens
  misc_RNA (1)...(19): siRNA sense strand
gaacgugcuggaacucaca

SEQ ID NO: 1460376 - RNA, 19 nt, Homo sapiens
  misc_RNA (1)...(19): siRNA sense strand
gauccuagugccagcaaug

SEQ ID NO: 1460377 - RNA, 19 nt, Homo sapiens
  misc_RNA (1)...(19): siRNA sense strand
gggcuucaucgacuucauu

SEQ ID NO: 1460378 - RNA, 19 nt, Homo sapiens
  misc_RNA (1)...(19): siRNA sense strand
gggagggcuucaucgacuu

SEQ ID NO: 1460379 - RNA, 19 nt, Homo sapiens
  misc_RNA (1)...(19): siRNA sense strand
gaagucacggaucaagugu

SEQ ID NO: 1460380 - RNA, 19 nt, Homo sapiens
  misc_RNA (1)...(19): siRNA sense strand
caugggcagugauuacauc

SEQ ID NO: 1460381 - RNA, 19 nt, Homo sapiens
  misc_RNA (1)...(19): siRNA sense strand
guaaacgcaaggacucaga

SEQ ID NO: 1460382 - RNA, 19 nt, Homo sapiens
  misc_RNA (1)...(19): siRNA sense strand
gcccuggcauggugucugu

SEQ ID NO: 1460383 - RNA, 19 nt, Homo sapiens
  misc_RNA (1)...(19): siRNA sense strand
acccugagaucaccugguu

SEQ ID NO: 1460384 - RNA, 19 nt, Homo sapiens
  misc_RNA (1)...(19): siRNA sense strand
ucauugcuauccugcucua

SEQ ID NO: 1460385 - RNA, 19 nt, Homo sapiens
  misc_RNA (1)...(19): siRNA sense strand
gacaucaccaccacacguu

SEQ ID NO: 1460386 - RNA, 19 nt, Homo sapiens
  misc_RNA (1)...(19): siRNA sense strand
gaccagggcaaauaugagu

SEQ ID NO: 1460387 - RNA, 19 nt, Homo sapiens
  misc_RNA (1)...(19): siRNA sense strand
gaacaaacccgacaguaaa

SEQ ID NO: 1460388 - RNA, 19 nt, Homo sapiens
  misc_RNA (1)...(19): siRNA sense strand
gcaagaaggucaacucuca

SEQ ID NO: 1460389 - RNA, 19 nt, Homo sapiens
  misc_RNA (1)...(19): siRNA sense strand
ccaaaugccuccugaacaa

SEQ ID NO: 1460390 - RNA, 19 nt, Homo sapiens
  misc_RNA (1)...(19): siRNA sense strand
guccagagcuauuucauug

SEQ ID NO: 1460391 - RNA, 19 nt, Homo sapiens
  misc_RNA (1)...(19): siRNA sense strand
cagauccuguguccuauua

SEQ ID NO: 1460392 - RNA, 19 nt, Homo sapiens
  misc_RNA (1)...(19): siRNA sense strand
cgagugaccuggaacaaga

SEQ ID NO: 1460393 - RNA, 19 nt, Homo sapiens
  misc_RNA (1)...(19): siRNA sense strand
gugccaaucugccuuguaa

SEQ ID NO: 1460394 - RNA, 19 nt, Homo sapiens
  misc_RNA (1)...(19): siRNA sense strand
gaggagaagucacggauca

SEQ ID NO: 1460395 - RNA, 19 nt, Homo sapiens
  misc_RNA (1)...(19): siRNA sense strand
gaagagcgagccuaccuuu

SEQ ID NO: 1460396 - RNA, 19 nt, Homo sapiens
  misc_RNA (1)...(19): siRNA sense strand
caacaugccucaguauauc

SEQ ID NO: 1460397 - RNA, 19 nt, Homo sapiens
  misc_RNA (1)...(19): siRNA sense strand
ggacucccauggugacuga

SEQ ID NO: 1460398 - RNA, 19 nt, Homo sapiens
  misc_RNA (1)...(19): siRNA sense strand
ggucaacucucagcgcuuu

SEQ ID NO: 1460399 - RNA, 19 nt, Homo sapiens
  misc_RNA (1)...(19): siRNA sense strand
aagaauggcuccagugaga

SEQ ID NO: 1460400 - RNA, 19 nt, Homo sapiens
  misc_RNA (1)...(19): siRNA sense strand
ggacauggaucuggaagag

SEQ ID NO: 1460401 - RNA, 19 nt, Homo sapiens
  misc_RNA (1)...(19): siRNA sense strand
ggagggcucugacuacauc

SEQ ID NO: 1460402 - RNA, 19 nt, Homo sapiens
  misc_RNA (1)...(19): siRNA sense strand
ccaucgagcuggccacauu

SEQ ID NO: 1460403 - RNA, 19 nt, Homo sapiens
  misc_RNA (1)...(19): siRNA sense strand
uagauccgauggcagaaua

SEQ ID NO: 1460404 - RNA, 19 nt, Homo sapiens
  misc_RNA (1)...(19): siRNA sense strand
ggagaagugucaccaguac

SEQ ID NO: 1460405 - RNA, 19 nt, Homo sapiens
  misc_RNA (1)...(19): siRNA sense strand
caaggacccuguggaaaug

SEQ ID NO: 1460406 - RNA, 19 nt, Homo sapiens
  misc_RNA (1)...(19): siRNA sense strand
gaagugaacaagccgaaga

SEQ ID NO: 1460407 - RNA, 19 nt, Homo sapiens
  misc_RNA (1)...(19): siRNA sense strand
caggucacguugcuagaua

SEQ ID NO: 1460408 - RNA, 19 nt, Homo sapiens
  misc_RNA (1)...(19): siRNA sense strand
gcaauggacgcaucaaaca

SEQ ID NO: 1460409 - RNA, 19 nt, Homo sapiens
  misc_RNA (1)...(19): siRNA sense strand
gaacagggugugccaaagu

SEQ ID NO: 1460410 - RNA, 19 nt, Homo sapiens
  misc_RNA (1)...(19): siRNA sense strand
cgacaugggcccacaguug

SEQ ID NO: 1460411 - RNA, 19 nt, Homo sapiens
  misc_RNA (1)...(19): siRNA sense strand
acacgucacuggcauggaa

SEQ ID NO: 1460412 - RNA, 19 nt, Homo sapiens
  misc_RNA (1)...(19): siRNA sense strand
agaacaaacccgacaguaa

SEQ ID NO: 1460413 - RNA, 19 nt, Homo sapiens
  misc_RNA (1)...(19): siRNA sense strand
ccagagcuauuucauugug

SEQ ID NO: 1460414 - RNA, 19 nt, Homo sapiens
  misc_RNA (1)...(19): siRNA sense strand
ccaaggacccuguggaaau

SEQ ID NO: 1460415 - RNA, 19 nt, Homo sapiens
  misc_RNA (1)...(19): siRNA sense strand
caucaacgccagcuucauu

SEQ ID NO: 1460416 - RNA, 19 nt, Homo sapiens
  misc_RNA (1)...(19): siRNA sense strand
ugacgcggcuggaggagaa

SEQ ID NO: 1460417 - RNA, 19 nt, Homo sapiens
  misc_RNA (1)...(19): siRNA sense strand
ccuacaagauccaguacaa

SEQ ID NO: 1460418 - RNA, 19 nt, Homo sapiens
  misc_RNA (1)...(19): siRNA sense strand
ugaccacuaugcaaccuaa

SEQ ID NO: 1460419 - RNA, 19 nt, Homo sapiens
  misc_RNA (1)...(19): siRNA sense strand
aauacaacaugccucagua

SEQ ID NO: 1460420 - RNA, 19 nt, Homo sapiens
  misc_RNA (1)...(19): siRNA sense strand
gaauggcuccagugagaaa

SEQ ID NO: 1460421 - RNA, 19 nt, Homo sapiens
  misc_RNA (1)...(19): siRNA sense strand
gaacaagaagggcaagaag

SEQ ID NO: 1460422 - RNA, 19 nt, Homo sapiens
  misc_RNA (1)...(19): siRNA sense strand
aggagaguaucaucaagua

SEQ ID NO: 1460423 - RNA, 19 nt, Homo sapiens
  misc_RNA (1)...(19): siRNA sense strand
gccaagugcauaagacuaa

SEQ ID NO: 1460424 - RNA, 19 nt, Homo sapiens
  misc_RNA (1)...(19): siRNA sense strand
gacaugggcccacaguuga

SEQ ID NO: 1460425 - RNA, 19 nt, Homo sapiens
  misc_RNA (1)...(19): siRNA sense strand
ggccguaucagauuaaaga

SEQ ID NO: 1460426 - RNA, 19 nt, Homo sapiens
  misc_RNA (1)...(19): siRNA sense strand
caacgcccuuccuggcuuu

SEQ ID NO: 1460427 - RNA, 19 nt, Homo sapiens
  misc_RNA (1)...(19): siRNA sense strand
ggugaaaucucuccccaaa

SEQ ID NO: 1460428 - RNA, 19 nt, Homo sapiens
  misc_RNA (1)...(19): siRNA sense strand
gaauacaacaugccucagu

SEQ ID NO: 1460429 - RNA, 19 nt, Homo sapiens
  misc_RNA (1)...(19): siRNA sense strand
ggaacaagaagggcaagaa

SEQ ID NO: 1460430 - RNA, 19 nt, Homo sapiens
  misc_RNA (1)...(19): siRNA sense strand
gcaacuggcagaagcacaa

SEQ ID NO: 1460431 - RNA, 19 nt, Homo sapiens
  misc_RNA (1)...(19): siRNA sense strand
gggagaagugucaccagua

SEQ ID NO: 1460432 - RNA, 19 nt, Homo sapiens
  misc_RNA (1)...(19): siRNA sense strand
cgucagaacgcguacauug

SEQ ID NO: 1460433 - RNA, 19 nt, Homo sapiens
  misc_RNA (1)...(19): siRNA sense strand
aaaccgaccagggcaaaua

SEQ ID NO: 1460434 - RNA, 19 nt, Homo sapiens
  misc_RNA (1)...(19): siRNA sense strand
gcaggagaguaucaucaag

SEQ ID NO: 1460435 - RNA, 19 nt, Homo sapiens
  misc_RNA (1)...(19): siRNA sense strand
uugagacgauugaguuuga

SEQ ID NO: 1460436 - RNA, 19 nt, Homo sapiens
  misc_RNA (1)...(19): siRNA sense strand
gagcgagccuaccuuugca

SEQ ID NO: 1460437 - RNA, 19 nt, Homo sapiens
  misc_RNA (1)...(19): siRNA sense strand
ggaaaccgaccagggcaaa

SEQ ID NO: 1460438 - RNA, 19 nt, Homo sapiens
  misc_RNA (1)...(19): siRNA sense strand
cggaagcuuugaccacuau

SEQ ID NO: 1460439 - RNA, 19 nt, Homo sapiens
  misc_RNA (1)...(19): siRNA sense strand
gcagacagaggaugaguac

SEQ ID NO: 1460440 - RNA, 19 nt, Homo sapiens
  misc_RNA (1)...(19): siRNA sense strand
ggaacagggugugccaaag

SEQ ID NO: 1460441 - RNA, 19 nt, Homo sapiens
  misc_RNA (1)...(19): siRNA sense strand
ucaagugugaucaguauug

SEQ ID NO: 1460442 - RNA, 19 nt, Homo sapiens
  misc_RNA (1)...(19): siRNA sense strand
cauaaucugcauugucauu

SEQ ID NO: 1460443 - RNA, 19 nt, Homo sapiens
  misc_RNA (1)...(19): siRNA sense strand
gccguggucuucauaaucu

SEQ ID NO: 1460444 - RNA, 19 nt, Homo sapiens
  misc_RNA (1)...(19): siRNA sense strand
ccaccgcuauguccucuuc

SEQ ID NO: 1460445 - RNA, 19 nt, Homo sapiens
  misc_RNA (1)...(19): siRNA sense strand
uucauaaucugcauuguca

SEQ ID NO: 1460446 - RNA, 19 nt, Homo sapiens
  misc_RNA (1)...(19): siRNA sense strand
ggaguaccucggaagcuuu

SEQ ID NO: 1460447 - RNA, 19 nt, Homo sapiens
  misc_RNA (1)...(19): siRNA sense strand
gcucugcccgcuaccagua

SEQ ID NO: 1460448 - RNA, 19 nt, Homo sapiens
  misc_RNA (1)...(19): siRNA sense strand
ugaccaagcugcgggagau

SEQ ID NO: 1460449 - RNA, 19 nt, Homo sapiens
  misc_RNA (1)...(19): siRNA sense strand
ucaagcggcuggcuaacuc

SEQ ID NO: 1460450 - RNA, 19 nt, Homo sapiens
  misc_RNA (1)...(19): siRNA sense strand
gagcggaucaagccagaga

SEQ ID NO: 1460451 - RNA, 19 nt, Homo sapiens
  misc_RNA (1)...(19): siRNA sense strand
ucaaggacucggccaacua

SEQ ID NO: 1460452 - RNA, 19 nt, Homo sapiens
  misc_RNA (1)...(19): siRNA sense strand
gcuuugagacgauugaguu

SEQ ID NO: 1460453 - RNA, 19 nt, Homo sapiens
  misc_RNA (1)...(19): siRNA sense strand
gacauucucucugcacaag

SEQ ID NO: 1460454 - RNA, 19 nt, Homo sapiens
  misc_RNA (1)...(19): siRNA sense strand
gaucaugaagacaucaguu

SEQ ID NO: 1460455 - RNA, 19 nt, Homo sapiens
  misc_RNA (1)...(19): siRNA sense strand
caguauggcggcuucgaua

SEQ ID NO: 1460456 - RNA, 19 nt, Homo sapiens
  misc_RNA (1)...(19): siRNA sense strand
augaguaccaguucuguua

SEQ ID NO: 1460457 - RNA, 19 nt, Homo sapiens
  misc_RNA (1)...(19): siRNA sense strand
acaacaugccucaguauau

SEQ ID NO: 1460458 - RNA, 19 nt, Homo sapiens
  misc_RNA (1)...(19): siRNA sense strand
gauggcagaauacaacaug

SEQ ID NO: 1460459 - RNA, 19 nt, Homo sapiens
  misc_RNA (1)...(19): siRNA sense strand
guccgccaguuccaguuua

SEQ ID NO: 1460460 - RNA, 19 nt, Homo sapiens
  misc_RNA (1)...(19): siRNA sense strand
gagcggaugcgguaugaag

SEQ ID NO: 1460461 - RNA, 19 nt, Homo sapiens
  misc_RNA (1)...(19): siRNA sense strand
caaguacgagcuccucuuc

SEQ ID NO: 1460462 - RNA, 19 nt, Homo sapiens
  misc_RNA (1)...(19): siRNA sense strand
uacaagauccaguacaaug

SEQ ID NO: 1460463 - RNA, 19 nt, Homo sapiens
  misc_RNA (1)...(19): siRNA sense strand
ggaacucacagaugucaag

SEQ ID NO: 1460464 - RNA, 19 nt, Homo sapiens
  misc_RNA (1)...(19): siRNA sense strand
uacaacaugccucaguaua

SEQ ID NO: 1460465 - RNA, 19 nt, Homo sapiens
  misc_RNA (1)...(19): siRNA sense strand
ucaagaaccgccuggugaa

SEQ ID NO: 1460466 - RNA, 19 nt, Homo sapiens
  misc_RNA (1)...(19): siRNA sense strand
gcccacacgucacgcuuca

SEQ ID NO: 1460467 - RNA, 19 nt, Homo sapiens
  misc_RNA (1)...(19): siRNA sense strand
acaagaauggcuccaguga

SEQ ID NO: 1460468 - RNA, 19 nt, Homo sapiens
  misc_RNA (1)...(19): siRNA sense strand
ucacguugcuagauaccau

SEQ ID NO: 1460469 - RNA, 19 nt, Homo sapiens
  misc_RNA (1)...(19): siRNA sense strand
cagagaagacagucgaugu

SEQ ID NO: 1460470 - RNA, 19 nt, Homo sapiens
  misc_RNA (1)...(19): siRNA sense strand
gaccauggcgugcccgaau

SEQ ID NO: 1460471 - RNA, 19 nt, Homo sapiens
  misc_RNA (1)...(19): siRNA sense strand
ggacauucucucugcacaa

SEQ ID NO: 1460472 - RNA, 19 nt, Homo sapiens
  misc_RNA (1)...(19): siRNA sense strand
ucaccugguucaaggacuu

SEQ ID NO: 1460473 - RNA, 19 nt, Homo sapiens
  misc_RNA (1)...(19): siRNA sense strand
gaggaugaguaccaguucu

SEQ ID NO: 1460474 - RNA, 19 nt, Homo sapiens
  misc_RNA (1)...(19): siRNA sense strand
caagugugaucaguauugg

SEQ ID NO: 1460475 - RNA, 19 nt, Homo sapiens
  misc_RNA (1)...(19): siRNA sense strand
gaacgugcuggaacucaca

SEQ ID NO: 1460476 - RNA, 19 nt, Homo sapiens
  misc_RNA (1)...(19): siRNA sense strand
gauccuagugccagcaaug

SEQ ID NO: 1460477 - RNA, 19 nt, Homo sapiens
  misc_RNA (1)...(19): siRNA sense strand
gggcuucaucgacuucauu

SEQ ID NO: 1460478 - RNA, 19 nt, Homo sapiens
  misc_RNA (1)...(19): siRNA sense strand
gggagggcuucaucgacuu

SEQ ID NO: 1460479 - RNA, 19 nt, Homo sapiens
  misc_RNA (1)...(19): siRNA sense strand
gaagucacggaucaagugu

SEQ ID NO: 1460480 - RNA, 19 nt, Homo sapiens
  misc_RNA (1)...(19): siRNA sense strand
caugggcagugauuacauc

SEQ ID NO: 1460481 - RNA, 19 nt, Homo sapiens
  misc_RNA (1)...(19): siRNA sense strand
guaaacgcaaggacucaga

SEQ ID NO: 1460482 - RNA, 19 nt, Homo sapiens
  misc_RNA (1)...(19): siRNA sense strand
gcccuggcauggugucugu

SEQ ID NO: 1460483 - RNA, 19 nt, Homo sapiens
  misc_RNA (1)...(19): siRNA sense strand
acccugagaucaccugguu

SEQ ID NO: 1460484 - RNA, 19 nt, Homo sapiens
  misc_RNA (1)...(19): siRNA sense strand
ucauugcuauccugcucua

SEQ ID NO: 1460485 - RNA, 19 nt, Homo sapiens
  misc_RNA (1)...(19): siRNA sense strand
gacaucaccaccacacguu

SEQ ID NO: 1460486 - RNA, 19 nt, Homo sapiens
  misc_RNA (1)...(19): siRNA sense strand
gaccagggcaaauaugagu

SEQ ID NO: 1460487 - RNA, 19 nt, Homo sapiens
  misc_RNA (1)...(19): siRNA sense strand
gaacaaacccgacaguaaa

SEQ ID NO: 1460488 - RNA, 19 nt, Homo sapiens
  misc_RNA (1)...(19): siRNA sense strand
gcaagaaggucaacucuca

SEQ ID NO: 1460489 - RNA, 19 nt, Homo sapiens
  misc_RNA (1)...(19): siRNA sense strand
ccaaaugccuccugaacaa

SEQ ID NO: 1460490 - RNA, 19 nt, Homo sapiens
  misc_RNA (1)...(19): siRNA sense strand
guccagagcuauuucauug

SEQ ID NO: 1460491 - RNA, 19 nt, Homo sapiens
  misc_RNA (1)...(19): siRNA sense strand
cagauccuguguccuauua

SEQ ID NO: 1460492 - RNA, 19 nt, Homo sapiens
  misc_RNA (1)...(19): siRNA sense strand
cgagugaccuggaacaaga

SEQ ID NO: 1460493 - RNA, 19 nt, Homo sapiens
  misc_RNA (1)...(19): siRNA sense strand
gugccaaucugccuuguaa

SEQ ID NO: 1460494 - RNA, 19 nt, Homo sapiens
  misc_RNA (1)...(19): siRNA sense strand
gaggagaagucacggauca

SEQ ID NO: 1460495 - RNA, 19 nt, Homo sapiens
  misc_RNA (1)...(19): siRNA sense strand
gaagagcgagccuaccuuu

SEQ ID NO: 1460496 - RNA, 19 nt, Homo sapiens
  misc_RNA (1)...(19): siRNA sense strand
caacaugccucaguauauc

SEQ ID NO: 1460497 - RNA, 19 nt, Homo sapiens
  misc_RNA (1)...(19): siRNA sense strand
ggacucccauggugacuga

SEQ ID NO: 1460498 - RNA, 19 nt, Homo sapiens
  misc_RNA (1)...(19): siRNA sense strand
ggucaacucucagcgcuuu

SEQ ID NO: 1460499 - RNA, 19 nt, Homo sapiens
  misc_RNA (1)...(19): siRNA sense strand
aagaauggcuccagugaga

SEQ ID NO: 1460500 - RNA, 19 nt, Homo sapiens
  misc_RNA (1)...(19): siRNA sense strand
ggacauggaucuggaagag

SEQ ID NO: 1460501 - RNA, 19 nt, Homo sapiens
  misc_RNA (1)...(19): siRNA sense strand
ggagggcucugacuacauc

SEQ ID NO: 1460502 - RNA, 19 nt, Homo sapiens
  misc_RNA (1)...(19): siRNA sense strand
ccaucgagcuggccacauu

SEQ ID NO: 1460503 - RNA, 19 nt, Homo sapiens
  misc_RNA (1)...(19): siRNA sense strand
uagauccgauggcagaaua

SEQ ID NO: 1460504 - RNA, 19 nt, Homo sapiens
  misc_RNA (1)...(19): siRNA sense strand
ggagaagugucaccaguac

SEQ ID NO: 1460505 - RNA, 19 nt, Homo sapiens
  misc_RNA (1)...(19): siRNA sense strand
caaggacccuguggaaaug

SEQ ID NO: 1460506 - RNA, 19 nt, Homo sapiens
  misc_RNA (1)...(19): siRNA sense strand
gaagugaacaagccgaaga

SEQ ID NO: 1460507 - RNA, 19 nt, Homo sapiens
  misc_RNA (1)...(19): siRNA sense strand
caggucacguugcuagaua

SEQ ID NO: 1460508 - RNA, 19 nt, Homo sapiens
  misc_RNA (1)...(19): siRNA sense strand
gcaauggacgcaucaaaca

SEQ ID NO: 1460509 - RNA, 19 nt, Homo sapiens
  misc_RNA (1)...(19): siRNA sense strand
gaacagggugugccaaagu

SEQ ID NO: 1460510 - RNA, 19 nt, Homo sapiens
  misc_RNA (1)...(19): siRNA sense strand
cgacaugggcccacaguug

SEQ ID NO: 1460511 - RNA, 19 nt, Homo sapiens
  misc_RNA (1)...(19): siRNA sense strand
acacgucacuggcauggaa

SEQ ID NO: 1460512 - RNA, 19 nt, Homo sapiens
  misc_RNA (1)...(19): siRNA sense strand
agaacaaacccgacaguaa

SEQ ID NO: 1460513 - RNA, 19 nt, Homo sapiens
  misc_RNA (1)...(19): siRNA sense strand
ccagagcuauuucauugug

SEQ ID NO: 1460514 - RNA, 19 nt, Homo sapiens
  misc_RNA (1)...(19): siRNA sense strand
ccaaggacccuguggaaau

SEQ ID NO: 1460515 - RNA, 19 nt, Homo sapiens
  misc_RNA (1)...(19): siRNA sense strand
caucaacgccagcuucauu

SEQ ID NO: 1460516 - RNA, 19 nt, Homo sapiens
  misc_RNA (1)...(19): siRNA sense strand
ugacgcggcuggaggagaa

SEQ ID NO: 1460517 - RNA, 19 nt, Homo sapiens
  misc_RNA (1)...(19): siRNA sense strand
ccuacaagauccaguacaa

SEQ ID NO: 1460518 - RNA, 19 nt, Homo sapiens
  misc_RNA (1)...(19): siRNA sense strand
ugaccacuaugcaaccuaa

SEQ ID NO: 1460519 - RNA, 19 nt, Homo sapiens
  misc_RNA (1)...(19): siRNA sense strand
aauacaacaugccucagua

SEQ ID NO: 1460520 - RNA, 19 nt, Homo sapiens
  misc_RNA (1)...(19): siRNA sense strand
gaauggcuccagugagaaa

SEQ ID NO: 1460521 - RNA, 19 nt, Homo sapiens
  misc_RNA (1)...(19): siRNA sense strand
gaacaagaagggcaagaag

SEQ ID NO: 1460522 - RNA, 19 nt, Homo sapiens
  misc_RNA (1)...(19): siRNA sense strand
aggagaguaucaucaagua

SEQ ID NO: 1460523 - RNA, 19 nt, Homo sapiens
  misc_RNA (1)...(19): siRNA sense strand
gccaagugcauaagacuaa

SEQ ID NO: 1460524 - RNA, 19 nt, Homo sapiens
  misc_RNA (1)...(19): siRNA sense strand
gacaugggcccacaguuga

SEQ ID NO: 1460525 - RNA, 19 nt, Homo sapiens
  misc_RNA (1)...(19): siRNA sense strand
ggccguaucagauuaaaga

SEQ ID NO: 1460526 - RNA, 19 nt, Homo sapiens
  misc_RNA (1)...(19): siRNA sense strand
caacgcccuuccuggcuuu

SEQ ID NO: 1460527 - RNA, 19 nt, Homo sapiens
  misc_RNA (1)...(19): siRNA sense strand
ggugaaaucucuccccaaa

SEQ ID NO: 1460528 - RNA, 19 nt, Homo sapiens
  misc_RNA (1)...(19): siRNA sense strand
gaauacaacaugccucagu

SEQ ID NO: 1460529 - RNA, 19 nt, Homo sapiens
  misc_RNA (1)...(19): siRNA sense strand
ggaacaagaagggcaagaa

SEQ ID NO: 1460530 - RNA, 19 nt, Homo sapiens
  misc_RNA (1)...(19): siRNA sense strand
gcaacuggcagaagcacaa

SEQ ID NO: 1460531 - RNA, 19 nt, Homo sapiens
  misc_RNA (1)...(19): siRNA sense strand
gggagaagugucaccagua

SEQ ID NO: 1460532 - RNA, 19 nt, Homo sapiens
  misc_RNA (1)...(19): siRNA sense strand
cgucagaacgcguacauug

SEQ ID NO: 1460533 - RNA, 19 nt, Homo sapiens
  misc_RNA (1)...(19): siRNA sense strand
aaaccgaccagggcaaaua

SEQ ID NO: 1460534 - RNA, 19 nt, Homo sapiens
  misc_RNA (1)...(19): siRNA sense strand
gcaggagaguaucaucaag

SEQ ID NO: 1460535 - RNA, 19 nt, Homo sapiens
  misc_RNA (1)...(19): siRNA sense strand
uugagacgauugaguuuga

SEQ ID NO: 1460536 - RNA, 19 nt, Homo sapiens
  misc_RNA (1)...(19): siRNA sense strand
gagcgagccuaccuuugca

SEQ ID NO: 1460537 - RNA, 19 nt, Homo sapiens
  misc_RNA (1)...(19): siRNA sense strand
ggaaaccgaccagggcaaa

SEQ ID NO: 1460538 - RNA, 19 nt, Homo sapiens
  misc_RNA (1)...(19): siRNA sense strand
cggaagcuuugaccacuau

SEQ ID NO: 1460539 - RNA, 19 nt, Homo sapiens
  misc_RNA (1)...(19): siRNA sense strand
gcagacagaggaugaguac

SEQ ID NO: 1460540 - RNA, 19 nt, Homo sapiens
  misc_RNA (1)...(19): siRNA sense strand
ggaacagggugugccaaag

SEQ ID NO: 1460541 - RNA, 19 nt, Homo sapiens
  misc_RNA (1)...(19): siRNA sense strand
ucaagugugaucaguauug

SEQ ID NO: 1460542 - RNA, 19 nt, Homo sapiens
  misc_RNA (1)...(19): siRNA sense strand
cauaaucugcauugucauu

SEQ ID NO: 1460543 - RNA, 19 nt, Homo sapiens
  misc_RNA (1)...(19): siRNA sense strand
gccguggucuucauaaucu

SEQ ID NO: 1460544 - RNA, 19 nt, Homo sapiens
  misc_RNA (1)...(19): siRNA sense strand
ccaccgcuauguccucuuc

SEQ ID NO: 1460545 - RNA, 19 nt, Homo sapiens
  misc_RNA (1)...(19): siRNA sense strand
uucauaaucugcauuguca

SEQ ID NO: 1460546 - RNA, 19 nt, Homo sapiens
  misc_RNA (1)...(19): siRNA sense strand
ggaguaccucggaagcuuu

SEQ ID NO: 1460547 - RNA, 19 nt, Homo sapiens
  misc_RNA (1)...(19): siRNA sense strand
gcucugcccgcuaccagua

SEQ ID NO: 1460548 - RNA, 19 nt, Homo sapiens
  misc_RNA (1)...(19): siRNA sense strand
ugaccaagcugcgggagau

SEQ ID NO: 1460549 - RNA, 19 nt, Homo sapiens
  misc_RNA (1)...(19): siRNA sense strand
ucaagcggcuggcuaacuc

SEQ ID NO: 1460550 - RNA, 19 nt, Homo sapiens
  misc_RNA (1)...(19): siRNA sense strand
gagcggaucaagccagaga

SEQ ID NO: 1460551 - RNA, 19 nt, Homo sapiens
  misc_RNA (1)...(19): siRNA sense strand
ucaaggacucggccaacua

SEQ ID NO: 1460552 - RNA, 19 nt, Homo sapiens
  misc_RNA (1)...(19): siRNA sense strand
gcuuugagacgauugaguu

SEQ ID NO: 1460553 - RNA, 19 nt, Homo sapiens
  misc_RNA (1)...(19): siRNA sense strand
gacauucucucugcacaag

SEQ ID NO: 1460554 - RNA, 19 nt, Homo sapiens
  misc_RNA (1)...(19): siRNA sense strand
gaucaugaagacaucaguu

SEQ ID NO: 1460555 - RNA, 19 nt, Homo sapiens
  misc_RNA (1)...(19): siRNA sense strand
caguauggcggcuucgaua

SEQ ID NO: 1460556 - RNA, 19 nt, Homo sapiens
  misc_RNA (1)...(19): siRNA sense strand
augaguaccaguucuguua

SEQ ID NO: 1460557 - RNA, 19 nt, Homo sapiens
  misc_RNA (1)...(19): siRNA sense strand
acaacaugccucaguauau

SEQ ID NO: 1460558 - RNA, 19 nt, Homo sapiens
  misc_RNA (1)...(19): siRNA sense strand
gauggcagaauacaacaug

SEQ ID NO: 1460559 - RNA, 19 nt, Homo sapiens
  misc_RNA (1)...(19): siRNA sense strand
guccgccaguuccaguuua

SEQ ID NO: 1460560 - RNA, 19 nt, Homo sapiens
  misc_RNA (1)...(19): siRNA sense strand
gagcggaugcgguaugaag

SEQ ID NO: 1460561 - RNA, 19 nt, Homo sapiens
  misc_RNA (1)...(19): siRNA sense strand
caaguacgagcuccucuuc

SEQ ID NO: 1460562 - RNA, 19 nt, Homo sapiens
  misc_RNA (1)...(19): siRNA sense strand
uacaagauccaguacaaug

SEQ ID NO: 1460563 - RNA, 19 nt, Homo sapiens
  misc_RNA (1)...(19): siRNA sense strand
ggaacucacagaugucaag

SEQ ID NO: 1460564 - RNA, 19 nt, Homo sapiens
  misc_RNA (1)...(19): siRNA sense strand
uacaacaugccucaguaua

SEQ ID NO: 1460565 - RNA, 19 nt, Homo sapiens
  misc_RNA (1)...(19): siRNA sense strand
ucaagaaccgccuggugaa

SEQ ID NO: 1460566 - RNA, 19 nt, Homo sapiens
  misc_RNA (1)...(19): siRNA sense strand
gcccacacgucacgcuuca

SEQ ID NO: 1460567 - RNA, 19 nt, Homo sapiens
  misc_RNA (1)...(19): siRNA sense strand
acaagaauggcuccaguga

SEQ ID NO: 1460568 - RNA, 19 nt, Homo sapiens
  misc_RNA (1)...(19): siRNA sense strand
ucacguugcuagauaccau

SEQ ID NO: 1460569 - RNA, 19 nt, Homo sapiens
  misc_RNA (1)...(19): siRNA sense strand
cagagaagacagucgaugu

SEQ ID NO: 1460570 - RNA, 19 nt, Homo sapiens
  misc_RNA (1)...(19): siRNA sense strand
gaccauggcgugcccgaau

SEQ ID NO: 1460571 - RNA, 19 nt, Homo sapiens
  misc_RNA (1)...(19): siRNA sense strand
ggacauucucucugcacaa

SEQ ID NO: 1460572 - RNA, 19 nt, Homo sapiens
  misc_RNA (1)...(19): siRNA sense strand
ucaccugguucaaggacuu

SEQ ID NO: 1460573 - RNA, 19 nt, Homo sapiens
  misc_RNA (1)...(19): siRNA sense strand
gaggaugaguaccaguucu

SEQ ID NO: 1460574 - RNA, 19 nt, Homo sapiens
  misc_RNA (1)...(19): siRNA sense strand
caagugugaucaguauugg

SEQ ID NO: 1460575 - RNA, 19 nt, Homo sapiens
  misc_RNA (1)...(19): siRNA sense strand
gaacgugcuggaacucaca

SEQ ID NO: 1460576 - RNA, 19 nt, Homo sapiens
  misc_RNA (1)...(19): siRNA sense strand
gauccuagugccagcaaug

SEQ ID NO: 1460577 - RNA, 19 nt, Homo sapiens
  misc_RNA (1)...(19): siRNA sense strand
gggcuucaucgacuucauu

SEQ ID NO: 1460578 - RNA, 19 nt, Homo sapiens
  misc_RNA (1)...(19): siRNA sense strand
gggagggcuucaucgacuu

SEQ ID NO: 1460579 - RNA, 19 nt, Homo sapiens
  misc_RNA (1)...(19): siRNA sense strand
gaagucacggaucaagugu

SEQ ID NO: 1460580 - RNA, 19 nt, Homo sapiens
  misc_RNA (1)...(19): siRNA sense strand
caugggcagugauuacauc

SEQ ID NO: 1460581 - RNA, 19 nt, Homo sapiens
  misc_RNA (1)...(19): siRNA sense strand
guaaacgcaaggacucaga

SEQ ID NO: 1460582 - RNA, 19 nt, Homo sapiens
  misc_RNA (1)...(19): siRNA sense strand
gcccuggcauggugucugu

SEQ ID NO: 1460583 - RNA, 19 nt, Homo sapiens
  misc_RNA (1)...(19): siRNA sense strand
acccugagaucaccugguu

SEQ ID NO: 1460584 - RNA, 19 nt, Homo sapiens
  misc_RNA (1)...(19): siRNA sense strand
ucauugcuauccugcucua

SEQ ID NO: 1460585 - RNA, 19 nt, Homo sapiens
  misc_RNA (1)...(19): siRNA sense strand
gacaucaccaccacacguu

SEQ ID NO: 1460586 - RNA, 19 nt, Homo sapiens
  misc_RNA (1)...(19): siRNA sense strand
gaccagggcaaauaugagu

SEQ ID NO: 1460587 - RNA, 19 nt, Homo sapiens
  misc_RNA (1)...(19): siRNA sense strand
gaacaaacccgacaguaaa

SEQ ID NO: 1460588 - RNA, 19 nt, Homo sapiens
  misc_RNA (1)...(19): siRNA sense strand
gcaagaaggucaacucuca

SEQ ID NO: 1460589 - RNA, 19 nt, Homo sapiens
  misc_RNA (1)...(19): siRNA sense strand
ccaaaugccuccugaacaa

SEQ ID NO: 1460590 - RNA, 19 nt, Homo sapiens
  misc_RNA (1)...(19): siRNA sense strand
guccagagcuauuucauug

SEQ ID NO: 1460591 - RNA, 19 nt, Homo sapiens
  misc_RNA (1)...(19): siRNA sense strand
cagauccuguguccuauua

SEQ ID NO: 1460592 - RNA, 19 nt, Homo sapiens
  misc_RNA (1)...(19): siRNA sense strand
cgagugaccuggaacaaga

SEQ ID NO: 1460593 - RNA, 19 nt, Homo sapiens
  misc_RNA (1)...(19): siRNA sense strand
gugccaaucugccuuguaa

SEQ ID NO: 1460594 - RNA, 19 nt, Homo sapiens
  misc_RNA (1)...(19): siRNA sense strand
gaggagaagucacggauca

SEQ ID NO: 1460595 - RNA, 19 nt, Homo sapiens
  misc_RNA (1)...(19): siRNA sense strand
gaagagcgagccuaccuuu

SEQ ID NO: 1460596 - RNA, 19 nt, Homo sapiens
  misc_RNA (1)...(19): siRNA sense strand
caacaugccucaguauauc

SEQ ID NO: 1460597 - RNA, 19 nt, Homo sapiens
  misc_RNA (1)...(19): siRNA sense strand
ggacucccauggugacuga

SEQ ID NO: 1460598 - RNA, 19 nt, Homo sapiens
  misc_RNA (1)...(19): siRNA sense strand
ggucaacucucagcgcuuu

SEQ ID NO: 1460599 - RNA, 19 nt, Homo sapiens
  misc_RNA (1)...(19): siRNA sense strand
aagaauggcuccagugaga

SEQ ID NO: 1460600 - RNA, 19 nt, Homo sapiens
  misc_RNA (1)...(19): siRNA sense strand
ggacauggaucuggaagag

SEQ ID NO: 1460601 - RNA, 19 nt, Homo sapiens
  misc_RNA (1)...(19): siRNA sense strand
ggagggcucugacuacauc

SEQ ID NO: 1460602 - RNA, 19 nt, Homo sapiens
  misc_RNA (1)...(19): siRNA sense strand
ccaucgagcuggccacauu

SEQ ID NO: 1460603 - RNA, 19 nt, Homo sapiens
  misc_RNA (1)...(19): siRNA sense strand
uagauccgauggcagaaua

SEQ ID NO: 1460604 - RNA, 19 nt, Homo sapiens
  misc_RNA (1)...(19): siRNA sense strand
ggagaagugucaccaguac

SEQ ID NO: 1460605 - RNA, 19 nt, Homo sapiens
  misc_RNA (1)...(19): siRNA sense strand
caaggacccuguggaaaug

SEQ ID NO: 1460606 - RNA, 19 nt, Homo sapiens
  misc_RNA (1)...(19): siRNA sense strand
gaagugaacaagccgaaga

SEQ ID NO: 1460607 - RNA, 19 nt, Homo sapiens
  misc_RNA (1)...(19): siRNA sense strand
caggucacguugcuagaua

SEQ ID NO: 1460608 - RNA, 19 nt, Homo sapiens
  misc_RNA (1)...(19): siRNA sense strand
gcaauggacgcaucaaaca

SEQ ID NO: 1460609 - RNA, 19 nt, Homo sapiens
  misc_RNA (1)...(19): siRNA sense strand
gaacagggugugccaaagu

SEQ ID NO: 1460610 - RNA, 19 nt, Homo sapiens
  misc_RNA (1)...(19): siRNA sense strand
cgacaugggcccacaguug

SEQ ID NO: 1460611 - RNA, 19 nt, Homo sapiens
  misc_RNA (1)...(19): siRNA sense strand
acacgucacuggcauggaa

SEQ ID NO: 1460612 - RNA, 19 nt, Homo sapiens
  misc_RNA (1)...(19): siRNA sense strand
agaacaaacccgacaguaa

SEQ ID NO: 1460613 - RNA, 19 nt, Homo sapiens
  misc_RNA (1)...(19): siRNA sense strand
ccagagcuauuucauugug

SEQ ID NO: 1460614 - RNA, 19 nt, Homo sapiens
  misc_RNA (1)...(19): siRNA sense strand
ccaaggacccuguggaaau

SEQ ID NO: 1460615 - RNA, 19 nt, Homo sapiens
  misc_RNA (1)...(19): siRNA sense strand
caucaacgccagcuucauu

SEQ ID NO: 1460616 - RNA, 19 nt, Homo sapiens
  misc_RNA (1)...(19): siRNA sense strand
ugacgcggcuggaggagaa

SEQ ID NO: 1460617 - RNA, 19 nt, Homo sapiens
  misc_RNA (1)...(19): siRNA sense strand
ccuacaagauccaguacaa

SEQ ID NO: 1460618 - RNA, 19 nt, Homo sapiens
  misc_RNA (1)...(19): siRNA sense strand
ugaccacuaugcaaccuaa

SEQ ID NO: 1460619 - RNA, 19 nt, Homo sapiens
  misc_RNA (1)...(19): siRNA sense strand
aauacaacaugccucagua

SEQ ID NO: 1460620 - RNA, 19 nt, Homo sapiens
  misc_RNA (1)...(19): siRNA sense strand
gaauggcuccagugagaaa

SEQ ID NO: 1460621 - RNA, 19 nt, Homo sapiens
  misc_RNA (1)...(19): siRNA sense strand
gaacaagaagggcaagaag

SEQ ID NO: 1460622 - RNA, 19 nt, Homo sapiens
  misc_RNA (1)...(19): siRNA sense strand
aggagaguaucaucaagua

SEQ ID NO: 1460623 - RNA, 19 nt, Homo sapiens
  misc_RNA (1)...(19): siRNA sense strand
gccaagugcauaagacuaa

SEQ ID NO: 1460624 - RNA, 19 nt, Homo sapiens
  misc_RNA (1)...(19): siRNA sense strand
gacaugggcccacaguuga

SEQ ID NO: 1460625 - RNA, 19 nt, Homo sapiens
  misc_RNA (1)...(19): siRNA sense strand
ggccguaucagauuaaaga

SEQ ID NO: 1460626 - RNA, 19 nt, Homo sapiens
  misc_RNA (1)...(19): siRNA sense strand
caacgcccuuccuggcuuu

SEQ ID NO: 1460627 - RNA, 19 nt, Homo sapiens
  misc_RNA (1)...(19): siRNA sense strand
ggugaaaucucuccccaaa

SEQ ID NO: 1460628 - RNA, 19 nt, Homo sapiens
  misc_RNA (1)...(19): siRNA sense strand
gaauacaacaugccucagu

SEQ ID NO: 1460629 - RNA, 19 nt, Homo sapiens
  misc_RNA (1)...(19): siRNA sense strand
ggaacaagaagggcaagaa

SEQ ID NO: 1460630 - RNA, 19 nt, Homo sapiens
  misc_RNA (1)...(19): siRNA sense strand
gcaacuggcagaagcacaa

SEQ ID NO: 1460631 - RNA, 19 nt, Homo sapiens
  misc_RNA (1)...(19): siRNA sense strand
gggagaagugucaccagua

SEQ ID NO: 1460632 - RNA, 19 nt, Homo sapiens
  misc_RNA (1)...(19): siRNA sense strand
cgucagaacgcguacauug

SEQ ID NO: 1460633 - RNA, 19 nt, Homo sapiens
  misc_RNA (1)...(19): siRNA sense strand
aaaccgaccagggcaaaua

SEQ ID NO: 1460634 - RNA, 19 nt, Homo sapiens
  misc_RNA (1)...(19): siRNA sense strand
gcaggagaguaucaucaag

SEQ ID NO: 1460635 - RNA, 19 nt, Homo sapiens
  misc_RNA (1)...(19): siRNA sense strand
uugagacgauugaguuuga

SEQ ID NO: 1460636 - RNA, 19 nt, Homo sapiens
  misc_RNA (1)...(19): siRNA sense strand
gagcgagccuaccuuugca

SEQ ID NO: 1460637 - RNA, 19 nt, Homo sapiens
  misc_RNA (1)...(19): siRNA sense strand
ggaaaccgaccagggcaaa

SEQ ID NO: 1460638 - RNA, 19 nt, Homo sapiens
  misc_RNA (1)...(19): siRNA sense strand
cggaagcuuugaccacuau

SEQ ID NO: 1460639 - RNA, 19 nt, Homo sapiens
  misc_RNA (1)...(19): siRNA sense strand
gcagacagaggaugaguac

SEQ ID NO: 1460640 - RNA, 19 nt, Homo sapiens
  misc_RNA (1)...(19): siRNA sense strand
ggaacagggugugccaaag

SEQ ID NO: 1460641 - RNA, 19 nt, Homo sapiens
  misc_RNA (1)...(19): siRNA sense strand
ucaagugugaucaguauug

SEQ ID NO: 1460642 - RNA, 19 nt, Homo sapiens
  misc_RNA (1)...(19): siRNA sense strand
cauaaucugcauugucauu

SEQ ID NO: 1460643 - RNA, 19 nt, Homo sapiens
  misc_RNA (1)...(19): siRNA sense strand
gccguggucuucauaaucu

SEQ ID NO: 1460644 - RNA, 19 nt, Homo sapiens
  misc_RNA (1)...(19): siRNA sense strand
ccaccgcuauguccucuuc

SEQ ID NO: 1460645 - RNA, 19 nt, Homo sapiens
  misc_RNA (1)...(19): siRNA sense strand
uucauaaucugcauuguca

SEQ ID NO: 1460646 - RNA, 19 nt, Homo sapiens
  misc_RNA (1)...(19): siRNA sense strand
ggaguaccucggaagcuuu

SEQ ID NO: 1460647 - RNA, 19 nt, Homo sapiens
  misc_RNA (1)...(19): siRNA sense strand
gcucugcccgcuaccagua

SEQ ID NO: 1460648 - RNA, 19 nt, Homo sapiens
  misc_RNA (1)...(19): siRNA sense strand
ugaccaagcugcgggagau

SEQ ID NO: 1460649 - RNA, 19 nt, Homo sapiens
  misc_RNA (1)...(19): siRNA sense strand
ucaagcggcuggcuaacuc

SEQ ID NO: 1460650 - RNA, 19 nt, Homo sapiens
  misc_RNA (1)...(19): siRNA sense strand
gagcggaucaagccagaga

SEQ ID NO: 1460651 - RNA, 19 nt, Homo sapiens
  misc_RNA (1)...(19): siRNA sense strand
ucaaggacucggccaacua

SEQ ID NO: 1460652 - RNA, 19 nt, Homo sapiens
  misc_RNA (1)...(19): siRNA sense strand
gcuuugagacgauugaguu

SEQ ID NO: 1460653 - RNA, 19 nt, Homo sapiens
  misc_RNA (1)...(19): siRNA sense strand
gacauucucucugcacaag

SEQ ID NO: 1460654 - RNA, 19 nt, Homo sapiens
  misc_RNA (1)...(19): siRNA sense strand
gaucaugaagacaucaguu

SEQ ID NO: 1460655 - RNA, 19 nt, Homo sapiens
  misc_RNA (1)...(19): siRNA sense strand
caguauggcggcuucgaua

SEQ ID NO: 1460656 - RNA, 19 nt, Homo sapiens
  misc_RNA (1)...(19): siRNA sense strand
augaguaccaguucuguua

SEQ ID NO: 1460657 - RNA, 19 nt, Homo sapiens
  misc_RNA (1)...(19): siRNA sense strand
acaacaugccucaguauau

SEQ ID NO: 1460658 - RNA, 19 nt, Homo sapiens
  misc_RNA (1)...(19): siRNA sense strand
gauggcagaauacaacaug

SEQ ID NO: 1460659 - RNA, 19 nt, Homo sapiens
  misc_RNA (1)...(19): siRNA sense strand
guccgccaguuccaguuua

SEQ ID NO: 1460660 - RNA, 19 nt, Homo sapiens
  misc_RNA (1)...(19): siRNA sense strand
gagcggaugcgguaugaag

SEQ ID NO: 1460661 - RNA, 19 nt, Homo sapiens
  misc_RNA (1)...(19): siRNA sense strand
caaguacgagcuccucuuc

SEQ ID NO: 1460662 - RNA, 19 nt, Homo sapiens
  misc_RNA (1)...(19): siRNA sense strand
uacaagauccaguacaaug

SEQ ID NO: 1460663 - RNA, 19 nt, Homo sapiens
  misc_RNA (1)...(19): siRNA sense strand
ggaacucacagaugucaag

SEQ ID NO: 1460664 - RNA, 19 nt, Homo sapiens
  misc_RNA (1)...(19): siRNA sense strand
uacaacaugccucaguaua

SEQ ID NO: 1460665 - RNA, 19 nt, Homo sapiens
  misc_RNA (1)...(19): siRNA sense strand
ucaagaaccgccuggugaa

SEQ ID NO: 1460666 - RNA, 19 nt, Homo sapiens
  misc_RNA (1)...(19): siRNA sense strand
gcccacacgucacgcuuca

SEQ ID NO: 1460667 - RNA, 19 nt, Homo sapiens
  misc_RNA (1)...(19): siRNA sense strand
acaagaauggcuccaguga

SEQ ID NO: 1460668 - RNA, 19 nt, Homo sapiens
  misc_RNA (1)...(19): siRNA sense strand
ucacguugcuagauaccau

SEQ ID NO: 1460669 - RNA, 19 nt, Homo sapiens
  misc_RNA (1)...(19): siRNA sense strand
cagagaagacagucgaugu

SEQ ID NO: 1460670 - RNA, 19 nt, Homo sapiens
  misc_RNA (1)...(19): siRNA sense strand
gaccauggcgugcccgaau

SEQ ID NO: 1460671 - RNA, 19 nt, Homo sapiens
  misc_RNA (1)...(19): siRNA sense strand
ggacauucucucugcacaa

SEQ ID NO: 1460672 - RNA, 19 nt, Homo sapiens
  misc_RNA (1)...(19): siRNA sense strand
ucaccugguucaaggacuu

SEQ ID NO: 1460673 - RNA, 19 nt, Homo sapiens
  misc_RNA (1)...(19): siRNA sense strand
gaggaugaguaccaguucu

SEQ ID NO: 1460674 - RNA, 19 nt, Homo sapiens
  misc_RNA (1)...(19): siRNA sense strand
caagugugaucaguauugg

SEQ ID NO: 1460675 - RNA, 19 nt, Homo sapiens
  misc_RNA (1)...(19): siRNA sense strand
gaacgugcuggaacucaca

SEQ ID NO: 1460676 - RNA, 19 nt, Homo sapiens
  misc_RNA (1)...(19): siRNA sense strand
gauccuagugccagcaaug

SEQ ID NO: 1460677 - RNA, 19 nt, Homo sapiens
  misc_RNA (1)...(19): siRNA sense strand
gggcuucaucgacuucauu

SEQ ID NO: 1460678 - RNA, 19 nt, Homo sapiens
  misc_RNA (1)...(19): siRNA sense strand
gggagggcuucaucgacuu

SEQ ID NO: 1460679 - RNA, 19 nt, Homo sapiens
  misc_RNA (1)...(19): siRNA sense strand
gaagucacggaucaagugu

SEQ ID NO: 1460680 - RNA, 19 nt, Homo sapiens
  misc_RNA (1)...(19): siRNA sense strand
caugggcagugauuacauc

SEQ ID NO: 1460681 - RNA, 19 nt, Homo sapiens
  misc_RNA (1)...(19): siRNA sense strand
guaaacgcaaggacucaga

SEQ ID NO: 1460682 - RNA, 19 nt, Homo sapiens
  misc_RNA (1)...(19): siRNA sense strand
gcccuggcauggugucugu

SEQ ID NO: 1460683 - RNA, 19 nt, Homo sapiens
  misc_RNA (1)...(19): siRNA sense strand
acccugagaucaccugguu

SEQ ID NO: 1460684 - RNA, 19 nt, Homo sapiens
  misc_RNA (1)...(19): siRNA sense strand
ucauugcuauccugcucua

SEQ ID NO: 1460685 - RNA, 19 nt, Homo sapiens
  misc_RNA (1)...(19): siRNA sense strand
gacaucaccaccacacguu

SEQ ID NO: 1460686 - RNA, 19 nt, Homo sapiens
  misc_RNA (1)...(19): siRNA sense strand
gaccagggcaaauaugagu

SEQ ID NO: 1460687 - RNA, 19 nt, Homo sapiens
  misc_RNA (1)...(19): siRNA sense strand
gaacaaacccgacaguaaa

SEQ ID NO: 1460688 - RNA, 19 nt, Homo sapiens
  misc_RNA (1)...(19): siRNA sense strand
gcaagaaggucaacucuca

SEQ ID NO: 1460689 - RNA, 19 nt, Homo sapiens
  misc_RNA (1)...(19): siRNA sense strand
ccaaaugccuccugaacaa

SEQ ID NO: 1460690 - RNA, 19 nt, Homo sapiens
  misc_RNA (1)...(19): siRNA sense strand
guccagagcuauuucauug

SEQ ID NO: 1460691 - RNA, 19 nt, Homo sapiens
  misc_RNA (1)...(19): siRNA sense strand
cagauccuguguccuauua

SEQ ID NO: 1460692 - RNA, 19 nt, Homo sapiens
  misc_RNA (1)...(19): siRNA sense strand
cgagugaccuggaacaaga

SEQ ID NO: 1460693 - RNA, 19 nt, Homo sapiens
  misc_RNA (1)...(19): siRNA sense strand
gugccaaucugccuuguaa

SEQ ID NO: 1460694 - RNA, 19 nt, Homo sapiens
  misc_RNA (1)...(19): siRNA sense strand
gaggagaagucacggauca

SEQ ID NO: 1460695 - RNA, 19 nt, Homo sapiens
  misc_RNA (1)...(19): siRNA sense strand
gaagagcgagccuaccuuu

SEQ ID NO: 1460696 - RNA, 19 nt, Homo sapiens
  misc_RNA (1)...(19): siRNA sense strand
caacaugccucaguauauc

SEQ ID NO: 1460697 - RNA, 19 nt, Homo sapiens
  misc_RNA (1)...(19): siRNA sense strand
ggacucccauggugacuga

SEQ ID NO: 1460698 - RNA, 19 nt, Homo sapiens
  misc_RNA (1)...(19): siRNA sense strand
ggucaacucucagcgcuuu

SEQ ID NO: 1460699 - RNA, 19 nt, Homo sapiens
  misc_RNA (1)...(19): siRNA sense strand
aagaauggcuccagugaga

SEQ ID NO: 1460700 - RNA, 19 nt, Homo sapiens
  misc_RNA (1)...(19): siRNA sense strand
ggacauggaucuggaagag

SEQ ID NO: 1460701 - RNA, 19 nt, Homo sapiens
  misc_RNA (1)...(19): siRNA sense strand
ggagggcucugacuacauc

SEQ ID NO: 1460702 - RNA, 19 nt, Homo sapiens
  misc_RNA (1)...(19): siRNA sense strand
ccaucgagcuggccacauu

SEQ ID NO: 1460703 - RNA, 19 nt, Homo sapiens
  misc_RNA (1)...(19): siRNA sense strand
uagauccgauggcagaaua

SEQ ID NO: 1460704 - RNA, 19 nt, Homo sapiens
  misc_RNA (1)...(19): siRNA sense strand
ggagaagugucaccaguac

SEQ ID NO: 1460705 - RNA, 19 nt, Homo sapiens
  misc_RNA (1)...(19): siRNA sense strand
caaggacccuguggaaaug

SEQ ID NO: 1460706 - RNA, 19 nt, Homo sapiens
  misc_RNA (1)...(19): siRNA sense strand
gaagugaacaagccgaaga

SEQ ID NO: 1460707 - RNA, 19 nt, Homo sapiens
  misc_RNA (1)...(19): siRNA sense strand
caggucacguugcuagaua

SEQ ID NO: 1460708 - RNA, 19 nt, Homo sapiens
  misc_RNA (1)...(19): siRNA sense strand
gcaauggacgcaucaaaca

SEQ ID NO: 1460709 - RNA, 19 nt, Homo sapiens
  misc_RNA (1)...(19): siRNA sense strand
gaacagggugugccaaagu

SEQ ID NO: 1460710 - RNA, 19 nt, Homo sapiens
  misc_RNA (1)...(19): siRNA sense strand
cgacaugggcccacaguug

SEQ ID NO: 1460711 - RNA, 19 nt, Homo sapiens
  misc_RNA (1)...(19): siRNA sense strand
acacgucacuggcauggaa

SEQ ID NO: 1460712 - RNA, 19 nt, Homo sapiens
  misc_RNA (1)...(19): siRNA sense strand
agaacaaacccgacaguaa

SEQ ID NO: 1460713 - RNA, 19 nt, Homo sapiens
  misc_RNA (1)...(19): siRNA sense strand
ccagagcuauuucauugug

SEQ ID NO: 1460714 - RNA, 19 nt, Homo sapiens
  misc_RNA (1)...(19): siRNA sense strand
ccaaggacccuguggaaau

SEQ ID NO: 1460715 - RNA, 19 nt, Homo sapiens
  misc_RNA (1)...(19): siRNA sense strand
caucaacgccagcuucauu

SEQ ID NO: 1460716 - RNA, 19 nt, Homo sapiens
  misc_RNA (1)...(19): siRNA sense strand
ugacgcggcuggaggagaa

SEQ ID NO: 1460717 - RNA, 19 nt, Homo sapiens
  misc_RNA (1)...(19): siRNA sense strand
ccuacaagauccaguacaa

SEQ ID NO: 1460718 - RNA, 19 nt, Homo sapiens
  misc_RNA (1)...(19): siRNA sense strand
ugaccacuaugcaaccuaa

SEQ ID NO: 1460719 - RNA, 19 nt, Homo sapiens
  misc_RNA (1)...(19): siRNA sense strand
aauacaacaugccucagua

SEQ ID NO: 1460720 - RNA, 19 nt, Homo sapiens
  misc_RNA (1)...(19): siRNA sense strand
gaauggcuccagugagaaa

SEQ ID NO: 1460721 - RNA, 19 nt, Homo sapiens
  misc_RNA (1)...(19): siRNA sense strand
gaacaagaagggcaagaag

SEQ ID NO: 1460722 - RNA, 19 nt, Homo sapiens
  misc_RNA (1)...(19): siRNA sense strand
aggagaguaucaucaagua

SEQ ID NO: 1460723 - RNA, 19 nt, Homo sapiens
  misc_RNA (1)...(19): siRNA sense strand
gccaagugcauaagacuaa

SEQ ID NO: 1460724 - RNA, 19 nt, Homo sapiens
  misc_RNA (1)...(19): siRNA sense strand
gacaugggcccacaguuga

SEQ ID NO: 1460725 - RNA, 19 nt, Homo sapiens
  misc_RNA (1)...(19): siRNA sense strand
ggccguaucagauuaaaga

SEQ ID NO: 1460726 - RNA, 19 nt, Homo sapiens
  misc_RNA (1)...(19): siRNA sense strand
caacgcccuuccuggcuuu

SEQ ID NO: 1460727 - RNA, 19 nt, Homo sapiens
  misc_RNA (1)...(19): siRNA sense strand
ggugaaaucucuccccaaa

SEQ ID NO: 1460728 - RNA, 19 nt, Homo sapiens
  misc_RNA (1)...(19): siRNA sense strand
gaauacaacaugccucagu

SEQ ID NO: 1460729 - RNA, 19 nt, Homo sapiens
  misc_RNA (1)...(19): siRNA sense strand
ggaacaagaagggcaagaa

SEQ ID NO: 1460730 - RNA, 19 nt, Homo sapiens
  misc_RNA (1)...(19): siRNA sense strand
gcaacuggcagaagcacaa

SEQ ID NO: 1460731 - RNA, 19 nt, Homo sapiens
  misc_RNA (1)...(19): siRNA sense strand
gggagaagugucaccagua

SEQ ID NO: 1460732 - RNA, 19 nt, Homo sapiens
  misc_RNA (1)...(19): siRNA sense strand
cgucagaacgcguacauug

SEQ ID NO: 1460733 - RNA, 19 nt, Homo sapiens
  misc_RNA (1)...(19): siRNA sense strand
aaaccgaccagggcaaaua

SEQ ID NO: 1460734 - RNA, 19 nt, Homo sapiens
  misc_RNA (1)...(19): siRNA sense strand
gcaggagaguaucaucaag

SEQ ID NO: 1460735 - RNA, 19 nt, Homo sapiens
  misc_RNA (1)...(19): siRNA sense strand
uugagacgauugaguuuga

SEQ ID NO: 1460736 - RNA, 19 nt, Homo sapiens
  misc_RNA (1)...(19): siRNA sense strand
gagcgagccuaccuuugca

SEQ ID NO: 1460737 - RNA, 19 nt, Homo sapiens
  misc_RNA (1)...(19): siRNA sense strand
ggaaaccgaccagggcaaa

SEQ ID NO: 1460738 - RNA, 19 nt, Homo sapiens
  misc_RNA (1)...(19): siRNA sense strand
cggaagcuuugaccacuau

SEQ ID NO: 1460739 - RNA, 19 nt, Homo sapiens
  misc_RNA (1)...(19): siRNA sense strand
gcagacagaggaugaguac

SEQ ID NO: 1460740 - RNA, 19 nt, Homo sapiens
  misc_RNA (1)...(19): siRNA sense strand
ggaacagggugugccaaag

SEQ ID NO: 1460741 - RNA, 19 nt, Homo sapiens
  misc_RNA (1)...(19): siRNA sense strand
ucaagugugaucaguauug

SEQ ID NO: 1460742 - RNA, 19 nt, Homo sapiens
  misc_RNA (1)...(19): siRNA sense strand
cauaaucugcauugucauu

SEQ ID NO: 1460743 - RNA, 19 nt, Homo sapiens
  misc_RNA (1)...(19): siRNA sense strand
gccguggucuucauaaucu

SEQ ID NO: 1460744 - RNA, 19 nt, Homo sapiens
  misc_RNA (1)...(19): siRNA sense strand
ccaccgcuauguccucuuc

SEQ ID NO: 1460745 - RNA, 19 nt, Homo sapiens
  misc_RNA (1)...(19): siRNA sense strand
uucauaaucugcauuguca

SEQ ID NO: 1460746 - RNA, 19 nt, Homo sapiens
  misc_RNA (1)...(19): siRNA sense strand
ggaguaccucggaagcuuu

SEQ ID NO: 1460747 - RNA, 19 nt, Homo sapiens
  misc_RNA (1)...(19): siRNA sense strand
gcucugcccgcuaccagua

SEQ ID NO: 1460748 - RNA, 19 nt, Homo sapiens
  misc_RNA (1)...(19): siRNA sense strand
ugaccaagcugcgggagau

SEQ ID NO: 1460749 - RNA, 19 nt, Homo sapiens
  misc_RNA (1)...(19): siRNA sense strand
ucaagcggcuggcuaacuc

SEQ ID NO: 1460750 - RNA, 19 nt, Homo sapiens
  misc_RNA (1)...(19): siRNA sense strand
gagcggaucaagccagaga

SEQ ID NO: 1460751 - RNA, 19 nt, Homo sapiens
  misc_RNA (1)...(19): siRNA sense strand
ucaaggacucggccaacua

SEQ ID NO: 1460752 - RNA, 19 nt, Homo sapiens
  misc_RNA (1)...(19): siRNA sense strand
gcuuugagacgauugaguu

SEQ ID NO: 1460753 - RNA, 19 nt, Homo sapiens
  misc_RNA (1)...(19): siRNA sense strand
gacauucucucugcacaag

SEQ ID NO: 1460754 - RNA, 19 nt, Homo sapiens
  misc_RNA (1)...(19): siRNA sense strand
gaucaugaagacaucaguu

SEQ ID NO: 1460755 - RNA, 19 nt, Homo sapiens
  misc_RNA (1)...(19): siRNA sense strand
caguauggcggcuucgaua

SEQ ID NO: 1460756 - RNA, 19 nt, Homo sapiens
  misc_RNA (1)...(19): siRNA sense strand
augaguaccaguucuguua

SEQ ID NO: 1460757 - RNA, 19 nt, Homo sapiens
  misc_RNA (1)...(19): siRNA sense strand
acaacaugccucaguauau

SEQ ID NO: 1460758 - RNA, 19 nt, Homo sapiens
  misc_RNA (1)...(19): siRNA sense strand
gauggcagaauacaacaug

SEQ ID NO: 1460759 - RNA, 19 nt, Homo sapiens
  misc_RNA (1)...(19): siRNA sense strand
guccgccaguuccaguuua

SEQ ID NO: 1460760 - RNA, 19 nt, Homo sapiens
  misc_RNA (1)...(19): siRNA sense strand
gagcggaugcgguaugaag

SEQ ID NO: 1460761 - RNA, 19 nt, Homo sapiens
  misc_RNA (1)...(19): siRNA sense strand
caaguacgagcuccucuuc

SEQ ID NO: 1460762 - RNA, 19 nt, Homo sapiens
  misc_RNA (1)...(19): siRNA sense strand
uacaagauccaguacaaug

SEQ ID NO: 1460763 - RNA, 19 nt, Homo sapiens
  misc_RNA (1)...(19): siRNA sense strand
ggaacucacagaugucaag

SEQ ID NO: 1460764 - RNA, 19 nt, Homo sapiens
  misc_RNA (1)...(19): siRNA sense strand
uacaacaugccucaguaua

SEQ ID NO: 1460765 - RNA, 19 nt, Homo sapiens
  misc_RNA (1)...(19): siRNA sense strand
ucaagaaccgccuggugaa

SEQ ID NO: 1460766 - RNA, 19 nt, Homo sapiens
  misc_RNA (1)...(19): siRNA sense strand
gcccacacgucacgcuuca

SEQ ID NO: 1460767 - RNA, 19 nt, Homo sapiens
  misc_RNA (1)...(19): siRNA sense strand
acaagaauggcuccaguga

SEQ ID NO: 1460768 - RNA, 19 nt, Homo sapiens
  misc_RNA (1)...(19): siRNA sense strand
ucacguugcuagauaccau

SEQ ID NO: 1460769 - RNA, 19 nt, Homo sapiens
  misc_RNA (1)...(19): siRNA sense strand
cagagaagacagucgaugu

SEQ ID NO: 1460770 - RNA, 19 nt, Homo sapiens
  misc_RNA (1)...(19): siRNA sense strand
gaccauggcgugcccgaau

SEQ ID NO: 1460771 - RNA, 19 nt, Homo sapiens
  misc_RNA (1)...(19): siRNA sense strand
ggacauucucucugcacaa

SEQ ID NO: 1460772 - RNA, 19 nt, Homo sapiens
  misc_RNA (1)...(19): siRNA sense strand
ucaccugguucaaggacuu

SEQ ID NO: 1460773 - RNA, 19 nt, Homo sapiens
  misc_RNA (1)...(19): siRNA sense strand
gaggaugaguaccaguucu

SEQ ID NO: 1460774 - RNA, 19 nt, Homo sapiens
  misc_RNA (1)...(19): siRNA sense strand
caagugugaucaguauugg

SEQ ID NO: 1460775 - RNA, 19 nt, Homo sapiens
  misc_RNA (1)...(19): siRNA sense strand
gaacgugcuggaacucaca

SEQ ID NO: 1460776 - RNA, 19 nt, Homo sapiens
  misc_RNA (1)...(19): siRNA sense strand
gauccuagugccagcaaug

SEQ ID NO: 1460777 - RNA, 19 nt, Homo sapiens
  misc_RNA (1)...(19): siRNA sense strand
gggcuucaucgacuucauu

SEQ ID NO: 1460778 - RNA, 19 nt, Homo sapiens
  misc_RNA (1)...(19): siRNA sense strand
gggagggcuucaucgacuu

SEQ ID NO: 1460779 - RNA, 19 nt, Homo sapiens
  misc_RNA (1)...(19): siRNA sense strand
gaagucacggaucaagugu

SEQ ID NO: 1460780 - RNA, 19 nt, Homo sapiens
  misc_RNA (1)...(19): siRNA sense strand
caugggcagugauuacauc

SEQ ID NO: 1460781 - RNA, 19 nt, Homo sapiens
  misc_RNA (1)...(19): siRNA sense strand
guaaacgcaaggacucaga

SEQ ID NO: 1460782 - RNA, 19 nt, Homo sapiens
  misc_RNA (1)...(19): siRNA sense strand
gcccuggcauggugucugu

SEQ ID NO: 1460783 - RNA, 19 nt, Homo sapiens
  misc_RNA (1)...(19): siRNA sense strand
acccugagaucaccugguu

SEQ ID NO: 1460784 - RNA, 19 nt, Homo sapiens
  misc_RNA (1)...(19): siRNA sense strand
ucauugcuauccugcucua

SEQ ID NO: 1460785 - RNA, 19 nt, Homo sapiens
  misc_RNA (1)...(19): siRNA sense strand
gacaucaccaccacacguu

SEQ ID NO: 1460786 - RNA, 19 nt, Homo sapiens
  misc_RNA (1)...(19): siRNA sense strand
gaccagggcaaauaugagu

SEQ ID NO: 1460787 - RNA, 19 nt, Homo sapiens
  misc_RNA (1)...(19): siRNA sense strand
ggaccuguaucuccacguu

SEQ ID NO: 1460788 - RNA, 19 nt, Homo sapiens
  misc_RNA (1)...(19): siRNA sense strand
guaaagaaggcaacacaug

SEQ ID NO: 1460789 - RNA, 19 nt, Homo sapiens
  misc_RNA (1)...(19): siRNA sense strand
gaaccaggcaguaaagaag

SEQ ID NO: 1460790 - RNA, 19 nt, Homo sapiens
  misc_RNA (1)...(19): siRNA sense strand
ggggaacucuguccuaaaa

SEQ ID NO: 1460791 - RNA, 19 nt, Homo sapiens
  misc_RNA (1)...(19): siRNA sense strand
aguggaaccucguguguga

SEQ ID NO: 1460792 - RNA, 19 nt, Homo sapiens
  misc_RNA (1)...(19): siRNA sense strand
ucaccugcaucaccaucua

SEQ ID NO: 1460793 - RNA, 19 nt, Homo sapiens
  misc_RNA (1)...(19): siRNA sense strand
gcccgacccuuggugauga

SEQ ID NO: 1460794 - RNA, 19 nt, Homo sapiens
  misc_RNA (1)...(19): siRNA sense strand
gugcagaaccaggcaguaa

SEQ ID NO: 1460795 - RNA, 19 nt, Homo sapiens
  misc_RNA (1)...(19): siRNA sense strand
gcagaaccaggcaguaaag

SEQ ID NO: 1460796 - RNA, 19 nt, Homo sapiens
  misc_RNA (1)...(19): siRNA sense strand
guggauggcugggucuaug

SEQ ID NO: 1460797 - RNA, 19 nt, Homo sapiens
  misc_RNA (1)...(19): siRNA sense strand
ccacaggcaggcuggauug

SEQ ID NO: 1460798 - RNA, 19 nt, Homo sapiens
  misc_RNA (1)...(19): siRNA sense strand
ggaacucuguccuaaaauc

SEQ ID NO: 1460799 - RNA, 19 nt, Homo sapiens
  misc_RNA (1)...(19): siRNA sense strand
caucuucaccuccacaauc

SEQ ID NO: 1460800 - RNA, 19 nt, Homo sapiens
  misc_RNA (1)...(19): siRNA sense strand
caaguggaaccucgugugu

SEQ ID NO: 1460801 - RNA, 19 nt, Homo sapiens
  misc_RNA (1)...(19): siRNA sense strand
gacccuuggugaugaccuu

SEQ ID NO: 1460802 - RNA, 19 nt, Homo sapiens
  misc_RNA (1)...(19): siRNA sense strand
gaaccucgugugugacucu

SEQ ID NO: 1460803 - RNA, 19 nt, Homo sapiens
  misc_RNA (1)...(19): siRNA sense strand
ccuaaaauccacacaguuu

SEQ ID NO: 1460804 - RNA, 19 nt, Homo sapiens
  misc_RNA (1)...(19): siRNA sense strand
caacaucuuccugcuccaa

SEQ ID NO: 1460805 - RNA, 19 nt, Homo sapiens
  misc_RNA (1)...(19): siRNA sense strand
uccaagaugugcagaacca

SEQ ID NO: 1460806 - RNA, 19 nt, Homo sapiens
  misc_RNA (1)...(19): siRNA sense strand
gccuuuggcuucaccuucu

SEQ ID NO: 1460807 - RNA, 19 nt, Homo sapiens
  misc_RNA (1)...(19): siRNA sense strand
agaaccaggcaguaaagaa

SEQ ID NO: 1460808 - RNA, 19 nt, Homo sapiens
  misc_RNA (1)...(19): siRNA sense strand
caguaaagaaggcaacaca

SEQ ID NO: 1460809 - RNA, 19 nt, Homo sapiens
  misc_RNA (1)...(19): siRNA sense strand
cuaccuggcugggauucug

SEQ ID NO: 1460810 - RNA, 19 nt, Homo sapiens
  misc_RNA (1)...(19): siRNA sense strand
ccacugugcucaggaugac

SEQ ID NO: 1460811 - RNA, 19 nt, Homo sapiens
  misc_RNA (1)...(19): siRNA sense strand
ggaccuguaucuccacguu

SEQ ID NO: 1460812 - RNA, 19 nt, Homo sapiens
  misc_RNA (1)...(19): siRNA sense strand
guaaagaaggcaacacaug

SEQ ID NO: 1460813 - RNA, 19 nt, Homo sapiens
  misc_RNA (1)...(19): siRNA sense strand
gaaccaggcaguaaagaag

SEQ ID NO: 1460814 - RNA, 19 nt, Homo sapiens
  misc_RNA (1)...(19): siRNA sense strand
ggggaacucuguccuaaaa

SEQ ID NO: 1460815 - RNA, 19 nt, Homo sapiens
  misc_RNA (1)...(19): siRNA sense strand
ucaccugcaucaccaucua

SEQ ID NO: 1460816 - RNA, 19 nt, Homo sapiens
  misc_RNA (1)...(19): siRNA sense strand
gcccgacccuuggugauga

SEQ ID NO: 1460817 - RNA, 19 nt, Homo sapiens
  misc_RNA (1)...(19): siRNA sense strand
gugcagaaccaggcaguaa

SEQ ID NO: 1460818 - RNA, 19 nt, Homo sapiens
  misc_RNA (1)...(19): siRNA sense strand
gcagaaccaggcaguaaag

SEQ ID NO: 1460819 - RNA, 19 nt, Homo sapiens
  misc_RNA (1)...(19): siRNA sense strand
ccacaggcaggcuggauug

SEQ ID NO: 1460820 - RNA, 19 nt, Homo sapiens
  misc_RNA (1)...(19): siRNA sense strand
ggaacucuguccuaaaauc

SEQ ID NO: 1460821 - RNA, 19 nt, Homo sapiens
  misc_RNA (1)...(19): siRNA sense strand
gacccuuggugaugaccuu

SEQ ID NO: 1460822 - RNA, 19 nt, Homo sapiens
  misc_RNA (1)...(19): siRNA sense strand
ccuaaaauccacacaguuu

SEQ ID NO: 1460823 - RNA, 19 nt, Homo sapiens
  misc_RNA (1)...(19): siRNA sense strand
caacaucuuccugcuccaa

SEQ ID NO: 1460824 - RNA, 19 nt, Homo sapiens
  misc_RNA (1)...(19): siRNA sense strand
uccaagaugugcagaacca

SEQ ID NO: 1460825 - RNA, 19 nt, Homo sapiens
  misc_RNA (1)...(19): siRNA sense strand
gccuuuggcuucaccuucu

SEQ ID NO: 1460826 - RNA, 19 nt, Homo sapiens
  misc_RNA (1)...(19): siRNA sense strand
agaaccaggcaguaaagaa

SEQ ID NO: 1460827 - RNA, 19 nt, Homo sapiens
  misc_RNA (1)...(19): siRNA sense strand
caguaaagaaggcaacaca

SEQ ID NO: 1460828 - RNA, 19 nt, Homo sapiens
  misc_RNA (1)...(19): siRNA sense strand
ccacugugcucaggaugac

SEQ ID NO: 1460829 - RNA, 19 nt, Homo sapiens
  misc_RNA (1)...(19): siRNA sense strand
gcacaacuauugcagaaau

SEQ ID NO: 1460830 - RNA, 19 nt, Homo sapiens
  misc_RNA (1)...(19): siRNA sense strand
gagcacaacuauugcagaa

SEQ ID NO: 1460831 - RNA, 19 nt, Homo sapiens
  misc_RNA (1)...(19): siRNA sense strand
gaacgagacuuuccagcau

SEQ ID NO: 1460832 - RNA, 19 nt, Homo sapiens
  misc_RNA (1)...(19): siRNA sense strand
gcacgaggauggugucuac

SEQ ID NO: 1460833 - RNA, 19 nt, Homo sapiens
  misc_RNA (1)...(19): siRNA sense strand
gaacuggacagcacuacaa

SEQ ID NO: 1460834 - RNA, 19 nt, Homo sapiens
  misc_RNA (1)...(19): siRNA sense strand
ggaaacccaccuccucuaa

SEQ ID NO: 1460835 - RNA, 19 nt, Homo sapiens
  misc_RNA (1)...(19): siRNA sense strand
ucacagccauuguagcaaa

SEQ ID NO: 1460836 - RNA, 19 nt, Homo sapiens
  misc_RNA (1)...(19): siRNA sense strand
ccaacaaacucaccauaca

SEQ ID NO: 1460837 - RNA, 19 nt, Homo sapiens
  misc_RNA (1)...(19): siRNA sense strand
cauacaacacucugaaaua

SEQ ID NO: 1460838 - RNA, 19 nt, Homo sapiens
  misc_RNA (1)...(19): siRNA sense strand
caacgucucucuggacuuc

SEQ ID NO: 1460839 - RNA, 19 nt, Homo sapiens
  misc_RNA (1)...(19): siRNA sense strand
gcccagggauuugcuguuu

SEQ ID NO: 1460840 - RNA, 19 nt, Homo sapiens
  misc_RNA (1)...(19): siRNA sense strand
agucagagguucaaguuug

SEQ ID NO: 1460841 - RNA, 19 nt, Homo sapiens
  misc_RNA (1)...(19): siRNA sense strand
ccacuucaauuuccaucuu

SEQ ID NO: 1460842 - RNA, 19 nt, Homo sapiens
  misc_RNA (1)...(19): siRNA sense strand
cauacaaacuugcaucagu

SEQ ID NO: 1460843 - RNA, 19 nt, Homo sapiens
  misc_RNA (1)...(19): siRNA sense strand
uuacaagccuuccacuuca

SEQ ID NO: 1460844 - RNA, 19 nt, Homo sapiens
  misc_RNA (1)...(19): siRNA sense strand
ggagucagagguucaaguu

SEQ ID NO: 1460845 - RNA, 19 nt, Homo sapiens
  misc_RNA (1)...(19): siRNA sense strand
ucaacaagaugaccgcaau

SEQ ID NO: 1460846 - RNA, 19 nt, Homo sapiens
  misc_RNA (1)...(19): siRNA sense strand
caacaaacucaccauacaa

SEQ ID NO: 1460847 - RNA, 19 nt, Homo sapiens
  misc_RNA (1)...(19): siRNA sense strand
gaacuacucagccaugucu

SEQ ID NO: 1460848 - RNA, 19 nt, Homo sapiens
  misc_RNA (1)...(19): siRNA sense strand
cuacaaggaucauggaaac

SEQ ID NO: 1460849 - RNA, 19 nt, Homo sapiens
  misc_RNA (1)...(19): siRNA sense strand
ggacuucgucaucuuguau

SEQ ID NO: 1460850 - RNA, 19 nt, Homo sapiens
  misc_RNA (1)...(19): siRNA sense strand
gcuggaagccacagaguug

SEQ ID NO: 1460851 - RNA, 19 nt, Homo sapiens
  misc_RNA (1)...(19): siRNA sense strand
gauaccugcuugccagaug

SEQ ID NO: 1460852 - RNA, 19 nt, Homo sapiens
  misc_RNA (1)...(19): siRNA sense strand
ccagggauuugcuguuuua

SEQ ID NO: 1460853 - RNA, 19 nt, Homo sapiens
  misc_RNA (1)...(19): siRNA sense strand
gauggugucuacuggaagu

SEQ ID NO: 1460854 - RNA, 19 nt, Homo sapiens
  misc_RNA (1)...(19): siRNA sense strand
caucuuguauuucuucucu

SEQ ID NO: 1460855 - RNA, 19 nt, Homo sapiens
  misc_RNA (1)...(19): siRNA sense strand
auacaacacucugaaauac

SEQ ID NO: 1460856 - RNA, 19 nt, Homo sapiens
  misc_RNA (1)...(19): siRNA sense strand
ggucagagucaacaagaug

SEQ ID NO: 1460857 - RNA, 19 nt, Homo sapiens
  misc_RNA (1)...(19): siRNA sense strand
ccaaaguccucuaugucau

SEQ ID NO: 1460858 - RNA, 19 nt, Homo sapiens
  misc_RNA (1)...(19): siRNA sense strand
aaacucaccauacaaacuu

SEQ ID NO: 1460859 - RNA, 19 nt, Homo sapiens
  misc_RNA (1)...(19): siRNA sense strand
ccuccaaaguccucuaugu

SEQ ID NO: 1460860 - RNA, 19 nt, Homo sapiens
  misc_RNA (1)...(19): siRNA sense strand
ccaauggugcggauuauag

SEQ ID NO: 1460861 - RNA, 19 nt, Homo sapiens
  misc_RNA (1)...(19): siRNA sense strand
cagccaauggugcggauua

SEQ ID NO: 1460862 - RNA, 19 nt, Homo sapiens
  misc_RNA (1)...(19): siRNA sense strand
ugucuucuguggucuauuc

SEQ ID NO: 1460863 - RNA, 19 nt, Homo sapiens
  misc_RNA (1)...(19): siRNA sense strand
aaacccaccuccucuaacu

SEQ ID NO: 1460864 - RNA, 19 nt, Homo sapiens
  misc_RNA (1)...(19): siRNA sense strand
guugaaggauggacagucu

SEQ ID NO: 1460865 - RNA, 19 nt, Homo sapiens
  misc_RNA (1)...(19): siRNA sense strand
gcccaccucuguccuucaa

SEQ ID NO: 1460866 - RNA, 19 nt, Homo sapiens
  misc_RNA (1)...(19): siRNA sense strand
ugggugagcacaacuauug

SEQ ID NO: 1460867 - RNA, 19 nt, Homo sapiens
  misc_RNA (1)...(19): siRNA sense strand
gcuacaaggaucauggaaa

SEQ ID NO: 1460868 - RNA, 19 nt, Homo sapiens
  misc_RNA (1)...(19): siRNA sense strand
gggaagccaugucuguuuu

SEQ ID NO: 1460869 - RNA, 19 nt, Homo sapiens
  misc_RNA (1)...(19): siRNA sense strand
cuggaaaccuuggcugcua

SEQ ID NO: 1460870 - RNA, 19 nt, Homo sapiens
  misc_RNA (1)...(19): siRNA sense strand
gcacgucacauucaaaucc

SEQ ID NO: 1460871 - RNA, 19 nt, Homo sapiens
  misc_RNA (1)...(19): siRNA sense strand
gaaguacugugagauaccu

SEQ ID NO: 1460872 - RNA, 19 nt, Homo sapiens
  misc_RNA (1)...(19): siRNA sense strand
auaccaagccgucaaggaa

SEQ ID NO: 1460873 - RNA, 19 nt, Homo sapiens
  misc_RNA (1)...(19): siRNA sense strand
uaugcuugcuucuguggaa

SEQ ID NO: 1460874 - RNA, 19 nt, Homo sapiens
  misc_RNA (1)...(19): siRNA sense strand
ccuuagggauugucaucaa

SEQ ID NO: 1460875 - RNA, 19 nt, Homo sapiens
  misc_RNA (1)...(19): siRNA sense strand
gggauuugcuguuuuauac

SEQ ID NO: 1460876 - RNA, 19 nt, Homo sapiens
  misc_RNA (1)...(19): siRNA sense strand
caaaguccucuaugucauc

SEQ ID NO: 1460877 - RNA, 19 nt, Homo sapiens
  misc_RNA (1)...(19): siRNA sense strand
ccauacaacacucugaaau

SEQ ID NO: 1460878 - RNA, 19 nt, Homo sapiens
  misc_RNA (1)...(19): siRNA sense strand
cacuucaauuuccaucuuu

SEQ ID NO: 1460879 - RNA, 19 nt, Homo sapiens
  misc_RNA (1)...(19): siRNA sense strand
ucuuguauuucuucucuga

SEQ ID NO: 1460880 - RNA, 19 nt, Homo sapiens
  misc_RNA (1)...(19): siRNA sense strand
cgggaagccaugucuguuu

SEQ ID NO: 1460881 - RNA, 19 nt, Homo sapiens
  misc_RNA (1)...(19): siRNA sense strand
aacaaacucaccauacaaa

SEQ ID NO: 1460882 - RNA, 19 nt, Homo sapiens
  misc_RNA (1)...(19): siRNA sense strand
ucuauggucuggcaacucu

SEQ ID NO: 1460883 - RNA, 19 nt, Homo sapiens
  misc_RNA (1)...(19): siRNA sense strand
acucagccaugucuucugu

SEQ ID NO: 1460884 - RNA, 19 nt, Homo sapiens
  misc_RNA (1)...(19): siRNA sense strand
gggaacuacucagccaugu

SEQ ID NO: 1460885 - RNA, 19 nt, Homo sapiens
  misc_RNA (1)...(19): siRNA sense strand
aggcuaugcuugcuucugu

SEQ ID NO: 1460886 - RNA, 19 nt, Homo sapiens
  misc_RNA (1)...(19): siRNA sense strand
caaacucaccauacaaacu

SEQ ID NO: 1460887 - RNA, 19 nt, Homo sapiens
  misc_RNA (1)...(19): siRNA sense strand
cacagucacagccauugua

SEQ ID NO: 1460888 - RNA, 19 nt, Homo sapiens
  misc_RNA (1)...(19): siRNA sense strand
cuggaaguacugugagaua

SEQ ID NO: 1460889 - RNA, 19 nt, Homo sapiens
  misc_RNA (1)...(19): siRNA sense strand
ugaaggauggacagucuau

SEQ ID NO: 1460890 - RNA, 19 nt, Homo sapiens
  misc_RNA (1)...(19): siRNA sense strand
agacuuuccagcauccaua

SEQ ID NO: 1460891 - RNA, 19 nt, Homo sapiens
  misc_RNA (1)...(19): siRNA sense strand
aggauggugucuacuggaa

SEQ ID NO: 1460892 - RNA, 19 nt, Homo sapiens
  misc_RNA (1)...(19): siRNA sense strand
gaccuuagggauugucauc

SEQ ID NO: 1460893 - RNA, 19 nt, Homo sapiens
  misc_RNA (1)...(19): siRNA sense strand
gggauggagucaggcuaug

SEQ ID NO: 1460894 - RNA, 19 nt, Homo sapiens
  misc_RNA (1)...(19): siRNA sense strand
guccaacaaacucaccaua

SEQ ID NO: 1460895 - RNA, 19 nt, Homo sapiens
  misc_RNA (1)...(19): siRNA sense strand
gccaauggugcggauuaua

SEQ ID NO: 1460896 - RNA, 19 nt, Homo sapiens
  misc_RNA (1)...(19): siRNA sense strand
ggagcaggccaaccucagu

SEQ ID NO: 1460897 - RNA, 19 nt, Homo sapiens
  misc_RNA (1)...(19): siRNA sense strand
ccucagacugucccaggua

SEQ ID NO: 1460898 - RNA, 19 nt, Homo sapiens
  misc_RNA (1)...(19): siRNA sense strand
aaaguccucuaugucauca

SEQ ID NO: 1460899 - RNA, 19 nt, Homo sapiens
  misc_RNA (1)...(19): siRNA sense strand
gaaacccaccuccucuaac

SEQ ID NO: 1460900 - RNA, 19 nt, Homo sapiens
  misc_RNA (1)...(19): siRNA sense strand
uacaagccuuccacuucaa

SEQ ID NO: 1460901 - RNA, 19 nt, Homo sapiens
  misc_RNA (1)...(19): siRNA sense strand
uuuacaagccuuccacuuc

SEQ ID NO: 1460902 - RNA, 19 nt, Homo sapiens
  misc_RNA (1)...(19): siRNA sense strand
ucuggcaacucuccucauc

SEQ ID NO: 1460903 - RNA, 19 nt, Homo sapiens
  misc_RNA (1)...(19): siRNA sense strand
uccaaaguccucuauguca

SEQ ID NO: 1460904 - RNA, 19 nt, Homo sapiens
  misc_RNA (1)...(19): siRNA sense strand
auucaaaucccaucguguu

SEQ ID NO: 1460905 - RNA, 19 nt, Homo sapiens
  misc_RNA (1)...(19): siRNA sense strand
gagucagagguucaaguuu

SEQ ID NO: 1460906 - RNA, 19 nt, Homo sapiens
  misc_RNA (1)...(19): siRNA sense strand
uggacuucgucaucuugua

SEQ ID NO: 1460907 - RNA, 19 nt, Homo sapiens
  misc_RNA (1)...(19): siRNA sense strand
uugcuucuguggaaacaau

SEQ ID NO: 1460908 - RNA, 19 nt, Homo sapiens
  misc_RNA (1)...(19): siRNA sense strand
accaagccgucaaggaaga

SEQ ID NO: 1460909 - RNA, 19 nt, Homo sapiens
  misc_RNA (1)...(19): siRNA sense strand
gggucagagucaacaagau

SEQ ID NO: 1460910 - RNA, 19 nt, Homo sapiens
  misc_RNA (1)...(19): siRNA sense strand
caaaucccaucguguuccu

SEQ ID NO: 1460911 - RNA, 19 nt, Homo sapiens
  misc_RNA (1)...(19): siRNA sense strand
gcacaacuauugcagaaau

SEQ ID NO: 1460912 - RNA, 19 nt, Homo sapiens
  misc_RNA (1)...(19): siRNA sense strand
gagcacaacuauugcagaa

SEQ ID NO: 1460913 - RNA, 19 nt, Homo sapiens
  misc_RNA (1)...(19): siRNA sense strand
gaacgagacuuuccagcau

SEQ ID NO: 1460914 - RNA, 19 nt, Homo sapiens
  misc_RNA (1)...(19): siRNA sense strand
gcacgaggauggugucuac

SEQ ID NO: 1460915 - RNA, 19 nt, Homo sapiens
  misc_RNA (1)...(19): siRNA sense strand
gaacuggacagcacuacaa

SEQ ID NO: 1460916 - RNA, 19 nt, Homo sapiens
  misc_RNA (1)...(19): siRNA sense strand
ggaaacccaccuccucuaa

SEQ ID NO: 1460917 - RNA, 19 nt, Homo sapiens
  misc_RNA (1)...(19): siRNA sense strand
ucacagccauuguagcaaa

SEQ ID NO: 1460918 - RNA, 19 nt, Homo sapiens
  misc_RNA (1)...(19): siRNA sense strand
ccaacaaacucaccauaca

SEQ ID NO: 1460919 - RNA, 19 nt, Homo sapiens
  misc_RNA (1)...(19): siRNA sense strand
cauacaacacucugaaaua

SEQ ID NO: 1460920 - RNA, 19 nt, Homo sapiens
  misc_RNA (1)...(19): siRNA sense strand
caacgucucucuggacuuc

SEQ ID NO: 1460921 - RNA, 19 nt, Homo sapiens
  misc_RNA (1)...(19): siRNA sense strand
gcccagggauuugcuguuu

SEQ ID NO: 1460922 - RNA, 19 nt, Homo sapiens
  misc_RNA (1)...(19): siRNA sense strand
agucagagguucaaguuug

SEQ ID NO: 1460923 - RNA, 19 nt, Homo sapiens
  misc_RNA (1)...(19): siRNA sense strand
ccacuucaauuuccaucuu

SEQ ID NO: 1460924 - RNA, 19 nt, Homo sapiens
  misc_RNA (1)...(19): siRNA sense strand
cauacaaacuugcaucagu

SEQ ID NO: 1460925 - RNA, 19 nt, Homo sapiens
  misc_RNA (1)...(19): siRNA sense strand
uuacaagccuuccacuuca

SEQ ID NO: 1460926 - RNA, 19 nt, Homo sapiens
  misc_RNA (1)...(19): siRNA sense strand
ggagucagagguucaaguu

SEQ ID NO: 1460927 - RNA, 19 nt, Homo sapiens
  misc_RNA (1)...(19): siRNA sense strand
ucaacaagaugaccgcaau

SEQ ID NO: 1460928 - RNA, 19 nt, Homo sapiens
  misc_RNA (1)...(19): siRNA sense strand
caacaaacucaccauacaa

SEQ ID NO: 1460929 - RNA, 19 nt, Homo sapiens
  misc_RNA (1)...(19): siRNA sense strand
gaacuacucagccaugucu

SEQ ID NO: 1460930 - RNA, 19 nt, Homo sapiens
  misc_RNA (1)...(19): siRNA sense strand
cuacaaggaucauggaaac

SEQ ID NO: 1460931 - RNA, 19 nt, Homo sapiens
  misc_RNA (1)...(19): siRNA sense strand
ggacuucgucaucuuguau

SEQ ID NO: 1460932 - RNA, 19 nt, Homo sapiens
  misc_RNA (1)...(19): siRNA sense strand
gcuggaagccacagaguug

SEQ ID NO: 1460933 - RNA, 19 nt, Homo sapiens
  misc_RNA (1)...(19): siRNA sense strand
gauaccugcuugccagaug

SEQ ID NO: 1460934 - RNA, 19 nt, Homo sapiens
  misc_RNA (1)...(19): siRNA sense strand
ccagggauuugcuguuuua

SEQ ID NO: 1460935 - RNA, 19 nt, Homo sapiens
  misc_RNA (1)...(19): siRNA sense strand
gauggugucuacuggaagu

SEQ ID NO: 1460936 - RNA, 19 nt, Homo sapiens
  misc_RNA (1)...(19): siRNA sense strand
caucuuguauuucuucucu

SEQ ID NO: 1460937 - RNA, 19 nt, Homo sapiens
  misc_RNA (1)...(19): siRNA sense strand
auacaacacucugaaauac

SEQ ID NO: 1460938 - RNA, 19 nt, Homo sapiens
  misc_RNA (1)...(19): siRNA sense strand
ggucagagucaacaagaug

SEQ ID NO: 1460939 - RNA, 19 nt, Homo sapiens
  misc_RNA (1)...(19): siRNA sense strand
ccaaaguccucuaugucau

SEQ ID NO: 1460940 - RNA, 19 nt, Homo sapiens
  misc_RNA (1)...(19): siRNA sense strand
aaacucaccauacaaacuu

SEQ ID NO: 1460941 - RNA, 19 nt, Homo sapiens
  misc_RNA (1)...(19): siRNA sense strand
ccuccaaaguccucuaugu

SEQ ID NO: 1460942 - RNA, 19 nt, Homo sapiens
  misc_RNA (1)...(19): siRNA sense strand
ccaauggugcggauuauag

SEQ ID NO: 1460943 - RNA, 19 nt, Homo sapiens
  misc_RNA (1)...(19): siRNA sense strand
cagccaauggugcggauua

SEQ ID NO: 1460944 - RNA, 19 nt, Homo sapiens
  misc_RNA (1)...(19): siRNA sense strand
ugucuucuguggucuauuc

SEQ ID NO: 1460945 - RNA, 19 nt, Homo sapiens
  misc_RNA (1)...(19): siRNA sense strand
aaacccaccuccucuaacu

SEQ ID NO: 1460946 - RNA, 19 nt, Homo sapiens
  misc_RNA (1)...(19): siRNA sense strand
guugaaggauggacagucu

SEQ ID NO: 1460947 - RNA, 19 nt, Homo sapiens
  misc_RNA (1)...(19): siRNA sense strand
gcccaccucuguccuucaa

SEQ ID NO: 1460948 - RNA, 19 nt, Homo sapiens
  misc_RNA (1)...(19): siRNA sense strand
ugggugagcacaacuauug

SEQ ID NO: 1460949 - RNA, 19 nt, Homo sapiens
  misc_RNA (1)...(19): siRNA sense strand
gcuacaaggaucauggaaa

SEQ ID NO: 1460950 - RNA, 19 nt, Homo sapiens
  misc_RNA (1)...(19): siRNA sense strand
gggaagccaugucuguuuu

SEQ ID NO: 1460951 - RNA, 19 nt, Homo sapiens
  misc_RNA (1)...(19): siRNA sense strand
cuggaaaccuuggcugcua

SEQ ID NO: 1460952 - RNA, 19 nt, Homo sapiens
  misc_RNA (1)...(19): siRNA sense strand
gcacgucacauucaaaucc

SEQ ID NO: 1460953 - RNA, 19 nt, Homo sapiens
  misc_RNA (1)...(19): siRNA sense strand
gaaguacugugagauaccu

SEQ ID NO: 1460954 - RNA, 19 nt, Homo sapiens
  misc_RNA (1)...(19): siRNA sense strand
auaccaagccgucaaggaa

SEQ ID NO: 1460955 - RNA, 19 nt, Homo sapiens
  misc_RNA (1)...(19): siRNA sense strand
uaugcuugcuucuguggaa

SEQ ID NO: 1460956 - RNA, 19 nt, Homo sapiens
  misc_RNA (1)...(19): siRNA sense strand
ccuuagggauugucaucaa

SEQ ID NO: 1460957 - RNA, 19 nt, Homo sapiens
  misc_RNA (1)...(19): siRNA sense strand
gggauuugcuguuuuauac

SEQ ID NO: 1460958 - RNA, 19 nt, Homo sapiens
  misc_RNA (1)...(19): siRNA sense strand
caaaguccucuaugucauc

SEQ ID NO: 1460959 - RNA, 19 nt, Homo sapiens
  misc_RNA (1)...(19): siRNA sense strand
ccauacaacacucugaaau

SEQ ID NO: 1460960 - RNA, 19 nt, Homo sapiens
  misc_RNA (1)...(19): siRNA sense strand
cacuucaauuuccaucuuu

SEQ ID NO: 1460961 - RNA, 19 nt, Homo sapiens
  misc_RNA (1)...(19): siRNA sense strand
ucuuguauuucuucucuga

SEQ ID NO: 1460962 - RNA, 19 nt, Homo sapiens
  misc_RNA (1)...(19): siRNA sense strand
cgggaagccaugucuguuu

SEQ ID NO: 1460963 - RNA, 19 nt, Homo sapiens
  misc_RNA (1)...(19): siRNA sense strand
aacaaacucaccauacaaa

SEQ ID NO: 1460964 - RNA, 19 nt, Homo sapiens
  misc_RNA (1)...(19): siRNA sense strand
ucuauggucuggcaacucu

SEQ ID NO: 1460965 - RNA, 19 nt, Homo sapiens
  misc_RNA (1)...(19): siRNA sense strand
acucagccaugucuucugu

SEQ ID NO: 1460966 - RNA, 19 nt, Homo sapiens
  misc_RNA (1)...(19): siRNA sense strand
gggaacuacucagccaugu

SEQ ID NO: 1460967 - RNA, 19 nt, Homo sapiens
  misc_RNA (1)...(19): siRNA sense strand
aggcuaugcuugcuucugu

SEQ ID NO: 1460968 - RNA, 19 nt, Homo sapiens
  misc_RNA (1)...(19): siRNA sense strand
caaacucaccauacaaacu

SEQ ID NO: 1460969 - RNA, 19 nt, Homo sapiens
  misc_RNA (1)...(19): siRNA sense strand
cacagucacagccauugua

SEQ ID NO: 1460970 - RNA, 19 nt, Homo sapiens
  misc_RNA (1)...(19): siRNA sense strand
cuggaaguacugugagaua

SEQ ID NO: 1460971 - RNA, 19 nt, Homo sapiens
  misc_RNA (1)...(19): siRNA sense strand
ugaaggauggacagucuau

SEQ ID NO: 1460972 - RNA, 19 nt, Homo sapiens
  misc_RNA (1)...(19): siRNA sense strand
agacuuuccagcauccaua

SEQ ID NO: 1460973 - RNA, 19 nt, Homo sapiens
  misc_RNA (1)...(19): siRNA sense strand
aggauggugucuacuggaa

SEQ ID NO: 1460974 - RNA, 19 nt, Homo sapiens
  misc_RNA (1)...(19): siRNA sense strand
gaccuuagggauugucauc

SEQ ID NO: 1460975 - RNA, 19 nt, Homo sapiens
  misc_RNA (1)...(19): siRNA sense strand
gggauggagucaggcuaug

SEQ ID NO: 1460976 - RNA, 19 nt, Homo sapiens
  misc_RNA (1)...(19): siRNA sense strand
guccaacaaacucaccaua

SEQ ID NO: 1460977 - RNA, 19 nt, Homo sapiens
  misc_RNA (1)...(19): siRNA sense strand
gccaauggugcggauuaua

SEQ ID NO: 1460978 - RNA, 19 nt, Homo sapiens
  misc_RNA (1)...(19): siRNA sense strand
ggagcaggccaaccucagu

SEQ ID NO: 1460979 - RNA, 19 nt, Homo sapiens
  misc_RNA (1)...(19): siRNA sense strand
ccucagacugucccaggua

SEQ ID NO: 1460980 - RNA, 19 nt, Homo sapiens
  misc_RNA (1)...(19): siRNA sense strand
aaaguccucuaugucauca

SEQ ID NO: 1460981 - RNA, 19 nt, Homo sapiens
  misc_RNA (1)...(19): siRNA sense strand
gaaacccaccuccucuaac

SEQ ID NO: 1460982 - RNA, 19 nt, Homo sapiens
  misc_RNA (1)...(19): siRNA sense strand
uacaagccuuccacuucaa

SEQ ID NO: 1460983 - RNA, 19 nt, Homo sapiens
  misc_RNA (1)...(19): siRNA sense strand
uuuacaagccuuccacuuc

SEQ ID NO: 1460984 - RNA, 19 nt, Homo sapiens
  misc_RNA (1)...(19): siRNA sense strand
ucuggcaacucuccucauc

SEQ ID NO: 1460985 - RNA, 19 nt, Homo sapiens
  misc_RNA (1)...(19): siRNA sense strand
uccaaaguccucuauguca

SEQ ID NO: 1460986 - RNA, 19 nt, Homo sapiens
  misc_RNA (1)...(19): siRNA sense strand
auucaaaucccaucguguu

SEQ ID NO: 1460987 - RNA, 19 nt, Homo sapiens
  misc_RNA (1)...(19): siRNA sense strand
gagucagagguucaaguuu

SEQ ID NO: 1460988 - RNA, 19 nt, Homo sapiens
  misc_RNA (1)...(19): siRNA sense strand
uggacuucgucaucuugua

SEQ ID NO: 1460989 - RNA, 19 nt, Homo sapiens
  misc_RNA (1)...(19): siRNA sense strand
uugcuucuguggaaacaau

SEQ ID NO: 1460990 - RNA, 19 nt, Homo sapiens
  misc_RNA (1)...(19): siRNA sense strand
accaagccgucaaggaaga

SEQ ID NO: 1460991 - RNA, 19 nt, Homo sapiens
  misc_RNA (1)...(19): siRNA sense strand
gggucagagucaacaagau

SEQ ID NO: 1460992 - RNA, 19 nt, Homo sapiens
  misc_RNA (1)...(19): siRNA sense strand
caaaucccaucguguuccu

SEQ ID NO: 1460993 - RNA, 19 nt, Homo sapiens
  misc_RNA (1)...(19): siRNA sense strand
gaacaaagcuguggauuac

SEQ ID NO: 1460994 - RNA, 19 nt, Homo sapiens
  misc_RNA (1)...(19): siRNA sense strand
gaagauacagccauauuaa

SEQ ID NO: 1460995 - RNA, 19 nt, Homo sapiens
  misc_RNA (1)...(19): siRNA sense strand
gagcucagaugaucagaaa

SEQ ID NO: 1460996 - RNA, 19 nt, Homo sapiens
  misc_RNA (1)...(19): siRNA sense strand
gaaugacuccaacgaauua

SEQ ID NO: 1460997 - RNA, 19 nt, Homo sapiens
  misc_RNA (1)...(19): siRNA sense strand
gaagauuucugaagauaca

SEQ ID NO: 1460998 - RNA, 19 nt, Homo sapiens
  misc_RNA (1)...(19): siRNA sense strand
gcccagcacucaacaagua

SEQ ID NO: 1460999 - RNA, 19 nt, Homo sapiens
  misc_RNA (1)...(19): siRNA sense strand
ggagagaguguccagauaa

SEQ ID NO: 1461000 - RNA, 19 nt, Homo sapiens
  misc_RNA (1)...(19): siRNA sense strand
uaaaggaacuggugguauc

SEQ ID NO: 1461001 - RNA, 19 nt, Homo sapiens
  misc_RNA (1)...(19): siRNA sense strand
caagauaacugggaaugug

SEQ ID NO: 1461002 - RNA, 19 nt, Homo sapiens
  misc_RNA (1)...(19): siRNA sense strand
ugacguaguuacaccuaua

SEQ ID NO: 1461003 - RNA, 19 nt, Homo sapiens
  misc_RNA (1)...(19): siRNA sense strand
ggaccuauguguucaccuu

SEQ ID NO: 1461004 - RNA, 19 nt, Homo sapiens
  misc_RNA (1)...(19): siRNA sense strand
ucaaagcacugaugaugau

SEQ ID NO: 1461005 - RNA, 19 nt, Homo sapiens
  misc_RNA (1)...(19): siRNA sense strand
gaaagugaccgaugcaaag

SEQ ID NO: 1461006 - RNA, 19 nt, Homo sapiens
  misc_RNA (1)...(19): siRNA sense strand
ggacugugaucuguuguug

SEQ ID NO: 1461007 - RNA, 19 nt, Homo sapiens
  misc_RNA (1)...(19): siRNA sense strand
ugaacaaagcuguggauua

SEQ ID NO: 1461008 - RNA, 19 nt, Homo sapiens
  misc_RNA (1)...(19): siRNA sense strand
ugaagauacagccauauua

SEQ ID NO: 1461009 - RNA, 19 nt, Homo sapiens
  misc_RNA (1)...(19): siRNA sense strand
cagcgaugcucaagaguga

SEQ ID NO: 1461010 - RNA, 19 nt, Homo sapiens
  misc_RNA (1)...(19): siRNA sense strand
ucaagugacuguuauugug

SEQ ID NO: 1461011 - RNA, 19 nt, Homo sapiens
  misc_RNA (1)...(19): siRNA sense strand
ggaaagugguggagaugca

SEQ ID NO: 1461012 - RNA, 19 nt, Homo sapiens
  misc_RNA (1)...(19): siRNA sense strand
gaccaucacccuauccuuu

SEQ ID NO: 1461013 - RNA, 19 nt, Homo sapiens
  misc_RNA (1)...(19): siRNA sense strand
gaagacacaauuuggaguu

SEQ ID NO: 1461014 - RNA, 19 nt, Homo sapiens
  misc_RNA (1)...(19): siRNA sense strand
acaaggcgauuacaauuuc

SEQ ID NO: 1461015 - RNA, 19 nt, Homo sapiens
  misc_RNA (1)...(19): siRNA sense strand
guaguuacaccuauaguga

SEQ ID NO: 1461016 - RNA, 19 nt, Homo sapiens
  misc_RNA (1)...(19): siRNA sense strand
acacagcauucuaaaguga

SEQ ID NO: 1461017 - RNA, 19 nt, Homo sapiens
  misc_RNA (1)...(19): siRNA sense strand
ccacaaggcgauuacaauu

SEQ ID NO: 1461018 - RNA, 19 nt, Homo sapiens
  misc_RNA (1)...(19): siRNA sense strand
cgaauuagguggucugacu

SEQ ID NO: 1461019 - RNA, 19 nt, Homo sapiens
  misc_RNA (1)...(19): siRNA sense strand
cagauaacccugccuaaga

SEQ ID NO: 1461020 - RNA, 19 nt, Homo sapiens
  misc_RNA (1)...(19): siRNA sense strand
gcagaugcaggcccagaua

SEQ ID NO: 1461021 - RNA, 19 nt, Homo sapiens
  misc_RNA (1)...(19): siRNA sense strand
ggacacacuccuccaauuc

SEQ ID NO: 1461022 - RNA, 19 nt, Homo sapiens
  misc_RNA (1)...(19): siRNA sense strand
acugugaucuguuguugua

SEQ ID NO: 1461023 - RNA, 19 nt, Homo sapiens
  misc_RNA (1)...(19): siRNA sense strand
agauaacccugccuaagaa

SEQ ID NO: 1461024 - RNA, 19 nt, Homo sapiens
  misc_RNA (1)...(19): siRNA sense strand
gugaaugacuccaacgaau

SEQ ID NO: 1461025 - RNA, 19 nt, Homo sapiens
  misc_RNA (1)...(19): siRNA sense strand
ugagaagccuguaccuguu

SEQ ID NO: 1461026 - RNA, 19 nt, Homo sapiens
  misc_RNA (1)...(19): siRNA sense strand
agacuacaguggagaaaug

SEQ ID NO: 1461027 - RNA, 19 nt, Homo sapiens
  misc_RNA (1)...(19): siRNA sense strand
gcucuaaguccucagauga

SEQ ID NO: 1461028 - RNA, 19 nt, Homo sapiens
  misc_RNA (1)...(19): siRNA sense strand
ugacacagcauucuaaagu

SEQ ID NO: 1461029 - RNA, 19 nt, Homo sapiens
  misc_RNA (1)...(19): siRNA sense strand
uggagcguguuauauguua

SEQ ID NO: 1461030 - RNA, 19 nt, Homo sapiens
  misc_RNA (1)...(19): siRNA sense strand
gcaccauacccaguuauaa

SEQ ID NO: 1461031 - RNA, 19 nt, Homo sapiens
  misc_RNA (1)...(19): siRNA sense strand
gcagcaagagcucagauga

SEQ ID NO: 1461032 - RNA, 19 nt, Homo sapiens
  misc_RNA (1)...(19): siRNA sense strand
cugcaaaccugacagugaa

SEQ ID NO: 1461033 - RNA, 19 nt, Homo sapiens
  misc_RNA (1)...(19): siRNA sense strand
ccaagaaccaccuaaagga

SEQ ID NO: 1461034 - RNA, 19 nt, Homo sapiens
  misc_RNA (1)...(19): siRNA sense strand
aaucaccucuggcuucuug

SEQ ID NO: 1461035 - RNA, 19 nt, Homo sapiens
  misc_RNA (1)...(19): siRNA sense strand
gcugauuacucauccuaga

SEQ ID NO: 1461036 - RNA, 19 nt, Homo sapiens
  misc_RNA (1)...(19): siRNA sense strand
ccaauuccaugcugguguu

SEQ ID NO: 1461037 - RNA, 19 nt, Homo sapiens
  misc_RNA (1)...(19): siRNA sense strand
acccagagcugcacucaga

SEQ ID NO: 1461038 - RNA, 19 nt, Homo sapiens
  misc_RNA (1)...(19): siRNA sense strand
ggaaccagagcacugauga

SEQ ID NO: 1461039 - RNA, 19 nt, Homo sapiens
  misc_RNA (1)...(19): siRNA sense strand
gagaagaggcugggaguca

SEQ ID NO: 1461040 - RNA, 19 nt, Homo sapiens
  misc_RNA (1)...(19): siRNA sense strand
ggaacuacacuuucagcuu

SEQ ID NO: 1461041 - RNA, 19 nt, Homo sapiens
  misc_RNA (1)...(19): siRNA sense strand
caccauacccaguuauaaa

SEQ ID NO: 1461042 - RNA, 19 nt, Homo sapiens
  misc_RNA (1)...(19): siRNA sense strand
acucagaccugcuguaucu

SEQ ID NO: 1461043 - RNA, 19 nt, Homo sapiens
  misc_RNA (1)...(19): siRNA sense strand
gcacucagaccugcuguau

SEQ ID NO: 1461044 - RNA, 19 nt, Homo sapiens
  misc_RNA (1)...(19): siRNA sense strand
gcuaccaacucuacuacug

SEQ ID NO: 1461045 - RNA, 19 nt, Homo sapiens
  misc_RNA (1)...(19): siRNA sense strand
uaagagaagagaagauuuc

SEQ ID NO: 1461046 - RNA, 19 nt, Homo sapiens
  misc_RNA (1)...(19): siRNA sense strand
gaacuuaaggggccucuaa

SEQ ID NO: 1461047 - RNA, 19 nt, Homo sapiens
  misc_RNA (1)...(19): siRNA sense strand
ccaccuauagccaagauaa

SEQ ID NO: 1461048 - RNA, 19 nt, Homo sapiens
  misc_RNA (1)...(19): siRNA sense strand
gagaagccuguaccuguuu

SEQ ID NO: 1461049 - RNA, 19 nt, Homo sapiens
  misc_RNA (1)...(19): siRNA sense strand
ggagcuaccaacucuacua

SEQ ID NO: 1461050 - RNA, 19 nt, Homo sapiens
  misc_RNA (1)...(19): siRNA sense strand
ucagcaccauacccaguua

SEQ ID NO: 1461051 - RNA, 19 nt, Homo sapiens
  misc_RNA (1)...(19): siRNA sense strand
gaguggagcguguuauaug

SEQ ID NO: 1461052 - RNA, 19 nt, Homo sapiens
  misc_RNA (1)...(19): siRNA sense strand
ggaguuggccugagaucug

SEQ ID NO: 1461053 - RNA, 19 nt, Homo sapiens
  misc_RNA (1)...(19): siRNA sense strand
agucaacacugucacaugu

SEQ ID NO: 1461054 - RNA, 19 nt, Homo sapiens
  misc_RNA (1)...(19): siRNA sense strand
cagagggucuugcuacuac

SEQ ID NO: 1461055 - RNA, 19 nt, Homo sapiens
  misc_RNA (1)...(19): siRNA sense strand
gacacagcauucuaaagug

SEQ ID NO: 1461056 - RNA, 19 nt, Homo sapiens
  misc_RNA (1)...(19): siRNA sense strand
uagaagggaugugcauuca

SEQ ID NO: 1461057 - RNA, 19 nt, Homo sapiens
  misc_RNA (1)...(19): siRNA sense strand
gaugagaggaaccugcaaa

SEQ ID NO: 1461058 - RNA, 19 nt, Homo sapiens
  misc_RNA (1)...(19): siRNA sense strand
aagaaggagacuacacuua

SEQ ID NO: 1461059 - RNA, 19 nt, Homo sapiens
  misc_RNA (1)...(19): siRNA sense strand
gcaagaaggagacuacacu

SEQ ID NO: 1461060 - RNA, 19 nt, Homo sapiens
  misc_RNA (1)...(19): siRNA sense strand
aagcacugaugaugauaaa

SEQ ID NO: 1461061 - RNA, 19 nt, Homo sapiens
  misc_RNA (1)...(19): siRNA sense strand
gcuauugugucaccucagu

SEQ ID NO: 1461062 - RNA, 19 nt, Homo sapiens
  misc_RNA (1)...(19): siRNA sense strand
uaacccugccuaagaauga

SEQ ID NO: 1461063 - RNA, 19 nt, Homo sapiens
  misc_RNA (1)...(19): siRNA sense strand
gagagaguguccagauaac

SEQ ID NO: 1461064 - RNA, 19 nt, Homo sapiens
  misc_RNA (1)...(19): siRNA sense strand
ugaaugacuccaacgaauu

SEQ ID NO: 1461065 - RNA, 19 nt, Homo sapiens
  misc_RNA (1)...(19): siRNA sense strand
cuccaggccuguaugaauu

SEQ ID NO: 1461066 - RNA, 19 nt, Homo sapiens
  misc_RNA (1)...(19): siRNA sense strand
gcagaugauuugggcuuuc

SEQ ID NO: 1461067 - RNA, 19 nt, Homo sapiens
  misc_RNA (1)...(19): siRNA sense strand
ucaacacugucacauguca

SEQ ID NO: 1461068 - RNA, 19 nt, Homo sapiens
  misc_RNA (1)...(19): siRNA sense strand
ggagaugcaggguguuaga

SEQ ID NO: 1461069 - RNA, 19 nt, Homo sapiens
  misc_RNA (1)...(19): siRNA sense strand
cacaaggcgauuacaauuu

SEQ ID NO: 1461070 - RNA, 19 nt, Homo sapiens
  misc_RNA (1)...(19): siRNA sense strand
gaauuagguggucugacua

SEQ ID NO: 1461071 - RNA, 19 nt, Homo sapiens
  misc_RNA (1)...(19): siRNA sense strand
gaauucaaagugauuguag

SEQ ID NO: 1461072 - RNA, 19 nt, Homo sapiens
  misc_RNA (1)...(19): siRNA sense strand
gugaguggagcguguuaua

SEQ ID NO: 1461073 - RNA, 19 nt, Homo sapiens
  misc_RNA (1)...(19): siRNA sense strand
acaagggaauagucagcua

SEQ ID NO: 1461074 - RNA, 19 nt, Homo sapiens
  misc_RNA (1)...(19): siRNA sense strand
cagcuugacuguaguagac

SEQ ID NO: 1461075 - RNA, 19 nt, Homo sapiens
  misc_RNA (1)...(19): siRNA sense strand
agugcaaccugaaauauca

SEQ ID NO: 1461076 - RNA, 19 nt, Homo sapiens
  misc_RNA (1)...(19): siRNA sense strand
ugaaagugaccgaugcaaa

SEQ ID NO: 1461077 - RNA, 19 nt, Homo sapiens
  misc_RNA (1)...(19): siRNA sense strand
gaaggagacuacacuuacc

SEQ ID NO: 1461078 - RNA, 19 nt, Homo sapiens
  misc_RNA (1)...(19): siRNA sense strand
ugauggagcuaccaacucu

SEQ ID NO: 1461079 - RNA, 19 nt, Homo sapiens
  misc_RNA (1)...(19): siRNA sense strand
ccugggaacuacacuuuca

SEQ ID NO: 1461080 - RNA, 19 nt, Homo sapiens
  misc_RNA (1)...(19): siRNA sense strand
augcauauguucuccaaga

SEQ ID NO: 1461081 - RNA, 19 nt, Homo sapiens
  misc_RNA (1)...(19): siRNA sense strand
gguaucugcuggagagagu

SEQ ID NO: 1461082 - RNA, 19 nt, Homo sapiens
  misc_RNA (1)...(19): siRNA sense strand
ugacuguaguagacucuga

SEQ ID NO: 1461083 - RNA, 19 nt, Homo sapiens
  misc_RNA (1)...(19): siRNA sense strand
agaaccaccuaaaggagaa

SEQ ID NO: 1461084 - RNA, 19 nt, Homo sapiens
  misc_RNA (1)...(19): siRNA sense strand
ucccagauccucaaacuau

SEQ ID NO: 1461085 - RNA, 19 nt, Homo sapiens
  misc_RNA (1)...(19): siRNA sense strand
uaucauugcuaccuuuguc

SEQ ID NO: 1461086 - RNA, 19 nt, Homo sapiens
  misc_RNA (1)...(19): siRNA sense strand
gauauucagagccuuggaa

SEQ ID NO: 1461087 - RNA, 19 nt, Homo sapiens
  misc_RNA (1)...(19): siRNA sense strand
agagugagcugcggaagca

SEQ ID NO: 1461088 - RNA, 19 nt, Homo sapiens
  misc_RNA (1)...(19): siRNA sense strand
caacgucagucagcuaacu

SEQ ID NO: 1461089 - RNA, 19 nt, Homo sapiens
  misc_RNA (1)...(19): siRNA sense strand
ucaguaccauugggaagaa

SEQ ID NO: 1461090 - RNA, 19 nt, Homo sapiens
  misc_RNA (1)...(19): siRNA sense strand
ccacuucuacagucauuga

SEQ ID NO: 1461091 - RNA, 19 nt, Homo sapiens
  misc_RNA (1)...(19): siRNA sense strand
ccaaccacuucuacaguca

SEQ ID NO: 1461092 - RNA, 19 nt, Homo sapiens
  misc_RNA (1)...(19): siRNA sense strand
gggugcagcucgagaaugc

SEQ ID NO: 1461093 - RNA, 19 nt, Homo sapiens
  misc_RNA (1)...(19): siRNA sense strand
gaacaaagcuguggauuac

SEQ ID NO: 1461094 - RNA, 19 nt, Homo sapiens
  misc_RNA (1)...(19): siRNA sense strand
gaagauacagccauauuaa

SEQ ID NO: 1461095 - RNA, 19 nt, Homo sapiens
  misc_RNA (1)...(19): siRNA sense strand
gagcucagaugaucagaaa

SEQ ID NO: 1461096 - RNA, 19 nt, Homo sapiens
  misc_RNA (1)...(19): siRNA sense strand
gaaugacuccaacgaauua

SEQ ID NO: 1461097 - RNA, 19 nt, Homo sapiens
  misc_RNA (1)...(19): siRNA sense strand
gaagauuucugaagauaca

SEQ ID NO: 1461098 - RNA, 19 nt, Homo sapiens
  misc_RNA (1)...(19): siRNA sense strand
gcccagcacucaacaagua

SEQ ID NO: 1461099 - RNA, 19 nt, Homo sapiens
  misc_RNA (1)...(19): siRNA sense strand
ggagagaguguccagauaa

SEQ ID NO: 1461100 - RNA, 19 nt, Homo sapiens
  misc_RNA (1)...(19): siRNA sense strand
uaaaggaacuggugguauc

SEQ ID NO: 1461101 - RNA, 19 nt, Homo sapiens
  misc_RNA (1)...(19): siRNA sense strand
caagauaacugggaaugug

SEQ ID NO: 1461102 - RNA, 19 nt, Homo sapiens
  misc_RNA (1)...(19): siRNA sense strand
ugacguaguuacaccuaua

SEQ ID NO: 1461103 - RNA, 19 nt, Homo sapiens
  misc_RNA (1)...(19): siRNA sense strand
ggaccuauguguucaccuu

SEQ ID NO: 1461104 - RNA, 19 nt, Homo sapiens
  misc_RNA (1)...(19): siRNA sense strand
ucaaagcacugaugaugau

SEQ ID NO: 1461105 - RNA, 19 nt, Homo sapiens
  misc_RNA (1)...(19): siRNA sense strand
gaaagugaccgaugcaaag

SEQ ID NO: 1461106 - RNA, 19 nt, Homo sapiens
  misc_RNA (1)...(19): siRNA sense strand
ggacugugaucuguuguug

SEQ ID NO: 1461107 - RNA, 19 nt, Homo sapiens
  misc_RNA (1)...(19): siRNA sense strand
ugaacaaagcuguggauua

SEQ ID NO: 1461108 - RNA, 19 nt, Homo sapiens
  misc_RNA (1)...(19): siRNA sense strand
ugaagauacagccauauua

SEQ ID NO: 1461109 - RNA, 19 nt, Homo sapiens
  misc_RNA (1)...(19): siRNA sense strand
cagcgaugcucaagaguga

SEQ ID NO: 1461110 - RNA, 19 nt, Homo sapiens
  misc_RNA (1)...(19): siRNA sense strand
ucaagugacuguuauugug

SEQ ID NO: 1461111 - RNA, 19 nt, Homo sapiens
  misc_RNA (1)...(19): siRNA sense strand
ggaaagugguggagaugca

SEQ ID NO: 1461112 - RNA, 19 nt, Homo sapiens
  misc_RNA (1)...(19): siRNA sense strand
gaccaucacccuauccuuu

SEQ ID NO: 1461113 - RNA, 19 nt, Homo sapiens
  misc_RNA (1)...(19): siRNA sense strand
gaagacacaauuuggaguu

SEQ ID NO: 1461114 - RNA, 19 nt, Homo sapiens
  misc_RNA (1)...(19): siRNA sense strand
acaaggcgauuacaauuuc

SEQ ID NO: 1461115 - RNA, 19 nt, Homo sapiens
  misc_RNA (1)...(19): siRNA sense strand
guaguuacaccuauaguga

SEQ ID NO: 1461116 - RNA, 19 nt, Homo sapiens
  misc_RNA (1)...(19): siRNA sense strand
acacagcauucuaaaguga

SEQ ID NO: 1461117 - RNA, 19 nt, Homo sapiens
  misc_RNA (1)...(19): siRNA sense strand
ccacaaggcgauuacaauu

SEQ ID NO: 1461118 - RNA, 19 nt, Homo sapiens
  misc_RNA (1)...(19): siRNA sense strand
cgaauuagguggucugacu

SEQ ID NO: 1461119 - RNA, 19 nt, Homo sapiens
  misc_RNA (1)...(19): siRNA sense strand
cagauaacccugccuaaga

SEQ ID NO: 1461120 - RNA, 19 nt, Homo sapiens
  misc_RNA (1)...(19): siRNA sense strand
gcagaugcaggcccagaua

SEQ ID NO: 1461121 - RNA, 19 nt, Homo sapiens
  misc_RNA (1)...(19): siRNA sense strand
ggacacacuccuccaauuc

SEQ ID NO: 1461122 - RNA, 19 nt, Homo sapiens
  misc_RNA (1)...(19): siRNA sense strand
acugugaucuguuguugua

SEQ ID NO: 1461123 - RNA, 19 nt, Homo sapiens
  misc_RNA (1)...(19): siRNA sense strand
agauaacccugccuaagaa

SEQ ID NO: 1461124 - RNA, 19 nt, Homo sapiens
  misc_RNA (1)...(19): siRNA sense strand
gugaaugacuccaacgaau

SEQ ID NO: 1461125 - RNA, 19 nt, Homo sapiens
  misc_RNA (1)...(19): siRNA sense strand
ugagaagccuguaccuguu

SEQ ID NO: 1461126 - RNA, 19 nt, Homo sapiens
  misc_RNA (1)...(19): siRNA sense strand
agacuacaguggagaaaug

SEQ ID NO: 1461127 - RNA, 19 nt, Homo sapiens
  misc_RNA (1)...(19): siRNA sense strand
gcucuaaguccucagauga

SEQ ID NO: 1461128 - RNA, 19 nt, Homo sapiens
  misc_RNA (1)...(19): siRNA sense strand
ugacacagcauucuaaagu

SEQ ID NO: 1461129 - RNA, 19 nt, Homo sapiens
  misc_RNA (1)...(19): siRNA sense strand
uggagcguguuauauguua

SEQ ID NO: 1461130 - RNA, 19 nt, Homo sapiens
  misc_RNA (1)...(19): siRNA sense strand
gcaccauacccaguuauaa

SEQ ID NO: 1461131 - RNA, 19 nt, Homo sapiens
  misc_RNA (1)...(19): siRNA sense strand
gcagcaagagcucagauga

SEQ ID NO: 1461132 - RNA, 19 nt, Homo sapiens
  misc_RNA (1)...(19): siRNA sense strand
cugcaaaccugacagugaa

SEQ ID NO: 1461133 - RNA, 19 nt, Homo sapiens
  misc_RNA (1)...(19): siRNA sense strand
ccaagaaccaccuaaagga

SEQ ID NO: 1461134 - RNA, 19 nt, Homo sapiens
  misc_RNA (1)...(19): siRNA sense strand
aaucaccucuggcuucuug

SEQ ID NO: 1461135 - RNA, 19 nt, Homo sapiens
  misc_RNA (1)...(19): siRNA sense strand
gcugauuacucauccuaga

SEQ ID NO: 1461136 - RNA, 19 nt, Homo sapiens
  misc_RNA (1)...(19): siRNA sense strand
ccaauuccaugcugguguu

SEQ ID NO: 1461137 - RNA, 19 nt, Homo sapiens
  misc_RNA (1)...(19): siRNA sense strand
acccagagcugcacucaga

SEQ ID NO: 1461138 - RNA, 19 nt, Homo sapiens
  misc_RNA (1)...(19): siRNA sense strand
ggaaccagagcacugauga

SEQ ID NO: 1461139 - RNA, 19 nt, Homo sapiens
  misc_RNA (1)...(19): siRNA sense strand
gagaagaggcugggaguca

SEQ ID NO: 1461140 - RNA, 19 nt, Homo sapiens
  misc_RNA (1)...(19): siRNA sense strand
ggaacuacacuuucagcuu

SEQ ID NO: 1461141 - RNA, 19 nt, Homo sapiens
  misc_RNA (1)...(19): siRNA sense strand
caccauacccaguuauaaa

SEQ ID NO: 1461142 - RNA, 19 nt, Homo sapiens
  misc_RNA (1)...(19): siRNA sense strand
acucagaccugcuguaucu

SEQ ID NO: 1461143 - RNA, 19 nt, Homo sapiens
  misc_RNA (1)...(19): siRNA sense strand
gcacucagaccugcuguau

SEQ ID NO: 1461144 - RNA, 19 nt, Homo sapiens
  misc_RNA (1)...(19): siRNA sense strand
gcuaccaacucuacuacug

SEQ ID NO: 1461145 - RNA, 19 nt, Homo sapiens
  misc_RNA (1)...(19): siRNA sense strand
uaagagaagagaagauuuc

SEQ ID NO: 1461146 - RNA, 19 nt, Homo sapiens
  misc_RNA (1)...(19): siRNA sense strand
gaacuuaaggggccucuaa

SEQ ID NO: 1461147 - RNA, 19 nt, Homo sapiens
  misc_RNA (1)...(19): siRNA sense strand
ccaccuauagccaagauaa

SEQ ID NO: 1461148 - RNA, 19 nt, Homo sapiens
  misc_RNA (1)...(19): siRNA sense strand
gagaagccuguaccuguuu

SEQ ID NO: 1461149 - RNA, 19 nt, Homo sapiens
  misc_RNA (1)...(19): siRNA sense strand
ggagcuaccaacucuacua

SEQ ID NO: 1461150 - RNA, 19 nt, Homo sapiens
  misc_RNA (1)...(19): siRNA sense strand
ucagcaccauacccaguua

SEQ ID NO: 1461151 - RNA, 19 nt, Homo sapiens
  misc_RNA (1)...(19): siRNA sense strand
gaguggagcguguuauaug

SEQ ID NO: 1461152 - RNA, 19 nt, Homo sapiens
  misc_RNA (1)...(19): siRNA sense strand
ggaguuggccugagaucug

SEQ ID NO: 1461153 - RNA, 19 nt, Homo sapiens
  misc_RNA (1)...(19): siRNA sense strand
agucaacacugucacaugu

SEQ ID NO: 1461154 - RNA, 19 nt, Homo sapiens
  misc_RNA (1)...(19): siRNA sense strand
cagagggucuugcuacuac

SEQ ID NO: 1461155 - RNA, 19 nt, Homo sapiens
  misc_RNA (1)...(19): siRNA sense strand
gacacagcauucuaaagug

SEQ ID NO: 1461156 - RNA, 19 nt, Homo sapiens
  misc_RNA (1)...(19): siRNA sense strand
uagaagggaugugcauuca

SEQ ID NO: 1461157 - RNA, 19 nt, Homo sapiens
  misc_RNA (1)...(19): siRNA sense strand
gaugagaggaaccugcaaa

SEQ ID NO: 1461158 - RNA, 19 nt, Homo sapiens
  misc_RNA (1)...(19): siRNA sense strand
aagaaggagacuacacuua

SEQ ID NO: 1461159 - RNA, 19 nt, Homo sapiens
  misc_RNA (1)...(19): siRNA sense strand
gcaagaaggagacuacacu

SEQ ID NO: 1461160 - RNA, 19 nt, Homo sapiens
  misc_RNA (1)...(19): siRNA sense strand
aagcacugaugaugauaaa

SEQ ID NO: 1461161 - RNA, 19 nt, Homo sapiens
  misc_RNA (1)...(19): siRNA sense strand
gcuauugugucaccucagu

SEQ ID NO: 1461162 - RNA, 19 nt, Homo sapiens
  misc_RNA (1)...(19): siRNA sense strand
uaacccugccuaagaauga

SEQ ID NO: 1461163 - RNA, 19 nt, Homo sapiens
  misc_RNA (1)...(19): siRNA sense strand
gagagaguguccagauaac

SEQ ID NO: 1461164 - RNA, 19 nt, Homo sapiens
  misc_RNA (1)...(19): siRNA sense strand
ugaaugacuccaacgaauu

SEQ ID NO: 1461165 - RNA, 19 nt, Homo sapiens
  misc_RNA (1)...(19): siRNA sense strand
cuccaggccuguaugaauu

SEQ ID NO: 1461166 - RNA, 19 nt, Homo sapiens
  misc_RNA (1)...(19): siRNA sense strand
gcagaugauuugggcuuuc

SEQ ID NO: 1461167 - RNA, 19 nt, Homo sapiens
  misc_RNA (1)...(19): siRNA sense strand
ucaacacugucacauguca

SEQ ID NO: 1461168 - RNA, 19 nt, Homo sapiens
  misc_RNA (1)...(19): siRNA sense strand
ggagaugcaggguguuaga

SEQ ID NO: 1461169 - RNA, 19 nt, Homo sapiens
  misc_RNA (1)...(19): siRNA sense strand
cacaaggcgauuacaauuu

SEQ ID NO: 1461170 - RNA, 19 nt, Homo sapiens
  misc_RNA (1)...(19): siRNA sense strand
gaauuagguggucugacua

SEQ ID NO: 1461171 - RNA, 19 nt, Homo sapiens
  misc_RNA (1)...(19): siRNA sense strand
gaauucaaagugauuguag

SEQ ID NO: 1461172 - RNA, 19 nt, Homo sapiens
  misc_RNA (1)...(19): siRNA sense strand
gugaguggagcguguuaua

SEQ ID NO: 1461173 - RNA, 19 nt, Homo sapiens
  misc_RNA (1)...(19): siRNA sense strand
acaagggaauagucagcua

SEQ ID NO: 1461174 - RNA, 19 nt, Homo sapiens
  misc_RNA (1)...(19): siRNA sense strand
cagcuugacuguaguagac

SEQ ID NO: 1461175 - RNA, 19 nt, Homo sapiens
  misc_RNA (1)...(19): siRNA sense strand
agugcaaccugaaauauca

SEQ ID NO: 1461176 - RNA, 19 nt, Homo sapiens
  misc_RNA (1)...(19): siRNA sense strand
ugaaagugaccgaugcaaa

SEQ ID NO: 1461177 - RNA, 19 nt, Homo sapiens
  misc_RNA (1)...(19): siRNA sense strand
gaaggagacuacacuuacc

SEQ ID NO: 1461178 - RNA, 19 nt, Homo sapiens
  misc_RNA (1)...(19): siRNA sense strand
ugauggagcuaccaacucu

SEQ ID NO: 1461179 - RNA, 19 nt, Homo sapiens
  misc_RNA (1)...(19): siRNA sense strand
ccugggaacuacacuuuca

SEQ ID NO: 1461180 - RNA, 19 nt, Homo sapiens
  misc_RNA (1)...(19): siRNA sense strand
augcauauguucuccaaga

SEQ ID NO: 1461181 - RNA, 19 nt, Homo sapiens
  misc_RNA (1)...(19): siRNA sense strand
gguaucugcuggagagagu

SEQ ID NO: 1461182 - RNA, 19 nt, Homo sapiens
  misc_RNA (1)...(19): siRNA sense strand
ugacuguaguagacucuga

SEQ ID NO: 1461183 - RNA, 19 nt, Homo sapiens
  misc_RNA (1)...(19): siRNA sense strand
agaaccaccuaaaggagaa

SEQ ID NO: 1461184 - RNA, 19 nt, Homo sapiens
  misc_RNA (1)...(19): siRNA sense strand
ucccagauccucaaacuau

SEQ ID NO: 1461185 - RNA, 19 nt, Homo sapiens
  misc_RNA (1)...(19): siRNA sense strand
uaucauugcuaccuuuguc

SEQ ID NO: 1461186 - RNA, 19 nt, Homo sapiens
  misc_RNA (1)...(19): siRNA sense strand
gauauucagagccuuggaa

SEQ ID NO: 1461187 - RNA, 19 nt, Homo sapiens
  misc_RNA (1)...(19): siRNA sense strand
agagugagcugcggaagca

SEQ ID NO: 1461188 - RNA, 19 nt, Homo sapiens
  misc_RNA (1)...(19): siRNA sense strand
caacgucagucagcuaacu

SEQ ID NO: 1461189 - RNA, 19 nt, Homo sapiens
  misc_RNA (1)...(19): siRNA sense strand
ucaguaccauugggaagaa

SEQ ID NO: 1461190 - RNA, 19 nt, Homo sapiens
  misc_RNA (1)...(19): siRNA sense strand
ccacuucuacagucauuga

SEQ ID NO: 1461191 - RNA, 19 nt, Homo sapiens
  misc_RNA (1)...(19): siRNA sense strand
ccaaccacuucuacaguca

SEQ ID NO: 1461192 - RNA, 19 nt, Homo sapiens
  misc_RNA (1)...(19): siRNA sense strand
gggugcagcucgagaaugc

SEQ ID NO: 1461193 - RNA, 19 nt, Homo sapiens
  misc_RNA (1)...(19): siRNA sense strand
gaucagaaccucuucgaaa

SEQ ID NO: 1461194 - RNA, 19 nt, Homo sapiens
  misc_RNA (1)...(19): siRNA sense strand
gcaggaagcucuggaggaa

SEQ ID NO: 1461195 - RNA, 19 nt, Homo sapiens
  misc_RNA (1)...(19): siRNA sense strand
ggagagcucugcuucugaa

SEQ ID NO: 1461196 - RNA, 19 nt, Homo sapiens
  misc_RNA (1)...(19): siRNA sense strand
acacacaaguggaguuuaa

SEQ ID NO: 1461197 - RNA, 19 nt, Homo sapiens
  misc_RNA (1)...(19): siRNA sense strand
gagcgucauuguugucuuu

SEQ ID NO: 1461198 - RNA, 19 nt, Homo sapiens
  misc_RNA (1)...(19): siRNA sense strand
agaagaagguagauccuaa

SEQ ID NO: 1461199 - RNA, 19 nt, Homo sapiens
  misc_RNA (1)...(19): siRNA sense strand
ccucuaaaguucuuggaua

SEQ ID NO: 1461200 - RNA, 19 nt, Homo sapiens
  misc_RNA (1)...(19): siRNA sense strand
gaaggcagguacaaugaca

SEQ ID NO: 1461201 - RNA, 19 nt, Homo sapiens
  misc_RNA (1)...(19): siRNA sense strand
gaagaagguagauccuaaa

SEQ ID NO: 1461202 - RNA, 19 nt, Homo sapiens
  misc_RNA (1)...(19): siRNA sense strand
caucagggcuaugcuagaa

SEQ ID NO: 1461203 - RNA, 19 nt, Homo sapiens
  misc_RNA (1)...(19): siRNA sense strand
gaggagagcucugcuucug

SEQ ID NO: 1461204 - RNA, 19 nt, Homo sapiens
  misc_RNA (1)...(19): siRNA sense strand
caagagcuaauuccuauug

SEQ ID NO: 1461205 - RNA, 19 nt, Homo sapiens
  misc_RNA (1)...(19): siRNA sense strand
gcuaauuccuauugaagau

SEQ ID NO: 1461206 - RNA, 19 nt, Homo sapiens
  misc_RNA (1)...(19): siRNA sense strand
caaguggaguuuaagagau

SEQ ID NO: 1461207 - RNA, 19 nt, Homo sapiens
  misc_RNA (1)...(19): siRNA sense strand
aaguggaguuuaagagaua

SEQ ID NO: 1461208 - RNA, 19 nt, Homo sapiens
  misc_RNA (1)...(19): siRNA sense strand
agaaggaagggccacauua

SEQ ID NO: 1461209 - RNA, 19 nt, Homo sapiens
  misc_RNA (1)...(19): siRNA sense strand
caccaccgaucccuaacua

SEQ ID NO: 1461210 - RNA, 19 nt, Homo sapiens
  misc_RNA (1)...(19): siRNA sense strand
ggaaaaggcuacucaagag

SEQ ID NO: 1461211 - RNA, 19 nt, Homo sapiens
  misc_RNA (1)...(19): siRNA sense strand
gaaggaagggccacauuac

SEQ ID NO: 1461212 - RNA, 19 nt, Homo sapiens
  misc_RNA (1)...(19): siRNA sense strand
cucaagagcuaauuccuau

SEQ ID NO: 1461213 - RNA, 19 nt, Homo sapiens
  misc_RNA (1)...(19): siRNA sense strand
acaaugacaucaccaaggu

SEQ ID NO: 1461214 - RNA, 19 nt, Homo sapiens
  misc_RNA (1)...(19): siRNA sense strand
ugaagaagugguccuugua

SEQ ID NO: 1461215 - RNA, 19 nt, Homo sapiens
  misc_RNA (1)...(19): siRNA sense strand
gagaaggaagggccacauu

SEQ ID NO: 1461216 - RNA, 19 nt, Homo sapiens
  misc_RNA (1)...(19): siRNA sense strand
gcuagaagcccagcaggaa

SEQ ID NO: 1461217 - RNA, 19 nt, Homo sapiens
  misc_RNA (1)...(19): siRNA sense strand
cuaaaguucuuggauaaag

SEQ ID NO: 1461218 - RNA, 19 nt, Homo sapiens
  misc_RNA (1)...(19): siRNA sense strand
ggaagggccacauuacaca

SEQ ID NO: 1461219 - RNA, 19 nt, Homo sapiens
  misc_RNA (1)...(19): siRNA sense strand
gaagaagugguccuuguac

SEQ ID NO: 1461220 - RNA, 19 nt, Homo sapiens
  misc_RNA (1)...(19): siRNA sense strand
guacacacaaguggaguuu

SEQ ID NO: 1461221 - RNA, 19 nt, Homo sapiens
  misc_RNA (1)...(19): siRNA sense strand
ccagcgagcgucauuguug

SEQ ID NO: 1461222 - RNA, 19 nt, Homo sapiens
  misc_RNA (1)...(19): siRNA sense strand
cucuaaaguucuuggauaa

SEQ ID NO: 1461223 - RNA, 19 nt, Homo sapiens
  misc_RNA (1)...(19): siRNA sense strand
aaaggcuacucaagagcua

SEQ ID NO: 1461224 - RNA, 19 nt, Homo sapiens
  misc_RNA (1)...(19): siRNA sense strand
gagcuaauuccuauugaag

SEQ ID NO: 1461225 - RNA, 19 nt, Homo sapiens
  misc_RNA (1)...(19): siRNA sense strand
acacaccaccgaucccuaa

SEQ ID NO: 1461226 - RNA, 19 nt, Homo sapiens
  misc_RNA (1)...(19): siRNA sense strand
gcaaaggagcgcuugaaaa

SEQ ID NO: 1461227 - RNA, 19 nt, Homo sapiens
  misc_RNA (1)...(19): siRNA sense strand
ccaucaagcgggauccuaa

SEQ ID NO: 1461228 - RNA, 19 nt, Homo sapiens
  misc_RNA (1)...(19): siRNA sense strand
agagcuaauuccuauugaa

SEQ ID NO: 1461229 - RNA, 19 nt, Homo sapiens
  misc_RNA (1)...(19): siRNA sense strand
ggaggaacugcaacuggaa

SEQ ID NO: 1461230 - RNA, 19 nt, Homo sapiens
  misc_RNA (1)...(19): siRNA sense strand
cugaagaagugguccuugu

SEQ ID NO: 1461231 - RNA, 19 nt, Homo sapiens
  misc_RNA (1)...(19): siRNA sense strand
caaaggagcgcuugaaaag

SEQ ID NO: 1461232 - RNA, 19 nt, Homo sapiens
  misc_RNA (1)...(19): siRNA sense strand
cagcgagcgucauuguugu

SEQ ID NO: 1461233 - RNA, 19 nt, Homo sapiens
  misc_RNA (1)...(19): siRNA sense strand
gaaaaggaagauccgaaaa

SEQ ID NO: 1461234 - RNA, 19 nt, Homo sapiens
  misc_RNA (1)...(19): siRNA sense strand
acaaguggaguuuaagaga

SEQ ID NO: 1461235 - RNA, 19 nt, Homo sapiens
  misc_RNA (1)...(19): siRNA sense strand
ggcagacgcagcuuagaga

SEQ ID NO: 1461236 - RNA, 19 nt, Homo sapiens
  misc_RNA (1)...(19): siRNA sense strand
gagaucagaaccucuucga

SEQ ID NO: 1461237 - RNA, 19 nt, Homo sapiens
  misc_RNA (1)...(19): siRNA sense strand
caugagaucagaaccucuu

SEQ ID NO: 1461238 - RNA, 19 nt, Homo sapiens
  misc_RNA (1)...(19): siRNA sense strand
gcgggauccuaaccuguuc

SEQ ID NO: 1461239 - RNA, 19 nt, Homo sapiens
  misc_RNA (1)...(19): siRNA sense strand
uaaaguucuuggauaaagc

SEQ ID NO: 1461240 - RNA, 19 nt, Homo sapiens
  misc_RNA (1)...(19): siRNA sense strand
aagagcuaauuccuauuga

SEQ ID NO: 1461241 - RNA, 19 nt, Homo sapiens
  misc_RNA (1)...(19): siRNA sense strand
acacaaguggaguuuaaga

SEQ ID NO: 1461242 - RNA, 19 nt, Homo sapiens
  misc_RNA (1)...(19): siRNA sense strand
agaagugguccuuguacaa

SEQ ID NO: 1461243 - RNA, 19 nt, Homo sapiens
  misc_RNA (1)...(19): siRNA sense strand
aagaagugguccuuguaca

SEQ ID NO: 1461244 - RNA, 19 nt, Homo sapiens
  misc_RNA (1)...(19): siRNA sense strand
aaggagcgcuugaaaagga

SEQ ID NO: 1461245 - RNA, 19 nt, Homo sapiens
  misc_RNA (1)...(19): siRNA sense strand
acucaagagcuaauuccua

SEQ ID NO: 1461246 - RNA, 19 nt, Homo sapiens
  misc_RNA (1)...(19): siRNA sense strand
cgucauuguugucuuucug

SEQ ID NO: 1461247 - RNA, 19 nt, Homo sapiens
  misc_RNA (1)...(19): siRNA sense strand
aggaagcucuggaggaacu

SEQ ID NO: 1461248 - RNA, 19 nt, Homo sapiens
  misc_RNA (1)...(19): siRNA sense strand
gguacaaugacaucaccaa

SEQ ID NO: 1461249 - RNA, 19 nt, Homo sapiens
  misc_RNA (1)...(19): siRNA sense strand
cugaaggcagguacaauga

SEQ ID NO: 1461250 - RNA, 19 nt, Homo sapiens
  misc_RNA (1)...(19): siRNA sense strand
gaggaacugcaacuggaau

SEQ ID NO: 1461251 - RNA, 19 nt, Homo sapiens
  misc_RNA (1)...(19): siRNA sense strand
gggacaccaucagggcuau

SEQ ID NO: 1461252 - RNA, 19 nt, Homo sapiens
  misc_RNA (1)...(19): siRNA sense strand
aagaagaagguagauccua

SEQ ID NO: 1461253 - RNA, 19 nt, Homo sapiens
  misc_RNA (1)...(19): siRNA sense strand
ucacugagauaaccacuaa

SEQ ID NO: 1461254 - RNA, 19 nt, Homo sapiens
  misc_RNA (1)...(19): siRNA sense strand
gcauugauccucagaguaa

SEQ ID NO: 1461255 - RNA, 19 nt, Homo sapiens
  misc_RNA (1)...(19): siRNA sense strand
gcaaugagaccuaccaugu

SEQ ID NO: 1461256 - RNA, 19 nt, Homo sapiens
  misc_RNA (1)...(19): siRNA sense strand
gcaaggaggucacuuucca

SEQ ID NO: 1461257 - RNA, 19 nt, Homo sapiens
  misc_RNA (1)...(19): siRNA sense strand
gacaugaucuuccucaagu

SEQ ID NO: 1461258 - RNA, 19 nt, Homo sapiens
  misc_RNA (1)...(19): siRNA sense strand
gagagugugugaagacaga

SEQ ID NO: 1461259 - RNA, 19 nt, Homo sapiens
  misc_RNA (1)...(19): siRNA sense strand
gagaagacacacaugauga

SEQ ID NO: 1461260 - RNA, 19 nt, Homo sapiens
  misc_RNA (1)...(19): siRNA sense strand
gcagcaauauggccucaug

SEQ ID NO: 1461261 - RNA, 19 nt, Homo sapiens
  misc_RNA (1)...(19): siRNA sense strand
gcagugcuguguggaauau

SEQ ID NO: 1461262 - RNA, 19 nt, Homo sapiens
  misc_RNA (1)...(19): siRNA sense strand
gggcacagcugaugaagac

SEQ ID NO: 1461263 - RNA, 19 nt, Homo sapiens
  misc_RNA (1)...(19): siRNA sense strand
gaaagcugccugcaaggaa

SEQ ID NO: 1461264 - RNA, 19 nt, Homo sapiens
  misc_RNA (1)...(19): siRNA sense strand
aauaucaggugcuguuuga

SEQ ID NO: 1461265 - RNA, 19 nt, Homo sapiens
  misc_RNA (1)...(19): siRNA sense strand
ucauggagguggaguuuau

SEQ ID NO: 1461266 - RNA, 19 nt, Homo sapiens
  misc_RNA (1)...(19): siRNA sense strand
ccacaaagaagaaagacaa

SEQ ID NO: 1461267 - RNA, 19 nt, Homo sapiens
  misc_RNA (1)...(19): siRNA sense strand
gauaaccacuaacaucucu

SEQ ID NO: 1461268 - RNA, 19 nt, Homo sapiens
  misc_RNA (1)...(19): siRNA sense strand
gaacuacaaacccaacaug

SEQ ID NO: 1461269 - RNA, 19 nt, Homo sapiens
  misc_RNA (1)...(19): siRNA sense strand
ggagaagacacacaugaug

SEQ ID NO: 1461270 - RNA, 19 nt, Homo sapiens
  misc_RNA (1)...(19): siRNA sense strand
caguacaucuucauucaug

SEQ ID NO: 1461271 - RNA, 19 nt, Homo sapiens
  misc_RNA (1)...(19): siRNA sense strand
ggucaacacuucccagcau

SEQ ID NO: 1461272 - RNA, 19 nt, Homo sapiens
  misc_RNA (1)...(19): siRNA sense strand
caacaccaacuccaucauu

SEQ ID NO: 1461273 - RNA, 19 nt, Homo sapiens
  misc_RNA (1)...(19): siRNA sense strand
gaaggccuaucucaucuac

SEQ ID NO: 1461274 - RNA, 19 nt, Homo sapiens
  misc_RNA (1)...(19): siRNA sense strand
ugaagacggccgaggguua

SEQ ID NO: 1461275 - RNA, 19 nt, Homo sapiens
  misc_RNA (1)...(19): siRNA sense strand
cacagcugaugaagacuua

SEQ ID NO: 1461276 - RNA, 19 nt, Homo sapiens
  misc_RNA (1)...(19): siRNA sense strand
ucuccaagcuccgcaauga

SEQ ID NO: 1461277 - RNA, 19 nt, Homo sapiens
  misc_RNA (1)...(19): siRNA sense strand
agccugagauggucuauga

SEQ ID NO: 1461278 - RNA, 19 nt, Homo sapiens
  misc_RNA (1)...(19): siRNA sense strand
gccaaugccugccuaugau

SEQ ID NO: 1461279 - RNA, 19 nt, Homo sapiens
  misc_RNA (1)...(19): siRNA sense strand
gaagaaagacaaggucaag

SEQ ID NO: 1461280 - RNA, 19 nt, Homo sapiens
  misc_RNA (1)...(19): siRNA sense strand
gcucccagcuuugauuaug

SEQ ID NO: 1461281 - RNA, 19 nt, Homo sapiens
  misc_RNA (1)...(19): siRNA sense strand
caucucugcucccagcuuu

SEQ ID NO: 1461282 - RNA, 19 nt, Homo sapiens
  misc_RNA (1)...(19): siRNA sense strand
ucaacaugauccagacuga

SEQ ID NO: 1461283 - RNA, 19 nt, Homo sapiens
  misc_RNA (1)...(19): siRNA sense strand
gaauaucaggugcuguuug

SEQ ID NO: 1461284 - RNA, 19 nt, Homo sapiens
  misc_RNA (1)...(19): siRNA sense strand
uccaacaacuacauuaaug

SEQ ID NO: 1461285 - RNA, 19 nt, Homo sapiens
  misc_RNA (1)...(19): siRNA sense strand
aaagcugccugcaaggaaa

SEQ ID NO: 1461286 - RNA, 19 nt, Homo sapiens
  misc_RNA (1)...(19): siRNA sense strand
caucagacccggcagugaa

SEQ ID NO: 1461287 - RNA, 19 nt, Homo sapiens
  misc_RNA (1)...(19): siRNA sense strand
uggcugagguggacaagug

SEQ ID NO: 1461288 - RNA, 19 nt, Homo sapiens
  misc_RNA (1)...(19): siRNA sense strand
cuuaguggcucgagucuuc

SEQ ID NO: 1461289 - RNA, 19 nt, Homo sapiens
  misc_RNA (1)...(19): siRNA sense strand
gcacagcugaugaagacuu

SEQ ID NO: 1461290 - RNA, 19 nt, Homo sapiens
  misc_RNA (1)...(19): siRNA sense strand
ccgcacagguugcuauauc

SEQ ID NO: 1461291 - RNA, 19 nt, Homo sapiens
  misc_RNA (1)...(19): siRNA sense strand
gaggagcaguacaucuuca

SEQ ID NO: 1461292 - RNA, 19 nt, Homo sapiens
  misc_RNA (1)...(19): siRNA sense strand
gagcaguacaucuucauuc

SEQ ID NO: 1461293 - RNA, 19 nt, Homo sapiens
  misc_RNA (1)...(19): siRNA sense strand
ucgcggagcucaucgucaa

SEQ ID NO: 1461294 - RNA, 19 nt, Homo sapiens
  misc_RNA (1)...(19): siRNA sense strand
uggagaccauggaucagua

SEQ ID NO: 1461295 - RNA, 19 nt, Homo sapiens
  misc_RNA (1)...(19): siRNA sense strand
ccacggcuccuacuugaug

SEQ ID NO: 1461296 - RNA, 19 nt, Homo sapiens
  misc_RNA (1)...(19): siRNA sense strand
gggaaccacugggcuacaa

SEQ ID NO: 1461297 - RNA, 19 nt, Homo sapiens
  misc_RNA (1)...(19): siRNA sense strand
ccaccuaccucaucaucca

SEQ ID NO: 1461298 - RNA, 19 nt, Homo sapiens
  misc_RNA (1)...(19): siRNA sense strand
ggacaugaucuuccucaag

SEQ ID NO: 1461299 - RNA, 19 nt, Homo sapiens
  misc_RNA (1)...(19): siRNA sense strand
ggacuccaacaacuacauu

SEQ ID NO: 1461300 - RNA, 19 nt, Homo sapiens
  misc_RNA (1)...(19): siRNA sense strand
cauuaaugccaacuacaua

SEQ ID NO: 1461301 - RNA, 19 nt, Homo sapiens
  misc_RNA (1)...(19): siRNA sense strand
caaagaagaaagacaaggu

SEQ ID NO: 1461302 - RNA, 19 nt, Homo sapiens
  misc_RNA (1)...(19): siRNA sense strand
ccaaggccaccgucaacua

SEQ ID NO: 1461303 - RNA, 19 nt, Homo sapiens
  misc_RNA (1)...(19): siRNA sense strand
ggaaagcugccugcaagga

SEQ ID NO: 1461304 - RNA, 19 nt, Homo sapiens
  misc_RNA (1)...(19): siRNA sense strand
gggagacccggcugaauug

SEQ ID NO: 1461305 - RNA, 19 nt, Homo sapiens
  misc_RNA (1)...(19): siRNA sense strand
ugagauaaccacuaacauc

SEQ ID NO: 1461306 - RNA, 19 nt, Homo sapiens
  misc_RNA (1)...(19): siRNA sense strand
cgagaaugauacccacugu

SEQ ID NO: 1461307 - RNA, 19 nt, Homo sapiens
  misc_RNA (1)...(19): siRNA sense strand
ggcggcuggucuacgauua

SEQ ID NO: 1461308 - RNA, 19 nt, Homo sapiens
  misc_RNA (1)...(19): siRNA sense strand
gggcagugcuguguggaau

SEQ ID NO: 1461309 - RNA, 19 nt, Homo sapiens
  misc_RNA (1)...(19): siRNA sense strand
caggucaaaccacuucaua

SEQ ID NO: 1461310 - RNA, 19 nt, Homo sapiens
  misc_RNA (1)...(19): siRNA sense strand
cgacacagaguaugagauc

SEQ ID NO: 1461311 - RNA, 19 nt, Homo sapiens
  misc_RNA (1)...(19): siRNA sense strand
aggccuaucucaucuacuu

SEQ ID NO: 1461312 - RNA, 19 nt, Homo sapiens
  misc_RNA (1)...(19): siRNA sense strand
ccaaaacccuccggaacua

SEQ ID NO: 1461313 - RNA, 19 nt, Homo sapiens
  misc_RNA (1)...(19): siRNA sense strand
ccacgguccuggagaugau

SEQ ID NO: 1461314 - RNA, 19 nt, Homo sapiens
  misc_RNA (1)...(19): siRNA sense strand
gcuauaucguccuggaugu

SEQ ID NO: 1461315 - RNA, 19 nt, Homo sapiens
  misc_RNA (1)...(19): siRNA sense strand
ggaaggccuaucucaucua

SEQ ID NO: 1461316 - RNA, 19 nt, Homo sapiens
  misc_RNA (1)...(19): siRNA sense strand
caacaacuacauuaaugca

SEQ ID NO: 1461317 - RNA, 19 nt, Homo sapiens
  misc_RNA (1)...(19): siRNA sense strand
gcgagcccaugucaucuuc

SEQ ID NO: 1461318 - RNA, 19 nt, Homo sapiens
  misc_RNA (1)...(19): siRNA sense strand
ucaagauuaugcuggugaa

SEQ ID NO: 1461319 - RNA, 19 nt, Homo sapiens
  misc_RNA (1)...(19): siRNA sense strand
cuacauuaaugccaacuac

SEQ ID NO: 1461320 - RNA, 19 nt, Homo sapiens
  misc_RNA (1)...(19): siRNA sense strand
gcugggacgccacaaagaa

SEQ ID NO: 1461321 - RNA, 19 nt, Homo sapiens
  misc_RNA (1)...(19): siRNA sense strand
caggagaagacacacauga

SEQ ID NO: 1461322 - RNA, 19 nt, Homo sapiens
  misc_RNA (1)...(19): siRNA sense strand
ucauccagcucaacaccaa

SEQ ID NO: 1461323 - RNA, 19 nt, Homo sapiens
  misc_RNA (1)...(19): siRNA sense strand
aacaccaacuccaucauug

SEQ ID NO: 1461324 - RNA, 19 nt, Homo sapiens
  misc_RNA (1)...(19): siRNA sense strand
agaaugauacccacugugu

SEQ ID NO: 1461325 - RNA, 19 nt, Homo sapiens
  misc_RNA (1)...(19): siRNA sense strand
ccacaggucaaaccacuuc

SEQ ID NO: 1461326 - RNA, 19 nt, Homo sapiens
  misc_RNA (1)...(19): siRNA sense strand
gcacuuucuggcccaauga

SEQ ID NO: 1461327 - RNA, 19 nt, Homo sapiens
  misc_RNA (1)...(19): siRNA sense strand
ccagcgagcccaugucauc

SEQ ID NO: 1461328 - RNA, 19 nt, Homo sapiens
  misc_RNA (1)...(19): siRNA sense strand
gauccgcugccacaacuug

SEQ ID NO: 1461329 - RNA, 19 nt, Homo sapiens
  misc_RNA (1)...(19): siRNA sense strand
ggagcaguacaucuucauu

SEQ ID NO: 1461330 - RNA, 19 nt, Homo sapiens
  misc_RNA (1)...(19): siRNA sense strand
ugagauggucuaugacuuc

SEQ ID NO: 1461331 - RNA, 19 nt, Homo sapiens
  misc_RNA (1)...(19): siRNA sense strand
ucuccugggugccaucauu

SEQ ID NO: 1461332 - RNA, 19 nt, Homo sapiens
  misc_RNA (1)...(19): siRNA sense strand
ccugaggccaugcccuuua

SEQ ID NO: 1461333 - RNA, 19 nt, Homo sapiens
  misc_RNA (1)...(19): siRNA sense strand
ggagaugauccgcauugau

SEQ ID NO: 1461334 - RNA, 19 nt, Homo sapiens
  misc_RNA (1)...(19): siRNA sense strand
gagauggucuaugacuucu

SEQ ID NO: 1461335 - RNA, 19 nt, Homo sapiens
  misc_RNA (1)...(19): siRNA sense strand
ucaacuaccgccaggagaa

SEQ ID NO: 1461336 - RNA, 19 nt, Homo sapiens
  misc_RNA (1)...(19): siRNA sense strand
gggcaaggaggucacuuuc

SEQ ID NO: 1461337 - RNA, 19 nt, Homo sapiens
  misc_RNA (1)...(19): siRNA sense strand
ccgcauugauccucagagu

SEQ ID NO: 1461338 - RNA, 19 nt, Homo sapiens
  misc_RNA (1)...(19): siRNA sense strand
ggucaaaccacuucauagc

SEQ ID NO: 1461339 - RNA, 19 nt, Homo sapiens
  misc_RNA (1)...(19): siRNA sense strand
gaagacggccgaggguuac

SEQ ID NO: 1461340 - RNA, 19 nt, Homo sapiens
  misc_RNA (1)...(19): siRNA sense strand
ccagagaucggaggagaug

SEQ ID NO: 1461341 - RNA, 19 nt, Homo sapiens
  misc_RNA (1)...(19): siRNA sense strand
ggagcccaauggucucauc

SEQ ID NO: 1461342 - RNA, 19 nt, Homo sapiens
  misc_RNA (1)...(19): siRNA sense strand
agcaguacaucuucauuca

SEQ ID NO: 1461343 - RNA, 19 nt, Homo sapiens
  misc_RNA (1)...(19): siRNA sense strand
gcaccuccaucgucaugcu

SEQ ID NO: 1461344 - RNA, 19 nt, Homo sapiens
  misc_RNA (1)...(19): siRNA sense strand
ggcgcuuccuggccacuuu

SEQ ID NO: 1461345 - RNA, 19 nt, Homo sapiens
  misc_RNA (1)...(19): siRNA sense strand
ucaaggccaccuacaagga

SEQ ID NO: 1461346 - RNA, 19 nt, Homo sapiens
  misc_RNA (1)...(19): siRNA sense strand
guucaaggccaccuacaag

SEQ ID NO: 1461347 - RNA, 19 nt, Homo sapiens
  misc_RNA (1)...(19): siRNA sense strand
ccaccaucccugucaguga

SEQ ID NO: 1461348 - RNA, 19 nt, Homo sapiens
  misc_RNA (1)...(19): siRNA sense strand
ggccgaagccugagauggu

SEQ ID NO: 1461349 - RNA, 19 nt, Homo sapiens
  misc_RNA (1)...(19): siRNA sense strand
gcauccgcauugccaggaa

SEQ ID NO: 1461350 - RNA, 19 nt, Homo sapiens
  misc_RNA (1)...(19): siRNA sense strand
ccagacggaugaggaugug

SEQ ID NO: 1461351 - RNA, 19 nt, Homo sapiens
  misc_RNA (1)...(19): siRNA sense strand
ucacuuuccagacggauga

SEQ ID NO: 1461352 - RNA, 19 nt, Homo sapiens
  misc_RNA (1)...(19): siRNA sense strand
uuaaugcagcccugacuga

SEQ ID NO: 1461353 - RNA, 19 nt, Homo sapiens
  misc_RNA (1)...(19): siRNA sense strand
ucacugagauaaccacuaa

SEQ ID NO: 1461354 - RNA, 19 nt, Homo sapiens
  misc_RNA (1)...(19): siRNA sense strand
gcauugauccucagaguaa

SEQ ID NO: 1461355 - RNA, 19 nt, Homo sapiens
  misc_RNA (1)...(19): siRNA sense strand
gcaaugagaccuaccaugu

SEQ ID NO: 1461356 - RNA, 19 nt, Homo sapiens
  misc_RNA (1)...(19): siRNA sense strand
gcaaggaggucacuuucca

SEQ ID NO: 1461357 - RNA, 19 nt, Homo sapiens
  misc_RNA (1)...(19): siRNA sense strand
gacaugaucuuccucaagu

SEQ ID NO: 1461358 - RNA, 19 nt, Homo sapiens
  misc_RNA (1)...(19): siRNA sense strand
gagagugugugaagacaga

SEQ ID NO: 1461359 - RNA, 19 nt, Homo sapiens
  misc_RNA (1)...(19): siRNA sense strand
gagaagacacacaugauga

SEQ ID NO: 1461360 - RNA, 19 nt, Homo sapiens
  misc_RNA (1)...(19): siRNA sense strand
gcagcaauauggccucaug

SEQ ID NO: 1461361 - RNA, 19 nt, Homo sapiens
  misc_RNA (1)...(19): siRNA sense strand
gcagugcuguguggaauau

SEQ ID NO: 1461362 - RNA, 19 nt, Homo sapiens
  misc_RNA (1)...(19): siRNA sense strand
gggcacagcugaugaagac

SEQ ID NO: 1461363 - RNA, 19 nt, Homo sapiens
  misc_RNA (1)...(19): siRNA sense strand
gaaagcugccugcaaggaa

SEQ ID NO: 1461364 - RNA, 19 nt, Homo sapiens
  misc_RNA (1)...(19): siRNA sense strand
aauaucaggugcuguuuga

SEQ ID NO: 1461365 - RNA, 19 nt, Homo sapiens
  misc_RNA (1)...(19): siRNA sense strand
ucauggagguggaguuuau

SEQ ID NO: 1461366 - RNA, 19 nt, Homo sapiens
  misc_RNA (1)...(19): siRNA sense strand
ccacaaagaagaaagacaa

SEQ ID NO: 1461367 - RNA, 19 nt, Homo sapiens
  misc_RNA (1)...(19): siRNA sense strand
gauaaccacuaacaucucu

SEQ ID NO: 1461368 - RNA, 19 nt, Homo sapiens
  misc_RNA (1)...(19): siRNA sense strand
gaacuacaaacccaacaug

SEQ ID NO: 1461369 - RNA, 19 nt, Homo sapiens
  misc_RNA (1)...(19): siRNA sense strand
ggagaagacacacaugaug

SEQ ID NO: 1461370 - RNA, 19 nt, Homo sapiens
  misc_RNA (1)...(19): siRNA sense strand
caguacaucuucauucaug

SEQ ID NO: 1461371 - RNA, 19 nt, Homo sapiens
  misc_RNA (1)...(19): siRNA sense strand
ggucaacacuucccagcau

SEQ ID NO: 1461372 - RNA, 19 nt, Homo sapiens
  misc_RNA (1)...(19): siRNA sense strand
caacaccaacuccaucauu

SEQ ID NO: 1461373 - RNA, 19 nt, Homo sapiens
  misc_RNA (1)...(19): siRNA sense strand
gaaggccuaucucaucuac

SEQ ID NO: 1461374 - RNA, 19 nt, Homo sapiens
  misc_RNA (1)...(19): siRNA sense strand
ugaagacggccgaggguua

SEQ ID NO: 1461375 - RNA, 19 nt, Homo sapiens
  misc_RNA (1)...(19): siRNA sense strand
cacagcugaugaagacuua

SEQ ID NO: 1461376 - RNA, 19 nt, Homo sapiens
  misc_RNA (1)...(19): siRNA sense strand
ucuccaagcuccgcaauga

SEQ ID NO: 1461377 - RNA, 19 nt, Homo sapiens
  misc_RNA (1)...(19): siRNA sense strand
agccugagauggucuauga

SEQ ID NO: 1461378 - RNA, 19 nt, Homo sapiens
  misc_RNA (1)...(19): siRNA sense strand
gccaaugccugccuaugau

SEQ ID NO: 1461379 - RNA, 19 nt, Homo sapiens
  misc_RNA (1)...(19): siRNA sense strand
gaagaaagacaaggucaag

SEQ ID NO: 1461380 - RNA, 19 nt, Homo sapiens
  misc_RNA (1)...(19): siRNA sense strand
gcucccagcuuugauuaug

SEQ ID NO: 1461381 - RNA, 19 nt, Homo sapiens
  misc_RNA (1)...(19): siRNA sense strand
caucucugcucccagcuuu

SEQ ID NO: 1461382 - RNA, 19 nt, Homo sapiens
  misc_RNA (1)...(19): siRNA sense strand
ucaacaugauccagacuga

SEQ ID NO: 1461383 - RNA, 19 nt, Homo sapiens
  misc_RNA (1)...(19): siRNA sense strand
gaauaucaggugcuguuug

SEQ ID NO: 1461384 - RNA, 19 nt, Homo sapiens
  misc_RNA (1)...(19): siRNA sense strand
uccaacaacuacauuaaug

SEQ ID NO: 1461385 - RNA, 19 nt, Homo sapiens
  misc_RNA (1)...(19): siRNA sense strand
aaagcugccugcaaggaaa

SEQ ID NO: 1461386 - RNA, 19 nt, Homo sapiens
  misc_RNA (1)...(19): siRNA sense strand
caucagacccggcagugaa

SEQ ID NO: 1461387 - RNA, 19 nt, Homo sapiens
  misc_RNA (1)...(19): siRNA sense strand
uggcugagguggacaagug

SEQ ID NO: 1461388 - RNA, 19 nt, Homo sapiens
  misc_RNA (1)...(19): siRNA sense strand
cuuaguggcucgagucuuc

SEQ ID NO: 1461389 - RNA, 19 nt, Homo sapiens
  misc_RNA (1)...(19): siRNA sense strand
gcacagcugaugaagacuu

SEQ ID NO: 1461390 - RNA, 19 nt, Homo sapiens
  misc_RNA (1)...(19): siRNA sense strand
ccgcacagguugcuauauc

SEQ ID NO: 1461391 - RNA, 19 nt, Homo sapiens
  misc_RNA (1)...(19): siRNA sense strand
gaggagcaguacaucuuca

SEQ ID NO: 1461392 - RNA, 19 nt, Homo sapiens
  misc_RNA (1)...(19): siRNA sense strand
gagcaguacaucuucauuc

SEQ ID NO: 1461393 - RNA, 19 nt, Homo sapiens
  misc_RNA (1)...(19): siRNA sense strand
ucgcggagcucaucgucaa

SEQ ID NO: 1461394 - RNA, 19 nt, Homo sapiens
  misc_RNA (1)...(19): siRNA sense strand
uggagaccauggaucagua

SEQ ID NO: 1461395 - RNA, 19 nt, Homo sapiens
  misc_RNA (1)...(19): siRNA sense strand
ccacggcuccuacuugaug

SEQ ID NO: 1461396 - RNA, 19 nt, Homo sapiens
  misc_RNA (1)...(19): siRNA sense strand
gggaaccacugggcuacaa

SEQ ID NO: 1461397 - RNA, 19 nt, Homo sapiens
  misc_RNA (1)...(19): siRNA sense strand
ccaccuaccucaucaucca

SEQ ID NO: 1461398 - RNA, 19 nt, Homo sapiens
  misc_RNA (1)...(19): siRNA sense strand
ggacaugaucuuccucaag

SEQ ID NO: 1461399 - RNA, 19 nt, Homo sapiens
  misc_RNA (1)...(19): siRNA sense strand
ggacuccaacaacuacauu

SEQ ID NO: 1461400 - RNA, 19 nt, Homo sapiens
  misc_RNA (1)...(19): siRNA sense strand
cauuaaugccaacuacaua

SEQ ID NO: 1461401 - RNA, 19 nt, Homo sapiens
  misc_RNA (1)...(19): siRNA sense strand
caaagaagaaagacaaggu

SEQ ID NO: 1461402 - RNA, 19 nt, Homo sapiens
  misc_RNA (1)...(19): siRNA sense strand
ccaaggccaccgucaacua

SEQ ID NO: 1461403 - RNA, 19 nt, Homo sapiens
  misc_RNA (1)...(19): siRNA sense strand
ggaaagcugccugcaagga

SEQ ID NO: 1461404 - RNA, 19 nt, Homo sapiens
  misc_RNA (1)...(19): siRNA sense strand
gggagacccggcugaauug

SEQ ID NO: 1461405 - RNA, 19 nt, Homo sapiens
  misc_RNA (1)...(19): siRNA sense strand
ugagauaaccacuaacauc

SEQ ID NO: 1461406 - RNA, 19 nt, Homo sapiens
  misc_RNA (1)...(19): siRNA sense strand
cgagaaugauacccacugu

SEQ ID NO: 1461407 - RNA, 19 nt, Homo sapiens
  misc_RNA (1)...(19): siRNA sense strand
ggcggcuggucuacgauua

SEQ ID NO: 1461408 - RNA, 19 nt, Homo sapiens
  misc_RNA (1)...(19): siRNA sense strand
gggcagugcuguguggaau

SEQ ID NO: 1461409 - RNA, 19 nt, Homo sapiens
  misc_RNA (1)...(19): siRNA sense strand
caggucaaaccacuucaua

SEQ ID NO: 1461410 - RNA, 19 nt, Homo sapiens
  misc_RNA (1)...(19): siRNA sense strand
cgacacagaguaugagauc

SEQ ID NO: 1461411 - RNA, 19 nt, Homo sapiens
  misc_RNA (1)...(19): siRNA sense strand
aggccuaucucaucuacuu

SEQ ID NO: 1461412 - RNA, 19 nt, Homo sapiens
  misc_RNA (1)...(19): siRNA sense strand
ccaaaacccuccggaacua

SEQ ID NO: 1461413 - RNA, 19 nt, Homo sapiens
  misc_RNA (1)...(19): siRNA sense strand
ccacgguccuggagaugau

SEQ ID NO: 1461414 - RNA, 19 nt, Homo sapiens
  misc_RNA (1)...(19): siRNA sense strand
gcuauaucguccuggaugu

SEQ ID NO: 1461415 - RNA, 19 nt, Homo sapiens
  misc_RNA (1)...(19): siRNA sense strand
ggaaggccuaucucaucua

SEQ ID NO: 1461416 - RNA, 19 nt, Homo sapiens
  misc_RNA (1)...(19): siRNA sense strand
caacaacuacauuaaugca

SEQ ID NO: 1461417 - RNA, 19 nt, Homo sapiens
  misc_RNA (1)...(19): siRNA sense strand
gcgagcccaugucaucuuc

SEQ ID NO: 1461418 - RNA, 19 nt, Homo sapiens
  misc_RNA (1)...(19): siRNA sense strand
ucaagauuaugcuggugaa

SEQ ID NO: 1461419 - RNA, 19 nt, Homo sapiens
  misc_RNA (1)...(19): siRNA sense strand
cuacauuaaugccaacuac

SEQ ID NO: 1461420 - RNA, 19 nt, Homo sapiens
  misc_RNA (1)...(19): siRNA sense strand
gcugggacgccacaaagaa

SEQ ID NO: 1461421 - RNA, 19 nt, Homo sapiens
  misc_RNA (1)...(19): siRNA sense strand
caggagaagacacacauga

SEQ ID NO: 1461422 - RNA, 19 nt, Homo sapiens
  misc_RNA (1)...(19): siRNA sense strand
ucauccagcucaacaccaa

SEQ ID NO: 1461423 - RNA, 19 nt, Homo sapiens
  misc_RNA (1)...(19): siRNA sense strand
aacaccaacuccaucauug

SEQ ID NO: 1461424 - RNA, 19 nt, Homo sapiens
  misc_RNA (1)...(19): siRNA sense strand
agaaugauacccacugugu

SEQ ID NO: 1461425 - RNA, 19 nt, Homo sapiens
  misc_RNA (1)...(19): siRNA sense strand
ccacaggucaaaccacuuc

SEQ ID NO: 1461426 - RNA, 19 nt, Homo sapiens
  misc_RNA (1)...(19): siRNA sense strand
gcacuuucuggcccaauga

SEQ ID NO: 1461427 - RNA, 19 nt, Homo sapiens
  misc_RNA (1)...(19): siRNA sense strand
ccagcgagcccaugucauc

SEQ ID NO: 1461428 - RNA, 19 nt, Homo sapiens
  misc_RNA (1)...(19): siRNA sense strand
gauccgcugccacaacuug

SEQ ID NO: 1461429 - RNA, 19 nt, Homo sapiens
  misc_RNA (1)...(19): siRNA sense strand
ggagcaguacaucuucauu

SEQ ID NO: 1461430 - RNA, 19 nt, Homo sapiens
  misc_RNA (1)...(19): siRNA sense strand
ugagauggucuaugacuuc

SEQ ID NO: 1461431 - RNA, 19 nt, Homo sapiens
  misc_RNA (1)...(19): siRNA sense strand
ucuccugggugccaucauu

SEQ ID NO: 1461432 - RNA, 19 nt, Homo sapiens
  misc_RNA (1)...(19): siRNA sense strand
ccugaggccaugcccuuua

SEQ ID NO: 1461433 - RNA, 19 nt, Homo sapiens
  misc_RNA (1)...(19): siRNA sense strand
ggagaugauccgcauugau

SEQ ID NO: 1461434 - RNA, 19 nt, Homo sapiens
  misc_RNA (1)...(19): siRNA sense strand
gagauggucuaugacuucu

SEQ ID NO: 1461435 - RNA, 19 nt, Homo sapiens
  misc_RNA (1)...(19): siRNA sense strand
ucaacuaccgccaggagaa

SEQ ID NO: 1461436 - RNA, 19 nt, Homo sapiens
  misc_RNA (1)...(19): siRNA sense strand
gggcaaggaggucacuuuc

SEQ ID NO: 1461437 - RNA, 19 nt, Homo sapiens
  misc_RNA (1)...(19): siRNA sense strand
ccgcauugauccucagagu

SEQ ID NO: 1461438 - RNA, 19 nt, Homo sapiens
  misc_RNA (1)...(19): siRNA sense strand
ggucaaaccacuucauagc

SEQ ID NO: 1461439 - RNA, 19 nt, Homo sapiens
  misc_RNA (1)...(19): siRNA sense strand
gaagacggccgaggguuac

SEQ ID NO: 1461440 - RNA, 19 nt, Homo sapiens
  misc_RNA (1)...(19): siRNA sense strand
ccagagaucggaggagaug

SEQ ID NO: 1461441 - RNA, 19 nt, Homo sapiens
  misc_RNA (1)...(19): siRNA sense strand
ggagcccaauggucucauc

SEQ ID NO: 1461442 - RNA, 19 nt, Homo sapiens
  misc_RNA (1)...(19): siRNA sense strand
agcaguacaucuucauuca

SEQ ID NO: 1461443 - RNA, 19 nt, Homo sapiens
  misc_RNA (1)...(19): siRNA sense strand
gcaccuccaucgucaugcu

SEQ ID NO: 1461444 - RNA, 19 nt, Homo sapiens
  misc_RNA (1)...(19): siRNA sense strand
ggcgcuuccuggccacuuu

SEQ ID NO: 1461445 - RNA, 19 nt, Homo sapiens
  misc_RNA (1)...(19): siRNA sense strand
ucaaggccaccuacaagga

SEQ ID NO: 1461446 - RNA, 19 nt, Homo sapiens
  misc_RNA (1)...(19): siRNA sense strand
guucaaggccaccuacaag

SEQ ID NO: 1461447 - RNA, 19 nt, Homo sapiens
  misc_RNA (1)...(19): siRNA sense strand
ccaccaucccugucaguga

SEQ ID NO: 1461448 - RNA, 19 nt, Homo sapiens
  misc_RNA (1)...(19): siRNA sense strand
ggccgaagccugagauggu

SEQ ID NO: 1461449 - RNA, 19 nt, Homo sapiens
  misc_RNA (1)...(19): siRNA sense strand
gcauccgcauugccaggaa

SEQ ID NO: 1461450 - RNA, 19 nt, Homo sapiens
  misc_RNA (1)...(19): siRNA sense strand
ccagacggaugaggaugug

SEQ ID NO: 1461451 - RNA, 19 nt, Homo sapiens
  misc_RNA (1)...(19): siRNA sense strand
ucacuuuccagacggauga

SEQ ID NO: 1461452 - RNA, 19 nt, Homo sapiens
  misc_RNA (1)...(19): siRNA sense strand
uuaaugcagcccugacuga

SEQ ID NO: 1461453 - RNA, 19 nt, Homo sapiens
  misc_RNA (1)...(19): siRNA sense strand
ucacugagauaaccacuaa

SEQ ID NO: 1461454 - RNA, 19 nt, Homo sapiens
  misc_RNA (1)...(19): siRNA sense strand
gcauugauccucagaguaa

SEQ ID NO: 1461455 - RNA, 19 nt, Homo sapiens
  misc_RNA (1)...(19): siRNA sense strand
gcaaugagaccuaccaugu

SEQ ID NO: 1461456 - RNA, 19 nt, Homo sapiens
  misc_RNA (1)...(19): siRNA sense strand
gcaaggaggucacuuucca

SEQ ID NO: 1461457 - RNA, 19 nt, Homo sapiens
  misc_RNA (1)...(19): siRNA sense strand
gacaugaucuuccucaagu

SEQ ID NO: 1461458 - RNA, 19 nt, Homo sapiens
  misc_RNA (1)...(19): siRNA sense strand
gagagugugugaagacaga

SEQ ID NO: 1461459 - RNA, 19 nt, Homo sapiens
  misc_RNA (1)...(19): siRNA sense strand
gagaagacacacaugauga

SEQ ID NO: 1461460 - RNA, 19 nt, Homo sapiens
  misc_RNA (1)...(19): siRNA sense strand
gcagcaauauggccucaug

SEQ ID NO: 1461461 - RNA, 19 nt, Homo sapiens
  misc_RNA (1)...(19): siRNA sense strand
gcagugcuguguggaauau

SEQ ID NO: 1461462 - RNA, 19 nt, Homo sapiens
  misc_RNA (1)...(19): siRNA sense strand
gggcacagcugaugaagac

SEQ ID NO: 1461463 - RNA, 19 nt, Homo sapiens
  misc_RNA (1)...(19): siRNA sense strand
gaaagcugccugcaaggaa

SEQ ID NO: 1461464 - RNA, 19 nt, Homo sapiens
  misc_RNA (1)...(19): siRNA sense strand
aauaucaggugcuguuuga

SEQ ID NO: 1461465 - RNA, 19 nt, Homo sapiens
  misc_RNA (1)...(19): siRNA sense strand
ucauggagguggaguuuau

SEQ ID NO: 1461466 - RNA, 19 nt, Homo sapiens
  misc_RNA (1)...(19): siRNA sense strand
ccacaaagaagaaagacaa

SEQ ID NO: 1461467 - RNA, 19 nt, Homo sapiens
  misc_RNA (1)...(19): siRNA sense strand
gauaaccacuaacaucucu

SEQ ID NO: 1461468 - RNA, 19 nt, Homo sapiens
  misc_RNA (1)...(19): siRNA sense strand
gaacuacaaacccaacaug

SEQ ID NO: 1461469 - RNA, 19 nt, Homo sapiens
  misc_RNA (1)...(19): siRNA sense strand
ggagaagacacacaugaug

SEQ ID NO: 1461470 - RNA, 19 nt, Homo sapiens
  misc_RNA (1)...(19): siRNA sense strand
caguacaucuucauucaug

SEQ ID NO: 1461471 - RNA, 19 nt, Homo sapiens
  misc_RNA (1)...(19): siRNA sense strand
ggucaacacuucccagcau

SEQ ID NO: 1461472 - RNA, 19 nt, Homo sapiens
  misc_RNA (1)...(19): siRNA sense strand
caacaccaacuccaucauu

SEQ ID NO: 1461473 - RNA, 19 nt, Homo sapiens
  misc_RNA (1)...(19): siRNA sense strand
gaaggccuaucucaucuac

SEQ ID NO: 1461474 - RNA, 19 nt, Homo sapiens
  misc_RNA (1)...(19): siRNA sense strand
ugaagacggccgaggguua

SEQ ID NO: 1461475 - RNA, 19 nt, Homo sapiens
  misc_RNA (1)...(19): siRNA sense strand
cacagcugaugaagacuua

SEQ ID NO: 1461476 - RNA, 19 nt, Homo sapiens
  misc_RNA (1)...(19): siRNA sense strand
ucuccaagcuccgcaauga

SEQ ID NO: 1461477 - RNA, 19 nt, Homo sapiens
  misc_RNA (1)...(19): siRNA sense strand
agccugagauggucuauga

SEQ ID NO: 1461478 - RNA, 19 nt, Homo sapiens
  misc_RNA (1)...(19): siRNA sense strand
gccaaugccugccuaugau

SEQ ID NO: 1461479 - RNA, 19 nt, Homo sapiens
  misc_RNA (1)...(19): siRNA sense strand
gaagaaagacaaggucaag

SEQ ID NO: 1461480 - RNA, 19 nt, Homo sapiens
  misc_RNA (1)...(19): siRNA sense strand
gcucccagcuuugauuaug

SEQ ID NO: 1461481 - RNA, 19 nt, Homo sapiens
  misc_RNA (1)...(19): siRNA sense strand
caucucugcucccagcuuu

SEQ ID NO: 1461482 - RNA, 19 nt, Homo sapiens
  misc_RNA (1)...(19): siRNA sense strand
ucaacaugauccagacuga

SEQ ID NO: 1461483 - RNA, 19 nt, Homo sapiens
  misc_RNA (1)...(19): siRNA sense strand
gaauaucaggugcuguuug

SEQ ID NO: 1461484 - RNA, 19 nt, Homo sapiens
  misc_RNA (1)...(19): siRNA sense strand
uccaacaacuacauuaaug

SEQ ID NO: 1461485 - RNA, 19 nt, Homo sapiens
  misc_RNA (1)...(19): siRNA sense strand
aaagcugccugcaaggaaa

SEQ ID NO: 1461486 - RNA, 19 nt, Homo sapiens
  misc_RNA (1)...(19): siRNA sense strand
caucagacccggcagugaa

SEQ ID NO: 1461487 - RNA, 19 nt, Homo sapiens
  misc_RNA (1)...(19): siRNA sense strand
uggcugagguggacaagug

SEQ ID NO: 1461488 - RNA, 19 nt, Homo sapiens
  misc_RNA (1)...(19): siRNA sense strand
cuuaguggcucgagucuuc

SEQ ID NO: 1461489 - RNA, 19 nt, Homo sapiens
  misc_RNA (1)...(19): siRNA sense strand
gcacagcugaugaagacuu

SEQ ID NO: 1461490 - RNA, 19 nt, Homo sapiens
  misc_RNA (1)...(19): siRNA sense strand
ccgcacagguugcuauauc

SEQ ID NO: 1461491 - RNA, 19 nt, Homo sapiens
  misc_RNA (1)...(19): siRNA sense strand
gaggagcaguacaucuuca

SEQ ID NO: 1461492 - RNA, 19 nt, Homo sapiens
  misc_RNA (1)...(19): siRNA sense strand
gagcaguacaucuucauuc

SEQ ID NO: 1461493 - RNA, 19 nt, Homo sapiens
  misc_RNA (1)...(19): siRNA sense strand
ucgcggagcucaucgucaa

SEQ ID NO: 1461494 - RNA, 19 nt, Homo sapiens
  misc_RNA (1)...(19): siRNA sense strand
uggagaccauggaucagua

SEQ ID NO: 1461495 - RNA, 19 nt, Homo sapiens
  misc_RNA (1)...(19): siRNA sense strand
ccacggcuccuacuugaug

SEQ ID NO: 1461496 - RNA, 19 nt, Homo sapiens
  misc_RNA (1)...(19): siRNA sense strand
gggaaccacugggcuacaa

SEQ ID NO: 1461497 - RNA, 19 nt, Homo sapiens
  misc_RNA (1)...(19): siRNA sense strand
ccaccuaccucaucaucca

SEQ ID NO: 1461498 - RNA, 19 nt, Homo sapiens
  misc_RNA (1)...(19): siRNA sense strand
ggacaugaucuuccucaag

SEQ ID NO: 1461499 - RNA, 19 nt, Homo sapiens
  misc_RNA (1)...(19): siRNA sense strand
ggacuccaacaacuacauu

SEQ ID NO: 1461500 - RNA, 19 nt, Homo sapiens
  misc_RNA (1)...(19): siRNA sense strand
cauuaaugccaacuacaua

SEQ ID NO: 1461501 - RNA, 19 nt, Homo sapiens
  misc_RNA (1)...(19): siRNA sense strand
caaagaagaaagacaaggu

SEQ ID NO: 1461502 - RNA, 19 nt, Homo sapiens
  misc_RNA (1)...(19): siRNA sense strand
ccaaggccaccgucaacua

SEQ ID NO: 1461503 - RNA, 19 nt, Homo sapiens
  misc_RNA (1)...(19): siRNA sense strand
ggaaagcugccugcaagga

SEQ ID NO: 1461504 - RNA, 19 nt, Homo sapiens
  misc_RNA (1)...(19): siRNA sense strand
gggagacccggcugaauug

SEQ ID NO: 1461505 - RNA, 19 nt, Homo sapiens
  misc_RNA (1)...(19): siRNA sense strand
ugagauaaccacuaacauc

SEQ ID NO: 1461506 - RNA, 19 nt, Homo sapiens
  misc_RNA (1)...(19): siRNA sense strand
cgagaaugauacccacugu

SEQ ID NO: 1461507 - RNA, 19 nt, Homo sapiens
  misc_RNA (1)...(19): siRNA sense strand
ggcggcuggucuacgauua

SEQ ID NO: 1461508 - RNA, 19 nt, Homo sapiens
  misc_RNA (1)...(19): siRNA sense strand
gggcagugcuguguggaau

SEQ ID NO: 1461509 - RNA, 19 nt, Homo sapiens
  misc_RNA (1)...(19): siRNA sense strand
caggucaaaccacuucaua

SEQ ID NO: 1461510 - RNA, 19 nt, Homo sapiens
  misc_RNA (1)...(19): siRNA sense strand
cgacacagaguaugagauc

SEQ ID NO: 1461511 - RNA, 19 nt, Homo sapiens
  misc_RNA (1)...(19): siRNA sense strand
aggccuaucucaucuacuu

SEQ ID NO: 1461512 - RNA, 19 nt, Homo sapiens
  misc_RNA (1)...(19): siRNA sense strand
ccaaaacccuccggaacua

SEQ ID NO: 1461513 - RNA, 19 nt, Homo sapiens
  misc_RNA (1)...(19): siRNA sense strand
ccacgguccuggagaugau

SEQ ID NO: 1461514 - RNA, 19 nt, Homo sapiens
  misc_RNA (1)...(19): siRNA sense strand
gcuauaucguccuggaugu

SEQ ID NO: 1461515 - RNA, 19 nt, Homo sapiens
  misc_RNA (1)...(19): siRNA sense strand
ggaaggccuaucucaucua

SEQ ID NO: 1461516 - RNA, 19 nt, Homo sapiens
  misc_RNA (1)...(19): siRNA sense strand
caacaacuacauuaaugca

SEQ ID NO: 1461517 - RNA, 19 nt, Homo sapiens
  misc_RNA (1)...(19): siRNA sense strand
gcgagcccaugucaucuuc

SEQ ID NO: 1461518 - RNA, 19 nt, Homo sapiens
  misc_RNA (1)...(19): siRNA sense strand
ucaagauuaugcuggugaa

SEQ ID NO: 1461519 - RNA, 19 nt, Homo sapiens
  misc_RNA (1)...(19): siRNA sense strand
cuacauuaaugccaacuac

SEQ ID NO: 1461520 - RNA, 19 nt, Homo sapiens
  misc_RNA (1)...(19): siRNA sense strand
gcugggacgccacaaagaa

SEQ ID NO: 1461521 - RNA, 19 nt, Homo sapiens
  misc_RNA (1)...(19): siRNA sense strand
caggagaagacacacauga

SEQ ID NO: 1461522 - RNA, 19 nt, Homo sapiens
  misc_RNA (1)...(19): siRNA sense strand
ucauccagcucaacaccaa

SEQ ID NO: 1461523 - RNA, 19 nt, Homo sapiens
  misc_RNA (1)...(19): siRNA sense strand
aacaccaacuccaucauug

SEQ ID NO: 1461524 - RNA, 19 nt, Homo sapiens
  misc_RNA (1)...(19): siRNA sense strand
agaaugauacccacugugu

SEQ ID NO: 1461525 - RNA, 19 nt, Homo sapiens
  misc_RNA (1)...(19): siRNA sense strand
ccacaggucaaaccacuuc

SEQ ID NO: 1461526 - RNA, 19 nt, Homo sapiens
  misc_RNA (1)...(19): siRNA sense strand
gcacuuucuggcccaauga

SEQ ID NO: 1461527 - RNA, 19 nt, Homo sapiens
  misc_RNA (1)...(19): siRNA sense strand
ccagcgagcccaugucauc

SEQ ID NO: 1461528 - RNA, 19 nt, Homo sapiens
  misc_RNA (1)...(19): siRNA sense strand
gauccgcugccacaacuug

SEQ ID NO: 1461529 - RNA, 19 nt, Homo sapiens
  misc_RNA (1)...(19): siRNA sense strand
ggagcaguacaucuucauu

SEQ ID NO: 1461530 - RNA, 19 nt, Homo sapiens
  misc_RNA (1)...(19): siRNA sense strand
ugagauggucuaugacuuc

SEQ ID NO: 1461531 - RNA, 19 nt, Homo sapiens
  misc_RNA (1)...(19): siRNA sense strand
ucuccugggugccaucauu

SEQ ID NO: 1461532 - RNA, 19 nt, Homo sapiens
  misc_RNA (1)...(19): siRNA sense strand
ccugaggccaugcccuuua

SEQ ID NO: 1461533 - RNA, 19 nt, Homo sapiens
  misc_RNA (1)...(19): siRNA sense strand
ggagaugauccgcauugau

SEQ ID NO: 1461534 - RNA, 19 nt, Homo sapiens
  misc_RNA (1)...(19): siRNA sense strand
gagauggucuaugacuucu

SEQ ID NO: 1461535 - RNA, 19 nt, Homo sapiens
  misc_RNA (1)...(19): siRNA sense strand
ucaacuaccgccaggagaa

SEQ ID NO: 1461536 - RNA, 19 nt, Homo sapiens
  misc_RNA (1)...(19): siRNA sense strand
gggcaaggaggucacuuuc

SEQ ID NO: 1461537 - RNA, 19 nt, Homo sapiens
  misc_RNA (1)...(19): siRNA sense strand
ccgcauugauccucagagu

SEQ ID NO: 1461538 - RNA, 19 nt, Homo sapiens
  misc_RNA (1)...(19): siRNA sense strand
ggucaaaccacuucauagc

SEQ ID NO: 1461539 - RNA, 19 nt, Homo sapiens
  misc_RNA (1)...(19): siRNA sense strand
gaagacggccgaggguuac

SEQ ID NO: 1461540 - RNA, 19 nt, Homo sapiens
  misc_RNA (1)...(19): siRNA sense strand
ccagagaucggaggagaug

SEQ ID NO: 1461541 - RNA, 19 nt, Homo sapiens
  misc_RNA (1)...(19): siRNA sense strand
ggagcccaauggucucauc

SEQ ID NO: 1461542 - RNA, 19 nt, Homo sapiens
  misc_RNA (1)...(19): siRNA sense strand
agcaguacaucuucauuca

SEQ ID NO: 1461543 - RNA, 19 nt, Homo sapiens
  misc_RNA (1)...(19): siRNA sense strand
gcaccuccaucgucaugcu

SEQ ID NO: 1461544 - RNA, 19 nt, Homo sapiens
  misc_RNA (1)...(19): siRNA sense strand
ggcgcuuccuggccacuuu

SEQ ID NO: 1461545 - RNA, 19 nt, Homo sapiens
  misc_RNA (1)...(19): siRNA sense strand
ucaaggccaccuacaagga

SEQ ID NO: 1461546 - RNA, 19 nt, Homo sapiens
  misc_RNA (1)...(19): siRNA sense strand
guucaaggccaccuacaag

SEQ ID NO: 1461547 - RNA, 19 nt, Homo sapiens
  misc_RNA (1)...(19): siRNA sense strand
ccaccaucccugucaguga

SEQ ID NO: 1461548 - RNA, 19 nt, Homo sapiens
  misc_RNA (1)...(19): siRNA sense strand
ggccgaagccugagauggu

SEQ ID NO: 1461549 - RNA, 19 nt, Homo sapiens
  misc_RNA (1)...(19): siRNA sense strand
gcauccgcauugccaggaa

SEQ ID NO: 1461550 - RNA, 19 nt, Homo sapiens
  misc_RNA (1)...(19): siRNA sense strand
ccagacggaugaggaugug

SEQ ID NO: 1461551 - RNA, 19 nt, Homo sapiens
  misc_RNA (1)...(19): siRNA sense strand
ucacuuuccagacggauga

SEQ ID NO: 1461552 - RNA, 19 nt, Homo sapiens
  misc_RNA (1)...(19): siRNA sense strand
uuaaugcagcccugacuga

SEQ ID NO: 1461553 - RNA, 19 nt, Homo sapiens
  misc_RNA (1)...(19): siRNA sense strand
ucacugagauaaccacuaa

SEQ ID NO: 1461554 - RNA, 19 nt, Homo sapiens
  misc_RNA (1)...(19): siRNA sense strand
gcauugauccucagaguaa

SEQ ID NO: 1461555 - RNA, 19 nt, Homo sapiens
  misc_RNA (1)...(19): siRNA sense strand
gcaaugagaccuaccaugu

SEQ ID NO: 1461556 - RNA, 19 nt, Homo sapiens
  misc_RNA (1)...(19): siRNA sense strand
gcaaggaggucacuuucca

SEQ ID NO: 1461557 - RNA, 19 nt, Homo sapiens
  misc_RNA (1)...(19): siRNA sense strand
gacaugaucuuccucaagu

SEQ ID NO: 1461558 - RNA, 19 nt, Homo sapiens
  misc_RNA (1)...(19): siRNA sense strand
gagagugugugaagacaga

SEQ ID NO: 1461559 - RNA, 19 nt, Homo sapiens
  misc_RNA (1)...(19): siRNA sense strand
gagaagacacacaugauga

SEQ ID NO: 1461560 - RNA, 19 nt, Homo sapiens
  misc_RNA (1)...(19): siRNA sense strand
gcagcaauauggccucaug

SEQ ID NO: 1461561 - RNA, 19 nt, Homo sapiens
  misc_RNA (1)...(19): siRNA sense strand
gcagugcuguguggaauau

SEQ ID NO: 1461562 - RNA, 19 nt, Homo sapiens
  misc_RNA (1)...(19): siRNA sense strand
gggcacagcugaugaagac

SEQ ID NO: 1461563 - RNA, 19 nt, Homo sapiens
  misc_RNA (1)...(19): siRNA sense strand
gaaagcugccugcaaggaa

SEQ ID NO: 1461564 - RNA, 19 nt, Homo sapiens
  misc_RNA (1)...(19): siRNA sense strand
aauaucaggugcuguuuga

SEQ ID NO: 1461565 - RNA, 19 nt, Homo sapiens
  misc_RNA (1)...(19): siRNA sense strand
ucauggagguggaguuuau

SEQ ID NO: 1461566 - RNA, 19 nt, Homo sapiens
  misc_RNA (1)...(19): siRNA sense strand
ccacaaagaagaaagacaa

SEQ ID NO: 1461567 - RNA, 19 nt, Homo sapiens
  misc_RNA (1)...(19): siRNA sense strand
gauaaccacuaacaucucu

SEQ ID NO: 1461568 - RNA, 19 nt, Homo sapiens
  misc_RNA (1)...(19): siRNA sense strand
gaacuacaaacccaacaug

SEQ ID NO: 1461569 - RNA, 19 nt, Homo sapiens
  misc_RNA (1)...(19): siRNA sense strand
ggagaagacacacaugaug

SEQ ID NO: 1461570 - RNA, 19 nt, Homo sapiens
  misc_RNA (1)...(19): siRNA sense strand
caguacaucuucauucaug

SEQ ID NO: 1461571 - RNA, 19 nt, Homo sapiens
  misc_RNA (1)...(19): siRNA sense strand
ggucaacacuucccagcau

SEQ ID NO: 1461572 - RNA, 19 nt, Homo sapiens
  misc_RNA (1)...(19): siRNA sense strand
caacaccaacuccaucauu

SEQ ID NO: 1461573 - RNA, 19 nt, Homo sapiens
  misc_RNA (1)...(19): siRNA sense strand
gaaggccuaucucaucuac

SEQ ID NO: 1461574 - RNA, 19 nt, Homo sapiens
  misc_RNA (1)...(19): siRNA sense strand
ugaagacggccgaggguua

SEQ ID NO: 1461575 - RNA, 19 nt, Homo sapiens
  misc_RNA (1)...(19): siRNA sense strand
cacagcugaugaagacuua

SEQ ID NO: 1461576 - RNA, 19 nt, Homo sapiens
  misc_RNA (1)...(19): siRNA sense strand
ucuccaagcuccgcaauga

SEQ ID NO: 1461577 - RNA, 19 nt, Homo sapiens
  misc_RNA (1)...(19): siRNA sense strand
agccugagauggucuauga

SEQ ID NO: 1461578 - RNA, 19 nt, Homo sapiens
  misc_RNA (1)...(19): siRNA sense strand
gccaaugccugccuaugau

SEQ ID NO: 1461579 - RNA, 19 nt, Homo sapiens
  misc_RNA (1)...(19): siRNA sense strand
gaagaaagacaaggucaag

SEQ ID NO: 1461580 - RNA, 19 nt, Homo sapiens
  misc_RNA (1)...(19): siRNA sense strand
gcucccagcuuugauuaug

SEQ ID NO: 1461581 - RNA, 19 nt, Homo sapiens
  misc_RNA (1)...(19): siRNA sense strand
caucucugcucccagcuuu

SEQ ID NO: 1461582 - RNA, 19 nt, Homo sapiens
  misc_RNA (1)...(19): siRNA sense strand
ucaacaugauccagacuga

SEQ ID NO: 1461583 - RNA, 19 nt, Homo sapiens
  misc_RNA (1)...(19): siRNA sense strand
gaauaucaggugcuguuug

SEQ ID NO: 1461584 - RNA, 19 nt, Homo sapiens
  misc_RNA (1)...(19): siRNA sense strand
uccaacaacuacauuaaug

SEQ ID NO: 1461585 - RNA, 19 nt, Homo sapiens
  misc_RNA (1)...(19): siRNA sense strand
aaagcugccugcaaggaaa

SEQ ID NO: 1461586 - RNA, 19 nt, Homo sapiens
  misc_RNA (1)...(19): siRNA sense strand
caucagacccggcagugaa

SEQ ID NO: 1461587 - RNA, 19 nt, Homo sapiens
  misc_RNA (1)...(19): siRNA sense strand
uggcugagguggacaagug

SEQ ID NO: 1461588 - RNA, 19 nt, Homo sapiens
  misc_RNA (1)...(19): siRNA sense strand
cuuaguggcucgagucuuc

SEQ ID NO: 1461589 - RNA, 19 nt, Homo sapiens
  misc_RNA (1)...(19): siRNA sense strand
gcacagcugaugaagacuu

SEQ ID NO: 1461590 - RNA, 19 nt, Homo sapiens
  misc_RNA (1)...(19): siRNA sense strand
ccgcacagguugcuauauc

SEQ ID NO: 1461591 - RNA, 19 nt, Homo sapiens
  misc_RNA (1)...(19): siRNA sense strand
gaggagcaguacaucuuca

SEQ ID NO: 1461592 - RNA, 19 nt, Homo sapiens
  misc_RNA (1)...(19): siRNA sense strand
gagcaguacaucuucauuc

SEQ ID NO: 1461593 - RNA, 19 nt, Homo sapiens
  misc_RNA (1)...(19): siRNA sense strand
ucgcggagcucaucgucaa

SEQ ID NO: 1461594 - RNA, 19 nt, Homo sapiens
  misc_RNA (1)...(19): siRNA sense strand
uggagaccauggaucagua

SEQ ID NO: 1461595 - RNA, 19 nt, Homo sapiens
  misc_RNA (1)...(19): siRNA sense strand
ccacggcuccuacuugaug

SEQ ID NO: 1461596 - RNA, 19 nt, Homo sapiens
  misc_RNA (1)...(19): siRNA sense strand
gggaaccacugggcuacaa

SEQ ID NO: 1461597 - RNA, 19 nt, Homo sapiens
  misc_RNA (1)...(19): siRNA sense strand
ccaccuaccucaucaucca

SEQ ID NO: 1461598 - RNA, 19 nt, Homo sapiens
  misc_RNA (1)...(19): siRNA sense strand
ggacaugaucuuccucaag

SEQ ID NO: 1461599 - RNA, 19 nt, Homo sapiens
  misc_RNA (1)...(19): siRNA sense strand
ggacuccaacaacuacauu

SEQ ID NO: 1461600 - RNA, 19 nt, Homo sapiens
  misc_RNA (1)...(19): siRNA sense strand
cauuaaugccaacuacaua

SEQ ID NO: 1461601 - RNA, 19 nt, Homo sapiens
  misc_RNA (1)...(19): siRNA sense strand
caaagaagaaagacaaggu

SEQ ID NO: 1461602 - RNA, 19 nt, Homo sapiens
  misc_RNA (1)...(19): siRNA sense strand
ccaaggccaccgucaacua

SEQ ID NO: 1461603 - RNA, 19 nt, Homo sapiens
  misc_RNA (1)...(19): siRNA sense strand
ggaaagcugccugcaagga

SEQ ID NO: 1461604 - RNA, 19 nt, Homo sapiens
  misc_RNA (1)...(19): siRNA sense strand
gggagacccggcugaauug

SEQ ID NO: 1461605 - RNA, 19 nt, Homo sapiens
  misc_RNA (1)...(19): siRNA sense strand
ugagauaaccacuaacauc

SEQ ID NO: 1461606 - RNA, 19 nt, Homo sapiens
  misc_RNA (1)...(19): siRNA sense strand
cgagaaugauacccacugu

SEQ ID NO: 1461607 - RNA, 19 nt, Homo sapiens
  misc_RNA (1)...(19): siRNA sense strand
ggcggcuggucuacgauua

SEQ ID NO: 1461608 - RNA, 19 nt, Homo sapiens
  misc_RNA (1)...(19): siRNA sense strand
gggcagugcuguguggaau

SEQ ID NO: 1461609 - RNA, 19 nt, Homo sapiens
  misc_RNA (1)...(19): siRNA sense strand
caggucaaaccacuucaua

SEQ ID NO: 1461610 - RNA, 19 nt, Homo sapiens
  misc_RNA (1)...(19): siRNA sense strand
cgacacagaguaugagauc

SEQ ID NO: 1461611 - RNA, 19 nt, Homo sapiens
  misc_RNA (1)...(19): siRNA sense strand
aggccuaucucaucuacuu

SEQ ID NO: 1461612 - RNA, 19 nt, Homo sapiens
  misc_RNA (1)...(19): siRNA sense strand
ccaaaacccuccggaacua

SEQ ID NO: 1461613 - RNA, 19 nt, Homo sapiens
  misc_RNA (1)...(19): siRNA sense strand
ccacgguccuggagaugau

SEQ ID NO: 1461614 - RNA, 19 nt, Homo sapiens
  misc_RNA (1)...(19): siRNA sense strand
gcuauaucguccuggaugu

SEQ ID NO: 1461615 - RNA, 19 nt, Homo sapiens
  misc_RNA (1)...(19): siRNA sense strand
ggaaggccuaucucaucua

SEQ ID NO: 1461616 - RNA, 19 nt, Homo sapiens
  misc_RNA (1)...(19): siRNA sense strand
caacaacuacauuaaugca

SEQ ID NO: 1461617 - RNA, 19 nt, Homo sapiens
  misc_RNA (1)...(19): siRNA sense strand
gcgagcccaugucaucuuc

SEQ ID NO: 1461618 - RNA, 19 nt, Homo sapiens
  misc_RNA (1)...(19): siRNA sense strand
ucaagauuaugcuggugaa

SEQ ID NO: 1461619 - RNA, 19 nt, Homo sapiens
  misc_RNA (1)...(19): siRNA sense strand
cuacauuaaugccaacuac

SEQ ID NO: 1461620 - RNA, 19 nt, Homo sapiens
  misc_RNA (1)...(19): siRNA sense strand
gcugggacgccacaaagaa

SEQ ID NO: 1461621 - RNA, 19 nt, Homo sapiens
  misc_RNA (1)...(19): siRNA sense strand
caggagaagacacacauga

SEQ ID NO: 1461622 - RNA, 19 nt, Homo sapiens
  misc_RNA (1)...(19): siRNA sense strand
ucauccagcucaacaccaa

SEQ ID NO: 1461623 - RNA, 19 nt, Homo sapiens
  misc_RNA (1)...(19): siRNA sense strand
aacaccaacuccaucauug

SEQ ID NO: 1461624 - RNA, 19 nt, Homo sapiens
  misc_RNA (1)...(19): siRNA sense strand
agaaugauacccacugugu

SEQ ID NO: 1461625 - RNA, 19 nt, Homo sapiens
  misc_RNA (1)...(19): siRNA sense strand
ccacaggucaaaccacuuc

SEQ ID NO: 1461626 - RNA, 19 nt, Homo sapiens
  misc_RNA (1)...(19): siRNA sense strand
gcacuuucuggcccaauga

SEQ ID NO: 1461627 - RNA, 19 nt, Homo sapiens
  misc_RNA (1)...(19): siRNA sense strand
ccagcgagcccaugucauc

SEQ ID NO: 1461628 - RNA, 19 nt, Homo sapiens
  misc_RNA (1)...(19): siRNA sense strand
gauccgcugccacaacuug

SEQ ID NO: 1461629 - RNA, 19 nt, Homo sapiens
  misc_RNA (1)...(19): siRNA sense strand
ggagcaguacaucuucauu

SEQ ID NO: 1461630 - RNA, 19 nt, Homo sapiens
  misc_RNA (1)...(19): siRNA sense strand
ugagauggucuaugacuuc

SEQ ID NO: 1461631 - RNA, 19 nt, Homo sapiens
  misc_RNA (1)...(19): siRNA sense strand
ucuccugggugccaucauu

SEQ ID NO: 1461632 - RNA, 19 nt, Homo sapiens
  misc_RNA (1)...(19): siRNA sense strand
ccugaggccaugcccuuua

SEQ ID NO: 1461633 - RNA, 19 nt, Homo sapiens
  misc_RNA (1)...(19): siRNA sense strand
ggagaugauccgcauugau

SEQ ID NO: 1461634 - RNA, 19 nt, Homo sapiens
  misc_RNA (1)...(19): siRNA sense strand
gagauggucuaugacuucu

SEQ ID NO: 1461635 - RNA, 19 nt, Homo sapiens
  misc_RNA (1)...(19): siRNA sense strand
ucaacuaccgccaggagaa

SEQ ID NO: 1461636 - RNA, 19 nt, Homo sapiens
  misc_RNA (1)...(19): siRNA sense strand
gggcaaggaggucacuuuc

SEQ ID NO: 1461637 - RNA, 19 nt, Homo sapiens
  misc_RNA (1)...(19): siRNA sense strand
ccgcauugauccucagagu

SEQ ID NO: 1461638 - RNA, 19 nt, Homo sapiens
  misc_RNA (1)...(19): siRNA sense strand
ggucaaaccacuucauagc

SEQ ID NO: 1461639 - RNA, 19 nt, Homo sapiens
  misc_RNA (1)...(19): siRNA sense strand
gaagacggccgaggguuac

SEQ ID NO: 1461640 - RNA, 19 nt, Homo sapiens
  misc_RNA (1)...(19): siRNA sense strand
ccagagaucggaggagaug

SEQ ID NO: 1461641 - RNA, 19 nt, Homo sapiens
  misc_RNA (1)...(19): siRNA sense strand
ggagcccaauggucucauc

SEQ ID NO: 1461642 - RNA, 19 nt, Homo sapiens
  misc_RNA (1)...(19): siRNA sense strand
agcaguacaucuucauuca

SEQ ID NO: 1461643 - RNA, 19 nt, Homo sapiens
  misc_RNA (1)...(19): siRNA sense strand
gcaccuccaucgucaugcu

SEQ ID NO: 1461644 - RNA, 19 nt, Homo sapiens
  misc_RNA (1)...(19): siRNA sense strand
ggcgcuuccuggccacuuu

SEQ ID NO: 1461645 - RNA, 19 nt, Homo sapiens
  misc_RNA (1)...(19): siRNA sense strand
ucaaggccaccuacaagga

SEQ ID NO: 1461646 - RNA, 19 nt, Homo sapiens
  misc_RNA (1)...(19): siRNA sense strand
guucaaggccaccuacaag

SEQ ID NO: 1461647 - RNA, 19 nt, Homo sapiens
  misc_RNA (1)...(19): siRNA sense strand
ccaccaucccugucaguga

SEQ ID NO: 1461648 - RNA, 19 nt, Homo sapiens
  misc_RNA (1)...(19): siRNA sense strand
ggccgaagccugagauggu

SEQ ID NO: 1461649 - RNA, 19 nt, Homo sapiens
  misc_RNA (1)...(19): siRNA sense strand
gcauccgcauugccaggaa

SEQ ID NO: 1461650 - RNA, 19 nt, Homo sapiens
  misc_RNA (1)...(19): siRNA sense strand
ccagacggaugaggaugug

SEQ ID NO: 1461651 - RNA, 19 nt, Homo sapiens
  misc_RNA (1)...(19): siRNA sense strand
ucacuuuccagacggauga

SEQ ID NO: 1461652 - RNA, 19 nt, Homo sapiens
  misc_RNA (1)...(19): siRNA sense strand
uuaaugcagcccugacuga

SEQ ID NO: 1461653 - RNA, 19 nt, Homo sapiens
  misc_RNA (1)...(19): siRNA sense strand
ucacugagauaaccacuaa

SEQ ID NO: 1461654 - RNA, 19 nt, Homo sapiens
  misc_RNA (1)...(19): siRNA sense strand
gcauugauccucagaguaa

SEQ ID NO: 1461655 - RNA, 19 nt, Homo sapiens
  misc_RNA (1)...(19): siRNA sense strand
gcaaugagaccuaccaugu

SEQ ID NO: 1461656 - RNA, 19 nt, Homo sapiens
  misc_RNA (1)...(19): siRNA sense strand
gcaaggaggucacuuucca

SEQ ID NO: 1461657 - RNA, 19 nt, Homo sapiens
  misc_RNA (1)...(19): siRNA sense strand
gacaugaucuuccucaagu

SEQ ID NO: 1461658 - RNA, 19 nt, Homo sapiens
  misc_RNA (1)...(19): siRNA sense strand
gagagugugugaagacaga

SEQ ID NO: 1461659 - RNA, 19 nt, Homo sapiens
  misc_RNA (1)...(19): siRNA sense strand
gagaagacacacaugauga

SEQ ID NO: 1461660 - RNA, 19 nt, Homo sapiens
  misc_RNA (1)...(19): siRNA sense strand
gcagcaauauggccucaug

SEQ ID NO: 1461661 - RNA, 19 nt, Homo sapiens
  misc_RNA (1)...(19): siRNA sense strand
gcagugcuguguggaauau

SEQ ID NO: 1461662 - RNA, 19 nt, Homo sapiens
  misc_RNA (1)...(19): siRNA sense strand
gggcacagcugaugaagac

SEQ ID NO: 1461663 - RNA, 19 nt, Homo sapiens
  misc_RNA (1)...(19): siRNA sense strand
gaaagcugccugcaaggaa

SEQ ID NO: 1461664 - RNA, 19 nt, Homo sapiens
  misc_RNA (1)...(19): siRNA sense strand
aauaucaggugcuguuuga

SEQ ID NO: 1461665 - RNA, 19 nt, Homo sapiens
  misc_RNA (1)...(19): siRNA sense strand
ucauggagguggaguuuau

SEQ ID NO: 1461666 - RNA, 19 nt, Homo sapiens
  misc_RNA (1)...(19): siRNA sense strand
ccacaaagaagaaagacaa

SEQ ID NO: 1461667 - RNA, 19 nt, Homo sapiens
  misc_RNA (1)...(19): siRNA sense strand
gauaaccacuaacaucucu

SEQ ID NO: 1461668 - RNA, 19 nt, Homo sapiens
  misc_RNA (1)...(19): siRNA sense strand
gaacuacaaacccaacaug

SEQ ID NO: 1461669 - RNA, 19 nt, Homo sapiens
  misc_RNA (1)...(19): siRNA sense strand
ggagaagacacacaugaug

SEQ ID NO: 1461670 - RNA, 19 nt, Homo sapiens
  misc_RNA (1)...(19): siRNA sense strand
caguacaucuucauucaug

SEQ ID NO: 1461671 - RNA, 19 nt, Homo sapiens
  misc_RNA (1)...(19): siRNA sense strand
ggucaacacuucccagcau

SEQ ID NO: 1461672 - RNA, 19 nt, Homo sapiens
  misc_RNA (1)...(19): siRNA sense strand
caacaccaacuccaucauu

SEQ ID NO: 1461673 - RNA, 19 nt, Homo sapiens
  misc_RNA (1)...(19): siRNA sense strand
gaaggccuaucucaucuac

SEQ ID NO: 1461674 - RNA, 19 nt, Homo sapiens
  misc_RNA (1)...(19): siRNA sense strand
ugaagacggccgaggguua

SEQ ID NO: 1461675 - RNA, 19 nt, Homo sapiens
  misc_RNA (1)...(19): siRNA sense strand
cacagcugaugaagacuua

SEQ ID NO: 1461676 - RNA, 19 nt, Homo sapiens
  misc_RNA (1)...(19): siRNA sense strand
ucuccaagcuccgcaauga

SEQ ID NO: 1461677 - RNA, 19 nt, Homo sapiens
  misc_RNA (1)...(19): siRNA sense strand
agccugagauggucuauga

SEQ ID NO: 1461678 - RNA, 19 nt, Homo sapiens
  misc_RNA (1)...(19): siRNA sense strand
gccaaugccugccuaugau

SEQ ID NO: 1461679 - RNA, 19 nt, Homo sapiens
  misc_RNA (1)...(19): siRNA sense strand
gaagaaagacaaggucaag

SEQ ID NO: 1461680 - RNA, 19 nt, Homo sapiens
  misc_RNA (1)...(19): siRNA sense strand
gcucccagcuuugauuaug

SEQ ID NO: 1461681 - RNA, 19 nt, Homo sapiens
  misc_RNA (1)...(19): siRNA sense strand
caucucugcucccagcuuu

SEQ ID NO: 1461682 - RNA, 19 nt, Homo sapiens
  misc_RNA (1)...(19): siRNA sense strand
ucaacaugauccagacuga

SEQ ID NO: 1461683 - RNA, 19 nt, Homo sapiens
  misc_RNA (1)...(19): siRNA sense strand
gaauaucaggugcuguuug

SEQ ID NO: 1461684 - RNA, 19 nt, Homo sapiens
  misc_RNA (1)...(19): siRNA sense strand
uccaacaacuacauuaaug

SEQ ID NO: 1461685 - RNA, 19 nt, Homo sapiens
  misc_RNA (1)...(19): siRNA sense strand
aaagcugccugcaaggaaa

SEQ ID NO: 1461686 - RNA, 19 nt, Homo sapiens
  misc_RNA (1)...(19): siRNA sense strand
caucagacccggcagugaa

SEQ ID NO: 1461687 - RNA, 19 nt, Homo sapiens
  misc_RNA (1)...(19): siRNA sense strand
uggcugagguggacaagug

SEQ ID NO: 1461688 - RNA, 19 nt, Homo sapiens
  misc_RNA (1)...(19): siRNA sense strand
cuuaguggcucgagucuuc

SEQ ID NO: 1461689 - RNA, 19 nt, Homo sapiens
  misc_RNA (1)...(19): siRNA sense strand
gcacagcugaugaagacuu

SEQ ID NO: 1461690 - RNA, 19 nt, Homo sapiens
  misc_RNA (1)...(19): siRNA sense strand
ccgcacagguugcuauauc

SEQ ID NO: 1461691 - RNA, 19 nt, Homo sapiens
  misc_RNA (1)...(19): siRNA sense strand
gaggagcaguacaucuuca

SEQ ID NO: 1461692 - RNA, 19 nt, Homo sapiens
  misc_RNA (1)...(19): siRNA sense strand
gagcaguacaucuucauuc

SEQ ID NO: 1461693 - RNA, 19 nt, Homo sapiens
  misc_RNA (1)...(19): siRNA sense strand
ucgcggagcucaucgucaa

SEQ ID NO: 1461694 - RNA, 19 nt, Homo sapiens
  misc_RNA (1)...(19): siRNA sense strand
uggagaccauggaucagua

SEQ ID NO: 1461695 - RNA, 19 nt, Homo sapiens
  misc_RNA (1)...(19): siRNA sense strand
ccacggcuccuacuugaug

SEQ ID NO: 1461696 - RNA, 19 nt, Homo sapiens
  misc_RNA (1)...(19): siRNA sense strand
gggaaccacugggcuacaa

SEQ ID NO: 1461697 - RNA, 19 nt, Homo sapiens
  misc_RNA (1)...(19): siRNA sense strand
ccaccuaccucaucaucca

SEQ ID NO: 1461698 - RNA, 19 nt, Homo sapiens
  misc_RNA (1)...(19): siRNA sense strand
ggacaugaucuuccucaag

SEQ ID NO: 1461699 - RNA, 19 nt, Homo sapiens
  misc_RNA (1)...(19): siRNA sense strand
ggacuccaacaacuacauu

SEQ ID NO: 1461700 - RNA, 19 nt, Homo sapiens
  misc_RNA (1)...(19): siRNA sense strand
cauuaaugccaacuacaua

SEQ ID NO: 1461701 - RNA, 19 nt, Homo sapiens
  misc_RNA (1)...(19): siRNA sense strand
caaagaagaaagacaaggu

SEQ ID NO: 1461702 - RNA, 19 nt, Homo sapiens
  misc_RNA (1)...(19): siRNA sense strand
ccaaggccaccgucaacua

SEQ ID NO: 1461703 - RNA, 19 nt, Homo sapiens
  misc_RNA (1)...(19): siRNA sense strand
ggaaagcugccugcaagga

SEQ ID NO: 1461704 - RNA, 19 nt, Homo sapiens
  misc_RNA (1)...(19): siRNA sense strand
gggagacccggcugaauug

SEQ ID NO: 1461705 - RNA, 19 nt, Homo sapiens
  misc_RNA (1)...(19): siRNA sense strand
ugagauaaccacuaacauc

SEQ ID NO: 1461706 - RNA, 19 nt, Homo sapiens
  misc_RNA (1)...(19): siRNA sense strand
cgagaaugauacccacugu

SEQ ID NO: 1461707 - RNA, 19 nt, Homo sapiens
  misc_RNA (1)...(19): siRNA sense strand
ggcggcuggucuacgauua

SEQ ID NO: 1461708 - RNA, 19 nt, Homo sapiens
  misc_RNA (1)...(19): siRNA sense strand
gggcagugcuguguggaau

SEQ ID NO: 1461709 - RNA, 19 nt, Homo sapiens
  misc_RNA (1)...(19): siRNA sense strand
caggucaaaccacuucaua

SEQ ID NO: 1461710 - RNA, 19 nt, Homo sapiens
  misc_RNA (1)...(19): siRNA sense strand
cgacacagaguaugagauc

SEQ ID NO: 1461711 - RNA, 19 nt, Homo sapiens
  misc_RNA (1)...(19): siRNA sense strand
aggccuaucucaucuacuu

SEQ ID NO: 1461712 - RNA, 19 nt, Homo sapiens
  misc_RNA (1)...(19): siRNA sense strand
ccaaaacccuccggaacua

SEQ ID NO: 1461713 - RNA, 19 nt, Homo sapiens
  misc_RNA (1)...(19): siRNA sense strand
ccacgguccuggagaugau

SEQ ID NO: 1461714 - RNA, 19 nt, Homo sapiens
  misc_RNA (1)...(19): siRNA sense strand
gcuauaucguccuggaugu

SEQ ID NO: 1461715 - RNA, 19 nt, Homo sapiens
  misc_RNA (1)...(19): siRNA sense strand
ggaaggccuaucucaucua

SEQ ID NO: 1461716 - RNA, 19 nt, Homo sapiens
  misc_RNA (1)...(19): siRNA sense strand
caacaacuacauuaaugca

SEQ ID NO: 1461717 - RNA, 19 nt, Homo sapiens
  misc_RNA (1)...(19): siRNA sense strand
gcgagcccaugucaucuuc

SEQ ID NO: 1461718 - RNA, 19 nt, Homo sapiens
  misc_RNA (1)...(19): siRNA sense strand
ucaagauuaugcuggugaa

SEQ ID NO: 1461719 - RNA, 19 nt, Homo sapiens
  misc_RNA (1)...(19): siRNA sense strand
cuacauuaaugccaacuac

SEQ ID NO: 1461720 - RNA, 19 nt, Homo sapiens
  misc_RNA (1)...(19): siRNA sense strand
gcugggacgccacaaagaa

SEQ ID NO: 1461721 - RNA, 19 nt, Homo sapiens
  misc_RNA (1)...(19): siRNA sense strand
caggagaagacacacauga

SEQ ID NO: 1461722 - RNA, 19 nt, Homo sapiens
  misc_RNA (1)...(19): siRNA sense strand
ucauccagcucaacaccaa

SEQ ID NO: 1461723 - RNA, 19 nt, Homo sapiens
  misc_RNA (1)...(19): siRNA sense strand
aacaccaacuccaucauug

SEQ ID NO: 1461724 - RNA, 19 nt, Homo sapiens
  misc_RNA (1)...(19): siRNA sense strand
agaaugauacccacugugu

SEQ ID NO: 1461725 - RNA, 19 nt, Homo sapiens
  misc_RNA (1)...(19): siRNA sense strand
ccacaggucaaaccacuuc

SEQ ID NO: 1461726 - RNA, 19 nt, Homo sapiens
  misc_RNA (1)...(19): siRNA sense strand
gcacuuucuggcccaauga

SEQ ID NO: 1461727 - RNA, 19 nt, Homo sapiens
  misc_RNA (1)...(19): siRNA sense strand
ccagcgagcccaugucauc

SEQ ID NO: 1461728 - RNA, 19 nt, Homo sapiens
  misc_RNA (1)...(19): siRNA sense strand
gauccgcugccacaacuug

SEQ ID NO: 1461729 - RNA, 19 nt, Homo sapiens
  misc_RNA (1)...(19): siRNA sense strand
ggagcaguacaucuucauu

SEQ ID NO: 1461730 - RNA, 19 nt, Homo sapiens
  misc_RNA (1)...(19): siRNA sense strand
ugagauggucuaugacuuc

SEQ ID NO: 1461731 - RNA, 19 nt, Homo sapiens
  misc_RNA (1)...(19): siRNA sense strand
ucuccugggugccaucauu

SEQ ID NO: 1461732 - RNA, 19 nt, Homo sapiens
  misc_RNA (1)...(19): siRNA sense strand
ccugaggccaugcccuuua

SEQ ID NO: 1461733 - RNA, 19 nt, Homo sapiens
  misc_RNA (1)...(19): siRNA sense strand
ggagaugauccgcauugau

SEQ ID NO: 1461734 - RNA, 19 nt, Homo sapiens
  misc_RNA (1)...(19): siRNA sense strand
gagauggucuaugacuucu

SEQ ID NO: 1461735 - RNA, 19 nt, Homo sapiens
  misc_RNA (1)...(19): siRNA sense strand
ucaacuaccgccaggagaa

SEQ ID NO: 1461736 - RNA, 19 nt, Homo sapiens
  misc_RNA (1)...(19): siRNA sense strand
gggcaaggaggucacuuuc

SEQ ID NO: 1461737 - RNA, 19 nt, Homo sapiens
  misc_RNA (1)...(19): siRNA sense strand
ccgcauugauccucagagu

SEQ ID NO: 1461738 - RNA, 19 nt, Homo sapiens
  misc_RNA (1)...(19): siRNA sense strand
ggucaaaccacuucauagc

SEQ ID NO: 1461739 - RNA, 19 nt, Homo sapiens
  misc_RNA (1)...(19): siRNA sense strand
gaagacggccgaggguuac

SEQ ID NO: 1461740 - RNA, 19 nt, Homo sapiens
  misc_RNA (1)...(19): siRNA sense strand
ccagagaucggaggagaug

SEQ ID NO: 1461741 - RNA, 19 nt, Homo sapiens
  misc_RNA (1)...(19): siRNA sense strand
ggagcccaauggucucauc

SEQ ID NO: 1461742 - RNA, 19 nt, Homo sapiens
  misc_RNA (1)...(19): siRNA sense strand
agcaguacaucuucauuca

SEQ ID NO: 1461743 - RNA, 19 nt, Homo sapiens
  misc_RNA (1)...(19): siRNA sense strand
gcaccuccaucgucaugcu

SEQ ID NO: 1461744 - RNA, 19 nt, Homo sapiens
  misc_RNA (1)...(19): siRNA sense strand
ggcgcuuccuggccacuuu

SEQ ID NO: 1461745 - RNA, 19 nt, Homo sapiens
  misc_RNA (1)...(19): siRNA sense strand
ucaaggccaccuacaagga

SEQ ID NO: 1461746 - RNA, 19 nt, Homo sapiens
  misc_RNA (1)...(19): siRNA sense strand
guucaaggccaccuacaag

SEQ ID NO: 1461747 - RNA, 19 nt, Homo sapiens
  misc_RNA (1)...(19): siRNA sense strand
ccaccaucccugucaguga

SEQ ID NO: 1461748 - RNA, 19 nt, Homo sapiens
  misc_RNA (1)...(19): siRNA sense strand
ggccgaagccugagauggu

SEQ ID NO: 1461749 - RNA, 19 nt, Homo sapiens
  misc_RNA (1)...(19): siRNA sense strand
gcauccgcauugccaggaa

SEQ ID NO: 1461750 - RNA, 19 nt, Homo sapiens
  misc_RNA (1)...(19): siRNA sense strand
ccagacggaugaggaugug

SEQ ID NO: 1461751 - RNA, 19 nt, Homo sapiens
  misc_RNA (1)...(19): siRNA sense strand
ucacuuuccagacggauga

SEQ ID NO: 1461752 - RNA, 19 nt, Homo sapiens
  misc_RNA (1)...(19): siRNA sense strand
uuaaugcagcccugacuga

SEQ ID NO: 1461753 - RNA, 19 nt, Homo sapiens
  misc_RNA (1)...(19): siRNA sense strand
ucacugagauaaccacuaa

SEQ ID NO: 1461754 - RNA, 19 nt, Homo sapiens
  misc_RNA (1)...(19): siRNA sense strand
gcauugauccucagaguaa

SEQ ID NO: 1461755 - RNA, 19 nt, Homo sapiens
  misc_RNA (1)...(19): siRNA sense strand
gcaaugagaccuaccaugu

SEQ ID NO: 1461756 - RNA, 19 nt, Homo sapiens
  misc_RNA (1)...(19): siRNA sense strand
gcaaggaggucacuuucca

SEQ ID NO: 1461757 - RNA, 19 nt, Homo sapiens
  misc_RNA (1)...(19): siRNA sense strand
gacaugaucuuccucaagu

SEQ ID NO: 1461758 - RNA, 19 nt, Homo sapiens
  misc_RNA (1)...(19): siRNA sense strand
gagagugugugaagacaga

SEQ ID NO: 1461759 - RNA, 19 nt, Homo sapiens
  misc_RNA (1)...(19): siRNA sense strand
gagaagacacacaugauga

SEQ ID NO: 1461760 - RNA, 19 nt, Homo sapiens
  misc_RNA (1)...(19): siRNA sense strand
gcagcaauauggccucaug

SEQ ID NO: 1461761 - RNA, 19 nt, Homo sapiens
  misc_RNA (1)...(19): siRNA sense strand
gcagugcuguguggaauau

SEQ ID NO: 1461762 - RNA, 19 nt, Homo sapiens
  misc_RNA (1)...(19): siRNA sense strand
gggcacagcugaugaagac

SEQ ID NO: 1461763 - RNA, 19 nt, Homo sapiens
  misc_RNA (1)...(19): siRNA sense strand
gaaagcugccugcaaggaa

SEQ ID NO: 1461764 - RNA, 19 nt, Homo sapiens
  misc_RNA (1)...(19): siRNA sense strand
aauaucaggugcuguuuga

SEQ ID NO: 1461765 - RNA, 19 nt, Homo sapiens
  misc_RNA (1)...(19): siRNA sense strand
ucauggagguggaguuuau

SEQ ID NO: 1461766 - RNA, 19 nt, Homo sapiens
  misc_RNA (1)...(19): siRNA sense strand
ccacaaagaagaaagacaa

SEQ ID NO: 1461767 - RNA, 19 nt, Homo sapiens
  misc_RNA (1)...(19): siRNA sense strand
gauaaccacuaacaucucu

SEQ ID NO: 1461768 - RNA, 19 nt, Homo sapiens
  misc_RNA (1)...(19): siRNA sense strand
gaacuacaaacccaacaug

SEQ ID NO: 1461769 - RNA, 19 nt, Homo sapiens
  misc_RNA (1)...(19): siRNA sense strand
ggagaagacacacaugaug

SEQ ID NO: 1461770 - RNA, 19 nt, Homo sapiens
  misc_RNA (1)...(19): siRNA sense strand
caguacaucuucauucaug

SEQ ID NO: 1461771 - RNA, 19 nt, Homo sapiens
  misc_RNA (1)...(19): siRNA sense strand
ggucaacacuucccagcau

SEQ ID NO: 1461772 - RNA, 19 nt, Homo sapiens
  misc_RNA (1)...(19): siRNA sense strand
caacaccaacuccaucauu

SEQ ID NO: 1461773 - RNA, 19 nt, Homo sapiens
  misc_RNA (1)...(19): siRNA sense strand
gaaggccuaucucaucuac

SEQ ID NO: 1461774 - RNA, 19 nt, Homo sapiens
  misc_RNA (1)...(19): siRNA sense strand
ugaagacggccgaggguua

SEQ ID NO: 1461775 - RNA, 19 nt, Homo sapiens
  misc_RNA (1)...(19): siRNA sense strand
cacagcugaugaagacuua

SEQ ID NO: 1461776 - RNA, 19 nt, Homo sapiens
  misc_RNA (1)...(19): siRNA sense strand
ucuccaagcuccgcaauga

SEQ ID NO: 1461777 - RNA, 19 nt, Homo sapiens
  misc_RNA (1)...(19): siRNA sense strand
agccugagauggucuauga

SEQ ID NO: 1461778 - RNA, 19 nt, Homo sapiens
  misc_RNA (1)...(19): siRNA sense strand
gccaaugccugccuaugau

SEQ ID NO: 1461779 - RNA, 19 nt, Homo sapiens
  misc_RNA (1)...(19): siRNA sense strand
gaagaaagacaaggucaag

SEQ ID NO: 1461780 - RNA, 19 nt, Homo sapiens
  misc_RNA (1)...(19): siRNA sense strand
gcucccagcuuugauuaug

SEQ ID NO: 1461781 - RNA, 19 nt, Homo sapiens
  misc_RNA (1)...(19): siRNA sense strand
caucucugcucccagcuuu

SEQ ID NO: 1461782 - RNA, 19 nt, Homo sapiens
  misc_RNA (1)...(19): siRNA sense strand
ucaacaugauccagacuga

SEQ ID NO: 1461783 - RNA, 19 nt, Homo sapiens
  misc_RNA (1)...(19): siRNA sense strand
gaauaucaggugcuguuug

SEQ ID NO: 1461784 - RNA, 19 nt, Homo sapiens
  misc_RNA (1)...(19): siRNA sense strand
uccaacaacuacauuaaug

SEQ ID NO: 1461785 - RNA, 19 nt, Homo sapiens
  misc_RNA (1)...(19): siRNA sense strand
aaagcugccugcaaggaaa

SEQ ID NO: 1461786 - RNA, 19 nt, Homo sapiens
  misc_RNA (1)...(19): siRNA sense strand
caucagacccggcagugaa

SEQ ID NO: 1461787 - RNA, 19 nt, Homo sapiens
  misc_RNA (1)...(19): siRNA sense strand
uggcugagguggacaagug

SEQ ID NO: 1461788 - RNA, 19 nt, Homo sapiens
  misc_RNA (1)...(19): siRNA sense strand
cuuaguggcucgagucuuc

SEQ ID NO: 1461789 - RNA, 19 nt, Homo sapiens
  misc_RNA (1)...(19): siRNA sense strand
gcacagcugaugaagacuu

SEQ ID NO: 1461790 - RNA, 19 nt, Homo sapiens
  misc_RNA (1)...(19): siRNA sense strand
ccgcacagguugcuauauc

SEQ ID NO: 1461791 - RNA, 19 nt, Homo sapiens
  misc_RNA (1)...(19): siRNA sense strand
gaggagcaguacaucuuca

SEQ ID NO: 1461792 - RNA, 19 nt, Homo sapiens
  misc_RNA (1)...(19): siRNA sense strand
gagcaguacaucuucauuc

SEQ ID NO: 1461793 - RNA, 19 nt, Homo sapiens
  misc_RNA (1)...(19): siRNA sense strand
ucgcggagcucaucgucaa

SEQ ID NO: 1461794 - RNA, 19 nt, Homo sapiens
  misc_RNA (1)...(19): siRNA sense strand
uggagaccauggaucagua

SEQ ID NO: 1461795 - RNA, 19 nt, Homo sapiens
  misc_RNA (1)...(19): siRNA sense strand
ccacggcuccuacuugaug

SEQ ID NO: 1461796 - RNA, 19 nt, Homo sapiens
  misc_RNA (1)...(19): siRNA sense strand
gggaaccacugggcuacaa

SEQ ID NO: 1461797 - RNA, 19 nt, Homo sapiens
  misc_RNA (1)...(19): siRNA sense strand
ccaccuaccucaucaucca

SEQ ID NO: 1461798 - RNA, 19 nt, Homo sapiens
  misc_RNA (1)...(19): siRNA sense strand
ggacaugaucuuccucaag

SEQ ID NO: 1461799 - RNA, 19 nt, Homo sapiens
  misc_RNA (1)...(19): siRNA sense strand
ggacuccaacaacuacauu

SEQ ID NO: 1461800 - RNA, 19 nt, Homo sapiens
  misc_RNA (1)...(19): siRNA sense strand
cauuaaugccaacuacaua

SEQ ID NO: 1461801 - RNA, 19 nt, Homo sapiens
  misc_RNA (1)...(19): siRNA sense strand
caaagaagaaagacaaggu

SEQ ID NO: 1461802 - RNA, 19 nt, Homo sapiens
  misc_RNA (1)...(19): siRNA sense strand
ccaaggccaccgucaacua

SEQ ID NO: 1461803 - RNA, 19 nt, Homo sapiens
  misc_RNA (1)...(19): siRNA sense strand
ggaaagcugccugcaagga

SEQ ID NO: 1461804 - RNA, 19 nt, Homo sapiens
  misc_RNA (1)...(19): siRNA sense strand
gggagacccggcugaauug

SEQ ID NO: 1461805 - RNA, 19 nt, Homo sapiens
  misc_RNA (1)...(19): siRNA sense strand
ugagauaaccacuaacauc

SEQ ID NO: 1461806 - RNA, 19 nt, Homo sapiens
  misc_RNA (1)...(19): siRNA sense strand
cgagaaugauacccacugu

SEQ ID NO: 1461807 - RNA, 19 nt, Homo sapiens
  misc_RNA (1)...(19): siRNA sense strand
ggcggcuggucuacgauua

SEQ ID NO: 1461808 - RNA, 19 nt, Homo sapiens
  misc_RNA (1)...(19): siRNA sense strand
gggcagugcuguguggaau

SEQ ID NO: 1461809 - RNA, 19 nt, Homo sapiens
  misc_RNA (1)...(19): siRNA sense strand
caggucaaaccacuucaua

SEQ ID NO: 1461810 - RNA, 19 nt, Homo sapiens
  misc_RNA (1)...(19): siRNA sense strand
cgacacagaguaugagauc

SEQ ID NO: 1461811 - RNA, 19 nt, Homo sapiens
  misc_RNA (1)...(19): siRNA sense strand
aggccuaucucaucuacuu

SEQ ID NO: 1461812 - RNA, 19 nt, Homo sapiens
  misc_RNA (1)...(19): siRNA sense strand
ccaaaacccuccggaacua

SEQ ID NO: 1461813 - RNA, 19 nt, Homo sapiens
  misc_RNA (1)...(19): siRNA sense strand
ccacgguccuggagaugau

SEQ ID NO: 1461814 - RNA, 19 nt, Homo sapiens
  misc_RNA (1)...(19): siRNA sense strand
gcuauaucguccuggaugu

SEQ ID NO: 1461815 - RNA, 19 nt, Homo sapiens
  misc_RNA (1)...(19): siRNA sense strand
ggaaggccuaucucaucua

SEQ ID NO: 1461816 - RNA, 19 nt, Homo sapiens
  misc_RNA (1)...(19): siRNA sense strand
caacaacuacauuaaugca

SEQ ID NO: 1461817 - RNA, 19 nt, Homo sapiens
  misc_RNA (1)...(19): siRNA sense strand
gcgagcccaugucaucuuc

SEQ ID NO: 1461818 - RNA, 19 nt, Homo sapiens
  misc_RNA (1)...(19): siRNA sense strand
ucaagauuaugcuggugaa

SEQ ID NO: 1461819 - RNA, 19 nt, Homo sapiens
  misc_RNA (1)...(19): siRNA sense strand
cuacauuaaugccaacuac

SEQ ID NO: 1461820 - RNA, 19 nt, Homo sapiens
  misc_RNA (1)...(19): siRNA sense strand
gcugggacgccacaaagaa

SEQ ID NO: 1461821 - RNA, 19 nt, Homo sapiens
  misc_RNA (1)...(19): siRNA sense strand
caggagaagacacacauga

SEQ ID NO: 1461822 - RNA, 19 nt, Homo sapiens
  misc_RNA (1)...(19): siRNA sense strand
ucauccagcucaacaccaa

SEQ ID NO: 1461823 - RNA, 19 nt, Homo sapiens
  misc_RNA (1)...(19): siRNA sense strand
aacaccaacuccaucauug

SEQ ID NO: 1461824 - RNA, 19 nt, Homo sapiens
  misc_RNA (1)...(19): siRNA sense strand
agaaugauacccacugugu

SEQ ID NO: 1461825 - RNA, 19 nt, Homo sapiens
  misc_RNA (1)...(19): siRNA sense strand
ccacaggucaaaccacuuc

SEQ ID NO: 1461826 - RNA, 19 nt, Homo sapiens
  misc_RNA (1)...(19): siRNA sense strand
gcacuuucuggcccaauga

SEQ ID NO: 1461827 - RNA, 19 nt, Homo sapiens
  misc_RNA (1)...(19): siRNA sense strand
ccagcgagcccaugucauc

SEQ ID NO: 1461828 - RNA, 19 nt, Homo sapiens
  misc_RNA (1)...(19): siRNA sense strand
gauccgcugccacaacuug

SEQ ID NO: 1461829 - RNA, 19 nt, Homo sapiens
  misc_RNA (1)...(19): siRNA sense strand
ggagcaguacaucuucauu

SEQ ID NO: 1461830 - RNA, 19 nt, Homo sapiens
  misc_RNA (1)...(19): siRNA sense strand
ugagauggucuaugacuuc

SEQ ID NO: 1461831 - RNA, 19 nt, Homo sapiens
  misc_RNA (1)...(19): siRNA sense strand
ucuccugggugccaucauu

SEQ ID NO: 1461832 - RNA, 19 nt, Homo sapiens
  misc_RNA (1)...(19): siRNA sense strand
ccugaggccaugcccuuua

SEQ ID NO: 1461833 - RNA, 19 nt, Homo sapiens
  misc_RNA (1)...(19): siRNA sense strand
ggagaugauccgcauugau

SEQ ID NO: 1461834 - RNA, 19 nt, Homo sapiens
  misc_RNA (1)...(19): siRNA sense strand
gagauggucuaugacuucu

SEQ ID NO: 1461835 - RNA, 19 nt, Homo sapiens
  misc_RNA (1)...(19): siRNA sense strand
ucaacuaccgccaggagaa

SEQ ID NO: 1461836 - RNA, 19 nt, Homo sapiens
  misc_RNA (1)...(19): siRNA sense strand
gggcaaggaggucacuuuc

SEQ ID NO: 1461837 - RNA, 19 nt, Homo sapiens
  misc_RNA (1)...(19): siRNA sense strand
ccgcauugauccucagagu

SEQ ID NO: 1461838 - RNA, 19 nt, Homo sapiens
  misc_RNA (1)...(19): siRNA sense strand
ggucaaaccacuucauagc

SEQ ID NO: 1461839 - RNA, 19 nt, Homo sapiens
  misc_RNA (1)...(19): siRNA sense strand
gaagacggccgaggguuac

SEQ ID NO: 1461840 - RNA, 19 nt, Homo sapiens
  misc_RNA (1)...(19): siRNA sense strand
ccagagaucggaggagaug

SEQ ID NO: 1461841 - RNA, 19 nt, Homo sapiens
  misc_RNA (1)...(19): siRNA sense strand
ggagcccaauggucucauc

SEQ ID NO: 1461842 - RNA, 19 nt, Homo sapiens
  misc_RNA (1)...(19): siRNA sense strand
agcaguacaucuucauuca

SEQ ID NO: 1461843 - RNA, 19 nt, Homo sapiens
  misc_RNA (1)...(19): siRNA sense strand
gcaccuccaucgucaugcu

SEQ ID NO: 1461844 - RNA, 19 nt, Homo sapiens
  misc_RNA (1)...(19): siRNA sense strand
ggcgcuuccuggccacuuu

SEQ ID NO: 1461845 - RNA, 19 nt, Homo sapiens
  misc_RNA (1)...(19): siRNA sense strand
ucaaggccaccuacaagga

SEQ ID NO: 1461846 - RNA, 19 nt, Homo sapiens
  misc_RNA (1)...(19): siRNA sense strand
guucaaggccaccuacaag

SEQ ID NO: 1461847 - RNA, 19 nt, Homo sapiens
  misc_RNA (1)...(19): siRNA sense strand
ccaccaucccugucaguga

SEQ ID NO: 1461848 - RNA, 19 nt, Homo sapiens
  misc_RNA (1)...(19): siRNA sense strand
ggccgaagccugagauggu

SEQ ID NO: 1461849 - RNA, 19 nt, Homo sapiens
  misc_RNA (1)...(19): siRNA sense strand
gcauccgcauugccaggaa

SEQ ID NO: 1461850 - RNA, 19 nt, Homo sapiens
  misc_RNA (1)...(19): siRNA sense strand
ccagacggaugaggaugug

SEQ ID NO: 1461851 - RNA, 19 nt, Homo sapiens
  misc_RNA (1)...(19): siRNA sense strand
ucacuuuccagacggauga

SEQ ID NO: 1461852 - RNA, 19 nt, Homo sapiens
  misc_RNA (1)...(19): siRNA sense strand
uuaaugcagcccugacuga

SEQ ID NO: 1461853 - RNA, 19 nt, Homo sapiens
  misc_RNA (1)...(19): siRNA sense strand
gaaacgugcucaucuuuga

SEQ ID NO: 1461854 - RNA, 19 nt, Homo sapiens
  misc_RNA (1)...(19): siRNA sense strand
ugacaaagaugaaggaaau

SEQ ID NO: 1461855 - RNA, 19 nt, Homo sapiens
  misc_RNA (1)...(19): siRNA sense strand
caaagaugcuggaacuauu

SEQ ID NO: 1461856 - RNA, 19 nt, Homo sapiens
  misc_RNA (1)...(19): siRNA sense strand
gaaaagaacugaauaagag

SEQ ID NO: 1461857 - RNA, 19 nt, Homo sapiens
  misc_RNA (1)...(19): siRNA sense strand
ggaggugucuucuaugguu

SEQ ID NO: 1461858 - RNA, 19 nt, Homo sapiens
  misc_RNA (1)...(19): siRNA sense strand
gaacaagagagcuguaaga

SEQ ID NO: 1461859 - RNA, 19 nt, Homo sapiens
  misc_RNA (1)...(19): siRNA sense strand
cagaggaggugucuucuau

SEQ ID NO: 1461860 - RNA, 19 nt, Homo sapiens
  misc_RNA (1)...(19): siRNA sense strand
ggacgcagauuugaugaug

SEQ ID NO: 1461861 - RNA, 19 nt, Homo sapiens
  misc_RNA (1)...(19): siRNA sense strand
gaucgauucucucuaugaa

SEQ ID NO: 1461862 - RNA, 19 nt, Homo sapiens
  misc_RNA (1)...(19): siRNA sense strand
gaaagaaacgugcucaucu

SEQ ID NO: 1461863 - RNA, 19 nt, Homo sapiens
  misc_RNA (1)...(19): siRNA sense strand
ggaagacuguuaccaaugc

SEQ ID NO: 1461864 - RNA, 19 nt, Homo sapiens
  misc_RNA (1)...(19): siRNA sense strand
cugagaauguucaagauuu

SEQ ID NO: 1461865 - RNA, 19 nt, Homo sapiens
  misc_RNA (1)...(19): siRNA sense strand
gagaaagcccuucgagaug

SEQ ID NO: 1461866 - RNA, 19 nt, Homo sapiens
  misc_RNA (1)...(19): siRNA sense strand
gaggaggugucuucuaugg

SEQ ID NO: 1461867 - RNA, 19 nt, Homo sapiens
  misc_RNA (1)...(19): siRNA sense strand
ggacaucagugagaacaag

SEQ ID NO: 1461868 - RNA, 19 nt, Homo sapiens
  misc_RNA (1)...(19): siRNA sense strand
caagggaccugcaguuggu

SEQ ID NO: 1461869 - RNA, 19 nt, Homo sapiens
  misc_RNA (1)...(19): siRNA sense strand
agucacagauucaugauau

SEQ ID NO: 1461870 - RNA, 19 nt, Homo sapiens
  misc_RNA (1)...(19): siRNA sense strand
agaaucaaguugcaaugaa

SEQ ID NO: 1461871 - RNA, 19 nt, Homo sapiens
  misc_RNA (1)...(19): siRNA sense strand
ugagaauguucaagauuug

SEQ ID NO: 1461872 - RNA, 19 nt, Homo sapiens
  misc_RNA (1)...(19): siRNA sense strand
uauugaggauggaaucuuu

SEQ ID NO: 1461873 - RNA, 19 nt, Homo sapiens
  misc_RNA (1)...(19): siRNA sense strand
agucugauaugaaacauug

SEQ ID NO: 1461874 - RNA, 19 nt, Homo sapiens
  misc_RNA (1)...(19): siRNA sense strand
gaaucaaguugcaaugaac

SEQ ID NO: 1461875 - RNA, 19 nt, Homo sapiens
  misc_RNA (1)...(19): siRNA sense strand
ccauugaagagguugauua

SEQ ID NO: 1461876 - RNA, 19 nt, Homo sapiens
  misc_RNA (1)...(19): siRNA sense strand
ggaaucgacuucuauaccu

SEQ ID NO: 1461877 - RNA, 19 nt, Homo sapiens
  misc_RNA (1)...(19): siRNA sense strand
cgacuucuauaccuccauu

SEQ ID NO: 1461878 - RNA, 19 nt, Homo sapiens
  misc_RNA (1)...(19): siRNA sense strand
uaugaaacauuggcccuuu

SEQ ID NO: 1461879 - RNA, 19 nt, Homo sapiens
  misc_RNA (1)...(19): siRNA sense strand
cuagacaagucacagauuc

SEQ ID NO: 1461880 - RNA, 19 nt, Homo sapiens
  misc_RNA (1)...(19): siRNA sense strand
guaagacgccuccguacug

SEQ ID NO: 1461881 - RNA, 19 nt, Homo sapiens
  misc_RNA (1)...(19): siRNA sense strand
gaguuuaagcgcaagcaua

SEQ ID NO: 1461882 - RNA, 19 nt, Homo sapiens
  misc_RNA (1)...(19): siRNA sense strand
ccaaagaugcuggaacuau

SEQ ID NO: 1461883 - RNA, 19 nt, Homo sapiens
  misc_RNA (1)...(19): siRNA sense strand
gaacugaauaagagcauca

SEQ ID NO: 1461884 - RNA, 19 nt, Homo sapiens
  misc_RNA (1)...(19): siRNA sense strand
caaagaaucaaguugcaau

SEQ ID NO: 1461885 - RNA, 19 nt, Homo sapiens
  misc_RNA (1)...(19): siRNA sense strand
acacagaccuucacuaccu

SEQ ID NO: 1461886 - RNA, 19 nt, Homo sapiens
  misc_RNA (1)...(19): siRNA sense strand
cguaauaccaccauuccua

SEQ ID NO: 1461887 - RNA, 19 nt, Homo sapiens
  misc_RNA (1)...(19): siRNA sense strand
ggaaaagaacugaauaaga

SEQ ID NO: 1461888 - RNA, 19 nt, Homo sapiens
  misc_RNA (1)...(19): siRNA sense strand
caagcuaugucgccuuuac

SEQ ID NO: 1461889 - RNA, 19 nt, Homo sapiens
  misc_RNA (1)...(19): siRNA sense strand
ccucagggcccaccauuga

SEQ ID NO: 1461890 - RNA, 19 nt, Homo sapiens
  misc_RNA (1)...(19): siRNA sense strand
guuggugguucuacucgua

SEQ ID NO: 1461891 - RNA, 19 nt, Homo sapiens
  misc_RNA (1)...(19): siRNA sense strand
gccaacugcugcugcuauu

SEQ ID NO: 1461892 - RNA, 19 nt, Homo sapiens
  misc_RNA (1)...(19): siRNA sense strand
uguccagucugauaugaaa

SEQ ID NO: 1461893 - RNA, 19 nt, Homo sapiens
  misc_RNA (1)...(19): siRNA sense strand
gcuguuguccagucugaua

SEQ ID NO: 1461894 - RNA, 19 nt, Homo sapiens
  misc_RNA (1)...(19): siRNA sense strand
agagaaagcccuucgagau

SEQ ID NO: 1461895 - RNA, 19 nt, Homo sapiens
  misc_RNA (1)...(19): siRNA sense strand
gagaacaagagagcuguaa

SEQ ID NO: 1461896 - RNA, 19 nt, Homo sapiens
  misc_RNA (1)...(19): siRNA sense strand
gaccugcaguugguauuga

SEQ ID NO: 1461897 - RNA, 19 nt, Homo sapiens
  misc_RNA (1)...(19): siRNA sense strand
agaaggacaucagugagaa

SEQ ID NO: 1461898 - RNA, 19 nt, Homo sapiens
  misc_RNA (1)...(19): siRNA sense strand
gaucggugaugccgcaaag

SEQ ID NO: 1461899 - RNA, 19 nt, Homo sapiens
  misc_RNA (1)...(19): siRNA sense strand
cauugaagagguugauuaa

SEQ ID NO: 1461900 - RNA, 19 nt, Homo sapiens
  misc_RNA (1)...(19): siRNA sense strand
gaccuucacuaccuauucu

SEQ ID NO: 1461901 - RNA, 19 nt, Homo sapiens
  misc_RNA (1)...(19): siRNA sense strand
ggaaaagucgagauaauug

SEQ ID NO: 1461902 - RNA, 19 nt, Homo sapiens
  misc_RNA (1)...(19): siRNA sense strand
cagauuugaugaugcuguu

SEQ ID NO: 1461903 - RNA, 19 nt, Homo sapiens
  misc_RNA (1)...(19): siRNA sense strand
ggaaaccgaaccacuccaa

SEQ ID NO: 1461904 - RNA, 19 nt, Homo sapiens
  misc_RNA (1)...(19): siRNA sense strand
ccgaaccacuccaagcuau

SEQ ID NO: 1461905 - RNA, 19 nt, Homo sapiens
  misc_RNA (1)...(19): siRNA sense strand
gaaccacuccaagcuaugu

SEQ ID NO: 1461906 - RNA, 19 nt, Homo sapiens
  misc_RNA (1)...(19): siRNA sense strand
acaagucacagauucauga

SEQ ID NO: 1461907 - RNA, 19 nt, Homo sapiens
  misc_RNA (1)...(19): siRNA sense strand
ugcuauugcuuacggcuua

SEQ ID NO: 1461908 - RNA, 19 nt, Homo sapiens
  misc_RNA (1)...(19): siRNA sense strand
uaccaaagaugcuggaacu

SEQ ID NO: 1461909 - RNA, 19 nt, Homo sapiens
  misc_RNA (1)...(19): siRNA sense strand
ggcccaagguccaaguaga

SEQ ID NO: 1461910 - RNA, 19 nt, Homo sapiens
  misc_RNA (1)...(19): siRNA sense strand
gcacggaaaagucgagaua

SEQ ID NO: 1461911 - RNA, 19 nt, Homo sapiens
  misc_RNA (1)...(19): siRNA sense strand
gaugaaggaaauugcagaa

SEQ ID NO: 1461912 - RNA, 19 nt, Homo sapiens
  misc_RNA (1)...(19): siRNA sense strand
ccuucgagaugccaaacua

SEQ ID NO: 1461913 - RNA, 19 nt, Homo sapiens
  misc_RNA (1)...(19): siRNA sense strand
gcacccaggccaguauuga

SEQ ID NO: 1461914 - RNA, 19 nt, Homo sapiens
  misc_RNA (1)...(19): siRNA sense strand
aaacauuggcccuuuaugg

SEQ ID NO: 1461915 - RNA, 19 nt, Homo sapiens
  misc_RNA (1)...(19): siRNA sense strand
ucacagauucaugauauug

SEQ ID NO: 1461916 - RNA, 19 nt, Homo sapiens
  misc_RNA (1)...(19): siRNA sense strand
auaagaaggacaucaguga

SEQ ID NO: 1461917 - RNA, 19 nt, Homo sapiens
  misc_RNA (1)...(19): siRNA sense strand
cuucuaugguucugacaaa

SEQ ID NO: 1461918 - RNA, 19 nt, Homo sapiens
  misc_RNA (1)...(19): siRNA sense strand
ccaagguccaaguagaaua

SEQ ID NO: 1461919 - RNA, 19 nt, Homo sapiens
  misc_RNA (1)...(19): siRNA sense strand
augaaacauuggcccuuua

SEQ ID NO: 1461920 - RNA, 19 nt, Homo sapiens
  misc_RNA (1)...(19): siRNA sense strand
uccaagcuaugucgccuuu

SEQ ID NO: 1461921 - RNA, 19 nt, Homo sapiens
  misc_RNA (1)...(19): siRNA sense strand
cauuacccgugcccgauuu

SEQ ID NO: 1461922 - RNA, 19 nt, Homo sapiens
  misc_RNA (1)...(19): siRNA sense strand
gcccaagguccaaguagaa

SEQ ID NO: 1461923 - RNA, 19 nt, Homo sapiens
  misc_RNA (1)...(19): siRNA sense strand
ugggaagacuguuaccaau

SEQ ID NO: 1461924 - RNA, 19 nt, Homo sapiens
  misc_RNA (1)...(19): siRNA sense strand
ggaugucacuccucuuucc

SEQ ID NO: 1461925 - RNA, 19 nt, Homo sapiens
  misc_RNA (1)...(19): siRNA sense strand
ucacagugccagcuuacuu

SEQ ID NO: 1461926 - RNA, 19 nt, Homo sapiens
  misc_RNA (1)...(19): siRNA sense strand
gggaagacuguuaccaaug

SEQ ID NO: 1461927 - RNA, 19 nt, Homo sapiens
  misc_RNA (1)...(19): siRNA sense strand
ccuuuaugguggugaauga

SEQ ID NO: 1461928 - RNA, 19 nt, Homo sapiens
  misc_RNA (1)...(19): siRNA sense strand
caacccugaugaagcuguu

SEQ ID NO: 1461929 - RNA, 19 nt, Homo sapiens
  misc_RNA (1)...(19): siRNA sense strand
aaagaugcuggaacuauug

SEQ ID NO: 1461930 - RNA, 19 nt, Homo sapiens
  misc_RNA (1)...(19): siRNA sense strand
acugaaugcugaccuguuc

SEQ ID NO: 1461931 - RNA, 19 nt, Homo sapiens
  misc_RNA (1)...(19): siRNA sense strand
gaaacauuggcccuuuaug

SEQ ID NO: 1461932 - RNA, 19 nt, Homo sapiens
  misc_RNA (1)...(19): siRNA sense strand
cacagugccagcuuacuuu

SEQ ID NO: 1461933 - RNA, 19 nt, Homo sapiens
  misc_RNA (1)...(19): siRNA sense strand
gcaaugaaccccaccaaca

SEQ ID NO: 1461934 - RNA, 19 nt, Homo sapiens
  misc_RNA (1)...(19): siRNA sense strand
acaaagaugaaggaaauug

SEQ ID NO: 1461935 - RNA, 19 nt, Homo sapiens
  misc_RNA (1)...(19): siRNA sense strand
cacagaccuucacuaccua

SEQ ID NO: 1461936 - RNA, 19 nt, Homo sapiens
  misc_RNA (1)...(19): siRNA sense strand
agacacagaccuucacuac

SEQ ID NO: 1461937 - RNA, 19 nt, Homo sapiens
  misc_RNA (1)...(19): siRNA sense strand
gaugccaaacgucugauug

SEQ ID NO: 1461938 - RNA, 19 nt, Homo sapiens
  misc_RNA (1)...(19): siRNA sense strand
guccucaucaagcguaaua

SEQ ID NO: 1461939 - RNA, 19 nt, Homo sapiens
  misc_RNA (1)...(19): siRNA sense strand
gcaguugguauugaucuug

SEQ ID NO: 1461940 - RNA, 19 nt, Homo sapiens
  misc_RNA (1)...(19): siRNA sense strand
aaacuagacaagucacaga

SEQ ID NO: 1461941 - RNA, 19 nt, Homo sapiens
  misc_RNA (1)...(19): siRNA sense strand
gcuggucucaauguacuua

SEQ ID NO: 1461942 - RNA, 19 nt, Homo sapiens
  misc_RNA (1)...(19): siRNA sense strand
ggucucaauguacuuagaa

SEQ ID NO: 1461943 - RNA, 19 nt, Homo sapiens
  misc_RNA (1)...(19): siRNA sense strand
ggaccugcaguugguauug

SEQ ID NO: 1461944 - RNA, 19 nt, Homo sapiens
  misc_RNA (1)...(19): siRNA sense strand
aguuuaagcgcaagcauaa

SEQ ID NO: 1461945 - RNA, 19 nt, Homo sapiens
  misc_RNA (1)...(19): siRNA sense strand
ugaaacauuggcccuuuau

SEQ ID NO: 1461946 - RNA, 19 nt, Homo sapiens
  misc_RNA (1)...(19): siRNA sense strand
gcccaccauugaagagguu

SEQ ID NO: 1461947 - RNA, 19 nt, Homo sapiens
  misc_RNA (1)...(19): siRNA sense strand
gcaagcauaagaaggacau

SEQ ID NO: 1461948 - RNA, 19 nt, Homo sapiens
  misc_RNA (1)...(19): siRNA sense strand
ccagaggaggugucuucua

SEQ ID NO: 1461949 - RNA, 19 nt, Homo sapiens
  misc_RNA (1)...(19): siRNA sense strand
gcgucaggcuaccaaagau

SEQ ID NO: 1461950 - RNA, 19 nt, Homo sapiens
  misc_RNA (1)...(19): siRNA sense strand
ugacaaaggauaacaaccu

SEQ ID NO: 1461951 - RNA, 19 nt, Homo sapiens
  misc_RNA (1)...(19): siRNA sense strand
gagcgugccaugacaaagg

SEQ ID NO: 1461952 - RNA, 19 nt, Homo sapiens
  misc_RNA (1)...(19): siRNA sense strand
aagaaggacaucagugaga

SEQ ID NO: 1461953 - RNA, 19 nt, Homo sapiens
  misc_RNA (1)...(19): siRNA sense strand
gaaacgugcucaucuuuga

SEQ ID NO: 1461954 - RNA, 19 nt, Homo sapiens
  misc_RNA (1)...(19): siRNA sense strand
ugacaaagaugaaggaaau

SEQ ID NO: 1461955 - RNA, 19 nt, Homo sapiens
  misc_RNA (1)...(19): siRNA sense strand
caaagaugcuggaacuauu

SEQ ID NO: 1461956 - RNA, 19 nt, Homo sapiens
  misc_RNA (1)...(19): siRNA sense strand
gaaaagaacugaauaagag

SEQ ID NO: 1461957 - RNA, 19 nt, Homo sapiens
  misc_RNA (1)...(19): siRNA sense strand
ggaggugucuucuaugguu

SEQ ID NO: 1461958 - RNA, 19 nt, Homo sapiens
  misc_RNA (1)...(19): siRNA sense strand
gaacaagagagcuguaaga

SEQ ID NO: 1461959 - RNA, 19 nt, Homo sapiens
  misc_RNA (1)...(19): siRNA sense strand
cagaggaggugucuucuau

SEQ ID NO: 1461960 - RNA, 19 nt, Homo sapiens
  misc_RNA (1)...(19): siRNA sense strand
ggacgcagauuugaugaug

SEQ ID NO: 1461961 - RNA, 19 nt, Homo sapiens
  misc_RNA (1)...(19): siRNA sense strand
gaucgauucucucuaugaa

SEQ ID NO: 1461962 - RNA, 19 nt, Homo sapiens
  misc_RNA (1)...(19): siRNA sense strand
gaaagaaacgugcucaucu

SEQ ID NO: 1461963 - RNA, 19 nt, Homo sapiens
  misc_RNA (1)...(19): siRNA sense strand
ggaagacuguuaccaaugc

SEQ ID NO: 1461964 - RNA, 19 nt, Homo sapiens
  misc_RNA (1)...(19): siRNA sense strand
cugagaauguucaagauuu

SEQ ID NO: 1461965 - RNA, 19 nt, Homo sapiens
  misc_RNA (1)...(19): siRNA sense strand
gagaaagcccuucgagaug

SEQ ID NO: 1461966 - RNA, 19 nt, Homo sapiens
  misc_RNA (1)...(19): siRNA sense strand
gaggaggugucuucuaugg

SEQ ID NO: 1461967 - RNA, 19 nt, Homo sapiens
  misc_RNA (1)...(19): siRNA sense strand
ggacaucagugagaacaag

SEQ ID NO: 1461968 - RNA, 19 nt, Homo sapiens
  misc_RNA (1)...(19): siRNA sense strand
caagggaccugcaguuggu

SEQ ID NO: 1461969 - RNA, 19 nt, Homo sapiens
  misc_RNA (1)...(19): siRNA sense strand
agucacagauucaugauau

SEQ ID NO: 1461970 - RNA, 19 nt, Homo sapiens
  misc_RNA (1)...(19): siRNA sense strand
agaaucaaguugcaaugaa

SEQ ID NO: 1461971 - RNA, 19 nt, Homo sapiens
  misc_RNA (1)...(19): siRNA sense strand
ugagaauguucaagauuug

SEQ ID NO: 1461972 - RNA, 19 nt, Homo sapiens
  misc_RNA (1)...(19): siRNA sense strand
uauugaggauggaaucuuu

SEQ ID NO: 1461973 - RNA, 19 nt, Homo sapiens
  misc_RNA (1)...(19): siRNA sense strand
agucugauaugaaacauug

SEQ ID NO: 1461974 - RNA, 19 nt, Homo sapiens
  misc_RNA (1)...(19): siRNA sense strand
gaaucaaguugcaaugaac

SEQ ID NO: 1461975 - RNA, 19 nt, Homo sapiens
  misc_RNA (1)...(19): siRNA sense strand
ccauugaagagguugauua

SEQ ID NO: 1461976 - RNA, 19 nt, Homo sapiens
  misc_RNA (1)...(19): siRNA sense strand
ggaaucgacuucuauaccu

SEQ ID NO: 1461977 - RNA, 19 nt, Homo sapiens
  misc_RNA (1)...(19): siRNA sense strand
cgacuucuauaccuccauu

SEQ ID NO: 1461978 - RNA, 19 nt, Homo sapiens
  misc_RNA (1)...(19): siRNA sense strand
uaugaaacauuggcccuuu

SEQ ID NO: 1461979 - RNA, 19 nt, Homo sapiens
  misc_RNA (1)...(19): siRNA sense strand
cuagacaagucacagauuc

SEQ ID NO: 1461980 - RNA, 19 nt, Homo sapiens
  misc_RNA (1)...(19): siRNA sense strand
guaagacgccuccguacug

SEQ ID NO: 1461981 - RNA, 19 nt, Homo sapiens
  misc_RNA (1)...(19): siRNA sense strand
gaguuuaagcgcaagcaua

SEQ ID NO: 1461982 - RNA, 19 nt, Homo sapiens
  misc_RNA (1)...(19): siRNA sense strand
ccaaagaugcuggaacuau

SEQ ID NO: 1461983 - RNA, 19 nt, Homo sapiens
  misc_RNA (1)...(19): siRNA sense strand
gaacugaauaagagcauca

SEQ ID NO: 1461984 - RNA, 19 nt, Homo sapiens
  misc_RNA (1)...(19): siRNA sense strand
caaagaaucaaguugcaau

SEQ ID NO: 1461985 - RNA, 19 nt, Homo sapiens
  misc_RNA (1)...(19): siRNA sense strand
acacagaccuucacuaccu

SEQ ID NO: 1461986 - RNA, 19 nt, Homo sapiens
  misc_RNA (1)...(19): siRNA sense strand
cguaauaccaccauuccua

SEQ ID NO: 1461987 - RNA, 19 nt, Homo sapiens
  misc_RNA (1)...(19): siRNA sense strand
ggaaaagaacugaauaaga

SEQ ID NO: 1461988 - RNA, 19 nt, Homo sapiens
  misc_RNA (1)...(19): siRNA sense strand
caagcuaugucgccuuuac

SEQ ID NO: 1461989 - RNA, 19 nt, Homo sapiens
  misc_RNA (1)...(19): siRNA sense strand
ccucagggcccaccauuga

SEQ ID NO: 1461990 - RNA, 19 nt, Homo sapiens
  misc_RNA (1)...(19): siRNA sense strand
guuggugguucuacucgua

SEQ ID NO: 1461991 - RNA, 19 nt, Homo sapiens
  misc_RNA (1)...(19): siRNA sense strand
gccaacugcugcugcuauu

SEQ ID NO: 1461992 - RNA, 19 nt, Homo sapiens
  misc_RNA (1)...(19): siRNA sense strand
uguccagucugauaugaaa

SEQ ID NO: 1461993 - RNA, 19 nt, Homo sapiens
  misc_RNA (1)...(19): siRNA sense strand
gcuguuguccagucugaua

SEQ ID NO: 1461994 - RNA, 19 nt, Homo sapiens
  misc_RNA (1)...(19): siRNA sense strand
agagaaagcccuucgagau

SEQ ID NO: 1461995 - RNA, 19 nt, Homo sapiens
  misc_RNA (1)...(19): siRNA sense strand
gagaacaagagagcuguaa

SEQ ID NO: 1461996 - RNA, 19 nt, Homo sapiens
  misc_RNA (1)...(19): siRNA sense strand
gaccugcaguugguauuga

SEQ ID NO: 1461997 - RNA, 19 nt, Homo sapiens
  misc_RNA (1)...(19): siRNA sense strand
agaaggacaucagugagaa

SEQ ID NO: 1461998 - RNA, 19 nt, Homo sapiens
  misc_RNA (1)...(19): siRNA sense strand
gaucggugaugccgcaaag

SEQ ID NO: 1461999 - RNA, 19 nt, Homo sapiens
  misc_RNA (1)...(19): siRNA sense strand
cauugaagagguugauuaa

SEQ ID NO: 1462000 - RNA, 19 nt, Homo sapiens
  misc_RNA (1)...(19): siRNA sense strand
gaccuucacuaccuauucu

SEQ ID NO: 1462001 - RNA, 19 nt, Homo sapiens
  misc_RNA (1)...(19): siRNA sense strand
ggaaaagucgagauaauug

SEQ ID NO: 1462002 - RNA, 19 nt, Homo sapiens
  misc_RNA (1)...(19): siRNA sense strand
cagauuugaugaugcuguu

SEQ ID NO: 1462003 - RNA, 19 nt, Homo sapiens
  misc_RNA (1)...(19): siRNA sense strand
ggaaaccgaaccacuccaa

SEQ ID NO: 1462004 - RNA, 19 nt, Homo sapiens
  misc_RNA (1)...(19): siRNA sense strand
ccgaaccacuccaagcuau

SEQ ID NO: 1462005 - RNA, 19 nt, Homo sapiens
  misc_RNA (1)...(19): siRNA sense strand
gaaccacuccaagcuaugu

SEQ ID NO: 1462006 - RNA, 19 nt, Homo sapiens
  misc_RNA (1)...(19): siRNA sense strand
acaagucacagauucauga

SEQ ID NO: 1462007 - RNA, 19 nt, Homo sapiens
  misc_RNA (1)...(19): siRNA sense strand
ugcuauugcuuacggcuua

SEQ ID NO: 1462008 - RNA, 19 nt, Homo sapiens
  misc_RNA (1)...(19): siRNA sense strand
uaccaaagaugcuggaacu

SEQ ID NO: 1462009 - RNA, 19 nt, Homo sapiens
  misc_RNA (1)...(19): siRNA sense strand
ggcccaagguccaaguaga

SEQ ID NO: 1462010 - RNA, 19 nt, Homo sapiens
  misc_RNA (1)...(19): siRNA sense strand
gcacggaaaagucgagaua

SEQ ID NO: 1462011 - RNA, 19 nt, Homo sapiens
  misc_RNA (1)...(19): siRNA sense strand
gaugaaggaaauugcagaa

SEQ ID NO: 1462012 - RNA, 19 nt, Homo sapiens
  misc_RNA (1)...(19): siRNA sense strand
ccuucgagaugccaaacua

SEQ ID NO: 1462013 - RNA, 19 nt, Homo sapiens
  misc_RNA (1)...(19): siRNA sense strand
gcacccaggccaguauuga

SEQ ID NO: 1462014 - RNA, 19 nt, Homo sapiens
  misc_RNA (1)...(19): siRNA sense strand
aaacauuggcccuuuaugg

SEQ ID NO: 1462015 - RNA, 19 nt, Homo sapiens
  misc_RNA (1)...(19): siRNA sense strand
ucacagauucaugauauug

SEQ ID NO: 1462016 - RNA, 19 nt, Homo sapiens
  misc_RNA (1)...(19): siRNA sense strand
auaagaaggacaucaguga

SEQ ID NO: 1462017 - RNA, 19 nt, Homo sapiens
  misc_RNA (1)...(19): siRNA sense strand
cuucuaugguucugacaaa

SEQ ID NO: 1462018 - RNA, 19 nt, Homo sapiens
  misc_RNA (1)...(19): siRNA sense strand
ccaagguccaaguagaaua

SEQ ID NO: 1462019 - RNA, 19 nt, Homo sapiens
  misc_RNA (1)...(19): siRNA sense strand
augaaacauuggcccuuua

SEQ ID NO: 1462020 - RNA, 19 nt, Homo sapiens
  misc_RNA (1)...(19): siRNA sense strand
uccaagcuaugucgccuuu

SEQ ID NO: 1462021 - RNA, 19 nt, Homo sapiens
  misc_RNA (1)...(19): siRNA sense strand
cauuacccgugcccgauuu

SEQ ID NO: 1462022 - RNA, 19 nt, Homo sapiens
  misc_RNA (1)...(19): siRNA sense strand
gcccaagguccaaguagaa

SEQ ID NO: 1462023 - RNA, 19 nt, Homo sapiens
  misc_RNA (1)...(19): siRNA sense strand
ugggaagacuguuaccaau

SEQ ID NO: 1462024 - RNA, 19 nt, Homo sapiens
  misc_RNA (1)...(19): siRNA sense strand
ggaugucacuccucuuucc

SEQ ID NO: 1462025 - RNA, 19 nt, Homo sapiens
  misc_RNA (1)...(19): siRNA sense strand
ucacagugccagcuuacuu

SEQ ID NO: 1462026 - RNA, 19 nt, Homo sapiens
  misc_RNA (1)...(19): siRNA sense strand
gggaagacuguuaccaaug

SEQ ID NO: 1462027 - RNA, 19 nt, Homo sapiens
  misc_RNA (1)...(19): siRNA sense strand
ccuuuaugguggugaauga

SEQ ID NO: 1462028 - RNA, 19 nt, Homo sapiens
  misc_RNA (1)...(19): siRNA sense strand
caacccugaugaagcuguu

SEQ ID NO: 1462029 - RNA, 19 nt, Homo sapiens
  misc_RNA (1)...(19): siRNA sense strand
aaagaugcuggaacuauug

SEQ ID NO: 1462030 - RNA, 19 nt, Homo sapiens
  misc_RNA (1)...(19): siRNA sense strand
acugaaugcugaccuguuc

SEQ ID NO: 1462031 - RNA, 19 nt, Homo sapiens
  misc_RNA (1)...(19): siRNA sense strand
gaaacauuggcccuuuaug

SEQ ID NO: 1462032 - RNA, 19 nt, Homo sapiens
  misc_RNA (1)...(19): siRNA sense strand
cacagugccagcuuacuuu

SEQ ID NO: 1462033 - RNA, 19 nt, Homo sapiens
  misc_RNA (1)...(19): siRNA sense strand
gcaaugaaccccaccaaca

SEQ ID NO: 1462034 - RNA, 19 nt, Homo sapiens
  misc_RNA (1)...(19): siRNA sense strand
acaaagaugaaggaaauug

SEQ ID NO: 1462035 - RNA, 19 nt, Homo sapiens
  misc_RNA (1)...(19): siRNA sense strand
cacagaccuucacuaccua

SEQ ID NO: 1462036 - RNA, 19 nt, Homo sapiens
  misc_RNA (1)...(19): siRNA sense strand
agacacagaccuucacuac

SEQ ID NO: 1462037 - RNA, 19 nt, Homo sapiens
  misc_RNA (1)...(19): siRNA sense strand
gaugccaaacgucugauug

SEQ ID NO: 1462038 - RNA, 19 nt, Homo sapiens
  misc_RNA (1)...(19): siRNA sense strand
guccucaucaagcguaaua

SEQ ID NO: 1462039 - RNA, 19 nt, Homo sapiens
  misc_RNA (1)...(19): siRNA sense strand
gcaguugguauugaucuug

SEQ ID NO: 1462040 - RNA, 19 nt, Homo sapiens
  misc_RNA (1)...(19): siRNA sense strand
aaacuagacaagucacaga

SEQ ID NO: 1462041 - RNA, 19 nt, Homo sapiens
  misc_RNA (1)...(19): siRNA sense strand
gcuggucucaauguacuua

SEQ ID NO: 1462042 - RNA, 19 nt, Homo sapiens
  misc_RNA (1)...(19): siRNA sense strand
ggucucaauguacuuagaa

SEQ ID NO: 1462043 - RNA, 19 nt, Homo sapiens
  misc_RNA (1)...(19): siRNA sense strand
ggaccugcaguugguauug

SEQ ID NO: 1462044 - RNA, 19 nt, Homo sapiens
  misc_RNA (1)...(19): siRNA sense strand
aguuuaagcgcaagcauaa

SEQ ID NO: 1462045 - RNA, 19 nt, Homo sapiens
  misc_RNA (1)...(19): siRNA sense strand
ugaaacauuggcccuuuau

SEQ ID NO: 1462046 - RNA, 19 nt, Homo sapiens
  misc_RNA (1)...(19): siRNA sense strand
gcccaccauugaagagguu

SEQ ID NO: 1462047 - RNA, 19 nt, Homo sapiens
  misc_RNA (1)...(19): siRNA sense strand
gcaagcauaagaaggacau

SEQ ID NO: 1462048 - RNA, 19 nt, Homo sapiens
  misc_RNA (1)...(19): siRNA sense strand
ccagaggaggugucuucua

SEQ ID NO: 1462049 - RNA, 19 nt, Homo sapiens
  misc_RNA (1)...(19): siRNA sense strand
gcgucaggcuaccaaagau

SEQ ID NO: 1462050 - RNA, 19 nt, Homo sapiens
  misc_RNA (1)...(19): siRNA sense strand
ugacaaaggauaacaaccu

SEQ ID NO: 1462051 - RNA, 19 nt, Homo sapiens
  misc_RNA (1)...(19): siRNA sense strand
gagcgugccaugacaaagg

SEQ ID NO: 1462052 - RNA, 19 nt, Homo sapiens
  misc_RNA (1)...(19): siRNA sense strand
aagaaggacaucagugaga

SEQ ID NO: 1462053 - RNA, 19 nt, Homo sapiens
  misc_RNA (1)...(19): siRNA sense strand
gaaacgugcucaucuuuga

SEQ ID NO: 1462054 - RNA, 19 nt, Homo sapiens
  misc_RNA (1)...(19): siRNA sense strand
ugacaaagaugaaggaaau

SEQ ID NO: 1462055 - RNA, 19 nt, Homo sapiens
  misc_RNA (1)...(19): siRNA sense strand
caaagaugcuggaacuauu

SEQ ID NO: 1462056 - RNA, 19 nt, Homo sapiens
  misc_RNA (1)...(19): siRNA sense strand
gaaaagaacugaauaagag

SEQ ID NO: 1462057 - RNA, 19 nt, Homo sapiens
  misc_RNA (1)...(19): siRNA sense strand
ggaggugucuucuaugguu

SEQ ID NO: 1462058 - RNA, 19 nt, Homo sapiens
  misc_RNA (1)...(19): siRNA sense strand
gaacaagagagcuguaaga

SEQ ID NO: 1462059 - RNA, 19 nt, Homo sapiens
  misc_RNA (1)...(19): siRNA sense strand
cagaggaggugucuucuau

SEQ ID NO: 1462060 - RNA, 19 nt, Homo sapiens
  misc_RNA (1)...(19): siRNA sense strand
ggacgcagauuugaugaug

SEQ ID NO: 1462061 - RNA, 19 nt, Homo sapiens
  misc_RNA (1)...(19): siRNA sense strand
gaucgauucucucuaugaa

SEQ ID NO: 1462062 - RNA, 19 nt, Homo sapiens
  misc_RNA (1)...(19): siRNA sense strand
gaaagaaacgugcucaucu

SEQ ID NO: 1462063 - RNA, 19 nt, Homo sapiens
  misc_RNA (1)...(19): siRNA sense strand
ggaagacuguuaccaaugc

SEQ ID NO: 1462064 - RNA, 19 nt, Homo sapiens
  misc_RNA (1)...(19): siRNA sense strand
cugagaauguucaagauuu

SEQ ID NO: 1462065 - RNA, 19 nt, Homo sapiens
  misc_RNA (1)...(19): siRNA sense strand
gagaaagcccuucgagaug

SEQ ID NO: 1462066 - RNA, 19 nt, Homo sapiens
  misc_RNA (1)...(19): siRNA sense strand
gaggaggugucuucuaugg

SEQ ID NO: 1462067 - RNA, 19 nt, Homo sapiens
  misc_RNA (1)...(19): siRNA sense strand
ggacaucagugagaacaag

SEQ ID NO: 1462068 - RNA, 19 nt, Homo sapiens
  misc_RNA (1)...(19): siRNA sense strand
caagggaccugcaguuggu

SEQ ID NO: 1462069 - RNA, 19 nt, Homo sapiens
  misc_RNA (1)...(19): siRNA sense strand
agucacagauucaugauau

SEQ ID NO: 1462070 - RNA, 19 nt, Homo sapiens
  misc_RNA (1)...(19): siRNA sense strand
agaaucaaguugcaaugaa

SEQ ID NO: 1462071 - RNA, 19 nt, Homo sapiens
  misc_RNA (1)...(19): siRNA sense strand
ugagaauguucaagauuug

SEQ ID NO: 1462072 - RNA, 19 nt, Homo sapiens
  misc_RNA (1)...(19): siRNA sense strand
uauugaggauggaaucuuu

SEQ ID NO: 1462073 - RNA, 19 nt, Homo sapiens
  misc_RNA (1)...(19): siRNA sense strand
agucugauaugaaacauug

SEQ ID NO: 1462074 - RNA, 19 nt, Homo sapiens
  misc_RNA (1)...(19): siRNA sense strand
gaaucaaguugcaaugaac

SEQ ID NO: 1462075 - RNA, 19 nt, Homo sapiens
  misc_RNA (1)...(19): siRNA sense strand
ccauugaagagguugauua

SEQ ID NO: 1462076 - RNA, 19 nt, Homo sapiens
  misc_RNA (1)...(19): siRNA sense strand
ggaaucgacuucuauaccu

SEQ ID NO: 1462077 - RNA, 19 nt, Homo sapiens
  misc_RNA (1)...(19): siRNA sense strand
cgacuucuauaccuccauu

SEQ ID NO: 1462078 - RNA, 19 nt, Homo sapiens
  misc_RNA (1)...(19): siRNA sense strand
uaugaaacauuggcccuuu

SEQ ID NO: 1462079 - RNA, 19 nt, Homo sapiens
  misc_RNA (1)...(19): siRNA sense strand
cuagacaagucacagauuc

SEQ ID NO: 1462080 - RNA, 19 nt, Homo sapiens
  misc_RNA (1)...(19): siRNA sense strand
guaagacgccuccguacug

SEQ ID NO: 1462081 - RNA, 19 nt, Homo sapiens
  misc_RNA (1)...(19): siRNA sense strand
gaguuuaagcgcaagcaua

SEQ ID NO: 1462082 - RNA, 19 nt, Homo sapiens
  misc_RNA (1)...(19): siRNA sense strand
ccaaagaugcuggaacuau

SEQ ID NO: 1462083 - RNA, 19 nt, Homo sapiens
  misc_RNA (1)...(19): siRNA sense strand
gaacugaauaagagcauca

SEQ ID NO: 1462084 - RNA, 19 nt, Homo sapiens
  misc_RNA (1)...(19): siRNA sense strand
caaagaaucaaguugcaau

SEQ ID NO: 1462085 - RNA, 19 nt, Homo sapiens
  misc_RNA (1)...(19): siRNA sense strand
acacagaccuucacuaccu

SEQ ID NO: 1462086 - RNA, 19 nt, Homo sapiens
  misc_RNA (1)...(19): siRNA sense strand
cguaauaccaccauuccua

SEQ ID NO: 1462087 - RNA, 19 nt, Homo sapiens
  misc_RNA (1)...(19): siRNA sense strand
ggaaaagaacugaauaaga

SEQ ID NO: 1462088 - RNA, 19 nt, Homo sapiens
  misc_RNA (1)...(19): siRNA sense strand
caagcuaugucgccuuuac

SEQ ID NO: 1462089 - RNA, 19 nt, Homo sapiens
  misc_RNA (1)...(19): siRNA sense strand
ccucagggcccaccauuga

SEQ ID NO: 1462090 - RNA, 19 nt, Homo sapiens
  misc_RNA (1)...(19): siRNA sense strand
guuggugguucuacucgua

SEQ ID NO: 1462091 - RNA, 19 nt, Homo sapiens
  misc_RNA (1)...(19): siRNA sense strand
gccaacugcugcugcuauu

SEQ ID NO: 1462092 - RNA, 19 nt, Homo sapiens
  misc_RNA (1)...(19): siRNA sense strand
uguccagucugauaugaaa

SEQ ID NO: 1462093 - RNA, 19 nt, Homo sapiens
  misc_RNA (1)...(19): siRNA sense strand
gcuguuguccagucugaua

SEQ ID NO: 1462094 - RNA, 19 nt, Homo sapiens
  misc_RNA (1)...(19): siRNA sense strand
agagaaagcccuucgagau

SEQ ID NO: 1462095 - RNA, 19 nt, Homo sapiens
  misc_RNA (1)...(19): siRNA sense strand
gagaacaagagagcuguaa

SEQ ID NO: 1462096 - RNA, 19 nt, Homo sapiens
  misc_RNA (1)...(19): siRNA sense strand
gaccugcaguugguauuga

SEQ ID NO: 1462097 - RNA, 19 nt, Homo sapiens
  misc_RNA (1)...(19): siRNA sense strand
agaaggacaucagugagaa

SEQ ID NO: 1462098 - RNA, 19 nt, Homo sapiens
  misc_RNA (1)...(19): siRNA sense strand
gaucggugaugccgcaaag

SEQ ID NO: 1462099 - RNA, 19 nt, Homo sapiens
  misc_RNA (1)...(19): siRNA sense strand
cauugaagagguugauuaa

SEQ ID NO: 1462100 - RNA, 19 nt, Homo sapiens
  misc_RNA (1)...(19): siRNA sense strand
gaccuucacuaccuauucu

SEQ ID NO: 1462101 - RNA, 19 nt, Homo sapiens
  misc_RNA (1)...(19): siRNA sense strand
ggaaaagucgagauaauug

SEQ ID NO: 1462102 - RNA, 19 nt, Homo sapiens
  misc_RNA (1)...(19): siRNA sense strand
cagauuugaugaugcuguu

SEQ ID NO: 1462103 - RNA, 19 nt, Homo sapiens
  misc_RNA (1)...(19): siRNA sense strand
ggaaaccgaaccacuccaa

SEQ ID NO: 1462104 - RNA, 19 nt, Homo sapiens
  misc_RNA (1)...(19): siRNA sense strand
ccgaaccacuccaagcuau

SEQ ID NO: 1462105 - RNA, 19 nt, Homo sapiens
  misc_RNA (1)...(19): siRNA sense strand
gaaccacuccaagcuaugu

SEQ ID NO: 1462106 - RNA, 19 nt, Homo sapiens
  misc_RNA (1)...(19): siRNA sense strand
acaagucacagauucauga

SEQ ID NO: 1462107 - RNA, 19 nt, Homo sapiens
  misc_RNA (1)...(19): siRNA sense strand
ugcuauugcuuacggcuua

SEQ ID NO: 1462108 - RNA, 19 nt, Homo sapiens
  misc_RNA (1)...(19): siRNA sense strand
uaccaaagaugcuggaacu

SEQ ID NO: 1462109 - RNA, 19 nt, Homo sapiens
  misc_RNA (1)...(19): siRNA sense strand
ggcccaagguccaaguaga

SEQ ID NO: 1462110 - RNA, 19 nt, Homo sapiens
  misc_RNA (1)...(19): siRNA sense strand
gcacggaaaagucgagaua

SEQ ID NO: 1462111 - RNA, 19 nt, Homo sapiens
  misc_RNA (1)...(19): siRNA sense strand
gaugaaggaaauugcagaa

SEQ ID NO: 1462112 - RNA, 19 nt, Homo sapiens
  misc_RNA (1)...(19): siRNA sense strand
ccuucgagaugccaaacua

SEQ ID NO: 1462113 - RNA, 19 nt, Homo sapiens
  misc_RNA (1)...(19): siRNA sense strand
gcacccaggccaguauuga

SEQ ID NO: 1462114 - RNA, 19 nt, Homo sapiens
  misc_RNA (1)...(19): siRNA sense strand
aaacauuggcccuuuaugg

SEQ ID NO: 1462115 - RNA, 19 nt, Homo sapiens
  misc_RNA (1)...(19): siRNA sense strand
ucacagauucaugauauug

SEQ ID NO: 1462116 - RNA, 19 nt, Homo sapiens
  misc_RNA (1)...(19): siRNA sense strand
auaagaaggacaucaguga

SEQ ID NO: 1462117 - RNA, 19 nt, Homo sapiens
  misc_RNA (1)...(19): siRNA sense strand
cuucuaugguucugacaaa

SEQ ID NO: 1462118 - RNA, 19 nt, Homo sapiens
  misc_RNA (1)...(19): siRNA sense strand
ccaagguccaaguagaaua

SEQ ID NO: 1462119 - RNA, 19 nt, Homo sapiens
  misc_RNA (1)...(19): siRNA sense strand
augaaacauuggcccuuua

SEQ ID NO: 1462120 - RNA, 19 nt, Homo sapiens
  misc_RNA (1)...(19): siRNA sense strand
uccaagcuaugucgccuuu

SEQ ID NO: 1462121 - RNA, 19 nt, Homo sapiens
  misc_RNA (1)...(19): siRNA sense strand
cauuacccgugcccgauuu

SEQ ID NO: 1462122 - RNA, 19 nt, Homo sapiens
  misc_RNA (1)...(19): siRNA sense strand
gcccaagguccaaguagaa

SEQ ID NO: 1462123 - RNA, 19 nt, Homo sapiens
  misc_RNA (1)...(19): siRNA sense strand
ugggaagacuguuaccaau

SEQ ID NO: 1462124 - RNA, 19 nt, Homo sapiens
  misc_RNA (1)...(19): siRNA sense strand
ggaugucacuccucuuucc

SEQ ID NO: 1462125 - RNA, 19 nt, Homo sapiens
  misc_RNA (1)...(19): siRNA sense strand
ucacagugccagcuuacuu

SEQ ID NO: 1462126 - RNA, 19 nt, Homo sapiens
  misc_RNA (1)...(19): siRNA sense strand
gggaagacuguuaccaaug

SEQ ID NO: 1462127 - RNA, 19 nt, Homo sapiens
  misc_RNA (1)...(19): siRNA sense strand
ccuuuaugguggugaauga

SEQ ID NO: 1462128 - RNA, 19 nt, Homo sapiens
  misc_RNA (1)...(19): siRNA sense strand
caacccugaugaagcuguu

SEQ ID NO: 1462129 - RNA, 19 nt, Homo sapiens
  misc_RNA (1)...(19): siRNA sense strand
aaagaugcuggaacuauug

SEQ ID NO: 1462130 - RNA, 19 nt, Homo sapiens
  misc_RNA (1)...(19): siRNA sense strand
acugaaugcugaccuguuc

SEQ ID NO: 1462131 - RNA, 19 nt, Homo sapiens
  misc_RNA (1)...(19): siRNA sense strand
gaaacauuggcccuuuaug

SEQ ID NO: 1462132 - RNA, 19 nt, Homo sapiens
  misc_RNA (1)...(19): siRNA sense strand
cacagugccagcuuacuuu

SEQ ID NO: 1462133 - RNA, 19 nt, Homo sapiens
  misc_RNA (1)...(19): siRNA sense strand
gcaaugaaccccaccaaca

SEQ ID NO: 1462134 - RNA, 19 nt, Homo sapiens
  misc_RNA (1)...(19): siRNA sense strand
acaaagaugaaggaaauug

SEQ ID NO: 1462135 - RNA, 19 nt, Homo sapiens
  misc_RNA (1)...(19): siRNA sense strand
cacagaccuucacuaccua

SEQ ID NO: 1462136 - RNA, 19 nt, Homo sapiens
  misc_RNA (1)...(19): siRNA sense strand
agacacagaccuucacuac

SEQ ID NO: 1462137 - RNA, 19 nt, Homo sapiens
  misc_RNA (1)...(19): siRNA sense strand
gaugccaaacgucugauug

SEQ ID NO: 1462138 - RNA, 19 nt, Homo sapiens
  misc_RNA (1)...(19): siRNA sense strand
guccucaucaagcguaaua

SEQ ID NO: 1462139 - RNA, 19 nt, Homo sapiens
  misc_RNA (1)...(19): siRNA sense strand
gcaguugguauugaucuug

SEQ ID NO: 1462140 - RNA, 19 nt, Homo sapiens
  misc_RNA (1)...(19): siRNA sense strand
aaacuagacaagucacaga

SEQ ID NO: 1462141 - RNA, 19 nt, Homo sapiens
  misc_RNA (1)...(19): siRNA sense strand
gcuggucucaauguacuua

SEQ ID NO: 1462142 - RNA, 19 nt, Homo sapiens
  misc_RNA (1)...(19): siRNA sense strand
ggucucaauguacuuagaa

SEQ ID NO: 1462143 - RNA, 19 nt, Homo sapiens
  misc_RNA (1)...(19): siRNA sense strand
ggaccugcaguugguauug

SEQ ID NO: 1462144 - RNA, 19 nt, Homo sapiens
  misc_RNA (1)...(19): siRNA sense strand
aguuuaagcgcaagcauaa

SEQ ID NO: 1462145 - RNA, 19 nt, Homo sapiens
  misc_RNA (1)...(19): siRNA sense strand
ugaaacauuggcccuuuau

SEQ ID NO: 1462146 - RNA, 19 nt, Homo sapiens
  misc_RNA (1)...(19): siRNA sense strand
gcccaccauugaagagguu

SEQ ID NO: 1462147 - RNA, 19 nt, Homo sapiens
  misc_RNA (1)...(19): siRNA sense strand
gcaagcauaagaaggacau

SEQ ID NO: 1462148 - RNA, 19 nt, Homo sapiens
  misc_RNA (1)...(19): siRNA sense strand
ccagaggaggugucuucua

SEQ ID NO: 1462149 - RNA, 19 nt, Homo sapiens
  misc_RNA (1)...(19): siRNA sense strand
gcgucaggcuaccaaagau

SEQ ID NO: 1462150 - RNA, 19 nt, Homo sapiens
  misc_RNA (1)...(19): siRNA sense strand
ugacaaaggauaacaaccu

SEQ ID NO: 1462151 - RNA, 19 nt, Homo sapiens
  misc_RNA (1)...(19): siRNA sense strand
gagcgugccaugacaaagg

SEQ ID NO: 1462152 - RNA, 19 nt, Homo sapiens
  misc_RNA (1)...(19): siRNA sense strand
aagaaggacaucagugaga

SEQ ID NO: 1462153 - RNA, 19 nt, Homo sapiens
  misc_RNA (1)...(19): siRNA sense strand
gaaacgugcucaucuuuga

SEQ ID NO: 1462154 - RNA, 19 nt, Homo sapiens
  misc_RNA (1)...(19): siRNA sense strand
ugacaaagaugaaggaaau

SEQ ID NO: 1462155 - RNA, 19 nt, Homo sapiens
  misc_RNA (1)...(19): siRNA sense strand
caaagaugcuggaacuauu

SEQ ID NO: 1462156 - RNA, 19 nt, Homo sapiens
  misc_RNA (1)...(19): siRNA sense strand
gaaaagaacugaauaagag

SEQ ID NO: 1462157 - RNA, 19 nt, Homo sapiens
  misc_RNA (1)...(19): siRNA sense strand
ggaggugucuucuaugguu

SEQ ID NO: 1462158 - RNA, 19 nt, Homo sapiens
  misc_RNA (1)...(19): siRNA sense strand
gaacaagagagcuguaaga

SEQ ID NO: 1462159 - RNA, 19 nt, Homo sapiens
  misc_RNA (1)...(19): siRNA sense strand
cagaggaggugucuucuau

SEQ ID NO: 1462160 - RNA, 19 nt, Homo sapiens
  misc_RNA (1)...(19): siRNA sense strand
ggacgcagauuugaugaug

SEQ ID NO: 1462161 - RNA, 19 nt, Homo sapiens
  misc_RNA (1)...(19): siRNA sense strand
gaucgauucucucuaugaa

SEQ ID NO: 1462162 - RNA, 19 nt, Homo sapiens
  misc_RNA (1)...(19): siRNA sense strand
gaaagaaacgugcucaucu

SEQ ID NO: 1462163 - RNA, 19 nt, Homo sapiens
  misc_RNA (1)...(19): siRNA sense strand
ggaagacuguuaccaaugc

SEQ ID NO: 1462164 - RNA, 19 nt, Homo sapiens
  misc_RNA (1)...(19): siRNA sense strand
cugagaauguucaagauuu

SEQ ID NO: 1462165 - RNA, 19 nt, Homo sapiens
  misc_RNA (1)...(19): siRNA sense strand
gagaaagcccuucgagaug

SEQ ID NO: 1462166 - RNA, 19 nt, Homo sapiens
  misc_RNA (1)...(19): siRNA sense strand
gaggaggugucuucuaugg

SEQ ID NO: 1462167 - RNA, 19 nt, Homo sapiens
  misc_RNA (1)...(19): siRNA sense strand
ggacaucagugagaacaag

SEQ ID NO: 1462168 - RNA, 19 nt, Homo sapiens
  misc_RNA (1)...(19): siRNA sense strand
caagggaccugcaguuggu

SEQ ID NO: 1462169 - RNA, 19 nt, Homo sapiens
  misc_RNA (1)...(19): siRNA sense strand
agucacagauucaugauau

SEQ ID NO: 1462170 - RNA, 19 nt, Homo sapiens
  misc_RNA (1)...(19): siRNA sense strand
agaaucaaguugcaaugaa

SEQ ID NO: 1462171 - RNA, 19 nt, Homo sapiens
  misc_RNA (1)...(19): siRNA sense strand
ugagaauguucaagauuug

SEQ ID NO: 1462172 - RNA, 19 nt, Homo sapiens
  misc_RNA (1)...(19): siRNA sense strand
uauugaggauggaaucuuu

SEQ ID NO: 1462173 - RNA, 19 nt, Homo sapiens
  misc_RNA (1)...(19): siRNA sense strand
agucugauaugaaacauug

SEQ ID NO: 1462174 - RNA, 19 nt, Homo sapiens
  misc_RNA (1)...(19): siRNA sense strand
gaaucaaguugcaaugaac

SEQ ID NO: 1462175 - RNA, 19 nt, Homo sapiens
  misc_RNA (1)...(19): siRNA sense strand
ccauugaagagguugauua

SEQ ID NO: 1462176 - RNA, 19 nt, Homo sapiens
  misc_RNA (1)...(19): siRNA sense strand
ggaaucgacuucuauaccu

SEQ ID NO: 1462177 - RNA, 19 nt, Homo sapiens
  misc_RNA (1)...(19): siRNA sense strand
cgacuucuauaccuccauu

SEQ ID NO: 1462178 - RNA, 19 nt, Homo sapiens
  misc_RNA (1)...(19): siRNA sense strand
uaugaaacauuggcccuuu

SEQ ID NO: 1462179 - RNA, 19 nt, Homo sapiens
  misc_RNA (1)...(19): siRNA sense strand
cuagacaagucacagauuc

SEQ ID NO: 1462180 - RNA, 19 nt, Homo sapiens
  misc_RNA (1)...(19): siRNA sense strand
guaagacgccuccguacug

SEQ ID NO: 1462181 - RNA, 19 nt, Homo sapiens
  misc_RNA (1)...(19): siRNA sense strand
gaguuuaagcgcaagcaua

SEQ ID NO: 1462182 - RNA, 19 nt, Homo sapiens
  misc_RNA (1)...(19): siRNA sense strand
ccaaagaugcuggaacuau

SEQ ID NO: 1462183 - RNA, 19 nt, Homo sapiens
  misc_RNA (1)...(19): siRNA sense strand
gaacugaauaagagcauca

SEQ ID NO: 1462184 - RNA, 19 nt, Homo sapiens
  misc_RNA (1)...(19): siRNA sense strand
caaagaaucaaguugcaau

SEQ ID NO: 1462185 - RNA, 19 nt, Homo sapiens
  misc_RNA (1)...(19): siRNA sense strand
acacagaccuucacuaccu

SEQ ID NO: 1462186 - RNA, 19 nt, Homo sapiens
  misc_RNA (1)...(19): siRNA sense strand
cguaauaccaccauuccua

SEQ ID NO: 1462187 - RNA, 19 nt, Homo sapiens
  misc_RNA (1)...(19): siRNA sense strand
ggaaaagaacugaauaaga

SEQ ID NO: 1462188 - RNA, 19 nt, Homo sapiens
  misc_RNA (1)...(19): siRNA sense strand
caagcuaugucgccuuuac

SEQ ID NO: 1462189 - RNA, 19 nt, Homo sapiens
  misc_RNA (1)...(19): siRNA sense strand
ccucagggcccaccauuga

SEQ ID NO: 1462190 - RNA, 19 nt, Homo sapiens
  misc_RNA (1)...(19): siRNA sense strand
guuggugguucuacucgua

SEQ ID NO: 1462191 - RNA, 19 nt, Homo sapiens
  misc_RNA (1)...(19): siRNA sense strand
gccaacugcugcugcuauu

SEQ ID NO: 1462192 - RNA, 19 nt, Homo sapiens
  misc_RNA (1)...(19): siRNA sense strand
uguccagucugauaugaaa

SEQ ID NO: 1462193 - RNA, 19 nt, Homo sapiens
  misc_RNA (1)...(19): siRNA sense strand
gcuguuguccagucugaua

SEQ ID NO: 1462194 - RNA, 19 nt, Homo sapiens
  misc_RNA (1)...(19): siRNA sense strand
agagaaagcccuucgagau

SEQ ID NO: 1462195 - RNA, 19 nt, Homo sapiens
  misc_RNA (1)...(19): siRNA sense strand
gagaacaagagagcuguaa

SEQ ID NO: 1462196 - RNA, 19 nt, Homo sapiens
  misc_RNA (1)...(19): siRNA sense strand
gaccugcaguugguauuga

SEQ ID NO: 1462197 - RNA, 19 nt, Homo sapiens
  misc_RNA (1)...(19): siRNA sense strand
agaaggacaucagugagaa

SEQ ID NO: 1462198 - RNA, 19 nt, Homo sapiens
  misc_RNA (1)...(19): siRNA sense strand
gaucggugaugccgcaaag

SEQ ID NO: 1462199 - RNA, 19 nt, Homo sapiens
  misc_RNA (1)...(19): siRNA sense strand
cauugaagagguugauuaa

SEQ ID NO: 1462200 - RNA, 19 nt, Homo sapiens
  misc_RNA (1)...(19): siRNA sense strand
gaccuucacuaccuauucu

SEQ ID NO: 1462201 - RNA, 19 nt, Homo sapiens
  misc_RNA (1)...(19): siRNA sense strand
ggaaaagucgagauaauug

SEQ ID NO: 1462202 - RNA, 19 nt, Homo sapiens
  misc_RNA (1)...(19): siRNA sense strand
cagauuugaugaugcuguu

SEQ ID NO: 1462203 - RNA, 19 nt, Homo sapiens
  misc_RNA (1)...(19): siRNA sense strand
ggaaaccgaaccacuccaa

SEQ ID NO: 1462204 - RNA, 19 nt, Homo sapiens
  misc_RNA (1)...(19): siRNA sense strand
ccgaaccacuccaagcuau

SEQ ID NO: 1462205 - RNA, 19 nt, Homo sapiens
  misc_RNA (1)...(19): siRNA sense strand
gaaccacuccaagcuaugu

SEQ ID NO: 1462206 - RNA, 19 nt, Homo sapiens
  misc_RNA (1)...(19): siRNA sense strand
acaagucacagauucauga

SEQ ID NO: 1462207 - RNA, 19 nt, Homo sapiens
  misc_RNA (1)...(19): siRNA sense strand
ugcuauugcuuacggcuua

SEQ ID NO: 1462208 - RNA, 19 nt, Homo sapiens
  misc_RNA (1)...(19): siRNA sense strand
uaccaaagaugcuggaacu

SEQ ID NO: 1462209 - RNA, 19 nt, Homo sapiens
  misc_RNA (1)...(19): siRNA sense strand
ggcccaagguccaaguaga

SEQ ID NO: 1462210 - RNA, 19 nt, Homo sapiens
  misc_RNA (1)...(19): siRNA sense strand
gcacggaaaagucgagaua

SEQ ID NO: 1462211 - RNA, 19 nt, Homo sapiens
  misc_RNA (1)...(19): siRNA sense strand
gaugaaggaaauugcagaa

SEQ ID NO: 1462212 - RNA, 19 nt, Homo sapiens
  misc_RNA (1)...(19): siRNA sense strand
ccuucgagaugccaaacua

SEQ ID NO: 1462213 - RNA, 19 nt, Homo sapiens
  misc_RNA (1)...(19): siRNA sense strand
gcacccaggccaguauuga

SEQ ID NO: 1462214 - RNA, 19 nt, Homo sapiens
  misc_RNA (1)...(19): siRNA sense strand
aaacauuggcccuuuaugg

SEQ ID NO: 1462215 - RNA, 19 nt, Homo sapiens
  misc_RNA (1)...(19): siRNA sense strand
ucacagauucaugauauug

SEQ ID NO: 1462216 - RNA, 19 nt, Homo sapiens
  misc_RNA (1)...(19): siRNA sense strand
auaagaaggacaucaguga

SEQ ID NO: 1462217 - RNA, 19 nt, Homo sapiens
  misc_RNA (1)...(19): siRNA sense strand
cuucuaugguucugacaaa

SEQ ID NO: 1462218 - RNA, 19 nt, Homo sapiens
  misc_RNA (1)...(19): siRNA sense strand
ccaagguccaaguagaaua

SEQ ID NO: 1462219 - RNA, 19 nt, Homo sapiens
  misc_RNA (1)...(19): siRNA sense strand
augaaacauuggcccuuua

SEQ ID NO: 1462220 - RNA, 19 nt, Homo sapiens
  misc_RNA (1)...(19): siRNA sense strand
uccaagcuaugucgccuuu

SEQ ID NO: 1462221 - RNA, 19 nt, Homo sapiens
  misc_RNA (1)...(19): siRNA sense strand
cauuacccgugcccgauuu

SEQ ID NO: 1462222 - RNA, 19 nt, Homo sapiens
  misc_RNA (1)...(19): siRNA sense strand
gcccaagguccaaguagaa

SEQ ID NO: 1462223 - RNA, 19 nt, Homo sapiens
  misc_RNA (1)...(19): siRNA sense strand
ugggaagacuguuaccaau

SEQ ID NO: 1462224 - RNA, 19 nt, Homo sapiens
  misc_RNA (1)...(19): siRNA sense strand
ggaugucacuccucuuucc

SEQ ID NO: 1462225 - RNA, 19 nt, Homo sapiens
  misc_RNA (1)...(19): siRNA sense strand
ucacagugccagcuuacuu

SEQ ID NO: 1462226 - RNA, 19 nt, Homo sapiens
  misc_RNA (1)...(19): siRNA sense strand
gggaagacuguuaccaaug

SEQ ID NO: 1462227 - RNA, 19 nt, Homo sapiens
  misc_RNA (1)...(19): siRNA sense strand
ccuuuaugguggugaauga

SEQ ID NO: 1462228 - RNA, 19 nt, Homo sapiens
  misc_RNA (1)...(19): siRNA sense strand
caacccugaugaagcuguu

SEQ ID NO: 1462229 - RNA, 19 nt, Homo sapiens
  misc_RNA (1)...(19): siRNA sense strand
aaagaugcuggaacuauug

SEQ ID NO: 1462230 - RNA, 19 nt, Homo sapiens
  misc_RNA (1)...(19): siRNA sense strand
acugaaugcugaccuguuc

SEQ ID NO: 1462231 - RNA, 19 nt, Homo sapiens
  misc_RNA (1)...(19): siRNA sense strand
gaaacauuggcccuuuaug

SEQ ID NO: 1462232 - RNA, 19 nt, Homo sapiens
  misc_RNA (1)...(19): siRNA sense strand
cacagugccagcuuacuuu

SEQ ID NO: 1462233 - RNA, 19 nt, Homo sapiens
  misc_RNA (1)...(19): siRNA sense strand
gcaaugaaccccaccaaca

SEQ ID NO: 1462234 - RNA, 19 nt, Homo sapiens
  misc_RNA (1)...(19): siRNA sense strand
acaaagaugaaggaaauug

SEQ ID NO: 1462235 - RNA, 19 nt, Homo sapiens
  misc_RNA (1)...(19): siRNA sense strand
cacagaccuucacuaccua

SEQ ID NO: 1462236 - RNA, 19 nt, Homo sapiens
  misc_RNA (1)...(19): siRNA sense strand
agacacagaccuucacuac

SEQ ID NO: 1462237 - RNA, 19 nt, Homo sapiens
  misc_RNA (1)...(19): siRNA sense strand
gaugccaaacgucugauug

SEQ ID NO: 1462238 - RNA, 19 nt, Homo sapiens
  misc_RNA (1)...(19): siRNA sense strand
guccucaucaagcguaaua

SEQ ID NO: 1462239 - RNA, 19 nt, Homo sapiens
  misc_RNA (1)...(19): siRNA sense strand
gcaguugguauugaucuug

SEQ ID NO: 1462240 - RNA, 19 nt, Homo sapiens
  misc_RNA (1)...(19): siRNA sense strand
aaacuagacaagucacaga

SEQ ID NO: 1462241 - RNA, 19 nt, Homo sapiens
  misc_RNA (1)...(19): siRNA sense strand
gcuggucucaauguacuua

SEQ ID NO: 1462242 - RNA, 19 nt, Homo sapiens
  misc_RNA (1)...(19): siRNA sense strand
ggucucaauguacuuagaa

SEQ ID NO: 1462243 - RNA, 19 nt, Homo sapiens
  misc_RNA (1)...(19): siRNA sense strand
ggaccugcaguugguauug

SEQ ID NO: 1462244 - RNA, 19 nt, Homo sapiens
  misc_RNA (1)...(19): siRNA sense strand
aguuuaagcgcaagcauaa

SEQ ID NO: 1462245 - RNA, 19 nt, Homo sapiens
  misc_RNA (1)...(19): siRNA sense strand
ugaaacauuggcccuuuau

SEQ ID NO: 1462246 - RNA, 19 nt, Homo sapiens
  misc_RNA (1)...(19): siRNA sense strand
gcccaccauugaagagguu

SEQ ID NO: 1462247 - RNA, 19 nt, Homo sapiens
  misc_RNA (1)...(19): siRNA sense strand
gcaagcauaagaaggacau

SEQ ID NO: 1462248 - RNA, 19 nt, Homo sapiens
  misc_RNA (1)...(19): siRNA sense strand
ccagaggaggugucuucua

SEQ ID NO: 1462249 - RNA, 19 nt, Homo sapiens
  misc_RNA (1)...(19): siRNA sense strand
gcgucaggcuaccaaagau

SEQ ID NO: 1462250 - RNA, 19 nt, Homo sapiens
  misc_RNA (1)...(19): siRNA sense strand
ugacaaaggauaacaaccu

SEQ ID NO: 1462251 - RNA, 19 nt, Homo sapiens
  misc_RNA (1)...(19): siRNA sense strand
gagcgugccaugacaaagg

SEQ ID NO: 1462252 - RNA, 19 nt, Homo sapiens
  misc_RNA (1)...(19): siRNA sense strand
aagaaggacaucagugaga

SEQ ID NO: 1462253 - RNA, 19 nt, Homo sapiens
  misc_RNA (1)...(19): siRNA sense strand
ccaccaagguuguaccauu

SEQ ID NO: 1462254 - RNA, 19 nt, Homo sapiens
  misc_RNA (1)...(19): siRNA sense strand
caccaagguuguaccauug

SEQ ID NO: 1462255 - RNA, 19 nt, Homo sapiens
  misc_RNA (1)...(19): siRNA sense strand
caaccucacugggacacuu

SEQ ID NO: 1462256 - RNA, 19 nt, Homo sapiens
  misc_RNA (1)...(19): siRNA sense strand
gcaucuacaugguacacau

SEQ ID NO: 1462257 - RNA, 19 nt, Homo sapiens
  misc_RNA (1)...(19): siRNA sense strand
gggcugcuuuggucccauu

SEQ ID NO: 1462258 - RNA, 19 nt, Homo sapiens
  misc_RNA (1)...(19): siRNA sense strand
gaaacacugaugagaccuu

SEQ ID NO: 1462259 - RNA, 19 nt, Homo sapiens
  misc_RNA (1)...(19): siRNA sense strand
gggacacacucugcaccaa

SEQ ID NO: 1462260 - RNA, 19 nt, Homo sapiens
  misc_RNA (1)...(19): siRNA sense strand
gcagcuacguauccaucgu

SEQ ID NO: 1462261 - RNA, 19 nt, Homo sapiens
  misc_RNA (1)...(19): siRNA sense strand
acacugaugagaccuucuu

SEQ ID NO: 1462262 - RNA, 19 nt, Homo sapiens
  misc_RNA (1)...(19): siRNA sense strand
ugaugagaccuucuuugga

SEQ ID NO: 1462263 - RNA, 19 nt, Homo sapiens
  misc_RNA (1)...(19): siRNA sense strand
ggaaguaccuggaacugua

SEQ ID NO: 1462264 - RNA, 19 nt, Homo sapiens
  misc_RNA (1)...(19): siRNA sense strand
gcaggaaugccagcuauua

SEQ ID NO: 1462265 - RNA, 19 nt, Homo sapiens
  misc_RNA (1)...(19): siRNA sense strand
ucaccuagauggccaggaa

SEQ ID NO: 1462266 - RNA, 19 nt, Homo sapiens
  misc_RNA (1)...(19): siRNA sense strand
caaacagcgucuccuggaa

SEQ ID NO: 1462267 - RNA, 19 nt, Homo sapiens
  misc_RNA (1)...(19): siRNA sense strand
ucaggacucuggacauuca

SEQ ID NO: 1462268 - RNA, 19 nt, Homo sapiens
  misc_RNA (1)...(19): siRNA sense strand
gaccacacccuguucuuga

SEQ ID NO: 1462269 - RNA, 19 nt, Homo sapiens
  misc_RNA (1)...(19): siRNA sense strand
cagcaggaaugccagcuau

SEQ ID NO: 1462270 - RNA, 19 nt, Homo sapiens
  misc_RNA (1)...(19): siRNA sense strand
gcgcuugccucuccaaugc

SEQ ID NO: 1462271 - RNA, 19 nt, Homo sapiens
  misc_RNA (1)...(19): siRNA sense strand
ucucaggacucuggacauu

SEQ ID NO: 1462272 - RNA, 19 nt, Homo sapiens
  misc_RNA (1)...(19): siRNA sense strand
ggacucuaccguucaccua

SEQ ID NO: 1462273 - RNA, 19 nt, Homo sapiens
  misc_RNA (1)...(19): siRNA sense strand
ggaaugccagcuauuaucu

SEQ ID NO: 1462274 - RNA, 19 nt, Homo sapiens
  misc_RNA (1)...(19): siRNA sense strand
gggagaugcucauggaaac

SEQ ID NO: 1462275 - RNA, 19 nt, Homo sapiens
  misc_RNA (1)...(19): siRNA sense strand
ugcuugagcuggagaagaa

SEQ ID NO: 1462276 - RNA, 19 nt, Homo sapiens
  misc_RNA (1)...(19): siRNA sense strand
gcuccacccuucugugaca

SEQ ID NO: 1462277 - RNA, 19 nt, Homo sapiens
  misc_RNA (1)...(19): siRNA sense strand
aaacuugaaccacaccaaa

SEQ ID NO: 1462278 - RNA, 19 nt, Homo sapiens
  misc_RNA (1)...(19): siRNA sense strand
gcaauagcaaccauaacug

SEQ ID NO: 1462279 - RNA, 19 nt, Homo sapiens
  misc_RNA (1)...(19): siRNA sense strand
gaaacuugaaccacaccaa

SEQ ID NO: 1462280 - RNA, 19 nt, Homo sapiens
  misc_RNA (1)...(19): siRNA sense strand
acugugaccucccugaguu

SEQ ID NO: 1462281 - RNA, 19 nt, Homo sapiens
  misc_RNA (1)...(19): siRNA sense strand
ggugaacucugcgggagau

SEQ ID NO: 1462282 - RNA, 19 nt, Homo sapiens
  misc_RNA (1)...(19): siRNA sense strand
uggaggagccggucucgaa

SEQ ID NO: 1462283 - RNA, 19 nt, Homo sapiens
  misc_RNA (1)...(19): siRNA sense strand
gggcuccacccuucuguga

SEQ ID NO: 1462284 - RNA, 19 nt, Homo sapiens
  misc_RNA (1)...(19): siRNA sense strand
ccaaccacacggaucauug

SEQ ID NO: 1462285 - RNA, 19 nt, Homo sapiens
  misc_RNA (1)...(19): siRNA sense strand
caggaaugccagcuauuau

SEQ ID NO: 1462286 - RNA, 19 nt, Homo sapiens
  misc_RNA (1)...(19): siRNA sense strand
gggaugaguggccugauca

SEQ ID NO: 1462287 - RNA, 19 nt, Homo sapiens
  misc_RNA (1)...(19): siRNA sense strand
caacuacguggaccagcuu

SEQ ID NO: 1462288 - RNA, 19 nt, Homo sapiens
  misc_RNA (1)...(19): siRNA sense strand
cuagauggccaggaaguga

SEQ ID NO: 1462289 - RNA, 19 nt, Homo sapiens
  misc_RNA (1)...(19): siRNA sense strand
cgggagaugcucauggaaa

SEQ ID NO: 1462290 - RNA, 19 nt, Homo sapiens
  misc_RNA (1)...(19): siRNA sense strand
acacggaucauugccacua

SEQ ID NO: 1462291 - RNA, 19 nt, Homo sapiens
  misc_RNA (1)...(19): siRNA sense strand
cugcugggauggcgcaugu

SEQ ID NO: 1462292 - RNA, 19 nt, Homo sapiens
  misc_RNA (1)...(19): siRNA sense strand
gcacuggguccuggaugga

SEQ ID NO: 1462293 - RNA, 19 nt, Homo sapiens
  misc_RNA (1)...(19): siRNA sense strand
gagaugcucauggaaacug

SEQ ID NO: 1462294 - RNA, 19 nt, Homo sapiens
  misc_RNA (1)...(19): siRNA sense strand
gggaacaaagcgggcauga

SEQ ID NO: 1462295 - RNA, 19 nt, Homo sapiens
  misc_RNA (1)...(19): siRNA sense strand
gaaugccagcuauuaucug

SEQ ID NO: 1462296 - RNA, 19 nt, Homo sapiens
  misc_RNA (1)...(19): siRNA sense strand
uaccuggaacuguacauug

SEQ ID NO: 1462297 - RNA, 19 nt, Homo sapiens
  misc_RNA (1)...(19): siRNA sense strand
caaccauaacugccacugu

SEQ ID NO: 1462298 - RNA, 19 nt, Homo sapiens
  misc_RNA (1)...(19): siRNA sense strand
ugcgggagaugcucaugga

SEQ ID NO: 1462299 - RNA, 19 nt, Homo sapiens
  misc_RNA (1)...(19): siRNA sense strand
cgcgaccucugcugcuuug

SEQ ID NO: 1462300 - RNA, 19 nt, Homo sapiens
  misc_RNA (1)...(19): siRNA sense strand
cgggaacggcuucguggaa

SEQ ID NO: 1462301 - RNA, 19 nt, Homo sapiens
  misc_RNA (1)...(19): siRNA sense strand
uccuggaagucgccaacua

SEQ ID NO: 1462302 - RNA, 19 nt, Homo sapiens
  misc_RNA (1)...(19): siRNA sense strand
ggaaguaccuggaacugua

SEQ ID NO: 1462303 - RNA, 19 nt, Homo sapiens
  misc_RNA (1)...(19): siRNA sense strand
gcaggaaugccagcuauua

SEQ ID NO: 1462304 - RNA, 19 nt, Homo sapiens
  misc_RNA (1)...(19): siRNA sense strand
ucaccuagauggccaggaa

SEQ ID NO: 1462305 - RNA, 19 nt, Homo sapiens
  misc_RNA (1)...(19): siRNA sense strand
caaacagcgucuccuggaa

SEQ ID NO: 1462306 - RNA, 19 nt, Homo sapiens
  misc_RNA (1)...(19): siRNA sense strand
ucaggacucuggacauuca

SEQ ID NO: 1462307 - RNA, 19 nt, Homo sapiens
  misc_RNA (1)...(19): siRNA sense strand
gaccacacccuguucuuga

SEQ ID NO: 1462308 - RNA, 19 nt, Homo sapiens
  misc_RNA (1)...(19): siRNA sense strand
cagcaggaaugccagcuau

SEQ ID NO: 1462309 - RNA, 19 nt, Homo sapiens
  misc_RNA (1)...(19): siRNA sense strand
gcgcuugccucuccaaugc

SEQ ID NO: 1462310 - RNA, 19 nt, Homo sapiens
  misc_RNA (1)...(19): siRNA sense strand
ucucaggacucuggacauu

SEQ ID NO: 1462311 - RNA, 19 nt, Homo sapiens
  misc_RNA (1)...(19): siRNA sense strand
ggacucuaccguucaccua

SEQ ID NO: 1462312 - RNA, 19 nt, Homo sapiens
  misc_RNA (1)...(19): siRNA sense strand
ggaaugccagcuauuaucu

SEQ ID NO: 1462313 - RNA, 19 nt, Homo sapiens
  misc_RNA (1)...(19): siRNA sense strand
gggagaugcucauggaaac

SEQ ID NO: 1462314 - RNA, 19 nt, Homo sapiens
  misc_RNA (1)...(19): siRNA sense strand
ugcuugagcuggagaagaa

SEQ ID NO: 1462315 - RNA, 19 nt, Homo sapiens
  misc_RNA (1)...(19): siRNA sense strand
gcuccacccuucugugaca

SEQ ID NO: 1462316 - RNA, 19 nt, Homo sapiens
  misc_RNA (1)...(19): siRNA sense strand
aaacuugaaccacaccaaa

SEQ ID NO: 1462317 - RNA, 19 nt, Homo sapiens
  misc_RNA (1)...(19): siRNA sense strand
gcaauagcaaccauaacug

SEQ ID NO: 1462318 - RNA, 19 nt, Homo sapiens
  misc_RNA (1)...(19): siRNA sense strand
gaaacuugaaccacaccaa

SEQ ID NO: 1462319 - RNA, 19 nt, Homo sapiens
  misc_RNA (1)...(19): siRNA sense strand
acugugaccucccugaguu

SEQ ID NO: 1462320 - RNA, 19 nt, Homo sapiens
  misc_RNA (1)...(19): siRNA sense strand
ggugaacucugcgggagau

SEQ ID NO: 1462321 - RNA, 19 nt, Homo sapiens
  misc_RNA (1)...(19): siRNA sense strand
uggaggagccggucucgaa

SEQ ID NO: 1462322 - RNA, 19 nt, Homo sapiens
  misc_RNA (1)...(19): siRNA sense strand
gggcuccacccuucuguga

SEQ ID NO: 1462323 - RNA, 19 nt, Homo sapiens
  misc_RNA (1)...(19): siRNA sense strand
ccaaccacacggaucauug

SEQ ID NO: 1462324 - RNA, 19 nt, Homo sapiens
  misc_RNA (1)...(19): siRNA sense strand
caggaaugccagcuauuau

SEQ ID NO: 1462325 - RNA, 19 nt, Homo sapiens
  misc_RNA (1)...(19): siRNA sense strand
gggaugaguggccugauca

SEQ ID NO: 1462326 - RNA, 19 nt, Homo sapiens
  misc_RNA (1)...(19): siRNA sense strand
caacuacguggaccagcuu

SEQ ID NO: 1462327 - RNA, 19 nt, Homo sapiens
  misc_RNA (1)...(19): siRNA sense strand
cuagauggccaggaaguga

SEQ ID NO: 1462328 - RNA, 19 nt, Homo sapiens
  misc_RNA (1)...(19): siRNA sense strand
cgggagaugcucauggaaa

SEQ ID NO: 1462329 - RNA, 19 nt, Homo sapiens
  misc_RNA (1)...(19): siRNA sense strand
acacggaucauugccacua

SEQ ID NO: 1462330 - RNA, 19 nt, Homo sapiens
  misc_RNA (1)...(19): siRNA sense strand
cugcugggauggcgcaugu

SEQ ID NO: 1462331 - RNA, 19 nt, Homo sapiens
  misc_RNA (1)...(19): siRNA sense strand
gcacuggguccuggaugga

SEQ ID NO: 1462332 - RNA, 19 nt, Homo sapiens
  misc_RNA (1)...(19): siRNA sense strand
gagaugcucauggaaacug

SEQ ID NO: 1462333 - RNA, 19 nt, Homo sapiens
  misc_RNA (1)...(19): siRNA sense strand
gggaacaaagcgggcauga

SEQ ID NO: 1462334 - RNA, 19 nt, Homo sapiens
  misc_RNA (1)...(19): siRNA sense strand
gaaugccagcuauuaucug

SEQ ID NO: 1462335 - RNA, 19 nt, Homo sapiens
  misc_RNA (1)...(19): siRNA sense strand
uaccuggaacuguacauug

SEQ ID NO: 1462336 - RNA, 19 nt, Homo sapiens
  misc_RNA (1)...(19): siRNA sense strand
caaccauaacugccacugu

SEQ ID NO: 1462337 - RNA, 19 nt, Homo sapiens
  misc_RNA (1)...(19): siRNA sense strand
ugcgggagaugcucaugga

SEQ ID NO: 1462338 - RNA, 19 nt, Homo sapiens
  misc_RNA (1)...(19): siRNA sense strand
cgcgaccucugcugcuuug

SEQ ID NO: 1462339 - RNA, 19 nt, Homo sapiens
  misc_RNA (1)...(19): siRNA sense strand
cgggaacggcuucguggaa

SEQ ID NO: 1462340 - RNA, 19 nt, Homo sapiens
  misc_RNA (1)...(19): siRNA sense strand
uccuggaagucgccaacua

SEQ ID NO: 1462341 - RNA, 19 nt, Homo sapiens
  misc_RNA (1)...(19): siRNA sense strand
gaaauuccagcuuacauua

SEQ ID NO: 1462342 - RNA, 19 nt, Homo sapiens
  misc_RNA (1)...(19): siRNA sense strand
caagucaguucguauuaua

SEQ ID NO: 1462343 - RNA, 19 nt, Homo sapiens
  misc_RNA (1)...(19): siRNA sense strand
gauguucacuguguuauuu

SEQ ID NO: 1462344 - RNA, 19 nt, Homo sapiens
  misc_RNA (1)...(19): siRNA sense strand
ucuaauaacugcauucuga

SEQ ID NO: 1462345 - RNA, 19 nt, Homo sapiens
  misc_RNA (1)...(19): siRNA sense strand
uaucauagcugcaguacug

SEQ ID NO: 1462346 - RNA, 19 nt, Homo sapiens
  misc_RNA (1)...(19): siRNA sense strand
ugauugaaauuccagcuua

SEQ ID NO: 1462347 - RNA, 19 nt, Homo sapiens
  misc_RNA (1)...(19): siRNA sense strand
gcccaggcguuauaucaua

SEQ ID NO: 1462348 - RNA, 19 nt, Homo sapiens
  misc_RNA (1)...(19): siRNA sense strand
cccaauggcuucaauggua

SEQ ID NO: 1462349 - RNA, 19 nt, Homo sapiens
  misc_RNA (1)...(19): siRNA sense strand
gcaagucaguucguauuau

SEQ ID NO: 1462350 - RNA, 19 nt, Homo sapiens
  misc_RNA (1)...(19): siRNA sense strand
ggccagaucuccaacuaug

SEQ ID NO: 1462351 - RNA, 19 nt, Homo sapiens
  misc_RNA (1)...(19): siRNA sense strand
ggagauguucacuguguua

SEQ ID NO: 1462352 - RNA, 19 nt, Homo sapiens
  misc_RNA (1)...(19): siRNA sense strand
ucuggaugcuccuaauuua

SEQ ID NO: 1462353 - RNA, 19 nt, Homo sapiens
  misc_RNA (1)...(19): siRNA sense strand
gcugggagauguucacugu

SEQ ID NO: 1462354 - RNA, 19 nt, Homo sapiens
  misc_RNA (1)...(19): siRNA sense strand
gagcagaugcagaaaguga

SEQ ID NO: 1462355 - RNA, 19 nt, Homo sapiens
  misc_RNA (1)...(19): siRNA sense strand
gaaugacucuuccagaaac

SEQ ID NO: 1462356 - RNA, 19 nt, Homo sapiens
  misc_RNA (1)...(19): siRNA sense strand
guucaggacucggaauauu

SEQ ID NO: 1462357 - RNA, 19 nt, Homo sapiens
  misc_RNA (1)...(19): siRNA sense strand
uagagaggcugaagauauc

SEQ ID NO: 1462358 - RNA, 19 nt, Homo sapiens
  misc_RNA (1)...(19): siRNA sense strand
gagacucaauggagacaga

SEQ ID NO: 1462359 - RNA, 19 nt, Homo sapiens
  misc_RNA (1)...(19): siRNA sense strand
gcagugauauuugauucug

SEQ ID NO: 1462360 - RNA, 19 nt, Homo sapiens
  misc_RNA (1)...(19): siRNA sense strand
ccugaaaguuugggaauga

SEQ ID NO: 1462361 - RNA, 19 nt, Homo sapiens
  misc_RNA (1)...(19): siRNA sense strand
uaccagcagugauauuuga

SEQ ID NO: 1462362 - RNA, 19 nt, Homo sapiens
  misc_RNA (1)...(19): siRNA sense strand
ggagaugccuaccugaacu

SEQ ID NO: 1462363 - RNA, 19 nt, Homo sapiens
  misc_RNA (1)...(19): siRNA sense strand
ugugguagccuucauacua

SEQ ID NO: 1462364 - RNA, 19 nt, Homo sapiens
  misc_RNA (1)...(19): siRNA sense strand
uagagcagaugcagaaagu

SEQ ID NO: 1462365 - RNA, 19 nt, Homo sapiens
  misc_RNA (1)...(19): siRNA sense strand
ugguaccuguggauuauua

SEQ ID NO: 1462366 - RNA, 19 nt, Homo sapiens
  misc_RNA (1)...(19): siRNA sense strand
cagcagugauauuugauuc

SEQ ID NO: 1462367 - RNA, 19 nt, Homo sapiens
  misc_RNA (1)...(19): siRNA sense strand
ccaauggcuucaaugguau

SEQ ID NO: 1462368 - RNA, 19 nt, Homo sapiens
  misc_RNA (1)...(19): siRNA sense strand
uuagagaggcugaagauau

SEQ ID NO: 1462369 - RNA, 19 nt, Homo sapiens
  misc_RNA (1)...(19): siRNA sense strand
aguggaaucugguguguga

SEQ ID NO: 1462370 - RNA, 19 nt, Homo sapiens
  misc_RNA (1)...(19): siRNA sense strand
gaucuccaacuauguggua

SEQ ID NO: 1462371 - RNA, 19 nt, Homo sapiens
  misc_RNA (1)...(19): siRNA sense strand
ggcaagucaguucguauua

SEQ ID NO: 1462372 - RNA, 19 nt, Homo sapiens
  misc_RNA (1)...(19): siRNA sense strand
gaggaggugugcuucucuu

SEQ ID NO: 1462373 - RNA, 19 nt, Homo sapiens
  misc_RNA (1)...(19): siRNA sense strand
gcagaugcagaaagugaaa

SEQ ID NO: 1462374 - RNA, 19 nt, Homo sapiens
  misc_RNA (1)...(19): siRNA sense strand
ccucggugcuuacaacaga

SEQ ID NO: 1462375 - RNA, 19 nt, Homo sapiens
  misc_RNA (1)...(19): siRNA sense strand
cauuaugucuuugcugcua

SEQ ID NO: 1462376 - RNA, 19 nt, Homo sapiens
  misc_RNA (1)...(19): siRNA sense strand
gaggugugcuucucuucau

SEQ ID NO: 1462377 - RNA, 19 nt, Homo sapiens
  misc_RNA (1)...(19): siRNA sense strand
ugaaauuccagcuuacauu

SEQ ID NO: 1462378 - RNA, 19 nt, Homo sapiens
  misc_RNA (1)...(19): siRNA sense strand
gugguagccuucauacuag

SEQ ID NO: 1462379 - RNA, 19 nt, Homo sapiens
  misc_RNA (1)...(19): siRNA sense strand
gcugauaucccagagaaga

SEQ ID NO: 1462380 - RNA, 19 nt, Homo sapiens
  misc_RNA (1)...(19): siRNA sense strand
uggcugauaucccagagaa

SEQ ID NO: 1462381 - RNA, 19 nt, Homo sapiens
  misc_RNA (1)...(19): siRNA sense strand
augccuaccugaacuguuu

SEQ ID NO: 1462382 - RNA, 19 nt, Homo sapiens
  misc_RNA (1)...(19): siRNA sense strand
ugacuguccugauuggaau

SEQ ID NO: 1462383 - RNA, 19 nt, Homo sapiens
  misc_RNA (1)...(19): siRNA sense strand
cggaauauugccauaauga

SEQ ID NO: 1462384 - RNA, 19 nt, Homo sapiens
  misc_RNA (1)...(19): siRNA sense strand
acagaaugcugcccuacau

SEQ ID NO: 1462385 - RNA, 19 nt, Homo sapiens
  misc_RNA (1)...(19): siRNA sense strand
gugcuucucuucauucaac

SEQ ID NO: 1462386 - RNA, 19 nt, Homo sapiens
  misc_RNA (1)...(19): siRNA sense strand
ucucuucauucaacuggua

SEQ ID NO: 1462387 - RNA, 19 nt, Homo sapiens
  misc_RNA (1)...(19): siRNA sense strand
ugggagauguucacugugu

SEQ ID NO: 1462388 - RNA, 19 nt, Homo sapiens
  misc_RNA (1)...(19): siRNA sense strand
gaacaacauagcuguacca

SEQ ID NO: 1462389 - RNA, 19 nt, Homo sapiens
  misc_RNA (1)...(19): siRNA sense strand
cauacuaggaacagaaauu

SEQ ID NO: 1462390 - RNA, 19 nt, Homo sapiens
  misc_RNA (1)...(19): siRNA sense strand
gaccucaguggguuacuuu

SEQ ID NO: 1462391 - RNA, 19 nt, Homo sapiens
  misc_RNA (1)...(19): siRNA sense strand
ugcagaaagugaaaugguu

SEQ ID NO: 1462392 - RNA, 19 nt, Homo sapiens
  misc_RNA (1)...(19): siRNA sense strand
gcucagcgccagcaucauc

SEQ ID NO: 1462393 - RNA, 19 nt, Homo sapiens
  misc_RNA (1)...(19): siRNA sense strand
gaaaaucccaagguucuaa

SEQ ID NO: 1462394 - RNA, 19 nt, Homo sapiens
  misc_RNA (1)...(19): siRNA sense strand
gggagauguucacuguguu

SEQ ID NO: 1462395 - RNA, 19 nt, Homo sapiens
  misc_RNA (1)...(19): siRNA sense strand
gggaucaccucugcuuucu

SEQ ID NO: 1462396 - RNA, 19 nt, Homo sapiens
  misc_RNA (1)...(19): siRNA sense strand
ggacuacgacgaggugauc

SEQ ID NO: 1462397 - RNA, 19 nt, Homo sapiens
  misc_RNA (1)...(19): siRNA sense strand
gauaucccagagaagauuu

SEQ ID NO: 1462398 - RNA, 19 nt, Homo sapiens
  misc_RNA (1)...(19): siRNA sense strand
ggaggugugcuucucuuca

SEQ ID NO: 1462399 - RNA, 19 nt, Homo sapiens
  misc_RNA (1)...(19): siRNA sense strand
gauugaaauuccagcuuac

SEQ ID NO: 1462400 - RNA, 19 nt, Homo sapiens
  misc_RNA (1)...(19): siRNA sense strand
uggcuucaaugguauguca

SEQ ID NO: 1462401 - RNA, 19 nt, Homo sapiens
  misc_RNA (1)...(19): siRNA sense strand
aaccauggcuguacagacu

SEQ ID NO: 1462402 - RNA, 19 nt, Homo sapiens
  misc_RNA (1)...(19): siRNA sense strand
ugucuuugcugcuauggau

SEQ ID NO: 1462403 - RNA, 19 nt, Homo sapiens
  misc_RNA (1)...(19): siRNA sense strand
guaccagcagugauauuug

SEQ ID NO: 1462404 - RNA, 19 nt, Homo sapiens
  misc_RNA (1)...(19): siRNA sense strand
ccagaucuccaacuaugug

SEQ ID NO: 1462405 - RNA, 19 nt, Homo sapiens
  misc_RNA (1)...(19): siRNA sense strand
aaacaagagacucaaugga

SEQ ID NO: 1462406 - RNA, 19 nt, Homo sapiens
  misc_RNA (1)...(19): siRNA sense strand
ccuuagagcagaugcagaa

SEQ ID NO: 1462407 - RNA, 19 nt, Homo sapiens
  misc_RNA (1)...(19): siRNA sense strand
caacugguaccuguggauu

SEQ ID NO: 1462408 - RNA, 19 nt, Homo sapiens
  misc_RNA (1)...(19): siRNA sense strand
cugaagauaucauccaaaa

SEQ ID NO: 1462409 - RNA, 19 nt, Homo sapiens
  misc_RNA (1)...(19): siRNA sense strand
ggcugaagauaucauccaa

SEQ ID NO: 1462410 - RNA, 19 nt, Homo sapiens
  misc_RNA (1)...(19): siRNA sense strand
cauuaggagugugcacauu

SEQ ID NO: 1462411 - RNA, 19 nt, Homo sapiens
  misc_RNA (1)...(19): siRNA sense strand
uuuccucucugccuugauu

SEQ ID NO: 1462412 - RNA, 19 nt, Homo sapiens
  misc_RNA (1)...(19): siRNA sense strand
uuguuuaccucggugcuua

SEQ ID NO: 1462413 - RNA, 19 nt, Homo sapiens
  misc_RNA (1)...(19): siRNA sense strand
ugggccagaucuccaacua

SEQ ID NO: 1462414 - RNA, 19 nt, Homo sapiens
  misc_RNA (1)...(19): siRNA sense strand
agaagaaaaucccaagguu

SEQ ID NO: 1462415 - RNA, 19 nt, Homo sapiens
  misc_RNA (1)...(19): siRNA sense strand
acugguaccuguggauuau

SEQ ID NO: 1462416 - RNA, 19 nt, Homo sapiens
  misc_RNA (1)...(19): siRNA sense strand
ccgcuguggugguucauuc

SEQ ID NO: 1462417 - RNA, 19 nt, Homo sapiens
  misc_RNA (1)...(19): siRNA sense strand
cgaguggaaucuggugugu

SEQ ID NO: 1462418 - RNA, 19 nt, Homo sapiens
  misc_RNA (1)...(19): siRNA sense strand
cagaaaccuuagagcagau

SEQ ID NO: 1462419 - RNA, 19 nt, Homo sapiens
  misc_RNA (1)...(19): siRNA sense strand
gggaggaggugugcuucuc

SEQ ID NO: 1462420 - RNA, 19 nt, Homo sapiens
  misc_RNA (1)...(19): siRNA sense strand
uugcuuacuucaucagaga

SEQ ID NO: 1462421 - RNA, 19 nt, Homo sapiens
  misc_RNA (1)...(19): siRNA sense strand
ccaccucccuguucuucgu

SEQ ID NO: 1462422 - RNA, 19 nt, Homo sapiens
  misc_RNA (1)...(19): siRNA sense strand
ggaugcuccuaauuuacau

SEQ ID NO: 1462423 - RNA, 19 nt, Homo sapiens
  misc_RNA (1)...(19): siRNA sense strand
gacucggaauauugccaua

SEQ ID NO: 1462424 - RNA, 19 nt, Homo sapiens
  misc_RNA (1)...(19): siRNA sense strand
ccugaacuguuuccucucu

SEQ ID NO: 1462425 - RNA, 19 nt, Homo sapiens
  misc_RNA (1)...(19): siRNA sense strand
gucaguucguauuauauuc

SEQ ID NO: 1462426 - RNA, 19 nt, Homo sapiens
  misc_RNA (1)...(19): siRNA sense strand
aaucccaagguucuaauaa

SEQ ID NO: 1462427 - RNA, 19 nt, Homo sapiens
  misc_RNA (1)...(19): siRNA sense strand
aauuccagcuuacauuaca

SEQ ID NO: 1462428 - RNA, 19 nt, Homo sapiens
  misc_RNA (1)...(19): siRNA sense strand
gcaugggccagaucuccaa

SEQ ID NO: 1462429 - RNA, 19 nt, Homo sapiens
  misc_RNA (1)...(19): siRNA sense strand
ucucugccuugauugaaau

SEQ ID NO: 1462430 - RNA, 19 nt, Homo sapiens
  misc_RNA (1)...(19): siRNA sense strand
ugaccucaguggguuacuu

SEQ ID NO: 1462431 - RNA, 19 nt, Homo sapiens
  misc_RNA (1)...(19): siRNA sense strand
uguaccagcagugauauuu

SEQ ID NO: 1462432 - RNA, 19 nt, Homo sapiens
  misc_RNA (1)...(19): siRNA sense strand
acuguuugcuuacuucauc

SEQ ID NO: 1462433 - RNA, 19 nt, Homo sapiens
  misc_RNA (1)...(19): siRNA sense strand
gccacuguuugcuuacuuc

SEQ ID NO: 1462434 - RNA, 19 nt, Homo sapiens
  misc_RNA (1)...(19): siRNA sense strand
uggcaagucaguucguauu

SEQ ID NO: 1462435 - RNA, 19 nt, Homo sapiens
  misc_RNA (1)...(19): siRNA sense strand
gcugaagauaucauccaaa

SEQ ID NO: 1462436 - RNA, 19 nt, Homo sapiens
  misc_RNA (1)...(19): siRNA sense strand
ugcugccacuguuugcuua

SEQ ID NO: 1462437 - RNA, 19 nt, Homo sapiens
  misc_RNA (1)...(19): siRNA sense strand
ucccaagguucuaauaacu

SEQ ID NO: 1462438 - RNA, 19 nt, Homo sapiens
  misc_RNA (1)...(19): siRNA sense strand
ggaauauugccauaaugac

SEQ ID NO: 1462439 - RNA, 19 nt, Homo sapiens
  misc_RNA (1)...(19): siRNA sense strand
ucggaauauugccauaaug

SEQ ID NO: 1462440 - RNA, 19 nt, Homo sapiens
  misc_RNA (1)...(19): siRNA sense strand
ccagcagugauauuugauu

SEQ ID NO: 1462441 - RNA, 19 nt, Homo sapiens
  misc_RNA (1)...(19): siRNA sense strand
cguaguagcuggaguuauu

SEQ ID NO: 1462442 - RNA, 19 nt, Homo sapiens
  misc_RNA (1)...(19): siRNA sense strand
agaaggagauggagaaaga

SEQ ID NO: 1462443 - RNA, 19 nt, Homo sapiens
  misc_RNA (1)...(19): siRNA sense strand
gaugagguguguccugaaa

SEQ ID NO: 1462444 - RNA, 19 nt, Homo sapiens
  misc_RNA (1)...(19): siRNA sense strand
ccagagagcacuaacaauu

SEQ ID NO: 1462445 - RNA, 19 nt, Homo sapiens
  misc_RNA (1)...(19): siRNA sense strand
caacaagcauucauucaac

SEQ ID NO: 1462446 - RNA, 19 nt, Homo sapiens
  misc_RNA (1)...(19): siRNA sense strand
ggucuaagcuggacgucau

SEQ ID NO: 1462447 - RNA, 19 nt, Homo sapiens
  misc_RNA (1)...(19): siRNA sense strand
gaacguggcaggaguguac

SEQ ID NO: 1462448 - RNA, 19 nt, Homo sapiens
  misc_RNA (1)...(19): siRNA sense strand
gggacuagaugaugaacug

SEQ ID NO: 1462449 - RNA, 19 nt, Homo sapiens
  misc_RNA (1)...(19): siRNA sense strand
gagagaaggagauggagaa

SEQ ID NO: 1462450 - RNA, 19 nt, Homo sapiens
  misc_RNA (1)...(19): siRNA sense strand
cagagagcacuaacaauuu

SEQ ID NO: 1462451 - RNA, 19 nt, Homo sapiens
  misc_RNA (1)...(19): siRNA sense strand
gaaccauggacccguagua

SEQ ID NO: 1462452 - RNA, 19 nt, Homo sapiens
  misc_RNA (1)...(19): siRNA sense strand
agacagagacgauggagaa

SEQ ID NO: 1462453 - RNA, 19 nt, Homo sapiens
  misc_RNA (1)...(19): siRNA sense strand
gggcagaggaggaggauga

SEQ ID NO: 1462454 - RNA, 19 nt, Homo sapiens
  misc_RNA (1)...(19): siRNA sense strand
gcacuaugguggaauuugc

SEQ ID NO: 1462455 - RNA, 19 nt, Homo sapiens
  misc_RNA (1)...(19): siRNA sense strand
gaaggagcccaaacugaug

SEQ ID NO: 1462456 - RNA, 19 nt, Homo sapiens
  misc_RNA (1)...(19): siRNA sense strand
cccagaagccgcaauauga

SEQ ID NO: 1462457 - RNA, 19 nt, Homo sapiens
  misc_RNA (1)...(19): siRNA sense strand
aauccaacaucaaucauga

SEQ ID NO: 1462458 - RNA, 19 nt, Homo sapiens
  misc_RNA (1)...(19): siRNA sense strand
agagagcacuaacaauuuc

SEQ ID NO: 1462459 - RNA, 19 nt, Homo sapiens
  misc_RNA (1)...(19): siRNA sense strand
ggugcuaucuccuucuuca

SEQ ID NO: 1462460 - RNA, 19 nt, Homo sapiens
  misc_RNA (1)...(19): siRNA sense strand
caauguguccuccaugauu

SEQ ID NO: 1462461 - RNA, 19 nt, Homo sapiens
  misc_RNA (1)...(19): siRNA sense strand
ugacucggcugcucuugga

SEQ ID NO: 1462462 - RNA, 19 nt, Homo sapiens
  misc_RNA (1)...(19): siRNA sense strand
acacuguacuucagagaga

SEQ ID NO: 1462463 - RNA, 19 nt, Homo sapiens
  misc_RNA (1)...(19): siRNA sense strand
ucaacccacugacacugua

SEQ ID NO: 1462464 - RNA, 19 nt, Homo sapiens
  misc_RNA (1)...(19): siRNA sense strand
ccaggaacaccuucucuug

SEQ ID NO: 1462465 - RNA, 19 nt, Homo sapiens
  misc_RNA (1)...(19): siRNA sense strand
ucaacaagcauucauucaa

SEQ ID NO: 1462466 - RNA, 19 nt, Homo sapiens
  misc_RNA (1)...(19): siRNA sense strand
ugaaggagcccaaacugau

SEQ ID NO: 1462467 - RNA, 19 nt, Homo sapiens
  misc_RNA (1)...(19): siRNA sense strand
aauguguccuccaugauuu

SEQ ID NO: 1462468 - RNA, 19 nt, Homo sapiens
  misc_RNA (1)...(19): siRNA sense strand
gcucuggccaucacguaua

SEQ ID NO: 1462469 - RNA, 19 nt, Homo sapiens
  misc_RNA (1)...(19): siRNA sense strand
cuaccuaucuggucaucga

SEQ ID NO: 1462470 - RNA, 19 nt, Homo sapiens
  misc_RNA (1)...(19): siRNA sense strand
gaaugcaugcggaucaaga

SEQ ID NO: 1462471 - RNA, 19 nt, Homo sapiens
  misc_RNA (1)...(19): siRNA sense strand
ccaagugacugaggagaca

SEQ ID NO: 1462472 - RNA, 19 nt, Homo sapiens
  misc_RNA (1)...(19): siRNA sense strand
gaaguggcaguacgacguu

SEQ ID NO: 1462473 - RNA, 19 nt, Homo sapiens
  misc_RNA (1)...(19): siRNA sense strand
cccaauguguccuccauga

SEQ ID NO: 1462474 - RNA, 19 nt, Homo sapiens
  misc_RNA (1)...(19): siRNA sense strand
ggacuucaacccacugaca

SEQ ID NO: 1462475 - RNA, 19 nt, Homo sapiens
  misc_RNA (1)...(19): siRNA sense strand
ggccagagagcacuaacaa

SEQ ID NO: 1462476 - RNA, 19 nt, Homo sapiens
  misc_RNA (1)...(19): siRNA sense strand
gaauccaacaucaaucaug

SEQ ID NO: 1462477 - RNA, 19 nt, Homo sapiens
  misc_RNA (1)...(19): siRNA sense strand
gacguuuggucacaugaug

SEQ ID NO: 1462478 - RNA, 19 nt, Homo sapiens
  misc_RNA (1)...(19): siRNA sense strand
ccacugacacuguacuuca

SEQ ID NO: 1462479 - RNA, 19 nt, Homo sapiens
  misc_RNA (1)...(19): siRNA sense strand
agaagaagcaccaggaaca

SEQ ID NO: 1462480 - RNA, 19 nt, Homo sapiens
  misc_RNA (1)...(19): siRNA sense strand
gccugcaccuuccugguuu

SEQ ID NO: 1462481 - RNA, 19 nt, Homo sapiens
  misc_RNA (1)...(19): siRNA sense strand
cagcucaacucgcagaaac

SEQ ID NO: 1462482 - RNA, 19 nt, Homo sapiens
  misc_RNA (1)...(19): siRNA sense strand
cgaccaggacugagaauag

SEQ ID NO: 1462483 - RNA, 19 nt, Homo sapiens
  misc_RNA (1)...(19): siRNA sense strand
uggagaagaucaagaccau

SEQ ID NO: 1462484 - RNA, 19 nt, Homo sapiens
  misc_RNA (1)...(19): siRNA sense strand
gcacucaggcagcguacug

SEQ ID NO: 1462485 - RNA, 19 nt, Homo sapiens
  misc_RNA (1)...(19): siRNA sense strand
gcaccuacuuccugaacac

SEQ ID NO: 1462486 - RNA, 19 nt, Homo sapiens
  misc_RNA (1)...(19): siRNA sense strand
gcccagaagccgcaauaug

SEQ ID NO: 1462487 - RNA, 19 nt, Homo sapiens
  misc_RNA (1)...(19): siRNA sense strand
ggccacgccuuccuguuca

SEQ ID NO: 1462488 - RNA, 19 nt, Homo sapiens
  misc_RNA (1)...(19): siRNA sense strand
cagaggaggaggaugagaa

SEQ ID NO: 1462489 - RNA, 19 nt, Homo sapiens
  misc_RNA (1)...(19): siRNA sense strand
ucaucgggcugcagaagug

SEQ ID NO: 1462490 - RNA, 19 nt, Homo sapiens
  misc_RNA (1)...(19): siRNA sense strand
ucagagagaaggagaugga

SEQ ID NO: 1462491 - RNA, 19 nt, Homo sapiens
  misc_RNA (1)...(19): siRNA sense strand
gcaacgaggaucucuacca

SEQ ID NO: 1462492 - RNA, 19 nt, Homo sapiens
  misc_RNA (1)...(19): siRNA sense strand
ccaaacugaugggugcuau

SEQ ID NO: 1462493 - RNA, 19 nt, Homo sapiens
  misc_RNA (1)...(19): siRNA sense strand
uuaccagccuguucuucuu

SEQ ID NO: 1462494 - RNA, 19 nt, Homo sapiens
  misc_RNA (1)...(19): siRNA sense strand
cacacuggcuaaccacaug

SEQ ID NO: 1462495 - RNA, 19 nt, Homo sapiens
  misc_RNA (1)...(19): siRNA sense strand
caucaacaagcauucauuc

SEQ ID NO: 1462496 - RNA, 19 nt, Homo sapiens
  misc_RNA (1)...(19): siRNA sense strand
gcuaucuccuucuucaucu

SEQ ID NO: 1462497 - RNA, 19 nt, Homo sapiens
  misc_RNA (1)...(19): siRNA sense strand
uuuccaagcucccaaugug

SEQ ID NO: 1462498 - RNA, 19 nt, Homo sapiens
  misc_RNA (1)...(19): siRNA sense strand
ggagauggagaaagaguac

SEQ ID NO: 1462499 - RNA, 19 nt, Homo sapiens
  misc_RNA (1)...(19): siRNA sense strand
gccaucacguauagcauca

SEQ ID NO: 1462500 - RNA, 19 nt, Homo sapiens
  misc_RNA (1)...(19): siRNA sense strand
gaagccgcaauaugacauu

SEQ ID NO: 1462501 - RNA, 19 nt, Homo sapiens
  misc_RNA (1)...(19): siRNA sense strand
gggcccagaagccgcaaua

SEQ ID NO: 1462502 - RNA, 19 nt, Homo sapiens
  misc_RNA (1)...(19): siRNA sense strand
agacugcccuuuccaagcu

SEQ ID NO: 1462503 - RNA, 19 nt, Homo sapiens
  misc_RNA (1)...(19): siRNA sense strand
aggaacaccuucucuuguc

SEQ ID NO: 1462504 - RNA, 19 nt, Homo sapiens
  misc_RNA (1)...(19): siRNA sense strand
uggcaggaguguaccacaa

SEQ ID NO: 1462505 - RNA, 19 nt, Homo sapiens
  misc_RNA (1)...(19): siRNA sense strand
ucccagacuucaaggaguu

SEQ ID NO: 1462506 - RNA, 19 nt, Homo sapiens
  misc_RNA (1)...(19): siRNA sense strand
gagaugaaggcagagauca

SEQ ID NO: 1462507 - RNA, 19 nt, Homo sapiens
  misc_RNA (1)...(19): siRNA sense strand
ucucaucagugucccauac

SEQ ID NO: 1462508 - RNA, 19 nt, Homo sapiens
  misc_RNA (1)...(19): siRNA sense strand
caccauccuccuugucuuu

SEQ ID NO: 1462509 - RNA, 19 nt, Homo sapiens
  misc_RNA (1)...(19): siRNA sense strand
gaccaggacugagaauagc

SEQ ID NO: 1462510 - RNA, 19 nt, Homo sapiens
  misc_RNA (1)...(19): siRNA sense strand
uccagaugcuagugacaaa

SEQ ID NO: 1462511 - RNA, 19 nt, Homo sapiens
  misc_RNA (1)...(19): siRNA sense strand
guacgacguuuggucacau

SEQ ID NO: 1462512 - RNA, 19 nt, Homo sapiens
  misc_RNA (1)...(19): siRNA sense strand
ucgaccagauugccaagga

SEQ ID NO: 1462513 - RNA, 19 nt, Homo sapiens
  misc_RNA (1)...(19): siRNA sense strand
aacacagacuugacacgaa

SEQ ID NO: 1462514 - RNA, 19 nt, Homo sapiens
  misc_RNA (1)...(19): siRNA sense strand
ccuacuuccugaacacaga

SEQ ID NO: 1462515 - RNA, 19 nt, Homo sapiens
  misc_RNA (1)...(19): siRNA sense strand
cgagcuuccugaccacugu

SEQ ID NO: 1462516 - RNA, 19 nt, Homo sapiens
  misc_RNA (1)...(19): siRNA sense strand
caggaacaccuucucuugu

SEQ ID NO: 1462517 - RNA, 19 nt, Homo sapiens
  misc_RNA (1)...(19): siRNA sense strand
gaccagguguccuauuuuc

SEQ ID NO: 1462518 - RNA, 19 nt, Homo sapiens
  misc_RNA (1)...(19): siRNA sense strand
ccaccauccuccuugucuu

SEQ ID NO: 1462519 - RNA, 19 nt, Homo sapiens
  misc_RNA (1)...(19): siRNA sense strand
ugagguguguccugaaagg

SEQ ID NO: 1462520 - RNA, 19 nt, Homo sapiens
  misc_RNA (1)...(19): siRNA sense strand
ucacguauagcaucaccuu

SEQ ID NO: 1462521 - RNA, 19 nt, Homo sapiens
  misc_RNA (1)...(19): siRNA sense strand
ccaacuucaucauccagau

SEQ ID NO: 1462522 - RNA, 19 nt, Homo sapiens
  misc_RNA (1)...(19): siRNA sense strand
cgagaagaagcaccaggaa

SEQ ID NO: 1462523 - RNA, 19 nt, Homo sapiens
  misc_RNA (1)...(19): siRNA sense strand
gcgcaacgaggaucucuac

SEQ ID NO: 1462524 - RNA, 19 nt, Homo sapiens
  misc_RNA (1)...(19): siRNA sense strand
cuaccuggcccgagagaug

SEQ ID NO: 1462525 - RNA, 19 nt, Homo sapiens
  misc_RNA (1)...(19): siRNA sense strand
gggaggagacagagacgau

SEQ ID NO: 1462526 - RNA, 19 nt, Homo sapiens
  misc_RNA (1)...(19): siRNA sense strand
cagagacgauggagaaccu

SEQ ID NO: 1462527 - RNA, 19 nt, Homo sapiens
  misc_RNA (1)...(19): siRNA sense strand
uaccaccaguccuaugaau

SEQ ID NO: 1462528 - RNA, 19 nt, Homo sapiens
  misc_RNA (1)...(19): siRNA sense strand
cauggaggcaggcggugua

SEQ ID NO: 1462529 - RNA, 19 nt, Homo sapiens
  misc_RNA (1)...(19): siRNA sense strand
gccgcaauaugacauuugg

SEQ ID NO: 1462530 - RNA, 19 nt, Homo sapiens
  misc_RNA (1)...(19): siRNA sense strand
ccaccaguccuaugaaugc

SEQ ID NO: 1462531 - RNA, 19 nt, Homo sapiens
  misc_RNA (1)...(19): siRNA sense strand
gcagcucaacucgcagaaa

SEQ ID NO: 1462532 - RNA, 19 nt, Homo sapiens
  misc_RNA (1)...(19): siRNA sense strand
ccucaucguccgccucuau

SEQ ID NO: 1462533 - RNA, 19 nt, Homo sapiens
  misc_RNA (1)...(19): siRNA sense strand
gaagcaccaggaacaccuu

SEQ ID NO: 1462534 - RNA, 19 nt, Homo sapiens
  misc_RNA (1)...(19): siRNA sense strand
caauuuccacagccucuau

SEQ ID NO: 1462535 - RNA, 19 nt, Homo sapiens
  misc_RNA (1)...(19): siRNA sense strand
aacaagcauucauucaaca

SEQ ID NO: 1462536 - RNA, 19 nt, Homo sapiens
  misc_RNA (1)...(19): siRNA sense strand
caaguucuuccaggucauu

SEQ ID NO: 1462537 - RNA, 19 nt, Homo sapiens
  misc_RNA (1)...(19): siRNA sense strand
aaugagcucuuuggcaagu

SEQ ID NO: 1462538 - RNA, 19 nt, Homo sapiens
  misc_RNA (1)...(19): siRNA sense strand
ccacagccucuaugucaag

SEQ ID NO: 1462539 - RNA, 19 nt, Homo sapiens
  misc_RNA (1)...(19): siRNA sense strand
guaccgacucucugcaauc

SEQ ID NO: 1462540 - RNA, 19 nt, Homo sapiens
  misc_RNA (1)...(19): siRNA sense strand
gcugaaggagcccaaacug

SEQ ID NO: 1462541 - RNA, 19 nt, Homo sapiens
  misc_RNA (1)...(19): siRNA sense strand
gaacagaugugcauaaugu

SEQ ID NO: 1462542 - RNA, 19 nt, Homo sapiens
  misc_RNA (1)...(19): siRNA sense strand
ggaaucagauguagcuuua

SEQ ID NO: 1462543 - RNA, 19 nt, Homo sapiens
  misc_RNA (1)...(19): siRNA sense strand
gaaguuccaucuacguuua

SEQ ID NO: 1462544 - RNA, 19 nt, Homo sapiens
  misc_RNA (1)...(19): siRNA sense strand
ugaagaagguggaacaaua

SEQ ID NO: 1462545 - RNA, 19 nt, Homo sapiens
  misc_RNA (1)...(19): siRNA sense strand
ggaaagaaaugguauucaa

SEQ ID NO: 1462546 - RNA, 19 nt, Homo sapiens
  misc_RNA (1)...(19): siRNA sense strand
gaagguggaacaauaaaua

SEQ ID NO: 1462547 - RNA, 19 nt, Homo sapiens
  misc_RNA (1)...(19): siRNA sense strand
gaaagaggcacauuugauu

SEQ ID NO: 1462548 - RNA, 19 nt, Homo sapiens
  misc_RNA (1)...(19): siRNA sense strand
gaagaagguggaacaauaa

SEQ ID NO: 1462549 - RNA, 19 nt, Homo sapiens
  misc_RNA (1)...(19): siRNA sense strand
gcucugaauucaaauguuu

SEQ ID NO: 1462550 - RNA, 19 nt, Homo sapiens
  misc_RNA (1)...(19): siRNA sense strand
guauugcacuucuugauaa

SEQ ID NO: 1462551 - RNA, 19 nt, Homo sapiens
  misc_RNA (1)...(19): siRNA sense strand
gcacacagcugcguaucuu

SEQ ID NO: 1462552 - RNA, 19 nt, Homo sapiens
  misc_RNA (1)...(19): siRNA sense strand
gaacacaacuuuucgaugu

SEQ ID NO: 1462553 - RNA, 19 nt, Homo sapiens
  misc_RNA (1)...(19): siRNA sense strand
gcagcaaccuccaccauca

SEQ ID NO: 1462554 - RNA, 19 nt, Homo sapiens
  misc_RNA (1)...(19): siRNA sense strand
agagacagaugacagcaua

SEQ ID NO: 1462555 - RNA, 19 nt, Homo sapiens
  misc_RNA (1)...(19): siRNA sense strand
gaaguguuccguugaauau

SEQ ID NO: 1462556 - RNA, 19 nt, Homo sapiens
  misc_RNA (1)...(19): siRNA sense strand
aaagaugacucuccugaug

SEQ ID NO: 1462557 - RNA, 19 nt, Homo sapiens
  misc_RNA (1)...(19): siRNA sense strand
gacuagcucugaauucaaa

SEQ ID NO: 1462558 - RNA, 19 nt, Homo sapiens
  misc_RNA (1)...(19): siRNA sense strand
ucacuuguccuucaguuua

SEQ ID NO: 1462559 - RNA, 19 nt, Homo sapiens
  misc_RNA (1)...(19): siRNA sense strand
caaacaugaucaaagugua

SEQ ID NO: 1462560 - RNA, 19 nt, Homo sapiens
  misc_RNA (1)...(19): siRNA sense strand
ggaaucaggagaugaagaa

SEQ ID NO: 1462561 - RNA, 19 nt, Homo sapiens
  misc_RNA (1)...(19): siRNA sense strand
caugagacgugaccgguuu

SEQ ID NO: 1462562 - RNA, 19 nt, Homo sapiens
  misc_RNA (1)...(19): siRNA sense strand
gaagaccucagaagcguaa

SEQ ID NO: 1462563 - RNA, 19 nt, Homo sapiens
  misc_RNA (1)...(19): siRNA sense strand
caaaguguauaaccaguuc

SEQ ID NO: 1462564 - RNA, 19 nt, Homo sapiens
  misc_RNA (1)...(19): siRNA sense strand
ggacaucaggcaacaggua

SEQ ID NO: 1462565 - RNA, 19 nt, Homo sapiens
  misc_RNA (1)...(19): siRNA sense strand
ggaaagcccauucgguuug

SEQ ID NO: 1462566 - RNA, 19 nt, Homo sapiens
  misc_RNA (1)...(19): siRNA sense strand
aaugagaacucccacagaa

SEQ ID NO: 1462567 - RNA, 19 nt, Homo sapiens
  misc_RNA (1)...(19): siRNA sense strand
aaugagagaugcaugaaau

SEQ ID NO: 1462568 - RNA, 19 nt, Homo sapiens
  misc_RNA (1)...(19): siRNA sense strand
gagaaaggaucacauugac

SEQ ID NO: 1462569 - RNA, 19 nt, Homo sapiens
  misc_RNA (1)...(19): siRNA sense strand
caaauugcgaccucucaua

SEQ ID NO: 1462570 - RNA, 19 nt, Homo sapiens
  misc_RNA (1)...(19): siRNA sense strand
gaacacuaaguuuacauga

SEQ ID NO: 1462571 - RNA, 19 nt, Homo sapiens
  misc_RNA (1)...(19): siRNA sense strand
aaagaggcacauuugauua

SEQ ID NO: 1462572 - RNA, 19 nt, Homo sapiens
  misc_RNA (1)...(19): siRNA sense strand
aaagaaagaggcacauuug

SEQ ID NO: 1462573 - RNA, 19 nt, Homo sapiens
  misc_RNA (1)...(19): siRNA sense strand
caguaaagguguacaucuu

SEQ ID NO: 1462574 - RNA, 19 nt, Homo sapiens
  misc_RNA (1)...(19): siRNA sense strand
ugagaaaggaucacauuga

SEQ ID NO: 1462575 - RNA, 19 nt, Homo sapiens
  misc_RNA (1)...(19): siRNA sense strand
caacagguacagugagaaa

SEQ ID NO: 1462576 - RNA, 19 nt, Homo sapiens
  misc_RNA (1)...(19): siRNA sense strand
gagagaugcaugaaauuug

SEQ ID NO: 1462577 - RNA, 19 nt, Homo sapiens
  misc_RNA (1)...(19): siRNA sense strand
cagcaccuguuucugauga

SEQ ID NO: 1462578 - RNA, 19 nt, Homo sapiens
  misc_RNA (1)...(19): siRNA sense strand
gaaagaaaugguauucaag

SEQ ID NO: 1462579 - RNA, 19 nt, Homo sapiens
  misc_RNA (1)...(19): siRNA sense strand
gauaagcucaguucaaugg

SEQ ID NO: 1462580 - RNA, 19 nt, Homo sapiens
  misc_RNA (1)...(19): siRNA sense strand
gggcuacauuugcugguuu

SEQ ID NO: 1462581 - RNA, 19 nt, Homo sapiens
  misc_RNA (1)...(19): siRNA sense strand
gcucugaugcugagucuga

SEQ ID NO: 1462582 - RNA, 19 nt, Homo sapiens
  misc_RNA (1)...(19): siRNA sense strand
gguuagugcugccaugaga

SEQ ID NO: 1462583 - RNA, 19 nt, Homo sapiens
  misc_RNA (1)...(19): siRNA sense strand
cgaggucauugaacucauu

SEQ ID NO: 1462584 - RNA, 19 nt, Homo sapiens
  misc_RNA (1)...(19): siRNA sense strand
gcaauauugucugcagaug

SEQ ID NO: 1462585 - RNA, 19 nt, Homo sapiens
  misc_RNA (1)...(19): siRNA sense strand
ggcaacagguacagugaga

SEQ ID NO: 1462586 - RNA, 19 nt, Homo sapiens
  misc_RNA (1)...(19): siRNA sense strand
gaauucaugguuccuuauu

SEQ ID NO: 1462587 - RNA, 19 nt, Homo sapiens
  misc_RNA (1)...(19): siRNA sense strand
agagaugcaugaaauuugu

SEQ ID NO: 1462588 - RNA, 19 nt, Homo sapiens
  misc_RNA (1)...(19): siRNA sense strand
gugcauaauguacugguua

SEQ ID NO: 1462589 - RNA, 19 nt, Homo sapiens
  misc_RNA (1)...(19): siRNA sense strand
ugacucuccugaugaaguu

SEQ ID NO: 1462590 - RNA, 19 nt, Homo sapiens
  misc_RNA (1)...(19): siRNA sense strand
gggaaagcccauucgguuu

SEQ ID NO: 1462591 - RNA, 19 nt, Homo sapiens
  misc_RNA (1)...(19): siRNA sense strand
gaugaggaaucaggagaug

SEQ ID NO: 1462592 - RNA, 19 nt, Homo sapiens
  misc_RNA (1)...(19): siRNA sense strand
gguuaugucucaguuccua

SEQ ID NO: 1462593 - RNA, 19 nt, Homo sapiens
  misc_RNA (1)...(19): siRNA sense strand
caucuuggcuugacuagcu

SEQ ID NO: 1462594 - RNA, 19 nt, Homo sapiens
  misc_RNA (1)...(19): siRNA sense strand
guacaacccguagcaggua

SEQ ID NO: 1462595 - RNA, 19 nt, Homo sapiens
  misc_RNA (1)...(19): siRNA sense strand
gcgaugcgcugaaugucau

SEQ ID NO: 1462596 - RNA, 19 nt, Homo sapiens
  misc_RNA (1)...(19): siRNA sense strand
aaagaacagaugugcauaa

SEQ ID NO: 1462597 - RNA, 19 nt, Homo sapiens
  misc_RNA (1)...(19): siRNA sense strand
gggcaucaauccguggaaa

SEQ ID NO: 1462598 - RNA, 19 nt, Homo sapiens
  misc_RNA (1)...(19): siRNA sense strand
aaaaugugauguugccuua

SEQ ID NO: 1462599 - RNA, 19 nt, Homo sapiens
  misc_RNA (1)...(19): siRNA sense strand
gucauaagaacacaacuuu

SEQ ID NO: 1462600 - RNA, 19 nt, Homo sapiens
  misc_RNA (1)...(19): siRNA sense strand
gagaacucccacagaaauu

SEQ ID NO: 1462601 - RNA, 19 nt, Homo sapiens
  misc_RNA (1)...(19): siRNA sense strand
ugaaguguuccguugaaua

SEQ ID NO: 1462602 - RNA, 19 nt, Homo sapiens
  misc_RNA (1)...(19): siRNA sense strand
ccucagaagcguaacauug

SEQ ID NO: 1462603 - RNA, 19 nt, Homo sapiens
  misc_RNA (1)...(19): siRNA sense strand
aauauugucugcagaugga

SEQ ID NO: 1462604 - RNA, 19 nt, Homo sapiens
  misc_RNA (1)...(19): siRNA sense strand
ugagagaugcaugaaauuu

SEQ ID NO: 1462605 - RNA, 19 nt, Homo sapiens
  misc_RNA (1)...(19): siRNA sense strand
cuuauaugcuugcaguaaa

SEQ ID NO: 1462606 - RNA, 19 nt, Homo sapiens
  misc_RNA (1)...(19): siRNA sense strand
aaauugcgaccucucauaa

SEQ ID NO: 1462607 - RNA, 19 nt, Homo sapiens
  misc_RNA (1)...(19): siRNA sense strand
agacagagcugaugaaaac

SEQ ID NO: 1462608 - RNA, 19 nt, Homo sapiens
  misc_RNA (1)...(19): siRNA sense strand
gucugcagauggaaugaua

SEQ ID NO: 1462609 - RNA, 19 nt, Homo sapiens
  misc_RNA (1)...(19): siRNA sense strand
caagugcuauagugauaca

SEQ ID NO: 1462610 - RNA, 19 nt, Homo sapiens
  misc_RNA (1)...(19): siRNA sense strand
agacgugaccgguuugaaa

SEQ ID NO: 1462611 - RNA, 19 nt, Homo sapiens
  misc_RNA (1)...(19): siRNA sense strand
caaacgcgaugcgcugaau

SEQ ID NO: 1462612 - RNA, 19 nt, Homo sapiens
  misc_RNA (1)...(19): siRNA sense strand
cagauggaaugauaacagu

SEQ ID NO: 1462613 - RNA, 19 nt, Homo sapiens
  misc_RNA (1)...(19): siRNA sense strand
gauggcaaaggcaauauug

SEQ ID NO: 1462614 - RNA, 19 nt, Homo sapiens
  misc_RNA (1)...(19): siRNA sense strand
gugcgucacuuguccuuca

SEQ ID NO: 1462615 - RNA, 19 nt, Homo sapiens
  misc_RNA (1)...(19): siRNA sense strand
gaaagcccauucgguuugg

SEQ ID NO: 1462616 - RNA, 19 nt, Homo sapiens
  misc_RNA (1)...(19): siRNA sense strand
ucacgggugcaaacaauuu

SEQ ID NO: 1462617 - RNA, 19 nt, Homo sapiens
  misc_RNA (1)...(19): siRNA sense strand
aagcaaacuuaaugagaga

SEQ ID NO: 1462618 - RNA, 19 nt, Homo sapiens
  misc_RNA (1)...(19): siRNA sense strand
gaugagaaaccaguggauu

SEQ ID NO: 1462619 - RNA, 19 nt, Homo sapiens
  misc_RNA (1)...(19): siRNA sense strand
ugagaacucccacagaaau

SEQ ID NO: 1462620 - RNA, 19 nt, Homo sapiens
  misc_RNA (1)...(19): siRNA sense strand
gacgugugguaugccauua

SEQ ID NO: 1462621 - RNA, 19 nt, Homo sapiens
  misc_RNA (1)...(19): siRNA sense strand
aagaacagaugugcauaau

SEQ ID NO: 1462622 - RNA, 19 nt, Homo sapiens
  misc_RNA (1)...(19): siRNA sense strand
caaagaacagaugugcaua

SEQ ID NO: 1462623 - RNA, 19 nt, Homo sapiens
  misc_RNA (1)...(19): siRNA sense strand
cauacgcaccuaaagauga

SEQ ID NO: 1462624 - RNA, 19 nt, Homo sapiens
  misc_RNA (1)...(19): siRNA sense strand
aacauugacucacguuaug

SEQ ID NO: 1462625 - RNA, 19 nt, Homo sapiens
  misc_RNA (1)...(19): siRNA sense strand
ccaaacaugaucaaagugu

SEQ ID NO: 1462626 - RNA, 19 nt, Homo sapiens
  misc_RNA (1)...(19): siRNA sense strand
guucagcagccaaacauga

SEQ ID NO: 1462627 - RNA, 19 nt, Homo sapiens
  misc_RNA (1)...(19): siRNA sense strand
ccacuggaaucagauguag

SEQ ID NO: 1462628 - RNA, 19 nt, Homo sapiens
  misc_RNA (1)...(19): siRNA sense strand
guacaucuuggcuugacua

SEQ ID NO: 1462629 - RNA, 19 nt, Homo sapiens
  misc_RNA (1)...(19): siRNA sense strand
cagcaccaccaaacgauuu

SEQ ID NO: 1462630 - RNA, 19 nt, Homo sapiens
  misc_RNA (1)...(19): siRNA sense strand
agaugacucuccugaugaa

SEQ ID NO: 1462631 - RNA, 19 nt, Homo sapiens
  misc_RNA (1)...(19): siRNA sense strand
cgucacgggugcaaacaau

SEQ ID NO: 1462632 - RNA, 19 nt, Homo sapiens
  misc_RNA (1)...(19): siRNA sense strand
gcaucaauccguggaaaga

SEQ ID NO: 1462633 - RNA, 19 nt, Homo sapiens
  misc_RNA (1)...(19): siRNA sense strand
guagacagagcugaugaaa

SEQ ID NO: 1462634 - RNA, 19 nt, Homo sapiens
  misc_RNA (1)...(19): siRNA sense strand
gauggaaugauaacagugu

SEQ ID NO: 1462635 - RNA, 19 nt, Homo sapiens
  misc_RNA (1)...(19): siRNA sense strand
gcagauggaaugauaacag

SEQ ID NO: 1462636 - RNA, 19 nt, Homo sapiens
  misc_RNA (1)...(19): siRNA sense strand
gcacauuugauuaucgaau

SEQ ID NO: 1462637 - RNA, 19 nt, Homo sapiens
  misc_RNA (1)...(19): siRNA sense strand
ucagauguagcuuuaaaga

SEQ ID NO: 1462638 - RNA, 19 nt, Homo sapiens
  misc_RNA (1)...(19): siRNA sense strand
ugaggaaucaggagaugaa

SEQ ID NO: 1462639 - RNA, 19 nt, Homo sapiens
  misc_RNA (1)...(19): siRNA sense strand
gcgcugaaugucauaagaa

SEQ ID NO: 1462640 - RNA, 19 nt, Homo sapiens
  misc_RNA (1)...(19): siRNA sense strand
ccauucgguuuggcuauaa

SEQ ID NO: 1462641 - RNA, 19 nt, Homo sapiens
  misc_RNA (1)...(19): siRNA sense strand
gggauuauaucugugaaua

SEQ ID NO: 1462642 - RNA, 19 nt, Homo sapiens
  misc_RNA (1)...(19): siRNA sense strand
gaaggaaauuaaaguggaa

SEQ ID NO: 1462643 - RNA, 19 nt, Homo sapiens
  misc_RNA (1)...(19): siRNA sense strand
ucaaagggauuauaucugu

SEQ ID NO: 1462644 - RNA, 19 nt, Homo sapiens
  misc_RNA (1)...(19): siRNA sense strand
cagaccaacuugauuauga

SEQ ID NO: 1462645 - RNA, 19 nt, Homo sapiens
  misc_RNA (1)...(19): siRNA sense strand
ugugagaucuguggauuua

SEQ ID NO: 1462646 - RNA, 19 nt, Homo sapiens
  misc_RNA (1)...(19): siRNA sense strand
gagauaccauucaaagaug

SEQ ID NO: 1462647 - RNA, 19 nt, Homo sapiens
  misc_RNA (1)...(19): siRNA sense strand
ggaggaagaagagauguua

SEQ ID NO: 1462648 - RNA, 19 nt, Homo sapiens
  misc_RNA (1)...(19): siRNA sense strand
ggagauaccauucaaagau

SEQ ID NO: 1462649 - RNA, 19 nt, Homo sapiens
  misc_RNA (1)...(19): siRNA sense strand
gaagaggagaaugaaauua

SEQ ID NO: 1462650 - RNA, 19 nt, Homo sapiens
  misc_RNA (1)...(19): siRNA sense strand
ugauaaagaucccaaggaa

SEQ ID NO: 1462651 - RNA, 19 nt, Homo sapiens
  misc_RNA (1)...(19): siRNA sense strand
gaagaagagauguuaauca

SEQ ID NO: 1462652 - RNA, 19 nt, Homo sapiens
  misc_RNA (1)...(19): siRNA sense strand
gaaagaagaggagaaugaa

SEQ ID NO: 1462653 - RNA, 19 nt, Homo sapiens
  misc_RNA (1)...(19): siRNA sense strand
caaaaggcaucucuuaauu

SEQ ID NO: 1462654 - RNA, 19 nt, Homo sapiens
  misc_RNA (1)...(19): siRNA sense strand
gagagugccuacuguuaga

SEQ ID NO: 1462655 - RNA, 19 nt, Homo sapiens
  misc_RNA (1)...(19): siRNA sense strand
ugacaaaaguccacguuua

SEQ ID NO: 1462656 - RNA, 19 nt, Homo sapiens
  misc_RNA (1)...(19): siRNA sense strand
gaagggaugucaaagucau

SEQ ID NO: 1462657 - RNA, 19 nt, Homo sapiens
  misc_RNA (1)...(19): siRNA sense strand
ggagaagaaggaaauuaaa

SEQ ID NO: 1462658 - RNA, 19 nt, Homo sapiens
  misc_RNA (1)...(19): siRNA sense strand
ugaaagaagaggagaauga

SEQ ID NO: 1462659 - RNA, 19 nt, Homo sapiens
  misc_RNA (1)...(19): siRNA sense strand
gaagaaggaaauuaaagug

SEQ ID NO: 1462660 - RNA, 19 nt, Homo sapiens
  misc_RNA (1)...(19): siRNA sense strand
gcucgggccuucaagaguu

SEQ ID NO: 1462661 - RNA, 19 nt, Homo sapiens
  misc_RNA (1)...(19): siRNA sense strand
caaagaugauccaagagau

SEQ ID NO: 1462662 - RNA, 19 nt, Homo sapiens
  misc_RNA (1)...(19): siRNA sense strand
acagauaucuugggcacua

SEQ ID NO: 1462663 - RNA, 19 nt, Homo sapiens
  misc_RNA (1)...(19): siRNA sense strand
cgacaugccaaacaucaua

SEQ ID NO: 1462664 - RNA, 19 nt, Homo sapiens
  misc_RNA (1)...(19): siRNA sense strand
auacagaccaacuugauua

SEQ ID NO: 1462665 - RNA, 19 nt, Homo sapiens
  misc_RNA (1)...(19): siRNA sense strand
gaagaaggacagcguagug

SEQ ID NO: 1462666 - RNA, 19 nt, Homo sapiens
  misc_RNA (1)...(19): siRNA sense strand
gaaauuaaaguggaaguag

SEQ ID NO: 1462667 - RNA, 19 nt, Homo sapiens
  misc_RNA (1)...(19): siRNA sense strand
gaucaaagggauuauaucu

SEQ ID NO: 1462668 - RNA, 19 nt, Homo sapiens
  misc_RNA (1)...(19): siRNA sense strand
gaagaggagauaccauuca

SEQ ID NO: 1462669 - RNA, 19 nt, Homo sapiens
  misc_RNA (1)...(19): siRNA sense strand
ccaaacaucauacagauca

SEQ ID NO: 1462670 - RNA, 19 nt, Homo sapiens
  misc_RNA (1)...(19): siRNA sense strand
ccaacuugauuaugauguu

SEQ ID NO: 1462671 - RNA, 19 nt, Homo sapiens
  misc_RNA (1)...(19): siRNA sense strand
gaaugaaauuagagaggau

SEQ ID NO: 1462672 - RNA, 19 nt, Homo sapiens
  misc_RNA (1)...(19): siRNA sense strand
ggaaauuaaaguggaagua

SEQ ID NO: 1462673 - RNA, 19 nt, Homo sapiens
  misc_RNA (1)...(19): siRNA sense strand
auucaaagaugauccaaga

SEQ ID NO: 1462674 - RNA, 19 nt, Homo sapiens
  misc_RNA (1)...(19): siRNA sense strand
aaaggcaucucuuaauugg

SEQ ID NO: 1462675 - RNA, 19 nt, Homo sapiens
  misc_RNA (1)...(19): siRNA sense strand
caagagaugagaccuacaa

SEQ ID NO: 1462676 - RNA, 19 nt, Homo sapiens
  misc_RNA (1)...(19): siRNA sense strand
gcagugcaccggaugauuc

SEQ ID NO: 1462677 - RNA, 19 nt, Homo sapiens
  misc_RNA (1)...(19): siRNA sense strand
auaaagaucccaaggaaga

SEQ ID NO: 1462678 - RNA, 19 nt, Homo sapiens
  misc_RNA (1)...(19): siRNA sense strand
ccaaauacagaccaacuug

SEQ ID NO: 1462679 - RNA, 19 nt, Homo sapiens
  misc_RNA (1)...(19): siRNA sense strand
ggagagugccuacuguuag

SEQ ID NO: 1462680 - RNA, 19 nt, Homo sapiens
  misc_RNA (1)...(19): siRNA sense strand
gagaagaaggaaauuaaag

SEQ ID NO: 1462681 - RNA, 19 nt, Homo sapiens
  misc_RNA (1)...(19): siRNA sense strand
ucaaagaugauccaagaga

SEQ ID NO: 1462682 - RNA, 19 nt, Homo sapiens
  misc_RNA (1)...(19): siRNA sense strand
uuaauuggcacaugaagaa

SEQ ID NO: 1462683 - RNA, 19 nt, Homo sapiens
  misc_RNA (1)...(19): siRNA sense strand
ucucuuaauuggcacauga

SEQ ID NO: 1462684 - RNA, 19 nt, Homo sapiens
  misc_RNA (1)...(19): siRNA sense strand
aagaagagauguuaaucag

SEQ ID NO: 1462685 - RNA, 19 nt, Homo sapiens
  misc_RNA (1)...(19): siRNA sense strand
cacauuaaauaccagcauu

SEQ ID NO: 1462686 - RNA, 19 nt, Homo sapiens
  misc_RNA (1)...(19): siRNA sense strand
aagaagagaaggagaagaa

SEQ ID NO: 1462687 - RNA, 19 nt, Homo sapiens
  misc_RNA (1)...(19): siRNA sense strand
gaggagauaccauucaaag

SEQ ID NO: 1462688 - RNA, 19 nt, Homo sapiens
  misc_RNA (1)...(19): siRNA sense strand
ggaagaagagauguuaauc

SEQ ID NO: 1462689 - RNA, 19 nt, Homo sapiens
  misc_RNA (1)...(19): siRNA sense strand
cgacaaaaggcaucucuua

SEQ ID NO: 1462690 - RNA, 19 nt, Homo sapiens
  misc_RNA (1)...(19): siRNA sense strand
ggaagaagacgaaaagaug

SEQ ID NO: 1462691 - RNA, 19 nt, Homo sapiens
  misc_RNA (1)...(19): siRNA sense strand
agaggagaaugaaauuaga

SEQ ID NO: 1462692 - RNA, 19 nt, Homo sapiens
  misc_RNA (1)...(19): siRNA sense strand
gugaagaggagauaccauu

SEQ ID NO: 1462693 - RNA, 19 nt, Homo sapiens
  misc_RNA (1)...(19): siRNA sense strand
gcagcucauuugcaaguca

SEQ ID NO: 1462694 - RNA, 19 nt, Homo sapiens
  misc_RNA (1)...(19): siRNA sense strand
ggaagaggaggaggaagaa

SEQ ID NO: 1462695 - RNA, 19 nt, Homo sapiens
  misc_RNA (1)...(19): siRNA sense strand
caaauacagaccaacuuga

SEQ ID NO: 1462696 - RNA, 19 nt, Homo sapiens
  misc_RNA (1)...(19): siRNA sense strand
guauguccguugugagaug

SEQ ID NO: 1462697 - RNA, 19 nt, Homo sapiens
  misc_RNA (1)...(19): siRNA sense strand
auacagaucaaagggauua

SEQ ID NO: 1462698 - RNA, 19 nt, Homo sapiens
  misc_RNA (1)...(19): siRNA sense strand
ggaggaggaagaagagaug

SEQ ID NO: 1462699 - RNA, 19 nt, Homo sapiens
  misc_RNA (1)...(19): siRNA sense strand
aagaggagauaccauucaa

SEQ ID NO: 1462700 - RNA, 19 nt, Homo sapiens
  misc_RNA (1)...(19): siRNA sense strand
guucauugcagcucauuug

SEQ ID NO: 1462701 - RNA, 19 nt, Homo sapiens
  misc_RNA (1)...(19): siRNA sense strand
ugauuaugauguuggagaa

SEQ ID NO: 1462702 - RNA, 19 nt, Homo sapiens
  misc_RNA (1)...(19): siRNA sense strand
aggagaagaaggaaauuaa

SEQ ID NO: 1462703 - RNA, 19 nt, Homo sapiens
  misc_RNA (1)...(19): siRNA sense strand
gaaggagaagaaggaaauu

SEQ ID NO: 1462704 - RNA, 19 nt, Homo sapiens
  misc_RNA (1)...(19): siRNA sense strand
gaggaagaagagauguuaa

SEQ ID NO: 1462705 - RNA, 19 nt, Homo sapiens
  misc_RNA (1)...(19): siRNA sense strand
cugaagggaugucaaaguc

SEQ ID NO: 1462706 - RNA, 19 nt, Homo sapiens
  misc_RNA (1)...(19): siRNA sense strand
cagaucaaagggauuauau

SEQ ID NO: 1462707 - RNA, 19 nt, Homo sapiens
  misc_RNA (1)...(19): siRNA sense strand
gaagaagacgaaaagauga

SEQ ID NO: 1462708 - RNA, 19 nt, Homo sapiens
  misc_RNA (1)...(19): siRNA sense strand
aagaagaggagaaugaaau

SEQ ID NO: 1462709 - RNA, 19 nt, Homo sapiens
  misc_RNA (1)...(19): siRNA sense strand
gaaaaucagggaagguaaa

SEQ ID NO: 1462710 - RNA, 19 nt, Homo sapiens
  misc_RNA (1)...(19): siRNA sense strand
uggagagugccuacuguua

SEQ ID NO: 1462711 - RNA, 19 nt, Homo sapiens
  misc_RNA (1)...(19): siRNA sense strand
guccaagaccgguucauug

SEQ ID NO: 1462712 - RNA, 19 nt, Homo sapiens
  misc_RNA (1)...(19): siRNA sense strand
ggucagggucuuccucuuc

SEQ ID NO: 1462713 - RNA, 19 nt, Homo sapiens
  misc_RNA (1)...(19): siRNA sense strand
aaugugagaucuguggauu

SEQ ID NO: 1462714 - RNA, 19 nt, Homo sapiens
  misc_RNA (1)...(19): siRNA sense strand
agaagaggagaaugaaauu

SEQ ID NO: 1462715 - RNA, 19 nt, Homo sapiens
  misc_RNA (1)...(19): siRNA sense strand
aaguagagguggaggugaa

SEQ ID NO: 1462716 - RNA, 19 nt, Homo sapiens
  misc_RNA (1)...(19): siRNA sense strand
agaaggagaagaaggaaau

SEQ ID NO: 1462717 - RNA, 19 nt, Homo sapiens
  misc_RNA (1)...(19): siRNA sense strand
ggaggaaggccgaguaucc

SEQ ID NO: 1462718 - RNA, 19 nt, Homo sapiens
  misc_RNA (1)...(19): siRNA sense strand
ugagaucuguggauuuacu

SEQ ID NO: 1462719 - RNA, 19 nt, Homo sapiens
  misc_RNA (1)...(19): siRNA sense strand
ugccaaacaucauacagau

SEQ ID NO: 1462720 - RNA, 19 nt, Homo sapiens
  misc_RNA (1)...(19): siRNA sense strand
gcugaagaagaaauaugua

SEQ ID NO: 1462721 - RNA, 19 nt, Homo sapiens
  misc_RNA (1)...(19): siRNA sense strand
gagauggaaggauguggaa

SEQ ID NO: 1462722 - RNA, 19 nt, Homo sapiens
  misc_RNA (1)...(19): siRNA sense strand
aguaguaggacaucuguuu

SEQ ID NO: 1462723 - RNA, 19 nt, Homo sapiens
  misc_RNA (1)...(19): siRNA sense strand
gagaaggagaagaaggaaa

SEQ ID NO: 1462724 - RNA, 19 nt, Homo sapiens
  misc_RNA (1)...(19): siRNA sense strand
cuacaaaccccacuuagaa

SEQ ID NO: 1462725 - RNA, 19 nt, Homo sapiens
  misc_RNA (1)...(19): siRNA sense strand
gagaugagaccuacaaacc

SEQ ID NO: 1462726 - RNA, 19 nt, Homo sapiens
  misc_RNA (1)...(19): siRNA sense strand
caaacaucauacagaucaa

SEQ ID NO: 1462727 - RNA, 19 nt, Homo sapiens
  misc_RNA (1)...(19): siRNA sense strand
caccagcacagauaucuug

SEQ ID NO: 1462728 - RNA, 19 nt, Homo sapiens
  misc_RNA (1)...(19): siRNA sense strand
caagucagaaccaaauaca

SEQ ID NO: 1462729 - RNA, 19 nt, Homo sapiens
  misc_RNA (1)...(19): siRNA sense strand
cuucaagaguucccacaau

SEQ ID NO: 1462730 - RNA, 19 nt, Homo sapiens
  misc_RNA (1)...(19): siRNA sense strand
ugcagcaccacauuaaaua

SEQ ID NO: 1462731 - RNA, 19 nt, Homo sapiens
  misc_RNA (1)...(19): siRNA sense strand
aaagggauuauaucuguga

SEQ ID NO: 1462732 - RNA, 19 nt, Homo sapiens
  misc_RNA (1)...(19): siRNA sense strand
agaccaacuugauuaugau

SEQ ID NO: 1462733 - RNA, 19 nt, Homo sapiens
  misc_RNA (1)...(19): siRNA sense strand
gacaaaaggcaucucuuaa

SEQ ID NO: 1462734 - RNA, 19 nt, Homo sapiens
  misc_RNA (1)...(19): siRNA sense strand
agucagaaccaaauacaga

SEQ ID NO: 1462735 - RNA, 19 nt, Homo sapiens
  misc_RNA (1)...(19): siRNA sense strand
gagaaaaucagggaaggua

SEQ ID NO: 1462736 - RNA, 19 nt, Homo sapiens
  misc_RNA (1)...(19): siRNA sense strand
gcaagucagaaccaaauac

SEQ ID NO: 1462737 - RNA, 19 nt, Homo sapiens
  misc_RNA (1)...(19): siRNA sense strand
agauaccauucaaagauga

SEQ ID NO: 1462738 - RNA, 19 nt, Homo sapiens
  misc_RNA (1)...(19): siRNA sense strand
gauucacacuggcgagaag

SEQ ID NO: 1462739 - RNA, 19 nt, Homo sapiens
  misc_RNA (1)...(19): siRNA sense strand
ccaaggaagagaggaagaa

SEQ ID NO: 1462740 - RNA, 19 nt, Homo sapiens
  misc_RNA (1)...(19): siRNA sense strand
gcugaagggaugucaaagu

SEQ ID NO: 1462741 - RNA, 19 nt, Homo sapiens
  misc_RNA (1)...(19): siRNA sense strand
gggauuauaucugugaaua

SEQ ID NO: 1462742 - RNA, 19 nt, Homo sapiens
  misc_RNA (1)...(19): siRNA sense strand
gaaggaaauuaaaguggaa

SEQ ID NO: 1462743 - RNA, 19 nt, Homo sapiens
  misc_RNA (1)...(19): siRNA sense strand
ucaaagggauuauaucugu

SEQ ID NO: 1462744 - RNA, 19 nt, Homo sapiens
  misc_RNA (1)...(19): siRNA sense strand
cagaccaacuugauuauga

SEQ ID NO: 1462745 - RNA, 19 nt, Homo sapiens
  misc_RNA (1)...(19): siRNA sense strand
ugugagaucuguggauuua

SEQ ID NO: 1462746 - RNA, 19 nt, Homo sapiens
  misc_RNA (1)...(19): siRNA sense strand
gagauaccauucaaagaug

SEQ ID NO: 1462747 - RNA, 19 nt, Homo sapiens
  misc_RNA (1)...(19): siRNA sense strand
ggaggaagaagagauguua

SEQ ID NO: 1462748 - RNA, 19 nt, Homo sapiens
  misc_RNA (1)...(19): siRNA sense strand
ggagauaccauucaaagau

SEQ ID NO: 1462749 - RNA, 19 nt, Homo sapiens
  misc_RNA (1)...(19): siRNA sense strand
gaagaggagaaugaaauua

SEQ ID NO: 1462750 - RNA, 19 nt, Homo sapiens
  misc_RNA (1)...(19): siRNA sense strand
ugauaaagaucccaaggaa

SEQ ID NO: 1462751 - RNA, 19 nt, Homo sapiens
  misc_RNA (1)...(19): siRNA sense strand
gaagaagagauguuaauca

SEQ ID NO: 1462752 - RNA, 19 nt, Homo sapiens
  misc_RNA (1)...(19): siRNA sense strand
gaaagaagaggagaaugaa

SEQ ID NO: 1462753 - RNA, 19 nt, Homo sapiens
  misc_RNA (1)...(19): siRNA sense strand
caaaaggcaucucuuaauu

SEQ ID NO: 1462754 - RNA, 19 nt, Homo sapiens
  misc_RNA (1)...(19): siRNA sense strand
gagagugccuacuguuaga

SEQ ID NO: 1462755 - RNA, 19 nt, Homo sapiens
  misc_RNA (1)...(19): siRNA sense strand
ugacaaaaguccacguuua

SEQ ID NO: 1462756 - RNA, 19 nt, Homo sapiens
  misc_RNA (1)...(19): siRNA sense strand
gaagggaugucaaagucau

SEQ ID NO: 1462757 - RNA, 19 nt, Homo sapiens
  misc_RNA (1)...(19): siRNA sense strand
ggagaagaaggaaauuaaa

SEQ ID NO: 1462758 - RNA, 19 nt, Homo sapiens
  misc_RNA (1)...(19): siRNA sense strand
ugaaagaagaggagaauga

SEQ ID NO: 1462759 - RNA, 19 nt, Homo sapiens
  misc_RNA (1)...(19): siRNA sense strand
gaagaaggaaauuaaagug

SEQ ID NO: 1462760 - RNA, 19 nt, Homo sapiens
  misc_RNA (1)...(19): siRNA sense strand
gcucgggccuucaagaguu

SEQ ID NO: 1462761 - RNA, 19 nt, Homo sapiens
  misc_RNA (1)...(19): siRNA sense strand
caaagaugauccaagagau

SEQ ID NO: 1462762 - RNA, 19 nt, Homo sapiens
  misc_RNA (1)...(19): siRNA sense strand
acagauaucuugggcacua

SEQ ID NO: 1462763 - RNA, 19 nt, Homo sapiens
  misc_RNA (1)...(19): siRNA sense strand
cgacaugccaaacaucaua

SEQ ID NO: 1462764 - RNA, 19 nt, Homo sapiens
  misc_RNA (1)...(19): siRNA sense strand
auacagaccaacuugauua

SEQ ID NO: 1462765 - RNA, 19 nt, Homo sapiens
  misc_RNA (1)...(19): siRNA sense strand
gaagaaggacagcguagug

SEQ ID NO: 1462766 - RNA, 19 nt, Homo sapiens
  misc_RNA (1)...(19): siRNA sense strand
gaaauuaaaguggaaguag

SEQ ID NO: 1462767 - RNA, 19 nt, Homo sapiens
  misc_RNA (1)...(19): siRNA sense strand
gaucaaagggauuauaucu

SEQ ID NO: 1462768 - RNA, 19 nt, Homo sapiens
  misc_RNA (1)...(19): siRNA sense strand
gaagaggagauaccauuca

SEQ ID NO: 1462769 - RNA, 19 nt, Homo sapiens
  misc_RNA (1)...(19): siRNA sense strand
ccaaacaucauacagauca

SEQ ID NO: 1462770 - RNA, 19 nt, Homo sapiens
  misc_RNA (1)...(19): siRNA sense strand
ccaacuugauuaugauguu

SEQ ID NO: 1462771 - RNA, 19 nt, Homo sapiens
  misc_RNA (1)...(19): siRNA sense strand
gaaugaaauuagagaggau

SEQ ID NO: 1462772 - RNA, 19 nt, Homo sapiens
  misc_RNA (1)...(19): siRNA sense strand
ggaaauuaaaguggaagua

SEQ ID NO: 1462773 - RNA, 19 nt, Homo sapiens
  misc_RNA (1)...(19): siRNA sense strand
auucaaagaugauccaaga

SEQ ID NO: 1462774 - RNA, 19 nt, Homo sapiens
  misc_RNA (1)...(19): siRNA sense strand
aaaggcaucucuuaauugg

SEQ ID NO: 1462775 - RNA, 19 nt, Homo sapiens
  misc_RNA (1)...(19): siRNA sense strand
caagagaugagaccuacaa

SEQ ID NO: 1462776 - RNA, 19 nt, Homo sapiens
  misc_RNA (1)...(19): siRNA sense strand
gcagugcaccggaugauuc

SEQ ID NO: 1462777 - RNA, 19 nt, Homo sapiens
  misc_RNA (1)...(19): siRNA sense strand
auaaagaucccaaggaaga

SEQ ID NO: 1462778 - RNA, 19 nt, Homo sapiens
  misc_RNA (1)...(19): siRNA sense strand
ccaaauacagaccaacuug

SEQ ID NO: 1462779 - RNA, 19 nt, Homo sapiens
  misc_RNA (1)...(19): siRNA sense strand
ggagagugccuacuguuag

SEQ ID NO: 1462780 - RNA, 19 nt, Homo sapiens
  misc_RNA (1)...(19): siRNA sense strand
gagaagaaggaaauuaaag

SEQ ID NO: 1462781 - RNA, 19 nt, Homo sapiens
  misc_RNA (1)...(19): siRNA sense strand
ucaaagaugauccaagaga

SEQ ID NO: 1462782 - RNA, 19 nt, Homo sapiens
  misc_RNA (1)...(19): siRNA sense strand
uuaauuggcacaugaagaa

SEQ ID NO: 1462783 - RNA, 19 nt, Homo sapiens
  misc_RNA (1)...(19): siRNA sense strand
ucucuuaauuggcacauga

SEQ ID NO: 1462784 - RNA, 19 nt, Homo sapiens
  misc_RNA (1)...(19): siRNA sense strand
aagaagagauguuaaucag

SEQ ID NO: 1462785 - RNA, 19 nt, Homo sapiens
  misc_RNA (1)...(19): siRNA sense strand
cacauuaaauaccagcauu

SEQ ID NO: 1462786 - RNA, 19 nt, Homo sapiens
  misc_RNA (1)...(19): siRNA sense strand
aagaagagaaggagaagaa

SEQ ID NO: 1462787 - RNA, 19 nt, Homo sapiens
  misc_RNA (1)...(19): siRNA sense strand
gaggagauaccauucaaag

SEQ ID NO: 1462788 - RNA, 19 nt, Homo sapiens
  misc_RNA (1)...(19): siRNA sense strand
ggaagaagagauguuaauc

SEQ ID NO: 1462789 - RNA, 19 nt, Homo sapiens
  misc_RNA (1)...(19): siRNA sense strand
cgacaaaaggcaucucuua

SEQ ID NO: 1462790 - RNA, 19 nt, Homo sapiens
  misc_RNA (1)...(19): siRNA sense strand
ggaagaagacgaaaagaug

SEQ ID NO: 1462791 - RNA, 19 nt, Homo sapiens
  misc_RNA (1)...(19): siRNA sense strand
agaggagaaugaaauuaga

SEQ ID NO: 1462792 - RNA, 19 nt, Homo sapiens
  misc_RNA (1)...(19): siRNA sense strand
gugaagaggagauaccauu

SEQ ID NO: 1462793 - RNA, 19 nt, Homo sapiens
  misc_RNA (1)...(19): siRNA sense strand
gcagcucauuugcaaguca

SEQ ID NO: 1462794 - RNA, 19 nt, Homo sapiens
  misc_RNA (1)...(19): siRNA sense strand
ggaagaggaggaggaagaa

SEQ ID NO: 1462795 - RNA, 19 nt, Homo sapiens
  misc_RNA (1)...(19): siRNA sense strand
caaauacagaccaacuuga

SEQ ID NO: 1462796 - RNA, 19 nt, Homo sapiens
  misc_RNA (1)...(19): siRNA sense strand
guauguccguugugagaug

SEQ ID NO: 1462797 - RNA, 19 nt, Homo sapiens
  misc_RNA (1)...(19): siRNA sense strand
auacagaucaaagggauua

SEQ ID NO: 1462798 - RNA, 19 nt, Homo sapiens
  misc_RNA (1)...(19): siRNA sense strand
ggaggaggaagaagagaug

SEQ ID NO: 1462799 - RNA, 19 nt, Homo sapiens
  misc_RNA (1)...(19): siRNA sense strand
aagaggagauaccauucaa

SEQ ID NO: 1462800 - RNA, 19 nt, Homo sapiens
  misc_RNA (1)...(19): siRNA sense strand
guucauugcagcucauuug

SEQ ID NO: 1462801 - RNA, 19 nt, Homo sapiens
  misc_RNA (1)...(19): siRNA sense strand
ugauuaugauguuggagaa

SEQ ID NO: 1462802 - RNA, 19 nt, Homo sapiens
  misc_RNA (1)...(19): siRNA sense strand
aggagaagaaggaaauuaa

SEQ ID NO: 1462803 - RNA, 19 nt, Homo sapiens
  misc_RNA (1)...(19): siRNA sense strand
gaaggagaagaaggaaauu

SEQ ID NO: 1462804 - RNA, 19 nt, Homo sapiens
  misc_RNA (1)...(19): siRNA sense strand
gaggaagaagagauguuaa

SEQ ID NO: 1462805 - RNA, 19 nt, Homo sapiens
  misc_RNA (1)...(19): siRNA sense strand
cugaagggaugucaaaguc

SEQ ID NO: 1462806 - RNA, 19 nt, Homo sapiens
  misc_RNA (1)...(19): siRNA sense strand
cagaucaaagggauuauau

SEQ ID NO: 1462807 - RNA, 19 nt, Homo sapiens
  misc_RNA (1)...(19): siRNA sense strand
gaagaagacgaaaagauga

SEQ ID NO: 1462808 - RNA, 19 nt, Homo sapiens
  misc_RNA (1)...(19): siRNA sense strand
aagaagaggagaaugaaau

SEQ ID NO: 1462809 - RNA, 19 nt, Homo sapiens
  misc_RNA (1)...(19): siRNA sense strand
gaaaaucagggaagguaaa

SEQ ID NO: 1462810 - RNA, 19 nt, Homo sapiens
  misc_RNA (1)...(19): siRNA sense strand
uggagagugccuacuguua

SEQ ID NO: 1462811 - RNA, 19 nt, Homo sapiens
  misc_RNA (1)...(19): siRNA sense strand
guccaagaccgguucauug

SEQ ID NO: 1462812 - RNA, 19 nt, Homo sapiens
  misc_RNA (1)...(19): siRNA sense strand
ggucagggucuuccucuuc

SEQ ID NO: 1462813 - RNA, 19 nt, Homo sapiens
  misc_RNA (1)...(19): siRNA sense strand
aaugugagaucuguggauu

SEQ ID NO: 1462814 - RNA, 19 nt, Homo sapiens
  misc_RNA (1)...(19): siRNA sense strand
agaagaggagaaugaaauu

SEQ ID NO: 1462815 - RNA, 19 nt, Homo sapiens
  misc_RNA (1)...(19): siRNA sense strand
aaguagagguggaggugaa

SEQ ID NO: 1462816 - RNA, 19 nt, Homo sapiens
  misc_RNA (1)...(19): siRNA sense strand
agaaggagaagaaggaaau

SEQ ID NO: 1462817 - RNA, 19 nt, Homo sapiens
  misc_RNA (1)...(19): siRNA sense strand
ggaggaaggccgaguaucc

SEQ ID NO: 1462818 - RNA, 19 nt, Homo sapiens
  misc_RNA (1)...(19): siRNA sense strand
ugagaucuguggauuuacu

SEQ ID NO: 1462819 - RNA, 19 nt, Homo sapiens
  misc_RNA (1)...(19): siRNA sense strand
ugccaaacaucauacagau

SEQ ID NO: 1462820 - RNA, 19 nt, Homo sapiens
  misc_RNA (1)...(19): siRNA sense strand
gcugaagaagaaauaugua

SEQ ID NO: 1462821 - RNA, 19 nt, Homo sapiens
  misc_RNA (1)...(19): siRNA sense strand
gagauggaaggauguggaa

SEQ ID NO: 1462822 - RNA, 19 nt, Homo sapiens
  misc_RNA (1)...(19): siRNA sense strand
aguaguaggacaucuguuu

SEQ ID NO: 1462823 - RNA, 19 nt, Homo sapiens
  misc_RNA (1)...(19): siRNA sense strand
gagaaggagaagaaggaaa

SEQ ID NO: 1462824 - RNA, 19 nt, Homo sapiens
  misc_RNA (1)...(19): siRNA sense strand
cuacaaaccccacuuagaa

SEQ ID NO: 1462825 - RNA, 19 nt, Homo sapiens
  misc_RNA (1)...(19): siRNA sense strand
gagaugagaccuacaaacc

SEQ ID NO: 1462826 - RNA, 19 nt, Homo sapiens
  misc_RNA (1)...(19): siRNA sense strand
caaacaucauacagaucaa

SEQ ID NO: 1462827 - RNA, 19 nt, Homo sapiens
  misc_RNA (1)...(19): siRNA sense strand
caccagcacagauaucuug

SEQ ID NO: 1462828 - RNA, 19 nt, Homo sapiens
  misc_RNA (1)...(19): siRNA sense strand
caagucagaaccaaauaca

SEQ ID NO: 1462829 - RNA, 19 nt, Homo sapiens
  misc_RNA (1)...(19): siRNA sense strand
cuucaagaguucccacaau

SEQ ID NO: 1462830 - RNA, 19 nt, Homo sapiens
  misc_RNA (1)...(19): siRNA sense strand
ugcagcaccacauuaaaua

SEQ ID NO: 1462831 - RNA, 19 nt, Homo sapiens
  misc_RNA (1)...(19): siRNA sense strand
aaagggauuauaucuguga

SEQ ID NO: 1462832 - RNA, 19 nt, Homo sapiens
  misc_RNA (1)...(19): siRNA sense strand
agaccaacuugauuaugau

SEQ ID NO: 1462833 - RNA, 19 nt, Homo sapiens
  misc_RNA (1)...(19): siRNA sense strand
gacaaaaggcaucucuuaa

SEQ ID NO: 1462834 - RNA, 19 nt, Homo sapiens
  misc_RNA (1)...(19): siRNA sense strand
agucagaaccaaauacaga

SEQ ID NO: 1462835 - RNA, 19 nt, Homo sapiens
  misc_RNA (1)...(19): siRNA sense strand
gagaaaaucagggaaggua

SEQ ID NO: 1462836 - RNA, 19 nt, Homo sapiens
  misc_RNA (1)...(19): siRNA sense strand
gcaagucagaaccaaauac

SEQ ID NO: 1462837 - RNA, 19 nt, Homo sapiens
  misc_RNA (1)...(19): siRNA sense strand
agauaccauucaaagauga

SEQ ID NO: 1462838 - RNA, 19 nt, Homo sapiens
  misc_RNA (1)...(19): siRNA sense strand
gauucacacuggcgagaag

SEQ ID NO: 1462839 - RNA, 19 nt, Homo sapiens
  misc_RNA (1)...(19): siRNA sense strand
ccaaggaagagaggaagaa

SEQ ID NO: 1462840 - RNA, 19 nt, Homo sapiens
  misc_RNA (1)...(19): siRNA sense strand
gcugaagggaugucaaagu

SEQ ID NO: 1462841 - RNA, 19 nt, Homo sapiens
  misc_RNA (1)...(19): siRNA sense strand
gauccuggcuuuccaugga

SEQ ID NO: 1462842 - RNA, 19 nt, Homo sapiens
  misc_RNA (1)...(19): siRNA sense strand
ggagagauuugacgagacu

SEQ ID NO: 1462843 - RNA, 19 nt, Homo sapiens
  misc_RNA (1)...(19): siRNA sense strand
agacugagacucugguuga

SEQ ID NO: 1462844 - RNA, 19 nt, Homo sapiens
  misc_RNA (1)...(19): siRNA sense strand
cugagacucugguugaaga

SEQ ID NO: 1462845 - RNA, 19 nt, Homo sapiens
  misc_RNA (1)...(19): siRNA sense strand
ggaaagcggcaaaaguuaa

SEQ ID NO: 1462846 - RNA, 19 nt, Homo sapiens
  misc_RNA (1)...(19): siRNA sense strand
ggagagaagggcaucuaca

SEQ ID NO: 1462847 - RNA, 19 nt, Homo sapiens
  misc_RNA (1)...(19): siRNA sense strand
gacugagacucugguugaa

SEQ ID NO: 1462848 - RNA, 19 nt, Homo sapiens
  misc_RNA (1)...(19): siRNA sense strand
gcggaaagcggcaaaaguu

SEQ ID NO: 1462849 - RNA, 19 nt, Homo sapiens
  misc_RNA (1)...(19): siRNA sense strand
gccgcagccugaggucuaa

SEQ ID NO: 1462850 - RNA, 19 nt, Homo sapiens
  misc_RNA (1)...(19): siRNA sense strand
gagagaagggcaucuacac

SEQ ID NO: 1462851 - RNA, 19 nt, Homo sapiens
  misc_RNA (1)...(19): siRNA sense strand
gaaagcggcaaaaguuaau

SEQ ID NO: 1462852 - RNA, 19 nt, Homo sapiens
  misc_RNA (1)...(19): siRNA sense strand
aagggcaucuacacagcaa

SEQ ID NO: 1462853 - RNA, 19 nt, Homo sapiens
  misc_RNA (1)...(19): siRNA sense strand
gauccuggcuuuccaugga

SEQ ID NO: 1462854 - RNA, 19 nt, Homo sapiens
  misc_RNA (1)...(19): siRNA sense strand
ggagagauuugacgagacu

SEQ ID NO: 1462855 - RNA, 19 nt, Homo sapiens
  misc_RNA (1)...(19): siRNA sense strand
agacugagacucugguuga

SEQ ID NO: 1462856 - RNA, 19 nt, Homo sapiens
  misc_RNA (1)...(19): siRNA sense strand
cugagacucugguugaaga

SEQ ID NO: 1462857 - RNA, 19 nt, Homo sapiens
  misc_RNA (1)...(19): siRNA sense strand
ggaaagcggcaaaaguuaa

SEQ ID NO: 1462858 - RNA, 19 nt, Homo sapiens
  misc_RNA (1)...(19): siRNA sense strand
ggagagaagggcaucuaca

SEQ ID NO: 1462859 - RNA, 19 nt, Homo sapiens
  misc_RNA (1)...(19): siRNA sense strand
gacugagacucugguugaa

SEQ ID NO: 1462860 - RNA, 19 nt, Homo sapiens
  misc_RNA (1)...(19): siRNA sense strand
gcggaaagcggcaaaaguu

SEQ ID NO: 1462861 - RNA, 19 nt, Homo sapiens
  misc_RNA (1)...(19): siRNA sense strand
gccgcagccugaggucuaa

SEQ ID NO: 1462862 - RNA, 19 nt, Homo sapiens
  misc_RNA (1)...(19): siRNA sense strand
gagagaagggcaucuacac

SEQ ID NO: 1462863 - RNA, 19 nt, Homo sapiens
  misc_RNA (1)...(19): siRNA sense strand
gaaagcggcaaaaguuaau

SEQ ID NO: 1462864 - RNA, 19 nt, Homo sapiens
  misc_RNA (1)...(19): siRNA sense strand
aagggcaucuacacagcaa

SEQ ID NO: 1462865 - RNA, 19 nt, Homo sapiens
  misc_RNA (1)...(19): siRNA sense strand
gcaggaguauuaauagcaa

SEQ ID NO: 1462866 - RNA, 19 nt, Homo sapiens
  misc_RNA (1)...(19): siRNA sense strand
gauccuggcuuuccaugga

SEQ ID NO: 1462867 - RNA, 19 nt, Homo sapiens
  misc_RNA (1)...(19): siRNA sense strand
gcccauugcaggaguauua

SEQ ID NO: 1462868 - RNA, 19 nt, Homo sapiens
  misc_RNA (1)...(19): siRNA sense strand
ggagagauuugacgagacu

SEQ ID NO: 1462869 - RNA, 19 nt, Homo sapiens
  misc_RNA (1)...(19): siRNA sense strand
cuacaguacuuccugacuu

SEQ ID NO: 1462870 - RNA, 19 nt, Homo sapiens
  misc_RNA (1)...(19): siRNA sense strand
agacugagacucugguuga

SEQ ID NO: 1462871 - RNA, 19 nt, Homo sapiens
  misc_RNA (1)...(19): siRNA sense strand
cauugcaggaguauuaaua

SEQ ID NO: 1462872 - RNA, 19 nt, Homo sapiens
  misc_RNA (1)...(19): siRNA sense strand
cugagacucugguugaaga

SEQ ID NO: 1462873 - RNA, 19 nt, Homo sapiens
  misc_RNA (1)...(19): siRNA sense strand
caucaguauugguaaagug

SEQ ID NO: 1462874 - RNA, 19 nt, Homo sapiens
  misc_RNA (1)...(19): siRNA sense strand
gaacaggcccuccccauca

SEQ ID NO: 1462875 - RNA, 19 nt, Homo sapiens
  misc_RNA (1)...(19): siRNA sense strand
ggaaagcggcaaaaguuaa

SEQ ID NO: 1462876 - RNA, 19 nt, Homo sapiens
  misc_RNA (1)...(19): siRNA sense strand
ggagagaagggcaucuaca

SEQ ID NO: 1462877 - RNA, 19 nt, Homo sapiens
  misc_RNA (1)...(19): siRNA sense strand
caccuggucuccacguuuc

SEQ ID NO: 1462878 - RNA, 19 nt, Homo sapiens
  misc_RNA (1)...(19): siRNA sense strand
uacaguacuuccugacuuc

SEQ ID NO: 1462879 - RNA, 19 nt, Homo sapiens
  misc_RNA (1)...(19): siRNA sense strand
uuaauagcaacccacauuu

SEQ ID NO: 1462880 - RNA, 19 nt, Homo sapiens
  misc_RNA (1)...(19): siRNA sense strand
gacugagacucugguugaa

SEQ ID NO: 1462881 - RNA, 19 nt, Homo sapiens
  misc_RNA (1)...(19): siRNA sense strand
auuaauagcaacccacauu

SEQ ID NO: 1462882 - RNA, 19 nt, Homo sapiens
  misc_RNA (1)...(19): siRNA sense strand
gcggaaagcggcaaaaguu

SEQ ID NO: 1462883 - RNA, 19 nt, Homo sapiens
  misc_RNA (1)...(19): siRNA sense strand
gcucaaaaccaaauccauu

SEQ ID NO: 1462884 - RNA, 19 nt, Homo sapiens
  misc_RNA (1)...(19): siRNA sense strand
cuuccugacuucucccauu

SEQ ID NO: 1462885 - RNA, 19 nt, Homo sapiens
  misc_RNA (1)...(19): siRNA sense strand
gccgcagccugaggucuaa

SEQ ID NO: 1462886 - RNA, 19 nt, Homo sapiens
  misc_RNA (1)...(19): siRNA sense strand
ugacuucucccauucaaac

SEQ ID NO: 1462887 - RNA, 19 nt, Homo sapiens
  misc_RNA (1)...(19): siRNA sense strand
gagagaagggcaucuacac

SEQ ID NO: 1462888 - RNA, 19 nt, Homo sapiens
  misc_RNA (1)...(19): siRNA sense strand
ccacucauuucugggaaca

SEQ ID NO: 1462889 - RNA, 19 nt, Homo sapiens
  misc_RNA (1)...(19): siRNA sense strand
ucaccuggucuccacguuu

SEQ ID NO: 1462890 - RNA, 19 nt, Homo sapiens
  misc_RNA (1)...(19): siRNA sense strand
cacauucacacgcccauug

SEQ ID NO: 1462891 - RNA, 19 nt, Homo sapiens
  misc_RNA (1)...(19): siRNA sense strand
ggaauuccccacucauuuc

SEQ ID NO: 1462892 - RNA, 19 nt, Homo sapiens
  misc_RNA (1)...(19): siRNA sense strand
gaaagcggcaaaaguuaau

SEQ ID NO: 1462893 - RNA, 19 nt, Homo sapiens
  misc_RNA (1)...(19): siRNA sense strand
aagggcaucuacacagcaa

SEQ ID NO: 1462894 - RNA, 19 nt, Homo sapiens
  misc_RNA (1)...(19): siRNA sense strand
ccugacuucucccauucaa

SEQ ID NO: 1462895 - RNA, 19 nt, Homo sapiens
  misc_RNA (1)...(19): siRNA sense strand
ccacgucccugcucaaaac

SEQ ID NO: 1462896 - RNA, 19 nt, Homo sapiens
  misc_RNA (1)...(19): siRNA sense strand
gauccuggcuuuccaugga

SEQ ID NO: 1462897 - RNA, 19 nt, Homo sapiens
  misc_RNA (1)...(19): siRNA sense strand
ggagagauuugacgagacu

SEQ ID NO: 1462898 - RNA, 19 nt, Homo sapiens
  misc_RNA (1)...(19): siRNA sense strand
agacugagacucugguuga

SEQ ID NO: 1462899 - RNA, 19 nt, Homo sapiens
  misc_RNA (1)...(19): siRNA sense strand
cugagacucugguugaaga

SEQ ID NO: 1462900 - RNA, 19 nt, Homo sapiens
  misc_RNA (1)...(19): siRNA sense strand
ggaaagcggcaaaaguuaa

SEQ ID NO: 1462901 - RNA, 19 nt, Homo sapiens
  misc_RNA (1)...(19): siRNA sense strand
ggagagaagggcaucuaca

SEQ ID NO: 1462902 - RNA, 19 nt, Homo sapiens
  misc_RNA (1)...(19): siRNA sense strand
gacugagacucugguugaa

SEQ ID NO: 1462903 - RNA, 19 nt, Homo sapiens
  misc_RNA (1)...(19): siRNA sense strand
gcggaaagcggcaaaaguu

SEQ ID NO: 1462904 - RNA, 19 nt, Homo sapiens
  misc_RNA (1)...(19): siRNA sense strand
gccgcagccugaggucuaa

SEQ ID NO: 1462905 - RNA, 19 nt, Homo sapiens
  misc_RNA (1)...(19): siRNA sense strand
gagagaagggcaucuacac

SEQ ID NO: 1462906 - RNA, 19 nt, Homo sapiens
  misc_RNA (1)...(19): siRNA sense strand
gaaagcggcaaaaguuaau

SEQ ID NO: 1462907 - RNA, 19 nt, Homo sapiens
  misc_RNA (1)...(19): siRNA sense strand
aagggcaucuacacagcaa

SEQ ID NO: 1462908 - RNA, 19 nt, Homo sapiens
  misc_RNA (1)...(19): siRNA sense strand
gauccuggcuuuccaugga

SEQ ID NO: 1462909 - RNA, 19 nt, Homo sapiens
  misc_RNA (1)...(19): siRNA sense strand
ggagagauuugacgagacu

SEQ ID NO: 1462910 - RNA, 19 nt, Homo sapiens
  misc_RNA (1)...(19): siRNA sense strand
agacugagacucugguuga

SEQ ID NO: 1462911 - RNA, 19 nt, Homo sapiens
  misc_RNA (1)...(19): siRNA sense strand
cugagacucugguugaaga

SEQ ID NO: 1462912 - RNA, 19 nt, Homo sapiens
  misc_RNA (1)...(19): siRNA sense strand
ggaaagcggcaaaaguuaa

SEQ ID NO: 1462913 - RNA, 19 nt, Homo sapiens
  misc_RNA (1)...(19): siRNA sense strand
ggagagaagggcaucuaca

SEQ ID NO: 1462914 - RNA, 19 nt, Homo sapiens
  misc_RNA (1)...(19): siRNA sense strand
gacugagacucugguugaa

SEQ ID NO: 1462915 - RNA, 19 nt, Homo sapiens
  misc_RNA (1)...(19): siRNA sense strand
gcggaaagcggcaaaaguu

SEQ ID NO: 1462916 - RNA, 19 nt, Homo sapiens
  misc_RNA (1)...(19): siRNA sense strand
gccgcagccugaggucuaa

SEQ ID NO: 1462917 - RNA, 19 nt, Homo sapiens
  misc_RNA (1)...(19): siRNA sense strand
gagagaagggcaucuacac

SEQ ID NO: 1462918 - RNA, 19 nt, Homo sapiens
  misc_RNA (1)...(19): siRNA sense strand
gaaagcggcaaaaguuaau

SEQ ID NO: 1462919 - RNA, 19 nt, Homo sapiens
  misc_RNA (1)...(19): siRNA sense strand
aagggcaucuacacagcaa

SEQ ID NO: 1462920 - RNA, 19 nt, Homo sapiens
  misc_RNA (1)...(19): siRNA sense strand
gcaggaguauuaauagcaa

SEQ ID NO: 1462921 - RNA, 19 nt, Homo sapiens
  misc_RNA (1)...(19): siRNA sense strand
gauccuggcuuuccaugga

SEQ ID NO: 1462922 - RNA, 19 nt, Homo sapiens
  misc_RNA (1)...(19): siRNA sense strand
gcccauugcaggaguauua

SEQ ID NO: 1462923 - RNA, 19 nt, Homo sapiens
  misc_RNA (1)...(19): siRNA sense strand
ggagagauuugacgagacu

SEQ ID NO: 1462924 - RNA, 19 nt, Homo sapiens
  misc_RNA (1)...(19): siRNA sense strand
cuacaguacuuccugacuu

SEQ ID NO: 1462925 - RNA, 19 nt, Homo sapiens
  misc_RNA (1)...(19): siRNA sense strand
agacugagacucugguuga

SEQ ID NO: 1462926 - RNA, 19 nt, Homo sapiens
  misc_RNA (1)...(19): siRNA sense strand
cauugcaggaguauuaaua

SEQ ID NO: 1462927 - RNA, 19 nt, Homo sapiens
  misc_RNA (1)...(19): siRNA sense strand
cugagacucugguugaaga

SEQ ID NO: 1462928 - RNA, 19 nt, Homo sapiens
  misc_RNA (1)...(19): siRNA sense strand
caucaguauugguaaagug

SEQ ID NO: 1462929 - RNA, 19 nt, Homo sapiens
  misc_RNA (1)...(19): siRNA sense strand
gaacaggcccuccccauca

SEQ ID NO: 1462930 - RNA, 19 nt, Homo sapiens
  misc_RNA (1)...(19): siRNA sense strand
ggaaagcggcaaaaguuaa

SEQ ID NO: 1462931 - RNA, 19 nt, Homo sapiens
  misc_RNA (1)...(19): siRNA sense strand
ggagagaagggcaucuaca

SEQ ID NO: 1462932 - RNA, 19 nt, Homo sapiens
  misc_RNA (1)...(19): siRNA sense strand
caccuggucuccacguuuc

SEQ ID NO: 1462933 - RNA, 19 nt, Homo sapiens
  misc_RNA (1)...(19): siRNA sense strand
uacaguacuuccugacuuc

SEQ ID NO: 1462934 - RNA, 19 nt, Homo sapiens
  misc_RNA (1)...(19): siRNA sense strand
uuaauagcaacccacauuu

SEQ ID NO: 1462935 - RNA, 19 nt, Homo sapiens
  misc_RNA (1)...(19): siRNA sense strand
gacugagacucugguugaa

SEQ ID NO: 1462936 - RNA, 19 nt, Homo sapiens
  misc_RNA (1)...(19): siRNA sense strand
auuaauagcaacccacauu

SEQ ID NO: 1462937 - RNA, 19 nt, Homo sapiens
  misc_RNA (1)...(19): siRNA sense strand
gcggaaagcggcaaaaguu

SEQ ID NO: 1462938 - RNA, 19 nt, Homo sapiens
  misc_RNA (1)...(19): siRNA sense strand
gcucaaaaccaaauccauu

SEQ ID NO: 1462939 - RNA, 19 nt, Homo sapiens
  misc_RNA (1)...(19): siRNA sense strand
cuuccugacuucucccauu

SEQ ID NO: 1462940 - RNA, 19 nt, Homo sapiens
  misc_RNA (1)...(19): siRNA sense strand
gccgcagccugaggucuaa

SEQ ID NO: 1462941 - RNA, 19 nt, Homo sapiens
  misc_RNA (1)...(19): siRNA sense strand
ugacuucucccauucaaac

SEQ ID NO: 1462942 - RNA, 19 nt, Homo sapiens
  misc_RNA (1)...(19): siRNA sense strand
gagagaagggcaucuacac

SEQ ID NO: 1462943 - RNA, 19 nt, Homo sapiens
  misc_RNA (1)...(19): siRNA sense strand
ccacucauuucugggaaca

SEQ ID NO: 1462944 - RNA, 19 nt, Homo sapiens
  misc_RNA (1)...(19): siRNA sense strand
ucaccuggucuccacguuu

SEQ ID NO: 1462945 - RNA, 19 nt, Homo sapiens
  misc_RNA (1)...(19): siRNA sense strand
cacauucacacgcccauug

SEQ ID NO: 1462946 - RNA, 19 nt, Homo sapiens
  misc_RNA (1)...(19): siRNA sense strand
ggaauuccccacucauuuc

SEQ ID NO: 1462947 - RNA, 19 nt, Homo sapiens
  misc_RNA (1)...(19): siRNA sense strand
gaaagcggcaaaaguuaau

SEQ ID NO: 1462948 - RNA, 19 nt, Homo sapiens
  misc_RNA (1)...(19): siRNA sense strand
aagggcaucuacacagcaa

SEQ ID NO: 1462949 - RNA, 19 nt, Homo sapiens
  misc_RNA (1)...(19): siRNA sense strand
ccugacuucucccauucaa

SEQ ID NO: 1462950 - RNA, 19 nt, Homo sapiens
  misc_RNA (1)...(19): siRNA sense strand
ccacgucccugcucaaaac

SEQ ID NO: 1462951 - RNA, 19 nt, Homo sapiens
  misc_RNA (1)...(19): siRNA sense strand
uaacagacauuaaggauga

SEQ ID NO: 1462952 - RNA, 19 nt, Homo sapiens
  misc_RNA (1)...(19): siRNA sense strand
gaugaagaguucuggaaua

SEQ ID NO: 1462953 - RNA, 19 nt, Homo sapiens
  misc_RNA (1)...(19): siRNA sense strand
gaaagagccaacaacguua

SEQ ID NO: 1462954 - RNA, 19 nt, Homo sapiens
  misc_RNA (1)...(19): siRNA sense strand
gaaccaggcaggcuacuuu

SEQ ID NO: 1462955 - RNA, 19 nt, Homo sapiens
  misc_RNA (1)...(19): siRNA sense strand
gaagaguucuggaauaggu

SEQ ID NO: 1462956 - RNA, 19 nt, Homo sapiens
  misc_RNA (1)...(19): siRNA sense strand
gaugaauccugcugcauga

SEQ ID NO: 1462957 - RNA, 19 nt, Homo sapiens
  misc_RNA (1)...(19): siRNA sense strand
caaggacucuuacgacuuc

SEQ ID NO: 1462958 - RNA, 19 nt, Homo sapiens
  misc_RNA (1)...(19): siRNA sense strand
gaagaggaggugauugaaa

SEQ ID NO: 1462959 - RNA, 19 nt, Homo sapiens
  misc_RNA (1)...(19): siRNA sense strand
ugaaagagccaacaacguu

SEQ ID NO: 1462960 - RNA, 19 nt, Homo sapiens
  misc_RNA (1)...(19): siRNA sense strand
ccuuguagcucauauauag

SEQ ID NO: 1462961 - RNA, 19 nt, Homo sapiens
  misc_RNA (1)...(19): siRNA sense strand
ugaaccagguggcggauuu

SEQ ID NO: 1462962 - RNA, 19 nt, Homo sapiens
  misc_RNA (1)...(19): siRNA sense strand
gggagucgcuggucugauc

SEQ ID NO: 1462963 - RNA, 19 nt, Homo sapiens
  misc_RNA (1)...(19): siRNA sense strand
caagaauccugccaucauc

SEQ ID NO: 1462964 - RNA, 19 nt, Homo sapiens
  misc_RNA (1)...(19): siRNA sense strand
ccaacaacguuaaguaugg

SEQ ID NO: 1462965 - RNA, 19 nt, Homo sapiens
  misc_RNA (1)...(19): siRNA sense strand
gcaagaauccugccaucau

SEQ ID NO: 1462966 - RNA, 19 nt, Homo sapiens
  misc_RNA (1)...(19): siRNA sense strand
gaauuugccacucuacuug

SEQ ID NO: 1462967 - RNA, 19 nt, Homo sapiens
  misc_RNA (1)...(19): siRNA sense strand
gagccaacaacguuaagua

SEQ ID NO: 1462968 - RNA, 19 nt, Homo sapiens
  misc_RNA (1)...(19): siRNA sense strand
ggaauuugccacucuacuu

SEQ ID NO: 1462969 - RNA, 19 nt, Homo sapiens
  misc_RNA (1)...(19): siRNA sense strand
ugugcaaacuccuggauaa

SEQ ID NO: 1462970 - RNA, 19 nt, Homo sapiens
  misc_RNA (1)...(19): siRNA sense strand
gcaaacuccuggauaaagc

SEQ ID NO: 1462971 - RNA, 19 nt, Homo sapiens
  misc_RNA (1)...(19): siRNA sense strand
gcaagaaccauggacauuc

SEQ ID NO: 1462972 - RNA, 19 nt, Homo sapiens
  misc_RNA (1)...(19): siRNA sense strand
caaccuggaugagugcauu

SEQ ID NO: 1462973 - RNA, 19 nt, Homo sapiens
  misc_RNA (1)...(19): siRNA sense strand
gugagggaguggauaaguu

SEQ ID NO: 1462974 - RNA, 19 nt, Homo sapiens
  misc_RNA (1)...(19): siRNA sense strand
gugaagaggaggugauuga

SEQ ID NO: 1462975 - RNA, 19 nt, Homo sapiens
  misc_RNA (1)...(19): siRNA sense strand
gauaacagacauuaaggau

SEQ ID NO: 1462976 - RNA, 19 nt, Homo sapiens
  misc_RNA (1)...(19): siRNA sense strand
gcugaaggugcccaaauuu

SEQ ID NO: 1462977 - RNA, 19 nt, Homo sapiens
  misc_RNA (1)...(19): siRNA sense strand
caucaccguuaaacacuga

SEQ ID NO: 1462978 - RNA, 19 nt, Homo sapiens
  misc_RNA (1)...(19): siRNA sense strand
aagaggaggugauugaaag

SEQ ID NO: 1462979 - RNA, 19 nt, Homo sapiens
  misc_RNA (1)...(19): siRNA sense strand
ggauaaagcagguguucca

SEQ ID NO: 1462980 - RNA, 19 nt, Homo sapiens
  misc_RNA (1)...(19): siRNA sense strand
gagcugaaccuuccuuucg

SEQ ID NO: 1462981 - RNA, 19 nt, Homo sapiens
  misc_RNA (1)...(19): siRNA sense strand
ggugauaacagacauuaag

SEQ ID NO: 1462982 - RNA, 19 nt, Homo sapiens
  misc_RNA (1)...(19): siRNA sense strand
ucaaaaccaucaccguuaa

SEQ ID NO: 1462983 - RNA, 19 nt, Homo sapiens
  misc_RNA (1)...(19): siRNA sense strand
caagaaccauggacauucc

SEQ ID NO: 1462984 - RNA, 19 nt, Homo sapiens
  misc_RNA (1)...(19): siRNA sense strand
ggaugaagaguucuggaau

SEQ ID NO: 1462985 - RNA, 19 nt, Homo sapiens
  misc_RNA (1)...(19): siRNA sense strand
uugcugaccuggaagauag

SEQ ID NO: 1462986 - RNA, 19 nt, Homo sapiens
  misc_RNA (1)...(19): siRNA sense strand
guagagagggagccaagga

SEQ ID NO: 1462987 - RNA, 19 nt, Homo sapiens
  misc_RNA (1)...(19): siRNA sense strand
cuucuucacugagaucaaa

SEQ ID NO: 1462988 - RNA, 19 nt, Homo sapiens
  misc_RNA (1)...(19): siRNA sense strand
gcucacggguccugaacca

SEQ ID NO: 1462989 - RNA, 19 nt, Homo sapiens
  misc_RNA (1)...(19): siRNA sense strand
gggaugaagaguucuggaa

SEQ ID NO: 1462990 - RNA, 19 nt, Homo sapiens
  misc_RNA (1)...(19): siRNA sense strand
aaagagccaacaacguuaa

SEQ ID NO: 1462991 - RNA, 19 nt, Homo sapiens
  misc_RNA (1)...(19): siRNA sense strand
cugcaugacggaagagaua

SEQ ID NO: 1462992 - RNA, 19 nt, Homo sapiens
  misc_RNA (1)...(19): siRNA sense strand
gaauccugccaucaucuuu

SEQ ID NO: 1462993 - RNA, 19 nt, Homo sapiens
  misc_RNA (1)...(19): siRNA sense strand
gcagggaacacugugauag

SEQ ID NO: 1462994 - RNA, 19 nt, Homo sapiens
  misc_RNA (1)...(19): siRNA sense strand
ggcaagaaccauggacauu

SEQ ID NO: 1462995 - RNA, 19 nt, Homo sapiens
  misc_RNA (1)...(19): siRNA sense strand
gcggugagggaguggauaa

SEQ ID NO: 1462996 - RNA, 19 nt, Homo sapiens
  misc_RNA (1)...(19): siRNA sense strand
uguggucaauauuguguuu

SEQ ID NO: 1462997 - RNA, 19 nt, Homo sapiens
  misc_RNA (1)...(19): siRNA sense strand
ccagguguggucaauauug

SEQ ID NO: 1462998 - RNA, 19 nt, Homo sapiens
  misc_RNA (1)...(19): siRNA sense strand
ccaggcaggcuacuuuaug

SEQ ID NO: 1462999 - RNA, 19 nt, Homo sapiens
  misc_RNA (1)...(19): siRNA sense strand
ugcugaaggugcccaaauu

SEQ ID NO: 1463000 - RNA, 19 nt, Homo sapiens
  misc_RNA (1)...(19): siRNA sense strand
cagguguggucaauauugu

SEQ ID NO: 1463001 - RNA, 19 nt, Homo sapiens
  misc_RNA (1)...(19): siRNA sense strand
gagccaaggacucuuacga

SEQ ID NO: 1463002 - RNA, 19 nt, Homo sapiens
  misc_RNA (1)...(19): siRNA sense strand
gcaugacggaagagauauu

SEQ ID NO: 1463003 - RNA, 19 nt, Homo sapiens
  misc_RNA (1)...(19): siRNA sense strand
ugagggaguggauaaguug

SEQ ID NO: 1463004 - RNA, 19 nt, Homo sapiens
  misc_RNA (1)...(19): siRNA sense strand
ccaaggacucuuacgacuu

SEQ ID NO: 1463005 - RNA, 19 nt, Homo sapiens
  misc_RNA (1)...(19): siRNA sense strand
gccaacaacguuaaguaug

SEQ ID NO: 1463006 - RNA, 19 nt, Homo sapiens
  misc_RNA (1)...(19): siRNA sense strand
ucuacuugcugaccuggaa

SEQ ID NO: 1463007 - RNA, 19 nt, Homo sapiens
  misc_RNA (1)...(19): siRNA sense strand
ggacucuuacgacuucuuc

SEQ ID NO: 1463008 - RNA, 19 nt, Homo sapiens
  misc_RNA (1)...(19): siRNA sense strand
cuuacgacuucuucacuga

SEQ ID NO: 1463009 - RNA, 19 nt, Homo sapiens
  misc_RNA (1)...(19): siRNA sense strand
gaaccagguggcggauuug

SEQ ID NO: 1463010 - RNA, 19 nt, Homo sapiens
  misc_RNA (1)...(19): siRNA sense strand
caugacggaagagauauuu

SEQ ID NO: 1463011 - RNA, 19 nt, Homo sapiens
  misc_RNA (1)...(19): siRNA sense strand
ccuggaauuugccacucua

SEQ ID NO: 1463012 - RNA, 19 nt, Homo sapiens
  misc_RNA (1)...(19): siRNA sense strand
cugcguggauguugugcaa

SEQ ID NO: 1463013 - RNA, 19 nt, Homo sapiens
  misc_RNA (1)...(19): siRNA sense strand
ucacugagaucaaaaccau

SEQ ID NO: 1463014 - RNA, 19 nt, Homo sapiens
  misc_RNA (1)...(19): siRNA sense strand
augaagaguucuggaauag

SEQ ID NO: 1463015 - RNA, 19 nt, Homo sapiens
  misc_RNA (1)...(19): siRNA sense strand
cagaaguuacgucaagaga

SEQ ID NO: 1463016 - RNA, 19 nt, Homo sapiens
  misc_RNA (1)...(19): siRNA sense strand
gugcaaacuccuggauaaa

SEQ ID NO: 1463017 - RNA, 19 nt, Homo sapiens
  misc_RNA (1)...(19): siRNA sense strand
caacaggggaaguguauug

SEQ ID NO: 1463018 - RNA, 19 nt, Homo sapiens
  misc_RNA (1)...(19): siRNA sense strand
ccacggugauaacagacau

SEQ ID NO: 1463019 - RNA, 19 nt, Homo sapiens
  misc_RNA (1)...(19): siRNA sense strand
ggucaauauuguguuugga

SEQ ID NO: 1463020 - RNA, 19 nt, Homo sapiens
  misc_RNA (1)...(19): siRNA sense strand
gcguggauguugugcaaac

SEQ ID NO: 1463021 - RNA, 19 nt, Homo sapiens
  misc_RNA (1)...(19): siRNA sense strand
caggcaggcuacuuuaugc

SEQ ID NO: 1463022 - RNA, 19 nt, Homo sapiens
  misc_RNA (1)...(19): siRNA sense strand
gucaauauuguguuuggaa

SEQ ID NO: 1463023 - RNA, 19 nt, Homo sapiens
  misc_RNA (1)...(19): siRNA sense strand
ggagcugaaccuuccuuuc

SEQ ID NO: 1463024 - RNA, 19 nt, Homo sapiens
  misc_RNA (1)...(19): siRNA sense strand
cuggaaaacuucauagaug

SEQ ID NO: 1463025 - RNA, 19 nt, Homo sapiens
  misc_RNA (1)...(19): siRNA sense strand
gagauauuugguccaguga

SEQ ID NO: 1463026 - RNA, 19 nt, Homo sapiens
  misc_RNA (1)...(19): siRNA sense strand
ugacggaagagauauuugg

SEQ ID NO: 1463027 - RNA, 19 nt, Homo sapiens
  misc_RNA (1)...(19): siRNA sense strand
gucagaaguuacgucaaga

SEQ ID NO: 1463028 - RNA, 19 nt, Homo sapiens
  misc_RNA (1)...(19): siRNA sense strand
uacgacuucuucacugaga

SEQ ID NO: 1463029 - RNA, 19 nt, Homo sapiens
  misc_RNA (1)...(19): siRNA sense strand
guucuggaauagguagaga

SEQ ID NO: 1463030 - RNA, 19 nt, Homo sapiens
  misc_RNA (1)...(19): siRNA sense strand
cugaaggugcccaaauuug

SEQ ID NO: 1463031 - RNA, 19 nt, Homo sapiens
  misc_RNA (1)...(19): siRNA sense strand
aaccaggcaggcuacuuua

SEQ ID NO: 1463032 - RNA, 19 nt, Homo sapiens
  misc_RNA (1)...(19): siRNA sense strand
ugauaacagacauuaagga

SEQ ID NO: 1463033 - RNA, 19 nt, Homo sapiens
  misc_RNA (1)...(19): siRNA sense strand
gaucagccccuggaauuug

SEQ ID NO: 1463034 - RNA, 19 nt, Homo sapiens
  misc_RNA (1)...(19): siRNA sense strand
ugaagaggaggugauugaa

SEQ ID NO: 1463035 - RNA, 19 nt, Homo sapiens
  misc_RNA (1)...(19): siRNA sense strand
ggaaccaggcaggcuacuu

SEQ ID NO: 1463036 - RNA, 19 nt, Homo sapiens
  misc_RNA (1)...(19): siRNA sense strand
uaccuuguagcucauauau

SEQ ID NO: 1463037 - RNA, 19 nt, Homo sapiens
  misc_RNA (1)...(19): siRNA sense strand
agcagucccuggaggaguu

SEQ ID NO: 1463038 - RNA, 19 nt, Homo sapiens
  misc_RNA (1)...(19): siRNA sense strand
uaacagacauuaaggauga

SEQ ID NO: 1463039 - RNA, 19 nt, Homo sapiens
  misc_RNA (1)...(19): siRNA sense strand
gaugaagaguucuggaaua

SEQ ID NO: 1463040 - RNA, 19 nt, Homo sapiens
  misc_RNA (1)...(19): siRNA sense strand
gaaagagccaacaacguua

SEQ ID NO: 1463041 - RNA, 19 nt, Homo sapiens
  misc_RNA (1)...(19): siRNA sense strand
gaaccaggcaggcuacuuu

SEQ ID NO: 1463042 - RNA, 19 nt, Homo sapiens
  misc_RNA (1)...(19): siRNA sense strand
gaagaguucuggaauaggu

SEQ ID NO: 1463043 - RNA, 19 nt, Homo sapiens
  misc_RNA (1)...(19): siRNA sense strand
gaugaauccugcugcauga

SEQ ID NO: 1463044 - RNA, 19 nt, Homo sapiens
  misc_RNA (1)...(19): siRNA sense strand
caaggacucuuacgacuuc

SEQ ID NO: 1463045 - RNA, 19 nt, Homo sapiens
  misc_RNA (1)...(19): siRNA sense strand
gaagaggaggugauugaaa

SEQ ID NO: 1463046 - RNA, 19 nt, Homo sapiens
  misc_RNA (1)...(19): siRNA sense strand
ugaaagagccaacaacguu

SEQ ID NO: 1463047 - RNA, 19 nt, Homo sapiens
  misc_RNA (1)...(19): siRNA sense strand
ccuuguagcucauauauag

SEQ ID NO: 1463048 - RNA, 19 nt, Homo sapiens
  misc_RNA (1)...(19): siRNA sense strand
ugaaccagguggcggauuu

SEQ ID NO: 1463049 - RNA, 19 nt, Homo sapiens
  misc_RNA (1)...(19): siRNA sense strand
gggagucgcuggucugauc

SEQ ID NO: 1463050 - RNA, 19 nt, Homo sapiens
  misc_RNA (1)...(19): siRNA sense strand
caagaauccugccaucauc

SEQ ID NO: 1463051 - RNA, 19 nt, Homo sapiens
  misc_RNA (1)...(19): siRNA sense strand
ccaacaacguuaaguaugg

SEQ ID NO: 1463052 - RNA, 19 nt, Homo sapiens
  misc_RNA (1)...(19): siRNA sense strand
gcaagaauccugccaucau

SEQ ID NO: 1463053 - RNA, 19 nt, Homo sapiens
  misc_RNA (1)...(19): siRNA sense strand
gaauuugccacucuacuug

SEQ ID NO: 1463054 - RNA, 19 nt, Homo sapiens
  misc_RNA (1)...(19): siRNA sense strand
gagccaacaacguuaagua

SEQ ID NO: 1463055 - RNA, 19 nt, Homo sapiens
  misc_RNA (1)...(19): siRNA sense strand
ggaauuugccacucuacuu

SEQ ID NO: 1463056 - RNA, 19 nt, Homo sapiens
  misc_RNA (1)...(19): siRNA sense strand
ugugcaaacuccuggauaa

SEQ ID NO: 1463057 - RNA, 19 nt, Homo sapiens
  misc_RNA (1)...(19): siRNA sense strand
gcaaacuccuggauaaagc

SEQ ID NO: 1463058 - RNA, 19 nt, Homo sapiens
  misc_RNA (1)...(19): siRNA sense strand
gcaagaaccauggacauuc

SEQ ID NO: 1463059 - RNA, 19 nt, Homo sapiens
  misc_RNA (1)...(19): siRNA sense strand
caaccuggaugagugcauu

SEQ ID NO: 1463060 - RNA, 19 nt, Homo sapiens
  misc_RNA (1)...(19): siRNA sense strand
gugagggaguggauaaguu

SEQ ID NO: 1463061 - RNA, 19 nt, Homo sapiens
  misc_RNA (1)...(19): siRNA sense strand
gugaagaggaggugauuga

SEQ ID NO: 1463062 - RNA, 19 nt, Homo sapiens
  misc_RNA (1)...(19): siRNA sense strand
gauaacagacauuaaggau

SEQ ID NO: 1463063 - RNA, 19 nt, Homo sapiens
  misc_RNA (1)...(19): siRNA sense strand
gcugaaggugcccaaauuu

SEQ ID NO: 1463064 - RNA, 19 nt, Homo sapiens
  misc_RNA (1)...(19): siRNA sense strand
caucaccguuaaacacuga

SEQ ID NO: 1463065 - RNA, 19 nt, Homo sapiens
  misc_RNA (1)...(19): siRNA sense strand
aagaggaggugauugaaag

SEQ ID NO: 1463066 - RNA, 19 nt, Homo sapiens
  misc_RNA (1)...(19): siRNA sense strand
ggauaaagcagguguucca

SEQ ID NO: 1463067 - RNA, 19 nt, Homo sapiens
  misc_RNA (1)...(19): siRNA sense strand
gagcugaaccuuccuuucg

SEQ ID NO: 1463068 - RNA, 19 nt, Homo sapiens
  misc_RNA (1)...(19): siRNA sense strand
ggugauaacagacauuaag

SEQ ID NO: 1463069 - RNA, 19 nt, Homo sapiens
  misc_RNA (1)...(19): siRNA sense strand
ucaaaaccaucaccguuaa

SEQ ID NO: 1463070 - RNA, 19 nt, Homo sapiens
  misc_RNA (1)...(19): siRNA sense strand
caagaaccauggacauucc

SEQ ID NO: 1463071 - RNA, 19 nt, Homo sapiens
  misc_RNA (1)...(19): siRNA sense strand
ggaugaagaguucuggaau

SEQ ID NO: 1463072 - RNA, 19 nt, Homo sapiens
  misc_RNA (1)...(19): siRNA sense strand
uugcugaccuggaagauag

SEQ ID NO: 1463073 - RNA, 19 nt, Homo sapiens
  misc_RNA (1)...(19): siRNA sense strand
guagagagggagccaagga

SEQ ID NO: 1463074 - RNA, 19 nt, Homo sapiens
  misc_RNA (1)...(19): siRNA sense strand
cuucuucacugagaucaaa

SEQ ID NO: 1463075 - RNA, 19 nt, Homo sapiens
  misc_RNA (1)...(19): siRNA sense strand
gcucacggguccugaacca

SEQ ID NO: 1463076 - RNA, 19 nt, Homo sapiens
  misc_RNA (1)...(19): siRNA sense strand
gggaugaagaguucuggaa

SEQ ID NO: 1463077 - RNA, 19 nt, Homo sapiens
  misc_RNA (1)...(19): siRNA sense strand
aaagagccaacaacguuaa

SEQ ID NO: 1463078 - RNA, 19 nt, Homo sapiens
  misc_RNA (1)...(19): siRNA sense strand
cugcaugacggaagagaua

SEQ ID NO: 1463079 - RNA, 19 nt, Homo sapiens
  misc_RNA (1)...(19): siRNA sense strand
gaauccugccaucaucuuu

SEQ ID NO: 1463080 - RNA, 19 nt, Homo sapiens
  misc_RNA (1)...(19): siRNA sense strand
gcagggaacacugugauag

SEQ ID NO: 1463081 - RNA, 19 nt, Homo sapiens
  misc_RNA (1)...(19): siRNA sense strand
ggcaagaaccauggacauu

SEQ ID NO: 1463082 - RNA, 19 nt, Homo sapiens
  misc_RNA (1)...(19): siRNA sense strand
gcggugagggaguggauaa

SEQ ID NO: 1463083 - RNA, 19 nt, Homo sapiens
  misc_RNA (1)...(19): siRNA sense strand
uguggucaauauuguguuu

SEQ ID NO: 1463084 - RNA, 19 nt, Homo sapiens
  misc_RNA (1)...(19): siRNA sense strand
ccagguguggucaauauug

SEQ ID NO: 1463085 - RNA, 19 nt, Homo sapiens
  misc_RNA (1)...(19): siRNA sense strand
ccaggcaggcuacuuuaug

SEQ ID NO: 1463086 - RNA, 19 nt, Homo sapiens
  misc_RNA (1)...(19): siRNA sense strand
ugcugaaggugcccaaauu

SEQ ID NO: 1463087 - RNA, 19 nt, Homo sapiens
  misc_RNA (1)...(19): siRNA sense strand
cagguguggucaauauugu

SEQ ID NO: 1463088 - RNA, 19 nt, Homo sapiens
  misc_RNA (1)...(19): siRNA sense strand
gagccaaggacucuuacga

SEQ ID NO: 1463089 - RNA, 19 nt, Homo sapiens
  misc_RNA (1)...(19): siRNA sense strand
gcaugacggaagagauauu

SEQ ID NO: 1463090 - RNA, 19 nt, Homo sapiens
  misc_RNA (1)...(19): siRNA sense strand
ugagggaguggauaaguug

SEQ ID NO: 1463091 - RNA, 19 nt, Homo sapiens
  misc_RNA (1)...(19): siRNA sense strand
ccaaggacucuuacgacuu

SEQ ID NO: 1463092 - RNA, 19 nt, Homo sapiens
  misc_RNA (1)...(19): siRNA sense strand
gccaacaacguuaaguaug

SEQ ID NO: 1463093 - RNA, 19 nt, Homo sapiens
  misc_RNA (1)...(19): siRNA sense strand
ucuacuugcugaccuggaa

SEQ ID NO: 1463094 - RNA, 19 nt, Homo sapiens
  misc_RNA (1)...(19): siRNA sense strand
ggacucuuacgacuucuuc

SEQ ID NO: 1463095 - RNA, 19 nt, Homo sapiens
  misc_RNA (1)...(19): siRNA sense strand
cuuacgacuucuucacuga

SEQ ID NO: 1463096 - RNA, 19 nt, Homo sapiens
  misc_RNA (1)...(19): siRNA sense strand
gaaccagguggcggauuug

SEQ ID NO: 1463097 - RNA, 19 nt, Homo sapiens
  misc_RNA (1)...(19): siRNA sense strand
caugacggaagagauauuu

SEQ ID NO: 1463098 - RNA, 19 nt, Homo sapiens
  misc_RNA (1)...(19): siRNA sense strand
ccuggaauuugccacucua

SEQ ID NO: 1463099 - RNA, 19 nt, Homo sapiens
  misc_RNA (1)...(19): siRNA sense strand
cugcguggauguugugcaa

SEQ ID NO: 1463100 - RNA, 19 nt, Homo sapiens
  misc_RNA (1)...(19): siRNA sense strand
ucacugagaucaaaaccau

SEQ ID NO: 1463101 - RNA, 19 nt, Homo sapiens
  misc_RNA (1)...(19): siRNA sense strand
augaagaguucuggaauag

SEQ ID NO: 1463102 - RNA, 19 nt, Homo sapiens
  misc_RNA (1)...(19): siRNA sense strand
cagaaguuacgucaagaga

SEQ ID NO: 1463103 - RNA, 19 nt, Homo sapiens
  misc_RNA (1)...(19): siRNA sense strand
gugcaaacuccuggauaaa

SEQ ID NO: 1463104 - RNA, 19 nt, Homo sapiens
  misc_RNA (1)...(19): siRNA sense strand
caacaggggaaguguauug

SEQ ID NO: 1463105 - RNA, 19 nt, Homo sapiens
  misc_RNA (1)...(19): siRNA sense strand
ccacggugauaacagacau

SEQ ID NO: 1463106 - RNA, 19 nt, Homo sapiens
  misc_RNA (1)...(19): siRNA sense strand
ggucaauauuguguuugga

SEQ ID NO: 1463107 - RNA, 19 nt, Homo sapiens
  misc_RNA (1)...(19): siRNA sense strand
gcguggauguugugcaaac

SEQ ID NO: 1463108 - RNA, 19 nt, Homo sapiens
  misc_RNA (1)...(19): siRNA sense strand
caggcaggcuacuuuaugc

SEQ ID NO: 1463109 - RNA, 19 nt, Homo sapiens
  misc_RNA (1)...(19): siRNA sense strand
gucaauauuguguuuggaa

SEQ ID NO: 1463110 - RNA, 19 nt, Homo sapiens
  misc_RNA (1)...(19): siRNA sense strand
ggagcugaaccuuccuuuc

SEQ ID NO: 1463111 - RNA, 19 nt, Homo sapiens
  misc_RNA (1)...(19): siRNA sense strand
cuggaaaacuucauagaug

SEQ ID NO: 1463112 - RNA, 19 nt, Homo sapiens
  misc_RNA (1)...(19): siRNA sense strand
gagauauuugguccaguga

SEQ ID NO: 1463113 - RNA, 19 nt, Homo sapiens
  misc_RNA (1)...(19): siRNA sense strand
ugacggaagagauauuugg

SEQ ID NO: 1463114 - RNA, 19 nt, Homo sapiens
  misc_RNA (1)...(19): siRNA sense strand
gucagaaguuacgucaaga

SEQ ID NO: 1463115 - RNA, 19 nt, Homo sapiens
  misc_RNA (1)...(19): siRNA sense strand
uacgacuucuucacugaga

SEQ ID NO: 1463116 - RNA, 19 nt, Homo sapiens
  misc_RNA (1)...(19): siRNA sense strand
guucuggaauagguagaga

SEQ ID NO: 1463117 - RNA, 19 nt, Homo sapiens
  misc_RNA (1)...(19): siRNA sense strand
cugaaggugcccaaauuug

SEQ ID NO: 1463118 - RNA, 19 nt, Homo sapiens
  misc_RNA (1)...(19): siRNA sense strand
aaccaggcaggcuacuuua

SEQ ID NO: 1463119 - RNA, 19 nt, Homo sapiens
  misc_RNA (1)...(19): siRNA sense strand
ugauaacagacauuaagga

SEQ ID NO: 1463120 - RNA, 19 nt, Homo sapiens
  misc_RNA (1)...(19): siRNA sense strand
gaucagccccuggaauuug

SEQ ID NO: 1463121 - RNA, 19 nt, Homo sapiens
  misc_RNA (1)...(19): siRNA sense strand
ugaagaggaggugauugaa

SEQ ID NO: 1463122 - RNA, 19 nt, Homo sapiens
  misc_RNA (1)...(19): siRNA sense strand
ggaaccaggcaggcuacuu

SEQ ID NO: 1463123 - RNA, 19 nt, Homo sapiens
  misc_RNA (1)...(19): siRNA sense strand
uaccuuguagcucauauau

SEQ ID NO: 1463124 - RNA, 19 nt, Homo sapiens
  misc_RNA (1)...(19): siRNA sense strand
agcagucccuggaggaguu

SEQ ID NO: 1463125 - RNA, 19 nt, Homo sapiens
  misc_RNA (1)...(19): siRNA sense strand
ggaagaagaucgggaagua

SEQ ID NO: 1463126 - RNA, 19 nt, Homo sapiens
  misc_RNA (1)...(19): siRNA sense strand
gagcagaucuccaaagugu

SEQ ID NO: 1463127 - RNA, 19 nt, Homo sapiens
  misc_RNA (1)...(19): siRNA sense strand
cagaggaguuugccuugua

SEQ ID NO: 1463128 - RNA, 19 nt, Homo sapiens
  misc_RNA (1)...(19): siRNA sense strand
cgacguggcccaguauaua

SEQ ID NO: 1463129 - RNA, 19 nt, Homo sapiens
  misc_RNA (1)...(19): siRNA sense strand
gaauucagcagaggaguuu

SEQ ID NO: 1463130 - RNA, 19 nt, Homo sapiens
  misc_RNA (1)...(19): siRNA sense strand
gacagaggcuggaggagau

SEQ ID NO: 1463131 - RNA, 19 nt, Homo sapiens
  misc_RNA (1)...(19): siRNA sense strand
ggccauuucuacaaccaua

SEQ ID NO: 1463132 - RNA, 19 nt, Homo sapiens
  misc_RNA (1)...(19): siRNA sense strand
gaagaagaucgggaaguaa

SEQ ID NO: 1463133 - RNA, 19 nt, Homo sapiens
  misc_RNA (1)...(19): siRNA sense strand
gcagaucuccaaaguguuc

SEQ ID NO: 1463134 - RNA, 19 nt, Homo sapiens
  misc_RNA (1)...(19): siRNA sense strand
ccaaaguguuccuaaugga

SEQ ID NO: 1463135 - RNA, 19 nt, Homo sapiens
  misc_RNA (1)...(19): siRNA sense strand
caacggccauuucuacaac

SEQ ID NO: 1463136 - RNA, 19 nt, Homo sapiens
  misc_RNA (1)...(19): siRNA sense strand
gaagaucgggaaguaaaga

SEQ ID NO: 1463137 - RNA, 19 nt, Homo sapiens
  misc_RNA (1)...(19): siRNA sense strand
gugagcagaucuccaaagu

SEQ ID NO: 1463138 - RNA, 19 nt, Homo sapiens
  misc_RNA (1)...(19): siRNA sense strand
ugaagcugcugcucaacaa

SEQ ID NO: 1463139 - RNA, 19 nt, Homo sapiens
  misc_RNA (1)...(19): siRNA sense strand
gcccaaaguucagaucuca

SEQ ID NO: 1463140 - RNA, 19 nt, Homo sapiens
  misc_RNA (1)...(19): siRNA sense strand
cgagaugccgguacuuaaa

SEQ ID NO: 1463141 - RNA, 19 nt, Homo sapiens
  misc_RNA (1)...(19): siRNA sense strand
cauaagacauccguguuca

SEQ ID NO: 1463142 - RNA, 19 nt, Homo sapiens
  misc_RNA (1)...(19): siRNA sense strand
cuuaaaagcuucauucaga

SEQ ID NO: 1463143 - RNA, 19 nt, Homo sapiens
  misc_RNA (1)...(19): siRNA sense strand
gacguggcccaguauauaa

SEQ ID NO: 1463144 - RNA, 19 nt, Homo sapiens
  misc_RNA (1)...(19): siRNA sense strand
gcagaggaguuugccuugu

SEQ ID NO: 1463145 - RNA, 19 nt, Homo sapiens
  misc_RNA (1)...(19): siRNA sense strand
guauauaaaguucgagaug

SEQ ID NO: 1463146 - RNA, 19 nt, Homo sapiens
  misc_RNA (1)...(19): siRNA sense strand
aagaagaucgggaaguaaa

SEQ ID NO: 1463147 - RNA, 19 nt, Homo sapiens
  misc_RNA (1)...(19): siRNA sense strand
ccuacgacguggcccagua

SEQ ID NO: 1463148 - RNA, 19 nt, Homo sapiens
  misc_RNA (1)...(19): siRNA sense strand
ccaaaguucagaucucaga

SEQ ID NO: 1463149 - RNA, 19 nt, Homo sapiens
  misc_RNA (1)...(19): siRNA sense strand
cgccaccgcuucuccauca

SEQ ID NO: 1463150 - RNA, 19 nt, Homo sapiens
  misc_RNA (1)...(19): siRNA sense strand
caucaacggccauuucuac

SEQ ID NO: 1463151 - RNA, 19 nt, Homo sapiens
  misc_RNA (1)...(19): siRNA sense strand
caugugagcagaucuccaa

SEQ ID NO: 1463152 - RNA, 19 nt, Homo sapiens
  misc_RNA (1)...(19): siRNA sense strand
ggaaguaaagaagcugaug

SEQ ID NO: 1463153 - RNA, 19 nt, Homo sapiens
  misc_RNA (1)...(19): siRNA sense strand
agaagcugaugcgcaagua

SEQ ID NO: 1463154 - RNA, 19 nt, Homo sapiens
  misc_RNA (1)...(19): siRNA sense strand
gaagcugcugcucaacaaa

SEQ ID NO: 1463155 - RNA, 19 nt, Homo sapiens
  misc_RNA (1)...(19): siRNA sense strand
uggaggaagucaccuacga

SEQ ID NO: 1463156 - RNA, 19 nt, Homo sapiens
  misc_RNA (1)...(19): siRNA sense strand
ugacugugcccaaaguuca

SEQ ID NO: 1463157 - RNA, 19 nt, Homo sapiens
  misc_RNA (1)...(19): siRNA sense strand
uaagacauccguguucaca

SEQ ID NO: 1463158 - RNA, 19 nt, Homo sapiens
  misc_RNA (1)...(19): siRNA sense strand
ccauaagacauccguguuc

SEQ ID NO: 1463159 - RNA, 19 nt, Homo sapiens
  misc_RNA (1)...(19): siRNA sense strand
uccaaaguguuccuaaugg

SEQ ID NO: 1463160 - RNA, 19 nt, Homo sapiens
  misc_RNA (1)...(19): siRNA sense strand
cugcugcucaacaaauuua

SEQ ID NO: 1463161 - RNA, 19 nt, Homo sapiens
  misc_RNA (1)...(19): siRNA sense strand
ucgagaugccgguacuuaa

SEQ ID NO: 1463162 - RNA, 19 nt, Homo sapiens
  misc_RNA (1)...(19): siRNA sense strand
ucuccaaaguguuccuaau

SEQ ID NO: 1463163 - RNA, 19 nt, Homo sapiens
  misc_RNA (1)...(19): siRNA sense strand
ggcccaguauauaaaguuc

SEQ ID NO: 1463164 - RNA, 19 nt, Homo sapiens
  misc_RNA (1)...(19): siRNA sense strand
ucaacggccauuucuacaa

SEQ ID NO: 1463165 - RNA, 19 nt, Homo sapiens
  misc_RNA (1)...(19): siRNA sense strand
gcgcacacgcagugauguu

SEQ ID NO: 1463166 - RNA, 19 nt, Homo sapiens
  misc_RNA (1)...(19): siRNA sense strand
gaaggaccagguggaggaa

SEQ ID NO: 1463167 - RNA, 19 nt, Homo sapiens
  misc_RNA (1)...(19): siRNA sense strand
ucaccaacguccgcaucaa

SEQ ID NO: 1463168 - RNA, 19 nt, Homo sapiens
  misc_RNA (1)...(19): siRNA sense strand
cccaguauauaaaguucga

SEQ ID NO: 1463169 - RNA, 19 nt, Homo sapiens
  misc_RNA (1)...(19): siRNA sense strand
cggcuaaugauucgacaga

SEQ ID NO: 1463170 - RNA, 19 nt, Homo sapiens
  misc_RNA (1)...(19): siRNA sense strand
guacuuaaaagcuucauuc

SEQ ID NO: 1463171 - RNA, 19 nt, Homo sapiens
  misc_RNA (1)...(19): siRNA sense strand
gagaugccgguacuuaaaa

SEQ ID NO: 1463172 - RNA, 19 nt, Homo sapiens
  misc_RNA (1)...(19): siRNA sense strand
cagaggaguuugccuugua

SEQ ID NO: 1463173 - RNA, 19 nt, Homo sapiens
  misc_RNA (1)...(19): siRNA sense strand
gaauucagcagaggaguuu

SEQ ID NO: 1463174 - RNA, 19 nt, Homo sapiens
  misc_RNA (1)...(19): siRNA sense strand
ggccauuucuacaaccaua

SEQ ID NO: 1463175 - RNA, 19 nt, Homo sapiens
  misc_RNA (1)...(19): siRNA sense strand
caacggccauuucuacaac

SEQ ID NO: 1463176 - RNA, 19 nt, Homo sapiens
  misc_RNA (1)...(19): siRNA sense strand
ugaagcugcugcucaacaa

SEQ ID NO: 1463177 - RNA, 19 nt, Homo sapiens
  misc_RNA (1)...(19): siRNA sense strand
gcccaaaguucagaucuca

SEQ ID NO: 1463178 - RNA, 19 nt, Homo sapiens
  misc_RNA (1)...(19): siRNA sense strand
cauaagacauccguguuca

SEQ ID NO: 1463179 - RNA, 19 nt, Homo sapiens
  misc_RNA (1)...(19): siRNA sense strand
gcagaggaguuugccuugu

SEQ ID NO: 1463180 - RNA, 19 nt, Homo sapiens
  misc_RNA (1)...(19): siRNA sense strand
ccaaaguucagaucucaga

SEQ ID NO: 1463181 - RNA, 19 nt, Homo sapiens
  misc_RNA (1)...(19): siRNA sense strand
cgccaccgcuucuccauca

SEQ ID NO: 1463182 - RNA, 19 nt, Homo sapiens
  misc_RNA (1)...(19): siRNA sense strand
caucaacggccauuucuac

SEQ ID NO: 1463183 - RNA, 19 nt, Homo sapiens
  misc_RNA (1)...(19): siRNA sense strand
gaagcugcugcucaacaaa

SEQ ID NO: 1463184 - RNA, 19 nt, Homo sapiens
  misc_RNA (1)...(19): siRNA sense strand
uaagacauccguguucaca

SEQ ID NO: 1463185 - RNA, 19 nt, Homo sapiens
  misc_RNA (1)...(19): siRNA sense strand
ugacugugcccaaaguuca

SEQ ID NO: 1463186 - RNA, 19 nt, Homo sapiens
  misc_RNA (1)...(19): siRNA sense strand
ccauaagacauccguguuc

SEQ ID NO: 1463187 - RNA, 19 nt, Homo sapiens
  misc_RNA (1)...(19): siRNA sense strand
cugcugcucaacaaauuua

SEQ ID NO: 1463188 - RNA, 19 nt, Homo sapiens
  misc_RNA (1)...(19): siRNA sense strand
gcgcacacgcagugauguu

SEQ ID NO: 1463189 - RNA, 19 nt, Homo sapiens
  misc_RNA (1)...(19): siRNA sense strand
ucaccaacguccgcaucaa

SEQ ID NO: 1463190 - RNA, 19 nt, Homo sapiens
  misc_RNA (1)...(19): siRNA sense strand
ucaacggccauuucuacaa

SEQ ID NO: 1463191 - RNA, 19 nt, Homo sapiens
  misc_RNA (1)...(19): siRNA sense strand
ggaagaagaucgggaagua

SEQ ID NO: 1463192 - RNA, 19 nt, Homo sapiens
  misc_RNA (1)...(19): siRNA sense strand
gagcagaucuccaaagugu

SEQ ID NO: 1463193 - RNA, 19 nt, Homo sapiens
  misc_RNA (1)...(19): siRNA sense strand
cagaggaguuugccuugua

SEQ ID NO: 1463194 - RNA, 19 nt, Homo sapiens
  misc_RNA (1)...(19): siRNA sense strand
cgacguggcccaguauaua

SEQ ID NO: 1463195 - RNA, 19 nt, Homo sapiens
  misc_RNA (1)...(19): siRNA sense strand
gaauucagcagaggaguuu

SEQ ID NO: 1463196 - RNA, 19 nt, Homo sapiens
  misc_RNA (1)...(19): siRNA sense strand
gacagaggcuggaggagau

SEQ ID NO: 1463197 - RNA, 19 nt, Homo sapiens
  misc_RNA (1)...(19): siRNA sense strand
ggccauuucuacaaccaua

SEQ ID NO: 1463198 - RNA, 19 nt, Homo sapiens
  misc_RNA (1)...(19): siRNA sense strand
gaagaagaucgggaaguaa

SEQ ID NO: 1463199 - RNA, 19 nt, Homo sapiens
  misc_RNA (1)...(19): siRNA sense strand
gcagaucuccaaaguguuc

SEQ ID NO: 1463200 - RNA, 19 nt, Homo sapiens
  misc_RNA (1)...(19): siRNA sense strand
ccaaaguguuccuaaugga

SEQ ID NO: 1463201 - RNA, 19 nt, Homo sapiens
  misc_RNA (1)...(19): siRNA sense strand
caacggccauuucuacaac

SEQ ID NO: 1463202 - RNA, 19 nt, Homo sapiens
  misc_RNA (1)...(19): siRNA sense strand
gaagaucgggaaguaaaga

SEQ ID NO: 1463203 - RNA, 19 nt, Homo sapiens
  misc_RNA (1)...(19): siRNA sense strand
gugagcagaucuccaaagu

SEQ ID NO: 1463204 - RNA, 19 nt, Homo sapiens
  misc_RNA (1)...(19): siRNA sense strand
ugaagcugcugcucaacaa

SEQ ID NO: 1463205 - RNA, 19 nt, Homo sapiens
  misc_RNA (1)...(19): siRNA sense strand
gcccaaaguucagaucuca

SEQ ID NO: 1463206 - RNA, 19 nt, Homo sapiens
  misc_RNA (1)...(19): siRNA sense strand
cgagaugccgguacuuaaa

SEQ ID NO: 1463207 - RNA, 19 nt, Homo sapiens
  misc_RNA (1)...(19): siRNA sense strand
cauaagacauccguguuca

SEQ ID NO: 1463208 - RNA, 19 nt, Homo sapiens
  misc_RNA (1)...(19): siRNA sense strand
cuuaaaagcuucauucaga

SEQ ID NO: 1463209 - RNA, 19 nt, Homo sapiens
  misc_RNA (1)...(19): siRNA sense strand
gacguggcccaguauauaa

SEQ ID NO: 1463210 - RNA, 19 nt, Homo sapiens
  misc_RNA (1)...(19): siRNA sense strand
gcagaggaguuugccuugu

SEQ ID NO: 1463211 - RNA, 19 nt, Homo sapiens
  misc_RNA (1)...(19): siRNA sense strand
guauauaaaguucgagaug

SEQ ID NO: 1463212 - RNA, 19 nt, Homo sapiens
  misc_RNA (1)...(19): siRNA sense strand
aagaagaucgggaaguaaa

SEQ ID NO: 1463213 - RNA, 19 nt, Homo sapiens
  misc_RNA (1)...(19): siRNA sense strand
ccuacgacguggcccagua

SEQ ID NO: 1463214 - RNA, 19 nt, Homo sapiens
  misc_RNA (1)...(19): siRNA sense strand
ccaaaguucagaucucaga

SEQ ID NO: 1463215 - RNA, 19 nt, Homo sapiens
  misc_RNA (1)...(19): siRNA sense strand
cgccaccgcuucuccauca

SEQ ID NO: 1463216 - RNA, 19 nt, Homo sapiens
  misc_RNA (1)...(19): siRNA sense strand
caucaacggccauuucuac

SEQ ID NO: 1463217 - RNA, 19 nt, Homo sapiens
  misc_RNA (1)...(19): siRNA sense strand
caugugagcagaucuccaa

SEQ ID NO: 1463218 - RNA, 19 nt, Homo sapiens
  misc_RNA (1)...(19): siRNA sense strand
ggaaguaaagaagcugaug

SEQ ID NO: 1463219 - RNA, 19 nt, Homo sapiens
  misc_RNA (1)...(19): siRNA sense strand
agaagcugaugcgcaagua

SEQ ID NO: 1463220 - RNA, 19 nt, Homo sapiens
  misc_RNA (1)...(19): siRNA sense strand
gaagcugcugcucaacaaa

SEQ ID NO: 1463221 - RNA, 19 nt, Homo sapiens
  misc_RNA (1)...(19): siRNA sense strand
uggaggaagucaccuacga

SEQ ID NO: 1463222 - RNA, 19 nt, Homo sapiens
  misc_RNA (1)...(19): siRNA sense strand
ugacugugcccaaaguuca

SEQ ID NO: 1463223 - RNA, 19 nt, Homo sapiens
  misc_RNA (1)...(19): siRNA sense strand
uaagacauccguguucaca

SEQ ID NO: 1463224 - RNA, 19 nt, Homo sapiens
  misc_RNA (1)...(19): siRNA sense strand
ccauaagacauccguguuc

SEQ ID NO: 1463225 - RNA, 19 nt, Homo sapiens
  misc_RNA (1)...(19): siRNA sense strand
uccaaaguguuccuaaugg

SEQ ID NO: 1463226 - RNA, 19 nt, Homo sapiens
  misc_RNA (1)...(19): siRNA sense strand
cugcugcucaacaaauuua

SEQ ID NO: 1463227 - RNA, 19 nt, Homo sapiens
  misc_RNA (1)...(19): siRNA sense strand
ucgagaugccgguacuuaa

SEQ ID NO: 1463228 - RNA, 19 nt, Homo sapiens
  misc_RNA (1)...(19): siRNA sense strand
ucuccaaaguguuccuaau

SEQ ID NO: 1463229 - RNA, 19 nt, Homo sapiens
  misc_RNA (1)...(19): siRNA sense strand
ggcccaguauauaaaguuc

SEQ ID NO: 1463230 - RNA, 19 nt, Homo sapiens
  misc_RNA (1)...(19): siRNA sense strand
ucaacggccauuucuacaa

SEQ ID NO: 1463231 - RNA, 19 nt, Homo sapiens
  misc_RNA (1)...(19): siRNA sense strand
gcgcacacgcagugauguu

SEQ ID NO: 1463232 - RNA, 19 nt, Homo sapiens
  misc_RNA (1)...(19): siRNA sense strand
gaaggaccagguggaggaa

SEQ ID NO: 1463233 - RNA, 19 nt, Homo sapiens
  misc_RNA (1)...(19): siRNA sense strand
ucaccaacguccgcaucaa

SEQ ID NO: 1463234 - RNA, 19 nt, Homo sapiens
  misc_RNA (1)...(19): siRNA sense strand
cccaguauauaaaguucga

SEQ ID NO: 1463235 - RNA, 19 nt, Homo sapiens
  misc_RNA (1)...(19): siRNA sense strand
cggcuaaugauucgacaga

SEQ ID NO: 1463236 - RNA, 19 nt, Homo sapiens
  misc_RNA (1)...(19): siRNA sense strand
guacuuaaaagcuucauuc

SEQ ID NO: 1463237 - RNA, 19 nt, Homo sapiens
  misc_RNA (1)...(19): siRNA sense strand
gagaugccgguacuuaaaa

SEQ ID NO: 1463238 - RNA, 19 nt, Homo sapiens
  misc_RNA (1)...(19): siRNA sense strand
caacugcgaugaugacuug

SEQ ID NO: 1463239 - RNA, 19 nt, Homo sapiens
  misc_RNA (1)...(19): siRNA sense strand
guaacucucuguccuggua

SEQ ID NO: 1463240 - RNA, 19 nt, Homo sapiens
  misc_RNA (1)...(19): siRNA sense strand
ugacaaagauagcuguaug

SEQ ID NO: 1463241 - RNA, 19 nt, Homo sapiens
  misc_RNA (1)...(19): siRNA sense strand
gaaguacgaggcacuguau

SEQ ID NO: 1463242 - RNA, 19 nt, Homo sapiens
  misc_RNA (1)...(19): siRNA sense strand
guacagaggaggagccauu

SEQ ID NO: 1463243 - RNA, 19 nt, Homo sapiens
  misc_RNA (1)...(19): siRNA sense strand
gcucaagugccauguguuu

SEQ ID NO: 1463244 - RNA, 19 nt, Homo sapiens
  misc_RNA (1)...(19): siRNA sense strand
gcauggaugugcugaacga

SEQ ID NO: 1463245 - RNA, 19 nt, Homo sapiens
  misc_RNA (1)...(19): siRNA sense strand
ggccagaacaugcugauga

SEQ ID NO: 1463246 - RNA, 19 nt, Homo sapiens
  misc_RNA (1)...(19): siRNA sense strand
gccaagcugcucagaagua

SEQ ID NO: 1463247 - RNA, 19 nt, Homo sapiens
  misc_RNA (1)...(19): siRNA sense strand
gccagaacaugcugaugau

SEQ ID NO: 1463248 - RNA, 19 nt, Homo sapiens
  misc_RNA (1)...(19): siRNA sense strand
cggaccagcuccauggauu

SEQ ID NO: 1463249 - RNA, 19 nt, Homo sapiens
  misc_RNA (1)...(19): siRNA sense strand
gaucuugucagagcgagua

SEQ ID NO: 1463250 - RNA, 19 nt, Homo sapiens
  misc_RNA (1)...(19): siRNA sense strand
aagccaagcugcucagaag

SEQ ID NO: 1463251 - RNA, 19 nt, Homo sapiens
  misc_RNA (1)...(19): siRNA sense strand
gugcccagaucuugucaga

SEQ ID NO: 1463252 - RNA, 19 nt, Homo sapiens
  misc_RNA (1)...(19): siRNA sense strand
guacgaggcacuguauaug

SEQ ID NO: 1463253 - RNA, 19 nt, Homo sapiens
  misc_RNA (1)...(19): siRNA sense strand
gagccagccuccagauggu

SEQ ID NO: 1463254 - RNA, 19 nt, Homo sapiens
  misc_RNA (1)...(19): siRNA sense strand
gaaacccucucugcuccau

SEQ ID NO: 1463255 - RNA, 19 nt, Homo sapiens
  misc_RNA (1)...(19): siRNA sense strand
gggcauggaugugcugaac

SEQ ID NO: 1463256 - RNA, 19 nt, Homo sapiens
  misc_RNA (1)...(19): siRNA sense strand
gugucugacucucucauga

SEQ ID NO: 1463257 - RNA, 19 nt, Homo sapiens
  misc_RNA (1)...(19): siRNA sense strand
ccacgaugcugcagguacu

SEQ ID NO: 1463258 - RNA, 19 nt, Homo sapiens
  misc_RNA (1)...(19): siRNA sense strand
gccaugagccuagugaauc

SEQ ID NO: 1463259 - RNA, 19 nt, Homo sapiens
  misc_RNA (1)...(19): siRNA sense strand
agaaguacgaggcacugua

SEQ ID NO: 1463260 - RNA, 19 nt, Homo sapiens
  misc_RNA (1)...(19): siRNA sense strand
cugccuguaugguucagua

SEQ ID NO: 1463261 - RNA, 19 nt, Homo sapiens
  misc_RNA (1)...(19): siRNA sense strand
ccaagcugcucagaaguac

SEQ ID NO: 1463262 - RNA, 19 nt, Homo sapiens
  misc_RNA (1)...(19): siRNA sense strand
aacccucucugcuccauau

SEQ ID NO: 1463263 - RNA, 19 nt, Homo sapiens
  misc_RNA (1)...(19): siRNA sense strand
ggaccagcuccauggauuc

SEQ ID NO: 1463264 - RNA, 19 nt, Homo sapiens
  misc_RNA (1)...(19): siRNA sense strand
guagaggucaguggugaug

SEQ ID NO: 1463265 - RNA, 19 nt, Homo sapiens
  misc_RNA (1)...(19): siRNA sense strand
ucacuggaccggaguaacu

SEQ ID NO: 1463266 - RNA, 19 nt, Homo sapiens
  misc_RNA (1)...(19): siRNA sense strand
cagaggaggagccauugug

SEQ ID NO: 1463267 - RNA, 19 nt, Homo sapiens
  misc_RNA (1)...(19): siRNA sense strand
ugaagaaggaugccaugag

SEQ ID NO: 1463268 - RNA, 19 nt, Homo sapiens
  misc_RNA (1)...(19): siRNA sense strand
uguggcaagugacaaagau

SEQ ID NO: 1463269 - RNA, 19 nt, Homo sapiens
  misc_RNA (1)...(19): siRNA sense strand
acacaccuuuggccucauc

SEQ ID NO: 1463270 - RNA, 19 nt, Homo sapiens
  misc_RNA (1)...(19): siRNA sense strand
uaagccaagcugcucagaa

SEQ ID NO: 1463271 - RNA, 19 nt, Homo sapiens
  misc_RNA (1)...(19): siRNA sense strand
gaugccaugagccuaguga

SEQ ID NO: 1463272 - RNA, 19 nt, Homo sapiens
  misc_RNA (1)...(19): siRNA sense strand
ccaucauucuggucaacug

SEQ ID NO: 1463273 - RNA, 19 nt, Homo sapiens
  misc_RNA (1)...(19): siRNA sense strand
caacugcgaugaugacuug

SEQ ID NO: 1463274 - RNA, 19 nt, Homo sapiens
  misc_RNA (1)...(19): siRNA sense strand
guaacucucuguccuggua

SEQ ID NO: 1463275 - RNA, 19 nt, Homo sapiens
  misc_RNA (1)...(19): siRNA sense strand
ugacaaagauagcuguaug

SEQ ID NO: 1463276 - RNA, 19 nt, Homo sapiens
  misc_RNA (1)...(19): siRNA sense strand
gaaguacgaggcacuguau

SEQ ID NO: 1463277 - RNA, 19 nt, Homo sapiens
  misc_RNA (1)...(19): siRNA sense strand
guacagaggaggagccauu

SEQ ID NO: 1463278 - RNA, 19 nt, Homo sapiens
  misc_RNA (1)...(19): siRNA sense strand
gcucaagugccauguguuu

SEQ ID NO: 1463279 - RNA, 19 nt, Homo sapiens
  misc_RNA (1)...(19): siRNA sense strand
gcauggaugugcugaacga

SEQ ID NO: 1463280 - RNA, 19 nt, Homo sapiens
  misc_RNA (1)...(19): siRNA sense strand
ggccagaacaugcugauga

SEQ ID NO: 1463281 - RNA, 19 nt, Homo sapiens
  misc_RNA (1)...(19): siRNA sense strand
gccaagcugcucagaagua

SEQ ID NO: 1463282 - RNA, 19 nt, Homo sapiens
  misc_RNA (1)...(19): siRNA sense strand
gccagaacaugcugaugau

SEQ ID NO: 1463283 - RNA, 19 nt, Homo sapiens
  misc_RNA (1)...(19): siRNA sense strand
cggaccagcuccauggauu

SEQ ID NO: 1463284 - RNA, 19 nt, Homo sapiens
  misc_RNA (1)...(19): siRNA sense strand
gaucuugucagagcgagua

SEQ ID NO: 1463285 - RNA, 19 nt, Homo sapiens
  misc_RNA (1)...(19): siRNA sense strand
aagccaagcugcucagaag

SEQ ID NO: 1463286 - RNA, 19 nt, Homo sapiens
  misc_RNA (1)...(19): siRNA sense strand
gugcccagaucuugucaga

SEQ ID NO: 1463287 - RNA, 19 nt, Homo sapiens
  misc_RNA (1)...(19): siRNA sense strand
guacgaggcacuguauaug

SEQ ID NO: 1463288 - RNA, 19 nt, Homo sapiens
  misc_RNA (1)...(19): siRNA sense strand
gagccagccuccagauggu

SEQ ID NO: 1463289 - RNA, 19 nt, Homo sapiens
  misc_RNA (1)...(19): siRNA sense strand
gaaacccucucugcuccau

SEQ ID NO: 1463290 - RNA, 19 nt, Homo sapiens
  misc_RNA (1)...(19): siRNA sense strand
gggcauggaugugcugaac

SEQ ID NO: 1463291 - RNA, 19 nt, Homo sapiens
  misc_RNA (1)...(19): siRNA sense strand
gugucugacucucucauga

SEQ ID NO: 1463292 - RNA, 19 nt, Homo sapiens
  misc_RNA (1)...(19): siRNA sense strand
ccacgaugcugcagguacu

SEQ ID NO: 1463293 - RNA, 19 nt, Homo sapiens
  misc_RNA (1)...(19): siRNA sense strand
gccaugagccuagugaauc

SEQ ID NO: 1463294 - RNA, 19 nt, Homo sapiens
  misc_RNA (1)...(19): siRNA sense strand
agaaguacgaggcacugua

SEQ ID NO: 1463295 - RNA, 19 nt, Homo sapiens
  misc_RNA (1)...(19): siRNA sense strand
cugccuguaugguucagua

SEQ ID NO: 1463296 - RNA, 19 nt, Homo sapiens
  misc_RNA (1)...(19): siRNA sense strand
ccaagcugcucagaaguac

SEQ ID NO: 1463297 - RNA, 19 nt, Homo sapiens
  misc_RNA (1)...(19): siRNA sense strand
aacccucucugcuccauau

SEQ ID NO: 1463298 - RNA, 19 nt, Homo sapiens
  misc_RNA (1)...(19): siRNA sense strand
ggaccagcuccauggauuc

SEQ ID NO: 1463299 - RNA, 19 nt, Homo sapiens
  misc_RNA (1)...(19): siRNA sense strand
guagaggucaguggugaug

SEQ ID NO: 1463300 - RNA, 19 nt, Homo sapiens
  misc_RNA (1)...(19): siRNA sense strand
ucacuggaccggaguaacu

SEQ ID NO: 1463301 - RNA, 19 nt, Homo sapiens
  misc_RNA (1)...(19): siRNA sense strand
cagaggaggagccauugug

SEQ ID NO: 1463302 - RNA, 19 nt, Homo sapiens
  misc_RNA (1)...(19): siRNA sense strand
ugaagaaggaugccaugag

SEQ ID NO: 1463303 - RNA, 19 nt, Homo sapiens
  misc_RNA (1)...(19): siRNA sense strand
uguggcaagugacaaagau

SEQ ID NO: 1463304 - RNA, 19 nt, Homo sapiens
  misc_RNA (1)...(19): siRNA sense strand
acacaccuuuggccucauc

SEQ ID NO: 1463305 - RNA, 19 nt, Homo sapiens
  misc_RNA (1)...(19): siRNA sense strand
uaagccaagcugcucagaa

SEQ ID NO: 1463306 - RNA, 19 nt, Homo sapiens
  misc_RNA (1)...(19): siRNA sense strand
gaugccaugagccuaguga

SEQ ID NO: 1463307 - RNA, 19 nt, Homo sapiens
  misc_RNA (1)...(19): siRNA sense strand
ccaucauucuggucaacug

SEQ ID NO: 1463308 - RNA, 19 nt, Homo sapiens
  misc_RNA (1)...(19): siRNA sense strand
caacugcgaugaugacuug

SEQ ID NO: 1463309 - RNA, 19 nt, Homo sapiens
  misc_RNA (1)...(19): siRNA sense strand
guaacucucuguccuggua

SEQ ID NO: 1463310 - RNA, 19 nt, Homo sapiens
  misc_RNA (1)...(19): siRNA sense strand
ugacaaagauagcuguaug

SEQ ID NO: 1463311 - RNA, 19 nt, Homo sapiens
  misc_RNA (1)...(19): siRNA sense strand
gaaguacgaggcacuguau

SEQ ID NO: 1463312 - RNA, 19 nt, Homo sapiens
  misc_RNA (1)...(19): siRNA sense strand
guacagaggaggagccauu

SEQ ID NO: 1463313 - RNA, 19 nt, Homo sapiens
  misc_RNA (1)...(19): siRNA sense strand
gcucaagugccauguguuu

SEQ ID NO: 1463314 - RNA, 19 nt, Homo sapiens
  misc_RNA (1)...(19): siRNA sense strand
gcauggaugugcugaacga

SEQ ID NO: 1463315 - RNA, 19 nt, Homo sapiens
  misc_RNA (1)...(19): siRNA sense strand
ggccagaacaugcugauga

SEQ ID NO: 1463316 - RNA, 19 nt, Homo sapiens
  misc_RNA (1)...(19): siRNA sense strand
gccaagcugcucagaagua

SEQ ID NO: 1463317 - RNA, 19 nt, Homo sapiens
  misc_RNA (1)...(19): siRNA sense strand
gccagaacaugcugaugau

SEQ ID NO: 1463318 - RNA, 19 nt, Homo sapiens
  misc_RNA (1)...(19): siRNA sense strand
cggaccagcuccauggauu

SEQ ID NO: 1463319 - RNA, 19 nt, Homo sapiens
  misc_RNA (1)...(19): siRNA sense strand
gaucuugucagagcgagua

SEQ ID NO: 1463320 - RNA, 19 nt, Homo sapiens
  misc_RNA (1)...(19): siRNA sense strand
aagccaagcugcucagaag

SEQ ID NO: 1463321 - RNA, 19 nt, Homo sapiens
  misc_RNA (1)...(19): siRNA sense strand
gugcccagaucuugucaga

SEQ ID NO: 1463322 - RNA, 19 nt, Homo sapiens
  misc_RNA (1)...(19): siRNA sense strand
guacgaggcacuguauaug

SEQ ID NO: 1463323 - RNA, 19 nt, Homo sapiens
  misc_RNA (1)...(19): siRNA sense strand
gagccagccuccagauggu

SEQ ID NO: 1463324 - RNA, 19 nt, Homo sapiens
  misc_RNA (1)...(19): siRNA sense strand
gaaacccucucugcuccau

SEQ ID NO: 1463325 - RNA, 19 nt, Homo sapiens
  misc_RNA (1)...(19): siRNA sense strand
gggcauggaugugcugaac

SEQ ID NO: 1463326 - RNA, 19 nt, Homo sapiens
  misc_RNA (1)...(19): siRNA sense strand
gugucugacucucucauga

SEQ ID NO: 1463327 - RNA, 19 nt, Homo sapiens
  misc_RNA (1)...(19): siRNA sense strand
ccacgaugcugcagguacu

SEQ ID NO: 1463328 - RNA, 19 nt, Homo sapiens
  misc_RNA (1)...(19): siRNA sense strand
gccaugagccuagugaauc

SEQ ID NO: 1463329 - RNA, 19 nt, Homo sapiens
  misc_RNA (1)...(19): siRNA sense strand
agaaguacgaggcacugua

SEQ ID NO: 1463330 - RNA, 19 nt, Homo sapiens
  misc_RNA (1)...(19): siRNA sense strand
cugccuguaugguucagua

SEQ ID NO: 1463331 - RNA, 19 nt, Homo sapiens
  misc_RNA (1)...(19): siRNA sense strand
ccaagcugcucagaaguac

SEQ ID NO: 1463332 - RNA, 19 nt, Homo sapiens
  misc_RNA (1)...(19): siRNA sense strand
aacccucucugcuccauau

SEQ ID NO: 1463333 - RNA, 19 nt, Homo sapiens
  misc_RNA (1)...(19): siRNA sense strand
ggaccagcuccauggauuc

SEQ ID NO: 1463334 - RNA, 19 nt, Homo sapiens
  misc_RNA (1)...(19): siRNA sense strand
guagaggucaguggugaug

SEQ ID NO: 1463335 - RNA, 19 nt, Homo sapiens
  misc_RNA (1)...(19): siRNA sense strand
ucacuggaccggaguaacu

SEQ ID NO: 1463336 - RNA, 19 nt, Homo sapiens
  misc_RNA (1)...(19): siRNA sense strand
cagaggaggagccauugug

SEQ ID NO: 1463337 - RNA, 19 nt, Homo sapiens
  misc_RNA (1)...(19): siRNA sense strand
ugaagaaggaugccaugag

SEQ ID NO: 1463338 - RNA, 19 nt, Homo sapiens
  misc_RNA (1)...(19): siRNA sense strand
uguggcaagugacaaagau

SEQ ID NO: 1463339 - RNA, 19 nt, Homo sapiens
  misc_RNA (1)...(19): siRNA sense strand
acacaccuuuggccucauc

SEQ ID NO: 1463340 - RNA, 19 nt, Homo sapiens
  misc_RNA (1)...(19): siRNA sense strand
uaagccaagcugcucagaa

SEQ ID NO: 1463341 - RNA, 19 nt, Homo sapiens
  misc_RNA (1)...(19): siRNA sense strand
gaugccaugagccuaguga

SEQ ID NO: 1463342 - RNA, 19 nt, Homo sapiens
  misc_RNA (1)...(19): siRNA sense strand
ccaucauucuggucaacug

SEQ ID NO: 1463343 - RNA, 19 nt, Homo sapiens
  misc_RNA (1)...(19): siRNA sense strand
caacugcgaugaugacuug

SEQ ID NO: 1463344 - RNA, 19 nt, Homo sapiens
  misc_RNA (1)...(19): siRNA sense strand
guaacucucuguccuggua

SEQ ID NO: 1463345 - RNA, 19 nt, Homo sapiens
  misc_RNA (1)...(19): siRNA sense strand
ugacaaagauagcuguaug

SEQ ID NO: 1463346 - RNA, 19 nt, Homo sapiens
  misc_RNA (1)...(19): siRNA sense strand
gaaguacgaggcacuguau

SEQ ID NO: 1463347 - RNA, 19 nt, Homo sapiens
  misc_RNA (1)...(19): siRNA sense strand
guacagaggaggagccauu

SEQ ID NO: 1463348 - RNA, 19 nt, Homo sapiens
  misc_RNA (1)...(19): siRNA sense strand
gcucaagugccauguguuu

SEQ ID NO: 1463349 - RNA, 19 nt, Homo sapiens
  misc_RNA (1)...(19): siRNA sense strand
gcauggaugugcugaacga

SEQ ID NO: 1463350 - RNA, 19 nt, Homo sapiens
  misc_RNA (1)...(19): siRNA sense strand
ggccagaacaugcugauga

SEQ ID NO: 1463351 - RNA, 19 nt, Homo sapiens
  misc_RNA (1)...(19): siRNA sense strand
gccaagcugcucagaagua

SEQ ID NO: 1463352 - RNA, 19 nt, Homo sapiens
  misc_RNA (1)...(19): siRNA sense strand
gccagaacaugcugaugau

SEQ ID NO: 1463353 - RNA, 19 nt, Homo sapiens
  misc_RNA (1)...(19): siRNA sense strand
cggaccagcuccauggauu

SEQ ID NO: 1463354 - RNA, 19 nt, Homo sapiens
  misc_RNA (1)...(19): siRNA sense strand
gaucuugucagagcgagua

SEQ ID NO: 1463355 - RNA, 19 nt, Homo sapiens
  misc_RNA (1)...(19): siRNA sense strand
aagccaagcugcucagaag

SEQ ID NO: 1463356 - RNA, 19 nt, Homo sapiens
  misc_RNA (1)...(19): siRNA sense strand
gugcccagaucuugucaga

SEQ ID NO: 1463357 - RNA, 19 nt, Homo sapiens
  misc_RNA (1)...(19): siRNA sense strand
guacgaggcacuguauaug

SEQ ID NO: 1463358 - RNA, 19 nt, Homo sapiens
  misc_RNA (1)...(19): siRNA sense strand
gagccagccuccagauggu

SEQ ID NO: 1463359 - RNA, 19 nt, Homo sapiens
  misc_RNA (1)...(19): siRNA sense strand
gaaacccucucugcuccau

SEQ ID NO: 1463360 - RNA, 19 nt, Homo sapiens
  misc_RNA (1)...(19): siRNA sense strand
gggcauggaugugcugaac

SEQ ID NO: 1463361 - RNA, 19 nt, Homo sapiens
  misc_RNA (1)...(19): siRNA sense strand
gugucugacucucucauga

SEQ ID NO: 1463362 - RNA, 19 nt, Homo sapiens
  misc_RNA (1)...(19): siRNA sense strand
ccacgaugcugcagguacu

SEQ ID NO: 1463363 - RNA, 19 nt, Homo sapiens
  misc_RNA (1)...(19): siRNA sense strand
gccaugagccuagugaauc

SEQ ID NO: 1463364 - RNA, 19 nt, Homo sapiens
  misc_RNA (1)...(19): siRNA sense strand
agaaguacgaggcacugua

SEQ ID NO: 1463365 - RNA, 19 nt, Homo sapiens
  misc_RNA (1)...(19): siRNA sense strand
cugccuguaugguucagua

SEQ ID NO: 1463366 - RNA, 19 nt, Homo sapiens
  misc_RNA (1)...(19): siRNA sense strand
ccaagcugcucagaaguac

SEQ ID NO: 1463367 - RNA, 19 nt, Homo sapiens
  misc_RNA (1)...(19): siRNA sense strand
aacccucucugcuccauau

SEQ ID NO: 1463368 - RNA, 19 nt, Homo sapiens
  misc_RNA (1)...(19): siRNA sense strand
ggaccagcuccauggauuc

SEQ ID NO: 1463369 - RNA, 19 nt, Homo sapiens
  misc_RNA (1)...(19): siRNA sense strand
guagaggucaguggugaug

SEQ ID NO: 1463370 - RNA, 19 nt, Homo sapiens
  misc_RNA (1)...(19): siRNA sense strand
ucacuggaccggaguaacu

SEQ ID NO: 1463371 - RNA, 19 nt, Homo sapiens
  misc_RNA (1)...(19): siRNA sense strand
cagaggaggagccauugug

SEQ ID NO: 1463372 - RNA, 19 nt, Homo sapiens
  misc_RNA (1)...(19): siRNA sense strand
ugaagaaggaugccaugag

SEQ ID NO: 1463373 - RNA, 19 nt, Homo sapiens
  misc_RNA (1)...(19): siRNA sense strand
uguggcaagugacaaagau

SEQ ID NO: 1463374 - RNA, 19 nt, Homo sapiens
  misc_RNA (1)...(19): siRNA sense strand
acacaccuuuggccucauc

SEQ ID NO: 1463375 - RNA, 19 nt, Homo sapiens
  misc_RNA (1)...(19): siRNA sense strand
uaagccaagcugcucagaa

SEQ ID NO: 1463376 - RNA, 19 nt, Homo sapiens
  misc_RNA (1)...(19): siRNA sense strand
gaugccaugagccuaguga

SEQ ID NO: 1463377 - RNA, 19 nt, Homo sapiens
  misc_RNA (1)...(19): siRNA sense strand
ccaucauucuggucaacug

SEQ ID NO: 1463378 - RNA, 19 nt, Homo sapiens
  misc_RNA (1)...(19): siRNA sense strand
caacugcgaugaugacuug

SEQ ID NO: 1463379 - RNA, 19 nt, Homo sapiens
  misc_RNA (1)...(19): siRNA sense strand
guaacucucuguccuggua

SEQ ID NO: 1463380 - RNA, 19 nt, Homo sapiens
  misc_RNA (1)...(19): siRNA sense strand
ggccagaacaugcugauga

SEQ ID NO: 1463381 - RNA, 19 nt, Homo sapiens
  misc_RNA (1)...(19): siRNA sense strand
gccagaacaugcugaugau

SEQ ID NO: 1463382 - RNA, 19 nt, Homo sapiens
  misc_RNA (1)...(19): siRNA sense strand
gagccagccuccagauggu

SEQ ID NO: 1463383 - RNA, 19 nt, Homo sapiens
  misc_RNA (1)...(19): siRNA sense strand
ccacgaugcugcagguacu

SEQ ID NO: 1463384 - RNA, 19 nt, Homo sapiens
  misc_RNA (1)...(19): siRNA sense strand
gccaugagccuagugaauc

SEQ ID NO: 1463385 - RNA, 19 nt, Homo sapiens
  misc_RNA (1)...(19): siRNA sense strand
ucacuggaccggaguaacu

SEQ ID NO: 1463386 - RNA, 19 nt, Homo sapiens
  misc_RNA (1)...(19): siRNA sense strand
ugaagaaggaugccaugag

SEQ ID NO: 1463387 - RNA, 19 nt, Homo sapiens
  misc_RNA (1)...(19): siRNA sense strand
ccaucauucuggucaacug

SEQ ID NO: 1463388 - RNA, 19 nt, Homo sapiens
  misc_RNA (1)...(19): siRNA sense strand
gaugccaugagccuaguga

SEQ ID NO: 1463389 - RNA, 19 nt, Homo sapiens
  misc_RNA (1)...(19): siRNA sense strand
caacugcgaugaugacuug

SEQ ID NO: 1463390 - RNA, 19 nt, Homo sapiens
  misc_RNA (1)...(19): siRNA sense strand
guaacucucuguccuggua

SEQ ID NO: 1463391 - RNA, 19 nt, Homo sapiens
  misc_RNA (1)...(19): siRNA sense strand
ggccagaacaugcugauga

SEQ ID NO: 1463392 - RNA, 19 nt, Homo sapiens
  misc_RNA (1)...(19): siRNA sense strand
gccagaacaugcugaugau

SEQ ID NO: 1463393 - RNA, 19 nt, Homo sapiens
  misc_RNA (1)...(19): siRNA sense strand
gagccagccuccagauggu

SEQ ID NO: 1463394 - RNA, 19 nt, Homo sapiens
  misc_RNA (1)...(19): siRNA sense strand
ccacgaugcugcagguacu

SEQ ID NO: 1463395 - RNA, 19 nt, Homo sapiens
  misc_RNA (1)...(19): siRNA sense strand
gccaugagccuagugaauc

SEQ ID NO: 1463396 - RNA, 19 nt, Homo sapiens
  misc_RNA (1)...(19): siRNA sense strand
ucacuggaccggaguaacu

SEQ ID NO: 1463397 - RNA, 19 nt, Homo sapiens
  misc_RNA (1)...(19): siRNA sense strand
ugaagaaggaugccaugag

SEQ ID NO: 1463398 - RNA, 19 nt, Homo sapiens
  misc_RNA (1)...(19): siRNA sense strand
ccaucauucuggucaacug

SEQ ID NO: 1463399 - RNA, 19 nt, Homo sapiens
  misc_RNA (1)...(19): siRNA sense strand
gaugccaugagccuaguga

SEQ ID NO: 1463400 - RNA, 19 nt, Homo sapiens
  misc_RNA (1)...(19): siRNA sense strand
caacugcgaugaugacuug

SEQ ID NO: 1463401 - RNA, 19 nt, Homo sapiens
  misc_RNA (1)...(19): siRNA sense strand
guaacucucuguccuggua

SEQ ID NO: 1463402 - RNA, 19 nt, Homo sapiens
  misc_RNA (1)...(19): siRNA sense strand
ugacaaagauagcuguaug

SEQ ID NO: 1463403 - RNA, 19 nt, Homo sapiens
  misc_RNA (1)...(19): siRNA sense strand
gaaguacgaggcacuguau

SEQ ID NO: 1463404 - RNA, 19 nt, Homo sapiens
  misc_RNA (1)...(19): siRNA sense strand
guacagaggaggagccauu

SEQ ID NO: 1463405 - RNA, 19 nt, Homo sapiens
  misc_RNA (1)...(19): siRNA sense strand
gcucaagugccauguguuu

SEQ ID NO: 1463406 - RNA, 19 nt, Homo sapiens
  misc_RNA (1)...(19): siRNA sense strand
gcauggaugugcugaacga

SEQ ID NO: 1463407 - RNA, 19 nt, Homo sapiens
  misc_RNA (1)...(19): siRNA sense strand
ggccagaacaugcugauga

SEQ ID NO: 1463408 - RNA, 19 nt, Homo sapiens
  misc_RNA (1)...(19): siRNA sense strand
gccaagcugcucagaagua

SEQ ID NO: 1463409 - RNA, 19 nt, Homo sapiens
  misc_RNA (1)...(19): siRNA sense strand
gccagaacaugcugaugau

SEQ ID NO: 1463410 - RNA, 19 nt, Homo sapiens
  misc_RNA (1)...(19): siRNA sense strand
cggaccagcuccauggauu

SEQ ID NO: 1463411 - RNA, 19 nt, Homo sapiens
  misc_RNA (1)...(19): siRNA sense strand
gaucuugucagagcgagua

SEQ ID NO: 1463412 - RNA, 19 nt, Homo sapiens
  misc_RNA (1)...(19): siRNA sense strand
aagccaagcugcucagaag

SEQ ID NO: 1463413 - RNA, 19 nt, Homo sapiens
  misc_RNA (1)...(19): siRNA sense strand
gugcccagaucuugucaga

SEQ ID NO: 1463414 - RNA, 19 nt, Homo sapiens
  misc_RNA (1)...(19): siRNA sense strand
guacgaggcacuguauaug

SEQ ID NO: 1463415 - RNA, 19 nt, Homo sapiens
  misc_RNA (1)...(19): siRNA sense strand
gagccagccuccagauggu

SEQ ID NO: 1463416 - RNA, 19 nt, Homo sapiens
  misc_RNA (1)...(19): siRNA sense strand
gaaacccucucugcuccau

SEQ ID NO: 1463417 - RNA, 19 nt, Homo sapiens
  misc_RNA (1)...(19): siRNA sense strand
gggcauggaugugcugaac

SEQ ID NO: 1463418 - RNA, 19 nt, Homo sapiens
  misc_RNA (1)...(19): siRNA sense strand
gugucugacucucucauga

SEQ ID NO: 1463419 - RNA, 19 nt, Homo sapiens
  misc_RNA (1)...(19): siRNA sense strand
ccacgaugcugcagguacu

SEQ ID NO: 1463420 - RNA, 19 nt, Homo sapiens
  misc_RNA (1)...(19): siRNA sense strand
gccaugagccuagugaauc

SEQ ID NO: 1463421 - RNA, 19 nt, Homo sapiens
  misc_RNA (1)...(19): siRNA sense strand
agaaguacgaggcacugua

SEQ ID NO: 1463422 - RNA, 19 nt, Homo sapiens
  misc_RNA (1)...(19): siRNA sense strand
cugccuguaugguucagua

SEQ ID NO: 1463423 - RNA, 19 nt, Homo sapiens
  misc_RNA (1)...(19): siRNA sense strand
ccaagcugcucagaaguac

SEQ ID NO: 1463424 - RNA, 19 nt, Homo sapiens
  misc_RNA (1)...(19): siRNA sense strand
aacccucucugcuccauau

SEQ ID NO: 1463425 - RNA, 19 nt, Homo sapiens
  misc_RNA (1)...(19): siRNA sense strand
ggaccagcuccauggauuc

SEQ ID NO: 1463426 - RNA, 19 nt, Homo sapiens
  misc_RNA (1)...(19): siRNA sense strand
guagaggucaguggugaug

SEQ ID NO: 1463427 - RNA, 19 nt, Homo sapiens
  misc_RNA (1)...(19): siRNA sense strand
ucacuggaccggaguaacu

SEQ ID NO: 1463428 - RNA, 19 nt, Homo sapiens
  misc_RNA (1)...(19): siRNA sense strand
cagaggaggagccauugug

SEQ ID NO: 1463429 - RNA, 19 nt, Homo sapiens
  misc_RNA (1)...(19): siRNA sense strand
ugaagaaggaugccaugag

SEQ ID NO: 1463430 - RNA, 19 nt, Homo sapiens
  misc_RNA (1)...(19): siRNA sense strand
uguggcaagugacaaagau

SEQ ID NO: 1463431 - RNA, 19 nt, Homo sapiens
  misc_RNA (1)...(19): siRNA sense strand
acacaccuuuggccucauc

SEQ ID NO: 1463432 - RNA, 19 nt, Homo sapiens
  misc_RNA (1)...(19): siRNA sense strand
uaagccaagcugcucagaa

SEQ ID NO: 1463433 - RNA, 19 nt, Homo sapiens
  misc_RNA (1)...(19): siRNA sense strand
gaugccaugagccuaguga

SEQ ID NO: 1463434 - RNA, 19 nt, Homo sapiens
  misc_RNA (1)...(19): siRNA sense strand
ccaucauucuggucaacug

SEQ ID NO: 1463435 - RNA, 19 nt, Homo sapiens
  misc_RNA (1)...(19): siRNA sense strand
caacugcgaugaugacuug

SEQ ID NO: 1463436 - RNA, 19 nt, Homo sapiens
  misc_RNA (1)...(19): siRNA sense strand
guaacucucuguccuggua

SEQ ID NO: 1463437 - RNA, 19 nt, Homo sapiens
  misc_RNA (1)...(19): siRNA sense strand
ugacaaagauagcuguaug

SEQ ID NO: 1463438 - RNA, 19 nt, Homo sapiens
  misc_RNA (1)...(19): siRNA sense strand
gaaguacgaggcacuguau

SEQ ID NO: 1463439 - RNA, 19 nt, Homo sapiens
  misc_RNA (1)...(19): siRNA sense strand
guacagaggaggagccauu

SEQ ID NO: 1463440 - RNA, 19 nt, Homo sapiens
  misc_RNA (1)...(19): siRNA sense strand
gcucaagugccauguguuu

SEQ ID NO: 1463441 - RNA, 19 nt, Homo sapiens
  misc_RNA (1)...(19): siRNA sense strand
gcauggaugugcugaacga

SEQ ID NO: 1463442 - RNA, 19 nt, Homo sapiens
  misc_RNA (1)...(19): siRNA sense strand
ggccagaacaugcugauga

SEQ ID NO: 1463443 - RNA, 19 nt, Homo sapiens
  misc_RNA (1)...(19): siRNA sense strand
gccaagcugcucagaagua

SEQ ID NO: 1463444 - RNA, 19 nt, Homo sapiens
  misc_RNA (1)...(19): siRNA sense strand
gccagaacaugcugaugau

SEQ ID NO: 1463445 - RNA, 19 nt, Homo sapiens
  misc_RNA (1)...(19): siRNA sense strand
cggaccagcuccauggauu

SEQ ID NO: 1463446 - RNA, 19 nt, Homo sapiens
  misc_RNA (1)...(19): siRNA sense strand
gaucuugucagagcgagua

SEQ ID NO: 1463447 - RNA, 19 nt, Homo sapiens
  misc_RNA (1)...(19): siRNA sense strand
aagccaagcugcucagaag

SEQ ID NO: 1463448 - RNA, 19 nt, Homo sapiens
  misc_RNA (1)...(19): siRNA sense strand
gugcccagaucuugucaga

SEQ ID NO: 1463449 - RNA, 19 nt, Homo sapiens
  misc_RNA (1)...(19): siRNA sense strand
guacgaggcacuguauaug

SEQ ID NO: 1463450 - RNA, 19 nt, Homo sapiens
  misc_RNA (1)...(19): siRNA sense strand
gagccagccuccagauggu

SEQ ID NO: 1463451 - RNA, 19 nt, Homo sapiens
  misc_RNA (1)...(19): siRNA sense strand
gaaacccucucugcuccau

SEQ ID NO: 1463452 - RNA, 19 nt, Homo sapiens
  misc_RNA (1)...(19): siRNA sense strand
gggcauggaugugcugaac

SEQ ID NO: 1463453 - RNA, 19 nt, Homo sapiens
  misc_RNA (1)...(19): siRNA sense strand
gugucugacucucucauga

SEQ ID NO: 1463454 - RNA, 19 nt, Homo sapiens
  misc_RNA (1)...(19): siRNA sense strand
ccacgaugcugcagguacu

SEQ ID NO: 1463455 - RNA, 19 nt, Homo sapiens
  misc_RNA (1)...(19): siRNA sense strand
gccaugagccuagugaauc

SEQ ID NO: 1463456 - RNA, 19 nt, Homo sapiens
  misc_RNA (1)...(19): siRNA sense strand
agaaguacgaggcacugua

SEQ ID NO: 1463457 - RNA, 19 nt, Homo sapiens
  misc_RNA (1)...(19): siRNA sense strand
cugccuguaugguucagua

SEQ ID NO: 1463458 - RNA, 19 nt, Homo sapiens
  misc_RNA (1)...(19): siRNA sense strand
ccaagcugcucagaaguac

SEQ ID NO: 1463459 - RNA, 19 nt, Homo sapiens
  misc_RNA (1)...(19): siRNA sense strand
aacccucucugcuccauau

SEQ ID NO: 1463460 - RNA, 19 nt, Homo sapiens
  misc_RNA (1)...(19): siRNA sense strand
ggaccagcuccauggauuc

SEQ ID NO: 1463461 - RNA, 19 nt, Homo sapiens
  misc_RNA (1)...(19): siRNA sense strand
guagaggucaguggugaug

SEQ ID NO: 1463462 - RNA, 19 nt, Homo sapiens
  misc_RNA (1)...(19): siRNA sense strand
ucacuggaccggaguaacu

SEQ ID NO: 1463463 - RNA, 19 nt, Homo sapiens
  misc_RNA (1)...(19): siRNA sense strand
cagaggaggagccauugug

SEQ ID NO: 1463464 - RNA, 19 nt, Homo sapiens
  misc_RNA (1)...(19): siRNA sense strand
ugaagaaggaugccaugag

SEQ ID NO: 1463465 - RNA, 19 nt, Homo sapiens
  misc_RNA (1)...(19): siRNA sense strand
uguggcaagugacaaagau

SEQ ID NO: 1463466 - RNA, 19 nt, Homo sapiens
  misc_RNA (1)...(19): siRNA sense strand
acacaccuuuggccucauc

SEQ ID NO: 1463467 - RNA, 19 nt, Homo sapiens
  misc_RNA (1)...(19): siRNA sense strand
uaagccaagcugcucagaa

SEQ ID NO: 1463468 - RNA, 19 nt, Homo sapiens
  misc_RNA (1)...(19): siRNA sense strand
gaugccaugagccuaguga

SEQ ID NO: 1463469 - RNA, 19 nt, Homo sapiens
  misc_RNA (1)...(19): siRNA sense strand
ccaucauucuggucaacug

SEQ ID NO: 1463470 - RNA, 19 nt, Homo sapiens
  misc_RNA (1)...(19): siRNA sense strand
caacugcgaugaugacuug

SEQ ID NO: 1463471 - RNA, 19 nt, Homo sapiens
  misc_RNA (1)...(19): siRNA sense strand
guaacucucuguccuggua

SEQ ID NO: 1463472 - RNA, 19 nt, Homo sapiens
  misc_RNA (1)...(19): siRNA sense strand
ugacaaagauagcuguaug

SEQ ID NO: 1463473 - RNA, 19 nt, Homo sapiens
  misc_RNA (1)...(19): siRNA sense strand
gaaguacgaggcacuguau

SEQ ID NO: 1463474 - RNA, 19 nt, Homo sapiens
  misc_RNA (1)...(19): siRNA sense strand
guacagaggaggagccauu

SEQ ID NO: 1463475 - RNA, 19 nt, Homo sapiens
  misc_RNA (1)...(19): siRNA sense strand
gcucaagugccauguguuu

SEQ ID NO: 1463476 - RNA, 19 nt, Homo sapiens
  misc_RNA (1)...(19): siRNA sense strand
gcauggaugugcugaacga

SEQ ID NO: 1463477 - RNA, 19 nt, Homo sapiens
  misc_RNA (1)...(19): siRNA sense strand
ggccagaacaugcugauga

SEQ ID NO: 1463478 - RNA, 19 nt, Homo sapiens
  misc_RNA (1)...(19): siRNA sense strand
gccaagcugcucagaagua

SEQ ID NO: 1463479 - RNA, 19 nt, Homo sapiens
  misc_RNA (1)...(19): siRNA sense strand
gccagaacaugcugaugau

SEQ ID NO: 1463480 - RNA, 19 nt, Homo sapiens
  misc_RNA (1)...(19): siRNA sense strand
cggaccagcuccauggauu

SEQ ID NO: 1463481 - RNA, 19 nt, Homo sapiens
  misc_RNA (1)...(19): siRNA sense strand
gaucuugucagagcgagua

SEQ ID NO: 1463482 - RNA, 19 nt, Homo sapiens
  misc_RNA (1)...(19): siRNA sense strand
aagccaagcugcucagaag

SEQ ID NO: 1463483 - RNA, 19 nt, Homo sapiens
  misc_RNA (1)...(19): siRNA sense strand
gugcccagaucuugucaga

SEQ ID NO: 1463484 - RNA, 19 nt, Homo sapiens
  misc_RNA (1)...(19): siRNA sense strand
guacgaggcacuguauaug

SEQ ID NO: 1463485 - RNA, 19 nt, Homo sapiens
  misc_RNA (1)...(19): siRNA sense strand
gagccagccuccagauggu

SEQ ID NO: 1463486 - RNA, 19 nt, Homo sapiens
  misc_RNA (1)...(19): siRNA sense strand
gaaacccucucugcuccau

SEQ ID NO: 1463487 - RNA, 19 nt, Homo sapiens
  misc_RNA (1)...(19): siRNA sense strand
gggcauggaugugcugaac

SEQ ID NO: 1463488 - RNA, 19 nt, Homo sapiens
  misc_RNA (1)...(19): siRNA sense strand
gugucugacucucucauga

SEQ ID NO: 1463489 - RNA, 19 nt, Homo sapiens
  misc_RNA (1)...(19): siRNA sense strand
ccacgaugcugcagguacu

SEQ ID NO: 1463490 - RNA, 19 nt, Homo sapiens
  misc_RNA (1)...(19): siRNA sense strand
gccaugagccuagugaauc

SEQ ID NO: 1463491 - RNA, 19 nt, Homo sapiens
  misc_RNA (1)...(19): siRNA sense strand
agaaguacgaggcacugua

SEQ ID NO: 1463492 - RNA, 19 nt, Homo sapiens
  misc_RNA (1)...(19): siRNA sense strand
cugccuguaugguucagua

SEQ ID NO: 1463493 - RNA, 19 nt, Homo sapiens
  misc_RNA (1)...(19): siRNA sense strand
ccaagcugcucagaaguac

SEQ ID NO: 1463494 - RNA, 19 nt, Homo sapiens
  misc_RNA (1)...(19): siRNA sense strand
aacccucucugcuccauau

SEQ ID NO: 1463495 - RNA, 19 nt, Homo sapiens
  misc_RNA (1)...(19): siRNA sense strand
ggaccagcuccauggauuc

SEQ ID NO: 1463496 - RNA, 19 nt, Homo sapiens
  misc_RNA (1)...(19): siRNA sense strand
guagaggucaguggugaug

SEQ ID NO: 1463497 - RNA, 19 nt, Homo sapiens
  misc_RNA (1)...(19): siRNA sense strand
ucacuggaccggaguaacu

SEQ ID NO: 1463498 - RNA, 19 nt, Homo sapiens
  misc_RNA (1)...(19): siRNA sense strand
cagaggaggagccauugug

SEQ ID NO: 1463499 - RNA, 19 nt, Homo sapiens
  misc_RNA (1)...(19): siRNA sense strand
ugaagaaggaugccaugag

SEQ ID NO: 1463500 - RNA, 19 nt, Homo sapiens
  misc_RNA (1)...(19): siRNA sense strand
uguggcaagugacaaagau

SEQ ID NO: 1463501 - RNA, 19 nt, Homo sapiens
  misc_RNA (1)...(19): siRNA sense strand
acacaccuuuggccucauc

SEQ ID NO: 1463502 - RNA, 19 nt, Homo sapiens
  misc_RNA (1)...(19): siRNA sense strand
uaagccaagcugcucagaa

SEQ ID NO: 1463503 - RNA, 19 nt, Homo sapiens
  misc_RNA (1)...(19): siRNA sense strand
gaugccaugagccuaguga

SEQ ID NO: 1463504 - RNA, 19 nt, Homo sapiens
  misc_RNA (1)...(19): siRNA sense strand
ccaucauucuggucaacug

SEQ ID NO: 1463505 - RNA, 19 nt, Homo sapiens
  misc_RNA (1)...(19): siRNA sense strand
caacugcgaugaugacuug

SEQ ID NO: 1463506 - RNA, 19 nt, Homo sapiens
  misc_RNA (1)...(19): siRNA sense strand
guaacucucuguccuggua

SEQ ID NO: 1463507 - RNA, 19 nt, Homo sapiens
  misc_RNA (1)...(19): siRNA sense strand
ugacaaagauagcuguaug

SEQ ID NO: 1463508 - RNA, 19 nt, Homo sapiens
  misc_RNA (1)...(19): siRNA sense strand
gaaguacgaggcacuguau

SEQ ID NO: 1463509 - RNA, 19 nt, Homo sapiens
  misc_RNA (1)...(19): siRNA sense strand
guacagaggaggagccauu

SEQ ID NO: 1463510 - RNA, 19 nt, Homo sapiens
  misc_RNA (1)...(19): siRNA sense strand
gcucaagugccauguguuu

SEQ ID NO: 1463511 - RNA, 19 nt, Homo sapiens
  misc_RNA (1)...(19): siRNA sense strand
gcauggaugugcugaacga

SEQ ID NO: 1463512 - RNA, 19 nt, Homo sapiens
  misc_RNA (1)...(19): siRNA sense strand
ggccagaacaugcugauga

SEQ ID NO: 1463513 - RNA, 19 nt, Homo sapiens
  misc_RNA (1)...(19): siRNA sense strand
gccaagcugcucagaagua

SEQ ID NO: 1463514 - RNA, 19 nt, Homo sapiens
  misc_RNA (1)...(19): siRNA sense strand
gccagaacaugcugaugau

SEQ ID NO: 1463515 - RNA, 19 nt, Homo sapiens
  misc_RNA (1)...(19): siRNA sense strand
cggaccagcuccauggauu

SEQ ID NO: 1463516 - RNA, 19 nt, Homo sapiens
  misc_RNA (1)...(19): siRNA sense strand
gaucuugucagagcgagua

SEQ ID NO: 1463517 - RNA, 19 nt, Homo sapiens
  misc_RNA (1)...(19): siRNA sense strand
aagccaagcugcucagaag

SEQ ID NO: 1463518 - RNA, 19 nt, Homo sapiens
  misc_RNA (1)...(19): siRNA sense strand
gugcccagaucuugucaga

SEQ ID NO: 1463519 - RNA, 19 nt, Homo sapiens
  misc_RNA (1)...(19): siRNA sense strand
guacgaggcacuguauaug

SEQ ID NO: 1463520 - RNA, 19 nt, Homo sapiens
  misc_RNA (1)...(19): siRNA sense strand
gagccagccuccagauggu

SEQ ID NO: 1463521 - RNA, 19 nt, Homo sapiens
  misc_RNA (1)...(19): siRNA sense strand
gaaacccucucugcuccau

SEQ ID NO: 1463522 - RNA, 19 nt, Homo sapiens
  misc_RNA (1)...(19): siRNA sense strand
gggcauggaugugcugaac

SEQ ID NO: 1463523 - RNA, 19 nt, Homo sapiens
  misc_RNA (1)...(19): siRNA sense strand
gugucugacucucucauga

SEQ ID NO: 1463524 - RNA, 19 nt, Homo sapiens
  misc_RNA (1)...(19): siRNA sense strand
ccacgaugcugcagguacu

SEQ ID NO: 1463525 - RNA, 19 nt, Homo sapiens
  misc_RNA (1)...(19): siRNA sense strand
gccaugagccuagugaauc

SEQ ID NO: 1463526 - RNA, 19 nt, Homo sapiens
  misc_RNA (1)...(19): siRNA sense strand
agaaguacgaggcacugua

SEQ ID NO: 1463527 - RNA, 19 nt, Homo sapiens
  misc_RNA (1)...(19): siRNA sense strand
cugccuguaugguucagua

SEQ ID NO: 1463528 - RNA, 19 nt, Homo sapiens
  misc_RNA (1)...(19): siRNA sense strand
ccaagcugcucagaaguac

SEQ ID NO: 1463529 - RNA, 19 nt, Homo sapiens
  misc_RNA (1)...(19): siRNA sense strand
aacccucucugcuccauau

SEQ ID NO: 1463530 - RNA, 19 nt, Homo sapiens
  misc_RNA (1)...(19): siRNA sense strand
ggaccagcuccauggauuc

SEQ ID NO: 1463531 - RNA, 19 nt, Homo sapiens
  misc_RNA (1)...(19): siRNA sense strand
guagaggucaguggugaug

SEQ ID NO: 1463532 - RNA, 19 nt, Homo sapiens
  misc_RNA (1)...(19): siRNA sense strand
ucacuggaccggaguaacu

SEQ ID NO: 1463533 - RNA, 19 nt, Homo sapiens
  misc_RNA (1)...(19): siRNA sense strand
cagaggaggagccauugug

SEQ ID NO: 1463534 - RNA, 19 nt, Homo sapiens
  misc_RNA (1)...(19): siRNA sense strand
ugaagaaggaugccaugag

SEQ ID NO: 1463535 - RNA, 19 nt, Homo sapiens
  misc_RNA (1)...(19): siRNA sense strand
uguggcaagugacaaagau

SEQ ID NO: 1463536 - RNA, 19 nt, Homo sapiens
  misc_RNA (1)...(19): siRNA sense strand
acacaccuuuggccucauc

SEQ ID NO: 1463537 - RNA, 19 nt, Homo sapiens
  misc_RNA (1)...(19): siRNA sense strand
uaagccaagcugcucagaa

SEQ ID NO: 1463538 - RNA, 19 nt, Homo sapiens
  misc_RNA (1)...(19): siRNA sense strand
gaugccaugagccuaguga

SEQ ID NO: 1463539 - RNA, 19 nt, Homo sapiens
  misc_RNA (1)...(19): siRNA sense strand
ccaucauucuggucaacug

SEQ ID NO: 1463540 - RNA, 19 nt, Homo sapiens
  misc_RNA (1)...(19): siRNA sense strand
caacugcgaugaugacuug

SEQ ID NO: 1463541 - RNA, 19 nt, Homo sapiens
  misc_RNA (1)...(19): siRNA sense strand
guaacucucuguccuggua

SEQ ID NO: 1463542 - RNA, 19 nt, Homo sapiens
  misc_RNA (1)...(19): siRNA sense strand
ggccagaacaugcugauga

SEQ ID NO: 1463543 - RNA, 19 nt, Homo sapiens
  misc_RNA (1)...(19): siRNA sense strand
gccagaacaugcugaugau

SEQ ID NO: 1463544 - RNA, 19 nt, Homo sapiens
  misc_RNA (1)...(19): siRNA sense strand
gagccagccuccagauggu

SEQ ID NO: 1463545 - RNA, 19 nt, Homo sapiens
  misc_RNA (1)...(19): siRNA sense strand
ccacgaugcugcagguacu

SEQ ID NO: 1463546 - RNA, 19 nt, Homo sapiens
  misc_RNA (1)...(19): siRNA sense strand
gccaugagccuagugaauc

SEQ ID NO: 1463547 - RNA, 19 nt, Homo sapiens
  misc_RNA (1)...(19): siRNA sense strand
ucacuggaccggaguaacu

SEQ ID NO: 1463548 - RNA, 19 nt, Homo sapiens
  misc_RNA (1)...(19): siRNA sense strand
ugaagaaggaugccaugag

SEQ ID NO: 1463549 - RNA, 19 nt, Homo sapiens
  misc_RNA (1)...(19): siRNA sense strand
ccaucauucuggucaacug

SEQ ID NO: 1463550 - RNA, 19 nt, Homo sapiens
  misc_RNA (1)...(19): siRNA sense strand
gaugccaugagccuaguga

SEQ ID NO: 1463551 - RNA, 19 nt, Homo sapiens
  misc_RNA (1)...(19): siRNA sense strand
caacugcgaugaugacuug

SEQ ID NO: 1463552 - RNA, 19 nt, Homo sapiens
  misc_RNA (1)...(19): siRNA sense strand
guaacucucuguccuggua

SEQ ID NO: 1463553 - RNA, 19 nt, Homo sapiens
  misc_RNA (1)...(19): siRNA sense strand
ggccagaacaugcugauga

SEQ ID NO: 1463554 - RNA, 19 nt, Homo sapiens
  misc_RNA (1)...(19): siRNA sense strand
gccagaacaugcugaugau

SEQ ID NO: 1463555 - RNA, 19 nt, Homo sapiens
  misc_RNA (1)...(19): siRNA sense strand
gagccagccuccagauggu

SEQ ID NO: 1463556 - RNA, 19 nt, Homo sapiens
  misc_RNA (1)...(19): siRNA sense strand
ccacgaugcugcagguacu

SEQ ID NO: 1463557 - RNA, 19 nt, Homo sapiens
  misc_RNA (1)...(19): siRNA sense strand
gccaugagccuagugaauc

SEQ ID NO: 1463558 - RNA, 19 nt, Homo sapiens
  misc_RNA (1)...(19): siRNA sense strand
ucacuggaccggaguaacu

SEQ ID NO: 1463559 - RNA, 19 nt, Homo sapiens
  misc_RNA (1)...(19): siRNA sense strand
ugaagaaggaugccaugag

SEQ ID NO: 1463560 - RNA, 19 nt, Homo sapiens
  misc_RNA (1)...(19): siRNA sense strand
ccaucauucuggucaacug

SEQ ID NO: 1463561 - RNA, 19 nt, Homo sapiens
  misc_RNA (1)...(19): siRNA sense strand
gaugccaugagccuaguga

SEQ ID NO: 1463562 - RNA, 19 nt, Homo sapiens
  misc_RNA (1)...(19): siRNA sense strand
ggaagaagcugagagaaau

SEQ ID NO: 1463563 - RNA, 19 nt, Homo sapiens
  misc_RNA (1)...(19): siRNA sense strand
aaucuacacugaccaauua

SEQ ID NO: 1463564 - RNA, 19 nt, Homo sapiens
  misc_RNA (1)...(19): siRNA sense strand
ggagagaccuucuuguugu

SEQ ID NO: 1463565 - RNA, 19 nt, Homo sapiens
  misc_RNA (1)...(19): siRNA sense strand
gagagaccuucuuguugua

SEQ ID NO: 1463566 - RNA, 19 nt, Homo sapiens
  misc_RNA (1)...(19): siRNA sense strand
gaagaagcugagagaaaua

SEQ ID NO: 1463567 - RNA, 19 nt, Homo sapiens
  misc_RNA (1)...(19): siRNA sense strand
uagaagaggauaagcauaa

SEQ ID NO: 1463568 - RNA, 19 nt, Homo sapiens
  misc_RNA (1)...(19): siRNA sense strand
gggaagaagcugagagaaa

SEQ ID NO: 1463569 - RNA, 19 nt, Homo sapiens
  misc_RNA (1)...(19): siRNA sense strand
ggacaccaccugcaaggaa

SEQ ID NO: 1463570 - RNA, 19 nt, Homo sapiens
  misc_RNA (1)...(19): siRNA sense strand
ggccagagcuuccaugacu

SEQ ID NO: 1463571 - RNA, 19 nt, Homo sapiens
  misc_RNA (1)...(19): siRNA sense strand
gcauaaaucagaggaagaa

SEQ ID NO: 1463572 - RNA, 19 nt, Homo sapiens
  misc_RNA (1)...(19): siRNA sense strand
gaaacaacgggaagagguu

SEQ ID NO: 1463573 - RNA, 19 nt, Homo sapiens
  misc_RNA (1)...(19): siRNA sense strand
gaaccgcugcugugccuuu

SEQ ID NO: 1463574 - RNA, 19 nt, Homo sapiens
  misc_RNA (1)...(19): siRNA sense strand
gaagcugagagaaauauau

SEQ ID NO: 1463575 - RNA, 19 nt, Homo sapiens
  misc_RNA (1)...(19): siRNA sense strand
gggaagagguuuugaggaa

SEQ ID NO: 1463576 - RNA, 19 nt, Homo sapiens
  misc_RNA (1)...(19): siRNA sense strand
gacaccaccugcaaggaaa

SEQ ID NO: 1463577 - RNA, 19 nt, Homo sapiens
  misc_RNA (1)...(19): siRNA sense strand
gcacauggucaucuuguuc

SEQ ID NO: 1463578 - RNA, 19 nt, Homo sapiens
  misc_RNA (1)...(19): siRNA sense strand
gcagaaaaccguugcauug

SEQ ID NO: 1463579 - RNA, 19 nt, Homo sapiens
  misc_RNA (1)...(19): siRNA sense strand
gggagagaccuucuuguug

SEQ ID NO: 1463580 - RNA, 19 nt, Homo sapiens
  misc_RNA (1)...(19): siRNA sense strand
acacugaccaauuaaauga

SEQ ID NO: 1463581 - RNA, 19 nt, Homo sapiens
  misc_RNA (1)...(19): siRNA sense strand
aaagucaagugcaggaguu

SEQ ID NO: 1463582 - RNA, 19 nt, Homo sapiens
  misc_RNA (1)...(19): siRNA sense strand
ugaagcacauggucaucuu

SEQ ID NO: 1463583 - RNA, 19 nt, Homo sapiens
  misc_RNA (1)...(19): siRNA sense strand
gaggaaaggcugaaacaac

SEQ ID NO: 1463584 - RNA, 19 nt, Homo sapiens
  misc_RNA (1)...(19): siRNA sense strand
ugguggagcugauagagaa

SEQ ID NO: 1463585 - RNA, 19 nt, Homo sapiens
  misc_RNA (1)...(19): siRNA sense strand
cccaagcuguuaccaagaa

SEQ ID NO: 1463586 - RNA, 19 nt, Homo sapiens
  misc_RNA (1)...(19): siRNA sense strand
gaagaggauaagcauaaau

SEQ ID NO: 1463587 - RNA, 19 nt, Homo sapiens
  misc_RNA (1)...(19): siRNA sense strand
agaagaggauaagcauaaa

SEQ ID NO: 1463588 - RNA, 19 nt, Homo sapiens
  misc_RNA (1)...(19): siRNA sense strand
gaaaaccguugcauugauc

SEQ ID NO: 1463589 - RNA, 19 nt, Homo sapiens
  misc_RNA (1)...(19): siRNA sense strand
ggaagucagccaugaagca

SEQ ID NO: 1463590 - RNA, 19 nt, Homo sapiens
  misc_RNA (1)...(19): siRNA sense strand
acacagaggaggagcagaa

SEQ ID NO: 1463591 - RNA, 19 nt, Homo sapiens
  misc_RNA (1)...(19): siRNA sense strand
guagaagaggauaagcaua

SEQ ID NO: 1463592 - RNA, 19 nt, Homo sapiens
  misc_RNA (1)...(19): siRNA sense strand
cuuguucacucgcaaagaa

SEQ ID NO: 1463593 - RNA, 19 nt, Homo sapiens
  misc_RNA (1)...(19): siRNA sense strand
caacgaaggggcuuacuuu

SEQ ID NO: 1463594 - RNA, 19 nt, Homo sapiens
  misc_RNA (1)...(19): siRNA sense strand
gaagaaaaggagaaagaaa

SEQ ID NO: 1463595 - RNA, 19 nt, Homo sapiens
  misc_RNA (1)...(19): siRNA sense strand
uuuggaagaugcuuucaga

SEQ ID NO: 1463596 - RNA, 19 nt, Homo sapiens
  misc_RNA (1)...(19): siRNA sense strand
gagaccuucuuguuguaga

SEQ ID NO: 1463597 - RNA, 19 nt, Homo sapiens
  misc_RNA (1)...(19): siRNA sense strand
aggauaagcauaaaucaga

SEQ ID NO: 1463598 - RNA, 19 nt, Homo sapiens
  misc_RNA (1)...(19): siRNA sense strand
ccaguaaggcagagaagga

SEQ ID NO: 1463599 - RNA, 19 nt, Homo sapiens
  misc_RNA (1)...(19): siRNA sense strand
uagaauugcugcccaagcu

SEQ ID NO: 1463600 - RNA, 19 nt, Homo sapiens
  misc_RNA (1)...(19): siRNA sense strand
ggaguugguggagcugaua

SEQ ID NO: 1463601 - RNA, 19 nt, Homo sapiens
  misc_RNA (1)...(19): siRNA sense strand
gggcuuacuuuucugauga

SEQ ID NO: 1463602 - RNA, 19 nt, Homo sapiens
  misc_RNA (1)...(19): siRNA sense strand
ugaggaaaaucuacacuga

SEQ ID NO: 1463603 - RNA, 19 nt, Homo sapiens
  misc_RNA (1)...(19): siRNA sense strand
gcagagaaggaaagucaag

SEQ ID NO: 1463604 - RNA, 19 nt, Homo sapiens
  misc_RNA (1)...(19): siRNA sense strand
cugaugacauauacaagga

SEQ ID NO: 1463605 - RNA, 19 nt, Homo sapiens
  misc_RNA (1)...(19): siRNA sense strand
cgaaggggcuuacuuuucu

SEQ ID NO: 1463606 - RNA, 19 nt, Homo sapiens
  misc_RNA (1)...(19): siRNA sense strand
uaauaggauuuggaagaug

SEQ ID NO: 1463607 - RNA, 19 nt, Homo sapiens
  misc_RNA (1)...(19): siRNA sense strand
gaagcacauggucaucuug

SEQ ID NO: 1463608 - RNA, 19 nt, Homo sapiens
  misc_RNA (1)...(19): siRNA sense strand
cuacacugaccaauuaaau

SEQ ID NO: 1463609 - RNA, 19 nt, Homo sapiens
  misc_RNA (1)...(19): siRNA sense strand
cauagcagaugcggaugug

SEQ ID NO: 1463610 - RNA, 19 nt, Homo sapiens
  misc_RNA (1)...(19): siRNA sense strand
ggaagagguuuugaggaaa

SEQ ID NO: 1463611 - RNA, 19 nt, Homo sapiens
  misc_RNA (1)...(19): siRNA sense strand
ggauuuggaagaugcuuuc

SEQ ID NO: 1463612 - RNA, 19 nt, Homo sapiens
  misc_RNA (1)...(19): siRNA sense strand
aaaucuacacugaccaauu

SEQ ID NO: 1463613 - RNA, 19 nt, Homo sapiens
  misc_RNA (1)...(19): siRNA sense strand
gaaaaucuacacugaccaa

SEQ ID NO: 1463614 - RNA, 19 nt, Homo sapiens
  misc_RNA (1)...(19): siRNA sense strand
ccuuggagaggaaaucuuu

SEQ ID NO: 1463615 - RNA, 19 nt, Homo sapiens
  misc_RNA (1)...(19): siRNA sense strand
uaaacuaguagaagaggau

SEQ ID NO: 1463616 - RNA, 19 nt, Homo sapiens
  misc_RNA (1)...(19): siRNA sense strand
cagaggaaaggcugaaaca

SEQ ID NO: 1463617 - RNA, 19 nt, Homo sapiens
  misc_RNA (1)...(19): siRNA sense strand
ccagagcuuccaugacuuc

SEQ ID NO: 1463618 - RNA, 19 nt, Homo sapiens
  misc_RNA (1)...(19): siRNA sense strand
gccagagcuuccaugacuu

SEQ ID NO: 1463619 - RNA, 19 nt, Homo sapiens
  misc_RNA (1)...(19): siRNA sense strand
gaggauaagcauaaaucag

SEQ ID NO: 1463620 - RNA, 19 nt, Homo sapiens
  misc_RNA (1)...(19): siRNA sense strand
auacaaggacacagaggaa

SEQ ID NO: 1463621 - RNA, 19 nt, Homo sapiens
  misc_RNA (1)...(19): siRNA sense strand
aggcagagaaggaaaguca

SEQ ID NO: 1463622 - RNA, 19 nt, Homo sapiens
  misc_RNA (1)...(19): siRNA sense strand
ggaagaaaaggagaaagaa

SEQ ID NO: 1463623 - RNA, 19 nt, Homo sapiens
  misc_RNA (1)...(19): siRNA sense strand
aagaggauaagcauaaauc

SEQ ID NO: 1463624 - RNA, 19 nt, Homo sapiens
  misc_RNA (1)...(19): siRNA sense strand
guaaggcagagaaggaaag

SEQ ID NO: 1463625 - RNA, 19 nt, Homo sapiens
  misc_RNA (1)...(19): siRNA sense strand
acauauacaaggacacaga

SEQ ID NO: 1463626 - RNA, 19 nt, Homo sapiens
  misc_RNA (1)...(19): siRNA sense strand
ugacauauacaaggacaca

SEQ ID NO: 1463627 - RNA, 19 nt, Homo sapiens
  misc_RNA (1)...(19): siRNA sense strand
aaccgcugcugugccuuua

SEQ ID NO: 1463628 - RNA, 19 nt, Homo sapiens
  misc_RNA (1)...(19): siRNA sense strand
aaacuaguagaagaggaua

SEQ ID NO: 1463629 - RNA, 19 nt, Homo sapiens
  misc_RNA (1)...(19): siRNA sense strand
ggaaagagucuauguuuac

SEQ ID NO: 1463630 - RNA, 19 nt, Homo sapiens
  misc_RNA (1)...(19): siRNA sense strand
gcaaaugccguuacagaug

SEQ ID NO: 1463631 - RNA, 19 nt, Homo sapiens
  misc_RNA (1)...(19): siRNA sense strand
aggaaagagucuauguuua

SEQ ID NO: 1463632 - RNA, 19 nt, Homo sapiens
  misc_RNA (1)...(19): siRNA sense strand
gaaggaaagagucuauguu

SEQ ID NO: 1463633 - RNA, 19 nt, Homo sapiens
  misc_RNA (1)...(19): siRNA sense strand
gaaaggugguggccauuuu

SEQ ID NO: 1463634 - RNA, 19 nt, Homo sapiens
  misc_RNA (1)...(19): siRNA sense strand
gaaagagucuauguuuacu

SEQ ID NO: 1463635 - RNA, 19 nt, Homo sapiens
  misc_RNA (1)...(19): siRNA sense strand
aaggaaagagucuauguuu

SEQ ID NO: 1463636 - RNA, 19 nt, Homo sapiens
  misc_RNA (1)...(19): siRNA sense strand
caagaaggaaagagucuau

SEQ ID NO: 1463637 - RNA, 19 nt, Homo sapiens
  misc_RNA (1)...(19): siRNA sense strand
ugacugugcugcugcucuu

SEQ ID NO: 1463638 - RNA, 19 nt, Homo sapiens
  misc_RNA (1)...(19): siRNA sense strand
cguuacagaugcuccaaga

SEQ ID NO: 1463639 - RNA, 19 nt, Homo sapiens
  misc_RNA (1)...(19): siRNA sense strand
acccaaagaugcuggaauc

SEQ ID NO: 1463640 - RNA, 19 nt, Homo sapiens
  misc_RNA (1)...(19): siRNA sense strand
gaaucuuuauggcaaaugc

SEQ ID NO: 1463641 - RNA, 19 nt, Homo sapiens
  misc_RNA (1)...(19): siRNA sense strand
gagucuauguuuacugcau

SEQ ID NO: 1463642 - RNA, 19 nt, Homo sapiens
  misc_RNA (1)...(19): siRNA sense strand
uuacagaugcuccaagaag

SEQ ID NO: 1463643 - RNA, 19 nt, Homo sapiens
  misc_RNA (1)...(19): siRNA sense strand
ccaaguaccagccaaaaga

SEQ ID NO: 1463644 - RNA, 19 nt, Homo sapiens
  misc_RNA (1)...(19): siRNA sense strand
agaaggaaagagucuaugu

SEQ ID NO: 1463645 - RNA, 19 nt, Homo sapiens
  misc_RNA (1)...(19): siRNA sense strand
gcgugaagcccaaguacca

SEQ ID NO: 1463646 - RNA, 19 nt, Homo sapiens
  misc_RNA (1)...(19): siRNA sense strand
gaugcuggaaucuuuaugg

SEQ ID NO: 1463647 - RNA, 19 nt, Homo sapiens
  misc_RNA (1)...(19): siRNA sense strand
gcuccaagaaggaaagagu

SEQ ID NO: 1463648 - RNA, 19 nt, Homo sapiens
  misc_RNA (1)...(19): siRNA sense strand
ccaagaaggaaagagucua

SEQ ID NO: 1463649 - RNA, 19 nt, Homo sapiens
  misc_RNA (1)...(19): siRNA sense strand
agaaaggugguggccauuu

SEQ ID NO: 1463650 - RNA, 19 nt, Homo sapiens
  misc_RNA (1)...(19): siRNA sense strand
agacagcucuuacucauaa

SEQ ID NO: 1463651 - RNA, 19 nt, Homo sapiens
  misc_RNA (1)...(19): siRNA sense strand
agaagacgauguuuagaua

SEQ ID NO: 1463652 - RNA, 19 nt, Homo sapiens
  misc_RNA (1)...(19): siRNA sense strand
ugacacaacuaaauuugga

SEQ ID NO: 1463653 - RNA, 19 nt, Homo sapiens
  misc_RNA (1)...(19): siRNA sense strand
caguaucuauguugaauga

SEQ ID NO: 1463654 - RNA, 19 nt, Homo sapiens
  misc_RNA (1)...(19): siRNA sense strand
auagugauguggacucuuu

SEQ ID NO: 1463655 - RNA, 19 nt, Homo sapiens
  misc_RNA (1)...(19): siRNA sense strand
gaggauauaacauuggauu

SEQ ID NO: 1463656 - RNA, 19 nt, Homo sapiens
  misc_RNA (1)...(19): siRNA sense strand
cgaccagcauuuccuguga

SEQ ID NO: 1463657 - RNA, 19 nt, Homo sapiens
  misc_RNA (1)...(19): siRNA sense strand
ccuagaggauauaacauug

SEQ ID NO: 1463658 - RNA, 19 nt, Homo sapiens
  misc_RNA (1)...(19): siRNA sense strand
gauaacauuugacacaacu

SEQ ID NO: 1463659 - RNA, 19 nt, Homo sapiens
  misc_RNA (1)...(19): siRNA sense strand
ggacauugcagaagacgau

SEQ ID NO: 1463660 - RNA, 19 nt, Homo sapiens
  misc_RNA (1)...(19): siRNA sense strand
ucagacagcucuuacucau

SEQ ID NO: 1463661 - RNA, 19 nt, Homo sapiens
  misc_RNA (1)...(19): siRNA sense strand
gacgauguuuagauacuga

SEQ ID NO: 1463662 - RNA, 19 nt, Homo sapiens
  misc_RNA (1)...(19): siRNA sense strand
caucugagacugcuacuuc

SEQ ID NO: 1463663 - RNA, 19 nt, Homo sapiens
  misc_RNA (1)...(19): siRNA sense strand
uguaggacauugcagaaga

SEQ ID NO: 1463664 - RNA, 19 nt, Homo sapiens
  misc_RNA (1)...(19): siRNA sense strand
guaucuauguugaaugauc

SEQ ID NO: 1463665 - RNA, 19 nt, Homo sapiens
  misc_RNA (1)...(19): siRNA sense strand
cagcucuuacucauaauua

SEQ ID NO: 1463666 - RNA, 19 nt, Homo sapiens
  misc_RNA (1)...(19): siRNA sense strand
gaucugauaacauuugaca

SEQ ID NO: 1463667 - RNA, 19 nt, Homo sapiens
  misc_RNA (1)...(19): siRNA sense strand
guuuagauacugaaaggua

SEQ ID NO: 1463668 - RNA, 19 nt, Homo sapiens
  misc_RNA (1)...(19): siRNA sense strand
uaacucgggugaccaaagg

SEQ ID NO: 1463669 - RNA, 19 nt, Homo sapiens
  misc_RNA (1)...(19): siRNA sense strand
caacuaaauuuggagaaac

SEQ ID NO: 1463670 - RNA, 19 nt, Homo sapiens
  misc_RNA (1)...(19): siRNA sense strand
uagaggauauaacauugga

SEQ ID NO: 1463671 - RNA, 19 nt, Homo sapiens
  misc_RNA (1)...(19): siRNA sense strand
gaaaccaugacaccugaga

SEQ ID NO: 1463672 - RNA, 19 nt, Homo sapiens
  misc_RNA (1)...(19): siRNA sense strand
ugauucaccuagaggauau

SEQ ID NO: 1463673 - RNA, 19 nt, Homo sapiens
  misc_RNA (1)...(19): siRNA sense strand
acugaaagguacauacuuc

SEQ ID NO: 1463674 - RNA, 19 nt, Homo sapiens
  misc_RNA (1)...(19): siRNA sense strand
gaccaauacuccugagacu

SEQ ID NO: 1463675 - RNA, 19 nt, Homo sapiens
  misc_RNA (1)...(19): siRNA sense strand
cagaagacgauguuuagau

SEQ ID NO: 1463676 - RNA, 19 nt, Homo sapiens
  misc_RNA (1)...(19): siRNA sense strand
ccaauacuccugagacuac

SEQ ID NO: 1463677 - RNA, 19 nt, Homo sapiens
  misc_RNA (1)...(19): siRNA sense strand
guaggaacaagcuaucaug

SEQ ID NO: 1463678 - RNA, 19 nt, Homo sapiens
  misc_RNA (1)...(19): siRNA sense strand
cagcauuuccugugauuca

SEQ ID NO: 1463679 - RNA, 19 nt, Homo sapiens
  misc_RNA (1)...(19): siRNA sense strand
ucaccuagaggauauaaca

SEQ ID NO: 1463680 - RNA, 19 nt, Homo sapiens
  misc_RNA (1)...(19): siRNA sense strand
gcagaagacgauguuuaga

SEQ ID NO: 1463681 - RNA, 19 nt, Homo sapiens
  misc_RNA (1)...(19): siRNA sense strand
gaccagcauuuccugugau

SEQ ID NO: 1463682 - RNA, 19 nt, Homo sapiens
  misc_RNA (1)...(19): siRNA sense strand
caugacaccugagaccaau

SEQ ID NO: 1463683 - RNA, 19 nt, Homo sapiens
  misc_RNA (1)...(19): siRNA sense strand
uugcagaagacgauguuua

SEQ ID NO: 1463684 - RNA, 19 nt, Homo sapiens
  misc_RNA (1)...(19): siRNA sense strand
guugaaugaucugauaaca

SEQ ID NO: 1463685 - RNA, 19 nt, Homo sapiens
  misc_RNA (1)...(19): siRNA sense strand
gagacuaugccaccaccuu

SEQ ID NO: 1463686 - RNA, 19 nt, Homo sapiens
  misc_RNA (1)...(19): siRNA sense strand
cuacuaugccaccaucuga

SEQ ID NO: 1463687 - RNA, 19 nt, Homo sapiens
  misc_RNA (1)...(19): siRNA sense strand
ccacuacucccgagacuac

SEQ ID NO: 1463688 - RNA, 19 nt, Homo sapiens
  misc_RNA (1)...(19): siRNA sense strand
gauguggacucuuuuacug

SEQ ID NO: 1463689 - RNA, 19 nt, Homo sapiens
  misc_RNA (1)...(19): siRNA sense strand
gccaccaccuucucagaca

SEQ ID NO: 1463690 - RNA, 19 nt, Homo sapiens
  misc_RNA (1)...(19): siRNA sense strand
ugaaagguacauacuucuu

SEQ ID NO: 1463691 - RNA, 19 nt, Homo sapiens
  misc_RNA (1)...(19): siRNA sense strand
cauuaucuguggguugcua

SEQ ID NO: 1463692 - RNA, 19 nt, Homo sapiens
  misc_RNA (1)...(19): siRNA sense strand
gaagacgauguuuagauac

SEQ ID NO: 1463693 - RNA, 19 nt, Homo sapiens
  misc_RNA (1)...(19): siRNA sense strand
cagacagcucuuacucaua

SEQ ID NO: 1463694 - RNA, 19 nt, Homo sapiens
  misc_RNA (1)...(19): siRNA sense strand
cccaguaucuauguugaau

SEQ ID NO: 1463695 - RNA, 19 nt, Homo sapiens
  misc_RNA (1)...(19): siRNA sense strand
cugauaacauuugacacaa

SEQ ID NO: 1463696 - RNA, 19 nt, Homo sapiens
  misc_RNA (1)...(19): siRNA sense strand
guaggacauugcagaagac

SEQ ID NO: 1463697 - RNA, 19 nt, Homo sapiens
  misc_RNA (1)...(19): siRNA sense strand
ucugauaacauuugacaca

SEQ ID NO: 1463698 - RNA, 19 nt, Homo sapiens
  misc_RNA (1)...(19): siRNA sense strand
auacuucuuuguaggaaca

SEQ ID NO: 1463699 - RNA, 19 nt, Homo sapiens
  misc_RNA (1)...(19): siRNA sense strand
aagacgauguuuagauacu

SEQ ID NO: 1463700 - RNA, 19 nt, Homo sapiens
  misc_RNA (1)...(19): siRNA sense strand
aaauuuggagaaaccauga

SEQ ID NO: 1463701 - RNA, 19 nt, Homo sapiens
  misc_RNA (1)...(19): siRNA sense strand
ugauaacauuugacacaac

SEQ ID NO: 1463702 - RNA, 19 nt, Homo sapiens
  misc_RNA (1)...(19): siRNA sense strand
ccaugacaccugagaccaa

SEQ ID NO: 1463703 - RNA, 19 nt, Homo sapiens
  misc_RNA (1)...(19): siRNA sense strand
uuggaagaauaauguagga

SEQ ID NO: 1463704 - RNA, 19 nt, Homo sapiens
  misc_RNA (1)...(19): siRNA sense strand
ugcagaagacgauguuuag

SEQ ID NO: 1463705 - RNA, 19 nt, Homo sapiens
  misc_RNA (1)...(19): siRNA sense strand
gaagaugacuuaguggaua

SEQ ID NO: 1463706 - RNA, 19 nt, Homo sapiens
  misc_RNA (1)...(19): siRNA sense strand
gaacaagucuggugaaggu

SEQ ID NO: 1463707 - RNA, 19 nt, Homo sapiens
  misc_RNA (1)...(19): siRNA sense strand
ggaauuggaucuacuagug

SEQ ID NO: 1463708 - RNA, 19 nt, Homo sapiens
  misc_RNA (1)...(19): siRNA sense strand
gaaagcaaauuacauccaa

SEQ ID NO: 1463709 - RNA, 19 nt, Homo sapiens
  misc_RNA (1)...(19): siRNA sense strand
gaauagcgaucaaguuaca

SEQ ID NO: 1463710 - RNA, 19 nt, Homo sapiens
  misc_RNA (1)...(19): siRNA sense strand
uaaauucacuugccucuca

SEQ ID NO: 1463711 - RNA, 19 nt, Homo sapiens
  misc_RNA (1)...(19): siRNA sense strand
gggaauauuucaacauguu

SEQ ID NO: 1463712 - RNA, 19 nt, Homo sapiens
  misc_RNA (1)...(19): siRNA sense strand
agucauauguuucggaaua

SEQ ID NO: 1463713 - RNA, 19 nt, Homo sapiens
  misc_RNA (1)...(19): siRNA sense strand
aaucucaguuccucaaaua

SEQ ID NO: 1463714 - RNA, 19 nt, Homo sapiens
  misc_RNA (1)...(19): siRNA sense strand
ggaaagggaugaagaugcu

SEQ ID NO: 1463715 - RNA, 19 nt, Homo sapiens
  misc_RNA (1)...(19): siRNA sense strand
gaauguaucuaguaaagcu

SEQ ID NO: 1463716 - RNA, 19 nt, Homo sapiens
  misc_RNA (1)...(19): siRNA sense strand
gagcugugauuccucuaaa

SEQ ID NO: 1463717 - RNA, 19 nt, Homo sapiens
  misc_RNA (1)...(19): siRNA sense strand
gugcagguauuguauguga

SEQ ID NO: 1463718 - RNA, 19 nt, Homo sapiens
  misc_RNA (1)...(19): siRNA sense strand
ccaaccagguguagagauu

SEQ ID NO: 1463719 - RNA, 19 nt, Homo sapiens
  misc_RNA (1)...(19): siRNA sense strand
guucaaaggcuaucuguug

SEQ ID NO: 1463720 - RNA, 19 nt, Homo sapiens
  misc_RNA (1)...(19): siRNA sense strand
cggaauaccauaagaauga

SEQ ID NO: 1463721 - RNA, 19 nt, Homo sapiens
  misc_RNA (1)...(19): siRNA sense strand
caaauaugcagcaaagauu

SEQ ID NO: 1463722 - RNA, 19 nt, Homo sapiens
  misc_RNA (1)...(19): siRNA sense strand
ugaagguucuggaguuuga

SEQ ID NO: 1463723 - RNA, 19 nt, Homo sapiens
  misc_RNA (1)...(19): siRNA sense strand
ccagugaagugcuuacaau

SEQ ID NO: 1463724 - RNA, 19 nt, Homo sapiens
  misc_RNA (1)...(19): siRNA sense strand
gcaagcauguguuugugau

SEQ ID NO: 1463725 - RNA, 19 nt, Homo sapiens
  misc_RNA (1)...(19): siRNA sense strand
ucaaaggacugaugcuaca

SEQ ID NO: 1463726 - RNA, 19 nt, Homo sapiens
  misc_RNA (1)...(19): siRNA sense strand
guguagagauuaccaggaa

SEQ ID NO: 1463727 - RNA, 19 nt, Homo sapiens
  misc_RNA (1)...(19): siRNA sense strand
aggaaggaauguaauauug

SEQ ID NO: 1463728 - RNA, 19 nt, Homo sapiens
  misc_RNA (1)...(19): siRNA sense strand
caaaggcuaucuguuggaa

SEQ ID NO: 1463729 - RNA, 19 nt, Homo sapiens
  misc_RNA (1)...(19): siRNA sense strand
gcaaagauuacaccaagau

SEQ ID NO: 1463730 - RNA, 19 nt, Homo sapiens
  misc_RNA (1)...(19): siRNA sense strand
gaaggaaagggaugaagau

SEQ ID NO: 1463731 - RNA, 19 nt, Homo sapiens
  misc_RNA (1)...(19): siRNA sense strand
gaaucuucaugccaggaua

SEQ ID NO: 1463732 - RNA, 19 nt, Homo sapiens
  misc_RNA (1)...(19): siRNA sense strand
ggacagugauucgaacaag

SEQ ID NO: 1463733 - RNA, 19 nt, Homo sapiens
  misc_RNA (1)...(19): siRNA sense strand
ucaaguguuuggaauguau

SEQ ID NO: 1463734 - RNA, 19 nt, Homo sapiens
  misc_RNA (1)...(19): siRNA sense strand
ggugaagguucuggaguuu

SEQ ID NO: 1463735 - RNA, 19 nt, Homo sapiens
  misc_RNA (1)...(19): siRNA sense strand
uaagagcgaucccuuugca

SEQ ID NO: 1463736 - RNA, 19 nt, Homo sapiens
  misc_RNA (1)...(19): siRNA sense strand
ggaagcccuuucagcaaga

SEQ ID NO: 1463737 - RNA, 19 nt, Homo sapiens
  misc_RNA (1)...(19): siRNA sense strand
gcacagggaaaucucaguu

SEQ ID NO: 1463738 - RNA, 19 nt, Homo sapiens
  misc_RNA (1)...(19): siRNA sense strand
gagauaguccugaaagcaa

SEQ ID NO: 1463739 - RNA, 19 nt, Homo sapiens
  misc_RNA (1)...(19): siRNA sense strand
gugaagugcuuacaauuuu

SEQ ID NO: 1463740 - RNA, 19 nt, Homo sapiens
  misc_RNA (1)...(19): siRNA sense strand
ccucaaauaugcagcaaag

SEQ ID NO: 1463741 - RNA, 19 nt, Homo sapiens
  misc_RNA (1)...(19): siRNA sense strand
gagcaguccucagggauca

SEQ ID NO: 1463742 - RNA, 19 nt, Homo sapiens
  misc_RNA (1)...(19): siRNA sense strand
guguuugagucauauguuu

SEQ ID NO: 1463743 - RNA, 19 nt, Homo sapiens
  misc_RNA (1)...(19): siRNA sense strand
ggugcuggcuggugggauu

SEQ ID NO: 1463744 - RNA, 19 nt, Homo sapiens
  misc_RNA (1)...(19): siRNA sense strand
ccucagggaucaucaugga

SEQ ID NO: 1463745 - RNA, 19 nt, Homo sapiens
  misc_RNA (1)...(19): siRNA sense strand
ugagggaacacauaccuaa

SEQ ID NO: 1463746 - RNA, 19 nt, Homo sapiens
  misc_RNA (1)...(19): siRNA sense strand
gcaggaaggaauguaauau

SEQ ID NO: 1463747 - RNA, 19 nt, Homo sapiens
  misc_RNA (1)...(19): siRNA sense strand
ucuggaagaugacuuagug

SEQ ID NO: 1463748 - RNA, 19 nt, Homo sapiens
  misc_RNA (1)...(19): siRNA sense strand
gcugugauuccucuaaauu

SEQ ID NO: 1463749 - RNA, 19 nt, Homo sapiens
  misc_RNA (1)...(19): siRNA sense strand
ggaauaccauaagaaugau

SEQ ID NO: 1463750 - RNA, 19 nt, Homo sapiens
  misc_RNA (1)...(19): siRNA sense strand
ugagcaguauuacaccuuu

SEQ ID NO: 1463751 - RNA, 19 nt, Homo sapiens
  misc_RNA (1)...(19): siRNA sense strand
uggaauguaucuaguaaag

SEQ ID NO: 1463752 - RNA, 19 nt, Homo sapiens
  misc_RNA (1)...(19): siRNA sense strand
gcugugaaguggagauagu

SEQ ID NO: 1463753 - RNA, 19 nt, Homo sapiens
  misc_RNA (1)...(19): siRNA sense strand
ugaagguuauucuggaaga

SEQ ID NO: 1463754 - RNA, 19 nt, Homo sapiens
  misc_RNA (1)...(19): siRNA sense strand
caaaaggaauucgaagauu

SEQ ID NO: 1463755 - RNA, 19 nt, Homo sapiens
  misc_RNA (1)...(19): siRNA sense strand
ucaaauaugcagcaaagau

SEQ ID NO: 1463756 - RNA, 19 nt, Homo sapiens
  misc_RNA (1)...(19): siRNA sense strand
gaaaucucaguuccucaaa

SEQ ID NO: 1463757 - RNA, 19 nt, Homo sapiens
  misc_RNA (1)...(19): siRNA sense strand
uauaagagcgaucccuuug

SEQ ID NO: 1463758 - RNA, 19 nt, Homo sapiens
  misc_RNA (1)...(19): siRNA sense strand
ccaaggaugugggacacuu

SEQ ID NO: 1463759 - RNA, 19 nt, Homo sapiens
  misc_RNA (1)...(19): siRNA sense strand
ggaagaugacuuaguggau

SEQ ID NO: 1463760 - RNA, 19 nt, Homo sapiens
  misc_RNA (1)...(19): siRNA sense strand
guggauaguugcaaaucug

SEQ ID NO: 1463761 - RNA, 19 nt, Homo sapiens
  misc_RNA (1)...(19): siRNA sense strand
ggaaggaauguaauauugg

SEQ ID NO: 1463762 - RNA, 19 nt, Homo sapiens
  misc_RNA (1)...(19): siRNA sense strand
caggaaggaauguaauauu

SEQ ID NO: 1463763 - RNA, 19 nt, Homo sapiens
  misc_RNA (1)...(19): siRNA sense strand
caaccagguguagagauua

SEQ ID NO: 1463764 - RNA, 19 nt, Homo sapiens
  misc_RNA (1)...(19): siRNA sense strand
ccacaggaauuggaucuac

SEQ ID NO: 1463765 - RNA, 19 nt, Homo sapiens
  misc_RNA (1)...(19): siRNA sense strand
ggagauaguccugaaagca

SEQ ID NO: 1463766 - RNA, 19 nt, Homo sapiens
  misc_RNA (1)...(19): siRNA sense strand
uaugaagguuauucuggaa

SEQ ID NO: 1463767 - RNA, 19 nt, Homo sapiens
  misc_RNA (1)...(19): siRNA sense strand
agauaguccugaaagcaaa

SEQ ID NO: 1463768 - RNA, 19 nt, Homo sapiens
  misc_RNA (1)...(19): siRNA sense strand
cacgaucuaugaagguuau

SEQ ID NO: 1463769 - RNA, 19 nt, Homo sapiens
  misc_RNA (1)...(19): siRNA sense strand
ccucaaguguuuggaaugu

SEQ ID NO: 1463770 - RNA, 19 nt, Homo sapiens
  misc_RNA (1)...(19): siRNA sense strand
gaagguuauucuggaagau

SEQ ID NO: 1463771 - RNA, 19 nt, Homo sapiens
  misc_RNA (1)...(19): siRNA sense strand
gagggaacacauaccuaaa

SEQ ID NO: 1463772 - RNA, 19 nt, Homo sapiens
  misc_RNA (1)...(19): siRNA sense strand
ugugauuccucuaaauuca

SEQ ID NO: 1463773 - RNA, 19 nt, Homo sapiens
  misc_RNA (1)...(19): siRNA sense strand
aggcugacuuugagcagua

SEQ ID NO: 1463774 - RNA, 19 nt, Homo sapiens
  misc_RNA (1)...(19): siRNA sense strand
ugagcgggauuacaugugu

SEQ ID NO: 1463775 - RNA, 19 nt, Homo sapiens
  misc_RNA (1)...(19): siRNA sense strand
uuaaugccaugacucuguu

SEQ ID NO: 1463776 - RNA, 19 nt, Homo sapiens
  misc_RNA (1)...(19): siRNA sense strand
ugaaggaaagggaugaaga

SEQ ID NO: 1463777 - RNA, 19 nt, Homo sapiens
  misc_RNA (1)...(19): siRNA sense strand
gaaguauuccacgaucuau

SEQ ID NO: 1463778 - RNA, 19 nt, Homo sapiens
  misc_RNA (1)...(19): siRNA sense strand
gcuaucuguuggaaguauu

SEQ ID NO: 1463779 - RNA, 19 nt, Homo sapiens
  misc_RNA (1)...(19): siRNA sense strand
acaauucuccagucccuuu

SEQ ID NO: 1463780 - RNA, 19 nt, Homo sapiens
  misc_RNA (1)...(19): siRNA sense strand
guagagauuaccaggaaau

SEQ ID NO: 1463781 - RNA, 19 nt, Homo sapiens
  misc_RNA (1)...(19): siRNA sense strand
gacagugauucgaacaagu

SEQ ID NO: 1463782 - RNA, 19 nt, Homo sapiens
  misc_RNA (1)...(19): siRNA sense strand
agugaagugcuuacaauuu

SEQ ID NO: 1463783 - RNA, 19 nt, Homo sapiens
  misc_RNA (1)...(19): siRNA sense strand
gaucuacuagugcagguau

SEQ ID NO: 1463784 - RNA, 19 nt, Homo sapiens
  misc_RNA (1)...(19): siRNA sense strand
guuaaugccaugacucugu

SEQ ID NO: 1463785 - RNA, 19 nt, Homo sapiens
  misc_RNA (1)...(19): siRNA sense strand
gcccucaaguguuuggaau

SEQ ID NO: 1463786 - RNA, 19 nt, Homo sapiens
  misc_RNA (1)...(19): siRNA sense strand
cuuaguggauaguugcaaa

SEQ ID NO: 1463787 - RNA, 19 nt, Homo sapiens
  misc_RNA (1)...(19): siRNA sense strand
gcuggugagggaacacaua

SEQ ID NO: 1463788 - RNA, 19 nt, Homo sapiens
  misc_RNA (1)...(19): siRNA sense strand
gcagguauuguaugugaca

SEQ ID NO: 1463789 - RNA, 19 nt, Homo sapiens
  misc_RNA (1)...(19): siRNA sense strand
gcagcaaagauuacaccaa

SEQ ID NO: 1463790 - RNA, 19 nt, Homo sapiens
  misc_RNA (1)...(19): siRNA sense strand
caagaugugcgcugugaag

SEQ ID NO: 1463791 - RNA, 19 nt, Homo sapiens
  misc_RNA (1)...(19): siRNA sense strand
aagcauguguuugugauca

SEQ ID NO: 1463792 - RNA, 19 nt, Homo sapiens
  misc_RNA (1)...(19): siRNA sense strand
uggugaagguucuggaguu

SEQ ID NO: 1463793 - RNA, 19 nt, Homo sapiens
  misc_RNA (1)...(19): siRNA sense strand
cgaucaaguuacacugguu

SEQ ID NO: 1463794 - RNA, 19 nt, Homo sapiens
  misc_RNA (1)...(19): siRNA sense strand
gugcugaccacaggaauug

SEQ ID NO: 1463795 - RNA, 19 nt, Homo sapiens
  misc_RNA (1)...(19): siRNA sense strand
gaugcucauuacccaguug

SEQ ID NO: 1463796 - RNA, 19 nt, Homo sapiens
  misc_RNA (1)...(19): siRNA sense strand
ggaauauuucaacauguuc

SEQ ID NO: 1463797 - RNA, 19 nt, Homo sapiens
  misc_RNA (1)...(19): siRNA sense strand
acugguuggucaaguguuu

SEQ ID NO: 1463798 - RNA, 19 nt, Homo sapiens
  misc_RNA (1)...(19): siRNA sense strand
caaggaugugggacacuuu

SEQ ID NO: 1463799 - RNA, 19 nt, Homo sapiens
  misc_RNA (1)...(19): siRNA sense strand
gaacacauaccuaaaacca

SEQ ID NO: 1463800 - RNA, 19 nt, Homo sapiens
  misc_RNA (1)...(19): siRNA sense strand
uagugcagguauuguaugu

SEQ ID NO: 1463801 - RNA, 19 nt, Homo sapiens
  misc_RNA (1)...(19): siRNA sense strand
gauagugcacugcgaaggu

SEQ ID NO: 1463802 - RNA, 19 nt, Homo sapiens
  misc_RNA (1)...(19): siRNA sense strand
ccugaaagcaaauuacauc

SEQ ID NO: 1463803 - RNA, 19 nt, Homo sapiens
  misc_RNA (1)...(19): siRNA sense strand
aaggcuaucuguuggaagu

SEQ ID NO: 1463804 - RNA, 19 nt, Homo sapiens
  misc_RNA (1)...(19): siRNA sense strand
aaaucucaguuccucaaau

SEQ ID NO: 1463805 - RNA, 19 nt, Homo sapiens
  misc_RNA (1)...(19): siRNA sense strand
caacugcgaugaugacuug

SEQ ID NO: 1463806 - RNA, 19 nt, Homo sapiens
  misc_RNA (1)...(19): siRNA sense strand
guaacucucuguccuggua

SEQ ID NO: 1463807 - RNA, 19 nt, Homo sapiens
  misc_RNA (1)...(19): siRNA sense strand
ugacaaagauagcuguaug

SEQ ID NO: 1463808 - RNA, 19 nt, Homo sapiens
  misc_RNA (1)...(19): siRNA sense strand
gaaguacgaggcacuguau

SEQ ID NO: 1463809 - RNA, 19 nt, Homo sapiens
  misc_RNA (1)...(19): siRNA sense strand
guacagaggaggagccauu

SEQ ID NO: 1463810 - RNA, 19 nt, Homo sapiens
  misc_RNA (1)...(19): siRNA sense strand
gcucaagugccauguguuu

SEQ ID NO: 1463811 - RNA, 19 nt, Homo sapiens
  misc_RNA (1)...(19): siRNA sense strand
gcauggaugugcugaacga

SEQ ID NO: 1463812 - RNA, 19 nt, Homo sapiens
  misc_RNA (1)...(19): siRNA sense strand
ggccagaacaugcugauga

SEQ ID NO: 1463813 - RNA, 19 nt, Homo sapiens
  misc_RNA (1)...(19): siRNA sense strand
gccaagcugcucagaagua

SEQ ID NO: 1463814 - RNA, 19 nt, Homo sapiens
  misc_RNA (1)...(19): siRNA sense strand
gccagaacaugcugaugau

SEQ ID NO: 1463815 - RNA, 19 nt, Homo sapiens
  misc_RNA (1)...(19): siRNA sense strand
cggaccagcuccauggauu

SEQ ID NO: 1463816 - RNA, 19 nt, Homo sapiens
  misc_RNA (1)...(19): siRNA sense strand
gaucuugucagagcgagua

SEQ ID NO: 1463817 - RNA, 19 nt, Homo sapiens
  misc_RNA (1)...(19): siRNA sense strand
aagccaagcugcucagaag

SEQ ID NO: 1463818 - RNA, 19 nt, Homo sapiens
  misc_RNA (1)...(19): siRNA sense strand
gugcccagaucuugucaga

SEQ ID NO: 1463819 - RNA, 19 nt, Homo sapiens
  misc_RNA (1)...(19): siRNA sense strand
guacgaggcacuguauaug

SEQ ID NO: 1463820 - RNA, 19 nt, Homo sapiens
  misc_RNA (1)...(19): siRNA sense strand
gagccagccuccagauggu

SEQ ID NO: 1463821 - RNA, 19 nt, Homo sapiens
  misc_RNA (1)...(19): siRNA sense strand
gaaacccucucugcuccau

SEQ ID NO: 1463822 - RNA, 19 nt, Homo sapiens
  misc_RNA (1)...(19): siRNA sense strand
gggcauggaugugcugaac

SEQ ID NO: 1463823 - RNA, 19 nt, Homo sapiens
  misc_RNA (1)...(19): siRNA sense strand
gugucugacucucucauga

SEQ ID NO: 1463824 - RNA, 19 nt, Homo sapiens
  misc_RNA (1)...(19): siRNA sense strand
ccacgaugcugcagguacu

SEQ ID NO: 1463825 - RNA, 19 nt, Homo sapiens
  misc_RNA (1)...(19): siRNA sense strand
gccaugagccuagugaauc

SEQ ID NO: 1463826 - RNA, 19 nt, Homo sapiens
  misc_RNA (1)...(19): siRNA sense strand
agaaguacgaggcacugua

SEQ ID NO: 1463827 - RNA, 19 nt, Homo sapiens
  misc_RNA (1)...(19): siRNA sense strand
cugccuguaugguucagua

SEQ ID NO: 1463828 - RNA, 19 nt, Homo sapiens
  misc_RNA (1)...(19): siRNA sense strand
ccaagcugcucagaaguac

SEQ ID NO: 1463829 - RNA, 19 nt, Homo sapiens
  misc_RNA (1)...(19): siRNA sense strand
aacccucucugcuccauau

SEQ ID NO: 1463830 - RNA, 19 nt, Homo sapiens
  misc_RNA (1)...(19): siRNA sense strand
ggaccagcuccauggauuc

SEQ ID NO: 1463831 - RNA, 19 nt, Homo sapiens
  misc_RNA (1)...(19): siRNA sense strand
guagaggucaguggugaug

SEQ ID NO: 1463832 - RNA, 19 nt, Homo sapiens
  misc_RNA (1)...(19): siRNA sense strand
ucacuggaccggaguaacu

SEQ ID NO: 1463833 - RNA, 19 nt, Homo sapiens
  misc_RNA (1)...(19): siRNA sense strand
cagaggaggagccauugug

SEQ ID NO: 1463834 - RNA, 19 nt, Homo sapiens
  misc_RNA (1)...(19): siRNA sense strand
ugaagaaggaugccaugag

SEQ ID NO: 1463835 - RNA, 19 nt, Homo sapiens
  misc_RNA (1)...(19): siRNA sense strand
uguggcaagugacaaagau

SEQ ID NO: 1463836 - RNA, 19 nt, Homo sapiens
  misc_RNA (1)...(19): siRNA sense strand
acacaccuuuggccucauc

SEQ ID NO: 1463837 - RNA, 19 nt, Homo sapiens
  misc_RNA (1)...(19): siRNA sense strand
uaagccaagcugcucagaa

SEQ ID NO: 1463838 - RNA, 19 nt, Homo sapiens
  misc_RNA (1)...(19): siRNA sense strand
gaugccaugagccuaguga

SEQ ID NO: 1463839 - RNA, 19 nt, Homo sapiens
  misc_RNA (1)...(19): siRNA sense strand
ccaucauucuggucaacug

SEQ ID NO: 1463840 - RNA, 19 nt, Homo sapiens
  misc_RNA (1)...(19): siRNA sense strand
caacugcgaugaugacuug

SEQ ID NO: 1463841 - RNA, 19 nt, Homo sapiens
  misc_RNA (1)...(19): siRNA sense strand
guaacucucuguccuggua

SEQ ID NO: 1463842 - RNA, 19 nt, Homo sapiens
  misc_RNA (1)...(19): siRNA sense strand
ugacaaagauagcuguaug

SEQ ID NO: 1463843 - RNA, 19 nt, Homo sapiens
  misc_RNA (1)...(19): siRNA sense strand
gaaguacgaggcacuguau

SEQ ID NO: 1463844 - RNA, 19 nt, Homo sapiens
  misc_RNA (1)...(19): siRNA sense strand
guacagaggaggagccauu

SEQ ID NO: 1463845 - RNA, 19 nt, Homo sapiens
  misc_RNA (1)...(19): siRNA sense strand
gcucaagugccauguguuu

SEQ ID NO: 1463846 - RNA, 19 nt, Homo sapiens
  misc_RNA (1)...(19): siRNA sense strand
gcauggaugugcugaacga

SEQ ID NO: 1463847 - RNA, 19 nt, Homo sapiens
  misc_RNA (1)...(19): siRNA sense strand
ggccagaacaugcugauga

SEQ ID NO: 1463848 - RNA, 19 nt, Homo sapiens
  misc_RNA (1)...(19): siRNA sense strand
gccaagcugcucagaagua

SEQ ID NO: 1463849 - RNA, 19 nt, Homo sapiens
  misc_RNA (1)...(19): siRNA sense strand
gccagaacaugcugaugau

SEQ ID NO: 1463850 - RNA, 19 nt, Homo sapiens
  misc_RNA (1)...(19): siRNA sense strand
cggaccagcuccauggauu

SEQ ID NO: 1463851 - RNA, 19 nt, Homo sapiens
  misc_RNA (1)...(19): siRNA sense strand
gaucuugucagagcgagua

SEQ ID NO: 1463852 - RNA, 19 nt, Homo sapiens
  misc_RNA (1)...(19): siRNA sense strand
aagccaagcugcucagaag

SEQ ID NO: 1463853 - RNA, 19 nt, Homo sapiens
  misc_RNA (1)...(19): siRNA sense strand
gugcccagaucuugucaga

SEQ ID NO: 1463854 - RNA, 19 nt, Homo sapiens
  misc_RNA (1)...(19): siRNA sense strand
guacgaggcacuguauaug

SEQ ID NO: 1463855 - RNA, 19 nt, Homo sapiens
  misc_RNA (1)...(19): siRNA sense strand
gagccagccuccagauggu

SEQ ID NO: 1463856 - RNA, 19 nt, Homo sapiens
  misc_RNA (1)...(19): siRNA sense strand
gaaacccucucugcuccau

SEQ ID NO: 1463857 - RNA, 19 nt, Homo sapiens
  misc_RNA (1)...(19): siRNA sense strand
gggcauggaugugcugaac

SEQ ID NO: 1463858 - RNA, 19 nt, Homo sapiens
  misc_RNA (1)...(19): siRNA sense strand
gugucugacucucucauga

SEQ ID NO: 1463859 - RNA, 19 nt, Homo sapiens
  misc_RNA (1)...(19): siRNA sense strand
ccacgaugcugcagguacu

SEQ ID NO: 1463860 - RNA, 19 nt, Homo sapiens
  misc_RNA (1)...(19): siRNA sense strand
gccaugagccuagugaauc

SEQ ID NO: 1463861 - RNA, 19 nt, Homo sapiens
  misc_RNA (1)...(19): siRNA sense strand
agaaguacgaggcacugua

SEQ ID NO: 1463862 - RNA, 19 nt, Homo sapiens
  misc_RNA (1)...(19): siRNA sense strand
cugccuguaugguucagua

SEQ ID NO: 1463863 - RNA, 19 nt, Homo sapiens
  misc_RNA (1)...(19): siRNA sense strand
ccaagcugcucagaaguac

SEQ ID NO: 1463864 - RNA, 19 nt, Homo sapiens
  misc_RNA (1)...(19): siRNA sense strand
aacccucucugcuccauau

SEQ ID NO: 1463865 - RNA, 19 nt, Homo sapiens
  misc_RNA (1)...(19): siRNA sense strand
ggaccagcuccauggauuc

SEQ ID NO: 1463866 - RNA, 19 nt, Homo sapiens
  misc_RNA (1)...(19): siRNA sense strand
guagaggucaguggugaug

SEQ ID NO: 1463867 - RNA, 19 nt, Homo sapiens
  misc_RNA (1)...(19): siRNA sense strand
ucacuggaccggaguaacu

SEQ ID NO: 1463868 - RNA, 19 nt, Homo sapiens
  misc_RNA (1)...(19): siRNA sense strand
cagaggaggagccauugug

SEQ ID NO: 1463869 - RNA, 19 nt, Homo sapiens
  misc_RNA (1)...(19): siRNA sense strand
ugaagaaggaugccaugag

SEQ ID NO: 1463870 - RNA, 19 nt, Homo sapiens
  misc_RNA (1)...(19): siRNA sense strand
uguggcaagugacaaagau

SEQ ID NO: 1463871 - RNA, 19 nt, Homo sapiens
  misc_RNA (1)...(19): siRNA sense strand
acacaccuuuggccucauc

SEQ ID NO: 1463872 - RNA, 19 nt, Homo sapiens
  misc_RNA (1)...(19): siRNA sense strand
uaagccaagcugcucagaa

SEQ ID NO: 1463873 - RNA, 19 nt, Homo sapiens
  misc_RNA (1)...(19): siRNA sense strand
gaugccaugagccuaguga

SEQ ID NO: 1463874 - RNA, 19 nt, Homo sapiens
  misc_RNA (1)...(19): siRNA sense strand
ccaucauucuggucaacug

SEQ ID NO: 1463875 - RNA, 19 nt, Homo sapiens
  misc_RNA (1)...(19): siRNA sense strand
caacugcgaugaugacuug

SEQ ID NO: 1463876 - RNA, 19 nt, Homo sapiens
  misc_RNA (1)...(19): siRNA sense strand
guaacucucuguccuggua

SEQ ID NO: 1463877 - RNA, 19 nt, Homo sapiens
  misc_RNA (1)...(19): siRNA sense strand
ugacaaagauagcuguaug

SEQ ID NO: 1463878 - RNA, 19 nt, Homo sapiens
  misc_RNA (1)...(19): siRNA sense strand
gaaguacgaggcacuguau

SEQ ID NO: 1463879 - RNA, 19 nt, Homo sapiens
  misc_RNA (1)...(19): siRNA sense strand
guacagaggaggagccauu

SEQ ID NO: 1463880 - RNA, 19 nt, Homo sapiens
  misc_RNA (1)...(19): siRNA sense strand
gcucaagugccauguguuu

SEQ ID NO: 1463881 - RNA, 19 nt, Homo sapiens
  misc_RNA (1)...(19): siRNA sense strand
gcauggaugugcugaacga

SEQ ID NO: 1463882 - RNA, 19 nt, Homo sapiens
  misc_RNA (1)...(19): siRNA sense strand
ggccagaacaugcugauga

SEQ ID NO: 1463883 - RNA, 19 nt, Homo sapiens
  misc_RNA (1)...(19): siRNA sense strand
gccaagcugcucagaagua

SEQ ID NO: 1463884 - RNA, 19 nt, Homo sapiens
  misc_RNA (1)...(19): siRNA sense strand
gccagaacaugcugaugau

SEQ ID NO: 1463885 - RNA, 19 nt, Homo sapiens
  misc_RNA (1)...(19): siRNA sense strand
cggaccagcuccauggauu

SEQ ID NO: 1463886 - RNA, 19 nt, Homo sapiens
  misc_RNA (1)...(19): siRNA sense strand
gaucuugucagagcgagua

SEQ ID NO: 1463887 - RNA, 19 nt, Homo sapiens
  misc_RNA (1)...(19): siRNA sense strand
aagccaagcugcucagaag

SEQ ID NO: 1463888 - RNA, 19 nt, Homo sapiens
  misc_RNA (1)...(19): siRNA sense strand
gugcccagaucuugucaga

SEQ ID NO: 1463889 - RNA, 19 nt, Homo sapiens
  misc_RNA (1)...(19): siRNA sense strand
guacgaggcacuguauaug

SEQ ID NO: 1463890 - RNA, 19 nt, Homo sapiens
  misc_RNA (1)...(19): siRNA sense strand
gagccagccuccagauggu

SEQ ID NO: 1463891 - RNA, 19 nt, Homo sapiens
  misc_RNA (1)...(19): siRNA sense strand
gaaacccucucugcuccau

SEQ ID NO: 1463892 - RNA, 19 nt, Homo sapiens
  misc_RNA (1)...(19): siRNA sense strand
gggcauggaugugcugaac

SEQ ID NO: 1463893 - RNA, 19 nt, Homo sapiens
  misc_RNA (1)...(19): siRNA sense strand
gugucugacucucucauga

SEQ ID NO: 1463894 - RNA, 19 nt, Homo sapiens
  misc_RNA (1)...(19): siRNA sense strand
ccacgaugcugcagguacu

SEQ ID NO: 1463895 - RNA, 19 nt, Homo sapiens
  misc_RNA (1)...(19): siRNA sense strand
gccaugagccuagugaauc

SEQ ID NO: 1463896 - RNA, 19 nt, Homo sapiens
  misc_RNA (1)...(19): siRNA sense strand
agaaguacgaggcacugua

SEQ ID NO: 1463897 - RNA, 19 nt, Homo sapiens
  misc_RNA (1)...(19): siRNA sense strand
cugccuguaugguucagua

SEQ ID NO: 1463898 - RNA, 19 nt, Homo sapiens
  misc_RNA (1)...(19): siRNA sense strand
ccaagcugcucagaaguac

SEQ ID NO: 1463899 - RNA, 19 nt, Homo sapiens
  misc_RNA (1)...(19): siRNA sense strand
aacccucucugcuccauau

SEQ ID NO: 1463900 - RNA, 19 nt, Homo sapiens
  misc_RNA (1)...(19): siRNA sense strand
ggaccagcuccauggauuc

SEQ ID NO: 1463901 - RNA, 19 nt, Homo sapiens
  misc_RNA (1)...(19): siRNA sense strand
guagaggucaguggugaug

SEQ ID NO: 1463902 - RNA, 19 nt, Homo sapiens
  misc_RNA (1)...(19): siRNA sense strand
ucacuggaccggaguaacu

SEQ ID NO: 1463903 - RNA, 19 nt, Homo sapiens
  misc_RNA (1)...(19): siRNA sense strand
cagaggaggagccauugug

SEQ ID NO: 1463904 - RNA, 19 nt, Homo sapiens
  misc_RNA (1)...(19): siRNA sense strand
ugaagaaggaugccaugag

SEQ ID NO: 1463905 - RNA, 19 nt, Homo sapiens
  misc_RNA (1)...(19): siRNA sense strand
uguggcaagugacaaagau

SEQ ID NO: 1463906 - RNA, 19 nt, Homo sapiens
  misc_RNA (1)...(19): siRNA sense strand
acacaccuuuggccucauc

SEQ ID NO: 1463907 - RNA, 19 nt, Homo sapiens
  misc_RNA (1)...(19): siRNA sense strand
uaagccaagcugcucagaa

SEQ ID NO: 1463908 - RNA, 19 nt, Homo sapiens
  misc_RNA (1)...(19): siRNA sense strand
gaugccaugagccuaguga

SEQ ID NO: 1463909 - RNA, 19 nt, Homo sapiens
  misc_RNA (1)...(19): siRNA sense strand
ccaucauucuggucaacug

SEQ ID NO: 1463910 - RNA, 19 nt, Homo sapiens
  misc_RNA (1)...(19): siRNA sense strand
caacugcgaugaugacuug

SEQ ID NO: 1463911 - RNA, 19 nt, Homo sapiens
  misc_RNA (1)...(19): siRNA sense strand
guaacucucuguccuggua

SEQ ID NO: 1463912 - RNA, 19 nt, Homo sapiens
  misc_RNA (1)...(19): siRNA sense strand
ugacaaagauagcuguaug

SEQ ID NO: 1463913 - RNA, 19 nt, Homo sapiens
  misc_RNA (1)...(19): siRNA sense strand
gaaguacgaggcacuguau

SEQ ID NO: 1463914 - RNA, 19 nt, Homo sapiens
  misc_RNA (1)...(19): siRNA sense strand
guacagaggaggagccauu

SEQ ID NO: 1463915 - RNA, 19 nt, Homo sapiens
  misc_RNA (1)...(19): siRNA sense strand
gcucaagugccauguguuu

SEQ ID NO: 1463916 - RNA, 19 nt, Homo sapiens
  misc_RNA (1)...(19): siRNA sense strand
gcauggaugugcugaacga

SEQ ID NO: 1463917 - RNA, 19 nt, Homo sapiens
  misc_RNA (1)...(19): siRNA sense strand
ggccagaacaugcugauga

SEQ ID NO: 1463918 - RNA, 19 nt, Homo sapiens
  misc_RNA (1)...(19): siRNA sense strand
gccaagcugcucagaagua

SEQ ID NO: 1463919 - RNA, 19 nt, Homo sapiens
  misc_RNA (1)...(19): siRNA sense strand
gccagaacaugcugaugau

SEQ ID NO: 1463920 - RNA, 19 nt, Homo sapiens
  misc_RNA (1)...(19): siRNA sense strand
cggaccagcuccauggauu

SEQ ID NO: 1463921 - RNA, 19 nt, Homo sapiens
  misc_RNA (1)...(19): siRNA sense strand
gaucuugucagagcgagua

SEQ ID NO: 1463922 - RNA, 19 nt, Homo sapiens
  misc_RNA (1)...(19): siRNA sense strand
aagccaagcugcucagaag

SEQ ID NO: 1463923 - RNA, 19 nt, Homo sapiens
  misc_RNA (1)...(19): siRNA sense strand
gugcccagaucuugucaga

SEQ ID NO: 1463924 - RNA, 19 nt, Homo sapiens
  misc_RNA (1)...(19): siRNA sense strand
guacgaggcacuguauaug

SEQ ID NO: 1463925 - RNA, 19 nt, Homo sapiens
  misc_RNA (1)...(19): siRNA sense strand
gagccagccuccagauggu

SEQ ID NO: 1463926 - RNA, 19 nt, Homo sapiens
  misc_RNA (1)...(19): siRNA sense strand
gaaacccucucugcuccau

SEQ ID NO: 1463927 - RNA, 19 nt, Homo sapiens
  misc_RNA (1)...(19): siRNA sense strand
gggcauggaugugcugaac

SEQ ID NO: 1463928 - RNA, 19 nt, Homo sapiens
  misc_RNA (1)...(19): siRNA sense strand
gugucugacucucucauga

SEQ ID NO: 1463929 - RNA, 19 nt, Homo sapiens
  misc_RNA (1)...(19): siRNA sense strand
ccacgaugcugcagguacu

SEQ ID NO: 1463930 - RNA, 19 nt, Homo sapiens
  misc_RNA (1)...(19): siRNA sense strand
gccaugagccuagugaauc

SEQ ID NO: 1463931 - RNA, 19 nt, Homo sapiens
  misc_RNA (1)...(19): siRNA sense strand
agaaguacgaggcacugua

SEQ ID NO: 1463932 - RNA, 19 nt, Homo sapiens
  misc_RNA (1)...(19): siRNA sense strand
cugccuguaugguucagua

SEQ ID NO: 1463933 - RNA, 19 nt, Homo sapiens
  misc_RNA (1)...(19): siRNA sense strand
ccaagcugcucagaaguac

SEQ ID NO: 1463934 - RNA, 19 nt, Homo sapiens
  misc_RNA (1)...(19): siRNA sense strand
aacccucucugcuccauau

SEQ ID NO: 1463935 - RNA, 19 nt, Homo sapiens
  misc_RNA (1)...(19): siRNA sense strand
ggaccagcuccauggauuc

SEQ ID NO: 1463936 - RNA, 19 nt, Homo sapiens
  misc_RNA (1)...(19): siRNA sense strand
guagaggucaguggugaug

SEQ ID NO: 1463937 - RNA, 19 nt, Homo sapiens
  misc_RNA (1)...(19): siRNA sense strand
ucacuggaccggaguaacu

SEQ ID NO: 1463938 - RNA, 19 nt, Homo sapiens
  misc_RNA (1)...(19): siRNA sense strand
cagaggaggagccauugug

SEQ ID NO: 1463939 - RNA, 19 nt, Homo sapiens
  misc_RNA (1)...(19): siRNA sense strand
ugaagaaggaugccaugag

SEQ ID NO: 1463940 - RNA, 19 nt, Homo sapiens
  misc_RNA (1)...(19): siRNA sense strand
uguggcaagugacaaagau

SEQ ID NO: 1463941 - RNA, 19 nt, Homo sapiens
  misc_RNA (1)...(19): siRNA sense strand
acacaccuuuggccucauc

SEQ ID NO: 1463942 - RNA, 19 nt, Homo sapiens
  misc_RNA (1)...(19): siRNA sense strand
uaagccaagcugcucagaa

SEQ ID NO: 1463943 - RNA, 19 nt, Homo sapiens
  misc_RNA (1)...(19): siRNA sense strand
gaugccaugagccuaguga

SEQ ID NO: 1463944 - RNA, 19 nt, Homo sapiens
  misc_RNA (1)...(19): siRNA sense strand
ccaucauucuggucaacug

SEQ ID NO: 1463945 - RNA, 19 nt, Homo sapiens
  misc_RNA (1)...(19): siRNA sense strand
caacugcgaugaugacuug

SEQ ID NO: 1463946 - RNA, 19 nt, Homo sapiens
  misc_RNA (1)...(19): siRNA sense strand
guaacucucuguccuggua

SEQ ID NO: 1463947 - RNA, 19 nt, Homo sapiens
  misc_RNA (1)...(19): siRNA sense strand
ggccagaacaugcugauga

SEQ ID NO: 1463948 - RNA, 19 nt, Homo sapiens
  misc_RNA (1)...(19): siRNA sense strand
gccagaacaugcugaugau

SEQ ID NO: 1463949 - RNA, 19 nt, Homo sapiens
  misc_RNA (1)...(19): siRNA sense strand
gagccagccuccagauggu

SEQ ID NO: 1463950 - RNA, 19 nt, Homo sapiens
  misc_RNA (1)...(19): siRNA sense strand
ccacgaugcugcagguacu

SEQ ID NO: 1463951 - RNA, 19 nt, Homo sapiens
  misc_RNA (1)...(19): siRNA sense strand
gccaugagccuagugaauc

SEQ ID NO: 1463952 - RNA, 19 nt, Homo sapiens
  misc_RNA (1)...(19): siRNA sense strand
ucacuggaccggaguaacu

SEQ ID NO: 1463953 - RNA, 19 nt, Homo sapiens
  misc_RNA (1)...(19): siRNA sense strand
ugaagaaggaugccaugag

SEQ ID NO: 1463954 - RNA, 19 nt, Homo sapiens
  misc_RNA (1)...(19): siRNA sense strand
ccaucauucuggucaacug

SEQ ID NO: 1463955 - RNA, 19 nt, Homo sapiens
  misc_RNA (1)...(19): siRNA sense strand
gaugccaugagccuaguga

SEQ ID NO: 1463956 - RNA, 19 nt, Homo sapiens
  misc_RNA (1)...(19): siRNA sense strand
caacugcgaugaugacuug

SEQ ID NO: 1463957 - RNA, 19 nt, Homo sapiens
  misc_RNA (1)...(19): siRNA sense strand
guaacucucuguccuggua

SEQ ID NO: 1463958 - RNA, 19 nt, Homo sapiens
  misc_RNA (1)...(19): siRNA sense strand
ggccagaacaugcugauga

SEQ ID NO: 1463959 - RNA, 19 nt, Homo sapiens
  misc_RNA (1)...(19): siRNA sense strand
gccagaacaugcugaugau

SEQ ID NO: 1463960 - RNA, 19 nt, Homo sapiens
  misc_RNA (1)...(19): siRNA sense strand
gagccagccuccagauggu

SEQ ID NO: 1463961 - RNA, 19 nt, Homo sapiens
  misc_RNA (1)...(19): siRNA sense strand
ccacgaugcugcagguacu

SEQ ID NO: 1463962 - RNA, 19 nt, Homo sapiens
  misc_RNA (1)...(19): siRNA sense strand
gccaugagccuagugaauc

SEQ ID NO: 1463963 - RNA, 19 nt, Homo sapiens
  misc_RNA (1)...(19): siRNA sense strand
ucacuggaccggaguaacu

SEQ ID NO: 1463964 - RNA, 19 nt, Homo sapiens
  misc_RNA (1)...(19): siRNA sense strand
ugaagaaggaugccaugag

SEQ ID NO: 1463965 - RNA, 19 nt, Homo sapiens
  misc_RNA (1)...(19): siRNA sense strand
ccaucauucuggucaacug

SEQ ID NO: 1463966 - RNA, 19 nt, Homo sapiens
  misc_RNA (1)...(19): siRNA sense strand
gaugccaugagccuaguga

SEQ ID NO: 1463967 - RNA, 19 nt, Homo sapiens
  misc_RNA (1)...(19): siRNA sense strand
caacugcgaugaugacuug

SEQ ID NO: 1463968 - RNA, 19 nt, Homo sapiens
  misc_RNA (1)...(19): siRNA sense strand
guaacucucuguccuggua

SEQ ID NO: 1463969 - RNA, 19 nt, Homo sapiens
  misc_RNA (1)...(19): siRNA sense strand
ugacaaagauagcuguaug

SEQ ID NO: 1463970 - RNA, 19 nt, Homo sapiens
  misc_RNA (1)...(19): siRNA sense strand
gaaguacgaggcacuguau

SEQ ID NO: 1463971 - RNA, 19 nt, Homo sapiens
  misc_RNA (1)...(19): siRNA sense strand
guacagaggaggagccauu

SEQ ID NO: 1463972 - RNA, 19 nt, Homo sapiens
  misc_RNA (1)...(19): siRNA sense strand
gcucaagugccauguguuu

SEQ ID NO: 1463973 - RNA, 19 nt, Homo sapiens
  misc_RNA (1)...(19): siRNA sense strand
gcauggaugugcugaacga

SEQ ID NO: 1463974 - RNA, 19 nt, Homo sapiens
  misc_RNA (1)...(19): siRNA sense strand
ggccagaacaugcugauga

SEQ ID NO: 1463975 - RNA, 19 nt, Homo sapiens
  misc_RNA (1)...(19): siRNA sense strand
gccaagcugcucagaagua

SEQ ID NO: 1463976 - RNA, 19 nt, Homo sapiens
  misc_RNA (1)...(19): siRNA sense strand
gccagaacaugcugaugau

SEQ ID NO: 1463977 - RNA, 19 nt, Homo sapiens
  misc_RNA (1)...(19): siRNA sense strand
cggaccagcuccauggauu

SEQ ID NO: 1463978 - RNA, 19 nt, Homo sapiens
  misc_RNA (1)...(19): siRNA sense strand
gaucuugucagagcgagua

SEQ ID NO: 1463979 - RNA, 19 nt, Homo sapiens
  misc_RNA (1)...(19): siRNA sense strand
aagccaagcugcucagaag

SEQ ID NO: 1463980 - RNA, 19 nt, Homo sapiens
  misc_RNA (1)...(19): siRNA sense strand
gugcccagaucuugucaga

SEQ ID NO: 1463981 - RNA, 19 nt, Homo sapiens
  misc_RNA (1)...(19): siRNA sense strand
guacgaggcacuguauaug

SEQ ID NO: 1463982 - RNA, 19 nt, Homo sapiens
  misc_RNA (1)...(19): siRNA sense strand
gagccagccuccagauggu

SEQ ID NO: 1463983 - RNA, 19 nt, Homo sapiens
  misc_RNA (1)...(19): siRNA sense strand
gaaacccucucugcuccau

SEQ ID NO: 1463984 - RNA, 19 nt, Homo sapiens
  misc_RNA (1)...(19): siRNA sense strand
gggcauggaugugcugaac

SEQ ID NO: 1463985 - RNA, 19 nt, Homo sapiens
  misc_RNA (1)...(19): siRNA sense strand
gugucugacucucucauga

SEQ ID NO: 1463986 - RNA, 19 nt, Homo sapiens
  misc_RNA (1)...(19): siRNA sense strand
ccacgaugcugcagguacu

SEQ ID NO: 1463987 - RNA, 19 nt, Homo sapiens
  misc_RNA (1)...(19): siRNA sense strand
gccaugagccuagugaauc

SEQ ID NO: 1463988 - RNA, 19 nt, Homo sapiens
  misc_RNA (1)...(19): siRNA sense strand
agaaguacgaggcacugua

SEQ ID NO: 1463989 - RNA, 19 nt, Homo sapiens
  misc_RNA (1)...(19): siRNA sense strand
cugccuguaugguucagua

SEQ ID NO: 1463990 - RNA, 19 nt, Homo sapiens
  misc_RNA (1)...(19): siRNA sense strand
ccaagcugcucagaaguac

SEQ ID NO: 1463991 - RNA, 19 nt, Homo sapiens
  misc_RNA (1)...(19): siRNA sense strand
aacccucucugcuccauau

SEQ ID NO: 1463992 - RNA, 19 nt, Homo sapiens
  misc_RNA (1)...(19): siRNA sense strand
ggaccagcuccauggauuc

SEQ ID NO: 1463993 - RNA, 19 nt, Homo sapiens
  misc_RNA (1)...(19): siRNA sense strand
guagaggucaguggugaug

SEQ ID NO: 1463994 - RNA, 19 nt, Homo sapiens
  misc_RNA (1)...(19): siRNA sense strand
ucacuggaccggaguaacu

SEQ ID NO: 1463995 - RNA, 19 nt, Homo sapiens
  misc_RNA (1)...(19): siRNA sense strand
cagaggaggagccauugug

SEQ ID NO: 1463996 - RNA, 19 nt, Homo sapiens
  misc_RNA (1)...(19): siRNA sense strand
ugaagaaggaugccaugag

SEQ ID NO: 1463997 - RNA, 19 nt, Homo sapiens
  misc_RNA (1)...(19): siRNA sense strand
uguggcaagugacaaagau

SEQ ID NO: 1463998 - RNA, 19 nt, Homo sapiens
  misc_RNA (1)...(19): siRNA sense strand
acacaccuuuggccucauc

SEQ ID NO: 1463999 - RNA, 19 nt, Homo sapiens
  misc_RNA (1)...(19): siRNA sense strand
uaagccaagcugcucagaa

SEQ ID NO: 1464000 - RNA, 19 nt, Homo sapiens
  misc_RNA (1)...(19): siRNA sense strand
gaugccaugagccuaguga

SEQ ID NO: 1464001 - RNA, 19 nt, Homo sapiens
  misc_RNA (1)...(19): siRNA sense strand
ccaucauucuggucaacug

SEQ ID NO: 1464002 - RNA, 19 nt, Homo sapiens
  misc_RNA (1)...(19): siRNA sense strand
caacugcgaugaugacuug

SEQ ID NO: 1464003 - RNA, 19 nt, Homo sapiens
  misc_RNA (1)...(19): siRNA sense strand
guaacucucuguccuggua

SEQ ID NO: 1464004 - RNA, 19 nt, Homo sapiens
  misc_RNA (1)...(19): siRNA sense strand
ugacaaagauagcuguaug

SEQ ID NO: 1464005 - RNA, 19 nt, Homo sapiens
  misc_RNA (1)...(19): siRNA sense strand
gaaguacgaggcacuguau

SEQ ID NO: 1464006 - RNA, 19 nt, Homo sapiens
  misc_RNA (1)...(19): siRNA sense strand
guacagaggaggagccauu

SEQ ID NO: 1464007 - RNA, 19 nt, Homo sapiens
  misc_RNA (1)...(19): siRNA sense strand
gcucaagugccauguguuu

SEQ ID NO: 1464008 - RNA, 19 nt, Homo sapiens
  misc_RNA (1)...(19): siRNA sense strand
gcauggaugugcugaacga

SEQ ID NO: 1464009 - RNA, 19 nt, Homo sapiens
  misc_RNA (1)...(19): siRNA sense strand
ggccagaacaugcugauga

SEQ ID NO: 1464010 - RNA, 19 nt, Homo sapiens
  misc_RNA (1)...(19): siRNA sense strand
gccaagcugcucagaagua

SEQ ID NO: 1464011 - RNA, 19 nt, Homo sapiens
  misc_RNA (1)...(19): siRNA sense strand
gccagaacaugcugaugau

SEQ ID NO: 1464012 - RNA, 19 nt, Homo sapiens
  misc_RNA (1)...(19): siRNA sense strand
cggaccagcuccauggauu

SEQ ID NO: 1464013 - RNA, 19 nt, Homo sapiens
  misc_RNA (1)...(19): siRNA sense strand
gaucuugucagagcgagua

SEQ ID NO: 1464014 - RNA, 19 nt, Homo sapiens
  misc_RNA (1)...(19): siRNA sense strand
aagccaagcugcucagaag

SEQ ID NO: 1464015 - RNA, 19 nt, Homo sapiens
  misc_RNA (1)...(19): siRNA sense strand
gugcccagaucuugucaga

SEQ ID NO: 1464016 - RNA, 19 nt, Homo sapiens
  misc_RNA (1)...(19): siRNA sense strand
guacgaggcacuguauaug

SEQ ID NO: 1464017 - RNA, 19 nt, Homo sapiens
  misc_RNA (1)...(19): siRNA sense strand
gagccagccuccagauggu

SEQ ID NO: 1464018 - RNA, 19 nt, Homo sapiens
  misc_RNA (1)...(19): siRNA sense strand
gaaacccucucugcuccau

SEQ ID NO: 1464019 - RNA, 19 nt, Homo sapiens
  misc_RNA (1)...(19): siRNA sense strand
gggcauggaugugcugaac

SEQ ID NO: 1464020 - RNA, 19 nt, Homo sapiens
  misc_RNA (1)...(19): siRNA sense strand
gugucugacucucucauga

SEQ ID NO: 1464021 - RNA, 19 nt, Homo sapiens
  misc_RNA (1)...(19): siRNA sense strand
ccacgaugcugcagguacu

SEQ ID NO: 1464022 - RNA, 19 nt, Homo sapiens
  misc_RNA (1)...(19): siRNA sense strand
gccaugagccuagugaauc

SEQ ID NO: 1464023 - RNA, 19 nt, Homo sapiens
  misc_RNA (1)...(19): siRNA sense strand
agaaguacgaggcacugua

SEQ ID NO: 1464024 - RNA, 19 nt, Homo sapiens
  misc_RNA (1)...(19): siRNA sense strand
cugccuguaugguucagua

SEQ ID NO: 1464025 - RNA, 19 nt, Homo sapiens
  misc_RNA (1)...(19): siRNA sense strand
ccaagcugcucagaaguac

SEQ ID NO: 1464026 - RNA, 19 nt, Homo sapiens
  misc_RNA (1)...(19): siRNA sense strand
aacccucucugcuccauau

SEQ ID NO: 1464027 - RNA, 19 nt, Homo sapiens
  misc_RNA (1)...(19): siRNA sense strand
ggaccagcuccauggauuc

SEQ ID NO: 1464028 - RNA, 19 nt, Homo sapiens
  misc_RNA (1)...(19): siRNA sense strand
guagaggucaguggugaug

SEQ ID NO: 1464029 - RNA, 19 nt, Homo sapiens
  misc_RNA (1)...(19): siRNA sense strand
ucacuggaccggaguaacu

SEQ ID NO: 1464030 - RNA, 19 nt, Homo sapiens
  misc_RNA (1)...(19): siRNA sense strand
cagaggaggagccauugug

SEQ ID NO: 1464031 - RNA, 19 nt, Homo sapiens
  misc_RNA (1)...(19): siRNA sense strand
ugaagaaggaugccaugag

SEQ ID NO: 1464032 - RNA, 19 nt, Homo sapiens
  misc_RNA (1)...(19): siRNA sense strand
uguggcaagugacaaagau

SEQ ID NO: 1464033 - RNA, 19 nt, Homo sapiens
  misc_RNA (1)...(19): siRNA sense strand
acacaccuuuggccucauc

SEQ ID NO: 1464034 - RNA, 19 nt, Homo sapiens
  misc_RNA (1)...(19): siRNA sense strand
uaagccaagcugcucagaa

SEQ ID NO: 1464035 - RNA, 19 nt, Homo sapiens
  misc_RNA (1)...(19): siRNA sense strand
gaugccaugagccuaguga

SEQ ID NO: 1464036 - RNA, 19 nt, Homo sapiens
  misc_RNA (1)...(19): siRNA sense strand
ccaucauucuggucaacug

SEQ ID NO: 1464037 - RNA, 19 nt, Homo sapiens
  misc_RNA (1)...(19): siRNA sense strand
caacugcgaugaugacuug

SEQ ID NO: 1464038 - RNA, 19 nt, Homo sapiens
  misc_RNA (1)...(19): siRNA sense strand
guaacucucuguccuggua

SEQ ID NO: 1464039 - RNA, 19 nt, Homo sapiens
  misc_RNA (1)...(19): siRNA sense strand
ugacaaagauagcuguaug

SEQ ID NO: 1464040 - RNA, 19 nt, Homo sapiens
  misc_RNA (1)...(19): siRNA sense strand
gaaguacgaggcacuguau

SEQ ID NO: 1464041 - RNA, 19 nt, Homo sapiens
  misc_RNA (1)...(19): siRNA sense strand
guacagaggaggagccauu

SEQ ID NO: 1464042 - RNA, 19 nt, Homo sapiens
  misc_RNA (1)...(19): siRNA sense strand
gcucaagugccauguguuu

SEQ ID NO: 1464043 - RNA, 19 nt, Homo sapiens
  misc_RNA (1)...(19): siRNA sense strand
gcauggaugugcugaacga

SEQ ID NO: 1464044 - RNA, 19 nt, Homo sapiens
  misc_RNA (1)...(19): siRNA sense strand
ggccagaacaugcugauga

SEQ ID NO: 1464045 - RNA, 19 nt, Homo sapiens
  misc_RNA (1)...(19): siRNA sense strand
gccaagcugcucagaagua

SEQ ID NO: 1464046 - RNA, 19 nt, Homo sapiens
  misc_RNA (1)...(19): siRNA sense strand
gccagaacaugcugaugau

SEQ ID NO: 1464047 - RNA, 19 nt, Homo sapiens
  misc_RNA (1)...(19): siRNA sense strand
cggaccagcuccauggauu

SEQ ID NO: 1464048 - RNA, 19 nt, Homo sapiens
  misc_RNA (1)...(19): siRNA sense strand
gaucuugucagagcgagua

SEQ ID NO: 1464049 - RNA, 19 nt, Homo sapiens
  misc_RNA (1)...(19): siRNA sense strand
aagccaagcugcucagaag

SEQ ID NO: 1464050 - RNA, 19 nt, Homo sapiens
  misc_RNA (1)...(19): siRNA sense strand
gugcccagaucuugucaga

SEQ ID NO: 1464051 - RNA, 19 nt, Homo sapiens
  misc_RNA (1)...(19): siRNA sense strand
guacgaggcacuguauaug

SEQ ID NO: 1464052 - RNA, 19 nt, Homo sapiens
  misc_RNA (1)...(19): siRNA sense strand
gagccagccuccagauggu

SEQ ID NO: 1464053 - RNA, 19 nt, Homo sapiens
  misc_RNA (1)...(19): siRNA sense strand
gaaacccucucugcuccau

SEQ ID NO: 1464054 - RNA, 19 nt, Homo sapiens
  misc_RNA (1)...(19): siRNA sense strand
gggcauggaugugcugaac

SEQ ID NO: 1464055 - RNA, 19 nt, Homo sapiens
  misc_RNA (1)...(19): siRNA sense strand
gugucugacucucucauga

SEQ ID NO: 1464056 - RNA, 19 nt, Homo sapiens
  misc_RNA (1)...(19): siRNA sense strand
ccacgaugcugcagguacu

SEQ ID NO: 1464057 - RNA, 19 nt, Homo sapiens
  misc_RNA (1)...(19): siRNA sense strand
gccaugagccuagugaauc

SEQ ID NO: 1464058 - RNA, 19 nt, Homo sapiens
  misc_RNA (1)...(19): siRNA sense strand
agaaguacgaggcacugua

SEQ ID NO: 1464059 - RNA, 19 nt, Homo sapiens
  misc_RNA (1)...(19): siRNA sense strand
cugccuguaugguucagua

SEQ ID NO: 1464060 - RNA, 19 nt, Homo sapiens
  misc_RNA (1)...(19): siRNA sense strand
ccaagcugcucagaaguac

SEQ ID NO: 1464061 - RNA, 19 nt, Homo sapiens
  misc_RNA (1)...(19): siRNA sense strand
aacccucucugcuccauau

SEQ ID NO: 1464062 - RNA, 19 nt, Homo sapiens
  misc_RNA (1)...(19): siRNA sense strand
ggaccagcuccauggauuc

SEQ ID NO: 1464063 - RNA, 19 nt, Homo sapiens
  misc_RNA (1)...(19): siRNA sense strand
guagaggucaguggugaug

SEQ ID NO: 1464064 - RNA, 19 nt, Homo sapiens
  misc_RNA (1)...(19): siRNA sense strand
ucacuggaccggaguaacu

SEQ ID NO: 1464065 - RNA, 19 nt, Homo sapiens
  misc_RNA (1)...(19): siRNA sense strand
cagaggaggagccauugug

SEQ ID NO: 1464066 - RNA, 19 nt, Homo sapiens
  misc_RNA (1)...(19): siRNA sense strand
ugaagaaggaugccaugag

SEQ ID NO: 1464067 - RNA, 19 nt, Homo sapiens
  misc_RNA (1)...(19): siRNA sense strand
uguggcaagugacaaagau

SEQ ID NO: 1464068 - RNA, 19 nt, Homo sapiens
  misc_RNA (1)...(19): siRNA sense strand
acacaccuuuggccucauc

SEQ ID NO: 1464069 - RNA, 19 nt, Homo sapiens
  misc_RNA (1)...(19): siRNA sense strand
uaagccaagcugcucagaa

SEQ ID NO: 1464070 - RNA, 19 nt, Homo sapiens
  misc_RNA (1)...(19): siRNA sense strand
gaugccaugagccuaguga

SEQ ID NO: 1464071 - RNA, 19 nt, Homo sapiens
  misc_RNA (1)...(19): siRNA sense strand
ccaucauucuggucaacug

SEQ ID NO: 1464072 - RNA, 19 nt, Homo sapiens
  misc_RNA (1)...(19): siRNA sense strand
caacugcgaugaugacuug

SEQ ID NO: 1464073 - RNA, 19 nt, Homo sapiens
  misc_RNA (1)...(19): siRNA sense strand
guaacucucuguccuggua

SEQ ID NO: 1464074 - RNA, 19 nt, Homo sapiens
  misc_RNA (1)...(19): siRNA sense strand
ugacaaagauagcuguaug

SEQ ID NO: 1464075 - RNA, 19 nt, Homo sapiens
  misc_RNA (1)...(19): siRNA sense strand
gaaguacgaggcacuguau

SEQ ID NO: 1464076 - RNA, 19 nt, Homo sapiens
  misc_RNA (1)...(19): siRNA sense strand
guacagaggaggagccauu

SEQ ID NO: 1464077 - RNA, 19 nt, Homo sapiens
  misc_RNA (1)...(19): siRNA sense strand
gcucaagugccauguguuu

SEQ ID NO: 1464078 - RNA, 19 nt, Homo sapiens
  misc_RNA (1)...(19): siRNA sense strand
gcauggaugugcugaacga

SEQ ID NO: 1464079 - RNA, 19 nt, Homo sapiens
  misc_RNA (1)...(19): siRNA sense strand
ggccagaacaugcugauga

SEQ ID NO: 1464080 - RNA, 19 nt, Homo sapiens
  misc_RNA (1)...(19): siRNA sense strand
gccaagcugcucagaagua

SEQ ID NO: 1464081 - RNA, 19 nt, Homo sapiens
  misc_RNA (1)...(19): siRNA sense strand
gccagaacaugcugaugau

SEQ ID NO: 1464082 - RNA, 19 nt, Homo sapiens
  misc_RNA (1)...(19): siRNA sense strand
cggaccagcuccauggauu

SEQ ID NO: 1464083 - RNA, 19 nt, Homo sapiens
  misc_RNA (1)...(19): siRNA sense strand
gaucuugucagagcgagua

SEQ ID NO: 1464084 - RNA, 19 nt, Homo sapiens
  misc_RNA (1)...(19): siRNA sense strand
aagccaagcugcucagaag

SEQ ID NO: 1464085 - RNA, 19 nt, Homo sapiens
  misc_RNA (1)...(19): siRNA sense strand
gugcccagaucuugucaga

SEQ ID NO: 1464086 - RNA, 19 nt, Homo sapiens
  misc_RNA (1)...(19): siRNA sense strand
guacgaggcacuguauaug

SEQ ID NO: 1464087 - RNA, 19 nt, Homo sapiens
  misc_RNA (1)...(19): siRNA sense strand
gagccagccuccagauggu

SEQ ID NO: 1464088 - RNA, 19 nt, Homo sapiens
  misc_RNA (1)...(19): siRNA sense strand
gaaacccucucugcuccau

SEQ ID NO: 1464089 - RNA, 19 nt, Homo sapiens
  misc_RNA (1)...(19): siRNA sense strand
gggcauggaugugcugaac

SEQ ID NO: 1464090 - RNA, 19 nt, Homo sapiens
  misc_RNA (1)...(19): siRNA sense strand
gugucugacucucucauga

SEQ ID NO: 1464091 - RNA, 19 nt, Homo sapiens
  misc_RNA (1)...(19): siRNA sense strand
ccacgaugcugcagguacu

SEQ ID NO: 1464092 - RNA, 19 nt, Homo sapiens
  misc_RNA (1)...(19): siRNA sense strand
gccaugagccuagugaauc

SEQ ID NO: 1464093 - RNA, 19 nt, Homo sapiens
  misc_RNA (1)...(19): siRNA sense strand
agaaguacgaggcacugua

SEQ ID NO: 1464094 - RNA, 19 nt, Homo sapiens
  misc_RNA (1)...(19): siRNA sense strand
cugccuguaugguucagua

SEQ ID NO: 1464095 - RNA, 19 nt, Homo sapiens
  misc_RNA (1)...(19): siRNA sense strand
ccaagcugcucagaaguac

SEQ ID NO: 1464096 - RNA, 19 nt, Homo sapiens
  misc_RNA (1)...(19): siRNA sense strand
aacccucucugcuccauau

SEQ ID NO: 1464097 - RNA, 19 nt, Homo sapiens
  misc_RNA (1)...(19): siRNA sense strand
ggaccagcuccauggauuc

SEQ ID NO: 1464098 - RNA, 19 nt, Homo sapiens
  misc_RNA (1)...(19): siRNA sense strand
guagaggucaguggugaug

SEQ ID NO: 1464099 - RNA, 19 nt, Homo sapiens
  misc_RNA (1)...(19): siRNA sense strand
ucacuggaccggaguaacu

SEQ ID NO: 1464100 - RNA, 19 nt, Homo sapiens
  misc_RNA (1)...(19): siRNA sense strand
cagaggaggagccauugug

SEQ ID NO: 1464101 - RNA, 19 nt, Homo sapiens
  misc_RNA (1)...(19): siRNA sense strand
ugaagaaggaugccaugag

SEQ ID NO: 1464102 - RNA, 19 nt, Homo sapiens
  misc_RNA (1)...(19): siRNA sense strand
uguggcaagugacaaagau

SEQ ID NO: 1464103 - RNA, 19 nt, Homo sapiens
  misc_RNA (1)...(19): siRNA sense strand
acacaccuuuggccucauc

SEQ ID NO: 1464104 - RNA, 19 nt, Homo sapiens
  misc_RNA (1)...(19): siRNA sense strand
uaagccaagcugcucagaa

SEQ ID NO: 1464105 - RNA, 19 nt, Homo sapiens
  misc_RNA (1)...(19): siRNA sense strand
gaugccaugagccuaguga

SEQ ID NO: 1464106 - RNA, 19 nt, Homo sapiens
  misc_RNA (1)...(19): siRNA sense strand
ccaucauucuggucaacug

SEQ ID NO: 1464107 - RNA, 19 nt, Homo sapiens
  misc_RNA (1)...(19): siRNA sense strand
caacugcgaugaugacuug

SEQ ID NO: 1464108 - RNA, 19 nt, Homo sapiens
  misc_RNA (1)...(19): siRNA sense strand
guaacucucuguccuggua

SEQ ID NO: 1464109 - RNA, 19 nt, Homo sapiens
  misc_RNA (1)...(19): siRNA sense strand
ggccagaacaugcugauga

SEQ ID NO: 1464110 - RNA, 19 nt, Homo sapiens
  misc_RNA (1)...(19): siRNA sense strand
gccagaacaugcugaugau

SEQ ID NO: 1464111 - RNA, 19 nt, Homo sapiens
  misc_RNA (1)...(19): siRNA sense strand
gagccagccuccagauggu

SEQ ID NO: 1464112 - RNA, 19 nt, Homo sapiens
  misc_RNA (1)...(19): siRNA sense strand
ccacgaugcugcagguacu

SEQ ID NO: 1464113 - RNA, 19 nt, Homo sapiens
  misc_RNA (1)...(19): siRNA sense strand
gccaugagccuagugaauc

SEQ ID NO: 1464114 - RNA, 19 nt, Homo sapiens
  misc_RNA (1)...(19): siRNA sense strand
ucacuggaccggaguaacu

SEQ ID NO: 1464115 - RNA, 19 nt, Homo sapiens
  misc_RNA (1)...(19): siRNA sense strand
ugaagaaggaugccaugag

SEQ ID NO: 1464116 - RNA, 19 nt, Homo sapiens
  misc_RNA (1)...(19): siRNA sense strand
ccaucauucuggucaacug

SEQ ID NO: 1464117 - RNA, 19 nt, Homo sapiens
  misc_RNA (1)...(19): siRNA sense strand
gaugccaugagccuaguga

SEQ ID NO: 1464118 - RNA, 19 nt, Homo sapiens
  misc_RNA (1)...(19): siRNA sense strand
caacugcgaugaugacuug

SEQ ID NO: 1464119 - RNA, 19 nt, Homo sapiens
  misc_RNA (1)...(19): siRNA sense strand
guaacucucuguccuggua

SEQ ID NO: 1464120 - RNA, 19 nt, Homo sapiens
  misc_RNA (1)...(19): siRNA sense strand
ggccagaacaugcugauga

SEQ ID NO: 1464121 - RNA, 19 nt, Homo sapiens
  misc_RNA (1)...(19): siRNA sense strand
gccagaacaugcugaugau

SEQ ID NO: 1464122 - RNA, 19 nt, Homo sapiens
  misc_RNA (1)...(19): siRNA sense strand
gagccagccuccagauggu

SEQ ID NO: 1464123 - RNA, 19 nt, Homo sapiens
  misc_RNA (1)...(19): siRNA sense strand
ccacgaugcugcagguacu

SEQ ID NO: 1464124 - RNA, 19 nt, Homo sapiens
  misc_RNA (1)...(19): siRNA sense strand
gccaugagccuagugaauc

SEQ ID NO: 1464125 - RNA, 19 nt, Homo sapiens
  misc_RNA (1)...(19): siRNA sense strand
ucacuggaccggaguaacu

SEQ ID NO: 1464126 - RNA, 19 nt, Homo sapiens
  misc_RNA (1)...(19): siRNA sense strand
ugaagaaggaugccaugag

SEQ ID NO: 1464127 - RNA, 19 nt, Homo sapiens
  misc_RNA (1)...(19): siRNA sense strand
ccaucauucuggucaacug

SEQ ID NO: 1464128 - RNA, 19 nt, Homo sapiens
  misc_RNA (1)...(19): siRNA sense strand
gaugccaugagccuaguga

SEQ ID NO: 1464129 - RNA, 19 nt, Homo sapiens
  misc_RNA (1)...(19): siRNA sense strand
gcaugacuguggccgagaa

SEQ ID NO: 1464130 - RNA, 19 nt, Homo sapiens
  misc_RNA (1)...(19): siRNA sense strand
ccagugguguggcccucua

SEQ ID NO: 1464131 - RNA, 19 nt, Homo sapiens
  misc_RNA (1)...(19): siRNA sense strand
guccugcccugccaacuuc

SEQ ID NO: 1464132 - RNA, 19 nt, Homo sapiens
  misc_RNA (1)...(19): siRNA sense strand
ccauacuggugguugaguu

SEQ ID NO: 1464133 - RNA, 19 nt, Homo sapiens
  misc_RNA (1)...(19): siRNA sense strand
cccgagcuuugcagacaua

SEQ ID NO: 1464134 - RNA, 19 nt, Homo sapiens
  misc_RNA (1)...(19): siRNA sense strand
cuggagcgcuuccucuuca

SEQ ID NO: 1464135 - RNA, 19 nt, Homo sapiens
  misc_RNA (1)...(19): siRNA sense strand
gcuccuaugugcccuacca

SEQ ID NO: 1464136 - RNA, 19 nt, Homo sapiens
  misc_RNA (1)...(19): siRNA sense strand
cccaagcacuggcgcuaug

SEQ ID NO: 1464137 - RNA, 19 nt, Homo sapiens
  misc_RNA (1)...(19): siRNA sense strand
cuacgcagcccaggcauga

SEQ ID NO: 1464138 - RNA, 19 nt, Homo sapiens
  misc_RNA (1)...(19): siRNA sense strand
ggcccauacuggugguuga

SEQ ID NO: 1464139 - RNA, 19 nt, Homo sapiens
  misc_RNA (1)...(19): siRNA sense strand
cccgugagcugagccaaug

SEQ ID NO: 1464140 - RNA, 19 nt, Homo sapiens
  misc_RNA (1)...(19): siRNA sense strand
ggacuuccuguggcccaua

SEQ ID NO: 1464141 - RNA, 19 nt, Homo sapiens
  misc_RNA (1)...(19): siRNA sense strand
cccgaggccugcaucaagu

SEQ ID NO: 1464142 - RNA, 19 nt, Homo sapiens
  misc_RNA (1)...(19): siRNA sense strand
ccucuacgccagcuccuau

SEQ ID NO: 1464143 - RNA, 19 nt, Homo sapiens
  misc_RNA (1)...(19): siRNA sense strand
gaaaugauccucacagauu

SEQ ID NO: 1464144 - RNA, 19 nt, Homo sapiens
  misc_RNA (1)...(19): siRNA sense strand
gcucagaccugcaagagaa

SEQ ID NO: 1464145 - RNA, 19 nt, Homo sapiens
  misc_RNA (1)...(19): siRNA sense strand
uaagacagagcacaaauua

SEQ ID NO: 1464146 - RNA, 19 nt, Homo sapiens
  misc_RNA (1)...(19): siRNA sense strand
caaaguaccuaagaagauu

SEQ ID NO: 1464147 - RNA, 19 nt, Homo sapiens
  misc_RNA (1)...(19): siRNA sense strand
gaaaucagcccauggagau

SEQ ID NO: 1464148 - RNA, 19 nt, Homo sapiens
  misc_RNA (1)...(19): siRNA sense strand
gcuaugguuucuaugguua

SEQ ID NO: 1464149 - RNA, 19 nt, Homo sapiens
  misc_RNA (1)...(19): siRNA sense strand
caagaacuuugccaugauu

SEQ ID NO: 1464150 - RNA, 19 nt, Homo sapiens
  misc_RNA (1)...(19): siRNA sense strand
gagaaaucaucguuacaga

SEQ ID NO: 1464151 - RNA, 19 nt, Homo sapiens
  misc_RNA (1)...(19): siRNA sense strand
ucaaacaguuccucgacua

SEQ ID NO: 1464152 - RNA, 19 nt, Homo sapiens
  misc_RNA (1)...(19): siRNA sense strand
ucacgaaguuaaagucuga

SEQ ID NO: 1464153 - RNA, 19 nt, Homo sapiens
  misc_RNA (1)...(19): siRNA sense strand
cagacaagcucccuggauu

SEQ ID NO: 1464154 - RNA, 19 nt, Homo sapiens
  misc_RNA (1)...(19): siRNA sense strand
ccaaaugaauccacauauc

SEQ ID NO: 1464155 - RNA, 19 nt, Homo sapiens
  misc_RNA (1)...(19): siRNA sense strand
gacagcaacuuucauaugg

SEQ ID NO: 1464156 - RNA, 19 nt, Homo sapiens
  misc_RNA (1)...(19): siRNA sense strand
gcucgccgcuguccaagaa

SEQ ID NO: 1464157 - RNA, 19 nt, Homo sapiens
  misc_RNA (1)...(19): siRNA sense strand
gaaaucaucguuacagaca

SEQ ID NO: 1464158 - RNA, 19 nt, Homo sapiens
  misc_RNA (1)...(19): siRNA sense strand
ggagaucgcuaagaacauc

SEQ ID NO: 1464159 - RNA, 19 nt, Homo sapiens
  misc_RNA (1)...(19): siRNA sense strand
gagcacaaauuagagauca

SEQ ID NO: 1464160 - RNA, 19 nt, Homo sapiens
  misc_RNA (1)...(19): siRNA sense strand
ucaaaguccuggguccuua

SEQ ID NO: 1464161 - RNA, 19 nt, Homo sapiens
  misc_RNA (1)...(19): siRNA sense strand
agacagagcacaaauuaga

SEQ ID NO: 1464162 - RNA, 19 nt, Homo sapiens
  misc_RNA (1)...(19): siRNA sense strand
gcguggagaucgcuaagaa

SEQ ID NO: 1464163 - RNA, 19 nt, Homo sapiens
  misc_RNA (1)...(19): siRNA sense strand
acacggagcgcaucuauga

SEQ ID NO: 1464164 - RNA, 19 nt, Homo sapiens
  misc_RNA (1)...(19): siRNA sense strand
ggcagaaccugacuuugug

SEQ ID NO: 1464165 - RNA, 19 nt, Homo sapiens
  misc_RNA (1)...(19): siRNA sense strand
gcaacuuucauauggauuu

SEQ ID NO: 1464166 - RNA, 19 nt, Homo sapiens
  misc_RNA (1)...(19): siRNA sense strand
ggaugcagcagaacuggua

SEQ ID NO: 1464167 - RNA, 19 nt, Homo sapiens
  misc_RNA (1)...(19): siRNA sense strand
gagaugacccucaaacagu

SEQ ID NO: 1464168 - RNA, 19 nt, Homo sapiens
  misc_RNA (1)...(19): siRNA sense strand
cagaaaaugucaaccagua

SEQ ID NO: 1464169 - RNA, 19 nt, Homo sapiens
  misc_RNA (1)...(19): siRNA sense strand
gaagaucaucccagccauu

SEQ ID NO: 1464170 - RNA, 19 nt, Homo sapiens
  misc_RNA (1)...(19): siRNA sense strand
ucagugcuaugguuucuau

SEQ ID NO: 1464171 - RNA, 19 nt, Homo sapiens
  misc_RNA (1)...(19): siRNA sense strand
ccaacggaauggccaagaa

SEQ ID NO: 1464172 - RNA, 19 nt, Homo sapiens
  misc_RNA (1)...(19): siRNA sense strand
gaagucaaaucugaaucga

SEQ ID NO: 1464173 - RNA, 19 nt, Homo sapiens
  misc_RNA (1)...(19): siRNA sense strand
caacuucuccgacuacauc

SEQ ID NO: 1464174 - RNA, 19 nt, Homo sapiens
  misc_RNA (1)...(19): siRNA sense strand
ugaggaggaugcagcagaa

SEQ ID NO: 1464175 - RNA, 19 nt, Homo sapiens
  misc_RNA (1)...(19): siRNA sense strand
ccacgucaccaguacuaua

SEQ ID NO: 1464176 - RNA, 19 nt, Homo sapiens
  misc_RNA (1)...(19): siRNA sense strand
ugacagagucguacaguuc

SEQ ID NO: 1464177 - RNA, 19 nt, Homo sapiens
  misc_RNA (1)...(19): siRNA sense strand
gggcagcucuucugugacu

SEQ ID NO: 1464178 - RNA, 19 nt, Homo sapiens
  misc_RNA (1)...(19): siRNA sense strand
aacaguuccucgacuauuu

SEQ ID NO: 1464179 - RNA, 19 nt, Homo sapiens
  misc_RNA (1)...(19): siRNA sense strand
caagaaugguuuccucaac

SEQ ID NO: 1464180 - RNA, 19 nt, Homo sapiens
  misc_RNA (1)...(19): siRNA sense strand
gcucuucugugacuuugga

SEQ ID NO: 1464181 - RNA, 19 nt, Homo sapiens
  misc_RNA (1)...(19): siRNA sense strand
ugaagcggcuccagacauc

SEQ ID NO: 1464182 - RNA, 19 nt, Homo sapiens
  misc_RNA (1)...(19): siRNA sense strand
gggaggaggacaucgguaa

SEQ ID NO: 1464183 - RNA, 19 nt, Homo sapiens
  misc_RNA (1)...(19): siRNA sense strand
ggacuuccuuagugguuuc

SEQ ID NO: 1464184 - RNA, 19 nt, Homo sapiens
  misc_RNA (1)...(19): siRNA sense strand
gccaaugccucuguugaug

SEQ ID NO: 1464185 - RNA, 19 nt, Homo sapiens
  misc_RNA (1)...(19): siRNA sense strand
aaaucugaaucgacaguuu

SEQ ID NO: 1464186 - RNA, 19 nt, Homo sapiens
  misc_RNA (1)...(19): siRNA sense strand
ggacaccauugagaaguca

SEQ ID NO: 1464187 - RNA, 19 nt, Homo sapiens
  misc_RNA (1)...(19): siRNA sense strand
ucaagaacuuugccaugau

SEQ ID NO: 1464188 - RNA, 19 nt, Homo sapiens
  misc_RNA (1)...(19): siRNA sense strand
ucacaaccguggcaucaag

SEQ ID NO: 1464189 - RNA, 19 nt, Homo sapiens
  misc_RNA (1)...(19): siRNA sense strand
gcagugaagcagacauaga

SEQ ID NO: 1464190 - RNA, 19 nt, Homo sapiens
  misc_RNA (1)...(19): siRNA sense strand
gcagaaaacuaugacauuc

SEQ ID NO: 1464191 - RNA, 19 nt, Homo sapiens
  misc_RNA (1)...(19): siRNA sense strand
caagcucccuggauucaag

SEQ ID NO: 1464192 - RNA, 19 nt, Homo sapiens
  misc_RNA (1)...(19): siRNA sense strand
ccaaugcccuggacaacgu

SEQ ID NO: 1464193 - RNA, 19 nt, Homo sapiens
  misc_RNA (1)...(19): siRNA sense strand
ggaaaugauccucacagau

SEQ ID NO: 1464194 - RNA, 19 nt, Homo sapiens
  misc_RNA (1)...(19): siRNA sense strand
ccuuauaccuuuagcaucu

SEQ ID NO: 1464195 - RNA, 19 nt, Homo sapiens
  misc_RNA (1)...(19): siRNA sense strand
ggagaugacccucaaacag

SEQ ID NO: 1464196 - RNA, 19 nt, Homo sapiens
  misc_RNA (1)...(19): siRNA sense strand
cacaagagcaagcugauug

SEQ ID NO: 1464197 - RNA, 19 nt, Homo sapiens
  misc_RNA (1)...(19): siRNA sense strand
ugacagcaacuuucauaug

SEQ ID NO: 1464198 - RNA, 19 nt, Homo sapiens
  misc_RNA (1)...(19): siRNA sense strand
ccauugacuuugagaagga

SEQ ID NO: 1464199 - RNA, 19 nt, Homo sapiens
  misc_RNA (1)...(19): siRNA sense strand
ccacagaccugggcugacu

SEQ ID NO: 1464200 - RNA, 19 nt, Homo sapiens
  misc_RNA (1)...(19): siRNA sense strand
ccacauauccgggugacaa

SEQ ID NO: 1464201 - RNA, 19 nt, Homo sapiens
  misc_RNA (1)...(19): siRNA sense strand
ccugggaugucacgaaguu

SEQ ID NO: 1464202 - RNA, 19 nt, Homo sapiens
  misc_RNA (1)...(19): siRNA sense strand
cucaagaacuuugccauga

SEQ ID NO: 1464203 - RNA, 19 nt, Homo sapiens
  misc_RNA (1)...(19): siRNA sense strand
uccggaagcuggcauaugu

SEQ ID NO: 1464204 - RNA, 19 nt, Homo sapiens
  misc_RNA (1)...(19): siRNA sense strand
ucaaaguaccuaagaagau

SEQ ID NO: 1464205 - RNA, 19 nt, Homo sapiens
  misc_RNA (1)...(19): siRNA sense strand
ucaaggaacgguuggauca

SEQ ID NO: 1464206 - RNA, 19 nt, Homo sapiens
  misc_RNA (1)...(19): siRNA sense strand
gcacaagagcaagcugauu

SEQ ID NO: 1464207 - RNA, 19 nt, Homo sapiens
  misc_RNA (1)...(19): siRNA sense strand
gcagcugugcgccaaauga

SEQ ID NO: 1464208 - RNA, 19 nt, Homo sapiens
  misc_RNA (1)...(19): siRNA sense strand
gaucuuuccucccaguucu

SEQ ID NO: 1464209 - RNA, 19 nt, Homo sapiens
  misc_RNA (1)...(19): siRNA sense strand
cagcaacuuucauauggau

SEQ ID NO: 1464210 - RNA, 19 nt, Homo sapiens
  misc_RNA (1)...(19): siRNA sense strand
ugcaguggcuauacuuuga

SEQ ID NO: 1464211 - RNA, 19 nt, Homo sapiens
  misc_RNA (1)...(19): siRNA sense strand
ggaaguucaugcccaucau

SEQ ID NO: 1464212 - RNA, 19 nt, Homo sapiens
  misc_RNA (1)...(19): siRNA sense strand
ggaggaggacaucgguaaa

SEQ ID NO: 1464213 - RNA, 19 nt, Homo sapiens
  misc_RNA (1)...(19): siRNA sense strand
gaugaugacagcaacuuuc

SEQ ID NO: 1464214 - RNA, 19 nt, Homo sapiens
  misc_RNA (1)...(19): siRNA sense strand
gcgagugggugaguucugu

SEQ ID NO: 1464215 - RNA, 19 nt, Homo sapiens
  misc_RNA (1)...(19): siRNA sense strand
gaucagccgaugacagaga

SEQ ID NO: 1464216 - RNA, 19 nt, Homo sapiens
  misc_RNA (1)...(19): siRNA sense strand
agaugacccucaaacaguu

SEQ ID NO: 1464217 - RNA, 19 nt, Homo sapiens
  misc_RNA (1)...(19): siRNA sense strand
agaaugguuuccucaacuu

SEQ ID NO: 1464218 - RNA, 19 nt, Homo sapiens
  misc_RNA (1)...(19): siRNA sense strand
caucgucagucaggucaaa

SEQ ID NO: 1464219 - RNA, 19 nt, Homo sapiens
  misc_RNA (1)...(19): siRNA sense strand
gcagcucuucugugacuuu

SEQ ID NO: 1464220 - RNA, 19 nt, Homo sapiens
  misc_RNA (1)...(19): siRNA sense strand
cggcgaggaugucgagguu

SEQ ID NO: 1464221 - RNA, 19 nt, Homo sapiens
  misc_RNA (1)...(19): siRNA sense strand
gcguguccaugcucuauuc

SEQ ID NO: 1464222 - RNA, 19 nt, Homo sapiens
  misc_RNA (1)...(19): siRNA sense strand
caacuuggcccugccuuuc

SEQ ID NO: 1464223 - RNA, 19 nt, Homo sapiens
  misc_RNA (1)...(19): siRNA sense strand
gagcgccaaugccucuguu

SEQ ID NO: 1464224 - RNA, 19 nt, Homo sapiens
  misc_RNA (1)...(19): siRNA sense strand
guggagaaaucaucguuac

SEQ ID NO: 1464225 - RNA, 19 nt, Homo sapiens
  misc_RNA (1)...(19): siRNA sense strand
gguggagaaaucaucguua

SEQ ID NO: 1464226 - RNA, 19 nt, Homo sapiens
  misc_RNA (1)...(19): siRNA sense strand
aagagaagcugggcaagca

SEQ ID NO: 1464227 - RNA, 19 nt, Homo sapiens
  misc_RNA (1)...(19): siRNA sense strand
aaaugauccucacagauuc

SEQ ID NO: 1464228 - RNA, 19 nt, Homo sapiens
  misc_RNA (1)...(19): siRNA sense strand
uugggcagcucuucuguga

SEQ ID NO: 1464229 - RNA, 19 nt, Homo sapiens
  misc_RNA (1)...(19): siRNA sense strand
ggaugaugacagcaacuuu

SEQ ID NO: 1464230 - RNA, 19 nt, Homo sapiens
  misc_RNA (1)...(19): siRNA sense strand
gcgucaagauccauguuuc

SEQ ID NO: 1464231 - RNA, 19 nt, Homo sapiens
  misc_RNA (1)...(19): siRNA sense strand
cacacccgcucaccuuuga

SEQ ID NO: 1464232 - RNA, 19 nt, Homo sapiens
  misc_RNA (1)...(19): siRNA sense strand
aaucaucguuacagacaug

SEQ ID NO: 1464233 - RNA, 19 nt, Homo sapiens
  misc_RNA (1)...(19): siRNA sense strand
ugggcaagcagaaguauuu

SEQ ID NO: 1464234 - RNA, 19 nt, Homo sapiens
  misc_RNA (1)...(19): siRNA sense strand
uggcagaaccugacuuugu

SEQ ID NO: 1464235 - RNA, 19 nt, Homo sapiens
  misc_RNA (1)...(19): siRNA sense strand
ggucaaaguaccuaagaag

SEQ ID NO: 1464236 - RNA, 19 nt, Homo sapiens
  misc_RNA (1)...(19): siRNA sense strand
gcucuauuccuucuucaug

SEQ ID NO: 1464237 - RNA, 19 nt, Homo sapiens
  misc_RNA (1)...(19): siRNA sense strand
accgacagcuugacuccua

SEQ ID NO: 1464238 - RNA, 19 nt, Homo sapiens
  misc_RNA (1)...(19): siRNA sense strand
caacuuucauauggauuuc

SEQ ID NO: 1464239 - RNA, 19 nt, Homo sapiens
  misc_RNA (1)...(19): siRNA sense strand
ccaaugccucuguugauga

SEQ ID NO: 1464240 - RNA, 19 nt, Homo sapiens
  misc_RNA (1)...(19): siRNA sense strand
ucuguacccugaagaacuu

SEQ ID NO: 1464241 - RNA, 19 nt, Homo sapiens
  misc_RNA (1)...(19): siRNA sense strand
ggagaaaucaucguuacag

SEQ ID NO: 1464242 - RNA, 19 nt, Homo sapiens
  misc_RNA (1)...(19): siRNA sense strand
ccagugggcugaucuuucc

SEQ ID NO: 1464243 - RNA, 19 nt, Homo sapiens
  misc_RNA (1)...(19): siRNA sense strand
gaaaugauccucacagauu

SEQ ID NO: 1464244 - RNA, 19 nt, Homo sapiens
  misc_RNA (1)...(19): siRNA sense strand
gcucagaccugcaagagaa

SEQ ID NO: 1464245 - RNA, 19 nt, Homo sapiens
  misc_RNA (1)...(19): siRNA sense strand
uaagacagagcacaaauua

SEQ ID NO: 1464246 - RNA, 19 nt, Homo sapiens
  misc_RNA (1)...(19): siRNA sense strand
caaaguaccuaagaagauu

SEQ ID NO: 1464247 - RNA, 19 nt, Homo sapiens
  misc_RNA (1)...(19): siRNA sense strand
gaaaucagcccauggagau

SEQ ID NO: 1464248 - RNA, 19 nt, Homo sapiens
  misc_RNA (1)...(19): siRNA sense strand
gcuaugguuucuaugguua

SEQ ID NO: 1464249 - RNA, 19 nt, Homo sapiens
  misc_RNA (1)...(19): siRNA sense strand
caagaacuuugccaugauu

SEQ ID NO: 1464250 - RNA, 19 nt, Homo sapiens
  misc_RNA (1)...(19): siRNA sense strand
gagaaaucaucguuacaga

SEQ ID NO: 1464251 - RNA, 19 nt, Homo sapiens
  misc_RNA (1)...(19): siRNA sense strand
ucaaacaguuccucgacua

SEQ ID NO: 1464252 - RNA, 19 nt, Homo sapiens
  misc_RNA (1)...(19): siRNA sense strand
ucacgaaguuaaagucuga

SEQ ID NO: 1464253 - RNA, 19 nt, Homo sapiens
  misc_RNA (1)...(19): siRNA sense strand
cagacaagcucccuggauu

SEQ ID NO: 1464254 - RNA, 19 nt, Homo sapiens
  misc_RNA (1)...(19): siRNA sense strand
ccaaaugaauccacauauc

SEQ ID NO: 1464255 - RNA, 19 nt, Homo sapiens
  misc_RNA (1)...(19): siRNA sense strand
gacagcaacuuucauaugg

SEQ ID NO: 1464256 - RNA, 19 nt, Homo sapiens
  misc_RNA (1)...(19): siRNA sense strand
gcucgccgcuguccaagaa

SEQ ID NO: 1464257 - RNA, 19 nt, Homo sapiens
  misc_RNA (1)...(19): siRNA sense strand
gaaaucaucguuacagaca

SEQ ID NO: 1464258 - RNA, 19 nt, Homo sapiens
  misc_RNA (1)...(19): siRNA sense strand
ggagaucgcuaagaacauc

SEQ ID NO: 1464259 - RNA, 19 nt, Homo sapiens
  misc_RNA (1)...(19): siRNA sense strand
gagcacaaauuagagauca

SEQ ID NO: 1464260 - RNA, 19 nt, Homo sapiens
  misc_RNA (1)...(19): siRNA sense strand
ucaaaguccuggguccuua

SEQ ID NO: 1464261 - RNA, 19 nt, Homo sapiens
  misc_RNA (1)...(19): siRNA sense strand
agacagagcacaaauuaga

SEQ ID NO: 1464262 - RNA, 19 nt, Homo sapiens
  misc_RNA (1)...(19): siRNA sense strand
gcguggagaucgcuaagaa

SEQ ID NO: 1464263 - RNA, 19 nt, Homo sapiens
  misc_RNA (1)...(19): siRNA sense strand
acacggagcgcaucuauga

SEQ ID NO: 1464264 - RNA, 19 nt, Homo sapiens
  misc_RNA (1)...(19): siRNA sense strand
ggcagaaccugacuuugug

SEQ ID NO: 1464265 - RNA, 19 nt, Homo sapiens
  misc_RNA (1)...(19): siRNA sense strand
gcaacuuucauauggauuu

SEQ ID NO: 1464266 - RNA, 19 nt, Homo sapiens
  misc_RNA (1)...(19): siRNA sense strand
ggaugcagcagaacuggua

SEQ ID NO: 1464267 - RNA, 19 nt, Homo sapiens
  misc_RNA (1)...(19): siRNA sense strand
gagaugacccucaaacagu

SEQ ID NO: 1464268 - RNA, 19 nt, Homo sapiens
  misc_RNA (1)...(19): siRNA sense strand
cagaaaaugucaaccagua

SEQ ID NO: 1464269 - RNA, 19 nt, Homo sapiens
  misc_RNA (1)...(19): siRNA sense strand
gaagaucaucccagccauu

SEQ ID NO: 1464270 - RNA, 19 nt, Homo sapiens
  misc_RNA (1)...(19): siRNA sense strand
ucagugcuaugguuucuau

SEQ ID NO: 1464271 - RNA, 19 nt, Homo sapiens
  misc_RNA (1)...(19): siRNA sense strand
ccaacggaauggccaagaa

SEQ ID NO: 1464272 - RNA, 19 nt, Homo sapiens
  misc_RNA (1)...(19): siRNA sense strand
gaagucaaaucugaaucga

SEQ ID NO: 1464273 - RNA, 19 nt, Homo sapiens
  misc_RNA (1)...(19): siRNA sense strand
caacuucuccgacuacauc

SEQ ID NO: 1464274 - RNA, 19 nt, Homo sapiens
  misc_RNA (1)...(19): siRNA sense strand
ugaggaggaugcagcagaa

SEQ ID NO: 1464275 - RNA, 19 nt, Homo sapiens
  misc_RNA (1)...(19): siRNA sense strand
ccacgucaccaguacuaua

SEQ ID NO: 1464276 - RNA, 19 nt, Homo sapiens
  misc_RNA (1)...(19): siRNA sense strand
ugacagagucguacaguuc

SEQ ID NO: 1464277 - RNA, 19 nt, Homo sapiens
  misc_RNA (1)...(19): siRNA sense strand
gggcagcucuucugugacu

SEQ ID NO: 1464278 - RNA, 19 nt, Homo sapiens
  misc_RNA (1)...(19): siRNA sense strand
aacaguuccucgacuauuu

SEQ ID NO: 1464279 - RNA, 19 nt, Homo sapiens
  misc_RNA (1)...(19): siRNA sense strand
caagaaugguuuccucaac

SEQ ID NO: 1464280 - RNA, 19 nt, Homo sapiens
  misc_RNA (1)...(19): siRNA sense strand
gcucuucugugacuuugga

SEQ ID NO: 1464281 - RNA, 19 nt, Homo sapiens
  misc_RNA (1)...(19): siRNA sense strand
ugaagcggcuccagacauc

SEQ ID NO: 1464282 - RNA, 19 nt, Homo sapiens
  misc_RNA (1)...(19): siRNA sense strand
gggaggaggacaucgguaa

SEQ ID NO: 1464283 - RNA, 19 nt, Homo sapiens
  misc_RNA (1)...(19): siRNA sense strand
ggacuuccuuagugguuuc

SEQ ID NO: 1464284 - RNA, 19 nt, Homo sapiens
  misc_RNA (1)...(19): siRNA sense strand
gccaaugccucuguugaug

SEQ ID NO: 1464285 - RNA, 19 nt, Homo sapiens
  misc_RNA (1)...(19): siRNA sense strand
aaaucugaaucgacaguuu

SEQ ID NO: 1464286 - RNA, 19 nt, Homo sapiens
  misc_RNA (1)...(19): siRNA sense strand
ggacaccauugagaaguca

SEQ ID NO: 1464287 - RNA, 19 nt, Homo sapiens
  misc_RNA (1)...(19): siRNA sense strand
ucaagaacuuugccaugau

SEQ ID NO: 1464288 - RNA, 19 nt, Homo sapiens
  misc_RNA (1)...(19): siRNA sense strand
ucacaaccguggcaucaag

SEQ ID NO: 1464289 - RNA, 19 nt, Homo sapiens
  misc_RNA (1)...(19): siRNA sense strand
gcagugaagcagacauaga

SEQ ID NO: 1464290 - RNA, 19 nt, Homo sapiens
  misc_RNA (1)...(19): siRNA sense strand
gcagaaaacuaugacauuc

SEQ ID NO: 1464291 - RNA, 19 nt, Homo sapiens
  misc_RNA (1)...(19): siRNA sense strand
caagcucccuggauucaag

SEQ ID NO: 1464292 - RNA, 19 nt, Homo sapiens
  misc_RNA (1)...(19): siRNA sense strand
ccaaugcccuggacaacgu

SEQ ID NO: 1464293 - RNA, 19 nt, Homo sapiens
  misc_RNA (1)...(19): siRNA sense strand
ggaaaugauccucacagau

SEQ ID NO: 1464294 - RNA, 19 nt, Homo sapiens
  misc_RNA (1)...(19): siRNA sense strand
ccuuauaccuuuagcaucu

SEQ ID NO: 1464295 - RNA, 19 nt, Homo sapiens
  misc_RNA (1)...(19): siRNA sense strand
ggagaugacccucaaacag

SEQ ID NO: 1464296 - RNA, 19 nt, Homo sapiens
  misc_RNA (1)...(19): siRNA sense strand
cacaagagcaagcugauug

SEQ ID NO: 1464297 - RNA, 19 nt, Homo sapiens
  misc_RNA (1)...(19): siRNA sense strand
ugacagcaacuuucauaug

SEQ ID NO: 1464298 - RNA, 19 nt, Homo sapiens
  misc_RNA (1)...(19): siRNA sense strand
ccauugacuuugagaagga

SEQ ID NO: 1464299 - RNA, 19 nt, Homo sapiens
  misc_RNA (1)...(19): siRNA sense strand
ccacagaccugggcugacu

SEQ ID NO: 1464300 - RNA, 19 nt, Homo sapiens
  misc_RNA (1)...(19): siRNA sense strand
ccacauauccgggugacaa

SEQ ID NO: 1464301 - RNA, 19 nt, Homo sapiens
  misc_RNA (1)...(19): siRNA sense strand
ccugggaugucacgaaguu

SEQ ID NO: 1464302 - RNA, 19 nt, Homo sapiens
  misc_RNA (1)...(19): siRNA sense strand
cucaagaacuuugccauga

SEQ ID NO: 1464303 - RNA, 19 nt, Homo sapiens
  misc_RNA (1)...(19): siRNA sense strand
uccggaagcuggcauaugu

SEQ ID NO: 1464304 - RNA, 19 nt, Homo sapiens
  misc_RNA (1)...(19): siRNA sense strand
ucaaaguaccuaagaagau

SEQ ID NO: 1464305 - RNA, 19 nt, Homo sapiens
  misc_RNA (1)...(19): siRNA sense strand
ucaaggaacgguuggauca

SEQ ID NO: 1464306 - RNA, 19 nt, Homo sapiens
  misc_RNA (1)...(19): siRNA sense strand
gcacaagagcaagcugauu

SEQ ID NO: 1464307 - RNA, 19 nt, Homo sapiens
  misc_RNA (1)...(19): siRNA sense strand
gcagcugugcgccaaauga

SEQ ID NO: 1464308 - RNA, 19 nt, Homo sapiens
  misc_RNA (1)...(19): siRNA sense strand
gaucuuuccucccaguucu

SEQ ID NO: 1464309 - RNA, 19 nt, Homo sapiens
  misc_RNA (1)...(19): siRNA sense strand
cagcaacuuucauauggau

SEQ ID NO: 1464310 - RNA, 19 nt, Homo sapiens
  misc_RNA (1)...(19): siRNA sense strand
ugcaguggcuauacuuuga

SEQ ID NO: 1464311 - RNA, 19 nt, Homo sapiens
  misc_RNA (1)...(19): siRNA sense strand
ggaaguucaugcccaucau

SEQ ID NO: 1464312 - RNA, 19 nt, Homo sapiens
  misc_RNA (1)...(19): siRNA sense strand
ggaggaggacaucgguaaa

SEQ ID NO: 1464313 - RNA, 19 nt, Homo sapiens
  misc_RNA (1)...(19): siRNA sense strand
gaugaugacagcaacuuuc

SEQ ID NO: 1464314 - RNA, 19 nt, Homo sapiens
  misc_RNA (1)...(19): siRNA sense strand
gcgagugggugaguucugu

SEQ ID NO: 1464315 - RNA, 19 nt, Homo sapiens
  misc_RNA (1)...(19): siRNA sense strand
gaucagccgaugacagaga

SEQ ID NO: 1464316 - RNA, 19 nt, Homo sapiens
  misc_RNA (1)...(19): siRNA sense strand
agaugacccucaaacaguu

SEQ ID NO: 1464317 - RNA, 19 nt, Homo sapiens
  misc_RNA (1)...(19): siRNA sense strand
agaaugguuuccucaacuu

SEQ ID NO: 1464318 - RNA, 19 nt, Homo sapiens
  misc_RNA (1)...(19): siRNA sense strand
caucgucagucaggucaaa

SEQ ID NO: 1464319 - RNA, 19 nt, Homo sapiens
  misc_RNA (1)...(19): siRNA sense strand
gcagcucuucugugacuuu

SEQ ID NO: 1464320 - RNA, 19 nt, Homo sapiens
  misc_RNA (1)...(19): siRNA sense strand
cggcgaggaugucgagguu

SEQ ID NO: 1464321 - RNA, 19 nt, Homo sapiens
  misc_RNA (1)...(19): siRNA sense strand
gcguguccaugcucuauuc

SEQ ID NO: 1464322 - RNA, 19 nt, Homo sapiens
  misc_RNA (1)...(19): siRNA sense strand
caacuuggcccugccuuuc

SEQ ID NO: 1464323 - RNA, 19 nt, Homo sapiens
  misc_RNA (1)...(19): siRNA sense strand
gagcgccaaugccucuguu

SEQ ID NO: 1464324 - RNA, 19 nt, Homo sapiens
  misc_RNA (1)...(19): siRNA sense strand
guggagaaaucaucguuac

SEQ ID NO: 1464325 - RNA, 19 nt, Homo sapiens
  misc_RNA (1)...(19): siRNA sense strand
gguggagaaaucaucguua

SEQ ID NO: 1464326 - RNA, 19 nt, Homo sapiens
  misc_RNA (1)...(19): siRNA sense strand
aagagaagcugggcaagca

SEQ ID NO: 1464327 - RNA, 19 nt, Homo sapiens
  misc_RNA (1)...(19): siRNA sense strand
aaaugauccucacagauuc

SEQ ID NO: 1464328 - RNA, 19 nt, Homo sapiens
  misc_RNA (1)...(19): siRNA sense strand
uugggcagcucuucuguga

SEQ ID NO: 1464329 - RNA, 19 nt, Homo sapiens
  misc_RNA (1)...(19): siRNA sense strand
ggaugaugacagcaacuuu

SEQ ID NO: 1464330 - RNA, 19 nt, Homo sapiens
  misc_RNA (1)...(19): siRNA sense strand
gcgucaagauccauguuuc

SEQ ID NO: 1464331 - RNA, 19 nt, Homo sapiens
  misc_RNA (1)...(19): siRNA sense strand
cacacccgcucaccuuuga

SEQ ID NO: 1464332 - RNA, 19 nt, Homo sapiens
  misc_RNA (1)...(19): siRNA sense strand
aaucaucguuacagacaug

SEQ ID NO: 1464333 - RNA, 19 nt, Homo sapiens
  misc_RNA (1)...(19): siRNA sense strand
ugggcaagcagaaguauuu

SEQ ID NO: 1464334 - RNA, 19 nt, Homo sapiens
  misc_RNA (1)...(19): siRNA sense strand
uggcagaaccugacuuugu

SEQ ID NO: 1464335 - RNA, 19 nt, Homo sapiens
  misc_RNA (1)...(19): siRNA sense strand
ggucaaaguaccuaagaag

SEQ ID NO: 1464336 - RNA, 19 nt, Homo sapiens
  misc_RNA (1)...(19): siRNA sense strand
gcucuauuccuucuucaug

SEQ ID NO: 1464337 - RNA, 19 nt, Homo sapiens
  misc_RNA (1)...(19): siRNA sense strand
accgacagcuugacuccua

SEQ ID NO: 1464338 - RNA, 19 nt, Homo sapiens
  misc_RNA (1)...(19): siRNA sense strand
caacuuucauauggauuuc

SEQ ID NO: 1464339 - RNA, 19 nt, Homo sapiens
  misc_RNA (1)...(19): siRNA sense strand
ccaaugccucuguugauga

SEQ ID NO: 1464340 - RNA, 19 nt, Homo sapiens
  misc_RNA (1)...(19): siRNA sense strand
ucuguacccugaagaacuu

SEQ ID NO: 1464341 - RNA, 19 nt, Homo sapiens
  misc_RNA (1)...(19): siRNA sense strand
ggagaaaucaucguuacag

SEQ ID NO: 1464342 - RNA, 19 nt, Homo sapiens
  misc_RNA (1)...(19): siRNA sense strand
ccagugggcugaucuuucc

SEQ ID NO: 1464343 - RNA, 19 nt, Homo sapiens
  misc_RNA (1)...(19): siRNA sense strand
caaauuauccugacucaua

SEQ ID NO: 1464344 - RNA, 19 nt, Homo sapiens
  misc_RNA (1)...(19): siRNA sense strand
gaauagaguugaccuuuga

SEQ ID NO: 1464345 - RNA, 19 nt, Homo sapiens
  misc_RNA (1)...(19): siRNA sense strand
gaaaagcccuccauuaauu

SEQ ID NO: 1464346 - RNA, 19 nt, Homo sapiens
  misc_RNA (1)...(19): siRNA sense strand
ggaagcaguucuauugaaa

SEQ ID NO: 1464347 - RNA, 19 nt, Homo sapiens
  misc_RNA (1)...(19): siRNA sense strand
gagauucccugugaaauuu

SEQ ID NO: 1464348 - RNA, 19 nt, Homo sapiens
  misc_RNA (1)...(19): siRNA sense strand
gauugcaucuggaccauua

SEQ ID NO: 1464349 - RNA, 19 nt, Homo sapiens
  misc_RNA (1)...(19): siRNA sense strand
ccaaugauguaaugcuuaa

SEQ ID NO: 1464350 - RNA, 19 nt, Homo sapiens
  misc_RNA (1)...(19): siRNA sense strand
ggacugggauuucgagcaa

SEQ ID NO: 1464351 - RNA, 19 nt, Homo sapiens
  misc_RNA (1)...(19): siRNA sense strand
gauggaagcaguucuauug

SEQ ID NO: 1464352 - RNA, 19 nt, Homo sapiens
  misc_RNA (1)...(19): siRNA sense strand
ucaaaugaaugcaagagaa

SEQ ID NO: 1464353 - RNA, 19 nt, Homo sapiens
  misc_RNA (1)...(19): siRNA sense strand
ggauuaaguuuaguucuga

SEQ ID NO: 1464354 - RNA, 19 nt, Homo sapiens
  misc_RNA (1)...(19): siRNA sense strand
ggagauucccugugaaauu

SEQ ID NO: 1464355 - RNA, 19 nt, Homo sapiens
  misc_RNA (1)...(19): siRNA sense strand
guuccuagauuaucaaaug

SEQ ID NO: 1464356 - RNA, 19 nt, Homo sapiens
  misc_RNA (1)...(19): siRNA sense strand
ggagauucauguggauuaa

SEQ ID NO: 1464357 - RNA, 19 nt, Homo sapiens
  misc_RNA (1)...(19): siRNA sense strand
gcagcacuguggccaauga

SEQ ID NO: 1464358 - RNA, 19 nt, Homo sapiens
  misc_RNA (1)...(19): siRNA sense strand
gcacaaccacagccaauga

SEQ ID NO: 1464359 - RNA, 19 nt, Homo sapiens
  misc_RNA (1)...(19): siRNA sense strand
aaacuucguugcagucuau

SEQ ID NO: 1464360 - RNA, 19 nt, Homo sapiens
  misc_RNA (1)...(19): siRNA sense strand
cggaagaauuggacaacua

SEQ ID NO: 1464361 - RNA, 19 nt, Homo sapiens
  misc_RNA (1)...(19): siRNA sense strand
gaccuuugaugaacauuau

SEQ ID NO: 1464362 - RNA, 19 nt, Homo sapiens
  misc_RNA (1)...(19): siRNA sense strand
gaaacuucguugcagucua

SEQ ID NO: 1464363 - RNA, 19 nt, Homo sapiens
  misc_RNA (1)...(19): siRNA sense strand
gcacaagcauccauaucca

SEQ ID NO: 1464364 - RNA, 19 nt, Homo sapiens
  misc_RNA (1)...(19): siRNA sense strand
uauuugagguuccuagauu

SEQ ID NO: 1464365 - RNA, 19 nt, Homo sapiens
  misc_RNA (1)...(19): siRNA sense strand
ccauauccauugacuucua

SEQ ID NO: 1464366 - RNA, 19 nt, Homo sapiens
  misc_RNA (1)...(19): siRNA sense strand
uggaggagauucccuguga

SEQ ID NO: 1464367 - RNA, 19 nt, Homo sapiens
  misc_RNA (1)...(19): siRNA sense strand
uaauagcaccuucaagaaa

SEQ ID NO: 1464368 - RNA, 19 nt, Homo sapiens
  misc_RNA (1)...(19): siRNA sense strand
aaauggagcacucaaauga

SEQ ID NO: 1464369 - RNA, 19 nt, Homo sapiens
  misc_RNA (1)...(19): siRNA sense strand
caaaugaaugcaagagaaa

SEQ ID NO: 1464370 - RNA, 19 nt, Homo sapiens
  misc_RNA (1)...(19): siRNA sense strand
cucgggagcugauggaaua

SEQ ID NO: 1464371 - RNA, 19 nt, Homo sapiens
  misc_RNA (1)...(19): siRNA sense strand
gggagauucauguggauua

SEQ ID NO: 1464372 - RNA, 19 nt, Homo sapiens
  misc_RNA (1)...(19): siRNA sense strand
gaagguagucggcuuagca

SEQ ID NO: 1464373 - RNA, 19 nt, Homo sapiens
  misc_RNA (1)...(19): siRNA sense strand
gaugaagguagucggcuua

SEQ ID NO: 1464374 - RNA, 19 nt, Homo sapiens
  misc_RNA (1)...(19): siRNA sense strand
ggaagcugcuccacgucaa

SEQ ID NO: 1464375 - RNA, 19 nt, Homo sapiens
  misc_RNA (1)...(19): siRNA sense strand
cauauccauugacuucuaa

SEQ ID NO: 1464376 - RNA, 19 nt, Homo sapiens
  misc_RNA (1)...(19): siRNA sense strand
gaggagauucccugugaaa

SEQ ID NO: 1464377 - RNA, 19 nt, Homo sapiens
  misc_RNA (1)...(19): siRNA sense strand
guaguuacacuuucaaaca

SEQ ID NO: 1464378 - RNA, 19 nt, Homo sapiens
  misc_RNA (1)...(19): siRNA sense strand
uaagacucauggaacaauu

SEQ ID NO: 1464379 - RNA, 19 nt, Homo sapiens
  misc_RNA (1)...(19): siRNA sense strand
agaauagaguugaccuuug

SEQ ID NO: 1464380 - RNA, 19 nt, Homo sapiens
  misc_RNA (1)...(19): siRNA sense strand
guaaugguguccaaaauug

SEQ ID NO: 1464381 - RNA, 19 nt, Homo sapiens
  misc_RNA (1)...(19): siRNA sense strand
gaauagugcgcucuaguca

SEQ ID NO: 1464382 - RNA, 19 nt, Homo sapiens
  misc_RNA (1)...(19): siRNA sense strand
agacuuuacuuaccuagga

SEQ ID NO: 1464383 - RNA, 19 nt, Homo sapiens
  misc_RNA (1)...(19): siRNA sense strand
gcucuuuacuuccuuugug

SEQ ID NO: 1464384 - RNA, 19 nt, Homo sapiens
  misc_RNA (1)...(19): siRNA sense strand
gcaacaugugcaucaauaa

SEQ ID NO: 1464385 - RNA, 19 nt, Homo sapiens
  misc_RNA (1)...(19): siRNA sense strand
gugaaaagcccuccauuaa

SEQ ID NO: 1464386 - RNA, 19 nt, Homo sapiens
  misc_RNA (1)...(19): siRNA sense strand
cgaaaugacuuugcacaac

SEQ ID NO: 1464387 - RNA, 19 nt, Homo sapiens
  misc_RNA (1)...(19): siRNA sense strand
caacaugugcaucaauaau

SEQ ID NO: 1464388 - RNA, 19 nt, Homo sapiens
  misc_RNA (1)...(19): siRNA sense strand
gcaacccaguguggcauuu

SEQ ID NO: 1464389 - RNA, 19 nt, Homo sapiens
  misc_RNA (1)...(19): siRNA sense strand
ccucaaaguguuguuaaua

SEQ ID NO: 1464390 - RNA, 19 nt, Homo sapiens
  misc_RNA (1)...(19): siRNA sense strand
ugguuucucuccucuuaua

SEQ ID NO: 1464391 - RNA, 19 nt, Homo sapiens
  misc_RNA (1)...(19): siRNA sense strand
ggacaacuaccagaagaug

SEQ ID NO: 1464392 - RNA, 19 nt, Homo sapiens
  misc_RNA (1)...(19): siRNA sense strand
agcaacaugugcaucaaua

SEQ ID NO: 1464393 - RNA, 19 nt, Homo sapiens
  misc_RNA (1)...(19): siRNA sense strand
ucuuauagaucguuacugu

SEQ ID NO: 1464394 - RNA, 19 nt, Homo sapiens
  misc_RNA (1)...(19): siRNA sense strand
ucauguggauuaaguuuag

SEQ ID NO: 1464395 - RNA, 19 nt, Homo sapiens
  misc_RNA (1)...(19): siRNA sense strand
ggaggagauucccugugaa

SEQ ID NO: 1464396 - RNA, 19 nt, Homo sapiens
  misc_RNA (1)...(19): siRNA sense strand
uguuugauccuccucauua

SEQ ID NO: 1464397 - RNA, 19 nt, Homo sapiens
  misc_RNA (1)...(19): siRNA sense strand
gagccucccugcacaagca

SEQ ID NO: 1464398 - RNA, 19 nt, Homo sapiens
  misc_RNA (1)...(19): siRNA sense strand
guagucggcuuagcagguu

SEQ ID NO: 1464399 - RNA, 19 nt, Homo sapiens
  misc_RNA (1)...(19): siRNA sense strand
uggaagcaguucuauugaa

SEQ ID NO: 1464400 - RNA, 19 nt, Homo sapiens
  misc_RNA (1)...(19): siRNA sense strand
caaauggagcacucaaaug

SEQ ID NO: 1464401 - RNA, 19 nt, Homo sapiens
  misc_RNA (1)...(19): siRNA sense strand
aagcauccauauccauuga

SEQ ID NO: 1464402 - RNA, 19 nt, Homo sapiens
  misc_RNA (1)...(19): siRNA sense strand
gcacaagcagcacuuucuu

SEQ ID NO: 1464403 - RNA, 19 nt, Homo sapiens
  misc_RNA (1)...(19): siRNA sense strand
ggccaaugauguaaugcuu

SEQ ID NO: 1464404 - RNA, 19 nt, Homo sapiens
  misc_RNA (1)...(19): siRNA sense strand
caagagaaacuucguugca

SEQ ID NO: 1464405 - RNA, 19 nt, Homo sapiens
  misc_RNA (1)...(19): siRNA sense strand
agacuugucggaagaauug

SEQ ID NO: 1464406 - RNA, 19 nt, Homo sapiens
  misc_RNA (1)...(19): siRNA sense strand
gugcauacccuugggauga

SEQ ID NO: 1464407 - RNA, 19 nt, Homo sapiens
  misc_RNA (1)...(19): siRNA sense strand
gcacuguggccaaugaugu

SEQ ID NO: 1464408 - RNA, 19 nt, Homo sapiens
  misc_RNA (1)...(19): siRNA sense strand
ggaauagugcgcucuaguc

SEQ ID NO: 1464409 - RNA, 19 nt, Homo sapiens
  misc_RNA (1)...(19): siRNA sense strand
gcucgguccucaaaguguu

SEQ ID NO: 1464410 - RNA, 19 nt, Homo sapiens
  misc_RNA (1)...(19): siRNA sense strand
uuugguuucucuccucuua

SEQ ID NO: 1464411 - RNA, 19 nt, Homo sapiens
  misc_RNA (1)...(19): siRNA sense strand
ucaaauggagcacucaaau

SEQ ID NO: 1464412 - RNA, 19 nt, Homo sapiens
  misc_RNA (1)...(19): siRNA sense strand
ugagguuccuagauuauca

SEQ ID NO: 1464413 - RNA, 19 nt, Homo sapiens
  misc_RNA (1)...(19): siRNA sense strand
gccaaauuauccugacuca

SEQ ID NO: 1464414 - RNA, 19 nt, Homo sapiens
  misc_RNA (1)...(19): siRNA sense strand
cuagucagguagaacaaga

SEQ ID NO: 1464415 - RNA, 19 nt, Homo sapiens
  misc_RNA (1)...(19): siRNA sense strand
uuuaauagcaccuucaaga

SEQ ID NO: 1464416 - RNA, 19 nt, Homo sapiens
  misc_RNA (1)...(19): siRNA sense strand
acaugugcaucaauaauuc

SEQ ID NO: 1464417 - RNA, 19 nt, Homo sapiens
  misc_RNA (1)...(19): siRNA sense strand
caaacaaggaguguaucua

SEQ ID NO: 1464418 - RNA, 19 nt, Homo sapiens
  misc_RNA (1)...(19): siRNA sense strand
uauuccagauccagacuuu

SEQ ID NO: 1464419 - RNA, 19 nt, Homo sapiens
  misc_RNA (1)...(19): siRNA sense strand
gccaaugauguaaugcuua

SEQ ID NO: 1464420 - RNA, 19 nt, Homo sapiens
  misc_RNA (1)...(19): siRNA sense strand
cagauccagacuuuacuua

SEQ ID NO: 1464421 - RNA, 19 nt, Homo sapiens
  misc_RNA (1)...(19): siRNA sense strand
ggaagaauuggacaacuac

SEQ ID NO: 1464422 - RNA, 19 nt, Homo sapiens
  misc_RNA (1)...(19): siRNA sense strand
uggcagacuugucggaaga

SEQ ID NO: 1464423 - RNA, 19 nt, Homo sapiens
  misc_RNA (1)...(19): siRNA sense strand
caagugaaacagccucgaa

SEQ ID NO: 1464424 - RNA, 19 nt, Homo sapiens
  misc_RNA (1)...(19): siRNA sense strand
gcucugcucgguccucaaa

SEQ ID NO: 1464425 - RNA, 19 nt, Homo sapiens
  misc_RNA (1)...(19): siRNA sense strand
cggcuuagcagguuucgaa

SEQ ID NO: 1464426 - RNA, 19 nt, Homo sapiens
  misc_RNA (1)...(19): siRNA sense strand
caacagggagauucaugug

SEQ ID NO: 1464427 - RNA, 19 nt, Homo sapiens
  misc_RNA (1)...(19): siRNA sense strand
cgaaugcucuuuacuuccu

SEQ ID NO: 1464428 - RNA, 19 nt, Homo sapiens
  misc_RNA (1)...(19): siRNA sense strand
aaacaaggaguguaucuac

SEQ ID NO: 1464429 - RNA, 19 nt, Homo sapiens
  misc_RNA (1)...(19): siRNA sense strand
gaagcugcuccacgucaaa

SEQ ID NO: 1464430 - RNA, 19 nt, Homo sapiens
  misc_RNA (1)...(19): siRNA sense strand
gggagcugauggaauagug

SEQ ID NO: 1464431 - RNA, 19 nt, Homo sapiens
  misc_RNA (1)...(19): siRNA sense strand
uggauuaaguuuaguucug

SEQ ID NO: 1464432 - RNA, 19 nt, Homo sapiens
  misc_RNA (1)...(19): siRNA sense strand
caagauggacaaaauauug

SEQ ID NO: 1464433 - RNA, 19 nt, Homo sapiens
  misc_RNA (1)...(19): siRNA sense strand
gaguugaccuuugaugaac

SEQ ID NO: 1464434 - RNA, 19 nt, Homo sapiens
  misc_RNA (1)...(19): siRNA sense strand
aacaggaauuggagugauu

SEQ ID NO: 1464435 - RNA, 19 nt, Homo sapiens
  misc_RNA (1)...(19): siRNA sense strand
ugacucauauccaccaaac

SEQ ID NO: 1464436 - RNA, 19 nt, Homo sapiens
  misc_RNA (1)...(19): siRNA sense strand
uuaauagcaccuucaagaa

SEQ ID NO: 1464437 - RNA, 19 nt, Homo sapiens
  misc_RNA (1)...(19): siRNA sense strand
ucacuaagggacaaagaga

SEQ ID NO: 1464438 - RNA, 19 nt, Homo sapiens
  misc_RNA (1)...(19): siRNA sense strand
gcauacccuugggaugaaa

SEQ ID NO: 1464439 - RNA, 19 nt, Homo sapiens
  misc_RNA (1)...(19): siRNA sense strand
aagaauagaguugaccuuu

SEQ ID NO: 1464440 - RNA, 19 nt, Homo sapiens
  misc_RNA (1)...(19): siRNA sense strand
ucauuugagugucgguuug

SEQ ID NO: 1464441 - RNA, 19 nt, Homo sapiens
  misc_RNA (1)...(19): siRNA sense strand
gauucccugugaaauuuau

SEQ ID NO: 1464442 - RNA, 19 nt, Homo sapiens
  misc_RNA (1)...(19): siRNA sense strand
aaacaggaauuggagugau

SEQ ID NO: 1464443 - RNA, 19 nt, Homo sapiens
  misc_RNA (1)...(19): siRNA sense strand
gaaagugacugaagagcuu

SEQ ID NO: 1464444 - RNA, 19 nt, Homo sapiens
  misc_RNA (1)...(19): siRNA sense strand
ggaagaaagugacugaaga

SEQ ID NO: 1464445 - RNA, 19 nt, Homo sapiens
  misc_RNA (1)...(19): siRNA sense strand
gaagagauuucacccaaca

SEQ ID NO: 1464446 - RNA, 19 nt, Homo sapiens
  misc_RNA (1)...(19): siRNA sense strand
uaaaggaccugccugaugu

SEQ ID NO: 1464447 - RNA, 19 nt, Homo sapiens
  misc_RNA (1)...(19): siRNA sense strand
caacggcaaucaagcguaa

SEQ ID NO: 1464448 - RNA, 19 nt, Homo sapiens
  misc_RNA (1)...(19): siRNA sense strand
aaacgacgcucaucaaaca

SEQ ID NO: 1464449 - RNA, 19 nt, Homo sapiens
  misc_RNA (1)...(19): siRNA sense strand
agacaaagccuuccagaaa

SEQ ID NO: 1464450 - RNA, 19 nt, Homo sapiens
  misc_RNA (1)...(19): siRNA sense strand
gaaggcaaacaaagaauuu

SEQ ID NO: 1464451 - RNA, 19 nt, Homo sapiens
  misc_RNA (1)...(19): siRNA sense strand
gcgaagcccuuguccugua

SEQ ID NO: 1464452 - RNA, 19 nt, Homo sapiens
  misc_RNA (1)...(19): siRNA sense strand
uuacacagcuuaccucuca

SEQ ID NO: 1464453 - RNA, 19 nt, Homo sapiens
  misc_RNA (1)...(19): siRNA sense strand
acagagagauuauauccuu

SEQ ID NO: 1464454 - RNA, 19 nt, Homo sapiens
  misc_RNA (1)...(19): siRNA sense strand
gaucagaaacagagagauu

SEQ ID NO: 1464455 - RNA, 19 nt, Homo sapiens
  misc_RNA (1)...(19): siRNA sense strand
gcaagccuuuguucuuuga

SEQ ID NO: 1464456 - RNA, 19 nt, Homo sapiens
  misc_RNA (1)...(19): siRNA sense strand
gaucgaaggcaaacaaaga

SEQ ID NO: 1464457 - RNA, 19 nt, Homo sapiens
  misc_RNA (1)...(19): siRNA sense strand
gacaucaucuuacagaauc

SEQ ID NO: 1464458 - RNA, 19 nt, Homo sapiens
  misc_RNA (1)...(19): siRNA sense strand
uauuaggacuggcugauaa

SEQ ID NO: 1464459 - RNA, 19 nt, Homo sapiens
  misc_RNA (1)...(19): siRNA sense strand
gcaaacgacgcucaucaaa

SEQ ID NO: 1464460 - RNA, 19 nt, Homo sapiens
  misc_RNA (1)...(19): siRNA sense strand
ggaccugccugaugugcaa

SEQ ID NO: 1464461 - RNA, 19 nt, Homo sapiens
  misc_RNA (1)...(19): siRNA sense strand
gacaaagccuuccagaaag

SEQ ID NO: 1464462 - RNA, 19 nt, Homo sapiens
  misc_RNA (1)...(19): siRNA sense strand
gcaaaacuaucuaugagaa

SEQ ID NO: 1464463 - RNA, 19 nt, Homo sapiens
  misc_RNA (1)...(19): siRNA sense strand
ugcaagagcucaucacuca

SEQ ID NO: 1464464 - RNA, 19 nt, Homo sapiens
  misc_RNA (1)...(19): siRNA sense strand
acaauaagccucugguuga

SEQ ID NO: 1464465 - RNA, 19 nt, Homo sapiens
  misc_RNA (1)...(19): siRNA sense strand
cagcuuaccucucaggaau

SEQ ID NO: 1464466 - RNA, 19 nt, Homo sapiens
  misc_RNA (1)...(19): siRNA sense strand
ccugaaauaugcaaaugaa

SEQ ID NO: 1464467 - RNA, 19 nt, Homo sapiens
  misc_RNA (1)...(19): siRNA sense strand
gcaaucaagcguaaugaga

SEQ ID NO: 1464468 - RNA, 19 nt, Homo sapiens
  misc_RNA (1)...(19): siRNA sense strand
ucaagacucugguguucaa

SEQ ID NO: 1464469 - RNA, 19 nt, Homo sapiens
  misc_RNA (1)...(19): siRNA sense strand
gagggucucuuggcugaaa

SEQ ID NO: 1464470 - RNA, 19 nt, Homo sapiens
  misc_RNA (1)...(19): siRNA sense strand
caauaagccucugguugaa

SEQ ID NO: 1464471 - RNA, 19 nt, Homo sapiens
  misc_RNA (1)...(19): siRNA sense strand
ccuaugugcuggugaagaa

SEQ ID NO: 1464472 - RNA, 19 nt, Homo sapiens
  misc_RNA (1)...(19): siRNA sense strand
cuaaggagcgccuguuuga

SEQ ID NO: 1464473 - RNA, 19 nt, Homo sapiens
  misc_RNA (1)...(19): siRNA sense strand
ucaagggcaucuuuggauu

SEQ ID NO: 1464474 - RNA, 19 nt, Homo sapiens
  misc_RNA (1)...(19): siRNA sense strand
acaaagccuuccagaaaga

SEQ ID NO: 1464475 - RNA, 19 nt, Homo sapiens
  misc_RNA (1)...(19): siRNA sense strand
gcucaagccagaucagaaa

SEQ ID NO: 1464476 - RNA, 19 nt, Homo sapiens
  misc_RNA (1)...(19): siRNA sense strand
ugacuuacaucaagcuauc

SEQ ID NO: 1464477 - RNA, 19 nt, Homo sapiens
  misc_RNA (1)...(19): siRNA sense strand
cagggaaggugucuaaucu

SEQ ID NO: 1464478 - RNA, 19 nt, Homo sapiens
  misc_RNA (1)...(19): siRNA sense strand
ggagauucuucagauuauu

SEQ ID NO: 1464479 - RNA, 19 nt, Homo sapiens
  misc_RNA (1)...(19): siRNA sense strand
ucugauggaugcugaaaga

SEQ ID NO: 1464480 - RNA, 19 nt, Homo sapiens
  misc_RNA (1)...(19): siRNA sense strand
ggaauuggaacgcuugugu

SEQ ID NO: 1464481 - RNA, 19 nt, Homo sapiens
  misc_RNA (1)...(19): siRNA sense strand
ugacagaguccugaaauau

SEQ ID NO: 1464482 - RNA, 19 nt, Homo sapiens
  misc_RNA (1)...(19): siRNA sense strand
cagugaagauugacaaagu

SEQ ID NO: 1464483 - RNA, 19 nt, Homo sapiens
  misc_RNA (1)...(19): siRNA sense strand
ucucaggaaugcuacguuu

SEQ ID NO: 1464484 - RNA, 19 nt, Homo sapiens
  misc_RNA (1)...(19): siRNA sense strand
uaacgaagcagcuauuguc

SEQ ID NO: 1464485 - RNA, 19 nt, Homo sapiens
  misc_RNA (1)...(19): siRNA sense strand
gaggacaaguuggaacaga

SEQ ID NO: 1464486 - RNA, 19 nt, Homo sapiens
  misc_RNA (1)...(19): siRNA sense strand
cugcaagccuuuguucuuu

SEQ ID NO: 1464487 - RNA, 19 nt, Homo sapiens
  misc_RNA (1)...(19): siRNA sense strand
gagagauuauauccuugaa

SEQ ID NO: 1464488 - RNA, 19 nt, Homo sapiens
  misc_RNA (1)...(19): siRNA sense strand
uaacagacacaaauucaca

SEQ ID NO: 1464489 - RNA, 19 nt, Homo sapiens
  misc_RNA (1)...(19): siRNA sense strand
gcaaaugaaguaaauucug

SEQ ID NO: 1464490 - RNA, 19 nt, Homo sapiens
  misc_RNA (1)...(19): siRNA sense strand
caaauucacagggaagaaa

SEQ ID NO: 1464491 - RNA, 19 nt, Homo sapiens
  misc_RNA (1)...(19): siRNA sense strand
caaucaagcguaaugagaa

SEQ ID NO: 1464492 - RNA, 19 nt, Homo sapiens
  misc_RNA (1)...(19): siRNA sense strand
gaacaucaagaauggaaag

SEQ ID NO: 1464493 - RNA, 19 nt, Homo sapiens
  misc_RNA (1)...(19): siRNA sense strand
gguaacagacacaaauuca

SEQ ID NO: 1464494 - RNA, 19 nt, Homo sapiens
  misc_RNA (1)...(19): siRNA sense strand
gacagaguccugaaauaug

SEQ ID NO: 1464495 - RNA, 19 nt, Homo sapiens
  misc_RNA (1)...(19): siRNA sense strand
gcugaaagcgaagaaacua

SEQ ID NO: 1464496 - RNA, 19 nt, Homo sapiens
  misc_RNA (1)...(19): siRNA sense strand
gagcuucugaccgauaaua

SEQ ID NO: 1464497 - RNA, 19 nt, Homo sapiens
  misc_RNA (1)...(19): siRNA sense strand
gaagaaagugacugaagag

SEQ ID NO: 1464498 - RNA, 19 nt, Homo sapiens
  misc_RNA (1)...(19): siRNA sense strand
aauuagaggcucaggcuua

SEQ ID NO: 1464499 - RNA, 19 nt, Homo sapiens
  misc_RNA (1)...(19): siRNA sense strand
uugcauagcuaccugacuu

SEQ ID NO: 1464500 - RNA, 19 nt, Homo sapiens
  misc_RNA (1)...(19): siRNA sense strand
gauacuugcuucugguucu

SEQ ID NO: 1464501 - RNA, 19 nt, Homo sapiens
  misc_RNA (1)...(19): siRNA sense strand
gaccugauccgacucuaug

SEQ ID NO: 1464502 - RNA, 19 nt, Homo sapiens
  misc_RNA (1)...(19): siRNA sense strand
gaccgauaauagauacuug

SEQ ID NO: 1464503 - RNA, 19 nt, Homo sapiens
  misc_RNA (1)...(19): siRNA sense strand
cuaaaggaccugccugaug

SEQ ID NO: 1464504 - RNA, 19 nt, Homo sapiens
  misc_RNA (1)...(19): siRNA sense strand
ugaaguaaauucugaugcu

SEQ ID NO: 1464505 - RNA, 19 nt, Homo sapiens
  misc_RNA (1)...(19): siRNA sense strand
gaaacagagagauuauauc

SEQ ID NO: 1464506 - RNA, 19 nt, Homo sapiens
  misc_RNA (1)...(19): siRNA sense strand
cauccgcuauugugcauau

SEQ ID NO: 1464507 - RNA, 19 nt, Homo sapiens
  misc_RNA (1)...(19): siRNA sense strand
uuggaacgcuugugugaga

SEQ ID NO: 1464508 - RNA, 19 nt, Homo sapiens
  misc_RNA (1)...(19): siRNA sense strand
gggauagccugaguuugga

SEQ ID NO: 1464509 - RNA, 19 nt, Homo sapiens
  misc_RNA (1)...(19): siRNA sense strand
uggagauucuucagauuau

SEQ ID NO: 1464510 - RNA, 19 nt, Homo sapiens
  misc_RNA (1)...(19): siRNA sense strand
gaagcaugcagaggaauug

SEQ ID NO: 1464511 - RNA, 19 nt, Homo sapiens
  misc_RNA (1)...(19): siRNA sense strand
ggacaauaagccucugguu

SEQ ID NO: 1464512 - RNA, 19 nt, Homo sapiens
  misc_RNA (1)...(19): siRNA sense strand
ccucaagacucugguguuc

SEQ ID NO: 1464513 - RNA, 19 nt, Homo sapiens
  misc_RNA (1)...(19): siRNA sense strand
aaacaggcagcuaccauga

SEQ ID NO: 1464514 - RNA, 19 nt, Homo sapiens
  misc_RNA (1)...(19): siRNA sense strand
cgaaggcaaacaaagaauu

SEQ ID NO: 1464515 - RNA, 19 nt, Homo sapiens
  misc_RNA (1)...(19): siRNA sense strand
aagagcuucugaccgauaa

SEQ ID NO: 1464516 - RNA, 19 nt, Homo sapiens
  misc_RNA (1)...(19): siRNA sense strand
cuaccugacuuacaucaag

SEQ ID NO: 1464517 - RNA, 19 nt, Homo sapiens
  misc_RNA (1)...(19): siRNA sense strand
ccagucagccaucaaugaa

SEQ ID NO: 1464518 - RNA, 19 nt, Homo sapiens
  misc_RNA (1)...(19): siRNA sense strand
ggaugccaagaccaaauua

SEQ ID NO: 1464519 - RNA, 19 nt, Homo sapiens
  misc_RNA (1)...(19): siRNA sense strand
guuuggagauucuucagau

SEQ ID NO: 1464520 - RNA, 19 nt, Homo sapiens
  misc_RNA (1)...(19): siRNA sense strand
aaagagauaggccucaaga

SEQ ID NO: 1464521 - RNA, 19 nt, Homo sapiens
  misc_RNA (1)...(19): siRNA sense strand
caagugcggucagagaagu

SEQ ID NO: 1464522 - RNA, 19 nt, Homo sapiens
  misc_RNA (1)...(19): siRNA sense strand
ggaccagucagccaucaau

SEQ ID NO: 1464523 - RNA, 19 nt, Homo sapiens
  misc_RNA (1)...(19): siRNA sense strand
aagccaaccuugugcacuu

SEQ ID NO: 1464524 - RNA, 19 nt, Homo sapiens
  misc_RNA (1)...(19): siRNA sense strand
caagagcucaucacucaag

SEQ ID NO: 1464525 - RNA, 19 nt, Homo sapiens
  misc_RNA (1)...(19): siRNA sense strand
cgaagcccuuguccuguau

SEQ ID NO: 1464526 - RNA, 19 nt, Homo sapiens
  misc_RNA (1)...(19): siRNA sense strand
cagaaacagagagauuaua

SEQ ID NO: 1464527 - RNA, 19 nt, Homo sapiens
  misc_RNA (1)...(19): siRNA sense strand
cgugaagcaugcagaggaa

SEQ ID NO: 1464528 - RNA, 19 nt, Homo sapiens
  misc_RNA (1)...(19): siRNA sense strand
ucaagaacagccuaaagga

SEQ ID NO: 1464529 - RNA, 19 nt, Homo sapiens
  misc_RNA (1)...(19): siRNA sense strand
agaaagagauaggccucaa

SEQ ID NO: 1464530 - RNA, 19 nt, Homo sapiens
  misc_RNA (1)...(19): siRNA sense strand
aggacuggcugauaacgaa

SEQ ID NO: 1464531 - RNA, 19 nt, Homo sapiens
  misc_RNA (1)...(19): siRNA sense strand
ugagagcaaucgcguggau

SEQ ID NO: 1464532 - RNA, 19 nt, Homo sapiens
  misc_RNA (1)...(19): siRNA sense strand
gcaugcagaggaauuggaa

SEQ ID NO: 1464533 - RNA, 19 nt, Homo sapiens
  misc_RNA (1)...(19): siRNA sense strand
uuggagauucuucagauua

SEQ ID NO: 1464534 - RNA, 19 nt, Homo sapiens
  misc_RNA (1)...(19): siRNA sense strand
acagaguccugaaauaugc

SEQ ID NO: 1464535 - RNA, 19 nt, Homo sapiens
  misc_RNA (1)...(19): siRNA sense strand
caaagugcgcauuuucuua

SEQ ID NO: 1464536 - RNA, 19 nt, Homo sapiens
  misc_RNA (1)...(19): siRNA sense strand
cauugaggcuuuuaacaaa

SEQ ID NO: 1464537 - RNA, 19 nt, Homo sapiens
  misc_RNA (1)...(19): siRNA sense strand
ugacaucaucuuacagaau

SEQ ID NO: 1464538 - RNA, 19 nt, Homo sapiens
  misc_RNA (1)...(19): siRNA sense strand
gauaacgaagcagcuauug

SEQ ID NO: 1464539 - RNA, 19 nt, Homo sapiens
  misc_RNA (1)...(19): siRNA sense strand
gggaagaaagugacugaag

SEQ ID NO: 1464540 - RNA, 19 nt, Homo sapiens
  misc_RNA (1)...(19): siRNA sense strand
ggaccugauccgacucuau

SEQ ID NO: 1464541 - RNA, 19 nt, Homo sapiens
  misc_RNA (1)...(19): siRNA sense strand
ggacaaguuggaacagaag

SEQ ID NO: 1464542 - RNA, 19 nt, Homo sapiens
  misc_RNA (1)...(19): siRNA sense strand
augacagaguccugaaaua

SEQ ID NO: 1464543 - RNA, 19 nt, Homo sapiens
  misc_RNA (1)...(19): siRNA sense strand
ggacugcccuuucucaaug

SEQ ID NO: 1464544 - RNA, 19 nt, Homo sapiens
  misc_RNA (1)...(19): siRNA sense strand
ggaagaaggagccaaauug

SEQ ID NO: 1464545 - RNA, 19 nt, Homo sapiens
  misc_RNA (1)...(19): siRNA sense strand
ggaagguacucaucuugaa

SEQ ID NO: 1464546 - RNA, 19 nt, Homo sapiens
  misc_RNA (1)...(19): siRNA sense strand
gaagaaggagccaaauuga

SEQ ID NO: 1464547 - RNA, 19 nt, Homo sapiens
  misc_RNA (1)...(19): siRNA sense strand
ggagucagcaucuaccuaa

SEQ ID NO: 1464548 - RNA, 19 nt, Homo sapiens
  misc_RNA (1)...(19): siRNA sense strand
ggaacuguaucccacaaug

SEQ ID NO: 1464549 - RNA, 19 nt, Homo sapiens
  misc_RNA (1)...(19): siRNA sense strand
ccacuagcuuugcauacua

SEQ ID NO: 1464550 - RNA, 19 nt, Homo sapiens
  misc_RNA (1)...(19): siRNA sense strand
caagagcaccagaaguaua

SEQ ID NO: 1464551 - RNA, 19 nt, Homo sapiens
  misc_RNA (1)...(19): siRNA sense strand
gaaggagccaaauugagua

SEQ ID NO: 1464552 - RNA, 19 nt, Homo sapiens
  misc_RNA (1)...(19): siRNA sense strand
caaauugaguauggaggua

SEQ ID NO: 1464553 - RNA, 19 nt, Homo sapiens
  misc_RNA (1)...(19): siRNA sense strand
ggaccugccugccaagcuu

SEQ ID NO: 1464554 - RNA, 19 nt, Homo sapiens
  misc_RNA (1)...(19): siRNA sense strand
gaacuguaucccacaauga

SEQ ID NO: 1464555 - RNA, 19 nt, Homo sapiens
  misc_RNA (1)...(19): siRNA sense strand
caucuaccaucgugacuga

SEQ ID NO: 1464556 - RNA, 19 nt, Homo sapiens
  misc_RNA (1)...(19): siRNA sense strand
aacaagagcaccagaagua

SEQ ID NO: 1464557 - RNA, 19 nt, Homo sapiens
  misc_RNA (1)...(19): siRNA sense strand
ggagccaaauugaguaugg

SEQ ID NO: 1464558 - RNA, 19 nt, Homo sapiens
  misc_RNA (1)...(19): siRNA sense strand
caacagcaccuucccaucu

SEQ ID NO: 1464559 - RNA, 19 nt, Homo sapiens
  misc_RNA (1)...(19): siRNA sense strand
gcaccuugauuggcuaugu

SEQ ID NO: 1464560 - RNA, 19 nt, Homo sapiens
  misc_RNA (1)...(19): siRNA sense strand
gggaagaaggagccaaauu

SEQ ID NO: 1464561 - RNA, 19 nt, Homo sapiens
  misc_RNA (1)...(19): siRNA sense strand
ucaacugcaucuuccugua

SEQ ID NO: 1464562 - RNA, 19 nt, Homo sapiens
  misc_RNA (1)...(19): siRNA sense strand
gggccagucugcagaagga

SEQ ID NO: 1464563 - RNA, 19 nt, Homo sapiens
  misc_RNA (1)...(19): siRNA sense strand
gaaacagacgcgacagcaa

SEQ ID NO: 1464564 - RNA, 19 nt, Homo sapiens
  misc_RNA (1)...(19): siRNA sense strand
acaacacccugcagaacuu

SEQ ID NO: 1464565 - RNA, 19 nt, Homo sapiens
  misc_RNA (1)...(19): siRNA sense strand
caacugcaucuuccuguau

SEQ ID NO: 1464566 - RNA, 19 nt, Homo sapiens
  misc_RNA (1)...(19): siRNA sense strand
gcaacaagagcaccagaag

SEQ ID NO: 1464567 - RNA, 19 nt, Homo sapiens
  misc_RNA (1)...(19): siRNA sense strand
ccugauggcuucucacaac

SEQ ID NO: 1464568 - RNA, 19 nt, Homo sapiens
  misc_RNA (1)...(19): siRNA sense strand
aacagcaccuucccaucua

SEQ ID NO: 1464569 - RNA, 19 nt, Homo sapiens
  misc_RNA (1)...(19): siRNA sense strand
agaaggagccaaauugagu

SEQ ID NO: 1464570 - RNA, 19 nt, Homo sapiens
  misc_RNA (1)...(19): siRNA sense strand
ucaacugcaugacacugaa

SEQ ID NO: 1464571 - RNA, 19 nt, Homo sapiens
  misc_RNA (1)...(19): siRNA sense strand
acuaugggcuggucaugga

SEQ ID NO: 1464572 - RNA, 19 nt, Homo sapiens
  misc_RNA (1)...(19): siRNA sense strand
uggaguggaugcccauuca

SEQ ID NO: 1464573 - RNA, 19 nt, Homo sapiens
  misc_RNA (1)...(19): siRNA sense strand
cuugugggcuuccuuguca

SEQ ID NO: 1464574 - RNA, 19 nt, Homo sapiens
  misc_RNA (1)...(19): siRNA sense strand
gagccaaauugaguaugga

SEQ ID NO: 1464575 - RNA, 19 nt, Homo sapiens
  misc_RNA (1)...(19): siRNA sense strand
gcaucucccucaacugcau

SEQ ID NO: 1464576 - RNA, 19 nt, Homo sapiens
  misc_RNA (1)...(19): siRNA sense strand
cugcagggcuuuggaguca

SEQ ID NO: 1464577 - RNA, 19 nt, Homo sapiens
  misc_RNA (1)...(19): siRNA sense strand
gccggaagguacucaucuu

SEQ ID NO: 1464578 - RNA, 19 nt, Homo sapiens
  misc_RNA (1)...(19): siRNA sense strand
caacaagagcaccagaagu

SEQ ID NO: 1464579 - RNA, 19 nt, Homo sapiens
  misc_RNA (1)...(19): siRNA sense strand
gaugccaaccucagcaaga

SEQ ID NO: 1464580 - RNA, 19 nt, Homo sapiens
  misc_RNA (1)...(19): siRNA sense strand
ugagggcccugcagagagu

SEQ ID NO: 1464581 - RNA, 19 nt, Homo sapiens
  misc_RNA (1)...(19): siRNA sense strand
aacugcaucuuccuguaua

SEQ ID NO: 1464582 - RNA, 19 nt, Homo sapiens
  misc_RNA (1)...(19): siRNA sense strand
gcuggcaucucccucaacu

SEQ ID NO: 1464583 - RNA, 19 nt, Homo sapiens
  misc_RNA (1)...(19): siRNA sense strand
aagagcaccagaaguauau

SEQ ID NO: 1464584 - RNA, 19 nt, Homo sapiens
  misc_RNA (1)...(19): siRNA sense strand
uaauccaggugaucuuugg

SEQ ID NO: 1464585 - RNA, 19 nt, Homo sapiens
  misc_RNA (1)...(19): siRNA sense strand
gcgggaagaaggagccaaa

SEQ ID NO: 1464586 - RNA, 19 nt, Homo sapiens
  misc_RNA (1)...(19): siRNA sense strand
gaagguacucaucuugaac

SEQ ID NO: 1464587 - RNA, 19 nt, Homo sapiens
  misc_RNA (1)...(19): siRNA sense strand
gccacuagcuuugcauacu

SEQ ID NO: 1464588 - RNA, 19 nt, Homo sapiens
  misc_RNA (1)...(19): siRNA sense strand
cggaagguacucaucuuga

SEQ ID NO: 1464589 - RNA, 19 nt, Homo sapiens
  misc_RNA (1)...(19): siRNA sense strand
gggacugcccuuucucaau

SEQ ID NO: 1464590 - RNA, 19 nt, Homo sapiens
  misc_RNA (1)...(19): siRNA sense strand
gcaccgauggcuggaucua

SEQ ID NO: 1464591 - RNA, 19 nt, Homo sapiens
  misc_RNA (1)...(19): siRNA sense strand
gcaucugcauccugcucaa

SEQ ID NO: 1464592 - RNA, 19 nt, Homo sapiens
  misc_RNA (1)...(19): siRNA sense strand
cacuagcuuugcauacuau

SEQ ID NO: 1464593 - RNA, 19 nt, Homo sapiens
  misc_RNA (1)...(19): siRNA sense strand
ccucagcacaagagaagaa

SEQ ID NO: 1464594 - RNA, 19 nt, Homo sapiens
  misc_RNA (1)...(19): siRNA sense strand
acuccugguucuucauuga

SEQ ID NO: 1464595 - RNA, 19 nt, Homo sapiens
  misc_RNA (1)...(19): siRNA sense strand
accgauggcuggaucuaug

SEQ ID NO: 1464596 - RNA, 19 nt, Homo sapiens
  misc_RNA (1)...(19): siRNA sense strand
gagucagcaucuaccuaau

SEQ ID NO: 1464597 - RNA, 19 nt, Homo sapiens
  misc_RNA (1)...(19): siRNA sense strand
gcacccaacuuccccaucu

SEQ ID NO: 1464598 - RNA, 19 nt, Homo sapiens
  misc_RNA (1)...(19): siRNA sense strand
gggcuuccuugucaucaac

SEQ ID NO: 1464599 - RNA, 19 nt, Homo sapiens
  misc_RNA (1)...(19): siRNA sense strand
gcuuuggagucagcaucua

SEQ ID NO: 1464600 - RNA, 19 nt, Homo sapiens
  misc_RNA (1)...(19): siRNA sense strand
gagcugaccaugggcaaag

SEQ ID NO: 1464601 - RNA, 19 nt, Homo sapiens
  misc_RNA (1)...(19): siRNA sense strand
caucuacuccugguucuuc

SEQ ID NO: 1464602 - RNA, 19 nt, Homo sapiens
  misc_RNA (1)...(19): siRNA sense strand
gaguggaugcccauucaca

SEQ ID NO: 1464603 - RNA, 19 nt, Homo sapiens
  misc_RNA (1)...(19): siRNA sense strand
cagcacaagagaagaaugg

SEQ ID NO: 1464604 - RNA, 19 nt, Homo sapiens
  misc_RNA (1)...(19): siRNA sense strand
ccuaauccaggugaucuuu

SEQ ID NO: 1464605 - RNA, 19 nt, Homo sapiens
  misc_RNA (1)...(19): siRNA sense strand
ggacugcccuuucucaaug

SEQ ID NO: 1464606 - RNA, 19 nt, Homo sapiens
  misc_RNA (1)...(19): siRNA sense strand
ggaagaaggagccaaauug

SEQ ID NO: 1464607 - RNA, 19 nt, Homo sapiens
  misc_RNA (1)...(19): siRNA sense strand
ggaagguacucaucuugaa

SEQ ID NO: 1464608 - RNA, 19 nt, Homo sapiens
  misc_RNA (1)...(19): siRNA sense strand
gaagaaggagccaaauuga

SEQ ID NO: 1464609 - RNA, 19 nt, Homo sapiens
  misc_RNA (1)...(19): siRNA sense strand
ggagucagcaucuaccuaa

SEQ ID NO: 1464610 - RNA, 19 nt, Homo sapiens
  misc_RNA (1)...(19): siRNA sense strand
ggaacuguaucccacaaug

SEQ ID NO: 1464611 - RNA, 19 nt, Homo sapiens
  misc_RNA (1)...(19): siRNA sense strand
ccacuagcuuugcauacua

SEQ ID NO: 1464612 - RNA, 19 nt, Homo sapiens
  misc_RNA (1)...(19): siRNA sense strand
caagagcaccagaaguaua

SEQ ID NO: 1464613 - RNA, 19 nt, Homo sapiens
  misc_RNA (1)...(19): siRNA sense strand
gaaggagccaaauugagua

SEQ ID NO: 1464614 - RNA, 19 nt, Homo sapiens
  misc_RNA (1)...(19): siRNA sense strand
caaauugaguauggaggua

SEQ ID NO: 1464615 - RNA, 19 nt, Homo sapiens
  misc_RNA (1)...(19): siRNA sense strand
ggaccugccugccaagcuu

SEQ ID NO: 1464616 - RNA, 19 nt, Homo sapiens
  misc_RNA (1)...(19): siRNA sense strand
gaacuguaucccacaauga

SEQ ID NO: 1464617 - RNA, 19 nt, Homo sapiens
  misc_RNA (1)...(19): siRNA sense strand
caucuaccaucgugacuga

SEQ ID NO: 1464618 - RNA, 19 nt, Homo sapiens
  misc_RNA (1)...(19): siRNA sense strand
aacaagagcaccagaagua

SEQ ID NO: 1464619 - RNA, 19 nt, Homo sapiens
  misc_RNA (1)...(19): siRNA sense strand
ggagccaaauugaguaugg

SEQ ID NO: 1464620 - RNA, 19 nt, Homo sapiens
  misc_RNA (1)...(19): siRNA sense strand
caacagcaccuucccaucu

SEQ ID NO: 1464621 - RNA, 19 nt, Homo sapiens
  misc_RNA (1)...(19): siRNA sense strand
gcaccuugauuggcuaugu

SEQ ID NO: 1464622 - RNA, 19 nt, Homo sapiens
  misc_RNA (1)...(19): siRNA sense strand
gggaagaaggagccaaauu

SEQ ID NO: 1464623 - RNA, 19 nt, Homo sapiens
  misc_RNA (1)...(19): siRNA sense strand
ucaacugcaucuuccugua

SEQ ID NO: 1464624 - RNA, 19 nt, Homo sapiens
  misc_RNA (1)...(19): siRNA sense strand
gggccagucugcagaagga

SEQ ID NO: 1464625 - RNA, 19 nt, Homo sapiens
  misc_RNA (1)...(19): siRNA sense strand
gaaacagacgcgacagcaa

SEQ ID NO: 1464626 - RNA, 19 nt, Homo sapiens
  misc_RNA (1)...(19): siRNA sense strand
acaacacccugcagaacuu

SEQ ID NO: 1464627 - RNA, 19 nt, Homo sapiens
  misc_RNA (1)...(19): siRNA sense strand
caacugcaucuuccuguau

SEQ ID NO: 1464628 - RNA, 19 nt, Homo sapiens
  misc_RNA (1)...(19): siRNA sense strand
gcaacaagagcaccagaag

SEQ ID NO: 1464629 - RNA, 19 nt, Homo sapiens
  misc_RNA (1)...(19): siRNA sense strand
ccugauggcuucucacaac

SEQ ID NO: 1464630 - RNA, 19 nt, Homo sapiens
  misc_RNA (1)...(19): siRNA sense strand
aacagcaccuucccaucua

SEQ ID NO: 1464631 - RNA, 19 nt, Homo sapiens
  misc_RNA (1)...(19): siRNA sense strand
agaaggagccaaauugagu

SEQ ID NO: 1464632 - RNA, 19 nt, Homo sapiens
  misc_RNA (1)...(19): siRNA sense strand
ucaacugcaugacacugaa

SEQ ID NO: 1464633 - RNA, 19 nt, Homo sapiens
  misc_RNA (1)...(19): siRNA sense strand
acuaugggcuggucaugga

SEQ ID NO: 1464634 - RNA, 19 nt, Homo sapiens
  misc_RNA (1)...(19): siRNA sense strand
uggaguggaugcccauuca

SEQ ID NO: 1464635 - RNA, 19 nt, Homo sapiens
  misc_RNA (1)...(19): siRNA sense strand
cuugugggcuuccuuguca

SEQ ID NO: 1464636 - RNA, 19 nt, Homo sapiens
  misc_RNA (1)...(19): siRNA sense strand
gagccaaauugaguaugga

SEQ ID NO: 1464637 - RNA, 19 nt, Homo sapiens
  misc_RNA (1)...(19): siRNA sense strand
gcaucucccucaacugcau

SEQ ID NO: 1464638 - RNA, 19 nt, Homo sapiens
  misc_RNA (1)...(19): siRNA sense strand
cugcagggcuuuggaguca

SEQ ID NO: 1464639 - RNA, 19 nt, Homo sapiens
  misc_RNA (1)...(19): siRNA sense strand
gccggaagguacucaucuu

SEQ ID NO: 1464640 - RNA, 19 nt, Homo sapiens
  misc_RNA (1)...(19): siRNA sense strand
caacaagagcaccagaagu

SEQ ID NO: 1464641 - RNA, 19 nt, Homo sapiens
  misc_RNA (1)...(19): siRNA sense strand
gaugccaaccucagcaaga

SEQ ID NO: 1464642 - RNA, 19 nt, Homo sapiens
  misc_RNA (1)...(19): siRNA sense strand
ugagggcccugcagagagu

SEQ ID NO: 1464643 - RNA, 19 nt, Homo sapiens
  misc_RNA (1)...(19): siRNA sense strand
aacugcaucuuccuguaua

SEQ ID NO: 1464644 - RNA, 19 nt, Homo sapiens
  misc_RNA (1)...(19): siRNA sense strand
gcuggcaucucccucaacu

SEQ ID NO: 1464645 - RNA, 19 nt, Homo sapiens
  misc_RNA (1)...(19): siRNA sense strand
aagagcaccagaaguauau

SEQ ID NO: 1464646 - RNA, 19 nt, Homo sapiens
  misc_RNA (1)...(19): siRNA sense strand
uaauccaggugaucuuugg

SEQ ID NO: 1464647 - RNA, 19 nt, Homo sapiens
  misc_RNA (1)...(19): siRNA sense strand
gcgggaagaaggagccaaa

SEQ ID NO: 1464648 - RNA, 19 nt, Homo sapiens
  misc_RNA (1)...(19): siRNA sense strand
gaagguacucaucuugaac

SEQ ID NO: 1464649 - RNA, 19 nt, Homo sapiens
  misc_RNA (1)...(19): siRNA sense strand
gccacuagcuuugcauacu

SEQ ID NO: 1464650 - RNA, 19 nt, Homo sapiens
  misc_RNA (1)...(19): siRNA sense strand
cggaagguacucaucuuga

SEQ ID NO: 1464651 - RNA, 19 nt, Homo sapiens
  misc_RNA (1)...(19): siRNA sense strand
gggacugcccuuucucaau

SEQ ID NO: 1464652 - RNA, 19 nt, Homo sapiens
  misc_RNA (1)...(19): siRNA sense strand
gcaccgauggcuggaucua

SEQ ID NO: 1464653 - RNA, 19 nt, Homo sapiens
  misc_RNA (1)...(19): siRNA sense strand
gcaucugcauccugcucaa

SEQ ID NO: 1464654 - RNA, 19 nt, Homo sapiens
  misc_RNA (1)...(19): siRNA sense strand
cacuagcuuugcauacuau

SEQ ID NO: 1464655 - RNA, 19 nt, Homo sapiens
  misc_RNA (1)...(19): siRNA sense strand
ccucagcacaagagaagaa

SEQ ID NO: 1464656 - RNA, 19 nt, Homo sapiens
  misc_RNA (1)...(19): siRNA sense strand
acuccugguucuucauuga

SEQ ID NO: 1464657 - RNA, 19 nt, Homo sapiens
  misc_RNA (1)...(19): siRNA sense strand
accgauggcuggaucuaug

SEQ ID NO: 1464658 - RNA, 19 nt, Homo sapiens
  misc_RNA (1)...(19): siRNA sense strand
gagucagcaucuaccuaau

SEQ ID NO: 1464659 - RNA, 19 nt, Homo sapiens
  misc_RNA (1)...(19): siRNA sense strand
gcacccaacuuccccaucu

SEQ ID NO: 1464660 - RNA, 19 nt, Homo sapiens
  misc_RNA (1)...(19): siRNA sense strand
gggcuuccuugucaucaac

SEQ ID NO: 1464661 - RNA, 19 nt, Homo sapiens
  misc_RNA (1)...(19): siRNA sense strand
gcuuuggagucagcaucua

SEQ ID NO: 1464662 - RNA, 19 nt, Homo sapiens
  misc_RNA (1)...(19): siRNA sense strand
gagcugaccaugggcaaag

SEQ ID NO: 1464663 - RNA, 19 nt, Homo sapiens
  misc_RNA (1)...(19): siRNA sense strand
caucuacuccugguucuuc

SEQ ID NO: 1464664 - RNA, 19 nt, Homo sapiens
  misc_RNA (1)...(19): siRNA sense strand
gaguggaugcccauucaca

SEQ ID NO: 1464665 - RNA, 19 nt, Homo sapiens
  misc_RNA (1)...(19): siRNA sense strand
cagcacaagagaagaaugg

SEQ ID NO: 1464666 - RNA, 19 nt, Homo sapiens
  misc_RNA (1)...(19): siRNA sense strand
ccuaauccaggugaucuuu

SEQ ID NO: 1464667 - RNA, 19 nt, Homo sapiens
  misc_RNA (1)...(19): siRNA sense strand
ggacugcccuuucucaaug

SEQ ID NO: 1464668 - RNA, 19 nt, Homo sapiens
  misc_RNA (1)...(19): siRNA sense strand
ggaagaaggagccaaauug

SEQ ID NO: 1464669 - RNA, 19 nt, Homo sapiens
  misc_RNA (1)...(19): siRNA sense strand
ggaagguacucaucuugaa

SEQ ID NO: 1464670 - RNA, 19 nt, Homo sapiens
  misc_RNA (1)...(19): siRNA sense strand
gaagaaggagccaaauuga

SEQ ID NO: 1464671 - RNA, 19 nt, Homo sapiens
  misc_RNA (1)...(19): siRNA sense strand
ggagucagcaucuaccuaa

SEQ ID NO: 1464672 - RNA, 19 nt, Homo sapiens
  misc_RNA (1)...(19): siRNA sense strand
ggaacuguaucccacaaug

SEQ ID NO: 1464673 - RNA, 19 nt, Homo sapiens
  misc_RNA (1)...(19): siRNA sense strand
ccacuagcuuugcauacua

SEQ ID NO: 1464674 - RNA, 19 nt, Homo sapiens
  misc_RNA (1)...(19): siRNA sense strand
caagagcaccagaaguaua

SEQ ID NO: 1464675 - RNA, 19 nt, Homo sapiens
  misc_RNA (1)...(19): siRNA sense strand
gaaggagccaaauugagua

SEQ ID NO: 1464676 - RNA, 19 nt, Homo sapiens
  misc_RNA (1)...(19): siRNA sense strand
caaauugaguauggaggua

SEQ ID NO: 1464677 - RNA, 19 nt, Homo sapiens
  misc_RNA (1)...(19): siRNA sense strand
ggaccugccugccaagcuu

SEQ ID NO: 1464678 - RNA, 19 nt, Homo sapiens
  misc_RNA (1)...(19): siRNA sense strand
gaacuguaucccacaauga

SEQ ID NO: 1464679 - RNA, 19 nt, Homo sapiens
  misc_RNA (1)...(19): siRNA sense strand
caucuaccaucgugacuga

SEQ ID NO: 1464680 - RNA, 19 nt, Homo sapiens
  misc_RNA (1)...(19): siRNA sense strand
aacaagagcaccagaagua

SEQ ID NO: 1464681 - RNA, 19 nt, Homo sapiens
  misc_RNA (1)...(19): siRNA sense strand
ggagccaaauugaguaugg

SEQ ID NO: 1464682 - RNA, 19 nt, Homo sapiens
  misc_RNA (1)...(19): siRNA sense strand
caacagcaccuucccaucu

SEQ ID NO: 1464683 - RNA, 19 nt, Homo sapiens
  misc_RNA (1)...(19): siRNA sense strand
gcaccuugauuggcuaugu

SEQ ID NO: 1464684 - RNA, 19 nt, Homo sapiens
  misc_RNA (1)...(19): siRNA sense strand
gggaagaaggagccaaauu

SEQ ID NO: 1464685 - RNA, 19 nt, Homo sapiens
  misc_RNA (1)...(19): siRNA sense strand
ucaacugcaucuuccugua

SEQ ID NO: 1464686 - RNA, 19 nt, Homo sapiens
  misc_RNA (1)...(19): siRNA sense strand
gggccagucugcagaagga

SEQ ID NO: 1464687 - RNA, 19 nt, Homo sapiens
  misc_RNA (1)...(19): siRNA sense strand
gaaacagacgcgacagcaa

SEQ ID NO: 1464688 - RNA, 19 nt, Homo sapiens
  misc_RNA (1)...(19): siRNA sense strand
acaacacccugcagaacuu

SEQ ID NO: 1464689 - RNA, 19 nt, Homo sapiens
  misc_RNA (1)...(19): siRNA sense strand
caacugcaucuuccuguau

SEQ ID NO: 1464690 - RNA, 19 nt, Homo sapiens
  misc_RNA (1)...(19): siRNA sense strand
gcaacaagagcaccagaag

SEQ ID NO: 1464691 - RNA, 19 nt, Homo sapiens
  misc_RNA (1)...(19): siRNA sense strand
ccugauggcuucucacaac

SEQ ID NO: 1464692 - RNA, 19 nt, Homo sapiens
  misc_RNA (1)...(19): siRNA sense strand
aacagcaccuucccaucua

SEQ ID NO: 1464693 - RNA, 19 nt, Homo sapiens
  misc_RNA (1)...(19): siRNA sense strand
agaaggagccaaauugagu

SEQ ID NO: 1464694 - RNA, 19 nt, Homo sapiens
  misc_RNA (1)...(19): siRNA sense strand
ucaacugcaugacacugaa

SEQ ID NO: 1464695 - RNA, 19 nt, Homo sapiens
  misc_RNA (1)...(19): siRNA sense strand
acuaugggcuggucaugga

SEQ ID NO: 1464696 - RNA, 19 nt, Homo sapiens
  misc_RNA (1)...(19): siRNA sense strand
uggaguggaugcccauuca

SEQ ID NO: 1464697 - RNA, 19 nt, Homo sapiens
  misc_RNA (1)...(19): siRNA sense strand
cuugugggcuuccuuguca

SEQ ID NO: 1464698 - RNA, 19 nt, Homo sapiens
  misc_RNA (1)...(19): siRNA sense strand
gagccaaauugaguaugga

SEQ ID NO: 1464699 - RNA, 19 nt, Homo sapiens
  misc_RNA (1)...(19): siRNA sense strand
gcaucucccucaacugcau

SEQ ID NO: 1464700 - RNA, 19 nt, Homo sapiens
  misc_RNA (1)...(19): siRNA sense strand
cugcagggcuuuggaguca

SEQ ID NO: 1464701 - RNA, 19 nt, Homo sapiens
  misc_RNA (1)...(19): siRNA sense strand
gccggaagguacucaucuu

SEQ ID NO: 1464702 - RNA, 19 nt, Homo sapiens
  misc_RNA (1)...(19): siRNA sense strand
caacaagagcaccagaagu

SEQ ID NO: 1464703 - RNA, 19 nt, Homo sapiens
  misc_RNA (1)...(19): siRNA sense strand
gaugccaaccucagcaaga

SEQ ID NO: 1464704 - RNA, 19 nt, Homo sapiens
  misc_RNA (1)...(19): siRNA sense strand
ugagggcccugcagagagu

SEQ ID NO: 1464705 - RNA, 19 nt, Homo sapiens
  misc_RNA (1)...(19): siRNA sense strand
aacugcaucuuccuguaua

SEQ ID NO: 1464706 - RNA, 19 nt, Homo sapiens
  misc_RNA (1)...(19): siRNA sense strand
gcuggcaucucccucaacu

SEQ ID NO: 1464707 - RNA, 19 nt, Homo sapiens
  misc_RNA (1)...(19): siRNA sense strand
aagagcaccagaaguauau

SEQ ID NO: 1464708 - RNA, 19 nt, Homo sapiens
  misc_RNA (1)...(19): siRNA sense strand
uaauccaggugaucuuugg

SEQ ID NO: 1464709 - RNA, 19 nt, Homo sapiens
  misc_RNA (1)...(19): siRNA sense strand
gcgggaagaaggagccaaa

SEQ ID NO: 1464710 - RNA, 19 nt, Homo sapiens
  misc_RNA (1)...(19): siRNA sense strand
gaagguacucaucuugaac

SEQ ID NO: 1464711 - RNA, 19 nt, Homo sapiens
  misc_RNA (1)...(19): siRNA sense strand
gccacuagcuuugcauacu

SEQ ID NO: 1464712 - RNA, 19 nt, Homo sapiens
  misc_RNA (1)...(19): siRNA sense strand
cggaagguacucaucuuga

SEQ ID NO: 1464713 - RNA, 19 nt, Homo sapiens
  misc_RNA (1)...(19): siRNA sense strand
gggacugcccuuucucaau

SEQ ID NO: 1464714 - RNA, 19 nt, Homo sapiens
  misc_RNA (1)...(19): siRNA sense strand
gcaccgauggcuggaucua

SEQ ID NO: 1464715 - RNA, 19 nt, Homo sapiens
  misc_RNA (1)...(19): siRNA sense strand
gcaucugcauccugcucaa

SEQ ID NO: 1464716 - RNA, 19 nt, Homo sapiens
  misc_RNA (1)...(19): siRNA sense strand
cacuagcuuugcauacuau

SEQ ID NO: 1464717 - RNA, 19 nt, Homo sapiens
  misc_RNA (1)...(19): siRNA sense strand
ccucagcacaagagaagaa

SEQ ID NO: 1464718 - RNA, 19 nt, Homo sapiens
  misc_RNA (1)...(19): siRNA sense strand
acuccugguucuucauuga

SEQ ID NO: 1464719 - RNA, 19 nt, Homo sapiens
  misc_RNA (1)...(19): siRNA sense strand
accgauggcuggaucuaug

SEQ ID NO: 1464720 - RNA, 19 nt, Homo sapiens
  misc_RNA (1)...(19): siRNA sense strand
gagucagcaucuaccuaau

SEQ ID NO: 1464721 - RNA, 19 nt, Homo sapiens
  misc_RNA (1)...(19): siRNA sense strand
gcacccaacuuccccaucu

SEQ ID NO: 1464722 - RNA, 19 nt, Homo sapiens
  misc_RNA (1)...(19): siRNA sense strand
gggcuuccuugucaucaac

SEQ ID NO: 1464723 - RNA, 19 nt, Homo sapiens
  misc_RNA (1)...(19): siRNA sense strand
gcuuuggagucagcaucua

SEQ ID NO: 1464724 - RNA, 19 nt, Homo sapiens
  misc_RNA (1)...(19): siRNA sense strand
gagcugaccaugggcaaag

SEQ ID NO: 1464725 - RNA, 19 nt, Homo sapiens
  misc_RNA (1)...(19): siRNA sense strand
caucuacuccugguucuuc

SEQ ID NO: 1464726 - RNA, 19 nt, Homo sapiens
  misc_RNA (1)...(19): siRNA sense strand
gaguggaugcccauucaca

SEQ ID NO: 1464727 - RNA, 19 nt, Homo sapiens
  misc_RNA (1)...(19): siRNA sense strand
cagcacaagagaagaaugg

SEQ ID NO: 1464728 - RNA, 19 nt, Homo sapiens
  misc_RNA (1)...(19): siRNA sense strand
ccuaauccaggugaucuuu

SEQ ID NO: 1464729 - RNA, 19 nt, Homo sapiens
  misc_RNA (1)...(19): siRNA sense strand
ggacugcccuuucucaaug

SEQ ID NO: 1464730 - RNA, 19 nt, Homo sapiens
  misc_RNA (1)...(19): siRNA sense strand
ggaagaaggagccaaauug

SEQ ID NO: 1464731 - RNA, 19 nt, Homo sapiens
  misc_RNA (1)...(19): siRNA sense strand
ggaagguacucaucuugaa

SEQ ID NO: 1464732 - RNA, 19 nt, Homo sapiens
  misc_RNA (1)...(19): siRNA sense strand
gaagaaggagccaaauuga

SEQ ID NO: 1464733 - RNA, 19 nt, Homo sapiens
  misc_RNA (1)...(19): siRNA sense strand
ggagucagcaucuaccuaa

SEQ ID NO: 1464734 - RNA, 19 nt, Homo sapiens
  misc_RNA (1)...(19): siRNA sense strand
ggaacuguaucccacaaug

SEQ ID NO: 1464735 - RNA, 19 nt, Homo sapiens
  misc_RNA (1)...(19): siRNA sense strand
ccacuagcuuugcauacua

SEQ ID NO: 1464736 - RNA, 19 nt, Homo sapiens
  misc_RNA (1)...(19): siRNA sense strand
caagagcaccagaaguaua

SEQ ID NO: 1464737 - RNA, 19 nt, Homo sapiens
  misc_RNA (1)...(19): siRNA sense strand
gaaggagccaaauugagua

SEQ ID NO: 1464738 - RNA, 19 nt, Homo sapiens
  misc_RNA (1)...(19): siRNA sense strand
caaauugaguauggaggua

SEQ ID NO: 1464739 - RNA, 19 nt, Homo sapiens
  misc_RNA (1)...(19): siRNA sense strand
ggaccugccugccaagcuu

SEQ ID NO: 1464740 - RNA, 19 nt, Homo sapiens
  misc_RNA (1)...(19): siRNA sense strand
gaacuguaucccacaauga

SEQ ID NO: 1464741 - RNA, 19 nt, Homo sapiens
  misc_RNA (1)...(19): siRNA sense strand
caucuaccaucgugacuga

SEQ ID NO: 1464742 - RNA, 19 nt, Homo sapiens
  misc_RNA (1)...(19): siRNA sense strand
aacaagagcaccagaagua

SEQ ID NO: 1464743 - RNA, 19 nt, Homo sapiens
  misc_RNA (1)...(19): siRNA sense strand
ggagccaaauugaguaugg

SEQ ID NO: 1464744 - RNA, 19 nt, Homo sapiens
  misc_RNA (1)...(19): siRNA sense strand
caacagcaccuucccaucu

SEQ ID NO: 1464745 - RNA, 19 nt, Homo sapiens
  misc_RNA (1)...(19): siRNA sense strand
gcaccuugauuggcuaugu

SEQ ID NO: 1464746 - RNA, 19 nt, Homo sapiens
  misc_RNA (1)...(19): siRNA sense strand
gggaagaaggagccaaauu

SEQ ID NO: 1464747 - RNA, 19 nt, Homo sapiens
  misc_RNA (1)...(19): siRNA sense strand
ucaacugcaucuuccugua

SEQ ID NO: 1464748 - RNA, 19 nt, Homo sapiens
  misc_RNA (1)...(19): siRNA sense strand
gggccagucugcagaagga

SEQ ID NO: 1464749 - RNA, 19 nt, Homo sapiens
  misc_RNA (1)...(19): siRNA sense strand
gaaacagacgcgacagcaa

SEQ ID NO: 1464750 - RNA, 19 nt, Homo sapiens
  misc_RNA (1)...(19): siRNA sense strand
acaacacccugcagaacuu

SEQ ID NO: 1464751 - RNA, 19 nt, Homo sapiens
  misc_RNA (1)...(19): siRNA sense strand
caacugcaucuuccuguau

SEQ ID NO: 1464752 - RNA, 19 nt, Homo sapiens
  misc_RNA (1)...(19): siRNA sense strand
gcaacaagagcaccagaag

SEQ ID NO: 1464753 - RNA, 19 nt, Homo sapiens
  misc_RNA (1)...(19): siRNA sense strand
ccugauggcuucucacaac

SEQ ID NO: 1464754 - RNA, 19 nt, Homo sapiens
  misc_RNA (1)...(19): siRNA sense strand
aacagcaccuucccaucua

SEQ ID NO: 1464755 - RNA, 19 nt, Homo sapiens
  misc_RNA (1)...(19): siRNA sense strand
agaaggagccaaauugagu

SEQ ID NO: 1464756 - RNA, 19 nt, Homo sapiens
  misc_RNA (1)...(19): siRNA sense strand
ucaacugcaugacacugaa

SEQ ID NO: 1464757 - RNA, 19 nt, Homo sapiens
  misc_RNA (1)...(19): siRNA sense strand
acuaugggcuggucaugga

SEQ ID NO: 1464758 - RNA, 19 nt, Homo sapiens
  misc_RNA (1)...(19): siRNA sense strand
uggaguggaugcccauuca

SEQ ID NO: 1464759 - RNA, 19 nt, Homo sapiens
  misc_RNA (1)...(19): siRNA sense strand
cuugugggcuuccuuguca

SEQ ID NO: 1464760 - RNA, 19 nt, Homo sapiens
  misc_RNA (1)...(19): siRNA sense strand
gagccaaauugaguaugga

SEQ ID NO: 1464761 - RNA, 19 nt, Homo sapiens
  misc_RNA (1)...(19): siRNA sense strand
gcaucucccucaacugcau

SEQ ID NO: 1464762 - RNA, 19 nt, Homo sapiens
  misc_RNA (1)...(19): siRNA sense strand
cugcagggcuuuggaguca

SEQ ID NO: 1464763 - RNA, 19 nt, Homo sapiens
  misc_RNA (1)...(19): siRNA sense strand
gccggaagguacucaucuu

SEQ ID NO: 1464764 - RNA, 19 nt, Homo sapiens
  misc_RNA (1)...(19): siRNA sense strand
caacaagagcaccagaagu

SEQ ID NO: 1464765 - RNA, 19 nt, Homo sapiens
  misc_RNA (1)...(19): siRNA sense strand
gaugccaaccucagcaaga

SEQ ID NO: 1464766 - RNA, 19 nt, Homo sapiens
  misc_RNA (1)...(19): siRNA sense strand
ugagggcccugcagagagu

SEQ ID NO: 1464767 - RNA, 19 nt, Homo sapiens
  misc_RNA (1)...(19): siRNA sense strand
aacugcaucuuccuguaua

SEQ ID NO: 1464768 - RNA, 19 nt, Homo sapiens
  misc_RNA (1)...(19): siRNA sense strand
gcuggcaucucccucaacu

SEQ ID NO: 1464769 - RNA, 19 nt, Homo sapiens
  misc_RNA (1)...(19): siRNA sense strand
aagagcaccagaaguauau

SEQ ID NO: 1464770 - RNA, 19 nt, Homo sapiens
  misc_RNA (1)...(19): siRNA sense strand
uaauccaggugaucuuugg

SEQ ID NO: 1464771 - RNA, 19 nt, Homo sapiens
  misc_RNA (1)...(19): siRNA sense strand
gcgggaagaaggagccaaa

SEQ ID NO: 1464772 - RNA, 19 nt, Homo sapiens
  misc_RNA (1)...(19): siRNA sense strand
gaagguacucaucuugaac

SEQ ID NO: 1464773 - RNA, 19 nt, Homo sapiens
  misc_RNA (1)...(19): siRNA sense strand
gccacuagcuuugcauacu

SEQ ID NO: 1464774 - RNA, 19 nt, Homo sapiens
  misc_RNA (1)...(19): siRNA sense strand
cggaagguacucaucuuga

SEQ ID NO: 1464775 - RNA, 19 nt, Homo sapiens
  misc_RNA (1)...(19): siRNA sense strand
gggacugcccuuucucaau

SEQ ID NO: 1464776 - RNA, 19 nt, Homo sapiens
  misc_RNA (1)...(19): siRNA sense strand
gcaccgauggcuggaucua

SEQ ID NO: 1464777 - RNA, 19 nt, Homo sapiens
  misc_RNA (1)...(19): siRNA sense strand
gcaucugcauccugcucaa

SEQ ID NO: 1464778 - RNA, 19 nt, Homo sapiens
  misc_RNA (1)...(19): siRNA sense strand
cacuagcuuugcauacuau

SEQ ID NO: 1464779 - RNA, 19 nt, Homo sapiens
  misc_RNA (1)...(19): siRNA sense strand
ccucagcacaagagaagaa

SEQ ID NO: 1464780 - RNA, 19 nt, Homo sapiens
  misc_RNA (1)...(19): siRNA sense strand
acuccugguucuucauuga

SEQ ID NO: 1464781 - RNA, 19 nt, Homo sapiens
  misc_RNA (1)...(19): siRNA sense strand
accgauggcuggaucuaug

SEQ ID NO: 1464782 - RNA, 19 nt, Homo sapiens
  misc_RNA (1)...(19): siRNA sense strand
gagucagcaucuaccuaau

SEQ ID NO: 1464783 - RNA, 19 nt, Homo sapiens
  misc_RNA (1)...(19): siRNA sense strand
gcacccaacuuccccaucu

SEQ ID NO: 1464784 - RNA, 19 nt, Homo sapiens
  misc_RNA (1)...(19): siRNA sense strand
gggcuuccuugucaucaac

SEQ ID NO: 1464785 - RNA, 19 nt, Homo sapiens
  misc_RNA (1)...(19): siRNA sense strand
gcuuuggagucagcaucua

SEQ ID NO: 1464786 - RNA, 19 nt, Homo sapiens
  misc_RNA (1)...(19): siRNA sense strand
gagcugaccaugggcaaag

SEQ ID NO: 1464787 - RNA, 19 nt, Homo sapiens
  misc_RNA (1)...(19): siRNA sense strand
caucuacuccugguucuuc

SEQ ID NO: 1464788 - RNA, 19 nt, Homo sapiens
  misc_RNA (1)...(19): siRNA sense strand
gaguggaugcccauucaca

SEQ ID NO: 1464789 - RNA, 19 nt, Homo sapiens
  misc_RNA (1)...(19): siRNA sense strand
cagcacaagagaagaaugg

SEQ ID NO: 1464790 - RNA, 19 nt, Homo sapiens
  misc_RNA (1)...(19): siRNA sense strand
ccuaauccaggugaucuuu

SEQ ID NO: 1464791 - RNA, 19 nt, Homo sapiens
  misc_RNA (1)...(19): siRNA sense strand
ggacugcccuuucucaaug

SEQ ID NO: 1464792 - RNA, 19 nt, Homo sapiens
  misc_RNA (1)...(19): siRNA sense strand
ggaagaaggagccaaauug

SEQ ID NO: 1464793 - RNA, 19 nt, Homo sapiens
  misc_RNA (1)...(19): siRNA sense strand
ggaagguacucaucuugaa

SEQ ID NO: 1464794 - RNA, 19 nt, Homo sapiens
  misc_RNA (1)...(19): siRNA sense strand
gaagaaggagccaaauuga

SEQ ID NO: 1464795 - RNA, 19 nt, Homo sapiens
  misc_RNA (1)...(19): siRNA sense strand
ggagucagcaucuaccuaa

SEQ ID NO: 1464796 - RNA, 19 nt, Homo sapiens
  misc_RNA (1)...(19): siRNA sense strand
ggaacuguaucccacaaug

SEQ ID NO: 1464797 - RNA, 19 nt, Homo sapiens
  misc_RNA (1)...(19): siRNA sense strand
ccacuagcuuugcauacua

SEQ ID NO: 1464798 - RNA, 19 nt, Homo sapiens
  misc_RNA (1)...(19): siRNA sense strand
caagagcaccagaaguaua

SEQ ID NO: 1464799 - RNA, 19 nt, Homo sapiens
  misc_RNA (1)...(19): siRNA sense strand
gaaggagccaaauugagua

SEQ ID NO: 1464800 - RNA, 19 nt, Homo sapiens
  misc_RNA (1)...(19): siRNA sense strand
caaauugaguauggaggua

SEQ ID NO: 1464801 - RNA, 19 nt, Homo sapiens
  misc_RNA (1)...(19): siRNA sense strand
ggaccugccugccaagcuu

SEQ ID NO: 1464802 - RNA, 19 nt, Homo sapiens
  misc_RNA (1)...(19): siRNA sense strand
gaacuguaucccacaauga

SEQ ID NO: 1464803 - RNA, 19 nt, Homo sapiens
  misc_RNA (1)...(19): siRNA sense strand
caucuaccaucgugacuga

SEQ ID NO: 1464804 - RNA, 19 nt, Homo sapiens
  misc_RNA (1)...(19): siRNA sense strand
aacaagagcaccagaagua

SEQ ID NO: 1464805 - RNA, 19 nt, Homo sapiens
  misc_RNA (1)...(19): siRNA sense strand
ggagccaaauugaguaugg

SEQ ID NO: 1464806 - RNA, 19 nt, Homo sapiens
  misc_RNA (1)...(19): siRNA sense strand
caacagcaccuucccaucu

SEQ ID NO: 1464807 - RNA, 19 nt, Homo sapiens
  misc_RNA (1)...(19): siRNA sense strand
gcaccuugauuggcuaugu

SEQ ID NO: 1464808 - RNA, 19 nt, Homo sapiens
  misc_RNA (1)...(19): siRNA sense strand
gggaagaaggagccaaauu

SEQ ID NO: 1464809 - RNA, 19 nt, Homo sapiens
  misc_RNA (1)...(19): siRNA sense strand
ucaacugcaucuuccugua

SEQ ID NO: 1464810 - RNA, 19 nt, Homo sapiens
  misc_RNA (1)...(19): siRNA sense strand
gggccagucugcagaagga

SEQ ID NO: 1464811 - RNA, 19 nt, Homo sapiens
  misc_RNA (1)...(19): siRNA sense strand
gaaacagacgcgacagcaa

SEQ ID NO: 1464812 - RNA, 19 nt, Homo sapiens
  misc_RNA (1)...(19): siRNA sense strand
acaacacccugcagaacuu

SEQ ID NO: 1464813 - RNA, 19 nt, Homo sapiens
  misc_RNA (1)...(19): siRNA sense strand
caacugcaucuuccuguau

SEQ ID NO: 1464814 - RNA, 19 nt, Homo sapiens
  misc_RNA (1)...(19): siRNA sense strand
gcaacaagagcaccagaag

SEQ ID NO: 1464815 - RNA, 19 nt, Homo sapiens
  misc_RNA (1)...(19): siRNA sense strand
ccugauggcuucucacaac

SEQ ID NO: 1464816 - RNA, 19 nt, Homo sapiens
  misc_RNA (1)...(19): siRNA sense strand
aacagcaccuucccaucua

SEQ ID NO: 1464817 - RNA, 19 nt, Homo sapiens
  misc_RNA (1)...(19): siRNA sense strand
agaaggagccaaauugagu

SEQ ID NO: 1464818 - RNA, 19 nt, Homo sapiens
  misc_RNA (1)...(19): siRNA sense strand
ucaacugcaugacacugaa

SEQ ID NO: 1464819 - RNA, 19 nt, Homo sapiens
  misc_RNA (1)...(19): siRNA sense strand
acuaugggcuggucaugga

SEQ ID NO: 1464820 - RNA, 19 nt, Homo sapiens
  misc_RNA (1)...(19): siRNA sense strand
uggaguggaugcccauuca

SEQ ID NO: 1464821 - RNA, 19 nt, Homo sapiens
  misc_RNA (1)...(19): siRNA sense strand
cuugugggcuuccuuguca

SEQ ID NO: 1464822 - RNA, 19 nt, Homo sapiens
  misc_RNA (1)...(19): siRNA sense strand
gagccaaauugaguaugga

SEQ ID NO: 1464823 - RNA, 19 nt, Homo sapiens
  misc_RNA (1)...(19): siRNA sense strand
gcaucucccucaacugcau

SEQ ID NO: 1464824 - RNA, 19 nt, Homo sapiens
  misc_RNA (1)...(19): siRNA sense strand
cugcagggcuuuggaguca

SEQ ID NO: 1464825 - RNA, 19 nt, Homo sapiens
  misc_RNA (1)...(19): siRNA sense strand
gccggaagguacucaucuu

SEQ ID NO: 1464826 - RNA, 19 nt, Homo sapiens
  misc_RNA (1)...(19): siRNA sense strand
caacaagagcaccagaagu

SEQ ID NO: 1464827 - RNA, 19 nt, Homo sapiens
  misc_RNA (1)...(19): siRNA sense strand
gaugccaaccucagcaaga

SEQ ID NO: 1464828 - RNA, 19 nt, Homo sapiens
  misc_RNA (1)...(19): siRNA sense strand
ugagggcccugcagagagu

SEQ ID NO: 1464829 - RNA, 19 nt, Homo sapiens
  misc_RNA (1)...(19): siRNA sense strand
aacugcaucuuccuguaua

SEQ ID NO: 1464830 - RNA, 19 nt, Homo sapiens
  misc_RNA (1)...(19): siRNA sense strand
gcuggcaucucccucaacu

SEQ ID NO: 1464831 - RNA, 19 nt, Homo sapiens
  misc_RNA (1)...(19): siRNA sense strand
aagagcaccagaaguauau

SEQ ID NO: 1464832 - RNA, 19 nt, Homo sapiens
  misc_RNA (1)...(19): siRNA sense strand
uaauccaggugaucuuugg

SEQ ID NO: 1464833 - RNA, 19 nt, Homo sapiens
  misc_RNA (1)...(19): siRNA sense strand
gcgggaagaaggagccaaa

SEQ ID NO: 1464834 - RNA, 19 nt, Homo sapiens
  misc_RNA (1)...(19): siRNA sense strand
gaagguacucaucuugaac

SEQ ID NO: 1464835 - RNA, 19 nt, Homo sapiens
  misc_RNA (1)...(19): siRNA sense strand
gccacuagcuuugcauacu

SEQ ID NO: 1464836 - RNA, 19 nt, Homo sapiens
  misc_RNA (1)...(19): siRNA sense strand
cggaagguacucaucuuga

SEQ ID NO: 1464837 - RNA, 19 nt, Homo sapiens
  misc_RNA (1)...(19): siRNA sense strand
gggacugcccuuucucaau

SEQ ID NO: 1464838 - RNA, 19 nt, Homo sapiens
  misc_RNA (1)...(19): siRNA sense strand
gcaccgauggcuggaucua

SEQ ID NO: 1464839 - RNA, 19 nt, Homo sapiens
  misc_RNA (1)...(19): siRNA sense strand
gcaucugcauccugcucaa

SEQ ID NO: 1464840 - RNA, 19 nt, Homo sapiens
  misc_RNA (1)...(19): siRNA sense strand
cacuagcuuugcauacuau

SEQ ID NO: 1464841 - RNA, 19 nt, Homo sapiens
  misc_RNA (1)...(19): siRNA sense strand
ccucagcacaagagaagaa

SEQ ID NO: 1464842 - RNA, 19 nt, Homo sapiens
  misc_RNA (1)...(19): siRNA sense strand
acuccugguucuucauuga

SEQ ID NO: 1464843 - RNA, 19 nt, Homo sapiens
  misc_RNA (1)...(19): siRNA sense strand
accgauggcuggaucuaug

SEQ ID NO: 1464844 - RNA, 19 nt, Homo sapiens
  misc_RNA (1)...(19): siRNA sense strand
gagucagcaucuaccuaau

SEQ ID NO: 1464845 - RNA, 19 nt, Homo sapiens
  misc_RNA (1)...(19): siRNA sense strand
gcacccaacuuccccaucu

SEQ ID NO: 1464846 - RNA, 19 nt, Homo sapiens
  misc_RNA (1)...(19): siRNA sense strand
gggcuuccuugucaucaac

SEQ ID NO: 1464847 - RNA, 19 nt, Homo sapiens
  misc_RNA (1)...(19): siRNA sense strand
gcuuuggagucagcaucua

SEQ ID NO: 1464848 - RNA, 19 nt, Homo sapiens
  misc_RNA (1)...(19): siRNA sense strand
gagcugaccaugggcaaag

SEQ ID NO: 1464849 - RNA, 19 nt, Homo sapiens
  misc_RNA (1)...(19): siRNA sense strand
caucuacuccugguucuuc

SEQ ID NO: 1464850 - RNA, 19 nt, Homo sapiens
  misc_RNA (1)...(19): siRNA sense strand
gaguggaugcccauucaca

SEQ ID NO: 1464851 - RNA, 19 nt, Homo sapiens
  misc_RNA (1)...(19): siRNA sense strand
cagcacaagagaagaaugg

SEQ ID NO: 1464852 - RNA, 19 nt, Homo sapiens
  misc_RNA (1)...(19): siRNA sense strand
ccuaauccaggugaucuuu

SEQ ID NO: 1464853 - RNA, 19 nt, Homo sapiens
  misc_RNA (1)...(19): siRNA sense strand
ggacugcccuuucucaaug

SEQ ID NO: 1464854 - RNA, 19 nt, Homo sapiens
  misc_RNA (1)...(19): siRNA sense strand
ggaagaaggagccaaauug

SEQ ID NO: 1464855 - RNA, 19 nt, Homo sapiens
  misc_RNA (1)...(19): siRNA sense strand
ggaagguacucaucuugaa

SEQ ID NO: 1464856 - RNA, 19 nt, Homo sapiens
  misc_RNA (1)...(19): siRNA sense strand
gaagaaggagccaaauuga

SEQ ID NO: 1464857 - RNA, 19 nt, Homo sapiens
  misc_RNA (1)...(19): siRNA sense strand
ggagucagcaucuaccuaa

SEQ ID NO: 1464858 - RNA, 19 nt, Homo sapiens
  misc_RNA (1)...(19): siRNA sense strand
ggaacuguaucccacaaug

SEQ ID NO: 1464859 - RNA, 19 nt, Homo sapiens
  misc_RNA (1)...(19): siRNA sense strand
ccacuagcuuugcauacua

SEQ ID NO: 1464860 - RNA, 19 nt, Homo sapiens
  misc_RNA (1)...(19): siRNA sense strand
caagagcaccagaaguaua

SEQ ID NO: 1464861 - RNA, 19 nt, Homo sapiens
  misc_RNA (1)...(19): siRNA sense strand
gaaggagccaaauugagua

SEQ ID NO: 1464862 - RNA, 19 nt, Homo sapiens
  misc_RNA (1)...(19): siRNA sense strand
caaauugaguauggaggua

SEQ ID NO: 1464863 - RNA, 19 nt, Homo sapiens
  misc_RNA (1)...(19): siRNA sense strand
ggaccugccugccaagcuu

SEQ ID NO: 1464864 - RNA, 19 nt, Homo sapiens
  misc_RNA (1)...(19): siRNA sense strand
gaacuguaucccacaauga

SEQ ID NO: 1464865 - RNA, 19 nt, Homo sapiens
  misc_RNA (1)...(19): siRNA sense strand
caucuaccaucgugacuga

SEQ ID NO: 1464866 - RNA, 19 nt, Homo sapiens
  misc_RNA (1)...(19): siRNA sense strand
aacaagagcaccagaagua

SEQ ID NO: 1464867 - RNA, 19 nt, Homo sapiens
  misc_RNA (1)...(19): siRNA sense strand
ggagccaaauugaguaugg

SEQ ID NO: 1464868 - RNA, 19 nt, Homo sapiens
  misc_RNA (1)...(19): siRNA sense strand
caacagcaccuucccaucu

SEQ ID NO: 1464869 - RNA, 19 nt, Homo sapiens
  misc_RNA (1)...(19): siRNA sense strand
gcaccuugauuggcuaugu

SEQ ID NO: 1464870 - RNA, 19 nt, Homo sapiens
  misc_RNA (1)...(19): siRNA sense strand
gggaagaaggagccaaauu

SEQ ID NO: 1464871 - RNA, 19 nt, Homo sapiens
  misc_RNA (1)...(19): siRNA sense strand
ucaacugcaucuuccugua

SEQ ID NO: 1464872 - RNA, 19 nt, Homo sapiens
  misc_RNA (1)...(19): siRNA sense strand
gggccagucugcagaagga

SEQ ID NO: 1464873 - RNA, 19 nt, Homo sapiens
  misc_RNA (1)...(19): siRNA sense strand
gaaacagacgcgacagcaa

SEQ ID NO: 1464874 - RNA, 19 nt, Homo sapiens
  misc_RNA (1)...(19): siRNA sense strand
acaacacccugcagaacuu

SEQ ID NO: 1464875 - RNA, 19 nt, Homo sapiens
  misc_RNA (1)...(19): siRNA sense strand
caacugcaucuuccuguau

SEQ ID NO: 1464876 - RNA, 19 nt, Homo sapiens
  misc_RNA (1)...(19): siRNA sense strand
gcaacaagagcaccagaag

SEQ ID NO: 1464877 - RNA, 19 nt, Homo sapiens
  misc_RNA (1)...(19): siRNA sense strand
ccugauggcuucucacaac

SEQ ID NO: 1464878 - RNA, 19 nt, Homo sapiens
  misc_RNA (1)...(19): siRNA sense strand
aacagcaccuucccaucua

SEQ ID NO: 1464879 - RNA, 19 nt, Homo sapiens
  misc_RNA (1)...(19): siRNA sense strand
agaaggagccaaauugagu

SEQ ID NO: 1464880 - RNA, 19 nt, Homo sapiens
  misc_RNA (1)...(19): siRNA sense strand
ucaacugcaugacacugaa

SEQ ID NO: 1464881 - RNA, 19 nt, Homo sapiens
  misc_RNA (1)...(19): siRNA sense strand
acuaugggcuggucaugga

SEQ ID NO: 1464882 - RNA, 19 nt, Homo sapiens
  misc_RNA (1)...(19): siRNA sense strand
uggaguggaugcccauuca

SEQ ID NO: 1464883 - RNA, 19 nt, Homo sapiens
  misc_RNA (1)...(19): siRNA sense strand
cuugugggcuuccuuguca

SEQ ID NO: 1464884 - RNA, 19 nt, Homo sapiens
  misc_RNA (1)...(19): siRNA sense strand
gagccaaauugaguaugga

SEQ ID NO: 1464885 - RNA, 19 nt, Homo sapiens
  misc_RNA (1)...(19): siRNA sense strand
gcaucucccucaacugcau

SEQ ID NO: 1464886 - RNA, 19 nt, Homo sapiens
  misc_RNA (1)...(19): siRNA sense strand
cugcagggcuuuggaguca

SEQ ID NO: 1464887 - RNA, 19 nt, Homo sapiens
  misc_RNA (1)...(19): siRNA sense strand
gccggaagguacucaucuu

SEQ ID NO: 1464888 - RNA, 19 nt, Homo sapiens
  misc_RNA (1)...(19): siRNA sense strand
caacaagagcaccagaagu

SEQ ID NO: 1464889 - RNA, 19 nt, Homo sapiens
  misc_RNA (1)...(19): siRNA sense strand
gaugccaaccucagcaaga

SEQ ID NO: 1464890 - RNA, 19 nt, Homo sapiens
  misc_RNA (1)...(19): siRNA sense strand
ugagggcccugcagagagu

SEQ ID NO: 1464891 - RNA, 19 nt, Homo sapiens
  misc_RNA (1)...(19): siRNA sense strand
aacugcaucuuccuguaua

SEQ ID NO: 1464892 - RNA, 19 nt, Homo sapiens
  misc_RNA (1)...(19): siRNA sense strand
gcuggcaucucccucaacu

SEQ ID NO: 1464893 - RNA, 19 nt, Homo sapiens
  misc_RNA (1)...(19): siRNA sense strand
aagagcaccagaaguauau

SEQ ID NO: 1464894 - RNA, 19 nt, Homo sapiens
  misc_RNA (1)...(19): siRNA sense strand
uaauccaggugaucuuugg

SEQ ID NO: 1464895 - RNA, 19 nt, Homo sapiens
  misc_RNA (1)...(19): siRNA sense strand
gcgggaagaaggagccaaa

SEQ ID NO: 1464896 - RNA, 19 nt, Homo sapiens
  misc_RNA (1)...(19): siRNA sense strand
gaagguacucaucuugaac

SEQ ID NO: 1464897 - RNA, 19 nt, Homo sapiens
  misc_RNA (1)...(19): siRNA sense strand
gccacuagcuuugcauacu

SEQ ID NO: 1464898 - RNA, 19 nt, Homo sapiens
  misc_RNA (1)...(19): siRNA sense strand
cggaagguacucaucuuga

SEQ ID NO: 1464899 - RNA, 19 nt, Homo sapiens
  misc_RNA (1)...(19): siRNA sense strand
gggacugcccuuucucaau

SEQ ID NO: 1464900 - RNA, 19 nt, Homo sapiens
  misc_RNA (1)...(19): siRNA sense strand
gcaccgauggcuggaucua

SEQ ID NO: 1464901 - RNA, 19 nt, Homo sapiens
  misc_RNA (1)...(19): siRNA sense strand
gcaucugcauccugcucaa

SEQ ID NO: 1464902 - RNA, 19 nt, Homo sapiens
  misc_RNA (1)...(19): siRNA sense strand
cacuagcuuugcauacuau

SEQ ID NO: 1464903 - RNA, 19 nt, Homo sapiens
  misc_RNA (1)...(19): siRNA sense strand
ccucagcacaagagaagaa

SEQ ID NO: 1464904 - RNA, 19 nt, Homo sapiens
  misc_RNA (1)...(19): siRNA sense strand
acuccugguucuucauuga

SEQ ID NO: 1464905 - RNA, 19 nt, Homo sapiens
  misc_RNA (1)...(19): siRNA sense strand
accgauggcuggaucuaug

SEQ ID NO: 1464906 - RNA, 19 nt, Homo sapiens
  misc_RNA (1)...(19): siRNA sense strand
gagucagcaucuaccuaau

SEQ ID NO: 1464907 - RNA, 19 nt, Homo sapiens
  misc_RNA (1)...(19): siRNA sense strand
gcacccaacuuccccaucu

SEQ ID NO: 1464908 - RNA, 19 nt, Homo sapiens
  misc_RNA (1)...(19): siRNA sense strand
gggcuuccuugucaucaac

SEQ ID NO: 1464909 - RNA, 19 nt, Homo sapiens
  misc_RNA (1)...(19): siRNA sense strand
gcuuuggagucagcaucua

SEQ ID NO: 1464910 - RNA, 19 nt, Homo sapiens
  misc_RNA (1)...(19): siRNA sense strand
gagcugaccaugggcaaag

SEQ ID NO: 1464911 - RNA, 19 nt, Homo sapiens
  misc_RNA (1)...(19): siRNA sense strand
caucuacuccugguucuuc

SEQ ID NO: 1464912 - RNA, 19 nt, Homo sapiens
  misc_RNA (1)...(19): siRNA sense strand
gaguggaugcccauucaca

SEQ ID NO: 1464913 - RNA, 19 nt, Homo sapiens
  misc_RNA (1)...(19): siRNA sense strand
cagcacaagagaagaaugg

SEQ ID NO: 1464914 - RNA, 19 nt, Homo sapiens
  misc_RNA (1)...(19): siRNA sense strand
ccuaauccaggugaucuuu

SEQ ID NO: 1464915 - RNA, 19 nt, Homo sapiens
  misc_RNA (1)...(19): siRNA sense strand
ggacugcccuuucucaaug

SEQ ID NO: 1464916 - RNA, 19 nt, Homo sapiens
  misc_RNA (1)...(19): siRNA sense strand
ggaagaaggagccaaauug

SEQ ID NO: 1464917 - RNA, 19 nt, Homo sapiens
  misc_RNA (1)...(19): siRNA sense strand
ggaagguacucaucuugaa

SEQ ID NO: 1464918 - RNA, 19 nt, Homo sapiens
  misc_RNA (1)...(19): siRNA sense strand
gaagaaggagccaaauuga

SEQ ID NO: 1464919 - RNA, 19 nt, Homo sapiens
  misc_RNA (1)...(19): siRNA sense strand
ggagucagcaucuaccuaa

SEQ ID NO: 1464920 - RNA, 19 nt, Homo sapiens
  misc_RNA (1)...(19): siRNA sense strand
ggaacuguaucccacaaug

SEQ ID NO: 1464921 - RNA, 19 nt, Homo sapiens
  misc_RNA (1)...(19): siRNA sense strand
ccacuagcuuugcauacua

SEQ ID NO: 1464922 - RNA, 19 nt, Homo sapiens
  misc_RNA (1)...(19): siRNA sense strand
caagagcaccagaaguaua

SEQ ID NO: 1464923 - RNA, 19 nt, Homo sapiens
  misc_RNA (1)...(19): siRNA sense strand
gaaggagccaaauugagua

SEQ ID NO: 1464924 - RNA, 19 nt, Homo sapiens
  misc_RNA (1)...(19): siRNA sense strand
caaauugaguauggaggua

SEQ ID NO: 1464925 - RNA, 19 nt, Homo sapiens
  misc_RNA (1)...(19): siRNA sense strand
ggaccugccugccaagcuu

SEQ ID NO: 1464926 - RNA, 19 nt, Homo sapiens
  misc_RNA (1)...(19): siRNA sense strand
gaacuguaucccacaauga

SEQ ID NO: 1464927 - RNA, 19 nt, Homo sapiens
  misc_RNA (1)...(19): siRNA sense strand
caucuaccaucgugacuga

SEQ ID NO: 1464928 - RNA, 19 nt, Homo sapiens
  misc_RNA (1)...(19): siRNA sense strand
aacaagagcaccagaagua

SEQ ID NO: 1464929 - RNA, 19 nt, Homo sapiens
  misc_RNA (1)...(19): siRNA sense strand
ggagccaaauugaguaugg

SEQ ID NO: 1464930 - RNA, 19 nt, Homo sapiens
  misc_RNA (1)...(19): siRNA sense strand
caacagcaccuucccaucu

SEQ ID NO: 1464931 - RNA, 19 nt, Homo sapiens
  misc_RNA (1)...(19): siRNA sense strand
gcaccuugauuggcuaugu

SEQ ID NO: 1464932 - RNA, 19 nt, Homo sapiens
  misc_RNA (1)...(19): siRNA sense strand
gggaagaaggagccaaauu

SEQ ID NO: 1464933 - RNA, 19 nt, Homo sapiens
  misc_RNA (1)...(19): siRNA sense strand
ucaacugcaucuuccugua

SEQ ID NO: 1464934 - RNA, 19 nt, Homo sapiens
  misc_RNA (1)...(19): siRNA sense strand
gggccagucugcagaagga

SEQ ID NO: 1464935 - RNA, 19 nt, Homo sapiens
  misc_RNA (1)...(19): siRNA sense strand
gaaacagacgcgacagcaa

SEQ ID NO: 1464936 - RNA, 19 nt, Homo sapiens
  misc_RNA (1)...(19): siRNA sense strand
acaacacccugcagaacuu

SEQ ID NO: 1464937 - RNA, 19 nt, Homo sapiens
  misc_RNA (1)...(19): siRNA sense strand
caacugcaucuuccuguau

SEQ ID NO: 1464938 - RNA, 19 nt, Homo sapiens
  misc_RNA (1)...(19): siRNA sense strand
gcaacaagagcaccagaag

SEQ ID NO: 1464939 - RNA, 19 nt, Homo sapiens
  misc_RNA (1)...(19): siRNA sense strand
ccugauggcuucucacaac

SEQ ID NO: 1464940 - RNA, 19 nt, Homo sapiens
  misc_RNA (1)...(19): siRNA sense strand
aacagcaccuucccaucua

SEQ ID NO: 1464941 - RNA, 19 nt, Homo sapiens
  misc_RNA (1)...(19): siRNA sense strand
agaaggagccaaauugagu

SEQ ID NO: 1464942 - RNA, 19 nt, Homo sapiens
  misc_RNA (1)...(19): siRNA sense strand
ucaacugcaugacacugaa

SEQ ID NO: 1464943 - RNA, 19 nt, Homo sapiens
  misc_RNA (1)...(19): siRNA sense strand
acuaugggcuggucaugga

SEQ ID NO: 1464944 - RNA, 19 nt, Homo sapiens
  misc_RNA (1)...(19): siRNA sense strand
uggaguggaugcccauuca

SEQ ID NO: 1464945 - RNA, 19 nt, Homo sapiens
  misc_RNA (1)...(19): siRNA sense strand
cuugugggcuuccuuguca

SEQ ID NO: 1464946 - RNA, 19 nt, Homo sapiens
  misc_RNA (1)...(19): siRNA sense strand
gagccaaauugaguaugga

SEQ ID NO: 1464947 - RNA, 19 nt, Homo sapiens
  misc_RNA (1)...(19): siRNA sense strand
gcaucucccucaacugcau

SEQ ID NO: 1464948 - RNA, 19 nt, Homo sapiens
  misc_RNA (1)...(19): siRNA sense strand
cugcagggcuuuggaguca

SEQ ID NO: 1464949 - RNA, 19 nt, Homo sapiens
  misc_RNA (1)...(19): siRNA sense strand
gccggaagguacucaucuu

SEQ ID NO: 1464950 - RNA, 19 nt, Homo sapiens
  misc_RNA (1)...(19): siRNA sense strand
caacaagagcaccagaagu

SEQ ID NO: 1464951 - RNA, 19 nt, Homo sapiens
  misc_RNA (1)...(19): siRNA sense strand
gaugccaaccucagcaaga

SEQ ID NO: 1464952 - RNA, 19 nt, Homo sapiens
  misc_RNA (1)...(19): siRNA sense strand
ugagggcccugcagagagu

SEQ ID NO: 1464953 - RNA, 19 nt, Homo sapiens
  misc_RNA (1)...(19): siRNA sense strand
aacugcaucuuccuguaua

SEQ ID NO: 1464954 - RNA, 19 nt, Homo sapiens
  misc_RNA (1)...(19): siRNA sense strand
gcuggcaucucccucaacu

SEQ ID NO: 1464955 - RNA, 19 nt, Homo sapiens
  misc_RNA (1)...(19): siRNA sense strand
aagagcaccagaaguauau

SEQ ID NO: 1464956 - RNA, 19 nt, Homo sapiens
  misc_RNA (1)...(19): siRNA sense strand
uaauccaggugaucuuugg

SEQ ID NO: 1464957 - RNA, 19 nt, Homo sapiens
  misc_RNA (1)...(19): siRNA sense strand
gcgggaagaaggagccaaa

SEQ ID NO: 1464958 - RNA, 19 nt, Homo sapiens
  misc_RNA (1)...(19): siRNA sense strand
gaagguacucaucuugaac

SEQ ID NO: 1464959 - RNA, 19 nt, Homo sapiens
  misc_RNA (1)...(19): siRNA sense strand
gccacuagcuuugcauacu

SEQ ID NO: 1464960 - RNA, 19 nt, Homo sapiens
  misc_RNA (1)...(19): siRNA sense strand
cggaagguacucaucuuga

SEQ ID NO: 1464961 - RNA, 19 nt, Homo sapiens
  misc_RNA (1)...(19): siRNA sense strand
gggacugcccuuucucaau

SEQ ID NO: 1464962 - RNA, 19 nt, Homo sapiens
  misc_RNA (1)...(19): siRNA sense strand
gcaccgauggcuggaucua

SEQ ID NO: 1464963 - RNA, 19 nt, Homo sapiens
  misc_RNA (1)...(19): siRNA sense strand
gcaucugcauccugcucaa

SEQ ID NO: 1464964 - RNA, 19 nt, Homo sapiens
  misc_RNA (1)...(19): siRNA sense strand
cacuagcuuugcauacuau

SEQ ID NO: 1464965 - RNA, 19 nt, Homo sapiens
  misc_RNA (1)...(19): siRNA sense strand
ccucagcacaagagaagaa

SEQ ID NO: 1464966 - RNA, 19 nt, Homo sapiens
  misc_RNA (1)...(19): siRNA sense strand
acuccugguucuucauuga

SEQ ID NO: 1464967 - RNA, 19 nt, Homo sapiens
  misc_RNA (1)...(19): siRNA sense strand
accgauggcuggaucuaug

SEQ ID NO: 1464968 - RNA, 19 nt, Homo sapiens
  misc_RNA (1)...(19): siRNA sense strand
gagucagcaucuaccuaau

SEQ ID NO: 1464969 - RNA, 19 nt, Homo sapiens
  misc_RNA (1)...(19): siRNA sense strand
gcacccaacuuccccaucu

SEQ ID NO: 1464970 - RNA, 19 nt, Homo sapiens
  misc_RNA (1)...(19): siRNA sense strand
gggcuuccuugucaucaac

SEQ ID NO: 1464971 - RNA, 19 nt, Homo sapiens
  misc_RNA (1)...(19): siRNA sense strand
gcuuuggagucagcaucua

SEQ ID NO: 1464972 - RNA, 19 nt, Homo sapiens
  misc_RNA (1)...(19): siRNA sense strand
gagcugaccaugggcaaag

SEQ ID NO: 1464973 - RNA, 19 nt, Homo sapiens
  misc_RNA (1)...(19): siRNA sense strand
caucuacuccugguucuuc

SEQ ID NO: 1464974 - RNA, 19 nt, Homo sapiens
  misc_RNA (1)...(19): siRNA sense strand
gaguggaugcccauucaca

SEQ ID NO: 1464975 - RNA, 19 nt, Homo sapiens
  misc_RNA (1)...(19): siRNA sense strand
cagcacaagagaagaaugg

SEQ ID NO: 1464976 - RNA, 19 nt, Homo sapiens
  misc_RNA (1)...(19): siRNA sense strand
ccuaauccaggugaucuuu

SEQ ID NO: 1464977 - RNA, 19 nt, Homo sapiens
  misc_RNA (1)...(19): siRNA sense strand
ggacugcccuuucucaaug

SEQ ID NO: 1464978 - RNA, 19 nt, Homo sapiens
  misc_RNA (1)...(19): siRNA sense strand
ggaagaaggagccaaauug

SEQ ID NO: 1464979 - RNA, 19 nt, Homo sapiens
  misc_RNA (1)...(19): siRNA sense strand
ggaagguacucaucuugaa

SEQ ID NO: 1464980 - RNA, 19 nt, Homo sapiens
  misc_RNA (1)...(19): siRNA sense strand
gaagaaggagccaaauuga

SEQ ID NO: 1464981 - RNA, 19 nt, Homo sapiens
  misc_RNA (1)...(19): siRNA sense strand
ggagucagcaucuaccuaa

SEQ ID NO: 1464982 - RNA, 19 nt, Homo sapiens
  misc_RNA (1)...(19): siRNA sense strand
ggaacuguaucccacaaug

SEQ ID NO: 1464983 - RNA, 19 nt, Homo sapiens
  misc_RNA (1)...(19): siRNA sense strand
ccacuagcuuugcauacua

SEQ ID NO: 1464984 - RNA, 19 nt, Homo sapiens
  misc_RNA (1)...(19): siRNA sense strand
caagagcaccagaaguaua

SEQ ID NO: 1464985 - RNA, 19 nt, Homo sapiens
  misc_RNA (1)...(19): siRNA sense strand
gaaggagccaaauugagua

SEQ ID NO: 1464986 - RNA, 19 nt, Homo sapiens
  misc_RNA (1)...(19): siRNA sense strand
caaauugaguauggaggua

SEQ ID NO: 1464987 - RNA, 19 nt, Homo sapiens
  misc_RNA (1)...(19): siRNA sense strand
ggaccugccugccaagcuu

SEQ ID NO: 1464988 - RNA, 19 nt, Homo sapiens
  misc_RNA (1)...(19): siRNA sense strand
gaacuguaucccacaauga

SEQ ID NO: 1464989 - RNA, 19 nt, Homo sapiens
  misc_RNA (1)...(19): siRNA sense strand
caucuaccaucgugacuga

SEQ ID NO: 1464990 - RNA, 19 nt, Homo sapiens
  misc_RNA (1)...(19): siRNA sense strand
aacaagagcaccagaagua

SEQ ID NO: 1464991 - RNA, 19 nt, Homo sapiens
  misc_RNA (1)...(19): siRNA sense strand
ggagccaaauugaguaugg

SEQ ID NO: 1464992 - RNA, 19 nt, Homo sapiens
  misc_RNA (1)...(19): siRNA sense strand
caacagcaccuucccaucu

SEQ ID NO: 1464993 - RNA, 19 nt, Homo sapiens
  misc_RNA (1)...(19): siRNA sense strand
gcaccuugauuggcuaugu

SEQ ID NO: 1464994 - RNA, 19 nt, Homo sapiens
  misc_RNA (1)...(19): siRNA sense strand
gggaagaaggagccaaauu

SEQ ID NO: 1464995 - RNA, 19 nt, Homo sapiens
  misc_RNA (1)...(19): siRNA sense strand
ucaacugcaucuuccugua

SEQ ID NO: 1464996 - RNA, 19 nt, Homo sapiens
  misc_RNA (1)...(19): siRNA sense strand
gggccagucugcagaagga

SEQ ID NO: 1464997 - RNA, 19 nt, Homo sapiens
  misc_RNA (1)...(19): siRNA sense strand
gaaacagacgcgacagcaa

SEQ ID NO: 1464998 - RNA, 19 nt, Homo sapiens
  misc_RNA (1)...(19): siRNA sense strand
acaacacccugcagaacuu

SEQ ID NO: 1464999 - RNA, 19 nt, Homo sapiens
  misc_RNA (1)...(19): siRNA sense strand
caacugcaucuuccuguau

SEQ ID NO: 1465000 - RNA, 19 nt, Homo sapiens
  misc_RNA (1)...(19): siRNA sense strand
gcaacaagagcaccagaag

SEQ ID NO: 1465001 - RNA, 19 nt, Homo sapiens
  misc_RNA (1)...(19): siRNA sense strand
ccugauggcuucucacaac

SEQ ID NO: 1465002 - RNA, 19 nt, Homo sapiens
  misc_RNA (1)...(19): siRNA sense strand
aacagcaccuucccaucua

SEQ ID NO: 1465003 - RNA, 19 nt, Homo sapiens
  misc_RNA (1)...(19): siRNA sense strand
agaaggagccaaauugagu

SEQ ID NO: 1465004 - RNA, 19 nt, Homo sapiens
  misc_RNA (1)...(19): siRNA sense strand
ucaacugcaugacacugaa

SEQ ID NO: 1465005 - RNA, 19 nt, Homo sapiens
  misc_RNA (1)...(19): siRNA sense strand
acuaugggcuggucaugga

SEQ ID NO: 1465006 - RNA, 19 nt, Homo sapiens
  misc_RNA (1)...(19): siRNA sense strand
uggaguggaugcccauuca

SEQ ID NO: 1465007 - RNA, 19 nt, Homo sapiens
  misc_RNA (1)...(19): siRNA sense strand
cuugugggcuuccuuguca

SEQ ID NO: 1465008 - RNA, 19 nt, Homo sapiens
  misc_RNA (1)...(19): siRNA sense strand
gagccaaauugaguaugga

SEQ ID NO: 1465009 - RNA, 19 nt, Homo sapiens
  misc_RNA (1)...(19): siRNA sense strand
gcaucucccucaacugcau

SEQ ID NO: 1465010 - RNA, 19 nt, Homo sapiens
  misc_RNA (1)...(19): siRNA sense strand
cugcagggcuuuggaguca

SEQ ID NO: 1465011 - RNA, 19 nt, Homo sapiens
  misc_RNA (1)...(19): siRNA sense strand
gccggaagguacucaucuu

SEQ ID NO: 1465012 - RNA, 19 nt, Homo sapiens
  misc_RNA (1)...(19): siRNA sense strand
caacaagagcaccagaagu

SEQ ID NO: 1465013 - RNA, 19 nt, Homo sapiens
  misc_RNA (1)...(19): siRNA sense strand
gaugccaaccucagcaaga

SEQ ID NO: 1465014 - RNA, 19 nt, Homo sapiens
  misc_RNA (1)...(19): siRNA sense strand
ugagggcccugcagagagu

SEQ ID NO: 1465015 - RNA, 19 nt, Homo sapiens
  misc_RNA (1)...(19): siRNA sense strand
aacugcaucuuccuguaua

SEQ ID NO: 1465016 - RNA, 19 nt, Homo sapiens
  misc_RNA (1)...(19): siRNA sense strand
gcuggcaucucccucaacu

SEQ ID NO: 1465017 - RNA, 19 nt, Homo sapiens
  misc_RNA (1)...(19): siRNA sense strand
aagagcaccagaaguauau

SEQ ID NO: 1465018 - RNA, 19 nt, Homo sapiens
  misc_RNA (1)...(19): siRNA sense strand
uaauccaggugaucuuugg

SEQ ID NO: 1465019 - RNA, 19 nt, Homo sapiens
  misc_RNA (1)...(19): siRNA sense strand
gcgggaagaaggagccaaa

SEQ ID NO: 1465020 - RNA, 19 nt, Homo sapiens
  misc_RNA (1)...(19): siRNA sense strand
gaagguacucaucuugaac

SEQ ID NO: 1465021 - RNA, 19 nt, Homo sapiens
  misc_RNA (1)...(19): siRNA sense strand
gccacuagcuuugcauacu

SEQ ID NO: 1465022 - RNA, 19 nt, Homo sapiens
  misc_RNA (1)...(19): siRNA sense strand
cggaagguacucaucuuga

SEQ ID NO: 1465023 - RNA, 19 nt, Homo sapiens
  misc_RNA (1)...(19): siRNA sense strand
gggacugcccuuucucaau

SEQ ID NO: 1465024 - RNA, 19 nt, Homo sapiens
  misc_RNA (1)...(19): siRNA sense strand
gcaccgauggcuggaucua

SEQ ID NO: 1465025 - RNA, 19 nt, Homo sapiens
  misc_RNA (1)...(19): siRNA sense strand
gcaucugcauccugcucaa

SEQ ID NO: 1465026 - RNA, 19 nt, Homo sapiens
  misc_RNA (1)...(19): siRNA sense strand
cacuagcuuugcauacuau

SEQ ID NO: 1465027 - RNA, 19 nt, Homo sapiens
  misc_RNA (1)...(19): siRNA sense strand
ccucagcacaagagaagaa

SEQ ID NO: 1465028 - RNA, 19 nt, Homo sapiens
  misc_RNA (1)...(19): siRNA sense strand
acuccugguucuucauuga

SEQ ID NO: 1465029 - RNA, 19 nt, Homo sapiens
  misc_RNA (1)...(19): siRNA sense strand
accgauggcuggaucuaug

SEQ ID NO: 1465030 - RNA, 19 nt, Homo sapiens
  misc_RNA (1)...(19): siRNA sense strand
gagucagcaucuaccuaau

SEQ ID NO: 1465031 - RNA, 19 nt, Homo sapiens
  misc_RNA (1)...(19): siRNA sense strand
gcacccaacuuccccaucu

SEQ ID NO: 1465032 - RNA, 19 nt, Homo sapiens
  misc_RNA (1)...(19): siRNA sense strand
gggcuuccuugucaucaac

SEQ ID NO: 1465033 - RNA, 19 nt, Homo sapiens
  misc_RNA (1)...(19): siRNA sense strand
gcuuuggagucagcaucua

SEQ ID NO: 1465034 - RNA, 19 nt, Homo sapiens
  misc_RNA (1)...(19): siRNA sense strand
gagcugaccaugggcaaag

SEQ ID NO: 1465035 - RNA, 19 nt, Homo sapiens
  misc_RNA (1)...(19): siRNA sense strand
caucuacuccugguucuuc

SEQ ID NO: 1465036 - RNA, 19 nt, Homo sapiens
  misc_RNA (1)...(19): siRNA sense strand
gaguggaugcccauucaca

SEQ ID NO: 1465037 - RNA, 19 nt, Homo sapiens
  misc_RNA (1)...(19): siRNA sense strand
cagcacaagagaagaaugg

SEQ ID NO: 1465038 - RNA, 19 nt, Homo sapiens
  misc_RNA (1)...(19): siRNA sense strand
ccuaauccaggugaucuuu

SEQ ID NO: 1465039 - RNA, 19 nt, Homo sapiens
  misc_RNA (1)...(19): siRNA sense strand
ggacugcccuuucucaaug

SEQ ID NO: 1465040 - RNA, 19 nt, Homo sapiens
  misc_RNA (1)...(19): siRNA sense strand
ggaagaaggagccaaauug

SEQ ID NO: 1465041 - RNA, 19 nt, Homo sapiens
  misc_RNA (1)...(19): siRNA sense strand
ggaagguacucaucuugaa

SEQ ID NO: 1465042 - RNA, 19 nt, Homo sapiens
  misc_RNA (1)...(19): siRNA sense strand
gaagaaggagccaaauuga

SEQ ID NO: 1465043 - RNA, 19 nt, Homo sapiens
  misc_RNA (1)...(19): siRNA sense strand
ggagucagcaucuaccuaa

SEQ ID NO: 1465044 - RNA, 19 nt, Homo sapiens
  misc_RNA (1)...(19): siRNA sense strand
ggaacuguaucccacaaug

SEQ ID NO: 1465045 - RNA, 19 nt, Homo sapiens
  misc_RNA (1)...(19): siRNA sense strand
ccacuagcuuugcauacua

SEQ ID NO: 1465046 - RNA, 19 nt, Homo sapiens
  misc_RNA (1)...(19): siRNA sense strand
caagagcaccagaaguaua

SEQ ID NO: 1465047 - RNA, 19 nt, Homo sapiens
  misc_RNA (1)...(19): siRNA sense strand
gaaggagccaaauugagua

SEQ ID NO: 1465048 - RNA, 19 nt, Homo sapiens
  misc_RNA (1)...(19): siRNA sense strand
caaauugaguauggaggua

SEQ ID NO: 1465049 - RNA, 19 nt, Homo sapiens
  misc_RNA (1)...(19): siRNA sense strand
ggaccugccugccaagcuu

SEQ ID NO: 1465050 - RNA, 19 nt, Homo sapiens
  misc_RNA (1)...(19): siRNA sense strand
gaacuguaucccacaauga

SEQ ID NO: 1465051 - RNA, 19 nt, Homo sapiens
  misc_RNA (1)...(19): siRNA sense strand
caucuaccaucgugacuga

SEQ ID NO: 1465052 - RNA, 19 nt, Homo sapiens
  misc_RNA (1)...(19): siRNA sense strand
aacaagagcaccagaagua

SEQ ID NO: 1465053 - RNA, 19 nt, Homo sapiens
  misc_RNA (1)...(19): siRNA sense strand
ggagccaaauugaguaugg

SEQ ID NO: 1465054 - RNA, 19 nt, Homo sapiens
  misc_RNA (1)...(19): siRNA sense strand
caacagcaccuucccaucu

SEQ ID NO: 1465055 - RNA, 19 nt, Homo sapiens
  misc_RNA (1)...(19): siRNA sense strand
gcaccuugauuggcuaugu

SEQ ID NO: 1465056 - RNA, 19 nt, Homo sapiens
  misc_RNA (1)...(19): siRNA sense strand
gggaagaaggagccaaauu

SEQ ID NO: 1465057 - RNA, 19 nt, Homo sapiens
  misc_RNA (1)...(19): siRNA sense strand
ucaacugcaucuuccugua

SEQ ID NO: 1465058 - RNA, 19 nt, Homo sapiens
  misc_RNA (1)...(19): siRNA sense strand
gggccagucugcagaagga

SEQ ID NO: 1465059 - RNA, 19 nt, Homo sapiens
  misc_RNA (1)...(19): siRNA sense strand
gaaacagacgcgacagcaa

SEQ ID NO: 1465060 - RNA, 19 nt, Homo sapiens
  misc_RNA (1)...(19): siRNA sense strand
acaacacccugcagaacuu

SEQ ID NO: 1465061 - RNA, 19 nt, Homo sapiens
  misc_RNA (1)...(19): siRNA sense strand
caacugcaucuuccuguau

SEQ ID NO: 1465062 - RNA, 19 nt, Homo sapiens
  misc_RNA (1)...(19): siRNA sense strand
gcaacaagagcaccagaag

SEQ ID NO: 1465063 - RNA, 19 nt, Homo sapiens
  misc_RNA (1)...(19): siRNA sense strand
ccugauggcuucucacaac

SEQ ID NO: 1465064 - RNA, 19 nt, Homo sapiens
  misc_RNA (1)...(19): siRNA sense strand
aacagcaccuucccaucua

SEQ ID NO: 1465065 - RNA, 19 nt, Homo sapiens
  misc_RNA (1)...(19): siRNA sense strand
agaaggagccaaauugagu

SEQ ID NO: 1465066 - RNA, 19 nt, Homo sapiens
  misc_RNA (1)...(19): siRNA sense strand
ucaacugcaugacacugaa

SEQ ID NO: 1465067 - RNA, 19 nt, Homo sapiens
  misc_RNA (1)...(19): siRNA sense strand
acuaugggcuggucaugga

SEQ ID NO: 1465068 - RNA, 19 nt, Homo sapiens
  misc_RNA (1)...(19): siRNA sense strand
uggaguggaugcccauuca

SEQ ID NO: 1465069 - RNA, 19 nt, Homo sapiens
  misc_RNA (1)...(19): siRNA sense strand
cuugugggcuuccuuguca

SEQ ID NO: 1465070 - RNA, 19 nt, Homo sapiens
  misc_RNA (1)...(19): siRNA sense strand
gagccaaauugaguaugga

SEQ ID NO: 1465071 - RNA, 19 nt, Homo sapiens
  misc_RNA (1)...(19): siRNA sense strand
gcaucucccucaacugcau

SEQ ID NO: 1465072 - RNA, 19 nt, Homo sapiens
  misc_RNA (1)...(19): siRNA sense strand
cugcagggcuuuggaguca

SEQ ID NO: 1465073 - RNA, 19 nt, Homo sapiens
  misc_RNA (1)...(19): siRNA sense strand
gccggaagguacucaucuu

SEQ ID NO: 1465074 - RNA, 19 nt, Homo sapiens
  misc_RNA (1)...(19): siRNA sense strand
caacaagagcaccagaagu

SEQ ID NO: 1465075 - RNA, 19 nt, Homo sapiens
  misc_RNA (1)...(19): siRNA sense strand
gaugccaaccucagcaaga

SEQ ID NO: 1465076 - RNA, 19 nt, Homo sapiens
  misc_RNA (1)...(19): siRNA sense strand
ugagggcccugcagagagu

SEQ ID NO: 1465077 - RNA, 19 nt, Homo sapiens
  misc_RNA (1)...(19): siRNA sense strand
aacugcaucuuccuguaua

SEQ ID NO: 1465078 - RNA, 19 nt, Homo sapiens
  misc_RNA (1)...(19): siRNA sense strand
gcuggcaucucccucaacu

SEQ ID NO: 1465079 - RNA, 19 nt, Homo sapiens
  misc_RNA (1)...(19): siRNA sense strand
aagagcaccagaaguauau

SEQ ID NO: 1465080 - RNA, 19 nt, Homo sapiens
  misc_RNA (1)...(19): siRNA sense strand
uaauccaggugaucuuugg

SEQ ID NO: 1465081 - RNA, 19 nt, Homo sapiens
  misc_RNA (1)...(19): siRNA sense strand
gcgggaagaaggagccaaa

SEQ ID NO: 1465082 - RNA, 19 nt, Homo sapiens
  misc_RNA (1)...(19): siRNA sense strand
gaagguacucaucuugaac

SEQ ID NO: 1465083 - RNA, 19 nt, Homo sapiens
  misc_RNA (1)...(19): siRNA sense strand
gccacuagcuuugcauacu

SEQ ID NO: 1465084 - RNA, 19 nt, Homo sapiens
  misc_RNA (1)...(19): siRNA sense strand
cggaagguacucaucuuga

SEQ ID NO: 1465085 - RNA, 19 nt, Homo sapiens
  misc_RNA (1)...(19): siRNA sense strand
gggacugcccuuucucaau

SEQ ID NO: 1465086 - RNA, 19 nt, Homo sapiens
  misc_RNA (1)...(19): siRNA sense strand
gcaccgauggcuggaucua

SEQ ID NO: 1465087 - RNA, 19 nt, Homo sapiens
  misc_RNA (1)...(19): siRNA sense strand
gcaucugcauccugcucaa

SEQ ID NO: 1465088 - RNA, 19 nt, Homo sapiens
  misc_RNA (1)...(19): siRNA sense strand
cacuagcuuugcauacuau

SEQ ID NO: 1465089 - RNA, 19 nt, Homo sapiens
  misc_RNA (1)...(19): siRNA sense strand
ccucagcacaagagaagaa

SEQ ID NO: 1465090 - RNA, 19 nt, Homo sapiens
  misc_RNA (1)...(19): siRNA sense strand
acuccugguucuucauuga

SEQ ID NO: 1465091 - RNA, 19 nt, Homo sapiens
  misc_RNA (1)...(19): siRNA sense strand
accgauggcuggaucuaug

SEQ ID NO: 1465092 - RNA, 19 nt, Homo sapiens
  misc_RNA (1)...(19): siRNA sense strand
gagucagcaucuaccuaau

SEQ ID NO: 1465093 - RNA, 19 nt, Homo sapiens
  misc_RNA (1)...(19): siRNA sense strand
gcacccaacuuccccaucu

SEQ ID NO: 1465094 - RNA, 19 nt, Homo sapiens
  misc_RNA (1)...(19): siRNA sense strand
gggcuuccuugucaucaac

SEQ ID NO: 1465095 - RNA, 19 nt, Homo sapiens
  misc_RNA (1)...(19): siRNA sense strand
gcuuuggagucagcaucua

SEQ ID NO: 1465096 - RNA, 19 nt, Homo sapiens
  misc_RNA (1)...(19): siRNA sense strand
gagcugaccaugggcaaag

SEQ ID NO: 1465097 - RNA, 19 nt, Homo sapiens
  misc_RNA (1)...(19): siRNA sense strand
caucuacuccugguucuuc

SEQ ID NO: 1465098 - RNA, 19 nt, Homo sapiens
  misc_RNA (1)...(19): siRNA sense strand
gaguggaugcccauucaca

SEQ ID NO: 1465099 - RNA, 19 nt, Homo sapiens
  misc_RNA (1)...(19): siRNA sense strand
cagcacaagagaagaaugg

SEQ ID NO: 1465100 - RNA, 19 nt, Homo sapiens
  misc_RNA (1)...(19): siRNA sense strand
ccuaauccaggugaucuuu

SEQ ID NO: 1465101 - RNA, 19 nt, Homo sapiens
  misc_RNA (1)...(19): siRNA sense strand
ggacugcccuuucucaaug

SEQ ID NO: 1465102 - RNA, 19 nt, Homo sapiens
  misc_RNA (1)...(19): siRNA sense strand
ggaagaaggagccaaauug

SEQ ID NO: 1465103 - RNA, 19 nt, Homo sapiens
  misc_RNA (1)...(19): siRNA sense strand
ggaagguacucaucuugaa

SEQ ID NO: 1465104 - RNA, 19 nt, Homo sapiens
  misc_RNA (1)...(19): siRNA sense strand
gaagaaggagccaaauuga

SEQ ID NO: 1465105 - RNA, 19 nt, Homo sapiens
  misc_RNA (1)...(19): siRNA sense strand
ggagucagcaucuaccuaa

SEQ ID NO: 1465106 - RNA, 19 nt, Homo sapiens
  misc_RNA (1)...(19): siRNA sense strand
ggaacuguaucccacaaug

SEQ ID NO: 1465107 - RNA, 19 nt, Homo sapiens
  misc_RNA (1)...(19): siRNA sense strand
ccacuagcuuugcauacua

SEQ ID NO: 1465108 - RNA, 19 nt, Homo sapiens
  misc_RNA (1)...(19): siRNA sense strand
caagagcaccagaaguaua

SEQ ID NO: 1465109 - RNA, 19 nt, Homo sapiens
  misc_RNA (1)...(19): siRNA sense strand
gaaggagccaaauugagua

SEQ ID NO: 1465110 - RNA, 19 nt, Homo sapiens
  misc_RNA (1)...(19): siRNA sense strand
caaauugaguauggaggua

SEQ ID NO: 1465111 - RNA, 19 nt, Homo sapiens
  misc_RNA (1)...(19): siRNA sense strand
ggaccugccugccaagcuu

SEQ ID NO: 1465112 - RNA, 19 nt, Homo sapiens
  misc_RNA (1)...(19): siRNA sense strand
gaacuguaucccacaauga

SEQ ID NO: 1465113 - RNA, 19 nt, Homo sapiens
  misc_RNA (1)...(19): siRNA sense strand
caucuaccaucgugacuga

SEQ ID NO: 1465114 - RNA, 19 nt, Homo sapiens
  misc_RNA (1)...(19): siRNA sense strand
aacaagagcaccagaagua

SEQ ID NO: 1465115 - RNA, 19 nt, Homo sapiens
  misc_RNA (1)...(19): siRNA sense strand
ggagccaaauugaguaugg

SEQ ID NO: 1465116 - RNA, 19 nt, Homo sapiens
  misc_RNA (1)...(19): siRNA sense strand
caacagcaccuucccaucu

SEQ ID NO: 1465117 - RNA, 19 nt, Homo sapiens
  misc_RNA (1)...(19): siRNA sense strand
gcaccuugauuggcuaugu

SEQ ID NO: 1465118 - RNA, 19 nt, Homo sapiens
  misc_RNA (1)...(19): siRNA sense strand
gggaagaaggagccaaauu

SEQ ID NO: 1465119 - RNA, 19 nt, Homo sapiens
  misc_RNA (1)...(19): siRNA sense strand
ucaacugcaucuuccugua

SEQ ID NO: 1465120 - RNA, 19 nt, Homo sapiens
  misc_RNA (1)...(19): siRNA sense strand
gggccagucugcagaagga

SEQ ID NO: 1465121 - RNA, 19 nt, Homo sapiens
  misc_RNA (1)...(19): siRNA sense strand
gaaacagacgcgacagcaa

SEQ ID NO: 1465122 - RNA, 19 nt, Homo sapiens
  misc_RNA (1)...(19): siRNA sense strand
acaacacccugcagaacuu

SEQ ID NO: 1465123 - RNA, 19 nt, Homo sapiens
  misc_RNA (1)...(19): siRNA sense strand
caacugcaucuuccuguau

SEQ ID NO: 1465124 - RNA, 19 nt, Homo sapiens
  misc_RNA (1)...(19): siRNA sense strand
gcaacaagagcaccagaag

SEQ ID NO: 1465125 - RNA, 19 nt, Homo sapiens
  misc_RNA (1)...(19): siRNA sense strand
ccugauggcuucucacaac

SEQ ID NO: 1465126 - RNA, 19 nt, Homo sapiens
  misc_RNA (1)...(19): siRNA sense strand
aacagcaccuucccaucua

SEQ ID NO: 1465127 - RNA, 19 nt, Homo sapiens
  misc_RNA (1)...(19): siRNA sense strand
agaaggagccaaauugagu

SEQ ID NO: 1465128 - RNA, 19 nt, Homo sapiens
  misc_RNA (1)...(19): siRNA sense strand
ucaacugcaugacacugaa

SEQ ID NO: 1465129 - RNA, 19 nt, Homo sapiens
  misc_RNA (1)...(19): siRNA sense strand
acuaugggcuggucaugga

SEQ ID NO: 1465130 - RNA, 19 nt, Homo sapiens
  misc_RNA (1)...(19): siRNA sense strand
uggaguggaugcccauuca

SEQ ID NO: 1465131 - RNA, 19 nt, Homo sapiens
  misc_RNA (1)...(19): siRNA sense strand
cuugugggcuuccuuguca

SEQ ID NO: 1465132 - RNA, 19 nt, Homo sapiens
  misc_RNA (1)...(19): siRNA sense strand
gagccaaauugaguaugga

SEQ ID NO: 1465133 - RNA, 19 nt, Homo sapiens
  misc_RNA (1)...(19): siRNA sense strand
gcaucucccucaacugcau

SEQ ID NO: 1465134 - RNA, 19 nt, Homo sapiens
  misc_RNA (1)...(19): siRNA sense strand
cugcagggcuuuggaguca

SEQ ID NO: 1465135 - RNA, 19 nt, Homo sapiens
  misc_RNA (1)...(19): siRNA sense strand
gccggaagguacucaucuu

SEQ ID NO: 1465136 - RNA, 19 nt, Homo sapiens
  misc_RNA (1)...(19): siRNA sense strand
caacaagagcaccagaagu

SEQ ID NO: 1465137 - RNA, 19 nt, Homo sapiens
  misc_RNA (1)...(19): siRNA sense strand
gaugccaaccucagcaaga

SEQ ID NO: 1465138 - RNA, 19 nt, Homo sapiens
  misc_RNA (1)...(19): siRNA sense strand
ugagggcccugcagagagu

SEQ ID NO: 1465139 - RNA, 19 nt, Homo sapiens
  misc_RNA (1)...(19): siRNA sense strand
aacugcaucuuccuguaua

SEQ ID NO: 1465140 - RNA, 19 nt, Homo sapiens
  misc_RNA (1)...(19): siRNA sense strand
gcuggcaucucccucaacu

SEQ ID NO: 1465141 - RNA, 19 nt, Homo sapiens
  misc_RNA (1)...(19): siRNA sense strand
aagagcaccagaaguauau

SEQ ID NO: 1465142 - RNA, 19 nt, Homo sapiens
  misc_RNA (1)...(19): siRNA sense strand
uaauccaggugaucuuugg

SEQ ID NO: 1465143 - RNA, 19 nt, Homo sapiens
  misc_RNA (1)...(19): siRNA sense strand
gcgggaagaaggagccaaa

SEQ ID NO: 1465144 - RNA, 19 nt, Homo sapiens
  misc_RNA (1)...(19): siRNA sense strand
gaagguacucaucuugaac

SEQ ID NO: 1465145 - RNA, 19 nt, Homo sapiens
  misc_RNA (1)...(19): siRNA sense strand
gccacuagcuuugcauacu

SEQ ID NO: 1465146 - RNA, 19 nt, Homo sapiens
  misc_RNA (1)...(19): siRNA sense strand
cggaagguacucaucuuga

SEQ ID NO: 1465147 - RNA, 19 nt, Homo sapiens
  misc_RNA (1)...(19): siRNA sense strand
gggacugcccuuucucaau

SEQ ID NO: 1465148 - RNA, 19 nt, Homo sapiens
  misc_RNA (1)...(19): siRNA sense strand
gcaccgauggcuggaucua

SEQ ID NO: 1465149 - RNA, 19 nt, Homo sapiens
  misc_RNA (1)...(19): siRNA sense strand
gcaucugcauccugcucaa

SEQ ID NO: 1465150 - RNA, 19 nt, Homo sapiens
  misc_RNA (1)...(19): siRNA sense strand
cacuagcuuugcauacuau

SEQ ID NO: 1465151 - RNA, 19 nt, Homo sapiens
  misc_RNA (1)...(19): siRNA sense strand
ccucagcacaagagaagaa

SEQ ID NO: 1465152 - RNA, 19 nt, Homo sapiens
  misc_RNA (1)...(19): siRNA sense strand
acuccugguucuucauuga

SEQ ID NO: 1465153 - RNA, 19 nt, Homo sapiens
  misc_RNA (1)...(19): siRNA sense strand
accgauggcuggaucuaug

SEQ ID NO: 1465154 - RNA, 19 nt, Homo sapiens
  misc_RNA (1)...(19): siRNA sense strand
gagucagcaucuaccuaau

SEQ ID NO: 1465155 - RNA, 19 nt, Homo sapiens
  misc_RNA (1)...(19): siRNA sense strand
gcacccaacuuccccaucu

SEQ ID NO: 1465156 - RNA, 19 nt, Homo sapiens
  misc_RNA (1)...(19): siRNA sense strand
gggcuuccuugucaucaac

SEQ ID NO: 1465157 - RNA, 19 nt, Homo sapiens
  misc_RNA (1)...(19): siRNA sense strand
gcuuuggagucagcaucua

SEQ ID NO: 1465158 - RNA, 19 nt, Homo sapiens
  misc_RNA (1)...(19): siRNA sense strand
gagcugaccaugggcaaag

SEQ ID NO: 1465159 - RNA, 19 nt, Homo sapiens
  misc_RNA (1)...(19): siRNA sense strand
caucuacuccugguucuuc

SEQ ID NO: 1465160 - RNA, 19 nt, Homo sapiens
  misc_RNA (1)...(19): siRNA sense strand
gaguggaugcccauucaca

SEQ ID NO: 1465161 - RNA, 19 nt, Homo sapiens
  misc_RNA (1)...(19): siRNA sense strand
cagcacaagagaagaaugg

SEQ ID NO: 1465162 - RNA, 19 nt, Homo sapiens
  misc_RNA (1)...(19): siRNA sense strand
ccuaauccaggugaucuuu

SEQ ID NO: 1465163 - RNA, 19 nt, Homo sapiens
  misc_RNA (1)...(19): siRNA sense strand
gagaauaacucacuaaauc

SEQ ID NO: 1465164 - RNA, 19 nt, Homo sapiens
  misc_RNA (1)...(19): siRNA sense strand
gaagaucgaugaguucuga

SEQ ID NO: 1465165 - RNA, 19 nt, Homo sapiens
  misc_RNA (1)...(19): siRNA sense strand
gaagugaugguucgcauua

SEQ ID NO: 1465166 - RNA, 19 nt, Homo sapiens
  misc_RNA (1)...(19): siRNA sense strand
gaaacuucgugaauacuuu

SEQ ID NO: 1465167 - RNA, 19 nt, Homo sapiens
  misc_RNA (1)...(19): siRNA sense strand
gaaagugccuacagauaca

SEQ ID NO: 1465168 - RNA, 19 nt, Homo sapiens
  misc_RNA (1)...(19): siRNA sense strand
gcaucuauauugccucuuu

SEQ ID NO: 1465169 - RNA, 19 nt, Homo sapiens
  misc_RNA (1)...(19): siRNA sense strand
gaaauuuauugacgacaga

SEQ ID NO: 1465170 - RNA, 19 nt, Homo sapiens
  misc_RNA (1)...(19): siRNA sense strand
gacaagcgauugcguuuca

SEQ ID NO: 1465171 - RNA, 19 nt, Homo sapiens
  misc_RNA (1)...(19): siRNA sense strand
uaaaguacuugcagaggaa

SEQ ID NO: 1465172 - RNA, 19 nt, Homo sapiens
  misc_RNA (1)...(19): siRNA sense strand
guucauggaugcauuaaca

SEQ ID NO: 1465173 - RNA, 19 nt, Homo sapiens
  misc_RNA (1)...(19): siRNA sense strand
gcaauccaguugugcuuga

SEQ ID NO: 1465174 - RNA, 19 nt, Homo sapiens
  misc_RNA (1)...(19): siRNA sense strand
acaaaguccucagagaaua

SEQ ID NO: 1465175 - RNA, 19 nt, Homo sapiens
  misc_RNA (1)...(19): siRNA sense strand
uaagaagcccauuauugua

SEQ ID NO: 1465176 - RNA, 19 nt, Homo sapiens
  misc_RNA (1)...(19): siRNA sense strand
agaggaagaucgaugaguu

SEQ ID NO: 1465177 - RNA, 19 nt, Homo sapiens
  misc_RNA (1)...(19): siRNA sense strand
ccacaaaguccucagagaa

SEQ ID NO: 1465178 - RNA, 19 nt, Homo sapiens
  misc_RNA (1)...(19): siRNA sense strand
cagaaagugccuacagaua

SEQ ID NO: 1465179 - RNA, 19 nt, Homo sapiens
  misc_RNA (1)...(19): siRNA sense strand
guacaucuccguucaugga

SEQ ID NO: 1465180 - RNA, 19 nt, Homo sapiens
  misc_RNA (1)...(19): siRNA sense strand
uuaagaagcccauuauugu

SEQ ID NO: 1465181 - RNA, 19 nt, Homo sapiens
  misc_RNA (1)...(19): siRNA sense strand
gagauauuguggucaggaa

SEQ ID NO: 1465182 - RNA, 19 nt, Homo sapiens
  misc_RNA (1)...(19): siRNA sense strand
guuguggacuugacuuuau

SEQ ID NO: 1465183 - RNA, 19 nt, Homo sapiens
  misc_RNA (1)...(19): siRNA sense strand
gccuacagauacagagaua

SEQ ID NO: 1465184 - RNA, 19 nt, Homo sapiens
  misc_RNA (1)...(19): siRNA sense strand
ucuaggagcaucuauauug

SEQ ID NO: 1465185 - RNA, 19 nt, Homo sapiens
  misc_RNA (1)...(19): siRNA sense strand
ucagaaacuucgugaauac

SEQ ID NO: 1465186 - RNA, 19 nt, Homo sapiens
  misc_RNA (1)...(19): siRNA sense strand
caaaguccucagagaauaa

SEQ ID NO: 1465187 - RNA, 19 nt, Homo sapiens
  misc_RNA (1)...(19): siRNA sense strand
caauuuaagaagcccauua

SEQ ID NO: 1465188 - RNA, 19 nt, Homo sapiens
  misc_RNA (1)...(19): siRNA sense strand
caaccaacauacagacauc

SEQ ID NO: 1465189 - RNA, 19 nt, Homo sapiens
  misc_RNA (1)...(19): siRNA sense strand
gaagagaccagccuuuuga

SEQ ID NO: 1465190 - RNA, 19 nt, Homo sapiens
  misc_RNA (1)...(19): siRNA sense strand
gauggcuguucuaccguua

SEQ ID NO: 1465191 - RNA, 19 nt, Homo sapiens
  misc_RNA (1)...(19): siRNA sense strand
cuacagauacagagauauu

SEQ ID NO: 1465192 - RNA, 19 nt, Homo sapiens
  misc_RNA (1)...(19): siRNA sense strand
gaaaagagaaagcacuaaa

SEQ ID NO: 1465193 - RNA, 19 nt, Homo sapiens
  misc_RNA (1)...(19): siRNA sense strand
ggucuaggagcaucuauau

SEQ ID NO: 1465194 - RNA, 19 nt, Homo sapiens
  misc_RNA (1)...(19): siRNA sense strand
ggcagaagcuaucagaaac

SEQ ID NO: 1465195 - RNA, 19 nt, Homo sapiens
  misc_RNA (1)...(19): siRNA sense strand
cagaagcuaucagaaacuu

SEQ ID NO: 1465196 - RNA, 19 nt, Homo sapiens
  misc_RNA (1)...(19): siRNA sense strand
uaucagaaacuucgugaau

SEQ ID NO: 1465197 - RNA, 19 nt, Homo sapiens
  misc_RNA (1)...(19): siRNA sense strand
agugugaggugcugaagaa

SEQ ID NO: 1465198 - RNA, 19 nt, Homo sapiens
  misc_RNA (1)...(19): siRNA sense strand
cguuauguuucccaagaua

SEQ ID NO: 1465199 - RNA, 19 nt, Homo sapiens
  misc_RNA (1)...(19): siRNA sense strand
uuuaagaagcccauuauug

SEQ ID NO: 1465200 - RNA, 19 nt, Homo sapiens
  misc_RNA (1)...(19): siRNA sense strand
gcgaugugguuugggcuaa

SEQ ID NO: 1465201 - RNA, 19 nt, Homo sapiens
  misc_RNA (1)...(19): siRNA sense strand
uggcagaagcuaucagaaa

SEQ ID NO: 1465202 - RNA, 19 nt, Homo sapiens
  misc_RNA (1)...(19): siRNA sense strand
ccaacgagagggaguguga

SEQ ID NO: 1465203 - RNA, 19 nt, Homo sapiens
  misc_RNA (1)...(19): siRNA sense strand
caaugggacaaccaacaua

SEQ ID NO: 1465204 - RNA, 19 nt, Homo sapiens
  misc_RNA (1)...(19): siRNA sense strand
gcugcaacaugaagaugga

SEQ ID NO: 1465205 - RNA, 19 nt, Homo sapiens
  misc_RNA (1)...(19): siRNA sense strand
gaauaacucacuaaaucca

SEQ ID NO: 1465206 - RNA, 19 nt, Homo sapiens
  misc_RNA (1)...(19): siRNA sense strand
gauaaugggaggagcaucu

SEQ ID NO: 1465207 - RNA, 19 nt, Homo sapiens
  misc_RNA (1)...(19): siRNA sense strand
aacagaaagugccuacaga

SEQ ID NO: 1465208 - RNA, 19 nt, Homo sapiens
  misc_RNA (1)...(19): siRNA sense strand
aucagaaacuucgugaaua

SEQ ID NO: 1465209 - RNA, 19 nt, Homo sapiens
  misc_RNA (1)...(19): siRNA sense strand
cagagaauaacucacuaaa

SEQ ID NO: 1465210 - RNA, 19 nt, Homo sapiens
  misc_RNA (1)...(19): siRNA sense strand
gaugugguuugggcuaaug

SEQ ID NO: 1465211 - RNA, 19 nt, Homo sapiens
  misc_RNA (1)...(19): siRNA sense strand
cacaaaguccucagagaau

SEQ ID NO: 1465212 - RNA, 19 nt, Homo sapiens
  misc_RNA (1)...(19): siRNA sense strand
ggaagugaugguucgcauu

SEQ ID NO: 1465213 - RNA, 19 nt, Homo sapiens
  misc_RNA (1)...(19): siRNA sense strand
ucagagaauaacucacuaa

SEQ ID NO: 1465214 - RNA, 19 nt, Homo sapiens
  misc_RNA (1)...(19): siRNA sense strand
ucacccacaucuuguuauc

SEQ ID NO: 1465215 - RNA, 19 nt, Homo sapiens
  misc_RNA (1)...(19): siRNA sense strand
aggagugacugccagcaaa

SEQ ID NO: 1465216 - RNA, 19 nt, Homo sapiens
  misc_RNA (1)...(19): siRNA sense strand
agaaagugccuacagauac

SEQ ID NO: 1465217 - RNA, 19 nt, Homo sapiens
  misc_RNA (1)...(19): siRNA sense strand
gaggaagaucgaugaguuc

SEQ ID NO: 1465218 - RNA, 19 nt, Homo sapiens
  misc_RNA (1)...(19): siRNA sense strand
gggaggagcaucugcaaac

SEQ ID NO: 1465219 - RNA, 19 nt, Homo sapiens
  misc_RNA (1)...(19): siRNA sense strand
cucacuaaauccagaggua

SEQ ID NO: 1465220 - RNA, 19 nt, Homo sapiens
  misc_RNA (1)...(19): siRNA sense strand
cucgugcgcugcaacauga

SEQ ID NO: 1465221 - RNA, 19 nt, Homo sapiens
  misc_RNA (1)...(19): siRNA sense strand
caucuauauugccucuuug

SEQ ID NO: 1465222 - RNA, 19 nt, Homo sapiens
  misc_RNA (1)...(19): siRNA sense strand
cgucuucuguuguggacuu

SEQ ID NO: 1465223 - RNA, 19 nt, Homo sapiens
  misc_RNA (1)...(19): siRNA sense strand
ggcagcgucuucuguugug

SEQ ID NO: 1465224 - RNA, 19 nt, Homo sapiens
  misc_RNA (1)...(19): siRNA sense strand
ucacuaaauccagagguaa

SEQ ID NO: 1465225 - RNA, 19 nt, Homo sapiens
  misc_RNA (1)...(19): siRNA sense strand
caguugugcuugaggaauc

SEQ ID NO: 1465226 - RNA, 19 nt, Homo sapiens
  misc_RNA (1)...(19): siRNA sense strand
aaacagaaagugccuacag

SEQ ID NO: 1465227 - RNA, 19 nt, Homo sapiens
  misc_RNA (1)...(19): siRNA sense strand
gcuguucuaccguuauguu

SEQ ID NO: 1465228 - RNA, 19 nt, Homo sapiens
  misc_RNA (1)...(19): siRNA sense strand
uggcuucacccacaucuug

SEQ ID NO: 1465229 - RNA, 19 nt, Homo sapiens
  misc_RNA (1)...(19): siRNA sense strand
ggacguucacucaggaagu

SEQ ID NO: 1465230 - RNA, 19 nt, Homo sapiens
  misc_RNA (1)...(19): siRNA sense strand
uauaccaccuucggacaga

SEQ ID NO: 1465231 - RNA, 19 nt, Homo sapiens
  misc_RNA (1)...(19): siRNA sense strand
gaagcccauuauuguagca

SEQ ID NO: 1465232 - RNA, 19 nt, Homo sapiens
  misc_RNA (1)...(19): siRNA sense strand
aagaagcccauuauuguag

SEQ ID NO: 1465233 - RNA, 19 nt, Homo sapiens
  misc_RNA (1)...(19): siRNA sense strand
gggacaaccaacauacaga

SEQ ID NO: 1465234 - RNA, 19 nt, Homo sapiens
  misc_RNA (1)...(19): siRNA sense strand
auccagagguaaugagaga

SEQ ID NO: 1465235 - RNA, 19 nt, Homo sapiens
  misc_RNA (1)...(19): siRNA sense strand
gugaggugcugaagaaaau

SEQ ID NO: 1465236 - RNA, 19 nt, Homo sapiens
  misc_RNA (1)...(19): siRNA sense strand
ccaaugggacaaccaacau

SEQ ID NO: 1465237 - RNA, 19 nt, Homo sapiens
  misc_RNA (1)...(19): siRNA sense strand
guggacuugacuuuauuua

SEQ ID NO: 1465238 - RNA, 19 nt, Homo sapiens
  misc_RNA (1)...(19): siRNA sense strand
gaggagcaucugcaaacga

SEQ ID NO: 1465239 - RNA, 19 nt, Homo sapiens
  misc_RNA (1)...(19): siRNA sense strand
ggaggagcaucugcaaacg

SEQ ID NO: 1465240 - RNA, 19 nt, Homo sapiens
  misc_RNA (1)...(19): siRNA sense strand
gcagaagcuaucagaaacu

SEQ ID NO: 1465241 - RNA, 19 nt, Homo sapiens
  misc_RNA (1)...(19): siRNA sense strand
cuucacccacaucuuguua

SEQ ID NO: 1465242 - RNA, 19 nt, Homo sapiens
  misc_RNA (1)...(19): siRNA sense strand
cuaggagcaucuauauugc

SEQ ID NO: 1465243 - RNA, 19 nt, Homo sapiens
  misc_RNA (1)...(19): siRNA sense strand
uccacaaaguccucagaga

SEQ ID NO: 1465244 - RNA, 19 nt, Homo sapiens
  misc_RNA (1)...(19): siRNA sense strand
acagaagagaccagccuuu

SEQ ID NO: 1465245 - RNA, 19 nt, Homo sapiens
  misc_RNA (1)...(19): siRNA sense strand
cuaaauccagagguaauga

SEQ ID NO: 1465246 - RNA, 19 nt, Homo sapiens
  misc_RNA (1)...(19): siRNA sense strand
ccucagagaauaacucacu

SEQ ID NO: 1465247 - RNA, 19 nt, Homo sapiens
  misc_RNA (1)...(19): siRNA sense strand
accguuauguuucccaaga

SEQ ID NO: 1465248 - RNA, 19 nt, Homo sapiens
  misc_RNA (1)...(19): siRNA sense strand
acagauacagagauauugu

SEQ ID NO: 1465249 - RNA, 19 nt, Homo sapiens
  misc_RNA (1)...(19): siRNA sense strand
gccaaugggacaaccaaca

SEQ ID NO: 1465250 - RNA, 19 nt, Homo sapiens
  misc_RNA (1)...(19): siRNA sense strand
agaaacuucgugaauacuu

SEQ ID NO: 1465251 - RNA, 19 nt, Homo sapiens
  misc_RNA (1)...(19): siRNA sense strand
gaguccagauggcuguucu

SEQ ID NO: 1465252 - RNA, 19 nt, Homo sapiens
  misc_RNA (1)...(19): siRNA sense strand
gagaauaacucacuaaauc

SEQ ID NO: 1465253 - RNA, 19 nt, Homo sapiens
  misc_RNA (1)...(19): siRNA sense strand
gaagaucgaugaguucuga

SEQ ID NO: 1465254 - RNA, 19 nt, Homo sapiens
  misc_RNA (1)...(19): siRNA sense strand
gaagugaugguucgcauua

SEQ ID NO: 1465255 - RNA, 19 nt, Homo sapiens
  misc_RNA (1)...(19): siRNA sense strand
gaaacuucgugaauacuuu

SEQ ID NO: 1465256 - RNA, 19 nt, Homo sapiens
  misc_RNA (1)...(19): siRNA sense strand
gaaagugccuacagauaca

SEQ ID NO: 1465257 - RNA, 19 nt, Homo sapiens
  misc_RNA (1)...(19): siRNA sense strand
gcaucuauauugccucuuu

SEQ ID NO: 1465258 - RNA, 19 nt, Homo sapiens
  misc_RNA (1)...(19): siRNA sense strand
gaaauuuauugacgacaga

SEQ ID NO: 1465259 - RNA, 19 nt, Homo sapiens
  misc_RNA (1)...(19): siRNA sense strand
gacaagcgauugcguuuca

SEQ ID NO: 1465260 - RNA, 19 nt, Homo sapiens
  misc_RNA (1)...(19): siRNA sense strand
uaaaguacuugcagaggaa

SEQ ID NO: 1465261 - RNA, 19 nt, Homo sapiens
  misc_RNA (1)...(19): siRNA sense strand
guucauggaugcauuaaca

SEQ ID NO: 1465262 - RNA, 19 nt, Homo sapiens
  misc_RNA (1)...(19): siRNA sense strand
gcaauccaguugugcuuga

SEQ ID NO: 1465263 - RNA, 19 nt, Homo sapiens
  misc_RNA (1)...(19): siRNA sense strand
acaaaguccucagagaaua

SEQ ID NO: 1465264 - RNA, 19 nt, Homo sapiens
  misc_RNA (1)...(19): siRNA sense strand
uaagaagcccauuauugua

SEQ ID NO: 1465265 - RNA, 19 nt, Homo sapiens
  misc_RNA (1)...(19): siRNA sense strand
agaggaagaucgaugaguu

SEQ ID NO: 1465266 - RNA, 19 nt, Homo sapiens
  misc_RNA (1)...(19): siRNA sense strand
ccacaaaguccucagagaa

SEQ ID NO: 1465267 - RNA, 19 nt, Homo sapiens
  misc_RNA (1)...(19): siRNA sense strand
cagaaagugccuacagaua

SEQ ID NO: 1465268 - RNA, 19 nt, Homo sapiens
  misc_RNA (1)...(19): siRNA sense strand
guacaucuccguucaugga

SEQ ID NO: 1465269 - RNA, 19 nt, Homo sapiens
  misc_RNA (1)...(19): siRNA sense strand
uuaagaagcccauuauugu

SEQ ID NO: 1465270 - RNA, 19 nt, Homo sapiens
  misc_RNA (1)...(19): siRNA sense strand
gagauauuguggucaggaa

SEQ ID NO: 1465271 - RNA, 19 nt, Homo sapiens
  misc_RNA (1)...(19): siRNA sense strand
guuguggacuugacuuuau

SEQ ID NO: 1465272 - RNA, 19 nt, Homo sapiens
  misc_RNA (1)...(19): siRNA sense strand
gccuacagauacagagaua

SEQ ID NO: 1465273 - RNA, 19 nt, Homo sapiens
  misc_RNA (1)...(19): siRNA sense strand
ucuaggagcaucuauauug

SEQ ID NO: 1465274 - RNA, 19 nt, Homo sapiens
  misc_RNA (1)...(19): siRNA sense strand
ucagaaacuucgugaauac

SEQ ID NO: 1465275 - RNA, 19 nt, Homo sapiens
  misc_RNA (1)...(19): siRNA sense strand
caaaguccucagagaauaa

SEQ ID NO: 1465276 - RNA, 19 nt, Homo sapiens
  misc_RNA (1)...(19): siRNA sense strand
caauuuaagaagcccauua

SEQ ID NO: 1465277 - RNA, 19 nt, Homo sapiens
  misc_RNA (1)...(19): siRNA sense strand
caaccaacauacagacauc

SEQ ID NO: 1465278 - RNA, 19 nt, Homo sapiens
  misc_RNA (1)...(19): siRNA sense strand
gaagagaccagccuuuuga

SEQ ID NO: 1465279 - RNA, 19 nt, Homo sapiens
  misc_RNA (1)...(19): siRNA sense strand
gauggcuguucuaccguua

SEQ ID NO: 1465280 - RNA, 19 nt, Homo sapiens
  misc_RNA (1)...(19): siRNA sense strand
cuacagauacagagauauu

SEQ ID NO: 1465281 - RNA, 19 nt, Homo sapiens
  misc_RNA (1)...(19): siRNA sense strand
gaaaagagaaagcacuaaa

SEQ ID NO: 1465282 - RNA, 19 nt, Homo sapiens
  misc_RNA (1)...(19): siRNA sense strand
ggucuaggagcaucuauau

SEQ ID NO: 1465283 - RNA, 19 nt, Homo sapiens
  misc_RNA (1)...(19): siRNA sense strand
ggcagaagcuaucagaaac

SEQ ID NO: 1465284 - RNA, 19 nt, Homo sapiens
  misc_RNA (1)...(19): siRNA sense strand
cagaagcuaucagaaacuu

SEQ ID NO: 1465285 - RNA, 19 nt, Homo sapiens
  misc_RNA (1)...(19): siRNA sense strand
uaucagaaacuucgugaau

SEQ ID NO: 1465286 - RNA, 19 nt, Homo sapiens
  misc_RNA (1)...(19): siRNA sense strand
agugugaggugcugaagaa

SEQ ID NO: 1465287 - RNA, 19 nt, Homo sapiens
  misc_RNA (1)...(19): siRNA sense strand
cguuauguuucccaagaua

SEQ ID NO: 1465288 - RNA, 19 nt, Homo sapiens
  misc_RNA (1)...(19): siRNA sense strand
uuuaagaagcccauuauug

SEQ ID NO: 1465289 - RNA, 19 nt, Homo sapiens
  misc_RNA (1)...(19): siRNA sense strand
gcgaugugguuugggcuaa

SEQ ID NO: 1465290 - RNA, 19 nt, Homo sapiens
  misc_RNA (1)...(19): siRNA sense strand
uggcagaagcuaucagaaa

SEQ ID NO: 1465291 - RNA, 19 nt, Homo sapiens
  misc_RNA (1)...(19): siRNA sense strand
ccaacgagagggaguguga

SEQ ID NO: 1465292 - RNA, 19 nt, Homo sapiens
  misc_RNA (1)...(19): siRNA sense strand
caaugggacaaccaacaua

SEQ ID NO: 1465293 - RNA, 19 nt, Homo sapiens
  misc_RNA (1)...(19): siRNA sense strand
gcugcaacaugaagaugga

SEQ ID NO: 1465294 - RNA, 19 nt, Homo sapiens
  misc_RNA (1)...(19): siRNA sense strand
gaauaacucacuaaaucca

SEQ ID NO: 1465295 - RNA, 19 nt, Homo sapiens
  misc_RNA (1)...(19): siRNA sense strand
gauaaugggaggagcaucu

SEQ ID NO: 1465296 - RNA, 19 nt, Homo sapiens
  misc_RNA (1)...(19): siRNA sense strand
aacagaaagugccuacaga

SEQ ID NO: 1465297 - RNA, 19 nt, Homo sapiens
  misc_RNA (1)...(19): siRNA sense strand
aucagaaacuucgugaaua

SEQ ID NO: 1465298 - RNA, 19 nt, Homo sapiens
  misc_RNA (1)...(19): siRNA sense strand
cagagaauaacucacuaaa

SEQ ID NO: 1465299 - RNA, 19 nt, Homo sapiens
  misc_RNA (1)...(19): siRNA sense strand
gaugugguuugggcuaaug

SEQ ID NO: 1465300 - RNA, 19 nt, Homo sapiens
  misc_RNA (1)...(19): siRNA sense strand
cacaaaguccucagagaau

SEQ ID NO: 1465301 - RNA, 19 nt, Homo sapiens
  misc_RNA (1)...(19): siRNA sense strand
ggaagugaugguucgcauu

SEQ ID NO: 1465302 - RNA, 19 nt, Homo sapiens
  misc_RNA (1)...(19): siRNA sense strand
ucagagaauaacucacuaa

SEQ ID NO: 1465303 - RNA, 19 nt, Homo sapiens
  misc_RNA (1)...(19): siRNA sense strand
ucacccacaucuuguuauc

SEQ ID NO: 1465304 - RNA, 19 nt, Homo sapiens
  misc_RNA (1)...(19): siRNA sense strand
aggagugacugccagcaaa

SEQ ID NO: 1465305 - RNA, 19 nt, Homo sapiens
  misc_RNA (1)...(19): siRNA sense strand
agaaagugccuacagauac

SEQ ID NO: 1465306 - RNA, 19 nt, Homo sapiens
  misc_RNA (1)...(19): siRNA sense strand
gaggaagaucgaugaguuc

SEQ ID NO: 1465307 - RNA, 19 nt, Homo sapiens
  misc_RNA (1)...(19): siRNA sense strand
gggaggagcaucugcaaac

SEQ ID NO: 1465308 - RNA, 19 nt, Homo sapiens
  misc_RNA (1)...(19): siRNA sense strand
cucacuaaauccagaggua

SEQ ID NO: 1465309 - RNA, 19 nt, Homo sapiens
  misc_RNA (1)...(19): siRNA sense strand
cucgugcgcugcaacauga

SEQ ID NO: 1465310 - RNA, 19 nt, Homo sapiens
  misc_RNA (1)...(19): siRNA sense strand
caucuauauugccucuuug

SEQ ID NO: 1465311 - RNA, 19 nt, Homo sapiens
  misc_RNA (1)...(19): siRNA sense strand
cgucuucuguuguggacuu

SEQ ID NO: 1465312 - RNA, 19 nt, Homo sapiens
  misc_RNA (1)...(19): siRNA sense strand
ggcagcgucuucuguugug

SEQ ID NO: 1465313 - RNA, 19 nt, Homo sapiens
  misc_RNA (1)...(19): siRNA sense strand
ucacuaaauccagagguaa

SEQ ID NO: 1465314 - RNA, 19 nt, Homo sapiens
  misc_RNA (1)...(19): siRNA sense strand
caguugugcuugaggaauc

SEQ ID NO: 1465315 - RNA, 19 nt, Homo sapiens
  misc_RNA (1)...(19): siRNA sense strand
aaacagaaagugccuacag

SEQ ID NO: 1465316 - RNA, 19 nt, Homo sapiens
  misc_RNA (1)...(19): siRNA sense strand
gcuguucuaccguuauguu

SEQ ID NO: 1465317 - RNA, 19 nt, Homo sapiens
  misc_RNA (1)...(19): siRNA sense strand
uggcuucacccacaucuug

SEQ ID NO: 1465318 - RNA, 19 nt, Homo sapiens
  misc_RNA (1)...(19): siRNA sense strand
ggacguucacucaggaagu

SEQ ID NO: 1465319 - RNA, 19 nt, Homo sapiens
  misc_RNA (1)...(19): siRNA sense strand
uauaccaccuucggacaga

SEQ ID NO: 1465320 - RNA, 19 nt, Homo sapiens
  misc_RNA (1)...(19): siRNA sense strand
gaagcccauuauuguagca

SEQ ID NO: 1465321 - RNA, 19 nt, Homo sapiens
  misc_RNA (1)...(19): siRNA sense strand
aagaagcccauuauuguag

SEQ ID NO: 1465322 - RNA, 19 nt, Homo sapiens
  misc_RNA (1)...(19): siRNA sense strand
gggacaaccaacauacaga

SEQ ID NO: 1465323 - RNA, 19 nt, Homo sapiens
  misc_RNA (1)...(19): siRNA sense strand
auccagagguaaugagaga

SEQ ID NO: 1465324 - RNA, 19 nt, Homo sapiens
  misc_RNA (1)...(19): siRNA sense strand
gugaggugcugaagaaaau

SEQ ID NO: 1465325 - RNA, 19 nt, Homo sapiens
  misc_RNA (1)...(19): siRNA sense strand
ccaaugggacaaccaacau

SEQ ID NO: 1465326 - RNA, 19 nt, Homo sapiens
  misc_RNA (1)...(19): siRNA sense strand
guggacuugacuuuauuua

SEQ ID NO: 1465327 - RNA, 19 nt, Homo sapiens
  misc_RNA (1)...(19): siRNA sense strand
gaggagcaucugcaaacga

SEQ ID NO: 1465328 - RNA, 19 nt, Homo sapiens
  misc_RNA (1)...(19): siRNA sense strand
ggaggagcaucugcaaacg

SEQ ID NO: 1465329 - RNA, 19 nt, Homo sapiens
  misc_RNA (1)...(19): siRNA sense strand
gcagaagcuaucagaaacu

SEQ ID NO: 1465330 - RNA, 19 nt, Homo sapiens
  misc_RNA (1)...(19): siRNA sense strand
cuucacccacaucuuguua

SEQ ID NO: 1465331 - RNA, 19 nt, Homo sapiens
  misc_RNA (1)...(19): siRNA sense strand
cuaggagcaucuauauugc

SEQ ID NO: 1465332 - RNA, 19 nt, Homo sapiens
  misc_RNA (1)...(19): siRNA sense strand
uccacaaaguccucagaga

SEQ ID NO: 1465333 - RNA, 19 nt, Homo sapiens
  misc_RNA (1)...(19): siRNA sense strand
acagaagagaccagccuuu

SEQ ID NO: 1465334 - RNA, 19 nt, Homo sapiens
  misc_RNA (1)...(19): siRNA sense strand
cuaaauccagagguaauga

SEQ ID NO: 1465335 - RNA, 19 nt, Homo sapiens
  misc_RNA (1)...(19): siRNA sense strand
ccucagagaauaacucacu

SEQ ID NO: 1465336 - RNA, 19 nt, Homo sapiens
  misc_RNA (1)...(19): siRNA sense strand
accguuauguuucccaaga

SEQ ID NO: 1465337 - RNA, 19 nt, Homo sapiens
  misc_RNA (1)...(19): siRNA sense strand
acagauacagagauauugu

SEQ ID NO: 1465338 - RNA, 19 nt, Homo sapiens
  misc_RNA (1)...(19): siRNA sense strand
gccaaugggacaaccaaca

SEQ ID NO: 1465339 - RNA, 19 nt, Homo sapiens
  misc_RNA (1)...(19): siRNA sense strand
agaaacuucgugaauacuu

SEQ ID NO: 1465340 - RNA, 19 nt, Homo sapiens
  misc_RNA (1)...(19): siRNA sense strand
gaguccagauggcuguucu

SEQ ID NO: 1465341 - RNA, 19 nt, Homo sapiens
  misc_RNA (1)...(19): siRNA sense strand
gagaauaacucacuaaauc

SEQ ID NO: 1465342 - RNA, 19 nt, Homo sapiens
  misc_RNA (1)...(19): siRNA sense strand
gaagaucgaugaguucuga

SEQ ID NO: 1465343 - RNA, 19 nt, Homo sapiens
  misc_RNA (1)...(19): siRNA sense strand
gaagugaugguucgcauua

SEQ ID NO: 1465344 - RNA, 19 nt, Homo sapiens
  misc_RNA (1)...(19): siRNA sense strand
gaaacuucgugaauacuuu

SEQ ID NO: 1465345 - RNA, 19 nt, Homo sapiens
  misc_RNA (1)...(19): siRNA sense strand
gaaagugccuacagauaca

SEQ ID NO: 1465346 - RNA, 19 nt, Homo sapiens
  misc_RNA (1)...(19): siRNA sense strand
gcaucuauauugccucuuu

SEQ ID NO: 1465347 - RNA, 19 nt, Homo sapiens
  misc_RNA (1)...(19): siRNA sense strand
gaaauuuauugacgacaga

SEQ ID NO: 1465348 - RNA, 19 nt, Homo sapiens
  misc_RNA (1)...(19): siRNA sense strand
gacaagcgauugcguuuca

SEQ ID NO: 1465349 - RNA, 19 nt, Homo sapiens
  misc_RNA (1)...(19): siRNA sense strand
uaaaguacuugcagaggaa

SEQ ID NO: 1465350 - RNA, 19 nt, Homo sapiens
  misc_RNA (1)...(19): siRNA sense strand
gcaauccaguugugcuuga

SEQ ID NO: 1465351 - RNA, 19 nt, Homo sapiens
  misc_RNA (1)...(19): siRNA sense strand
acaaaguccucagagaaua

SEQ ID NO: 1465352 - RNA, 19 nt, Homo sapiens
  misc_RNA (1)...(19): siRNA sense strand
uaagaagcccauuauugua

SEQ ID NO: 1465353 - RNA, 19 nt, Homo sapiens
  misc_RNA (1)...(19): siRNA sense strand
agaggaagaucgaugaguu

SEQ ID NO: 1465354 - RNA, 19 nt, Homo sapiens
  misc_RNA (1)...(19): siRNA sense strand
ccacaaaguccucagagaa

SEQ ID NO: 1465355 - RNA, 19 nt, Homo sapiens
  misc_RNA (1)...(19): siRNA sense strand
cagaaagugccuacagaua

SEQ ID NO: 1465356 - RNA, 19 nt, Homo sapiens
  misc_RNA (1)...(19): siRNA sense strand
uuaagaagcccauuauugu

SEQ ID NO: 1465357 - RNA, 19 nt, Homo sapiens
  misc_RNA (1)...(19): siRNA sense strand
gagauauuguggucaggaa

SEQ ID NO: 1465358 - RNA, 19 nt, Homo sapiens
  misc_RNA (1)...(19): siRNA sense strand
guuguggacuugacuuuau

SEQ ID NO: 1465359 - RNA, 19 nt, Homo sapiens
  misc_RNA (1)...(19): siRNA sense strand
gccuacagauacagagaua

SEQ ID NO: 1465360 - RNA, 19 nt, Homo sapiens
  misc_RNA (1)...(19): siRNA sense strand
ucuaggagcaucuauauug

SEQ ID NO: 1465361 - RNA, 19 nt, Homo sapiens
  misc_RNA (1)...(19): siRNA sense strand
ucagaaacuucgugaauac

SEQ ID NO: 1465362 - RNA, 19 nt, Homo sapiens
  misc_RNA (1)...(19): siRNA sense strand
caaaguccucagagaauaa

SEQ ID NO: 1465363 - RNA, 19 nt, Homo sapiens
  misc_RNA (1)...(19): siRNA sense strand
caauuuaagaagcccauua

SEQ ID NO: 1465364 - RNA, 19 nt, Homo sapiens
  misc_RNA (1)...(19): siRNA sense strand
caaccaacauacagacauc

SEQ ID NO: 1465365 - RNA, 19 nt, Homo sapiens
  misc_RNA (1)...(19): siRNA sense strand
gaagagaccagccuuuuga

SEQ ID NO: 1465366 - RNA, 19 nt, Homo sapiens
  misc_RNA (1)...(19): siRNA sense strand
gauggcuguucuaccguua

SEQ ID NO: 1465367 - RNA, 19 nt, Homo sapiens
  misc_RNA (1)...(19): siRNA sense strand
cuacagauacagagauauu

SEQ ID NO: 1465368 - RNA, 19 nt, Homo sapiens
  misc_RNA (1)...(19): siRNA sense strand
gaaaagagaaagcacuaaa

SEQ ID NO: 1465369 - RNA, 19 nt, Homo sapiens
  misc_RNA (1)...(19): siRNA sense strand
ggucuaggagcaucuauau

SEQ ID NO: 1465370 - RNA, 19 nt, Homo sapiens
  misc_RNA (1)...(19): siRNA sense strand
ggcagaagcuaucagaaac

SEQ ID NO: 1465371 - RNA, 19 nt, Homo sapiens
  misc_RNA (1)...(19): siRNA sense strand
cagaagcuaucagaaacuu

SEQ ID NO: 1465372 - RNA, 19 nt, Homo sapiens
  misc_RNA (1)...(19): siRNA sense strand
uaucagaaacuucgugaau

SEQ ID NO: 1465373 - RNA, 19 nt, Homo sapiens
  misc_RNA (1)...(19): siRNA sense strand
agugugaggugcugaagaa

SEQ ID NO: 1465374 - RNA, 19 nt, Homo sapiens
  misc_RNA (1)...(19): siRNA sense strand
cguuauguuucccaagaua

SEQ ID NO: 1465375 - RNA, 19 nt, Homo sapiens
  misc_RNA (1)...(19): siRNA sense strand
uuuaagaagcccauuauug

SEQ ID NO: 1465376 - RNA, 19 nt, Homo sapiens
  misc_RNA (1)...(19): siRNA sense strand
gcgaugugguuugggcuaa

SEQ ID NO: 1465377 - RNA, 19 nt, Homo sapiens
  misc_RNA (1)...(19): siRNA sense strand
uggcagaagcuaucagaaa

SEQ ID NO: 1465378 - RNA, 19 nt, Homo sapiens
  misc_RNA (1)...(19): siRNA sense strand
ccaacgagagggaguguga

SEQ ID NO: 1465379 - RNA, 19 nt, Homo sapiens
  misc_RNA (1)...(19): siRNA sense strand
caaugggacaaccaacaua

SEQ ID NO: 1465380 - RNA, 19 nt, Homo sapiens
  misc_RNA (1)...(19): siRNA sense strand
gcugcaacaugaagaugga

SEQ ID NO: 1465381 - RNA, 19 nt, Homo sapiens
  misc_RNA (1)...(19): siRNA sense strand
gaauaacucacuaaaucca

SEQ ID NO: 1465382 - RNA, 19 nt, Homo sapiens
  misc_RNA (1)...(19): siRNA sense strand
gauaaugggaggagcaucu

SEQ ID NO: 1465383 - RNA, 19 nt, Homo sapiens
  misc_RNA (1)...(19): siRNA sense strand
aacagaaagugccuacaga

SEQ ID NO: 1465384 - RNA, 19 nt, Homo sapiens
  misc_RNA (1)...(19): siRNA sense strand
aucagaaacuucgugaaua

SEQ ID NO: 1465385 - RNA, 19 nt, Homo sapiens
  misc_RNA (1)...(19): siRNA sense strand
cagagaauaacucacuaaa

SEQ ID NO: 1465386 - RNA, 19 nt, Homo sapiens
  misc_RNA (1)...(19): siRNA sense strand
gaugugguuugggcuaaug

SEQ ID NO: 1465387 - RNA, 19 nt, Homo sapiens
  misc_RNA (1)...(19): siRNA sense strand
cacaaaguccucagagaau

SEQ ID NO: 1465388 - RNA, 19 nt, Homo sapiens
  misc_RNA (1)...(19): siRNA sense strand
ggaagugaugguucgcauu

SEQ ID NO: 1465389 - RNA, 19 nt, Homo sapiens
  misc_RNA (1)...(19): siRNA sense strand
ucagagaauaacucacuaa

SEQ ID NO: 1465390 - RNA, 19 nt, Homo sapiens
  misc_RNA (1)...(19): siRNA sense strand
aggagugacugccagcaaa

SEQ ID NO: 1465391 - RNA, 19 nt, Homo sapiens
  misc_RNA (1)...(19): siRNA sense strand
ucacccacaucuuguuauc

SEQ ID NO: 1465392 - RNA, 19 nt, Homo sapiens
  misc_RNA (1)...(19): siRNA sense strand
agaaagugccuacagauac

SEQ ID NO: 1465393 - RNA, 19 nt, Homo sapiens
  misc_RNA (1)...(19): siRNA sense strand
gaggaagaucgaugaguuc

SEQ ID NO: 1465394 - RNA, 19 nt, Homo sapiens
  misc_RNA (1)...(19): siRNA sense strand
gggaggagcaucugcaaac

SEQ ID NO: 1465395 - RNA, 19 nt, Homo sapiens
  misc_RNA (1)...(19): siRNA sense strand
cucacuaaauccagaggua

SEQ ID NO: 1465396 - RNA, 19 nt, Homo sapiens
  misc_RNA (1)...(19): siRNA sense strand
cucgugcgcugcaacauga

SEQ ID NO: 1465397 - RNA, 19 nt, Homo sapiens
  misc_RNA (1)...(19): siRNA sense strand
caucuauauugccucuuug

SEQ ID NO: 1465398 - RNA, 19 nt, Homo sapiens
  misc_RNA (1)...(19): siRNA sense strand
cgucuucuguuguggacuu

SEQ ID NO: 1465399 - RNA, 19 nt, Homo sapiens
  misc_RNA (1)...(19): siRNA sense strand
ggcagcgucuucuguugug

SEQ ID NO: 1465400 - RNA, 19 nt, Homo sapiens
  misc_RNA (1)...(19): siRNA sense strand
ucacuaaauccagagguaa

SEQ ID NO: 1465401 - RNA, 19 nt, Homo sapiens
  misc_RNA (1)...(19): siRNA sense strand
caguugugcuugaggaauc

SEQ ID NO: 1465402 - RNA, 19 nt, Homo sapiens
  misc_RNA (1)...(19): siRNA sense strand
aaacagaaagugccuacag

SEQ ID NO: 1465403 - RNA, 19 nt, Homo sapiens
  misc_RNA (1)...(19): siRNA sense strand
gcuguucuaccguuauguu

SEQ ID NO: 1465404 - RNA, 19 nt, Homo sapiens
  misc_RNA (1)...(19): siRNA sense strand
uggcuucacccacaucuug

SEQ ID NO: 1465405 - RNA, 19 nt, Homo sapiens
  misc_RNA (1)...(19): siRNA sense strand
ggacguucacucaggaagu

SEQ ID NO: 1465406 - RNA, 19 nt, Homo sapiens
  misc_RNA (1)...(19): siRNA sense strand
uauaccaccuucggacaga

SEQ ID NO: 1465407 - RNA, 19 nt, Homo sapiens
  misc_RNA (1)...(19): siRNA sense strand
gaagcccauuauuguagca

SEQ ID NO: 1465408 - RNA, 19 nt, Homo sapiens
  misc_RNA (1)...(19): siRNA sense strand
aagaagcccauuauuguag

SEQ ID NO: 1465409 - RNA, 19 nt, Homo sapiens
  misc_RNA (1)...(19): siRNA sense strand
gggacaaccaacauacaga

SEQ ID NO: 1465410 - RNA, 19 nt, Homo sapiens
  misc_RNA (1)...(19): siRNA sense strand
auccagagguaaugagaga

SEQ ID NO: 1465411 - RNA, 19 nt, Homo sapiens
  misc_RNA (1)...(19): siRNA sense strand
gugaggugcugaagaaaau

SEQ ID NO: 1465412 - RNA, 19 nt, Homo sapiens
  misc_RNA (1)...(19): siRNA sense strand
ccaaugggacaaccaacau

SEQ ID NO: 1465413 - RNA, 19 nt, Homo sapiens
  misc_RNA (1)...(19): siRNA sense strand
guggacuugacuuuauuua

SEQ ID NO: 1465414 - RNA, 19 nt, Homo sapiens
  misc_RNA (1)...(19): siRNA sense strand
gaggagcaucugcaaacga

SEQ ID NO: 1465415 - RNA, 19 nt, Homo sapiens
  misc_RNA (1)...(19): siRNA sense strand
ggaggagcaucugcaaacg

SEQ ID NO: 1465416 - RNA, 19 nt, Homo sapiens
  misc_RNA (1)...(19): siRNA sense strand
gcagaagcuaucagaaacu

SEQ ID NO: 1465417 - RNA, 19 nt, Homo sapiens
  misc_RNA (1)...(19): siRNA sense strand
cuucacccacaucuuguua

SEQ ID NO: 1465418 - RNA, 19 nt, Homo sapiens
  misc_RNA (1)...(19): siRNA sense strand
cuaggagcaucuauauugc

SEQ ID NO: 1465419 - RNA, 19 nt, Homo sapiens
  misc_RNA (1)...(19): siRNA sense strand
uccacaaaguccucagaga

SEQ ID NO: 1465420 - RNA, 19 nt, Homo sapiens
  misc_RNA (1)...(19): siRNA sense strand
acagaagagaccagccuuu

SEQ ID NO: 1465421 - RNA, 19 nt, Homo sapiens
  misc_RNA (1)...(19): siRNA sense strand
cuaaauccagagguaauga

SEQ ID NO: 1465422 - RNA, 19 nt, Homo sapiens
  misc_RNA (1)...(19): siRNA sense strand
ccucagagaauaacucacu

SEQ ID NO: 1465423 - RNA, 19 nt, Homo sapiens
  misc_RNA (1)...(19): siRNA sense strand
acagauacagagauauugu

SEQ ID NO: 1465424 - RNA, 19 nt, Homo sapiens
  misc_RNA (1)...(19): siRNA sense strand
accguuauguuucccaaga

SEQ ID NO: 1465425 - RNA, 19 nt, Homo sapiens
  misc_RNA (1)...(19): siRNA sense strand
gccaaugggacaaccaaca

SEQ ID NO: 1465426 - RNA, 19 nt, Homo sapiens
  misc_RNA (1)...(19): siRNA sense strand
agaaacuucgugaauacuu

SEQ ID NO: 1465427 - RNA, 19 nt, Homo sapiens
  misc_RNA (1)...(19): siRNA sense strand
gaguccagauggcuguucu

SEQ ID NO: 1465428 - RNA, 19 nt, Homo sapiens
  misc_RNA (1)...(19): siRNA sense strand
gaaagaaauugccaaguua

SEQ ID NO: 1465429 - RNA, 19 nt, Homo sapiens
  misc_RNA (1)...(19): siRNA sense strand
ggcagacacuucaguauua

SEQ ID NO: 1465430 - RNA, 19 nt, Homo sapiens
  misc_RNA (1)...(19): siRNA sense strand
caacuaugcuucuugcuaa

SEQ ID NO: 1465431 - RNA, 19 nt, Homo sapiens
  misc_RNA (1)...(19): siRNA sense strand
gagcaugccuguaguguga

SEQ ID NO: 1465432 - RNA, 19 nt, Homo sapiens
  misc_RNA (1)...(19): siRNA sense strand
ugaaagaaauugccaaguu

SEQ ID NO: 1465433 - RNA, 19 nt, Homo sapiens
  misc_RNA (1)...(19): siRNA sense strand
gagcgagucuguaaucuga

SEQ ID NO: 1465434 - RNA, 19 nt, Homo sapiens
  misc_RNA (1)...(19): siRNA sense strand
ggagggagcuuccauccuu

SEQ ID NO: 1465435 - RNA, 19 nt, Homo sapiens
  misc_RNA (1)...(19): siRNA sense strand
gaaauaccuuccuaaugaa

SEQ ID NO: 1465436 - RNA, 19 nt, Homo sapiens
  misc_RNA (1)...(19): siRNA sense strand
gcaugaagcuguaaauuuu

SEQ ID NO: 1465437 - RNA, 19 nt, Homo sapiens
  misc_RNA (1)...(19): siRNA sense strand
ccaaagagcgagucuguaa

SEQ ID NO: 1465438 - RNA, 19 nt, Homo sapiens
  misc_RNA (1)...(19): siRNA sense strand
gagagaggaucaagacaug

SEQ ID NO: 1465439 - RNA, 19 nt, Homo sapiens
  misc_RNA (1)...(19): siRNA sense strand
gcagacacuucaguauuaa

SEQ ID NO: 1465440 - RNA, 19 nt, Homo sapiens
  misc_RNA (1)...(19): siRNA sense strand
gcaaacagggcauccaauu

SEQ ID NO: 1465441 - RNA, 19 nt, Homo sapiens
  misc_RNA (1)...(19): siRNA sense strand
caacaaggcaggagaguau

SEQ ID NO: 1465442 - RNA, 19 nt, Homo sapiens
  misc_RNA (1)...(19): siRNA sense strand
gaaauugccaaguuaauca

SEQ ID NO: 1465443 - RNA, 19 nt, Homo sapiens
  misc_RNA (1)...(19): siRNA sense strand
ccauccagauuguaaauaa

SEQ ID NO: 1465444 - RNA, 19 nt, Homo sapiens
  misc_RNA (1)...(19): siRNA sense strand
uaaagaccauuacuucuca

SEQ ID NO: 1465445 - RNA, 19 nt, Homo sapiens
  misc_RNA (1)...(19): siRNA sense strand
agccaaauaugaccuguua

SEQ ID NO: 1465446 - RNA, 19 nt, Homo sapiens
  misc_RNA (1)...(19): siRNA sense strand
gacccuagcugaugcugaa

SEQ ID NO: 1465447 - RNA, 19 nt, Homo sapiens
  misc_RNA (1)...(19): siRNA sense strand
gagcuuccauccuucuuga

SEQ ID NO: 1465448 - RNA, 19 nt, Homo sapiens
  misc_RNA (1)...(19): siRNA sense strand
ugaaggagauguauuucga

SEQ ID NO: 1465449 - RNA, 19 nt, Homo sapiens
  misc_RNA (1)...(19): siRNA sense strand
gaccaaccaucaucucgaa

SEQ ID NO: 1465450 - RNA, 19 nt, Homo sapiens
  misc_RNA (1)...(19): siRNA sense strand
gaagccauccagauuguaa

SEQ ID NO: 1465451 - RNA, 19 nt, Homo sapiens
  misc_RNA (1)...(19): siRNA sense strand
guaaauaacaacccauaug

SEQ ID NO: 1465452 - RNA, 19 nt, Homo sapiens
  misc_RNA (1)...(19): siRNA sense strand
ccaauucuacacucaguua

SEQ ID NO: 1465453 - RNA, 19 nt, Homo sapiens
  misc_RNA (1)...(19): siRNA sense strand
acauggaccuuuauuccua

SEQ ID NO: 1465454 - RNA, 19 nt, Homo sapiens
  misc_RNA (1)...(19): siRNA sense strand
caagaggguucaagccaau

SEQ ID NO: 1465455 - RNA, 19 nt, Homo sapiens
  misc_RNA (1)...(19): siRNA sense strand
cuaaguugcuccaggauuc

SEQ ID NO: 1465456 - RNA, 19 nt, Homo sapiens
  misc_RNA (1)...(19): siRNA sense strand
ggaaauaugcccacuuggu

SEQ ID NO: 1465457 - RNA, 19 nt, Homo sapiens
  misc_RNA (1)...(19): siRNA sense strand
uaacaacccauauggaaau

SEQ ID NO: 1465458 - RNA, 19 nt, Homo sapiens
  misc_RNA (1)...(19): siRNA sense strand
aauaugaccuguuacaaag

SEQ ID NO: 1465459 - RNA, 19 nt, Homo sapiens
  misc_RNA (1)...(19): siRNA sense strand
gccaugguguguggaaaua

SEQ ID NO: 1465460 - RNA, 19 nt, Homo sapiens
  misc_RNA (1)...(19): siRNA sense strand
gggcagacacuucaguauu

SEQ ID NO: 1465461 - RNA, 19 nt, Homo sapiens
  misc_RNA (1)...(19): siRNA sense strand
gagagucaaugcaggagau

SEQ ID NO: 1465462 - RNA, 19 nt, Homo sapiens
  misc_RNA (1)...(19): siRNA sense strand
caaccaucaucucgaaugu

SEQ ID NO: 1465463 - RNA, 19 nt, Homo sapiens
  misc_RNA (1)...(19): siRNA sense strand
ucggaaauaugcccacuug

SEQ ID NO: 1465464 - RNA, 19 nt, Homo sapiens
  misc_RNA (1)...(19): siRNA sense strand
gggagugugugcaggcauu

SEQ ID NO: 1465465 - RNA, 19 nt, Homo sapiens
  misc_RNA (1)...(19): siRNA sense strand
cugcauggcucuuucaaca

SEQ ID NO: 1465466 - RNA, 19 nt, Homo sapiens
  misc_RNA (1)...(19): siRNA sense strand
gugcaggcauugcuccauu

SEQ ID NO: 1465467 - RNA, 19 nt, Homo sapiens
  misc_RNA (1)...(19): siRNA sense strand
agacagaaacauuggauga

SEQ ID NO: 1465468 - RNA, 19 nt, Homo sapiens
  misc_RNA (1)...(19): siRNA sense strand
ucucgaaugucaagccaaa

SEQ ID NO: 1465469 - RNA, 19 nt, Homo sapiens
  misc_RNA (1)...(19): siRNA sense strand
uaaauaacaacccauaugg

SEQ ID NO: 1465470 - RNA, 19 nt, Homo sapiens
  misc_RNA (1)...(19): siRNA sense strand
gcucuucauuggugggaaa

SEQ ID NO: 1465471 - RNA, 19 nt, Homo sapiens
  misc_RNA (1)...(19): siRNA sense strand
gcccggauccugcagguuu

SEQ ID NO: 1465472 - RNA, 19 nt, Homo sapiens
  misc_RNA (1)...(19): siRNA sense strand
aauaacaacccauauggaa

SEQ ID NO: 1465473 - RNA, 19 nt, Homo sapiens
  misc_RNA (1)...(19): siRNA sense strand
ccaaauaugaccuguuaca

SEQ ID NO: 1465474 - RNA, 19 nt, Homo sapiens
  misc_RNA (1)...(19): siRNA sense strand
gggaagacccuagcugaug

SEQ ID NO: 1465475 - RNA, 19 nt, Homo sapiens
  misc_RNA (1)...(19): siRNA sense strand
agugacaaauggaucgaua

SEQ ID NO: 1465476 - RNA, 19 nt, Homo sapiens
  misc_RNA (1)...(19): siRNA sense strand
aaagugaaaggcuaugaaa

SEQ ID NO: 1465477 - RNA, 19 nt, Homo sapiens
  misc_RNA (1)...(19): siRNA sense strand
gcuccgcuaucaacaacuu

SEQ ID NO: 1465478 - RNA, 19 nt, Homo sapiens
  misc_RNA (1)...(19): siRNA sense strand
gagagaccaugccauccau

SEQ ID NO: 1465479 - RNA, 19 nt, Homo sapiens
  misc_RNA (1)...(19): siRNA sense strand
aaacagggcauccaauucu

SEQ ID NO: 1465480 - RNA, 19 nt, Homo sapiens
  misc_RNA (1)...(19): siRNA sense strand
gggagacaccaauuucuau

SEQ ID NO: 1465481 - RNA, 19 nt, Homo sapiens
  misc_RNA (1)...(19): siRNA sense strand
ucgaaugucaagccaaaua

SEQ ID NO: 1465482 - RNA, 19 nt, Homo sapiens
  misc_RNA (1)...(19): siRNA sense strand
cuguaaagcucuucauugg

SEQ ID NO: 1465483 - RNA, 19 nt, Homo sapiens
  misc_RNA (1)...(19): siRNA sense strand
caaacagggcauccaauuc

SEQ ID NO: 1465484 - RNA, 19 nt, Homo sapiens
  misc_RNA (1)...(19): siRNA sense strand
ggagacaccaauuucuaug

SEQ ID NO: 1465485 - RNA, 19 nt, Homo sapiens
  misc_RNA (1)...(19): siRNA sense strand
caucuuccuucucuucuuc

SEQ ID NO: 1465486 - RNA, 19 nt, Homo sapiens
  misc_RNA (1)...(19): siRNA sense strand
gaaugucaagccaaauaug

SEQ ID NO: 1465487 - RNA, 19 nt, Homo sapiens
  misc_RNA (1)...(19): siRNA sense strand
ccagugccuuugccaaugu

SEQ ID NO: 1465488 - RNA, 19 nt, Homo sapiens
  misc_RNA (1)...(19): siRNA sense strand
caaguuaaucacauuggaa

SEQ ID NO: 1465489 - RNA, 19 nt, Homo sapiens
  misc_RNA (1)...(19): siRNA sense strand
uaaagugaaaggcuaugaa

SEQ ID NO: 1465490 - RNA, 19 nt, Homo sapiens
  misc_RNA (1)...(19): siRNA sense strand
caucauccauggacagcau

SEQ ID NO: 1465491 - RNA, 19 nt, Homo sapiens
  misc_RNA (1)...(19): siRNA sense strand
caaauaugaccuguuacaa

SEQ ID NO: 1465492 - RNA, 19 nt, Homo sapiens
  misc_RNA (1)...(19): siRNA sense strand
gcaucuuccuucucuucuu

SEQ ID NO: 1465493 - RNA, 19 nt, Homo sapiens
  misc_RNA (1)...(19): siRNA sense strand
ggagagaccaugccaucca

SEQ ID NO: 1465494 - RNA, 19 nt, Homo sapiens
  misc_RNA (1)...(19): siRNA sense strand
gcauccaauucuacacuca

SEQ ID NO: 1465495 - RNA, 19 nt, Homo sapiens
  misc_RNA (1)...(19): siRNA sense strand
gacagaaacauuggaugaa

SEQ ID NO: 1465496 - RNA, 19 nt, Homo sapiens
  misc_RNA (1)...(19): siRNA sense strand
gcgagucccuggagcaacu

SEQ ID NO: 1465497 - RNA, 19 nt, Homo sapiens
  misc_RNA (1)...(19): siRNA sense strand
ugccauccaucaccaaaga

SEQ ID NO: 1465498 - RNA, 19 nt, Homo sapiens
  misc_RNA (1)...(19): siRNA sense strand
agugugacaucccucauga

SEQ ID NO: 1465499 - RNA, 19 nt, Homo sapiens
  misc_RNA (1)...(19): siRNA sense strand
caauuucuauggcaaacag

SEQ ID NO: 1465500 - RNA, 19 nt, Homo sapiens
  misc_RNA (1)...(19): siRNA sense strand
acagaaacauuggaugaag

SEQ ID NO: 1465501 - RNA, 19 nt, Homo sapiens
  misc_RNA (1)...(19): siRNA sense strand
ggagacagaaacauuggau

SEQ ID NO: 1465502 - RNA, 19 nt, Homo sapiens
  misc_RNA (1)...(19): siRNA sense strand
aaagagcgagucuguaauc

SEQ ID NO: 1465503 - RNA, 19 nt, Homo sapiens
  misc_RNA (1)...(19): siRNA sense strand
ggcaggagaguauaucuuc

SEQ ID NO: 1465504 - RNA, 19 nt, Homo sapiens
  misc_RNA (1)...(19): siRNA sense strand
gcgaucauccggacaucaa

SEQ ID NO: 1465505 - RNA, 19 nt, Homo sapiens
  misc_RNA (1)...(19): siRNA sense strand
gaacauuaaacaucaucca

SEQ ID NO: 1465506 - RNA, 19 nt, Homo sapiens
  misc_RNA (1)...(19): siRNA sense strand
ggccaaagagcgagucugu

SEQ ID NO: 1465507 - RNA, 19 nt, Homo sapiens
  misc_RNA (1)...(19): siRNA sense strand
agcaugaagcuguaaauuu

SEQ ID NO: 1465508 - RNA, 19 nt, Homo sapiens
  misc_RNA (1)...(19): siRNA sense strand
ccagaugccaauaaggaaa

SEQ ID NO: 1465509 - RNA, 19 nt, Homo sapiens
  misc_RNA (1)...(19): siRNA sense strand
ggacaggugggagugaaug

SEQ ID NO: 1465510 - RNA, 19 nt, Homo sapiens
  misc_RNA (1)...(19): siRNA sense strand
ccacaacccagccaccaau

SEQ ID NO: 1465511 - RNA, 19 nt, Homo sapiens
  misc_RNA (1)...(19): siRNA sense strand
cgaaugucaagccaaauau

SEQ ID NO: 1465512 - RNA, 19 nt, Homo sapiens
  misc_RNA (1)...(19): siRNA sense strand
gcuaaguugcuccaggauu

SEQ ID NO: 1465513 - RNA, 19 nt, Homo sapiens
  misc_RNA (1)...(19): siRNA sense strand
cgagagaggaucaagacau

SEQ ID NO: 1465514 - RNA, 19 nt, Homo sapiens
  misc_RNA (1)...(19): siRNA sense strand
ccaacaaggcaggagagua

SEQ ID NO: 1465515 - RNA, 19 nt, Homo sapiens
  misc_RNA (1)...(19): siRNA sense strand
cuaugaaaauggcaacuuu

SEQ ID NO: 1465516 - RNA, 19 nt, Homo sapiens
  misc_RNA (1)...(19): siRNA sense strand
aacagggcauccaauucua

SEQ ID NO: 1465517 - RNA, 19 nt, Homo sapiens
  misc_RNA (1)...(19): siRNA sense strand
aaugucaagccaaauauga

SEQ ID NO: 1465518 - RNA, 19 nt, Homo sapiens
  misc_RNA (1)...(19): siRNA sense strand
ccaaccaucaucucgaaug

SEQ ID NO: 1465519 - RNA, 19 nt, Homo sapiens
  misc_RNA (1)...(19): siRNA sense strand
guuaaucacauuggaacaa

SEQ ID NO: 1465520 - RNA, 19 nt, Homo sapiens
  misc_RNA (1)...(19): siRNA sense strand
ugacaaauggaucgauauc

SEQ ID NO: 1465521 - RNA, 19 nt, Homo sapiens
  misc_RNA (1)...(19): siRNA sense strand
accaucaucucgaauguca

SEQ ID NO: 1465522 - RNA, 19 nt, Homo sapiens
  misc_RNA (1)...(19): siRNA sense strand
gugaaaggcuaugaaaaug

SEQ ID NO: 1465523 - RNA, 19 nt, Homo sapiens
  misc_RNA (1)...(19): siRNA sense strand
ggagcuuccauccuucuug

SEQ ID NO: 1465524 - RNA, 19 nt, Homo sapiens
  misc_RNA (1)...(19): siRNA sense strand
caaagagcgagucuguaau

SEQ ID NO: 1465525 - RNA, 19 nt, Homo sapiens
  misc_RNA (1)...(19): siRNA sense strand
gaucaagacauggcaagag

SEQ ID NO: 1465526 - RNA, 19 nt, Homo sapiens
  misc_RNA (1)...(19): siRNA sense strand
cuaugcuucuugcuaaguu

SEQ ID NO: 1465527 - RNA, 19 nt, Homo sapiens
  misc_RNA (1)...(19): siRNA sense strand
gagaccaugccauccauca

SEQ ID NO: 1465528 - RNA, 19 nt, Homo sapiens
  misc_RNA (1)...(19): siRNA sense strand
caacugcgaugaugacuug

SEQ ID NO: 1465529 - RNA, 19 nt, Homo sapiens
  misc_RNA (1)...(19): siRNA sense strand
guaacucucuguccuggua

SEQ ID NO: 1465530 - RNA, 19 nt, Homo sapiens
  misc_RNA (1)...(19): siRNA sense strand
ugacaaagauagcuguaug

SEQ ID NO: 1465531 - RNA, 19 nt, Homo sapiens
  misc_RNA (1)...(19): siRNA sense strand
gaaguacgaggcacuguau

SEQ ID NO: 1465532 - RNA, 19 nt, Homo sapiens
  misc_RNA (1)...(19): siRNA sense strand
guacagaggaggagccauu

SEQ ID NO: 1465533 - RNA, 19 nt, Homo sapiens
  misc_RNA (1)...(19): siRNA sense strand
gcucaagugccauguguuu

SEQ ID NO: 1465534 - RNA, 19 nt, Homo sapiens
  misc_RNA (1)...(19): siRNA sense strand
gcauggaugugcugaacga

SEQ ID NO: 1465535 - RNA, 19 nt, Homo sapiens
  misc_RNA (1)...(19): siRNA sense strand
ggccagaacaugcugauga

SEQ ID NO: 1465536 - RNA, 19 nt, Homo sapiens
  misc_RNA (1)...(19): siRNA sense strand
gccaagcugcucagaagua

SEQ ID NO: 1465537 - RNA, 19 nt, Homo sapiens
  misc_RNA (1)...(19): siRNA sense strand
gccagaacaugcugaugau

SEQ ID NO: 1465538 - RNA, 19 nt, Homo sapiens
  misc_RNA (1)...(19): siRNA sense strand
cggaccagcuccauggauu

SEQ ID NO: 1465539 - RNA, 19 nt, Homo sapiens
  misc_RNA (1)...(19): siRNA sense strand
gaucuugucagagcgagua

SEQ ID NO: 1465540 - RNA, 19 nt, Homo sapiens
  misc_RNA (1)...(19): siRNA sense strand
aagccaagcugcucagaag

SEQ ID NO: 1465541 - RNA, 19 nt, Homo sapiens
  misc_RNA (1)...(19): siRNA sense strand
gugcccagaucuugucaga

SEQ ID NO: 1465542 - RNA, 19 nt, Homo sapiens
  misc_RNA (1)...(19): siRNA sense strand
guacgaggcacuguauaug

SEQ ID NO: 1465543 - RNA, 19 nt, Homo sapiens
  misc_RNA (1)...(19): siRNA sense strand
gagccagccuccagauggu

SEQ ID NO: 1465544 - RNA, 19 nt, Homo sapiens
  misc_RNA (1)...(19): siRNA sense strand
gaaacccucucugcuccau

SEQ ID NO: 1465545 - RNA, 19 nt, Homo sapiens
  misc_RNA (1)...(19): siRNA sense strand
gggcauggaugugcugaac

SEQ ID NO: 1465546 - RNA, 19 nt, Homo sapiens
  misc_RNA (1)...(19): siRNA sense strand
gugucugacucucucauga

SEQ ID NO: 1465547 - RNA, 19 nt, Homo sapiens
  misc_RNA (1)...(19): siRNA sense strand
ccacgaugcugcagguacu

SEQ ID NO: 1465548 - RNA, 19 nt, Homo sapiens
  misc_RNA (1)...(19): siRNA sense strand
gccaugagccuagugaauc

SEQ ID NO: 1465549 - RNA, 19 nt, Homo sapiens
  misc_RNA (1)...(19): siRNA sense strand
agaaguacgaggcacugua

SEQ ID NO: 1465550 - RNA, 19 nt, Homo sapiens
  misc_RNA (1)...(19): siRNA sense strand
cugccuguaugguucagua

SEQ ID NO: 1465551 - RNA, 19 nt, Homo sapiens
  misc_RNA (1)...(19): siRNA sense strand
ccaagcugcucagaaguac

SEQ ID NO: 1465552 - RNA, 19 nt, Homo sapiens
  misc_RNA (1)...(19): siRNA sense strand
aacccucucugcuccauau

SEQ ID NO: 1465553 - RNA, 19 nt, Homo sapiens
  misc_RNA (1)...(19): siRNA sense strand
ggaccagcuccauggauuc

SEQ ID NO: 1465554 - RNA, 19 nt, Homo sapiens
  misc_RNA (1)...(19): siRNA sense strand
guagaggucaguggugaug

SEQ ID NO: 1465555 - RNA, 19 nt, Homo sapiens
  misc_RNA (1)...(19): siRNA sense strand
ucacuggaccggaguaacu

SEQ ID NO: 1465556 - RNA, 19 nt, Homo sapiens
  misc_RNA (1)...(19): siRNA sense strand
cagaggaggagccauugug

SEQ ID NO: 1465557 - RNA, 19 nt, Homo sapiens
  misc_RNA (1)...(19): siRNA sense strand
ugaagaaggaugccaugag

SEQ ID NO: 1465558 - RNA, 19 nt, Homo sapiens
  misc_RNA (1)...(19): siRNA sense strand
uguggcaagugacaaagau

SEQ ID NO: 1465559 - RNA, 19 nt, Homo sapiens
  misc_RNA (1)...(19): siRNA sense strand
acacaccuuuggccucauc

SEQ ID NO: 1465560 - RNA, 19 nt, Homo sapiens
  misc_RNA (1)...(19): siRNA sense strand
uaagccaagcugcucagaa

SEQ ID NO: 1465561 - RNA, 19 nt, Homo sapiens
  misc_RNA (1)...(19): siRNA sense strand
gaugccaugagccuaguga

SEQ ID NO: 1465562 - RNA, 19 nt, Homo sapiens
  misc_RNA (1)...(19): siRNA sense strand
ccaucauucuggucaacug

SEQ ID NO: 1465563 - RNA, 19 nt, Homo sapiens
  misc_RNA (1)...(19): siRNA sense strand
caacugcgaugaugacuug

SEQ ID NO: 1465564 - RNA, 19 nt, Homo sapiens
  misc_RNA (1)...(19): siRNA sense strand
guaacucucuguccuggua

SEQ ID NO: 1465565 - RNA, 19 nt, Homo sapiens
  misc_RNA (1)...(19): siRNA sense strand
ugacaaagauagcuguaug

SEQ ID NO: 1465566 - RNA, 19 nt, Homo sapiens
  misc_RNA (1)...(19): siRNA sense strand
gaaguacgaggcacuguau

SEQ ID NO: 1465567 - RNA, 19 nt, Homo sapiens
  misc_RNA (1)...(19): siRNA sense strand
guacagaggaggagccauu

SEQ ID NO: 1465568 - RNA, 19 nt, Homo sapiens
  misc_RNA (1)...(19): siRNA sense strand
gcucaagugccauguguuu

SEQ ID NO: 1465569 - RNA, 19 nt, Homo sapiens
  misc_RNA (1)...(19): siRNA sense strand
gcauggaugugcugaacga

SEQ ID NO: 1465570 - RNA, 19 nt, Homo sapiens
  misc_RNA (1)...(19): siRNA sense strand
ggccagaacaugcugauga

SEQ ID NO: 1465571 - RNA, 19 nt, Homo sapiens
  misc_RNA (1)...(19): siRNA sense strand
gccaagcugcucagaagua

SEQ ID NO: 1465572 - RNA, 19 nt, Homo sapiens
  misc_RNA (1)...(19): siRNA sense strand
gccagaacaugcugaugau

SEQ ID NO: 1465573 - RNA, 19 nt, Homo sapiens
  misc_RNA (1)...(19): siRNA sense strand
cggaccagcuccauggauu

SEQ ID NO: 1465574 - RNA, 19 nt, Homo sapiens
  misc_RNA (1)...(19): siRNA sense strand
gaucuugucagagcgagua

SEQ ID NO: 1465575 - RNA, 19 nt, Homo sapiens
  misc_RNA (1)...(19): siRNA sense strand
aagccaagcugcucagaag

SEQ ID NO: 1465576 - RNA, 19 nt, Homo sapiens
  misc_RNA (1)...(19): siRNA sense strand
gugcccagaucuugucaga

SEQ ID NO: 1465577 - RNA, 19 nt, Homo sapiens
  misc_RNA (1)...(19): siRNA sense strand
guacgaggcacuguauaug

SEQ ID NO: 1465578 - RNA, 19 nt, Homo sapiens
  misc_RNA (1)...(19): siRNA sense strand
gagccagccuccagauggu

SEQ ID NO: 1465579 - RNA, 19 nt, Homo sapiens
  misc_RNA (1)...(19): siRNA sense strand
gaaacccucucugcuccau

SEQ ID NO: 1465580 - RNA, 19 nt, Homo sapiens
  misc_RNA (1)...(19): siRNA sense strand
gggcauggaugugcugaac

SEQ ID NO: 1465581 - RNA, 19 nt, Homo sapiens
  misc_RNA (1)...(19): siRNA sense strand
gugucugacucucucauga

SEQ ID NO: 1465582 - RNA, 19 nt, Homo sapiens
  misc_RNA (1)...(19): siRNA sense strand
ccacgaugcugcagguacu

SEQ ID NO: 1465583 - RNA, 19 nt, Homo sapiens
  misc_RNA (1)...(19): siRNA sense strand
gccaugagccuagugaauc

SEQ ID NO: 1465584 - RNA, 19 nt, Homo sapiens
  misc_RNA (1)...(19): siRNA sense strand
agaaguacgaggcacugua

SEQ ID NO: 1465585 - RNA, 19 nt, Homo sapiens
  misc_RNA (1)...(19): siRNA sense strand
cugccuguaugguucagua

SEQ ID NO: 1465586 - RNA, 19 nt, Homo sapiens
  misc_RNA (1)...(19): siRNA sense strand
ccaagcugcucagaaguac

SEQ ID NO: 1465587 - RNA, 19 nt, Homo sapiens
  misc_RNA (1)...(19): siRNA sense strand
aacccucucugcuccauau

SEQ ID NO: 1465588 - RNA, 19 nt, Homo sapiens
  misc_RNA (1)...(19): siRNA sense strand
ggaccagcuccauggauuc

SEQ ID NO: 1465589 - RNA, 19 nt, Homo sapiens
  misc_RNA (1)...(19): siRNA sense strand
guagaggucaguggugaug

SEQ ID NO: 1465590 - RNA, 19 nt, Homo sapiens
  misc_RNA (1)...(19): siRNA sense strand
ucacuggaccggaguaacu

SEQ ID NO: 1465591 - RNA, 19 nt, Homo sapiens
  misc_RNA (1)...(19): siRNA sense strand
cagaggaggagccauugug

SEQ ID NO: 1465592 - RNA, 19 nt, Homo sapiens
  misc_RNA (1)...(19): siRNA sense strand
ugaagaaggaugccaugag

SEQ ID NO: 1465593 - RNA, 19 nt, Homo sapiens
  misc_RNA (1)...(19): siRNA sense strand
uguggcaagugacaaagau

SEQ ID NO: 1465594 - RNA, 19 nt, Homo sapiens
  misc_RNA (1)...(19): siRNA sense strand
acacaccuuuggccucauc

SEQ ID NO: 1465595 - RNA, 19 nt, Homo sapiens
  misc_RNA (1)...(19): siRNA sense strand
uaagccaagcugcucagaa

SEQ ID NO: 1465596 - RNA, 19 nt, Homo sapiens
  misc_RNA (1)...(19): siRNA sense strand
gaugccaugagccuaguga

SEQ ID NO: 1465597 - RNA, 19 nt, Homo sapiens
  misc_RNA (1)...(19): siRNA sense strand
ccaucauucuggucaacug

SEQ ID NO: 1465598 - RNA, 19 nt, Homo sapiens
  misc_RNA (1)...(19): siRNA sense strand
caacugcgaugaugacuug

SEQ ID NO: 1465599 - RNA, 19 nt, Homo sapiens
  misc_RNA (1)...(19): siRNA sense strand
guaacucucuguccuggua

SEQ ID NO: 1465600 - RNA, 19 nt, Homo sapiens
  misc_RNA (1)...(19): siRNA sense strand
ugacaaagauagcuguaug

SEQ ID NO: 1465601 - RNA, 19 nt, Homo sapiens
  misc_RNA (1)...(19): siRNA sense strand
gaaguacgaggcacuguau

SEQ ID NO: 1465602 - RNA, 19 nt, Homo sapiens
  misc_RNA (1)...(19): siRNA sense strand
guacagaggaggagccauu

SEQ ID NO: 1465603 - RNA, 19 nt, Homo sapiens
  misc_RNA (1)...(19): siRNA sense strand
gcucaagugccauguguuu

SEQ ID NO: 1465604 - RNA, 19 nt, Homo sapiens
  misc_RNA (1)...(19): siRNA sense strand
gcauggaugugcugaacga

SEQ ID NO: 1465605 - RNA, 19 nt, Homo sapiens
  misc_RNA (1)...(19): siRNA sense strand
ggccagaacaugcugauga

SEQ ID NO: 1465606 - RNA, 19 nt, Homo sapiens
  misc_RNA (1)...(19): siRNA sense strand
gccaagcugcucagaagua

SEQ ID NO: 1465607 - RNA, 19 nt, Homo sapiens
  misc_RNA (1)...(19): siRNA sense strand
gccagaacaugcugaugau

SEQ ID NO: 1465608 - RNA, 19 nt, Homo sapiens
  misc_RNA (1)...(19): siRNA sense strand
cggaccagcuccauggauu

SEQ ID NO: 1465609 - RNA, 19 nt, Homo sapiens
  misc_RNA (1)...(19): siRNA sense strand
gaucuugucagagcgagua

SEQ ID NO: 1465610 - RNA, 19 nt, Homo sapiens
  misc_RNA (1)...(19): siRNA sense strand
aagccaagcugcucagaag

SEQ ID NO: 1465611 - RNA, 19 nt, Homo sapiens
  misc_RNA (1)...(19): siRNA sense strand
gugcccagaucuugucaga

SEQ ID NO: 1465612 - RNA, 19 nt, Homo sapiens
  misc_RNA (1)...(19): siRNA sense strand
guacgaggcacuguauaug

SEQ ID NO: 1465613 - RNA, 19 nt, Homo sapiens
  misc_RNA (1)...(19): siRNA sense strand
gagccagccuccagauggu

SEQ ID NO: 1465614 - RNA, 19 nt, Homo sapiens
  misc_RNA (1)...(19): siRNA sense strand
gaaacccucucugcuccau

SEQ ID NO: 1465615 - RNA, 19 nt, Homo sapiens
  misc_RNA (1)...(19): siRNA sense strand
gggcauggaugugcugaac

SEQ ID NO: 1465616 - RNA, 19 nt, Homo sapiens
  misc_RNA (1)...(19): siRNA sense strand
gugucugacucucucauga

SEQ ID NO: 1465617 - RNA, 19 nt, Homo sapiens
  misc_RNA (1)...(19): siRNA sense strand
ccacgaugcugcagguacu

SEQ ID NO: 1465618 - RNA, 19 nt, Homo sapiens
  misc_RNA (1)...(19): siRNA sense strand
gccaugagccuagugaauc

SEQ ID NO: 1465619 - RNA, 19 nt, Homo sapiens
  misc_RNA (1)...(19): siRNA sense strand
agaaguacgaggcacugua

SEQ ID NO: 1465620 - RNA, 19 nt, Homo sapiens
  misc_RNA (1)...(19): siRNA sense strand
cugccuguaugguucagua

SEQ ID NO: 1465621 - RNA, 19 nt, Homo sapiens
  misc_RNA (1)...(19): siRNA sense strand
ccaagcugcucagaaguac

SEQ ID NO: 1465622 - RNA, 19 nt, Homo sapiens
  misc_RNA (1)...(19): siRNA sense strand
aacccucucugcuccauau

SEQ ID NO: 1465623 - RNA, 19 nt, Homo sapiens
  misc_RNA (1)...(19): siRNA sense strand
ggaccagcuccauggauuc

SEQ ID NO: 1465624 - RNA, 19 nt, Homo sapiens
  misc_RNA (1)...(19): siRNA sense strand
guagaggucaguggugaug

SEQ ID NO: 1465625 - RNA, 19 nt, Homo sapiens
  misc_RNA (1)...(19): siRNA sense strand
ucacuggaccggaguaacu

SEQ ID NO: 1465626 - RNA, 19 nt, Homo sapiens
  misc_RNA (1)...(19): siRNA sense strand
cagaggaggagccauugug

SEQ ID NO: 1465627 - RNA, 19 nt, Homo sapiens
  misc_RNA (1)...(19): siRNA sense strand
ugaagaaggaugccaugag

SEQ ID NO: 1465628 - RNA, 19 nt, Homo sapiens
  misc_RNA (1)...(19): siRNA sense strand
uguggcaagugacaaagau

SEQ ID NO: 1465629 - RNA, 19 nt, Homo sapiens
  misc_RNA (1)...(19): siRNA sense strand
acacaccuuuggccucauc

SEQ ID NO: 1465630 - RNA, 19 nt, Homo sapiens
  misc_RNA (1)...(19): siRNA sense strand
uaagccaagcugcucagaa

SEQ ID NO: 1465631 - RNA, 19 nt, Homo sapiens
  misc_RNA (1)...(19): siRNA sense strand
gaugccaugagccuaguga

SEQ ID NO: 1465632 - RNA, 19 nt, Homo sapiens
  misc_RNA (1)...(19): siRNA sense strand
ccaucauucuggucaacug

SEQ ID NO: 1465633 - RNA, 19 nt, Homo sapiens
  misc_RNA (1)...(19): siRNA sense strand
caacugcgaugaugacuug

SEQ ID NO: 1465634 - RNA, 19 nt, Homo sapiens
  misc_RNA (1)...(19): siRNA sense strand
guaacucucuguccuggua

SEQ ID NO: 1465635 - RNA, 19 nt, Homo sapiens
  misc_RNA (1)...(19): siRNA sense strand
ugacaaagauagcuguaug

SEQ ID NO: 1465636 - RNA, 19 nt, Homo sapiens
  misc_RNA (1)...(19): siRNA sense strand
gaaguacgaggcacuguau

SEQ ID NO: 1465637 - RNA, 19 nt, Homo sapiens
  misc_RNA (1)...(19): siRNA sense strand
guacagaggaggagccauu

SEQ ID NO: 1465638 - RNA, 19 nt, Homo sapiens
  misc_RNA (1)...(19): siRNA sense strand
gcucaagugccauguguuu

SEQ ID NO: 1465639 - RNA, 19 nt, Homo sapiens
  misc_RNA (1)...(19): siRNA sense strand
gcauggaugugcugaacga

SEQ ID NO: 1465640 - RNA, 19 nt, Homo sapiens
  misc_RNA (1)...(19): siRNA sense strand
ggccagaacaugcugauga

SEQ ID NO: 1465641 - RNA, 19 nt, Homo sapiens
  misc_RNA (1)...(19): siRNA sense strand
gccaagcugcucagaagua

SEQ ID NO: 1465642 - RNA, 19 nt, Homo sapiens
  misc_RNA (1)...(19): siRNA sense strand
gccagaacaugcugaugau

SEQ ID NO: 1465643 - RNA, 19 nt, Homo sapiens
  misc_RNA (1)...(19): siRNA sense strand
cggaccagcuccauggauu

SEQ ID NO: 1465644 - RNA, 19 nt, Homo sapiens
  misc_RNA (1)...(19): siRNA sense strand
gaucuugucagagcgagua

SEQ ID NO: 1465645 - RNA, 19 nt, Homo sapiens
  misc_RNA (1)...(19): siRNA sense strand
aagccaagcugcucagaag

SEQ ID NO: 1465646 - RNA, 19 nt, Homo sapiens
  misc_RNA (1)...(19): siRNA sense strand
gugcccagaucuugucaga

SEQ ID NO: 1465647 - RNA, 19 nt, Homo sapiens
  misc_RNA (1)...(19): siRNA sense strand
guacgaggcacuguauaug

SEQ ID NO: 1465648 - RNA, 19 nt, Homo sapiens
  misc_RNA (1)...(19): siRNA sense strand
gagccagccuccagauggu

SEQ ID NO: 1465649 - RNA, 19 nt, Homo sapiens
  misc_RNA (1)...(19): siRNA sense strand
gaaacccucucugcuccau

SEQ ID NO: 1465650 - RNA, 19 nt, Homo sapiens
  misc_RNA (1)...(19): siRNA sense strand
gggcauggaugugcugaac

SEQ ID NO: 1465651 - RNA, 19 nt, Homo sapiens
  misc_RNA (1)...(19): siRNA sense strand
gugucugacucucucauga

SEQ ID NO: 1465652 - RNA, 19 nt, Homo sapiens
  misc_RNA (1)...(19): siRNA sense strand
ccacgaugcugcagguacu

SEQ ID NO: 1465653 - RNA, 19 nt, Homo sapiens
  misc_RNA (1)...(19): siRNA sense strand
gccaugagccuagugaauc

SEQ ID NO: 1465654 - RNA, 19 nt, Homo sapiens
  misc_RNA (1)...(19): siRNA sense strand
agaaguacgaggcacugua

SEQ ID NO: 1465655 - RNA, 19 nt, Homo sapiens
  misc_RNA (1)...(19): siRNA sense strand
cugccuguaugguucagua

SEQ ID NO: 1465656 - RNA, 19 nt, Homo sapiens
  misc_RNA (1)...(19): siRNA sense strand
ccaagcugcucagaaguac

SEQ ID NO: 1465657 - RNA, 19 nt, Homo sapiens
  misc_RNA (1)...(19): siRNA sense strand
aacccucucugcuccauau

SEQ ID NO: 1465658 - RNA, 19 nt, Homo sapiens
  misc_RNA (1)...(19): siRNA sense strand
ggaccagcuccauggauuc

SEQ ID NO: 1465659 - RNA, 19 nt, Homo sapiens
  misc_RNA (1)...(19): siRNA sense strand
guagaggucaguggugaug

SEQ ID NO: 1465660 - RNA, 19 nt, Homo sapiens
  misc_RNA (1)...(19): siRNA sense strand
ucacuggaccggaguaacu

SEQ ID NO: 1465661 - RNA, 19 nt, Homo sapiens
  misc_RNA (1)...(19): siRNA sense strand
cagaggaggagccauugug

SEQ ID NO: 1465662 - RNA, 19 nt, Homo sapiens
  misc_RNA (1)...(19): siRNA sense strand
ugaagaaggaugccaugag

SEQ ID NO: 1465663 - RNA, 19 nt, Homo sapiens
  misc_RNA (1)...(19): siRNA sense strand
uguggcaagugacaaagau

SEQ ID NO: 1465664 - RNA, 19 nt, Homo sapiens
  misc_RNA (1)...(19): siRNA sense strand
acacaccuuuggccucauc

SEQ ID NO: 1465665 - RNA, 19 nt, Homo sapiens
  misc_RNA (1)...(19): siRNA sense strand
uaagccaagcugcucagaa

SEQ ID NO: 1465666 - RNA, 19 nt, Homo sapiens
  misc_RNA (1)...(19): siRNA sense strand
gaugccaugagccuaguga

SEQ ID NO: 1465667 - RNA, 19 nt, Homo sapiens
  misc_RNA (1)...(19): siRNA sense strand
ccaucauucuggucaacug

SEQ ID NO: 1465668 - RNA, 19 nt, Homo sapiens
  misc_RNA (1)...(19): siRNA sense strand
caacugcgaugaugacuug

SEQ ID NO: 1465669 - RNA, 19 nt, Homo sapiens
  misc_RNA (1)...(19): siRNA sense strand
guaacucucuguccuggua

SEQ ID NO: 1465670 - RNA, 19 nt, Homo sapiens
  misc_RNA (1)...(19): siRNA sense strand
ggccagaacaugcugauga

SEQ ID NO: 1465671 - RNA, 19 nt, Homo sapiens
  misc_RNA (1)...(19): siRNA sense strand
gccagaacaugcugaugau

SEQ ID NO: 1465672 - RNA, 19 nt, Homo sapiens
  misc_RNA (1)...(19): siRNA sense strand
gagccagccuccagauggu

SEQ ID NO: 1465673 - RNA, 19 nt, Homo sapiens
  misc_RNA (1)...(19): siRNA sense strand
ccacgaugcugcagguacu

SEQ ID NO: 1465674 - RNA, 19 nt, Homo sapiens
  misc_RNA (1)...(19): siRNA sense strand
gccaugagccuagugaauc

SEQ ID NO: 1465675 - RNA, 19 nt, Homo sapiens
  misc_RNA (1)...(19): siRNA sense strand
ucacuggaccggaguaacu

SEQ ID NO: 1465676 - RNA, 19 nt, Homo sapiens
  misc_RNA (1)...(19): siRNA sense strand
ugaagaaggaugccaugag

SEQ ID NO: 1465677 - RNA, 19 nt, Homo sapiens
  misc_RNA (1)...(19): siRNA sense strand
ccaucauucuggucaacug

SEQ ID NO: 1465678 - RNA, 19 nt, Homo sapiens
  misc_RNA (1)...(19): siRNA sense strand
gaugccaugagccuaguga

SEQ ID NO: 1465679 - RNA, 19 nt, Homo sapiens
  misc_RNA (1)...(19): siRNA sense strand
caacugcgaugaugacuug

SEQ ID NO: 1465680 - RNA, 19 nt, Homo sapiens
  misc_RNA (1)...(19): siRNA sense strand
guaacucucuguccuggua

SEQ ID NO: 1465681 - RNA, 19 nt, Homo sapiens
  misc_RNA (1)...(19): siRNA sense strand
ggccagaacaugcugauga

SEQ ID NO: 1465682 - RNA, 19 nt, Homo sapiens
  misc_RNA (1)...(19): siRNA sense strand
gccagaacaugcugaugau

SEQ ID NO: 1465683 - RNA, 19 nt, Homo sapiens
  misc_RNA (1)...(19): siRNA sense strand
gagccagccuccagauggu

SEQ ID NO: 1465684 - RNA, 19 nt, Homo sapiens
  misc_RNA (1)...(19): siRNA sense strand
ccacgaugcugcagguacu

SEQ ID NO: 1465685 - RNA, 19 nt, Homo sapiens
  misc_RNA (1)...(19): siRNA sense strand
gccaugagccuagugaauc

SEQ ID NO: 1465686 - RNA, 19 nt, Homo sapiens
  misc_RNA (1)...(19): siRNA sense strand
ucacuggaccggaguaacu

SEQ ID NO: 1465687 - RNA, 19 nt, Homo sapiens
  misc_RNA (1)...(19): siRNA sense strand
ugaagaaggaugccaugag

SEQ ID NO: 1465688 - RNA, 19 nt, Homo sapiens
  misc_RNA (1)...(19): siRNA sense strand
ccaucauucuggucaacug

SEQ ID NO: 1465689 - RNA, 19 nt, Homo sapiens
  misc_RNA (1)...(19): siRNA sense strand
gaugccaugagccuaguga

SEQ ID NO: 1465690 - RNA, 19 nt, Homo sapiens
  misc_RNA (1)...(19): siRNA sense strand
caacugcgaugaugacuug

SEQ ID NO: 1465691 - RNA, 19 nt, Homo sapiens
  misc_RNA (1)...(19): siRNA sense strand
guaacucucuguccuggua

SEQ ID NO: 1465692 - RNA, 19 nt, Homo sapiens
  misc_RNA (1)...(19): siRNA sense strand
ugacaaagauagcuguaug

SEQ ID NO: 1465693 - RNA, 19 nt, Homo sapiens
  misc_RNA (1)...(19): siRNA sense strand
gaaguacgaggcacuguau

SEQ ID NO: 1465694 - RNA, 19 nt, Homo sapiens
  misc_RNA (1)...(19): siRNA sense strand
guacagaggaggagccauu

SEQ ID NO: 1465695 - RNA, 19 nt, Homo sapiens
  misc_RNA (1)...(19): siRNA sense strand
gcucaagugccauguguuu

SEQ ID NO: 1465696 - RNA, 19 nt, Homo sapiens
  misc_RNA (1)...(19): siRNA sense strand
gcauggaugugcugaacga

SEQ ID NO: 1465697 - RNA, 19 nt, Homo sapiens
  misc_RNA (1)...(19): siRNA sense strand
ggccagaacaugcugauga

SEQ ID NO: 1465698 - RNA, 19 nt, Homo sapiens
  misc_RNA (1)...(19): siRNA sense strand
gccaagcugcucagaagua

SEQ ID NO: 1465699 - RNA, 19 nt, Homo sapiens
  misc_RNA (1)...(19): siRNA sense strand
gccagaacaugcugaugau

SEQ ID NO: 1465700 - RNA, 19 nt, Homo sapiens
  misc_RNA (1)...(19): siRNA sense strand
cggaccagcuccauggauu

SEQ ID NO: 1465701 - RNA, 19 nt, Homo sapiens
  misc_RNA (1)...(19): siRNA sense strand
gaucuugucagagcgagua

SEQ ID NO: 1465702 - RNA, 19 nt, Homo sapiens
  misc_RNA (1)...(19): siRNA sense strand
aagccaagcugcucagaag

SEQ ID NO: 1465703 - RNA, 19 nt, Homo sapiens
  misc_RNA (1)...(19): siRNA sense strand
gugcccagaucuugucaga

SEQ ID NO: 1465704 - RNA, 19 nt, Homo sapiens
  misc_RNA (1)...(19): siRNA sense strand
guacgaggcacuguauaug

SEQ ID NO: 1465705 - RNA, 19 nt, Homo sapiens
  misc_RNA (1)...(19): siRNA sense strand
gagccagccuccagauggu

SEQ ID NO: 1465706 - RNA, 19 nt, Homo sapiens
  misc_RNA (1)...(19): siRNA sense strand
gaaacccucucugcuccau

SEQ ID NO: 1465707 - RNA, 19 nt, Homo sapiens
  misc_RNA (1)...(19): siRNA sense strand
gggcauggaugugcugaac

SEQ ID NO: 1465708 - RNA, 19 nt, Homo sapiens
  misc_RNA (1)...(19): siRNA sense strand
gugucugacucucucauga

SEQ ID NO: 1465709 - RNA, 19 nt, Homo sapiens
  misc_RNA (1)...(19): siRNA sense strand
ccacgaugcugcagguacu

SEQ ID NO: 1465710 - RNA, 19 nt, Homo sapiens
  misc_RNA (1)...(19): siRNA sense strand
gccaugagccuagugaauc

SEQ ID NO: 1465711 - RNA, 19 nt, Homo sapiens
  misc_RNA (1)...(19): siRNA sense strand
agaaguacgaggcacugua

SEQ ID NO: 1465712 - RNA, 19 nt, Homo sapiens
  misc_RNA (1)...(19): siRNA sense strand
cugccuguaugguucagua

SEQ ID NO: 1465713 - RNA, 19 nt, Homo sapiens
  misc_RNA (1)...(19): siRNA sense strand
ccaagcugcucagaaguac

SEQ ID NO: 1465714 - RNA, 19 nt, Homo sapiens
  misc_RNA (1)...(19): siRNA sense strand
aacccucucugcuccauau

SEQ ID NO: 1465715 - RNA, 19 nt, Homo sapiens
  misc_RNA (1)...(19): siRNA sense strand
ggaccagcuccauggauuc

SEQ ID NO: 1465716 - RNA, 19 nt, Homo sapiens
  misc_RNA (1)...(19): siRNA sense strand
guagaggucaguggugaug

SEQ ID NO: 1465717 - RNA, 19 nt, Homo sapiens
  misc_RNA (1)...(19): siRNA sense strand
ucacuggaccggaguaacu

SEQ ID NO: 1465718 - RNA, 19 nt, Homo sapiens
  misc_RNA (1)...(19): siRNA sense strand
cagaggaggagccauugug

SEQ ID NO: 1465719 - RNA, 19 nt, Homo sapiens
  misc_RNA (1)...(19): siRNA sense strand
ugaagaaggaugccaugag

SEQ ID NO: 1465720 - RNA, 19 nt, Homo sapiens
  misc_RNA (1)...(19): siRNA sense strand
uguggcaagugacaaagau

SEQ ID NO: 1465721 - RNA, 19 nt, Homo sapiens
  misc_RNA (1)...(19): siRNA sense strand
acacaccuuuggccucauc

SEQ ID NO: 1465722 - RNA, 19 nt, Homo sapiens
  misc_RNA (1)...(19): siRNA sense strand
uaagccaagcugcucagaa

SEQ ID NO: 1465723 - RNA, 19 nt, Homo sapiens
  misc_RNA (1)...(19): siRNA sense strand
gaugccaugagccuaguga

SEQ ID NO: 1465724 - RNA, 19 nt, Homo sapiens
  misc_RNA (1)...(19): siRNA sense strand
ccaucauucuggucaacug

SEQ ID NO: 1465725 - RNA, 19 nt, Homo sapiens
  misc_RNA (1)...(19): siRNA sense strand
caacugcgaugaugacuug

SEQ ID NO: 1465726 - RNA, 19 nt, Homo sapiens
  misc_RNA (1)...(19): siRNA sense strand
guaacucucuguccuggua

SEQ ID NO: 1465727 - RNA, 19 nt, Homo sapiens
  misc_RNA (1)...(19): siRNA sense strand
ugacaaagauagcuguaug

SEQ ID NO: 1465728 - RNA, 19 nt, Homo sapiens
  misc_RNA (1)...(19): siRNA sense strand
gaaguacgaggcacuguau

SEQ ID NO: 1465729 - RNA, 19 nt, Homo sapiens
  misc_RNA (1)...(19): siRNA sense strand
guacagaggaggagccauu

SEQ ID NO: 1465730 - RNA, 19 nt, Homo sapiens
  misc_RNA (1)...(19): siRNA sense strand
gcucaagugccauguguuu

SEQ ID NO: 1465731 - RNA, 19 nt, Homo sapiens
  misc_RNA (1)...(19): siRNA sense strand
gcauggaugugcugaacga

SEQ ID NO: 1465732 - RNA, 19 nt, Homo sapiens
  misc_RNA (1)...(19): siRNA sense strand
ggccagaacaugcugauga

SEQ ID NO: 1465733 - RNA, 19 nt, Homo sapiens
  misc_RNA (1)...(19): siRNA sense strand
gccaagcugcucagaagua

SEQ ID NO: 1465734 - RNA, 19 nt, Homo sapiens
  misc_RNA (1)...(19): siRNA sense strand
gccagaacaugcugaugau

SEQ ID NO: 1465735 - RNA, 19 nt, Homo sapiens
  misc_RNA (1)...(19): siRNA sense strand
cggaccagcuccauggauu

SEQ ID NO: 1465736 - RNA, 19 nt, Homo sapiens
  misc_RNA (1)...(19): siRNA sense strand
gaucuugucagagcgagua

SEQ ID NO: 1465737 - RNA, 19 nt, Homo sapiens
  misc_RNA (1)...(19): siRNA sense strand
aagccaagcugcucagaag

SEQ ID NO: 1465738 - RNA, 19 nt, Homo sapiens
  misc_RNA (1)...(19): siRNA sense strand
gugcccagaucuugucaga

SEQ ID NO: 1465739 - RNA, 19 nt, Homo sapiens
  misc_RNA (1)...(19): siRNA sense strand
guacgaggcacuguauaug

SEQ ID NO: 1465740 - RNA, 19 nt, Homo sapiens
  misc_RNA (1)...(19): siRNA sense strand
gagccagccuccagauggu

SEQ ID NO: 1465741 - RNA, 19 nt, Homo sapiens
  misc_RNA (1)...(19): siRNA sense strand
gaaacccucucugcuccau

SEQ ID NO: 1465742 - RNA, 19 nt, Homo sapiens
  misc_RNA (1)...(19): siRNA sense strand
gggcauggaugugcugaac

SEQ ID NO: 1465743 - RNA, 19 nt, Homo sapiens
  misc_RNA (1)...(19): siRNA sense strand
gugucugacucucucauga

SEQ ID NO: 1465744 - RNA, 19 nt, Homo sapiens
  misc_RNA (1)...(19): siRNA sense strand
ccacgaugcugcagguacu

SEQ ID NO: 1465745 - RNA, 19 nt, Homo sapiens
  misc_RNA (1)...(19): siRNA sense strand
gccaugagccuagugaauc

SEQ ID NO: 1465746 - RNA, 19 nt, Homo sapiens
  misc_RNA (1)...(19): siRNA sense strand
agaaguacgaggcacugua

SEQ ID NO: 1465747 - RNA, 19 nt, Homo sapiens
  misc_RNA (1)...(19): siRNA sense strand
cugccuguaugguucagua

SEQ ID NO: 1465748 - RNA, 19 nt, Homo sapiens
  misc_RNA (1)...(19): siRNA sense strand
ccaagcugcucagaaguac

SEQ ID NO: 1465749 - RNA, 19 nt, Homo sapiens
  misc_RNA (1)...(19): siRNA sense strand
aacccucucugcuccauau

SEQ ID NO: 1465750 - RNA, 19 nt, Homo sapiens
  misc_RNA (1)...(19): siRNA sense strand
ggaccagcuccauggauuc

SEQ ID NO: 1465751 - RNA, 19 nt, Homo sapiens
  misc_RNA (1)...(19): siRNA sense strand
guagaggucaguggugaug

SEQ ID NO: 1465752 - RNA, 19 nt, Homo sapiens
  misc_RNA (1)...(19): siRNA sense strand
ucacuggaccggaguaacu

SEQ ID NO: 1465753 - RNA, 19 nt, Homo sapiens
  misc_RNA (1)...(19): siRNA sense strand
cagaggaggagccauugug

SEQ ID NO: 1465754 - RNA, 19 nt, Homo sapiens
  misc_RNA (1)...(19): siRNA sense strand
ugaagaaggaugccaugag

SEQ ID NO: 1465755 - RNA, 19 nt, Homo sapiens
  misc_RNA (1)...(19): siRNA sense strand
uguggcaagugacaaagau

SEQ ID NO: 1465756 - RNA, 19 nt, Homo sapiens
  misc_RNA (1)...(19): siRNA sense strand
acacaccuuuggccucauc

SEQ ID NO: 1465757 - RNA, 19 nt, Homo sapiens
  misc_RNA (1)...(19): siRNA sense strand
uaagccaagcugcucagaa

SEQ ID NO: 1465758 - RNA, 19 nt, Homo sapiens
  misc_RNA (1)...(19): siRNA sense strand
gaugccaugagccuaguga

SEQ ID NO: 1465759 - RNA, 19 nt, Homo sapiens
  misc_RNA (1)...(19): siRNA sense strand
ccaucauucuggucaacug

SEQ ID NO: 1465760 - RNA, 19 nt, Homo sapiens
  misc_RNA (1)...(19): siRNA sense strand
caacugcgaugaugacuug

SEQ ID NO: 1465761 - RNA, 19 nt, Homo sapiens
  misc_RNA (1)...(19): siRNA sense strand
guaacucucuguccuggua

SEQ ID NO: 1465762 - RNA, 19 nt, Homo sapiens
  misc_RNA (1)...(19): siRNA sense strand
ugacaaagauagcuguaug

SEQ ID NO: 1465763 - RNA, 19 nt, Homo sapiens
  misc_RNA (1)...(19): siRNA sense strand
gaaguacgaggcacuguau

SEQ ID NO: 1465764 - RNA, 19 nt, Homo sapiens
  misc_RNA (1)...(19): siRNA sense strand
guacagaggaggagccauu

SEQ ID NO: 1465765 - RNA, 19 nt, Homo sapiens
  misc_RNA (1)...(19): siRNA sense strand
gcucaagugccauguguuu

SEQ ID NO: 1465766 - RNA, 19 nt, Homo sapiens
  misc_RNA (1)...(19): siRNA sense strand
gcauggaugugcugaacga

SEQ ID NO: 1465767 - RNA, 19 nt, Homo sapiens
  misc_RNA (1)...(19): siRNA sense strand
ggccagaacaugcugauga

SEQ ID NO: 1465768 - RNA, 19 nt, Homo sapiens
  misc_RNA (1)...(19): siRNA sense strand
gccaagcugcucagaagua

SEQ ID NO: 1465769 - RNA, 19 nt, Homo sapiens
  misc_RNA (1)...(19): siRNA sense strand
gccagaacaugcugaugau

SEQ ID NO: 1465770 - RNA, 19 nt, Homo sapiens
  misc_RNA (1)...(19): siRNA sense strand
cggaccagcuccauggauu

SEQ ID NO: 1465771 - RNA, 19 nt, Homo sapiens
  misc_RNA (1)...(19): siRNA sense strand
gaucuugucagagcgagua

SEQ ID NO: 1465772 - RNA, 19 nt, Homo sapiens
  misc_RNA (1)...(19): siRNA sense strand
aagccaagcugcucagaag

SEQ ID NO: 1465773 - RNA, 19 nt, Homo sapiens
  misc_RNA (1)...(19): siRNA sense strand
gugcccagaucuugucaga

SEQ ID NO: 1465774 - RNA, 19 nt, Homo sapiens
  misc_RNA (1)...(19): siRNA sense strand
guacgaggcacuguauaug

SEQ ID NO: 1465775 - RNA, 19 nt, Homo sapiens
  misc_RNA (1)...(19): siRNA sense strand
gagccagccuccagauggu

SEQ ID NO: 1465776 - RNA, 19 nt, Homo sapiens
  misc_RNA (1)...(19): siRNA sense strand
gaaacccucucugcuccau

SEQ ID NO: 1465777 - RNA, 19 nt, Homo sapiens
  misc_RNA (1)...(19): siRNA sense strand
gggcauggaugugcugaac

SEQ ID NO: 1465778 - RNA, 19 nt, Homo sapiens
  misc_RNA (1)...(19): siRNA sense strand
gugucugacucucucauga

SEQ ID NO: 1465779 - RNA, 19 nt, Homo sapiens
  misc_RNA (1)...(19): siRNA sense strand
ccacgaugcugcagguacu

SEQ ID NO: 1465780 - RNA, 19 nt, Homo sapiens
  misc_RNA (1)...(19): siRNA sense strand
gccaugagccuagugaauc

SEQ ID NO: 1465781 - RNA, 19 nt, Homo sapiens
  misc_RNA (1)...(19): siRNA sense strand
agaaguacgaggcacugua

SEQ ID NO: 1465782 - RNA, 19 nt, Homo sapiens
  misc_RNA (1)...(19): siRNA sense strand
cugccuguaugguucagua

SEQ ID NO: 1465783 - RNA, 19 nt, Homo sapiens
  misc_RNA (1)...(19): siRNA sense strand
ccaagcugcucagaaguac

SEQ ID NO: 1465784 - RNA, 19 nt, Homo sapiens
  misc_RNA (1)...(19): siRNA sense strand
aacccucucugcuccauau

SEQ ID NO: 1465785 - RNA, 19 nt, Homo sapiens
  misc_RNA (1)...(19): siRNA sense strand
ggaccagcuccauggauuc

SEQ ID NO: 1465786 - RNA, 19 nt, Homo sapiens
  misc_RNA (1)...(19): siRNA sense strand
guagaggucaguggugaug

SEQ ID NO: 1465787 - RNA, 19 nt, Homo sapiens
  misc_RNA (1)...(19): siRNA sense strand
ucacuggaccggaguaacu

SEQ ID NO: 1465788 - RNA, 19 nt, Homo sapiens
  misc_RNA (1)...(19): siRNA sense strand
cagaggaggagccauugug

SEQ ID NO: 1465789 - RNA, 19 nt, Homo sapiens
  misc_RNA (1)...(19): siRNA sense strand
ugaagaaggaugccaugag

SEQ ID NO: 1465790 - RNA, 19 nt, Homo sapiens
  misc_RNA (1)...(19): siRNA sense strand
uguggcaagugacaaagau

SEQ ID NO: 1465791 - RNA, 19 nt, Homo sapiens
  misc_RNA (1)...(19): siRNA sense strand
acacaccuuuggccucauc

SEQ ID NO: 1465792 - RNA, 19 nt, Homo sapiens
  misc_RNA (1)...(19): siRNA sense strand
uaagccaagcugcucagaa

SEQ ID NO: 1465793 - RNA, 19 nt, Homo sapiens
  misc_RNA (1)...(19): siRNA sense strand
gaugccaugagccuaguga

SEQ ID NO: 1465794 - RNA, 19 nt, Homo sapiens
  misc_RNA (1)...(19): siRNA sense strand
ccaucauucuggucaacug

SEQ ID NO: 1465795 - RNA, 19 nt, Homo sapiens
  misc_RNA (1)...(19): siRNA sense strand
caacugcgaugaugacuug

SEQ ID NO: 1465796 - RNA, 19 nt, Homo sapiens
  misc_RNA (1)...(19): siRNA sense strand
guaacucucuguccuggua

SEQ ID NO: 1465797 - RNA, 19 nt, Homo sapiens
  misc_RNA (1)...(19): siRNA sense strand
ugacaaagauagcuguaug

SEQ ID NO: 1465798 - RNA, 19 nt, Homo sapiens
  misc_RNA (1)...(19): siRNA sense strand
gaaguacgaggcacuguau

SEQ ID NO: 1465799 - RNA, 19 nt, Homo sapiens
  misc_RNA (1)...(19): siRNA sense strand
guacagaggaggagccauu

SEQ ID NO: 1465800 - RNA, 19 nt, Homo sapiens
  misc_RNA (1)...(19): siRNA sense strand
gcucaagugccauguguuu

SEQ ID NO: 1465801 - RNA, 19 nt, Homo sapiens
  misc_RNA (1)...(19): siRNA sense strand
gcauggaugugcugaacga

SEQ ID NO: 1465802 - RNA, 19 nt, Homo sapiens
  misc_RNA (1)...(19): siRNA sense strand
ggccagaacaugcugauga

SEQ ID NO: 1465803 - RNA, 19 nt, Homo sapiens
  misc_RNA (1)...(19): siRNA sense strand
gccaagcugcucagaagua

SEQ ID NO: 1465804 - RNA, 19 nt, Homo sapiens
  misc_RNA (1)...(19): siRNA sense strand
gccagaacaugcugaugau

SEQ ID NO: 1465805 - RNA, 19 nt, Homo sapiens
  misc_RNA (1)...(19): siRNA sense strand
cggaccagcuccauggauu

SEQ ID NO: 1465806 - RNA, 19 nt, Homo sapiens
  misc_RNA (1)...(19): siRNA sense strand
gaucuugucagagcgagua

SEQ ID NO: 1465807 - RNA, 19 nt, Homo sapiens
  misc_RNA (1)...(19): siRNA sense strand
aagccaagcugcucagaag

SEQ ID NO: 1465808 - RNA, 19 nt, Homo sapiens
  misc_RNA (1)...(19): siRNA sense strand
gugcccagaucuugucaga

SEQ ID NO: 1465809 - RNA, 19 nt, Homo sapiens
  misc_RNA (1)...(19): siRNA sense strand
guacgaggcacuguauaug

SEQ ID NO: 1465810 - RNA, 19 nt, Homo sapiens
  misc_RNA (1)...(19): siRNA sense strand
gagccagccuccagauggu

SEQ ID NO: 1465811 - RNA, 19 nt, Homo sapiens
  misc_RNA (1)...(19): siRNA sense strand
gaaacccucucugcuccau

SEQ ID NO: 1465812 - RNA, 19 nt, Homo sapiens
  misc_RNA (1)...(19): siRNA sense strand
gggcauggaugugcugaac

SEQ ID NO: 1465813 - RNA, 19 nt, Homo sapiens
  misc_RNA (1)...(19): siRNA sense strand
gugucugacucucucauga

SEQ ID NO: 1465814 - RNA, 19 nt, Homo sapiens
  misc_RNA (1)...(19): siRNA sense strand
ccacgaugcugcagguacu

SEQ ID NO: 1465815 - RNA, 19 nt, Homo sapiens
  misc_RNA (1)...(19): siRNA sense strand
gccaugagccuagugaauc

SEQ ID NO: 1465816 - RNA, 19 nt, Homo sapiens
  misc_RNA (1)...(19): siRNA sense strand
agaaguacgaggcacugua

SEQ ID NO: 1465817 - RNA, 19 nt, Homo sapiens
  misc_RNA (1)...(19): siRNA sense strand
cugccuguaugguucagua

SEQ ID NO: 1465818 - RNA, 19 nt, Homo sapiens
  misc_RNA (1)...(19): siRNA sense strand
ccaagcugcucagaaguac

SEQ ID NO: 1465819 - RNA, 19 nt, Homo sapiens
  misc_RNA (1)...(19): siRNA sense strand
aacccucucugcuccauau

SEQ ID NO: 1465820 - RNA, 19 nt, Homo sapiens
  misc_RNA (1)...(19): siRNA sense strand
ggaccagcuccauggauuc

SEQ ID NO: 1465821 - RNA, 19 nt, Homo sapiens
  misc_RNA (1)...(19): siRNA sense strand
guagaggucaguggugaug

SEQ ID NO: 1465822 - RNA, 19 nt, Homo sapiens
  misc_RNA (1)...(19): siRNA sense strand
ucacuggaccggaguaacu

SEQ ID NO: 1465823 - RNA, 19 nt, Homo sapiens
  misc_RNA (1)...(19): siRNA sense strand
cagaggaggagccauugug

SEQ ID NO: 1465824 - RNA, 19 nt, Homo sapiens
  misc_RNA (1)...(19): siRNA sense strand
ugaagaaggaugccaugag

SEQ ID NO: 1465825 - RNA, 19 nt, Homo sapiens
  misc_RNA (1)...(19): siRNA sense strand
uguggcaagugacaaagau

SEQ ID NO: 1465826 - RNA, 19 nt, Homo sapiens
  misc_RNA (1)...(19): siRNA sense strand
acacaccuuuggccucauc

SEQ ID NO: 1465827 - RNA, 19 nt, Homo sapiens
  misc_RNA (1)...(19): siRNA sense strand
uaagccaagcugcucagaa

SEQ ID NO: 1465828 - RNA, 19 nt, Homo sapiens
  misc_RNA (1)...(19): siRNA sense strand
gaugccaugagccuaguga

SEQ ID NO: 1465829 - RNA, 19 nt, Homo sapiens
  misc_RNA (1)...(19): siRNA sense strand
ccaucauucuggucaacug

SEQ ID NO: 1465830 - RNA, 19 nt, Homo sapiens
  misc_RNA (1)...(19): siRNA sense strand
caacugcgaugaugacuug

SEQ ID NO: 1465831 - RNA, 19 nt, Homo sapiens
  misc_RNA (1)...(19): siRNA sense strand
guaacucucuguccuggua

SEQ ID NO: 1465832 - RNA, 19 nt, Homo sapiens
  misc_RNA (1)...(19): siRNA sense strand
ggccagaacaugcugauga

SEQ ID NO: 1465833 - RNA, 19 nt, Homo sapiens
  misc_RNA (1)...(19): siRNA sense strand
gccagaacaugcugaugau

SEQ ID NO: 1465834 - RNA, 19 nt, Homo sapiens
  misc_RNA (1)...(19): siRNA sense strand
gagccagccuccagauggu

SEQ ID NO: 1465835 - RNA, 19 nt, Homo sapiens
  misc_RNA (1)...(19): siRNA sense strand
ccacgaugcugcagguacu

SEQ ID NO: 1465836 - RNA, 19 nt, Homo sapiens
  misc_RNA (1)...(19): siRNA sense strand
gccaugagccuagugaauc

SEQ ID NO: 1465837 - RNA, 19 nt, Homo sapiens
  misc_RNA (1)...(19): siRNA sense strand
ucacuggaccggaguaacu

SEQ ID NO: 1465838 - RNA, 19 nt, Homo sapiens
  misc_RNA (1)...(19): siRNA sense strand
ugaagaaggaugccaugag

SEQ ID NO: 1465839 - RNA, 19 nt, Homo sapiens
  misc_RNA (1)...(19): siRNA sense strand
ccaucauucuggucaacug

SEQ ID NO: 1465840 - RNA, 19 nt, Homo sapiens
  misc_RNA (1)...(19): siRNA sense strand
gaugccaugagccuaguga

SEQ ID NO: 1465841 - RNA, 19 nt, Homo sapiens
  misc_RNA (1)...(19): siRNA sense strand
caacugcgaugaugacuug

SEQ ID NO: 1465842 - RNA, 19 nt, Homo sapiens
  misc_RNA (1)...(19): siRNA sense strand
guaacucucuguccuggua

SEQ ID NO: 1465843 - RNA, 19 nt, Homo sapiens
  misc_RNA (1)...(19): siRNA sense strand
ggccagaacaugcugauga

SEQ ID NO: 1465844 - RNA, 19 nt, Homo sapiens
  misc_RNA (1)...(19): siRNA sense strand
gccagaacaugcugaugau

SEQ ID NO: 1465845 - RNA, 19 nt, Homo sapiens
  misc_RNA (1)...(19): siRNA sense strand
gagccagccuccagauggu

SEQ ID NO: 1465846 - RNA, 19 nt, Homo sapiens
  misc_RNA (1)...(19): siRNA sense strand
ccacgaugcugcagguacu

SEQ ID NO: 1465847 - RNA, 19 nt, Homo sapiens
  misc_RNA (1)...(19): siRNA sense strand
gccaugagccuagugaauc

SEQ ID NO: 1465848 - RNA, 19 nt, Homo sapiens
  misc_RNA (1)...(19): siRNA sense strand
ucacuggaccggaguaacu

SEQ ID NO: 1465849 - RNA, 19 nt, Homo sapiens
  misc_RNA (1)...(19): siRNA sense strand
ugaagaaggaugccaugag

SEQ ID NO: 1465850 - RNA, 19 nt, Homo sapiens
  misc_RNA (1)...(19): siRNA sense strand
ccaucauucuggucaacug

SEQ ID NO: 1465851 - RNA, 19 nt, Homo sapiens
  misc_RNA (1)...(19): siRNA sense strand
gaugccaugagccuaguga

SEQ ID NO: 1465852 - RNA, 19 nt, Homo sapiens
  misc_RNA (1)...(19): siRNA sense strand
ggacugcccuuucucaaug

SEQ ID NO: 1465853 - RNA, 19 nt, Homo sapiens
  misc_RNA (1)...(19): siRNA sense strand
ggaagaaggagccaaauug

SEQ ID NO: 1465854 - RNA, 19 nt, Homo sapiens
  misc_RNA (1)...(19): siRNA sense strand
ggaagguacucaucuugaa

SEQ ID NO: 1465855 - RNA, 19 nt, Homo sapiens
  misc_RNA (1)...(19): siRNA sense strand
gaagaaggagccaaauuga

SEQ ID NO: 1465856 - RNA, 19 nt, Homo sapiens
  misc_RNA (1)...(19): siRNA sense strand
ggagucagcaucuaccuaa

SEQ ID NO: 1465857 - RNA, 19 nt, Homo sapiens
  misc_RNA (1)...(19): siRNA sense strand
ggaacuguaucccacaaug

SEQ ID NO: 1465858 - RNA, 19 nt, Homo sapiens
  misc_RNA (1)...(19): siRNA sense strand
ccacuagcuuugcauacua

SEQ ID NO: 1465859 - RNA, 19 nt, Homo sapiens
  misc_RNA (1)...(19): siRNA sense strand
caagagcaccagaaguaua

SEQ ID NO: 1465860 - RNA, 19 nt, Homo sapiens
  misc_RNA (1)...(19): siRNA sense strand
gaaggagccaaauugagua

SEQ ID NO: 1465861 - RNA, 19 nt, Homo sapiens
  misc_RNA (1)...(19): siRNA sense strand
caaauugaguauggaggua

SEQ ID NO: 1465862 - RNA, 19 nt, Homo sapiens
  misc_RNA (1)...(19): siRNA sense strand
ggaccugccugccaagcuu

SEQ ID NO: 1465863 - RNA, 19 nt, Homo sapiens
  misc_RNA (1)...(19): siRNA sense strand
gaacuguaucccacaauga

SEQ ID NO: 1465864 - RNA, 19 nt, Homo sapiens
  misc_RNA (1)...(19): siRNA sense strand
caucuaccaucgugacuga

SEQ ID NO: 1465865 - RNA, 19 nt, Homo sapiens
  misc_RNA (1)...(19): siRNA sense strand
aacaagagcaccagaagua

SEQ ID NO: 1465866 - RNA, 19 nt, Homo sapiens
  misc_RNA (1)...(19): siRNA sense strand
ggagccaaauugaguaugg

SEQ ID NO: 1465867 - RNA, 19 nt, Homo sapiens
  misc_RNA (1)...(19): siRNA sense strand
caacagcaccuucccaucu

SEQ ID NO: 1465868 - RNA, 19 nt, Homo sapiens
  misc_RNA (1)...(19): siRNA sense strand
gcaccuugauuggcuaugu

SEQ ID NO: 1465869 - RNA, 19 nt, Homo sapiens
  misc_RNA (1)...(19): siRNA sense strand
gggaagaaggagccaaauu

SEQ ID NO: 1465870 - RNA, 19 nt, Homo sapiens
  misc_RNA (1)...(19): siRNA sense strand
ucaacugcaucuuccugua

SEQ ID NO: 1465871 - RNA, 19 nt, Homo sapiens
  misc_RNA (1)...(19): siRNA sense strand
gggccagucugcagaagga

SEQ ID NO: 1465872 - RNA, 19 nt, Homo sapiens
  misc_RNA (1)...(19): siRNA sense strand
gaaacagacgcgacagcaa

SEQ ID NO: 1465873 - RNA, 19 nt, Homo sapiens
  misc_RNA (1)...(19): siRNA sense strand
acaacacccugcagaacuu

SEQ ID NO: 1465874 - RNA, 19 nt, Homo sapiens
  misc_RNA (1)...(19): siRNA sense strand
caacugcaucuuccuguau

SEQ ID NO: 1465875 - RNA, 19 nt, Homo sapiens
  misc_RNA (1)...(19): siRNA sense strand
gcaacaagagcaccagaag

SEQ ID NO: 1465876 - RNA, 19 nt, Homo sapiens
  misc_RNA (1)...(19): siRNA sense strand
ccugauggcuucucacaac

SEQ ID NO: 1465877 - RNA, 19 nt, Homo sapiens
  misc_RNA (1)...(19): siRNA sense strand
aacagcaccuucccaucua

SEQ ID NO: 1465878 - RNA, 19 nt, Homo sapiens
  misc_RNA (1)...(19): siRNA sense strand
agaaggagccaaauugagu

SEQ ID NO: 1465879 - RNA, 19 nt, Homo sapiens
  misc_RNA (1)...(19): siRNA sense strand
ucaacugcaugacacugaa

SEQ ID NO: 1465880 - RNA, 19 nt, Homo sapiens
  misc_RNA (1)...(19): siRNA sense strand
acuaugggcuggucaugga

SEQ ID NO: 1465881 - RNA, 19 nt, Homo sapiens
  misc_RNA (1)...(19): siRNA sense strand
uggaguggaugcccauuca

SEQ ID NO: 1465882 - RNA, 19 nt, Homo sapiens
  misc_RNA (1)...(19): siRNA sense strand
cuugugggcuuccuuguca

SEQ ID NO: 1465883 - RNA, 19 nt, Homo sapiens
  misc_RNA (1)...(19): siRNA sense strand
gagccaaauugaguaugga

SEQ ID NO: 1465884 - RNA, 19 nt, Homo sapiens
  misc_RNA (1)...(19): siRNA sense strand
gcaucucccucaacugcau

SEQ ID NO: 1465885 - RNA, 19 nt, Homo sapiens
  misc_RNA (1)...(19): siRNA sense strand
cugcagggcuuuggaguca

SEQ ID NO: 1465886 - RNA, 19 nt, Homo sapiens
  misc_RNA (1)...(19): siRNA sense strand
gccggaagguacucaucuu

SEQ ID NO: 1465887 - RNA, 19 nt, Homo sapiens
  misc_RNA (1)...(19): siRNA sense strand
caacaagagcaccagaagu

SEQ ID NO: 1465888 - RNA, 19 nt, Homo sapiens
  misc_RNA (1)...(19): siRNA sense strand
gaugccaaccucagcaaga

SEQ ID NO: 1465889 - RNA, 19 nt, Homo sapiens
  misc_RNA (1)...(19): siRNA sense strand
ugagggcccugcagagagu

SEQ ID NO: 1465890 - RNA, 19 nt, Homo sapiens
  misc_RNA (1)...(19): siRNA sense strand
aacugcaucuuccuguaua

SEQ ID NO: 1465891 - RNA, 19 nt, Homo sapiens
  misc_RNA (1)...(19): siRNA sense strand
gcuggcaucucccucaacu

SEQ ID NO: 1465892 - RNA, 19 nt, Homo sapiens
  misc_RNA (1)...(19): siRNA sense strand
aagagcaccagaaguauau

SEQ ID NO: 1465893 - RNA, 19 nt, Homo sapiens
  misc_RNA (1)...(19): siRNA sense strand
uaauccaggugaucuuugg

SEQ ID NO: 1465894 - RNA, 19 nt, Homo sapiens
  misc_RNA (1)...(19): siRNA sense strand
gcgggaagaaggagccaaa

SEQ ID NO: 1465895 - RNA, 19 nt, Homo sapiens
  misc_RNA (1)...(19): siRNA sense strand
gaagguacucaucuugaac

SEQ ID NO: 1465896 - RNA, 19 nt, Homo sapiens
  misc_RNA (1)...(19): siRNA sense strand
gccacuagcuuugcauacu

SEQ ID NO: 1465897 - RNA, 19 nt, Homo sapiens
  misc_RNA (1)...(19): siRNA sense strand
cggaagguacucaucuuga

SEQ ID NO: 1465898 - RNA, 19 nt, Homo sapiens
  misc_RNA (1)...(19): siRNA sense strand
gggacugcccuuucucaau

SEQ ID NO: 1465899 - RNA, 19 nt, Homo sapiens
  misc_RNA (1)...(19): siRNA sense strand
gcaccgauggcuggaucua

SEQ ID NO: 1465900 - RNA, 19 nt, Homo sapiens
  misc_RNA (1)...(19): siRNA sense strand
gcaucugcauccugcucaa

SEQ ID NO: 1465901 - RNA, 19 nt, Homo sapiens
  misc_RNA (1)...(19): siRNA sense strand
cacuagcuuugcauacuau

SEQ ID NO: 1465902 - RNA, 19 nt, Homo sapiens
  misc_RNA (1)...(19): siRNA sense strand
ccucagcacaagagaagaa

SEQ ID NO: 1465903 - RNA, 19 nt, Homo sapiens
  misc_RNA (1)...(19): siRNA sense strand
acuccugguucuucauuga

SEQ ID NO: 1465904 - RNA, 19 nt, Homo sapiens
  misc_RNA (1)...(19): siRNA sense strand
accgauggcuggaucuaug

SEQ ID NO: 1465905 - RNA, 19 nt, Homo sapiens
  misc_RNA (1)...(19): siRNA sense strand
gagucagcaucuaccuaau

SEQ ID NO: 1465906 - RNA, 19 nt, Homo sapiens
  misc_RNA (1)...(19): siRNA sense strand
gcacccaacuuccccaucu

SEQ ID NO: 1465907 - RNA, 19 nt, Homo sapiens
  misc_RNA (1)...(19): siRNA sense strand
gggcuuccuugucaucaac

SEQ ID NO: 1465908 - RNA, 19 nt, Homo sapiens
  misc_RNA (1)...(19): siRNA sense strand
gcuuuggagucagcaucua

SEQ ID NO: 1465909 - RNA, 19 nt, Homo sapiens
  misc_RNA (1)...(19): siRNA sense strand
gagcugaccaugggcaaag

SEQ ID NO: 1465910 - RNA, 19 nt, Homo sapiens
  misc_RNA (1)...(19): siRNA sense strand
caucuacuccugguucuuc

SEQ ID NO: 1465911 - RNA, 19 nt, Homo sapiens
  misc_RNA (1)...(19): siRNA sense strand
gaguggaugcccauucaca

SEQ ID NO: 1465912 - RNA, 19 nt, Homo sapiens
  misc_RNA (1)...(19): siRNA sense strand
cagcacaagagaagaaugg

SEQ ID NO: 1465913 - RNA, 19 nt, Homo sapiens
  misc_RNA (1)...(19): siRNA sense strand
ccuaauccaggugaucuuu

SEQ ID NO: 1465914 - RNA, 19 nt, Homo sapiens
  misc_RNA (1)...(19): siRNA sense strand
ggacugcccuuucucaaug

SEQ ID NO: 1465915 - RNA, 19 nt, Homo sapiens
  misc_RNA (1)...(19): siRNA sense strand
ggaagaaggagccaaauug

SEQ ID NO: 1465916 - RNA, 19 nt, Homo sapiens
  misc_RNA (1)...(19): siRNA sense strand
ggaagguacucaucuugaa

SEQ ID NO: 1465917 - RNA, 19 nt, Homo sapiens
  misc_RNA (1)...(19): siRNA sense strand
gaagaaggagccaaauuga

SEQ ID NO: 1465918 - RNA, 19 nt, Homo sapiens
  misc_RNA (1)...(19): siRNA sense strand
ggagucagcaucuaccuaa

SEQ ID NO: 1465919 - RNA, 19 nt, Homo sapiens
  misc_RNA (1)...(19): siRNA sense strand
ggaacuguaucccacaaug

SEQ ID NO: 1465920 - RNA, 19 nt, Homo sapiens
  misc_RNA (1)...(19): siRNA sense strand
ccacuagcuuugcauacua

SEQ ID NO: 1465921 - RNA, 19 nt, Homo sapiens
  misc_RNA (1)...(19): siRNA sense strand
caagagcaccagaaguaua

SEQ ID NO: 1465922 - RNA, 19 nt, Homo sapiens
  misc_RNA (1)...(19): siRNA sense strand
gaaggagccaaauugagua

SEQ ID NO: 1465923 - RNA, 19 nt, Homo sapiens
  misc_RNA (1)...(19): siRNA sense strand
caaauugaguauggaggua

SEQ ID NO: 1465924 - RNA, 19 nt, Homo sapiens
  misc_RNA (1)...(19): siRNA sense strand
ggaccugccugccaagcuu

SEQ ID NO: 1465925 - RNA, 19 nt, Homo sapiens
  misc_RNA (1)...(19): siRNA sense strand
gaacuguaucccacaauga

SEQ ID NO: 1465926 - RNA, 19 nt, Homo sapiens
  misc_RNA (1)...(19): siRNA sense strand
caucuaccaucgugacuga

SEQ ID NO: 1465927 - RNA, 19 nt, Homo sapiens
  misc_RNA (1)...(19): siRNA sense strand
aacaagagcaccagaagua

SEQ ID NO: 1465928 - RNA, 19 nt, Homo sapiens
  misc_RNA (1)...(19): siRNA sense strand
ggagccaaauugaguaugg

SEQ ID NO: 1465929 - RNA, 19 nt, Homo sapiens
  misc_RNA (1)...(19): siRNA sense strand
caacagcaccuucccaucu

SEQ ID NO: 1465930 - RNA, 19 nt, Homo sapiens
  misc_RNA (1)...(19): siRNA sense strand
gcaccuugauuggcuaugu

SEQ ID NO: 1465931 - RNA, 19 nt, Homo sapiens
  misc_RNA (1)...(19): siRNA sense strand
gggaagaaggagccaaauu

SEQ ID NO: 1465932 - RNA, 19 nt, Homo sapiens
  misc_RNA (1)...(19): siRNA sense strand
ucaacugcaucuuccugua

SEQ ID NO: 1465933 - RNA, 19 nt, Homo sapiens
  misc_RNA (1)...(19): siRNA sense strand
gggccagucugcagaagga

SEQ ID NO: 1465934 - RNA, 19 nt, Homo sapiens
  misc_RNA (1)...(19): siRNA sense strand
gaaacagacgcgacagcaa

SEQ ID NO: 1465935 - RNA, 19 nt, Homo sapiens
  misc_RNA (1)...(19): siRNA sense strand
acaacacccugcagaacuu

SEQ ID NO: 1465936 - RNA, 19 nt, Homo sapiens
  misc_RNA (1)...(19): siRNA sense strand
caacugcaucuuccuguau

SEQ ID NO: 1465937 - RNA, 19 nt, Homo sapiens
  misc_RNA (1)...(19): siRNA sense strand
gcaacaagagcaccagaag

SEQ ID NO: 1465938 - RNA, 19 nt, Homo sapiens
  misc_RNA (1)...(19): siRNA sense strand
ccugauggcuucucacaac

SEQ ID NO: 1465939 - RNA, 19 nt, Homo sapiens
  misc_RNA (1)...(19): siRNA sense strand
aacagcaccuucccaucua

SEQ ID NO: 1465940 - RNA, 19 nt, Homo sapiens
  misc_RNA (1)...(19): siRNA sense strand
agaaggagccaaauugagu

SEQ ID NO: 1465941 - RNA, 19 nt, Homo sapiens
  misc_RNA (1)...(19): siRNA sense strand
ucaacugcaugacacugaa

SEQ ID NO: 1465942 - RNA, 19 nt, Homo sapiens
  misc_RNA (1)...(19): siRNA sense strand
acuaugggcuggucaugga

SEQ ID NO: 1465943 - RNA, 19 nt, Homo sapiens
  misc_RNA (1)...(19): siRNA sense strand
uggaguggaugcccauuca

SEQ ID NO: 1465944 - RNA, 19 nt, Homo sapiens
  misc_RNA (1)...(19): siRNA sense strand
cuugugggcuuccuuguca

SEQ ID NO: 1465945 - RNA, 19 nt, Homo sapiens
  misc_RNA (1)...(19): siRNA sense strand
gagccaaauugaguaugga

SEQ ID NO: 1465946 - RNA, 19 nt, Homo sapiens
  misc_RNA (1)...(19): siRNA sense strand
gcaucucccucaacugcau

SEQ ID NO: 1465947 - RNA, 19 nt, Homo sapiens
  misc_RNA (1)...(19): siRNA sense strand
cugcagggcuuuggaguca

SEQ ID NO: 1465948 - RNA, 19 nt, Homo sapiens
  misc_RNA (1)...(19): siRNA sense strand
gccggaagguacucaucuu

SEQ ID NO: 1465949 - RNA, 19 nt, Homo sapiens
  misc_RNA (1)...(19): siRNA sense strand
caacaagagcaccagaagu

SEQ ID NO: 1465950 - RNA, 19 nt, Homo sapiens
  misc_RNA (1)...(19): siRNA sense strand
gaugccaaccucagcaaga

SEQ ID NO: 1465951 - RNA, 19 nt, Homo sapiens
  misc_RNA (1)...(19): siRNA sense strand
ugagggcccugcagagagu

SEQ ID NO: 1465952 - RNA, 19 nt, Homo sapiens
  misc_RNA (1)...(19): siRNA sense strand
aacugcaucuuccuguaua

SEQ ID NO: 1465953 - RNA, 19 nt, Homo sapiens
  misc_RNA (1)...(19): siRNA sense strand
gcuggcaucucccucaacu

SEQ ID NO: 1465954 - RNA, 19 nt, Homo sapiens
  misc_RNA (1)...(19): siRNA sense strand
aagagcaccagaaguauau

SEQ ID NO: 1465955 - RNA, 19 nt, Homo sapiens
  misc_RNA (1)...(19): siRNA sense strand
uaauccaggugaucuuugg

SEQ ID NO: 1465956 - RNA, 19 nt, Homo sapiens
  misc_RNA (1)...(19): siRNA sense strand
gcgggaagaaggagccaaa

SEQ ID NO: 1465957 - RNA, 19 nt, Homo sapiens
  misc_RNA (1)...(19): siRNA sense strand
gaagguacucaucuugaac

SEQ ID NO: 1465958 - RNA, 19 nt, Homo sapiens
  misc_RNA (1)...(19): siRNA sense strand
gccacuagcuuugcauacu

SEQ ID NO: 1465959 - RNA, 19 nt, Homo sapiens
  misc_RNA (1)...(19): siRNA sense strand
cggaagguacucaucuuga

SEQ ID NO: 1465960 - RNA, 19 nt, Homo sapiens
  misc_RNA (1)...(19): siRNA sense strand
gggacugcccuuucucaau

SEQ ID NO: 1465961 - RNA, 19 nt, Homo sapiens
  misc_RNA (1)...(19): siRNA sense strand
gcaccgauggcuggaucua

SEQ ID NO: 1465962 - RNA, 19 nt, Homo sapiens
  misc_RNA (1)...(19): siRNA sense strand
gcaucugcauccugcucaa

SEQ ID NO: 1465963 - RNA, 19 nt, Homo sapiens
  misc_RNA (1)...(19): siRNA sense strand
cacuagcuuugcauacuau

SEQ ID NO: 1465964 - RNA, 19 nt, Homo sapiens
  misc_RNA (1)...(19): siRNA sense strand
ccucagcacaagagaagaa

SEQ ID NO: 1465965 - RNA, 19 nt, Homo sapiens
  misc_RNA (1)...(19): siRNA sense strand
acuccugguucuucauuga

SEQ ID NO: 1465966 - RNA, 19 nt, Homo sapiens
  misc_RNA (1)...(19): siRNA sense strand
accgauggcuggaucuaug

SEQ ID NO: 1465967 - RNA, 19 nt, Homo sapiens
  misc_RNA (1)...(19): siRNA sense strand
gagucagcaucuaccuaau

SEQ ID NO: 1465968 - RNA, 19 nt, Homo sapiens
  misc_RNA (1)...(19): siRNA sense strand
gcacccaacuuccccaucu

SEQ ID NO: 1465969 - RNA, 19 nt, Homo sapiens
  misc_RNA (1)...(19): siRNA sense strand
gggcuuccuugucaucaac

SEQ ID NO: 1465970 - RNA, 19 nt, Homo sapiens
  misc_RNA (1)...(19): siRNA sense strand
gcuuuggagucagcaucua

SEQ ID NO: 1465971 - RNA, 19 nt, Homo sapiens
  misc_RNA (1)...(19): siRNA sense strand
gagcugaccaugggcaaag

SEQ ID NO: 1465972 - RNA, 19 nt, Homo sapiens
  misc_RNA (1)...(19): siRNA sense strand
caucuacuccugguucuuc

SEQ ID NO: 1465973 - RNA, 19 nt, Homo sapiens
  misc_RNA (1)...(19): siRNA sense strand
gaguggaugcccauucaca

SEQ ID NO: 1465974 - RNA, 19 nt, Homo sapiens
  misc_RNA (1)...(19): siRNA sense strand
cagcacaagagaagaaugg

SEQ ID NO: 1465975 - RNA, 19 nt, Homo sapiens
  misc_RNA (1)...(19): siRNA sense strand
ccuaauccaggugaucuuu

SEQ ID NO: 1465976 - RNA, 19 nt, Homo sapiens
  misc_RNA (1)...(19): siRNA sense strand
ggacugcccuuucucaaug

SEQ ID NO: 1465977 - RNA, 19 nt, Homo sapiens
  misc_RNA (1)...(19): siRNA sense strand
ggaagaaggagccaaauug

SEQ ID NO: 1465978 - RNA, 19 nt, Homo sapiens
  misc_RNA (1)...(19): siRNA sense strand
ggaagguacucaucuugaa

SEQ ID NO: 1465979 - RNA, 19 nt, Homo sapiens
  misc_RNA (1)...(19): siRNA sense strand
gaagaaggagccaaauuga

SEQ ID NO: 1465980 - RNA, 19 nt, Homo sapiens
  misc_RNA (1)...(19): siRNA sense strand
ggagucagcaucuaccuaa

SEQ ID NO: 1465981 - RNA, 19 nt, Homo sapiens
  misc_RNA (1)...(19): siRNA sense strand
ggaacuguaucccacaaug

SEQ ID NO: 1465982 - RNA, 19 nt, Homo sapiens
  misc_RNA (1)...(19): siRNA sense strand
ccacuagcuuugcauacua

SEQ ID NO: 1465983 - RNA, 19 nt, Homo sapiens
  misc_RNA (1)...(19): siRNA sense strand
caagagcaccagaaguaua

SEQ ID NO: 1465984 - RNA, 19 nt, Homo sapiens
  misc_RNA (1)...(19): siRNA sense strand
gaaggagccaaauugagua

SEQ ID NO: 1465985 - RNA, 19 nt, Homo sapiens
  misc_RNA (1)...(19): siRNA sense strand
caaauugaguauggaggua

SEQ ID NO: 1465986 - RNA, 19 nt, Homo sapiens
  misc_RNA (1)...(19): siRNA sense strand
ggaccugccugccaagcuu

SEQ ID NO: 1465987 - RNA, 19 nt, Homo sapiens
  misc_RNA (1)...(19): siRNA sense strand
gaacuguaucccacaauga

SEQ ID NO: 1465988 - RNA, 19 nt, Homo sapiens
  misc_RNA (1)...(19): siRNA sense strand
caucuaccaucgugacuga

SEQ ID NO: 1465989 - RNA, 19 nt, Homo sapiens
  misc_RNA (1)...(19): siRNA sense strand
aacaagagcaccagaagua

SEQ ID NO: 1465990 - RNA, 19 nt, Homo sapiens
  misc_RNA (1)...(19): siRNA sense strand
ggagccaaauugaguaugg

SEQ ID NO: 1465991 - RNA, 19 nt, Homo sapiens
  misc_RNA (1)...(19): siRNA sense strand
caacagcaccuucccaucu

SEQ ID NO: 1465992 - RNA, 19 nt, Homo sapiens
  misc_RNA (1)...(19): siRNA sense strand
gcaccuugauuggcuaugu

SEQ ID NO: 1465993 - RNA, 19 nt, Homo sapiens
  misc_RNA (1)...(19): siRNA sense strand
gggaagaaggagccaaauu

SEQ ID NO: 1465994 - RNA, 19 nt, Homo sapiens
  misc_RNA (1)...(19): siRNA sense strand
ucaacugcaucuuccugua

SEQ ID NO: 1465995 - RNA, 19 nt, Homo sapiens
  misc_RNA (1)...(19): siRNA sense strand
gggccagucugcagaagga

SEQ ID NO: 1465996 - RNA, 19 nt, Homo sapiens
  misc_RNA (1)...(19): siRNA sense strand
gaaacagacgcgacagcaa

SEQ ID NO: 1465997 - RNA, 19 nt, Homo sapiens
  misc_RNA (1)...(19): siRNA sense strand
acaacacccugcagaacuu

SEQ ID NO: 1465998 - RNA, 19 nt, Homo sapiens
  misc_RNA (1)...(19): siRNA sense strand
caacugcaucuuccuguau

SEQ ID NO: 1465999 - RNA, 19 nt, Homo sapiens
  misc_RNA (1)...(19): siRNA sense strand
gcaacaagagcaccagaag

SEQ ID NO: 1466000 - RNA, 19 nt, Homo sapiens
  misc_RNA (1)...(19): siRNA sense strand
ccugauggcuucucacaac

SEQ ID NO: 1466001 - RNA, 19 nt, Homo sapiens
  misc_RNA (1)...(19): siRNA sense strand
aacagcaccuucccaucua

SEQ ID NO: 1466002 - RNA, 19 nt, Homo sapiens
  misc_RNA (1)...(19): siRNA sense strand
agaaggagccaaauugagu

SEQ ID NO: 1466003 - RNA, 19 nt, Homo sapiens
  misc_RNA (1)...(19): siRNA sense strand
ucaacugcaugacacugaa

SEQ ID NO: 1466004 - RNA, 19 nt, Homo sapiens
  misc_RNA (1)...(19): siRNA sense strand
acuaugggcuggucaugga

SEQ ID NO: 1466005 - RNA, 19 nt, Homo sapiens
  misc_RNA (1)...(19): siRNA sense strand
uggaguggaugcccauuca

SEQ ID NO: 1466006 - RNA, 19 nt, Homo sapiens
  misc_RNA (1)...(19): siRNA sense strand
cuugugggcuuccuuguca

SEQ ID NO: 1466007 - RNA, 19 nt, Homo sapiens
  misc_RNA (1)...(19): siRNA sense strand
gagccaaauugaguaugga

SEQ ID NO: 1466008 - RNA, 19 nt, Homo sapiens
  misc_RNA (1)...(19): siRNA sense strand
gcaucucccucaacugcau

SEQ ID NO: 1466009 - RNA, 19 nt, Homo sapiens
  misc_RNA (1)...(19): siRNA sense strand
cugcagggcuuuggaguca

SEQ ID NO: 1466010 - RNA, 19 nt, Homo sapiens
  misc_RNA (1)...(19): siRNA sense strand
gccggaagguacucaucuu

SEQ ID NO: 1466011 - RNA, 19 nt, Homo sapiens
  misc_RNA (1)...(19): siRNA sense strand
caacaagagcaccagaagu

SEQ ID NO: 1466012 - RNA, 19 nt, Homo sapiens
  misc_RNA (1)...(19): siRNA sense strand
gaugccaaccucagcaaga

SEQ ID NO: 1466013 - RNA, 19 nt, Homo sapiens
  misc_RNA (1)...(19): siRNA sense strand
ugagggcccugcagagagu

SEQ ID NO: 1466014 - RNA, 19 nt, Homo sapiens
  misc_RNA (1)...(19): siRNA sense strand
aacugcaucuuccuguaua

SEQ ID NO: 1466015 - RNA, 19 nt, Homo sapiens
  misc_RNA (1)...(19): siRNA sense strand
gcuggcaucucccucaacu

SEQ ID NO: 1466016 - RNA, 19 nt, Homo sapiens
  misc_RNA (1)...(19): siRNA sense strand
aagagcaccagaaguauau

SEQ ID NO: 1466017 - RNA, 19 nt, Homo sapiens
  misc_RNA (1)...(19): siRNA sense strand
uaauccaggugaucuuugg

SEQ ID NO: 1466018 - RNA, 19 nt, Homo sapiens
  misc_RNA (1)...(19): siRNA sense strand
gcgggaagaaggagccaaa

SEQ ID NO: 1466019 - RNA, 19 nt, Homo sapiens
  misc_RNA (1)...(19): siRNA sense strand
gaagguacucaucuugaac

SEQ ID NO: 1466020 - RNA, 19 nt, Homo sapiens
  misc_RNA (1)...(19): siRNA sense strand
gccacuagcuuugcauacu

SEQ ID NO: 1466021 - RNA, 19 nt, Homo sapiens
  misc_RNA (1)...(19): siRNA sense strand
cggaagguacucaucuuga

SEQ ID NO: 1466022 - RNA, 19 nt, Homo sapiens
  misc_RNA (1)...(19): siRNA sense strand
gggacugcccuuucucaau

SEQ ID NO: 1466023 - RNA, 19 nt, Homo sapiens
  misc_RNA (1)...(19): siRNA sense strand
gcaccgauggcuggaucua

SEQ ID NO: 1466024 - RNA, 19 nt, Homo sapiens
  misc_RNA (1)...(19): siRNA sense strand
gcaucugcauccugcucaa

SEQ ID NO: 1466025 - RNA, 19 nt, Homo sapiens
  misc_RNA (1)...(19): siRNA sense strand
cacuagcuuugcauacuau

SEQ ID NO: 1466026 - RNA, 19 nt, Homo sapiens
  misc_RNA (1)...(19): siRNA sense strand
ccucagcacaagagaagaa

SEQ ID NO: 1466027 - RNA, 19 nt, Homo sapiens
  misc_RNA (1)...(19): siRNA sense strand
acuccugguucuucauuga

SEQ ID NO: 1466028 - RNA, 19 nt, Homo sapiens
  misc_RNA (1)...(19): siRNA sense strand
accgauggcuggaucuaug

SEQ ID NO: 1466029 - RNA, 19 nt, Homo sapiens
  misc_RNA (1)...(19): siRNA sense strand
gagucagcaucuaccuaau

SEQ ID NO: 1466030 - RNA, 19 nt, Homo sapiens
  misc_RNA (1)...(19): siRNA sense strand
gcacccaacuuccccaucu

SEQ ID NO: 1466031 - RNA, 19 nt, Homo sapiens
  misc_RNA (1)...(19): siRNA sense strand
gggcuuccuugucaucaac

SEQ ID NO: 1466032 - RNA, 19 nt, Homo sapiens
  misc_RNA (1)...(19): siRNA sense strand
gcuuuggagucagcaucua

SEQ ID NO: 1466033 - RNA, 19 nt, Homo sapiens
  misc_RNA (1)...(19): siRNA sense strand
gagcugaccaugggcaaag

SEQ ID NO: 1466034 - RNA, 19 nt, Homo sapiens
  misc_RNA (1)...(19): siRNA sense strand
caucuacuccugguucuuc

SEQ ID NO: 1466035 - RNA, 19 nt, Homo sapiens
  misc_RNA (1)...(19): siRNA sense strand
gaguggaugcccauucaca

SEQ ID NO: 1466036 - RNA, 19 nt, Homo sapiens
  misc_RNA (1)...(19): siRNA sense strand
cagcacaagagaagaaugg

SEQ ID NO: 1466037 - RNA, 19 nt, Homo sapiens
  misc_RNA (1)...(19): siRNA sense strand
ccuaauccaggugaucuuu

SEQ ID NO: 1466038 - RNA, 19 nt, Homo sapiens
  misc_RNA (1)...(19): siRNA sense strand
ggacugcccuuucucaaug

SEQ ID NO: 1466039 - RNA, 19 nt, Homo sapiens
  misc_RNA (1)...(19): siRNA sense strand
ggaagaaggagccaaauug

SEQ ID NO: 1466040 - RNA, 19 nt, Homo sapiens
  misc_RNA (1)...(19): siRNA sense strand
ggaagguacucaucuugaa

SEQ ID NO: 1466041 - RNA, 19 nt, Homo sapiens
  misc_RNA (1)...(19): siRNA sense strand
gaagaaggagccaaauuga

SEQ ID NO: 1466042 - RNA, 19 nt, Homo sapiens
  misc_RNA (1)...(19): siRNA sense strand
ggagucagcaucuaccuaa

SEQ ID NO: 1466043 - RNA, 19 nt, Homo sapiens
  misc_RNA (1)...(19): siRNA sense strand
ggaacuguaucccacaaug

SEQ ID NO: 1466044 - RNA, 19 nt, Homo sapiens
  misc_RNA (1)...(19): siRNA sense strand
ccacuagcuuugcauacua

SEQ ID NO: 1466045 - RNA, 19 nt, Homo sapiens
  misc_RNA (1)...(19): siRNA sense strand
caagagcaccagaaguaua

SEQ ID NO: 1466046 - RNA, 19 nt, Homo sapiens
  misc_RNA (1)...(19): siRNA sense strand
gaaggagccaaauugagua

SEQ ID NO: 1466047 - RNA, 19 nt, Homo sapiens
  misc_RNA (1)...(19): siRNA sense strand
caaauugaguauggaggua

SEQ ID NO: 1466048 - RNA, 19 nt, Homo sapiens
  misc_RNA (1)...(19): siRNA sense strand
ggaccugccugccaagcuu

SEQ ID NO: 1466049 - RNA, 19 nt, Homo sapiens
  misc_RNA (1)...(19): siRNA sense strand
gaacuguaucccacaauga

SEQ ID NO: 1466050 - RNA, 19 nt, Homo sapiens
  misc_RNA (1)...(19): siRNA sense strand
caucuaccaucgugacuga

SEQ ID NO: 1466051 - RNA, 19 nt, Homo sapiens
  misc_RNA (1)...(19): siRNA sense strand
aacaagagcaccagaagua

SEQ ID NO: 1466052 - RNA, 19 nt, Homo sapiens
  misc_RNA (1)...(19): siRNA sense strand
ggagccaaauugaguaugg

SEQ ID NO: 1466053 - RNA, 19 nt, Homo sapiens
  misc_RNA (1)...(19): siRNA sense strand
caacagcaccuucccaucu

SEQ ID NO: 1466054 - RNA, 19 nt, Homo sapiens
  misc_RNA (1)...(19): siRNA sense strand
gcaccuugauuggcuaugu

SEQ ID NO: 1466055 - RNA, 19 nt, Homo sapiens
  misc_RNA (1)...(19): siRNA sense strand
gggaagaaggagccaaauu

SEQ ID NO: 1466056 - RNA, 19 nt, Homo sapiens
  misc_RNA (1)...(19): siRNA sense strand
ucaacugcaucuuccugua

SEQ ID NO: 1466057 - RNA, 19 nt, Homo sapiens
  misc_RNA (1)...(19): siRNA sense strand
gggccagucugcagaagga

SEQ ID NO: 1466058 - RNA, 19 nt, Homo sapiens
  misc_RNA (1)...(19): siRNA sense strand
gaaacagacgcgacagcaa

SEQ ID NO: 1466059 - RNA, 19 nt, Homo sapiens
  misc_RNA (1)...(19): siRNA sense strand
acaacacccugcagaacuu

SEQ ID NO: 1466060 - RNA, 19 nt, Homo sapiens
  misc_RNA (1)...(19): siRNA sense strand
caacugcaucuuccuguau

SEQ ID NO: 1466061 - RNA, 19 nt, Homo sapiens
  misc_RNA (1)...(19): siRNA sense strand
gcaacaagagcaccagaag

SEQ ID NO: 1466062 - RNA, 19 nt, Homo sapiens
  misc_RNA (1)...(19): siRNA sense strand
ccugauggcuucucacaac

SEQ ID NO: 1466063 - RNA, 19 nt, Homo sapiens
  misc_RNA (1)...(19): siRNA sense strand
aacagcaccuucccaucua

SEQ ID NO: 1466064 - RNA, 19 nt, Homo sapiens
  misc_RNA (1)...(19): siRNA sense strand
agaaggagccaaauugagu

SEQ ID NO: 1466065 - RNA, 19 nt, Homo sapiens
  misc_RNA (1)...(19): siRNA sense strand
ucaacugcaugacacugaa

SEQ ID NO: 1466066 - RNA, 19 nt, Homo sapiens
  misc_RNA (1)...(19): siRNA sense strand
acuaugggcuggucaugga

SEQ ID NO: 1466067 - RNA, 19 nt, Homo sapiens
  misc_RNA (1)...(19): siRNA sense strand
uggaguggaugcccauuca

SEQ ID NO: 1466068 - RNA, 19 nt, Homo sapiens
  misc_RNA (1)...(19): siRNA sense strand
cuugugggcuuccuuguca

SEQ ID NO: 1466069 - RNA, 19 nt, Homo sapiens
  misc_RNA (1)...(19): siRNA sense strand
gagccaaauugaguaugga

SEQ ID NO: 1466070 - RNA, 19 nt, Homo sapiens
  misc_RNA (1)...(19): siRNA sense strand
gcaucucccucaacugcau

SEQ ID NO: 1466071 - RNA, 19 nt, Homo sapiens
  misc_RNA (1)...(19): siRNA sense strand
cugcagggcuuuggaguca

SEQ ID NO: 1466072 - RNA, 19 nt, Homo sapiens
  misc_RNA (1)...(19): siRNA sense strand
gccggaagguacucaucuu

SEQ ID NO: 1466073 - RNA, 19 nt, Homo sapiens
  misc_RNA (1)...(19): siRNA sense strand
caacaagagcaccagaagu

SEQ ID NO: 1466074 - RNA, 19 nt, Homo sapiens
  misc_RNA (1)...(19): siRNA sense strand
gaugccaaccucagcaaga

SEQ ID NO: 1466075 - RNA, 19 nt, Homo sapiens
  misc_RNA (1)...(19): siRNA sense strand
ugagggcccugcagagagu

SEQ ID NO: 1466076 - RNA, 19 nt, Homo sapiens
  misc_RNA (1)...(19): siRNA sense strand
aacugcaucuuccuguaua

SEQ ID NO: 1466077 - RNA, 19 nt, Homo sapiens
  misc_RNA (1)...(19): siRNA sense strand
gcuggcaucucccucaacu

SEQ ID NO: 1466078 - RNA, 19 nt, Homo sapiens
  misc_RNA (1)...(19): siRNA sense strand
aagagcaccagaaguauau

SEQ ID NO: 1466079 - RNA, 19 nt, Homo sapiens
  misc_RNA (1)...(19): siRNA sense strand
uaauccaggugaucuuugg

SEQ ID NO: 1466080 - RNA, 19 nt, Homo sapiens
  misc_RNA (1)...(19): siRNA sense strand
gcgggaagaaggagccaaa

SEQ ID NO: 1466081 - RNA, 19 nt, Homo sapiens
  misc_RNA (1)...(19): siRNA sense strand
gaagguacucaucuugaac

SEQ ID NO: 1466082 - RNA, 19 nt, Homo sapiens
  misc_RNA (1)...(19): siRNA sense strand
gccacuagcuuugcauacu

SEQ ID NO: 1466083 - RNA, 19 nt, Homo sapiens
  misc_RNA (1)...(19): siRNA sense strand
cggaagguacucaucuuga

SEQ ID NO: 1466084 - RNA, 19 nt, Homo sapiens
  misc_RNA (1)...(19): siRNA sense strand
gggacugcccuuucucaau

SEQ ID NO: 1466085 - RNA, 19 nt, Homo sapiens
  misc_RNA (1)...(19): siRNA sense strand
gcaccgauggcuggaucua

SEQ ID NO: 1466086 - RNA, 19 nt, Homo sapiens
  misc_RNA (1)...(19): siRNA sense strand
gcaucugcauccugcucaa

SEQ ID NO: 1466087 - RNA, 19 nt, Homo sapiens
  misc_RNA (1)...(19): siRNA sense strand
cacuagcuuugcauacuau

SEQ ID NO: 1466088 - RNA, 19 nt, Homo sapiens
  misc_RNA (1)...(19): siRNA sense strand
ccucagcacaagagaagaa

SEQ ID NO: 1466089 - RNA, 19 nt, Homo sapiens
  misc_RNA (1)...(19): siRNA sense strand
acuccugguucuucauuga

SEQ ID NO: 1466090 - RNA, 19 nt, Homo sapiens
  misc_RNA (1)...(19): siRNA sense strand
accgauggcuggaucuaug

SEQ ID NO: 1466091 - RNA, 19 nt, Homo sapiens
  misc_RNA (1)...(19): siRNA sense strand
gagucagcaucuaccuaau

SEQ ID NO: 1466092 - RNA, 19 nt, Homo sapiens
  misc_RNA (1)...(19): siRNA sense strand
gcacccaacuuccccaucu

SEQ ID NO: 1466093 - RNA, 19 nt, Homo sapiens
  misc_RNA (1)...(19): siRNA sense strand
gggcuuccuugucaucaac

SEQ ID NO: 1466094 - RNA, 19 nt, Homo sapiens
  misc_RNA (1)...(19): siRNA sense strand
gcuuuggagucagcaucua

SEQ ID NO: 1466095 - RNA, 19 nt, Homo sapiens
  misc_RNA (1)...(19): siRNA sense strand
gagcugaccaugggcaaag

SEQ ID NO: 1466096 - RNA, 19 nt, Homo sapiens
  misc_RNA (1)...(19): siRNA sense strand
caucuacuccugguucuuc

SEQ ID NO: 1466097 - RNA, 19 nt, Homo sapiens
  misc_RNA (1)...(19): siRNA sense strand
gaguggaugcccauucaca

SEQ ID NO: 1466098 - RNA, 19 nt, Homo sapiens
  misc_RNA (1)...(19): siRNA sense strand
cagcacaagagaagaaugg

SEQ ID NO: 1466099 - RNA, 19 nt, Homo sapiens
  misc_RNA (1)...(19): siRNA sense strand
ccuaauccaggugaucuuu

SEQ ID NO: 1466100 - RNA, 19 nt, Homo sapiens
  misc_RNA (1)...(19): siRNA sense strand
ggacugcccuuucucaaug

SEQ ID NO: 1466101 - RNA, 19 nt, Homo sapiens
  misc_RNA (1)...(19): siRNA sense strand
ggaagaaggagccaaauug

SEQ ID NO: 1466102 - RNA, 19 nt, Homo sapiens
  misc_RNA (1)...(19): siRNA sense strand
ggaagguacucaucuugaa

SEQ ID NO: 1466103 - RNA, 19 nt, Homo sapiens
  misc_RNA (1)...(19): siRNA sense strand
gaagaaggagccaaauuga

SEQ ID NO: 1466104 - RNA, 19 nt, Homo sapiens
  misc_RNA (1)...(19): siRNA sense strand
ggagucagcaucuaccuaa

SEQ ID NO: 1466105 - RNA, 19 nt, Homo sapiens
  misc_RNA (1)...(19): siRNA sense strand
ggaacuguaucccacaaug

SEQ ID NO: 1466106 - RNA, 19 nt, Homo sapiens
  misc_RNA (1)...(19): siRNA sense strand
ccacuagcuuugcauacua

SEQ ID NO: 1466107 - RNA, 19 nt, Homo sapiens
  misc_RNA (1)...(19): siRNA sense strand
caagagcaccagaaguaua

SEQ ID NO: 1466108 - RNA, 19 nt, Homo sapiens
  misc_RNA (1)...(19): siRNA sense strand
gaaggagccaaauugagua

SEQ ID NO: 1466109 - RNA, 19 nt, Homo sapiens
  misc_RNA (1)...(19): siRNA sense strand
caaauugaguauggaggua

SEQ ID NO: 1466110 - RNA, 19 nt, Homo sapiens
  misc_RNA (1)...(19): siRNA sense strand
ggaccugccugccaagcuu

SEQ ID NO: 1466111 - RNA, 19 nt, Homo sapiens
  misc_RNA (1)...(19): siRNA sense strand
gaacuguaucccacaauga

SEQ ID NO: 1466112 - RNA, 19 nt, Homo sapiens
  misc_RNA (1)...(19): siRNA sense strand
caucuaccaucgugacuga

SEQ ID NO: 1466113 - RNA, 19 nt, Homo sapiens
  misc_RNA (1)...(19): siRNA sense strand
aacaagagcaccagaagua

SEQ ID NO: 1466114 - RNA, 19 nt, Homo sapiens
  misc_RNA (1)...(19): siRNA sense strand
ggagccaaauugaguaugg

SEQ ID NO: 1466115 - RNA, 19 nt, Homo sapiens
  misc_RNA (1)...(19): siRNA sense strand
caacagcaccuucccaucu

SEQ ID NO: 1466116 - RNA, 19 nt, Homo sapiens
  misc_RNA (1)...(19): siRNA sense strand
gcaccuugauuggcuaugu

SEQ ID NO: 1466117 - RNA, 19 nt, Homo sapiens
  misc_RNA (1)...(19): siRNA sense strand
gggaagaaggagccaaauu

SEQ ID NO: 1466118 - RNA, 19 nt, Homo sapiens
  misc_RNA (1)...(19): siRNA sense strand
ucaacugcaucuuccugua

SEQ ID NO: 1466119 - RNA, 19 nt, Homo sapiens
  misc_RNA (1)...(19): siRNA sense strand
gggccagucugcagaagga

SEQ ID NO: 1466120 - RNA, 19 nt, Homo sapiens
  misc_RNA (1)...(19): siRNA sense strand
gaaacagacgcgacagcaa

SEQ ID NO: 1466121 - RNA, 19 nt, Homo sapiens
  misc_RNA (1)...(19): siRNA sense strand
acaacacccugcagaacuu

SEQ ID NO: 1466122 - RNA, 19 nt, Homo sapiens
  misc_RNA (1)...(19): siRNA sense strand
caacugcaucuuccuguau

SEQ ID NO: 1466123 - RNA, 19 nt, Homo sapiens
  misc_RNA (1)...(19): siRNA sense strand
gcaacaagagcaccagaag

SEQ ID NO: 1466124 - RNA, 19 nt, Homo sapiens
  misc_RNA (1)...(19): siRNA sense strand
ccugauggcuucucacaac

SEQ ID NO: 1466125 - RNA, 19 nt, Homo sapiens
  misc_RNA (1)...(19): siRNA sense strand
aacagcaccuucccaucua

SEQ ID NO: 1466126 - RNA, 19 nt, Homo sapiens
  misc_RNA (1)...(19): siRNA sense strand
agaaggagccaaauugagu

SEQ ID NO: 1466127 - RNA, 19 nt, Homo sapiens
  misc_RNA (1)...(19): siRNA sense strand
ucaacugcaugacacugaa

SEQ ID NO: 1466128 - RNA, 19 nt, Homo sapiens
  misc_RNA (1)...(19): siRNA sense strand
acuaugggcuggucaugga

SEQ ID NO: 1466129 - RNA, 19 nt, Homo sapiens
  misc_RNA (1)...(19): siRNA sense strand
uggaguggaugcccauuca

SEQ ID NO: 1466130 - RNA, 19 nt, Homo sapiens
  misc_RNA (1)...(19): siRNA sense strand
cuugugggcuuccuuguca

SEQ ID NO: 1466131 - RNA, 19 nt, Homo sapiens
  misc_RNA (1)...(19): siRNA sense strand
gagccaaauugaguaugga

SEQ ID NO: 1466132 - RNA, 19 nt, Homo sapiens
  misc_RNA (1)...(19): siRNA sense strand
gcaucucccucaacugcau

SEQ ID NO: 1466133 - RNA, 19 nt, Homo sapiens
  misc_RNA (1)...(19): siRNA sense strand
cugcagggcuuuggaguca

SEQ ID NO: 1466134 - RNA, 19 nt, Homo sapiens
  misc_RNA (1)...(19): siRNA sense strand
gccggaagguacucaucuu

SEQ ID NO: 1466135 - RNA, 19 nt, Homo sapiens
  misc_RNA (1)...(19): siRNA sense strand
caacaagagcaccagaagu

SEQ ID NO: 1466136 - RNA, 19 nt, Homo sapiens
  misc_RNA (1)...(19): siRNA sense strand
gaugccaaccucagcaaga

SEQ ID NO: 1466137 - RNA, 19 nt, Homo sapiens
  misc_RNA (1)...(19): siRNA sense strand
ugagggcccugcagagagu

SEQ ID NO: 1466138 - RNA, 19 nt, Homo sapiens
  misc_RNA (1)...(19): siRNA sense strand
aacugcaucuuccuguaua

SEQ ID NO: 1466139 - RNA, 19 nt, Homo sapiens
  misc_RNA (1)...(19): siRNA sense strand
gcuggcaucucccucaacu

SEQ ID NO: 1466140 - RNA, 19 nt, Homo sapiens
  misc_RNA (1)...(19): siRNA sense strand
aagagcaccagaaguauau

SEQ ID NO: 1466141 - RNA, 19 nt, Homo sapiens
  misc_RNA (1)...(19): siRNA sense strand
uaauccaggugaucuuugg

SEQ ID NO: 1466142 - RNA, 19 nt, Homo sapiens
  misc_RNA (1)...(19): siRNA sense strand
gcgggaagaaggagccaaa

SEQ ID NO: 1466143 - RNA, 19 nt, Homo sapiens
  misc_RNA (1)...(19): siRNA sense strand
gaagguacucaucuugaac

SEQ ID NO: 1466144 - RNA, 19 nt, Homo sapiens
  misc_RNA (1)...(19): siRNA sense strand
gccacuagcuuugcauacu

SEQ ID NO: 1466145 - RNA, 19 nt, Homo sapiens
  misc_RNA (1)...(19): siRNA sense strand
cggaagguacucaucuuga

SEQ ID NO: 1466146 - RNA, 19 nt, Homo sapiens
  misc_RNA (1)...(19): siRNA sense strand
gggacugcccuuucucaau

SEQ ID NO: 1466147 - RNA, 19 nt, Homo sapiens
  misc_RNA (1)...(19): siRNA sense strand
gcaccgauggcuggaucua

SEQ ID NO: 1466148 - RNA, 19 nt, Homo sapiens
  misc_RNA (1)...(19): siRNA sense strand
gcaucugcauccugcucaa

SEQ ID NO: 1466149 - RNA, 19 nt, Homo sapiens
  misc_RNA (1)...(19): siRNA sense strand
cacuagcuuugcauacuau

SEQ ID NO: 1466150 - RNA, 19 nt, Homo sapiens
  misc_RNA (1)...(19): siRNA sense strand
ccucagcacaagagaagaa

SEQ ID NO: 1466151 - RNA, 19 nt, Homo sapiens
  misc_RNA (1)...(19): siRNA sense strand
acuccugguucuucauuga

SEQ ID NO: 1466152 - RNA, 19 nt, Homo sapiens
  misc_RNA (1)...(19): siRNA sense strand
accgauggcuggaucuaug

SEQ ID NO: 1466153 - RNA, 19 nt, Homo sapiens
  misc_RNA (1)...(19): siRNA sense strand
gagucagcaucuaccuaau

SEQ ID NO: 1466154 - RNA, 19 nt, Homo sapiens
  misc_RNA (1)...(19): siRNA sense strand
gcacccaacuuccccaucu

SEQ ID NO: 1466155 - RNA, 19 nt, Homo sapiens
  misc_RNA (1)...(19): siRNA sense strand
gggcuuccuugucaucaac

SEQ ID NO: 1466156 - RNA, 19 nt, Homo sapiens
  misc_RNA (1)...(19): siRNA sense strand
gcuuuggagucagcaucua

SEQ ID NO: 1466157 - RNA, 19 nt, Homo sapiens
  misc_RNA (1)...(19): siRNA sense strand
gagcugaccaugggcaaag

SEQ ID NO: 1466158 - RNA, 19 nt, Homo sapiens
  misc_RNA (1)...(19): siRNA sense strand
caucuacuccugguucuuc

SEQ ID NO: 1466159 - RNA, 19 nt, Homo sapiens
  misc_RNA (1)...(19): siRNA sense strand
gaguggaugcccauucaca

SEQ ID NO: 1466160 - RNA, 19 nt, Homo sapiens
  misc_RNA (1)...(19): siRNA sense strand
cagcacaagagaagaaugg

SEQ ID NO: 1466161 - RNA, 19 nt, Homo sapiens
  misc_RNA (1)...(19): siRNA sense strand
ccuaauccaggugaucuuu

SEQ ID NO: 1466162 - RNA, 19 nt, Homo sapiens
  misc_RNA (1)...(19): siRNA sense strand
ggacugcccuuucucaaug

SEQ ID NO: 1466163 - RNA, 19 nt, Homo sapiens
  misc_RNA (1)...(19): siRNA sense strand
ggaagaaggagccaaauug

SEQ ID NO: 1466164 - RNA, 19 nt, Homo sapiens
  misc_RNA (1)...(19): siRNA sense strand
ggaagguacucaucuugaa

SEQ ID NO: 1466165 - RNA, 19 nt, Homo sapiens
  misc_RNA (1)...(19): siRNA sense strand
gaagaaggagccaaauuga

SEQ ID NO: 1466166 - RNA, 19 nt, Homo sapiens
  misc_RNA (1)...(19): siRNA sense strand
ggagucagcaucuaccuaa

SEQ ID NO: 1466167 - RNA, 19 nt, Homo sapiens
  misc_RNA (1)...(19): siRNA sense strand
ggaacuguaucccacaaug

SEQ ID NO: 1466168 - RNA, 19 nt, Homo sapiens
  misc_RNA (1)...(19): siRNA sense strand
ccacuagcuuugcauacua

SEQ ID NO: 1466169 - RNA, 19 nt, Homo sapiens
  misc_RNA (1)...(19): siRNA sense strand
caagagcaccagaaguaua

SEQ ID NO: 1466170 - RNA, 19 nt, Homo sapiens
  misc_RNA (1)...(19): siRNA sense strand
gaaggagccaaauugagua

SEQ ID NO: 1466171 - RNA, 19 nt, Homo sapiens
  misc_RNA (1)...(19): siRNA sense strand
caaauugaguauggaggua

SEQ ID NO: 1466172 - RNA, 19 nt, Homo sapiens
  misc_RNA (1)...(19): siRNA sense strand
ggaccugccugccaagcuu

SEQ ID NO: 1466173 - RNA, 19 nt, Homo sapiens
  misc_RNA (1)...(19): siRNA sense strand
gaacuguaucccacaauga

SEQ ID NO: 1466174 - RNA, 19 nt, Homo sapiens
  misc_RNA (1)...(19): siRNA sense strand
caucuaccaucgugacuga

SEQ ID NO: 1466175 - RNA, 19 nt, Homo sapiens
  misc_RNA (1)...(19): siRNA sense strand
aacaagagcaccagaagua

SEQ ID NO: 1466176 - RNA, 19 nt, Homo sapiens
  misc_RNA (1)...(19): siRNA sense strand
ggagccaaauugaguaugg

SEQ ID NO: 1466177 - RNA, 19 nt, Homo sapiens
  misc_RNA (1)...(19): siRNA sense strand
caacagcaccuucccaucu

SEQ ID NO: 1466178 - RNA, 19 nt, Homo sapiens
  misc_RNA (1)...(19): siRNA sense strand
gcaccuugauuggcuaugu

SEQ ID NO: 1466179 - RNA, 19 nt, Homo sapiens
  misc_RNA (1)...(19): siRNA sense strand
gggaagaaggagccaaauu

SEQ ID NO: 1466180 - RNA, 19 nt, Homo sapiens
  misc_RNA (1)...(19): siRNA sense strand
ucaacugcaucuuccugua

SEQ ID NO: 1466181 - RNA, 19 nt, Homo sapiens
  misc_RNA (1)...(19): siRNA sense strand
gggccagucugcagaagga

SEQ ID NO: 1466182 - RNA, 19 nt, Homo sapiens
  misc_RNA (1)...(19): siRNA sense strand
gaaacagacgcgacagcaa

SEQ ID NO: 1466183 - RNA, 19 nt, Homo sapiens
  misc_RNA (1)...(19): siRNA sense strand
acaacacccugcagaacuu

SEQ ID NO: 1466184 - RNA, 19 nt, Homo sapiens
  misc_RNA (1)...(19): siRNA sense strand
caacugcaucuuccuguau

SEQ ID NO: 1466185 - RNA, 19 nt, Homo sapiens
  misc_RNA (1)...(19): siRNA sense strand
gcaacaagagcaccagaag

SEQ ID NO: 1466186 - RNA, 19 nt, Homo sapiens
  misc_RNA (1)...(19): siRNA sense strand
ccugauggcuucucacaac

SEQ ID NO: 1466187 - RNA, 19 nt, Homo sapiens
  misc_RNA (1)...(19): siRNA sense strand
aacagcaccuucccaucua

SEQ ID NO: 1466188 - RNA, 19 nt, Homo sapiens
  misc_RNA (1)...(19): siRNA sense strand
agaaggagccaaauugagu

SEQ ID NO: 1466189 - RNA, 19 nt, Homo sapiens
  misc_RNA (1)...(19): siRNA sense strand
ucaacugcaugacacugaa

SEQ ID NO: 1466190 - RNA, 19 nt, Homo sapiens
  misc_RNA (1)...(19): siRNA sense strand
acuaugggcuggucaugga

SEQ ID NO: 1466191 - RNA, 19 nt, Homo sapiens
  misc_RNA (1)...(19): siRNA sense strand
uggaguggaugcccauuca

SEQ ID NO: 1466192 - RNA, 19 nt, Homo sapiens
  misc_RNA (1)...(19): siRNA sense strand
cuugugggcuuccuuguca

SEQ ID NO: 1466193 - RNA, 19 nt, Homo sapiens
  misc_RNA (1)...(19): siRNA sense strand
gagccaaauugaguaugga

SEQ ID NO: 1466194 - RNA, 19 nt, Homo sapiens
  misc_RNA (1)...(19): siRNA sense strand
gcaucucccucaacugcau

SEQ ID NO: 1466195 - RNA, 19 nt, Homo sapiens
  misc_RNA (1)...(19): siRNA sense strand
cugcagggcuuuggaguca

SEQ ID NO: 1466196 - RNA, 19 nt, Homo sapiens
  misc_RNA (1)...(19): siRNA sense strand
gccggaagguacucaucuu

SEQ ID NO: 1466197 - RNA, 19 nt, Homo sapiens
  misc_RNA (1)...(19): siRNA sense strand
caacaagagcaccagaagu

SEQ ID NO: 1466198 - RNA, 19 nt, Homo sapiens
  misc_RNA (1)...(19): siRNA sense strand
gaugccaaccucagcaaga

SEQ ID NO: 1466199 - RNA, 19 nt, Homo sapiens
  misc_RNA (1)...(19): siRNA sense strand
ugagggcccugcagagagu

SEQ ID NO: 1466200 - RNA, 19 nt, Homo sapiens
  misc_RNA (1)...(19): siRNA sense strand
aacugcaucuuccuguaua

SEQ ID NO: 1466201 - RNA, 19 nt, Homo sapiens
  misc_RNA (1)...(19): siRNA sense strand
gcuggcaucucccucaacu

SEQ ID NO: 1466202 - RNA, 19 nt, Homo sapiens
  misc_RNA (1)...(19): siRNA sense strand
aagagcaccagaaguauau

SEQ ID NO: 1466203 - RNA, 19 nt, Homo sapiens
  misc_RNA (1)...(19): siRNA sense strand
uaauccaggugaucuuugg

SEQ ID NO: 1466204 - RNA, 19 nt, Homo sapiens
  misc_RNA (1)...(19): siRNA sense strand
gcgggaagaaggagccaaa

SEQ ID NO: 1466205 - RNA, 19 nt, Homo sapiens
  misc_RNA (1)...(19): siRNA sense strand
gaagguacucaucuugaac

SEQ ID NO: 1466206 - RNA, 19 nt, Homo sapiens
  misc_RNA (1)...(19): siRNA sense strand
gccacuagcuuugcauacu

SEQ ID NO: 1466207 - RNA, 19 nt, Homo sapiens
  misc_RNA (1)...(19): siRNA sense strand
cggaagguacucaucuuga

SEQ ID NO: 1466208 - RNA, 19 nt, Homo sapiens
  misc_RNA (1)...(19): siRNA sense strand
gggacugcccuuucucaau

SEQ ID NO: 1466209 - RNA, 19 nt, Homo sapiens
  misc_RNA (1)...(19): siRNA sense strand
gcaccgauggcuggaucua

SEQ ID NO: 1466210 - RNA, 19 nt, Homo sapiens
  misc_RNA (1)...(19): siRNA sense strand
gcaucugcauccugcucaa

SEQ ID NO: 1466211 - RNA, 19 nt, Homo sapiens
  misc_RNA (1)...(19): siRNA sense strand
cacuagcuuugcauacuau

SEQ ID NO: 1466212 - RNA, 19 nt, Homo sapiens
  misc_RNA (1)...(19): siRNA sense strand
ccucagcacaagagaagaa

SEQ ID NO: 1466213 - RNA, 19 nt, Homo sapiens
  misc_RNA (1)...(19): siRNA sense strand
acuccugguucuucauuga

SEQ ID NO: 1466214 - RNA, 19 nt, Homo sapiens
  misc_RNA (1)...(19): siRNA sense strand
accgauggcuggaucuaug

SEQ ID NO: 1466215 - RNA, 19 nt, Homo sapiens
  misc_RNA (1)...(19): siRNA sense strand
gagucagcaucuaccuaau

SEQ ID NO: 1466216 - RNA, 19 nt, Homo sapiens
  misc_RNA (1)...(19): siRNA sense strand
gcacccaacuuccccaucu

SEQ ID NO: 1466217 - RNA, 19 nt, Homo sapiens
  misc_RNA (1)...(19): siRNA sense strand
gggcuuccuugucaucaac

SEQ ID NO: 1466218 - RNA, 19 nt, Homo sapiens
  misc_RNA (1)...(19): siRNA sense strand
gcuuuggagucagcaucua

SEQ ID NO: 1466219 - RNA, 19 nt, Homo sapiens
  misc_RNA (1)...(19): siRNA sense strand
gagcugaccaugggcaaag

SEQ ID NO: 1466220 - RNA, 19 nt, Homo sapiens
  misc_RNA (1)...(19): siRNA sense strand
caucuacuccugguucuuc

SEQ ID NO: 1466221 - RNA, 19 nt, Homo sapiens
  misc_RNA (1)...(19): siRNA sense strand
gaguggaugcccauucaca

SEQ ID NO: 1466222 - RNA, 19 nt, Homo sapiens
  misc_RNA (1)...(19): siRNA sense strand
cagcacaagagaagaaugg

SEQ ID NO: 1466223 - RNA, 19 nt, Homo sapiens
  misc_RNA (1)...(19): siRNA sense strand
ccuaauccaggugaucuuu

SEQ ID NO: 1466224 - RNA, 19 nt, Homo sapiens
  misc_RNA (1)...(19): siRNA sense strand
ggacugcccuuucucaaug

SEQ ID NO: 1466225 - RNA, 19 nt, Homo sapiens
  misc_RNA (1)...(19): siRNA sense strand
ggaagaaggagccaaauug

SEQ ID NO: 1466226 - RNA, 19 nt, Homo sapiens
  misc_RNA (1)...(19): siRNA sense strand
ggaagguacucaucuugaa

SEQ ID NO: 1466227 - RNA, 19 nt, Homo sapiens
  misc_RNA (1)...(19): siRNA sense strand
gaagaaggagccaaauuga

SEQ ID NO: 1466228 - RNA, 19 nt, Homo sapiens
  misc_RNA (1)...(19): siRNA sense strand
ggagucagcaucuaccuaa

SEQ ID NO: 1466229 - RNA, 19 nt, Homo sapiens
  misc_RNA (1)...(19): siRNA sense strand
ggaacuguaucccacaaug

SEQ ID NO: 1466230 - RNA, 19 nt, Homo sapiens
  misc_RNA (1)...(19): siRNA sense strand
ccacuagcuuugcauacua

SEQ ID NO: 1466231 - RNA, 19 nt, Homo sapiens
  misc_RNA (1)...(19): siRNA sense strand
caagagcaccagaaguaua

SEQ ID NO: 1466232 - RNA, 19 nt, Homo sapiens
  misc_RNA (1)...(19): siRNA sense strand
gaaggagccaaauugagua

SEQ ID NO: 1466233 - RNA, 19 nt, Homo sapiens
  misc_RNA (1)...(19): siRNA sense strand
caaauugaguauggaggua

SEQ ID NO: 1466234 - RNA, 19 nt, Homo sapiens
  misc_RNA (1)...(19): siRNA sense strand
ggaccugccugccaagcuu

SEQ ID NO: 1466235 - RNA, 19 nt, Homo sapiens
  misc_RNA (1)...(19): siRNA sense strand
gaacuguaucccacaauga

SEQ ID NO: 1466236 - RNA, 19 nt, Homo sapiens
  misc_RNA (1)...(19): siRNA sense strand
caucuaccaucgugacuga

SEQ ID NO: 1466237 - RNA, 19 nt, Homo sapiens
  misc_RNA (1)...(19): siRNA sense strand
aacaagagcaccagaagua

SEQ ID NO: 1466238 - RNA, 19 nt, Homo sapiens
  misc_RNA (1)...(19): siRNA sense strand
ggagccaaauugaguaugg

SEQ ID NO: 1466239 - RNA, 19 nt, Homo sapiens
  misc_RNA (1)...(19): siRNA sense strand
caacagcaccuucccaucu

SEQ ID NO: 1466240 - RNA, 19 nt, Homo sapiens
  misc_RNA (1)...(19): siRNA sense strand
gcaccuugauuggcuaugu

SEQ ID NO: 1466241 - RNA, 19 nt, Homo sapiens
  misc_RNA (1)...(19): siRNA sense strand
gggaagaaggagccaaauu

SEQ ID NO: 1466242 - RNA, 19 nt, Homo sapiens
  misc_RNA (1)...(19): siRNA sense strand
ucaacugcaucuuccugua

SEQ ID NO: 1466243 - RNA, 19 nt, Homo sapiens
  misc_RNA (1)...(19): siRNA sense strand
gggccagucugcagaagga

SEQ ID NO: 1466244 - RNA, 19 nt, Homo sapiens
  misc_RNA (1)...(19): siRNA sense strand
gaaacagacgcgacagcaa

SEQ ID NO: 1466245 - RNA, 19 nt, Homo sapiens
  misc_RNA (1)...(19): siRNA sense strand
acaacacccugcagaacuu

SEQ ID NO: 1466246 - RNA, 19 nt, Homo sapiens
  misc_RNA (1)...(19): siRNA sense strand
caacugcaucuuccuguau

SEQ ID NO: 1466247 - RNA, 19 nt, Homo sapiens
  misc_RNA (1)...(19): siRNA sense strand
gcaacaagagcaccagaag

SEQ ID NO: 1466248 - RNA, 19 nt, Homo sapiens
  misc_RNA (1)...(19): siRNA sense strand
ccugauggcuucucacaac

SEQ ID NO: 1466249 - RNA, 19 nt, Homo sapiens
  misc_RNA (1)...(19): siRNA sense strand
aacagcaccuucccaucua

SEQ ID NO: 1466250 - RNA, 19 nt, Homo sapiens
  misc_RNA (1)...(19): siRNA sense strand
agaaggagccaaauugagu

SEQ ID NO: 1466251 - RNA, 19 nt, Homo sapiens
  misc_RNA (1)...(19): siRNA sense strand
ucaacugcaugacacugaa

SEQ ID NO: 1466252 - RNA, 19 nt, Homo sapiens
  misc_RNA (1)...(19): siRNA sense strand
acuaugggcuggucaugga

SEQ ID NO: 1466253 - RNA, 19 nt, Homo sapiens
  misc_RNA (1)...(19): siRNA sense strand
uggaguggaugcccauuca

SEQ ID NO: 1466254 - RNA, 19 nt, Homo sapiens
  misc_RNA (1)...(19): siRNA sense strand
cuugugggcuuccuuguca

SEQ ID NO: 1466255 - RNA, 19 nt, Homo sapiens
  misc_RNA (1)...(19): siRNA sense strand
gagccaaauugaguaugga

SEQ ID NO: 1466256 - RNA, 19 nt, Homo sapiens
  misc_RNA (1)...(19): siRNA sense strand
gcaucucccucaacugcau

SEQ ID NO: 1466257 - RNA, 19 nt, Homo sapiens
  misc_RNA (1)...(19): siRNA sense strand
cugcagggcuuuggaguca

SEQ ID NO: 1466258 - RNA, 19 nt, Homo sapiens
  misc_RNA (1)...(19): siRNA sense strand
gccggaagguacucaucuu

SEQ ID NO: 1466259 - RNA, 19 nt, Homo sapiens
  misc_RNA (1)...(19): siRNA sense strand
caacaagagcaccagaagu

SEQ ID NO: 1466260 - RNA, 19 nt, Homo sapiens
  misc_RNA (1)...(19): siRNA sense strand
gaugccaaccucagcaaga

SEQ ID NO: 1466261 - RNA, 19 nt, Homo sapiens
  misc_RNA (1)...(19): siRNA sense strand
ugagggcccugcagagagu

SEQ ID NO: 1466262 - RNA, 19 nt, Homo sapiens
  misc_RNA (1)...(19): siRNA sense strand
aacugcaucuuccuguaua

SEQ ID NO: 1466263 - RNA, 19 nt, Homo sapiens
  misc_RNA (1)...(19): siRNA sense strand
gcuggcaucucccucaacu

SEQ ID NO: 1466264 - RNA, 19 nt, Homo sapiens
  misc_RNA (1)...(19): siRNA sense strand
aagagcaccagaaguauau

SEQ ID NO: 1466265 - RNA, 19 nt, Homo sapiens
  misc_RNA (1)...(19): siRNA sense strand
uaauccaggugaucuuugg

SEQ ID NO: 1466266 - RNA, 19 nt, Homo sapiens
  misc_RNA (1)...(19): siRNA sense strand
gcgggaagaaggagccaaa

SEQ ID NO: 1466267 - RNA, 19 nt, Homo sapiens
  misc_RNA (1)...(19): siRNA sense strand
gaagguacucaucuugaac

SEQ ID NO: 1466268 - RNA, 19 nt, Homo sapiens
  misc_RNA (1)...(19): siRNA sense strand
gccacuagcuuugcauacu

SEQ ID NO: 1466269 - RNA, 19 nt, Homo sapiens
  misc_RNA (1)...(19): siRNA sense strand
cggaagguacucaucuuga

SEQ ID NO: 1466270 - RNA, 19 nt, Homo sapiens
  misc_RNA (1)...(19): siRNA sense strand
gggacugcccuuucucaau

SEQ ID NO: 1466271 - RNA, 19 nt, Homo sapiens
  misc_RNA (1)...(19): siRNA sense strand
gcaccgauggcuggaucua

SEQ ID NO: 1466272 - RNA, 19 nt, Homo sapiens
  misc_RNA (1)...(19): siRNA sense strand
gcaucugcauccugcucaa

SEQ ID NO: 1466273 - RNA, 19 nt, Homo sapiens
  misc_RNA (1)...(19): siRNA sense strand
cacuagcuuugcauacuau

SEQ ID NO: 1466274 - RNA, 19 nt, Homo sapiens
  misc_RNA (1)...(19): siRNA sense strand
ccucagcacaagagaagaa

SEQ ID NO: 1466275 - RNA, 19 nt, Homo sapiens
  misc_RNA (1)...(19): siRNA sense strand
acuccugguucuucauuga

SEQ ID NO: 1466276 - RNA, 19 nt, Homo sapiens
  misc_RNA (1)...(19): siRNA sense strand
accgauggcuggaucuaug

SEQ ID NO: 1466277 - RNA, 19 nt, Homo sapiens
  misc_RNA (1)...(19): siRNA sense strand
gagucagcaucuaccuaau

SEQ ID NO: 1466278 - RNA, 19 nt, Homo sapiens
  misc_RNA (1)...(19): siRNA sense strand
gcacccaacuuccccaucu

SEQ ID NO: 1466279 - RNA, 19 nt, Homo sapiens
  misc_RNA (1)...(19): siRNA sense strand
gggcuuccuugucaucaac

SEQ ID NO: 1466280 - RNA, 19 nt, Homo sapiens
  misc_RNA (1)...(19): siRNA sense strand
gcuuuggagucagcaucua

SEQ ID NO: 1466281 - RNA, 19 nt, Homo sapiens
  misc_RNA (1)...(19): siRNA sense strand
gagcugaccaugggcaaag

SEQ ID NO: 1466282 - RNA, 19 nt, Homo sapiens
  misc_RNA (1)...(19): siRNA sense strand
caucuacuccugguucuuc

SEQ ID NO: 1466283 - RNA, 19 nt, Homo sapiens
  misc_RNA (1)...(19): siRNA sense strand
gaguggaugcccauucaca

SEQ ID NO: 1466284 - RNA, 19 nt, Homo sapiens
  misc_RNA (1)...(19): siRNA sense strand
cagcacaagagaagaaugg

SEQ ID NO: 1466285 - RNA, 19 nt, Homo sapiens
  misc_RNA (1)...(19): siRNA sense strand
ccuaauccaggugaucuuu

SEQ ID NO: 1466286 - RNA, 19 nt, Homo sapiens
  misc_RNA (1)...(19): siRNA sense strand
ggacugcccuuucucaaug

SEQ ID NO: 1466287 - RNA, 19 nt, Homo sapiens
  misc_RNA (1)...(19): siRNA sense strand
ggaagaaggagccaaauug

SEQ ID NO: 1466288 - RNA, 19 nt, Homo sapiens
  misc_RNA (1)...(19): siRNA sense strand
ggaagguacucaucuugaa

SEQ ID NO: 1466289 - RNA, 19 nt, Homo sapiens
  misc_RNA (1)...(19): siRNA sense strand
gaagaaggagccaaauuga

SEQ ID NO: 1466290 - RNA, 19 nt, Homo sapiens
  misc_RNA (1)...(19): siRNA sense strand
ggagucagcaucuaccuaa

SEQ ID NO: 1466291 - RNA, 19 nt, Homo sapiens
  misc_RNA (1)...(19): siRNA sense strand
ggaacuguaucccacaaug

SEQ ID NO: 1466292 - RNA, 19 nt, Homo sapiens
  misc_RNA (1)...(19): siRNA sense strand
ccacuagcuuugcauacua

SEQ ID NO: 1466293 - RNA, 19 nt, Homo sapiens
  misc_RNA (1)...(19): siRNA sense strand
caagagcaccagaaguaua

SEQ ID NO: 1466294 - RNA, 19 nt, Homo sapiens
  misc_RNA (1)...(19): siRNA sense strand
gaaggagccaaauugagua

SEQ ID NO: 1466295 - RNA, 19 nt, Homo sapiens
  misc_RNA (1)...(19): siRNA sense strand
caaauugaguauggaggua

SEQ ID NO: 1466296 - RNA, 19 nt, Homo sapiens
  misc_RNA (1)...(19): siRNA sense strand
ggaccugccugccaagcuu

SEQ ID NO: 1466297 - RNA, 19 nt, Homo sapiens
  misc_RNA (1)...(19): siRNA sense strand
gaacuguaucccacaauga

SEQ ID NO: 1466298 - RNA, 19 nt, Homo sapiens
  misc_RNA (1)...(19): siRNA sense strand
caucuaccaucgugacuga

SEQ ID NO: 1466299 - RNA, 19 nt, Homo sapiens
  misc_RNA (1)...(19): siRNA sense strand
aacaagagcaccagaagua

SEQ ID NO: 1466300 - RNA, 19 nt, Homo sapiens
  misc_RNA (1)...(19): siRNA sense strand
ggagccaaauugaguaugg

SEQ ID NO: 1466301 - RNA, 19 nt, Homo sapiens
  misc_RNA (1)...(19): siRNA sense strand
caacagcaccuucccaucu

SEQ ID NO: 1466302 - RNA, 19 nt, Homo sapiens
  misc_RNA (1)...(19): siRNA sense strand
gcaccuugauuggcuaugu

SEQ ID NO: 1466303 - RNA, 19 nt, Homo sapiens
  misc_RNA (1)...(19): siRNA sense strand
gggaagaaggagccaaauu

SEQ ID NO: 1466304 - RNA, 19 nt, Homo sapiens
  misc_RNA (1)...(19): siRNA sense strand
ucaacugcaucuuccugua

SEQ ID NO: 1466305 - RNA, 19 nt, Homo sapiens
  misc_RNA (1)...(19): siRNA sense strand
gggccagucugcagaagga

SEQ ID NO: 1466306 - RNA, 19 nt, Homo sapiens
  misc_RNA (1)...(19): siRNA sense strand
gaaacagacgcgacagcaa

SEQ ID NO: 1466307 - RNA, 19 nt, Homo sapiens
  misc_RNA (1)...(19): siRNA sense strand
acaacacccugcagaacuu

SEQ ID NO: 1466308 - RNA, 19 nt, Homo sapiens
  misc_RNA (1)...(19): siRNA sense strand
caacugcaucuuccuguau

SEQ ID NO: 1466309 - RNA, 19 nt, Homo sapiens
  misc_RNA (1)...(19): siRNA sense strand
gcaacaagagcaccagaag

SEQ ID NO: 1466310 - RNA, 19 nt, Homo sapiens
  misc_RNA (1)...(19): siRNA sense strand
ccugauggcuucucacaac

SEQ ID NO: 1466311 - RNA, 19 nt, Homo sapiens
  misc_RNA (1)...(19): siRNA sense strand
aacagcaccuucccaucua

SEQ ID NO: 1466312 - RNA, 19 nt, Homo sapiens
  misc_RNA (1)...(19): siRNA sense strand
agaaggagccaaauugagu

SEQ ID NO: 1466313 - RNA, 19 nt, Homo sapiens
  misc_RNA (1)...(19): siRNA sense strand
ucaacugcaugacacugaa

SEQ ID NO: 1466314 - RNA, 19 nt, Homo sapiens
  misc_RNA (1)...(19): siRNA sense strand
acuaugggcuggucaugga

SEQ ID NO: 1466315 - RNA, 19 nt, Homo sapiens
  misc_RNA (1)...(19): siRNA sense strand
uggaguggaugcccauuca

SEQ ID NO: 1466316 - RNA, 19 nt, Homo sapiens
  misc_RNA (1)...(19): siRNA sense strand
cuugugggcuuccuuguca

SEQ ID NO: 1466317 - RNA, 19 nt, Homo sapiens
  misc_RNA (1)...(19): siRNA sense strand
gagccaaauugaguaugga

SEQ ID NO: 1466318 - RNA, 19 nt, Homo sapiens
  misc_RNA (1)...(19): siRNA sense strand
gcaucucccucaacugcau

SEQ ID NO: 1466319 - RNA, 19 nt, Homo sapiens
  misc_RNA (1)...(19): siRNA sense strand
cugcagggcuuuggaguca

SEQ ID NO: 1466320 - RNA, 19 nt, Homo sapiens
  misc_RNA (1)...(19): siRNA sense strand
gccggaagguacucaucuu

SEQ ID NO: 1466321 - RNA, 19 nt, Homo sapiens
  misc_RNA (1)...(19): siRNA sense strand
caacaagagcaccagaagu

SEQ ID NO: 1466322 - RNA, 19 nt, Homo sapiens
  misc_RNA (1)...(19): siRNA sense strand
gaugccaaccucagcaaga

SEQ ID NO: 1466323 - RNA, 19 nt, Homo sapiens
  misc_RNA (1)...(19): siRNA sense strand
ugagggcccugcagagagu

SEQ ID NO: 1466324 - RNA, 19 nt, Homo sapiens
  misc_RNA (1)...(19): siRNA sense strand
aacugcaucuuccuguaua

SEQ ID NO: 1466325 - RNA, 19 nt, Homo sapiens
  misc_RNA (1)...(19): siRNA sense strand
gcuggcaucucccucaacu

SEQ ID NO: 1466326 - RNA, 19 nt, Homo sapiens
  misc_RNA (1)...(19): siRNA sense strand
aagagcaccagaaguauau

SEQ ID NO: 1466327 - RNA, 19 nt, Homo sapiens
  misc_RNA (1)...(19): siRNA sense strand
uaauccaggugaucuuugg

SEQ ID NO: 1466328 - RNA, 19 nt, Homo sapiens
  misc_RNA (1)...(19): siRNA sense strand
gcgggaagaaggagccaaa

SEQ ID NO: 1466329 - RNA, 19 nt, Homo sapiens
  misc_RNA (1)...(19): siRNA sense strand
gaagguacucaucuugaac

SEQ ID NO: 1466330 - RNA, 19 nt, Homo sapiens
  misc_RNA (1)...(19): siRNA sense strand
gccacuagcuuugcauacu

SEQ ID NO: 1466331 - RNA, 19 nt, Homo sapiens
  misc_RNA (1)...(19): siRNA sense strand
cggaagguacucaucuuga

SEQ ID NO: 1466332 - RNA, 19 nt, Homo sapiens
  misc_RNA (1)...(19): siRNA sense strand
gggacugcccuuucucaau

SEQ ID NO: 1466333 - RNA, 19 nt, Homo sapiens
  misc_RNA (1)...(19): siRNA sense strand
gcaccgauggcuggaucua

SEQ ID NO: 1466334 - RNA, 19 nt, Homo sapiens
  misc_RNA (1)...(19): siRNA sense strand
gcaucugcauccugcucaa

SEQ ID NO: 1466335 - RNA, 19 nt, Homo sapiens
  misc_RNA (1)...(19): siRNA sense strand
cacuagcuuugcauacuau

SEQ ID NO: 1466336 - RNA, 19 nt, Homo sapiens
  misc_RNA (1)...(19): siRNA sense strand
ccucagcacaagagaagaa

SEQ ID NO: 1466337 - RNA, 19 nt, Homo sapiens
  misc_RNA (1)...(19): siRNA sense strand
acuccugguucuucauuga

SEQ ID NO: 1466338 - RNA, 19 nt, Homo sapiens
  misc_RNA (1)...(19): siRNA sense strand
accgauggcuggaucuaug

SEQ ID NO: 1466339 - RNA, 19 nt, Homo sapiens
  misc_RNA (1)...(19): siRNA sense strand
gagucagcaucuaccuaau

SEQ ID NO: 1466340 - RNA, 19 nt, Homo sapiens
  misc_RNA (1)...(19): siRNA sense strand
gcacccaacuuccccaucu

SEQ ID NO: 1466341 - RNA, 19 nt, Homo sapiens
  misc_RNA (1)...(19): siRNA sense strand
gggcuuccuugucaucaac

SEQ ID NO: 1466342 - RNA, 19 nt, Homo sapiens
  misc_RNA (1)...(19): siRNA sense strand
gcuuuggagucagcaucua

SEQ ID NO: 1466343 - RNA, 19 nt, Homo sapiens
  misc_RNA (1)...(19): siRNA sense strand
gagcugaccaugggcaaag

SEQ ID NO: 1466344 - RNA, 19 nt, Homo sapiens
  misc_RNA (1)...(19): siRNA sense strand
caucuacuccugguucuuc

SEQ ID NO: 1466345 - RNA, 19 nt, Homo sapiens
  misc_RNA (1)...(19): siRNA sense strand
gaguggaugcccauucaca

SEQ ID NO: 1466346 - RNA, 19 nt, Homo sapiens
  misc_RNA (1)...(19): siRNA sense strand
cagcacaagagaagaaugg

SEQ ID NO: 1466347 - RNA, 19 nt, Homo sapiens
  misc_RNA (1)...(19): siRNA sense strand
ccuaauccaggugaucuuu

SEQ ID NO: 1466348 - RNA, 19 nt, Homo sapiens
  misc_RNA (1)...(19): siRNA sense strand
ggacugcccuuucucaaug

SEQ ID NO: 1466349 - RNA, 19 nt, Homo sapiens
  misc_RNA (1)...(19): siRNA sense strand
ggaagaaggagccaaauug

SEQ ID NO: 1466350 - RNA, 19 nt, Homo sapiens
  misc_RNA (1)...(19): siRNA sense strand
ggaagguacucaucuugaa

SEQ ID NO: 1466351 - RNA, 19 nt, Homo sapiens
  misc_RNA (1)...(19): siRNA sense strand
gaagaaggagccaaauuga

SEQ ID NO: 1466352 - RNA, 19 nt, Homo sapiens
  misc_RNA (1)...(19): siRNA sense strand
ggagucagcaucuaccuaa

SEQ ID NO: 1466353 - RNA, 19 nt, Homo sapiens
  misc_RNA (1)...(19): siRNA sense strand
ggaacuguaucccacaaug

SEQ ID NO: 1466354 - RNA, 19 nt, Homo sapiens
  misc_RNA (1)...(19): siRNA sense strand
ccacuagcuuugcauacua

SEQ ID NO: 1466355 - RNA, 19 nt, Homo sapiens
  misc_RNA (1)...(19): siRNA sense strand
caagagcaccagaaguaua

SEQ ID NO: 1466356 - RNA, 19 nt, Homo sapiens
  misc_RNA (1)...(19): siRNA sense strand
gaaggagccaaauugagua

SEQ ID NO: 1466357 - RNA, 19 nt, Homo sapiens
  misc_RNA (1)...(19): siRNA sense strand
caaauugaguauggaggua

SEQ ID NO: 1466358 - RNA, 19 nt, Homo sapiens
  misc_RNA (1)...(19): siRNA sense strand
ggaccugccugccaagcuu

SEQ ID NO: 1466359 - RNA, 19 nt, Homo sapiens
  misc_RNA (1)...(19): siRNA sense strand
gaacuguaucccacaauga

SEQ ID NO: 1466360 - RNA, 19 nt, Homo sapiens
  misc_RNA (1)...(19): siRNA sense strand
caucuaccaucgugacuga

SEQ ID NO: 1466361 - RNA, 19 nt, Homo sapiens
  misc_RNA (1)...(19): siRNA sense strand
aacaagagcaccagaagua

SEQ ID NO: 1466362 - RNA, 19 nt, Homo sapiens
  misc_RNA (1)...(19): siRNA sense strand
ggagccaaauugaguaugg

SEQ ID NO: 1466363 - RNA, 19 nt, Homo sapiens
  misc_RNA (1)...(19): siRNA sense strand
caacagcaccuucccaucu

SEQ ID NO: 1466364 - RNA, 19 nt, Homo sapiens
  misc_RNA (1)...(19): siRNA sense strand
gcaccuugauuggcuaugu

SEQ ID NO: 1466365 - RNA, 19 nt, Homo sapiens
  misc_RNA (1)...(19): siRNA sense strand
gggaagaaggagccaaauu

SEQ ID NO: 1466366 - RNA, 19 nt, Homo sapiens
  misc_RNA (1)...(19): siRNA sense strand
ucaacugcaucuuccugua

SEQ ID NO: 1466367 - RNA, 19 nt, Homo sapiens
  misc_RNA (1)...(19): siRNA sense strand
gggccagucugcagaagga

SEQ ID NO: 1466368 - RNA, 19 nt, Homo sapiens
  misc_RNA (1)...(19): siRNA sense strand
gaaacagacgcgacagcaa

SEQ ID NO: 1466369 - RNA, 19 nt, Homo sapiens
  misc_RNA (1)...(19): siRNA sense strand
acaacacccugcagaacuu

SEQ ID NO: 1466370 - RNA, 19 nt, Homo sapiens
  misc_RNA (1)...(19): siRNA sense strand
caacugcaucuuccuguau

SEQ ID NO: 1466371 - RNA, 19 nt, Homo sapiens
  misc_RNA (1)...(19): siRNA sense strand
gcaacaagagcaccagaag

SEQ ID NO: 1466372 - RNA, 19 nt, Homo sapiens
  misc_RNA (1)...(19): siRNA sense strand
ccugauggcuucucacaac

SEQ ID NO: 1466373 - RNA, 19 nt, Homo sapiens
  misc_RNA (1)...(19): siRNA sense strand
aacagcaccuucccaucua

SEQ ID NO: 1466374 - RNA, 19 nt, Homo sapiens
  misc_RNA (1)...(19): siRNA sense strand
agaaggagccaaauugagu

SEQ ID NO: 1466375 - RNA, 19 nt, Homo sapiens
  misc_RNA (1)...(19): siRNA sense strand
ucaacugcaugacacugaa

SEQ ID NO: 1466376 - RNA, 19 nt, Homo sapiens
  misc_RNA (1)...(19): siRNA sense strand
acuaugggcuggucaugga

SEQ ID NO: 1466377 - RNA, 19 nt, Homo sapiens
  misc_RNA (1)...(19): siRNA sense strand
uggaguggaugcccauuca

SEQ ID NO: 1466378 - RNA, 19 nt, Homo sapiens
  misc_RNA (1)...(19): siRNA sense strand
cuugugggcuuccuuguca

SEQ ID NO: 1466379 - RNA, 19 nt, Homo sapiens
  misc_RNA (1)...(19): siRNA sense strand
gagccaaauugaguaugga

SEQ ID NO: 1466380 - RNA, 19 nt, Homo sapiens
  misc_RNA (1)...(19): siRNA sense strand
gcaucucccucaacugcau

SEQ ID NO: 1466381 - RNA, 19 nt, Homo sapiens
  misc_RNA (1)...(19): siRNA sense strand
cugcagggcuuuggaguca

SEQ ID NO: 1466382 - RNA, 19 nt, Homo sapiens
  misc_RNA (1)...(19): siRNA sense strand
gccggaagguacucaucuu

SEQ ID NO: 1466383 - RNA, 19 nt, Homo sapiens
  misc_RNA (1)...(19): siRNA sense strand
caacaagagcaccagaagu

SEQ ID NO: 1466384 - RNA, 19 nt, Homo sapiens
  misc_RNA (1)...(19): siRNA sense strand
gaugccaaccucagcaaga

SEQ ID NO: 1466385 - RNA, 19 nt, Homo sapiens
  misc_RNA (1)...(19): siRNA sense strand
ugagggcccugcagagagu

SEQ ID NO: 1466386 - RNA, 19 nt, Homo sapiens
  misc_RNA (1)...(19): siRNA sense strand
aacugcaucuuccuguaua

SEQ ID NO: 1466387 - RNA, 19 nt, Homo sapiens
  misc_RNA (1)...(19): siRNA sense strand
gcuggcaucucccucaacu

SEQ ID NO: 1466388 - RNA, 19 nt, Homo sapiens
  misc_RNA (1)...(19): siRNA sense strand
aagagcaccagaaguauau

SEQ ID NO: 1466389 - RNA, 19 nt, Homo sapiens
  misc_RNA (1)...(19): siRNA sense strand
uaauccaggugaucuuugg

SEQ ID NO: 1466390 - RNA, 19 nt, Homo sapiens
  misc_RNA (1)...(19): siRNA sense strand
gcgggaagaaggagccaaa

SEQ ID NO: 1466391 - RNA, 19 nt, Homo sapiens
  misc_RNA (1)...(19): siRNA sense strand
gaagguacucaucuugaac

SEQ ID NO: 1466392 - RNA, 19 nt, Homo sapiens
  misc_RNA (1)...(19): siRNA sense strand
gccacuagcuuugcauacu

SEQ ID NO: 1466393 - RNA, 19 nt, Homo sapiens
  misc_RNA (1)...(19): siRNA sense strand
cggaagguacucaucuuga

SEQ ID NO: 1466394 - RNA, 19 nt, Homo sapiens
  misc_RNA (1)...(19): siRNA sense strand
gggacugcccuuucucaau

SEQ ID NO: 1466395 - RNA, 19 nt, Homo sapiens
  misc_RNA (1)...(19): siRNA sense strand
gcaccgauggcuggaucua

SEQ ID NO: 1466396 - RNA, 19 nt, Homo sapiens
  misc_RNA (1)...(19): siRNA sense strand
gcaucugcauccugcucaa

SEQ ID NO: 1466397 - RNA, 19 nt, Homo sapiens
  misc_RNA (1)...(19): siRNA sense strand
cacuagcuuugcauacuau

SEQ ID NO: 1466398 - RNA, 19 nt, Homo sapiens
  misc_RNA (1)...(19): siRNA sense strand
ccucagcacaagagaagaa

SEQ ID NO: 1466399 - RNA, 19 nt, Homo sapiens
  misc_RNA (1)...(19): siRNA sense strand
acuccugguucuucauuga

SEQ ID NO: 1466400 - RNA, 19 nt, Homo sapiens
  misc_RNA (1)...(19): siRNA sense strand
accgauggcuggaucuaug

SEQ ID NO: 1466401 - RNA, 19 nt, Homo sapiens
  misc_RNA (1)...(19): siRNA sense strand
gagucagcaucuaccuaau

SEQ ID NO: 1466402 - RNA, 19 nt, Homo sapiens
  misc_RNA (1)...(19): siRNA sense strand
gcacccaacuuccccaucu

SEQ ID NO: 1466403 - RNA, 19 nt, Homo sapiens
  misc_RNA (1)...(19): siRNA sense strand
gggcuuccuugucaucaac

SEQ ID NO: 1466404 - RNA, 19 nt, Homo sapiens
  misc_RNA (1)...(19): siRNA sense strand
gcuuuggagucagcaucua

SEQ ID NO: 1466405 - RNA, 19 nt, Homo sapiens
  misc_RNA (1)...(19): siRNA sense strand
gagcugaccaugggcaaag

SEQ ID NO: 1466406 - RNA, 19 nt, Homo sapiens
  misc_RNA (1)...(19): siRNA sense strand
caucuacuccugguucuuc

SEQ ID NO: 1466407 - RNA, 19 nt, Homo sapiens
  misc_RNA (1)...(19): siRNA sense strand
gaguggaugcccauucaca

SEQ ID NO: 1466408 - RNA, 19 nt, Homo sapiens
  misc_RNA (1)...(19): siRNA sense strand
cagcacaagagaagaaugg

SEQ ID NO: 1466409 - RNA, 19 nt, Homo sapiens
  misc_RNA (1)...(19): siRNA sense strand
ccuaauccaggugaucuuu

SEQ ID NO: 1466410 - RNA, 19 nt, Homo sapiens
  misc_RNA (1)...(19): siRNA sense strand
ggacugcccuuucucaaug

SEQ ID NO: 1466411 - RNA, 19 nt, Homo sapiens
  misc_RNA (1)...(19): siRNA sense strand
ggaagaaggagccaaauug

SEQ ID NO: 1466412 - RNA, 19 nt, Homo sapiens
  misc_RNA (1)...(19): siRNA sense strand
ggaagguacucaucuugaa

SEQ ID NO: 1466413 - RNA, 19 nt, Homo sapiens
  misc_RNA (1)...(19): siRNA sense strand
gaagaaggagccaaauuga

SEQ ID NO: 1466414 - RNA, 19 nt, Homo sapiens
  misc_RNA (1)...(19): siRNA sense strand
ggagucagcaucuaccuaa

SEQ ID NO: 1466415 - RNA, 19 nt, Homo sapiens
  misc_RNA (1)...(19): siRNA sense strand
ggaacuguaucccacaaug

SEQ ID NO: 1466416 - RNA, 19 nt, Homo sapiens
  misc_RNA (1)...(19): siRNA sense strand
ccacuagcuuugcauacua

SEQ ID NO: 1466417 - RNA, 19 nt, Homo sapiens
  misc_RNA (1)...(19): siRNA sense strand
caagagcaccagaaguaua

SEQ ID NO: 1466418 - RNA, 19 nt, Homo sapiens
  misc_RNA (1)...(19): siRNA sense strand
gaaggagccaaauugagua

SEQ ID NO: 1466419 - RNA, 19 nt, Homo sapiens
  misc_RNA (1)...(19): siRNA sense strand
caaauugaguauggaggua

SEQ ID NO: 1466420 - RNA, 19 nt, Homo sapiens
  misc_RNA (1)...(19): siRNA sense strand
ggaccugccugccaagcuu

SEQ ID NO: 1466421 - RNA, 19 nt, Homo sapiens
  misc_RNA (1)...(19): siRNA sense strand
gaacuguaucccacaauga

SEQ ID NO: 1466422 - RNA, 19 nt, Homo sapiens
  misc_RNA (1)...(19): siRNA sense strand
caucuaccaucgugacuga

SEQ ID NO: 1466423 - RNA, 19 nt, Homo sapiens
  misc_RNA (1)...(19): siRNA sense strand
aacaagagcaccagaagua

SEQ ID NO: 1466424 - RNA, 19 nt, Homo sapiens
  misc_RNA (1)...(19): siRNA sense strand
ggagccaaauugaguaugg

SEQ ID NO: 1466425 - RNA, 19 nt, Homo sapiens
  misc_RNA (1)...(19): siRNA sense strand
caacagcaccuucccaucu

SEQ ID NO: 1466426 - RNA, 19 nt, Homo sapiens
  misc_RNA (1)...(19): siRNA sense strand
gcaccuugauuggcuaugu

SEQ ID NO: 1466427 - RNA, 19 nt, Homo sapiens
  misc_RNA (1)...(19): siRNA sense strand
gggaagaaggagccaaauu

SEQ ID NO: 1466428 - RNA, 19 nt, Homo sapiens
  misc_RNA (1)...(19): siRNA sense strand
ucaacugcaucuuccugua

SEQ ID NO: 1466429 - RNA, 19 nt, Homo sapiens
  misc_RNA (1)...(19): siRNA sense strand
gggccagucugcagaagga

SEQ ID NO: 1466430 - RNA, 19 nt, Homo sapiens
  misc_RNA (1)...(19): siRNA sense strand
gaaacagacgcgacagcaa

SEQ ID NO: 1466431 - RNA, 19 nt, Homo sapiens
  misc_RNA (1)...(19): siRNA sense strand
acaacacccugcagaacuu

SEQ ID NO: 1466432 - RNA, 19 nt, Homo sapiens
  misc_RNA (1)...(19): siRNA sense strand
caacugcaucuuccuguau

SEQ ID NO: 1466433 - RNA, 19 nt, Homo sapiens
  misc_RNA (1)...(19): siRNA sense strand
gcaacaagagcaccagaag

SEQ ID NO: 1466434 - RNA, 19 nt, Homo sapiens
  misc_RNA (1)...(19): siRNA sense strand
ccugauggcuucucacaac

SEQ ID NO: 1466435 - RNA, 19 nt, Homo sapiens
  misc_RNA (1)...(19): siRNA sense strand
aacagcaccuucccaucua

SEQ ID NO: 1466436 - RNA, 19 nt, Homo sapiens
  misc_RNA (1)...(19): siRNA sense strand
agaaggagccaaauugagu

SEQ ID NO: 1466437 - RNA, 19 nt, Homo sapiens
  misc_RNA (1)...(19): siRNA sense strand
ucaacugcaugacacugaa

SEQ ID NO: 1466438 - RNA, 19 nt, Homo sapiens
  misc_RNA (1)...(19): siRNA sense strand
acuaugggcuggucaugga

SEQ ID NO: 1466439 - RNA, 19 nt, Homo sapiens
  misc_RNA (1)...(19): siRNA sense strand
uggaguggaugcccauuca

SEQ ID NO: 1466440 - RNA, 19 nt, Homo sapiens
  misc_RNA (1)...(19): siRNA sense strand
cuugugggcuuccuuguca

SEQ ID NO: 1466441 - RNA, 19 nt, Homo sapiens
  misc_RNA (1)...(19): siRNA sense strand
gagccaaauugaguaugga

SEQ ID NO: 1466442 - RNA, 19 nt, Homo sapiens
  misc_RNA (1)...(19): siRNA sense strand
gcaucucccucaacugcau

SEQ ID NO: 1466443 - RNA, 19 nt, Homo sapiens
  misc_RNA (1)...(19): siRNA sense strand
cugcagggcuuuggaguca

SEQ ID NO: 1466444 - RNA, 19 nt, Homo sapiens
  misc_RNA (1)...(19): siRNA sense strand
gccggaagguacucaucuu

SEQ ID NO: 1466445 - RNA, 19 nt, Homo sapiens
  misc_RNA (1)...(19): siRNA sense strand
caacaagagcaccagaagu

SEQ ID NO: 1466446 - RNA, 19 nt, Homo sapiens
  misc_RNA (1)...(19): siRNA sense strand
gaugccaaccucagcaaga

SEQ ID NO: 1466447 - RNA, 19 nt, Homo sapiens
  misc_RNA (1)...(19): siRNA sense strand
ugagggcccugcagagagu

SEQ ID NO: 1466448 - RNA, 19 nt, Homo sapiens
  misc_RNA (1)...(19): siRNA sense strand
aacugcaucuuccuguaua

SEQ ID NO: 1466449 - RNA, 19 nt, Homo sapiens
  misc_RNA (1)...(19): siRNA sense strand
gcuggcaucucccucaacu

SEQ ID NO: 1466450 - RNA, 19 nt, Homo sapiens
  misc_RNA (1)...(19): siRNA sense strand
aagagcaccagaaguauau

SEQ ID NO: 1466451 - RNA, 19 nt, Homo sapiens
  misc_RNA (1)...(19): siRNA sense strand
uaauccaggugaucuuugg

SEQ ID NO: 1466452 - RNA, 19 nt, Homo sapiens
  misc_RNA (1)...(19): siRNA sense strand
gcgggaagaaggagccaaa

SEQ ID NO: 1466453 - RNA, 19 nt, Homo sapiens
  misc_RNA (1)...(19): siRNA sense strand
gaagguacucaucuugaac

SEQ ID NO: 1466454 - RNA, 19 nt, Homo sapiens
  misc_RNA (1)...(19): siRNA sense strand
gccacuagcuuugcauacu

SEQ ID NO: 1466455 - RNA, 19 nt, Homo sapiens
  misc_RNA (1)...(19): siRNA sense strand
cggaagguacucaucuuga

SEQ ID NO: 1466456 - RNA, 19 nt, Homo sapiens
  misc_RNA (1)...(19): siRNA sense strand
gggacugcccuuucucaau

SEQ ID NO: 1466457 - RNA, 19 nt, Homo sapiens
  misc_RNA (1)...(19): siRNA sense strand
gcaccgauggcuggaucua

SEQ ID NO: 1466458 - RNA, 19 nt, Homo sapiens
  misc_RNA (1)...(19): siRNA sense strand
gcaucugcauccugcucaa

SEQ ID NO: 1466459 - RNA, 19 nt, Homo sapiens
  misc_RNA (1)...(19): siRNA sense strand
cacuagcuuugcauacuau

SEQ ID NO: 1466460 - RNA, 19 nt, Homo sapiens
  misc_RNA (1)...(19): siRNA sense strand
ccucagcacaagagaagaa

SEQ ID NO: 1466461 - RNA, 19 nt, Homo sapiens
  misc_RNA (1)...(19): siRNA sense strand
acuccugguucuucauuga

SEQ ID NO: 1466462 - RNA, 19 nt, Homo sapiens
  misc_RNA (1)...(19): siRNA sense strand
accgauggcuggaucuaug

SEQ ID NO: 1466463 - RNA, 19 nt, Homo sapiens
  misc_RNA (1)...(19): siRNA sense strand
gagucagcaucuaccuaau

SEQ ID NO: 1466464 - RNA, 19 nt, Homo sapiens
  misc_RNA (1)...(19): siRNA sense strand
gcacccaacuuccccaucu

SEQ ID NO: 1466465 - RNA, 19 nt, Homo sapiens
  misc_RNA (1)...(19): siRNA sense strand
gggcuuccuugucaucaac

SEQ ID NO: 1466466 - RNA, 19 nt, Homo sapiens
  misc_RNA (1)...(19): siRNA sense strand
gcuuuggagucagcaucua

SEQ ID NO: 1466467 - RNA, 19 nt, Homo sapiens
  misc_RNA (1)...(19): siRNA sense strand
gagcugaccaugggcaaag

SEQ ID NO: 1466468 - RNA, 19 nt, Homo sapiens
  misc_RNA (1)...(19): siRNA sense strand
caucuacuccugguucuuc

SEQ ID NO: 1466469 - RNA, 19 nt, Homo sapiens
  misc_RNA (1)...(19): siRNA sense strand
gaguggaugcccauucaca

SEQ ID NO: 1466470 - RNA, 19 nt, Homo sapiens
  misc_RNA (1)...(19): siRNA sense strand
cagcacaagagaagaaugg

SEQ ID NO: 1466471 - RNA, 19 nt, Homo sapiens
  misc_RNA (1)...(19): siRNA sense strand
ccuaauccaggugaucuuu

SEQ ID NO: 1466472 - RNA, 19 nt, Homo sapiens
  misc_RNA (1)...(19): siRNA sense strand
ugagaucgcugucauguua

SEQ ID NO: 1466473 - RNA, 19 nt, Homo sapiens
  misc_RNA (1)...(19): siRNA sense strand
gagcaaguauuuacauuga

SEQ ID NO: 1466474 - RNA, 19 nt, Homo sapiens
  misc_RNA (1)...(19): siRNA sense strand
gcaaguauuuacauugaga

SEQ ID NO: 1466475 - RNA, 19 nt, Homo sapiens
  misc_RNA (1)...(19): siRNA sense strand
gcgggaagcuggaagaguu

SEQ ID NO: 1466476 - RNA, 19 nt, Homo sapiens
  misc_RNA (1)...(19): siRNA sense strand
ggacauacagaaauuguug

SEQ ID NO: 1466477 - RNA, 19 nt, Homo sapiens
  misc_RNA (1)...(19): siRNA sense strand
agagaaugguggaagguua

SEQ ID NO: 1466478 - RNA, 19 nt, Homo sapiens
  misc_RNA (1)...(19): siRNA sense strand
gcagguuggucuccucuuc

SEQ ID NO: 1466479 - RNA, 19 nt, Homo sapiens
  misc_RNA (1)...(19): siRNA sense strand
ggagugccagugaaugaua

SEQ ID NO: 1466480 - RNA, 19 nt, Homo sapiens
  misc_RNA (1)...(19): siRNA sense strand
gggcuaauccagaugcuaa

SEQ ID NO: 1466481 - RNA, 19 nt, Homo sapiens
  misc_RNA (1)...(19): siRNA sense strand
gagaaugguggaagguuaa

SEQ ID NO: 1466482 - RNA, 19 nt, Homo sapiens
  misc_RNA (1)...(19): siRNA sense strand
agaguauucuggccgauaa

SEQ ID NO: 1466483 - RNA, 19 nt, Homo sapiens
  misc_RNA (1)...(19): siRNA sense strand
ucaagugaaugcugucaau

SEQ ID NO: 1466484 - RNA, 19 nt, Homo sapiens
  misc_RNA (1)...(19): siRNA sense strand
caacuuggagugccaguga

SEQ ID NO: 1466485 - RNA, 19 nt, Homo sapiens
  misc_RNA (1)...(19): siRNA sense strand
auaaaucccuggcuacuag

SEQ ID NO: 1466486 - RNA, 19 nt, Homo sapiens
  misc_RNA (1)...(19): siRNA sense strand
gagugccagugaaugauaa

SEQ ID NO: 1466487 - RNA, 19 nt, Homo sapiens
  misc_RNA (1)...(19): siRNA sense strand
uaaaagcccuucugggaaa

SEQ ID NO: 1466488 - RNA, 19 nt, Homo sapiens
  misc_RNA (1)...(19): siRNA sense strand
gauaaaucccuggcuacua

SEQ ID NO: 1466489 - RNA, 19 nt, Homo sapiens
  misc_RNA (1)...(19): siRNA sense strand
ggagcaaguauuuacauug

SEQ ID NO: 1466490 - RNA, 19 nt, Homo sapiens
  misc_RNA (1)...(19): siRNA sense strand
gggaaaaggugcucaagug

SEQ ID NO: 1466491 - RNA, 19 nt, Homo sapiens
  misc_RNA (1)...(19): siRNA sense strand
cagaugcuaaggaccauua

SEQ ID NO: 1466492 - RNA, 19 nt, Homo sapiens
  misc_RNA (1)...(19): siRNA sense strand
aaauggcuguacucccuua

SEQ ID NO: 1466493 - RNA, 19 nt, Homo sapiens
  misc_RNA (1)...(19): siRNA sense strand
gggugugugucuaaccuaa

SEQ ID NO: 1466494 - RNA, 19 nt, Homo sapiens
  misc_RNA (1)...(19): siRNA sense strand
aaagguggccuggguuuaa

SEQ ID NO: 1466495 - RNA, 19 nt, Homo sapiens
  misc_RNA (1)...(19): siRNA sense strand
ggagagaguggaagaagca

SEQ ID NO: 1466496 - RNA, 19 nt, Homo sapiens
  misc_RNA (1)...(19): siRNA sense strand
caaagguggccuggguuua

SEQ ID NO: 1466497 - RNA, 19 nt, Homo sapiens
  misc_RNA (1)...(19): siRNA sense strand
ggccuggguuuaauacuca

SEQ ID NO: 1466498 - RNA, 19 nt, Homo sapiens
  misc_RNA (1)...(19): siRNA sense strand
gagaguauucuggccgaua

SEQ ID NO: 1466499 - RNA, 19 nt, Homo sapiens
  misc_RNA (1)...(19): siRNA sense strand
ccaaggagcaaguauuuac

SEQ ID NO: 1466500 - RNA, 19 nt, Homo sapiens
  misc_RNA (1)...(19): siRNA sense strand
ccaaagguggccuggguuu

SEQ ID NO: 1466501 - RNA, 19 nt, Homo sapiens
  misc_RNA (1)...(19): siRNA sense strand
ggucuccucuucauauugc

SEQ ID NO: 1466502 - RNA, 19 nt, Homo sapiens
  misc_RNA (1)...(19): siRNA sense strand
acacuuagccugugaugag

SEQ ID NO: 1466503 - RNA, 19 nt, Homo sapiens
  misc_RNA (1)...(19): siRNA sense strand
gguuuaauacucaagagaa

SEQ ID NO: 1466504 - RNA, 19 nt, Homo sapiens
  misc_RNA (1)...(19): siRNA sense strand
gaaaaggugcucaagugaa

SEQ ID NO: 1466505 - RNA, 19 nt, Homo sapiens
  misc_RNA (1)...(19): siRNA sense strand
ugaaugcugucaaucaaaa

SEQ ID NO: 1466506 - RNA, 19 nt, Homo sapiens
  misc_RNA (1)...(19): siRNA sense strand
gugugugucuaaccuaaug

SEQ ID NO: 1466507 - RNA, 19 nt, Homo sapiens
  misc_RNA (1)...(19): siRNA sense strand
uuaugaggcuacagcaaug

SEQ ID NO: 1466508 - RNA, 19 nt, Homo sapiens
  misc_RNA (1)...(19): siRNA sense strand
ucccaaggagcaaguauuu

SEQ ID NO: 1466509 - RNA, 19 nt, Homo sapiens
  misc_RNA (1)...(19): siRNA sense strand
gauaaagacgaugcagguu

SEQ ID NO: 1466510 - RNA, 19 nt, Homo sapiens
  misc_RNA (1)...(19): siRNA sense strand
agugaaugcugucaaucaa

SEQ ID NO: 1466511 - RNA, 19 nt, Homo sapiens
  misc_RNA (1)...(19): siRNA sense strand
guuggucuccucuucauau

SEQ ID NO: 1466512 - RNA, 19 nt, Homo sapiens
  misc_RNA (1)...(19): siRNA sense strand
aaaaggugcucaagugaau

SEQ ID NO: 1466513 - RNA, 19 nt, Homo sapiens
  misc_RNA (1)...(19): siRNA sense strand
ggaaaaggugcucaaguga

SEQ ID NO: 1466514 - RNA, 19 nt, Homo sapiens
  misc_RNA (1)...(19): siRNA sense strand
aggagcaaguauuuacauu

SEQ ID NO: 1466515 - RNA, 19 nt, Homo sapiens
  misc_RNA (1)...(19): siRNA sense strand
gaccaggacagcagaacug

SEQ ID NO: 1466516 - RNA, 19 nt, Homo sapiens
  misc_RNA (1)...(19): siRNA sense strand
gaagaguugaaggagagua

SEQ ID NO: 1466517 - RNA, 19 nt, Homo sapiens
  misc_RNA (1)...(19): siRNA sense strand
gccagugaaugauaaagac

SEQ ID NO: 1466518 - RNA, 19 nt, Homo sapiens
  misc_RNA (1)...(19): siRNA sense strand
cagcuggacauacagaaau

SEQ ID NO: 1466519 - RNA, 19 nt, Homo sapiens
  misc_RNA (1)...(19): siRNA sense strand
gggaugagauuguaaaagc

SEQ ID NO: 1466520 - RNA, 19 nt, Homo sapiens
  misc_RNA (1)...(19): siRNA sense strand
gugaaugcugucaaucaaa

SEQ ID NO: 1466521 - RNA, 19 nt, Homo sapiens
  misc_RNA (1)...(19): siRNA sense strand
gaggagagaguggaagaag

SEQ ID NO: 1466522 - RNA, 19 nt, Homo sapiens
  misc_RNA (1)...(19): siRNA sense strand
augcuaaggaccauuauga

SEQ ID NO: 1466523 - RNA, 19 nt, Homo sapiens
  misc_RNA (1)...(19): siRNA sense strand
gaguugaaggagaguauuc

SEQ ID NO: 1466524 - RNA, 19 nt, Homo sapiens
  misc_RNA (1)...(19): siRNA sense strand
augcucagcuggacauaca

SEQ ID NO: 1466525 - RNA, 19 nt, Homo sapiens
  misc_RNA (1)...(19): siRNA sense strand
caaggagcaaguauuuaca

SEQ ID NO: 1466526 - RNA, 19 nt, Homo sapiens
  misc_RNA (1)...(19): siRNA sense strand
guacucccuuacauuaugc

SEQ ID NO: 1466527 - RNA, 19 nt, Homo sapiens
  misc_RNA (1)...(19): siRNA sense strand
gacauacagaaauuguuga

SEQ ID NO: 1466528 - RNA, 19 nt, Homo sapiens
  misc_RNA (1)...(19): siRNA sense strand
gagaguggaagaagcaaaa

SEQ ID NO: 1466529 - RNA, 19 nt, Homo sapiens
  misc_RNA (1)...(19): siRNA sense strand
gcucagcuggacauacaga

SEQ ID NO: 1466530 - RNA, 19 nt, Homo sapiens
  misc_RNA (1)...(19): siRNA sense strand
ucagcuggacauacagaaa

SEQ ID NO: 1466531 - RNA, 19 nt, Homo sapiens
  misc_RNA (1)...(19): siRNA sense strand
ggaagcuggaagaguugaa

SEQ ID NO: 1466532 - RNA, 19 nt, Homo sapiens
  misc_RNA (1)...(19): siRNA sense strand
ggaccauuaugaggcuaca

SEQ ID NO: 1466533 - RNA, 19 nt, Homo sapiens
  misc_RNA (1)...(19): siRNA sense strand
ugagaucgcugucauguua

SEQ ID NO: 1466534 - RNA, 19 nt, Homo sapiens
  misc_RNA (1)...(19): siRNA sense strand
gcgggaagcuggaagaguu

SEQ ID NO: 1466535 - RNA, 19 nt, Homo sapiens
  misc_RNA (1)...(19): siRNA sense strand
ggacauacagaaauuguug

SEQ ID NO: 1466536 - RNA, 19 nt, Homo sapiens
  misc_RNA (1)...(19): siRNA sense strand
gcagguuggucuccucuuc

SEQ ID NO: 1466537 - RNA, 19 nt, Homo sapiens
  misc_RNA (1)...(19): siRNA sense strand
ggagugccagugaaugaua

SEQ ID NO: 1466538 - RNA, 19 nt, Homo sapiens
  misc_RNA (1)...(19): siRNA sense strand
gggcuaauccagaugcuaa

SEQ ID NO: 1466539 - RNA, 19 nt, Homo sapiens
  misc_RNA (1)...(19): siRNA sense strand
agaguauucuggccgauaa

SEQ ID NO: 1466540 - RNA, 19 nt, Homo sapiens
  misc_RNA (1)...(19): siRNA sense strand
ucaagugaaugcugucaau

SEQ ID NO: 1466541 - RNA, 19 nt, Homo sapiens
  misc_RNA (1)...(19): siRNA sense strand
caacuuggagugccaguga

SEQ ID NO: 1466542 - RNA, 19 nt, Homo sapiens
  misc_RNA (1)...(19): siRNA sense strand
auaaaucccuggcuacuag

SEQ ID NO: 1466543 - RNA, 19 nt, Homo sapiens
  misc_RNA (1)...(19): siRNA sense strand
gagugccagugaaugauaa

SEQ ID NO: 1466544 - RNA, 19 nt, Homo sapiens
  misc_RNA (1)...(19): siRNA sense strand
uaaaagcccuucugggaaa

SEQ ID NO: 1466545 - RNA, 19 nt, Homo sapiens
  misc_RNA (1)...(19): siRNA sense strand
gauaaaucccuggcuacua

SEQ ID NO: 1466546 - RNA, 19 nt, Homo sapiens
  misc_RNA (1)...(19): siRNA sense strand
gggaaaaggugcucaagug

SEQ ID NO: 1466547 - RNA, 19 nt, Homo sapiens
  misc_RNA (1)...(19): siRNA sense strand
cagaugcuaaggaccauua

SEQ ID NO: 1466548 - RNA, 19 nt, Homo sapiens
  misc_RNA (1)...(19): siRNA sense strand
aaauggcuguacucccuua

SEQ ID NO: 1466549 - RNA, 19 nt, Homo sapiens
  misc_RNA (1)...(19): siRNA sense strand
gggugugugucuaaccuaa

SEQ ID NO: 1466550 - RNA, 19 nt, Homo sapiens
  misc_RNA (1)...(19): siRNA sense strand
gagaguauucuggccgaua

SEQ ID NO: 1466551 - RNA, 19 nt, Homo sapiens
  misc_RNA (1)...(19): siRNA sense strand
ggucuccucuucauauugc

SEQ ID NO: 1466552 - RNA, 19 nt, Homo sapiens
  misc_RNA (1)...(19): siRNA sense strand
gaaaaggugcucaagugaa

SEQ ID NO: 1466553 - RNA, 19 nt, Homo sapiens
  misc_RNA (1)...(19): siRNA sense strand
ugaaugcugucaaucaaaa

SEQ ID NO: 1466554 - RNA, 19 nt, Homo sapiens
  misc_RNA (1)...(19): siRNA sense strand
gugugugucuaaccuaaug

SEQ ID NO: 1466555 - RNA, 19 nt, Homo sapiens
  misc_RNA (1)...(19): siRNA sense strand
uuaugaggcuacagcaaug

SEQ ID NO: 1466556 - RNA, 19 nt, Homo sapiens
  misc_RNA (1)...(19): siRNA sense strand
gauaaagacgaugcagguu

SEQ ID NO: 1466557 - RNA, 19 nt, Homo sapiens
  misc_RNA (1)...(19): siRNA sense strand
agugaaugcugucaaucaa

SEQ ID NO: 1466558 - RNA, 19 nt, Homo sapiens
  misc_RNA (1)...(19): siRNA sense strand
guuggucuccucuucauau

SEQ ID NO: 1466559 - RNA, 19 nt, Homo sapiens
  misc_RNA (1)...(19): siRNA sense strand
aaaaggugcucaagugaau

SEQ ID NO: 1466560 - RNA, 19 nt, Homo sapiens
  misc_RNA (1)...(19): siRNA sense strand
ggaaaaggugcucaaguga

SEQ ID NO: 1466561 - RNA, 19 nt, Homo sapiens
  misc_RNA (1)...(19): siRNA sense strand
gaccaggacagcagaacug

SEQ ID NO: 1466562 - RNA, 19 nt, Homo sapiens
  misc_RNA (1)...(19): siRNA sense strand
gaagaguugaaggagagua

SEQ ID NO: 1466563 - RNA, 19 nt, Homo sapiens
  misc_RNA (1)...(19): siRNA sense strand
gccagugaaugauaaagac

SEQ ID NO: 1466564 - RNA, 19 nt, Homo sapiens
  misc_RNA (1)...(19): siRNA sense strand
cagcuggacauacagaaau

SEQ ID NO: 1466565 - RNA, 19 nt, Homo sapiens
  misc_RNA (1)...(19): siRNA sense strand
gggaugagauuguaaaagc

SEQ ID NO: 1466566 - RNA, 19 nt, Homo sapiens
  misc_RNA (1)...(19): siRNA sense strand
gugaaugcugucaaucaaa

SEQ ID NO: 1466567 - RNA, 19 nt, Homo sapiens
  misc_RNA (1)...(19): siRNA sense strand
augcucagcuggacauaca

SEQ ID NO: 1466568 - RNA, 19 nt, Homo sapiens
  misc_RNA (1)...(19): siRNA sense strand
augcuaaggaccauuauga

SEQ ID NO: 1466569 - RNA, 19 nt, Homo sapiens
  misc_RNA (1)...(19): siRNA sense strand
gaguugaaggagaguauuc

SEQ ID NO: 1466570 - RNA, 19 nt, Homo sapiens
  misc_RNA (1)...(19): siRNA sense strand
guacucccuuacauuaugc

SEQ ID NO: 1466571 - RNA, 19 nt, Homo sapiens
  misc_RNA (1)...(19): siRNA sense strand
gacauacagaaauuguuga

SEQ ID NO: 1466572 - RNA, 19 nt, Homo sapiens
  misc_RNA (1)...(19): siRNA sense strand
gcucagcuggacauacaga

SEQ ID NO: 1466573 - RNA, 19 nt, Homo sapiens
  misc_RNA (1)...(19): siRNA sense strand
ucagcuggacauacagaaa

SEQ ID NO: 1466574 - RNA, 19 nt, Homo sapiens
  misc_RNA (1)...(19): siRNA sense strand
ggaagcuggaagaguugaa

SEQ ID NO: 1466575 - RNA, 19 nt, Homo sapiens
  misc_RNA (1)...(19): siRNA sense strand
ggaccauuaugaggcuaca

SEQ ID NO: 1466576 - RNA, 19 nt, Homo sapiens
  misc_RNA (1)...(19): siRNA sense strand
gagaauaacucacuaaauc

SEQ ID NO: 1466577 - RNA, 19 nt, Homo sapiens
  misc_RNA (1)...(19): siRNA sense strand
gaagaucgaugaguucuga

SEQ ID NO: 1466578 - RNA, 19 nt, Homo sapiens
  misc_RNA (1)...(19): siRNA sense strand
gaagugaugguucgcauua

SEQ ID NO: 1466579 - RNA, 19 nt, Homo sapiens
  misc_RNA (1)...(19): siRNA sense strand
gaaacuucgugaauacuuu

SEQ ID NO: 1466580 - RNA, 19 nt, Homo sapiens
  misc_RNA (1)...(19): siRNA sense strand
gaaagugccuacagauaca

SEQ ID NO: 1466581 - RNA, 19 nt, Homo sapiens
  misc_RNA (1)...(19): siRNA sense strand
gcaucuauauugccucuuu

SEQ ID NO: 1466582 - RNA, 19 nt, Homo sapiens
  misc_RNA (1)...(19): siRNA sense strand
gaaauuuauugacgacaga

SEQ ID NO: 1466583 - RNA, 19 nt, Homo sapiens
  misc_RNA (1)...(19): siRNA sense strand
gacaagcgauugcguuuca

SEQ ID NO: 1466584 - RNA, 19 nt, Homo sapiens
  misc_RNA (1)...(19): siRNA sense strand
uaaaguacuugcagaggaa

SEQ ID NO: 1466585 - RNA, 19 nt, Homo sapiens
  misc_RNA (1)...(19): siRNA sense strand
guucauggaugcauuaaca

SEQ ID NO: 1466586 - RNA, 19 nt, Homo sapiens
  misc_RNA (1)...(19): siRNA sense strand
gcaauccaguugugcuuga

SEQ ID NO: 1466587 - RNA, 19 nt, Homo sapiens
  misc_RNA (1)...(19): siRNA sense strand
acaaaguccucagagaaua

SEQ ID NO: 1466588 - RNA, 19 nt, Homo sapiens
  misc_RNA (1)...(19): siRNA sense strand
uaagaagcccauuauugua

SEQ ID NO: 1466589 - RNA, 19 nt, Homo sapiens
  misc_RNA (1)...(19): siRNA sense strand
agaggaagaucgaugaguu

SEQ ID NO: 1466590 - RNA, 19 nt, Homo sapiens
  misc_RNA (1)...(19): siRNA sense strand
ccacaaaguccucagagaa

SEQ ID NO: 1466591 - RNA, 19 nt, Homo sapiens
  misc_RNA (1)...(19): siRNA sense strand
cagaaagugccuacagaua

SEQ ID NO: 1466592 - RNA, 19 nt, Homo sapiens
  misc_RNA (1)...(19): siRNA sense strand
guacaucuccguucaugga

SEQ ID NO: 1466593 - RNA, 19 nt, Homo sapiens
  misc_RNA (1)...(19): siRNA sense strand
uuaagaagcccauuauugu

SEQ ID NO: 1466594 - RNA, 19 nt, Homo sapiens
  misc_RNA (1)...(19): siRNA sense strand
gagauauuguggucaggaa

SEQ ID NO: 1466595 - RNA, 19 nt, Homo sapiens
  misc_RNA (1)...(19): siRNA sense strand
guuguggacuugacuuuau

SEQ ID NO: 1466596 - RNA, 19 nt, Homo sapiens
  misc_RNA (1)...(19): siRNA sense strand
gccuacagauacagagaua

SEQ ID NO: 1466597 - RNA, 19 nt, Homo sapiens
  misc_RNA (1)...(19): siRNA sense strand
ucuaggagcaucuauauug

SEQ ID NO: 1466598 - RNA, 19 nt, Homo sapiens
  misc_RNA (1)...(19): siRNA sense strand
ucagaaacuucgugaauac

SEQ ID NO: 1466599 - RNA, 19 nt, Homo sapiens
  misc_RNA (1)...(19): siRNA sense strand
caaaguccucagagaauaa

SEQ ID NO: 1466600 - RNA, 19 nt, Homo sapiens
  misc_RNA (1)...(19): siRNA sense strand
caauuuaagaagcccauua

SEQ ID NO: 1466601 - RNA, 19 nt, Homo sapiens
  misc_RNA (1)...(19): siRNA sense strand
caaccaacauacagacauc

SEQ ID NO: 1466602 - RNA, 19 nt, Homo sapiens
  misc_RNA (1)...(19): siRNA sense strand
gaagagaccagccuuuuga

SEQ ID NO: 1466603 - RNA, 19 nt, Homo sapiens
  misc_RNA (1)...(19): siRNA sense strand
gauggcuguucuaccguua

SEQ ID NO: 1466604 - RNA, 19 nt, Homo sapiens
  misc_RNA (1)...(19): siRNA sense strand
cuacagauacagagauauu

SEQ ID NO: 1466605 - RNA, 19 nt, Homo sapiens
  misc_RNA (1)...(19): siRNA sense strand
gaaaagagaaagcacuaaa

SEQ ID NO: 1466606 - RNA, 19 nt, Homo sapiens
  misc_RNA (1)...(19): siRNA sense strand
ggucuaggagcaucuauau

SEQ ID NO: 1466607 - RNA, 19 nt, Homo sapiens
  misc_RNA (1)...(19): siRNA sense strand
ggcagaagcuaucagaaac

SEQ ID NO: 1466608 - RNA, 19 nt, Homo sapiens
  misc_RNA (1)...(19): siRNA sense strand
cagaagcuaucagaaacuu

SEQ ID NO: 1466609 - RNA, 19 nt, Homo sapiens
  misc_RNA (1)...(19): siRNA sense strand
uaucagaaacuucgugaau

SEQ ID NO: 1466610 - RNA, 19 nt, Homo sapiens
  misc_RNA (1)...(19): siRNA sense strand
agugugaggugcugaagaa

SEQ ID NO: 1466611 - RNA, 19 nt, Homo sapiens
  misc_RNA (1)...(19): siRNA sense strand
cguuauguuucccaagaua

SEQ ID NO: 1466612 - RNA, 19 nt, Homo sapiens
  misc_RNA (1)...(19): siRNA sense strand
uuuaagaagcccauuauug

SEQ ID NO: 1466613 - RNA, 19 nt, Homo sapiens
  misc_RNA (1)...(19): siRNA sense strand
gcgaugugguuugggcuaa

SEQ ID NO: 1466614 - RNA, 19 nt, Homo sapiens
  misc_RNA (1)...(19): siRNA sense strand
uggcagaagcuaucagaaa

SEQ ID NO: 1466615 - RNA, 19 nt, Homo sapiens
  misc_RNA (1)...(19): siRNA sense strand
ccaacgagagggaguguga

SEQ ID NO: 1466616 - RNA, 19 nt, Homo sapiens
  misc_RNA (1)...(19): siRNA sense strand
caaugggacaaccaacaua

SEQ ID NO: 1466617 - RNA, 19 nt, Homo sapiens
  misc_RNA (1)...(19): siRNA sense strand
gcugcaacaugaagaugga

SEQ ID NO: 1466618 - RNA, 19 nt, Homo sapiens
  misc_RNA (1)...(19): siRNA sense strand
gaauaacucacuaaaucca

SEQ ID NO: 1466619 - RNA, 19 nt, Homo sapiens
  misc_RNA (1)...(19): siRNA sense strand
gauaaugggaggagcaucu

SEQ ID NO: 1466620 - RNA, 19 nt, Homo sapiens
  misc_RNA (1)...(19): siRNA sense strand
aacagaaagugccuacaga

SEQ ID NO: 1466621 - RNA, 19 nt, Homo sapiens
  misc_RNA (1)...(19): siRNA sense strand
aucagaaacuucgugaaua

SEQ ID NO: 1466622 - RNA, 19 nt, Homo sapiens
  misc_RNA (1)...(19): siRNA sense strand
cagagaauaacucacuaaa

SEQ ID NO: 1466623 - RNA, 19 nt, Homo sapiens
  misc_RNA (1)...(19): siRNA sense strand
gaugugguuugggcuaaug

SEQ ID NO: 1466624 - RNA, 19 nt, Homo sapiens
  misc_RNA (1)...(19): siRNA sense strand
cacaaaguccucagagaau

SEQ ID NO: 1466625 - RNA, 19 nt, Homo sapiens
  misc_RNA (1)...(19): siRNA sense strand
ggaagugaugguucgcauu

SEQ ID NO: 1466626 - RNA, 19 nt, Homo sapiens
  misc_RNA (1)...(19): siRNA sense strand
ucagagaauaacucacuaa

SEQ ID NO: 1466627 - RNA, 19 nt, Homo sapiens
  misc_RNA (1)...(19): siRNA sense strand
ucacccacaucuuguuauc

SEQ ID NO: 1466628 - RNA, 19 nt, Homo sapiens
  misc_RNA (1)...(19): siRNA sense strand
aggagugacugccagcaaa

SEQ ID NO: 1466629 - RNA, 19 nt, Homo sapiens
  misc_RNA (1)...(19): siRNA sense strand
agaaagugccuacagauac

SEQ ID NO: 1466630 - RNA, 19 nt, Homo sapiens
  misc_RNA (1)...(19): siRNA sense strand
gaggaagaucgaugaguuc

SEQ ID NO: 1466631 - RNA, 19 nt, Homo sapiens
  misc_RNA (1)...(19): siRNA sense strand
gggaggagcaucugcaaac

SEQ ID NO: 1466632 - RNA, 19 nt, Homo sapiens
  misc_RNA (1)...(19): siRNA sense strand
cucacuaaauccagaggua

SEQ ID NO: 1466633 - RNA, 19 nt, Homo sapiens
  misc_RNA (1)...(19): siRNA sense strand
cucgugcgcugcaacauga

SEQ ID NO: 1466634 - RNA, 19 nt, Homo sapiens
  misc_RNA (1)...(19): siRNA sense strand
caucuauauugccucuuug

SEQ ID NO: 1466635 - RNA, 19 nt, Homo sapiens
  misc_RNA (1)...(19): siRNA sense strand
cgucuucuguuguggacuu

SEQ ID NO: 1466636 - RNA, 19 nt, Homo sapiens
  misc_RNA (1)...(19): siRNA sense strand
ggcagcgucuucuguugug

SEQ ID NO: 1466637 - RNA, 19 nt, Homo sapiens
  misc_RNA (1)...(19): siRNA sense strand
ucacuaaauccagagguaa

SEQ ID NO: 1466638 - RNA, 19 nt, Homo sapiens
  misc_RNA (1)...(19): siRNA sense strand
caguugugcuugaggaauc

SEQ ID NO: 1466639 - RNA, 19 nt, Homo sapiens
  misc_RNA (1)...(19): siRNA sense strand
aaacagaaagugccuacag

SEQ ID NO: 1466640 - RNA, 19 nt, Homo sapiens
  misc_RNA (1)...(19): siRNA sense strand
gcuguucuaccguuauguu

SEQ ID NO: 1466641 - RNA, 19 nt, Homo sapiens
  misc_RNA (1)...(19): siRNA sense strand
uggcuucacccacaucuug

SEQ ID NO: 1466642 - RNA, 19 nt, Homo sapiens
  misc_RNA (1)...(19): siRNA sense strand
ggacguucacucaggaagu

SEQ ID NO: 1466643 - RNA, 19 nt, Homo sapiens
  misc_RNA (1)...(19): siRNA sense strand
uauaccaccuucggacaga

SEQ ID NO: 1466644 - RNA, 19 nt, Homo sapiens
  misc_RNA (1)...(19): siRNA sense strand
gaagcccauuauuguagca

SEQ ID NO: 1466645 - RNA, 19 nt, Homo sapiens
  misc_RNA (1)...(19): siRNA sense strand
aagaagcccauuauuguag

SEQ ID NO: 1466646 - RNA, 19 nt, Homo sapiens
  misc_RNA (1)...(19): siRNA sense strand
gggacaaccaacauacaga

SEQ ID NO: 1466647 - RNA, 19 nt, Homo sapiens
  misc_RNA (1)...(19): siRNA sense strand
auccagagguaaugagaga

SEQ ID NO: 1466648 - RNA, 19 nt, Homo sapiens
  misc_RNA (1)...(19): siRNA sense strand
gugaggugcugaagaaaau

SEQ ID NO: 1466649 - RNA, 19 nt, Homo sapiens
  misc_RNA (1)...(19): siRNA sense strand
ccaaugggacaaccaacau

SEQ ID NO: 1466650 - RNA, 19 nt, Homo sapiens
  misc_RNA (1)...(19): siRNA sense strand
guggacuugacuuuauuua

SEQ ID NO: 1466651 - RNA, 19 nt, Homo sapiens
  misc_RNA (1)...(19): siRNA sense strand
gaggagcaucugcaaacga

SEQ ID NO: 1466652 - RNA, 19 nt, Homo sapiens
  misc_RNA (1)...(19): siRNA sense strand
ggaggagcaucugcaaacg

SEQ ID NO: 1466653 - RNA, 19 nt, Homo sapiens
  misc_RNA (1)...(19): siRNA sense strand
gcagaagcuaucagaaacu

SEQ ID NO: 1466654 - RNA, 19 nt, Homo sapiens
  misc_RNA (1)...(19): siRNA sense strand
cuucacccacaucuuguua

SEQ ID NO: 1466655 - RNA, 19 nt, Homo sapiens
  misc_RNA (1)...(19): siRNA sense strand
cuaggagcaucuauauugc

SEQ ID NO: 1466656 - RNA, 19 nt, Homo sapiens
  misc_RNA (1)...(19): siRNA sense strand
uccacaaaguccucagaga

SEQ ID NO: 1466657 - RNA, 19 nt, Homo sapiens
  misc_RNA (1)...(19): siRNA sense strand
acagaagagaccagccuuu

SEQ ID NO: 1466658 - RNA, 19 nt, Homo sapiens
  misc_RNA (1)...(19): siRNA sense strand
cuaaauccagagguaauga

SEQ ID NO: 1466659 - RNA, 19 nt, Homo sapiens
  misc_RNA (1)...(19): siRNA sense strand
ccucagagaauaacucacu

SEQ ID NO: 1466660 - RNA, 19 nt, Homo sapiens
  misc_RNA (1)...(19): siRNA sense strand
accguuauguuucccaaga

SEQ ID NO: 1466661 - RNA, 19 nt, Homo sapiens
  misc_RNA (1)...(19): siRNA sense strand
acagauacagagauauugu

SEQ ID NO: 1466662 - RNA, 19 nt, Homo sapiens
  misc_RNA (1)...(19): siRNA sense strand
gccaaugggacaaccaaca

SEQ ID NO: 1466663 - RNA, 19 nt, Homo sapiens
  misc_RNA (1)...(19): siRNA sense strand
agaaacuucgugaauacuu

SEQ ID NO: 1466664 - RNA, 19 nt, Homo sapiens
  misc_RNA (1)...(19): siRNA sense strand
gaguccagauggcuguucu

SEQ ID NO: 1466665 - RNA, 19 nt, Homo sapiens
  misc_RNA (1)...(19): siRNA sense strand
gagaauaacucacuaaauc

SEQ ID NO: 1466666 - RNA, 19 nt, Homo sapiens
  misc_RNA (1)...(19): siRNA sense strand
gaagaucgaugaguucuga

SEQ ID NO: 1466667 - RNA, 19 nt, Homo sapiens
  misc_RNA (1)...(19): siRNA sense strand
gaagugaugguucgcauua

SEQ ID NO: 1466668 - RNA, 19 nt, Homo sapiens
  misc_RNA (1)...(19): siRNA sense strand
gaaacuucgugaauacuuu

SEQ ID NO: 1466669 - RNA, 19 nt, Homo sapiens
  misc_RNA (1)...(19): siRNA sense strand
gaaagugccuacagauaca

SEQ ID NO: 1466670 - RNA, 19 nt, Homo sapiens
  misc_RNA (1)...(19): siRNA sense strand
gcaucuauauugccucuuu

SEQ ID NO: 1466671 - RNA, 19 nt, Homo sapiens
  misc_RNA (1)...(19): siRNA sense strand
gaaauuuauugacgacaga

SEQ ID NO: 1466672 - RNA, 19 nt, Homo sapiens
  misc_RNA (1)...(19): siRNA sense strand
gacaagcgauugcguuuca

SEQ ID NO: 1466673 - RNA, 19 nt, Homo sapiens
  misc_RNA (1)...(19): siRNA sense strand
uaaaguacuugcagaggaa

SEQ ID NO: 1466674 - RNA, 19 nt, Homo sapiens
  misc_RNA (1)...(19): siRNA sense strand
guucauggaugcauuaaca

SEQ ID NO: 1466675 - RNA, 19 nt, Homo sapiens
  misc_RNA (1)...(19): siRNA sense strand
gcaauccaguugugcuuga

SEQ ID NO: 1466676 - RNA, 19 nt, Homo sapiens
  misc_RNA (1)...(19): siRNA sense strand
acaaaguccucagagaaua

SEQ ID NO: 1466677 - RNA, 19 nt, Homo sapiens
  misc_RNA (1)...(19): siRNA sense strand
uaagaagcccauuauugua

SEQ ID NO: 1466678 - RNA, 19 nt, Homo sapiens
  misc_RNA (1)...(19): siRNA sense strand
agaggaagaucgaugaguu

SEQ ID NO: 1466679 - RNA, 19 nt, Homo sapiens
  misc_RNA (1)...(19): siRNA sense strand
ccacaaaguccucagagaa

SEQ ID NO: 1466680 - RNA, 19 nt, Homo sapiens
  misc_RNA (1)...(19): siRNA sense strand
cagaaagugccuacagaua

SEQ ID NO: 1466681 - RNA, 19 nt, Homo sapiens
  misc_RNA (1)...(19): siRNA sense strand
guacaucuccguucaugga

SEQ ID NO: 1466682 - RNA, 19 nt, Homo sapiens
  misc_RNA (1)...(19): siRNA sense strand
uuaagaagcccauuauugu

SEQ ID NO: 1466683 - RNA, 19 nt, Homo sapiens
  misc_RNA (1)...(19): siRNA sense strand
gagauauuguggucaggaa

SEQ ID NO: 1466684 - RNA, 19 nt, Homo sapiens
  misc_RNA (1)...(19): siRNA sense strand
guuguggacuugacuuuau

SEQ ID NO: 1466685 - RNA, 19 nt, Homo sapiens
  misc_RNA (1)...(19): siRNA sense strand
gccuacagauacagagaua

SEQ ID NO: 1466686 - RNA, 19 nt, Homo sapiens
  misc_RNA (1)...(19): siRNA sense strand
ucuaggagcaucuauauug

SEQ ID NO: 1466687 - RNA, 19 nt, Homo sapiens
  misc_RNA (1)...(19): siRNA sense strand
ucagaaacuucgugaauac

SEQ ID NO: 1466688 - RNA, 19 nt, Homo sapiens
  misc_RNA (1)...(19): siRNA sense strand
caaaguccucagagaauaa

SEQ ID NO: 1466689 - RNA, 19 nt, Homo sapiens
  misc_RNA (1)...(19): siRNA sense strand
caauuuaagaagcccauua

SEQ ID NO: 1466690 - RNA, 19 nt, Homo sapiens
  misc_RNA (1)...(19): siRNA sense strand
caaccaacauacagacauc

SEQ ID NO: 1466691 - RNA, 19 nt, Homo sapiens
  misc_RNA (1)...(19): siRNA sense strand
gaagagaccagccuuuuga

SEQ ID NO: 1466692 - RNA, 19 nt, Homo sapiens
  misc_RNA (1)...(19): siRNA sense strand
gauggcuguucuaccguua

SEQ ID NO: 1466693 - RNA, 19 nt, Homo sapiens
  misc_RNA (1)...(19): siRNA sense strand
cuacagauacagagauauu

SEQ ID NO: 1466694 - RNA, 19 nt, Homo sapiens
  misc_RNA (1)...(19): siRNA sense strand
gaaaagagaaagcacuaaa

SEQ ID NO: 1466695 - RNA, 19 nt, Homo sapiens
  misc_RNA (1)...(19): siRNA sense strand
ggucuaggagcaucuauau

SEQ ID NO: 1466696 - RNA, 19 nt, Homo sapiens
  misc_RNA (1)...(19): siRNA sense strand
ggcagaagcuaucagaaac

SEQ ID NO: 1466697 - RNA, 19 nt, Homo sapiens
  misc_RNA (1)...(19): siRNA sense strand
cagaagcuaucagaaacuu

SEQ ID NO: 1466698 - RNA, 19 nt, Homo sapiens
  misc_RNA (1)...(19): siRNA sense strand
uaucagaaacuucgugaau

SEQ ID NO: 1466699 - RNA, 19 nt, Homo sapiens
  misc_RNA (1)...(19): siRNA sense strand
agugugaggugcugaagaa

SEQ ID NO: 1466700 - RNA, 19 nt, Homo sapiens
  misc_RNA (1)...(19): siRNA sense strand
cguuauguuucccaagaua

SEQ ID NO: 1466701 - RNA, 19 nt, Homo sapiens
  misc_RNA (1)...(19): siRNA sense strand
uuuaagaagcccauuauug

SEQ ID NO: 1466702 - RNA, 19 nt, Homo sapiens
  misc_RNA (1)...(19): siRNA sense strand
gcgaugugguuugggcuaa

SEQ ID NO: 1466703 - RNA, 19 nt, Homo sapiens
  misc_RNA (1)...(19): siRNA sense strand
uggcagaagcuaucagaaa

SEQ ID NO: 1466704 - RNA, 19 nt, Homo sapiens
  misc_RNA (1)...(19): siRNA sense strand
ccaacgagagggaguguga

SEQ ID NO: 1466705 - RNA, 19 nt, Homo sapiens
  misc_RNA (1)...(19): siRNA sense strand
caaugggacaaccaacaua

SEQ ID NO: 1466706 - RNA, 19 nt, Homo sapiens
  misc_RNA (1)...(19): siRNA sense strand
gcugcaacaugaagaugga

SEQ ID NO: 1466707 - RNA, 19 nt, Homo sapiens
  misc_RNA (1)...(19): siRNA sense strand
gaauaacucacuaaaucca

SEQ ID NO: 1466708 - RNA, 19 nt, Homo sapiens
  misc_RNA (1)...(19): siRNA sense strand
gauaaugggaggagcaucu

SEQ ID NO: 1466709 - RNA, 19 nt, Homo sapiens
  misc_RNA (1)...(19): siRNA sense strand
aacagaaagugccuacaga

SEQ ID NO: 1466710 - RNA, 19 nt, Homo sapiens
  misc_RNA (1)...(19): siRNA sense strand
aucagaaacuucgugaaua

SEQ ID NO: 1466711 - RNA, 19 nt, Homo sapiens
  misc_RNA (1)...(19): siRNA sense strand
cagagaauaacucacuaaa

SEQ ID NO: 1466712 - RNA, 19 nt, Homo sapiens
  misc_RNA (1)...(19): siRNA sense strand
gaugugguuugggcuaaug

SEQ ID NO: 1466713 - RNA, 19 nt, Homo sapiens
  misc_RNA (1)...(19): siRNA sense strand
cacaaaguccucagagaau

SEQ ID NO: 1466714 - RNA, 19 nt, Homo sapiens
  misc_RNA (1)...(19): siRNA sense strand
ggaagugaugguucgcauu

SEQ ID NO: 1466715 - RNA, 19 nt, Homo sapiens
  misc_RNA (1)...(19): siRNA sense strand
ucagagaauaacucacuaa

SEQ ID NO: 1466716 - RNA, 19 nt, Homo sapiens
  misc_RNA (1)...(19): siRNA sense strand
ucacccacaucuuguuauc

SEQ ID NO: 1466717 - RNA, 19 nt, Homo sapiens
  misc_RNA (1)...(19): siRNA sense strand
aggagugacugccagcaaa

SEQ ID NO: 1466718 - RNA, 19 nt, Homo sapiens
  misc_RNA (1)...(19): siRNA sense strand
agaaagugccuacagauac

SEQ ID NO: 1466719 - RNA, 19 nt, Homo sapiens
  misc_RNA (1)...(19): siRNA sense strand
gaggaagaucgaugaguuc

SEQ ID NO: 1466720 - RNA, 19 nt, Homo sapiens
  misc_RNA (1)...(19): siRNA sense strand
gggaggagcaucugcaaac

SEQ ID NO: 1466721 - RNA, 19 nt, Homo sapiens
  misc_RNA (1)...(19): siRNA sense strand
cucacuaaauccagaggua

SEQ ID NO: 1466722 - RNA, 19 nt, Homo sapiens
  misc_RNA (1)...(19): siRNA sense strand
cucgugcgcugcaacauga

SEQ ID NO: 1466723 - RNA, 19 nt, Homo sapiens
  misc_RNA (1)...(19): siRNA sense strand
caucuauauugccucuuug

SEQ ID NO: 1466724 - RNA, 19 nt, Homo sapiens
  misc_RNA (1)...(19): siRNA sense strand
cgucuucuguuguggacuu

SEQ ID NO: 1466725 - RNA, 19 nt, Homo sapiens
  misc_RNA (1)...(19): siRNA sense strand
ggcagcgucuucuguugug

SEQ ID NO: 1466726 - RNA, 19 nt, Homo sapiens
  misc_RNA (1)...(19): siRNA sense strand
ucacuaaauccagagguaa

SEQ ID NO: 1466727 - RNA, 19 nt, Homo sapiens
  misc_RNA (1)...(19): siRNA sense strand
caguugugcuugaggaauc

SEQ ID NO: 1466728 - RNA, 19 nt, Homo sapiens
  misc_RNA (1)...(19): siRNA sense strand
aaacagaaagugccuacag

SEQ ID NO: 1466729 - RNA, 19 nt, Homo sapiens
  misc_RNA (1)...(19): siRNA sense strand
gcuguucuaccguuauguu

SEQ ID NO: 1466730 - RNA, 19 nt, Homo sapiens
  misc_RNA (1)...(19): siRNA sense strand
uggcuucacccacaucuug

SEQ ID NO: 1466731 - RNA, 19 nt, Homo sapiens
  misc_RNA (1)...(19): siRNA sense strand
ggacguucacucaggaagu

SEQ ID NO: 1466732 - RNA, 19 nt, Homo sapiens
  misc_RNA (1)...(19): siRNA sense strand
uauaccaccuucggacaga

SEQ ID NO: 1466733 - RNA, 19 nt, Homo sapiens
  misc_RNA (1)...(19): siRNA sense strand
gaagcccauuauuguagca

SEQ ID NO: 1466734 - RNA, 19 nt, Homo sapiens
  misc_RNA (1)...(19): siRNA sense strand
aagaagcccauuauuguag

SEQ ID NO: 1466735 - RNA, 19 nt, Homo sapiens
  misc_RNA (1)...(19): siRNA sense strand
gggacaaccaacauacaga

SEQ ID NO: 1466736 - RNA, 19 nt, Homo sapiens
  misc_RNA (1)...(19): siRNA sense strand
auccagagguaaugagaga

SEQ ID NO: 1466737 - RNA, 19 nt, Homo sapiens
  misc_RNA (1)...(19): siRNA sense strand
gugaggugcugaagaaaau

SEQ ID NO: 1466738 - RNA, 19 nt, Homo sapiens
  misc_RNA (1)...(19): siRNA sense strand
ccaaugggacaaccaacau

SEQ ID NO: 1466739 - RNA, 19 nt, Homo sapiens
  misc_RNA (1)...(19): siRNA sense strand
guggacuugacuuuauuua

SEQ ID NO: 1466740 - RNA, 19 nt, Homo sapiens
  misc_RNA (1)...(19): siRNA sense strand
gaggagcaucugcaaacga

SEQ ID NO: 1466741 - RNA, 19 nt, Homo sapiens
  misc_RNA (1)...(19): siRNA sense strand
ggaggagcaucugcaaacg

SEQ ID NO: 1466742 - RNA, 19 nt, Homo sapiens
  misc_RNA (1)...(19): siRNA sense strand
gcagaagcuaucagaaacu

SEQ ID NO: 1466743 - RNA, 19 nt, Homo sapiens
  misc_RNA (1)...(19): siRNA sense strand
cuucacccacaucuuguua

SEQ ID NO: 1466744 - RNA, 19 nt, Homo sapiens
  misc_RNA (1)...(19): siRNA sense strand
cuaggagcaucuauauugc

SEQ ID NO: 1466745 - RNA, 19 nt, Homo sapiens
  misc_RNA (1)...(19): siRNA sense strand
uccacaaaguccucagaga

SEQ ID NO: 1466746 - RNA, 19 nt, Homo sapiens
  misc_RNA (1)...(19): siRNA sense strand
acagaagagaccagccuuu

SEQ ID NO: 1466747 - RNA, 19 nt, Homo sapiens
  misc_RNA (1)...(19): siRNA sense strand
cuaaauccagagguaauga

SEQ ID NO: 1466748 - RNA, 19 nt, Homo sapiens
  misc_RNA (1)...(19): siRNA sense strand
ccucagagaauaacucacu

SEQ ID NO: 1466749 - RNA, 19 nt, Homo sapiens
  misc_RNA (1)...(19): siRNA sense strand
accguuauguuucccaaga

SEQ ID NO: 1466750 - RNA, 19 nt, Homo sapiens
  misc_RNA (1)...(19): siRNA sense strand
acagauacagagauauugu

SEQ ID NO: 1466751 - RNA, 19 nt, Homo sapiens
  misc_RNA (1)...(19): siRNA sense strand
gccaaugggacaaccaaca

SEQ ID NO: 1466752 - RNA, 19 nt, Homo sapiens
  misc_RNA (1)...(19): siRNA sense strand
agaaacuucgugaauacuu

SEQ ID NO: 1466753 - RNA, 19 nt, Homo sapiens
  misc_RNA (1)...(19): siRNA sense strand
gaguccagauggcuguucu

SEQ ID NO: 1466754 - RNA, 19 nt, Homo sapiens
  misc_RNA (1)...(19): siRNA sense strand
gagaauaacucacuaaauc

SEQ ID NO: 1466755 - RNA, 19 nt, Homo sapiens
  misc_RNA (1)...(19): siRNA sense strand
gaagaucgaugaguucuga

SEQ ID NO: 1466756 - RNA, 19 nt, Homo sapiens
  misc_RNA (1)...(19): siRNA sense strand
gaagugaugguucgcauua

SEQ ID NO: 1466757 - RNA, 19 nt, Homo sapiens
  misc_RNA (1)...(19): siRNA sense strand
gaaacuucgugaauacuuu

SEQ ID NO: 1466758 - RNA, 19 nt, Homo sapiens
  misc_RNA (1)...(19): siRNA sense strand
gaaagugccuacagauaca

SEQ ID NO: 1466759 - RNA, 19 nt, Homo sapiens
  misc_RNA (1)...(19): siRNA sense strand
gcaucuauauugccucuuu

SEQ ID NO: 1466760 - RNA, 19 nt, Homo sapiens
  misc_RNA (1)...(19): siRNA sense strand
gaaauuuauugacgacaga

SEQ ID NO: 1466761 - RNA, 19 nt, Homo sapiens
  misc_RNA (1)...(19): siRNA sense strand
gacaagcgauugcguuuca

SEQ ID NO: 1466762 - RNA, 19 nt, Homo sapiens
  misc_RNA (1)...(19): siRNA sense strand
uaaaguacuugcagaggaa

SEQ ID NO: 1466763 - RNA, 19 nt, Homo sapiens
  misc_RNA (1)...(19): siRNA sense strand
gcaauccaguugugcuuga

SEQ ID NO: 1466764 - RNA, 19 nt, Homo sapiens
  misc_RNA (1)...(19): siRNA sense strand
acaaaguccucagagaaua

SEQ ID NO: 1466765 - RNA, 19 nt, Homo sapiens
  misc_RNA (1)...(19): siRNA sense strand
uaagaagcccauuauugua

SEQ ID NO: 1466766 - RNA, 19 nt, Homo sapiens
  misc_RNA (1)...(19): siRNA sense strand
agaggaagaucgaugaguu

SEQ ID NO: 1466767 - RNA, 19 nt, Homo sapiens
  misc_RNA (1)...(19): siRNA sense strand
ccacaaaguccucagagaa

SEQ ID NO: 1466768 - RNA, 19 nt, Homo sapiens
  misc_RNA (1)...(19): siRNA sense strand
cagaaagugccuacagaua

SEQ ID NO: 1466769 - RNA, 19 nt, Homo sapiens
  misc_RNA (1)...(19): siRNA sense strand
uuaagaagcccauuauugu

SEQ ID NO: 1466770 - RNA, 19 nt, Homo sapiens
  misc_RNA (1)...(19): siRNA sense strand
gagauauuguggucaggaa

SEQ ID NO: 1466771 - RNA, 19 nt, Homo sapiens
  misc_RNA (1)...(19): siRNA sense strand
guuguggacuugacuuuau

SEQ ID NO: 1466772 - RNA, 19 nt, Homo sapiens
  misc_RNA (1)...(19): siRNA sense strand
gccuacagauacagagaua

SEQ ID NO: 1466773 - RNA, 19 nt, Homo sapiens
  misc_RNA (1)...(19): siRNA sense strand
ucuaggagcaucuauauug

SEQ ID NO: 1466774 - RNA, 19 nt, Homo sapiens
  misc_RNA (1)...(19): siRNA sense strand
ucagaaacuucgugaauac

SEQ ID NO: 1466775 - RNA, 19 nt, Homo sapiens
  misc_RNA (1)...(19): siRNA sense strand
caaaguccucagagaauaa

SEQ ID NO: 1466776 - RNA, 19 nt, Homo sapiens
  misc_RNA (1)...(19): siRNA sense strand
caauuuaagaagcccauua

SEQ ID NO: 1466777 - RNA, 19 nt, Homo sapiens
  misc_RNA (1)...(19): siRNA sense strand
caaccaacauacagacauc

SEQ ID NO: 1466778 - RNA, 19 nt, Homo sapiens
  misc_RNA (1)...(19): siRNA sense strand
gaagagaccagccuuuuga

SEQ ID NO: 1466779 - RNA, 19 nt, Homo sapiens
  misc_RNA (1)...(19): siRNA sense strand
gauggcuguucuaccguua

SEQ ID NO: 1466780 - RNA, 19 nt, Homo sapiens
  misc_RNA (1)...(19): siRNA sense strand
cuacagauacagagauauu

SEQ ID NO: 1466781 - RNA, 19 nt, Homo sapiens
  misc_RNA (1)...(19): siRNA sense strand
gaaaagagaaagcacuaaa

SEQ ID NO: 1466782 - RNA, 19 nt, Homo sapiens
  misc_RNA (1)...(19): siRNA sense strand
ggucuaggagcaucuauau

SEQ ID NO: 1466783 - RNA, 19 nt, Homo sapiens
  misc_RNA (1)...(19): siRNA sense strand
ggcagaagcuaucagaaac

SEQ ID NO: 1466784 - RNA, 19 nt, Homo sapiens
  misc_RNA (1)...(19): siRNA sense strand
cagaagcuaucagaaacuu

SEQ ID NO: 1466785 - RNA, 19 nt, Homo sapiens
  misc_RNA (1)...(19): siRNA sense strand
uaucagaaacuucgugaau

SEQ ID NO: 1466786 - RNA, 19 nt, Homo sapiens
  misc_RNA (1)...(19): siRNA sense strand
agugugaggugcugaagaa

SEQ ID NO: 1466787 - RNA, 19 nt, Homo sapiens
  misc_RNA (1)...(19): siRNA sense strand
cguuauguuucccaagaua

SEQ ID NO: 1466788 - RNA, 19 nt, Homo sapiens
  misc_RNA (1)...(19): siRNA sense strand
uuuaagaagcccauuauug

SEQ ID NO: 1466789 - RNA, 19 nt, Homo sapiens
  misc_RNA (1)...(19): siRNA sense strand
gcgaugugguuugggcuaa

SEQ ID NO: 1466790 - RNA, 19 nt, Homo sapiens
  misc_RNA (1)...(19): siRNA sense strand
uggcagaagcuaucagaaa

SEQ ID NO: 1466791 - RNA, 19 nt, Homo sapiens
  misc_RNA (1)...(19): siRNA sense strand
ccaacgagagggaguguga

SEQ ID NO: 1466792 - RNA, 19 nt, Homo sapiens
  misc_RNA (1)...(19): siRNA sense strand
caaugggacaaccaacaua

SEQ ID NO: 1466793 - RNA, 19 nt, Homo sapiens
  misc_RNA (1)...(19): siRNA sense strand
gcugcaacaugaagaugga

SEQ ID NO: 1466794 - RNA, 19 nt, Homo sapiens
  misc_RNA (1)...(19): siRNA sense strand
gaauaacucacuaaaucca

SEQ ID NO: 1466795 - RNA, 19 nt, Homo sapiens
  misc_RNA (1)...(19): siRNA sense strand
gauaaugggaggagcaucu

SEQ ID NO: 1466796 - RNA, 19 nt, Homo sapiens
  misc_RNA (1)...(19): siRNA sense strand
aacagaaagugccuacaga

SEQ ID NO: 1466797 - RNA, 19 nt, Homo sapiens
  misc_RNA (1)...(19): siRNA sense strand
aucagaaacuucgugaaua

SEQ ID NO: 1466798 - RNA, 19 nt, Homo sapiens
  misc_RNA (1)...(19): siRNA sense strand
cagagaauaacucacuaaa

SEQ ID NO: 1466799 - RNA, 19 nt, Homo sapiens
  misc_RNA (1)...(19): siRNA sense strand
gaugugguuugggcuaaug

SEQ ID NO: 1466800 - RNA, 19 nt, Homo sapiens
  misc_RNA (1)...(19): siRNA sense strand
cacaaaguccucagagaau

SEQ ID NO: 1466801 - RNA, 19 nt, Homo sapiens
  misc_RNA (1)...(19): siRNA sense strand
ggaagugaugguucgcauu

SEQ ID NO: 1466802 - RNA, 19 nt, Homo sapiens
  misc_RNA (1)...(19): siRNA sense strand
ucagagaauaacucacuaa

SEQ ID NO: 1466803 - RNA, 19 nt, Homo sapiens
  misc_RNA (1)...(19): siRNA sense strand
aggagugacugccagcaaa

SEQ ID NO: 1466804 - RNA, 19 nt, Homo sapiens
  misc_RNA (1)...(19): siRNA sense strand
ucacccacaucuuguuauc

SEQ ID NO: 1466805 - RNA, 19 nt, Homo sapiens
  misc_RNA (1)...(19): siRNA sense strand
agaaagugccuacagauac

SEQ ID NO: 1466806 - RNA, 19 nt, Homo sapiens
  misc_RNA (1)...(19): siRNA sense strand
gaggaagaucgaugaguuc

SEQ ID NO: 1466807 - RNA, 19 nt, Homo sapiens
  misc_RNA (1)...(19): siRNA sense strand
gggaggagcaucugcaaac

SEQ ID NO: 1466808 - RNA, 19 nt, Homo sapiens
  misc_RNA (1)...(19): siRNA sense strand
cucacuaaauccagaggua

SEQ ID NO: 1466809 - RNA, 19 nt, Homo sapiens
  misc_RNA (1)...(19): siRNA sense strand
cucgugcgcugcaacauga

SEQ ID NO: 1466810 - RNA, 19 nt, Homo sapiens
  misc_RNA (1)...(19): siRNA sense strand
caucuauauugccucuuug

SEQ ID NO: 1466811 - RNA, 19 nt, Homo sapiens
  misc_RNA (1)...(19): siRNA sense strand
cgucuucuguuguggacuu

SEQ ID NO: 1466812 - RNA, 19 nt, Homo sapiens
  misc_RNA (1)...(19): siRNA sense strand
ggcagcgucuucuguugug

SEQ ID NO: 1466813 - RNA, 19 nt, Homo sapiens
  misc_RNA (1)...(19): siRNA sense strand
ucacuaaauccagagguaa

SEQ ID NO: 1466814 - RNA, 19 nt, Homo sapiens
  misc_RNA (1)...(19): siRNA sense strand
caguugugcuugaggaauc

SEQ ID NO: 1466815 - RNA, 19 nt, Homo sapiens
  misc_RNA (1)...(19): siRNA sense strand
aaacagaaagugccuacag

SEQ ID NO: 1466816 - RNA, 19 nt, Homo sapiens
  misc_RNA (1)...(19): siRNA sense strand
gcuguucuaccguuauguu

SEQ ID NO: 1466817 - RNA, 19 nt, Homo sapiens
  misc_RNA (1)...(19): siRNA sense strand
uggcuucacccacaucuug

SEQ ID NO: 1466818 - RNA, 19 nt, Homo sapiens
  misc_RNA (1)...(19): siRNA sense strand
ggacguucacucaggaagu

SEQ ID NO: 1466819 - RNA, 19 nt, Homo sapiens
  misc_RNA (1)...(19): siRNA sense strand
uauaccaccuucggacaga

SEQ ID NO: 1466820 - RNA, 19 nt, Homo sapiens
  misc_RNA (1)...(19): siRNA sense strand
gaagcccauuauuguagca

SEQ ID NO: 1466821 - RNA, 19 nt, Homo sapiens
  misc_RNA (1)...(19): siRNA sense strand
aagaagcccauuauuguag

SEQ ID NO: 1466822 - RNA, 19 nt, Homo sapiens
  misc_RNA (1)...(19): siRNA sense strand
gggacaaccaacauacaga

SEQ ID NO: 1466823 - RNA, 19 nt, Homo sapiens
  misc_RNA (1)...(19): siRNA sense strand
auccagagguaaugagaga

SEQ ID NO: 1466824 - RNA, 19 nt, Homo sapiens
  misc_RNA (1)...(19): siRNA sense strand
gugaggugcugaagaaaau

SEQ ID NO: 1466825 - RNA, 19 nt, Homo sapiens
  misc_RNA (1)...(19): siRNA sense strand
ccaaugggacaaccaacau

SEQ ID NO: 1466826 - RNA, 19 nt, Homo sapiens
  misc_RNA (1)...(19): siRNA sense strand
guggacuugacuuuauuua

SEQ ID NO: 1466827 - RNA, 19 nt, Homo sapiens
  misc_RNA (1)...(19): siRNA sense strand
gaggagcaucugcaaacga

SEQ ID NO: 1466828 - RNA, 19 nt, Homo sapiens
  misc_RNA (1)...(19): siRNA sense strand
ggaggagcaucugcaaacg

SEQ ID NO: 1466829 - RNA, 19 nt, Homo sapiens
  misc_RNA (1)...(19): siRNA sense strand
gcagaagcuaucagaaacu

SEQ ID NO: 1466830 - RNA, 19 nt, Homo sapiens
  misc_RNA (1)...(19): siRNA sense strand
cuucacccacaucuuguua

SEQ ID NO: 1466831 - RNA, 19 nt, Homo sapiens
  misc_RNA (1)...(19): siRNA sense strand
cuaggagcaucuauauugc

SEQ ID NO: 1466832 - RNA, 19 nt, Homo sapiens
  misc_RNA (1)...(19): siRNA sense strand
uccacaaaguccucagaga

SEQ ID NO: 1466833 - RNA, 19 nt, Homo sapiens
  misc_RNA (1)...(19): siRNA sense strand
acagaagagaccagccuuu

SEQ ID NO: 1466834 - RNA, 19 nt, Homo sapiens
  misc_RNA (1)...(19): siRNA sense strand
cuaaauccagagguaauga

SEQ ID NO: 1466835 - RNA, 19 nt, Homo sapiens
  misc_RNA (1)...(19): siRNA sense strand
ccucagagaauaacucacu

SEQ ID NO: 1466836 - RNA, 19 nt, Homo sapiens
  misc_RNA (1)...(19): siRNA sense strand
acagauacagagauauugu

SEQ ID NO: 1466837 - RNA, 19 nt, Homo sapiens
  misc_RNA (1)...(19): siRNA sense strand
accguuauguuucccaaga

SEQ ID NO: 1466838 - RNA, 19 nt, Homo sapiens
  misc_RNA (1)...(19): siRNA sense strand
gccaaugggacaaccaaca

SEQ ID NO: 1466839 - RNA, 19 nt, Homo sapiens
  misc_RNA (1)...(19): siRNA sense strand
agaaacuucgugaauacuu

SEQ ID NO: 1466840 - RNA, 19 nt, Homo sapiens
  misc_RNA (1)...(19): siRNA sense strand
gaguccagauggcuguucu

SEQ ID NO: 1466841 - RNA, 19 nt, Homo sapiens
  misc_RNA (1)...(19): siRNA sense strand
gaagauggcuggcgugauc

SEQ ID NO: 1466842 - RNA, 19 nt, Homo sapiens
  misc_RNA (1)...(19): siRNA sense strand
gaagaaaugcuuauuccua

SEQ ID NO: 1466843 - RNA, 19 nt, Homo sapiens
  misc_RNA (1)...(19): siRNA sense strand
aaaggaagcuggccaagaa

SEQ ID NO: 1466844 - RNA, 19 nt, Homo sapiens
  misc_RNA (1)...(19): siRNA sense strand
gagggcagcugacauuauu

SEQ ID NO: 1466845 - RNA, 19 nt, Homo sapiens
  misc_RNA (1)...(19): siRNA sense strand
ggaggcugguguucgauua

SEQ ID NO: 1466846 - RNA, 19 nt, Homo sapiens
  misc_RNA (1)...(19): siRNA sense strand
ggacaucauccacagaaua

SEQ ID NO: 1466847 - RNA, 19 nt, Homo sapiens
  misc_RNA (1)...(19): siRNA sense strand
ccaacuacauugacggaua

SEQ ID NO: 1466848 - RNA, 19 nt, Homo sapiens
  misc_RNA (1)...(19): siRNA sense strand
ucacaaaccugguggaagu

SEQ ID NO: 1466849 - RNA, 19 nt, Homo sapiens
  misc_RNA (1)...(19): siRNA sense strand
ccagguggcuguuccuuug

SEQ ID NO: 1466850 - RNA, 19 nt, Homo sapiens
  misc_RNA (1)...(19): siRNA sense strand
gaagaaaggcuaccaugag

SEQ ID NO: 1466851 - RNA, 19 nt, Homo sapiens
  misc_RNA (1)...(19): siRNA sense strand
gaauauuccgcaucuguaa

SEQ ID NO: 1466852 - RNA, 19 nt, Homo sapiens
  misc_RNA (1)...(19): siRNA sense strand
cacaggaucuuucaugaug

SEQ ID NO: 1466853 - RNA, 19 nt, Homo sapiens
  misc_RNA (1)...(19): siRNA sense strand
cuacuuugcugcugaguug

SEQ ID NO: 1466854 - RNA, 19 nt, Homo sapiens
  misc_RNA (1)...(19): siRNA sense strand
ggucugguguguccaacua

SEQ ID NO: 1466855 - RNA, 19 nt, Homo sapiens
  misc_RNA (1)...(19): siRNA sense strand
cgacuuccauuacuacuuc

SEQ ID NO: 1466856 - RNA, 19 nt, Homo sapiens
  misc_RNA (1)...(19): siRNA sense strand
gagaagaaaugcuuauucc

SEQ ID NO: 1466857 - RNA, 19 nt, Homo sapiens
  misc_RNA (1)...(19): siRNA sense strand
cagacaaacuccagccaaa

SEQ ID NO: 1466858 - RNA, 19 nt, Homo sapiens
  misc_RNA (1)...(19): siRNA sense strand
gcaucgacuuccauuacua

SEQ ID NO: 1466859 - RNA, 19 nt, Homo sapiens
  misc_RNA (1)...(19): siRNA sense strand
ggaaguggucucagcauga

SEQ ID NO: 1466860 - RNA, 19 nt, Homo sapiens
  misc_RNA (1)...(19): siRNA sense strand
ggaaaucguagacaucaga

SEQ ID NO: 1466861 - RNA, 19 nt, Homo sapiens
  misc_RNA (1)...(19): siRNA sense strand
aagaaaggcuaccaugaga

SEQ ID NO: 1466862 - RNA, 19 nt, Homo sapiens
  misc_RNA (1)...(19): siRNA sense strand
ggaggaauacgaggccuua

SEQ ID NO: 1466863 - RNA, 19 nt, Homo sapiens
  misc_RNA (1)...(19): siRNA sense strand
ggagaagaaaugcuuauuc

SEQ ID NO: 1466864 - RNA, 19 nt, Homo sapiens
  misc_RNA (1)...(19): siRNA sense strand
gagcuccugucaguguuua

SEQ ID NO: 1466865 - RNA, 19 nt, Homo sapiens
  misc_RNA (1)...(19): siRNA sense strand
gagaugauccagcagcaaa

SEQ ID NO: 1466866 - RNA, 19 nt, Homo sapiens
  misc_RNA (1)...(19): siRNA sense strand
gauaagaaucgaaguaugg

SEQ ID NO: 1466867 - RNA, 19 nt, Homo sapiens
  misc_RNA (1)...(19): siRNA sense strand
ggacaacaccgugaagaug

SEQ ID NO: 1466868 - RNA, 19 nt, Homo sapiens
  misc_RNA (1)...(19): siRNA sense strand
gaaaggcuaccaugagauc

SEQ ID NO: 1466869 - RNA, 19 nt, Homo sapiens
  misc_RNA (1)...(19): siRNA sense strand
gcaauaagaaucgauaugg

SEQ ID NO: 1466870 - RNA, 19 nt, Homo sapiens
  misc_RNA (1)...(19): siRNA sense strand
ugaaggaaguggaauaucg

SEQ ID NO: 1466871 - RNA, 19 nt, Homo sapiens
  misc_RNA (1)...(19): siRNA sense strand
uggagacccuggaacagua

SEQ ID NO: 1466872 - RNA, 19 nt, Homo sapiens
  misc_RNA (1)...(19): siRNA sense strand
gacaauaagacauacaaug

SEQ ID NO: 1466873 - RNA, 19 nt, Homo sapiens
  misc_RNA (1)...(19): siRNA sense strand
cggacuggcugcuucauug

SEQ ID NO: 1466874 - RNA, 19 nt, Homo sapiens
  misc_RNA (1)...(19): siRNA sense strand
gacggagaauccagcaauu

SEQ ID NO: 1466875 - RNA, 19 nt, Homo sapiens
  misc_RNA (1)...(19): siRNA sense strand
ggacggagaauccagcaau

SEQ ID NO: 1466876 - RNA, 19 nt, Homo sapiens
  misc_RNA (1)...(19): siRNA sense strand
ccagccaaaucaaagauga

SEQ ID NO: 1466877 - RNA, 19 nt, Homo sapiens
  misc_RNA (1)...(19): siRNA sense strand
caacuacauugacggauac

SEQ ID NO: 1466878 - RNA, 19 nt, Homo sapiens
  misc_RNA (1)...(19): siRNA sense strand
gcacuggaauauuuaagcu

SEQ ID NO: 1466879 - RNA, 19 nt, Homo sapiens
  misc_RNA (1)...(19): siRNA sense strand
acaggaugguuaucguaua

SEQ ID NO: 1466880 - RNA, 19 nt, Homo sapiens
  misc_RNA (1)...(19): siRNA sense strand
gacaucauccacagaauau

SEQ ID NO: 1466881 - RNA, 19 nt, Homo sapiens
  misc_RNA (1)...(19): siRNA sense strand
agacagaggagcaauaugu

SEQ ID NO: 1466882 - RNA, 19 nt, Homo sapiens
  misc_RNA (1)...(19): siRNA sense strand
aaagucacccugauugaaa

SEQ ID NO: 1466883 - RNA, 19 nt, Homo sapiens
  misc_RNA (1)...(19): siRNA sense strand
caagcgcucucugcucaaa

SEQ ID NO: 1466884 - RNA, 19 nt, Homo sapiens
  misc_RNA (1)...(19): siRNA sense strand
cagcaacugugguuauagu

SEQ ID NO: 1466885 - RNA, 19 nt, Homo sapiens
  misc_RNA (1)...(19): siRNA sense strand
uaacaacaaauccaacaug

SEQ ID NO: 1466886 - RNA, 19 nt, Homo sapiens
  misc_RNA (1)...(19): siRNA sense strand
cuacaucaaugccaacuac

SEQ ID NO: 1466887 - RNA, 19 nt, Homo sapiens
  misc_RNA (1)...(19): siRNA sense strand
gaugaaaaccgcaauaaga

SEQ ID NO: 1466888 - RNA, 19 nt, Homo sapiens
  misc_RNA (1)...(19): siRNA sense strand
ucuacgagaucaacuacaa

SEQ ID NO: 1466889 - RNA, 19 nt, Homo sapiens
  misc_RNA (1)...(19): siRNA sense strand
gggagcagauuaacacaac

SEQ ID NO: 1466890 - RNA, 19 nt, Homo sapiens
  misc_RNA (1)...(19): siRNA sense strand
gaggacaucauccacagaa

SEQ ID NO: 1466891 - RNA, 19 nt, Homo sapiens
  misc_RNA (1)...(19): siRNA sense strand
ggagcaauauguguuugug

SEQ ID NO: 1466892 - RNA, 19 nt, Homo sapiens
  misc_RNA (1)...(19): siRNA sense strand
gggcagagacccacauagu

SEQ ID NO: 1466893 - RNA, 19 nt, Homo sapiens
  misc_RNA (1)...(19): siRNA sense strand
caugauaagaaucgaagua

SEQ ID NO: 1466894 - RNA, 19 nt, Homo sapiens
  misc_RNA (1)...(19): siRNA sense strand
ugacauggccgagaaugaa

SEQ ID NO: 1466895 - RNA, 19 nt, Homo sapiens
  misc_RNA (1)...(19): siRNA sense strand
ccacggcguucccugcuau

SEQ ID NO: 1466896 - RNA, 19 nt, Homo sapiens
  misc_RNA (1)...(19): siRNA sense strand
acgcggagcugaucgugaa

SEQ ID NO: 1466897 - RNA, 19 nt, Homo sapiens
  misc_RNA (1)...(19): siRNA sense strand
agaaguggcaggagcagua

SEQ ID NO: 1466898 - RNA, 19 nt, Homo sapiens
  misc_RNA (1)...(19): siRNA sense strand
ccaaagggucaaccuggua

SEQ ID NO: 1466899 - RNA, 19 nt, Homo sapiens
  misc_RNA (1)...(19): siRNA sense strand
gaaucgauaugggaacauc

SEQ ID NO: 1466900 - RNA, 19 nt, Homo sapiens
  misc_RNA (1)...(19): siRNA sense strand
ggagggcagcugacauuau

SEQ ID NO: 1466901 - RNA, 19 nt, Homo sapiens
  misc_RNA (1)...(19): siRNA sense strand
ccacucggauugccaccaa

SEQ ID NO: 1466902 - RNA, 19 nt, Homo sapiens
  misc_RNA (1)...(19): siRNA sense strand
guggaaaccucccaaugag

SEQ ID NO: 1466903 - RNA, 19 nt, Homo sapiens
  misc_RNA (1)...(19): siRNA sense strand
gaugagcacuacagcaacu

SEQ ID NO: 1466904 - RNA, 19 nt, Homo sapiens
  misc_RNA (1)...(19): siRNA sense strand
uuacagugggugacaauaa

SEQ ID NO: 1466905 - RNA, 19 nt, Homo sapiens
  misc_RNA (1)...(19): siRNA sense strand
caggaugguuaucguauag

SEQ ID NO: 1466906 - RNA, 19 nt, Homo sapiens
  misc_RNA (1)...(19): siRNA sense strand
gaagugggcagggugaaau

SEQ ID NO: 1466907 - RNA, 19 nt, Homo sapiens
  misc_RNA (1)...(19): siRNA sense strand
caucauauccuacgaccau

SEQ ID NO: 1466908 - RNA, 19 nt, Homo sapiens
  misc_RNA (1)...(19): siRNA sense strand
gaaguggucucagcaugac

SEQ ID NO: 1466909 - RNA, 19 nt, Homo sapiens
  misc_RNA (1)...(19): siRNA sense strand
ccuggaacaguauaaauuu

SEQ ID NO: 1466910 - RNA, 19 nt, Homo sapiens
  misc_RNA (1)...(19): siRNA sense strand
ugauaagaaucgaaguaug

SEQ ID NO: 1466911 - RNA, 19 nt, Homo sapiens
  misc_RNA (1)...(19): siRNA sense strand
uaaagucacccugauugaa

SEQ ID NO: 1466912 - RNA, 19 nt, Homo sapiens
  misc_RNA (1)...(19): siRNA sense strand
ggacgucaacggauucaca

SEQ ID NO: 1466913 - RNA, 19 nt, Homo sapiens
  misc_RNA (1)...(19): siRNA sense strand
ugaaacccaccaccucuuu

SEQ ID NO: 1466914 - RNA, 19 nt, Homo sapiens
  misc_RNA (1)...(19): siRNA sense strand
gggcagcugacauuauuga

SEQ ID NO: 1466915 - RNA, 19 nt, Homo sapiens
  misc_RNA (1)...(19): siRNA sense strand
agguggcacuggaauauuu

SEQ ID NO: 1466916 - RNA, 19 nt, Homo sapiens
  misc_RNA (1)...(19): siRNA sense strand
uuucagacccucaacauug

SEQ ID NO: 1466917 - RNA, 19 nt, Homo sapiens
  misc_RNA (1)...(19): siRNA sense strand
gacaaacuccagccaaauc

SEQ ID NO: 1466918 - RNA, 19 nt, Homo sapiens
  misc_RNA (1)...(19): siRNA sense strand
gaggagcaauauguguuug

SEQ ID NO: 1466919 - RNA, 19 nt, Homo sapiens
  misc_RNA (1)...(19): siRNA sense strand
ggacacagccaaggaggau

SEQ ID NO: 1466920 - RNA, 19 nt, Homo sapiens
  misc_RNA (1)...(19): siRNA sense strand
gauggugggucuggugugu

SEQ ID NO: 1466921 - RNA, 19 nt, Homo sapiens
  misc_RNA (1)...(19): siRNA sense strand
ccacaggaugguuaucgua

SEQ ID NO: 1466922 - RNA, 19 nt, Homo sapiens
  misc_RNA (1)...(19): siRNA sense strand
ugaaaugugugcgauacug

SEQ ID NO: 1466923 - RNA, 19 nt, Homo sapiens
  misc_RNA (1)...(19): siRNA sense strand
ggugaaaugugugcgauac

SEQ ID NO: 1466924 - RNA, 19 nt, Homo sapiens
  misc_RNA (1)...(19): siRNA sense strand
ggcacuacauugcgacuca

SEQ ID NO: 1466925 - RNA, 19 nt, Homo sapiens
  misc_RNA (1)...(19): siRNA sense strand
gucaacggauucacagaug

SEQ ID NO: 1466926 - RNA, 19 nt, Homo sapiens
  misc_RNA (1)...(19): siRNA sense strand
caaaggaagcuggccaaga

SEQ ID NO: 1466927 - RNA, 19 nt, Homo sapiens
  misc_RNA (1)...(19): siRNA sense strand
cagagaagcagguggacaa

SEQ ID NO: 1466928 - RNA, 19 nt, Homo sapiens
  misc_RNA (1)...(19): siRNA sense strand
acaauaagacauacaaugg

SEQ ID NO: 1466929 - RNA, 19 nt, Homo sapiens
  misc_RNA (1)...(19): siRNA sense strand
agucgacucucccaacuau

SEQ ID NO: 1466930 - RNA, 19 nt, Homo sapiens
  misc_RNA (1)...(19): siRNA sense strand
gcagaaaagcaccucauuu

SEQ ID NO: 1466931 - RNA, 19 nt, Homo sapiens
  misc_RNA (1)...(19): siRNA sense strand
gaagaccuccgggugcuau

SEQ ID NO: 1466932 - RNA, 19 nt, Homo sapiens
  misc_RNA (1)...(19): siRNA sense strand
acgcagcacugauggauag

SEQ ID NO: 1466933 - RNA, 19 nt, Homo sapiens
  misc_RNA (1)...(19): siRNA sense strand
gaauccagcaauuacauca

SEQ ID NO: 1466934 - RNA, 19 nt, Homo sapiens
  misc_RNA (1)...(19): siRNA sense strand
ggaagugggcagggugaaa

SEQ ID NO: 1466935 - RNA, 19 nt, Homo sapiens
  misc_RNA (1)...(19): siRNA sense strand
gcaucgucauggucacaaa

SEQ ID NO: 1466936 - RNA, 19 nt, Homo sapiens
  misc_RNA (1)...(19): siRNA sense strand
gcacucugacuacaucaau

SEQ ID NO: 1466937 - RNA, 19 nt, Homo sapiens
  misc_RNA (1)...(19): siRNA sense strand
ugacauuauugagugcuuu

SEQ ID NO: 1466938 - RNA, 19 nt, Homo sapiens
  misc_RNA (1)...(19): siRNA sense strand
ugccaacccugaaggagaa

SEQ ID NO: 1466939 - RNA, 19 nt, Homo sapiens
  misc_RNA (1)...(19): siRNA sense strand
gaaacccaccaccucuuug

SEQ ID NO: 1466940 - RNA, 19 nt, Homo sapiens
  misc_RNA (1)...(19): siRNA sense strand
ggaugguuaucguauaguc

SEQ ID NO: 1466941 - RNA, 19 nt, Homo sapiens
  misc_RNA (1)...(19): siRNA sense strand
gaagauggcuggcgugauc

SEQ ID NO: 1466942 - RNA, 19 nt, Homo sapiens
  misc_RNA (1)...(19): siRNA sense strand
gaagaaaugcuuauuccua

SEQ ID NO: 1466943 - RNA, 19 nt, Homo sapiens
  misc_RNA (1)...(19): siRNA sense strand
aaaggaagcuggccaagaa

SEQ ID NO: 1466944 - RNA, 19 nt, Homo sapiens
  misc_RNA (1)...(19): siRNA sense strand
gagggcagcugacauuauu

SEQ ID NO: 1466945 - RNA, 19 nt, Homo sapiens
  misc_RNA (1)...(19): siRNA sense strand
ggaggcugguguucgauua

SEQ ID NO: 1466946 - RNA, 19 nt, Homo sapiens
  misc_RNA (1)...(19): siRNA sense strand
ggacaucauccacagaaua

SEQ ID NO: 1466947 - RNA, 19 nt, Homo sapiens
  misc_RNA (1)...(19): siRNA sense strand
ccaacuacauugacggaua

SEQ ID NO: 1466948 - RNA, 19 nt, Homo sapiens
  misc_RNA (1)...(19): siRNA sense strand
ucacaaaccugguggaagu

SEQ ID NO: 1466949 - RNA, 19 nt, Homo sapiens
  misc_RNA (1)...(19): siRNA sense strand
ccagguggcuguuccuuug

SEQ ID NO: 1466950 - RNA, 19 nt, Homo sapiens
  misc_RNA (1)...(19): siRNA sense strand
gaagaaaggcuaccaugag

SEQ ID NO: 1466951 - RNA, 19 nt, Homo sapiens
  misc_RNA (1)...(19): siRNA sense strand
gaauauuccgcaucuguaa

SEQ ID NO: 1466952 - RNA, 19 nt, Homo sapiens
  misc_RNA (1)...(19): siRNA sense strand
cacaggaucuuucaugaug

SEQ ID NO: 1466953 - RNA, 19 nt, Homo sapiens
  misc_RNA (1)...(19): siRNA sense strand
cuacuuugcugcugaguug

SEQ ID NO: 1466954 - RNA, 19 nt, Homo sapiens
  misc_RNA (1)...(19): siRNA sense strand
ggucugguguguccaacua

SEQ ID NO: 1466955 - RNA, 19 nt, Homo sapiens
  misc_RNA (1)...(19): siRNA sense strand
cgacuuccauuacuacuuc

SEQ ID NO: 1466956 - RNA, 19 nt, Homo sapiens
  misc_RNA (1)...(19): siRNA sense strand
gagaagaaaugcuuauucc

SEQ ID NO: 1466957 - RNA, 19 nt, Homo sapiens
  misc_RNA (1)...(19): siRNA sense strand
cagacaaacuccagccaaa

SEQ ID NO: 1466958 - RNA, 19 nt, Homo sapiens
  misc_RNA (1)...(19): siRNA sense strand
gcaucgacuuccauuacua

SEQ ID NO: 1466959 - RNA, 19 nt, Homo sapiens
  misc_RNA (1)...(19): siRNA sense strand
ggaaguggucucagcauga

SEQ ID NO: 1466960 - RNA, 19 nt, Homo sapiens
  misc_RNA (1)...(19): siRNA sense strand
ggaaaucguagacaucaga

SEQ ID NO: 1466961 - RNA, 19 nt, Homo sapiens
  misc_RNA (1)...(19): siRNA sense strand
aagaaaggcuaccaugaga

SEQ ID NO: 1466962 - RNA, 19 nt, Homo sapiens
  misc_RNA (1)...(19): siRNA sense strand
ggaggaauacgaggccuua

SEQ ID NO: 1466963 - RNA, 19 nt, Homo sapiens
  misc_RNA (1)...(19): siRNA sense strand
ggagaagaaaugcuuauuc

SEQ ID NO: 1466964 - RNA, 19 nt, Homo sapiens
  misc_RNA (1)...(19): siRNA sense strand
gagcuccugucaguguuua

SEQ ID NO: 1466965 - RNA, 19 nt, Homo sapiens
  misc_RNA (1)...(19): siRNA sense strand
gagaugauccagcagcaaa

SEQ ID NO: 1466966 - RNA, 19 nt, Homo sapiens
  misc_RNA (1)...(19): siRNA sense strand
gauaagaaucgaaguaugg

SEQ ID NO: 1466967 - RNA, 19 nt, Homo sapiens
  misc_RNA (1)...(19): siRNA sense strand
ggacaacaccgugaagaug

SEQ ID NO: 1466968 - RNA, 19 nt, Homo sapiens
  misc_RNA (1)...(19): siRNA sense strand
gaaaggcuaccaugagauc

SEQ ID NO: 1466969 - RNA, 19 nt, Homo sapiens
  misc_RNA (1)...(19): siRNA sense strand
gcaauaagaaucgauaugg

SEQ ID NO: 1466970 - RNA, 19 nt, Homo sapiens
  misc_RNA (1)...(19): siRNA sense strand
ugaaggaaguggaauaucg

SEQ ID NO: 1466971 - RNA, 19 nt, Homo sapiens
  misc_RNA (1)...(19): siRNA sense strand
uggagacccuggaacagua

SEQ ID NO: 1466972 - RNA, 19 nt, Homo sapiens
  misc_RNA (1)...(19): siRNA sense strand
gacaauaagacauacaaug

SEQ ID NO: 1466973 - RNA, 19 nt, Homo sapiens
  misc_RNA (1)...(19): siRNA sense strand
cggacuggcugcuucauug

SEQ ID NO: 1466974 - RNA, 19 nt, Homo sapiens
  misc_RNA (1)...(19): siRNA sense strand
gacggagaauccagcaauu

SEQ ID NO: 1466975 - RNA, 19 nt, Homo sapiens
  misc_RNA (1)...(19): siRNA sense strand
ggacggagaauccagcaau

SEQ ID NO: 1466976 - RNA, 19 nt, Homo sapiens
  misc_RNA (1)...(19): siRNA sense strand
ccagccaaaucaaagauga

SEQ ID NO: 1466977 - RNA, 19 nt, Homo sapiens
  misc_RNA (1)...(19): siRNA sense strand
caacuacauugacggauac

SEQ ID NO: 1466978 - RNA, 19 nt, Homo sapiens
  misc_RNA (1)...(19): siRNA sense strand
gcacuggaauauuuaagcu

SEQ ID NO: 1466979 - RNA, 19 nt, Homo sapiens
  misc_RNA (1)...(19): siRNA sense strand
acaggaugguuaucguaua

SEQ ID NO: 1466980 - RNA, 19 nt, Homo sapiens
  misc_RNA (1)...(19): siRNA sense strand
gacaucauccacagaauau

SEQ ID NO: 1466981 - RNA, 19 nt, Homo sapiens
  misc_RNA (1)...(19): siRNA sense strand
agacagaggagcaauaugu

SEQ ID NO: 1466982 - RNA, 19 nt, Homo sapiens
  misc_RNA (1)...(19): siRNA sense strand
aaagucacccugauugaaa

SEQ ID NO: 1466983 - RNA, 19 nt, Homo sapiens
  misc_RNA (1)...(19): siRNA sense strand
caagcgcucucugcucaaa

SEQ ID NO: 1466984 - RNA, 19 nt, Homo sapiens
  misc_RNA (1)...(19): siRNA sense strand
cagcaacugugguuauagu

SEQ ID NO: 1466985 - RNA, 19 nt, Homo sapiens
  misc_RNA (1)...(19): siRNA sense strand
uaacaacaaauccaacaug

SEQ ID NO: 1466986 - RNA, 19 nt, Homo sapiens
  misc_RNA (1)...(19): siRNA sense strand
cuacaucaaugccaacuac

SEQ ID NO: 1466987 - RNA, 19 nt, Homo sapiens
  misc_RNA (1)...(19): siRNA sense strand
gaugaaaaccgcaauaaga

SEQ ID NO: 1466988 - RNA, 19 nt, Homo sapiens
  misc_RNA (1)...(19): siRNA sense strand
ucuacgagaucaacuacaa

SEQ ID NO: 1466989 - RNA, 19 nt, Homo sapiens
  misc_RNA (1)...(19): siRNA sense strand
gggagcagauuaacacaac

SEQ ID NO: 1466990 - RNA, 19 nt, Homo sapiens
  misc_RNA (1)...(19): siRNA sense strand
gaggacaucauccacagaa

SEQ ID NO: 1466991 - RNA, 19 nt, Homo sapiens
  misc_RNA (1)...(19): siRNA sense strand
ggagcaauauguguuugug

SEQ ID NO: 1466992 - RNA, 19 nt, Homo sapiens
  misc_RNA (1)...(19): siRNA sense strand
gggcagagacccacauagu

SEQ ID NO: 1466993 - RNA, 19 nt, Homo sapiens
  misc_RNA (1)...(19): siRNA sense strand
caugauaagaaucgaagua

SEQ ID NO: 1466994 - RNA, 19 nt, Homo sapiens
  misc_RNA (1)...(19): siRNA sense strand
ugacauggccgagaaugaa

SEQ ID NO: 1466995 - RNA, 19 nt, Homo sapiens
  misc_RNA (1)...(19): siRNA sense strand
ccacggcguucccugcuau

SEQ ID NO: 1466996 - RNA, 19 nt, Homo sapiens
  misc_RNA (1)...(19): siRNA sense strand
acgcggagcugaucgugaa

SEQ ID NO: 1466997 - RNA, 19 nt, Homo sapiens
  misc_RNA (1)...(19): siRNA sense strand
agaaguggcaggagcagua

SEQ ID NO: 1466998 - RNA, 19 nt, Homo sapiens
  misc_RNA (1)...(19): siRNA sense strand
ccaaagggucaaccuggua

SEQ ID NO: 1466999 - RNA, 19 nt, Homo sapiens
  misc_RNA (1)...(19): siRNA sense strand
gaaucgauaugggaacauc

SEQ ID NO: 1467000 - RNA, 19 nt, Homo sapiens
  misc_RNA (1)...(19): siRNA sense strand
ggagggcagcugacauuau

SEQ ID NO: 1467001 - RNA, 19 nt, Homo sapiens
  misc_RNA (1)...(19): siRNA sense strand
ccacucggauugccaccaa

SEQ ID NO: 1467002 - RNA, 19 nt, Homo sapiens
  misc_RNA (1)...(19): siRNA sense strand
guggaaaccucccaaugag

SEQ ID NO: 1467003 - RNA, 19 nt, Homo sapiens
  misc_RNA (1)...(19): siRNA sense strand
gaugagcacuacagcaacu

SEQ ID NO: 1467004 - RNA, 19 nt, Homo sapiens
  misc_RNA (1)...(19): siRNA sense strand
uuacagugggugacaauaa

SEQ ID NO: 1467005 - RNA, 19 nt, Homo sapiens
  misc_RNA (1)...(19): siRNA sense strand
caggaugguuaucguauag

SEQ ID NO: 1467006 - RNA, 19 nt, Homo sapiens
  misc_RNA (1)...(19): siRNA sense strand
gaagugggcagggugaaau

SEQ ID NO: 1467007 - RNA, 19 nt, Homo sapiens
  misc_RNA (1)...(19): siRNA sense strand
caucauauccuacgaccau

SEQ ID NO: 1467008 - RNA, 19 nt, Homo sapiens
  misc_RNA (1)...(19): siRNA sense strand
gaaguggucucagcaugac

SEQ ID NO: 1467009 - RNA, 19 nt, Homo sapiens
  misc_RNA (1)...(19): siRNA sense strand
ccuggaacaguauaaauuu

SEQ ID NO: 1467010 - RNA, 19 nt, Homo sapiens
  misc_RNA (1)...(19): siRNA sense strand
ugauaagaaucgaaguaug

SEQ ID NO: 1467011 - RNA, 19 nt, Homo sapiens
  misc_RNA (1)...(19): siRNA sense strand
uaaagucacccugauugaa

SEQ ID NO: 1467012 - RNA, 19 nt, Homo sapiens
  misc_RNA (1)...(19): siRNA sense strand
ggacgucaacggauucaca

SEQ ID NO: 1467013 - RNA, 19 nt, Homo sapiens
  misc_RNA (1)...(19): siRNA sense strand
ugaaacccaccaccucuuu

SEQ ID NO: 1467014 - RNA, 19 nt, Homo sapiens
  misc_RNA (1)...(19): siRNA sense strand
gggcagcugacauuauuga

SEQ ID NO: 1467015 - RNA, 19 nt, Homo sapiens
  misc_RNA (1)...(19): siRNA sense strand
agguggcacuggaauauuu

SEQ ID NO: 1467016 - RNA, 19 nt, Homo sapiens
  misc_RNA (1)...(19): siRNA sense strand
uuucagacccucaacauug

SEQ ID NO: 1467017 - RNA, 19 nt, Homo sapiens
  misc_RNA (1)...(19): siRNA sense strand
gacaaacuccagccaaauc

SEQ ID NO: 1467018 - RNA, 19 nt, Homo sapiens
  misc_RNA (1)...(19): siRNA sense strand
gaggagcaauauguguuug

SEQ ID NO: 1467019 - RNA, 19 nt, Homo sapiens
  misc_RNA (1)...(19): siRNA sense strand
ggacacagccaaggaggau

SEQ ID NO: 1467020 - RNA, 19 nt, Homo sapiens
  misc_RNA (1)...(19): siRNA sense strand
gauggugggucuggugugu

SEQ ID NO: 1467021 - RNA, 19 nt, Homo sapiens
  misc_RNA (1)...(19): siRNA sense strand
ccacaggaugguuaucgua

SEQ ID NO: 1467022 - RNA, 19 nt, Homo sapiens
  misc_RNA (1)...(19): siRNA sense strand
ugaaaugugugcgauacug

SEQ ID NO: 1467023 - RNA, 19 nt, Homo sapiens
  misc_RNA (1)...(19): siRNA sense strand
ggugaaaugugugcgauac

SEQ ID NO: 1467024 - RNA, 19 nt, Homo sapiens
  misc_RNA (1)...(19): siRNA sense strand
ggcacuacauugcgacuca

SEQ ID NO: 1467025 - RNA, 19 nt, Homo sapiens
  misc_RNA (1)...(19): siRNA sense strand
gucaacggauucacagaug

SEQ ID NO: 1467026 - RNA, 19 nt, Homo sapiens
  misc_RNA (1)...(19): siRNA sense strand
caaaggaagcuggccaaga

SEQ ID NO: 1467027 - RNA, 19 nt, Homo sapiens
  misc_RNA (1)...(19): siRNA sense strand
cagagaagcagguggacaa

SEQ ID NO: 1467028 - RNA, 19 nt, Homo sapiens
  misc_RNA (1)...(19): siRNA sense strand
acaauaagacauacaaugg

SEQ ID NO: 1467029 - RNA, 19 nt, Homo sapiens
  misc_RNA (1)...(19): siRNA sense strand
agucgacucucccaacuau

SEQ ID NO: 1467030 - RNA, 19 nt, Homo sapiens
  misc_RNA (1)...(19): siRNA sense strand
gcagaaaagcaccucauuu

SEQ ID NO: 1467031 - RNA, 19 nt, Homo sapiens
  misc_RNA (1)...(19): siRNA sense strand
gaagaccuccgggugcuau

SEQ ID NO: 1467032 - RNA, 19 nt, Homo sapiens
  misc_RNA (1)...(19): siRNA sense strand
acgcagcacugauggauag

SEQ ID NO: 1467033 - RNA, 19 nt, Homo sapiens
  misc_RNA (1)...(19): siRNA sense strand
gaauccagcaauuacauca

SEQ ID NO: 1467034 - RNA, 19 nt, Homo sapiens
  misc_RNA (1)...(19): siRNA sense strand
ggaagugggcagggugaaa

SEQ ID NO: 1467035 - RNA, 19 nt, Homo sapiens
  misc_RNA (1)...(19): siRNA sense strand
gcaucgucauggucacaaa

SEQ ID NO: 1467036 - RNA, 19 nt, Homo sapiens
  misc_RNA (1)...(19): siRNA sense strand
gcacucugacuacaucaau

SEQ ID NO: 1467037 - RNA, 19 nt, Homo sapiens
  misc_RNA (1)...(19): siRNA sense strand
ugacauuauugagugcuuu

SEQ ID NO: 1467038 - RNA, 19 nt, Homo sapiens
  misc_RNA (1)...(19): siRNA sense strand
ugccaacccugaaggagaa

SEQ ID NO: 1467039 - RNA, 19 nt, Homo sapiens
  misc_RNA (1)...(19): siRNA sense strand
gaaacccaccaccucuuug

SEQ ID NO: 1467040 - RNA, 19 nt, Homo sapiens
  misc_RNA (1)...(19): siRNA sense strand
ggaugguuaucguauaguc

SEQ ID NO: 1467041 - RNA, 19 nt, Homo sapiens
  misc_RNA (1)...(19): siRNA sense strand
gaagaugucuguuauccuu

SEQ ID NO: 1467042 - RNA, 19 nt, Homo sapiens
  misc_RNA (1)...(19): siRNA sense strand
ggaagaggcacuccuuuaa

SEQ ID NO: 1467043 - RNA, 19 nt, Homo sapiens
  misc_RNA (1)...(19): siRNA sense strand
ugaaggaaaucaacacaaa

SEQ ID NO: 1467044 - RNA, 19 nt, Homo sapiens
  misc_RNA (1)...(19): siRNA sense strand
ccaauaaacugacguucuu

SEQ ID NO: 1467045 - RNA, 19 nt, Homo sapiens
  misc_RNA (1)...(19): siRNA sense strand
gaacuuaccgagagauaaa

SEQ ID NO: 1467046 - RNA, 19 nt, Homo sapiens
  misc_RNA (1)...(19): siRNA sense strand
gaacauaguagaugcuuau

SEQ ID NO: 1467047 - RNA, 19 nt, Homo sapiens
  misc_RNA (1)...(19): siRNA sense strand
agaaaggaauucaguguuu

SEQ ID NO: 1467048 - RNA, 19 nt, Homo sapiens
  misc_RNA (1)...(19): siRNA sense strand
uagaagaugugaagaaaug

SEQ ID NO: 1467049 - RNA, 19 nt, Homo sapiens
  misc_RNA (1)...(19): siRNA sense strand
gaaugagaaugagauguuu

SEQ ID NO: 1467050 - RNA, 19 nt, Homo sapiens
  misc_RNA (1)...(19): siRNA sense strand
ccaagucucuuaauaucuu

SEQ ID NO: 1467051 - RNA, 19 nt, Homo sapiens
  misc_RNA (1)...(19): siRNA sense strand
ggguugaguuccagaauaa

SEQ ID NO: 1467052 - RNA, 19 nt, Homo sapiens
  misc_RNA (1)...(19): siRNA sense strand
gaaugaaguuagaagaugu

SEQ ID NO: 1467053 - RNA, 19 nt, Homo sapiens
  misc_RNA (1)...(19): siRNA sense strand
gugaagaaauggaucgaaa

SEQ ID NO: 1467054 - RNA, 19 nt, Homo sapiens
  misc_RNA (1)...(19): siRNA sense strand
caacggaaauuugugaaug

SEQ ID NO: 1467055 - RNA, 19 nt, Homo sapiens
  misc_RNA (1)...(19): siRNA sense strand
ggaaauuugugaaugaagu

SEQ ID NO: 1467056 - RNA, 19 nt, Homo sapiens
  misc_RNA (1)...(19): siRNA sense strand
gggaagaggcacuccuuua

SEQ ID NO: 1467057 - RNA, 19 nt, Homo sapiens
  misc_RNA (1)...(19): siRNA sense strand
ggaggaugcugagauuauu

SEQ ID NO: 1467058 - RNA, 19 nt, Homo sapiens
  misc_RNA (1)...(19): siRNA sense strand
gaaauggcuucuggaguga

SEQ ID NO: 1467059 - RNA, 19 nt, Homo sapiens
  misc_RNA (1)...(19): siRNA sense strand
guuagaagaugugaagaaa

SEQ ID NO: 1467060 - RNA, 19 nt, Homo sapiens
  misc_RNA (1)...(19): siRNA sense strand
ggacaugauugacuuagag

SEQ ID NO: 1467061 - RNA, 19 nt, Homo sapiens
  misc_RNA (1)...(19): siRNA sense strand
ccagcuccguauacuauua

SEQ ID NO: 1467062 - RNA, 19 nt, Homo sapiens
  misc_RNA (1)...(19): siRNA sense strand
gaagggaaguuugaagagu

SEQ ID NO: 1467063 - RNA, 19 nt, Homo sapiens
  misc_RNA (1)...(19): siRNA sense strand
agaaauggaucgaaagcuu

SEQ ID NO: 1467064 - RNA, 19 nt, Homo sapiens
  misc_RNA (1)...(19): siRNA sense strand
aaagcuaacauuccgauua

SEQ ID NO: 1467065 - RNA, 19 nt, Homo sapiens
  misc_RNA (1)...(19): siRNA sense strand
ugacuuaaauccagaugug

SEQ ID NO: 1467066 - RNA, 19 nt, Homo sapiens
  misc_RNA (1)...(19): siRNA sense strand
ugaacaggaugcagacaaa

SEQ ID NO: 1467067 - RNA, 19 nt, Homo sapiens
  misc_RNA (1)...(19): siRNA sense strand
gaaguuagaagaugugaag

SEQ ID NO: 1467068 - RNA, 19 nt, Homo sapiens
  misc_RNA (1)...(19): siRNA sense strand
cggccgauguuuacuuaua

SEQ ID NO: 1467069 - RNA, 19 nt, Homo sapiens
  misc_RNA (1)...(19): siRNA sense strand
ggccgauguuuacuuauaa

SEQ ID NO: 1467070 - RNA, 19 nt, Homo sapiens
  misc_RNA (1)...(19): siRNA sense strand
acucagaaaugcuugauug

SEQ ID NO: 1467071 - RNA, 19 nt, Homo sapiens
  misc_RNA (1)...(19): siRNA sense strand
guucaguggucgauacauu

SEQ ID NO: 1467072 - RNA, 19 nt, Homo sapiens
  misc_RNA (1)...(19): siRNA sense strand
ccaacaaguuuaccuaugg

SEQ ID NO: 1467073 - RNA, 19 nt, Homo sapiens
  misc_RNA (1)...(19): siRNA sense strand
ccaaggcgaucagcugaaa

SEQ ID NO: 1467074 - RNA, 19 nt, Homo sapiens
  misc_RNA (1)...(19): siRNA sense strand
caacacugccuccuacuug

SEQ ID NO: 1467075 - RNA, 19 nt, Homo sapiens
  misc_RNA (1)...(19): siRNA sense strand
ggacagaaaggaauucagu

SEQ ID NO: 1467076 - RNA, 19 nt, Homo sapiens
  misc_RNA (1)...(19): siRNA sense strand
gcuauuugguuauccuuau

SEQ ID NO: 1467077 - RNA, 19 nt, Homo sapiens
  misc_RNA (1)...(19): siRNA sense strand
ugaaugaaguuagaagaug

SEQ ID NO: 1467078 - RNA, 19 nt, Homo sapiens
  misc_RNA (1)...(19): siRNA sense strand
acacuggccucaucuacaa

SEQ ID NO: 1467079 - RNA, 19 nt, Homo sapiens
  misc_RNA (1)...(19): siRNA sense strand
aagaggcacuccuuuaaga

SEQ ID NO: 1467080 - RNA, 19 nt, Homo sapiens
  misc_RNA (1)...(19): siRNA sense strand
aagcuaacauuccgauuau

SEQ ID NO: 1467081 - RNA, 19 nt, Homo sapiens
  misc_RNA (1)...(19): siRNA sense strand
gauggcggauccagacuug

SEQ ID NO: 1467082 - RNA, 19 nt, Homo sapiens
  misc_RNA (1)...(19): siRNA sense strand
gauugaugaucuccaaaug

SEQ ID NO: 1467083 - RNA, 19 nt, Homo sapiens
  misc_RNA (1)...(19): siRNA sense strand
uuugggaacucucaacuuu

SEQ ID NO: 1467084 - RNA, 19 nt, Homo sapiens
  misc_RNA (1)...(19): siRNA sense strand
agacuucggucauggcauu

SEQ ID NO: 1467085 - RNA, 19 nt, Homo sapiens
  misc_RNA (1)...(19): siRNA sense strand
caaaugguucugaaucaaa

SEQ ID NO: 1467086 - RNA, 19 nt, Homo sapiens
  misc_RNA (1)...(19): siRNA sense strand
caagccuucugauccauuu

SEQ ID NO: 1467087 - RNA, 19 nt, Homo sapiens
  misc_RNA (1)...(19): siRNA sense strand
gaacugaaggaaaucaaca

SEQ ID NO: 1467088 - RNA, 19 nt, Homo sapiens
  misc_RNA (1)...(19): siRNA sense strand
agaggaggaugcugagauu

SEQ ID NO: 1467089 - RNA, 19 nt, Homo sapiens
  misc_RNA (1)...(19): siRNA sense strand
gcacuacuguguguaccuu

SEQ ID NO: 1467090 - RNA, 19 nt, Homo sapiens
  misc_RNA (1)...(19): siRNA sense strand
cuucguggcuggugucauu

SEQ ID NO: 1467091 - RNA, 19 nt, Homo sapiens
  misc_RNA (1)...(19): siRNA sense strand
gaagaggcacuccuuuaag

SEQ ID NO: 1467092 - RNA, 19 nt, Homo sapiens
  misc_RNA (1)...(19): siRNA sense strand
agaugaagaugucuguuau

SEQ ID NO: 1467093 - RNA, 19 nt, Homo sapiens
  misc_RNA (1)...(19): siRNA sense strand
caaguuuaccuauggcuuu

SEQ ID NO: 1467094 - RNA, 19 nt, Homo sapiens
  misc_RNA (1)...(19): siRNA sense strand
ccaaaugguucugaaucaa

SEQ ID NO: 1467095 - RNA, 19 nt, Homo sapiens
  misc_RNA (1)...(19): siRNA sense strand
gucagaggcugcuuauugu

SEQ ID NO: 1467096 - RNA, 19 nt, Homo sapiens
  misc_RNA (1)...(19): siRNA sense strand
guucaaccauaucuauuuc

SEQ ID NO: 1467097 - RNA, 19 nt, Homo sapiens
  misc_RNA (1)...(19): siRNA sense strand
aagaugaagaugucuguua

SEQ ID NO: 1467098 - RNA, 19 nt, Homo sapiens
  misc_RNA (1)...(19): siRNA sense strand
aguagaugcuuauggaauu

SEQ ID NO: 1467099 - RNA, 19 nt, Homo sapiens
  misc_RNA (1)...(19): siRNA sense strand
gaaaaugaacugaaggaaa

SEQ ID NO: 1467100 - RNA, 19 nt, Homo sapiens
  misc_RNA (1)...(19): siRNA sense strand
cguauacuauuaucacguu

SEQ ID NO: 1467101 - RNA, 19 nt, Homo sapiens
  misc_RNA (1)...(19): siRNA sense strand
gcagacgaguuugacuuug

SEQ ID NO: 1467102 - RNA, 19 nt, Homo sapiens
  misc_RNA (1)...(19): siRNA sense strand
gaaagcauuugggaacucu

SEQ ID NO: 1467103 - RNA, 19 nt, Homo sapiens
  misc_RNA (1)...(19): siRNA sense strand
uacggccgauguuuacuua

SEQ ID NO: 1467104 - RNA, 19 nt, Homo sapiens
  misc_RNA (1)...(19): siRNA sense strand
ucuauuugcugugauguuu

SEQ ID NO: 1467105 - RNA, 19 nt, Homo sapiens
  misc_RNA (1)...(19): siRNA sense strand
agucagaggcugcuuauug

SEQ ID NO: 1467106 - RNA, 19 nt, Homo sapiens
  misc_RNA (1)...(19): siRNA sense strand
cuucaugaccucuuuguuu

SEQ ID NO: 1467107 - RNA, 19 nt, Homo sapiens
  misc_RNA (1)...(19): siRNA sense strand
cuuauggaauuggaacuua

SEQ ID NO: 1467108 - RNA, 19 nt, Homo sapiens
  misc_RNA (1)...(19): siRNA sense strand
guagaugcuuauggaauug

SEQ ID NO: 1467109 - RNA, 19 nt, Homo sapiens
  misc_RNA (1)...(19): siRNA sense strand
gugaauaccaggauugaug

SEQ ID NO: 1467110 - RNA, 19 nt, Homo sapiens
  misc_RNA (1)...(19): siRNA sense strand
gaagaaugagaaugagaug

SEQ ID NO: 1467111 - RNA, 19 nt, Homo sapiens
  misc_RNA (1)...(19): siRNA sense strand
gagcuuggcgggagguuug

SEQ ID NO: 1467112 - RNA, 19 nt, Homo sapiens
  misc_RNA (1)...(19): siRNA sense strand
cugaauaucuacuuuggau

SEQ ID NO: 1467113 - RNA, 19 nt, Homo sapiens
  misc_RNA (1)...(19): siRNA sense strand
ccauaucuauuucaagaag

SEQ ID NO: 1467114 - RNA, 19 nt, Homo sapiens
  misc_RNA (1)...(19): siRNA sense strand
uaucauccauaugcuguuu

SEQ ID NO: 1467115 - RNA, 19 nt, Homo sapiens
  misc_RNA (1)...(19): siRNA sense strand
gaacugaccgaauuaaaau

SEQ ID NO: 1467116 - RNA, 19 nt, Homo sapiens
  misc_RNA (1)...(19): siRNA sense strand
ggaccgguuucaaguucuu

SEQ ID NO: 1467117 - RNA, 19 nt, Homo sapiens
  misc_RNA (1)...(19): siRNA sense strand
ucauaaacauguuccucuu

SEQ ID NO: 1467118 - RNA, 19 nt, Homo sapiens
  misc_RNA (1)...(19): siRNA sense strand
acaaguggacggccuauga

SEQ ID NO: 1467119 - RNA, 19 nt, Homo sapiens
  misc_RNA (1)...(19): siRNA sense strand
aguggucgauacauuauuu

SEQ ID NO: 1467120 - RNA, 19 nt, Homo sapiens
  misc_RNA (1)...(19): siRNA sense strand
ggaacuuaccgagagauaa

SEQ ID NO: 1467121 - RNA, 19 nt, Homo sapiens
  misc_RNA (1)...(19): siRNA sense strand
gggacaugauugacuuaga

SEQ ID NO: 1467122 - RNA, 19 nt, Homo sapiens
  misc_RNA (1)...(19): siRNA sense strand
gggaagggaaguuugaaga

SEQ ID NO: 1467123 - RNA, 19 nt, Homo sapiens
  misc_RNA (1)...(19): siRNA sense strand
uggguugaguuccagaaua

SEQ ID NO: 1467124 - RNA, 19 nt, Homo sapiens
  misc_RNA (1)...(19): siRNA sense strand
cuuggaugcugcuguuuaa

SEQ ID NO: 1467125 - RNA, 19 nt, Homo sapiens
  misc_RNA (1)...(19): siRNA sense strand
gguucaguuucgugacuua

SEQ ID NO: 1467126 - RNA, 19 nt, Homo sapiens
  misc_RNA (1)...(19): siRNA sense strand
ggagugaauaccaggauug

SEQ ID NO: 1467127 - RNA, 19 nt, Homo sapiens
  misc_RNA (1)...(19): siRNA sense strand
guuccgagccucacucuau

SEQ ID NO: 1467128 - RNA, 19 nt, Homo sapiens
  misc_RNA (1)...(19): siRNA sense strand
ggaacugaccgaauuaaaa

SEQ ID NO: 1467129 - RNA, 19 nt, Homo sapiens
  misc_RNA (1)...(19): siRNA sense strand
gagguuuggugcuguucuu

SEQ ID NO: 1467130 - RNA, 19 nt, Homo sapiens
  misc_RNA (1)...(19): siRNA sense strand
cuucugauccauuucauaa

SEQ ID NO: 1467131 - RNA, 19 nt, Homo sapiens
  misc_RNA (1)...(19): siRNA sense strand
ucaagaagccccugaauau

SEQ ID NO: 1467132 - RNA, 19 nt, Homo sapiens
  misc_RNA (1)...(19): siRNA sense strand
agaaugagaaugagauguu

SEQ ID NO: 1467133 - RNA, 19 nt, Homo sapiens
  misc_RNA (1)...(19): siRNA sense strand
gcuaagaacauccgugucu

SEQ ID NO: 1467134 - RNA, 19 nt, Homo sapiens
  misc_RNA (1)...(19): siRNA sense strand
ucgcaaaacucagcaauuu

SEQ ID NO: 1467135 - RNA, 19 nt, Homo sapiens
  misc_RNA (1)...(19): siRNA sense strand
gaagaugugaagaaaugga

SEQ ID NO: 1467136 - RNA, 19 nt, Homo sapiens
  misc_RNA (1)...(19): siRNA sense strand
cugagucuguucaaccaua

SEQ ID NO: 1467137 - RNA, 19 nt, Homo sapiens
  misc_RNA (1)...(19): siRNA sense strand
ucaaagugcggaagaugaa

SEQ ID NO: 1467138 - RNA, 19 nt, Homo sapiens
  misc_RNA (1)...(19): siRNA sense strand
ugaauuaggagaacuugga

SEQ ID NO: 1467139 - RNA, 19 nt, Homo sapiens
  misc_RNA (1)...(19): siRNA sense strand
ucaguuucgugacuuaaau

SEQ ID NO: 1467140 - RNA, 19 nt, Homo sapiens
  misc_RNA (1)...(19): siRNA sense strand
cauaaacauguuccucuuu

SEQ ID NO: 1467141 - RNA, 19 nt, Homo sapiens
  misc_RNA (1)...(19): siRNA sense strand
gaaaugauccucacagauu

SEQ ID NO: 1467142 - RNA, 19 nt, Homo sapiens
  misc_RNA (1)...(19): siRNA sense strand
gcucagaccugcaagagaa

SEQ ID NO: 1467143 - RNA, 19 nt, Homo sapiens
  misc_RNA (1)...(19): siRNA sense strand
uaagacagagcacaaauua

SEQ ID NO: 1467144 - RNA, 19 nt, Homo sapiens
  misc_RNA (1)...(19): siRNA sense strand
caaaguaccuaagaagauu

SEQ ID NO: 1467145 - RNA, 19 nt, Homo sapiens
  misc_RNA (1)...(19): siRNA sense strand
gaaaucagcccauggagau

SEQ ID NO: 1467146 - RNA, 19 nt, Homo sapiens
  misc_RNA (1)...(19): siRNA sense strand
gcuaugguuucuaugguua

SEQ ID NO: 1467147 - RNA, 19 nt, Homo sapiens
  misc_RNA (1)...(19): siRNA sense strand
caagaacuuugccaugauu

SEQ ID NO: 1467148 - RNA, 19 nt, Homo sapiens
  misc_RNA (1)...(19): siRNA sense strand
gagaaaucaucguuacaga

SEQ ID NO: 1467149 - RNA, 19 nt, Homo sapiens
  misc_RNA (1)...(19): siRNA sense strand
ucaaacaguuccucgacua

SEQ ID NO: 1467150 - RNA, 19 nt, Homo sapiens
  misc_RNA (1)...(19): siRNA sense strand
ucacgaaguuaaagucuga

SEQ ID NO: 1467151 - RNA, 19 nt, Homo sapiens
  misc_RNA (1)...(19): siRNA sense strand
cagacaagcucccuggauu

SEQ ID NO: 1467152 - RNA, 19 nt, Homo sapiens
  misc_RNA (1)...(19): siRNA sense strand
ccaaaugaauccacauauc

SEQ ID NO: 1467153 - RNA, 19 nt, Homo sapiens
  misc_RNA (1)...(19): siRNA sense strand
gacagcaacuuucauaugg

SEQ ID NO: 1467154 - RNA, 19 nt, Homo sapiens
  misc_RNA (1)...(19): siRNA sense strand
gcucgccgcuguccaagaa

SEQ ID NO: 1467155 - RNA, 19 nt, Homo sapiens
  misc_RNA (1)...(19): siRNA sense strand
gaaaucaucguuacagaca

SEQ ID NO: 1467156 - RNA, 19 nt, Homo sapiens
  misc_RNA (1)...(19): siRNA sense strand
ggagaucgcuaagaacauc

SEQ ID NO: 1467157 - RNA, 19 nt, Homo sapiens
  misc_RNA (1)...(19): siRNA sense strand
gagcacaaauuagagauca

SEQ ID NO: 1467158 - RNA, 19 nt, Homo sapiens
  misc_RNA (1)...(19): siRNA sense strand
ucaaaguccuggguccuua

SEQ ID NO: 1467159 - RNA, 19 nt, Homo sapiens
  misc_RNA (1)...(19): siRNA sense strand
agacagagcacaaauuaga

SEQ ID NO: 1467160 - RNA, 19 nt, Homo sapiens
  misc_RNA (1)...(19): siRNA sense strand
gcguggagaucgcuaagaa

SEQ ID NO: 1467161 - RNA, 19 nt, Homo sapiens
  misc_RNA (1)...(19): siRNA sense strand
acacggagcgcaucuauga

SEQ ID NO: 1467162 - RNA, 19 nt, Homo sapiens
  misc_RNA (1)...(19): siRNA sense strand
ggcagaaccugacuuugug

SEQ ID NO: 1467163 - RNA, 19 nt, Homo sapiens
  misc_RNA (1)...(19): siRNA sense strand
gcaacuuucauauggauuu

SEQ ID NO: 1467164 - RNA, 19 nt, Homo sapiens
  misc_RNA (1)...(19): siRNA sense strand
ggaugcagcagaacuggua

SEQ ID NO: 1467165 - RNA, 19 nt, Homo sapiens
  misc_RNA (1)...(19): siRNA sense strand
gagaugacccucaaacagu

SEQ ID NO: 1467166 - RNA, 19 nt, Homo sapiens
  misc_RNA (1)...(19): siRNA sense strand
cagaaaaugucaaccagua

SEQ ID NO: 1467167 - RNA, 19 nt, Homo sapiens
  misc_RNA (1)...(19): siRNA sense strand
gaagaucaucccagccauu

SEQ ID NO: 1467168 - RNA, 19 nt, Homo sapiens
  misc_RNA (1)...(19): siRNA sense strand
ucagugcuaugguuucuau

SEQ ID NO: 1467169 - RNA, 19 nt, Homo sapiens
  misc_RNA (1)...(19): siRNA sense strand
ccaacggaauggccaagaa

SEQ ID NO: 1467170 - RNA, 19 nt, Homo sapiens
  misc_RNA (1)...(19): siRNA sense strand
gaagucaaaucugaaucga

SEQ ID NO: 1467171 - RNA, 19 nt, Homo sapiens
  misc_RNA (1)...(19): siRNA sense strand
caacuucuccgacuacauc

SEQ ID NO: 1467172 - RNA, 19 nt, Homo sapiens
  misc_RNA (1)...(19): siRNA sense strand
ugaggaggaugcagcagaa

SEQ ID NO: 1467173 - RNA, 19 nt, Homo sapiens
  misc_RNA (1)...(19): siRNA sense strand
ccacgucaccaguacuaua

SEQ ID NO: 1467174 - RNA, 19 nt, Homo sapiens
  misc_RNA (1)...(19): siRNA sense strand
ugacagagucguacaguuc

SEQ ID NO: 1467175 - RNA, 19 nt, Homo sapiens
  misc_RNA (1)...(19): siRNA sense strand
gggcagcucuucugugacu

SEQ ID NO: 1467176 - RNA, 19 nt, Homo sapiens
  misc_RNA (1)...(19): siRNA sense strand
aacaguuccucgacuauuu

SEQ ID NO: 1467177 - RNA, 19 nt, Homo sapiens
  misc_RNA (1)...(19): siRNA sense strand
caagaaugguuuccucaac

SEQ ID NO: 1467178 - RNA, 19 nt, Homo sapiens
  misc_RNA (1)...(19): siRNA sense strand
gcucuucugugacuuugga

SEQ ID NO: 1467179 - RNA, 19 nt, Homo sapiens
  misc_RNA (1)...(19): siRNA sense strand
ugaagcggcuccagacauc

SEQ ID NO: 1467180 - RNA, 19 nt, Homo sapiens
  misc_RNA (1)...(19): siRNA sense strand
gggaggaggacaucgguaa

SEQ ID NO: 1467181 - RNA, 19 nt, Homo sapiens
  misc_RNA (1)...(19): siRNA sense strand
ggacuuccuuagugguuuc

SEQ ID NO: 1467182 - RNA, 19 nt, Homo sapiens
  misc_RNA (1)...(19): siRNA sense strand
gccaaugccucuguugaug

SEQ ID NO: 1467183 - RNA, 19 nt, Homo sapiens
  misc_RNA (1)...(19): siRNA sense strand
aaaucugaaucgacaguuu

SEQ ID NO: 1467184 - RNA, 19 nt, Homo sapiens
  misc_RNA (1)...(19): siRNA sense strand
ggacaccauugagaaguca

SEQ ID NO: 1467185 - RNA, 19 nt, Homo sapiens
  misc_RNA (1)...(19): siRNA sense strand
ucaagaacuuugccaugau

SEQ ID NO: 1467186 - RNA, 19 nt, Homo sapiens
  misc_RNA (1)...(19): siRNA sense strand
ucacaaccguggcaucaag

SEQ ID NO: 1467187 - RNA, 19 nt, Homo sapiens
  misc_RNA (1)...(19): siRNA sense strand
gcagugaagcagacauaga

SEQ ID NO: 1467188 - RNA, 19 nt, Homo sapiens
  misc_RNA (1)...(19): siRNA sense strand
gcagaaaacuaugacauuc

SEQ ID NO: 1467189 - RNA, 19 nt, Homo sapiens
  misc_RNA (1)...(19): siRNA sense strand
caagcucccuggauucaag

SEQ ID NO: 1467190 - RNA, 19 nt, Homo sapiens
  misc_RNA (1)...(19): siRNA sense strand
ccaaugcccuggacaacgu

SEQ ID NO: 1467191 - RNA, 19 nt, Homo sapiens
  misc_RNA (1)...(19): siRNA sense strand
ggaaaugauccucacagau

SEQ ID NO: 1467192 - RNA, 19 nt, Homo sapiens
  misc_RNA (1)...(19): siRNA sense strand
ccuuauaccuuuagcaucu

SEQ ID NO: 1467193 - RNA, 19 nt, Homo sapiens
  misc_RNA (1)...(19): siRNA sense strand
ggagaugacccucaaacag

SEQ ID NO: 1467194 - RNA, 19 nt, Homo sapiens
  misc_RNA (1)...(19): siRNA sense strand
cacaagagcaagcugauug

SEQ ID NO: 1467195 - RNA, 19 nt, Homo sapiens
  misc_RNA (1)...(19): siRNA sense strand
ugacagcaacuuucauaug

SEQ ID NO: 1467196 - RNA, 19 nt, Homo sapiens
  misc_RNA (1)...(19): siRNA sense strand
ccauugacuuugagaagga

SEQ ID NO: 1467197 - RNA, 19 nt, Homo sapiens
  misc_RNA (1)...(19): siRNA sense strand
ccacagaccugggcugacu

SEQ ID NO: 1467198 - RNA, 19 nt, Homo sapiens
  misc_RNA (1)...(19): siRNA sense strand
ccacauauccgggugacaa

SEQ ID NO: 1467199 - RNA, 19 nt, Homo sapiens
  misc_RNA (1)...(19): siRNA sense strand
ccugggaugucacgaaguu

SEQ ID NO: 1467200 - RNA, 19 nt, Homo sapiens
  misc_RNA (1)...(19): siRNA sense strand
cucaagaacuuugccauga

SEQ ID NO: 1467201 - RNA, 19 nt, Homo sapiens
  misc_RNA (1)...(19): siRNA sense strand
uccggaagcuggcauaugu

SEQ ID NO: 1467202 - RNA, 19 nt, Homo sapiens
  misc_RNA (1)...(19): siRNA sense strand
ucaaaguaccuaagaagau

SEQ ID NO: 1467203 - RNA, 19 nt, Homo sapiens
  misc_RNA (1)...(19): siRNA sense strand
ucaaggaacgguuggauca

SEQ ID NO: 1467204 - RNA, 19 nt, Homo sapiens
  misc_RNA (1)...(19): siRNA sense strand
gcacaagagcaagcugauu

SEQ ID NO: 1467205 - RNA, 19 nt, Homo sapiens
  misc_RNA (1)...(19): siRNA sense strand
gcagcugugcgccaaauga

SEQ ID NO: 1467206 - RNA, 19 nt, Homo sapiens
  misc_RNA (1)...(19): siRNA sense strand
gaucuuuccucccaguucu

SEQ ID NO: 1467207 - RNA, 19 nt, Homo sapiens
  misc_RNA (1)...(19): siRNA sense strand
cagcaacuuucauauggau

SEQ ID NO: 1467208 - RNA, 19 nt, Homo sapiens
  misc_RNA (1)...(19): siRNA sense strand
ugcaguggcuauacuuuga

SEQ ID NO: 1467209 - RNA, 19 nt, Homo sapiens
  misc_RNA (1)...(19): siRNA sense strand
ggaaguucaugcccaucau

SEQ ID NO: 1467210 - RNA, 19 nt, Homo sapiens
  misc_RNA (1)...(19): siRNA sense strand
ggaggaggacaucgguaaa

SEQ ID NO: 1467211 - RNA, 19 nt, Homo sapiens
  misc_RNA (1)...(19): siRNA sense strand
gaugaugacagcaacuuuc

SEQ ID NO: 1467212 - RNA, 19 nt, Homo sapiens
  misc_RNA (1)...(19): siRNA sense strand
gcgagugggugaguucugu

SEQ ID NO: 1467213 - RNA, 19 nt, Homo sapiens
  misc_RNA (1)...(19): siRNA sense strand
gaucagccgaugacagaga

SEQ ID NO: 1467214 - RNA, 19 nt, Homo sapiens
  misc_RNA (1)...(19): siRNA sense strand
agaugacccucaaacaguu

SEQ ID NO: 1467215 - RNA, 19 nt, Homo sapiens
  misc_RNA (1)...(19): siRNA sense strand
agaaugguuuccucaacuu

SEQ ID NO: 1467216 - RNA, 19 nt, Homo sapiens
  misc_RNA (1)...(19): siRNA sense strand
caucgucagucaggucaaa

SEQ ID NO: 1467217 - RNA, 19 nt, Homo sapiens
  misc_RNA (1)...(19): siRNA sense strand
gcagcucuucugugacuuu

SEQ ID NO: 1467218 - RNA, 19 nt, Homo sapiens
  misc_RNA (1)...(19): siRNA sense strand
cggcgaggaugucgagguu

SEQ ID NO: 1467219 - RNA, 19 nt, Homo sapiens
  misc_RNA (1)...(19): siRNA sense strand
gcguguccaugcucuauuc

SEQ ID NO: 1467220 - RNA, 19 nt, Homo sapiens
  misc_RNA (1)...(19): siRNA sense strand
caacuuggcccugccuuuc

SEQ ID NO: 1467221 - RNA, 19 nt, Homo sapiens
  misc_RNA (1)...(19): siRNA sense strand
gagcgccaaugccucuguu

SEQ ID NO: 1467222 - RNA, 19 nt, Homo sapiens
  misc_RNA (1)...(19): siRNA sense strand
guggagaaaucaucguuac

SEQ ID NO: 1467223 - RNA, 19 nt, Homo sapiens
  misc_RNA (1)...(19): siRNA sense strand
gguggagaaaucaucguua

SEQ ID NO: 1467224 - RNA, 19 nt, Homo sapiens
  misc_RNA (1)...(19): siRNA sense strand
aagagaagcugggcaagca

SEQ ID NO: 1467225 - RNA, 19 nt, Homo sapiens
  misc_RNA (1)...(19): siRNA sense strand
aaaugauccucacagauuc

SEQ ID NO: 1467226 - RNA, 19 nt, Homo sapiens
  misc_RNA (1)...(19): siRNA sense strand
uugggcagcucuucuguga

SEQ ID NO: 1467227 - RNA, 19 nt, Homo sapiens
  misc_RNA (1)...(19): siRNA sense strand
ggaugaugacagcaacuuu

SEQ ID NO: 1467228 - RNA, 19 nt, Homo sapiens
  misc_RNA (1)...(19): siRNA sense strand
gcgucaagauccauguuuc

SEQ ID NO: 1467229 - RNA, 19 nt, Homo sapiens
  misc_RNA (1)...(19): siRNA sense strand
cacacccgcucaccuuuga

SEQ ID NO: 1467230 - RNA, 19 nt, Homo sapiens
  misc_RNA (1)...(19): siRNA sense strand
aaucaucguuacagacaug

SEQ ID NO: 1467231 - RNA, 19 nt, Homo sapiens
  misc_RNA (1)...(19): siRNA sense strand
ugggcaagcagaaguauuu

SEQ ID NO: 1467232 - RNA, 19 nt, Homo sapiens
  misc_RNA (1)...(19): siRNA sense strand
uggcagaaccugacuuugu

SEQ ID NO: 1467233 - RNA, 19 nt, Homo sapiens
  misc_RNA (1)...(19): siRNA sense strand
ggucaaaguaccuaagaag

SEQ ID NO: 1467234 - RNA, 19 nt, Homo sapiens
  misc_RNA (1)...(19): siRNA sense strand
gcucuauuccuucuucaug

SEQ ID NO: 1467235 - RNA, 19 nt, Homo sapiens
  misc_RNA (1)...(19): siRNA sense strand
accgacagcuugacuccua

SEQ ID NO: 1467236 - RNA, 19 nt, Homo sapiens
  misc_RNA (1)...(19): siRNA sense strand
caacuuucauauggauuuc

SEQ ID NO: 1467237 - RNA, 19 nt, Homo sapiens
  misc_RNA (1)...(19): siRNA sense strand
ccaaugccucuguugauga

SEQ ID NO: 1467238 - RNA, 19 nt, Homo sapiens
  misc_RNA (1)...(19): siRNA sense strand
ucuguacccugaagaacuu

SEQ ID NO: 1467239 - RNA, 19 nt, Homo sapiens
  misc_RNA (1)...(19): siRNA sense strand
ggagaaaucaucguuacag

SEQ ID NO: 1467240 - RNA, 19 nt, Homo sapiens
  misc_RNA (1)...(19): siRNA sense strand
ccagugggcugaucuuucc

SEQ ID NO: 1467241 - RNA, 19 nt, Homo sapiens
  misc_RNA (1)...(19): siRNA sense strand
gaaaugauccucacagauu

SEQ ID NO: 1467242 - RNA, 19 nt, Homo sapiens
  misc_RNA (1)...(19): siRNA sense strand
gcucagaccugcaagagaa

SEQ ID NO: 1467243 - RNA, 19 nt, Homo sapiens
  misc_RNA (1)...(19): siRNA sense strand
uaagacagagcacaaauua

SEQ ID NO: 1467244 - RNA, 19 nt, Homo sapiens
  misc_RNA (1)...(19): siRNA sense strand
caaaguaccuaagaagauu

SEQ ID NO: 1467245 - RNA, 19 nt, Homo sapiens
  misc_RNA (1)...(19): siRNA sense strand
gaaaucagcccauggagau

SEQ ID NO: 1467246 - RNA, 19 nt, Homo sapiens
  misc_RNA (1)...(19): siRNA sense strand
gcuaugguuucuaugguua

SEQ ID NO: 1467247 - RNA, 19 nt, Homo sapiens
  misc_RNA (1)...(19): siRNA sense strand
caagaacuuugccaugauu

SEQ ID NO: 1467248 - RNA, 19 nt, Homo sapiens
  misc_RNA (1)...(19): siRNA sense strand
gagaaaucaucguuacaga

SEQ ID NO: 1467249 - RNA, 19 nt, Homo sapiens
  misc_RNA (1)...(19): siRNA sense strand
ucaaacaguuccucgacua

SEQ ID NO: 1467250 - RNA, 19 nt, Homo sapiens
  misc_RNA (1)...(19): siRNA sense strand
ucacgaaguuaaagucuga

SEQ ID NO: 1467251 - RNA, 19 nt, Homo sapiens
  misc_RNA (1)...(19): siRNA sense strand
cagacaagcucccuggauu

SEQ ID NO: 1467252 - RNA, 19 nt, Homo sapiens
  misc_RNA (1)...(19): siRNA sense strand
ccaaaugaauccacauauc

SEQ ID NO: 1467253 - RNA, 19 nt, Homo sapiens
  misc_RNA (1)...(19): siRNA sense strand
gacagcaacuuucauaugg

SEQ ID NO: 1467254 - RNA, 19 nt, Homo sapiens
  misc_RNA (1)...(19): siRNA sense strand
gcucgccgcuguccaagaa

SEQ ID NO: 1467255 - RNA, 19 nt, Homo sapiens
  misc_RNA (1)...(19): siRNA sense strand
gaaaucaucguuacagaca

SEQ ID NO: 1467256 - RNA, 19 nt, Homo sapiens
  misc_RNA (1)...(19): siRNA sense strand
ggagaucgcuaagaacauc

SEQ ID NO: 1467257 - RNA, 19 nt, Homo sapiens
  misc_RNA (1)...(19): siRNA sense strand
gagcacaaauuagagauca

SEQ ID NO: 1467258 - RNA, 19 nt, Homo sapiens
  misc_RNA (1)...(19): siRNA sense strand
ucaaaguccuggguccuua

SEQ ID NO: 1467259 - RNA, 19 nt, Homo sapiens
  misc_RNA (1)...(19): siRNA sense strand
agacagagcacaaauuaga

SEQ ID NO: 1467260 - RNA, 19 nt, Homo sapiens
  misc_RNA (1)...(19): siRNA sense strand
gcguggagaucgcuaagaa

SEQ ID NO: 1467261 - RNA, 19 nt, Homo sapiens
  misc_RNA (1)...(19): siRNA sense strand
acacggagcgcaucuauga

SEQ ID NO: 1467262 - RNA, 19 nt, Homo sapiens
  misc_RNA (1)...(19): siRNA sense strand
ggcagaaccugacuuugug

SEQ ID NO: 1467263 - RNA, 19 nt, Homo sapiens
  misc_RNA (1)...(19): siRNA sense strand
gcaacuuucauauggauuu

SEQ ID NO: 1467264 - RNA, 19 nt, Homo sapiens
  misc_RNA (1)...(19): siRNA sense strand
ggaugcagcagaacuggua

SEQ ID NO: 1467265 - RNA, 19 nt, Homo sapiens
  misc_RNA (1)...(19): siRNA sense strand
gagaugacccucaaacagu

SEQ ID NO: 1467266 - RNA, 19 nt, Homo sapiens
  misc_RNA (1)...(19): siRNA sense strand
cagaaaaugucaaccagua

SEQ ID NO: 1467267 - RNA, 19 nt, Homo sapiens
  misc_RNA (1)...(19): siRNA sense strand
gaagaucaucccagccauu

SEQ ID NO: 1467268 - RNA, 19 nt, Homo sapiens
  misc_RNA (1)...(19): siRNA sense strand
ucagugcuaugguuucuau

SEQ ID NO: 1467269 - RNA, 19 nt, Homo sapiens
  misc_RNA (1)...(19): siRNA sense strand
ccaacggaauggccaagaa

SEQ ID NO: 1467270 - RNA, 19 nt, Homo sapiens
  misc_RNA (1)...(19): siRNA sense strand
gaagucaaaucugaaucga

SEQ ID NO: 1467271 - RNA, 19 nt, Homo sapiens
  misc_RNA (1)...(19): siRNA sense strand
caacuucuccgacuacauc

SEQ ID NO: 1467272 - RNA, 19 nt, Homo sapiens
  misc_RNA (1)...(19): siRNA sense strand
ugaggaggaugcagcagaa

SEQ ID NO: 1467273 - RNA, 19 nt, Homo sapiens
  misc_RNA (1)...(19): siRNA sense strand
ccacgucaccaguacuaua

SEQ ID NO: 1467274 - RNA, 19 nt, Homo sapiens
  misc_RNA (1)...(19): siRNA sense strand
ugacagagucguacaguuc

SEQ ID NO: 1467275 - RNA, 19 nt, Homo sapiens
  misc_RNA (1)...(19): siRNA sense strand
gggcagcucuucugugacu

SEQ ID NO: 1467276 - RNA, 19 nt, Homo sapiens
  misc_RNA (1)...(19): siRNA sense strand
aacaguuccucgacuauuu

SEQ ID NO: 1467277 - RNA, 19 nt, Homo sapiens
  misc_RNA (1)...(19): siRNA sense strand
caagaaugguuuccucaac

SEQ ID NO: 1467278 - RNA, 19 nt, Homo sapiens
  misc_RNA (1)...(19): siRNA sense strand
gcucuucugugacuuugga

SEQ ID NO: 1467279 - RNA, 19 nt, Homo sapiens
  misc_RNA (1)...(19): siRNA sense strand
ugaagcggcuccagacauc

SEQ ID NO: 1467280 - RNA, 19 nt, Homo sapiens
  misc_RNA (1)...(19): siRNA sense strand
gggaggaggacaucgguaa

SEQ ID NO: 1467281 - RNA, 19 nt, Homo sapiens
  misc_RNA (1)...(19): siRNA sense strand
ggacuuccuuagugguuuc

SEQ ID NO: 1467282 - RNA, 19 nt, Homo sapiens
  misc_RNA (1)...(19): siRNA sense strand
gccaaugccucuguugaug

SEQ ID NO: 1467283 - RNA, 19 nt, Homo sapiens
  misc_RNA (1)...(19): siRNA sense strand
aaaucugaaucgacaguuu

SEQ ID NO: 1467284 - RNA, 19 nt, Homo sapiens
  misc_RNA (1)...(19): siRNA sense strand
ggacaccauugagaaguca

SEQ ID NO: 1467285 - RNA, 19 nt, Homo sapiens
  misc_RNA (1)...(19): siRNA sense strand
ucaagaacuuugccaugau

SEQ ID NO: 1467286 - RNA, 19 nt, Homo sapiens
  misc_RNA (1)...(19): siRNA sense strand
ucacaaccguggcaucaag

SEQ ID NO: 1467287 - RNA, 19 nt, Homo sapiens
  misc_RNA (1)...(19): siRNA sense strand
gcagugaagcagacauaga

SEQ ID NO: 1467288 - RNA, 19 nt, Homo sapiens
  misc_RNA (1)...(19): siRNA sense strand
gcagaaaacuaugacauuc

SEQ ID NO: 1467289 - RNA, 19 nt, Homo sapiens
  misc_RNA (1)...(19): siRNA sense strand
caagcucccuggauucaag

SEQ ID NO: 1467290 - RNA, 19 nt, Homo sapiens
  misc_RNA (1)...(19): siRNA sense strand
ccaaugcccuggacaacgu

SEQ ID NO: 1467291 - RNA, 19 nt, Homo sapiens
  misc_RNA (1)...(19): siRNA sense strand
ggaaaugauccucacagau

SEQ ID NO: 1467292 - RNA, 19 nt, Homo sapiens
  misc_RNA (1)...(19): siRNA sense strand
ccuuauaccuuuagcaucu

SEQ ID NO: 1467293 - RNA, 19 nt, Homo sapiens
  misc_RNA (1)...(19): siRNA sense strand
ggagaugacccucaaacag

SEQ ID NO: 1467294 - RNA, 19 nt, Homo sapiens
  misc_RNA (1)...(19): siRNA sense strand
cacaagagcaagcugauug

SEQ ID NO: 1467295 - RNA, 19 nt, Homo sapiens
  misc_RNA (1)...(19): siRNA sense strand
ugacagcaacuuucauaug

SEQ ID NO: 1467296 - RNA, 19 nt, Homo sapiens
  misc_RNA (1)...(19): siRNA sense strand
ccauugacuuugagaagga

SEQ ID NO: 1467297 - RNA, 19 nt, Homo sapiens
  misc_RNA (1)...(19): siRNA sense strand
ccacagaccugggcugacu

SEQ ID NO: 1467298 - RNA, 19 nt, Homo sapiens
  misc_RNA (1)...(19): siRNA sense strand
ccacauauccgggugacaa

SEQ ID NO: 1467299 - RNA, 19 nt, Homo sapiens
  misc_RNA (1)...(19): siRNA sense strand
ccugggaugucacgaaguu

SEQ ID NO: 1467300 - RNA, 19 nt, Homo sapiens
  misc_RNA (1)...(19): siRNA sense strand
cucaagaacuuugccauga

SEQ ID NO: 1467301 - RNA, 19 nt, Homo sapiens
  misc_RNA (1)...(19): siRNA sense strand
uccggaagcuggcauaugu

SEQ ID NO: 1467302 - RNA, 19 nt, Homo sapiens
  misc_RNA (1)...(19): siRNA sense strand
ucaaaguaccuaagaagau

SEQ ID NO: 1467303 - RNA, 19 nt, Homo sapiens
  misc_RNA (1)...(19): siRNA sense strand
ucaaggaacgguuggauca

SEQ ID NO: 1467304 - RNA, 19 nt, Homo sapiens
  misc_RNA (1)...(19): siRNA sense strand
gcacaagagcaagcugauu

SEQ ID NO: 1467305 - RNA, 19 nt, Homo sapiens
  misc_RNA (1)...(19): siRNA sense strand
gcagcugugcgccaaauga

SEQ ID NO: 1467306 - RNA, 19 nt, Homo sapiens
  misc_RNA (1)...(19): siRNA sense strand
gaucuuuccucccaguucu

SEQ ID NO: 1467307 - RNA, 19 nt, Homo sapiens
  misc_RNA (1)...(19): siRNA sense strand
cagcaacuuucauauggau

SEQ ID NO: 1467308 - RNA, 19 nt, Homo sapiens
  misc_RNA (1)...(19): siRNA sense strand
ugcaguggcuauacuuuga

SEQ ID NO: 1467309 - RNA, 19 nt, Homo sapiens
  misc_RNA (1)...(19): siRNA sense strand
ggaaguucaugcccaucau

SEQ ID NO: 1467310 - RNA, 19 nt, Homo sapiens
  misc_RNA (1)...(19): siRNA sense strand
ggaggaggacaucgguaaa

SEQ ID NO: 1467311 - RNA, 19 nt, Homo sapiens
  misc_RNA (1)...(19): siRNA sense strand
gaugaugacagcaacuuuc

SEQ ID NO: 1467312 - RNA, 19 nt, Homo sapiens
  misc_RNA (1)...(19): siRNA sense strand
gcgagugggugaguucugu

SEQ ID NO: 1467313 - RNA, 19 nt, Homo sapiens
  misc_RNA (1)...(19): siRNA sense strand
gaucagccgaugacagaga

SEQ ID NO: 1467314 - RNA, 19 nt, Homo sapiens
  misc_RNA (1)...(19): siRNA sense strand
agaugacccucaaacaguu

SEQ ID NO: 1467315 - RNA, 19 nt, Homo sapiens
  misc_RNA (1)...(19): siRNA sense strand
agaaugguuuccucaacuu

SEQ ID NO: 1467316 - RNA, 19 nt, Homo sapiens
  misc_RNA (1)...(19): siRNA sense strand
caucgucagucaggucaaa

SEQ ID NO: 1467317 - RNA, 19 nt, Homo sapiens
  misc_RNA (1)...(19): siRNA sense strand
gcagcucuucugugacuuu

SEQ ID NO: 1467318 - RNA, 19 nt, Homo sapiens
  misc_RNA (1)...(19): siRNA sense strand
cggcgaggaugucgagguu

SEQ ID NO: 1467319 - RNA, 19 nt, Homo sapiens
  misc_RNA (1)...(19): siRNA sense strand
gcguguccaugcucuauuc

SEQ ID NO: 1467320 - RNA, 19 nt, Homo sapiens
  misc_RNA (1)...(19): siRNA sense strand
caacuuggcccugccuuuc

SEQ ID NO: 1467321 - RNA, 19 nt, Homo sapiens
  misc_RNA (1)...(19): siRNA sense strand
gagcgccaaugccucuguu

SEQ ID NO: 1467322 - RNA, 19 nt, Homo sapiens
  misc_RNA (1)...(19): siRNA sense strand
guggagaaaucaucguuac

SEQ ID NO: 1467323 - RNA, 19 nt, Homo sapiens
  misc_RNA (1)...(19): siRNA sense strand
gguggagaaaucaucguua

SEQ ID NO: 1467324 - RNA, 19 nt, Homo sapiens
  misc_RNA (1)...(19): siRNA sense strand
aagagaagcugggcaagca

SEQ ID NO: 1467325 - RNA, 19 nt, Homo sapiens
  misc_RNA (1)...(19): siRNA sense strand
aaaugauccucacagauuc

SEQ ID NO: 1467326 - RNA, 19 nt, Homo sapiens
  misc_RNA (1)...(19): siRNA sense strand
uugggcagcucuucuguga

SEQ ID NO: 1467327 - RNA, 19 nt, Homo sapiens
  misc_RNA (1)...(19): siRNA sense strand
ggaugaugacagcaacuuu

SEQ ID NO: 1467328 - RNA, 19 nt, Homo sapiens
  misc_RNA (1)...(19): siRNA sense strand
gcgucaagauccauguuuc

SEQ ID NO: 1467329 - RNA, 19 nt, Homo sapiens
  misc_RNA (1)...(19): siRNA sense strand
cacacccgcucaccuuuga

SEQ ID NO: 1467330 - RNA, 19 nt, Homo sapiens
  misc_RNA (1)...(19): siRNA sense strand
aaucaucguuacagacaug

SEQ ID NO: 1467331 - RNA, 19 nt, Homo sapiens
  misc_RNA (1)...(19): siRNA sense strand
ugggcaagcagaaguauuu

SEQ ID NO: 1467332 - RNA, 19 nt, Homo sapiens
  misc_RNA (1)...(19): siRNA sense strand
uggcagaaccugacuuugu

SEQ ID NO: 1467333 - RNA, 19 nt, Homo sapiens
  misc_RNA (1)...(19): siRNA sense strand
ggucaaaguaccuaagaag

SEQ ID NO: 1467334 - RNA, 19 nt, Homo sapiens
  misc_RNA (1)...(19): siRNA sense strand
gcucuauuccuucuucaug

SEQ ID NO: 1467335 - RNA, 19 nt, Homo sapiens
  misc_RNA (1)...(19): siRNA sense strand
accgacagcuugacuccua

SEQ ID NO: 1467336 - RNA, 19 nt, Homo sapiens
  misc_RNA (1)...(19): siRNA sense strand
caacuuucauauggauuuc

SEQ ID NO: 1467337 - RNA, 19 nt, Homo sapiens
  misc_RNA (1)...(19): siRNA sense strand
ccaaugccucuguugauga

SEQ ID NO: 1467338 - RNA, 19 nt, Homo sapiens
  misc_RNA (1)...(19): siRNA sense strand
ucuguacccugaagaacuu

SEQ ID NO: 1467339 - RNA, 19 nt, Homo sapiens
  misc_RNA (1)...(19): siRNA sense strand
ggagaaaucaucguuacag

SEQ ID NO: 1467340 - RNA, 19 nt, Homo sapiens
  misc_RNA (1)...(19): siRNA sense strand
ccagugggcugaucuuucc

SEQ ID NO: 1467341 - RNA, 19 nt, Homo sapiens
  misc_RNA (1)...(19): siRNA sense strand
gucaggccaucaaggagua

SEQ ID NO: 1467342 - RNA, 19 nt, Homo sapiens
  misc_RNA (1)...(19): siRNA sense strand
gcccuucucugcagucaag

SEQ ID NO: 1467343 - RNA, 19 nt, Homo sapiens
  misc_RNA (1)...(19): siRNA sense strand
gcuguggaguucaaauguc

SEQ ID NO: 1467344 - RNA, 19 nt, Homo sapiens
  misc_RNA (1)...(19): siRNA sense strand
aaagcccuccuccuccuua

SEQ ID NO: 1467345 - RNA, 19 nt, Homo sapiens
  misc_RNA (1)...(19): siRNA sense strand
ccuuaacccugccaguuuc

SEQ ID NO: 1467346 - RNA, 19 nt, Homo sapiens
  misc_RNA (1)...(19): siRNA sense strand
aggaguauauggacacuac

SEQ ID NO: 1467347 - RNA, 19 nt, Homo sapiens
  misc_RNA (1)...(19): siRNA sense strand
caugucaggccaucaagga

SEQ ID NO: 1467348 - RNA, 19 nt, Homo sapiens
  misc_RNA (1)...(19): siRNA sense strand
ggugugagcggaagagcau

SEQ ID NO: 1467349 - RNA, 19 nt, Homo sapiens
  misc_RNA (1)...(19): siRNA sense strand
aaucaugucaggccaucaa

SEQ ID NO: 1467350 - RNA, 19 nt, Homo sapiens
  misc_RNA (1)...(19): siRNA sense strand
gaguucaaaugucgaugcu

SEQ ID NO: 1467351 - RNA, 19 nt, Homo sapiens
  misc_RNA (1)...(19): siRNA sense strand
ggugcccucucacuugaag

SEQ ID NO: 1467352 - RNA, 19 nt, Homo sapiens
  misc_RNA (1)...(19): siRNA sense strand
gucaggccaucaaggagua

SEQ ID NO: 1467353 - RNA, 19 nt, Homo sapiens
  misc_RNA (1)...(19): siRNA sense strand
gcccuucucugcagucaag

SEQ ID NO: 1467354 - RNA, 19 nt, Homo sapiens
  misc_RNA (1)...(19): siRNA sense strand
gcuguggaguucaaauguc

SEQ ID NO: 1467355 - RNA, 19 nt, Homo sapiens
  misc_RNA (1)...(19): siRNA sense strand
aaagcccuccuccuccuua

SEQ ID NO: 1467356 - RNA, 19 nt, Homo sapiens
  misc_RNA (1)...(19): siRNA sense strand
ccuuaacccugccaguuuc

SEQ ID NO: 1467357 - RNA, 19 nt, Homo sapiens
  misc_RNA (1)...(19): siRNA sense strand
aggaguauauggacacuac

SEQ ID NO: 1467358 - RNA, 19 nt, Homo sapiens
  misc_RNA (1)...(19): siRNA sense strand
caugucaggccaucaagga

SEQ ID NO: 1467359 - RNA, 19 nt, Homo sapiens
  misc_RNA (1)...(19): siRNA sense strand
ggugugagcggaagagcau

SEQ ID NO: 1467360 - RNA, 19 nt, Homo sapiens
  misc_RNA (1)...(19): siRNA sense strand
aaucaugucaggccaucaa

SEQ ID NO: 1467361 - RNA, 19 nt, Homo sapiens
  misc_RNA (1)...(19): siRNA sense strand
gaguucaaaugucgaugcu

SEQ ID NO: 1467362 - RNA, 19 nt, Homo sapiens
  misc_RNA (1)...(19): siRNA sense strand
ggugcccucucacuugaag

SEQ ID NO: 1467363 - RNA, 19 nt, Homo sapiens
  misc_RNA (1)...(19): siRNA sense strand
gucaggccaucaaggagua

SEQ ID NO: 1467364 - RNA, 19 nt, Homo sapiens
  misc_RNA (1)...(19): siRNA sense strand
gcccuucucugcagucaag

SEQ ID NO: 1467365 - RNA, 19 nt, Homo sapiens
  misc_RNA (1)...(19): siRNA sense strand
gcuguggaguucaaauguc

SEQ ID NO: 1467366 - RNA, 19 nt, Homo sapiens
  misc_RNA (1)...(19): siRNA sense strand
aaagcccuccuccuccuua

SEQ ID NO: 1467367 - RNA, 19 nt, Homo sapiens
  misc_RNA (1)...(19): siRNA sense strand
ccuuaacccugccaguuuc

SEQ ID NO: 1467368 - RNA, 19 nt, Homo sapiens
  misc_RNA (1)...(19): siRNA sense strand
aggaguauauggacacuac

SEQ ID NO: 1467369 - RNA, 19 nt, Homo sapiens
  misc_RNA (1)...(19): siRNA sense strand
caugucaggccaucaagga

SEQ ID NO: 1467370 - RNA, 19 nt, Homo sapiens
  misc_RNA (1)...(19): siRNA sense strand
ggugugagcggaagagcau

SEQ ID NO: 1467371 - RNA, 19 nt, Homo sapiens
  misc_RNA (1)...(19): siRNA sense strand
aaucaugucaggccaucaa

SEQ ID NO: 1467372 - RNA, 19 nt, Homo sapiens
  misc_RNA (1)...(19): siRNA sense strand
gaguucaaaugucgaugcu

SEQ ID NO: 1467373 - RNA, 19 nt, Homo sapiens
  misc_RNA (1)...(19): siRNA sense strand
ggugcccucucacuugaag

SEQ ID NO: 1467374 - RNA, 19 nt, Homo sapiens
  misc_RNA (1)...(19): siRNA sense strand
gucaggccaucaaggagua

SEQ ID NO: 1467375 - RNA, 19 nt, Homo sapiens
  misc_RNA (1)...(19): siRNA sense strand
gcccuucucugcagucaag

SEQ ID NO: 1467376 - RNA, 19 nt, Homo sapiens
  misc_RNA (1)...(19): siRNA sense strand
gcuguggaguucaaauguc

SEQ ID NO: 1467377 - RNA, 19 nt, Homo sapiens
  misc_RNA (1)...(19): siRNA sense strand
aaagcccuccuccuccuua

SEQ ID NO: 1467378 - RNA, 19 nt, Homo sapiens
  misc_RNA (1)...(19): siRNA sense strand
ccuuaacccugccaguuuc

SEQ ID NO: 1467379 - RNA, 19 nt, Homo sapiens
  misc_RNA (1)...(19): siRNA sense strand
aggaguauauggacacuac

SEQ ID NO: 1467380 - RNA, 19 nt, Homo sapiens
  misc_RNA (1)...(19): siRNA sense strand
caugucaggccaucaagga

SEQ ID NO: 1467381 - RNA, 19 nt, Homo sapiens
  misc_RNA (1)...(19): siRNA sense strand
ggugugagcggaagagcau

SEQ ID NO: 1467382 - RNA, 19 nt, Homo sapiens
  misc_RNA (1)...(19): siRNA sense strand
aaucaugucaggccaucaa

SEQ ID NO: 1467383 - RNA, 19 nt, Homo sapiens
  misc_RNA (1)...(19): siRNA sense strand
gaguucaaaugucgaugcu

SEQ ID NO: 1467384 - RNA, 19 nt, Homo sapiens
  misc_RNA (1)...(19): siRNA sense strand
ggugcccucucacuugaag

SEQ ID NO: 1467385 - RNA, 19 nt, Homo sapiens
  misc_RNA (1)...(19): siRNA sense strand
gucaggccaucaaggagua

SEQ ID NO: 1467386 - RNA, 19 nt, Homo sapiens
  misc_RNA (1)...(19): siRNA sense strand
gcccuucucugcagucaag

SEQ ID NO: 1467387 - RNA, 19 nt, Homo sapiens
  misc_RNA (1)...(19): siRNA sense strand
gcuguggaguucaaauguc

SEQ ID NO: 1467388 - RNA, 19 nt, Homo sapiens
  misc_RNA (1)...(19): siRNA sense strand
aaagcccuccuccuccuua

SEQ ID NO: 1467389 - RNA, 19 nt, Homo sapiens
  misc_RNA (1)...(19): siRNA sense strand
ccuuaacccugccaguuuc

SEQ ID NO: 1467390 - RNA, 19 nt, Homo sapiens
  misc_RNA (1)...(19): siRNA sense strand
aggaguauauggacacuac

SEQ ID NO: 1467391 - RNA, 19 nt, Homo sapiens
  misc_RNA (1)...(19): siRNA sense strand
caugucaggccaucaagga

SEQ ID NO: 1467392 - RNA, 19 nt, Homo sapiens
  misc_RNA (1)...(19): siRNA sense strand
ggugugagcggaagagcau

SEQ ID NO: 1467393 - RNA, 19 nt, Homo sapiens
  misc_RNA (1)...(19): siRNA sense strand
aaucaugucaggccaucaa

SEQ ID NO: 1467394 - RNA, 19 nt, Homo sapiens
  misc_RNA (1)...(19): siRNA sense strand
gaguucaaaugucgaugcu

SEQ ID NO: 1467395 - RNA, 19 nt, Homo sapiens
  misc_RNA (1)...(19): siRNA sense strand
ggugcccucucacuugaag

SEQ ID NO: 1467396 - RNA, 19 nt, Homo sapiens
  misc_RNA (1)...(19): siRNA sense strand
gucaggccaucaaggagua

SEQ ID NO: 1467397 - RNA, 19 nt, Homo sapiens
  misc_RNA (1)...(19): siRNA sense strand
gcccuucucugcagucaag

SEQ ID NO: 1467398 - RNA, 19 nt, Homo sapiens
  misc_RNA (1)...(19): siRNA sense strand
gcuguggaguucaaauguc

SEQ ID NO: 1467399 - RNA, 19 nt, Homo sapiens
  misc_RNA (1)...(19): siRNA sense strand
aaagcccuccuccuccuua

SEQ ID NO: 1467400 - RNA, 19 nt, Homo sapiens
  misc_RNA (1)...(19): siRNA sense strand
ccuuaacccugccaguuuc

SEQ ID NO: 1467401 - RNA, 19 nt, Homo sapiens
  misc_RNA (1)...(19): siRNA sense strand
aggaguauauggacacuac

SEQ ID NO: 1467402 - RNA, 19 nt, Homo sapiens
  misc_RNA (1)...(19): siRNA sense strand
caugucaggccaucaagga

SEQ ID NO: 1467403 - RNA, 19 nt, Homo sapiens
  misc_RNA (1)...(19): siRNA sense strand
ggugugagcggaagagcau

SEQ ID NO: 1467404 - RNA, 19 nt, Homo sapiens
  misc_RNA (1)...(19): siRNA sense strand
aaucaugucaggccaucaa

SEQ ID NO: 1467405 - RNA, 19 nt, Homo sapiens
  misc_RNA (1)...(19): siRNA sense strand
gaguucaaaugucgaugcu

SEQ ID NO: 1467406 - RNA, 19 nt, Homo sapiens
  misc_RNA (1)...(19): siRNA sense strand
ggugcccucucacuugaag

SEQ ID NO: 1467407 - RNA, 19 nt, Homo sapiens
  misc_RNA (1)...(19): siRNA sense strand
gcccuucucugcagucaag

SEQ ID NO: 1467408 - RNA, 19 nt, Homo sapiens
  misc_RNA (1)...(19): siRNA sense strand
gcuguggaguucaaauguc

SEQ ID NO: 1467409 - RNA, 19 nt, Homo sapiens
  misc_RNA (1)...(19): siRNA sense strand
aaagcccuccuccuccuua

SEQ ID NO: 1467410 - RNA, 19 nt, Homo sapiens
  misc_RNA (1)...(19): siRNA sense strand
ccuuaacccugccaguuuc

SEQ ID NO: 1467411 - RNA, 19 nt, Homo sapiens
  misc_RNA (1)...(19): siRNA sense strand
ggugugagcggaagagcau

SEQ ID NO: 1467412 - RNA, 19 nt, Homo sapiens
  misc_RNA (1)...(19): siRNA sense strand
ggugcccucucacuugaag

SEQ ID NO: 1467413 - RNA, 19 nt, Homo sapiens
  misc_RNA (1)...(19): siRNA sense strand
gaguucaaaugucgaugcu

SEQ ID NO: 1467414 - RNA, 19 nt, Homo sapiens
  misc_RNA (1)...(19): siRNA sense strand
guauuuggcggcaguguua

SEQ ID NO: 1467415 - RNA, 19 nt, Homo sapiens
  misc_RNA (1)...(19): siRNA sense strand
ggcaaugcgucucgcgaua

SEQ ID NO: 1467416 - RNA, 19 nt, Homo sapiens
  misc_RNA (1)...(19): siRNA sense strand
gauccgcaaugaugaggaa

SEQ ID NO: 1467417 - RNA, 19 nt, Homo sapiens
  misc_RNA (1)...(19): siRNA sense strand
gcaaugcgucucgcgauaa

SEQ ID NO: 1467418 - RNA, 19 nt, Homo sapiens
  misc_RNA (1)...(19): siRNA sense strand
gaggaacucaauaagcuuu

SEQ ID NO: 1467419 - RNA, 19 nt, Homo sapiens
  misc_RNA (1)...(19): siRNA sense strand
uggcggcaguguuagagua

SEQ ID NO: 1467420 - RNA, 19 nt, Homo sapiens
  misc_RNA (1)...(19): siRNA sense strand
gagagucaccaccauaaag

SEQ ID NO: 1467421 - RNA, 19 nt, Homo sapiens
  misc_RNA (1)...(19): siRNA sense strand
uagagcggguuugcaguuu

SEQ ID NO: 1467422 - RNA, 19 nt, Homo sapiens
  misc_RNA (1)...(19): siRNA sense strand
gagggaagcagggaggaaa

SEQ ID NO: 1467423 - RNA, 19 nt, Homo sapiens
  misc_RNA (1)...(19): siRNA sense strand
gcggaguccugccuaacau

SEQ ID NO: 1467424 - RNA, 19 nt, Homo sapiens
  misc_RNA (1)...(19): siRNA sense strand
aaacuaugcagagcggaua

SEQ ID NO: 1467425 - RNA, 19 nt, Homo sapiens
  misc_RNA (1)...(19): siRNA sense strand
ggaguccugccuaacauuc

SEQ ID NO: 1467426 - RNA, 19 nt, Homo sapiens
  misc_RNA (1)...(19): siRNA sense strand
uccaucgucugcuucguaa

SEQ ID NO: 1467427 - RNA, 19 nt, Homo sapiens
  misc_RNA (1)...(19): siRNA sense strand
gcagcuagcgauccgcaau

SEQ ID NO: 1467428 - RNA, 19 nt, Homo sapiens
  misc_RNA (1)...(19): siRNA sense strand
gaguaucucacagcagaaa

SEQ ID NO: 1467429 - RNA, 19 nt, Homo sapiens
  misc_RNA (1)...(19): siRNA sense strand
ggcaggcgcaccaguguau

SEQ ID NO: 1467430 - RNA, 19 nt, Homo sapiens
  misc_RNA (1)...(19): siRNA sense strand
uaaagcccaaagcaaguaa

SEQ ID NO: 1467431 - RNA, 19 nt, Homo sapiens
  misc_RNA (1)...(19): siRNA sense strand
cauaaagcccaaagcaagu

SEQ ID NO: 1467432 - RNA, 19 nt, Homo sapiens
  misc_RNA (1)...(19): siRNA sense strand
gaaaagcacgcgccaaguc

SEQ ID NO: 1467433 - RNA, 19 nt, Homo sapiens
  misc_RNA (1)...(19): siRNA sense strand
ucucacagcagaaauccuu

SEQ ID NO: 1467434 - RNA, 19 nt, Homo sapiens
  misc_RNA (1)...(19): siRNA sense strand
ugagagucaccaccauaaa

SEQ ID NO: 1467435 - RNA, 19 nt, Homo sapiens
  misc_RNA (1)...(19): siRNA sense strand
cagugcugcugcccaagaa

SEQ ID NO: 1467436 - RNA, 19 nt, Homo sapiens
  misc_RNA (1)...(19): siRNA sense strand
caggcgcaccaguguauuu

SEQ ID NO: 1467437 - RNA, 19 nt, Homo sapiens
  misc_RNA (1)...(19): siRNA sense strand
cuaagucucgcucuucuag

SEQ ID NO: 1467438 - RNA, 19 nt, Homo sapiens
  misc_RNA (1)...(19): siRNA sense strand
cuagcgauccgcaaugaug

SEQ ID NO: 1467439 - RNA, 19 nt, Homo sapiens
  misc_RNA (1)...(19): siRNA sense strand
caaugcgucucgcgauaac

SEQ ID NO: 1467440 - RNA, 19 nt, Homo sapiens
  misc_RNA (1)...(19): siRNA sense strand
ccggauccaucgucugcuu

SEQ ID NO: 1467441 - RNA, 19 nt, Homo sapiens
  misc_RNA (1)...(19): siRNA sense strand
gcacgcgccaagucuaagu

SEQ ID NO: 1467442 - RNA, 19 nt, Homo sapiens
  misc_RNA (1)...(19): siRNA sense strand
cugagagucaccaccauaa

SEQ ID NO: 1467443 - RNA, 19 nt, Homo sapiens
  misc_RNA (1)...(19): siRNA sense strand
cuagagcggguuugcaguu

SEQ ID NO: 1467444 - RNA, 19 nt, Homo sapiens
  misc_RNA (1)...(19): siRNA sense strand
ucacagcagaaauccuuga

SEQ ID NO: 1467445 - RNA, 19 nt, Homo sapiens
  misc_RNA (1)...(19): siRNA sense strand
aagcacgcgccaagucuaa

SEQ ID NO: 1467446 - RNA, 19 nt, Homo sapiens
  misc_RNA (1)...(19): siRNA sense strand
auaaagcccaaagcaagua

SEQ ID NO: 1467447 - RNA, 19 nt, Homo sapiens
  misc_RNA (1)...(19): siRNA sense strand
aaagcacgcgccaagucua

SEQ ID NO: 1467448 - RNA, 19 nt, Homo sapiens
  misc_RNA (1)...(19): siRNA sense strand
gagcggguuugcaguuucc

SEQ ID NO: 1467449 - RNA, 19 nt, Homo sapiens
  misc_RNA (1)...(19): siRNA sense strand
gaacaaugccuucaaacau

SEQ ID NO: 1467450 - RNA, 19 nt, Homo sapiens
  misc_RNA (1)...(19): siRNA sense strand
aacaaugccuucaaacaua

SEQ ID NO: 1467451 - RNA, 19 nt, Homo sapiens
  misc_RNA (1)...(19): siRNA sense strand
gagaagcaguggaaugugu

SEQ ID NO: 1467452 - RNA, 19 nt, Homo sapiens
  misc_RNA (1)...(19): siRNA sense strand
ggacaaguggugaauauca

SEQ ID NO: 1467453 - RNA, 19 nt, Homo sapiens
  misc_RNA (1)...(19): siRNA sense strand
ucaaagccaucgugaacaa

SEQ ID NO: 1467454 - RNA, 19 nt, Homo sapiens
  misc_RNA (1)...(19): siRNA sense strand
ggacagaagaggagaagau

SEQ ID NO: 1467455 - RNA, 19 nt, Homo sapiens
  misc_RNA (1)...(19): siRNA sense strand
caucaacagugccuuuaug

SEQ ID NO: 1467456 - RNA, 19 nt, Homo sapiens
  misc_RNA (1)...(19): siRNA sense strand
gacaaguggugaauaucaa

SEQ ID NO: 1467457 - RNA, 19 nt, Homo sapiens
  misc_RNA (1)...(19): siRNA sense strand
gauccagaaugucggaaau

SEQ ID NO: 1467458 - RNA, 19 nt, Homo sapiens
  misc_RNA (1)...(19): siRNA sense strand
ccacggaggugcagaugag

SEQ ID NO: 1467459 - RNA, 19 nt, Homo sapiens
  misc_RNA (1)...(19): siRNA sense strand
acaauaacgucuccuccuu

SEQ ID NO: 1467460 - RNA, 19 nt, Homo sapiens
  misc_RNA (1)...(19): siRNA sense strand
ugucacagcuuccauggau

SEQ ID NO: 1467461 - RNA, 19 nt, Homo sapiens
  misc_RNA (1)...(19): siRNA sense strand
gaggaccugugcucugaga

SEQ ID NO: 1467462 - RNA, 19 nt, Homo sapiens
  misc_RNA (1)...(19): siRNA sense strand
aauaacgucuccuccuuga

SEQ ID NO: 1467463 - RNA, 19 nt, Homo sapiens
  misc_RNA (1)...(19): siRNA sense strand
gccgagagaucaccaaggu

SEQ ID NO: 1467464 - RNA, 19 nt, Homo sapiens
  misc_RNA (1)...(19): siRNA sense strand
gggcuuggccucuguguuc

SEQ ID NO: 1467465 - RNA, 19 nt, Homo sapiens
  misc_RNA (1)...(19): siRNA sense strand
cggaggaccugugcucuga

SEQ ID NO: 1467466 - RNA, 19 nt, Homo sapiens
  misc_RNA (1)...(19): siRNA sense strand
gcucugagaagcaguggaa

SEQ ID NO: 1467467 - RNA, 19 nt, Homo sapiens
  misc_RNA (1)...(19): siRNA sense strand
ccacaucaacagugccuuu

SEQ ID NO: 1467468 - RNA, 19 nt, Homo sapiens
  misc_RNA (1)...(19): siRNA sense strand
gcucaaagccaucgugaac

SEQ ID NO: 1467469 - RNA, 19 nt, Homo sapiens
  misc_RNA (1)...(19): siRNA sense strand
uguacacucuggaggauga

SEQ ID NO: 1467470 - RNA, 19 nt, Homo sapiens
  misc_RNA (1)...(19): siRNA sense strand
cagaagaggagaagaugga

SEQ ID NO: 1467471 - RNA, 19 nt, Homo sapiens
  misc_RNA (1)...(19): siRNA sense strand
uaacgucuccuccuugaag

SEQ ID NO: 1467472 - RNA, 19 nt, Homo sapiens
  misc_RNA (1)...(19): siRNA sense strand
gaagacccguguggagagu

SEQ ID NO: 1467473 - RNA, 19 nt, Homo sapiens
  misc_RNA (1)...(19): siRNA sense strand
ucacagcuuccauggauga

SEQ ID NO: 1467474 - RNA, 19 nt, Homo sapiens
  misc_RNA (1)...(19): siRNA sense strand
acaaugccuucaaacauag

SEQ ID NO: 1467475 - RNA, 19 nt, Homo sapiens
  misc_RNA (1)...(19): siRNA sense strand
uuggacaaguggugaauau

SEQ ID NO: 1467476 - RNA, 19 nt, Homo sapiens
  misc_RNA (1)...(19): siRNA sense strand
gagaggccagugccagaaa

SEQ ID NO: 1467477 - RNA, 19 nt, Homo sapiens
  misc_RNA (1)...(19): siRNA sense strand
ucgggcagcugcucaagug

SEQ ID NO: 1467478 - RNA, 19 nt, Homo sapiens
  misc_RNA (1)...(19): siRNA sense strand
gcauggugccggcugagaa

SEQ ID NO: 1467479 - RNA, 19 nt, Homo sapiens
  misc_RNA (1)...(19): siRNA sense strand
uaccugagcuacaauaacg

SEQ ID NO: 1467480 - RNA, 19 nt, Homo sapiens
  misc_RNA (1)...(19): siRNA sense strand
ucuggaggaugacaaguuc

SEQ ID NO: 1467481 - RNA, 19 nt, Homo sapiens
  misc_RNA (1)...(19): siRNA sense strand
uggccuggauggagaaugu

SEQ ID NO: 1467482 - RNA, 19 nt, Homo sapiens
  misc_RNA (1)...(19): siRNA sense strand
cagcuuccauggaugacau

SEQ ID NO: 1467483 - RNA, 19 nt, Homo sapiens
  misc_RNA (1)...(19): siRNA sense strand
gagagacgccagaguacag

SEQ ID NO: 1467484 - RNA, 19 nt, Homo sapiens
  misc_RNA (1)...(19): siRNA sense strand
gacagaagaggagaagaug

SEQ ID NO: 1467485 - RNA, 19 nt, Homo sapiens
  misc_RNA (1)...(19): siRNA sense strand
caccauuaguguuggacaa

SEQ ID NO: 1467486 - RNA, 19 nt, Homo sapiens
  misc_RNA (1)...(19): siRNA sense strand
cauuaguguuggacaagug

SEQ ID NO: 1467487 - RNA, 19 nt, Homo sapiens
  misc_RNA (1)...(19): siRNA sense strand
ggagcuagugcagcaggua

SEQ ID NO: 1467488 - RNA, 19 nt, Homo sapiens
  misc_RNA (1)...(19): siRNA sense strand
aggugaagcugaagcagau

SEQ ID NO: 1467489 - RNA, 19 nt, Homo sapiens
  misc_RNA (1)...(19): siRNA sense strand
ggaccugugcucugagaag

SEQ ID NO: 1467490 - RNA, 19 nt, Homo sapiens
  misc_RNA (1)...(19): siRNA sense strand
uccagaaugucggaaauca

SEQ ID NO: 1467491 - RNA, 19 nt, Homo sapiens
  misc_RNA (1)...(19): siRNA sense strand
ggcagcugcucaaguggau

SEQ ID NO: 1467492 - RNA, 19 nt, Homo sapiens
  misc_RNA (1)...(19): siRNA sense strand
cacaucaacagugccuuua

SEQ ID NO: 1467493 - RNA, 19 nt, Homo sapiens
  misc_RNA (1)...(19): siRNA sense strand
gccagugccagaaagaaga

SEQ ID NO: 1467494 - RNA, 19 nt, Homo sapiens
  misc_RNA (1)...(19): siRNA sense strand
uggcagacggcgagggaua

SEQ ID NO: 1467495 - RNA, 19 nt, Homo sapiens
  misc_RNA (1)...(19): siRNA sense strand
ucaccagggcaacaccuuu

SEQ ID NO: 1467496 - RNA, 19 nt, Homo sapiens
  misc_RNA (1)...(19): siRNA sense strand
cagcugcucaaguggauug

SEQ ID NO: 1467497 - RNA, 19 nt, Homo sapiens
  misc_RNA (1)...(19): siRNA sense strand
gcgaccgucuggugcucaa

SEQ ID NO: 1467498 - RNA, 19 nt, Homo sapiens
  misc_RNA (1)...(19): siRNA sense strand
gaguacagacgcggagaga

SEQ ID NO: 1467499 - RNA, 19 nt, Homo sapiens
  misc_RNA (1)...(19): siRNA sense strand
acacaaagccccaggacuu

SEQ ID NO: 1467500 - RNA, 19 nt, Homo sapiens
  misc_RNA (1)...(19): siRNA sense strand
uggagaugguggugcaugu

SEQ ID NO: 1467501 - RNA, 19 nt, Homo sapiens
  misc_RNA (1)...(19): siRNA sense strand
acagugccuuuaugaccuu

SEQ ID NO: 1467502 - RNA, 19 nt, Homo sapiens
  misc_RNA (1)...(19): siRNA sense strand
uggagaauguggccaccau

SEQ ID NO: 1467503 - RNA, 19 nt, Homo sapiens
  misc_RNA (1)...(19): siRNA sense strand
guuccucuccuuccacaug

SEQ ID NO: 1467504 - RNA, 19 nt, Homo sapiens
  misc_RNA (1)...(19): siRNA sense strand
caccagggcaacaccuuug

SEQ ID NO: 1467505 - RNA, 19 nt, Homo sapiens
  misc_RNA (1)...(19): siRNA sense strand
accgagagacgccagagua

SEQ ID NO: 1467506 - RNA, 19 nt, Homo sapiens
  misc_RNA (1)...(19): siRNA sense strand
acaaguuccucuccuucca

SEQ ID NO: 1467507 - RNA, 19 nt, Homo sapiens
  misc_RNA (1)...(19): siRNA sense strand
gugcuguccucggagauca

SEQ ID NO: 1467508 - RNA, 19 nt, Homo sapiens
  misc_RNA (1)...(19): siRNA sense strand
aaagccaucgugaacaaug

SEQ ID NO: 1467509 - RNA, 19 nt, Homo sapiens
  misc_RNA (1)...(19): siRNA sense strand
gaacaaugccuucaaacau

SEQ ID NO: 1467510 - RNA, 19 nt, Homo sapiens
  misc_RNA (1)...(19): siRNA sense strand
aacaaugccuucaaacaua

SEQ ID NO: 1467511 - RNA, 19 nt, Homo sapiens
  misc_RNA (1)...(19): siRNA sense strand
gagaagcaguggaaugugu

SEQ ID NO: 1467512 - RNA, 19 nt, Homo sapiens
  misc_RNA (1)...(19): siRNA sense strand
ggacaaguggugaauauca

SEQ ID NO: 1467513 - RNA, 19 nt, Homo sapiens
  misc_RNA (1)...(19): siRNA sense strand
ucaaagccaucgugaacaa

SEQ ID NO: 1467514 - RNA, 19 nt, Homo sapiens
  misc_RNA (1)...(19): siRNA sense strand
ggacagaagaggagaagau

SEQ ID NO: 1467515 - RNA, 19 nt, Homo sapiens
  misc_RNA (1)...(19): siRNA sense strand
caucaacagugccuuuaug

SEQ ID NO: 1467516 - RNA, 19 nt, Homo sapiens
  misc_RNA (1)...(19): siRNA sense strand
gacaaguggugaauaucaa

SEQ ID NO: 1467517 - RNA, 19 nt, Homo sapiens
  misc_RNA (1)...(19): siRNA sense strand
gauccagaaugucggaaau

SEQ ID NO: 1467518 - RNA, 19 nt, Homo sapiens
  misc_RNA (1)...(19): siRNA sense strand
ccacggaggugcagaugag

SEQ ID NO: 1467519 - RNA, 19 nt, Homo sapiens
  misc_RNA (1)...(19): siRNA sense strand
acaauaacgucuccuccuu

SEQ ID NO: 1467520 - RNA, 19 nt, Homo sapiens
  misc_RNA (1)...(19): siRNA sense strand
ugucacagcuuccauggau

SEQ ID NO: 1467521 - RNA, 19 nt, Homo sapiens
  misc_RNA (1)...(19): siRNA sense strand
gaggaccugugcucugaga

SEQ ID NO: 1467522 - RNA, 19 nt, Homo sapiens
  misc_RNA (1)...(19): siRNA sense strand
aauaacgucuccuccuuga

SEQ ID NO: 1467523 - RNA, 19 nt, Homo sapiens
  misc_RNA (1)...(19): siRNA sense strand
gccgagagaucaccaaggu

SEQ ID NO: 1467524 - RNA, 19 nt, Homo sapiens
  misc_RNA (1)...(19): siRNA sense strand
gggcuuggccucuguguuc

SEQ ID NO: 1467525 - RNA, 19 nt, Homo sapiens
  misc_RNA (1)...(19): siRNA sense strand
cggaggaccugugcucuga

SEQ ID NO: 1467526 - RNA, 19 nt, Homo sapiens
  misc_RNA (1)...(19): siRNA sense strand
gcucugagaagcaguggaa

SEQ ID NO: 1467527 - RNA, 19 nt, Homo sapiens
  misc_RNA (1)...(19): siRNA sense strand
ccacaucaacagugccuuu

SEQ ID NO: 1467528 - RNA, 19 nt, Homo sapiens
  misc_RNA (1)...(19): siRNA sense strand
gcucaaagccaucgugaac

SEQ ID NO: 1467529 - RNA, 19 nt, Homo sapiens
  misc_RNA (1)...(19): siRNA sense strand
uguacacucuggaggauga

SEQ ID NO: 1467530 - RNA, 19 nt, Homo sapiens
  misc_RNA (1)...(19): siRNA sense strand
cagaagaggagaagaugga

SEQ ID NO: 1467531 - RNA, 19 nt, Homo sapiens
  misc_RNA (1)...(19): siRNA sense strand
uaacgucuccuccuugaag

SEQ ID NO: 1467532 - RNA, 19 nt, Homo sapiens
  misc_RNA (1)...(19): siRNA sense strand
gaagacccguguggagagu

SEQ ID NO: 1467533 - RNA, 19 nt, Homo sapiens
  misc_RNA (1)...(19): siRNA sense strand
ucacagcuuccauggauga

SEQ ID NO: 1467534 - RNA, 19 nt, Homo sapiens
  misc_RNA (1)...(19): siRNA sense strand
acaaugccuucaaacauag

SEQ ID NO: 1467535 - RNA, 19 nt, Homo sapiens
  misc_RNA (1)...(19): siRNA sense strand
uuggacaaguggugaauau

SEQ ID NO: 1467536 - RNA, 19 nt, Homo sapiens
  misc_RNA (1)...(19): siRNA sense strand
gagaggccagugccagaaa

SEQ ID NO: 1467537 - RNA, 19 nt, Homo sapiens
  misc_RNA (1)...(19): siRNA sense strand
ucgggcagcugcucaagug

SEQ ID NO: 1467538 - RNA, 19 nt, Homo sapiens
  misc_RNA (1)...(19): siRNA sense strand
gcauggugccggcugagaa

SEQ ID NO: 1467539 - RNA, 19 nt, Homo sapiens
  misc_RNA (1)...(19): siRNA sense strand
uaccugagcuacaauaacg

SEQ ID NO: 1467540 - RNA, 19 nt, Homo sapiens
  misc_RNA (1)...(19): siRNA sense strand
ucuggaggaugacaaguuc

SEQ ID NO: 1467541 - RNA, 19 nt, Homo sapiens
  misc_RNA (1)...(19): siRNA sense strand
uggccuggauggagaaugu

SEQ ID NO: 1467542 - RNA, 19 nt, Homo sapiens
  misc_RNA (1)...(19): siRNA sense strand
cagcuuccauggaugacau

SEQ ID NO: 1467543 - RNA, 19 nt, Homo sapiens
  misc_RNA (1)...(19): siRNA sense strand
gagagacgccagaguacag

SEQ ID NO: 1467544 - RNA, 19 nt, Homo sapiens
  misc_RNA (1)...(19): siRNA sense strand
gacagaagaggagaagaug

SEQ ID NO: 1467545 - RNA, 19 nt, Homo sapiens
  misc_RNA (1)...(19): siRNA sense strand
caccauuaguguuggacaa

SEQ ID NO: 1467546 - RNA, 19 nt, Homo sapiens
  misc_RNA (1)...(19): siRNA sense strand
cauuaguguuggacaagug

SEQ ID NO: 1467547 - RNA, 19 nt, Homo sapiens
  misc_RNA (1)...(19): siRNA sense strand
ggagcuagugcagcaggua

SEQ ID NO: 1467548 - RNA, 19 nt, Homo sapiens
  misc_RNA (1)...(19): siRNA sense strand
aggugaagcugaagcagau

SEQ ID NO: 1467549 - RNA, 19 nt, Homo sapiens
  misc_RNA (1)...(19): siRNA sense strand
ggaccugugcucugagaag

SEQ ID NO: 1467550 - RNA, 19 nt, Homo sapiens
  misc_RNA (1)...(19): siRNA sense strand
uccagaaugucggaaauca

SEQ ID NO: 1467551 - RNA, 19 nt, Homo sapiens
  misc_RNA (1)...(19): siRNA sense strand
ggcagcugcucaaguggau

SEQ ID NO: 1467552 - RNA, 19 nt, Homo sapiens
  misc_RNA (1)...(19): siRNA sense strand
cacaucaacagugccuuua

SEQ ID NO: 1467553 - RNA, 19 nt, Homo sapiens
  misc_RNA (1)...(19): siRNA sense strand
gccagugccagaaagaaga

SEQ ID NO: 1467554 - RNA, 19 nt, Homo sapiens
  misc_RNA (1)...(19): siRNA sense strand
uggcagacggcgagggaua

SEQ ID NO: 1467555 - RNA, 19 nt, Homo sapiens
  misc_RNA (1)...(19): siRNA sense strand
ucaccagggcaacaccuuu

SEQ ID NO: 1467556 - RNA, 19 nt, Homo sapiens
  misc_RNA (1)...(19): siRNA sense strand
cagcugcucaaguggauug

SEQ ID NO: 1467557 - RNA, 19 nt, Homo sapiens
  misc_RNA (1)...(19): siRNA sense strand
gcgaccgucuggugcucaa

SEQ ID NO: 1467558 - RNA, 19 nt, Homo sapiens
  misc_RNA (1)...(19): siRNA sense strand
gaguacagacgcggagaga

SEQ ID NO: 1467559 - RNA, 19 nt, Homo sapiens
  misc_RNA (1)...(19): siRNA sense strand
acacaaagccccaggacuu

SEQ ID NO: 1467560 - RNA, 19 nt, Homo sapiens
  misc_RNA (1)...(19): siRNA sense strand
uggagaugguggugcaugu

SEQ ID NO: 1467561 - RNA, 19 nt, Homo sapiens
  misc_RNA (1)...(19): siRNA sense strand
acagugccuuuaugaccuu

SEQ ID NO: 1467562 - RNA, 19 nt, Homo sapiens
  misc_RNA (1)...(19): siRNA sense strand
uggagaauguggccaccau

SEQ ID NO: 1467563 - RNA, 19 nt, Homo sapiens
  misc_RNA (1)...(19): siRNA sense strand
guuccucuccuuccacaug

SEQ ID NO: 1467564 - RNA, 19 nt, Homo sapiens
  misc_RNA (1)...(19): siRNA sense strand
caccagggcaacaccuuug

SEQ ID NO: 1467565 - RNA, 19 nt, Homo sapiens
  misc_RNA (1)...(19): siRNA sense strand
accgagagacgccagagua

SEQ ID NO: 1467566 - RNA, 19 nt, Homo sapiens
  misc_RNA (1)...(19): siRNA sense strand
acaaguuccucuccuucca

SEQ ID NO: 1467567 - RNA, 19 nt, Homo sapiens
  misc_RNA (1)...(19): siRNA sense strand
gugcuguccucggagauca

SEQ ID NO: 1467568 - RNA, 19 nt, Homo sapiens
  misc_RNA (1)...(19): siRNA sense strand
aaagccaucgugaacaaug

SEQ ID NO: 1467569 - RNA, 19 nt, Homo sapiens
  misc_RNA (1)...(19): siRNA sense strand
gaaguaugcugaugugauc

SEQ ID NO: 1467570 - RNA, 19 nt, Homo sapiens
  misc_RNA (1)...(19): siRNA sense strand
agaaaucacugaagggaaa

SEQ ID NO: 1467571 - RNA, 19 nt, Homo sapiens
  misc_RNA (1)...(19): siRNA sense strand
gaauucugcuugccaacaa

SEQ ID NO: 1467572 - RNA, 19 nt, Homo sapiens
  misc_RNA (1)...(19): siRNA sense strand
cgagaccuguuccagauga

SEQ ID NO: 1467573 - RNA, 19 nt, Homo sapiens
  misc_RNA (1)...(19): siRNA sense strand
ggcgagcccuuccuuauag

SEQ ID NO: 1467574 - RNA, 19 nt, Homo sapiens
  misc_RNA (1)...(19): siRNA sense strand
agaaugagguggacuaucg

SEQ ID NO: 1467575 - RNA, 19 nt, Homo sapiens
  misc_RNA (1)...(19): siRNA sense strand
aaagaaguaugcugaugug

SEQ ID NO: 1467576 - RNA, 19 nt, Homo sapiens
  misc_RNA (1)...(19): siRNA sense strand
caaagaaguaugcugaugu

SEQ ID NO: 1467577 - RNA, 19 nt, Homo sapiens
  misc_RNA (1)...(19): siRNA sense strand
cggcaagucuuccgugugu

SEQ ID NO: 1467578 - RNA, 19 nt, Homo sapiens
  misc_RNA (1)...(19): siRNA sense strand
cggaugccuuugacaauga

SEQ ID NO: 1467579 - RNA, 19 nt, Homo sapiens
  misc_RNA (1)...(19): siRNA sense strand
acaaagaaguaugcugaug

SEQ ID NO: 1467580 - RNA, 19 nt, Homo sapiens
  misc_RNA (1)...(19): siRNA sense strand
ggaaggaggagacaguuac

SEQ ID NO: 1467581 - RNA, 19 nt, Homo sapiens
  misc_RNA (1)...(19): siRNA sense strand
cggcgagcccuuccuuaua

SEQ ID NO: 1467582 - RNA, 19 nt, Homo sapiens
  misc_RNA (1)...(19): siRNA sense strand
gagagaggcagggaucuug

SEQ ID NO: 1467583 - RNA, 19 nt, Homo sapiens
  misc_RNA (1)...(19): siRNA sense strand
uacgagaccuguuccagau

SEQ ID NO: 1467584 - RNA, 19 nt, Homo sapiens
  misc_RNA (1)...(19): siRNA sense strand
gagccaggauagcuucuac

SEQ ID NO: 1467585 - RNA, 19 nt, Homo sapiens
  misc_RNA (1)...(19): siRNA sense strand
ccaaacggcagaccaaugg

SEQ ID NO: 1467586 - RNA, 19 nt, Homo sapiens
  misc_RNA (1)...(19): siRNA sense strand
cagacguggugcucuuuga

SEQ ID NO: 1467587 - RNA, 19 nt, Homo sapiens
  misc_RNA (1)...(19): siRNA sense strand
ggaugccuuugacaaugaa

SEQ ID NO: 1467588 - RNA, 19 nt, Homo sapiens
  misc_RNA (1)...(19): siRNA sense strand
ccgcagacguggugcucuu

SEQ ID NO: 1467589 - RNA, 19 nt, Homo sapiens
  misc_RNA (1)...(19): siRNA sense strand
gcggcgagcccuuccuuau

SEQ ID NO: 1467590 - RNA, 19 nt, Homo sapiens
  misc_RNA (1)...(19): siRNA sense strand
gaacagcuagcggcaaguc

SEQ ID NO: 1467591 - RNA, 19 nt, Homo sapiens
  misc_RNA (1)...(19): siRNA sense strand
guacauuacguucgucaag

SEQ ID NO: 1467592 - RNA, 19 nt, Homo sapiens
  misc_RNA (1)...(19): siRNA sense strand
ccggaugccuuugacaaug

SEQ ID NO: 1467593 - RNA, 19 nt, Homo sapiens
  misc_RNA (1)...(19): siRNA sense strand
cccuagaggugcagauaau

SEQ ID NO: 1467594 - RNA, 19 nt, Homo sapiens
  misc_RNA (1)...(19): siRNA sense strand
cggaaggaggagacaguua

SEQ ID NO: 1467595 - RNA, 19 nt, Homo sapiens
  misc_RNA (1)...(19): siRNA sense strand
ggaauucugcuugccaaca

SEQ ID NO: 1467596 - RNA, 19 nt, Homo sapiens
  misc_RNA (1)...(19): siRNA sense strand
gcagaaugagguggacuau

SEQ ID NO: 1467597 - RNA, 19 nt, Homo sapiens
  misc_RNA (1)...(19): siRNA sense strand
gguggacuaucgccagaag

SEQ ID NO: 1467598 - RNA, 19 nt, Homo sapiens
  misc_RNA (1)...(19): siRNA sense strand
gagaccuguuccagaugaa

SEQ ID NO: 1467599 - RNA, 19 nt, Homo sapiens
  misc_RNA (1)...(19): siRNA sense strand
gcagacguggugcucuuug

SEQ ID NO: 1467600 - RNA, 19 nt, Homo sapiens
  misc_RNA (1)...(19): siRNA sense strand
gauaaucugguggccauca

SEQ ID NO: 1467601 - RNA, 19 nt, Homo sapiens
  misc_RNA (1)...(19): siRNA sense strand
ggcagaaugagguggacua

SEQ ID NO: 1467602 - RNA, 19 nt, Homo sapiens
  misc_RNA (1)...(19): siRNA sense strand
ugaccacccggaugccuuu

SEQ ID NO: 1467603 - RNA, 19 nt, Homo sapiens
  misc_RNA (1)...(19): siRNA sense strand
gaaggaggagacaguuacu

SEQ ID NO: 1467604 - RNA, 19 nt, Homo sapiens
  misc_RNA (1)...(19): siRNA sense strand
agaaguaugcugaugugau

SEQ ID NO: 1467605 - RNA, 19 nt, Homo sapiens
  misc_RNA (1)...(19): siRNA sense strand
caagccugccuuugaggaa

SEQ ID NO: 1467606 - RNA, 19 nt, Homo sapiens
  misc_RNA (1)...(19): siRNA sense strand
uaucucaguacauuacguu

SEQ ID NO: 1467607 - RNA, 19 nt, Homo sapiens
  misc_RNA (1)...(19): siRNA sense strand
ccuccgagcuggcagaauu

SEQ ID NO: 1467608 - RNA, 19 nt, Homo sapiens
  misc_RNA (1)...(19): siRNA sense strand
gcuuggagauuuggacuuu

SEQ ID NO: 1467609 - RNA, 19 nt, Homo sapiens
  misc_RNA (1)...(19): siRNA sense strand
gagcucagccggcuacagu

SEQ ID NO: 1467610 - RNA, 19 nt, Homo sapiens
  misc_RNA (1)...(19): siRNA sense strand
cgagcuggcagaauucuuu

SEQ ID NO: 1467611 - RNA, 19 nt, Homo sapiens
  misc_RNA (1)...(19): siRNA sense strand
caacccgcuuggagauuug

SEQ ID NO: 1467612 - RNA, 19 nt, Homo sapiens
  misc_RNA (1)...(19): siRNA sense strand
gcaccuacagcugcuacua

SEQ ID NO: 1467613 - RNA, 19 nt, Homo sapiens
  misc_RNA (1)...(19): siRNA sense strand
gcucagccggcuacaguug

SEQ ID NO: 1467614 - RNA, 19 nt, Homo sapiens
  misc_RNA (1)...(19): siRNA sense strand
uuucaagccuggagagauc

SEQ ID NO: 1467615 - RNA, 19 nt, Homo sapiens
  misc_RNA (1)...(19): siRNA sense strand
gcgaggugcuggucaucag

SEQ ID NO: 1467616 - RNA, 19 nt, Homo sapiens
  misc_RNA (1)...(19): siRNA sense strand
uggagcugcuggugacaga

SEQ ID NO: 1467617 - RNA, 19 nt, Homo sapiens
  misc_RNA (1)...(19): siRNA sense strand
acaugagcuucgugcugua

SEQ ID NO: 1467618 - RNA, 19 nt, Homo sapiens
  misc_RNA (1)...(19): siRNA sense strand
caccuacagcugcuacuau

SEQ ID NO: 1467619 - RNA, 19 nt, Homo sapiens
  misc_RNA (1)...(19): siRNA sense strand
ccuccgagcuggcagaauu

SEQ ID NO: 1467620 - RNA, 19 nt, Homo sapiens
  misc_RNA (1)...(19): siRNA sense strand
gcuuggagauuuggacuuu

SEQ ID NO: 1467621 - RNA, 19 nt, Homo sapiens
  misc_RNA (1)...(19): siRNA sense strand
gagcucagccggcuacagu

SEQ ID NO: 1467622 - RNA, 19 nt, Homo sapiens
  misc_RNA (1)...(19): siRNA sense strand
cgagcuggcagaauucuuu

SEQ ID NO: 1467623 - RNA, 19 nt, Homo sapiens
  misc_RNA (1)...(19): siRNA sense strand
caacccgcuuggagauuug

SEQ ID NO: 1467624 - RNA, 19 nt, Homo sapiens
  misc_RNA (1)...(19): siRNA sense strand
gcaccuacagcugcuacua

SEQ ID NO: 1467625 - RNA, 19 nt, Homo sapiens
  misc_RNA (1)...(19): siRNA sense strand
gcucagccggcuacaguug

SEQ ID NO: 1467626 - RNA, 19 nt, Homo sapiens
  misc_RNA (1)...(19): siRNA sense strand
uuucaagccuggagagauc

SEQ ID NO: 1467627 - RNA, 19 nt, Homo sapiens
  misc_RNA (1)...(19): siRNA sense strand
gcgaggugcuggucaucag

SEQ ID NO: 1467628 - RNA, 19 nt, Homo sapiens
  misc_RNA (1)...(19): siRNA sense strand
uggagcugcuggugacaga

SEQ ID NO: 1467629 - RNA, 19 nt, Homo sapiens
  misc_RNA (1)...(19): siRNA sense strand
acaugagcuucgugcugua

SEQ ID NO: 1467630 - RNA, 19 nt, Homo sapiens
  misc_RNA (1)...(19): siRNA sense strand
caccuacagcugcuacuau

SEQ ID NO: 1467631 - RNA, 19 nt, Homo sapiens
  misc_RNA (1)...(19): siRNA sense strand
ccuccgagcuggcagaauu

SEQ ID NO: 1467632 - RNA, 19 nt, Homo sapiens
  misc_RNA (1)...(19): siRNA sense strand
gcuuggagauuuggacuuu

SEQ ID NO: 1467633 - RNA, 19 nt, Homo sapiens
  misc_RNA (1)...(19): siRNA sense strand
gagcucagccggcuacagu

SEQ ID NO: 1467634 - RNA, 19 nt, Homo sapiens
  misc_RNA (1)...(19): siRNA sense strand
cgagcuggcagaauucuuu

SEQ ID NO: 1467635 - RNA, 19 nt, Homo sapiens
  misc_RNA (1)...(19): siRNA sense strand
caacccgcuuggagauuug

SEQ ID NO: 1467636 - RNA, 19 nt, Homo sapiens
  misc_RNA (1)...(19): siRNA sense strand
gcaccuacagcugcuacua

SEQ ID NO: 1467637 - RNA, 19 nt, Homo sapiens
  misc_RNA (1)...(19): siRNA sense strand
gcucagccggcuacaguug

SEQ ID NO: 1467638 - RNA, 19 nt, Homo sapiens
  misc_RNA (1)...(19): siRNA sense strand
uuucaagccuggagagauc

SEQ ID NO: 1467639 - RNA, 19 nt, Homo sapiens
  misc_RNA (1)...(19): siRNA sense strand
gcgaggugcuggucaucag

SEQ ID NO: 1467640 - RNA, 19 nt, Homo sapiens
  misc_RNA (1)...(19): siRNA sense strand
uggagcugcuggugacaga

SEQ ID NO: 1467641 - RNA, 19 nt, Homo sapiens
  misc_RNA (1)...(19): siRNA sense strand
acaugagcuucgugcugua

SEQ ID NO: 1467642 - RNA, 19 nt, Homo sapiens
  misc_RNA (1)...(19): siRNA sense strand
caccuacagcugcuacuau

SEQ ID NO: 1467643 - RNA, 19 nt, Homo sapiens
  misc_RNA (1)...(19): siRNA sense strand
gucaggccaucaaggagua

SEQ ID NO: 1467644 - RNA, 19 nt, Homo sapiens
  misc_RNA (1)...(19): siRNA sense strand
gcccuucucugcagucaag

SEQ ID NO: 1467645 - RNA, 19 nt, Homo sapiens
  misc_RNA (1)...(19): siRNA sense strand
gcuguggaguucaaauguc

SEQ ID NO: 1467646 - RNA, 19 nt, Homo sapiens
  misc_RNA (1)...(19): siRNA sense strand
aaagcccuccuccuccuua

SEQ ID NO: 1467647 - RNA, 19 nt, Homo sapiens
  misc_RNA (1)...(19): siRNA sense strand
ccuuaacccugccaguuuc

SEQ ID NO: 1467648 - RNA, 19 nt, Homo sapiens
  misc_RNA (1)...(19): siRNA sense strand
aggaguauauggacacuac

SEQ ID NO: 1467649 - RNA, 19 nt, Homo sapiens
  misc_RNA (1)...(19): siRNA sense strand
caugucaggccaucaagga

SEQ ID NO: 1467650 - RNA, 19 nt, Homo sapiens
  misc_RNA (1)...(19): siRNA sense strand
ggugugagcggaagagcau

SEQ ID NO: 1467651 - RNA, 19 nt, Homo sapiens
  misc_RNA (1)...(19): siRNA sense strand
aaucaugucaggccaucaa

SEQ ID NO: 1467652 - RNA, 19 nt, Homo sapiens
  misc_RNA (1)...(19): siRNA sense strand
gaguucaaaugucgaugcu

SEQ ID NO: 1467653 - RNA, 19 nt, Homo sapiens
  misc_RNA (1)...(19): siRNA sense strand
ggugcccucucacuugaag

SEQ ID NO: 1467654 - RNA, 19 nt, Homo sapiens
  misc_RNA (1)...(19): siRNA sense strand
gucaggccaucaaggagua

SEQ ID NO: 1467655 - RNA, 19 nt, Homo sapiens
  misc_RNA (1)...(19): siRNA sense strand
gcccuucucugcagucaag

SEQ ID NO: 1467656 - RNA, 19 nt, Homo sapiens
  misc_RNA (1)...(19): siRNA sense strand
gcuguggaguucaaauguc

SEQ ID NO: 1467657 - RNA, 19 nt, Homo sapiens
  misc_RNA (1)...(19): siRNA sense strand
aaagcccuccuccuccuua

SEQ ID NO: 1467658 - RNA, 19 nt, Homo sapiens
  misc_RNA (1)...(19): siRNA sense strand
ccuuaacccugccaguuuc

SEQ ID NO: 1467659 - RNA, 19 nt, Homo sapiens
  misc_RNA (1)...(19): siRNA sense strand
aggaguauauggacacuac

SEQ ID NO: 1467660 - RNA, 19 nt, Homo sapiens
  misc_RNA (1)...(19): siRNA sense strand
caugucaggccaucaagga

SEQ ID NO: 1467661 - RNA, 19 nt, Homo sapiens
  misc_RNA (1)...(19): siRNA sense strand
ggugugagcggaagagcau

SEQ ID NO: 1467662 - RNA, 19 nt, Homo sapiens
  misc_RNA (1)...(19): siRNA sense strand
aaucaugucaggccaucaa

SEQ ID NO: 1467663 - RNA, 19 nt, Homo sapiens
  misc_RNA (1)...(19): siRNA sense strand
gaguucaaaugucgaugcu

SEQ ID NO: 1467664 - RNA, 19 nt, Homo sapiens
  misc_RNA (1)...(19): siRNA sense strand
ggugcccucucacuugaag

SEQ ID NO: 1467665 - RNA, 19 nt, Homo sapiens
  misc_RNA (1)...(19): siRNA sense strand
gucaggccaucaaggagua

SEQ ID NO: 1467666 - RNA, 19 nt, Homo sapiens
  misc_RNA (1)...(19): siRNA sense strand
gcccuucucugcagucaag

SEQ ID NO: 1467667 - RNA, 19 nt, Homo sapiens
  misc_RNA (1)...(19): siRNA sense strand
gcuguggaguucaaauguc

SEQ ID NO: 1467668 - RNA, 19 nt, Homo sapiens
  misc_RNA (1)...(19): siRNA sense strand
aaagcccuccuccuccuua

SEQ ID NO: 1467669 - RNA, 19 nt, Homo sapiens
  misc_RNA (1)...(19): siRNA sense strand
ccuuaacccugccaguuuc

SEQ ID NO: 1467670 - RNA, 19 nt, Homo sapiens
  misc_RNA (1)...(19): siRNA sense strand
aggaguauauggacacuac

SEQ ID NO: 1467671 - RNA, 19 nt, Homo sapiens
  misc_RNA (1)...(19): siRNA sense strand
caugucaggccaucaagga

SEQ ID NO: 1467672 - RNA, 19 nt, Homo sapiens
  misc_RNA (1)...(19): siRNA sense strand
ggugugagcggaagagcau

SEQ ID NO: 1467673 - RNA, 19 nt, Homo sapiens
  misc_RNA (1)...(19): siRNA sense strand
aaucaugucaggccaucaa

SEQ ID NO: 1467674 - RNA, 19 nt, Homo sapiens
  misc_RNA (1)...(19): siRNA sense strand
gaguucaaaugucgaugcu

SEQ ID NO: 1467675 - RNA, 19 nt, Homo sapiens
  misc_RNA (1)...(19): siRNA sense strand
ggugcccucucacuugaag

SEQ ID NO: 1467676 - RNA, 19 nt, Homo sapiens
  misc_RNA (1)...(19): siRNA sense strand
gucaggccaucaaggagua

SEQ ID NO: 1467677 - RNA, 19 nt, Homo sapiens
  misc_RNA (1)...(19): siRNA sense strand
gcccuucucugcagucaag

SEQ ID NO: 1467678 - RNA, 19 nt, Homo sapiens
  misc_RNA (1)...(19): siRNA sense strand
gcuguggaguucaaauguc

SEQ ID NO: 1467679 - RNA, 19 nt, Homo sapiens
  misc_RNA (1)...(19): siRNA sense strand
aaagcccuccuccuccuua

SEQ ID NO: 1467680 - RNA, 19 nt, Homo sapiens
  misc_RNA (1)...(19): siRNA sense strand
ccuuaacccugccaguuuc

SEQ ID NO: 1467681 - RNA, 19 nt, Homo sapiens
  misc_RNA (1)...(19): siRNA sense strand
aggaguauauggacacuac

SEQ ID NO: 1467682 - RNA, 19 nt, Homo sapiens
  misc_RNA (1)...(19): siRNA sense strand
caugucaggccaucaagga

SEQ ID NO: 1467683 - RNA, 19 nt, Homo sapiens
  misc_RNA (1)...(19): siRNA sense strand
ggugugagcggaagagcau

SEQ ID NO: 1467684 - RNA, 19 nt, Homo sapiens
  misc_RNA (1)...(19): siRNA sense strand
aaucaugucaggccaucaa

SEQ ID NO: 1467685 - RNA, 19 nt, Homo sapiens
  misc_RNA (1)...(19): siRNA sense strand
gaguucaaaugucgaugcu

SEQ ID NO: 1467686 - RNA, 19 nt, Homo sapiens
  misc_RNA (1)...(19): siRNA sense strand
ggugcccucucacuugaag

SEQ ID NO: 1467687 - RNA, 19 nt, Homo sapiens
  misc_RNA (1)...(19): siRNA sense strand
gucaggccaucaaggagua

SEQ ID NO: 1467688 - RNA, 19 nt, Homo sapiens
  misc_RNA (1)...(19): siRNA sense strand
gcccuucucugcagucaag

SEQ ID NO: 1467689 - RNA, 19 nt, Homo sapiens
  misc_RNA (1)...(19): siRNA sense strand
gcuguggaguucaaauguc

SEQ ID NO: 1467690 - RNA, 19 nt, Homo sapiens
  misc_RNA (1)...(19): siRNA sense strand
aaagcccuccuccuccuua

SEQ ID NO: 1467691 - RNA, 19 nt, Homo sapiens
  misc_RNA (1)...(19): siRNA sense strand
ccuuaacccugccaguuuc

SEQ ID NO: 1467692 - RNA, 19 nt, Homo sapiens
  misc_RNA (1)...(19): siRNA sense strand
aggaguauauggacacuac

SEQ ID NO: 1467693 - RNA, 19 nt, Homo sapiens
  misc_RNA (1)...(19): siRNA sense strand
caugucaggccaucaagga

SEQ ID NO: 1467694 - RNA, 19 nt, Homo sapiens
  misc_RNA (1)...(19): siRNA sense strand
ggugugagcggaagagcau

SEQ ID NO: 1467695 - RNA, 19 nt, Homo sapiens
  misc_RNA (1)...(19): siRNA sense strand
aaucaugucaggccaucaa

SEQ ID NO: 1467696 - RNA, 19 nt, Homo sapiens
  misc_RNA (1)...(19): siRNA sense strand
gaguucaaaugucgaugcu

SEQ ID NO: 1467697 - RNA, 19 nt, Homo sapiens
  misc_RNA (1)...(19): siRNA sense strand
ggugcccucucacuugaag

SEQ ID NO: 1467698 - RNA, 19 nt, Homo sapiens
  misc_RNA (1)...(19): siRNA sense strand
gucaggccaucaaggagua

SEQ ID NO: 1467699 - RNA, 19 nt, Homo sapiens
  misc_RNA (1)...(19): siRNA sense strand
gcccuucucugcagucaag

SEQ ID NO: 1467700 - RNA, 19 nt, Homo sapiens
  misc_RNA (1)...(19): siRNA sense strand
gcuguggaguucaaauguc

SEQ ID NO: 1467701 - RNA, 19 nt, Homo sapiens
  misc_RNA (1)...(19): siRNA sense strand
aaagcccuccuccuccuua

SEQ ID NO: 1467702 - RNA, 19 nt, Homo sapiens
  misc_RNA (1)...(19): siRNA sense strand
ccuuaacccugccaguuuc

SEQ ID NO: 1467703 - RNA, 19 nt, Homo sapiens
  misc_RNA (1)...(19): siRNA sense strand
aggaguauauggacacuac

SEQ ID NO: 1467704 - RNA, 19 nt, Homo sapiens
  misc_RNA (1)...(19): siRNA sense strand
caugucaggccaucaagga

SEQ ID NO: 1467705 - RNA, 19 nt, Homo sapiens
  misc_RNA (1)...(19): siRNA sense strand
ggugugagcggaagagcau

SEQ ID NO: 1467706 - RNA, 19 nt, Homo sapiens
  misc_RNA (1)...(19): siRNA sense strand
aaucaugucaggccaucaa

SEQ ID NO: 1467707 - RNA, 19 nt, Homo sapiens
  misc_RNA (1)...(19): siRNA sense strand
gaguucaaaugucgaugcu

SEQ ID NO: 1467708 - RNA, 19 nt, Homo sapiens
  misc_RNA (1)...(19): siRNA sense strand
ggugcccucucacuugaag

SEQ ID NO: 1467709 - RNA, 19 nt, Homo sapiens
  misc_RNA (1)...(19): siRNA sense strand
gcccuucucugcagucaag

SEQ ID NO: 1467710 - RNA, 19 nt, Homo sapiens
  misc_RNA (1)...(19): siRNA sense strand
gcuguggaguucaaauguc

SEQ ID NO: 1467711 - RNA, 19 nt, Homo sapiens
  misc_RNA (1)...(19): siRNA sense strand
aaagcccuccuccuccuua

SEQ ID NO: 1467712 - RNA, 19 nt, Homo sapiens
  misc_RNA (1)...(19): siRNA sense strand
ccuuaacccugccaguuuc

SEQ ID NO: 1467713 - RNA, 19 nt, Homo sapiens
  misc_RNA (1)...(19): siRNA sense strand
ggugugagcggaagagcau

SEQ ID NO: 1467714 - RNA, 19 nt, Homo sapiens
  misc_RNA (1)...(19): siRNA sense strand
ggugcccucucacuugaag

SEQ ID NO: 1467715 - RNA, 19 nt, Homo sapiens
  misc_RNA (1)...(19): siRNA sense strand
gaguucaaaugucgaugcu

SEQ ID NO: 1467716 - RNA, 19 nt, Homo sapiens
  misc_RNA (1)...(19): siRNA sense strand
gucaggccaucaaggagua

SEQ ID NO: 1467717 - RNA, 19 nt, Homo sapiens
  misc_RNA (1)...(19): siRNA sense strand
gcccuucucugcagucaag

SEQ ID NO: 1467718 - RNA, 19 nt, Homo sapiens
  misc_RNA (1)...(19): siRNA sense strand
gcuguggaguucaaauguc

SEQ ID NO: 1467719 - RNA, 19 nt, Homo sapiens
  misc_RNA (1)...(19): siRNA sense strand
aaagcccuccuccuccuua

SEQ ID NO: 1467720 - RNA, 19 nt, Homo sapiens
  misc_RNA (1)...(19): siRNA sense strand
ccuuaacccugccaguuuc

SEQ ID NO: 1467721 - RNA, 19 nt, Homo sapiens
  misc_RNA (1)...(19): siRNA sense strand
aggaguauauggacacuac

SEQ ID NO: 1467722 - RNA, 19 nt, Homo sapiens
  misc_RNA (1)...(19): siRNA sense strand
caugucaggccaucaagga

SEQ ID NO: 1467723 - RNA, 19 nt, Homo sapiens
  misc_RNA (1)...(19): siRNA sense strand
ggugugagcggaagagcau

SEQ ID NO: 1467724 - RNA, 19 nt, Homo sapiens
  misc_RNA (1)...(19): siRNA sense strand
aaucaugucaggccaucaa

SEQ ID NO: 1467725 - RNA, 19 nt, Homo sapiens
  misc_RNA (1)...(19): siRNA sense strand
gaguucaaaugucgaugcu

SEQ ID NO: 1467726 - RNA, 19 nt, Homo sapiens
  misc_RNA (1)...(19): siRNA sense strand
ggugcccucucacuugaag

SEQ ID NO: 1467727 - RNA, 19 nt, Homo sapiens
  misc_RNA (1)...(19): siRNA sense strand
gucaggccaucaaggagua

SEQ ID NO: 1467728 - RNA, 19 nt, Homo sapiens
  misc_RNA (1)...(19): siRNA sense strand
gcccuucucugcagucaag

SEQ ID NO: 1467729 - RNA, 19 nt, Homo sapiens
  misc_RNA (1)...(19): siRNA sense strand
gcuguggaguucaaauguc

SEQ ID NO: 1467730 - RNA, 19 nt, Homo sapiens
  misc_RNA (1)...(19): siRNA sense strand
aaagcccuccuccuccuua

SEQ ID NO: 1467731 - RNA, 19 nt, Homo sapiens
  misc_RNA (1)...(19): siRNA sense strand
ccuuaacccugccaguuuc

SEQ ID NO: 1467732 - RNA, 19 nt, Homo sapiens
  misc_RNA (1)...(19): siRNA sense strand
aggaguauauggacacuac

SEQ ID NO: 1467733 - RNA, 19 nt, Homo sapiens
  misc_RNA (1)...(19): siRNA sense strand
caugucaggccaucaagga

SEQ ID NO: 1467734 - RNA, 19 nt, Homo sapiens
  misc_RNA (1)...(19): siRNA sense strand
ggugugagcggaagagcau

SEQ ID NO: 1467735 - RNA, 19 nt, Homo sapiens
  misc_RNA (1)...(19): siRNA sense strand
aaucaugucaggccaucaa

SEQ ID NO: 1467736 - RNA, 19 nt, Homo sapiens
  misc_RNA (1)...(19): siRNA sense strand
gaguucaaaugucgaugcu

SEQ ID NO: 1467737 - RNA, 19 nt, Homo sapiens
  misc_RNA (1)...(19): siRNA sense strand
ggugcccucucacuugaag

SEQ ID NO: 1467738 - RNA, 19 nt, Homo sapiens
  misc_RNA (1)...(19): siRNA sense strand
gucaggccaucaaggagua

SEQ ID NO: 1467739 - RNA, 19 nt, Homo sapiens
  misc_RNA (1)...(19): siRNA sense strand
gcccuucucugcagucaag

SEQ ID NO: 1467740 - RNA, 19 nt, Homo sapiens
  misc_RNA (1)...(19): siRNA sense strand
gcuguggaguucaaauguc

SEQ ID NO: 1467741 - RNA, 19 nt, Homo sapiens
  misc_RNA (1)...(19): siRNA sense strand
aaagcccuccuccuccuua

SEQ ID NO: 1467742 - RNA, 19 nt, Homo sapiens
  misc_RNA (1)...(19): siRNA sense strand
ccuuaacccugccaguuuc

SEQ ID NO: 1467743 - RNA, 19 nt, Homo sapiens
  misc_RNA (1)...(19): siRNA sense strand
aggaguauauggacacuac

SEQ ID NO: 1467744 - RNA, 19 nt, Homo sapiens
  misc_RNA (1)...(19): siRNA sense strand
caugucaggccaucaagga

SEQ ID NO: 1467745 - RNA, 19 nt, Homo sapiens
  misc_RNA (1)...(19): siRNA sense strand
ggugugagcggaagagcau

SEQ ID NO: 1467746 - RNA, 19 nt, Homo sapiens
  misc_RNA (1)...(19): siRNA sense strand
aaucaugucaggccaucaa

SEQ ID NO: 1467747 - RNA, 19 nt, Homo sapiens
  misc_RNA (1)...(19): siRNA sense strand
gaguucaaaugucgaugcu

SEQ ID NO: 1467748 - RNA, 19 nt, Homo sapiens
  misc_RNA (1)...(19): siRNA sense strand
ggugcccucucacuugaag

SEQ ID NO: 1467749 - RNA, 19 nt, Homo sapiens
  misc_RNA (1)...(19): siRNA sense strand
gucaggccaucaaggagua

SEQ ID NO: 1467750 - RNA, 19 nt, Homo sapiens
  misc_RNA (1)...(19): siRNA sense strand
gcccuucucugcagucaag

SEQ ID NO: 1467751 - RNA, 19 nt, Homo sapiens
  misc_RNA (1)...(19): siRNA sense strand
gcuguggaguucaaauguc

SEQ ID NO: 1467752 - RNA, 19 nt, Homo sapiens
  misc_RNA (1)...(19): siRNA sense strand
aaagcccuccuccuccuua

SEQ ID NO: 1467753 - RNA, 19 nt, Homo sapiens
  misc_RNA (1)...(19): siRNA sense strand
ccuuaacccugccaguuuc

SEQ ID NO: 1467754 - RNA, 19 nt, Homo sapiens
  misc_RNA (1)...(19): siRNA sense strand
aggaguauauggacacuac

SEQ ID NO: 1467755 - RNA, 19 nt, Homo sapiens
  misc_RNA (1)...(19): siRNA sense strand
caugucaggccaucaagga

SEQ ID NO: 1467756 - RNA, 19 nt, Homo sapiens
  misc_RNA (1)...(19): siRNA sense strand
ggugugagcggaagagcau

SEQ ID NO: 1467757 - RNA, 19 nt, Homo sapiens
  misc_RNA (1)...(19): siRNA sense strand
aaucaugucaggccaucaa

SEQ ID NO: 1467758 - RNA, 19 nt, Homo sapiens
  misc_RNA (1)...(19): siRNA sense strand
gaguucaaaugucgaugcu

SEQ ID NO: 1467759 - RNA, 19 nt, Homo sapiens
  misc_RNA (1)...(19): siRNA sense strand
ggugcccucucacuugaag

SEQ ID NO: 1467760 - RNA, 19 nt, Homo sapiens
  misc_RNA (1)...(19): siRNA sense strand
gucaggccaucaaggagua

SEQ ID NO: 1467761 - RNA, 19 nt, Homo sapiens
  misc_RNA (1)...(19): siRNA sense strand
gcccuucucugcagucaag

SEQ ID NO: 1467762 - RNA, 19 nt, Homo sapiens
  misc_RNA (1)...(19): siRNA sense strand
gcuguggaguucaaauguc

SEQ ID NO: 1467763 - RNA, 19 nt, Homo sapiens
  misc_RNA (1)...(19): siRNA sense strand
aaagcccuccuccuccuua

SEQ ID NO: 1467764 - RNA, 19 nt, Homo sapiens
  misc_RNA (1)...(19): siRNA sense strand
ccuuaacccugccaguuuc

SEQ ID NO: 1467765 - RNA, 19 nt, Homo sapiens
  misc_RNA (1)...(19): siRNA sense strand
aggaguauauggacacuac

SEQ ID NO: 1467766 - RNA, 19 nt, Homo sapiens
  misc_RNA (1)...(19): siRNA sense strand
caugucaggccaucaagga

SEQ ID NO: 1467767 - RNA, 19 nt, Homo sapiens
  misc_RNA (1)...(19): siRNA sense strand
ggugugagcggaagagcau

SEQ ID NO: 1467768 - RNA, 19 nt, Homo sapiens
  misc_RNA (1)...(19): siRNA sense strand
aaucaugucaggccaucaa

SEQ ID NO: 1467769 - RNA, 19 nt, Homo sapiens
  misc_RNA (1)...(19): siRNA sense strand
gaguucaaaugucgaugcu

SEQ ID NO: 1467770 - RNA, 19 nt, Homo sapiens
  misc_RNA (1)...(19): siRNA sense strand
ggugcccucucacuugaag

SEQ ID NO: 1467771 - RNA, 19 nt, Homo sapiens
  misc_RNA (1)...(19): siRNA sense strand
gucaggccaucaaggagua

SEQ ID NO: 1467772 - RNA, 19 nt, Homo sapiens
  misc_RNA (1)...(19): siRNA sense strand
gcccuucucugcagucaag

SEQ ID NO: 1467773 - RNA, 19 nt, Homo sapiens
  misc_RNA (1)...(19): siRNA sense strand
gcuguggaguucaaauguc

SEQ ID NO: 1467774 - RNA, 19 nt, Homo sapiens
  misc_RNA (1)...(19): siRNA sense strand
aaagcccuccuccuccuua

SEQ ID NO: 1467775 - RNA, 19 nt, Homo sapiens
  misc_RNA (1)...(19): siRNA sense strand
ccuuaacccugccaguuuc

SEQ ID NO: 1467776 - RNA, 19 nt, Homo sapiens
  misc_RNA (1)...(19): siRNA sense strand
aggaguauauggacacuac

SEQ ID NO: 1467777 - RNA, 19 nt, Homo sapiens
  misc_RNA (1)...(19): siRNA sense strand
caugucaggccaucaagga

SEQ ID NO: 1467778 - RNA, 19 nt, Homo sapiens
  misc_RNA (1)...(19): siRNA sense strand
ggugugagcggaagagcau

SEQ ID NO: 1467779 - RNA, 19 nt, Homo sapiens
  misc_RNA (1)...(19): siRNA sense strand
aaucaugucaggccaucaa

SEQ ID NO: 1467780 - RNA, 19 nt, Homo sapiens
  misc_RNA (1)...(19): siRNA sense strand
gaguucaaaugucgaugcu

SEQ ID NO: 1467781 - RNA, 19 nt, Homo sapiens
  misc_RNA (1)...(19): siRNA sense strand
ggugcccucucacuugaag

SEQ ID NO: 1467782 - RNA, 19 nt, Homo sapiens
  misc_RNA (1)...(19): siRNA sense strand
gcccuucucugcagucaag

SEQ ID NO: 1467783 - RNA, 19 nt, Homo sapiens
  misc_RNA (1)...(19): siRNA sense strand
gcuguggaguucaaauguc

SEQ ID NO: 1467784 - RNA, 19 nt, Homo sapiens
  misc_RNA (1)...(19): siRNA sense strand
aaagcccuccuccuccuua

SEQ ID NO: 1467785 - RNA, 19 nt, Homo sapiens
  misc_RNA (1)...(19): siRNA sense strand
ccuuaacccugccaguuuc

SEQ ID NO: 1467786 - RNA, 19 nt, Homo sapiens
  misc_RNA (1)...(19): siRNA sense strand
ggugugagcggaagagcau

SEQ ID NO: 1467787 - RNA, 19 nt, Homo sapiens
  misc_RNA (1)...(19): siRNA sense strand
ggugcccucucacuugaag

SEQ ID NO: 1467788 - RNA, 19 nt, Homo sapiens
  misc_RNA (1)...(19): siRNA sense strand
gaguucaaaugucgaugcu

SEQ ID NO: 1467789 - RNA, 19 nt, Homo sapiens
  misc_RNA (1)...(19): siRNA sense strand
gucaggccaucaaggagua

SEQ ID NO: 1467790 - RNA, 19 nt, Homo sapiens
  misc_RNA (1)...(19): siRNA sense strand
gcccuucucugcagucaag

SEQ ID NO: 1467791 - RNA, 19 nt, Homo sapiens
  misc_RNA (1)...(19): siRNA sense strand
gcuguggaguucaaauguc

SEQ ID NO: 1467792 - RNA, 19 nt, Homo sapiens
  misc_RNA (1)...(19): siRNA sense strand
aaagcccuccuccuccuua

SEQ ID NO: 1467793 - RNA, 19 nt, Homo sapiens
  misc_RNA (1)...(19): siRNA sense strand
ccuuaacccugccaguuuc

SEQ ID NO: 1467794 - RNA, 19 nt, Homo sapiens
  misc_RNA (1)...(19): siRNA sense strand
aggaguauauggacacuac

SEQ ID NO: 1467795 - RNA, 19 nt, Homo sapiens
  misc_RNA (1)...(19): siRNA sense strand
caugucaggccaucaagga

SEQ ID NO: 1467796 - RNA, 19 nt, Homo sapiens
  misc_RNA (1)...(19): siRNA sense strand
ggugugagcggaagagcau

SEQ ID NO: 1467797 - RNA, 19 nt, Homo sapiens
  misc_RNA (1)...(19): siRNA sense strand
aaucaugucaggccaucaa

SEQ ID NO: 1467798 - RNA, 19 nt, Homo sapiens
  misc_RNA (1)...(19): siRNA sense strand
gaguucaaaugucgaugcu

SEQ ID NO: 1467799 - RNA, 19 nt, Homo sapiens
  misc_RNA (1)...(19): siRNA sense strand
ggugcccucucacuugaag

SEQ ID NO: 1467800 - RNA, 19 nt, Homo sapiens
  misc_RNA (1)...(19): siRNA sense strand
gucaggccaucaaggagua

SEQ ID NO: 1467801 - RNA, 19 nt, Homo sapiens
  misc_RNA (1)...(19): siRNA sense strand
gcccuucucugcagucaag

SEQ ID NO: 1467802 - RNA, 19 nt, Homo sapiens
  misc_RNA (1)...(19): siRNA sense strand
gcuguggaguucaaauguc

SEQ ID NO: 1467803 - RNA, 19 nt, Homo sapiens
  misc_RNA (1)...(19): siRNA sense strand
aaagcccuccuccuccuua

SEQ ID NO: 1467804 - RNA, 19 nt, Homo sapiens
  misc_RNA (1)...(19): siRNA sense strand
ccuuaacccugccaguuuc

SEQ ID NO: 1467805 - RNA, 19 nt, Homo sapiens
  misc_RNA (1)...(19): siRNA sense strand
aggaguauauggacacuac

SEQ ID NO: 1467806 - RNA, 19 nt, Homo sapiens
  misc_RNA (1)...(19): siRNA sense strand
caugucaggccaucaagga

SEQ ID NO: 1467807 - RNA, 19 nt, Homo sapiens
  misc_RNA (1)...(19): siRNA sense strand
ggugugagcggaagagcau

SEQ ID NO: 1467808 - RNA, 19 nt, Homo sapiens
  misc_RNA (1)...(19): siRNA sense strand
aaucaugucaggccaucaa

SEQ ID NO: 1467809 - RNA, 19 nt, Homo sapiens
  misc_RNA (1)...(19): siRNA sense strand
gaguucaaaugucgaugcu

SEQ ID NO: 1467810 - RNA, 19 nt, Homo sapiens
  misc_RNA (1)...(19): siRNA sense strand
ggugcccucucacuugaag

SEQ ID NO: 1467811 - RNA, 19 nt, Homo sapiens
  misc_RNA (1)...(19): siRNA sense strand
gucaggccaucaaggagua

SEQ ID NO: 1467812 - RNA, 19 nt, Homo sapiens
  misc_RNA (1)...(19): siRNA sense strand
gcccuucucugcagucaag

SEQ ID NO: 1467813 - RNA, 19 nt, Homo sapiens
  misc_RNA (1)...(19): siRNA sense strand
gcuguggaguucaaauguc

SEQ ID NO: 1467814 - RNA, 19 nt, Homo sapiens
  misc_RNA (1)...(19): siRNA sense strand
aaagcccuccuccuccuua

SEQ ID NO: 1467815 - RNA, 19 nt, Homo sapiens
  misc_RNA (1)...(19): siRNA sense strand
ccuuaacccugccaguuuc

SEQ ID NO: 1467816 - RNA, 19 nt, Homo sapiens
  misc_RNA (1)...(19): siRNA sense strand
aggaguauauggacacuac

SEQ ID NO: 1467817 - RNA, 19 nt, Homo sapiens
  misc_RNA (1)...(19): siRNA sense strand
caugucaggccaucaagga

SEQ ID NO: 1467818 - RNA, 19 nt, Homo sapiens
  misc_RNA (1)...(19): siRNA sense strand
ggugugagcggaagagcau

SEQ ID NO: 1467819 - RNA, 19 nt, Homo sapiens
  misc_RNA (1)...(19): siRNA sense strand
aaucaugucaggccaucaa

SEQ ID NO: 1467820 - RNA, 19 nt, Homo sapiens
  misc_RNA (1)...(19): siRNA sense strand
gaguucaaaugucgaugcu

SEQ ID NO: 1467821 - RNA, 19 nt, Homo sapiens
  misc_RNA (1)...(19): siRNA sense strand
ggugcccucucacuugaag

SEQ ID NO: 1467822 - RNA, 19 nt, Homo sapiens
  misc_RNA (1)...(19): siRNA sense strand
gucaggccaucaaggagua

SEQ ID NO: 1467823 - RNA, 19 nt, Homo sapiens
  misc_RNA (1)...(19): siRNA sense strand
gcccuucucugcagucaag

SEQ ID NO: 1467824 - RNA, 19 nt, Homo sapiens
  misc_RNA (1)...(19): siRNA sense strand
gcuguggaguucaaauguc

SEQ ID NO: 1467825 - RNA, 19 nt, Homo sapiens
  misc_RNA (1)...(19): siRNA sense strand
aaagcccuccuccuccuua

SEQ ID NO: 1467826 - RNA, 19 nt, Homo sapiens
  misc_RNA (1)...(19): siRNA sense strand
ccuuaacccugccaguuuc

SEQ ID NO: 1467827 - RNA, 19 nt, Homo sapiens
  misc_RNA (1)...(19): siRNA sense strand
aggaguauauggacacuac

SEQ ID NO: 1467828 - RNA, 19 nt, Homo sapiens
  misc_RNA (1)...(19): siRNA sense strand
caugucaggccaucaagga

SEQ ID NO: 1467829 - RNA, 19 nt, Homo sapiens
  misc_RNA (1)...(19): siRNA sense strand
ggugugagcggaagagcau

SEQ ID NO: 1467830 - RNA, 19 nt, Homo sapiens
  misc_RNA (1)...(19): siRNA sense strand
aaucaugucaggccaucaa

SEQ ID NO: 1467831 - RNA, 19 nt, Homo sapiens
  misc_RNA (1)...(19): siRNA sense strand
gaguucaaaugucgaugcu

SEQ ID NO: 1467832 - RNA, 19 nt, Homo sapiens
  misc_RNA (1)...(19): siRNA sense strand
ggugcccucucacuugaag

SEQ ID NO: 1467833 - RNA, 19 nt, Homo sapiens
  misc_RNA (1)...(19): siRNA sense strand
gucaggccaucaaggagua

SEQ ID NO: 1467834 - RNA, 19 nt, Homo sapiens
  misc_RNA (1)...(19): siRNA sense strand
gcccuucucugcagucaag

SEQ ID NO: 1467835 - RNA, 19 nt, Homo sapiens
  misc_RNA (1)...(19): siRNA sense strand
gcuguggaguucaaauguc

SEQ ID NO: 1467836 - RNA, 19 nt, Homo sapiens
  misc_RNA (1)...(19): siRNA sense strand
aaagcccuccuccuccuua

SEQ ID NO: 1467837 - RNA, 19 nt, Homo sapiens
  misc_RNA (1)...(19): siRNA sense strand
ccuuaacccugccaguuuc

SEQ ID NO: 1467838 - RNA, 19 nt, Homo sapiens
  misc_RNA (1)...(19): siRNA sense strand
aggaguauauggacacuac

SEQ ID NO: 1467839 - RNA, 19 nt, Homo sapiens
  misc_RNA (1)...(19): siRNA sense strand
caugucaggccaucaagga

SEQ ID NO: 1467840 - RNA, 19 nt, Homo sapiens
  misc_RNA (1)...(19): siRNA sense strand
ggugugagcggaagagcau

SEQ ID NO: 1467841 - RNA, 19 nt, Homo sapiens
  misc_RNA (1)...(19): siRNA sense strand
aaucaugucaggccaucaa

SEQ ID NO: 1467842 - RNA, 19 nt, Homo sapiens
  misc_RNA (1)...(19): siRNA sense strand
gaguucaaaugucgaugcu

SEQ ID NO: 1467843 - RNA, 19 nt, Homo sapiens
  misc_RNA (1)...(19): siRNA sense strand
ggugcccucucacuugaag

SEQ ID NO: 1467844 - RNA, 19 nt, Homo sapiens
  misc_RNA (1)...(19): siRNA sense strand
gucaggccaucaaggagua

SEQ ID NO: 1467845 - RNA, 19 nt, Homo sapiens
  misc_RNA (1)...(19): siRNA sense strand
gcccuucucugcagucaag

SEQ ID NO: 1467846 - RNA, 19 nt, Homo sapiens
  misc_RNA (1)...(19): siRNA sense strand
gcuguggaguucaaauguc

SEQ ID NO: 1467847 - RNA, 19 nt, Homo sapiens
  misc_RNA (1)...(19): siRNA sense strand
aaagcccuccuccuccuua

SEQ ID NO: 1467848 - RNA, 19 nt, Homo sapiens
  misc_RNA (1)...(19): siRNA sense strand
ccuuaacccugccaguuuc

SEQ ID NO: 1467849 - RNA, 19 nt, Homo sapiens
  misc_RNA (1)...(19): siRNA sense strand
aggaguauauggacacuac

SEQ ID NO: 1467850 - RNA, 19 nt, Homo sapiens
  misc_RNA (1)...(19): siRNA sense strand
caugucaggccaucaagga

SEQ ID NO: 1467851 - RNA, 19 nt, Homo sapiens
  misc_RNA (1)...(19): siRNA sense strand
ggugugagcggaagagcau

SEQ ID NO: 1467852 - RNA, 19 nt, Homo sapiens
  misc_RNA (1)...(19): siRNA sense strand
aaucaugucaggccaucaa

SEQ ID NO: 1467853 - RNA, 19 nt, Homo sapiens
  misc_RNA (1)...(19): siRNA sense strand
gaguucaaaugucgaugcu

SEQ ID NO: 1467854 - RNA, 19 nt, Homo sapiens
  misc_RNA (1)...(19): siRNA sense strand
ggugcccucucacuugaag

SEQ ID NO: 1467855 - RNA, 19 nt, Homo sapiens
  misc_RNA (1)...(19): siRNA sense strand
gcccuucucugcagucaag

SEQ ID NO: 1467856 - RNA, 19 nt, Homo sapiens
  misc_RNA (1)...(19): siRNA sense strand
gcuguggaguucaaauguc

SEQ ID NO: 1467857 - RNA, 19 nt, Homo sapiens
  misc_RNA (1)...(19): siRNA sense strand
aaagcccuccuccuccuua

SEQ ID NO: 1467858 - RNA, 19 nt, Homo sapiens
  misc_RNA (1)...(19): siRNA sense strand
ccuuaacccugccaguuuc

SEQ ID NO: 1467859 - RNA, 19 nt, Homo sapiens
  misc_RNA (1)...(19): siRNA sense strand
ggugugagcggaagagcau

SEQ ID NO: 1467860 - RNA, 19 nt, Homo sapiens
  misc_RNA (1)...(19): siRNA sense strand
ggugcccucucacuugaag

SEQ ID NO: 1467861 - RNA, 19 nt, Homo sapiens
  misc_RNA (1)...(19): siRNA sense strand
gaguucaaaugucgaugcu

SEQ ID NO: 1467862 - RNA, 19 nt, Homo sapiens
  misc_RNA (1)...(19): siRNA sense strand
gucaggccaucaaggagua

SEQ ID NO: 1467863 - RNA, 19 nt, Homo sapiens
  misc_RNA (1)...(19): siRNA sense strand
gcccuucucugcagucaag

SEQ ID NO: 1467864 - RNA, 19 nt, Homo sapiens
  misc_RNA (1)...(19): siRNA sense strand
gcuguggaguucaaauguc

SEQ ID NO: 1467865 - RNA, 19 nt, Homo sapiens
  misc_RNA (1)...(19): siRNA sense strand
aaagcccuccuccuccuua

SEQ ID NO: 1467866 - RNA, 19 nt, Homo sapiens
  misc_RNA (1)...(19): siRNA sense strand
ccuuaacccugccaguuuc

SEQ ID NO: 1467867 - RNA, 19 nt, Homo sapiens
  misc_RNA (1)...(19): siRNA sense strand
aggaguauauggacacuac

SEQ ID NO: 1467868 - RNA, 19 nt, Homo sapiens
  misc_RNA (1)...(19): siRNA sense strand
caugucaggccaucaagga

SEQ ID NO: 1467869 - RNA, 19 nt, Homo sapiens
  misc_RNA (1)...(19): siRNA sense strand
ggugugagcggaagagcau

SEQ ID NO: 1467870 - RNA, 19 nt, Homo sapiens
  misc_RNA (1)...(19): siRNA sense strand
aaucaugucaggccaucaa

SEQ ID NO: 1467871 - RNA, 19 nt, Homo sapiens
  misc_RNA (1)...(19): siRNA sense strand
gaguucaaaugucgaugcu

SEQ ID NO: 1467872 - RNA, 19 nt, Homo sapiens
  misc_RNA (1)...(19): siRNA sense strand
ggugcccucucacuugaag

SEQ ID NO: 1467873 - RNA, 19 nt, Homo sapiens
  misc_RNA (1)...(19): siRNA sense strand
gucaggccaucaaggagua

SEQ ID NO: 1467874 - RNA, 19 nt, Homo sapiens
  misc_RNA (1)...(19): siRNA sense strand
gcccuucucugcagucaag

SEQ ID NO: 1467875 - RNA, 19 nt, Homo sapiens
  misc_RNA (1)...(19): siRNA sense strand
gcuguggaguucaaauguc

SEQ ID NO: 1467876 - RNA, 19 nt, Homo sapiens
  misc_RNA (1)...(19): siRNA sense strand
aaagcccuccuccuccuua

SEQ ID NO: 1467877 - RNA, 19 nt, Homo sapiens
  misc_RNA (1)...(19): siRNA sense strand
ccuuaacccugccaguuuc

SEQ ID NO: 1467878 - RNA, 19 nt, Homo sapiens
  misc_RNA (1)...(19): siRNA sense strand
aggaguauauggacacuac

SEQ ID NO: 1467879 - RNA, 19 nt, Homo sapiens
  misc_RNA (1)...(19): siRNA sense strand
caugucaggccaucaagga

SEQ ID NO: 1467880 - RNA, 19 nt, Homo sapiens
  misc_RNA (1)...(19): siRNA sense strand
ggugugagcggaagagcau

SEQ ID NO: 1467881 - RNA, 19 nt, Homo sapiens
  misc_RNA (1)...(19): siRNA sense strand
aaucaugucaggccaucaa

SEQ ID NO: 1467882 - RNA, 19 nt, Homo sapiens
  misc_RNA (1)...(19): siRNA sense strand
gaguucaaaugucgaugcu

SEQ ID NO: 1467883 - RNA, 19 nt, Homo sapiens
  misc_RNA (1)...(19): siRNA sense strand
ggugcccucucacuugaag

SEQ ID NO: 1467884 - RNA, 19 nt, Homo sapiens
  misc_RNA (1)...(19): siRNA sense strand
gucaggccaucaaggagua

SEQ ID NO: 1467885 - RNA, 19 nt, Homo sapiens
  misc_RNA (1)...(19): siRNA sense strand
gcccuucucugcagucaag

SEQ ID NO: 1467886 - RNA, 19 nt, Homo sapiens
  misc_RNA (1)...(19): siRNA sense strand
gcuguggaguucaaauguc

SEQ ID NO: 1467887 - RNA, 19 nt, Homo sapiens
  misc_RNA (1)...(19): siRNA sense strand
aaagcccuccuccuccuua

SEQ ID NO: 1467888 - RNA, 19 nt, Homo sapiens
  misc_RNA (1)...(19): siRNA sense strand
ccuuaacccugccaguuuc

SEQ ID NO: 1467889 - RNA, 19 nt, Homo sapiens
  misc_RNA (1)...(19): siRNA sense strand
aggaguauauggacacuac

SEQ ID NO: 1467890 - RNA, 19 nt, Homo sapiens
  misc_RNA (1)...(19): siRNA sense strand
caugucaggccaucaagga

SEQ ID NO: 1467891 - RNA, 19 nt, Homo sapiens
  misc_RNA (1)...(19): siRNA sense strand
ggugugagcggaagagcau

SEQ ID NO: 1467892 - RNA, 19 nt, Homo sapiens
  misc_RNA (1)...(19): siRNA sense strand
aaucaugucaggccaucaa

SEQ ID NO: 1467893 - RNA, 19 nt, Homo sapiens
  misc_RNA (1)...(19): siRNA sense strand
gaguucaaaugucgaugcu

SEQ ID NO: 1467894 - RNA, 19 nt, Homo sapiens
  misc_RNA (1)...(19): siRNA sense strand
ggugcccucucacuugaag

SEQ ID NO: 1467895 - RNA, 19 nt, Homo sapiens
  misc_RNA (1)...(19): siRNA sense strand
gucaggccaucaaggagua

SEQ ID NO: 1467896 - RNA, 19 nt, Homo sapiens
  misc_RNA (1)...(19): siRNA sense strand
gcccuucucugcagucaag

SEQ ID NO: 1467897 - RNA, 19 nt, Homo sapiens
  misc_RNA (1)...(19): siRNA sense strand
gcuguggaguucaaauguc

SEQ ID NO: 1467898 - RNA, 19 nt, Homo sapiens
  misc_RNA (1)...(19): siRNA sense strand
aaagcccuccuccuccuua

SEQ ID NO: 1467899 - RNA, 19 nt, Homo sapiens
  misc_RNA (1)...(19): siRNA sense strand
ccuuaacccugccaguuuc

SEQ ID NO: 1467900 - RNA, 19 nt, Homo sapiens
  misc_RNA (1)...(19): siRNA sense strand
aggaguauauggacacuac

SEQ ID NO: 1467901 - RNA, 19 nt, Homo sapiens
  misc_RNA (1)...(19): siRNA sense strand
caugucaggccaucaagga

SEQ ID NO: 1467902 - RNA, 19 nt, Homo sapiens
  misc_RNA (1)...(19): siRNA sense strand
ggugugagcggaagagcau

SEQ ID NO: 1467903 - RNA, 19 nt, Homo sapiens
  misc_RNA (1)...(19): siRNA sense strand
aaucaugucaggccaucaa

SEQ ID NO: 1467904 - RNA, 19 nt, Homo sapiens
  misc_RNA (1)...(19): siRNA sense strand
gaguucaaaugucgaugcu

SEQ ID NO: 1467905 - RNA, 19 nt, Homo sapiens
  misc_RNA (1)...(19): siRNA sense strand
ggugcccucucacuugaag

SEQ ID NO: 1467906 - RNA, 19 nt, Homo sapiens
  misc_RNA (1)...(19): siRNA sense strand
gucaggccaucaaggagua

SEQ ID NO: 1467907 - RNA, 19 nt, Homo sapiens
  misc_RNA (1)...(19): siRNA sense strand
gcccuucucugcagucaag

SEQ ID NO: 1467908 - RNA, 19 nt, Homo sapiens
  misc_RNA (1)...(19): siRNA sense strand
gcuguggaguucaaauguc

SEQ ID NO: 1467909 - RNA, 19 nt, Homo sapiens
  misc_RNA (1)...(19): siRNA sense strand
aaagcccuccuccuccuua

SEQ ID NO: 1467910 - RNA, 19 nt, Homo sapiens
  misc_RNA (1)...(19): siRNA sense strand
ccuuaacccugccaguuuc

SEQ ID NO: 1467911 - RNA, 19 nt, Homo sapiens
  misc_RNA (1)...(19): siRNA sense strand
aggaguauauggacacuac

SEQ ID NO: 1467912 - RNA, 19 nt, Homo sapiens
  misc_RNA (1)...(19): siRNA sense strand
caugucaggccaucaagga

SEQ ID NO: 1467913 - RNA, 19 nt, Homo sapiens
  misc_RNA (1)...(19): siRNA sense strand
ggugugagcggaagagcau

SEQ ID NO: 1467914 - RNA, 19 nt, Homo sapiens
  misc_RNA (1)...(19): siRNA sense strand
aaucaugucaggccaucaa

SEQ ID NO: 1467915 - RNA, 19 nt, Homo sapiens
  misc_RNA (1)...(19): siRNA sense strand
gaguucaaaugucgaugcu

SEQ ID NO: 1467916 - RNA, 19 nt, Homo sapiens
  misc_RNA (1)...(19): siRNA sense strand
ggugcccucucacuugaag

SEQ ID NO: 1467917 - RNA, 19 nt, Homo sapiens
  misc_RNA (1)...(19): siRNA sense strand
gucaggccaucaaggagua

SEQ ID NO: 1467918 - RNA, 19 nt, Homo sapiens
  misc_RNA (1)...(19): siRNA sense strand
gcccuucucugcagucaag

SEQ ID NO: 1467919 - RNA, 19 nt, Homo sapiens
  misc_RNA (1)...(19): siRNA sense strand
gcuguggaguucaaauguc

SEQ ID NO: 1467920 - RNA, 19 nt, Homo sapiens
  misc_RNA (1)...(19): siRNA sense strand
aaagcccuccuccuccuua

SEQ ID NO: 1467921 - RNA, 19 nt, Homo sapiens
  misc_RNA (1)...(19): siRNA sense strand
ccuuaacccugccaguuuc

SEQ ID NO: 1467922 - RNA, 19 nt, Homo sapiens
  misc_RNA (1)...(19): siRNA sense strand
aggaguauauggacacuac

SEQ ID NO: 1467923 - RNA, 19 nt, Homo sapiens
  misc_RNA (1)...(19): siRNA sense strand
caugucaggccaucaagga

SEQ ID NO: 1467924 - RNA, 19 nt, Homo sapiens
  misc_RNA (1)...(19): siRNA sense strand
ggugugagcggaagagcau

SEQ ID NO: 1467925 - RNA, 19 nt, Homo sapiens
  misc_RNA (1)...(19): siRNA sense strand
aaucaugucaggccaucaa

SEQ ID NO: 1467926 - RNA, 19 nt, Homo sapiens
  misc_RNA (1)...(19): siRNA sense strand
gaguucaaaugucgaugcu

SEQ ID NO: 1467927 - RNA, 19 nt, Homo sapiens
  misc_RNA (1)...(19): siRNA sense strand
ggugcccucucacuugaag

SEQ ID NO: 1467928 - RNA, 19 nt, Homo sapiens
  misc_RNA (1)...(19): siRNA sense strand
gcccuucucugcagucaag

SEQ ID NO: 1467929 - RNA, 19 nt, Homo sapiens
  misc_RNA (1)...(19): siRNA sense strand
gcuguggaguucaaauguc

SEQ ID NO: 1467930 - RNA, 19 nt, Homo sapiens
  misc_RNA (1)...(19): siRNA sense strand
aaagcccuccuccuccuua

SEQ ID NO: 1467931 - RNA, 19 nt, Homo sapiens
  misc_RNA (1)...(19): siRNA sense strand
ccuuaacccugccaguuuc

SEQ ID NO: 1467932 - RNA, 19 nt, Homo sapiens
  misc_RNA (1)...(19): siRNA sense strand
ggugugagcggaagagcau

SEQ ID NO: 1467933 - RNA, 19 nt, Homo sapiens
  misc_RNA (1)...(19): siRNA sense strand
ggugcccucucacuugaag

SEQ ID NO: 1467934 - RNA, 19 nt, Homo sapiens
  misc_RNA (1)...(19): siRNA sense strand
gaguucaaaugucgaugcu

SEQ ID NO: 1467935 - RNA, 19 nt, Homo sapiens
  misc_RNA (1)...(19): siRNA sense strand
gucaggccaucaaggagua

SEQ ID NO: 1467936 - RNA, 19 nt, Homo sapiens
  misc_RNA (1)...(19): siRNA sense strand
gcccuucucugcagucaag

SEQ ID NO: 1467937 - RNA, 19 nt, Homo sapiens
  misc_RNA (1)...(19): siRNA sense strand
gcuguggaguucaaauguc

SEQ ID NO: 1467938 - RNA, 19 nt, Homo sapiens
  misc_RNA (1)...(19): siRNA sense strand
aaagcccuccuccuccuua

SEQ ID NO: 1467939 - RNA, 19 nt, Homo sapiens
  misc_RNA (1)...(19): siRNA sense strand
ccuuaacccugccaguuuc

SEQ ID NO: 1467940 - RNA, 19 nt, Homo sapiens
  misc_RNA (1)...(19): siRNA sense strand
aggaguauauggacacuac

SEQ ID NO: 1467941 - RNA, 19 nt, Homo sapiens
  misc_RNA (1)...(19): siRNA sense strand
caugucaggccaucaagga

SEQ ID NO: 1467942 - RNA, 19 nt, Homo sapiens
  misc_RNA (1)...(19): siRNA sense strand
ggugugagcggaagagcau

SEQ ID NO: 1467943 - RNA, 19 nt, Homo sapiens
  misc_RNA (1)...(19): siRNA sense strand
aaucaugucaggccaucaa

SEQ ID NO: 1467944 - RNA, 19 nt, Homo sapiens
  misc_RNA (1)...(19): siRNA sense strand
gaguucaaaugucgaugcu

SEQ ID NO: 1467945 - RNA, 19 nt, Homo sapiens
  misc_RNA (1)...(19): siRNA sense strand
ggugcccucucacuugaag

SEQ ID NO: 1467946 - RNA, 19 nt, Homo sapiens
  misc_RNA (1)...(19): siRNA sense strand
gucaggccaucaaggagua

SEQ ID NO: 1467947 - RNA, 19 nt, Homo sapiens
  misc_RNA (1)...(19): siRNA sense strand
gcccuucucugcagucaag

SEQ ID NO: 1467948 - RNA, 19 nt, Homo sapiens
  misc_RNA (1)...(19): siRNA sense strand
gcuguggaguucaaauguc

SEQ ID NO: 1467949 - RNA, 19 nt, Homo sapiens
  misc_RNA (1)...(19): siRNA sense strand
aaagcccuccuccuccuua

SEQ ID NO: 1467950 - RNA, 19 nt, Homo sapiens
  misc_RNA (1)...(19): siRNA sense strand
ccuuaacccugccaguuuc

SEQ ID NO: 1467951 - RNA, 19 nt, Homo sapiens
  misc_RNA (1)...(19): siRNA sense strand
aggaguauauggacacuac

SEQ ID NO: 1467952 - RNA, 19 nt, Homo sapiens
  misc_RNA (1)...(19): siRNA sense strand
caugucaggccaucaagga

SEQ ID NO: 1467953 - RNA, 19 nt, Homo sapiens
  misc_RNA (1)...(19): siRNA sense strand
ggugugagcggaagagcau

SEQ ID NO: 1467954 - RNA, 19 nt, Homo sapiens
  misc_RNA (1)...(19): siRNA sense strand
aaucaugucaggccaucaa

SEQ ID NO: 1467955 - RNA, 19 nt, Homo sapiens
  misc_RNA (1)...(19): siRNA sense strand
gaguucaaaugucgaugcu

SEQ ID NO: 1467956 - RNA, 19 nt, Homo sapiens
  misc_RNA (1)...(19): siRNA sense strand
ggugcccucucacuugaag

SEQ ID NO: 1467957 - RNA, 19 nt, Homo sapiens
  misc_RNA (1)...(19): siRNA sense strand
gucaggccaucaaggagua

SEQ ID NO: 1467958 - RNA, 19 nt, Homo sapiens
  misc_RNA (1)...(19): siRNA sense strand
gcccuucucugcagucaag

SEQ ID NO: 1467959 - RNA, 19 nt, Homo sapiens
  misc_RNA (1)...(19): siRNA sense strand
gcuguggaguucaaauguc

SEQ ID NO: 1467960 - RNA, 19 nt, Homo sapiens
  misc_RNA (1)...(19): siRNA sense strand
aaagcccuccuccuccuua

SEQ ID NO: 1467961 - RNA, 19 nt, Homo sapiens
  misc_RNA (1)...(19): siRNA sense strand
ccuuaacccugccaguuuc

SEQ ID NO: 1467962 - RNA, 19 nt, Homo sapiens
  misc_RNA (1)...(19): siRNA sense strand
aggaguauauggacacuac

SEQ ID NO: 1467963 - RNA, 19 nt, Homo sapiens
  misc_RNA (1)...(19): siRNA sense strand
caugucaggccaucaagga

SEQ ID NO: 1467964 - RNA, 19 nt, Homo sapiens
  misc_RNA (1)...(19): siRNA sense strand
ggugugagcggaagagcau

SEQ ID NO: 1467965 - RNA, 19 nt, Homo sapiens
  misc_RNA (1)...(19): siRNA sense strand
aaucaugucaggccaucaa

SEQ ID NO: 1467966 - RNA, 19 nt, Homo sapiens
  misc_RNA (1)...(19): siRNA sense strand
gaguucaaaugucgaugcu

SEQ ID NO: 1467967 - RNA, 19 nt, Homo sapiens
  misc_RNA (1)...(19): siRNA sense strand
ggugcccucucacuugaag

SEQ ID NO: 1467968 - RNA, 19 nt, Homo sapiens
  misc_RNA (1)...(19): siRNA sense strand
gucaggccaucaaggagua

SEQ ID NO: 1467969 - RNA, 19 nt, Homo sapiens
  misc_RNA (1)...(19): siRNA sense strand
gcccuucucugcagucaag

SEQ ID NO: 1467970 - RNA, 19 nt, Homo sapiens
  misc_RNA (1)...(19): siRNA sense strand
gcuguggaguucaaauguc

SEQ ID NO: 1467971 - RNA, 19 nt, Homo sapiens
  misc_RNA (1)...(19): siRNA sense strand
aaagcccuccuccuccuua

SEQ ID NO: 1467972 - RNA, 19 nt, Homo sapiens
  misc_RNA (1)...(19): siRNA sense strand
ccuuaacccugccaguuuc

SEQ ID NO: 1467973 - RNA, 19 nt, Homo sapiens
  misc_RNA (1)...(19): siRNA sense strand
aggaguauauggacacuac

SEQ ID NO: 1467974 - RNA, 19 nt, Homo sapiens
  misc_RNA (1)...(19): siRNA sense strand
caugucaggccaucaagga

SEQ ID NO: 1467975 - RNA, 19 nt, Homo sapiens
  misc_RNA (1)...(19): siRNA sense strand
ggugugagcggaagagcau

SEQ ID NO: 1467976 - RNA, 19 nt, Homo sapiens
  misc_RNA (1)...(19): siRNA sense strand
aaucaugucaggccaucaa

SEQ ID NO: 1467977 - RNA, 19 nt, Homo sapiens
  misc_RNA (1)...(19): siRNA sense strand
gaguucaaaugucgaugcu

SEQ ID NO: 1467978 - RNA, 19 nt, Homo sapiens
  misc_RNA (1)...(19): siRNA sense strand
ggugcccucucacuugaag

SEQ ID NO: 1467979 - RNA, 19 nt, Homo sapiens
  misc_RNA (1)...(19): siRNA sense strand
gucaggccaucaaggagua

SEQ ID NO: 1467980 - RNA, 19 nt, Homo sapiens
  misc_RNA (1)...(19): siRNA sense strand
gcccuucucugcagucaag

SEQ ID NO: 1467981 - RNA, 19 nt, Homo sapiens
  misc_RNA (1)...(19): siRNA sense strand
gcuguggaguucaaauguc

SEQ ID NO: 1467982 - RNA, 19 nt, Homo sapiens
  misc_RNA (1)...(19): siRNA sense strand
aaagcccuccuccuccuua

SEQ ID NO: 1467983 - RNA, 19 nt, Homo sapiens
  misc_RNA (1)...(19): siRNA sense strand
ccuuaacccugccaguuuc

SEQ ID NO: 1467984 - RNA, 19 nt, Homo sapiens
  misc_RNA (1)...(19): siRNA sense strand
aggaguauauggacacuac

SEQ ID NO: 1467985 - RNA, 19 nt, Homo sapiens
  misc_RNA (1)...(19): siRNA sense strand
caugucaggccaucaagga

SEQ ID NO: 1467986 - RNA, 19 nt, Homo sapiens
  misc_RNA (1)...(19): siRNA sense strand
ggugugagcggaagagcau

SEQ ID NO: 1467987 - RNA, 19 nt, Homo sapiens
  misc_RNA (1)...(19): siRNA sense strand
aaucaugucaggccaucaa

SEQ ID NO: 1467988 - RNA, 19 nt, Homo sapiens
  misc_RNA (1)...(19): siRNA sense strand
gaguucaaaugucgaugcu

SEQ ID NO: 1467989 - RNA, 19 nt, Homo sapiens
  misc_RNA (1)...(19): siRNA sense strand
ggugcccucucacuugaag

SEQ ID NO: 1467990 - RNA, 19 nt, Homo sapiens
  misc_RNA (1)...(19): siRNA sense strand
gucaggccaucaaggagua

SEQ ID NO: 1467991 - RNA, 19 nt, Homo sapiens
  misc_RNA (1)...(19): siRNA sense strand
gcccuucucugcagucaag

SEQ ID NO: 1467992 - RNA, 19 nt, Homo sapiens
  misc_RNA (1)...(19): siRNA sense strand
gcuguggaguucaaauguc

SEQ ID NO: 1467993 - RNA, 19 nt, Homo sapiens
  misc_RNA (1)...(19): siRNA sense strand
aaagcccuccuccuccuua

SEQ ID NO: 1467994 - RNA, 19 nt, Homo sapiens
  misc_RNA (1)...(19): siRNA sense strand
ccuuaacccugccaguuuc

SEQ ID NO: 1467995 - RNA, 19 nt, Homo sapiens
  misc_RNA (1)...(19): siRNA sense strand
aggaguauauggacacuac

SEQ ID NO: 1467996 - RNA, 19 nt, Homo sapiens
  misc_RNA (1)...(19): siRNA sense strand
caugucaggccaucaagga

SEQ ID NO: 1467997 - RNA, 19 nt, Homo sapiens
  misc_RNA (1)...(19): siRNA sense strand
ggugugagcggaagagcau

SEQ ID NO: 1467998 - RNA, 19 nt, Homo sapiens
  misc_RNA (1)...(19): siRNA sense strand
aaucaugucaggccaucaa

SEQ ID NO: 1467999 - RNA, 19 nt, Homo sapiens
  misc_RNA (1)...(19): siRNA sense strand
gaguucaaaugucgaugcu

SEQ ID NO: 1468000 - RNA, 19 nt, Homo sapiens
  misc_RNA (1)...(19): siRNA sense strand
ggugcccucucacuugaag

SEQ ID NO: 1468001 - RNA, 19 nt, Homo sapiens
  misc_RNA (1)...(19): siRNA sense strand
gcccuucucugcagucaag

SEQ ID NO: 1468002 - RNA, 19 nt, Homo sapiens
  misc_RNA (1)...(19): siRNA sense strand
gcuguggaguucaaauguc

SEQ ID NO: 1468003 - RNA, 19 nt, Homo sapiens
  misc_RNA (1)...(19): siRNA sense strand
aaagcccuccuccuccuua

SEQ ID NO: 1468004 - RNA, 19 nt, Homo sapiens
  misc_RNA (1)...(19): siRNA sense strand
ccuuaacccugccaguuuc

SEQ ID NO: 1468005 - RNA, 19 nt, Homo sapiens
  misc_RNA (1)...(19): siRNA sense strand
ggugugagcggaagagcau

SEQ ID NO: 1468006 - RNA, 19 nt, Homo sapiens
  misc_RNA (1)...(19): siRNA sense strand
ggugcccucucacuugaag

SEQ ID NO: 1468007 - RNA, 19 nt, Homo sapiens
  misc_RNA (1)...(19): siRNA sense strand
gaguucaaaugucgaugcu

SEQ ID NO: 1468008 - RNA, 19 nt, Homo sapiens
  misc_RNA (1)...(19): siRNA sense strand
gucaggccaucaaggagua

SEQ ID NO: 1468009 - RNA, 19 nt, Homo sapiens
  misc_RNA (1)...(19): siRNA sense strand
gcccuucucugcagucaag

SEQ ID NO: 1468010 - RNA, 19 nt, Homo sapiens
  misc_RNA (1)...(19): siRNA sense strand
gcuguggaguucaaauguc

SEQ ID NO: 1468011 - RNA, 19 nt, Homo sapiens
  misc_RNA (1)...(19): siRNA sense strand
aaagcccuccuccuccuua

SEQ ID NO: 1468012 - RNA, 19 nt, Homo sapiens
  misc_RNA (1)...(19): siRNA sense strand
ccuuaacccugccaguuuc

SEQ ID NO: 1468013 - RNA, 19 nt, Homo sapiens
  misc_RNA (1)...(19): siRNA sense strand
aggaguauauggacacuac

SEQ ID NO: 1468014 - RNA, 19 nt, Homo sapiens
  misc_RNA (1)...(19): siRNA sense strand
caugucaggccaucaagga

SEQ ID NO: 1468015 - RNA, 19 nt, Homo sapiens
  misc_RNA (1)...(19): siRNA sense strand
ggugugagcggaagagcau

SEQ ID NO: 1468016 - RNA, 19 nt, Homo sapiens
  misc_RNA (1)...(19): siRNA sense strand
aaucaugucaggccaucaa

SEQ ID NO: 1468017 - RNA, 19 nt, Homo sapiens
  misc_RNA (1)...(19): siRNA sense strand
gaguucaaaugucgaugcu

SEQ ID NO: 1468018 - RNA, 19 nt, Homo sapiens
  misc_RNA (1)...(19): siRNA sense strand
ggugcccucucacuugaag

SEQ ID NO: 1468019 - RNA, 19 nt, Homo sapiens
  misc_RNA (1)...(19): siRNA sense strand
gucaggccaucaaggagua

SEQ ID NO: 1468020 - RNA, 19 nt, Homo sapiens
  misc_RNA (1)...(19): siRNA sense strand
gcccuucucugcagucaag

SEQ ID NO: 1468021 - RNA, 19 nt, Homo sapiens
  misc_RNA (1)...(19): siRNA sense strand
gcuguggaguucaaauguc

SEQ ID NO: 1468022 - RNA, 19 nt, Homo sapiens
  misc_RNA (1)...(19): siRNA sense strand
aaagcccuccuccuccuua

SEQ ID NO: 1468023 - RNA, 19 nt, Homo sapiens
  misc_RNA (1)...(19): siRNA sense strand
ccuuaacccugccaguuuc

SEQ ID NO: 1468024 - RNA, 19 nt, Homo sapiens
  misc_RNA (1)...(19): siRNA sense strand
aggaguauauggacacuac

SEQ ID NO: 1468025 - RNA, 19 nt, Homo sapiens
  misc_RNA (1)...(19): siRNA sense strand
caugucaggccaucaagga

SEQ ID NO: 1468026 - RNA, 19 nt, Homo sapiens
  misc_RNA (1)...(19): siRNA sense strand
ggugugagcggaagagcau

SEQ ID NO: 1468027 - RNA, 19 nt, Homo sapiens
  misc_RNA (1)...(19): siRNA sense strand
aaucaugucaggccaucaa

SEQ ID NO: 1468028 - RNA, 19 nt, Homo sapiens
  misc_RNA (1)...(19): siRNA sense strand
gaguucaaaugucgaugcu

SEQ ID NO: 1468029 - RNA, 19 nt, Homo sapiens
  misc_RNA (1)...(19): siRNA sense strand
ggugcccucucacuugaag

SEQ ID NO: 1468030 - RNA, 19 nt, Homo sapiens
  misc_RNA (1)...(19): siRNA sense strand
gucaggccaucaaggagua

SEQ ID NO: 1468031 - RNA, 19 nt, Homo sapiens
  misc_RNA (1)...(19): siRNA sense strand
gcccuucucugcagucaag

SEQ ID NO: 1468032 - RNA, 19 nt, Homo sapiens
  misc_RNA (1)...(19): siRNA sense strand
gcuguggaguucaaauguc

SEQ ID NO: 1468033 - RNA, 19 nt, Homo sapiens
  misc_RNA (1)...(19): siRNA sense strand
aaagcccuccuccuccuua

SEQ ID NO: 1468034 - RNA, 19 nt, Homo sapiens
  misc_RNA (1)...(19): siRNA sense strand
ccuuaacccugccaguuuc

SEQ ID NO: 1468035 - RNA, 19 nt, Homo sapiens
  misc_RNA (1)...(19): siRNA sense strand
aggaguauauggacacuac

SEQ ID NO: 1468036 - RNA, 19 nt, Homo sapiens
  misc_RNA (1)...(19): siRNA sense strand
caugucaggccaucaagga

SEQ ID NO: 1468037 - RNA, 19 nt, Homo sapiens
  misc_RNA (1)...(19): siRNA sense strand
ggugugagcggaagagcau

SEQ ID NO: 1468038 - RNA, 19 nt, Homo sapiens
  misc_RNA (1)...(19): siRNA sense strand
aaucaugucaggccaucaa

SEQ ID NO: 1468039 - RNA, 19 nt, Homo sapiens
  misc_RNA (1)...(19): siRNA sense strand
gaguucaaaugucgaugcu

SEQ ID NO: 1468040 - RNA, 19 nt, Homo sapiens
  misc_RNA (1)...(19): siRNA sense strand
ggugcccucucacuugaag

SEQ ID NO: 1468041 - RNA, 19 nt, Homo sapiens
  misc_RNA (1)...(19): siRNA sense strand
gucaggccaucaaggagua

SEQ ID NO: 1468042 - RNA, 19 nt, Homo sapiens
  misc_RNA (1)...(19): siRNA sense strand
gcccuucucugcagucaag

SEQ ID NO: 1468043 - RNA, 19 nt, Homo sapiens
  misc_RNA (1)...(19): siRNA sense strand
gcuguggaguucaaauguc

SEQ ID NO: 1468044 - RNA, 19 nt, Homo sapiens
  misc_RNA (1)...(19): siRNA sense strand
aaagcccuccuccuccuua

SEQ ID NO: 1468045 - RNA, 19 nt, Homo sapiens
  misc_RNA (1)...(19): siRNA sense strand
ccuuaacccugccaguuuc

SEQ ID NO: 1468046 - RNA, 19 nt, Homo sapiens
  misc_RNA (1)...(19): siRNA sense strand
aggaguauauggacacuac

SEQ ID NO: 1468047 - RNA, 19 nt, Homo sapiens
  misc_RNA (1)...(19): siRNA sense strand
caugucaggccaucaagga

SEQ ID NO: 1468048 - RNA, 19 nt, Homo sapiens
  misc_RNA (1)...(19): siRNA sense strand
ggugugagcggaagagcau

SEQ ID NO: 1468049 - RNA, 19 nt, Homo sapiens
  misc_RNA (1)...(19): siRNA sense strand
aaucaugucaggccaucaa

SEQ ID NO: 1468050 - RNA, 19 nt, Homo sapiens
  misc_RNA (1)...(19): siRNA sense strand
gaguucaaaugucgaugcu

SEQ ID NO: 1468051 - RNA, 19 nt, Homo sapiens
  misc_RNA (1)...(19): siRNA sense strand
ggugcccucucacuugaag

SEQ ID NO: 1468052 - RNA, 19 nt, Homo sapiens
  misc_RNA (1)...(19): siRNA sense strand
gucaggccaucaaggagua

SEQ ID NO: 1468053 - RNA, 19 nt, Homo sapiens
  misc_RNA (1)...(19): siRNA sense strand
gcccuucucugcagucaag

SEQ ID NO: 1468054 - RNA, 19 nt, Homo sapiens
  misc_RNA (1)...(19): siRNA sense strand
gcuguggaguucaaauguc

SEQ ID NO: 1468055 - RNA, 19 nt, Homo sapiens
  misc_RNA (1)...(19): siRNA sense strand
aaagcccuccuccuccuua

SEQ ID NO: 1468056 - RNA, 19 nt, Homo sapiens
  misc_RNA (1)...(19): siRNA sense strand
ccuuaacccugccaguuuc

SEQ ID NO: 1468057 - RNA, 19 nt, Homo sapiens
  misc_RNA (1)...(19): siRNA sense strand
aggaguauauggacacuac

SEQ ID NO: 1468058 - RNA, 19 nt, Homo sapiens
  misc_RNA (1)...(19): siRNA sense strand
caugucaggccaucaagga

SEQ ID NO: 1468059 - RNA, 19 nt, Homo sapiens
  misc_RNA (1)...(19): siRNA sense strand
ggugugagcggaagagcau

SEQ ID NO: 1468060 - RNA, 19 nt, Homo sapiens
  misc_RNA (1)...(19): siRNA sense strand
aaucaugucaggccaucaa

SEQ ID NO: 1468061 - RNA, 19 nt, Homo sapiens
  misc_RNA (1)...(19): siRNA sense strand
gaguucaaaugucgaugcu

SEQ ID NO: 1468062 - RNA, 19 nt, Homo sapiens
  misc_RNA (1)...(19): siRNA sense strand
ggugcccucucacuugaag

SEQ ID NO: 1468063 - RNA, 19 nt, Homo sapiens
  misc_RNA (1)...(19): siRNA sense strand
gucaggccaucaaggagua

SEQ ID NO: 1468064 - RNA, 19 nt, Homo sapiens
  misc_RNA (1)...(19): siRNA sense strand
gcccuucucugcagucaag

SEQ ID NO: 1468065 - RNA, 19 nt, Homo sapiens
  misc_RNA (1)...(19): siRNA sense strand
gcuguggaguucaaauguc

SEQ ID NO: 1468066 - RNA, 19 nt, Homo sapiens
  misc_RNA (1)...(19): siRNA sense strand
aaagcccuccuccuccuua

SEQ ID NO: 1468067 - RNA, 19 nt, Homo sapiens
  misc_RNA (1)...(19): siRNA sense strand
ccuuaacccugccaguuuc

SEQ ID NO: 1468068 - RNA, 19 nt, Homo sapiens
  misc_RNA (1)...(19): siRNA sense strand
aggaguauauggacacuac

SEQ ID NO: 1468069 - RNA, 19 nt, Homo sapiens
  misc_RNA (1)...(19): siRNA sense strand
caugucaggccaucaagga

SEQ ID NO: 1468070 - RNA, 19 nt, Homo sapiens
  misc_RNA (1)...(19): siRNA sense strand
ggugugagcggaagagcau

SEQ ID NO: 1468071 - RNA, 19 nt, Homo sapiens
  misc_RNA (1)...(19): siRNA sense strand
aaucaugucaggccaucaa

SEQ ID NO: 1468072 - RNA, 19 nt, Homo sapiens
  misc_RNA (1)...(19): siRNA sense strand
gaguucaaaugucgaugcu

SEQ ID NO: 1468073 - RNA, 19 nt, Homo sapiens
  misc_RNA (1)...(19): siRNA sense strand
ggugcccucucacuugaag

SEQ ID NO: 1468074 - RNA, 19 nt, Homo sapiens
  misc_RNA (1)...(19): siRNA sense strand
gcccuucucugcagucaag

SEQ ID NO: 1468075 - RNA, 19 nt, Homo sapiens
  misc_RNA (1)...(19): siRNA sense strand
gcuguggaguucaaauguc

SEQ ID NO: 1468076 - RNA, 19 nt, Homo sapiens
  misc_RNA (1)...(19): siRNA sense strand
aaagcccuccuccuccuua

SEQ ID NO: 1468077 - RNA, 19 nt, Homo sapiens
  misc_RNA (1)...(19): siRNA sense strand
ccuuaacccugccaguuuc

SEQ ID NO: 1468078 - RNA, 19 nt, Homo sapiens
  misc_RNA (1)...(19): siRNA sense strand
ggugugagcggaagagcau

SEQ ID NO: 1468079 - RNA, 19 nt, Homo sapiens
  misc_RNA (1)...(19): siRNA sense strand
ggugcccucucacuugaag

SEQ ID NO: 1468080 - RNA, 19 nt, Homo sapiens
  misc_RNA (1)...(19): siRNA sense strand
gaguucaaaugucgaugcu

SEQ ID NO: 1468081 - RNA, 19 nt, Homo sapiens
  misc_RNA (1)...(19): siRNA sense strand
gucaggccaucaaggagua

SEQ ID NO: 1468082 - RNA, 19 nt, Homo sapiens
  misc_RNA (1)...(19): siRNA sense strand
gcccuucucugcagucaag

SEQ ID NO: 1468083 - RNA, 19 nt, Homo sapiens
  misc_RNA (1)...(19): siRNA sense strand
gcuguggaguucaaauguc

SEQ ID NO: 1468084 - RNA, 19 nt, Homo sapiens
  misc_RNA (1)...(19): siRNA sense strand
aaagcccuccuccuccuua

SEQ ID NO: 1468085 - RNA, 19 nt, Homo sapiens
  misc_RNA (1)...(19): siRNA sense strand
ccuuaacccugccaguuuc

SEQ ID NO: 1468086 - RNA, 19 nt, Homo sapiens
  misc_RNA (1)...(19): siRNA sense strand
aggaguauauggacacuac

SEQ ID NO: 1468087 - RNA, 19 nt, Homo sapiens
  misc_RNA (1)...(19): siRNA sense strand
caugucaggccaucaagga

SEQ ID NO: 1468088 - RNA, 19 nt, Homo sapiens
  misc_RNA (1)...(19): siRNA sense strand
ggugugagcggaagagcau

SEQ ID NO: 1468089 - RNA, 19 nt, Homo sapiens
  misc_RNA (1)...(19): siRNA sense strand
aaucaugucaggccaucaa

SEQ ID NO: 1468090 - RNA, 19 nt, Homo sapiens
  misc_RNA (1)...(19): siRNA sense strand
gaguucaaaugucgaugcu

SEQ ID NO: 1468091 - RNA, 19 nt, Homo sapiens
  misc_RNA (1)...(19): siRNA sense strand
ggugcccucucacuugaag

SEQ ID NO: 1468092 - RNA, 19 nt, Homo sapiens
  misc_RNA (1)...(19): siRNA sense strand
gucaggccaucaaggagua

SEQ ID NO: 1468093 - RNA, 19 nt, Homo sapiens
  misc_RNA (1)...(19): siRNA sense strand
gcccuucucugcagucaag

SEQ ID NO: 1468094 - RNA, 19 nt, Homo sapiens
  misc_RNA (1)...(19): siRNA sense strand
gcuguggaguucaaauguc

SEQ ID NO: 1468095 - RNA, 19 nt, Homo sapiens
  misc_RNA (1)...(19): siRNA sense strand
aaagcccuccuccuccuua

SEQ ID NO: 1468096 - RNA, 19 nt, Homo sapiens
  misc_RNA (1)...(19): siRNA sense strand
ccuuaacccugccaguuuc

SEQ ID NO: 1468097 - RNA, 19 nt, Homo sapiens
  misc_RNA (1)...(19): siRNA sense strand
aggaguauauggacacuac

SEQ ID NO: 1468098 - RNA, 19 nt, Homo sapiens
  misc_RNA (1)...(19): siRNA sense strand
caugucaggccaucaagga

SEQ ID NO: 1468099 - RNA, 19 nt, Homo sapiens
  misc_RNA (1)...(19): siRNA sense strand
ggugugagcggaagagcau

SEQ ID NO: 1468100 - RNA, 19 nt, Homo sapiens
  misc_RNA (1)...(19): siRNA sense strand
aaucaugucaggccaucaa

SEQ ID NO: 1468101 - RNA, 19 nt, Homo sapiens
  misc_RNA (1)...(19): siRNA sense strand
gaguucaaaugucgaugcu

SEQ ID NO: 1468102 - RNA, 19 nt, Homo sapiens
  misc_RNA (1)...(19): siRNA sense strand
ggugcccucucacuugaag

SEQ ID NO: 1468103 - RNA, 19 nt, Homo sapiens
  misc_RNA (1)...(19): siRNA sense strand
gucaggccaucaaggagua

SEQ ID NO: 1468104 - RNA, 19 nt, Homo sapiens
  misc_RNA (1)...(19): siRNA sense strand
gcccuucucugcagucaag

SEQ ID NO: 1468105 - RNA, 19 nt, Homo sapiens
  misc_RNA (1)...(19): siRNA sense strand
gcuguggaguucaaauguc

SEQ ID NO: 1468106 - RNA, 19 nt, Homo sapiens
  misc_RNA (1)...(19): siRNA sense strand
aaagcccuccuccuccuua

SEQ ID NO: 1468107 - RNA, 19 nt, Homo sapiens
  misc_RNA (1)...(19): siRNA sense strand
ccuuaacccugccaguuuc

SEQ ID NO: 1468108 - RNA, 19 nt, Homo sapiens
  misc_RNA (1)...(19): siRNA sense strand
aggaguauauggacacuac

SEQ ID NO: 1468109 - RNA, 19 nt, Homo sapiens
  misc_RNA (1)...(19): siRNA sense strand
caugucaggccaucaagga

SEQ ID NO: 1468110 - RNA, 19 nt, Homo sapiens
  misc_RNA (1)...(19): siRNA sense strand
ggugugagcggaagagcau

SEQ ID NO: 1468111 - RNA, 19 nt, Homo sapiens
  misc_RNA (1)...(19): siRNA sense strand
aaucaugucaggccaucaa

SEQ ID NO: 1468112 - RNA, 19 nt, Homo sapiens
  misc_RNA (1)...(19): siRNA sense strand
gaguucaaaugucgaugcu

SEQ ID NO: 1468113 - RNA, 19 nt, Homo sapiens
  misc_RNA (1)...(19): siRNA sense strand
ggugcccucucacuugaag

SEQ ID NO: 1468114 - RNA, 19 nt, Homo sapiens
  misc_RNA (1)...(19): siRNA sense strand
gucaggccaucaaggagua

SEQ ID NO: 1468115 - RNA, 19 nt, Homo sapiens
  misc_RNA (1)...(19): siRNA sense strand
gcccuucucugcagucaag

SEQ ID NO: 1468116 - RNA, 19 nt, Homo sapiens
  misc_RNA (1)...(19): siRNA sense strand
gcuguggaguucaaauguc

SEQ ID NO: 1468117 - RNA, 19 nt, Homo sapiens
  misc_RNA (1)...(19): siRNA sense strand
aaagcccuccuccuccuua

SEQ ID NO: 1468118 - RNA, 19 nt, Homo sapiens
  misc_RNA (1)...(19): siRNA sense strand
ccuuaacccugccaguuuc

SEQ ID NO: 1468119 - RNA, 19 nt, Homo sapiens
  misc_RNA (1)...(19): siRNA sense strand
aggaguauauggacacuac

SEQ ID NO: 1468120 - RNA, 19 nt, Homo sapiens
  misc_RNA (1)...(19): siRNA sense strand
caugucaggccaucaagga

SEQ ID NO: 1468121 - RNA, 19 nt, Homo sapiens
  misc_RNA (1)...(19): siRNA sense strand
ggugugagcggaagagcau

SEQ ID NO: 1468122 - RNA, 19 nt, Homo sapiens
  misc_RNA (1)...(19): siRNA sense strand
aaucaugucaggccaucaa

SEQ ID NO: 1468123 - RNA, 19 nt, Homo sapiens
  misc_RNA (1)...(19): siRNA sense strand
gaguucaaaugucgaugcu

SEQ ID NO: 1468124 - RNA, 19 nt, Homo sapiens
  misc_RNA (1)...(19): siRNA sense strand
ggugcccucucacuugaag

SEQ ID NO: 1468125 - RNA, 19 nt, Homo sapiens
  misc_RNA (1)...(19): siRNA sense strand
gucaggccaucaaggagua

SEQ ID NO: 1468126 - RNA, 19 nt, Homo sapiens
  misc_RNA (1)...(19): siRNA sense strand
gcccuucucugcagucaag

SEQ ID NO: 1468127 - RNA, 19 nt, Homo sapiens
  misc_RNA (1)...(19): siRNA sense strand
gcuguggaguucaaauguc

SEQ ID NO: 1468128 - RNA, 19 nt, Homo sapiens
  misc_RNA (1)...(19): siRNA sense strand
aaagcccuccuccuccuua

SEQ ID NO: 1468129 - RNA, 19 nt, Homo sapiens
  misc_RNA (1)...(19): siRNA sense strand
ccuuaacccugccaguuuc

SEQ ID NO: 1468130 - RNA, 19 nt, Homo sapiens
  misc_RNA (1)...(19): siRNA sense strand
aggaguauauggacacuac

SEQ ID NO: 1468131 - RNA, 19 nt, Homo sapiens
  misc_RNA (1)...(19): siRNA sense strand
caugucaggccaucaagga

SEQ ID NO: 1468132 - RNA, 19 nt, Homo sapiens
  misc_RNA (1)...(19): siRNA sense strand
ggugugagcggaagagcau

SEQ ID NO: 1468133 - RNA, 19 nt, Homo sapiens
  misc_RNA (1)...(19): siRNA sense strand
aaucaugucaggccaucaa

SEQ ID NO: 1468134 - RNA, 19 nt, Homo sapiens
  misc_RNA (1)...(19): siRNA sense strand
gaguucaaaugucgaugcu

SEQ ID NO: 1468135 - RNA, 19 nt, Homo sapiens
  misc_RNA (1)...(19): siRNA sense strand
ggugcccucucacuugaag

SEQ ID NO: 1468136 - RNA, 19 nt, Homo sapiens
  misc_RNA (1)...(19): siRNA sense strand
gucaggccaucaaggagua

SEQ ID NO: 1468137 - RNA, 19 nt, Homo sapiens
  misc_RNA (1)...(19): siRNA sense strand
gcccuucucugcagucaag

SEQ ID NO: 1468138 - RNA, 19 nt, Homo sapiens
  misc_RNA (1)...(19): siRNA sense strand
gcuguggaguucaaauguc

SEQ ID NO: 1468139 - RNA, 19 nt, Homo sapiens
  misc_RNA (1)...(19): siRNA sense strand
aaagcccuccuccuccuua

SEQ ID NO: 1468140 - RNA, 19 nt, Homo sapiens
  misc_RNA (1)...(19): siRNA sense strand
ccuuaacccugccaguuuc

SEQ ID NO: 1468141 - RNA, 19 nt, Homo sapiens
  misc_RNA (1)...(19): siRNA sense strand
aggaguauauggacacuac

SEQ ID NO: 1468142 - RNA, 19 nt, Homo sapiens
  misc_RNA (1)...(19): siRNA sense strand
caugucaggccaucaagga

SEQ ID NO: 1468143 - RNA, 19 nt, Homo sapiens
  misc_RNA (1)...(19): siRNA sense strand
ggugugagcggaagagcau

SEQ ID NO: 1468144 - RNA, 19 nt, Homo sapiens
  misc_RNA (1)...(19): siRNA sense strand
aaucaugucaggccaucaa

SEQ ID NO: 1468145 - RNA, 19 nt, Homo sapiens
  misc_RNA (1)...(19): siRNA sense strand
gaguucaaaugucgaugcu

SEQ ID NO: 1468146 - RNA, 19 nt, Homo sapiens
  misc_RNA (1)...(19): siRNA sense strand
ggugcccucucacuugaag

SEQ ID NO: 1468147 - RNA, 19 nt, Homo sapiens
  misc_RNA (1)...(19): siRNA sense strand
gcccuucucugcagucaag

SEQ ID NO: 1468148 - RNA, 19 nt, Homo sapiens
  misc_RNA (1)...(19): siRNA sense strand
gcuguggaguucaaauguc

SEQ ID NO: 1468149 - RNA, 19 nt, Homo sapiens
  misc_RNA (1)...(19): siRNA sense strand
aaagcccuccuccuccuua

SEQ ID NO: 1468150 - RNA, 19 nt, Homo sapiens
  misc_RNA (1)...(19): siRNA sense strand
ccuuaacccugccaguuuc

SEQ ID NO: 1468151 - RNA, 19 nt, Homo sapiens
  misc_RNA (1)...(19): siRNA sense strand
ggugugagcggaagagcau

SEQ ID NO: 1468152 - RNA, 19 nt, Homo sapiens
  misc_RNA (1)...(19): siRNA sense strand
ggugcccucucacuugaag

SEQ ID NO: 1468153 - RNA, 19 nt, Homo sapiens
  misc_RNA (1)...(19): siRNA sense strand
gaguucaaaugucgaugcu

SEQ ID NO: 1468154 - RNA, 19 nt, Homo sapiens
  misc_RNA (1)...(19): siRNA sense strand
gaagagagauuccauugaa

SEQ ID NO: 1468155 - RNA, 19 nt, Homo sapiens
  misc_RNA (1)...(19): siRNA sense strand
ugaaagagcucaacaacaa

SEQ ID NO: 1468156 - RNA, 19 nt, Homo sapiens
  misc_RNA (1)...(19): siRNA sense strand
ggaaagaagucuccagaau

SEQ ID NO: 1468157 - RNA, 19 nt, Homo sapiens
  misc_RNA (1)...(19): siRNA sense strand
gagagaaacugaagaaauc

SEQ ID NO: 1468158 - RNA, 19 nt, Homo sapiens
  misc_RNA (1)...(19): siRNA sense strand
ugaaguacaugcagaauga

SEQ ID NO: 1468159 - RNA, 19 nt, Homo sapiens
  misc_RNA (1)...(19): siRNA sense strand
caacaacaauguggagaaa

SEQ ID NO: 1468160 - RNA, 19 nt, Homo sapiens
  misc_RNA (1)...(19): siRNA sense strand
ggaaauuucuguucaagac

SEQ ID NO: 1468161 - RNA, 19 nt, Homo sapiens
  misc_RNA (1)...(19): siRNA sense strand
gaaagaagucuccagaauc

SEQ ID NO: 1468162 - RNA, 19 nt, Homo sapiens
  misc_RNA (1)...(19): siRNA sense strand
ggagagaaacugaagaaau

SEQ ID NO: 1468163 - RNA, 19 nt, Homo sapiens
  misc_RNA (1)...(19): siRNA sense strand
uaucuuuggugcuguauuu

SEQ ID NO: 1468164 - RNA, 19 nt, Homo sapiens
  misc_RNA (1)...(19): siRNA sense strand
gcucaaaucucggcagaau

SEQ ID NO: 1468165 - RNA, 19 nt, Homo sapiens
  misc_RNA (1)...(19): siRNA sense strand
gcaaacagcacauucagau

SEQ ID NO: 1468166 - RNA, 19 nt, Homo sapiens
  misc_RNA (1)...(19): siRNA sense strand
aaagaagucuccagaaucu

SEQ ID NO: 1468167 - RNA, 19 nt, Homo sapiens
  misc_RNA (1)...(19): siRNA sense strand
caaaggagauagaaacaac

SEQ ID NO: 1468168 - RNA, 19 nt, Homo sapiens
  misc_RNA (1)...(19): siRNA sense strand
gagaagagagauuccauug

SEQ ID NO: 1468169 - RNA, 19 nt, Homo sapiens
  misc_RNA (1)...(19): siRNA sense strand
caagacacacuucaccaua

SEQ ID NO: 1468170 - RNA, 19 nt, Homo sapiens
  misc_RNA (1)...(19): siRNA sense strand
ggucgaggacuauuucuuu

SEQ ID NO: 1468171 - RNA, 19 nt, Homo sapiens
  misc_RNA (1)...(19): siRNA sense strand
ccauggaacaucccaaaua

SEQ ID NO: 1468172 - RNA, 19 nt, Homo sapiens
  misc_RNA (1)...(19): siRNA sense strand
ccaaagggauuuuaacuug

SEQ ID NO: 1468173 - RNA, 19 nt, Homo sapiens
  misc_RNA (1)...(19): siRNA sense strand
caccugaccuugugcuuga

SEQ ID NO: 1468174 - RNA, 19 nt, Homo sapiens
  misc_RNA (1)...(19): siRNA sense strand
gagauuccauugaaagucu

SEQ ID NO: 1468175 - RNA, 19 nt, Homo sapiens
  misc_RNA (1)...(19): siRNA sense strand
aggaugaccuucaguauca

SEQ ID NO: 1468176 - RNA, 19 nt, Homo sapiens
  misc_RNA (1)...(19): siRNA sense strand
cagaagagccugagagaca

SEQ ID NO: 1468177 - RNA, 19 nt, Homo sapiens
  misc_RNA (1)...(19): siRNA sense strand
gaaagagcucaacaacaaa

SEQ ID NO: 1468178 - RNA, 19 nt, Homo sapiens
  misc_RNA (1)...(19): siRNA sense strand
gaagugggcaggagaaugg

SEQ ID NO: 1468179 - RNA, 19 nt, Homo sapiens
  misc_RNA (1)...(19): siRNA sense strand
acaggaaccuaccaacuga

SEQ ID NO: 1468180 - RNA, 19 nt, Homo sapiens
  misc_RNA (1)...(19): siRNA sense strand
aagacacacuucaccauaa

SEQ ID NO: 1468181 - RNA, 19 nt, Homo sapiens
  misc_RNA (1)...(19): siRNA sense strand
ucgaauuugucaaccaaua

SEQ ID NO: 1468182 - RNA, 19 nt, Homo sapiens
  misc_RNA (1)...(19): siRNA sense strand
gcaaagcccucagcagcau

SEQ ID NO: 1468183 - RNA, 19 nt, Homo sapiens
  misc_RNA (1)...(19): siRNA sense strand
aagguugucugcauggaua

SEQ ID NO: 1468184 - RNA, 19 nt, Homo sapiens
  misc_RNA (1)...(19): siRNA sense strand
cugccaagcugaaauugaa

SEQ ID NO: 1468185 - RNA, 19 nt, Homo sapiens
  misc_RNA (1)...(19): siRNA sense strand
gaaagaccaggcugucguu

SEQ ID NO: 1468186 - RNA, 19 nt, Homo sapiens
  misc_RNA (1)...(19): siRNA sense strand
caacauugcugugcuccau

SEQ ID NO: 1468187 - RNA, 19 nt, Homo sapiens
  misc_RNA (1)...(19): siRNA sense strand
uaacaaaggagauagaaac

SEQ ID NO: 1468188 - RNA, 19 nt, Homo sapiens
  misc_RNA (1)...(19): siRNA sense strand
agaaaucgcucuucaugcu

SEQ ID NO: 1468189 - RNA, 19 nt, Homo sapiens
  misc_RNA (1)...(19): siRNA sense strand
agaccaaauuccaccagua

SEQ ID NO: 1468190 - RNA, 19 nt, Homo sapiens
  misc_RNA (1)...(19): siRNA sense strand
ucagcaagcagcagaauga

SEQ ID NO: 1468191 - RNA, 19 nt, Homo sapiens
  misc_RNA (1)...(19): siRNA sense strand
ggccuguccuuggaaauuu

SEQ ID NO: 1468192 - RNA, 19 nt, Homo sapiens
  misc_RNA (1)...(19): siRNA sense strand
cauggaacaucccaaauac

SEQ ID NO: 1468193 - RNA, 19 nt, Homo sapiens
  misc_RNA (1)...(19): siRNA sense strand
gaccaaauuccaccaguau

SEQ ID NO: 1468194 - RNA, 19 nt, Homo sapiens
  misc_RNA (1)...(19): siRNA sense strand
gggaugacuuuccaagaca

SEQ ID NO: 1468195 - RNA, 19 nt, Homo sapiens
  misc_RNA (1)...(19): siRNA sense strand
gcaaguggaaguucaccaa

SEQ ID NO: 1468196 - RNA, 19 nt, Homo sapiens
  misc_RNA (1)...(19): siRNA sense strand
gagaagcggagacccaaga

SEQ ID NO: 1468197 - RNA, 19 nt, Homo sapiens
  misc_RNA (1)...(19): siRNA sense strand
ccaccaguaugcaaugaau

SEQ ID NO: 1468198 - RNA, 19 nt, Homo sapiens
  misc_RNA (1)...(19): siRNA sense strand
gaucacacgcccacagaga

SEQ ID NO: 1468199 - RNA, 19 nt, Homo sapiens
  misc_RNA (1)...(19): siRNA sense strand
uugcugugcuccauaguuu

SEQ ID NO: 1468200 - RNA, 19 nt, Homo sapiens
  misc_RNA (1)...(19): siRNA sense strand
gccaggcccucaccuacuu

SEQ ID NO: 1468201 - RNA, 19 nt, Homo sapiens
  misc_RNA (1)...(19): siRNA sense strand
accaggagaugcugaacua

SEQ ID NO: 1468202 - RNA, 19 nt, Homo sapiens
  misc_RNA (1)...(19): siRNA sense strand
uaucgaauuugucaaccaa

SEQ ID NO: 1468203 - RNA, 19 nt, Homo sapiens
  misc_RNA (1)...(19): siRNA sense strand
gcugugcucuuugccugua

SEQ ID NO: 1468204 - RNA, 19 nt, Homo sapiens
  misc_RNA (1)...(19): siRNA sense strand
gcugcagaauccuucauga

SEQ ID NO: 1468205 - RNA, 19 nt, Homo sapiens
  misc_RNA (1)...(19): siRNA sense strand
aagcaggccuggcgcaaug

SEQ ID NO: 1468206 - RNA, 19 nt, Homo sapiens
  misc_RNA (1)...(19): siRNA sense strand
gcaucgaccugggcuggaa

SEQ ID NO: 1468207 - RNA, 19 nt, Homo sapiens
  misc_RNA (1)...(19): siRNA sense strand
cgccuuugcucaugacauu

SEQ ID NO: 1468208 - RNA, 19 nt, Homo sapiens
  misc_RNA (1)...(19): siRNA sense strand
acccugagcucuucgaaau

SEQ ID NO: 1468209 - RNA, 19 nt, Homo sapiens
  misc_RNA (1)...(19): siRNA sense strand
gcaggucgaggacuauuuc

SEQ ID NO: 1468210 - RNA, 19 nt, Homo sapiens
  misc_RNA (1)...(19): siRNA sense strand
gagauagaaacaacaggaa

SEQ ID NO: 1468211 - RNA, 19 nt, Homo sapiens
  misc_RNA (1)...(19): siRNA sense strand
ccaggccaccucuauguuu

SEQ ID NO: 1468212 - RNA, 19 nt, Homo sapiens
  misc_RNA (1)...(19): siRNA sense strand
gcaauggagagaaacugaa

SEQ ID NO: 1468213 - RNA, 19 nt, Homo sapiens
  misc_RNA (1)...(19): siRNA sense strand
aagagagauuccauugaaa

SEQ ID NO: 1468214 - RNA, 19 nt, Homo sapiens
  misc_RNA (1)...(19): siRNA sense strand
uggaagcgguaacaaagga

SEQ ID NO: 1468215 - RNA, 19 nt, Homo sapiens
  misc_RNA (1)...(19): siRNA sense strand
ugguggaacucuccuguga

SEQ ID NO: 1468216 - RNA, 19 nt, Homo sapiens
  misc_RNA (1)...(19): siRNA sense strand
aacuggagcuaaaguggua

SEQ ID NO: 1468217 - RNA, 19 nt, Homo sapiens
  misc_RNA (1)...(19): siRNA sense strand
guaacaaaggagauagaaa

SEQ ID NO: 1468218 - RNA, 19 nt, Homo sapiens
  misc_RNA (1)...(19): siRNA sense strand
guacaugggcacagagauc

SEQ ID NO: 1468219 - RNA, 19 nt, Homo sapiens
  misc_RNA (1)...(19): siRNA sense strand
ucaaaucucggcagaaucu

SEQ ID NO: 1468220 - RNA, 19 nt, Homo sapiens
  misc_RNA (1)...(19): siRNA sense strand
gagcucaacaacaaauuca

SEQ ID NO: 1468221 - RNA, 19 nt, Homo sapiens
  misc_RNA (1)...(19): siRNA sense strand
ccacucggcugcagaaucc

SEQ ID NO: 1468222 - RNA, 19 nt, Homo sapiens
  misc_RNA (1)...(19): siRNA sense strand
ccauaaggccaaagggauu

SEQ ID NO: 1468223 - RNA, 19 nt, Homo sapiens
  misc_RNA (1)...(19): siRNA sense strand
ggagccaggccaccucuau

SEQ ID NO: 1468224 - RNA, 19 nt, Homo sapiens
  misc_RNA (1)...(19): siRNA sense strand
ucugcuggcuuccugcuuu

SEQ ID NO: 1468225 - RNA, 19 nt, Homo sapiens
  misc_RNA (1)...(19): siRNA sense strand
cgaaaucccaccugaccuu

SEQ ID NO: 1468226 - RNA, 19 nt, Homo sapiens
  misc_RNA (1)...(19): siRNA sense strand
ggucggccaucaccguguu

SEQ ID NO: 1468227 - RNA, 19 nt, Homo sapiens
  misc_RNA (1)...(19): siRNA sense strand
caccaacaauggcaacauc

SEQ ID NO: 1468228 - RNA, 19 nt, Homo sapiens
  misc_RNA (1)...(19): siRNA sense strand
gcagacacgugcguuacuc

SEQ ID NO: 1468229 - RNA, 19 nt, Homo sapiens
  misc_RNA (1)...(19): siRNA sense strand
gcugguacaugggcacaga

SEQ ID NO: 1468230 - RNA, 19 nt, Homo sapiens
  misc_RNA (1)...(19): siRNA sense strand
caggccaccucuauguuug

SEQ ID NO: 1468231 - RNA, 19 nt, Homo sapiens
  misc_RNA (1)...(19): siRNA sense strand
acaauggcgucccgaguca

SEQ ID NO: 1468232 - RNA, 19 nt, Homo sapiens
  misc_RNA (1)...(19): siRNA sense strand
caagcuaucgaauuuguca

SEQ ID NO: 1468233 - RNA, 19 nt, Homo sapiens
  misc_RNA (1)...(19): siRNA sense strand
gcucuacaccuccaaugug

SEQ ID NO: 1468234 - RNA, 19 nt, Homo sapiens
  misc_RNA (1)...(19): siRNA sense strand
gcuggucccucccaugucu

SEQ ID NO: 1468235 - RNA, 19 nt, Homo sapiens
  misc_RNA (1)...(19): siRNA sense strand
gggaaagaagucuccagaa

SEQ ID NO: 1468236 - RNA, 19 nt, Homo sapiens
  misc_RNA (1)...(19): siRNA sense strand
gguggaagcgguaacaaag

SEQ ID NO: 1468237 - RNA, 19 nt, Homo sapiens
  misc_RNA (1)...(19): siRNA sense strand
gcagcgggaugacuuucca

SEQ ID NO: 1468238 - RNA, 19 nt, Homo sapiens
  misc_RNA (1)...(19): siRNA sense strand
agauaucuuuggugcugua

SEQ ID NO: 1468239 - RNA, 19 nt, Homo sapiens
  misc_RNA (1)...(19): siRNA sense strand
ccgcaugaccuugguguuu

SEQ ID NO: 1468240 - RNA, 19 nt, Homo sapiens
  misc_RNA (1)...(19): siRNA sense strand
gaggcaaacagcacauuca

SEQ ID NO: 1468241 - RNA, 19 nt, Homo sapiens
  misc_RNA (1)...(19): siRNA sense strand
cucaugacauugaucagaa

SEQ ID NO: 1468242 - RNA, 19 nt, Homo sapiens
  misc_RNA (1)...(19): siRNA sense strand
gcucaugacauugaucaga

SEQ ID NO: 1468243 - RNA, 19 nt, Homo sapiens
  misc_RNA (1)...(19): siRNA sense strand
caacaggaaccuaccaacu

SEQ ID NO: 1468244 - RNA, 19 nt, Homo sapiens
  misc_RNA (1)...(19): siRNA sense strand
agacacacuucaccauaag

SEQ ID NO: 1468245 - RNA, 19 nt, Homo sapiens
  misc_RNA (1)...(19): siRNA sense strand
cgaauuugucaaccaauau

SEQ ID NO: 1468246 - RNA, 19 nt, Homo sapiens
  misc_RNA (1)...(19): siRNA sense strand
gcaagcccaaggucuaugu

SEQ ID NO: 1468247 - RNA, 19 nt, Homo sapiens
  misc_RNA (1)...(19): siRNA sense strand
aaagacaucaacaacaaug

SEQ ID NO: 1468248 - RNA, 19 nt, Homo sapiens
  misc_RNA (1)...(19): siRNA sense strand
gagagauuccauugaaagu

SEQ ID NO: 1468249 - RNA, 19 nt, Homo sapiens
  misc_RNA (1)...(19): siRNA sense strand
guacaugcagaaugaauac

SEQ ID NO: 1468250 - RNA, 19 nt, Homo sapiens
  misc_RNA (1)...(19): siRNA sense strand
gguaacaaaggagauagaa

SEQ ID NO: 1468251 - RNA, 19 nt, Homo sapiens
  misc_RNA (1)...(19): siRNA sense strand
uauuacggcuccuucaaag

SEQ ID NO: 1468252 - RNA, 19 nt, Homo sapiens
  misc_RNA (1)...(19): siRNA sense strand
aggagcaggucgaggacua

SEQ ID NO: 1468253 - RNA, 19 nt, Homo sapiens
  misc_RNA (1)...(19): siRNA sense strand
cgcaugaccuugguguuug

SEQ ID NO: 1468254 - RNA, 19 nt, Homo sapiens
  misc_RNA (1)...(19): siRNA sense strand
gaagagagauuccauugaa

SEQ ID NO: 1468255 - RNA, 19 nt, Homo sapiens
  misc_RNA (1)...(19): siRNA sense strand
ugaaagagcucaacaacaa

SEQ ID NO: 1468256 - RNA, 19 nt, Homo sapiens
  misc_RNA (1)...(19): siRNA sense strand
ggaaagaagucuccagaau

SEQ ID NO: 1468257 - RNA, 19 nt, Homo sapiens
  misc_RNA (1)...(19): siRNA sense strand
gagagaaacugaagaaauc

SEQ ID NO: 1468258 - RNA, 19 nt, Homo sapiens
  misc_RNA (1)...(19): siRNA sense strand
ugaaguacaugcagaauga

SEQ ID NO: 1468259 - RNA, 19 nt, Homo sapiens
  misc_RNA (1)...(19): siRNA sense strand
caacaacaauguggagaaa

SEQ ID NO: 1468260 - RNA, 19 nt, Homo sapiens
  misc_RNA (1)...(19): siRNA sense strand
ggaaauuucuguucaagac

SEQ ID NO: 1468261 - RNA, 19 nt, Homo sapiens
  misc_RNA (1)...(19): siRNA sense strand
gaaagaagucuccagaauc

SEQ ID NO: 1468262 - RNA, 19 nt, Homo sapiens
  misc_RNA (1)...(19): siRNA sense strand
ggagagaaacugaagaaau

SEQ ID NO: 1468263 - RNA, 19 nt, Homo sapiens
  misc_RNA (1)...(19): siRNA sense strand
uaucuuuggugcuguauuu

SEQ ID NO: 1468264 - RNA, 19 nt, Homo sapiens
  misc_RNA (1)...(19): siRNA sense strand
gcucaaaucucggcagaau

SEQ ID NO: 1468265 - RNA, 19 nt, Homo sapiens
  misc_RNA (1)...(19): siRNA sense strand
gcaaacagcacauucagau

SEQ ID NO: 1468266 - RNA, 19 nt, Homo sapiens
  misc_RNA (1)...(19): siRNA sense strand
aaagaagucuccagaaucu

SEQ ID NO: 1468267 - RNA, 19 nt, Homo sapiens
  misc_RNA (1)...(19): siRNA sense strand
caaaggagauagaaacaac

SEQ ID NO: 1468268 - RNA, 19 nt, Homo sapiens
  misc_RNA (1)...(19): siRNA sense strand
gagaagagagauuccauug

SEQ ID NO: 1468269 - RNA, 19 nt, Homo sapiens
  misc_RNA (1)...(19): siRNA sense strand
caagacacacuucaccaua

SEQ ID NO: 1468270 - RNA, 19 nt, Homo sapiens
  misc_RNA (1)...(19): siRNA sense strand
ggucgaggacuauuucuuu

SEQ ID NO: 1468271 - RNA, 19 nt, Homo sapiens
  misc_RNA (1)...(19): siRNA sense strand
ccauggaacaucccaaaua

SEQ ID NO: 1468272 - RNA, 19 nt, Homo sapiens
  misc_RNA (1)...(19): siRNA sense strand
ccaaagggauuuuaacuug

SEQ ID NO: 1468273 - RNA, 19 nt, Homo sapiens
  misc_RNA (1)...(19): siRNA sense strand
caccugaccuugugcuuga

SEQ ID NO: 1468274 - RNA, 19 nt, Homo sapiens
  misc_RNA (1)...(19): siRNA sense strand
gagauuccauugaaagucu

SEQ ID NO: 1468275 - RNA, 19 nt, Homo sapiens
  misc_RNA (1)...(19): siRNA sense strand
aggaugaccuucaguauca

SEQ ID NO: 1468276 - RNA, 19 nt, Homo sapiens
  misc_RNA (1)...(19): siRNA sense strand
cagaagagccugagagaca

SEQ ID NO: 1468277 - RNA, 19 nt, Homo sapiens
  misc_RNA (1)...(19): siRNA sense strand
gaaagagcucaacaacaaa

SEQ ID NO: 1468278 - RNA, 19 nt, Homo sapiens
  misc_RNA (1)...(19): siRNA sense strand
gaagugggcaggagaaugg

SEQ ID NO: 1468279 - RNA, 19 nt, Homo sapiens
  misc_RNA (1)...(19): siRNA sense strand
acaggaaccuaccaacuga

SEQ ID NO: 1468280 - RNA, 19 nt, Homo sapiens
  misc_RNA (1)...(19): siRNA sense strand
aagacacacuucaccauaa

SEQ ID NO: 1468281 - RNA, 19 nt, Homo sapiens
  misc_RNA (1)...(19): siRNA sense strand
ucgaauuugucaaccaaua

SEQ ID NO: 1468282 - RNA, 19 nt, Homo sapiens
  misc_RNA (1)...(19): siRNA sense strand
gcaaagcccucagcagcau

SEQ ID NO: 1468283 - RNA, 19 nt, Homo sapiens
  misc_RNA (1)...(19): siRNA sense strand
aagguugucugcauggaua

SEQ ID NO: 1468284 - RNA, 19 nt, Homo sapiens
  misc_RNA (1)...(19): siRNA sense strand
cugccaagcugaaauugaa

SEQ ID NO: 1468285 - RNA, 19 nt, Homo sapiens
  misc_RNA (1)...(19): siRNA sense strand
gaaagaccaggcugucguu

SEQ ID NO: 1468286 - RNA, 19 nt, Homo sapiens
  misc_RNA (1)...(19): siRNA sense strand
caacauugcugugcuccau

SEQ ID NO: 1468287 - RNA, 19 nt, Homo sapiens
  misc_RNA (1)...(19): siRNA sense strand
uaacaaaggagauagaaac

SEQ ID NO: 1468288 - RNA, 19 nt, Homo sapiens
  misc_RNA (1)...(19): siRNA sense strand
agaaaucgcucuucaugcu

SEQ ID NO: 1468289 - RNA, 19 nt, Homo sapiens
  misc_RNA (1)...(19): siRNA sense strand
agaccaaauuccaccagua

SEQ ID NO: 1468290 - RNA, 19 nt, Homo sapiens
  misc_RNA (1)...(19): siRNA sense strand
ucagcaagcagcagaauga

SEQ ID NO: 1468291 - RNA, 19 nt, Homo sapiens
  misc_RNA (1)...(19): siRNA sense strand
ggccuguccuuggaaauuu

SEQ ID NO: 1468292 - RNA, 19 nt, Homo sapiens
  misc_RNA (1)...(19): siRNA sense strand
cauggaacaucccaaauac

SEQ ID NO: 1468293 - RNA, 19 nt, Homo sapiens
  misc_RNA (1)...(19): siRNA sense strand
gaccaaauuccaccaguau

SEQ ID NO: 1468294 - RNA, 19 nt, Homo sapiens
  misc_RNA (1)...(19): siRNA sense strand
gggaugacuuuccaagaca

SEQ ID NO: 1468295 - RNA, 19 nt, Homo sapiens
  misc_RNA (1)...(19): siRNA sense strand
gcaaguggaaguucaccaa

SEQ ID NO: 1468296 - RNA, 19 nt, Homo sapiens
  misc_RNA (1)...(19): siRNA sense strand
gagaagcggagacccaaga

SEQ ID NO: 1468297 - RNA, 19 nt, Homo sapiens
  misc_RNA (1)...(19): siRNA sense strand
ccaccaguaugcaaugaau

SEQ ID NO: 1468298 - RNA, 19 nt, Homo sapiens
  misc_RNA (1)...(19): siRNA sense strand
gaucacacgcccacagaga

SEQ ID NO: 1468299 - RNA, 19 nt, Homo sapiens
  misc_RNA (1)...(19): siRNA sense strand
uugcugugcuccauaguuu

SEQ ID NO: 1468300 - RNA, 19 nt, Homo sapiens
  misc_RNA (1)...(19): siRNA sense strand
gccaggcccucaccuacuu

SEQ ID NO: 1468301 - RNA, 19 nt, Homo sapiens
  misc_RNA (1)...(19): siRNA sense strand
accaggagaugcugaacua

SEQ ID NO: 1468302 - RNA, 19 nt, Homo sapiens
  misc_RNA (1)...(19): siRNA sense strand
uaucgaauuugucaaccaa

SEQ ID NO: 1468303 - RNA, 19 nt, Homo sapiens
  misc_RNA (1)...(19): siRNA sense strand
gcugugcucuuugccugua

SEQ ID NO: 1468304 - RNA, 19 nt, Homo sapiens
  misc_RNA (1)...(19): siRNA sense strand
gcugcagaauccuucauga

SEQ ID NO: 1468305 - RNA, 19 nt, Homo sapiens
  misc_RNA (1)...(19): siRNA sense strand
aagcaggccuggcgcaaug

SEQ ID NO: 1468306 - RNA, 19 nt, Homo sapiens
  misc_RNA (1)...(19): siRNA sense strand
gcaucgaccugggcuggaa

SEQ ID NO: 1468307 - RNA, 19 nt, Homo sapiens
  misc_RNA (1)...(19): siRNA sense strand
cgccuuugcucaugacauu

SEQ ID NO: 1468308 - RNA, 19 nt, Homo sapiens
  misc_RNA (1)...(19): siRNA sense strand
acccugagcucuucgaaau

SEQ ID NO: 1468309 - RNA, 19 nt, Homo sapiens
  misc_RNA (1)...(19): siRNA sense strand
gcaggucgaggacuauuuc

SEQ ID NO: 1468310 - RNA, 19 nt, Homo sapiens
  misc_RNA (1)...(19): siRNA sense strand
gagauagaaacaacaggaa

SEQ ID NO: 1468311 - RNA, 19 nt, Homo sapiens
  misc_RNA (1)...(19): siRNA sense strand
ccaggccaccucuauguuu

SEQ ID NO: 1468312 - RNA, 19 nt, Homo sapiens
  misc_RNA (1)...(19): siRNA sense strand
gcaauggagagaaacugaa

SEQ ID NO: 1468313 - RNA, 19 nt, Homo sapiens
  misc_RNA (1)...(19): siRNA sense strand
aagagagauuccauugaaa

SEQ ID NO: 1468314 - RNA, 19 nt, Homo sapiens
  misc_RNA (1)...(19): siRNA sense strand
uggaagcgguaacaaagga

SEQ ID NO: 1468315 - RNA, 19 nt, Homo sapiens
  misc_RNA (1)...(19): siRNA sense strand
ugguggaacucuccuguga

SEQ ID NO: 1468316 - RNA, 19 nt, Homo sapiens
  misc_RNA (1)...(19): siRNA sense strand
aacuggagcuaaaguggua

SEQ ID NO: 1468317 - RNA, 19 nt, Homo sapiens
  misc_RNA (1)...(19): siRNA sense strand
guaacaaaggagauagaaa

SEQ ID NO: 1468318 - RNA, 19 nt, Homo sapiens
  misc_RNA (1)...(19): siRNA sense strand
guacaugggcacagagauc

SEQ ID NO: 1468319 - RNA, 19 nt, Homo sapiens
  misc_RNA (1)...(19): siRNA sense strand
ucaaaucucggcagaaucu

SEQ ID NO: 1468320 - RNA, 19 nt, Homo sapiens
  misc_RNA (1)...(19): siRNA sense strand
gagcucaacaacaaauuca

SEQ ID NO: 1468321 - RNA, 19 nt, Homo sapiens
  misc_RNA (1)...(19): siRNA sense strand
ccacucggcugcagaaucc

SEQ ID NO: 1468322 - RNA, 19 nt, Homo sapiens
  misc_RNA (1)...(19): siRNA sense strand
ccauaaggccaaagggauu

SEQ ID NO: 1468323 - RNA, 19 nt, Homo sapiens
  misc_RNA (1)...(19): siRNA sense strand
ggagccaggccaccucuau

SEQ ID NO: 1468324 - RNA, 19 nt, Homo sapiens
  misc_RNA (1)...(19): siRNA sense strand
ucugcuggcuuccugcuuu

SEQ ID NO: 1468325 - RNA, 19 nt, Homo sapiens
  misc_RNA (1)...(19): siRNA sense strand
cgaaaucccaccugaccuu

SEQ ID NO: 1468326 - RNA, 19 nt, Homo sapiens
  misc_RNA (1)...(19): siRNA sense strand
ggucggccaucaccguguu

SEQ ID NO: 1468327 - RNA, 19 nt, Homo sapiens
  misc_RNA (1)...(19): siRNA sense strand
caccaacaauggcaacauc

SEQ ID NO: 1468328 - RNA, 19 nt, Homo sapiens
  misc_RNA (1)...(19): siRNA sense strand
gcagacacgugcguuacuc

SEQ ID NO: 1468329 - RNA, 19 nt, Homo sapiens
  misc_RNA (1)...(19): siRNA sense strand
gcugguacaugggcacaga

SEQ ID NO: 1468330 - RNA, 19 nt, Homo sapiens
  misc_RNA (1)...(19): siRNA sense strand
caggccaccucuauguuug

SEQ ID NO: 1468331 - RNA, 19 nt, Homo sapiens
  misc_RNA (1)...(19): siRNA sense strand
acaauggcgucccgaguca

SEQ ID NO: 1468332 - RNA, 19 nt, Homo sapiens
  misc_RNA (1)...(19): siRNA sense strand
caagcuaucgaauuuguca

SEQ ID NO: 1468333 - RNA, 19 nt, Homo sapiens
  misc_RNA (1)...(19): siRNA sense strand
gcucuacaccuccaaugug

SEQ ID NO: 1468334 - RNA, 19 nt, Homo sapiens
  misc_RNA (1)...(19): siRNA sense strand
gcuggucccucccaugucu

SEQ ID NO: 1468335 - RNA, 19 nt, Homo sapiens
  misc_RNA (1)...(19): siRNA sense strand
gggaaagaagucuccagaa

SEQ ID NO: 1468336 - RNA, 19 nt, Homo sapiens
  misc_RNA (1)...(19): siRNA sense strand
gguggaagcgguaacaaag

SEQ ID NO: 1468337 - RNA, 19 nt, Homo sapiens
  misc_RNA (1)...(19): siRNA sense strand
gcagcgggaugacuuucca

SEQ ID NO: 1468338 - RNA, 19 nt, Homo sapiens
  misc_RNA (1)...(19): siRNA sense strand
agauaucuuuggugcugua

SEQ ID NO: 1468339 - RNA, 19 nt, Homo sapiens
  misc_RNA (1)...(19): siRNA sense strand
ccgcaugaccuugguguuu

SEQ ID NO: 1468340 - RNA, 19 nt, Homo sapiens
  misc_RNA (1)...(19): siRNA sense strand
gaggcaaacagcacauuca

SEQ ID NO: 1468341 - RNA, 19 nt, Homo sapiens
  misc_RNA (1)...(19): siRNA sense strand
cucaugacauugaucagaa

SEQ ID NO: 1468342 - RNA, 19 nt, Homo sapiens
  misc_RNA (1)...(19): siRNA sense strand
gcucaugacauugaucaga

SEQ ID NO: 1468343 - RNA, 19 nt, Homo sapiens
  misc_RNA (1)...(19): siRNA sense strand
caacaggaaccuaccaacu

SEQ ID NO: 1468344 - RNA, 19 nt, Homo sapiens
  misc_RNA (1)...(19): siRNA sense strand
agacacacuucaccauaag

SEQ ID NO: 1468345 - RNA, 19 nt, Homo sapiens
  misc_RNA (1)...(19): siRNA sense strand
cgaauuugucaaccaauau

SEQ ID NO: 1468346 - RNA, 19 nt, Homo sapiens
  misc_RNA (1)...(19): siRNA sense strand
gcaagcccaaggucuaugu

SEQ ID NO: 1468347 - RNA, 19 nt, Homo sapiens
  misc_RNA (1)...(19): siRNA sense strand
aaagacaucaacaacaaug

SEQ ID NO: 1468348 - RNA, 19 nt, Homo sapiens
  misc_RNA (1)...(19): siRNA sense strand
gagagauuccauugaaagu

SEQ ID NO: 1468349 - RNA, 19 nt, Homo sapiens
  misc_RNA (1)...(19): siRNA sense strand
guacaugcagaaugaauac

SEQ ID NO: 1468350 - RNA, 19 nt, Homo sapiens
  misc_RNA (1)...(19): siRNA sense strand
gguaacaaaggagauagaa

SEQ ID NO: 1468351 - RNA, 19 nt, Homo sapiens
  misc_RNA (1)...(19): siRNA sense strand
uauuacggcuccuucaaag

SEQ ID NO: 1468352 - RNA, 19 nt, Homo sapiens
  misc_RNA (1)...(19): siRNA sense strand
aggagcaggucgaggacua

SEQ ID NO: 1468353 - RNA, 19 nt, Homo sapiens
  misc_RNA (1)...(19): siRNA sense strand
cgcaugaccuugguguuug

SEQ ID NO: 1468354 - RNA, 19 nt, Homo sapiens
  misc_RNA (1)...(19): siRNA sense strand
gagugaacuucuccuauua

SEQ ID NO: 1468355 - RNA, 19 nt, Homo sapiens
  misc_RNA (1)...(19): siRNA sense strand
ugaagcagguccagaacua

SEQ ID NO: 1468356 - RNA, 19 nt, Homo sapiens
  misc_RNA (1)...(19): siRNA sense strand
cgucagcuauguaauguuu

SEQ ID NO: 1468357 - RNA, 19 nt, Homo sapiens
  misc_RNA (1)...(19): siRNA sense strand
ugaaagaggcccacaggua

SEQ ID NO: 1468358 - RNA, 19 nt, Homo sapiens
  misc_RNA (1)...(19): siRNA sense strand
gaauucuccucuaccauug

SEQ ID NO: 1468359 - RNA, 19 nt, Homo sapiens
  misc_RNA (1)...(19): siRNA sense strand
aggaagagaugcccaugaa

SEQ ID NO: 1468360 - RNA, 19 nt, Homo sapiens
  misc_RNA (1)...(19): siRNA sense strand
ccaagcugcuggucuacuu

SEQ ID NO: 1468361 - RNA, 19 nt, Homo sapiens
  misc_RNA (1)...(19): siRNA sense strand
ccaggaggcugugagcaaa

SEQ ID NO: 1468362 - RNA, 19 nt, Homo sapiens
  misc_RNA (1)...(19): siRNA sense strand
ccuccaagcugcuggucua

SEQ ID NO: 1468363 - RNA, 19 nt, Homo sapiens
  misc_RNA (1)...(19): siRNA sense strand
ccuguucacuucagaguug

SEQ ID NO: 1468364 - RNA, 19 nt, Homo sapiens
  misc_RNA (1)...(19): siRNA sense strand
guacgaccacucagaauuc

SEQ ID NO: 1468365 - RNA, 19 nt, Homo sapiens
  misc_RNA (1)...(19): siRNA sense strand
ccucuaccauugcaacuga

SEQ ID NO: 1468366 - RNA, 19 nt, Homo sapiens
  misc_RNA (1)...(19): siRNA sense strand
gacccaaggccaugugaaa

SEQ ID NO: 1468367 - RNA, 19 nt, Homo sapiens
  misc_RNA (1)...(19): siRNA sense strand
gccaucacccgcacccuua

SEQ ID NO: 1468368 - RNA, 19 nt, Homo sapiens
  misc_RNA (1)...(19): siRNA sense strand
guucggcacuagacugcua

SEQ ID NO: 1468369 - RNA, 19 nt, Homo sapiens
  misc_RNA (1)...(19): siRNA sense strand
agugggaucugguguguga

SEQ ID NO: 1468370 - RNA, 19 nt, Homo sapiens
  misc_RNA (1)...(19): siRNA sense strand
cuucauaccuagaccuguu

SEQ ID NO: 1468371 - RNA, 19 nt, Homo sapiens
  misc_RNA (1)...(19): siRNA sense strand
gaagcagguccagaacuaa

SEQ ID NO: 1468372 - RNA, 19 nt, Homo sapiens
  misc_RNA (1)...(19): siRNA sense strand
agaauucuccucuaccauu

SEQ ID NO: 1468373 - RNA, 19 nt, Homo sapiens
  misc_RNA (1)...(19): siRNA sense strand
gcuaguguccuccgauaug

SEQ ID NO: 1468374 - RNA, 19 nt, Homo sapiens
  misc_RNA (1)...(19): siRNA sense strand
ugcccaagcuuacuuaugg

SEQ ID NO: 1468375 - RNA, 19 nt, Homo sapiens
  misc_RNA (1)...(19): siRNA sense strand
ccaugaagcagguccagaa

SEQ ID NO: 1468376 - RNA, 19 nt, Homo sapiens
  misc_RNA (1)...(19): siRNA sense strand
gaggaagagaugcccauga

SEQ ID NO: 1468377 - RNA, 19 nt, Homo sapiens
  misc_RNA (1)...(19): siRNA sense strand
ucagaauucuccucuacca

SEQ ID NO: 1468378 - RNA, 19 nt, Homo sapiens
  misc_RNA (1)...(19): siRNA sense strand
cuaguguccuccgauauga

SEQ ID NO: 1468379 - RNA, 19 nt, Homo sapiens
  misc_RNA (1)...(19): siRNA sense strand
gggcuguggccuuuggaua

SEQ ID NO: 1468380 - RNA, 19 nt, Homo sapiens
  misc_RNA (1)...(19): siRNA sense strand
caacuucagccaucaggau

SEQ ID NO: 1468381 - RNA, 19 nt, Homo sapiens
  misc_RNA (1)...(19): siRNA sense strand
cugccuaccuguucacuuc

SEQ ID NO: 1468382 - RNA, 19 nt, Homo sapiens
  misc_RNA (1)...(19): siRNA sense strand
cugcuaguguccuccgaua

SEQ ID NO: 1468383 - RNA, 19 nt, Homo sapiens
  misc_RNA (1)...(19): siRNA sense strand
ucugcacgcuggcuucuga

SEQ ID NO: 1468384 - RNA, 19 nt, Homo sapiens
  misc_RNA (1)...(19): siRNA sense strand
uauguaauguuugccauca

SEQ ID NO: 1468385 - RNA, 19 nt, Homo sapiens
  misc_RNA (1)...(19): siRNA sense strand
acagagcugcguccacuuu

SEQ ID NO: 1468386 - RNA, 19 nt, Homo sapiens
  misc_RNA (1)...(19): siRNA sense strand
guggggagcuggaggauga

SEQ ID NO: 1468387 - RNA, 19 nt, Homo sapiens
  misc_RNA (1)...(19): siRNA sense strand
gagcugcguccacuuucuu

SEQ ID NO: 1468388 - RNA, 19 nt, Homo sapiens
  misc_RNA (1)...(19): siRNA sense strand
gcuguggccuuuggauauc

SEQ ID NO: 1468389 - RNA, 19 nt, Homo sapiens
  misc_RNA (1)...(19): siRNA sense strand
ggacguggagagaaagagu

SEQ ID NO: 1468390 - RNA, 19 nt, Homo sapiens
  misc_RNA (1)...(19): siRNA sense strand
ccaaggccaugugaaagag

SEQ ID NO: 1468391 - RNA, 19 nt, Homo sapiens
  misc_RNA (1)...(19): siRNA sense strand
ccacagugcccugcucuca

SEQ ID NO: 1468392 - RNA, 19 nt, Homo sapiens
  misc_RNA (1)...(19): siRNA sense strand
gccaggaggcugugagcaa

SEQ ID NO: 1468393 - RNA, 19 nt, Homo sapiens
  misc_RNA (1)...(19): siRNA sense strand
ccacggcuccgacacaucu

SEQ ID NO: 1468394 - RNA, 19 nt, Homo sapiens
  misc_RNA (1)...(19): siRNA sense strand
acucagaauucuccucuac

SEQ ID NO: 1468395 - RNA, 19 nt, Homo sapiens
  misc_RNA (1)...(19): siRNA sense strand
ggcuguggccuuuggauau

SEQ ID NO: 1468396 - RNA, 19 nt, Homo sapiens
  misc_RNA (1)...(19): siRNA sense strand
gaacgggugguccgaagac

SEQ ID NO: 1468397 - RNA, 19 nt, Homo sapiens
  misc_RNA (1)...(19): siRNA sense strand
ggaacgggugguccgaaga

SEQ ID NO: 1468398 - RNA, 19 nt, Homo sapiens
  misc_RNA (1)...(19): siRNA sense strand
cccaaggccaugugaaaga

SEQ ID NO: 1468399 - RNA, 19 nt, Homo sapiens
  misc_RNA (1)...(19): siRNA sense strand
gcucucagggcugggagua

SEQ ID NO: 1468400 - RNA, 19 nt, Homo sapiens
  misc_RNA (1)...(19): siRNA sense strand
guaccagacacagcuguug

SEQ ID NO: 1468401 - RNA, 19 nt, Homo sapiens
  misc_RNA (1)...(19): siRNA sense strand
gcugcgugguggugugguu

SEQ ID NO: 1468402 - RNA, 19 nt, Homo sapiens
  misc_RNA (1)...(19): siRNA sense strand
ggaagagaugcccaugaag

SEQ ID NO: 1468403 - RNA, 19 nt, Homo sapiens
  misc_RNA (1)...(19): siRNA sense strand
gcugucacccugccuugug

SEQ ID NO: 1468404 - RNA, 19 nt, Homo sapiens
  misc_RNA (1)...(19): siRNA sense strand
ucacugcccaagcuuacuu

SEQ ID NO: 1468405 - RNA, 19 nt, Homo sapiens
  misc_RNA (1)...(19): siRNA sense strand
ucagcuauguaauguuugc

SEQ ID NO: 1468406 - RNA, 19 nt, Homo sapiens
  misc_RNA (1)...(19): siRNA sense strand
gaauucuccucuaccauug

SEQ ID NO: 1468407 - RNA, 19 nt, Homo sapiens
  misc_RNA (1)...(19): siRNA sense strand
guacgaccacucagaauuc

SEQ ID NO: 1468408 - RNA, 19 nt, Homo sapiens
  misc_RNA (1)...(19): siRNA sense strand
ccucuaccauugcaacuga

SEQ ID NO: 1468409 - RNA, 19 nt, Homo sapiens
  misc_RNA (1)...(19): siRNA sense strand
agugggaucugguguguga

SEQ ID NO: 1468410 - RNA, 19 nt, Homo sapiens
  misc_RNA (1)...(19): siRNA sense strand
agaauucuccucuaccauu

SEQ ID NO: 1468411 - RNA, 19 nt, Homo sapiens
  misc_RNA (1)...(19): siRNA sense strand
ucagaauucuccucuacca

SEQ ID NO: 1468412 - RNA, 19 nt, Homo sapiens
  misc_RNA (1)...(19): siRNA sense strand
caacuucagccaucaggau

SEQ ID NO: 1468413 - RNA, 19 nt, Homo sapiens
  misc_RNA (1)...(19): siRNA sense strand
guggggagcuggaggauga

SEQ ID NO: 1468414 - RNA, 19 nt, Homo sapiens
  misc_RNA (1)...(19): siRNA sense strand
ccacagugcccugcucuca

SEQ ID NO: 1468415 - RNA, 19 nt, Homo sapiens
  misc_RNA (1)...(19): siRNA sense strand
acucagaauucuccucuac

SEQ ID NO: 1468416 - RNA, 19 nt, Homo sapiens
  misc_RNA (1)...(19): siRNA sense strand
gcucucagggcugggagua

SEQ ID NO: 1468417 - RNA, 19 nt, Homo sapiens
  misc_RNA (1)...(19): siRNA sense strand
gagugaacuucuccuauua

SEQ ID NO: 1468418 - RNA, 19 nt, Homo sapiens
  misc_RNA (1)...(19): siRNA sense strand
ugaagcagguccagaacua

SEQ ID NO: 1468419 - RNA, 19 nt, Homo sapiens
  misc_RNA (1)...(19): siRNA sense strand
cgucagcuauguaauguuu

SEQ ID NO: 1468420 - RNA, 19 nt, Homo sapiens
  misc_RNA (1)...(19): siRNA sense strand
ugaaagaggcccacaggua

SEQ ID NO: 1468421 - RNA, 19 nt, Homo sapiens
  misc_RNA (1)...(19): siRNA sense strand
gaauucuccucuaccauug

SEQ ID NO: 1468422 - RNA, 19 nt, Homo sapiens
  misc_RNA (1)...(19): siRNA sense strand
aggaagagaugcccaugaa

SEQ ID NO: 1468423 - RNA, 19 nt, Homo sapiens
  misc_RNA (1)...(19): siRNA sense strand
ccaagcugcuggucuacuu

SEQ ID NO: 1468424 - RNA, 19 nt, Homo sapiens
  misc_RNA (1)...(19): siRNA sense strand
ccaggaggcugugagcaaa

SEQ ID NO: 1468425 - RNA, 19 nt, Homo sapiens
  misc_RNA (1)...(19): siRNA sense strand
ccuccaagcugcuggucua

SEQ ID NO: 1468426 - RNA, 19 nt, Homo sapiens
  misc_RNA (1)...(19): siRNA sense strand
ccuguucacuucagaguug

SEQ ID NO: 1468427 - RNA, 19 nt, Homo sapiens
  misc_RNA (1)...(19): siRNA sense strand
guacgaccacucagaauuc

SEQ ID NO: 1468428 - RNA, 19 nt, Homo sapiens
  misc_RNA (1)...(19): siRNA sense strand
ccucuaccauugcaacuga

SEQ ID NO: 1468429 - RNA, 19 nt, Homo sapiens
  misc_RNA (1)...(19): siRNA sense strand
gacccaaggccaugugaaa

SEQ ID NO: 1468430 - RNA, 19 nt, Homo sapiens
  misc_RNA (1)...(19): siRNA sense strand
gccaucacccgcacccuua

SEQ ID NO: 1468431 - RNA, 19 nt, Homo sapiens
  misc_RNA (1)...(19): siRNA sense strand
guucggcacuagacugcua

SEQ ID NO: 1468432 - RNA, 19 nt, Homo sapiens
  misc_RNA (1)...(19): siRNA sense strand
agugggaucugguguguga

SEQ ID NO: 1468433 - RNA, 19 nt, Homo sapiens
  misc_RNA (1)...(19): siRNA sense strand
cuucauaccuagaccuguu

SEQ ID NO: 1468434 - RNA, 19 nt, Homo sapiens
  misc_RNA (1)...(19): siRNA sense strand
gaagcagguccagaacuaa

SEQ ID NO: 1468435 - RNA, 19 nt, Homo sapiens
  misc_RNA (1)...(19): siRNA sense strand
agaauucuccucuaccauu

SEQ ID NO: 1468436 - RNA, 19 nt, Homo sapiens
  misc_RNA (1)...(19): siRNA sense strand
gcuaguguccuccgauaug

SEQ ID NO: 1468437 - RNA, 19 nt, Homo sapiens
  misc_RNA (1)...(19): siRNA sense strand
ugcccaagcuuacuuaugg

SEQ ID NO: 1468438 - RNA, 19 nt, Homo sapiens
  misc_RNA (1)...(19): siRNA sense strand
ccaugaagcagguccagaa

SEQ ID NO: 1468439 - RNA, 19 nt, Homo sapiens
  misc_RNA (1)...(19): siRNA sense strand
gaggaagagaugcccauga

SEQ ID NO: 1468440 - RNA, 19 nt, Homo sapiens
  misc_RNA (1)...(19): siRNA sense strand
ucagaauucuccucuacca

SEQ ID NO: 1468441 - RNA, 19 nt, Homo sapiens
  misc_RNA (1)...(19): siRNA sense strand
cuaguguccuccgauauga

SEQ ID NO: 1468442 - RNA, 19 nt, Homo sapiens
  misc_RNA (1)...(19): siRNA sense strand
gggcuguggccuuuggaua

SEQ ID NO: 1468443 - RNA, 19 nt, Homo sapiens
  misc_RNA (1)...(19): siRNA sense strand
caacuucagccaucaggau

SEQ ID NO: 1468444 - RNA, 19 nt, Homo sapiens
  misc_RNA (1)...(19): siRNA sense strand
cugccuaccuguucacuuc

SEQ ID NO: 1468445 - RNA, 19 nt, Homo sapiens
  misc_RNA (1)...(19): siRNA sense strand
cugcuaguguccuccgaua

SEQ ID NO: 1468446 - RNA, 19 nt, Homo sapiens
  misc_RNA (1)...(19): siRNA sense strand
ucugcacgcuggcuucuga

SEQ ID NO: 1468447 - RNA, 19 nt, Homo sapiens
  misc_RNA (1)...(19): siRNA sense strand
uauguaauguuugccauca

SEQ ID NO: 1468448 - RNA, 19 nt, Homo sapiens
  misc_RNA (1)...(19): siRNA sense strand
acagagcugcguccacuuu

SEQ ID NO: 1468449 - RNA, 19 nt, Homo sapiens
  misc_RNA (1)...(19): siRNA sense strand
guggggagcuggaggauga

SEQ ID NO: 1468450 - RNA, 19 nt, Homo sapiens
  misc_RNA (1)...(19): siRNA sense strand
gagcugcguccacuuucuu

SEQ ID NO: 1468451 - RNA, 19 nt, Homo sapiens
  misc_RNA (1)...(19): siRNA sense strand
gcuguggccuuuggauauc

SEQ ID NO: 1468452 - RNA, 19 nt, Homo sapiens
  misc_RNA (1)...(19): siRNA sense strand
ggacguggagagaaagagu

SEQ ID NO: 1468453 - RNA, 19 nt, Homo sapiens
  misc_RNA (1)...(19): siRNA sense strand
ccaaggccaugugaaagag

SEQ ID NO: 1468454 - RNA, 19 nt, Homo sapiens
  misc_RNA (1)...(19): siRNA sense strand
ccacagugcccugcucuca

SEQ ID NO: 1468455 - RNA, 19 nt, Homo sapiens
  misc_RNA (1)...(19): siRNA sense strand
gccaggaggcugugagcaa

SEQ ID NO: 1468456 - RNA, 19 nt, Homo sapiens
  misc_RNA (1)...(19): siRNA sense strand
ccacggcuccgacacaucu

SEQ ID NO: 1468457 - RNA, 19 nt, Homo sapiens
  misc_RNA (1)...(19): siRNA sense strand
acucagaauucuccucuac

SEQ ID NO: 1468458 - RNA, 19 nt, Homo sapiens
  misc_RNA (1)...(19): siRNA sense strand
ggcuguggccuuuggauau

SEQ ID NO: 1468459 - RNA, 19 nt, Homo sapiens
  misc_RNA (1)...(19): siRNA sense strand
gaacgggugguccgaagac

SEQ ID NO: 1468460 - RNA, 19 nt, Homo sapiens
  misc_RNA (1)...(19): siRNA sense strand
ggaacgggugguccgaaga

SEQ ID NO: 1468461 - RNA, 19 nt, Homo sapiens
  misc_RNA (1)...(19): siRNA sense strand
cccaaggccaugugaaaga

SEQ ID NO: 1468462 - RNA, 19 nt, Homo sapiens
  misc_RNA (1)...(19): siRNA sense strand
gcucucagggcugggagua

SEQ ID NO: 1468463 - RNA, 19 nt, Homo sapiens
  misc_RNA (1)...(19): siRNA sense strand
guaccagacacagcuguug

SEQ ID NO: 1468464 - RNA, 19 nt, Homo sapiens
  misc_RNA (1)...(19): siRNA sense strand
gcugcgugguggugugguu

SEQ ID NO: 1468465 - RNA, 19 nt, Homo sapiens
  misc_RNA (1)...(19): siRNA sense strand
ggaagagaugcccaugaag

SEQ ID NO: 1468466 - RNA, 19 nt, Homo sapiens
  misc_RNA (1)...(19): siRNA sense strand
gcugucacccugccuugug

SEQ ID NO: 1468467 - RNA, 19 nt, Homo sapiens
  misc_RNA (1)...(19): siRNA sense strand
ucacugcccaagcuuacuu

SEQ ID NO: 1468468 - RNA, 19 nt, Homo sapiens
  misc_RNA (1)...(19): siRNA sense strand
ucagcuauguaauguuugc

SEQ ID NO: 1468469 - RNA, 19 nt, Homo sapiens
  misc_RNA (1)...(19): siRNA sense strand
gaauucuccucuaccauug

SEQ ID NO: 1468470 - RNA, 19 nt, Homo sapiens
  misc_RNA (1)...(19): siRNA sense strand
guacgaccacucagaauuc

SEQ ID NO: 1468471 - RNA, 19 nt, Homo sapiens
  misc_RNA (1)...(19): siRNA sense strand
ccucuaccauugcaacuga

SEQ ID NO: 1468472 - RNA, 19 nt, Homo sapiens
  misc_RNA (1)...(19): siRNA sense strand
agugggaucugguguguga

SEQ ID NO: 1468473 - RNA, 19 nt, Homo sapiens
  misc_RNA (1)...(19): siRNA sense strand
agaauucuccucuaccauu

SEQ ID NO: 1468474 - RNA, 19 nt, Homo sapiens
  misc_RNA (1)...(19): siRNA sense strand
ucagaauucuccucuacca

SEQ ID NO: 1468475 - RNA, 19 nt, Homo sapiens
  misc_RNA (1)...(19): siRNA sense strand
caacuucagccaucaggau

SEQ ID NO: 1468476 - RNA, 19 nt, Homo sapiens
  misc_RNA (1)...(19): siRNA sense strand
guggggagcuggaggauga

SEQ ID NO: 1468477 - RNA, 19 nt, Homo sapiens
  misc_RNA (1)...(19): siRNA sense strand
ccacagugcccugcucuca

SEQ ID NO: 1468478 - RNA, 19 nt, Homo sapiens
  misc_RNA (1)...(19): siRNA sense strand
acucagaauucuccucuac

SEQ ID NO: 1468479 - RNA, 19 nt, Homo sapiens
  misc_RNA (1)...(19): siRNA sense strand
gcucucagggcugggagua

SEQ ID NO: 1468480 - RNA, 19 nt, Homo sapiens
  misc_RNA (1)...(19): siRNA sense strand
ggaaacaccuuaucagaaa

SEQ ID NO: 1468481 - RNA, 19 nt, Homo sapiens
  misc_RNA (1)...(19): siRNA sense strand
ggcagcagcuaucauauua

SEQ ID NO: 1468482 - RNA, 19 nt, Homo sapiens
  misc_RNA (1)...(19): siRNA sense strand
caucuuaaguugcaucaua

SEQ ID NO: 1468483 - RNA, 19 nt, Homo sapiens
  misc_RNA (1)...(19): siRNA sense strand
ggaugacgauggcauuuaa

SEQ ID NO: 1468484 - RNA, 19 nt, Homo sapiens
  misc_RNA (1)...(19): siRNA sense strand
gcaaagcaguagccaaaga

SEQ ID NO: 1468485 - RNA, 19 nt, Homo sapiens
  misc_RNA (1)...(19): siRNA sense strand
ggccauagguuuaaugaug

SEQ ID NO: 1468486 - RNA, 19 nt, Homo sapiens
  misc_RNA (1)...(19): siRNA sense strand
gaacaucucaccaaucuag

SEQ ID NO: 1468487 - RNA, 19 nt, Homo sapiens
  misc_RNA (1)...(19): siRNA sense strand
gaggaaguauuacaaagug

SEQ ID NO: 1468488 - RNA, 19 nt, Homo sapiens
  misc_RNA (1)...(19): siRNA sense strand
gaagagaagagcaagaaga

SEQ ID NO: 1468489 - RNA, 19 nt, Homo sapiens
  misc_RNA (1)...(19): siRNA sense strand
agacgaaggucauuuagug

SEQ ID NO: 1468490 - RNA, 19 nt, Homo sapiens
  misc_RNA (1)...(19): siRNA sense strand
ugaaggaaguguggaagua

SEQ ID NO: 1468491 - RNA, 19 nt, Homo sapiens
  misc_RNA (1)...(19): siRNA sense strand
aaagagagcccaaaccauu

SEQ ID NO: 1468492 - RNA, 19 nt, Homo sapiens
  misc_RNA (1)...(19): siRNA sense strand
ucuagaagcuccuauguuc

SEQ ID NO: 1468493 - RNA, 19 nt, Homo sapiens
  misc_RNA (1)...(19): siRNA sense strand
gacgauuacuucacaaaga

SEQ ID NO: 1468494 - RNA, 19 nt, Homo sapiens
  misc_RNA (1)...(19): siRNA sense strand
aaugaugucuuggaaguua

SEQ ID NO: 1468495 - RNA, 19 nt, Homo sapiens
  misc_RNA (1)...(19): siRNA sense strand
gauggcagcuguaaugucu

SEQ ID NO: 1468496 - RNA, 19 nt, Homo sapiens
  misc_RNA (1)...(19): siRNA sense strand
gaaguuaagaggaaguauu

SEQ ID NO: 1468497 - RNA, 19 nt, Homo sapiens
  misc_RNA (1)...(19): siRNA sense strand
cauuauagcugagaagaga

SEQ ID NO: 1468498 - RNA, 19 nt, Homo sapiens
  misc_RNA (1)...(19): siRNA sense strand
cagcuacuuugcacuuaua

SEQ ID NO: 1468499 - RNA, 19 nt, Homo sapiens
  misc_RNA (1)...(19): siRNA sense strand
caacguccauucuuucaca

SEQ ID NO: 1468500 - RNA, 19 nt, Homo sapiens
  misc_RNA (1)...(19): siRNA sense strand
gauauuuggcucugucuuu

SEQ ID NO: 1468501 - RNA, 19 nt, Homo sapiens
  misc_RNA (1)...(19): siRNA sense strand
uauauucucucgugguuga

SEQ ID NO: 1468502 - RNA, 19 nt, Homo sapiens
  misc_RNA (1)...(19): siRNA sense strand
gggaaacaccuuaucagaa

SEQ ID NO: 1468503 - RNA, 19 nt, Homo sapiens
  misc_RNA (1)...(19): siRNA sense strand
gcgagacgaaggucauuua

SEQ ID NO: 1468504 - RNA, 19 nt, Homo sapiens
  misc_RNA (1)...(19): siRNA sense strand
gaaauucucuggggccaua

SEQ ID NO: 1468505 - RNA, 19 nt, Homo sapiens
  misc_RNA (1)...(19): siRNA sense strand
gcucauagccuuucaucau

SEQ ID NO: 1468506 - RNA, 19 nt, Homo sapiens
  misc_RNA (1)...(19): siRNA sense strand
gagaagagaagagcaagaa

SEQ ID NO: 1468507 - RNA, 19 nt, Homo sapiens
  misc_RNA (1)...(19): siRNA sense strand
caucauggcgaucuauuaa

SEQ ID NO: 1468508 - RNA, 19 nt, Homo sapiens
  misc_RNA (1)...(19): siRNA sense strand
gcuguaaugucuacuucaa

SEQ ID NO: 1468509 - RNA, 19 nt, Homo sapiens
  misc_RNA (1)...(19): siRNA sense strand
aaagauggcagcuguaaug

SEQ ID NO: 1468510 - RNA, 19 nt, Homo sapiens
  misc_RNA (1)...(19): siRNA sense strand
gcuaucauauuaucaaugc

SEQ ID NO: 1468511 - RNA, 19 nt, Homo sapiens
  misc_RNA (1)...(19): siRNA sense strand
cagcagcuaucauauuauc

SEQ ID NO: 1468512 - RNA, 19 nt, Homo sapiens
  misc_RNA (1)...(19): siRNA sense strand
ucauggcgaucuauuaaau

SEQ ID NO: 1468513 - RNA, 19 nt, Homo sapiens
  misc_RNA (1)...(19): siRNA sense strand
acacaugaauauagggaaa

SEQ ID NO: 1468514 - RNA, 19 nt, Homo sapiens
  misc_RNA (1)...(19): siRNA sense strand
caaguggcgccauauguuu

SEQ ID NO: 1468515 - RNA, 19 nt, Homo sapiens
  misc_RNA (1)...(19): siRNA sense strand
gaauauagggaaacaccuu

SEQ ID NO: 1468516 - RNA, 19 nt, Homo sapiens
  misc_RNA (1)...(19): siRNA sense strand
aaggaaguguggaaguaua

SEQ ID NO: 1468517 - RNA, 19 nt, Homo sapiens
  misc_RNA (1)...(19): siRNA sense strand
gauccuccaguccaucuua

SEQ ID NO: 1468518 - RNA, 19 nt, Homo sapiens
  misc_RNA (1)...(19): siRNA sense strand
gcagcuaucauauuaucaa

SEQ ID NO: 1468519 - RNA, 19 nt, Homo sapiens
  misc_RNA (1)...(19): siRNA sense strand
ggcaacugcucgaaagaga

SEQ ID NO: 1468520 - RNA, 19 nt, Homo sapiens
  misc_RNA (1)...(19): siRNA sense strand
ggaaguauuacaaagugaa

SEQ ID NO: 1468521 - RNA, 19 nt, Homo sapiens
  misc_RNA (1)...(19): siRNA sense strand
uuaaugaugucuuggaagu

SEQ ID NO: 1468522 - RNA, 19 nt, Homo sapiens
  misc_RNA (1)...(19): siRNA sense strand
uggaacaucucaccaaucu

SEQ ID NO: 1468523 - RNA, 19 nt, Homo sapiens
  misc_RNA (1)...(19): siRNA sense strand
gacaccaaguggcgccaua

SEQ ID NO: 1468524 - RNA, 19 nt, Homo sapiens
  misc_RNA (1)...(19): siRNA sense strand
gaaacaccuuaucagaaag

SEQ ID NO: 1468525 - RNA, 19 nt, Homo sapiens
  misc_RNA (1)...(19): siRNA sense strand
gaaggaaguguggaaguau

SEQ ID NO: 1468526 - RNA, 19 nt, Homo sapiens
  misc_RNA (1)...(19): siRNA sense strand
uuacaaagugaacugcuua

SEQ ID NO: 1468527 - RNA, 19 nt, Homo sapiens
  misc_RNA (1)...(19): siRNA sense strand
gccauagguuuaaugaugu

SEQ ID NO: 1468528 - RNA, 19 nt, Homo sapiens
  misc_RNA (1)...(19): siRNA sense strand
ccgcaaagcaguagccaaa

SEQ ID NO: 1468529 - RNA, 19 nt, Homo sapiens
  misc_RNA (1)...(19): siRNA sense strand
gggaagcuuugccucaugu

SEQ ID NO: 1468530 - RNA, 19 nt, Homo sapiens
  misc_RNA (1)...(19): siRNA sense strand
ccaaguggcgccauauguu

SEQ ID NO: 1468531 - RNA, 19 nt, Homo sapiens
  misc_RNA (1)...(19): siRNA sense strand
caaauuagucaacgaccaa

SEQ ID NO: 1468532 - RNA, 19 nt, Homo sapiens
  misc_RNA (1)...(19): siRNA sense strand
gaaagagagcccaaaccau

SEQ ID NO: 1468533 - RNA, 19 nt, Homo sapiens
  misc_RNA (1)...(19): siRNA sense strand
cagcagcuccacauagaaa

SEQ ID NO: 1468534 - RNA, 19 nt, Homo sapiens
  misc_RNA (1)...(19): siRNA sense strand
ccaaaccaccauaggauau

SEQ ID NO: 1468535 - RNA, 19 nt, Homo sapiens
  misc_RNA (1)...(19): siRNA sense strand
gguuaucgcuguguuacug

SEQ ID NO: 1468536 - RNA, 19 nt, Homo sapiens
  misc_RNA (1)...(19): siRNA sense strand
uaugagagaugggaagcuu

SEQ ID NO: 1468537 - RNA, 19 nt, Homo sapiens
  misc_RNA (1)...(19): siRNA sense strand
guaacuauuguccaugaaa

SEQ ID NO: 1468538 - RNA, 19 nt, Homo sapiens
  misc_RNA (1)...(19): siRNA sense strand
uugacaacguccauucuuu

SEQ ID NO: 1468539 - RNA, 19 nt, Homo sapiens
  misc_RNA (1)...(19): siRNA sense strand
ucuccugacuuuaaacaga

SEQ ID NO: 1468540 - RNA, 19 nt, Homo sapiens
  misc_RNA (1)...(19): siRNA sense strand
ccacuuccgccacacauga

SEQ ID NO: 1468541 - RNA, 19 nt, Homo sapiens
  misc_RNA (1)...(19): siRNA sense strand
guuuaaugaugucuuggaa

SEQ ID NO: 1468542 - RNA, 19 nt, Homo sapiens
  misc_RNA (1)...(19): siRNA sense strand
cgguaacuauuguccauga

SEQ ID NO: 1468543 - RNA, 19 nt, Homo sapiens
  misc_RNA (1)...(19): siRNA sense strand
caacuucuccgcuauacag

SEQ ID NO: 1468544 - RNA, 19 nt, Homo sapiens
  misc_RNA (1)...(19): siRNA sense strand
cgaaagagagcccaaacca

SEQ ID NO: 1468545 - RNA, 19 nt, Homo sapiens
  misc_RNA (1)...(19): siRNA sense strand
ggaggaugacgauggcauu

SEQ ID NO: 1468546 - RNA, 19 nt, Homo sapiens
  misc_RNA (1)...(19): siRNA sense strand
gguagaaggaacaguuaga

SEQ ID NO: 1468547 - RNA, 19 nt, Homo sapiens
  misc_RNA (1)...(19): siRNA sense strand
cagcuguaaugucuacuuc

SEQ ID NO: 1468548 - RNA, 19 nt, Homo sapiens
  misc_RNA (1)...(19): siRNA sense strand
acaaagauggcagcuguaa

SEQ ID NO: 1468549 - RNA, 19 nt, Homo sapiens
  misc_RNA (1)...(19): siRNA sense strand
gguaacuauuguccaugaa

SEQ ID NO: 1468550 - RNA, 19 nt, Homo sapiens
  misc_RNA (1)...(19): siRNA sense strand
uguagaaucccaaauguag

SEQ ID NO: 1468551 - RNA, 19 nt, Homo sapiens
  misc_RNA (1)...(19): siRNA sense strand
ucaucauggcgaucuauua

SEQ ID NO: 1468552 - RNA, 19 nt, Homo sapiens
  misc_RNA (1)...(19): siRNA sense strand
uagguuuaaugaugucuug

SEQ ID NO: 1468553 - RNA, 19 nt, Homo sapiens
  misc_RNA (1)...(19): siRNA sense strand
caaagcaguagccaaagau

SEQ ID NO: 1468554 - RNA, 19 nt, Homo sapiens
  misc_RNA (1)...(19): siRNA sense strand
ugacaacguccauucuuuc

SEQ ID NO: 1468555 - RNA, 19 nt, Homo sapiens
  misc_RNA (1)...(19): siRNA sense strand
aagcucuccugacuuuaaa

SEQ ID NO: 1468556 - RNA, 19 nt, Homo sapiens
  misc_RNA (1)...(19): siRNA sense strand
gaggaugacgauggcauuu

SEQ ID NO: 1468557 - RNA, 19 nt, Homo sapiens
  misc_RNA (1)...(19): siRNA sense strand
gugguagaaggaacaguua

SEQ ID NO: 1468558 - RNA, 19 nt, Homo sapiens
  misc_RNA (1)...(19): siRNA sense strand
ucagcuacuuugcacuuau

SEQ ID NO: 1468559 - RNA, 19 nt, Homo sapiens
  misc_RNA (1)...(19): siRNA sense strand
cuuauauucucucgugguu

SEQ ID NO: 1468560 - RNA, 19 nt, Homo sapiens
  misc_RNA (1)...(19): siRNA sense strand
ucuguagaaucccaaaugu

SEQ ID NO: 1468561 - RNA, 19 nt, Homo sapiens
  misc_RNA (1)...(19): siRNA sense strand
accagcagcuccacauaga

SEQ ID NO: 1468562 - RNA, 19 nt, Homo sapiens
  misc_RNA (1)...(19): siRNA sense strand
cggcagcagcuaucauauu

SEQ ID NO: 1468563 - RNA, 19 nt, Homo sapiens
  misc_RNA (1)...(19): siRNA sense strand
aagaggaaguauuacaaag

SEQ ID NO: 1468564 - RNA, 19 nt, Homo sapiens
  misc_RNA (1)...(19): siRNA sense strand
ugagagaugggaagcuuug

SEQ ID NO: 1468565 - RNA, 19 nt, Homo sapiens
  misc_RNA (1)...(19): siRNA sense strand
gacaacguccauucuuuca

SEQ ID NO: 1468566 - RNA, 19 nt, Homo sapiens
  misc_RNA (1)...(19): siRNA sense strand
cucauagccuuucaucaug

SEQ ID NO: 1468567 - RNA, 19 nt, Homo sapiens
  misc_RNA (1)...(19): siRNA sense strand
aauauagggaaacaccuua

SEQ ID NO: 1468568 - RNA, 19 nt, Homo sapiens
  misc_RNA (1)...(19): siRNA sense strand
gaccagcagcuccacauag

SEQ ID NO: 1468569 - RNA, 19 nt, Homo sapiens
  misc_RNA (1)...(19): siRNA sense strand
caaagugaacugcuuacag

SEQ ID NO: 1468570 - RNA, 19 nt, Homo sapiens
  misc_RNA (1)...(19): siRNA sense strand
gaagagcaagaagacgauu

SEQ ID NO: 1468571 - RNA, 19 nt, Homo sapiens
  misc_RNA (1)...(19): siRNA sense strand
guuaagaggaaguauuaca

SEQ ID NO: 1468572 - RNA, 19 nt, Homo sapiens
  misc_RNA (1)...(19): siRNA sense strand
acgauuacuucacaaagau

SEQ ID NO: 1468573 - RNA, 19 nt, Homo sapiens
  misc_RNA (1)...(19): siRNA sense strand
uccaguccaucuuaaguug

SEQ ID NO: 1468574 - RNA, 19 nt, Homo sapiens
  misc_RNA (1)...(19): siRNA sense strand
gacccaaaccaccauagga

SEQ ID NO: 1468575 - RNA, 19 nt, Homo sapiens
  misc_RNA (1)...(19): siRNA sense strand
gcccaacuucuccgcuaua

SEQ ID NO: 1468576 - RNA, 19 nt, Homo sapiens
  misc_RNA (1)...(19): siRNA sense strand
gcaauuggacuggaaagac

SEQ ID NO: 1468577 - RNA, 19 nt, Homo sapiens
  misc_RNA (1)...(19): siRNA sense strand
uacggcagcagcuaucaua

SEQ ID NO: 1468578 - RNA, 19 nt, Homo sapiens
  misc_RNA (1)...(19): siRNA sense strand
aagcaguagccaaagauaa

SEQ ID NO: 1468579 - RNA, 19 nt, Homo sapiens
  misc_RNA (1)...(19): siRNA sense strand
ugacgauggcauuuaaaga

SEQ ID NO: 1468580 - RNA, 19 nt, Homo sapiens
  misc_RNA (1)...(19): siRNA sense strand
ggaaacaccuuaucagaaa

SEQ ID NO: 1468581 - RNA, 19 nt, Homo sapiens
  misc_RNA (1)...(19): siRNA sense strand
ggcagcagcuaucauauua

SEQ ID NO: 1468582 - RNA, 19 nt, Homo sapiens
  misc_RNA (1)...(19): siRNA sense strand
caucuuaaguugcaucaua

SEQ ID NO: 1468583 - RNA, 19 nt, Homo sapiens
  misc_RNA (1)...(19): siRNA sense strand
ggaugacgauggcauuuaa

SEQ ID NO: 1468584 - RNA, 19 nt, Homo sapiens
  misc_RNA (1)...(19): siRNA sense strand
gcaaagcaguagccaaaga

SEQ ID NO: 1468585 - RNA, 19 nt, Homo sapiens
  misc_RNA (1)...(19): siRNA sense strand
ggccauagguuuaaugaug

SEQ ID NO: 1468586 - RNA, 19 nt, Homo sapiens
  misc_RNA (1)...(19): siRNA sense strand
gaacaucucaccaaucuag

SEQ ID NO: 1468587 - RNA, 19 nt, Homo sapiens
  misc_RNA (1)...(19): siRNA sense strand
gaggaaguauuacaaagug

SEQ ID NO: 1468588 - RNA, 19 nt, Homo sapiens
  misc_RNA (1)...(19): siRNA sense strand
gaagagaagagcaagaaga

SEQ ID NO: 1468589 - RNA, 19 nt, Homo sapiens
  misc_RNA (1)...(19): siRNA sense strand
agacgaaggucauuuagug

SEQ ID NO: 1468590 - RNA, 19 nt, Homo sapiens
  misc_RNA (1)...(19): siRNA sense strand
ugaaggaaguguggaagua

SEQ ID NO: 1468591 - RNA, 19 nt, Homo sapiens
  misc_RNA (1)...(19): siRNA sense strand
aaagagagcccaaaccauu

SEQ ID NO: 1468592 - RNA, 19 nt, Homo sapiens
  misc_RNA (1)...(19): siRNA sense strand
ucuagaagcuccuauguuc

SEQ ID NO: 1468593 - RNA, 19 nt, Homo sapiens
  misc_RNA (1)...(19): siRNA sense strand
gacgauuacuucacaaaga

SEQ ID NO: 1468594 - RNA, 19 nt, Homo sapiens
  misc_RNA (1)...(19): siRNA sense strand
aaugaugucuuggaaguua

SEQ ID NO: 1468595 - RNA, 19 nt, Homo sapiens
  misc_RNA (1)...(19): siRNA sense strand
gauggcagcuguaaugucu

SEQ ID NO: 1468596 - RNA, 19 nt, Homo sapiens
  misc_RNA (1)...(19): siRNA sense strand
gaaguuaagaggaaguauu

SEQ ID NO: 1468597 - RNA, 19 nt, Homo sapiens
  misc_RNA (1)...(19): siRNA sense strand
cauuauagcugagaagaga

SEQ ID NO: 1468598 - RNA, 19 nt, Homo sapiens
  misc_RNA (1)...(19): siRNA sense strand
cagcuacuuugcacuuaua

SEQ ID NO: 1468599 - RNA, 19 nt, Homo sapiens
  misc_RNA (1)...(19): siRNA sense strand
caacguccauucuuucaca

SEQ ID NO: 1468600 - RNA, 19 nt, Homo sapiens
  misc_RNA (1)...(19): siRNA sense strand
gauauuuggcucugucuuu

SEQ ID NO: 1468601 - RNA, 19 nt, Homo sapiens
  misc_RNA (1)...(19): siRNA sense strand
uauauucucucgugguuga

SEQ ID NO: 1468602 - RNA, 19 nt, Homo sapiens
  misc_RNA (1)...(19): siRNA sense strand
gggaaacaccuuaucagaa

SEQ ID NO: 1468603 - RNA, 19 nt, Homo sapiens
  misc_RNA (1)...(19): siRNA sense strand
gcgagacgaaggucauuua

SEQ ID NO: 1468604 - RNA, 19 nt, Homo sapiens
  misc_RNA (1)...(19): siRNA sense strand
gaaauucucuggggccaua

SEQ ID NO: 1468605 - RNA, 19 nt, Homo sapiens
  misc_RNA (1)...(19): siRNA sense strand
gcucauagccuuucaucau

SEQ ID NO: 1468606 - RNA, 19 nt, Homo sapiens
  misc_RNA (1)...(19): siRNA sense strand
gagaagagaagagcaagaa

SEQ ID NO: 1468607 - RNA, 19 nt, Homo sapiens
  misc_RNA (1)...(19): siRNA sense strand
caucauggcgaucuauuaa

SEQ ID NO: 1468608 - RNA, 19 nt, Homo sapiens
  misc_RNA (1)...(19): siRNA sense strand
gcuguaaugucuacuucaa

SEQ ID NO: 1468609 - RNA, 19 nt, Homo sapiens
  misc_RNA (1)...(19): siRNA sense strand
aaagauggcagcuguaaug

SEQ ID NO: 1468610 - RNA, 19 nt, Homo sapiens
  misc_RNA (1)...(19): siRNA sense strand
gcuaucauauuaucaaugc

SEQ ID NO: 1468611 - RNA, 19 nt, Homo sapiens
  misc_RNA (1)...(19): siRNA sense strand
cagcagcuaucauauuauc

SEQ ID NO: 1468612 - RNA, 19 nt, Homo sapiens
  misc_RNA (1)...(19): siRNA sense strand
ucauggcgaucuauuaaau

SEQ ID NO: 1468613 - RNA, 19 nt, Homo sapiens
  misc_RNA (1)...(19): siRNA sense strand
acacaugaauauagggaaa

SEQ ID NO: 1468614 - RNA, 19 nt, Homo sapiens
  misc_RNA (1)...(19): siRNA sense strand
caaguggcgccauauguuu

SEQ ID NO: 1468615 - RNA, 19 nt, Homo sapiens
  misc_RNA (1)...(19): siRNA sense strand
gaauauagggaaacaccuu

SEQ ID NO: 1468616 - RNA, 19 nt, Homo sapiens
  misc_RNA (1)...(19): siRNA sense strand
aaggaaguguggaaguaua

SEQ ID NO: 1468617 - RNA, 19 nt, Homo sapiens
  misc_RNA (1)...(19): siRNA sense strand
gauccuccaguccaucuua

SEQ ID NO: 1468618 - RNA, 19 nt, Homo sapiens
  misc_RNA (1)...(19): siRNA sense strand
gcagcuaucauauuaucaa

SEQ ID NO: 1468619 - RNA, 19 nt, Homo sapiens
  misc_RNA (1)...(19): siRNA sense strand
ggcaacugcucgaaagaga

SEQ ID NO: 1468620 - RNA, 19 nt, Homo sapiens
  misc_RNA (1)...(19): siRNA sense strand
ggaaguauuacaaagugaa

SEQ ID NO: 1468621 - RNA, 19 nt, Homo sapiens
  misc_RNA (1)...(19): siRNA sense strand
uuaaugaugucuuggaagu

SEQ ID NO: 1468622 - RNA, 19 nt, Homo sapiens
  misc_RNA (1)...(19): siRNA sense strand
uggaacaucucaccaaucu

SEQ ID NO: 1468623 - RNA, 19 nt, Homo sapiens
  misc_RNA (1)...(19): siRNA sense strand
gacaccaaguggcgccaua

SEQ ID NO: 1468624 - RNA, 19 nt, Homo sapiens
  misc_RNA (1)...(19): siRNA sense strand
gaaacaccuuaucagaaag

SEQ ID NO: 1468625 - RNA, 19 nt, Homo sapiens
  misc_RNA (1)...(19): siRNA sense strand
gaaggaaguguggaaguau

SEQ ID NO: 1468626 - RNA, 19 nt, Homo sapiens
  misc_RNA (1)...(19): siRNA sense strand
uuacaaagugaacugcuua

SEQ ID NO: 1468627 - RNA, 19 nt, Homo sapiens
  misc_RNA (1)...(19): siRNA sense strand
gccauagguuuaaugaugu

SEQ ID NO: 1468628 - RNA, 19 nt, Homo sapiens
  misc_RNA (1)...(19): siRNA sense strand
ccgcaaagcaguagccaaa

SEQ ID NO: 1468629 - RNA, 19 nt, Homo sapiens
  misc_RNA (1)...(19): siRNA sense strand
gggaagcuuugccucaugu

SEQ ID NO: 1468630 - RNA, 19 nt, Homo sapiens
  misc_RNA (1)...(19): siRNA sense strand
ccaaguggcgccauauguu

SEQ ID NO: 1468631 - RNA, 19 nt, Homo sapiens
  misc_RNA (1)...(19): siRNA sense strand
caaauuagucaacgaccaa

SEQ ID NO: 1468632 - RNA, 19 nt, Homo sapiens
  misc_RNA (1)...(19): siRNA sense strand
gaaagagagcccaaaccau

SEQ ID NO: 1468633 - RNA, 19 nt, Homo sapiens
  misc_RNA (1)...(19): siRNA sense strand
cagcagcuccacauagaaa

SEQ ID NO: 1468634 - RNA, 19 nt, Homo sapiens
  misc_RNA (1)...(19): siRNA sense strand
ccaaaccaccauaggauau

SEQ ID NO: 1468635 - RNA, 19 nt, Homo sapiens
  misc_RNA (1)...(19): siRNA sense strand
gguuaucgcuguguuacug

SEQ ID NO: 1468636 - RNA, 19 nt, Homo sapiens
  misc_RNA (1)...(19): siRNA sense strand
uaugagagaugggaagcuu

SEQ ID NO: 1468637 - RNA, 19 nt, Homo sapiens
  misc_RNA (1)...(19): siRNA sense strand
guaacuauuguccaugaaa

SEQ ID NO: 1468638 - RNA, 19 nt, Homo sapiens
  misc_RNA (1)...(19): siRNA sense strand
uugacaacguccauucuuu

SEQ ID NO: 1468639 - RNA, 19 nt, Homo sapiens
  misc_RNA (1)...(19): siRNA sense strand
ucuccugacuuuaaacaga

SEQ ID NO: 1468640 - RNA, 19 nt, Homo sapiens
  misc_RNA (1)...(19): siRNA sense strand
ccacuuccgccacacauga

SEQ ID NO: 1468641 - RNA, 19 nt, Homo sapiens
  misc_RNA (1)...(19): siRNA sense strand
guuuaaugaugucuuggaa

SEQ ID NO: 1468642 - RNA, 19 nt, Homo sapiens
  misc_RNA (1)...(19): siRNA sense strand
cgguaacuauuguccauga

SEQ ID NO: 1468643 - RNA, 19 nt, Homo sapiens
  misc_RNA (1)...(19): siRNA sense strand
caacuucuccgcuauacag

SEQ ID NO: 1468644 - RNA, 19 nt, Homo sapiens
  misc_RNA (1)...(19): siRNA sense strand
cgaaagagagcccaaacca

SEQ ID NO: 1468645 - RNA, 19 nt, Homo sapiens
  misc_RNA (1)...(19): siRNA sense strand
ggaggaugacgauggcauu

SEQ ID NO: 1468646 - RNA, 19 nt, Homo sapiens
  misc_RNA (1)...(19): siRNA sense strand
gguagaaggaacaguuaga

SEQ ID NO: 1468647 - RNA, 19 nt, Homo sapiens
  misc_RNA (1)...(19): siRNA sense strand
cagcuguaaugucuacuuc

SEQ ID NO: 1468648 - RNA, 19 nt, Homo sapiens
  misc_RNA (1)...(19): siRNA sense strand
acaaagauggcagcuguaa

SEQ ID NO: 1468649 - RNA, 19 nt, Homo sapiens
  misc_RNA (1)...(19): siRNA sense strand
gguaacuauuguccaugaa

SEQ ID NO: 1468650 - RNA, 19 nt, Homo sapiens
  misc_RNA (1)...(19): siRNA sense strand
uguagaaucccaaauguag

SEQ ID NO: 1468651 - RNA, 19 nt, Homo sapiens
  misc_RNA (1)...(19): siRNA sense strand
ucaucauggcgaucuauua

SEQ ID NO: 1468652 - RNA, 19 nt, Homo sapiens
  misc_RNA (1)...(19): siRNA sense strand
uagguuuaaugaugucuug

SEQ ID NO: 1468653 - RNA, 19 nt, Homo sapiens
  misc_RNA (1)...(19): siRNA sense strand
caaagcaguagccaaagau

SEQ ID NO: 1468654 - RNA, 19 nt, Homo sapiens
  misc_RNA (1)...(19): siRNA sense strand
ugacaacguccauucuuuc

SEQ ID NO: 1468655 - RNA, 19 nt, Homo sapiens
  misc_RNA (1)...(19): siRNA sense strand
aagcucuccugacuuuaaa

SEQ ID NO: 1468656 - RNA, 19 nt, Homo sapiens
  misc_RNA (1)...(19): siRNA sense strand
gaggaugacgauggcauuu

SEQ ID NO: 1468657 - RNA, 19 nt, Homo sapiens
  misc_RNA (1)...(19): siRNA sense strand
gugguagaaggaacaguua

SEQ ID NO: 1468658 - RNA, 19 nt, Homo sapiens
  misc_RNA (1)...(19): siRNA sense strand
ucagcuacuuugcacuuau

SEQ ID NO: 1468659 - RNA, 19 nt, Homo sapiens
  misc_RNA (1)...(19): siRNA sense strand
cuuauauucucucgugguu

SEQ ID NO: 1468660 - RNA, 19 nt, Homo sapiens
  misc_RNA (1)...(19): siRNA sense strand
ucuguagaaucccaaaugu

SEQ ID NO: 1468661 - RNA, 19 nt, Homo sapiens
  misc_RNA (1)...(19): siRNA sense strand
accagcagcuccacauaga

SEQ ID NO: 1468662 - RNA, 19 nt, Homo sapiens
  misc_RNA (1)...(19): siRNA sense strand
cggcagcagcuaucauauu

SEQ ID NO: 1468663 - RNA, 19 nt, Homo sapiens
  misc_RNA (1)...(19): siRNA sense strand
aagaggaaguauuacaaag

SEQ ID NO: 1468664 - RNA, 19 nt, Homo sapiens
  misc_RNA (1)...(19): siRNA sense strand
ugagagaugggaagcuuug

SEQ ID NO: 1468665 - RNA, 19 nt, Homo sapiens
  misc_RNA (1)...(19): siRNA sense strand
gacaacguccauucuuuca

SEQ ID NO: 1468666 - RNA, 19 nt, Homo sapiens
  misc_RNA (1)...(19): siRNA sense strand
cucauagccuuucaucaug

SEQ ID NO: 1468667 - RNA, 19 nt, Homo sapiens
  misc_RNA (1)...(19): siRNA sense strand
aauauagggaaacaccuua

SEQ ID NO: 1468668 - RNA, 19 nt, Homo sapiens
  misc_RNA (1)...(19): siRNA sense strand
gaccagcagcuccacauag

SEQ ID NO: 1468669 - RNA, 19 nt, Homo sapiens
  misc_RNA (1)...(19): siRNA sense strand
caaagugaacugcuuacag

SEQ ID NO: 1468670 - RNA, 19 nt, Homo sapiens
  misc_RNA (1)...(19): siRNA sense strand
gaagagcaagaagacgauu

SEQ ID NO: 1468671 - RNA, 19 nt, Homo sapiens
  misc_RNA (1)...(19): siRNA sense strand
guuaagaggaaguauuaca

SEQ ID NO: 1468672 - RNA, 19 nt, Homo sapiens
  misc_RNA (1)...(19): siRNA sense strand
acgauuacuucacaaagau

SEQ ID NO: 1468673 - RNA, 19 nt, Homo sapiens
  misc_RNA (1)...(19): siRNA sense strand
uccaguccaucuuaaguug

SEQ ID NO: 1468674 - RNA, 19 nt, Homo sapiens
  misc_RNA (1)...(19): siRNA sense strand
gacccaaaccaccauagga

SEQ ID NO: 1468675 - RNA, 19 nt, Homo sapiens
  misc_RNA (1)...(19): siRNA sense strand
gcccaacuucuccgcuaua

SEQ ID NO: 1468676 - RNA, 19 nt, Homo sapiens
  misc_RNA (1)...(19): siRNA sense strand
gcaauuggacuggaaagac

SEQ ID NO: 1468677 - RNA, 19 nt, Homo sapiens
  misc_RNA (1)...(19): siRNA sense strand
uacggcagcagcuaucaua

SEQ ID NO: 1468678 - RNA, 19 nt, Homo sapiens
  misc_RNA (1)...(19): siRNA sense strand
aagcaguagccaaagauaa

SEQ ID NO: 1468679 - RNA, 19 nt, Homo sapiens
  misc_RNA (1)...(19): siRNA sense strand
ugacgauggcauuuaaaga

SEQ ID NO: 1468680 - RNA, 19 nt, Homo sapiens
  misc_RNA (1)...(19): siRNA sense strand
ggaaacaccuuaucagaaa

SEQ ID NO: 1468681 - RNA, 19 nt, Homo sapiens
  misc_RNA (1)...(19): siRNA sense strand
ggcagcagcuaucauauua

SEQ ID NO: 1468682 - RNA, 19 nt, Homo sapiens
  misc_RNA (1)...(19): siRNA sense strand
caucuuaaguugcaucaua

SEQ ID NO: 1468683 - RNA, 19 nt, Homo sapiens
  misc_RNA (1)...(19): siRNA sense strand
ggaugacgauggcauuuaa

SEQ ID NO: 1468684 - RNA, 19 nt, Homo sapiens
  misc_RNA (1)...(19): siRNA sense strand
gcaaagcaguagccaaaga

SEQ ID NO: 1468685 - RNA, 19 nt, Homo sapiens
  misc_RNA (1)...(19): siRNA sense strand
ggccauagguuuaaugaug

SEQ ID NO: 1468686 - RNA, 19 nt, Homo sapiens
  misc_RNA (1)...(19): siRNA sense strand
gaacaucucaccaaucuag

SEQ ID NO: 1468687 - RNA, 19 nt, Homo sapiens
  misc_RNA (1)...(19): siRNA sense strand
gaggaaguauuacaaagug

SEQ ID NO: 1468688 - RNA, 19 nt, Homo sapiens
  misc_RNA (1)...(19): siRNA sense strand
gaagagaagagcaagaaga

SEQ ID NO: 1468689 - RNA, 19 nt, Homo sapiens
  misc_RNA (1)...(19): siRNA sense strand
agacgaaggucauuuagug

SEQ ID NO: 1468690 - RNA, 19 nt, Homo sapiens
  misc_RNA (1)...(19): siRNA sense strand
ugaaggaaguguggaagua

SEQ ID NO: 1468691 - RNA, 19 nt, Homo sapiens
  misc_RNA (1)...(19): siRNA sense strand
aaagagagcccaaaccauu

SEQ ID NO: 1468692 - RNA, 19 nt, Homo sapiens
  misc_RNA (1)...(19): siRNA sense strand
ucuagaagcuccuauguuc

SEQ ID NO: 1468693 - RNA, 19 nt, Homo sapiens
  misc_RNA (1)...(19): siRNA sense strand
gacgauuacuucacaaaga

SEQ ID NO: 1468694 - RNA, 19 nt, Homo sapiens
  misc_RNA (1)...(19): siRNA sense strand
aaugaugucuuggaaguua

SEQ ID NO: 1468695 - RNA, 19 nt, Homo sapiens
  misc_RNA (1)...(19): siRNA sense strand
gauggcagcuguaaugucu

SEQ ID NO: 1468696 - RNA, 19 nt, Homo sapiens
  misc_RNA (1)...(19): siRNA sense strand
gaaguuaagaggaaguauu

SEQ ID NO: 1468697 - RNA, 19 nt, Homo sapiens
  misc_RNA (1)...(19): siRNA sense strand
cauuauagcugagaagaga

SEQ ID NO: 1468698 - RNA, 19 nt, Homo sapiens
  misc_RNA (1)...(19): siRNA sense strand
cagcuacuuugcacuuaua

SEQ ID NO: 1468699 - RNA, 19 nt, Homo sapiens
  misc_RNA (1)...(19): siRNA sense strand
caacguccauucuuucaca

SEQ ID NO: 1468700 - RNA, 19 nt, Homo sapiens
  misc_RNA (1)...(19): siRNA sense strand
gauauuuggcucugucuuu

SEQ ID NO: 1468701 - RNA, 19 nt, Homo sapiens
  misc_RNA (1)...(19): siRNA sense strand
uauauucucucgugguuga

SEQ ID NO: 1468702 - RNA, 19 nt, Homo sapiens
  misc_RNA (1)...(19): siRNA sense strand
gggaaacaccuuaucagaa

SEQ ID NO: 1468703 - RNA, 19 nt, Homo sapiens
  misc_RNA (1)...(19): siRNA sense strand
gcgagacgaaggucauuua

SEQ ID NO: 1468704 - RNA, 19 nt, Homo sapiens
  misc_RNA (1)...(19): siRNA sense strand
gaaauucucuggggccaua

SEQ ID NO: 1468705 - RNA, 19 nt, Homo sapiens
  misc_RNA (1)...(19): siRNA sense strand
gcucauagccuuucaucau

SEQ ID NO: 1468706 - RNA, 19 nt, Homo sapiens
  misc_RNA (1)...(19): siRNA sense strand
gagaagagaagagcaagaa

SEQ ID NO: 1468707 - RNA, 19 nt, Homo sapiens
  misc_RNA (1)...(19): siRNA sense strand
caucauggcgaucuauuaa

SEQ ID NO: 1468708 - RNA, 19 nt, Homo sapiens
  misc_RNA (1)...(19): siRNA sense strand
gcuguaaugucuacuucaa

SEQ ID NO: 1468709 - RNA, 19 nt, Homo sapiens
  misc_RNA (1)...(19): siRNA sense strand
aaagauggcagcuguaaug

SEQ ID NO: 1468710 - RNA, 19 nt, Homo sapiens
  misc_RNA (1)...(19): siRNA sense strand
gcuaucauauuaucaaugc

SEQ ID NO: 1468711 - RNA, 19 nt, Homo sapiens
  misc_RNA (1)...(19): siRNA sense strand
cagcagcuaucauauuauc

SEQ ID NO: 1468712 - RNA, 19 nt, Homo sapiens
  misc_RNA (1)...(19): siRNA sense strand
ucauggcgaucuauuaaau

SEQ ID NO: 1468713 - RNA, 19 nt, Homo sapiens
  misc_RNA (1)...(19): siRNA sense strand
acacaugaauauagggaaa

SEQ ID NO: 1468714 - RNA, 19 nt, Homo sapiens
  misc_RNA (1)...(19): siRNA sense strand
caaguggcgccauauguuu

SEQ ID NO: 1468715 - RNA, 19 nt, Homo sapiens
  misc_RNA (1)...(19): siRNA sense strand
gaauauagggaaacaccuu

SEQ ID NO: 1468716 - RNA, 19 nt, Homo sapiens
  misc_RNA (1)...(19): siRNA sense strand
aaggaaguguggaaguaua

SEQ ID NO: 1468717 - RNA, 19 nt, Homo sapiens
  misc_RNA (1)...(19): siRNA sense strand
gauccuccaguccaucuua

SEQ ID NO: 1468718 - RNA, 19 nt, Homo sapiens
  misc_RNA (1)...(19): siRNA sense strand
gcagcuaucauauuaucaa

SEQ ID NO: 1468719 - RNA, 19 nt, Homo sapiens
  misc_RNA (1)...(19): siRNA sense strand
ggcaacugcucgaaagaga

SEQ ID NO: 1468720 - RNA, 19 nt, Homo sapiens
  misc_RNA (1)...(19): siRNA sense strand
ggaaguauuacaaagugaa

SEQ ID NO: 1468721 - RNA, 19 nt, Homo sapiens
  misc_RNA (1)...(19): siRNA sense strand
uuaaugaugucuuggaagu

SEQ ID NO: 1468722 - RNA, 19 nt, Homo sapiens
  misc_RNA (1)...(19): siRNA sense strand
uggaacaucucaccaaucu

SEQ ID NO: 1468723 - RNA, 19 nt, Homo sapiens
  misc_RNA (1)...(19): siRNA sense strand
gacaccaaguggcgccaua

SEQ ID NO: 1468724 - RNA, 19 nt, Homo sapiens
  misc_RNA (1)...(19): siRNA sense strand
gaaacaccuuaucagaaag

SEQ ID NO: 1468725 - RNA, 19 nt, Homo sapiens
  misc_RNA (1)...(19): siRNA sense strand
gaaggaaguguggaaguau

SEQ ID NO: 1468726 - RNA, 19 nt, Homo sapiens
  misc_RNA (1)...(19): siRNA sense strand
uuacaaagugaacugcuua

SEQ ID NO: 1468727 - RNA, 19 nt, Homo sapiens
  misc_RNA (1)...(19): siRNA sense strand
gccauagguuuaaugaugu

SEQ ID NO: 1468728 - RNA, 19 nt, Homo sapiens
  misc_RNA (1)...(19): siRNA sense strand
ccgcaaagcaguagccaaa

SEQ ID NO: 1468729 - RNA, 19 nt, Homo sapiens
  misc_RNA (1)...(19): siRNA sense strand
gggaagcuuugccucaugu

SEQ ID NO: 1468730 - RNA, 19 nt, Homo sapiens
  misc_RNA (1)...(19): siRNA sense strand
ccaaguggcgccauauguu

SEQ ID NO: 1468731 - RNA, 19 nt, Homo sapiens
  misc_RNA (1)...(19): siRNA sense strand
caaauuagucaacgaccaa

SEQ ID NO: 1468732 - RNA, 19 nt, Homo sapiens
  misc_RNA (1)...(19): siRNA sense strand
gaaagagagcccaaaccau

SEQ ID NO: 1468733 - RNA, 19 nt, Homo sapiens
  misc_RNA (1)...(19): siRNA sense strand
cagcagcuccacauagaaa

SEQ ID NO: 1468734 - RNA, 19 nt, Homo sapiens
  misc_RNA (1)...(19): siRNA sense strand
ccaaaccaccauaggauau

SEQ ID NO: 1468735 - RNA, 19 nt, Homo sapiens
  misc_RNA (1)...(19): siRNA sense strand
gguuaucgcuguguuacug

SEQ ID NO: 1468736 - RNA, 19 nt, Homo sapiens
  misc_RNA (1)...(19): siRNA sense strand
uaugagagaugggaagcuu

SEQ ID NO: 1468737 - RNA, 19 nt, Homo sapiens
  misc_RNA (1)...(19): siRNA sense strand
guaacuauuguccaugaaa

SEQ ID NO: 1468738 - RNA, 19 nt, Homo sapiens
  misc_RNA (1)...(19): siRNA sense strand
uugacaacguccauucuuu

SEQ ID NO: 1468739 - RNA, 19 nt, Homo sapiens
  misc_RNA (1)...(19): siRNA sense strand
ucuccugacuuuaaacaga

SEQ ID NO: 1468740 - RNA, 19 nt, Homo sapiens
  misc_RNA (1)...(19): siRNA sense strand
ccacuuccgccacacauga

SEQ ID NO: 1468741 - RNA, 19 nt, Homo sapiens
  misc_RNA (1)...(19): siRNA sense strand
guuuaaugaugucuuggaa

SEQ ID NO: 1468742 - RNA, 19 nt, Homo sapiens
  misc_RNA (1)...(19): siRNA sense strand
cgguaacuauuguccauga

SEQ ID NO: 1468743 - RNA, 19 nt, Homo sapiens
  misc_RNA (1)...(19): siRNA sense strand
caacuucuccgcuauacag

SEQ ID NO: 1468744 - RNA, 19 nt, Homo sapiens
  misc_RNA (1)...(19): siRNA sense strand
cgaaagagagcccaaacca

SEQ ID NO: 1468745 - RNA, 19 nt, Homo sapiens
  misc_RNA (1)...(19): siRNA sense strand
ggaggaugacgauggcauu

SEQ ID NO: 1468746 - RNA, 19 nt, Homo sapiens
  misc_RNA (1)...(19): siRNA sense strand
gguagaaggaacaguuaga

SEQ ID NO: 1468747 - RNA, 19 nt, Homo sapiens
  misc_RNA (1)...(19): siRNA sense strand
cagcuguaaugucuacuuc

SEQ ID NO: 1468748 - RNA, 19 nt, Homo sapiens
  misc_RNA (1)...(19): siRNA sense strand
acaaagauggcagcuguaa

SEQ ID NO: 1468749 - RNA, 19 nt, Homo sapiens
  misc_RNA (1)...(19): siRNA sense strand
gguaacuauuguccaugaa

SEQ ID NO: 1468750 - RNA, 19 nt, Homo sapiens
  misc_RNA (1)...(19): siRNA sense strand
uguagaaucccaaauguag

SEQ ID NO: 1468751 - RNA, 19 nt, Homo sapiens
  misc_RNA (1)...(19): siRNA sense strand
ucaucauggcgaucuauua

SEQ ID NO: 1468752 - RNA, 19 nt, Homo sapiens
  misc_RNA (1)...(19): siRNA sense strand
uagguuuaaugaugucuug

SEQ ID NO: 1468753 - RNA, 19 nt, Homo sapiens
  misc_RNA (1)...(19): siRNA sense strand
caaagcaguagccaaagau

SEQ ID NO: 1468754 - RNA, 19 nt, Homo sapiens
  misc_RNA (1)...(19): siRNA sense strand
ugacaacguccauucuuuc

SEQ ID NO: 1468755 - RNA, 19 nt, Homo sapiens
  misc_RNA (1)...(19): siRNA sense strand
aagcucuccugacuuuaaa

SEQ ID NO: 1468756 - RNA, 19 nt, Homo sapiens
  misc_RNA (1)...(19): siRNA sense strand
gaggaugacgauggcauuu

SEQ ID NO: 1468757 - RNA, 19 nt, Homo sapiens
  misc_RNA (1)...(19): siRNA sense strand
gugguagaaggaacaguua

SEQ ID NO: 1468758 - RNA, 19 nt, Homo sapiens
  misc_RNA (1)...(19): siRNA sense strand
ucagcuacuuugcacuuau

SEQ ID NO: 1468759 - RNA, 19 nt, Homo sapiens
  misc_RNA (1)...(19): siRNA sense strand
cuuauauucucucgugguu

SEQ ID NO: 1468760 - RNA, 19 nt, Homo sapiens
  misc_RNA (1)...(19): siRNA sense strand
ucuguagaaucccaaaugu

SEQ ID NO: 1468761 - RNA, 19 nt, Homo sapiens
  misc_RNA (1)...(19): siRNA sense strand
accagcagcuccacauaga

SEQ ID NO: 1468762 - RNA, 19 nt, Homo sapiens
  misc_RNA (1)...(19): siRNA sense strand
cggcagcagcuaucauauu

SEQ ID NO: 1468763 - RNA, 19 nt, Homo sapiens
  misc_RNA (1)...(19): siRNA sense strand
aagaggaaguauuacaaag

SEQ ID NO: 1468764 - RNA, 19 nt, Homo sapiens
  misc_RNA (1)...(19): siRNA sense strand
ugagagaugggaagcuuug

SEQ ID NO: 1468765 - RNA, 19 nt, Homo sapiens
  misc_RNA (1)...(19): siRNA sense strand
gacaacguccauucuuuca

SEQ ID NO: 1468766 - RNA, 19 nt, Homo sapiens
  misc_RNA (1)...(19): siRNA sense strand
cucauagccuuucaucaug

SEQ ID NO: 1468767 - RNA, 19 nt, Homo sapiens
  misc_RNA (1)...(19): siRNA sense strand
aauauagggaaacaccuua

SEQ ID NO: 1468768 - RNA, 19 nt, Homo sapiens
  misc_RNA (1)...(19): siRNA sense strand
gaccagcagcuccacauag

SEQ ID NO: 1468769 - RNA, 19 nt, Homo sapiens
  misc_RNA (1)...(19): siRNA sense strand
caaagugaacugcuuacag

SEQ ID NO: 1468770 - RNA, 19 nt, Homo sapiens
  misc_RNA (1)...(19): siRNA sense strand
gaagagcaagaagacgauu

SEQ ID NO: 1468771 - RNA, 19 nt, Homo sapiens
  misc_RNA (1)...(19): siRNA sense strand
guuaagaggaaguauuaca

SEQ ID NO: 1468772 - RNA, 19 nt, Homo sapiens
  misc_RNA (1)...(19): siRNA sense strand
acgauuacuucacaaagau

SEQ ID NO: 1468773 - RNA, 19 nt, Homo sapiens
  misc_RNA (1)...(19): siRNA sense strand
uccaguccaucuuaaguug

SEQ ID NO: 1468774 - RNA, 19 nt, Homo sapiens
  misc_RNA (1)...(19): siRNA sense strand
gacccaaaccaccauagga

SEQ ID NO: 1468775 - RNA, 19 nt, Homo sapiens
  misc_RNA (1)...(19): siRNA sense strand
gcccaacuucuccgcuaua

SEQ ID NO: 1468776 - RNA, 19 nt, Homo sapiens
  misc_RNA (1)...(19): siRNA sense strand
gcaauuggacuggaaagac

SEQ ID NO: 1468777 - RNA, 19 nt, Homo sapiens
  misc_RNA (1)...(19): siRNA sense strand
uacggcagcagcuaucaua

SEQ ID NO: 1468778 - RNA, 19 nt, Homo sapiens
  misc_RNA (1)...(19): siRNA sense strand
aagcaguagccaaagauaa

SEQ ID NO: 1468779 - RNA, 19 nt, Homo sapiens
  misc_RNA (1)...(19): siRNA sense strand
ugacgauggcauuuaaaga

SEQ ID NO: 1468780 - RNA, 19 nt, Homo sapiens
  misc_RNA (1)...(19): siRNA sense strand
ccaaggagcugcuauguuc

SEQ ID NO: 1468781 - RNA, 19 nt, Homo sapiens
  misc_RNA (1)...(19): siRNA sense strand
gagcugcuauguucuauga

SEQ ID NO: 1468782 - RNA, 19 nt, Homo sapiens
  misc_RNA (1)...(19): siRNA sense strand
gaagagcucccagaagaua

SEQ ID NO: 1468783 - RNA, 19 nt, Homo sapiens
  misc_RNA (1)...(19): siRNA sense strand
uggaagagcucccagaaga

SEQ ID NO: 1468784 - RNA, 19 nt, Homo sapiens
  misc_RNA (1)...(19): siRNA sense strand
caacagacaagauggaaga

SEQ ID NO: 1468785 - RNA, 19 nt, Homo sapiens
  misc_RNA (1)...(19): siRNA sense strand
cccaggaugugaccuauuu

SEQ ID NO: 1468786 - RNA, 19 nt, Homo sapiens
  misc_RNA (1)...(19): siRNA sense strand
cacuggaucugaaguauga

SEQ ID NO: 1468787 - RNA, 19 nt, Homo sapiens
  misc_RNA (1)...(19): siRNA sense strand
ccagaaccaucuacacguu

SEQ ID NO: 1468788 - RNA, 19 nt, Homo sapiens
  misc_RNA (1)...(19): siRNA sense strand
gcgagggaaucagaaauug

SEQ ID NO: 1468789 - RNA, 19 nt, Homo sapiens
  misc_RNA (1)...(19): siRNA sense strand
gaaccaaggagcugcuaug

SEQ ID NO: 1468790 - RNA, 19 nt, Homo sapiens
  misc_RNA (1)...(19): siRNA sense strand
gcugcuauguucuaugaug

SEQ ID NO: 1468791 - RNA, 19 nt, Homo sapiens
  misc_RNA (1)...(19): siRNA sense strand
ucuaugaugugccugaaga

SEQ ID NO: 1468792 - RNA, 19 nt, Homo sapiens
  misc_RNA (1)...(19): siRNA sense strand
ugaugugccugaagaaaca

SEQ ID NO: 1468793 - RNA, 19 nt, Homo sapiens
  misc_RNA (1)...(19): siRNA sense strand
ugacgcugcucucccagaa

SEQ ID NO: 1468794 - RNA, 19 nt, Homo sapiens
  misc_RNA (1)...(19): siRNA sense strand
ccgaauaccuggauuaccu

SEQ ID NO: 1468795 - RNA, 19 nt, Homo sapiens
  misc_RNA (1)...(19): siRNA sense strand
caccugaauucuccaagga

SEQ ID NO: 1468796 - RNA, 19 nt, Homo sapiens
  misc_RNA (1)...(19): siRNA sense strand
acauugaaccaccuucuuu

SEQ ID NO: 1468797 - RNA, 19 nt, Homo sapiens
  misc_RNA (1)...(19): siRNA sense strand
ggcgagggaaucagaaauu

SEQ ID NO: 1468798 - RNA, 19 nt, Homo sapiens
  misc_RNA (1)...(19): siRNA sense strand
gaagaggaggcgagggaau

SEQ ID NO: 1468799 - RNA, 19 nt, Homo sapiens
  misc_RNA (1)...(19): siRNA sense strand
ggaagagcucccagaagau

SEQ ID NO: 1468800 - RNA, 19 nt, Homo sapiens
  misc_RNA (1)...(19): siRNA sense strand
gaauaccuggauuaccuuu

SEQ ID NO: 1468801 - RNA, 19 nt, Homo sapiens
  misc_RNA (1)...(19): siRNA sense strand
aaacaagacccuauuucca

SEQ ID NO: 1468802 - RNA, 19 nt, Homo sapiens
  misc_RNA (1)...(19): siRNA sense strand
ugaaguaugagguggcauu

SEQ ID NO: 1468803 - RNA, 19 nt, Homo sapiens
  misc_RNA (1)...(19): siRNA sense strand
cguucagugucccgaaaua

SEQ ID NO: 1468804 - RNA, 19 nt, Homo sapiens
  misc_RNA (1)...(19): siRNA sense strand
aagcagcccugaggaggaa

SEQ ID NO: 1468805 - RNA, 19 nt, Homo sapiens
  misc_RNA (1)...(19): siRNA sense strand
ggaugaggaggacacagaa

SEQ ID NO: 1468806 - RNA, 19 nt, Homo sapiens
  misc_RNA (1)...(19): siRNA sense strand
ggacgaagaggaggaggau

SEQ ID NO: 1468807 - RNA, 19 nt, Homo sapiens
  misc_RNA (1)...(19): siRNA sense strand
ggaccuguacaacaaguuc

SEQ ID NO: 1468808 - RNA, 19 nt, Homo sapiens
  misc_RNA (1)...(19): siRNA sense strand
gagggaaucagaaauugag

SEQ ID NO: 1468809 - RNA, 19 nt, Homo sapiens
  misc_RNA (1)...(19): siRNA sense strand
gggaugggcaccaagaauc

SEQ ID NO: 1468810 - RNA, 19 nt, Homo sapiens
  misc_RNA (1)...(19): siRNA sense strand
cggaaacaagacccuauuu

SEQ ID NO: 1468811 - RNA, 19 nt, Homo sapiens
  misc_RNA (1)...(19): siRNA sense strand
aguaugagguggcauucug

SEQ ID NO: 1468812 - RNA, 19 nt, Homo sapiens
  misc_RNA (1)...(19): siRNA sense strand
cgagggaaucagaaauuga

SEQ ID NO: 1468813 - RNA, 19 nt, Homo sapiens
  misc_RNA (1)...(19): siRNA sense strand
gcuuccagcccuacauuga

SEQ ID NO: 1468814 - RNA, 19 nt, Homo sapiens
  misc_RNA (1)...(19): siRNA sense strand
gaaauacagcaaguucucu

SEQ ID NO: 1468815 - RNA, 19 nt, Homo sapiens
  misc_RNA (1)...(19): siRNA sense strand
cgaaauacagcaaguucuc

SEQ ID NO: 1468816 - RNA, 19 nt, Homo sapiens
  misc_RNA (1)...(19): siRNA sense strand
gaggcgagggaaucagaaa

SEQ ID NO: 1468817 - RNA, 19 nt, Homo sapiens
  misc_RNA (1)...(19): siRNA sense strand
acgaagaggaggaggauga

SEQ ID NO: 1468818 - RNA, 19 nt, Homo sapiens
  misc_RNA (1)...(19): siRNA sense strand
aaauacagcaaguucucua

SEQ ID NO: 1468819 - RNA, 19 nt, Homo sapiens
  misc_RNA (1)...(19): siRNA sense strand
gaaguaugagguggcauuc

SEQ ID NO: 1468820 - RNA, 19 nt, Homo sapiens
  misc_RNA (1)...(19): siRNA sense strand
gcgcgaaguggaagagugu

SEQ ID NO: 1468821 - RNA, 19 nt, Homo sapiens
  misc_RNA (1)...(19): siRNA sense strand
uggguccucuggcuauuug

SEQ ID NO: 1468822 - RNA, 19 nt, Homo sapiens
  misc_RNA (1)...(19): siRNA sense strand
cagaagauggcgucagcuu

SEQ ID NO: 1468823 - RNA, 19 nt, Homo sapiens
  misc_RNA (1)...(19): siRNA sense strand
gaggaggacacagaagaug

SEQ ID NO: 1468824 - RNA, 19 nt, Homo sapiens
  misc_RNA (1)...(19): siRNA sense strand
cacguucagugucccgaaa

SEQ ID NO: 1468825 - RNA, 19 nt, Homo sapiens
  misc_RNA (1)...(19): siRNA sense strand
ccacccaacagacaagaug

SEQ ID NO: 1468826 - RNA, 19 nt, Homo sapiens
  misc_RNA (1)...(19): siRNA sense strand
ggaugggcaccaagaaucu

SEQ ID NO: 1468827 - RNA, 19 nt, Homo sapiens
  misc_RNA (1)...(19): siRNA sense strand
gacccuauuuccagucacu

SEQ ID NO: 1468828 - RNA, 19 nt, Homo sapiens
  misc_RNA (1)...(19): siRNA sense strand
caguuucucuucagacacu

SEQ ID NO: 1468829 - RNA, 19 nt, Homo sapiens
  misc_RNA (1)...(19): siRNA sense strand
gcuggguccucuggcuauu

SEQ ID NO: 1468830 - RNA, 19 nt, Homo sapiens
  misc_RNA (1)...(19): siRNA sense strand
ggaccuugcagaggacgaa

SEQ ID NO: 1468831 - RNA, 19 nt, Homo sapiens
  misc_RNA (1)...(19): siRNA sense strand
agcgaaggcuccucugcuu

SEQ ID NO: 1468832 - RNA, 19 nt, Homo sapiens
  misc_RNA (1)...(19): siRNA sense strand
guucuaugaugugccugaa

SEQ ID NO: 1468833 - RNA, 19 nt, Homo sapiens
  misc_RNA (1)...(19): siRNA sense strand
cagcuuccagcccuacauu

SEQ ID NO: 1468834 - RNA, 19 nt, Homo sapiens
  misc_RNA (1)...(19): siRNA sense strand
ggaguccgaauaccuggau

SEQ ID NO: 1468835 - RNA, 19 nt, Homo sapiens
  misc_RNA (1)...(19): siRNA sense strand
ggaggcgagggaaucagaa

SEQ ID NO: 1468836 - RNA, 19 nt, Homo sapiens
  misc_RNA (1)...(19): siRNA sense strand
ccacuggaucugaaguaug

SEQ ID NO: 1468837 - RNA, 19 nt, Homo sapiens
  misc_RNA (1)...(19): siRNA sense strand
ugagugccaaugccacgua

SEQ ID NO: 1468838 - RNA, 19 nt, Homo sapiens
  misc_RNA (1)...(19): siRNA sense strand
aaggagcugcuauguucua

SEQ ID NO: 1468839 - RNA, 19 nt, Homo sapiens
  misc_RNA (1)...(19): siRNA sense strand
ccaaggagcugcuauguuc

SEQ ID NO: 1468840 - RNA, 19 nt, Homo sapiens
  misc_RNA (1)...(19): siRNA sense strand
gagcugcuauguucuauga

SEQ ID NO: 1468841 - RNA, 19 nt, Homo sapiens
  misc_RNA (1)...(19): siRNA sense strand
gaagagcucccagaagaua

SEQ ID NO: 1468842 - RNA, 19 nt, Homo sapiens
  misc_RNA (1)...(19): siRNA sense strand
uggaagagcucccagaaga

SEQ ID NO: 1468843 - RNA, 19 nt, Homo sapiens
  misc_RNA (1)...(19): siRNA sense strand
caacagacaagauggaaga

SEQ ID NO: 1468844 - RNA, 19 nt, Homo sapiens
  misc_RNA (1)...(19): siRNA sense strand
cccaggaugugaccuauuu

SEQ ID NO: 1468845 - RNA, 19 nt, Homo sapiens
  misc_RNA (1)...(19): siRNA sense strand
cacuggaucugaaguauga

SEQ ID NO: 1468846 - RNA, 19 nt, Homo sapiens
  misc_RNA (1)...(19): siRNA sense strand
ccagaaccaucuacacguu

SEQ ID NO: 1468847 - RNA, 19 nt, Homo sapiens
  misc_RNA (1)...(19): siRNA sense strand
gcgagggaaucagaaauug

SEQ ID NO: 1468848 - RNA, 19 nt, Homo sapiens
  misc_RNA (1)...(19): siRNA sense strand
gaaccaaggagcugcuaug

SEQ ID NO: 1468849 - RNA, 19 nt, Homo sapiens
  misc_RNA (1)...(19): siRNA sense strand
gcugcuauguucuaugaug

SEQ ID NO: 1468850 - RNA, 19 nt, Homo sapiens
  misc_RNA (1)...(19): siRNA sense strand
ucuaugaugugccugaaga

SEQ ID NO: 1468851 - RNA, 19 nt, Homo sapiens
  misc_RNA (1)...(19): siRNA sense strand
ugaugugccugaagaaaca

SEQ ID NO: 1468852 - RNA, 19 nt, Homo sapiens
  misc_RNA (1)...(19): siRNA sense strand
ugacgcugcucucccagaa

SEQ ID NO: 1468853 - RNA, 19 nt, Homo sapiens
  misc_RNA (1)...(19): siRNA sense strand
ccgaauaccuggauuaccu

SEQ ID NO: 1468854 - RNA, 19 nt, Homo sapiens
  misc_RNA (1)...(19): siRNA sense strand
caccugaauucuccaagga

SEQ ID NO: 1468855 - RNA, 19 nt, Homo sapiens
  misc_RNA (1)...(19): siRNA sense strand
acauugaaccaccuucuuu

SEQ ID NO: 1468856 - RNA, 19 nt, Homo sapiens
  misc_RNA (1)...(19): siRNA sense strand
ggcgagggaaucagaaauu

SEQ ID NO: 1468857 - RNA, 19 nt, Homo sapiens
  misc_RNA (1)...(19): siRNA sense strand
gaagaggaggcgagggaau

SEQ ID NO: 1468858 - RNA, 19 nt, Homo sapiens
  misc_RNA (1)...(19): siRNA sense strand
ggaagagcucccagaagau

SEQ ID NO: 1468859 - RNA, 19 nt, Homo sapiens
  misc_RNA (1)...(19): siRNA sense strand
gaauaccuggauuaccuuu

SEQ ID NO: 1468860 - RNA, 19 nt, Homo sapiens
  misc_RNA (1)...(19): siRNA sense strand
aaacaagacccuauuucca

SEQ ID NO: 1468861 - RNA, 19 nt, Homo sapiens
  misc_RNA (1)...(19): siRNA sense strand
ugaaguaugagguggcauu

SEQ ID NO: 1468862 - RNA, 19 nt, Homo sapiens
  misc_RNA (1)...(19): siRNA sense strand
cguucagugucccgaaaua

SEQ ID NO: 1468863 - RNA, 19 nt, Homo sapiens
  misc_RNA (1)...(19): siRNA sense strand
aagcagcccugaggaggaa

SEQ ID NO: 1468864 - RNA, 19 nt, Homo sapiens
  misc_RNA (1)...(19): siRNA sense strand
ggaugaggaggacacagaa

SEQ ID NO: 1468865 - RNA, 19 nt, Homo sapiens
  misc_RNA (1)...(19): siRNA sense strand
ggacgaagaggaggaggau

SEQ ID NO: 1468866 - RNA, 19 nt, Homo sapiens
  misc_RNA (1)...(19): siRNA sense strand
ggaccuguacaacaaguuc

SEQ ID NO: 1468867 - RNA, 19 nt, Homo sapiens
  misc_RNA (1)...(19): siRNA sense strand
gagggaaucagaaauugag

SEQ ID NO: 1468868 - RNA, 19 nt, Homo sapiens
  misc_RNA (1)...(19): siRNA sense strand
gggaugggcaccaagaauc

SEQ ID NO: 1468869 - RNA, 19 nt, Homo sapiens
  misc_RNA (1)...(19): siRNA sense strand
cggaaacaagacccuauuu

SEQ ID NO: 1468870 - RNA, 19 nt, Homo sapiens
  misc_RNA (1)...(19): siRNA sense strand
aguaugagguggcauucug

SEQ ID NO: 1468871 - RNA, 19 nt, Homo sapiens
  misc_RNA (1)...(19): siRNA sense strand
cgagggaaucagaaauuga

SEQ ID NO: 1468872 - RNA, 19 nt, Homo sapiens
  misc_RNA (1)...(19): siRNA sense strand
gcuuccagcccuacauuga

SEQ ID NO: 1468873 - RNA, 19 nt, Homo sapiens
  misc_RNA (1)...(19): siRNA sense strand
gaaauacagcaaguucucu

SEQ ID NO: 1468874 - RNA, 19 nt, Homo sapiens
  misc_RNA (1)...(19): siRNA sense strand
cgaaauacagcaaguucuc

SEQ ID NO: 1468875 - RNA, 19 nt, Homo sapiens
  misc_RNA (1)...(19): siRNA sense strand
gaggcgagggaaucagaaa

SEQ ID NO: 1468876 - RNA, 19 nt, Homo sapiens
  misc_RNA (1)...(19): siRNA sense strand
acgaagaggaggaggauga

SEQ ID NO: 1468877 - RNA, 19 nt, Homo sapiens
  misc_RNA (1)...(19): siRNA sense strand
aaauacagcaaguucucua

SEQ ID NO: 1468878 - RNA, 19 nt, Homo sapiens
  misc_RNA (1)...(19): siRNA sense strand
gaaguaugagguggcauuc

SEQ ID NO: 1468879 - RNA, 19 nt, Homo sapiens
  misc_RNA (1)...(19): siRNA sense strand
gcgcgaaguggaagagugu

SEQ ID NO: 1468880 - RNA, 19 nt, Homo sapiens
  misc_RNA (1)...(19): siRNA sense strand
uggguccucuggcuauuug

SEQ ID NO: 1468881 - RNA, 19 nt, Homo sapiens
  misc_RNA (1)...(19): siRNA sense strand
cagaagauggcgucagcuu

SEQ ID NO: 1468882 - RNA, 19 nt, Homo sapiens
  misc_RNA (1)...(19): siRNA sense strand
gaggaggacacagaagaug

SEQ ID NO: 1468883 - RNA, 19 nt, Homo sapiens
  misc_RNA (1)...(19): siRNA sense strand
cacguucagugucccgaaa

SEQ ID NO: 1468884 - RNA, 19 nt, Homo sapiens
  misc_RNA (1)...(19): siRNA sense strand
ccacccaacagacaagaug

SEQ ID NO: 1468885 - RNA, 19 nt, Homo sapiens
  misc_RNA (1)...(19): siRNA sense strand
ggaugggcaccaagaaucu

SEQ ID NO: 1468886 - RNA, 19 nt, Homo sapiens
  misc_RNA (1)...(19): siRNA sense strand
gacccuauuuccagucacu

SEQ ID NO: 1468887 - RNA, 19 nt, Homo sapiens
  misc_RNA (1)...(19): siRNA sense strand
caguuucucuucagacacu

SEQ ID NO: 1468888 - RNA, 19 nt, Homo sapiens
  misc_RNA (1)...(19): siRNA sense strand
gcuggguccucuggcuauu

SEQ ID NO: 1468889 - RNA, 19 nt, Homo sapiens
  misc_RNA (1)...(19): siRNA sense strand
ggaccuugcagaggacgaa

SEQ ID NO: 1468890 - RNA, 19 nt, Homo sapiens
  misc_RNA (1)...(19): siRNA sense strand
agcgaaggcuccucugcuu

SEQ ID NO: 1468891 - RNA, 19 nt, Homo sapiens
  misc_RNA (1)...(19): siRNA sense strand
guucuaugaugugccugaa

SEQ ID NO: 1468892 - RNA, 19 nt, Homo sapiens
  misc_RNA (1)...(19): siRNA sense strand
cagcuuccagcccuacauu

SEQ ID NO: 1468893 - RNA, 19 nt, Homo sapiens
  misc_RNA (1)...(19): siRNA sense strand
ggaguccgaauaccuggau

SEQ ID NO: 1468894 - RNA, 19 nt, Homo sapiens
  misc_RNA (1)...(19): siRNA sense strand
ggaggcgagggaaucagaa

SEQ ID NO: 1468895 - RNA, 19 nt, Homo sapiens
  misc_RNA (1)...(19): siRNA sense strand
ccacuggaucugaaguaug

SEQ ID NO: 1468896 - RNA, 19 nt, Homo sapiens
  misc_RNA (1)...(19): siRNA sense strand
ugagugccaaugccacgua

SEQ ID NO: 1468897 - RNA, 19 nt, Homo sapiens
  misc_RNA (1)...(19): siRNA sense strand
aaggagcugcuauguucua

SEQ ID NO: 1468898 - RNA, 19 nt, Homo sapiens
  misc_RNA (1)...(19): siRNA sense strand
ccaaggagcugcuauguuc

SEQ ID NO: 1468899 - RNA, 19 nt, Homo sapiens
  misc_RNA (1)...(19): siRNA sense strand
gagcugcuauguucuauga

SEQ ID NO: 1468900 - RNA, 19 nt, Homo sapiens
  misc_RNA (1)...(19): siRNA sense strand
cccaggaugugaccuauuu

SEQ ID NO: 1468901 - RNA, 19 nt, Homo sapiens
  misc_RNA (1)...(19): siRNA sense strand
cacuggaucugaaguauga

SEQ ID NO: 1468902 - RNA, 19 nt, Homo sapiens
  misc_RNA (1)...(19): siRNA sense strand
ccagaaccaucuacacguu

SEQ ID NO: 1468903 - RNA, 19 nt, Homo sapiens
  misc_RNA (1)...(19): siRNA sense strand
gaaccaaggagcugcuaug

SEQ ID NO: 1468904 - RNA, 19 nt, Homo sapiens
  misc_RNA (1)...(19): siRNA sense strand
gcugcuauguucuaugaug

SEQ ID NO: 1468905 - RNA, 19 nt, Homo sapiens
  misc_RNA (1)...(19): siRNA sense strand
ucuaugaugugccugaaga

SEQ ID NO: 1468906 - RNA, 19 nt, Homo sapiens
  misc_RNA (1)...(19): siRNA sense strand
ugaugugccugaagaaaca

SEQ ID NO: 1468907 - RNA, 19 nt, Homo sapiens
  misc_RNA (1)...(19): siRNA sense strand
ugacgcugcucucccagaa

SEQ ID NO: 1468908 - RNA, 19 nt, Homo sapiens
  misc_RNA (1)...(19): siRNA sense strand
ccgaauaccuggauuaccu

SEQ ID NO: 1468909 - RNA, 19 nt, Homo sapiens
  misc_RNA (1)...(19): siRNA sense strand
gaauaccuggauuaccuuu

SEQ ID NO: 1468910 - RNA, 19 nt, Homo sapiens
  misc_RNA (1)...(19): siRNA sense strand
aaacaagacccuauuucca

SEQ ID NO: 1468911 - RNA, 19 nt, Homo sapiens
  misc_RNA (1)...(19): siRNA sense strand
ugaaguaugagguggcauu

SEQ ID NO: 1468912 - RNA, 19 nt, Homo sapiens
  misc_RNA (1)...(19): siRNA sense strand
cguucagugucccgaaaua

SEQ ID NO: 1468913 - RNA, 19 nt, Homo sapiens
  misc_RNA (1)...(19): siRNA sense strand
ggaccuguacaacaaguuc

SEQ ID NO: 1468914 - RNA, 19 nt, Homo sapiens
  misc_RNA (1)...(19): siRNA sense strand
cggaaacaagacccuauuu

SEQ ID NO: 1468915 - RNA, 19 nt, Homo sapiens
  misc_RNA (1)...(19): siRNA sense strand
aguaugagguggcauucug

SEQ ID NO: 1468916 - RNA, 19 nt, Homo sapiens
  misc_RNA (1)...(19): siRNA sense strand
gaaauacagcaaguucucu

SEQ ID NO: 1468917 - RNA, 19 nt, Homo sapiens
  misc_RNA (1)...(19): siRNA sense strand
cgaaauacagcaaguucuc

SEQ ID NO: 1468918 - RNA, 19 nt, Homo sapiens
  misc_RNA (1)...(19): siRNA sense strand
aaauacagcaaguucucua

SEQ ID NO: 1468919 - RNA, 19 nt, Homo sapiens
  misc_RNA (1)...(19): siRNA sense strand
gcgcgaaguggaagagugu

SEQ ID NO: 1468920 - RNA, 19 nt, Homo sapiens
  misc_RNA (1)...(19): siRNA sense strand
gaaguaugagguggcauuc

SEQ ID NO: 1468921 - RNA, 19 nt, Homo sapiens
  misc_RNA (1)...(19): siRNA sense strand
cacguucagugucccgaaa

SEQ ID NO: 1468922 - RNA, 19 nt, Homo sapiens
  misc_RNA (1)...(19): siRNA sense strand
gacccuauuuccagucacu

SEQ ID NO: 1468923 - RNA, 19 nt, Homo sapiens
  misc_RNA (1)...(19): siRNA sense strand
guucuaugaugugccugaa

SEQ ID NO: 1468924 - RNA, 19 nt, Homo sapiens
  misc_RNA (1)...(19): siRNA sense strand
ggaguccgaauaccuggau

SEQ ID NO: 1468925 - RNA, 19 nt, Homo sapiens
  misc_RNA (1)...(19): siRNA sense strand
ccacuggaucugaaguaug

SEQ ID NO: 1468926 - RNA, 19 nt, Homo sapiens
  misc_RNA (1)...(19): siRNA sense strand
ugagugccaaugccacgua

SEQ ID NO: 1468927 - RNA, 19 nt, Homo sapiens
  misc_RNA (1)...(19): siRNA sense strand
aaggagcugcuauguucua

SEQ ID NO: 1468928 - RNA, 19 nt, Homo sapiens
  misc_RNA (1)...(19): siRNA sense strand
ggucauggcuggcaucauc

SEQ ID NO: 1468929 - RNA, 19 nt, Homo sapiens
  misc_RNA (1)...(19): siRNA sense strand
caagagcgguaccggcauu

SEQ ID NO: 1468930 - RNA, 19 nt, Homo sapiens
  misc_RNA (1)...(19): siRNA sense strand
gacaucagccucuacaaga

SEQ ID NO: 1468931 - RNA, 19 nt, Homo sapiens
  misc_RNA (1)...(19): siRNA sense strand
gauccugauucucaucuuc

SEQ ID NO: 1468932 - RNA, 19 nt, Homo sapiens
  misc_RNA (1)...(19): siRNA sense strand
ggcaugauccugauucuca

SEQ ID NO: 1468933 - RNA, 19 nt, Homo sapiens
  misc_RNA (1)...(19): siRNA sense strand
ggccggagcagaucaugaa

SEQ ID NO: 1468934 - RNA, 19 nt, Homo sapiens
  misc_RNA (1)...(19): siRNA sense strand
cggagcagaucaugaaguc

SEQ ID NO: 1468935 - RNA, 19 nt, Homo sapiens
  misc_RNA (1)...(19): siRNA sense strand
gcauugcggccaugucugu

SEQ ID NO: 1468936 - RNA, 19 nt, Homo sapiens
  misc_RNA (1)...(19): siRNA sense strand
cgacaucagccucuacaag

SEQ ID NO: 1468937 - RNA, 19 nt, Homo sapiens
  misc_RNA (1)...(19): siRNA sense strand
gcccucauccucuccacaa

SEQ ID NO: 1468938 - RNA, 19 nt, Homo sapiens
  misc_RNA (1)...(19): siRNA sense strand
ggugguggcaguccucauc

SEQ ID NO: 1468939 - RNA, 19 nt, Homo sapiens
  misc_RNA (1)...(19): siRNA sense strand
caucaucccaguggucaug

SEQ ID NO: 1468940 - RNA, 19 nt, Homo sapiens
  misc_RNA (1)...(19): siRNA sense strand
ccuccgagcuggcagaauu

SEQ ID NO: 1468941 - RNA, 19 nt, Homo sapiens
  misc_RNA (1)...(19): siRNA sense strand
gcuuggagauuuggacuuu

SEQ ID NO: 1468942 - RNA, 19 nt, Homo sapiens
  misc_RNA (1)...(19): siRNA sense strand
gagcucagccggcuacagu

SEQ ID NO: 1468943 - RNA, 19 nt, Homo sapiens
  misc_RNA (1)...(19): siRNA sense strand
cgagcuggcagaauucuuu

SEQ ID NO: 1468944 - RNA, 19 nt, Homo sapiens
  misc_RNA (1)...(19): siRNA sense strand
caacccgcuuggagauuug

SEQ ID NO: 1468945 - RNA, 19 nt, Homo sapiens
  misc_RNA (1)...(19): siRNA sense strand
gcaccuacagcugcuacua

SEQ ID NO: 1468946 - RNA, 19 nt, Homo sapiens
  misc_RNA (1)...(19): siRNA sense strand
gcucagccggcuacaguug

SEQ ID NO: 1468947 - RNA, 19 nt, Homo sapiens
  misc_RNA (1)...(19): siRNA sense strand
uuucaagccuggagagauc

SEQ ID NO: 1468948 - RNA, 19 nt, Homo sapiens
  misc_RNA (1)...(19): siRNA sense strand
gcgaggugcuggucaucag

SEQ ID NO: 1468949 - RNA, 19 nt, Homo sapiens
  misc_RNA (1)...(19): siRNA sense strand
uggagcugcuggugacaga

SEQ ID NO: 1468950 - RNA, 19 nt, Homo sapiens
  misc_RNA (1)...(19): siRNA sense strand
acaugagcuucgugcugua

SEQ ID NO: 1468951 - RNA, 19 nt, Homo sapiens
  misc_RNA (1)...(19): siRNA sense strand
caccuacagcugcuacuau

SEQ ID NO: 1468952 - RNA, 19 nt, Homo sapiens
  misc_RNA (1)...(19): siRNA sense strand
ccuccgagcuggcagaauu

SEQ ID NO: 1468953 - RNA, 19 nt, Homo sapiens
  misc_RNA (1)...(19): siRNA sense strand
gcuuggagauuuggacuuu

SEQ ID NO: 1468954 - RNA, 19 nt, Homo sapiens
  misc_RNA (1)...(19): siRNA sense strand
gagcucagccggcuacagu

SEQ ID NO: 1468955 - RNA, 19 nt, Homo sapiens
  misc_RNA (1)...(19): siRNA sense strand
cgagcuggcagaauucuuu

SEQ ID NO: 1468956 - RNA, 19 nt, Homo sapiens
  misc_RNA (1)...(19): siRNA sense strand
caacccgcuuggagauuug

SEQ ID NO: 1468957 - RNA, 19 nt, Homo sapiens
  misc_RNA (1)...(19): siRNA sense strand
gcaccuacagcugcuacua

SEQ ID NO: 1468958 - RNA, 19 nt, Homo sapiens
  misc_RNA (1)...(19): siRNA sense strand
gcucagccggcuacaguug

SEQ ID NO: 1468959 - RNA, 19 nt, Homo sapiens
  misc_RNA (1)...(19): siRNA sense strand
uuucaagccuggagagauc

SEQ ID NO: 1468960 - RNA, 19 nt, Homo sapiens
  misc_RNA (1)...(19): siRNA sense strand
gcgaggugcuggucaucag

SEQ ID NO: 1468961 - RNA, 19 nt, Homo sapiens
  misc_RNA (1)...(19): siRNA sense strand
uggagcugcuggugacaga

SEQ ID NO: 1468962 - RNA, 19 nt, Homo sapiens
  misc_RNA (1)...(19): siRNA sense strand
acaugagcuucgugcugua

SEQ ID NO: 1468963 - RNA, 19 nt, Homo sapiens
  misc_RNA (1)...(19): siRNA sense strand
caccuacagcugcuacuau

SEQ ID NO: 1468964 - RNA, 19 nt, Homo sapiens
  misc_RNA (1)...(19): siRNA sense strand
ccuccgagcuggcagaauu

SEQ ID NO: 1468965 - RNA, 19 nt, Homo sapiens
  misc_RNA (1)...(19): siRNA sense strand
gcuuggagauuuggacuuu

SEQ ID NO: 1468966 - RNA, 19 nt, Homo sapiens
  misc_RNA (1)...(19): siRNA sense strand
gagcucagccggcuacagu

SEQ ID NO: 1468967 - RNA, 19 nt, Homo sapiens
  misc_RNA (1)...(19): siRNA sense strand
cgagcuggcagaauucuuu

SEQ ID NO: 1468968 - RNA, 19 nt, Homo sapiens
  misc_RNA (1)...(19): siRNA sense strand
caacccgcuuggagauuug

SEQ ID NO: 1468969 - RNA, 19 nt, Homo sapiens
  misc_RNA (1)...(19): siRNA sense strand
gcaccuacagcugcuacua

SEQ ID NO: 1468970 - RNA, 19 nt, Homo sapiens
  misc_RNA (1)...(19): siRNA sense strand
gcucagccggcuacaguug

SEQ ID NO: 1468971 - RNA, 19 nt, Homo sapiens
  misc_RNA (1)...(19): siRNA sense strand
uuucaagccuggagagauc

SEQ ID NO: 1468972 - RNA, 19 nt, Homo sapiens
  misc_RNA (1)...(19): siRNA sense strand
gcgaggugcuggucaucag

SEQ ID NO: 1468973 - RNA, 19 nt, Homo sapiens
  misc_RNA (1)...(19): siRNA sense strand
uggagcugcuggugacaga

SEQ ID NO: 1468974 - RNA, 19 nt, Homo sapiens
  misc_RNA (1)...(19): siRNA sense strand
acaugagcuucgugcugua

SEQ ID NO: 1468975 - RNA, 19 nt, Homo sapiens
  misc_RNA (1)...(19): siRNA sense strand
caccuacagcugcuacuau

SEQ ID NO: 1468976 - RNA, 19 nt, Homo sapiens
  misc_RNA (1)...(19): siRNA sense strand
gauaugaacuugaggaaga

SEQ ID NO: 1468977 - RNA, 19 nt, Homo sapiens
  misc_RNA (1)...(19): siRNA sense strand
ggauauaugugucgcagua

SEQ ID NO: 1468978 - RNA, 19 nt, Homo sapiens
  misc_RNA (1)...(19): siRNA sense strand
ggacaguguuuagauauug

SEQ ID NO: 1468979 - RNA, 19 nt, Homo sapiens
  misc_RNA (1)...(19): siRNA sense strand
gauacucacuguuaccauu

SEQ ID NO: 1468980 - RNA, 19 nt, Homo sapiens
  misc_RNA (1)...(19): siRNA sense strand
gcagacgugcuacaauuua

SEQ ID NO: 1468981 - RNA, 19 nt, Homo sapiens
  misc_RNA (1)...(19): siRNA sense strand
ggacaaacccuguguaucg

SEQ ID NO: 1468982 - RNA, 19 nt, Homo sapiens
  misc_RNA (1)...(19): siRNA sense strand
ucaggacaguguuuagaua

SEQ ID NO: 1468983 - RNA, 19 nt, Homo sapiens
  misc_RNA (1)...(19): siRNA sense strand
gaaugagggcagagaauuu

SEQ ID NO: 1468984 - RNA, 19 nt, Homo sapiens
  misc_RNA (1)...(19): siRNA sense strand
gaucaaaucugggaaugag

SEQ ID NO: 1468985 - RNA, 19 nt, Homo sapiens
  misc_RNA (1)...(19): siRNA sense strand
gccaagacaucaacgaaug

SEQ ID NO: 1468986 - RNA, 19 nt, Homo sapiens
  misc_RNA (1)...(19): siRNA sense strand
gaauguuccuggauccuau

SEQ ID NO: 1468987 - RNA, 19 nt, Homo sapiens
  misc_RNA (1)...(19): siRNA sense strand
ggacgagugugcaacagau

SEQ ID NO: 1468988 - RNA, 19 nt, Homo sapiens
  misc_RNA (1)...(19): siRNA sense strand
gaagauggcguucauugca

SEQ ID NO: 1468989 - RNA, 19 nt, Homo sapiens
  misc_RNA (1)...(19): siRNA sense strand
cagcuggacuuggaaauga

SEQ ID NO: 1468990 - RNA, 19 nt, Homo sapiens
  misc_RNA (1)...(19): siRNA sense strand
gaaaugaucacugucaaca

SEQ ID NO: 1468991 - RNA, 19 nt, Homo sapiens
  misc_RNA (1)...(19): siRNA sense strand
gaccagcccuuuaccaucu

SEQ ID NO: 1468992 - RNA, 19 nt, Homo sapiens
  misc_RNA (1)...(19): siRNA sense strand
ggaaugagggcagagaauu

SEQ ID NO: 1468993 - RNA, 19 nt, Homo sapiens
  misc_RNA (1)...(19): siRNA sense strand
gauaccagauggaugaaag

SEQ ID NO: 1468994 - RNA, 19 nt, Homo sapiens
  misc_RNA (1)...(19): siRNA sense strand
acucucagcuccaaacuau

SEQ ID NO: 1468995 - RNA, 19 nt, Homo sapiens
  misc_RNA (1)...(19): siRNA sense strand
gaaggccagugcuuagaca

SEQ ID NO: 1468996 - RNA, 19 nt, Homo sapiens
  misc_RNA (1)...(19): siRNA sense strand
gagugcagcuucucugagu

SEQ ID NO: 1468997 - RNA, 19 nt, Homo sapiens
  misc_RNA (1)...(19): siRNA sense strand
gaugaaagcaaccaaugug

SEQ ID NO: 1468998 - RNA, 19 nt, Homo sapiens
  misc_RNA (1)...(19): siRNA sense strand
ggccagugcuuagacauug

SEQ ID NO: 1468999 - RNA, 19 nt, Homo sapiens
  misc_RNA (1)...(19): siRNA sense strand
gacaguguuuagauauuga

SEQ ID NO: 1469000 - RNA, 19 nt, Homo sapiens
  misc_RNA (1)...(19): siRNA sense strand
ccucuuauaugccgcuuug

SEQ ID NO: 1469001 - RNA, 19 nt, Homo sapiens
  misc_RNA (1)...(19): siRNA sense strand
gcagagaccagcccuuuac

SEQ ID NO: 1469002 - RNA, 19 nt, Homo sapiens
  misc_RNA (1)...(19): siRNA sense strand
caugauguguguuaaccaa

SEQ ID NO: 1469003 - RNA, 19 nt, Homo sapiens
  misc_RNA (1)...(19): siRNA sense strand
gugcaaaccugcgucaaca

SEQ ID NO: 1469004 - RNA, 19 nt, Homo sapiens
  misc_RNA (1)...(19): siRNA sense strand
cagcagcucugugcgaaug

SEQ ID NO: 1469005 - RNA, 19 nt, Homo sapiens
  misc_RNA (1)...(19): siRNA sense strand
aaaaggauacucacuguua

SEQ ID NO: 1469006 - RNA, 19 nt, Homo sapiens
  misc_RNA (1)...(19): siRNA sense strand
aaaccugcgucaacaccua

SEQ ID NO: 1469007 - RNA, 19 nt, Homo sapiens
  misc_RNA (1)...(19): siRNA sense strand
ucaacacugucaucaacuu

SEQ ID NO: 1469008 - RNA, 19 nt, Homo sapiens
  misc_RNA (1)...(19): siRNA sense strand
gacaaacccuguguaucga

SEQ ID NO: 1469009 - RNA, 19 nt, Homo sapiens
  misc_RNA (1)...(19): siRNA sense strand
ggcguucauugcagugaua

SEQ ID NO: 1469010 - RNA, 19 nt, Homo sapiens
  misc_RNA (1)...(19): siRNA sense strand
caaccaauguguggaugug

SEQ ID NO: 1469011 - RNA, 19 nt, Homo sapiens
  misc_RNA (1)...(19): siRNA sense strand
gaauggcuuugaccuggau

SEQ ID NO: 1469012 - RNA, 19 nt, Homo sapiens
  misc_RNA (1)...(19): siRNA sense strand
aaccgaagcugccaagaca

SEQ ID NO: 1469013 - RNA, 19 nt, Homo sapiens
  misc_RNA (1)...(19): siRNA sense strand
ugaggaagauggcguucau

SEQ ID NO: 1469014 - RNA, 19 nt, Homo sapiens
  misc_RNA (1)...(19): siRNA sense strand
gaguuccucugccaacaug

SEQ ID NO: 1469015 - RNA, 19 nt, Homo sapiens
  misc_RNA (1)...(19): siRNA sense strand
gaucuccaggccucuuaua

SEQ ID NO: 1469016 - RNA, 19 nt, Homo sapiens
  misc_RNA (1)...(19): siRNA sense strand
gaaugucgcuaugguuacu

SEQ ID NO: 1469017 - RNA, 19 nt, Homo sapiens
  misc_RNA (1)...(19): siRNA sense strand
ggaugaaagcaaccaaugu

SEQ ID NO: 1469018 - RNA, 19 nt, Homo sapiens
  misc_RNA (1)...(19): siRNA sense strand
gugcuuagacauugaugaa

SEQ ID NO: 1469019 - RNA, 19 nt, Homo sapiens
  misc_RNA (1)...(19): siRNA sense strand
guuccuggauccuauucuu

SEQ ID NO: 1469020 - RNA, 19 nt, Homo sapiens
  misc_RNA (1)...(19): siRNA sense strand
ugucaacacugucaucaac

SEQ ID NO: 1469021 - RNA, 19 nt, Homo sapiens
  misc_RNA (1)...(19): siRNA sense strand
caaacuaucccacgaucuc

SEQ ID NO: 1469022 - RNA, 19 nt, Homo sapiens
  misc_RNA (1)...(19): siRNA sense strand
guauguguccugcugagaa

SEQ ID NO: 1469023 - RNA, 19 nt, Homo sapiens
  misc_RNA (1)...(19): siRNA sense strand
gcagcucugugcgaauguu

SEQ ID NO: 1469024 - RNA, 19 nt, Homo sapiens
  misc_RNA (1)...(19): siRNA sense strand
uggcggguauuuaugcauu

SEQ ID NO: 1469025 - RNA, 19 nt, Homo sapiens
  misc_RNA (1)...(19): siRNA sense strand
cgacugcggauauaugugu

SEQ ID NO: 1469026 - RNA, 19 nt, Homo sapiens
  misc_RNA (1)...(19): siRNA sense strand
gcugugacccaggauauga

SEQ ID NO: 1469027 - RNA, 19 nt, Homo sapiens
  misc_RNA (1)...(19): siRNA sense strand
gaugaaugucgcuaugguu

SEQ ID NO: 1469028 - RNA, 19 nt, Homo sapiens
  misc_RNA (1)...(19): siRNA sense strand
agugauaaccgcuguaugu

SEQ ID NO: 1469029 - RNA, 19 nt, Homo sapiens
  misc_RNA (1)...(19): siRNA sense strand
gacccaggauaugaacuug

SEQ ID NO: 1469030 - RNA, 19 nt, Homo sapiens
  misc_RNA (1)...(19): siRNA sense strand
caacaccuacggcucuuuc

SEQ ID NO: 1469031 - RNA, 19 nt, Homo sapiens
  misc_RNA (1)...(19): siRNA sense strand
ccuggauccuauucuugua

SEQ ID NO: 1469032 - RNA, 19 nt, Homo sapiens
  misc_RNA (1)...(19): siRNA sense strand
ccagucaggacaguguuua

SEQ ID NO: 1469033 - RNA, 19 nt, Homo sapiens
  misc_RNA (1)...(19): siRNA sense strand
gagaccagcccuuuaccau

SEQ ID NO: 1469034 - RNA, 19 nt, Homo sapiens
  misc_RNA (1)...(19): siRNA sense strand
ccaccacucucagcuccaa

SEQ ID NO: 1469035 - RNA, 19 nt, Homo sapiens
  misc_RNA (1)...(19): siRNA sense strand
aaaggauacucacuguuac

SEQ ID NO: 1469036 - RNA, 19 nt, Homo sapiens
  misc_RNA (1)...(19): siRNA sense strand
aaugaucacugucaacacu

SEQ ID NO: 1469037 - RNA, 19 nt, Homo sapiens
  misc_RNA (1)...(19): siRNA sense strand
gccagugcuuagacauuga

SEQ ID NO: 1469038 - RNA, 19 nt, Homo sapiens
  misc_RNA (1)...(19): siRNA sense strand
augaaugucgcuaugguua

SEQ ID NO: 1469039 - RNA, 19 nt, Homo sapiens
  misc_RNA (1)...(19): siRNA sense strand
uuauaugccgcuuuggaua

SEQ ID NO: 1469040 - RNA, 19 nt, Homo sapiens
  misc_RNA (1)...(19): siRNA sense strand
uggaaaugaucacugucaa

SEQ ID NO: 1469041 - RNA, 19 nt, Homo sapiens
  misc_RNA (1)...(19): siRNA sense strand
ggaagauggcguucauugc

SEQ ID NO: 1469042 - RNA, 19 nt, Homo sapiens
  misc_RNA (1)...(19): siRNA sense strand
aggacaguguuuagauauu

SEQ ID NO: 1469043 - RNA, 19 nt, Homo sapiens
  misc_RNA (1)...(19): siRNA sense strand
caggacaguguuuagauau

SEQ ID NO: 1469044 - RNA, 19 nt, Homo sapiens
  misc_RNA (1)...(19): siRNA sense strand
ugaugaaugucgcuauggu

SEQ ID NO: 1469045 - RNA, 19 nt, Homo sapiens
  misc_RNA (1)...(19): siRNA sense strand
ggaaaugaucacugucaac

SEQ ID NO: 1469046 - RNA, 19 nt, Homo sapiens
  misc_RNA (1)...(19): siRNA sense strand
gggaaugagggcagagaau

SEQ ID NO: 1469047 - RNA, 19 nt, Homo sapiens
  misc_RNA (1)...(19): siRNA sense strand
gcugugaggagccuuaucu

SEQ ID NO: 1469048 - RNA, 19 nt, Homo sapiens
  misc_RNA (1)...(19): siRNA sense strand
gaagcugccaagacaucaa

SEQ ID NO: 1469049 - RNA, 19 nt, Homo sapiens
  misc_RNA (1)...(19): siRNA sense strand
uaaccaaaauggcggguau

SEQ ID NO: 1469050 - RNA, 19 nt, Homo sapiens
  misc_RNA (1)...(19): siRNA sense strand
gcuccugcaccgacggaua

SEQ ID NO: 1469051 - RNA, 19 nt, Homo sapiens
  misc_RNA (1)...(19): siRNA sense strand
cagacgugcuacaauuuac

SEQ ID NO: 1469052 - RNA, 19 nt, Homo sapiens
  misc_RNA (1)...(19): siRNA sense strand
cgaauguuccuggauccua

SEQ ID NO: 1469053 - RNA, 19 nt, Homo sapiens
  misc_RNA (1)...(19): siRNA sense strand
gauccuauucuuguacaug

SEQ ID NO: 1469054 - RNA, 19 nt, Homo sapiens
  misc_RNA (1)...(19): siRNA sense strand
gggcagagaauuuuacaug

SEQ ID NO: 1469055 - RNA, 19 nt, Homo sapiens
  misc_RNA (1)...(19): siRNA sense strand
uuggauaccagauggauga

SEQ ID NO: 1469056 - RNA, 19 nt, Homo sapiens
  misc_RNA (1)...(19): siRNA sense strand
caacacugucaucaacuuc

SEQ ID NO: 1469057 - RNA, 19 nt, Homo sapiens
  misc_RNA (1)...(19): siRNA sense strand
cauucuggcucucugucuu

SEQ ID NO: 1469058 - RNA, 19 nt, Homo sapiens
  misc_RNA (1)...(19): siRNA sense strand
ggacgagugcagcuucucu

SEQ ID NO: 1469059 - RNA, 19 nt, Homo sapiens
  misc_RNA (1)...(19): siRNA sense strand
cuccaggccucuuauaugc

SEQ ID NO: 1469060 - RNA, 19 nt, Homo sapiens
  misc_RNA (1)...(19): siRNA sense strand
aggaagauggcguucauug

SEQ ID NO: 1469061 - RNA, 19 nt, Homo sapiens
  misc_RNA (1)...(19): siRNA sense strand
gcaaccaauguguggaugu

SEQ ID NO: 1469062 - RNA, 19 nt, Homo sapiens
  misc_RNA (1)...(19): siRNA sense strand
cugcagagaccagcccuuu

SEQ ID NO: 1469063 - RNA, 19 nt, Homo sapiens
  misc_RNA (1)...(19): siRNA sense strand
caaccgaagcugccaagac

SEQ ID NO: 1469064 - RNA, 19 nt, Homo sapiens
  misc_RNA (1)...(19): siRNA sense strand
ugacccaggauaugaacuu

SEQ ID NO: 1469065 - RNA, 19 nt, Homo sapiens
  misc_RNA (1)...(19): siRNA sense strand
ggaaggccagugcuuagac

SEQ ID NO: 1469066 - RNA, 19 nt, Homo sapiens
  misc_RNA (1)...(19): siRNA sense strand
ugaucacugucaacacugu

SEQ ID NO: 1469067 - RNA, 19 nt, Homo sapiens
  misc_RNA (1)...(19): siRNA sense strand
cccaggauaugaacuugag

SEQ ID NO: 1469068 - RNA, 19 nt, Homo sapiens
  misc_RNA (1)...(19): siRNA sense strand
gaucgccagucaggacagu

SEQ ID NO: 1469069 - RNA, 19 nt, Homo sapiens
  misc_RNA (1)...(19): siRNA sense strand
ucuccaggccucuuauaug

SEQ ID NO: 1469070 - RNA, 19 nt, Homo sapiens
  misc_RNA (1)...(19): siRNA sense strand
gagaaccccugcgugcaaa

SEQ ID NO: 1469071 - RNA, 19 nt, Homo sapiens
  misc_RNA (1)...(19): siRNA sense strand
cagauucccaccagugcaa

SEQ ID NO: 1469072 - RNA, 19 nt, Homo sapiens
  misc_RNA (1)...(19): siRNA sense strand
acuuggaaaugaucacugu

SEQ ID NO: 1469073 - RNA, 19 nt, Homo sapiens
  misc_RNA (1)...(19): siRNA sense strand
ugauaaccgcuguaugugu

SEQ ID NO: 1469074 - RNA, 19 nt, Homo sapiens
  misc_RNA (1)...(19): siRNA sense strand
ugugaggagccuuaucuga

SEQ ID NO: 1469075 - RNA, 19 nt, Homo sapiens
  misc_RNA (1)...(19): siRNA sense strand
gacgugcuacaauuuacaa

SEQ ID NO: 1469076 - RNA, 19 nt, Homo sapiens
  misc_RNA (1)...(19): siRNA sense strand
gaaccgaacuuuaccauua

SEQ ID NO: 1469077 - RNA, 19 nt, Homo sapiens
  misc_RNA (1)...(19): siRNA sense strand
uuacauagcugaucguuua

SEQ ID NO: 1469078 - RNA, 19 nt, Homo sapiens
  misc_RNA (1)...(19): siRNA sense strand
gaaaugaggaugcagaaua

SEQ ID NO: 1469079 - RNA, 19 nt, Homo sapiens
  misc_RNA (1)...(19): siRNA sense strand
gaagugguauuauccauuu

SEQ ID NO: 1469080 - RNA, 19 nt, Homo sapiens
  misc_RNA (1)...(19): siRNA sense strand
ggacuuugcuggguucuua

SEQ ID NO: 1469081 - RNA, 19 nt, Homo sapiens
  misc_RNA (1)...(19): siRNA sense strand
gaacaaauuugauguggau

SEQ ID NO: 1469082 - RNA, 19 nt, Homo sapiens
  misc_RNA (1)...(19): siRNA sense strand
cuaaaugccuucgcuauua

SEQ ID NO: 1469083 - RNA, 19 nt, Homo sapiens
  misc_RNA (1)...(19): siRNA sense strand
gaaagagaaugaagagaga

SEQ ID NO: 1469084 - RNA, 19 nt, Homo sapiens
  misc_RNA (1)...(19): siRNA sense strand
gcaauugaccguuugguua

SEQ ID NO: 1469085 - RNA, 19 nt, Homo sapiens
  misc_RNA (1)...(19): siRNA sense strand
gaacugaauucauggacaa

SEQ ID NO: 1469086 - RNA, 19 nt, Homo sapiens
  misc_RNA (1)...(19): siRNA sense strand
ggaugcagcugaugagaaa

SEQ ID NO: 1469087 - RNA, 19 nt, Homo sapiens
  misc_RNA (1)...(19): siRNA sense strand
gacaugaggucaaagauug

SEQ ID NO: 1469088 - RNA, 19 nt, Homo sapiens
  misc_RNA (1)...(19): siRNA sense strand
gagaagaauucaaaccaaa

SEQ ID NO: 1469089 - RNA, 19 nt, Homo sapiens
  misc_RNA (1)...(19): siRNA sense strand
ggaaaguugugcagucgua

SEQ ID NO: 1469090 - RNA, 19 nt, Homo sapiens
  misc_RNA (1)...(19): siRNA sense strand
gaacuggcauuuacagcaa

SEQ ID NO: 1469091 - RNA, 19 nt, Homo sapiens
  misc_RNA (1)...(19): siRNA sense strand
cagaauaacucuaguccuu

SEQ ID NO: 1469092 - RNA, 19 nt, Homo sapiens
  misc_RNA (1)...(19): siRNA sense strand
gcuacgagcugcccuagaa

SEQ ID NO: 1469093 - RNA, 19 nt, Homo sapiens
  misc_RNA (1)...(19): siRNA sense strand
ggucaaagauugugaaggu

SEQ ID NO: 1469094 - RNA, 19 nt, Homo sapiens
  misc_RNA (1)...(19): siRNA sense strand
gaagagaccagaagaaaca

SEQ ID NO: 1469095 - RNA, 19 nt, Homo sapiens
  misc_RNA (1)...(19): siRNA sense strand
ggaaagagaacucacaaug

SEQ ID NO: 1469096 - RNA, 19 nt, Homo sapiens
  misc_RNA (1)...(19): siRNA sense strand
aaaugaggaugcagaauaa

SEQ ID NO: 1469097 - RNA, 19 nt, Homo sapiens
  misc_RNA (1)...(19): siRNA sense strand
gauccugauucuaguauaa

SEQ ID NO: 1469098 - RNA, 19 nt, Homo sapiens
  misc_RNA (1)...(19): siRNA sense strand
gggaagaaauauuggcaaa

SEQ ID NO: 1469099 - RNA, 19 nt, Homo sapiens
  misc_RNA (1)...(19): siRNA sense strand
gcugaucguuuaaauaaug

SEQ ID NO: 1469100 - RNA, 19 nt, Homo sapiens
  misc_RNA (1)...(19): siRNA sense strand
ggcggaagcucaugaguga

SEQ ID NO: 1469101 - RNA, 19 nt, Homo sapiens
  misc_RNA (1)...(19): siRNA sense strand
gcuggguucuuagauauua

SEQ ID NO: 1469102 - RNA, 19 nt, Homo sapiens
  misc_RNA (1)...(19): siRNA sense strand
gaguacagaugaucauguu

SEQ ID NO: 1469103 - RNA, 19 nt, Homo sapiens
  misc_RNA (1)...(19): siRNA sense strand
gaggugaugucuuauuugu

SEQ ID NO: 1469104 - RNA, 19 nt, Homo sapiens
  misc_RNA (1)...(19): siRNA sense strand
gggaaagcaugaugaacuu

SEQ ID NO: 1469105 - RNA, 19 nt, Homo sapiens
  misc_RNA (1)...(19): siRNA sense strand
ccuuggaggugaugucuua

SEQ ID NO: 1469106 - RNA, 19 nt, Homo sapiens
  misc_RNA (1)...(19): siRNA sense strand
ggaguuugauaaucuguau

SEQ ID NO: 1469107 - RNA, 19 nt, Homo sapiens
  misc_RNA (1)...(19): siRNA sense strand
ggacaugaggucaaagauu

SEQ ID NO: 1469108 - RNA, 19 nt, Homo sapiens
  misc_RNA (1)...(19): siRNA sense strand
ggaagcagcgguacuacaa

SEQ ID NO: 1469109 - RNA, 19 nt, Homo sapiens
  misc_RNA (1)...(19): siRNA sense strand
guaaucaguuuggacauga

SEQ ID NO: 1469110 - RNA, 19 nt, Homo sapiens
  misc_RNA (1)...(19): siRNA sense strand
gaaagagaacucacaaugg

SEQ ID NO: 1469111 - RNA, 19 nt, Homo sapiens
  misc_RNA (1)...(19): siRNA sense strand
guguaaagauuccaguuga

SEQ ID NO: 1469112 - RNA, 19 nt, Homo sapiens
  misc_RNA (1)...(19): siRNA sense strand
ccaguaaaccuaauccaaa

SEQ ID NO: 1469113 - RNA, 19 nt, Homo sapiens
  misc_RNA (1)...(19): siRNA sense strand
caaguacccguccaucaua

SEQ ID NO: 1469114 - RNA, 19 nt, Homo sapiens
  misc_RNA (1)...(19): siRNA sense strand
gaagggaaagcaugaugaa

SEQ ID NO: 1469115 - RNA, 19 nt, Homo sapiens
  misc_RNA (1)...(19): siRNA sense strand
ggaaucauccaucccugua

SEQ ID NO: 1469116 - RNA, 19 nt, Homo sapiens
  misc_RNA (1)...(19): siRNA sense strand
ucaagaaauucaccagguu

SEQ ID NO: 1469117 - RNA, 19 nt, Homo sapiens
  misc_RNA (1)...(19): siRNA sense strand
acacaugaaccgaacuuua

SEQ ID NO: 1469118 - RNA, 19 nt, Homo sapiens
  misc_RNA (1)...(19): siRNA sense strand
ugaacuaugucaugggauu

SEQ ID NO: 1469119 - RNA, 19 nt, Homo sapiens
  misc_RNA (1)...(19): siRNA sense strand
uggacaaucuugcuaaaug

SEQ ID NO: 1469120 - RNA, 19 nt, Homo sapiens
  misc_RNA (1)...(19): siRNA sense strand
gaaagugguuaugucaauc

SEQ ID NO: 1469121 - RNA, 19 nt, Homo sapiens
  misc_RNA (1)...(19): siRNA sense strand
gagcccagccuaaccauga

SEQ ID NO: 1469122 - RNA, 19 nt, Homo sapiens
  misc_RNA (1)...(19): siRNA sense strand
guaaaccuaauccaaauga

SEQ ID NO: 1469123 - RNA, 19 nt, Homo sapiens
  misc_RNA (1)...(19): siRNA sense strand
uggaggugaugucuuauuu

SEQ ID NO: 1469124 - RNA, 19 nt, Homo sapiens
  misc_RNA (1)...(19): siRNA sense strand
acaagcagccuaugaaaug

SEQ ID NO: 1469125 - RNA, 19 nt, Homo sapiens
  misc_RNA (1)...(19): siRNA sense strand
gagacaagcagccuaugaa

SEQ ID NO: 1469126 - RNA, 19 nt, Homo sapiens
  misc_RNA (1)...(19): siRNA sense strand
gaaguugaggauagcauuu

SEQ ID NO: 1469127 - RNA, 19 nt, Homo sapiens
  misc_RNA (1)...(19): siRNA sense strand
agaaagugguuaugucaau

SEQ ID NO: 1469128 - RNA, 19 nt, Homo sapiens
  misc_RNA (1)...(19): siRNA sense strand
caauugaccguuugguuaa

SEQ ID NO: 1469129 - RNA, 19 nt, Homo sapiens
  misc_RNA (1)...(19): siRNA sense strand
gaacuugccgauagucuuc

SEQ ID NO: 1469130 - RNA, 19 nt, Homo sapiens
  misc_RNA (1)...(19): siRNA sense strand
caguaaaccuaauccaaau

SEQ ID NO: 1469131 - RNA, 19 nt, Homo sapiens
  misc_RNA (1)...(19): siRNA sense strand
ggacaagcccagauuccaa

SEQ ID NO: 1469132 - RNA, 19 nt, Homo sapiens
  misc_RNA (1)...(19): siRNA sense strand
gcaaguacccguccaucau

SEQ ID NO: 1469133 - RNA, 19 nt, Homo sapiens
  misc_RNA (1)...(19): siRNA sense strand
uaacucuaguccuucgaua

SEQ ID NO: 1469134 - RNA, 19 nt, Homo sapiens
  misc_RNA (1)...(19): siRNA sense strand
gcuaaaugccuucgcuauu

SEQ ID NO: 1469135 - RNA, 19 nt, Homo sapiens
  misc_RNA (1)...(19): siRNA sense strand
ggacaaucuugcuaaaugc

SEQ ID NO: 1469136 - RNA, 19 nt, Homo sapiens
  misc_RNA (1)...(19): siRNA sense strand
gcucaggaacuggcauuua

SEQ ID NO: 1469137 - RNA, 19 nt, Homo sapiens
  misc_RNA (1)...(19): siRNA sense strand
guuagcaguuggugaaguu

SEQ ID NO: 1469138 - RNA, 19 nt, Homo sapiens
  misc_RNA (1)...(19): siRNA sense strand
gaagaaauauuggcaaaag

SEQ ID NO: 1469139 - RNA, 19 nt, Homo sapiens
  misc_RNA (1)...(19): siRNA sense strand
ucaggaagauacaauugga

SEQ ID NO: 1469140 - RNA, 19 nt, Homo sapiens
  misc_RNA (1)...(19): siRNA sense strand
gcaauggacggcaguggaa

SEQ ID NO: 1469141 - RNA, 19 nt, Homo sapiens
  misc_RNA (1)...(19): siRNA sense strand
cagaagagaccagaagaaa

SEQ ID NO: 1469142 - RNA, 19 nt, Homo sapiens
  misc_RNA (1)...(19): siRNA sense strand
caagcagccuaugaaauga

SEQ ID NO: 1469143 - RNA, 19 nt, Homo sapiens
  misc_RNA (1)...(19): siRNA sense strand
gugaguauuuggaaagaga

SEQ ID NO: 1469144 - RNA, 19 nt, Homo sapiens
  misc_RNA (1)...(19): siRNA sense strand
guacucauccugaagacaa

SEQ ID NO: 1469145 - RNA, 19 nt, Homo sapiens
  misc_RNA (1)...(19): siRNA sense strand
ccaagaggcucaggaacug

SEQ ID NO: 1469146 - RNA, 19 nt, Homo sapiens
  misc_RNA (1)...(19): siRNA sense strand
ggaagugguauuauccauu

SEQ ID NO: 1469147 - RNA, 19 nt, Homo sapiens
  misc_RNA (1)...(19): siRNA sense strand
ccuucgauaucuccuaaua

SEQ ID NO: 1469148 - RNA, 19 nt, Homo sapiens
  misc_RNA (1)...(19): siRNA sense strand
guucucaaguagccaguaa

SEQ ID NO: 1469149 - RNA, 19 nt, Homo sapiens
  misc_RNA (1)...(19): siRNA sense strand
gaaauucaccagguucuca

SEQ ID NO: 1469150 - RNA, 19 nt, Homo sapiens
  misc_RNA (1)...(19): siRNA sense strand
caaccagcuuucacuccua

SEQ ID NO: 1469151 - RNA, 19 nt, Homo sapiens
  misc_RNA (1)...(19): siRNA sense strand
gcgagucagggaagaaaua

SEQ ID NO: 1469152 - RNA, 19 nt, Homo sapiens
  misc_RNA (1)...(19): siRNA sense strand
ggaagcagcagucgagaag

SEQ ID NO: 1469153 - RNA, 19 nt, Homo sapiens
  misc_RNA (1)...(19): siRNA sense strand
caccaccaccugugacuua

SEQ ID NO: 1469154 - RNA, 19 nt, Homo sapiens
  misc_RNA (1)...(19): siRNA sense strand
agaggauaaugucagguua

SEQ ID NO: 1469155 - RNA, 19 nt, Homo sapiens
  misc_RNA (1)...(19): siRNA sense strand
ucaaagauugugaagguuu

SEQ ID NO: 1469156 - RNA, 19 nt, Homo sapiens
  misc_RNA (1)...(19): siRNA sense strand
gaagaauucaaaccaaaca

SEQ ID NO: 1469157 - RNA, 19 nt, Homo sapiens
  misc_RNA (1)...(19): siRNA sense strand
gcaaagagcccagccuaac

SEQ ID NO: 1469158 - RNA, 19 nt, Homo sapiens
  misc_RNA (1)...(19): siRNA sense strand
gagaggacaagcccagauu

SEQ ID NO: 1469159 - RNA, 19 nt, Homo sapiens
  misc_RNA (1)...(19): siRNA sense strand
gguacuacaagaacaaauu

SEQ ID NO: 1469160 - RNA, 19 nt, Homo sapiens
  misc_RNA (1)...(19): siRNA sense strand
uaggaggaauuaagcgaaa

SEQ ID NO: 1469161 - RNA, 19 nt, Homo sapiens
  misc_RNA (1)...(19): siRNA sense strand
guacagaugaucauguuag

SEQ ID NO: 1469162 - RNA, 19 nt, Homo sapiens
  misc_RNA (1)...(19): siRNA sense strand
cauguggucuuuguaauca

SEQ ID NO: 1469163 - RNA, 19 nt, Homo sapiens
  misc_RNA (1)...(19): siRNA sense strand
agagaagaauucaaaccaa

SEQ ID NO: 1469164 - RNA, 19 nt, Homo sapiens
  misc_RNA (1)...(19): siRNA sense strand
agaaugcaaugguguaaag

SEQ ID NO: 1469165 - RNA, 19 nt, Homo sapiens
  misc_RNA (1)...(19): siRNA sense strand
aauaguauguucuccuguu

SEQ ID NO: 1469166 - RNA, 19 nt, Homo sapiens
  misc_RNA (1)...(19): siRNA sense strand
cagaucaaauaguauguuc

SEQ ID NO: 1469167 - RNA, 19 nt, Homo sapiens
  misc_RNA (1)...(19): siRNA sense strand
gucaugggauucaaggaaa

SEQ ID NO: 1469168 - RNA, 19 nt, Homo sapiens
  misc_RNA (1)...(19): siRNA sense strand
cagaagacagugacaguga

SEQ ID NO: 1469169 - RNA, 19 nt, Homo sapiens
  misc_RNA (1)...(19): siRNA sense strand
cagccuaccauucacauuu

SEQ ID NO: 1469170 - RNA, 19 nt, Homo sapiens
  misc_RNA (1)...(19): siRNA sense strand
cauggacaaucuugcuaaa

SEQ ID NO: 1469171 - RNA, 19 nt, Homo sapiens
  misc_RNA (1)...(19): siRNA sense strand
gcucaugagugauccugau

SEQ ID NO: 1469172 - RNA, 19 nt, Homo sapiens
  misc_RNA (1)...(19): siRNA sense strand
gaaccugagccagaggaua

SEQ ID NO: 1469173 - RNA, 19 nt, Homo sapiens
  misc_RNA (1)...(19): siRNA sense strand
gauguggaguuugauaauc

SEQ ID NO: 1469174 - RNA, 19 nt, Homo sapiens
  misc_RNA (1)...(19): siRNA sense strand
ccaaauacucaucauuguu

SEQ ID NO: 1469175 - RNA, 19 nt, Homo sapiens
  misc_RNA (1)...(19): siRNA sense strand
cauagcugaucguuuaaau

SEQ ID NO: 1469176 - RNA, 19 nt, Homo sapiens
  misc_RNA (1)...(19): siRNA sense strand
gaaauguccaccacuguuu

SEQ ID NO: 1469177 - RNA, 19 nt, Homo sapiens
  misc_RNA (1)...(19): siRNA sense strand
uuacaucacuggaaucuuc

SEQ ID NO: 1469178 - RNA, 19 nt, Homo sapiens
  misc_RNA (1)...(19): siRNA sense strand
gcaauggacacgcaacuga

SEQ ID NO: 1469179 - RNA, 19 nt, Homo sapiens
  misc_RNA (1)...(19): siRNA sense strand
ggaaauguccaccacuguu

SEQ ID NO: 1469180 - RNA, 19 nt, Homo sapiens
  misc_RNA (1)...(19): siRNA sense strand
ucucagcggugucaucuau

SEQ ID NO: 1469181 - RNA, 19 nt, Homo sapiens
  misc_RNA (1)...(19): siRNA sense strand
acgaauggcugcagucugu

SEQ ID NO: 1469182 - RNA, 19 nt, Homo sapiens
  misc_RNA (1)...(19): siRNA sense strand
ccaccacuguuucucauca

SEQ ID NO: 1469183 - RNA, 19 nt, Homo sapiens
  misc_RNA (1)...(19): siRNA sense strand
ucgaucaucuucagcauuc

SEQ ID NO: 1469184 - RNA, 19 nt, Homo sapiens
  misc_RNA (1)...(19): siRNA sense strand
caucaucaccaaacgaaug

SEQ ID NO: 1469185 - RNA, 19 nt, Homo sapiens
  misc_RNA (1)...(19): siRNA sense strand
ggauuacuccuacgguuuc

SEQ ID NO: 1469186 - RNA, 19 nt, Homo sapiens
  misc_RNA (1)...(19): siRNA sense strand
uaugugaucuugcggaaac

SEQ ID NO: 1469187 - RNA, 19 nt, Homo sapiens
  misc_RNA (1)...(19): siRNA sense strand
ugucaucuaugugaucuug

SEQ ID NO: 1469188 - RNA, 19 nt, Homo sapiens
  misc_RNA (1)...(19): siRNA sense strand
ucagcggugucaucuaugu

SEQ ID NO: 1469189 - RNA, 19 nt, Homo sapiens
  misc_RNA (1)...(19): siRNA sense strand
gcuggucugugcgugauga

SEQ ID NO: 1469190 - RNA, 19 nt, Homo sapiens
  misc_RNA (1)...(19): siRNA sense strand
ccaccaugauccugucgau

SEQ ID NO: 1469191 - RNA, 19 nt, Homo sapiens
  misc_RNA (1)...(19): siRNA sense strand
ucaacucggauuacuccua

SEQ ID NO: 1469192 - RNA, 19 nt, Homo sapiens
  misc_RNA (1)...(19): siRNA sense strand
cggauuacuccuacgguuu

SEQ ID NO: 1469193 - RNA, 19 nt, Homo sapiens
  misc_RNA (1)...(19): siRNA sense strand
ucagcauucugucucuguu

SEQ ID NO: 1469194 - RNA, 19 nt, Homo sapiens
  misc_RNA (1)...(19): siRNA sense strand
caucucaacucggauuacu

SEQ ID NO: 1469195 - RNA, 19 nt, Homo sapiens
  misc_RNA (1)...(19): siRNA sense strand
ccacgaucgucagccaaug

SEQ ID NO: 1469196 - RNA, 19 nt, Homo sapiens
  misc_RNA (1)...(19): siRNA sense strand
caauggaucgugggcaaug

SEQ ID NO: 1469197 - RNA, 19 nt, Homo sapiens
  misc_RNA (1)...(19): siRNA sense strand
ggugucaucuaugugaucu

SEQ ID NO: 1469198 - RNA, 19 nt, Homo sapiens
  misc_RNA (1)...(19): siRNA sense strand
guucuucugccaacucuuc

SEQ ID NO: 1469199 - RNA, 19 nt, Homo sapiens
  misc_RNA (1)...(19): siRNA sense strand
caauggacacgcaacugau

SEQ ID NO: 1469200 - RNA, 19 nt, Homo sapiens
  misc_RNA (1)...(19): siRNA sense strand
gaucaucuucagcauucug

SEQ ID NO: 1469201 - RNA, 19 nt, Homo sapiens
  misc_RNA (1)...(19): siRNA sense strand
gaaauguccaccacuguuu

SEQ ID NO: 1469202 - RNA, 19 nt, Homo sapiens
  misc_RNA (1)...(19): siRNA sense strand
uuacaucacuggaaucuuc

SEQ ID NO: 1469203 - RNA, 19 nt, Homo sapiens
  misc_RNA (1)...(19): siRNA sense strand
gcaauggacacgcaacuga

SEQ ID NO: 1469204 - RNA, 19 nt, Homo sapiens
  misc_RNA (1)...(19): siRNA sense strand
ggaaauguccaccacuguu

SEQ ID NO: 1469205 - RNA, 19 nt, Homo sapiens
  misc_RNA (1)...(19): siRNA sense strand
ucucagcggugucaucuau

SEQ ID NO: 1469206 - RNA, 19 nt, Homo sapiens
  misc_RNA (1)...(19): siRNA sense strand
acgaauggcugcagucugu

SEQ ID NO: 1469207 - RNA, 19 nt, Homo sapiens
  misc_RNA (1)...(19): siRNA sense strand
ccaccacuguuucucauca

SEQ ID NO: 1469208 - RNA, 19 nt, Homo sapiens
  misc_RNA (1)...(19): siRNA sense strand
ucgaucaucuucagcauuc

SEQ ID NO: 1469209 - RNA, 19 nt, Homo sapiens
  misc_RNA (1)...(19): siRNA sense strand
caucaucaccaaacgaaug

SEQ ID NO: 1469210 - RNA, 19 nt, Homo sapiens
  misc_RNA (1)...(19): siRNA sense strand
ggauuacuccuacgguuuc

SEQ ID NO: 1469211 - RNA, 19 nt, Homo sapiens
  misc_RNA (1)...(19): siRNA sense strand
uaugugaucuugcggaaac

SEQ ID NO: 1469212 - RNA, 19 nt, Homo sapiens
  misc_RNA (1)...(19): siRNA sense strand
ugucaucuaugugaucuug

SEQ ID NO: 1469213 - RNA, 19 nt, Homo sapiens
  misc_RNA (1)...(19): siRNA sense strand
ucagcggugucaucuaugu

SEQ ID NO: 1469214 - RNA, 19 nt, Homo sapiens
  misc_RNA (1)...(19): siRNA sense strand
gcuggucugugcgugauga

SEQ ID NO: 1469215 - RNA, 19 nt, Homo sapiens
  misc_RNA (1)...(19): siRNA sense strand
ccaccaugauccugucgau

SEQ ID NO: 1469216 - RNA, 19 nt, Homo sapiens
  misc_RNA (1)...(19): siRNA sense strand
ucaacucggauuacuccua

SEQ ID NO: 1469217 - RNA, 19 nt, Homo sapiens
  misc_RNA (1)...(19): siRNA sense strand
cggauuacuccuacgguuu

SEQ ID NO: 1469218 - RNA, 19 nt, Homo sapiens
  misc_RNA (1)...(19): siRNA sense strand
ucagcauucugucucuguu

SEQ ID NO: 1469219 - RNA, 19 nt, Homo sapiens
  misc_RNA (1)...(19): siRNA sense strand
caucucaacucggauuacu

SEQ ID NO: 1469220 - RNA, 19 nt, Homo sapiens
  misc_RNA (1)...(19): siRNA sense strand
ccacgaucgucagccaaug

SEQ ID NO: 1469221 - RNA, 19 nt, Homo sapiens
  misc_RNA (1)...(19): siRNA sense strand
caauggaucgugggcaaug

SEQ ID NO: 1469222 - RNA, 19 nt, Homo sapiens
  misc_RNA (1)...(19): siRNA sense strand
ggugucaucuaugugaucu

SEQ ID NO: 1469223 - RNA, 19 nt, Homo sapiens
  misc_RNA (1)...(19): siRNA sense strand
guucuucugccaacucuuc

SEQ ID NO: 1469224 - RNA, 19 nt, Homo sapiens
  misc_RNA (1)...(19): siRNA sense strand
caauggacacgcaacugau

SEQ ID NO: 1469225 - RNA, 19 nt, Homo sapiens
  misc_RNA (1)...(19): siRNA sense strand
gaucaucuucagcauucug

SEQ ID NO: 1469226 - RNA, 19 nt, Homo sapiens
  misc_RNA (1)...(19): siRNA sense strand
gaaauguccaccacuguuu

SEQ ID NO: 1469227 - RNA, 19 nt, Homo sapiens
  misc_RNA (1)...(19): siRNA sense strand
uuacaucacuggaaucuuc

SEQ ID NO: 1469228 - RNA, 19 nt, Homo sapiens
  misc_RNA (1)...(19): siRNA sense strand
gcaauggacacgcaacuga

SEQ ID NO: 1469229 - RNA, 19 nt, Homo sapiens
  misc_RNA (1)...(19): siRNA sense strand
ggaaauguccaccacuguu

SEQ ID NO: 1469230 - RNA, 19 nt, Homo sapiens
  misc_RNA (1)...(19): siRNA sense strand
ucucagcggugucaucuau

SEQ ID NO: 1469231 - RNA, 19 nt, Homo sapiens
  misc_RNA (1)...(19): siRNA sense strand
acgaauggcugcagucugu

SEQ ID NO: 1469232 - RNA, 19 nt, Homo sapiens
  misc_RNA (1)...(19): siRNA sense strand
ccaccacuguuucucauca

SEQ ID NO: 1469233 - RNA, 19 nt, Homo sapiens
  misc_RNA (1)...(19): siRNA sense strand
ucgaucaucuucagcauuc

SEQ ID NO: 1469234 - RNA, 19 nt, Homo sapiens
  misc_RNA (1)...(19): siRNA sense strand
caucaucaccaaacgaaug

SEQ ID NO: 1469235 - RNA, 19 nt, Homo sapiens
  misc_RNA (1)...(19): siRNA sense strand
ggauuacuccuacgguuuc

SEQ ID NO: 1469236 - RNA, 19 nt, Homo sapiens
  misc_RNA (1)...(19): siRNA sense strand
uaugugaucuugcggaaac

SEQ ID NO: 1469237 - RNA, 19 nt, Homo sapiens
  misc_RNA (1)...(19): siRNA sense strand
ugucaucuaugugaucuug

SEQ ID NO: 1469238 - RNA, 19 nt, Homo sapiens
  misc_RNA (1)...(19): siRNA sense strand
ucagcggugucaucuaugu

SEQ ID NO: 1469239 - RNA, 19 nt, Homo sapiens
  misc_RNA (1)...(19): siRNA sense strand
gcuggucugugcgugauga

SEQ ID NO: 1469240 - RNA, 19 nt, Homo sapiens
  misc_RNA (1)...(19): siRNA sense strand
ccaccaugauccugucgau

SEQ ID NO: 1469241 - RNA, 19 nt, Homo sapiens
  misc_RNA (1)...(19): siRNA sense strand
ucaacucggauuacuccua

SEQ ID NO: 1469242 - RNA, 19 nt, Homo sapiens
  misc_RNA (1)...(19): siRNA sense strand
cggauuacuccuacgguuu

SEQ ID NO: 1469243 - RNA, 19 nt, Homo sapiens
  misc_RNA (1)...(19): siRNA sense strand
ucagcauucugucucuguu

SEQ ID NO: 1469244 - RNA, 19 nt, Homo sapiens
  misc_RNA (1)...(19): siRNA sense strand
caucucaacucggauuacu

SEQ ID NO: 1469245 - RNA, 19 nt, Homo sapiens
  misc_RNA (1)...(19): siRNA sense strand
ccacgaucgucagccaaug

SEQ ID NO: 1469246 - RNA, 19 nt, Homo sapiens
  misc_RNA (1)...(19): siRNA sense strand
caauggaucgugggcaaug

SEQ ID NO: 1469247 - RNA, 19 nt, Homo sapiens
  misc_RNA (1)...(19): siRNA sense strand
ggugucaucuaugugaucu

SEQ ID NO: 1469248 - RNA, 19 nt, Homo sapiens
  misc_RNA (1)...(19): siRNA sense strand
guucuucugccaacucuuc

SEQ ID NO: 1469249 - RNA, 19 nt, Homo sapiens
  misc_RNA (1)...(19): siRNA sense strand
caauggacacgcaacugau

SEQ ID NO: 1469250 - RNA, 19 nt, Homo sapiens
  misc_RNA (1)...(19): siRNA sense strand
gaucaucuucagcauucug

SEQ ID NO: 1469251 - RNA, 19 nt, Homo sapiens
  misc_RNA (1)...(19): siRNA sense strand
gaaauguccaccacuguuu

SEQ ID NO: 1469252 - RNA, 19 nt, Homo sapiens
  misc_RNA (1)...(19): siRNA sense strand
uuacaucacuggaaucuuc

SEQ ID NO: 1469253 - RNA, 19 nt, Homo sapiens
  misc_RNA (1)...(19): siRNA sense strand
gcaauggacacgcaacuga

SEQ ID NO: 1469254 - RNA, 19 nt, Homo sapiens
  misc_RNA (1)...(19): siRNA sense strand
ggaaauguccaccacuguu

SEQ ID NO: 1469255 - RNA, 19 nt, Homo sapiens
  misc_RNA (1)...(19): siRNA sense strand
ucucagcggugucaucuau

SEQ ID NO: 1469256 - RNA, 19 nt, Homo sapiens
  misc_RNA (1)...(19): siRNA sense strand
acgaauggcugcagucugu

SEQ ID NO: 1469257 - RNA, 19 nt, Homo sapiens
  misc_RNA (1)...(19): siRNA sense strand
ccaccacuguuucucauca

SEQ ID NO: 1469258 - RNA, 19 nt, Homo sapiens
  misc_RNA (1)...(19): siRNA sense strand
ucgaucaucuucagcauuc

SEQ ID NO: 1469259 - RNA, 19 nt, Homo sapiens
  misc_RNA (1)...(19): siRNA sense strand
caucaucaccaaacgaaug

SEQ ID NO: 1469260 - RNA, 19 nt, Homo sapiens
  misc_RNA (1)...(19): siRNA sense strand
ggauuacuccuacgguuuc

SEQ ID NO: 1469261 - RNA, 19 nt, Homo sapiens
  misc_RNA (1)...(19): siRNA sense strand
uaugugaucuugcggaaac

SEQ ID NO: 1469262 - RNA, 19 nt, Homo sapiens
  misc_RNA (1)...(19): siRNA sense strand
ugucaucuaugugaucuug

SEQ ID NO: 1469263 - RNA, 19 nt, Homo sapiens
  misc_RNA (1)...(19): siRNA sense strand
ucagcggugucaucuaugu

SEQ ID NO: 1469264 - RNA, 19 nt, Homo sapiens
  misc_RNA (1)...(19): siRNA sense strand
gcuggucugugcgugauga

SEQ ID NO: 1469265 - RNA, 19 nt, Homo sapiens
  misc_RNA (1)...(19): siRNA sense strand
ccaccaugauccugucgau

SEQ ID NO: 1469266 - RNA, 19 nt, Homo sapiens
  misc_RNA (1)...(19): siRNA sense strand
ucaacucggauuacuccua

SEQ ID NO: 1469267 - RNA, 19 nt, Homo sapiens
  misc_RNA (1)...(19): siRNA sense strand
cggauuacuccuacgguuu

SEQ ID NO: 1469268 - RNA, 19 nt, Homo sapiens
  misc_RNA (1)...(19): siRNA sense strand
ucagcauucugucucuguu

SEQ ID NO: 1469269 - RNA, 19 nt, Homo sapiens
  misc_RNA (1)...(19): siRNA sense strand
caucucaacucggauuacu

SEQ ID NO: 1469270 - RNA, 19 nt, Homo sapiens
  misc_RNA (1)...(19): siRNA sense strand
ccacgaucgucagccaaug

SEQ ID NO: 1469271 - RNA, 19 nt, Homo sapiens
  misc_RNA (1)...(19): siRNA sense strand
caauggaucgugggcaaug

SEQ ID NO: 1469272 - RNA, 19 nt, Homo sapiens
  misc_RNA (1)...(19): siRNA sense strand
ggugucaucuaugugaucu

SEQ ID NO: 1469273 - RNA, 19 nt, Homo sapiens
  misc_RNA (1)...(19): siRNA sense strand
guucuucugccaacucuuc

SEQ ID NO: 1469274 - RNA, 19 nt, Homo sapiens
  misc_RNA (1)...(19): siRNA sense strand
caauggacacgcaacugau

SEQ ID NO: 1469275 - RNA, 19 nt, Homo sapiens
  misc_RNA (1)...(19): siRNA sense strand
gaucaucuucagcauucug

SEQ ID NO: 1469276 - RNA, 19 nt, Homo sapiens
  misc_RNA (1)...(19): siRNA sense strand
gaaauguccaccacuguuu

SEQ ID NO: 1469277 - RNA, 19 nt, Homo sapiens
  misc_RNA (1)...(19): siRNA sense strand
uuacaucacuggaaucuuc

SEQ ID NO: 1469278 - RNA, 19 nt, Homo sapiens
  misc_RNA (1)...(19): siRNA sense strand
gcaauggacacgcaacuga

SEQ ID NO: 1469279 - RNA, 19 nt, Homo sapiens
  misc_RNA (1)...(19): siRNA sense strand
ggaaauguccaccacuguu

SEQ ID NO: 1469280 - RNA, 19 nt, Homo sapiens
  misc_RNA (1)...(19): siRNA sense strand
ucucagcggugucaucuau

SEQ ID NO: 1469281 - RNA, 19 nt, Homo sapiens
  misc_RNA (1)...(19): siRNA sense strand
acgaauggcugcagucugu

SEQ ID NO: 1469282 - RNA, 19 nt, Homo sapiens
  misc_RNA (1)...(19): siRNA sense strand
ccaccacuguuucucauca

SEQ ID NO: 1469283 - RNA, 19 nt, Homo sapiens
  misc_RNA (1)...(19): siRNA sense strand
ucgaucaucuucagcauuc

SEQ ID NO: 1469284 - RNA, 19 nt, Homo sapiens
  misc_RNA (1)...(19): siRNA sense strand
caucaucaccaaacgaaug

SEQ ID NO: 1469285 - RNA, 19 nt, Homo sapiens
  misc_RNA (1)...(19): siRNA sense strand
ggauuacuccuacgguuuc

SEQ ID NO: 1469286 - RNA, 19 nt, Homo sapiens
  misc_RNA (1)...(19): siRNA sense strand
uaugugaucuugcggaaac

SEQ ID NO: 1469287 - RNA, 19 nt, Homo sapiens
  misc_RNA (1)...(19): siRNA sense strand
ugucaucuaugugaucuug

SEQ ID NO: 1469288 - RNA, 19 nt, Homo sapiens
  misc_RNA (1)...(19): siRNA sense strand
ucagcggugucaucuaugu

SEQ ID NO: 1469289 - RNA, 19 nt, Homo sapiens
  misc_RNA (1)...(19): siRNA sense strand
gcuggucugugcgugauga

SEQ ID NO: 1469290 - RNA, 19 nt, Homo sapiens
  misc_RNA (1)...(19): siRNA sense strand
ccaccaugauccugucgau

SEQ ID NO: 1469291 - RNA, 19 nt, Homo sapiens
  misc_RNA (1)...(19): siRNA sense strand
ucaacucggauuacuccua

SEQ ID NO: 1469292 - RNA, 19 nt, Homo sapiens
  misc_RNA (1)...(19): siRNA sense strand
cggauuacuccuacgguuu

SEQ ID NO: 1469293 - RNA, 19 nt, Homo sapiens
  misc_RNA (1)...(19): siRNA sense strand
ucagcauucugucucuguu

SEQ ID NO: 1469294 - RNA, 19 nt, Homo sapiens
  misc_RNA (1)...(19): siRNA sense strand
caucucaacucggauuacu

SEQ ID NO: 1469295 - RNA, 19 nt, Homo sapiens
  misc_RNA (1)...(19): siRNA sense strand
ccacgaucgucagccaaug

SEQ ID NO: 1469296 - RNA, 19 nt, Homo sapiens
  misc_RNA (1)...(19): siRNA sense strand
caauggaucgugggcaaug

SEQ ID NO: 1469297 - RNA, 19 nt, Homo sapiens
  misc_RNA (1)...(19): siRNA sense strand
ggugucaucuaugugaucu

SEQ ID NO: 1469298 - RNA, 19 nt, Homo sapiens
  misc_RNA (1)...(19): siRNA sense strand
guucuucugccaacucuuc

SEQ ID NO: 1469299 - RNA, 19 nt, Homo sapiens
  misc_RNA (1)...(19): siRNA sense strand
caauggacacgcaacugau

SEQ ID NO: 1469300 - RNA, 19 nt, Homo sapiens
  misc_RNA (1)...(19): siRNA sense strand
gaucaucuucagcauucug

SEQ ID NO: 1469301 - RNA, 19 nt, Homo sapiens
  misc_RNA (1)...(19): siRNA sense strand
gaaauguccaccacuguuu

SEQ ID NO: 1469302 - RNA, 19 nt, Homo sapiens
  misc_RNA (1)...(19): siRNA sense strand
uuacaucacuggaaucuuc

SEQ ID NO: 1469303 - RNA, 19 nt, Homo sapiens
  misc_RNA (1)...(19): siRNA sense strand
gcaauggacacgcaacuga

SEQ ID NO: 1469304 - RNA, 19 nt, Homo sapiens
  misc_RNA (1)...(19): siRNA sense strand
ggaaauguccaccacuguu

SEQ ID NO: 1469305 - RNA, 19 nt, Homo sapiens
  misc_RNA (1)...(19): siRNA sense strand
ucucagcggugucaucuau

SEQ ID NO: 1469306 - RNA, 19 nt, Homo sapiens
  misc_RNA (1)...(19): siRNA sense strand
acgaauggcugcagucugu

SEQ ID NO: 1469307 - RNA, 19 nt, Homo sapiens
  misc_RNA (1)...(19): siRNA sense strand
ccaccacuguuucucauca

SEQ ID NO: 1469308 - RNA, 19 nt, Homo sapiens
  misc_RNA (1)...(19): siRNA sense strand
ucgaucaucuucagcauuc

SEQ ID NO: 1469309 - RNA, 19 nt, Homo sapiens
  misc_RNA (1)...(19): siRNA sense strand
caucaucaccaaacgaaug

SEQ ID NO: 1469310 - RNA, 19 nt, Homo sapiens
  misc_RNA (1)...(19): siRNA sense strand
ggauuacuccuacgguuuc

SEQ ID NO: 1469311 - RNA, 19 nt, Homo sapiens
  misc_RNA (1)...(19): siRNA sense strand
uaugugaucuugcggaaac

SEQ ID NO: 1469312 - RNA, 19 nt, Homo sapiens
  misc_RNA (1)...(19): siRNA sense strand
ugucaucuaugugaucuug

SEQ ID NO: 1469313 - RNA, 19 nt, Homo sapiens
  misc_RNA (1)...(19): siRNA sense strand
ucagcggugucaucuaugu

SEQ ID NO: 1469314 - RNA, 19 nt, Homo sapiens
  misc_RNA (1)...(19): siRNA sense strand
gcuggucugugcgugauga

SEQ ID NO: 1469315 - RNA, 19 nt, Homo sapiens
  misc_RNA (1)...(19): siRNA sense strand
ccaccaugauccugucgau

SEQ ID NO: 1469316 - RNA, 19 nt, Homo sapiens
  misc_RNA (1)...(19): siRNA sense strand
ucaacucggauuacuccua

SEQ ID NO: 1469317 - RNA, 19 nt, Homo sapiens
  misc_RNA (1)...(19): siRNA sense strand
cggauuacuccuacgguuu

SEQ ID NO: 1469318 - RNA, 19 nt, Homo sapiens
  misc_RNA (1)...(19): siRNA sense strand
ucagcauucugucucuguu

SEQ ID NO: 1469319 - RNA, 19 nt, Homo sapiens
  misc_RNA (1)...(19): siRNA sense strand
caucucaacucggauuacu

SEQ ID NO: 1469320 - RNA, 19 nt, Homo sapiens
  misc_RNA (1)...(19): siRNA sense strand
ccacgaucgucagccaaug

SEQ ID NO: 1469321 - RNA, 19 nt, Homo sapiens
  misc_RNA (1)...(19): siRNA sense strand
caauggaucgugggcaaug

SEQ ID NO: 1469322 - RNA, 19 nt, Homo sapiens
  misc_RNA (1)...(19): siRNA sense strand
ggugucaucuaugugaucu

SEQ ID NO: 1469323 - RNA, 19 nt, Homo sapiens
  misc_RNA (1)...(19): siRNA sense strand
guucuucugccaacucuuc

SEQ ID NO: 1469324 - RNA, 19 nt, Homo sapiens
  misc_RNA (1)...(19): siRNA sense strand
caauggacacgcaacugau

SEQ ID NO: 1469325 - RNA, 19 nt, Homo sapiens
  misc_RNA (1)...(19): siRNA sense strand
gaucaucuucagcauucug

SEQ ID NO: 1469326 - RNA, 19 nt, Homo sapiens
  misc_RNA (1)...(19): siRNA sense strand
caucuuggcucucaccuuu

SEQ ID NO: 1469327 - RNA, 19 nt, Homo sapiens
  misc_RNA (1)...(19): siRNA sense strand
gagaaaggcucagcuugga

SEQ ID NO: 1469328 - RNA, 19 nt, Homo sapiens
  misc_RNA (1)...(19): siRNA sense strand
cgcaugaccuucugucuuu

SEQ ID NO: 1469329 - RNA, 19 nt, Homo sapiens
  misc_RNA (1)...(19): siRNA sense strand
ccaacaaacugaaggagau

SEQ ID NO: 1469330 - RNA, 19 nt, Homo sapiens
  misc_RNA (1)...(19): siRNA sense strand
ggaagaauuuggagucaac

SEQ ID NO: 1469331 - RNA, 19 nt, Homo sapiens
  misc_RNA (1)...(19): siRNA sense strand
cuacacaagugaauuauac

SEQ ID NO: 1469332 - RNA, 19 nt, Homo sapiens
  misc_RNA (1)...(19): siRNA sense strand
gcggguggcugucuucaau

SEQ ID NO: 1469333 - RNA, 19 nt, Homo sapiens
  misc_RNA (1)...(19): siRNA sense strand
gcaccgucaucuugaaugu

SEQ ID NO: 1469334 - RNA, 19 nt, Homo sapiens
  misc_RNA (1)...(19): siRNA sense strand
ccaaguacaccgcaaguga

SEQ ID NO: 1469335 - RNA, 19 nt, Homo sapiens
  misc_RNA (1)...(19): siRNA sense strand
gaaggaagagggagaaagg

SEQ ID NO: 1469336 - RNA, 19 nt, Homo sapiens
  misc_RNA (1)...(19): siRNA sense strand
aaucagcccuugccagaga

SEQ ID NO: 1469337 - RNA, 19 nt, Homo sapiens
  misc_RNA (1)...(19): siRNA sense strand
uggaggagcucaaacucaa

SEQ ID NO: 1469338 - RNA, 19 nt, Homo sapiens
  misc_RNA (1)...(19): siRNA sense strand
ccucuacacaagugaauua

SEQ ID NO: 1469339 - RNA, 19 nt, Homo sapiens
  misc_RNA (1)...(19): siRNA sense strand
cauggcagguauacugauu

SEQ ID NO: 1469340 - RNA, 19 nt, Homo sapiens
  misc_RNA (1)...(19): siRNA sense strand
gcaccaaggacuccauugu

SEQ ID NO: 1469341 - RNA, 19 nt, Homo sapiens
  misc_RNA (1)...(19): siRNA sense strand
cgacagcacucggguacug

SEQ ID NO: 1469342 - RNA, 19 nt, Homo sapiens
  misc_RNA (1)...(19): siRNA sense strand
cgaaggcccugaagauacu

SEQ ID NO: 1469343 - RNA, 19 nt, Homo sapiens
  misc_RNA (1)...(19): siRNA sense strand
caacauggccaaccacaac

SEQ ID NO: 1469344 - RNA, 19 nt, Homo sapiens
  misc_RNA (1)...(19): siRNA sense strand
guuccugcauguagccaua

SEQ ID NO: 1469345 - RNA, 19 nt, Homo sapiens
  misc_RNA (1)...(19): siRNA sense strand
accaaggacuccauuguga

SEQ ID NO: 1469346 - RNA, 19 nt, Homo sapiens
  misc_RNA (1)...(19): siRNA sense strand
gggcaaagaagccaaagca

SEQ ID NO: 1469347 - RNA, 19 nt, Homo sapiens
  misc_RNA (1)...(19): siRNA sense strand
gcacucggguacugcuaca

SEQ ID NO: 1469348 - RNA, 19 nt, Homo sapiens
  misc_RNA (1)...(19): siRNA sense strand
ggagauggcccagucuauc

SEQ ID NO: 1469349 - RNA, 19 nt, Homo sapiens
  misc_RNA (1)...(19): siRNA sense strand
uuuggcaucucaggcauua

SEQ ID NO: 1469350 - RNA, 19 nt, Homo sapiens
  misc_RNA (1)...(19): siRNA sense strand
ucagcugccucuuccucua

SEQ ID NO: 1469351 - RNA, 19 nt, Homo sapiens
  misc_RNA (1)...(19): siRNA sense strand
cuauggguguggaagaauu

SEQ ID NO: 1469352 - RNA, 19 nt, Homo sapiens
  misc_RNA (1)...(19): siRNA sense strand
caucaccauccucuccuua

SEQ ID NO: 1469353 - RNA, 19 nt, Homo sapiens
  misc_RNA (1)...(19): siRNA sense strand
ggugugcaacuccaacaaa

SEQ ID NO: 1469354 - RNA, 19 nt, Homo sapiens
  misc_RNA (1)...(19): siRNA sense strand
ccaaaugggaagccugaga

SEQ ID NO: 1469355 - RNA, 19 nt, Homo sapiens
  misc_RNA (1)...(19): siRNA sense strand
caucuugaauguggaaugg

SEQ ID NO: 1469356 - RNA, 19 nt, Homo sapiens
  misc_RNA (1)...(19): siRNA sense strand
ggcuauggguguggaagaa

SEQ ID NO: 1469357 - RNA, 19 nt, Homo sapiens
  misc_RNA (1)...(19): siRNA sense strand
caagaaggaagagggagaa

SEQ ID NO: 1469358 - RNA, 19 nt, Homo sapiens
  misc_RNA (1)...(19): siRNA sense strand
ggcccagucuaucuucaug

SEQ ID NO: 1469359 - RNA, 19 nt, Homo sapiens
  misc_RNA (1)...(19): siRNA sense strand
ggcguuggcugcaguuaac

SEQ ID NO: 1469360 - RNA, 19 nt, Homo sapiens
  misc_RNA (1)...(19): siRNA sense strand
cuacaccuuuggccaguuc

SEQ ID NO: 1469361 - RNA, 19 nt, Homo sapiens
  misc_RNA (1)...(19): siRNA sense strand
ugagcaccgucaucuugaa

SEQ ID NO: 1469362 - RNA, 19 nt, Homo sapiens
  misc_RNA (1)...(19): siRNA sense strand
ccugagcaccgucaucuug

SEQ ID NO: 1469363 - RNA, 19 nt, Homo sapiens
  misc_RNA (1)...(19): siRNA sense strand
caaggacuccauugugaca

SEQ ID NO: 1469364 - RNA, 19 nt, Homo sapiens
  misc_RNA (1)...(19): siRNA sense strand
ugccagagacuaucgaaga

SEQ ID NO: 1469365 - RNA, 19 nt, Homo sapiens
  misc_RNA (1)...(19): siRNA sense strand
guggaagaauuuggaguca

SEQ ID NO: 1469366 - RNA, 19 nt, Homo sapiens
  misc_RNA (1)...(19): siRNA sense strand
ucccuggccugguuugcua

SEQ ID NO: 1469367 - RNA, 19 nt, Homo sapiens
  misc_RNA (1)...(19): siRNA sense strand
caccgcaagugaccuguuc

SEQ ID NO: 1469368 - RNA, 19 nt, Homo sapiens
  misc_RNA (1)...(19): siRNA sense strand
gcaacuccaacaaacugaa

SEQ ID NO: 1469369 - RNA, 19 nt, Homo sapiens
  misc_RNA (1)...(19): siRNA sense strand
cagccaaguucaucaccau

SEQ ID NO: 1469370 - RNA, 19 nt, Homo sapiens
  misc_RNA (1)...(19): siRNA sense strand
ggguacugcuacaccuuug

SEQ ID NO: 1469371 - RNA, 19 nt, Homo sapiens
  misc_RNA (1)...(19): siRNA sense strand
aaacagguaugggcguaag

SEQ ID NO: 1469372 - RNA, 19 nt, Homo sapiens
  misc_RNA (1)...(19): siRNA sense strand
ccucgaaggcccugaagau

SEQ ID NO: 1469373 - RNA, 19 nt, Homo sapiens
  misc_RNA (1)...(19): siRNA sense strand
ucaccauccucuccuuaag

SEQ ID NO: 1469374 - RNA, 19 nt, Homo sapiens
  misc_RNA (1)...(19): siRNA sense strand
gagcaccgucaucuugaau

SEQ ID NO: 1469375 - RNA, 19 nt, Homo sapiens
  misc_RNA (1)...(19): siRNA sense strand
ggguggcugucuucaaugg

SEQ ID NO: 1469376 - RNA, 19 nt, Homo sapiens
  misc_RNA (1)...(19): siRNA sense strand
gugcaacuccaacaaacug

SEQ ID NO: 1469377 - RNA, 19 nt, Homo sapiens
  misc_RNA (1)...(19): siRNA sense strand
aauaucaucuacgggauca

SEQ ID NO: 1469378 - RNA, 19 nt, Homo sapiens
  misc_RNA (1)...(19): siRNA sense strand
ucaauggcaagaaggaaga

SEQ ID NO: 1469379 - RNA, 19 nt, Homo sapiens
  misc_RNA (1)...(19): siRNA sense strand
ugguuggucuugucuggaa

SEQ ID NO: 1469380 - RNA, 19 nt, Homo sapiens
  misc_RNA (1)...(19): siRNA sense strand
ggucuuccgcuuccugugu

SEQ ID NO: 1469381 - RNA, 19 nt, Homo sapiens
  misc_RNA (1)...(19): siRNA sense strand
caacaaacugaaggagaug

SEQ ID NO: 1469382 - RNA, 19 nt, Homo sapiens
  misc_RNA (1)...(19): siRNA sense strand
caccaaggacuccauugug

SEQ ID NO: 1469383 - RNA, 19 nt, Homo sapiens
  misc_RNA (1)...(19): siRNA sense strand
gcaggagccagagguggaa

SEQ ID NO: 1469384 - RNA, 19 nt, Homo sapiens
  misc_RNA (1)...(19): siRNA sense strand
gccagagacuaucgaagac

SEQ ID NO: 1469385 - RNA, 19 nt, Homo sapiens
  misc_RNA (1)...(19): siRNA sense strand
gaccgugaggacaguauug

SEQ ID NO: 1469386 - RNA, 19 nt, Homo sapiens
  misc_RNA (1)...(19): siRNA sense strand
augccagccugcccaauga

SEQ ID NO: 1469387 - RNA, 19 nt, Homo sapiens
  misc_RNA (1)...(19): siRNA sense strand
ucgaagaccuggaaaacug

SEQ ID NO: 1469388 - RNA, 19 nt, Homo sapiens
  misc_RNA (1)...(19): siRNA sense strand
gacuaucgaagaccuggaa

SEQ ID NO: 1469389 - RNA, 19 nt, Homo sapiens
  misc_RNA (1)...(19): siRNA sense strand
ugccugagacccugaauca

SEQ ID NO: 1469390 - RNA, 19 nt, Homo sapiens
  misc_RNA (1)...(19): siRNA sense strand
gucaucaggcaaacaggua

SEQ ID NO: 1469391 - RNA, 19 nt, Homo sapiens
  misc_RNA (1)...(19): siRNA sense strand
gcaugaccuucugucuuuc

SEQ ID NO: 1469392 - RNA, 19 nt, Homo sapiens
  misc_RNA (1)...(19): siRNA sense strand
gauuggagggcucgugcuu

SEQ ID NO: 1469393 - RNA, 19 nt, Homo sapiens
  misc_RNA (1)...(19): siRNA sense strand
cagguaugggcguaaguaa

SEQ ID NO: 1469394 - RNA, 19 nt, Homo sapiens
  misc_RNA (1)...(19): siRNA sense strand
ccgcaugaccuucugucuu

SEQ ID NO: 1469395 - RNA, 19 nt, Homo sapiens
  misc_RNA (1)...(19): siRNA sense strand
acagguaugggcguaagua

SEQ ID NO: 1469396 - RNA, 19 nt, Homo sapiens
  misc_RNA (1)...(19): siRNA sense strand
gagucaaccucuacauccu

SEQ ID NO: 1469397 - RNA, 19 nt, Homo sapiens
  misc_RNA (1)...(19): siRNA sense strand
cuucauggcagguauacug

SEQ ID NO: 1469398 - RNA, 19 nt, Homo sapiens
  misc_RNA (1)...(19): siRNA sense strand
ugacagagugggacuuggu

SEQ ID NO: 1469399 - RNA, 19 nt, Homo sapiens
  misc_RNA (1)...(19): siRNA sense strand
caaacagguaugggcguaa

SEQ ID NO: 1469400 - RNA, 19 nt, Homo sapiens
  misc_RNA (1)...(19): siRNA sense strand
ucuuggcucucaccuuugu

SEQ ID NO: 1469401 - RNA, 19 nt, Homo sapiens
  misc_RNA (1)...(19): siRNA sense strand
gcacuggccuuaugccuuu

SEQ ID NO: 1469402 - RNA, 19 nt, Homo sapiens
  misc_RNA (1)...(19): siRNA sense strand
ggagauauauugugccuau

SEQ ID NO: 1469403 - RNA, 19 nt, Homo sapiens
  misc_RNA (1)...(19): siRNA sense strand
gaagagaugaagcagcuaa

SEQ ID NO: 1469404 - RNA, 19 nt, Homo sapiens
  misc_RNA (1)...(19): siRNA sense strand
ggagguaacugcuuauagc

SEQ ID NO: 1469405 - RNA, 19 nt, Homo sapiens
  misc_RNA (1)...(19): siRNA sense strand
gaagaugccucugauuggu

SEQ ID NO: 1469406 - RNA, 19 nt, Homo sapiens
  misc_RNA (1)...(19): siRNA sense strand
guguuugacuucaccuuua

SEQ ID NO: 1469407 - RNA, 19 nt, Homo sapiens
  misc_RNA (1)...(19): siRNA sense strand
gcagauugaugacauacuc

SEQ ID NO: 1469408 - RNA, 19 nt, Homo sapiens
  misc_RNA (1)...(19): siRNA sense strand
gcacguggccuggagguaa

SEQ ID NO: 1469409 - RNA, 19 nt, Homo sapiens
  misc_RNA (1)...(19): siRNA sense strand
uggaguaucuggaccugua

SEQ ID NO: 1469410 - RNA, 19 nt, Homo sapiens
  misc_RNA (1)...(19): siRNA sense strand
ggaaugccacccauacuug

SEQ ID NO: 1469411 - RNA, 19 nt, Homo sapiens
  misc_RNA (1)...(19): siRNA sense strand
aaaagcagcuguuaaguau

SEQ ID NO: 1469412 - RNA, 19 nt, Homo sapiens
  misc_RNA (1)...(19): siRNA sense strand
gagaugaagcagcuaaaug

SEQ ID NO: 1469413 - RNA, 19 nt, Homo sapiens
  misc_RNA (1)...(19): siRNA sense strand
gccuggagguaacugcuua

SEQ ID NO: 1469414 - RNA, 19 nt, Homo sapiens
  misc_RNA (1)...(19): siRNA sense strand
gaaugcugaugggacuaua

SEQ ID NO: 1469415 - RNA, 19 nt, Homo sapiens
  misc_RNA (1)...(19): siRNA sense strand
uauauugugccuaugcuua

SEQ ID NO: 1469416 - RNA, 19 nt, Homo sapiens
  misc_RNA (1)...(19): siRNA sense strand
gcuaaaugcccugaacaaa

SEQ ID NO: 1469417 - RNA, 19 nt, Homo sapiens
  misc_RNA (1)...(19): siRNA sense strand
uggaggcacugguggcuaa

SEQ ID NO: 1469418 - RNA, 19 nt, Homo sapiens
  misc_RNA (1)...(19): siRNA sense strand
gcagcuaaaugcccugaac

SEQ ID NO: 1469419 - RNA, 19 nt, Homo sapiens
  misc_RNA (1)...(19): siRNA sense strand
uaaaagcagcuguuaagua

SEQ ID NO: 1469420 - RNA, 19 nt, Homo sapiens
  misc_RNA (1)...(19): siRNA sense strand
ggcauuggcugaaaaguau

SEQ ID NO: 1469421 - RNA, 19 nt, Homo sapiens
  misc_RNA (1)...(19): siRNA sense strand
aagcagcuguuaaguaugc

SEQ ID NO: 1469422 - RNA, 19 nt, Homo sapiens
  misc_RNA (1)...(19): siRNA sense strand
cugaugcacuggccuuaug

SEQ ID NO: 1469423 - RNA, 19 nt, Homo sapiens
  misc_RNA (1)...(19): siRNA sense strand
ugauugugcugcuaucuac

SEQ ID NO: 1469424 - RNA, 19 nt, Homo sapiens
  misc_RNA (1)...(19): siRNA sense strand
uaucacuccuucucgaauc

SEQ ID NO: 1469425 - RNA, 19 nt, Homo sapiens
  misc_RNA (1)...(19): siRNA sense strand
gaggagcuguuugugacau

SEQ ID NO: 1469426 - RNA, 19 nt, Homo sapiens
  misc_RNA (1)...(19): siRNA sense strand
gauauauugugccuaugcu

SEQ ID NO: 1469427 - RNA, 19 nt, Homo sapiens
  misc_RNA (1)...(19): siRNA sense strand
ucucgaauccuucagaaca

SEQ ID NO: 1469428 - RNA, 19 nt, Homo sapiens
  misc_RNA (1)...(19): siRNA sense strand
cuaaaugcccugaacaaaa

SEQ ID NO: 1469429 - RNA, 19 nt, Homo sapiens
  misc_RNA (1)...(19): siRNA sense strand
cuucaacagucggcagauu

SEQ ID NO: 1469430 - RNA, 19 nt, Homo sapiens
  misc_RNA (1)...(19): siRNA sense strand
ccuuugggcuccucugauc

SEQ ID NO: 1469431 - RNA, 19 nt, Homo sapiens
  misc_RNA (1)...(19): siRNA sense strand
gacaaccccuuccccaaga

SEQ ID NO: 1469432 - RNA, 19 nt, Homo sapiens
  misc_RNA (1)...(19): siRNA sense strand
gagauauauugugccuaug

SEQ ID NO: 1469433 - RNA, 19 nt, Homo sapiens
  misc_RNA (1)...(19): siRNA sense strand
gguaaaagcagcuguuaag

SEQ ID NO: 1469434 - RNA, 19 nt, Homo sapiens
  misc_RNA (1)...(19): siRNA sense strand
acagucggcagauugauga

SEQ ID NO: 1469435 - RNA, 19 nt, Homo sapiens
  misc_RNA (1)...(19): siRNA sense strand
cugaugggacuauaugcua

SEQ ID NO: 1469436 - RNA, 19 nt, Homo sapiens
  misc_RNA (1)...(19): siRNA sense strand
ucggcagauugaugacaua

SEQ ID NO: 1469437 - RNA, 19 nt, Homo sapiens
  misc_RNA (1)...(19): siRNA sense strand
gcuacgacuccacccacua

SEQ ID NO: 1469438 - RNA, 19 nt, Homo sapiens
  misc_RNA (1)...(19): siRNA sense strand
uugaugacauacucagugu

SEQ ID NO: 1469439 - RNA, 19 nt, Homo sapiens
  misc_RNA (1)...(19): siRNA sense strand
cgacuccacccacuacaag

SEQ ID NO: 1469440 - RNA, 19 nt, Homo sapiens
  misc_RNA (1)...(19): siRNA sense strand
gcccagaagagaugaagca

SEQ ID NO: 1469441 - RNA, 19 nt, Homo sapiens
  misc_RNA (1)...(19): siRNA sense strand
guccuggcauuggcugaaa

SEQ ID NO: 1469442 - RNA, 19 nt, Homo sapiens
  misc_RNA (1)...(19): siRNA sense strand
agaagaugccucugauugg

SEQ ID NO: 1469443 - RNA, 19 nt, Homo sapiens
  misc_RNA (1)...(19): siRNA sense strand
uggaaugccacccauacuu

SEQ ID NO: 1469444 - RNA, 19 nt, Homo sapiens
  misc_RNA (1)...(19): siRNA sense strand
cgggaggagcuguuuguga

SEQ ID NO: 1469445 - RNA, 19 nt, Homo sapiens
  misc_RNA (1)...(19): siRNA sense strand
ggucuggguaccuggaaga

SEQ ID NO: 1469446 - RNA, 19 nt, Homo sapiens
  misc_RNA (1)...(19): siRNA sense strand
gcuaccgccacauugauug

SEQ ID NO: 1469447 - RNA, 19 nt, Homo sapiens
  misc_RNA (1)...(19): siRNA sense strand
agaugaagcagcuaaaugc

SEQ ID NO: 1469448 - RNA, 19 nt, Homo sapiens
  misc_RNA (1)...(19): siRNA sense strand
gcacuggccuuaugccuuu

SEQ ID NO: 1469449 - RNA, 19 nt, Homo sapiens
  misc_RNA (1)...(19): siRNA sense strand
ggagauauauugugccuau

SEQ ID NO: 1469450 - RNA, 19 nt, Homo sapiens
  misc_RNA (1)...(19): siRNA sense strand
gaagagaugaagcagcuaa

SEQ ID NO: 1469451 - RNA, 19 nt, Homo sapiens
  misc_RNA (1)...(19): siRNA sense strand
ggagguaacugcuuauagc

SEQ ID NO: 1469452 - RNA, 19 nt, Homo sapiens
  misc_RNA (1)...(19): siRNA sense strand
gaagaugccucugauuggu

SEQ ID NO: 1469453 - RNA, 19 nt, Homo sapiens
  misc_RNA (1)...(19): siRNA sense strand
guguuugacuucaccuuua

SEQ ID NO: 1469454 - RNA, 19 nt, Homo sapiens
  misc_RNA (1)...(19): siRNA sense strand
gcagauugaugacauacuc

SEQ ID NO: 1469455 - RNA, 19 nt, Homo sapiens
  misc_RNA (1)...(19): siRNA sense strand
gcacguggccuggagguaa

SEQ ID NO: 1469456 - RNA, 19 nt, Homo sapiens
  misc_RNA (1)...(19): siRNA sense strand
uggaguaucuggaccugua

SEQ ID NO: 1469457 - RNA, 19 nt, Homo sapiens
  misc_RNA (1)...(19): siRNA sense strand
ggaaugccacccauacuug

SEQ ID NO: 1469458 - RNA, 19 nt, Homo sapiens
  misc_RNA (1)...(19): siRNA sense strand
aaaagcagcuguuaaguau

SEQ ID NO: 1469459 - RNA, 19 nt, Homo sapiens
  misc_RNA (1)...(19): siRNA sense strand
gagaugaagcagcuaaaug

SEQ ID NO: 1469460 - RNA, 19 nt, Homo sapiens
  misc_RNA (1)...(19): siRNA sense strand
gccuggagguaacugcuua

SEQ ID NO: 1469461 - RNA, 19 nt, Homo sapiens
  misc_RNA (1)...(19): siRNA sense strand
gaaugcugaugggacuaua

SEQ ID NO: 1469462 - RNA, 19 nt, Homo sapiens
  misc_RNA (1)...(19): siRNA sense strand
uauauugugccuaugcuua

SEQ ID NO: 1469463 - RNA, 19 nt, Homo sapiens
  misc_RNA (1)...(19): siRNA sense strand
gcuaaaugcccugaacaaa

SEQ ID NO: 1469464 - RNA, 19 nt, Homo sapiens
  misc_RNA (1)...(19): siRNA sense strand
uggaggcacugguggcuaa

SEQ ID NO: 1469465 - RNA, 19 nt, Homo sapiens
  misc_RNA (1)...(19): siRNA sense strand
gcagcuaaaugcccugaac

SEQ ID NO: 1469466 - RNA, 19 nt, Homo sapiens
  misc_RNA (1)...(19): siRNA sense strand
uaaaagcagcuguuaagua

SEQ ID NO: 1469467 - RNA, 19 nt, Homo sapiens
  misc_RNA (1)...(19): siRNA sense strand
ggcauuggcugaaaaguau

SEQ ID NO: 1469468 - RNA, 19 nt, Homo sapiens
  misc_RNA (1)...(19): siRNA sense strand
aagcagcuguuaaguaugc

SEQ ID NO: 1469469 - RNA, 19 nt, Homo sapiens
  misc_RNA (1)...(19): siRNA sense strand
cugaugcacuggccuuaug

SEQ ID NO: 1469470 - RNA, 19 nt, Homo sapiens
  misc_RNA (1)...(19): siRNA sense strand
ugauugugcugcuaucuac

SEQ ID NO: 1469471 - RNA, 19 nt, Homo sapiens
  misc_RNA (1)...(19): siRNA sense strand
uaucacuccuucucgaauc

SEQ ID NO: 1469472 - RNA, 19 nt, Homo sapiens
  misc_RNA (1)...(19): siRNA sense strand
gaggagcuguuugugacau

SEQ ID NO: 1469473 - RNA, 19 nt, Homo sapiens
  misc_RNA (1)...(19): siRNA sense strand
gauauauugugccuaugcu

SEQ ID NO: 1469474 - RNA, 19 nt, Homo sapiens
  misc_RNA (1)...(19): siRNA sense strand
ucucgaauccuucagaaca

SEQ ID NO: 1469475 - RNA, 19 nt, Homo sapiens
  misc_RNA (1)...(19): siRNA sense strand
cuaaaugcccugaacaaaa

SEQ ID NO: 1469476 - RNA, 19 nt, Homo sapiens
  misc_RNA (1)...(19): siRNA sense strand
cuucaacagucggcagauu

SEQ ID NO: 1469477 - RNA, 19 nt, Homo sapiens
  misc_RNA (1)...(19): siRNA sense strand
ccuuugggcuccucugauc

SEQ ID NO: 1469478 - RNA, 19 nt, Homo sapiens
  misc_RNA (1)...(19): siRNA sense strand
gacaaccccuuccccaaga

SEQ ID NO: 1469479 - RNA, 19 nt, Homo sapiens
  misc_RNA (1)...(19): siRNA sense strand
gagauauauugugccuaug

SEQ ID NO: 1469480 - RNA, 19 nt, Homo sapiens
  misc_RNA (1)...(19): siRNA sense strand
gguaaaagcagcuguuaag

SEQ ID NO: 1469481 - RNA, 19 nt, Homo sapiens
  misc_RNA (1)...(19): siRNA sense strand
acagucggcagauugauga

SEQ ID NO: 1469482 - RNA, 19 nt, Homo sapiens
  misc_RNA (1)...(19): siRNA sense strand
cugaugggacuauaugcua

SEQ ID NO: 1469483 - RNA, 19 nt, Homo sapiens
  misc_RNA (1)...(19): siRNA sense strand
ucggcagauugaugacaua

SEQ ID NO: 1469484 - RNA, 19 nt, Homo sapiens
  misc_RNA (1)...(19): siRNA sense strand
gcuacgacuccacccacua

SEQ ID NO: 1469485 - RNA, 19 nt, Homo sapiens
  misc_RNA (1)...(19): siRNA sense strand
uugaugacauacucagugu

SEQ ID NO: 1469486 - RNA, 19 nt, Homo sapiens
  misc_RNA (1)...(19): siRNA sense strand
cgacuccacccacuacaag

SEQ ID NO: 1469487 - RNA, 19 nt, Homo sapiens
  misc_RNA (1)...(19): siRNA sense strand
gcccagaagagaugaagca

SEQ ID NO: 1469488 - RNA, 19 nt, Homo sapiens
  misc_RNA (1)...(19): siRNA sense strand
guccuggcauuggcugaaa

SEQ ID NO: 1469489 - RNA, 19 nt, Homo sapiens
  misc_RNA (1)...(19): siRNA sense strand
agaagaugccucugauugg

SEQ ID NO: 1469490 - RNA, 19 nt, Homo sapiens
  misc_RNA (1)...(19): siRNA sense strand
uggaaugccacccauacuu

SEQ ID NO: 1469491 - RNA, 19 nt, Homo sapiens
  misc_RNA (1)...(19): siRNA sense strand
cgggaggagcuguuuguga

SEQ ID NO: 1469492 - RNA, 19 nt, Homo sapiens
  misc_RNA (1)...(19): siRNA sense strand
ggucuggguaccuggaaga

SEQ ID NO: 1469493 - RNA, 19 nt, Homo sapiens
  misc_RNA (1)...(19): siRNA sense strand
gcuaccgccacauugauug

SEQ ID NO: 1469494 - RNA, 19 nt, Homo sapiens
  misc_RNA (1)...(19): siRNA sense strand
agaugaagcagcuaaaugc

SEQ ID NO: 1469495 - RNA, 19 nt, Homo sapiens
  misc_RNA (1)...(19): siRNA sense strand
caaaguggauggcauauac

SEQ ID NO: 1469496 - RNA, 19 nt, Homo sapiens
  misc_RNA (1)...(19): siRNA sense strand
gugaugaccugguuccuuu

SEQ ID NO: 1469497 - RNA, 19 nt, Homo sapiens
  misc_RNA (1)...(19): siRNA sense strand
gauacaaacucacccuguu

SEQ ID NO: 1469498 - RNA, 19 nt, Homo sapiens
  misc_RNA (1)...(19): siRNA sense strand
ccaagccacugucaaauuc

SEQ ID NO: 1469499 - RNA, 19 nt, Homo sapiens
  misc_RNA (1)...(19): siRNA sense strand
caaccaagccacugucaaa

SEQ ID NO: 1469500 - RNA, 19 nt, Homo sapiens
  misc_RNA (1)...(19): siRNA sense strand
uaaaggagaaggaguuuga

SEQ ID NO: 1469501 - RNA, 19 nt, Homo sapiens
  misc_RNA (1)...(19): siRNA sense strand
gggcugagaccaucaaguu

SEQ ID NO: 1469502 - RNA, 19 nt, Homo sapiens
  misc_RNA (1)...(19): siRNA sense strand
ccacaguuaucgacaugaa

SEQ ID NO: 1469503 - RNA, 19 nt, Homo sapiens
  misc_RNA (1)...(19): siRNA sense strand
gacaugaaguggagauaca

SEQ ID NO: 1469504 - RNA, 19 nt, Homo sapiens
  misc_RNA (1)...(19): siRNA sense strand
ugacaaaguggauggcaua

SEQ ID NO: 1469505 - RNA, 19 nt, Homo sapiens
  misc_RNA (1)...(19): siRNA sense strand
gcacagcaacgugagaauu

SEQ ID NO: 1469506 - RNA, 19 nt, Homo sapiens
  misc_RNA (1)...(19): siRNA sense strand
gcauauaccuacucuaccu

SEQ ID NO: 1469507 - RNA, 19 nt, Homo sapiens
  misc_RNA (1)...(19): siRNA sense strand
gaccacaguuaucgacaug

SEQ ID NO: 1469508 - RNA, 19 nt, Homo sapiens
  misc_RNA (1)...(19): siRNA sense strand
ugugguaucucucuccaaa

SEQ ID NO: 1469509 - RNA, 19 nt, Homo sapiens
  misc_RNA (1)...(19): siRNA sense strand
gaacugaggacacuuuuau

SEQ ID NO: 1469510 - RNA, 19 nt, Homo sapiens
  misc_RNA (1)...(19): siRNA sense strand
aagcccagauugcacauuu

SEQ ID NO: 1469511 - RNA, 19 nt, Homo sapiens
  misc_RNA (1)...(19): siRNA sense strand
ggagaaggaguuugagcuu

SEQ ID NO: 1469512 - RNA, 19 nt, Homo sapiens
  misc_RNA (1)...(19): siRNA sense strand
agaaggaguuugagcuugu

SEQ ID NO: 1469513 - RNA, 19 nt, Homo sapiens
  misc_RNA (1)...(19): siRNA sense strand
ugauucagguagccaauau

SEQ ID NO: 1469514 - RNA, 19 nt, Homo sapiens
  misc_RNA (1)...(19): siRNA sense strand
ggaccacaguuaucgacau

SEQ ID NO: 1469515 - RNA, 19 nt, Homo sapiens
  misc_RNA (1)...(19): siRNA sense strand
cgugagaauugacaaagug

SEQ ID NO: 1469516 - RNA, 19 nt, Homo sapiens
  misc_RNA (1)...(19): siRNA sense strand
aaagagaacugaggacacu

SEQ ID NO: 1469517 - RNA, 19 nt, Homo sapiens
  misc_RNA (1)...(19): siRNA sense strand
gaaggaguuugagcuugug

SEQ ID NO: 1469518 - RNA, 19 nt, Homo sapiens
  misc_RNA (1)...(19): siRNA sense strand
gaaccuuccuggccaaaau

SEQ ID NO: 1469519 - RNA, 19 nt, Homo sapiens
  misc_RNA (1)...(19): siRNA sense strand
cuacugggguuuugaguuu

SEQ ID NO: 1469520 - RNA, 19 nt, Homo sapiens
  misc_RNA (1)...(19): siRNA sense strand
gagccgaacaucuuauauc

SEQ ID NO: 1469521 - RNA, 19 nt, Homo sapiens
  misc_RNA (1)...(19): siRNA sense strand
caacgugagaauugacaaa

SEQ ID NO: 1469522 - RNA, 19 nt, Homo sapiens
  misc_RNA (1)...(19): siRNA sense strand
cgaccuugauugagaucuu

SEQ ID NO: 1469523 - RNA, 19 nt, Homo sapiens
  misc_RNA (1)...(19): siRNA sense strand
gccagagccgaacaucuua

SEQ ID NO: 1469524 - RNA, 19 nt, Homo sapiens
  misc_RNA (1)...(19): siRNA sense strand
gcugagaccaucaaguuca

SEQ ID NO: 1469525 - RNA, 19 nt, Homo sapiens
  misc_RNA (1)...(19): siRNA sense strand
ucagucaguuugaacagau

SEQ ID NO: 1469526 - RNA, 19 nt, Homo sapiens
  misc_RNA (1)...(19): siRNA sense strand
cagagccgaacaucuuaua

SEQ ID NO: 1469527 - RNA, 19 nt, Homo sapiens
  misc_RNA (1)...(19): siRNA sense strand
ccagacaaccauuggcuau

SEQ ID NO: 1469528 - RNA, 19 nt, Homo sapiens
  misc_RNA (1)...(19): siRNA sense strand
aacagcaacucgaggagaa

SEQ ID NO: 1469529 - RNA, 19 nt, Homo sapiens
  misc_RNA (1)...(19): siRNA sense strand
ccuguugguugcucaguug

SEQ ID NO: 1469530 - RNA, 19 nt, Homo sapiens
  misc_RNA (1)...(19): siRNA sense strand
gaucagagggaaagagaac

SEQ ID NO: 1469531 - RNA, 19 nt, Homo sapiens
  misc_RNA (1)...(19): siRNA sense strand
gauggcauauaccuacucu

SEQ ID NO: 1469532 - RNA, 19 nt, Homo sapiens
  misc_RNA (1)...(19): siRNA sense strand
caaaaucgccagacccaaa

SEQ ID NO: 1469533 - RNA, 19 nt, Homo sapiens
  misc_RNA (1)...(19): siRNA sense strand
ucacgaccuugauugagau

SEQ ID NO: 1469534 - RNA, 19 nt, Homo sapiens
  misc_RNA (1)...(19): siRNA sense strand
gaaaucuacugggguuuug

SEQ ID NO: 1469535 - RNA, 19 nt, Homo sapiens
  misc_RNA (1)...(19): siRNA sense strand
gagaauugacaaaguggau

SEQ ID NO: 1469536 - RNA, 19 nt, Homo sapiens
  misc_RNA (1)...(19): siRNA sense strand
cacagcaacgugagaauug

SEQ ID NO: 1469537 - RNA, 19 nt, Homo sapiens
  misc_RNA (1)...(19): siRNA sense strand
gaaguggagauacaaacuc

SEQ ID NO: 1469538 - RNA, 19 nt, Homo sapiens
  misc_RNA (1)...(19): siRNA sense strand
ucaugaaaguggacucucu

SEQ ID NO: 1469539 - RNA, 19 nt, Homo sapiens
  misc_RNA (1)...(19): siRNA sense strand
gaccuugauugagaucuuc

SEQ ID NO: 1469540 - RNA, 19 nt, Homo sapiens
  misc_RNA (1)...(19): siRNA sense strand
gaggacacuuuuauuacaa

SEQ ID NO: 1469541 - RNA, 19 nt, Homo sapiens
  misc_RNA (1)...(19): siRNA sense strand
agagaacugaggacacuuu

SEQ ID NO: 1469542 - RNA, 19 nt, Homo sapiens
  misc_RNA (1)...(19): siRNA sense strand
acagcaacgugagaauuga

SEQ ID NO: 1469543 - RNA, 19 nt, Homo sapiens
  misc_RNA (1)...(19): siRNA sense strand
aaguggagauacaaacuca

SEQ ID NO: 1469544 - RNA, 19 nt, Homo sapiens
  misc_RNA (1)...(19): siRNA sense strand
ugccagagccgaacaucuu

SEQ ID NO: 1469545 - RNA, 19 nt, Homo sapiens
  misc_RNA (1)...(19): siRNA sense strand
ucuaccaugugcuggauga

SEQ ID NO: 1469546 - RNA, 19 nt, Homo sapiens
  misc_RNA (1)...(19): siRNA sense strand
agacccacgucaccaagga

SEQ ID NO: 1469547 - RNA, 19 nt, Homo sapiens
  misc_RNA (1)...(19): siRNA sense strand
acaaaguggauggcauaua

SEQ ID NO: 1469548 - RNA, 19 nt, Homo sapiens
  misc_RNA (1)...(19): siRNA sense strand
gugcagucaucaccaagca

SEQ ID NO: 1469549 - RNA, 19 nt, Homo sapiens
  misc_RNA (1)...(19): siRNA sense strand
guggacuccuccucugaga

SEQ ID NO: 1469550 - RNA, 19 nt, Homo sapiens
  misc_RNA (1)...(19): siRNA sense strand
gagagccccuuccucauuc

SEQ ID NO: 1469551 - RNA, 19 nt, Homo sapiens
  misc_RNA (1)...(19): siRNA sense strand
ggaaaucuacugggguuuu

SEQ ID NO: 1469552 - RNA, 19 nt, Homo sapiens
  misc_RNA (1)...(19): siRNA sense strand
ggaaucccagacaaccauu

SEQ ID NO: 1469553 - RNA, 19 nt, Homo sapiens
  misc_RNA (1)...(19): siRNA sense strand
gggcacagcaacgugagaa

SEQ ID NO: 1469554 - RNA, 19 nt, Homo sapiens
  misc_RNA (1)...(19): siRNA sense strand
ccuguucgcugccacuuuu

SEQ ID NO: 1469555 - RNA, 19 nt, Homo sapiens
  misc_RNA (1)...(19): siRNA sense strand
uggcauauaccuacucuac

SEQ ID NO: 1469556 - RNA, 19 nt, Homo sapiens
  misc_RNA (1)...(19): siRNA sense strand
caugaaguggagauacaaa

SEQ ID NO: 1469557 - RNA, 19 nt, Homo sapiens
  misc_RNA (1)...(19): siRNA sense strand
ugaggacacuuuuauuaca

SEQ ID NO: 1469558 - RNA, 19 nt, Homo sapiens
  misc_RNA (1)...(19): siRNA sense strand
gugauucagguagccaaua

SEQ ID NO: 1469559 - RNA, 19 nt, Homo sapiens
  misc_RNA (1)...(19): siRNA sense strand
gcccagauugcacauuuua

SEQ ID NO: 1469560 - RNA, 19 nt, Homo sapiens
  misc_RNA (1)...(19): siRNA sense strand
cagucaguuugaacagauu

SEQ ID NO: 1469561 - RNA, 19 nt, Homo sapiens
  misc_RNA (1)...(19): siRNA sense strand
cccaaaaccuaaaggagaa

SEQ ID NO: 1469562 - RNA, 19 nt, Homo sapiens
  misc_RNA (1)...(19): siRNA sense strand
gaaucccagacaaccauug

SEQ ID NO: 1469563 - RNA, 19 nt, Homo sapiens
  misc_RNA (1)...(19): siRNA sense strand
ccuaaaggagaaggaguuu

SEQ ID NO: 1469564 - RNA, 19 nt, Homo sapiens
  misc_RNA (1)...(19): siRNA sense strand
caaaguggauggcauauac

SEQ ID NO: 1469565 - RNA, 19 nt, Homo sapiens
  misc_RNA (1)...(19): siRNA sense strand
gugaugaccugguuccuuu

SEQ ID NO: 1469566 - RNA, 19 nt, Homo sapiens
  misc_RNA (1)...(19): siRNA sense strand
gauacaaacucacccuguu

SEQ ID NO: 1469567 - RNA, 19 nt, Homo sapiens
  misc_RNA (1)...(19): siRNA sense strand
ccaagccacugucaaauuc

SEQ ID NO: 1469568 - RNA, 19 nt, Homo sapiens
  misc_RNA (1)...(19): siRNA sense strand
caaccaagccacugucaaa

SEQ ID NO: 1469569 - RNA, 19 nt, Homo sapiens
  misc_RNA (1)...(19): siRNA sense strand
uaaaggagaaggaguuuga

SEQ ID NO: 1469570 - RNA, 19 nt, Homo sapiens
  misc_RNA (1)...(19): siRNA sense strand
gggcugagaccaucaaguu

SEQ ID NO: 1469571 - RNA, 19 nt, Homo sapiens
  misc_RNA (1)...(19): siRNA sense strand
ccacaguuaucgacaugaa

SEQ ID NO: 1469572 - RNA, 19 nt, Homo sapiens
  misc_RNA (1)...(19): siRNA sense strand
gacaugaaguggagauaca

SEQ ID NO: 1469573 - RNA, 19 nt, Homo sapiens
  misc_RNA (1)...(19): siRNA sense strand
ugacaaaguggauggcaua

SEQ ID NO: 1469574 - RNA, 19 nt, Homo sapiens
  misc_RNA (1)...(19): siRNA sense strand
gcacagcaacgugagaauu

SEQ ID NO: 1469575 - RNA, 19 nt, Homo sapiens
  misc_RNA (1)...(19): siRNA sense strand
gcauauaccuacucuaccu

SEQ ID NO: 1469576 - RNA, 19 nt, Homo sapiens
  misc_RNA (1)...(19): siRNA sense strand
gaccacaguuaucgacaug

SEQ ID NO: 1469577 - RNA, 19 nt, Homo sapiens
  misc_RNA (1)...(19): siRNA sense strand
ugugguaucucucuccaaa

SEQ ID NO: 1469578 - RNA, 19 nt, Homo sapiens
  misc_RNA (1)...(19): siRNA sense strand
gaacugaggacacuuuuau

SEQ ID NO: 1469579 - RNA, 19 nt, Homo sapiens
  misc_RNA (1)...(19): siRNA sense strand
aagcccagauugcacauuu

SEQ ID NO: 1469580 - RNA, 19 nt, Homo sapiens
  misc_RNA (1)...(19): siRNA sense strand
ggagaaggaguuugagcuu

SEQ ID NO: 1469581 - RNA, 19 nt, Homo sapiens
  misc_RNA (1)...(19): siRNA sense strand
agaaggaguuugagcuugu

SEQ ID NO: 1469582 - RNA, 19 nt, Homo sapiens
  misc_RNA (1)...(19): siRNA sense strand
ugauucagguagccaauau

SEQ ID NO: 1469583 - RNA, 19 nt, Homo sapiens
  misc_RNA (1)...(19): siRNA sense strand
ggaccacaguuaucgacau

SEQ ID NO: 1469584 - RNA, 19 nt, Homo sapiens
  misc_RNA (1)...(19): siRNA sense strand
cgugagaauugacaaagug

SEQ ID NO: 1469585 - RNA, 19 nt, Homo sapiens
  misc_RNA (1)...(19): siRNA sense strand
aaagagaacugaggacacu

SEQ ID NO: 1469586 - RNA, 19 nt, Homo sapiens
  misc_RNA (1)...(19): siRNA sense strand
gaaggaguuugagcuugug

SEQ ID NO: 1469587 - RNA, 19 nt, Homo sapiens
  misc_RNA (1)...(19): siRNA sense strand
gaaccuuccuggccaaaau

SEQ ID NO: 1469588 - RNA, 19 nt, Homo sapiens
  misc_RNA (1)...(19): siRNA sense strand
cuacugggguuuugaguuu

SEQ ID NO: 1469589 - RNA, 19 nt, Homo sapiens
  misc_RNA (1)...(19): siRNA sense strand
gagccgaacaucuuauauc

SEQ ID NO: 1469590 - RNA, 19 nt, Homo sapiens
  misc_RNA (1)...(19): siRNA sense strand
caacgugagaauugacaaa

SEQ ID NO: 1469591 - RNA, 19 nt, Homo sapiens
  misc_RNA (1)...(19): siRNA sense strand
cgaccuugauugagaucuu

SEQ ID NO: 1469592 - RNA, 19 nt, Homo sapiens
  misc_RNA (1)...(19): siRNA sense strand
gccagagccgaacaucuua

SEQ ID NO: 1469593 - RNA, 19 nt, Homo sapiens
  misc_RNA (1)...(19): siRNA sense strand
gcugagaccaucaaguuca

SEQ ID NO: 1469594 - RNA, 19 nt, Homo sapiens
  misc_RNA (1)...(19): siRNA sense strand
ucagucaguuugaacagau

SEQ ID NO: 1469595 - RNA, 19 nt, Homo sapiens
  misc_RNA (1)...(19): siRNA sense strand
cagagccgaacaucuuaua

SEQ ID NO: 1469596 - RNA, 19 nt, Homo sapiens
  misc_RNA (1)...(19): siRNA sense strand
ccagacaaccauuggcuau

SEQ ID NO: 1469597 - RNA, 19 nt, Homo sapiens
  misc_RNA (1)...(19): siRNA sense strand
aacagcaacucgaggagaa

SEQ ID NO: 1469598 - RNA, 19 nt, Homo sapiens
  misc_RNA (1)...(19): siRNA sense strand
ccuguugguugcucaguug

SEQ ID NO: 1469599 - RNA, 19 nt, Homo sapiens
  misc_RNA (1)...(19): siRNA sense strand
gaucagagggaaagagaac

SEQ ID NO: 1469600 - RNA, 19 nt, Homo sapiens
  misc_RNA (1)...(19): siRNA sense strand
gauggcauauaccuacucu

SEQ ID NO: 1469601 - RNA, 19 nt, Homo sapiens
  misc_RNA (1)...(19): siRNA sense strand
caaaaucgccagacccaaa

SEQ ID NO: 1469602 - RNA, 19 nt, Homo sapiens
  misc_RNA (1)...(19): siRNA sense strand
ucacgaccuugauugagau

SEQ ID NO: 1469603 - RNA, 19 nt, Homo sapiens
  misc_RNA (1)...(19): siRNA sense strand
gaaaucuacugggguuuug

SEQ ID NO: 1469604 - RNA, 19 nt, Homo sapiens
  misc_RNA (1)...(19): siRNA sense strand
gagaauugacaaaguggau

SEQ ID NO: 1469605 - RNA, 19 nt, Homo sapiens
  misc_RNA (1)...(19): siRNA sense strand
cacagcaacgugagaauug

SEQ ID NO: 1469606 - RNA, 19 nt, Homo sapiens
  misc_RNA (1)...(19): siRNA sense strand
gaaguggagauacaaacuc

SEQ ID NO: 1469607 - RNA, 19 nt, Homo sapiens
  misc_RNA (1)...(19): siRNA sense strand
ucaugaaaguggacucucu

SEQ ID NO: 1469608 - RNA, 19 nt, Homo sapiens
  misc_RNA (1)...(19): siRNA sense strand
gaccuugauugagaucuuc

SEQ ID NO: 1469609 - RNA, 19 nt, Homo sapiens
  misc_RNA (1)...(19): siRNA sense strand
gaggacacuuuuauuacaa

SEQ ID NO: 1469610 - RNA, 19 nt, Homo sapiens
  misc_RNA (1)...(19): siRNA sense strand
agagaacugaggacacuuu

SEQ ID NO: 1469611 - RNA, 19 nt, Homo sapiens
  misc_RNA (1)...(19): siRNA sense strand
acagcaacgugagaauuga

SEQ ID NO: 1469612 - RNA, 19 nt, Homo sapiens
  misc_RNA (1)...(19): siRNA sense strand
aaguggagauacaaacuca

SEQ ID NO: 1469613 - RNA, 19 nt, Homo sapiens
  misc_RNA (1)...(19): siRNA sense strand
ugccagagccgaacaucuu

SEQ ID NO: 1469614 - RNA, 19 nt, Homo sapiens
  misc_RNA (1)...(19): siRNA sense strand
ucuaccaugugcuggauga

SEQ ID NO: 1469615 - RNA, 19 nt, Homo sapiens
  misc_RNA (1)...(19): siRNA sense strand
agacccacgucaccaagga

SEQ ID NO: 1469616 - RNA, 19 nt, Homo sapiens
  misc_RNA (1)...(19): siRNA sense strand
acaaaguggauggcauaua

SEQ ID NO: 1469617 - RNA, 19 nt, Homo sapiens
  misc_RNA (1)...(19): siRNA sense strand
gugcagucaucaccaagca

SEQ ID NO: 1469618 - RNA, 19 nt, Homo sapiens
  misc_RNA (1)...(19): siRNA sense strand
guggacuccuccucugaga

SEQ ID NO: 1469619 - RNA, 19 nt, Homo sapiens
  misc_RNA (1)...(19): siRNA sense strand
gagagccccuuccucauuc

SEQ ID NO: 1469620 - RNA, 19 nt, Homo sapiens
  misc_RNA (1)...(19): siRNA sense strand
ggaaaucuacugggguuuu

SEQ ID NO: 1469621 - RNA, 19 nt, Homo sapiens
  misc_RNA (1)...(19): siRNA sense strand
ggaaucccagacaaccauu

SEQ ID NO: 1469622 - RNA, 19 nt, Homo sapiens
  misc_RNA (1)...(19): siRNA sense strand
gggcacagcaacgugagaa

SEQ ID NO: 1469623 - RNA, 19 nt, Homo sapiens
  misc_RNA (1)...(19): siRNA sense strand
ccuguucgcugccacuuuu

SEQ ID NO: 1469624 - RNA, 19 nt, Homo sapiens
  misc_RNA (1)...(19): siRNA sense strand
uggcauauaccuacucuac

SEQ ID NO: 1469625 - RNA, 19 nt, Homo sapiens
  misc_RNA (1)...(19): siRNA sense strand
caugaaguggagauacaaa

SEQ ID NO: 1469626 - RNA, 19 nt, Homo sapiens
  misc_RNA (1)...(19): siRNA sense strand
ugaggacacuuuuauuaca

SEQ ID NO: 1469627 - RNA, 19 nt, Homo sapiens
  misc_RNA (1)...(19): siRNA sense strand
gugauucagguagccaaua

SEQ ID NO: 1469628 - RNA, 19 nt, Homo sapiens
  misc_RNA (1)...(19): siRNA sense strand
gcccagauugcacauuuua

SEQ ID NO: 1469629 - RNA, 19 nt, Homo sapiens
  misc_RNA (1)...(19): siRNA sense strand
cagucaguuugaacagauu

SEQ ID NO: 1469630 - RNA, 19 nt, Homo sapiens
  misc_RNA (1)...(19): siRNA sense strand
cccaaaaccuaaaggagaa

SEQ ID NO: 1469631 - RNA, 19 nt, Homo sapiens
  misc_RNA (1)...(19): siRNA sense strand
gaaucccagacaaccauug

SEQ ID NO: 1469632 - RNA, 19 nt, Homo sapiens
  misc_RNA (1)...(19): siRNA sense strand
ccuaaaggagaaggaguuu

SEQ ID NO: 1469633 - RNA, 19 nt, Homo sapiens
  misc_RNA (1)...(19): siRNA sense strand
caaaguggauggcauauac

SEQ ID NO: 1469634 - RNA, 19 nt, Homo sapiens
  misc_RNA (1)...(19): siRNA sense strand
gugaugaccugguuccuuu

SEQ ID NO: 1469635 - RNA, 19 nt, Homo sapiens
  misc_RNA (1)...(19): siRNA sense strand
gauacaaacucacccuguu

SEQ ID NO: 1469636 - RNA, 19 nt, Homo sapiens
  misc_RNA (1)...(19): siRNA sense strand
ccaagccacugucaaauuc

SEQ ID NO: 1469637 - RNA, 19 nt, Homo sapiens
  misc_RNA (1)...(19): siRNA sense strand
caaccaagccacugucaaa

SEQ ID NO: 1469638 - RNA, 19 nt, Homo sapiens
  misc_RNA (1)...(19): siRNA sense strand
uaaaggagaaggaguuuga

SEQ ID NO: 1469639 - RNA, 19 nt, Homo sapiens
  misc_RNA (1)...(19): siRNA sense strand
gggcugagaccaucaaguu

SEQ ID NO: 1469640 - RNA, 19 nt, Homo sapiens
  misc_RNA (1)...(19): siRNA sense strand
ccacaguuaucgacaugaa

SEQ ID NO: 1469641 - RNA, 19 nt, Homo sapiens
  misc_RNA (1)...(19): siRNA sense strand
gacaugaaguggagauaca

SEQ ID NO: 1469642 - RNA, 19 nt, Homo sapiens
  misc_RNA (1)...(19): siRNA sense strand
ugacaaaguggauggcaua

SEQ ID NO: 1469643 - RNA, 19 nt, Homo sapiens
  misc_RNA (1)...(19): siRNA sense strand
gcacagcaacgugagaauu

SEQ ID NO: 1469644 - RNA, 19 nt, Homo sapiens
  misc_RNA (1)...(19): siRNA sense strand
gcauauaccuacucuaccu

SEQ ID NO: 1469645 - RNA, 19 nt, Homo sapiens
  misc_RNA (1)...(19): siRNA sense strand
gaccacaguuaucgacaug

SEQ ID NO: 1469646 - RNA, 19 nt, Homo sapiens
  misc_RNA (1)...(19): siRNA sense strand
ugugguaucucucuccaaa

SEQ ID NO: 1469647 - RNA, 19 nt, Homo sapiens
  misc_RNA (1)...(19): siRNA sense strand
gaacugaggacacuuuuau

SEQ ID NO: 1469648 - RNA, 19 nt, Homo sapiens
  misc_RNA (1)...(19): siRNA sense strand
aagcccagauugcacauuu

SEQ ID NO: 1469649 - RNA, 19 nt, Homo sapiens
  misc_RNA (1)...(19): siRNA sense strand
ggagaaggaguuugagcuu

SEQ ID NO: 1469650 - RNA, 19 nt, Homo sapiens
  misc_RNA (1)...(19): siRNA sense strand
agaaggaguuugagcuugu

SEQ ID NO: 1469651 - RNA, 19 nt, Homo sapiens
  misc_RNA (1)...(19): siRNA sense strand
ugauucagguagccaauau

SEQ ID NO: 1469652 - RNA, 19 nt, Homo sapiens
  misc_RNA (1)...(19): siRNA sense strand
ggaccacaguuaucgacau

SEQ ID NO: 1469653 - RNA, 19 nt, Homo sapiens
  misc_RNA (1)...(19): siRNA sense strand
cgugagaauugacaaagug

SEQ ID NO: 1469654 - RNA, 19 nt, Homo sapiens
  misc_RNA (1)...(19): siRNA sense strand
aaagagaacugaggacacu

SEQ ID NO: 1469655 - RNA, 19 nt, Homo sapiens
  misc_RNA (1)...(19): siRNA sense strand
gaaggaguuugagcuugug

SEQ ID NO: 1469656 - RNA, 19 nt, Homo sapiens
  misc_RNA (1)...(19): siRNA sense strand
gaaccuuccuggccaaaau

SEQ ID NO: 1469657 - RNA, 19 nt, Homo sapiens
  misc_RNA (1)...(19): siRNA sense strand
cuacugggguuuugaguuu

SEQ ID NO: 1469658 - RNA, 19 nt, Homo sapiens
  misc_RNA (1)...(19): siRNA sense strand
gagccgaacaucuuauauc

SEQ ID NO: 1469659 - RNA, 19 nt, Homo sapiens
  misc_RNA (1)...(19): siRNA sense strand
caacgugagaauugacaaa

SEQ ID NO: 1469660 - RNA, 19 nt, Homo sapiens
  misc_RNA (1)...(19): siRNA sense strand
cgaccuugauugagaucuu

SEQ ID NO: 1469661 - RNA, 19 nt, Homo sapiens
  misc_RNA (1)...(19): siRNA sense strand
gccagagccgaacaucuua

SEQ ID NO: 1469662 - RNA, 19 nt, Homo sapiens
  misc_RNA (1)...(19): siRNA sense strand
gcugagaccaucaaguuca

SEQ ID NO: 1469663 - RNA, 19 nt, Homo sapiens
  misc_RNA (1)...(19): siRNA sense strand
ucagucaguuugaacagau

SEQ ID NO: 1469664 - RNA, 19 nt, Homo sapiens
  misc_RNA (1)...(19): siRNA sense strand
cagagccgaacaucuuaua

SEQ ID NO: 1469665 - RNA, 19 nt, Homo sapiens
  misc_RNA (1)...(19): siRNA sense strand
ccagacaaccauuggcuau

SEQ ID NO: 1469666 - RNA, 19 nt, Homo sapiens
  misc_RNA (1)...(19): siRNA sense strand
aacagcaacucgaggagaa

SEQ ID NO: 1469667 - RNA, 19 nt, Homo sapiens
  misc_RNA (1)...(19): siRNA sense strand
ccuguugguugcucaguug

SEQ ID NO: 1469668 - RNA, 19 nt, Homo sapiens
  misc_RNA (1)...(19): siRNA sense strand
gaucagagggaaagagaac

SEQ ID NO: 1469669 - RNA, 19 nt, Homo sapiens
  misc_RNA (1)...(19): siRNA sense strand
gauggcauauaccuacucu

SEQ ID NO: 1469670 - RNA, 19 nt, Homo sapiens
  misc_RNA (1)...(19): siRNA sense strand
caaaaucgccagacccaaa

SEQ ID NO: 1469671 - RNA, 19 nt, Homo sapiens
  misc_RNA (1)...(19): siRNA sense strand
ucacgaccuugauugagau

SEQ ID NO: 1469672 - RNA, 19 nt, Homo sapiens
  misc_RNA (1)...(19): siRNA sense strand
gaaaucuacugggguuuug

SEQ ID NO: 1469673 - RNA, 19 nt, Homo sapiens
  misc_RNA (1)...(19): siRNA sense strand
gagaauugacaaaguggau

SEQ ID NO: 1469674 - RNA, 19 nt, Homo sapiens
  misc_RNA (1)...(19): siRNA sense strand
cacagcaacgugagaauug

SEQ ID NO: 1469675 - RNA, 19 nt, Homo sapiens
  misc_RNA (1)...(19): siRNA sense strand
gaaguggagauacaaacuc

SEQ ID NO: 1469676 - RNA, 19 nt, Homo sapiens
  misc_RNA (1)...(19): siRNA sense strand
ucaugaaaguggacucucu

SEQ ID NO: 1469677 - RNA, 19 nt, Homo sapiens
  misc_RNA (1)...(19): siRNA sense strand
gaccuugauugagaucuuc

SEQ ID NO: 1469678 - RNA, 19 nt, Homo sapiens
  misc_RNA (1)...(19): siRNA sense strand
gaggacacuuuuauuacaa

SEQ ID NO: 1469679 - RNA, 19 nt, Homo sapiens
  misc_RNA (1)...(19): siRNA sense strand
agagaacugaggacacuuu

SEQ ID NO: 1469680 - RNA, 19 nt, Homo sapiens
  misc_RNA (1)...(19): siRNA sense strand
acagcaacgugagaauuga

SEQ ID NO: 1469681 - RNA, 19 nt, Homo sapiens
  misc_RNA (1)...(19): siRNA sense strand
aaguggagauacaaacuca

SEQ ID NO: 1469682 - RNA, 19 nt, Homo sapiens
  misc_RNA (1)...(19): siRNA sense strand
ugccagagccgaacaucuu

SEQ ID NO: 1469683 - RNA, 19 nt, Homo sapiens
  misc_RNA (1)...(19): siRNA sense strand
ucuaccaugugcuggauga

SEQ ID NO: 1469684 - RNA, 19 nt, Homo sapiens
  misc_RNA (1)...(19): siRNA sense strand
agacccacgucaccaagga

SEQ ID NO: 1469685 - RNA, 19 nt, Homo sapiens
  misc_RNA (1)...(19): siRNA sense strand
acaaaguggauggcauaua

SEQ ID NO: 1469686 - RNA, 19 nt, Homo sapiens
  misc_RNA (1)...(19): siRNA sense strand
gugcagucaucaccaagca

SEQ ID NO: 1469687 - RNA, 19 nt, Homo sapiens
  misc_RNA (1)...(19): siRNA sense strand
guggacuccuccucugaga

SEQ ID NO: 1469688 - RNA, 19 nt, Homo sapiens
  misc_RNA (1)...(19): siRNA sense strand
gagagccccuuccucauuc

SEQ ID NO: 1469689 - RNA, 19 nt, Homo sapiens
  misc_RNA (1)...(19): siRNA sense strand
ggaaaucuacugggguuuu

SEQ ID NO: 1469690 - RNA, 19 nt, Homo sapiens
  misc_RNA (1)...(19): siRNA sense strand
ggaaucccagacaaccauu

SEQ ID NO: 1469691 - RNA, 19 nt, Homo sapiens
  misc_RNA (1)...(19): siRNA sense strand
gggcacagcaacgugagaa

SEQ ID NO: 1469692 - RNA, 19 nt, Homo sapiens
  misc_RNA (1)...(19): siRNA sense strand
ccuguucgcugccacuuuu

SEQ ID NO: 1469693 - RNA, 19 nt, Homo sapiens
  misc_RNA (1)...(19): siRNA sense strand
uggcauauaccuacucuac

SEQ ID NO: 1469694 - RNA, 19 nt, Homo sapiens
  misc_RNA (1)...(19): siRNA sense strand
caugaaguggagauacaaa

SEQ ID NO: 1469695 - RNA, 19 nt, Homo sapiens
  misc_RNA (1)...(19): siRNA sense strand
ugaggacacuuuuauuaca

SEQ ID NO: 1469696 - RNA, 19 nt, Homo sapiens
  misc_RNA (1)...(19): siRNA sense strand
gugauucagguagccaaua

SEQ ID NO: 1469697 - RNA, 19 nt, Homo sapiens
  misc_RNA (1)...(19): siRNA sense strand
gcccagauugcacauuuua

SEQ ID NO: 1469698 - RNA, 19 nt, Homo sapiens
  misc_RNA (1)...(19): siRNA sense strand
cagucaguuugaacagauu

SEQ ID NO: 1469699 - RNA, 19 nt, Homo sapiens
  misc_RNA (1)...(19): siRNA sense strand
cccaaaaccuaaaggagaa

SEQ ID NO: 1469700 - RNA, 19 nt, Homo sapiens
  misc_RNA (1)...(19): siRNA sense strand
gaaucccagacaaccauug

SEQ ID NO: 1469701 - RNA, 19 nt, Homo sapiens
  misc_RNA (1)...(19): siRNA sense strand
ccuaaaggagaaggaguuu

SEQ ID NO: 1469702 - RNA, 19 nt, Homo sapiens
  misc_RNA (1)...(19): siRNA sense strand
caaaguggauggcauauac

SEQ ID NO: 1469703 - RNA, 19 nt, Homo sapiens
  misc_RNA (1)...(19): siRNA sense strand
gugaugaccugguuccuuu

SEQ ID NO: 1469704 - RNA, 19 nt, Homo sapiens
  misc_RNA (1)...(19): siRNA sense strand
gauacaaacucacccuguu

SEQ ID NO: 1469705 - RNA, 19 nt, Homo sapiens
  misc_RNA (1)...(19): siRNA sense strand
ccaagccacugucaaauuc

SEQ ID NO: 1469706 - RNA, 19 nt, Homo sapiens
  misc_RNA (1)...(19): siRNA sense strand
caaccaagccacugucaaa

SEQ ID NO: 1469707 - RNA, 19 nt, Homo sapiens
  misc_RNA (1)...(19): siRNA sense strand
uaaaggagaaggaguuuga

SEQ ID NO: 1469708 - RNA, 19 nt, Homo sapiens
  misc_RNA (1)...(19): siRNA sense strand
gggcugagaccaucaaguu

SEQ ID NO: 1469709 - RNA, 19 nt, Homo sapiens
  misc_RNA (1)...(19): siRNA sense strand
ccacaguuaucgacaugaa

SEQ ID NO: 1469710 - RNA, 19 nt, Homo sapiens
  misc_RNA (1)...(19): siRNA sense strand
gacaugaaguggagauaca

SEQ ID NO: 1469711 - RNA, 19 nt, Homo sapiens
  misc_RNA (1)...(19): siRNA sense strand
ugacaaaguggauggcaua

SEQ ID NO: 1469712 - RNA, 19 nt, Homo sapiens
  misc_RNA (1)...(19): siRNA sense strand
gcacagcaacgugagaauu

SEQ ID NO: 1469713 - RNA, 19 nt, Homo sapiens
  misc_RNA (1)...(19): siRNA sense strand
gcauauaccuacucuaccu

SEQ ID NO: 1469714 - RNA, 19 nt, Homo sapiens
  misc_RNA (1)...(19): siRNA sense strand
gaccacaguuaucgacaug

SEQ ID NO: 1469715 - RNA, 19 nt, Homo sapiens
  misc_RNA (1)...(19): siRNA sense strand
ugugguaucucucuccaaa

SEQ ID NO: 1469716 - RNA, 19 nt, Homo sapiens
  misc_RNA (1)...(19): siRNA sense strand
gaacugaggacacuuuuau

SEQ ID NO: 1469717 - RNA, 19 nt, Homo sapiens
  misc_RNA (1)...(19): siRNA sense strand
aagcccagauugcacauuu

SEQ ID NO: 1469718 - RNA, 19 nt, Homo sapiens
  misc_RNA (1)...(19): siRNA sense strand
ggagaaggaguuugagcuu

SEQ ID NO: 1469719 - RNA, 19 nt, Homo sapiens
  misc_RNA (1)...(19): siRNA sense strand
agaaggaguuugagcuugu

SEQ ID NO: 1469720 - RNA, 19 nt, Homo sapiens
  misc_RNA (1)...(19): siRNA sense strand
ugauucagguagccaauau

SEQ ID NO: 1469721 - RNA, 19 nt, Homo sapiens
  misc_RNA (1)...(19): siRNA sense strand
ggaccacaguuaucgacau

SEQ ID NO: 1469722 - RNA, 19 nt, Homo sapiens
  misc_RNA (1)...(19): siRNA sense strand
cgugagaauugacaaagug

SEQ ID NO: 1469723 - RNA, 19 nt, Homo sapiens
  misc_RNA (1)...(19): siRNA sense strand
aaagagaacugaggacacu

SEQ ID NO: 1469724 - RNA, 19 nt, Homo sapiens
  misc_RNA (1)...(19): siRNA sense strand
gaaggaguuugagcuugug

SEQ ID NO: 1469725 - RNA, 19 nt, Homo sapiens
  misc_RNA (1)...(19): siRNA sense strand
gaaccuuccuggccaaaau

SEQ ID NO: 1469726 - RNA, 19 nt, Homo sapiens
  misc_RNA (1)...(19): siRNA sense strand
cuacugggguuuugaguuu

SEQ ID NO: 1469727 - RNA, 19 nt, Homo sapiens
  misc_RNA (1)...(19): siRNA sense strand
gagccgaacaucuuauauc

SEQ ID NO: 1469728 - RNA, 19 nt, Homo sapiens
  misc_RNA (1)...(19): siRNA sense strand
caacgugagaauugacaaa

SEQ ID NO: 1469729 - RNA, 19 nt, Homo sapiens
  misc_RNA (1)...(19): siRNA sense strand
cgaccuugauugagaucuu

SEQ ID NO: 1469730 - RNA, 19 nt, Homo sapiens
  misc_RNA (1)...(19): siRNA sense strand
gccagagccgaacaucuua

SEQ ID NO: 1469731 - RNA, 19 nt, Homo sapiens
  misc_RNA (1)...(19): siRNA sense strand
gcugagaccaucaaguuca

SEQ ID NO: 1469732 - RNA, 19 nt, Homo sapiens
  misc_RNA (1)...(19): siRNA sense strand
ucagucaguuugaacagau

SEQ ID NO: 1469733 - RNA, 19 nt, Homo sapiens
  misc_RNA (1)...(19): siRNA sense strand
cagagccgaacaucuuaua

SEQ ID NO: 1469734 - RNA, 19 nt, Homo sapiens
  misc_RNA (1)...(19): siRNA sense strand
ccagacaaccauuggcuau

SEQ ID NO: 1469735 - RNA, 19 nt, Homo sapiens
  misc_RNA (1)...(19): siRNA sense strand
aacagcaacucgaggagaa

SEQ ID NO: 1469736 - RNA, 19 nt, Homo sapiens
  misc_RNA (1)...(19): siRNA sense strand
ccuguugguugcucaguug

SEQ ID NO: 1469737 - RNA, 19 nt, Homo sapiens
  misc_RNA (1)...(19): siRNA sense strand
gaucagagggaaagagaac

SEQ ID NO: 1469738 - RNA, 19 nt, Homo sapiens
  misc_RNA (1)...(19): siRNA sense strand
gauggcauauaccuacucu

SEQ ID NO: 1469739 - RNA, 19 nt, Homo sapiens
  misc_RNA (1)...(19): siRNA sense strand
caaaaucgccagacccaaa

SEQ ID NO: 1469740 - RNA, 19 nt, Homo sapiens
  misc_RNA (1)...(19): siRNA sense strand
ucacgaccuugauugagau

SEQ ID NO: 1469741 - RNA, 19 nt, Homo sapiens
  misc_RNA (1)...(19): siRNA sense strand
gaaaucuacugggguuuug

SEQ ID NO: 1469742 - RNA, 19 nt, Homo sapiens
  misc_RNA (1)...(19): siRNA sense strand
gagaauugacaaaguggau

SEQ ID NO: 1469743 - RNA, 19 nt, Homo sapiens
  misc_RNA (1)...(19): siRNA sense strand
cacagcaacgugagaauug

SEQ ID NO: 1469744 - RNA, 19 nt, Homo sapiens
  misc_RNA (1)...(19): siRNA sense strand
gaaguggagauacaaacuc

SEQ ID NO: 1469745 - RNA, 19 nt, Homo sapiens
  misc_RNA (1)...(19): siRNA sense strand
ucaugaaaguggacucucu

SEQ ID NO: 1469746 - RNA, 19 nt, Homo sapiens
  misc_RNA (1)...(19): siRNA sense strand
gaccuugauugagaucuuc

SEQ ID NO: 1469747 - RNA, 19 nt, Homo sapiens
  misc_RNA (1)...(19): siRNA sense strand
gaggacacuuuuauuacaa

SEQ ID NO: 1469748 - RNA, 19 nt, Homo sapiens
  misc_RNA (1)...(19): siRNA sense strand
agagaacugaggacacuuu

SEQ ID NO: 1469749 - RNA, 19 nt, Homo sapiens
  misc_RNA (1)...(19): siRNA sense strand
acagcaacgugagaauuga

SEQ ID NO: 1469750 - RNA, 19 nt, Homo sapiens
  misc_RNA (1)...(19): siRNA sense strand
aaguggagauacaaacuca

SEQ ID NO: 1469751 - RNA, 19 nt, Homo sapiens
  misc_RNA (1)...(19): siRNA sense strand
ugccagagccgaacaucuu

SEQ ID NO: 1469752 - RNA, 19 nt, Homo sapiens
  misc_RNA (1)...(19): siRNA sense strand
ucuaccaugugcuggauga

SEQ ID NO: 1469753 - RNA, 19 nt, Homo sapiens
  misc_RNA (1)...(19): siRNA sense strand
agacccacgucaccaagga

SEQ ID NO: 1469754 - RNA, 19 nt, Homo sapiens
  misc_RNA (1)...(19): siRNA sense strand
acaaaguggauggcauaua

SEQ ID NO: 1469755 - RNA, 19 nt, Homo sapiens
  misc_RNA (1)...(19): siRNA sense strand
gugcagucaucaccaagca

SEQ ID NO: 1469756 - RNA, 19 nt, Homo sapiens
  misc_RNA (1)...(19): siRNA sense strand
guggacuccuccucugaga

SEQ ID NO: 1469757 - RNA, 19 nt, Homo sapiens
  misc_RNA (1)...(19): siRNA sense strand
gagagccccuuccucauuc

SEQ ID NO: 1469758 - RNA, 19 nt, Homo sapiens
  misc_RNA (1)...(19): siRNA sense strand
ggaaaucuacugggguuuu

SEQ ID NO: 1469759 - RNA, 19 nt, Homo sapiens
  misc_RNA (1)...(19): siRNA sense strand
ggaaucccagacaaccauu

SEQ ID NO: 1469760 - RNA, 19 nt, Homo sapiens
  misc_RNA (1)...(19): siRNA sense strand
gggcacagcaacgugagaa

SEQ ID NO: 1469761 - RNA, 19 nt, Homo sapiens
  misc_RNA (1)...(19): siRNA sense strand
ccuguucgcugccacuuuu

SEQ ID NO: 1469762 - RNA, 19 nt, Homo sapiens
  misc_RNA (1)...(19): siRNA sense strand
uggcauauaccuacucuac

SEQ ID NO: 1469763 - RNA, 19 nt, Homo sapiens
  misc_RNA (1)...(19): siRNA sense strand
caugaaguggagauacaaa

SEQ ID NO: 1469764 - RNA, 19 nt, Homo sapiens
  misc_RNA (1)...(19): siRNA sense strand
ugaggacacuuuuauuaca

SEQ ID NO: 1469765 - RNA, 19 nt, Homo sapiens
  misc_RNA (1)...(19): siRNA sense strand
gugauucagguagccaaua

SEQ ID NO: 1469766 - RNA, 19 nt, Homo sapiens
  misc_RNA (1)...(19): siRNA sense strand
gcccagauugcacauuuua

SEQ ID NO: 1469767 - RNA, 19 nt, Homo sapiens
  misc_RNA (1)...(19): siRNA sense strand
cagucaguuugaacagauu

SEQ ID NO: 1469768 - RNA, 19 nt, Homo sapiens
  misc_RNA (1)...(19): siRNA sense strand
cccaaaaccuaaaggagaa

SEQ ID NO: 1469769 - RNA, 19 nt, Homo sapiens
  misc_RNA (1)...(19): siRNA sense strand
gaaucccagacaaccauug

SEQ ID NO: 1469770 - RNA, 19 nt, Homo sapiens
  misc_RNA (1)...(19): siRNA sense strand
ccuaaaggagaaggaguuu

SEQ ID NO: 1469771 - RNA, 19 nt, Homo sapiens
  misc_RNA (1)...(19): siRNA sense strand
caaaguggauggcauauac

SEQ ID NO: 1469772 - RNA, 19 nt, Homo sapiens
  misc_RNA (1)...(19): siRNA sense strand
gugaugaccugguuccuuu

SEQ ID NO: 1469773 - RNA, 19 nt, Homo sapiens
  misc_RNA (1)...(19): siRNA sense strand
gauacaaacucacccuguu

SEQ ID NO: 1469774 - RNA, 19 nt, Homo sapiens
  misc_RNA (1)...(19): siRNA sense strand
ccaagccacugucaaauuc

SEQ ID NO: 1469775 - RNA, 19 nt, Homo sapiens
  misc_RNA (1)...(19): siRNA sense strand
caaccaagccacugucaaa

SEQ ID NO: 1469776 - RNA, 19 nt, Homo sapiens
  misc_RNA (1)...(19): siRNA sense strand
uaaaggagaaggaguuuga

SEQ ID NO: 1469777 - RNA, 19 nt, Homo sapiens
  misc_RNA (1)...(19): siRNA sense strand
gggcugagaccaucaaguu

SEQ ID NO: 1469778 - RNA, 19 nt, Homo sapiens
  misc_RNA (1)...(19): siRNA sense strand
ccacaguuaucgacaugaa

SEQ ID NO: 1469779 - RNA, 19 nt, Homo sapiens
  misc_RNA (1)...(19): siRNA sense strand
gacaugaaguggagauaca

SEQ ID NO: 1469780 - RNA, 19 nt, Homo sapiens
  misc_RNA (1)...(19): siRNA sense strand
ugacaaaguggauggcaua

SEQ ID NO: 1469781 - RNA, 19 nt, Homo sapiens
  misc_RNA (1)...(19): siRNA sense strand
gcacagcaacgugagaauu

SEQ ID NO: 1469782 - RNA, 19 nt, Homo sapiens
  misc_RNA (1)...(19): siRNA sense strand
gcauauaccuacucuaccu

SEQ ID NO: 1469783 - RNA, 19 nt, Homo sapiens
  misc_RNA (1)...(19): siRNA sense strand
gaccacaguuaucgacaug

SEQ ID NO: 1469784 - RNA, 19 nt, Homo sapiens
  misc_RNA (1)...(19): siRNA sense strand
ugugguaucucucuccaaa

SEQ ID NO: 1469785 - RNA, 19 nt, Homo sapiens
  misc_RNA (1)...(19): siRNA sense strand
gaacugaggacacuuuuau

SEQ ID NO: 1469786 - RNA, 19 nt, Homo sapiens
  misc_RNA (1)...(19): siRNA sense strand
aagcccagauugcacauuu

SEQ ID NO: 1469787 - RNA, 19 nt, Homo sapiens
  misc_RNA (1)...(19): siRNA sense strand
ggagaaggaguuugagcuu

SEQ ID NO: 1469788 - RNA, 19 nt, Homo sapiens
  misc_RNA (1)...(19): siRNA sense strand
agaaggaguuugagcuugu

SEQ ID NO: 1469789 - RNA, 19 nt, Homo sapiens
  misc_RNA (1)...(19): siRNA sense strand
ugauucagguagccaauau

SEQ ID NO: 1469790 - RNA, 19 nt, Homo sapiens
  misc_RNA (1)...(19): siRNA sense strand
ggaccacaguuaucgacau

SEQ ID NO: 1469791 - RNA, 19 nt, Homo sapiens
  misc_RNA (1)...(19): siRNA sense strand
cgugagaauugacaaagug

SEQ ID NO: 1469792 - RNA, 19 nt, Homo sapiens
  misc_RNA (1)...(19): siRNA sense strand
aaagagaacugaggacacu

SEQ ID NO: 1469793 - RNA, 19 nt, Homo sapiens
  misc_RNA (1)...(19): siRNA sense strand
gaaggaguuugagcuugug

SEQ ID NO: 1469794 - RNA, 19 nt, Homo sapiens
  misc_RNA (1)...(19): siRNA sense strand
gaaccuuccuggccaaaau

SEQ ID NO: 1469795 - RNA, 19 nt, Homo sapiens
  misc_RNA (1)...(19): siRNA sense strand
cuacugggguuuugaguuu

SEQ ID NO: 1469796 - RNA, 19 nt, Homo sapiens
  misc_RNA (1)...(19): siRNA sense strand
gagccgaacaucuuauauc

SEQ ID NO: 1469797 - RNA, 19 nt, Homo sapiens
  misc_RNA (1)...(19): siRNA sense strand
caacgugagaauugacaaa

SEQ ID NO: 1469798 - RNA, 19 nt, Homo sapiens
  misc_RNA (1)...(19): siRNA sense strand
cgaccuugauugagaucuu

SEQ ID NO: 1469799 - RNA, 19 nt, Homo sapiens
  misc_RNA (1)...(19): siRNA sense strand
gccagagccgaacaucuua

SEQ ID NO: 1469800 - RNA, 19 nt, Homo sapiens
  misc_RNA (1)...(19): siRNA sense strand
gcugagaccaucaaguuca

SEQ ID NO: 1469801 - RNA, 19 nt, Homo sapiens
  misc_RNA (1)...(19): siRNA sense strand
ucagucaguuugaacagau

SEQ ID NO: 1469802 - RNA, 19 nt, Homo sapiens
  misc_RNA (1)...(19): siRNA sense strand
cagagccgaacaucuuaua

SEQ ID NO: 1469803 - RNA, 19 nt, Homo sapiens
  misc_RNA (1)...(19): siRNA sense strand
ccagacaaccauuggcuau

SEQ ID NO: 1469804 - RNA, 19 nt, Homo sapiens
  misc_RNA (1)...(19): siRNA sense strand
aacagcaacucgaggagaa

SEQ ID NO: 1469805 - RNA, 19 nt, Homo sapiens
  misc_RNA (1)...(19): siRNA sense strand
ccuguugguugcucaguug

SEQ ID NO: 1469806 - RNA, 19 nt, Homo sapiens
  misc_RNA (1)...(19): siRNA sense strand
gaucagagggaaagagaac

SEQ ID NO: 1469807 - RNA, 19 nt, Homo sapiens
  misc_RNA (1)...(19): siRNA sense strand
gauggcauauaccuacucu

SEQ ID NO: 1469808 - RNA, 19 nt, Homo sapiens
  misc_RNA (1)...(19): siRNA sense strand
caaaaucgccagacccaaa

SEQ ID NO: 1469809 - RNA, 19 nt, Homo sapiens
  misc_RNA (1)...(19): siRNA sense strand
ucacgaccuugauugagau

SEQ ID NO: 1469810 - RNA, 19 nt, Homo sapiens
  misc_RNA (1)...(19): siRNA sense strand
gaaaucuacugggguuuug

SEQ ID NO: 1469811 - RNA, 19 nt, Homo sapiens
  misc_RNA (1)...(19): siRNA sense strand
gagaauugacaaaguggau

SEQ ID NO: 1469812 - RNA, 19 nt, Homo sapiens
  misc_RNA (1)...(19): siRNA sense strand
cacagcaacgugagaauug

SEQ ID NO: 1469813 - RNA, 19 nt, Homo sapiens
  misc_RNA (1)...(19): siRNA sense strand
gaaguggagauacaaacuc

SEQ ID NO: 1469814 - RNA, 19 nt, Homo sapiens
  misc_RNA (1)...(19): siRNA sense strand
ucaugaaaguggacucucu

SEQ ID NO: 1469815 - RNA, 19 nt, Homo sapiens
  misc_RNA (1)...(19): siRNA sense strand
gaccuugauugagaucuuc

SEQ ID NO: 1469816 - RNA, 19 nt, Homo sapiens
  misc_RNA (1)...(19): siRNA sense strand
gaggacacuuuuauuacaa

SEQ ID NO: 1469817 - RNA, 19 nt, Homo sapiens
  misc_RNA (1)...(19): siRNA sense strand
agagaacugaggacacuuu

SEQ ID NO: 1469818 - RNA, 19 nt, Homo sapiens
  misc_RNA (1)...(19): siRNA sense strand
acagcaacgugagaauuga

SEQ ID NO: 1469819 - RNA, 19 nt, Homo sapiens
  misc_RNA (1)...(19): siRNA sense strand
aaguggagauacaaacuca

SEQ ID NO: 1469820 - RNA, 19 nt, Homo sapiens
  misc_RNA (1)...(19): siRNA sense strand
ugccagagccgaacaucuu

SEQ ID NO: 1469821 - RNA, 19 nt, Homo sapiens
  misc_RNA (1)...(19): siRNA sense strand
ucuaccaugugcuggauga

SEQ ID NO: 1469822 - RNA, 19 nt, Homo sapiens
  misc_RNA (1)...(19): siRNA sense strand
agacccacgucaccaagga

SEQ ID NO: 1469823 - RNA, 19 nt, Homo sapiens
  misc_RNA (1)...(19): siRNA sense strand
acaaaguggauggcauaua

SEQ ID NO: 1469824 - RNA, 19 nt, Homo sapiens
  misc_RNA (1)...(19): siRNA sense strand
gugcagucaucaccaagca

SEQ ID NO: 1469825 - RNA, 19 nt, Homo sapiens
  misc_RNA (1)...(19): siRNA sense strand
guggacuccuccucugaga

SEQ ID NO: 1469826 - RNA, 19 nt, Homo sapiens
  misc_RNA (1)...(19): siRNA sense strand
gagagccccuuccucauuc

SEQ ID NO: 1469827 - RNA, 19 nt, Homo sapiens
  misc_RNA (1)...(19): siRNA sense strand
ggaaaucuacugggguuuu

SEQ ID NO: 1469828 - RNA, 19 nt, Homo sapiens
  misc_RNA (1)...(19): siRNA sense strand
ggaaucccagacaaccauu

SEQ ID NO: 1469829 - RNA, 19 nt, Homo sapiens
  misc_RNA (1)...(19): siRNA sense strand
gggcacagcaacgugagaa

SEQ ID NO: 1469830 - RNA, 19 nt, Homo sapiens
  misc_RNA (1)...(19): siRNA sense strand
ccuguucgcugccacuuuu

SEQ ID NO: 1469831 - RNA, 19 nt, Homo sapiens
  misc_RNA (1)...(19): siRNA sense strand
uggcauauaccuacucuac

SEQ ID NO: 1469832 - RNA, 19 nt, Homo sapiens
  misc_RNA (1)...(19): siRNA sense strand
caugaaguggagauacaaa

SEQ ID NO: 1469833 - RNA, 19 nt, Homo sapiens
  misc_RNA (1)...(19): siRNA sense strand
ugaggacacuuuuauuaca

SEQ ID NO: 1469834 - RNA, 19 nt, Homo sapiens
  misc_RNA (1)...(19): siRNA sense strand
gugauucagguagccaaua

SEQ ID NO: 1469835 - RNA, 19 nt, Homo sapiens
  misc_RNA (1)...(19): siRNA sense strand
gcccagauugcacauuuua

SEQ ID NO: 1469836 - RNA, 19 nt, Homo sapiens
  misc_RNA (1)...(19): siRNA sense strand
cagucaguuugaacagauu

SEQ ID NO: 1469837 - RNA, 19 nt, Homo sapiens
  misc_RNA (1)...(19): siRNA sense strand
cccaaaaccuaaaggagaa

SEQ ID NO: 1469838 - RNA, 19 nt, Homo sapiens
  misc_RNA (1)...(19): siRNA sense strand
gaaucccagacaaccauug

SEQ ID NO: 1469839 - RNA, 19 nt, Homo sapiens
  misc_RNA (1)...(19): siRNA sense strand
ccuaaaggagaaggaguuu

SEQ ID NO: 1469840 - RNA, 19 nt, Homo sapiens
  misc_RNA (1)...(19): siRNA sense strand
caaaguggauggcauauac

SEQ ID NO: 1469841 - RNA, 19 nt, Homo sapiens
  misc_RNA (1)...(19): siRNA sense strand
gugaugaccugguuccuuu

SEQ ID NO: 1469842 - RNA, 19 nt, Homo sapiens
  misc_RNA (1)...(19): siRNA sense strand
gauacaaacucacccuguu

SEQ ID NO: 1469843 - RNA, 19 nt, Homo sapiens
  misc_RNA (1)...(19): siRNA sense strand
ccaagccacugucaaauuc

SEQ ID NO: 1469844 - RNA, 19 nt, Homo sapiens
  misc_RNA (1)...(19): siRNA sense strand
caaccaagccacugucaaa

SEQ ID NO: 1469845 - RNA, 19 nt, Homo sapiens
  misc_RNA (1)...(19): siRNA sense strand
uaaaggagaaggaguuuga

SEQ ID NO: 1469846 - RNA, 19 nt, Homo sapiens
  misc_RNA (1)...(19): siRNA sense strand
gggcugagaccaucaaguu

SEQ ID NO: 1469847 - RNA, 19 nt, Homo sapiens
  misc_RNA (1)...(19): siRNA sense strand
ccacaguuaucgacaugaa

SEQ ID NO: 1469848 - RNA, 19 nt, Homo sapiens
  misc_RNA (1)...(19): siRNA sense strand
gacaugaaguggagauaca

SEQ ID NO: 1469849 - RNA, 19 nt, Homo sapiens
  misc_RNA (1)...(19): siRNA sense strand
ugacaaaguggauggcaua

SEQ ID NO: 1469850 - RNA, 19 nt, Homo sapiens
  misc_RNA (1)...(19): siRNA sense strand
gcacagcaacgugagaauu

SEQ ID NO: 1469851 - RNA, 19 nt, Homo sapiens
  misc_RNA (1)...(19): siRNA sense strand
gcauauaccuacucuaccu

SEQ ID NO: 1469852 - RNA, 19 nt, Homo sapiens
  misc_RNA (1)...(19): siRNA sense strand
gaccacaguuaucgacaug

SEQ ID NO: 1469853 - RNA, 19 nt, Homo sapiens
  misc_RNA (1)...(19): siRNA sense strand
ugugguaucucucuccaaa

SEQ ID NO: 1469854 - RNA, 19 nt, Homo sapiens
  misc_RNA (1)...(19): siRNA sense strand
gaacugaggacacuuuuau

SEQ ID NO: 1469855 - RNA, 19 nt, Homo sapiens
  misc_RNA (1)...(19): siRNA sense strand
aagcccagauugcacauuu

SEQ ID NO: 1469856 - RNA, 19 nt, Homo sapiens
  misc_RNA (1)...(19): siRNA sense strand
ggagaaggaguuugagcuu

SEQ ID NO: 1469857 - RNA, 19 nt, Homo sapiens
  misc_RNA (1)...(19): siRNA sense strand
agaaggaguuugagcuugu

SEQ ID NO: 1469858 - RNA, 19 nt, Homo sapiens
  misc_RNA (1)...(19): siRNA sense strand
ugauucagguagccaauau

SEQ ID NO: 1469859 - RNA, 19 nt, Homo sapiens
  misc_RNA (1)...(19): siRNA sense strand
ggaccacaguuaucgacau

SEQ ID NO: 1469860 - RNA, 19 nt, Homo sapiens
  misc_RNA (1)...(19): siRNA sense strand
cgugagaauugacaaagug

SEQ ID NO: 1469861 - RNA, 19 nt, Homo sapiens
  misc_RNA (1)...(19): siRNA sense strand
aaagagaacugaggacacu

SEQ ID NO: 1469862 - RNA, 19 nt, Homo sapiens
  misc_RNA (1)...(19): siRNA sense strand
gaaggaguuugagcuugug

SEQ ID NO: 1469863 - RNA, 19 nt, Homo sapiens
  misc_RNA (1)...(19): siRNA sense strand
gaaccuuccuggccaaaau

SEQ ID NO: 1469864 - RNA, 19 nt, Homo sapiens
  misc_RNA (1)...(19): siRNA sense strand
cuacugggguuuugaguuu

SEQ ID NO: 1469865 - RNA, 19 nt, Homo sapiens
  misc_RNA (1)...(19): siRNA sense strand
gagccgaacaucuuauauc

SEQ ID NO: 1469866 - RNA, 19 nt, Homo sapiens
  misc_RNA (1)...(19): siRNA sense strand
caacgugagaauugacaaa

SEQ ID NO: 1469867 - RNA, 19 nt, Homo sapiens
  misc_RNA (1)...(19): siRNA sense strand
cgaccuugauugagaucuu

SEQ ID NO: 1469868 - RNA, 19 nt, Homo sapiens
  misc_RNA (1)...(19): siRNA sense strand
gccagagccgaacaucuua

SEQ ID NO: 1469869 - RNA, 19 nt, Homo sapiens
  misc_RNA (1)...(19): siRNA sense strand
gcugagaccaucaaguuca

SEQ ID NO: 1469870 - RNA, 19 nt, Homo sapiens
  misc_RNA (1)...(19): siRNA sense strand
ucagucaguuugaacagau

SEQ ID NO: 1469871 - RNA, 19 nt, Homo sapiens
  misc_RNA (1)...(19): siRNA sense strand
cagagccgaacaucuuaua

SEQ ID NO: 1469872 - RNA, 19 nt, Homo sapiens
  misc_RNA (1)...(19): siRNA sense strand
ccagacaaccauuggcuau

SEQ ID NO: 1469873 - RNA, 19 nt, Homo sapiens
  misc_RNA (1)...(19): siRNA sense strand
aacagcaacucgaggagaa

SEQ ID NO: 1469874 - RNA, 19 nt, Homo sapiens
  misc_RNA (1)...(19): siRNA sense strand
ccuguugguugcucaguug

SEQ ID NO: 1469875 - RNA, 19 nt, Homo sapiens
  misc_RNA (1)...(19): siRNA sense strand
gaucagagggaaagagaac

SEQ ID NO: 1469876 - RNA, 19 nt, Homo sapiens
  misc_RNA (1)...(19): siRNA sense strand
gauggcauauaccuacucu

SEQ ID NO: 1469877 - RNA, 19 nt, Homo sapiens
  misc_RNA (1)...(19): siRNA sense strand
caaaaucgccagacccaaa

SEQ ID NO: 1469878 - RNA, 19 nt, Homo sapiens
  misc_RNA (1)...(19): siRNA sense strand
ucacgaccuugauugagau

SEQ ID NO: 1469879 - RNA, 19 nt, Homo sapiens
  misc_RNA (1)...(19): siRNA sense strand
gaaaucuacugggguuuug

SEQ ID NO: 1469880 - RNA, 19 nt, Homo sapiens
  misc_RNA (1)...(19): siRNA sense strand
gagaauugacaaaguggau

SEQ ID NO: 1469881 - RNA, 19 nt, Homo sapiens
  misc_RNA (1)...(19): siRNA sense strand
cacagcaacgugagaauug

SEQ ID NO: 1469882 - RNA, 19 nt, Homo sapiens
  misc_RNA (1)...(19): siRNA sense strand
gaaguggagauacaaacuc

SEQ ID NO: 1469883 - RNA, 19 nt, Homo sapiens
  misc_RNA (1)...(19): siRNA sense strand
ucaugaaaguggacucucu

SEQ ID NO: 1469884 - RNA, 19 nt, Homo sapiens
  misc_RNA (1)...(19): siRNA sense strand
gaccuugauugagaucuuc

SEQ ID NO: 1469885 - RNA, 19 nt, Homo sapiens
  misc_RNA (1)...(19): siRNA sense strand
gaggacacuuuuauuacaa

SEQ ID NO: 1469886 - RNA, 19 nt, Homo sapiens
  misc_RNA (1)...(19): siRNA sense strand
agagaacugaggacacuuu

SEQ ID NO: 1469887 - RNA, 19 nt, Homo sapiens
  misc_RNA (1)...(19): siRNA sense strand
acagcaacgugagaauuga

SEQ ID NO: 1469888 - RNA, 19 nt, Homo sapiens
  misc_RNA (1)...(19): siRNA sense strand
aaguggagauacaaacuca

SEQ ID NO: 1469889 - RNA, 19 nt, Homo sapiens
  misc_RNA (1)...(19): siRNA sense strand
ugccagagccgaacaucuu

SEQ ID NO: 1469890 - RNA, 19 nt, Homo sapiens
  misc_RNA (1)...(19): siRNA sense strand
ucuaccaugugcuggauga

SEQ ID NO: 1469891 - RNA, 19 nt, Homo sapiens
  misc_RNA (1)...(19): siRNA sense strand
agacccacgucaccaagga

SEQ ID NO: 1469892 - RNA, 19 nt, Homo sapiens
  misc_RNA (1)...(19): siRNA sense strand
acaaaguggauggcauaua

SEQ ID NO: 1469893 - RNA, 19 nt, Homo sapiens
  misc_RNA (1)...(19): siRNA sense strand
gugcagucaucaccaagca

SEQ ID NO: 1469894 - RNA, 19 nt, Homo sapiens
  misc_RNA (1)...(19): siRNA sense strand
guggacuccuccucugaga

SEQ ID NO: 1469895 - RNA, 19 nt, Homo sapiens
  misc_RNA (1)...(19): siRNA sense strand
gagagccccuuccucauuc

SEQ ID NO: 1469896 - RNA, 19 nt, Homo sapiens
  misc_RNA (1)...(19): siRNA sense strand
ggaaaucuacugggguuuu

SEQ ID NO: 1469897 - RNA, 19 nt, Homo sapiens
  misc_RNA (1)...(19): siRNA sense strand
ggaaucccagacaaccauu

SEQ ID NO: 1469898 - RNA, 19 nt, Homo sapiens
  misc_RNA (1)...(19): siRNA sense strand
gggcacagcaacgugagaa

SEQ ID NO: 1469899 - RNA, 19 nt, Homo sapiens
  misc_RNA (1)...(19): siRNA sense strand
ccuguucgcugccacuuuu

SEQ ID NO: 1469900 - RNA, 19 nt, Homo sapiens
  misc_RNA (1)...(19): siRNA sense strand
uggcauauaccuacucuac

SEQ ID NO: 1469901 - RNA, 19 nt, Homo sapiens
  misc_RNA (1)...(19): siRNA sense strand
caugaaguggagauacaaa

SEQ ID NO: 1469902 - RNA, 19 nt, Homo sapiens
  misc_RNA (1)...(19): siRNA sense strand
ugaggacacuuuuauuaca

SEQ ID NO: 1469903 - RNA, 19 nt, Homo sapiens
  misc_RNA (1)...(19): siRNA sense strand
gugauucagguagccaaua

SEQ ID NO: 1469904 - RNA, 19 nt, Homo sapiens
  misc_RNA (1)...(19): siRNA sense strand
gcccagauugcacauuuua

SEQ ID NO: 1469905 - RNA, 19 nt, Homo sapiens
  misc_RNA (1)...(19): siRNA sense strand
cagucaguuugaacagauu

SEQ ID NO: 1469906 - RNA, 19 nt, Homo sapiens
  misc_RNA (1)...(19): siRNA sense strand
cccaaaaccuaaaggagaa

SEQ ID NO: 1469907 - RNA, 19 nt, Homo sapiens
  misc_RNA (1)...(19): siRNA sense strand
gaaucccagacaaccauug

SEQ ID NO: 1469908 - RNA, 19 nt, Homo sapiens
  misc_RNA (1)...(19): siRNA sense strand
ccuaaaggagaaggaguuu

SEQ ID NO: 1469909 - RNA, 19 nt, Homo sapiens
  misc_RNA (1)...(19): siRNA sense strand
gagaagaucuuucagaauc

SEQ ID NO: 1469910 - RNA, 19 nt, Homo sapiens
  misc_RNA (1)...(19): siRNA sense strand
gagcaugucuuuacagauc

SEQ ID NO: 1469911 - RNA, 19 nt, Homo sapiens
  misc_RNA (1)...(19): siRNA sense strand
ccaggaaacuagaaaugua

SEQ ID NO: 1469912 - RNA, 19 nt, Homo sapiens
  misc_RNA (1)...(19): siRNA sense strand
acaaagaucucaguggaua

SEQ ID NO: 1469913 - RNA, 19 nt, Homo sapiens
  misc_RNA (1)...(19): siRNA sense strand
ugacucagaugcauauaaa

SEQ ID NO: 1469914 - RNA, 19 nt, Homo sapiens
  misc_RNA (1)...(19): siRNA sense strand
gcaaacacauugaaguaca

SEQ ID NO: 1469915 - RNA, 19 nt, Homo sapiens
  misc_RNA (1)...(19): siRNA sense strand
gucaaacuaucaccucuua

SEQ ID NO: 1469916 - RNA, 19 nt, Homo sapiens
  misc_RNA (1)...(19): siRNA sense strand
gaagaauuauccagucuag

SEQ ID NO: 1469917 - RNA, 19 nt, Homo sapiens
  misc_RNA (1)...(19): siRNA sense strand
gaugagcuuucugauguua

SEQ ID NO: 1469918 - RNA, 19 nt, Homo sapiens
  misc_RNA (1)...(19): siRNA sense strand
gcaacaauuccuacugaua

SEQ ID NO: 1469919 - RNA, 19 nt, Homo sapiens
  misc_RNA (1)...(19): siRNA sense strand
uaucaguacugccaaauga

SEQ ID NO: 1469920 - RNA, 19 nt, Homo sapiens
  misc_RNA (1)...(19): siRNA sense strand
gcaacauccuagacaguuu

SEQ ID NO: 1469921 - RNA, 19 nt, Homo sapiens
  misc_RNA (1)...(19): siRNA sense strand
gagauaagcaaacacauug

SEQ ID NO: 1469922 - RNA, 19 nt, Homo sapiens
  misc_RNA (1)...(19): siRNA sense strand
gcauagagaacaaagcuuu

SEQ ID NO: 1469923 - RNA, 19 nt, Homo sapiens
  misc_RNA (1)...(19): siRNA sense strand
agaacgcccuauaucauua

SEQ ID NO: 1469924 - RNA, 19 nt, Homo sapiens
  misc_RNA (1)...(19): siRNA sense strand
uuacagaugcgccaaauaa

SEQ ID NO: 1469925 - RNA, 19 nt, Homo sapiens
  misc_RNA (1)...(19): siRNA sense strand
ggauaaaccaccagaaaug

SEQ ID NO: 1469926 - RNA, 19 nt, Homo sapiens
  misc_RNA (1)...(19): siRNA sense strand
acaaggauguugcugguuu

SEQ ID NO: 1469927 - RNA, 19 nt, Homo sapiens
  misc_RNA (1)...(19): siRNA sense strand
caaggcggaucuaaagcua

SEQ ID NO: 1469928 - RNA, 19 nt, Homo sapiens
  misc_RNA (1)...(19): siRNA sense strand
gaagggaaucguguuagua

SEQ ID NO: 1469929 - RNA, 19 nt, Homo sapiens
  misc_RNA (1)...(19): siRNA sense strand
gagagaagaagcccagaaa

SEQ ID NO: 1469930 - RNA, 19 nt, Homo sapiens
  misc_RNA (1)...(19): siRNA sense strand
ugaagaaacugaagcuagu

SEQ ID NO: 1469931 - RNA, 19 nt, Homo sapiens
  misc_RNA (1)...(19): siRNA sense strand
uacagaaucucucuuugaa

SEQ ID NO: 1469932 - RNA, 19 nt, Homo sapiens
  misc_RNA (1)...(19): siRNA sense strand
gaucugagcaauggaaauu

SEQ ID NO: 1469933 - RNA, 19 nt, Homo sapiens
  misc_RNA (1)...(19): siRNA sense strand
gcaaugacucagaugcaua

SEQ ID NO: 1469934 - RNA, 19 nt, Homo sapiens
  misc_RNA (1)...(19): siRNA sense strand
caauacagaaucucucuuu

SEQ ID NO: 1469935 - RNA, 19 nt, Homo sapiens
  misc_RNA (1)...(19): siRNA sense strand
ccaaaggcauagagaacaa

SEQ ID NO: 1469936 - RNA, 19 nt, Homo sapiens
  misc_RNA (1)...(19): siRNA sense strand
ggagauggauugcuuacac

SEQ ID NO: 1469937 - RNA, 19 nt, Homo sapiens
  misc_RNA (1)...(19): siRNA sense strand
caauggaaauuucaggaau

SEQ ID NO: 1469938 - RNA, 19 nt, Homo sapiens
  misc_RNA (1)...(19): siRNA sense strand
aggaugagcuuucugaugu

SEQ ID NO: 1469939 - RNA, 19 nt, Homo sapiens
  misc_RNA (1)...(19): siRNA sense strand
gaauuauccagucuaguuu

SEQ ID NO: 1469940 - RNA, 19 nt, Homo sapiens
  misc_RNA (1)...(19): siRNA sense strand
aagauucgauucucaguau

SEQ ID NO: 1469941 - RNA, 19 nt, Homo sapiens
  misc_RNA (1)...(19): siRNA sense strand
gaguucagaucccagaaga

SEQ ID NO: 1469942 - RNA, 19 nt, Homo sapiens
  misc_RNA (1)...(19): siRNA sense strand
caaacuaucaccucuuaga

SEQ ID NO: 1469943 - RNA, 19 nt, Homo sapiens
  misc_RNA (1)...(19): siRNA sense strand
agacuacccugcaggagaa

SEQ ID NO: 1469944 - RNA, 19 nt, Homo sapiens
  misc_RNA (1)...(19): siRNA sense strand
guauguccauucaucugua

SEQ ID NO: 1469945 - RNA, 19 nt, Homo sapiens
  misc_RNA (1)...(19): siRNA sense strand
aaacuggcgucuacacaga

SEQ ID NO: 1469946 - RNA, 19 nt, Homo sapiens
  misc_RNA (1)...(19): siRNA sense strand
ggaagaaaacgaaggauuu

SEQ ID NO: 1469947 - RNA, 19 nt, Homo sapiens
  misc_RNA (1)...(19): siRNA sense strand
cuacacagagcaugucuuu

SEQ ID NO: 1469948 - RNA, 19 nt, Homo sapiens
  misc_RNA (1)...(19): siRNA sense strand
aggagaagaucuuucagaa

SEQ ID NO: 1469949 - RNA, 19 nt, Homo sapiens
  misc_RNA (1)...(19): siRNA sense strand
ggauguugcugguuuggau

SEQ ID NO: 1469950 - RNA, 19 nt, Homo sapiens
  misc_RNA (1)...(19): siRNA sense strand
gaagaaaagucagaaguuc

SEQ ID NO: 1469951 - RNA, 19 nt, Homo sapiens
  misc_RNA (1)...(19): siRNA sense strand
uggcaacaauuccuacuga

SEQ ID NO: 1469952 - RNA, 19 nt, Homo sapiens
  misc_RNA (1)...(19): siRNA sense strand
cagagcaugucuuuacaga

SEQ ID NO: 1469953 - RNA, 19 nt, Homo sapiens
  misc_RNA (1)...(19): siRNA sense strand
gcacucauucggcuacaaa

SEQ ID NO: 1469954 - RNA, 19 nt, Homo sapiens
  misc_RNA (1)...(19): siRNA sense strand
agaauuauccagucuaguu

SEQ ID NO: 1469955 - RNA, 19 nt, Homo sapiens
  misc_RNA (1)...(19): siRNA sense strand
acaaacagguaaccaaugg

SEQ ID NO: 1469956 - RNA, 19 nt, Homo sapiens
  misc_RNA (1)...(19): siRNA sense strand
gauaagcaaacacauugaa

SEQ ID NO: 1469957 - RNA, 19 nt, Homo sapiens
  misc_RNA (1)...(19): siRNA sense strand
gcaauggaaauuucaggaa

SEQ ID NO: 1469958 - RNA, 19 nt, Homo sapiens
  misc_RNA (1)...(19): siRNA sense strand
caacaauuccuacugauac

SEQ ID NO: 1469959 - RNA, 19 nt, Homo sapiens
  misc_RNA (1)...(19): siRNA sense strand
gaagaagcccagaaaauga

SEQ ID NO: 1469960 - RNA, 19 nt, Homo sapiens
  misc_RNA (1)...(19): siRNA sense strand
ggaaguaugacaagcaaca

SEQ ID NO: 1469961 - RNA, 19 nt, Homo sapiens
  misc_RNA (1)...(19): siRNA sense strand
gaauuaagucaaccacguu

SEQ ID NO: 1469962 - RNA, 19 nt, Homo sapiens
  misc_RNA (1)...(19): siRNA sense strand
aagcaaacacauugaagua

SEQ ID NO: 1469963 - RNA, 19 nt, Homo sapiens
  misc_RNA (1)...(19): siRNA sense strand
cuacugauacucccuuaaa

SEQ ID NO: 1469964 - RNA, 19 nt, Homo sapiens
  misc_RNA (1)...(19): siRNA sense strand
caacagcuaauucagaugu

SEQ ID NO: 1469965 - RNA, 19 nt, Homo sapiens
  misc_RNA (1)...(19): siRNA sense strand
cagaguaguuuagauaagu

SEQ ID NO: 1469966 - RNA, 19 nt, Homo sapiens
  misc_RNA (1)...(19): siRNA sense strand
ucucagaguaguuuagaua

SEQ ID NO: 1469967 - RNA, 19 nt, Homo sapiens
  misc_RNA (1)...(19): siRNA sense strand
guacaaacagguaaccaau

SEQ ID NO: 1469968 - RNA, 19 nt, Homo sapiens
  misc_RNA (1)...(19): siRNA sense strand
gaaggauuugugaagguua

SEQ ID NO: 1469969 - RNA, 19 nt, Homo sapiens
  misc_RNA (1)...(19): siRNA sense strand
ggaugagcuuucugauguu

SEQ ID NO: 1469970 - RNA, 19 nt, Homo sapiens
  misc_RNA (1)...(19): siRNA sense strand
gaaaagaacgcccuauauc

SEQ ID NO: 1469971 - RNA, 19 nt, Homo sapiens
  misc_RNA (1)...(19): siRNA sense strand
gauggugguucuguuguug

SEQ ID NO: 1469972 - RNA, 19 nt, Homo sapiens
  misc_RNA (1)...(19): siRNA sense strand
cgaaggauuugugaagguu

SEQ ID NO: 1469973 - RNA, 19 nt, Homo sapiens
  misc_RNA (1)...(19): siRNA sense strand
aaagaucucaguggauaua

SEQ ID NO: 1469974 - RNA, 19 nt, Homo sapiens
  misc_RNA (1)...(19): siRNA sense strand
acacagagcaugucuuuac

SEQ ID NO: 1469975 - RNA, 19 nt, Homo sapiens
  misc_RNA (1)...(19): siRNA sense strand
ggagaagaucuuucagaau

SEQ ID NO: 1469976 - RNA, 19 nt, Homo sapiens
  misc_RNA (1)...(19): siRNA sense strand
gaacagcagaaggaguuaa

SEQ ID NO: 1469977 - RNA, 19 nt, Homo sapiens
  misc_RNA (1)...(19): siRNA sense strand
ggauacagaaggcaguaaa

SEQ ID NO: 1469978 - RNA, 19 nt, Homo sapiens
  misc_RNA (1)...(19): siRNA sense strand
aagcacauguucagaagga

SEQ ID NO: 1469979 - RNA, 19 nt, Homo sapiens
  misc_RNA (1)...(19): siRNA sense strand
caaggauguugcugguuug

SEQ ID NO: 1469980 - RNA, 19 nt, Homo sapiens
  misc_RNA (1)...(19): siRNA sense strand
gaagaagcaacugaagcua

SEQ ID NO: 1469981 - RNA, 19 nt, Homo sapiens
  misc_RNA (1)...(19): siRNA sense strand
caacagcucagcagagaca

SEQ ID NO: 1469982 - RNA, 19 nt, Homo sapiens
  misc_RNA (1)...(19): siRNA sense strand
aaucagagauaagcaaaca

SEQ ID NO: 1469983 - RNA, 19 nt, Homo sapiens
  misc_RNA (1)...(19): siRNA sense strand
guggacaucucccaaacug

SEQ ID NO: 1469984 - RNA, 19 nt, Homo sapiens
  misc_RNA (1)...(19): siRNA sense strand
caucaacagcuaauucaga

SEQ ID NO: 1469985 - RNA, 19 nt, Homo sapiens
  misc_RNA (1)...(19): siRNA sense strand
agaagcaacugaagcuaca

SEQ ID NO: 1469986 - RNA, 19 nt, Homo sapiens
  misc_RNA (1)...(19): siRNA sense strand
ugaaggaugagcuuucuga

SEQ ID NO: 1469987 - RNA, 19 nt, Homo sapiens
  misc_RNA (1)...(19): siRNA sense strand
ggauauaaagguucaagca

SEQ ID NO: 1469988 - RNA, 19 nt, Homo sapiens
  misc_RNA (1)...(19): siRNA sense strand
auaccagccugaaggauga

SEQ ID NO: 1469989 - RNA, 19 nt, Homo sapiens
  misc_RNA (1)...(19): siRNA sense strand
ugaagggaaucguguuagu

SEQ ID NO: 1469990 - RNA, 19 nt, Homo sapiens
  misc_RNA (1)...(19): siRNA sense strand
aaauaucaguacugccaaa

SEQ ID NO: 1469991 - RNA, 19 nt, Homo sapiens
  misc_RNA (1)...(19): siRNA sense strand
ucagaugcauauaaagauc

SEQ ID NO: 1469992 - RNA, 19 nt, Homo sapiens
  misc_RNA (1)...(19): siRNA sense strand
gaagaccucuccccagugu

SEQ ID NO: 1469993 - RNA, 19 nt, Homo sapiens
  misc_RNA (1)...(19): siRNA sense strand
aaagaacgcccuauaucau

SEQ ID NO: 1469994 - RNA, 19 nt, Homo sapiens
  misc_RNA (1)...(19): siRNA sense strand
gaaauggaagcagaaaaua

SEQ ID NO: 1469995 - RNA, 19 nt, Homo sapiens
  misc_RNA (1)...(19): siRNA sense strand
ucacagugguugguuguuc

SEQ ID NO: 1469996 - RNA, 19 nt, Homo sapiens
  misc_RNA (1)...(19): siRNA sense strand
gcaucuuuauguggaagua

SEQ ID NO: 1469997 - RNA, 19 nt, Homo sapiens
  misc_RNA (1)...(19): siRNA sense strand
caaccacguucucauacca

SEQ ID NO: 1469998 - RNA, 19 nt, Homo sapiens
  misc_RNA (1)...(19): siRNA sense strand
guggaaguaugacaagcaa

SEQ ID NO: 1469999 - RNA, 19 nt, Homo sapiens
  misc_RNA (1)...(19): siRNA sense strand
agucagaaguucaagcaau

SEQ ID NO: 1470000 - RNA, 19 nt, Homo sapiens
  misc_RNA (1)...(19): siRNA sense strand
guacagguagcccaggaaa

SEQ ID NO: 1470001 - RNA, 19 nt, Homo sapiens
  misc_RNA (1)...(19): siRNA sense strand
agagauaagcaaacacauu

SEQ ID NO: 1470002 - RNA, 19 nt, Homo sapiens
  misc_RNA (1)...(19): siRNA sense strand
cagaugcgccaaauaaauc

SEQ ID NO: 1470003 - RNA, 19 nt, Homo sapiens
  misc_RNA (1)...(19): siRNA sense strand
aaacgaaggauuugugaag

SEQ ID NO: 1470004 - RNA, 19 nt, Homo sapiens
  misc_RNA (1)...(19): siRNA sense strand
caaugacucagaugcauau

SEQ ID NO: 1470005 - RNA, 19 nt, Homo sapiens
  misc_RNA (1)...(19): siRNA sense strand
guuugcaacucucauguuc

SEQ ID NO: 1470006 - RNA, 19 nt, Homo sapiens
  misc_RNA (1)...(19): siRNA sense strand
auacagaaucucucuuuga

SEQ ID NO: 1470007 - RNA, 19 nt, Homo sapiens
  misc_RNA (1)...(19): siRNA sense strand
cuccugagcuggauaugga

SEQ ID NO: 1470008 - RNA, 19 nt, Homo sapiens
  misc_RNA (1)...(19): siRNA sense strand
gucagaaguucaagcaauc

SEQ ID NO: 1470009 - RNA, 19 nt, Homo sapiens
  misc_RNA (1)...(19): siRNA sense strand
gagaagaucuuucagaauc

SEQ ID NO: 1470010 - RNA, 19 nt, Homo sapiens
  misc_RNA (1)...(19): siRNA sense strand
gagcaugucuuuacagauc

SEQ ID NO: 1470011 - RNA, 19 nt, Homo sapiens
  misc_RNA (1)...(19): siRNA sense strand
ccaggaaacuagaaaugua

SEQ ID NO: 1470012 - RNA, 19 nt, Homo sapiens
  misc_RNA (1)...(19): siRNA sense strand
acaaagaucucaguggaua

SEQ ID NO: 1470013 - RNA, 19 nt, Homo sapiens
  misc_RNA (1)...(19): siRNA sense strand
ugacucagaugcauauaaa

SEQ ID NO: 1470014 - RNA, 19 nt, Homo sapiens
  misc_RNA (1)...(19): siRNA sense strand
gcaaacacauugaaguaca

SEQ ID NO: 1470015 - RNA, 19 nt, Homo sapiens
  misc_RNA (1)...(19): siRNA sense strand
gucaaacuaucaccucuua

SEQ ID NO: 1470016 - RNA, 19 nt, Homo sapiens
  misc_RNA (1)...(19): siRNA sense strand
gaagaauuauccagucuag

SEQ ID NO: 1470017 - RNA, 19 nt, Homo sapiens
  misc_RNA (1)...(19): siRNA sense strand
gaugagcuuucugauguua

SEQ ID NO: 1470018 - RNA, 19 nt, Homo sapiens
  misc_RNA (1)...(19): siRNA sense strand
gcaacaauuccuacugaua

SEQ ID NO: 1470019 - RNA, 19 nt, Homo sapiens
  misc_RNA (1)...(19): siRNA sense strand
uaucaguacugccaaauga

SEQ ID NO: 1470020 - RNA, 19 nt, Homo sapiens
  misc_RNA (1)...(19): siRNA sense strand
gcaacauccuagacaguuu

SEQ ID NO: 1470021 - RNA, 19 nt, Homo sapiens
  misc_RNA (1)...(19): siRNA sense strand
gagauaagcaaacacauug

SEQ ID NO: 1470022 - RNA, 19 nt, Homo sapiens
  misc_RNA (1)...(19): siRNA sense strand
gcauagagaacaaagcuuu

SEQ ID NO: 1470023 - RNA, 19 nt, Homo sapiens
  misc_RNA (1)...(19): siRNA sense strand
agaacgcccuauaucauua

SEQ ID NO: 1470024 - RNA, 19 nt, Homo sapiens
  misc_RNA (1)...(19): siRNA sense strand
uuacagaugcgccaaauaa

SEQ ID NO: 1470025 - RNA, 19 nt, Homo sapiens
  misc_RNA (1)...(19): siRNA sense strand
ggauaaaccaccagaaaug

SEQ ID NO: 1470026 - RNA, 19 nt, Homo sapiens
  misc_RNA (1)...(19): siRNA sense strand
acaaggauguugcugguuu

SEQ ID NO: 1470027 - RNA, 19 nt, Homo sapiens
  misc_RNA (1)...(19): siRNA sense strand
caaggcggaucuaaagcua

SEQ ID NO: 1470028 - RNA, 19 nt, Homo sapiens
  misc_RNA (1)...(19): siRNA sense strand
gaagggaaucguguuagua

SEQ ID NO: 1470029 - RNA, 19 nt, Homo sapiens
  misc_RNA (1)...(19): siRNA sense strand
gagagaagaagcccagaaa

SEQ ID NO: 1470030 - RNA, 19 nt, Homo sapiens
  misc_RNA (1)...(19): siRNA sense strand
ugaagaaacugaagcuagu

SEQ ID NO: 1470031 - RNA, 19 nt, Homo sapiens
  misc_RNA (1)...(19): siRNA sense strand
uacagaaucucucuuugaa

SEQ ID NO: 1470032 - RNA, 19 nt, Homo sapiens
  misc_RNA (1)...(19): siRNA sense strand
gaucugagcaauggaaauu

SEQ ID NO: 1470033 - RNA, 19 nt, Homo sapiens
  misc_RNA (1)...(19): siRNA sense strand
gcaaugacucagaugcaua

SEQ ID NO: 1470034 - RNA, 19 nt, Homo sapiens
  misc_RNA (1)...(19): siRNA sense strand
caauacagaaucucucuuu

SEQ ID NO: 1470035 - RNA, 19 nt, Homo sapiens
  misc_RNA (1)...(19): siRNA sense strand
ccaaaggcauagagaacaa

SEQ ID NO: 1470036 - RNA, 19 nt, Homo sapiens
  misc_RNA (1)...(19): siRNA sense strand
ggagauggauugcuuacac

SEQ ID NO: 1470037 - RNA, 19 nt, Homo sapiens
  misc_RNA (1)...(19): siRNA sense strand
caauggaaauuucaggaau

SEQ ID NO: 1470038 - RNA, 19 nt, Homo sapiens
  misc_RNA (1)...(19): siRNA sense strand
aggaugagcuuucugaugu

SEQ ID NO: 1470039 - RNA, 19 nt, Homo sapiens
  misc_RNA (1)...(19): siRNA sense strand
gaauuauccagucuaguuu

SEQ ID NO: 1470040 - RNA, 19 nt, Homo sapiens
  misc_RNA (1)...(19): siRNA sense strand
aagauucgauucucaguau

SEQ ID NO: 1470041 - RNA, 19 nt, Homo sapiens
  misc_RNA (1)...(19): siRNA sense strand
gaguucagaucccagaaga

SEQ ID NO: 1470042 - RNA, 19 nt, Homo sapiens
  misc_RNA (1)...(19): siRNA sense strand
caaacuaucaccucuuaga

SEQ ID NO: 1470043 - RNA, 19 nt, Homo sapiens
  misc_RNA (1)...(19): siRNA sense strand
agacuacccugcaggagaa

SEQ ID NO: 1470044 - RNA, 19 nt, Homo sapiens
  misc_RNA (1)...(19): siRNA sense strand
guauguccauucaucugua

SEQ ID NO: 1470045 - RNA, 19 nt, Homo sapiens
  misc_RNA (1)...(19): siRNA sense strand
aaacuggcgucuacacaga

SEQ ID NO: 1470046 - RNA, 19 nt, Homo sapiens
  misc_RNA (1)...(19): siRNA sense strand
ggaagaaaacgaaggauuu

SEQ ID NO: 1470047 - RNA, 19 nt, Homo sapiens
  misc_RNA (1)...(19): siRNA sense strand
cuacacagagcaugucuuu

SEQ ID NO: 1470048 - RNA, 19 nt, Homo sapiens
  misc_RNA (1)...(19): siRNA sense strand
aggagaagaucuuucagaa

SEQ ID NO: 1470049 - RNA, 19 nt, Homo sapiens
  misc_RNA (1)...(19): siRNA sense strand
ggauguugcugguuuggau

SEQ ID NO: 1470050 - RNA, 19 nt, Homo sapiens
  misc_RNA (1)...(19): siRNA sense strand
gaagaaaagucagaaguuc

SEQ ID NO: 1470051 - RNA, 19 nt, Homo sapiens
  misc_RNA (1)...(19): siRNA sense strand
uggcaacaauuccuacuga

SEQ ID NO: 1470052 - RNA, 19 nt, Homo sapiens
  misc_RNA (1)...(19): siRNA sense strand
cagagcaugucuuuacaga

SEQ ID NO: 1470053 - RNA, 19 nt, Homo sapiens
  misc_RNA (1)...(19): siRNA sense strand
gcacucauucggcuacaaa

SEQ ID NO: 1470054 - RNA, 19 nt, Homo sapiens
  misc_RNA (1)...(19): siRNA sense strand
agaauuauccagucuaguu

SEQ ID NO: 1470055 - RNA, 19 nt, Homo sapiens
  misc_RNA (1)...(19): siRNA sense strand
acaaacagguaaccaaugg

SEQ ID NO: 1470056 - RNA, 19 nt, Homo sapiens
  misc_RNA (1)...(19): siRNA sense strand
gauaagcaaacacauugaa

SEQ ID NO: 1470057 - RNA, 19 nt, Homo sapiens
  misc_RNA (1)...(19): siRNA sense strand
gcaauggaaauuucaggaa

SEQ ID NO: 1470058 - RNA, 19 nt, Homo sapiens
  misc_RNA (1)...(19): siRNA sense strand
caacaauuccuacugauac

SEQ ID NO: 1470059 - RNA, 19 nt, Homo sapiens
  misc_RNA (1)...(19): siRNA sense strand
gaagaagcccagaaaauga

SEQ ID NO: 1470060 - RNA, 19 nt, Homo sapiens
  misc_RNA (1)...(19): siRNA sense strand
ggaaguaugacaagcaaca

SEQ ID NO: 1470061 - RNA, 19 nt, Homo sapiens
  misc_RNA (1)...(19): siRNA sense strand
gaauuaagucaaccacguu

SEQ ID NO: 1470062 - RNA, 19 nt, Homo sapiens
  misc_RNA (1)...(19): siRNA sense strand
aagcaaacacauugaagua

SEQ ID NO: 1470063 - RNA, 19 nt, Homo sapiens
  misc_RNA (1)...(19): siRNA sense strand
cuacugauacucccuuaaa

SEQ ID NO: 1470064 - RNA, 19 nt, Homo sapiens
  misc_RNA (1)...(19): siRNA sense strand
caacagcuaauucagaugu

SEQ ID NO: 1470065 - RNA, 19 nt, Homo sapiens
  misc_RNA (1)...(19): siRNA sense strand
cagaguaguuuagauaagu

SEQ ID NO: 1470066 - RNA, 19 nt, Homo sapiens
  misc_RNA (1)...(19): siRNA sense strand
ucucagaguaguuuagaua

SEQ ID NO: 1470067 - RNA, 19 nt, Homo sapiens
  misc_RNA (1)...(19): siRNA sense strand
guacaaacagguaaccaau

SEQ ID NO: 1470068 - RNA, 19 nt, Homo sapiens
  misc_RNA (1)...(19): siRNA sense strand
gaaggauuugugaagguua

SEQ ID NO: 1470069 - RNA, 19 nt, Homo sapiens
  misc_RNA (1)...(19): siRNA sense strand
ggaugagcuuucugauguu

SEQ ID NO: 1470070 - RNA, 19 nt, Homo sapiens
  misc_RNA (1)...(19): siRNA sense strand
gaaaagaacgcccuauauc

SEQ ID NO: 1470071 - RNA, 19 nt, Homo sapiens
  misc_RNA (1)...(19): siRNA sense strand
gauggugguucuguuguug

SEQ ID NO: 1470072 - RNA, 19 nt, Homo sapiens
  misc_RNA (1)...(19): siRNA sense strand
cgaaggauuugugaagguu

SEQ ID NO: 1470073 - RNA, 19 nt, Homo sapiens
  misc_RNA (1)...(19): siRNA sense strand
aaagaucucaguggauaua

SEQ ID NO: 1470074 - RNA, 19 nt, Homo sapiens
  misc_RNA (1)...(19): siRNA sense strand
acacagagcaugucuuuac

SEQ ID NO: 1470075 - RNA, 19 nt, Homo sapiens
  misc_RNA (1)...(19): siRNA sense strand
ggagaagaucuuucagaau

SEQ ID NO: 1470076 - RNA, 19 nt, Homo sapiens
  misc_RNA (1)...(19): siRNA sense strand
gaacagcagaaggaguuaa

SEQ ID NO: 1470077 - RNA, 19 nt, Homo sapiens
  misc_RNA (1)...(19): siRNA sense strand
ggauacagaaggcaguaaa

SEQ ID NO: 1470078 - RNA, 19 nt, Homo sapiens
  misc_RNA (1)...(19): siRNA sense strand
aagcacauguucagaagga

SEQ ID NO: 1470079 - RNA, 19 nt, Homo sapiens
  misc_RNA (1)...(19): siRNA sense strand
caaggauguugcugguuug

SEQ ID NO: 1470080 - RNA, 19 nt, Homo sapiens
  misc_RNA (1)...(19): siRNA sense strand
gaagaagcaacugaagcua

SEQ ID NO: 1470081 - RNA, 19 nt, Homo sapiens
  misc_RNA (1)...(19): siRNA sense strand
caacagcucagcagagaca

SEQ ID NO: 1470082 - RNA, 19 nt, Homo sapiens
  misc_RNA (1)...(19): siRNA sense strand
aaucagagauaagcaaaca

SEQ ID NO: 1470083 - RNA, 19 nt, Homo sapiens
  misc_RNA (1)...(19): siRNA sense strand
guggacaucucccaaacug

SEQ ID NO: 1470084 - RNA, 19 nt, Homo sapiens
  misc_RNA (1)...(19): siRNA sense strand
caucaacagcuaauucaga

SEQ ID NO: 1470085 - RNA, 19 nt, Homo sapiens
  misc_RNA (1)...(19): siRNA sense strand
agaagcaacugaagcuaca

SEQ ID NO: 1470086 - RNA, 19 nt, Homo sapiens
  misc_RNA (1)...(19): siRNA sense strand
ugaaggaugagcuuucuga

SEQ ID NO: 1470087 - RNA, 19 nt, Homo sapiens
  misc_RNA (1)...(19): siRNA sense strand
ggauauaaagguucaagca

SEQ ID NO: 1470088 - RNA, 19 nt, Homo sapiens
  misc_RNA (1)...(19): siRNA sense strand
auaccagccugaaggauga

SEQ ID NO: 1470089 - RNA, 19 nt, Homo sapiens
  misc_RNA (1)...(19): siRNA sense strand
ugaagggaaucguguuagu

SEQ ID NO: 1470090 - RNA, 19 nt, Homo sapiens
  misc_RNA (1)...(19): siRNA sense strand
aaauaucaguacugccaaa

SEQ ID NO: 1470091 - RNA, 19 nt, Homo sapiens
  misc_RNA (1)...(19): siRNA sense strand
ucagaugcauauaaagauc

SEQ ID NO: 1470092 - RNA, 19 nt, Homo sapiens
  misc_RNA (1)...(19): siRNA sense strand
gaagaccucuccccagugu

SEQ ID NO: 1470093 - RNA, 19 nt, Homo sapiens
  misc_RNA (1)...(19): siRNA sense strand
aaagaacgcccuauaucau

SEQ ID NO: 1470094 - RNA, 19 nt, Homo sapiens
  misc_RNA (1)...(19): siRNA sense strand
gaaauggaagcagaaaaua

SEQ ID NO: 1470095 - RNA, 19 nt, Homo sapiens
  misc_RNA (1)...(19): siRNA sense strand
ucacagugguugguuguuc

SEQ ID NO: 1470096 - RNA, 19 nt, Homo sapiens
  misc_RNA (1)...(19): siRNA sense strand
gcaucuuuauguggaagua

SEQ ID NO: 1470097 - RNA, 19 nt, Homo sapiens
  misc_RNA (1)...(19): siRNA sense strand
caaccacguucucauacca

SEQ ID NO: 1470098 - RNA, 19 nt, Homo sapiens
  misc_RNA (1)...(19): siRNA sense strand
guggaaguaugacaagcaa

SEQ ID NO: 1470099 - RNA, 19 nt, Homo sapiens
  misc_RNA (1)...(19): siRNA sense strand
agucagaaguucaagcaau

SEQ ID NO: 1470100 - RNA, 19 nt, Homo sapiens
  misc_RNA (1)...(19): siRNA sense strand
guacagguagcccaggaaa

SEQ ID NO: 1470101 - RNA, 19 nt, Homo sapiens
  misc_RNA (1)...(19): siRNA sense strand
agagauaagcaaacacauu

SEQ ID NO: 1470102 - RNA, 19 nt, Homo sapiens
  misc_RNA (1)...(19): siRNA sense strand
cagaugcgccaaauaaauc

SEQ ID NO: 1470103 - RNA, 19 nt, Homo sapiens
  misc_RNA (1)...(19): siRNA sense strand
aaacgaaggauuugugaag

SEQ ID NO: 1470104 - RNA, 19 nt, Homo sapiens
  misc_RNA (1)...(19): siRNA sense strand
caaugacucagaugcauau

SEQ ID NO: 1470105 - RNA, 19 nt, Homo sapiens
  misc_RNA (1)...(19): siRNA sense strand
guuugcaacucucauguuc

SEQ ID NO: 1470106 - RNA, 19 nt, Homo sapiens
  misc_RNA (1)...(19): siRNA sense strand
auacagaaucucucuuuga

SEQ ID NO: 1470107 - RNA, 19 nt, Homo sapiens
  misc_RNA (1)...(19): siRNA sense strand
cuccugagcuggauaugga

SEQ ID NO: 1470108 - RNA, 19 nt, Homo sapiens
  misc_RNA (1)...(19): siRNA sense strand
gucagaaguucaagcaauc

SEQ ID NO: 1470109 - RNA, 19 nt, Homo sapiens
  misc_RNA (1)...(19): siRNA sense strand
cagaaacccuagaguauua

SEQ ID NO: 1470110 - RNA, 19 nt, Homo sapiens
  misc_RNA (1)...(19): siRNA sense strand
gaagugcucuguccugaaa

SEQ ID NO: 1470111 - RNA, 19 nt, Homo sapiens
  misc_RNA (1)...(19): siRNA sense strand
ggaaggacaucauugaaga

SEQ ID NO: 1470112 - RNA, 19 nt, Homo sapiens
  misc_RNA (1)...(19): siRNA sense strand
gcaggaagcucaucuugug

SEQ ID NO: 1470113 - RNA, 19 nt, Homo sapiens
  misc_RNA (1)...(19): siRNA sense strand
gaagauaucccuggacuuu

SEQ ID NO: 1470114 - RNA, 19 nt, Homo sapiens
  misc_RNA (1)...(19): siRNA sense strand
gaaaagaaauggaagauug

SEQ ID NO: 1470115 - RNA, 19 nt, Homo sapiens
  misc_RNA (1)...(19): siRNA sense strand
gaaggaaaccuaccuguga

SEQ ID NO: 1470116 - RNA, 19 nt, Homo sapiens
  misc_RNA (1)...(19): siRNA sense strand
caaggaagaugauacuuuc

SEQ ID NO: 1470117 - RNA, 19 nt, Homo sapiens
  misc_RNA (1)...(19): siRNA sense strand
gaacaaagaagcucacagu

SEQ ID NO: 1470118 - RNA, 19 nt, Homo sapiens
  misc_RNA (1)...(19): siRNA sense strand
gaucauagaacacacagaa

SEQ ID NO: 1470119 - RNA, 19 nt, Homo sapiens
  misc_RNA (1)...(19): siRNA sense strand
ggagaaaugugucaugaac

SEQ ID NO: 1470120 - RNA, 19 nt, Homo sapiens
  misc_RNA (1)...(19): siRNA sense strand
gaaagcaauucgucagauc

SEQ ID NO: 1470121 - RNA, 19 nt, Homo sapiens
  misc_RNA (1)...(19): siRNA sense strand
gaacaacuauuuuggcauu

SEQ ID NO: 1470122 - RNA, 19 nt, Homo sapiens
  misc_RNA (1)...(19): siRNA sense strand
gcacagaaccuacaagaac

SEQ ID NO: 1470123 - RNA, 19 nt, Homo sapiens
  misc_RNA (1)...(19): siRNA sense strand
agauaucccuggacuuuaa

SEQ ID NO: 1470124 - RNA, 19 nt, Homo sapiens
  misc_RNA (1)...(19): siRNA sense strand
ucucagggaugcacaauug

SEQ ID NO: 1470125 - RNA, 19 nt, Homo sapiens
  misc_RNA (1)...(19): siRNA sense strand
ucagucgccuguuaauuaa

SEQ ID NO: 1470126 - RNA, 19 nt, Homo sapiens
  misc_RNA (1)...(19): siRNA sense strand
cagcgaggauuccgaggua

SEQ ID NO: 1470127 - RNA, 19 nt, Homo sapiens
  misc_RNA (1)...(19): siRNA sense strand
agaaaugugucaugaacaa

SEQ ID NO: 1470128 - RNA, 19 nt, Homo sapiens
  misc_RNA (1)...(19): siRNA sense strand
ccaaacagaacaauucauu

SEQ ID NO: 1470129 - RNA, 19 nt, Homo sapiens
  misc_RNA (1)...(19): siRNA sense strand
ggagugcucuugccgagau

SEQ ID NO: 1470130 - RNA, 19 nt, Homo sapiens
  misc_RNA (1)...(19): siRNA sense strand
agucaucagucgccuguua

SEQ ID NO: 1470131 - RNA, 19 nt, Homo sapiens
  misc_RNA (1)...(19): siRNA sense strand
ccaaggaagaugauacuuu

SEQ ID NO: 1470132 - RNA, 19 nt, Homo sapiens
  misc_RNA (1)...(19): siRNA sense strand
ggugugaaguuccucagaa

SEQ ID NO: 1470133 - RNA, 19 nt, Homo sapiens
  misc_RNA (1)...(19): siRNA sense strand
gaauugcuguccuuaacau

SEQ ID NO: 1470134 - RNA, 19 nt, Homo sapiens
  misc_RNA (1)...(19): siRNA sense strand
ccaagauccuguacccaaa

SEQ ID NO: 1470135 - RNA, 19 nt, Homo sapiens
  misc_RNA (1)...(19): siRNA sense strand
cgaggaggcugaagaugga

SEQ ID NO: 1470136 - RNA, 19 nt, Homo sapiens
  misc_RNA (1)...(19): siRNA sense strand
gaaauggaagauuggauug

SEQ ID NO: 1470137 - RNA, 19 nt, Homo sapiens
  misc_RNA (1)...(19): siRNA sense strand
ggaccacacuggccucgau

SEQ ID NO: 1470138 - RNA, 19 nt, Homo sapiens
  misc_RNA (1)...(19): siRNA sense strand
ggcaaagucaaucauauuu

SEQ ID NO: 1470139 - RNA, 19 nt, Homo sapiens
  misc_RNA (1)...(19): siRNA sense strand
ugaaagagaagcuggauuc

SEQ ID NO: 1470140 - RNA, 19 nt, Homo sapiens
  misc_RNA (1)...(19): siRNA sense strand
gggaauugcuguccuuaac

SEQ ID NO: 1470141 - RNA, 19 nt, Homo sapiens
  misc_RNA (1)...(19): siRNA sense strand
ccagaaguuugacacauuc

SEQ ID NO: 1470142 - RNA, 19 nt, Homo sapiens
  misc_RNA (1)...(19): siRNA sense strand
ggcgaacgcuuuacuaugc

SEQ ID NO: 1470143 - RNA, 19 nt, Homo sapiens
  misc_RNA (1)...(19): siRNA sense strand
gcgaugagcacccagagaa

SEQ ID NO: 1470144 - RNA, 19 nt, Homo sapiens
  misc_RNA (1)...(19): siRNA sense strand
gguggagcgucauggcaua

SEQ ID NO: 1470145 - RNA, 19 nt, Homo sapiens
  misc_RNA (1)...(19): siRNA sense strand
gaacagggagcacuuugag

SEQ ID NO: 1470146 - RNA, 19 nt, Homo sapiens
  misc_RNA (1)...(19): siRNA sense strand
ccacccagauggaccaguu

SEQ ID NO: 1470147 - RNA, 19 nt, Homo sapiens
  misc_RNA (1)...(19): siRNA sense strand
aagauuggauugcagcauu

SEQ ID NO: 1470148 - RNA, 19 nt, Homo sapiens
  misc_RNA (1)...(19): siRNA sense strand
ggaaauggugaauaacuuc

SEQ ID NO: 1470149 - RNA, 19 nt, Homo sapiens
  misc_RNA (1)...(19): siRNA sense strand
gaugugguauggaguucuu

SEQ ID NO: 1470150 - RNA, 19 nt, Homo sapiens
  misc_RNA (1)...(19): siRNA sense strand
gaacgacuuggcccgagua

SEQ ID NO: 1470151 - RNA, 19 nt, Homo sapiens
  misc_RNA (1)...(19): siRNA sense strand
ugcgaggugugcaaauuua

SEQ ID NO: 1470152 - RNA, 19 nt, Homo sapiens
  misc_RNA (1)...(19): siRNA sense strand
uacagcagauucucuucua

SEQ ID NO: 1470153 - RNA, 19 nt, Homo sapiens
  misc_RNA (1)...(19): siRNA sense strand
agauuggauugcagcauua

SEQ ID NO: 1470154 - RNA, 19 nt, Homo sapiens
  misc_RNA (1)...(19): siRNA sense strand
ucacaguauccgagaaaua

SEQ ID NO: 1470155 - RNA, 19 nt, Homo sapiens
  misc_RNA (1)...(19): siRNA sense strand
ccagaaacccuagaguauu

SEQ ID NO: 1470156 - RNA, 19 nt, Homo sapiens
  misc_RNA (1)...(19): siRNA sense strand
gggaaggccuaugagaaga

SEQ ID NO: 1470157 - RNA, 19 nt, Homo sapiens
  misc_RNA (1)...(19): siRNA sense strand
ugaaguuccucagaagauu

SEQ ID NO: 1470158 - RNA, 19 nt, Homo sapiens
  misc_RNA (1)...(19): siRNA sense strand
caaccagggugugaaguuc

SEQ ID NO: 1470159 - RNA, 19 nt, Homo sapiens
  misc_RNA (1)...(19): siRNA sense strand
cacagacacugaccagaga

SEQ ID NO: 1470160 - RNA, 19 nt, Homo sapiens
  misc_RNA (1)...(19): siRNA sense strand
gaccagagacagggcauuu

SEQ ID NO: 1470161 - RNA, 19 nt, Homo sapiens
  misc_RNA (1)...(19): siRNA sense strand
ccacggcucucaacagcau

SEQ ID NO: 1470162 - RNA, 19 nt, Homo sapiens
  misc_RNA (1)...(19): siRNA sense strand
uggaaauggugaauaacuu

SEQ ID NO: 1470163 - RNA, 19 nt, Homo sapiens
  misc_RNA (1)...(19): siRNA sense strand
acaagaaccuggagcaaaa

SEQ ID NO: 1470164 - RNA, 19 nt, Homo sapiens
  misc_RNA (1)...(19): siRNA sense strand
ugaccaaacagaacaauuc

SEQ ID NO: 1470165 - RNA, 19 nt, Homo sapiens
  misc_RNA (1)...(19): siRNA sense strand
cauuaaagacugugcagaa

SEQ ID NO: 1470166 - RNA, 19 nt, Homo sapiens
  misc_RNA (1)...(19): siRNA sense strand
ccagagacagggcauuuga

SEQ ID NO: 1470167 - RNA, 19 nt, Homo sapiens
  misc_RNA (1)...(19): siRNA sense strand
uccagaaguuugacacauu

SEQ ID NO: 1470168 - RNA, 19 nt, Homo sapiens
  misc_RNA (1)...(19): siRNA sense strand
gcaauucgucagaucauag

SEQ ID NO: 1470169 - RNA, 19 nt, Homo sapiens
  misc_RNA (1)...(19): siRNA sense strand
acaaagaagcucacaguag

SEQ ID NO: 1470170 - RNA, 19 nt, Homo sapiens
  misc_RNA (1)...(19): siRNA sense strand
agaaauggaagauuggauu

SEQ ID NO: 1470171 - RNA, 19 nt, Homo sapiens
  misc_RNA (1)...(19): siRNA sense strand
aucagucgccuguuaauua

SEQ ID NO: 1470172 - RNA, 19 nt, Homo sapiens
  misc_RNA (1)...(19): siRNA sense strand
cgacuuggcccgaguacug

SEQ ID NO: 1470173 - RNA, 19 nt, Homo sapiens
  misc_RNA (1)...(19): siRNA sense strand
ccacuuggccugugcaaag

SEQ ID NO: 1470174 - RNA, 19 nt, Homo sapiens
  misc_RNA (1)...(19): siRNA sense strand
gcagaacagggagcacuuu

SEQ ID NO: 1470175 - RNA, 19 nt, Homo sapiens
  misc_RNA (1)...(19): siRNA sense strand
gggaagacaagcagaagug

SEQ ID NO: 1470176 - RNA, 19 nt, Homo sapiens
  misc_RNA (1)...(19): siRNA sense strand
uuucgcagcuccaucauuc

SEQ ID NO: 1470177 - RNA, 19 nt, Homo sapiens
  misc_RNA (1)...(19): siRNA sense strand
cggccaaagugcucuguga

SEQ ID NO: 1470178 - RNA, 19 nt, Homo sapiens
  misc_RNA (1)...(19): siRNA sense strand
gaucgggaaggacaucauu

SEQ ID NO: 1470179 - RNA, 19 nt, Homo sapiens
  misc_RNA (1)...(19): siRNA sense strand
cagcauggaccacuucuca

SEQ ID NO: 1470180 - RNA, 19 nt, Homo sapiens
  misc_RNA (1)...(19): siRNA sense strand
caccucggcuuacgguuau

SEQ ID NO: 1470181 - RNA, 19 nt, Homo sapiens
  misc_RNA (1)...(19): siRNA sense strand
uccuggaaauggugaauaa

SEQ ID NO: 1470182 - RNA, 19 nt, Homo sapiens
  misc_RNA (1)...(19): siRNA sense strand
gccaacagccugaagaaag

SEQ ID NO: 1470183 - RNA, 19 nt, Homo sapiens
  misc_RNA (1)...(19): siRNA sense strand
gagagagccagcaccaaga

SEQ ID NO: 1470184 - RNA, 19 nt, Homo sapiens
  misc_RNA (1)...(19): siRNA sense strand
gcacaagcccacuguuggu

SEQ ID NO: 1470185 - RNA, 19 nt, Homo sapiens
  misc_RNA (1)...(19): siRNA sense strand
gauccuguguggcaucaag

SEQ ID NO: 1470186 - RNA, 19 nt, Homo sapiens
  misc_RNA (1)...(19): siRNA sense strand
ggccgucucucgagucauc

SEQ ID NO: 1470187 - RNA, 19 nt, Homo sapiens
  misc_RNA (1)...(19): siRNA sense strand
gcaggagccgaaccaagaa

SEQ ID NO: 1470188 - RNA, 19 nt, Homo sapiens
  misc_RNA (1)...(19): siRNA sense strand
gagccaacagccugaagaa

SEQ ID NO: 1470189 - RNA, 19 nt, Homo sapiens
  misc_RNA (1)...(19): siRNA sense strand
cagaggucauggccaagaa

SEQ ID NO: 1470190 - RNA, 19 nt, Homo sapiens
  misc_RNA (1)...(19): siRNA sense strand
cggcaaagucaaucauauu

SEQ ID NO: 1470191 - RNA, 19 nt, Homo sapiens
  misc_RNA (1)...(19): siRNA sense strand
acaccucggcuuacgguua

SEQ ID NO: 1470192 - RNA, 19 nt, Homo sapiens
  misc_RNA (1)...(19): siRNA sense strand
gccucaaccuucauaaaca

SEQ ID NO: 1470193 - RNA, 19 nt, Homo sapiens
  misc_RNA (1)...(19): siRNA sense strand
ccaaauguccgggcuggaa

SEQ ID NO: 1470194 - RNA, 19 nt, Homo sapiens
  misc_RNA (1)...(19): siRNA sense strand
ccaacagccugaagaaagc

SEQ ID NO: 1470195 - RNA, 19 nt, Homo sapiens
  misc_RNA (1)...(19): siRNA sense strand
gcagauucucuucuaugaa

SEQ ID NO: 1470196 - RNA, 19 nt, Homo sapiens
  misc_RNA (1)...(19): siRNA sense strand
gcaaauuuaaggcccacaa

SEQ ID NO: 1470197 - RNA, 19 nt, Homo sapiens
  misc_RNA (1)...(19): siRNA sense strand
ggaauugcuguccuuaaca

SEQ ID NO: 1470198 - RNA, 19 nt, Homo sapiens
  misc_RNA (1)...(19): siRNA sense strand
gaccaaacagaacaauuca

SEQ ID NO: 1470199 - RNA, 19 nt, Homo sapiens
  misc_RNA (1)...(19): siRNA sense strand
aaccagaaacccuagagua

SEQ ID NO: 1470200 - RNA, 19 nt, Homo sapiens
  misc_RNA (1)...(19): siRNA sense strand
cagaagauucaaacagcua

SEQ ID NO: 1470201 - RNA, 19 nt, Homo sapiens
  misc_RNA (1)...(19): siRNA sense strand
gaaguuccucagaagauuc

SEQ ID NO: 1470202 - RNA, 19 nt, Homo sapiens
  misc_RNA (1)...(19): siRNA sense strand
ggacaaccagggugugaag

SEQ ID NO: 1470203 - RNA, 19 nt, Homo sapiens
  misc_RNA (1)...(19): siRNA sense strand
gaaggacaucauugaagau

SEQ ID NO: 1470204 - RNA, 19 nt, Homo sapiens
  misc_RNA (1)...(19): siRNA sense strand
cgacgaagagagugugaug

SEQ ID NO: 1470205 - RNA, 19 nt, Homo sapiens
  misc_RNA (1)...(19): siRNA sense strand
ucagggaauugcuguccuu

SEQ ID NO: 1470206 - RNA, 19 nt, Homo sapiens
  misc_RNA (1)...(19): siRNA sense strand
caaccuucauaaacagugu

SEQ ID NO: 1470207 - RNA, 19 nt, Homo sapiens
  misc_RNA (1)...(19): siRNA sense strand
gauucaaacagcuacuaaa

SEQ ID NO: 1470208 - RNA, 19 nt, Homo sapiens
  misc_RNA (1)...(19): siRNA sense strand
gaagaugcagaugggauug

SEQ ID NO: 1470209 - RNA, 19 nt, Homo sapiens
  misc_RNA (1)...(19): siRNA sense strand
cagaaacccuagaguauua

SEQ ID NO: 1470210 - RNA, 19 nt, Homo sapiens
  misc_RNA (1)...(19): siRNA sense strand
gaagugcucuguccugaaa

SEQ ID NO: 1470211 - RNA, 19 nt, Homo sapiens
  misc_RNA (1)...(19): siRNA sense strand
ggaaggacaucauugaaga

SEQ ID NO: 1470212 - RNA, 19 nt, Homo sapiens
  misc_RNA (1)...(19): siRNA sense strand
gcaggaagcucaucuugug

SEQ ID NO: 1470213 - RNA, 19 nt, Homo sapiens
  misc_RNA (1)...(19): siRNA sense strand
gaagauaucccuggacuuu

SEQ ID NO: 1470214 - RNA, 19 nt, Homo sapiens
  misc_RNA (1)...(19): siRNA sense strand
gaaaagaaauggaagauug

SEQ ID NO: 1470215 - RNA, 19 nt, Homo sapiens
  misc_RNA (1)...(19): siRNA sense strand
gaaggaaaccuaccuguga

SEQ ID NO: 1470216 - RNA, 19 nt, Homo sapiens
  misc_RNA (1)...(19): siRNA sense strand
caaggaagaugauacuuuc

SEQ ID NO: 1470217 - RNA, 19 nt, Homo sapiens
  misc_RNA (1)...(19): siRNA sense strand
gaacaaagaagcucacagu

SEQ ID NO: 1470218 - RNA, 19 nt, Homo sapiens
  misc_RNA (1)...(19): siRNA sense strand
gaucauagaacacacagaa

SEQ ID NO: 1470219 - RNA, 19 nt, Homo sapiens
  misc_RNA (1)...(19): siRNA sense strand
ggagaaaugugucaugaac

SEQ ID NO: 1470220 - RNA, 19 nt, Homo sapiens
  misc_RNA (1)...(19): siRNA sense strand
gaaagcaauucgucagauc

SEQ ID NO: 1470221 - RNA, 19 nt, Homo sapiens
  misc_RNA (1)...(19): siRNA sense strand
gaacaacuauuuuggcauu

SEQ ID NO: 1470222 - RNA, 19 nt, Homo sapiens
  misc_RNA (1)...(19): siRNA sense strand
gcacagaaccuacaagaac

SEQ ID NO: 1470223 - RNA, 19 nt, Homo sapiens
  misc_RNA (1)...(19): siRNA sense strand
agauaucccuggacuuuaa

SEQ ID NO: 1470224 - RNA, 19 nt, Homo sapiens
  misc_RNA (1)...(19): siRNA sense strand
ucucagggaugcacaauug

SEQ ID NO: 1470225 - RNA, 19 nt, Homo sapiens
  misc_RNA (1)...(19): siRNA sense strand
ucagucgccuguuaauuaa

SEQ ID NO: 1470226 - RNA, 19 nt, Homo sapiens
  misc_RNA (1)...(19): siRNA sense strand
cagcgaggauuccgaggua

SEQ ID NO: 1470227 - RNA, 19 nt, Homo sapiens
  misc_RNA (1)...(19): siRNA sense strand
agaaaugugucaugaacaa

SEQ ID NO: 1470228 - RNA, 19 nt, Homo sapiens
  misc_RNA (1)...(19): siRNA sense strand
ccaaacagaacaauucauu

SEQ ID NO: 1470229 - RNA, 19 nt, Homo sapiens
  misc_RNA (1)...(19): siRNA sense strand
ggagugcucuugccgagau

SEQ ID NO: 1470230 - RNA, 19 nt, Homo sapiens
  misc_RNA (1)...(19): siRNA sense strand
agucaucagucgccuguua

SEQ ID NO: 1470231 - RNA, 19 nt, Homo sapiens
  misc_RNA (1)...(19): siRNA sense strand
ccaaggaagaugauacuuu

SEQ ID NO: 1470232 - RNA, 19 nt, Homo sapiens
  misc_RNA (1)...(19): siRNA sense strand
ggugugaaguuccucagaa

SEQ ID NO: 1470233 - RNA, 19 nt, Homo sapiens
  misc_RNA (1)...(19): siRNA sense strand
gaauugcuguccuuaacau

SEQ ID NO: 1470234 - RNA, 19 nt, Homo sapiens
  misc_RNA (1)...(19): siRNA sense strand
ccaagauccuguacccaaa

SEQ ID NO: 1470235 - RNA, 19 nt, Homo sapiens
  misc_RNA (1)...(19): siRNA sense strand
cgaggaggcugaagaugga

SEQ ID NO: 1470236 - RNA, 19 nt, Homo sapiens
  misc_RNA (1)...(19): siRNA sense strand
gaaauggaagauuggauug

SEQ ID NO: 1470237 - RNA, 19 nt, Homo sapiens
  misc_RNA (1)...(19): siRNA sense strand
ggaccacacuggccucgau

SEQ ID NO: 1470238 - RNA, 19 nt, Homo sapiens
  misc_RNA (1)...(19): siRNA sense strand
ggcaaagucaaucauauuu

SEQ ID NO: 1470239 - RNA, 19 nt, Homo sapiens
  misc_RNA (1)...(19): siRNA sense strand
ugaaagagaagcuggauuc

SEQ ID NO: 1470240 - RNA, 19 nt, Homo sapiens
  misc_RNA (1)...(19): siRNA sense strand
gggaauugcuguccuuaac

SEQ ID NO: 1470241 - RNA, 19 nt, Homo sapiens
  misc_RNA (1)...(19): siRNA sense strand
ccagaaguuugacacauuc

SEQ ID NO: 1470242 - RNA, 19 nt, Homo sapiens
  misc_RNA (1)...(19): siRNA sense strand
ggcgaacgcuuuacuaugc

SEQ ID NO: 1470243 - RNA, 19 nt, Homo sapiens
  misc_RNA (1)...(19): siRNA sense strand
gcgaugagcacccagagaa

SEQ ID NO: 1470244 - RNA, 19 nt, Homo sapiens
  misc_RNA (1)...(19): siRNA sense strand
gguggagcgucauggcaua

SEQ ID NO: 1470245 - RNA, 19 nt, Homo sapiens
  misc_RNA (1)...(19): siRNA sense strand
gaacagggagcacuuugag

SEQ ID NO: 1470246 - RNA, 19 nt, Homo sapiens
  misc_RNA (1)...(19): siRNA sense strand
ccacccagauggaccaguu

SEQ ID NO: 1470247 - RNA, 19 nt, Homo sapiens
  misc_RNA (1)...(19): siRNA sense strand
aagauuggauugcagcauu

SEQ ID NO: 1470248 - RNA, 19 nt, Homo sapiens
  misc_RNA (1)...(19): siRNA sense strand
ggaaauggugaauaacuuc

SEQ ID NO: 1470249 - RNA, 19 nt, Homo sapiens
  misc_RNA (1)...(19): siRNA sense strand
gaugugguauggaguucuu

SEQ ID NO: 1470250 - RNA, 19 nt, Homo sapiens
  misc_RNA (1)...(19): siRNA sense strand
gaacgacuuggcccgagua

SEQ ID NO: 1470251 - RNA, 19 nt, Homo sapiens
  misc_RNA (1)...(19): siRNA sense strand
ugcgaggugugcaaauuua

SEQ ID NO: 1470252 - RNA, 19 nt, Homo sapiens
  misc_RNA (1)...(19): siRNA sense strand
uacagcagauucucuucua

SEQ ID NO: 1470253 - RNA, 19 nt, Homo sapiens
  misc_RNA (1)...(19): siRNA sense strand
agauuggauugcagcauua

SEQ ID NO: 1470254 - RNA, 19 nt, Homo sapiens
  misc_RNA (1)...(19): siRNA sense strand
ucacaguauccgagaaaua

SEQ ID NO: 1470255 - RNA, 19 nt, Homo sapiens
  misc_RNA (1)...(19): siRNA sense strand
ccagaaacccuagaguauu

SEQ ID NO: 1470256 - RNA, 19 nt, Homo sapiens
  misc_RNA (1)...(19): siRNA sense strand
gggaaggccuaugagaaga

SEQ ID NO: 1470257 - RNA, 19 nt, Homo sapiens
  misc_RNA (1)...(19): siRNA sense strand
ugaaguuccucagaagauu

SEQ ID NO: 1470258 - RNA, 19 nt, Homo sapiens
  misc_RNA (1)...(19): siRNA sense strand
caaccagggugugaaguuc

SEQ ID NO: 1470259 - RNA, 19 nt, Homo sapiens
  misc_RNA (1)...(19): siRNA sense strand
cacagacacugaccagaga

SEQ ID NO: 1470260 - RNA, 19 nt, Homo sapiens
  misc_RNA (1)...(19): siRNA sense strand
gaccagagacagggcauuu

SEQ ID NO: 1470261 - RNA, 19 nt, Homo sapiens
  misc_RNA (1)...(19): siRNA sense strand
ccacggcucucaacagcau

SEQ ID NO: 1470262 - RNA, 19 nt, Homo sapiens
  misc_RNA (1)...(19): siRNA sense strand
uggaaauggugaauaacuu

SEQ ID NO: 1470263 - RNA, 19 nt, Homo sapiens
  misc_RNA (1)...(19): siRNA sense strand
acaagaaccuggagcaaaa

SEQ ID NO: 1470264 - RNA, 19 nt, Homo sapiens
  misc_RNA (1)...(19): siRNA sense strand
ugaccaaacagaacaauuc

SEQ ID NO: 1470265 - RNA, 19 nt, Homo sapiens
  misc_RNA (1)...(19): siRNA sense strand
cauuaaagacugugcagaa

SEQ ID NO: 1470266 - RNA, 19 nt, Homo sapiens
  misc_RNA (1)...(19): siRNA sense strand
ccagagacagggcauuuga

SEQ ID NO: 1470267 - RNA, 19 nt, Homo sapiens
  misc_RNA (1)...(19): siRNA sense strand
uccagaaguuugacacauu

SEQ ID NO: 1470268 - RNA, 19 nt, Homo sapiens
  misc_RNA (1)...(19): siRNA sense strand
gcaauucgucagaucauag

SEQ ID NO: 1470269 - RNA, 19 nt, Homo sapiens
  misc_RNA (1)...(19): siRNA sense strand
acaaagaagcucacaguag

SEQ ID NO: 1470270 - RNA, 19 nt, Homo sapiens
  misc_RNA (1)...(19): siRNA sense strand
agaaauggaagauuggauu

SEQ ID NO: 1470271 - RNA, 19 nt, Homo sapiens
  misc_RNA (1)...(19): siRNA sense strand
aucagucgccuguuaauua

SEQ ID NO: 1470272 - RNA, 19 nt, Homo sapiens
  misc_RNA (1)...(19): siRNA sense strand
cgacuuggcccgaguacug

SEQ ID NO: 1470273 - RNA, 19 nt, Homo sapiens
  misc_RNA (1)...(19): siRNA sense strand
ccacuuggccugugcaaag

SEQ ID NO: 1470274 - RNA, 19 nt, Homo sapiens
  misc_RNA (1)...(19): siRNA sense strand
gcagaacagggagcacuuu

SEQ ID NO: 1470275 - RNA, 19 nt, Homo sapiens
  misc_RNA (1)...(19): siRNA sense strand
gggaagacaagcagaagug

SEQ ID NO: 1470276 - RNA, 19 nt, Homo sapiens
  misc_RNA (1)...(19): siRNA sense strand
uuucgcagcuccaucauuc

SEQ ID NO: 1470277 - RNA, 19 nt, Homo sapiens
  misc_RNA (1)...(19): siRNA sense strand
cggccaaagugcucuguga

SEQ ID NO: 1470278 - RNA, 19 nt, Homo sapiens
  misc_RNA (1)...(19): siRNA sense strand
gaucgggaaggacaucauu

SEQ ID NO: 1470279 - RNA, 19 nt, Homo sapiens
  misc_RNA (1)...(19): siRNA sense strand
cagcauggaccacuucuca

SEQ ID NO: 1470280 - RNA, 19 nt, Homo sapiens
  misc_RNA (1)...(19): siRNA sense strand
caccucggcuuacgguuau

SEQ ID NO: 1470281 - RNA, 19 nt, Homo sapiens
  misc_RNA (1)...(19): siRNA sense strand
uccuggaaauggugaauaa

SEQ ID NO: 1470282 - RNA, 19 nt, Homo sapiens
  misc_RNA (1)...(19): siRNA sense strand
gccaacagccugaagaaag

SEQ ID NO: 1470283 - RNA, 19 nt, Homo sapiens
  misc_RNA (1)...(19): siRNA sense strand
gagagagccagcaccaaga

SEQ ID NO: 1470284 - RNA, 19 nt, Homo sapiens
  misc_RNA (1)...(19): siRNA sense strand
gcacaagcccacuguuggu

SEQ ID NO: 1470285 - RNA, 19 nt, Homo sapiens
  misc_RNA (1)...(19): siRNA sense strand
gauccuguguggcaucaag

SEQ ID NO: 1470286 - RNA, 19 nt, Homo sapiens
  misc_RNA (1)...(19): siRNA sense strand
ggccgucucucgagucauc

SEQ ID NO: 1470287 - RNA, 19 nt, Homo sapiens
  misc_RNA (1)...(19): siRNA sense strand
gcaggagccgaaccaagaa

SEQ ID NO: 1470288 - RNA, 19 nt, Homo sapiens
  misc_RNA (1)...(19): siRNA sense strand
gagccaacagccugaagaa

SEQ ID NO: 1470289 - RNA, 19 nt, Homo sapiens
  misc_RNA (1)...(19): siRNA sense strand
cagaggucauggccaagaa

SEQ ID NO: 1470290 - RNA, 19 nt, Homo sapiens
  misc_RNA (1)...(19): siRNA sense strand
cggcaaagucaaucauauu

SEQ ID NO: 1470291 - RNA, 19 nt, Homo sapiens
  misc_RNA (1)...(19): siRNA sense strand
acaccucggcuuacgguua

SEQ ID NO: 1470292 - RNA, 19 nt, Homo sapiens
  misc_RNA (1)...(19): siRNA sense strand
gccucaaccuucauaaaca

SEQ ID NO: 1470293 - RNA, 19 nt, Homo sapiens
  misc_RNA (1)...(19): siRNA sense strand
ccaaauguccgggcuggaa

SEQ ID NO: 1470294 - RNA, 19 nt, Homo sapiens
  misc_RNA (1)...(19): siRNA sense strand
ccaacagccugaagaaagc

SEQ ID NO: 1470295 - RNA, 19 nt, Homo sapiens
  misc_RNA (1)...(19): siRNA sense strand
gcagauucucuucuaugaa

SEQ ID NO: 1470296 - RNA, 19 nt, Homo sapiens
  misc_RNA (1)...(19): siRNA sense strand
gcaaauuuaaggcccacaa

SEQ ID NO: 1470297 - RNA, 19 nt, Homo sapiens
  misc_RNA (1)...(19): siRNA sense strand
ggaauugcuguccuuaaca

SEQ ID NO: 1470298 - RNA, 19 nt, Homo sapiens
  misc_RNA (1)...(19): siRNA sense strand
gaccaaacagaacaauuca

SEQ ID NO: 1470299 - RNA, 19 nt, Homo sapiens
  misc_RNA (1)...(19): siRNA sense strand
aaccagaaacccuagagua

SEQ ID NO: 1470300 - RNA, 19 nt, Homo sapiens
  misc_RNA (1)...(19): siRNA sense strand
cagaagauucaaacagcua

SEQ ID NO: 1470301 - RNA, 19 nt, Homo sapiens
  misc_RNA (1)...(19): siRNA sense strand
gaaguuccucagaagauuc

SEQ ID NO: 1470302 - RNA, 19 nt, Homo sapiens
  misc_RNA (1)...(19): siRNA sense strand
ggacaaccagggugugaag

SEQ ID NO: 1470303 - RNA, 19 nt, Homo sapiens
  misc_RNA (1)...(19): siRNA sense strand
gaaggacaucauugaagau

SEQ ID NO: 1470304 - RNA, 19 nt, Homo sapiens
  misc_RNA (1)...(19): siRNA sense strand
cgacgaagagagugugaug

SEQ ID NO: 1470305 - RNA, 19 nt, Homo sapiens
  misc_RNA (1)...(19): siRNA sense strand
ucagggaauugcuguccuu

SEQ ID NO: 1470306 - RNA, 19 nt, Homo sapiens
  misc_RNA (1)...(19): siRNA sense strand
caaccuucauaaacagugu

SEQ ID NO: 1470307 - RNA, 19 nt, Homo sapiens
  misc_RNA (1)...(19): siRNA sense strand
gauucaaacagcuacuaaa

SEQ ID NO: 1470308 - RNA, 19 nt, Homo sapiens
  misc_RNA (1)...(19): siRNA sense strand
gaagaugcagaugggauug

SEQ ID NO: 1470309 - RNA, 19 nt, Homo sapiens
  misc_RNA (1)...(19): siRNA sense strand
ggacaaaggacaucaagga

SEQ ID NO: 1470310 - RNA, 19 nt, Homo sapiens
  misc_RNA (1)...(19): siRNA sense strand
agaagaagcugccaagaag

SEQ ID NO: 1470311 - RNA, 19 nt, Homo sapiens
  misc_RNA (1)...(19): siRNA sense strand
ggacaucaaggaaggcauu

SEQ ID NO: 1470312 - RNA, 19 nt, Homo sapiens
  misc_RNA (1)...(19): siRNA sense strand
ucaaugagaggacaaagga

SEQ ID NO: 1470313 - RNA, 19 nt, Homo sapiens
  misc_RNA (1)...(19): siRNA sense strand
ugagauugcccgcaucaaa

SEQ ID NO: 1470314 - RNA, 19 nt, Homo sapiens
  misc_RNA (1)...(19): siRNA sense strand
ugaagcauguguaugagau

SEQ ID NO: 1470315 - RNA, 19 nt, Homo sapiens
  misc_RNA (1)...(19): siRNA sense strand
gcauuccucugccuaccaa

SEQ ID NO: 1470316 - RNA, 19 nt, Homo sapiens
  misc_RNA (1)...(19): siRNA sense strand
gacaaaggacaucaaggaa

SEQ ID NO: 1470317 - RNA, 19 nt, Homo sapiens
  misc_RNA (1)...(19): siRNA sense strand
gcuugcagcuuuccagaag

SEQ ID NO: 1470318 - RNA, 19 nt, Homo sapiens
  misc_RNA (1)...(19): siRNA sense strand
aagaagaagcugccaagaa

SEQ ID NO: 1470319 - RNA, 19 nt, Homo sapiens
  misc_RNA (1)...(19): siRNA sense strand
gagaggcguuuccaucaac

SEQ ID NO: 1470320 - RNA, 19 nt, Homo sapiens
  misc_RNA (1)...(19): siRNA sense strand
gagauugcccgcaucaaag

SEQ ID NO: 1470321 - RNA, 19 nt, Homo sapiens
  misc_RNA (1)...(19): siRNA sense strand
ccuugaagcauguguauga

SEQ ID NO: 1470322 - RNA, 19 nt, Homo sapiens
  misc_RNA (1)...(19): siRNA sense strand
gcauucgcguggugaagga

SEQ ID NO: 1470323 - RNA, 19 nt, Homo sapiens
  misc_RNA (1)...(19): siRNA sense strand
ucagaaggaggcagauuug

SEQ ID NO: 1470324 - RNA, 19 nt, Homo sapiens
  misc_RNA (1)...(19): siRNA sense strand
agagaggcguuuccaucaa

SEQ ID NO: 1470325 - RNA, 19 nt, Homo sapiens
  misc_RNA (1)...(19): siRNA sense strand
gcguuuccaucaaccaguu

SEQ ID NO: 1470326 - RNA, 19 nt, Homo sapiens
  misc_RNA (1)...(19): siRNA sense strand
uggcaggccuggugaccuu

SEQ ID NO: 1470327 - RNA, 19 nt, Homo sapiens
  misc_RNA (1)...(19): siRNA sense strand
gaagcauguguaugagauu

SEQ ID NO: 1470328 - RNA, 19 nt, Homo sapiens
  misc_RNA (1)...(19): siRNA sense strand
cauuugcccugcaggaugu

SEQ ID NO: 1470329 - RNA, 19 nt, Homo sapiens
  misc_RNA (1)...(19): siRNA sense strand
gaagaagcugccaagaagu

SEQ ID NO: 1470330 - RNA, 19 nt, Homo sapiens
  misc_RNA (1)...(19): siRNA sense strand
ugcaaggaguucaaugaga

SEQ ID NO: 1470331 - RNA, 19 nt, Homo sapiens
  misc_RNA (1)...(19): siRNA sense strand
gaccuugaagcauguguau

SEQ ID NO: 1470332 - RNA, 19 nt, Homo sapiens
  misc_RNA (1)...(19): siRNA sense strand
aagcauguguaugagauug

SEQ ID NO: 1470333 - RNA, 19 nt, Homo sapiens
  misc_RNA (1)...(19): siRNA sense strand
cuaccaagauuuuagugaa

SEQ ID NO: 1470334 - RNA, 19 nt, Homo sapiens
  misc_RNA (1)...(19): siRNA sense strand
gcccacuguuuccuacuuc

SEQ ID NO: 1470335 - RNA, 19 nt, Homo sapiens
  misc_RNA (1)...(19): siRNA sense strand
gaggacaaaggacaucaag

SEQ ID NO: 1470336 - RNA, 19 nt, Homo sapiens
  misc_RNA (1)...(19): siRNA sense strand
caagaagaagcugccaaga

SEQ ID NO: 1470337 - RNA, 19 nt, Homo sapiens
  misc_RNA (1)...(19): siRNA sense strand
gcucagaaggaggcagauu

SEQ ID NO: 1470338 - RNA, 19 nt, Homo sapiens
  misc_RNA (1)...(19): siRNA sense strand
aagaagcugccaagaagug

SEQ ID NO: 1470339 - RNA, 19 nt, Homo sapiens
  misc_RNA (1)...(19): siRNA sense strand
cucagaaggaggcagauuu

SEQ ID NO: 1470340 - RNA, 19 nt, Homo sapiens
  misc_RNA (1)...(19): siRNA sense strand
uugcagcuuuccagaagga

SEQ ID NO: 1470341 - RNA, 19 nt, Homo sapiens
  misc_RNA (1)...(19): siRNA sense strand
ggacaaaggacaucaagga

SEQ ID NO: 1470342 - RNA, 19 nt, Homo sapiens
  misc_RNA (1)...(19): siRNA sense strand
agaagaagcugccaagaag

SEQ ID NO: 1470343 - RNA, 19 nt, Homo sapiens
  misc_RNA (1)...(19): siRNA sense strand
ggacaucaaggaaggcauu

SEQ ID NO: 1470344 - RNA, 19 nt, Homo sapiens
  misc_RNA (1)...(19): siRNA sense strand
ucaaugagaggacaaagga

SEQ ID NO: 1470345 - RNA, 19 nt, Homo sapiens
  misc_RNA (1)...(19): siRNA sense strand
ugagauugcccgcaucaaa

SEQ ID NO: 1470346 - RNA, 19 nt, Homo sapiens
  misc_RNA (1)...(19): siRNA sense strand
ugaagcauguguaugagau

SEQ ID NO: 1470347 - RNA, 19 nt, Homo sapiens
  misc_RNA (1)...(19): siRNA sense strand
gcauuccucugccuaccaa

SEQ ID NO: 1470348 - RNA, 19 nt, Homo sapiens
  misc_RNA (1)...(19): siRNA sense strand
gacaaaggacaucaaggaa

SEQ ID NO: 1470349 - RNA, 19 nt, Homo sapiens
  misc_RNA (1)...(19): siRNA sense strand
gcuugcagcuuuccagaag

SEQ ID NO: 1470350 - RNA, 19 nt, Homo sapiens
  misc_RNA (1)...(19): siRNA sense strand
aagaagaagcugccaagaa

SEQ ID NO: 1470351 - RNA, 19 nt, Homo sapiens
  misc_RNA (1)...(19): siRNA sense strand
gagaggcguuuccaucaac

SEQ ID NO: 1470352 - RNA, 19 nt, Homo sapiens
  misc_RNA (1)...(19): siRNA sense strand
gagauugcccgcaucaaag

SEQ ID NO: 1470353 - RNA, 19 nt, Homo sapiens
  misc_RNA (1)...(19): siRNA sense strand
ccuugaagcauguguauga

SEQ ID NO: 1470354 - RNA, 19 nt, Homo sapiens
  misc_RNA (1)...(19): siRNA sense strand
gcauucgcguggugaagga

SEQ ID NO: 1470355 - RNA, 19 nt, Homo sapiens
  misc_RNA (1)...(19): siRNA sense strand
ucagaaggaggcagauuug

SEQ ID NO: 1470356 - RNA, 19 nt, Homo sapiens
  misc_RNA (1)...(19): siRNA sense strand
agagaggcguuuccaucaa

SEQ ID NO: 1470357 - RNA, 19 nt, Homo sapiens
  misc_RNA (1)...(19): siRNA sense strand
gcguuuccaucaaccaguu

SEQ ID NO: 1470358 - RNA, 19 nt, Homo sapiens
  misc_RNA (1)...(19): siRNA sense strand
uggcaggccuggugaccuu

SEQ ID NO: 1470359 - RNA, 19 nt, Homo sapiens
  misc_RNA (1)...(19): siRNA sense strand
gaagcauguguaugagauu

SEQ ID NO: 1470360 - RNA, 19 nt, Homo sapiens
  misc_RNA (1)...(19): siRNA sense strand
cauuugcccugcaggaugu

SEQ ID NO: 1470361 - RNA, 19 nt, Homo sapiens
  misc_RNA (1)...(19): siRNA sense strand
gaagaagcugccaagaagu

SEQ ID NO: 1470362 - RNA, 19 nt, Homo sapiens
  misc_RNA (1)...(19): siRNA sense strand
ugcaaggaguucaaugaga

SEQ ID NO: 1470363 - RNA, 19 nt, Homo sapiens
  misc_RNA (1)...(19): siRNA sense strand
gaccuugaagcauguguau

SEQ ID NO: 1470364 - RNA, 19 nt, Homo sapiens
  misc_RNA (1)...(19): siRNA sense strand
aagcauguguaugagauug

SEQ ID NO: 1470365 - RNA, 19 nt, Homo sapiens
  misc_RNA (1)...(19): siRNA sense strand
cuaccaagauuuuagugaa

SEQ ID NO: 1470366 - RNA, 19 nt, Homo sapiens
  misc_RNA (1)...(19): siRNA sense strand
gcccacuguuuccuacuuc

SEQ ID NO: 1470367 - RNA, 19 nt, Homo sapiens
  misc_RNA (1)...(19): siRNA sense strand
gaggacaaaggacaucaag

SEQ ID NO: 1470368 - RNA, 19 nt, Homo sapiens
  misc_RNA (1)...(19): siRNA sense strand
caagaagaagcugccaaga

SEQ ID NO: 1470369 - RNA, 19 nt, Homo sapiens
  misc_RNA (1)...(19): siRNA sense strand
gcucagaaggaggcagauu

SEQ ID NO: 1470370 - RNA, 19 nt, Homo sapiens
  misc_RNA (1)...(19): siRNA sense strand
aagaagcugccaagaagug

SEQ ID NO: 1470371 - RNA, 19 nt, Homo sapiens
  misc_RNA (1)...(19): siRNA sense strand
cucagaaggaggcagauuu

SEQ ID NO: 1470372 - RNA, 19 nt, Homo sapiens
  misc_RNA (1)...(19): siRNA sense strand
uugcagcuuuccagaagga

SEQ ID NO: 1470373 - RNA, 19 nt, Homo sapiens
  misc_RNA (1)...(19): siRNA sense strand
ggacaaaggacaucaagga

SEQ ID NO: 1470374 - RNA, 19 nt, Homo sapiens
  misc_RNA (1)...(19): siRNA sense strand
ggacaucaaggaaggcauu

SEQ ID NO: 1470375 - RNA, 19 nt, Homo sapiens
  misc_RNA (1)...(19): siRNA sense strand
ucaaugagaggacaaagga

SEQ ID NO: 1470376 - RNA, 19 nt, Homo sapiens
  misc_RNA (1)...(19): siRNA sense strand
ugagauugcccgcaucaaa

SEQ ID NO: 1470377 - RNA, 19 nt, Homo sapiens
  misc_RNA (1)...(19): siRNA sense strand
ugaagcauguguaugagau

SEQ ID NO: 1470378 - RNA, 19 nt, Homo sapiens
  misc_RNA (1)...(19): siRNA sense strand
gcauuccucugccuaccaa

SEQ ID NO: 1470379 - RNA, 19 nt, Homo sapiens
  misc_RNA (1)...(19): siRNA sense strand
gacaaaggacaucaaggaa

SEQ ID NO: 1470380 - RNA, 19 nt, Homo sapiens
  misc_RNA (1)...(19): siRNA sense strand
gagaggcguuuccaucaac

SEQ ID NO: 1470381 - RNA, 19 nt, Homo sapiens
  misc_RNA (1)...(19): siRNA sense strand
gagauugcccgcaucaaag

SEQ ID NO: 1470382 - RNA, 19 nt, Homo sapiens
  misc_RNA (1)...(19): siRNA sense strand
ccuugaagcauguguauga

SEQ ID NO: 1470383 - RNA, 19 nt, Homo sapiens
  misc_RNA (1)...(19): siRNA sense strand
gcauucgcguggugaagga

SEQ ID NO: 1470384 - RNA, 19 nt, Homo sapiens
  misc_RNA (1)...(19): siRNA sense strand
agagaggcguuuccaucaa

SEQ ID NO: 1470385 - RNA, 19 nt, Homo sapiens
  misc_RNA (1)...(19): siRNA sense strand
gcguuuccaucaaccaguu

SEQ ID NO: 1470386 - RNA, 19 nt, Homo sapiens
  misc_RNA (1)...(19): siRNA sense strand
uggcaggccuggugaccuu

SEQ ID NO: 1470387 - RNA, 19 nt, Homo sapiens
  misc_RNA (1)...(19): siRNA sense strand
gaagcauguguaugagauu

SEQ ID NO: 1470388 - RNA, 19 nt, Homo sapiens
  misc_RNA (1)...(19): siRNA sense strand
ugcaaggaguucaaugaga

SEQ ID NO: 1470389 - RNA, 19 nt, Homo sapiens
  misc_RNA (1)...(19): siRNA sense strand
cauuugcccugcaggaugu

SEQ ID NO: 1470390 - RNA, 19 nt, Homo sapiens
  misc_RNA (1)...(19): siRNA sense strand
gaccuugaagcauguguau

SEQ ID NO: 1470391 - RNA, 19 nt, Homo sapiens
  misc_RNA (1)...(19): siRNA sense strand
aagcauguguaugagauug

SEQ ID NO: 1470392 - RNA, 19 nt, Homo sapiens
  misc_RNA (1)...(19): siRNA sense strand
cuaccaagauuuuagugaa

SEQ ID NO: 1470393 - RNA, 19 nt, Homo sapiens
  misc_RNA (1)...(19): siRNA sense strand
gcccacuguuuccuacuuc

SEQ ID NO: 1470394 - RNA, 19 nt, Homo sapiens
  misc_RNA (1)...(19): siRNA sense strand
gaggacaaaggacaucaag

SEQ ID NO: 1470395 - RNA, 19 nt, Homo sapiens
  misc_RNA (1)...(19): siRNA sense strand
ggacaaaggacaucaagga

SEQ ID NO: 1470396 - RNA, 19 nt, Homo sapiens
  misc_RNA (1)...(19): siRNA sense strand
agaagaagcugccaagaag

SEQ ID NO: 1470397 - RNA, 19 nt, Homo sapiens
  misc_RNA (1)...(19): siRNA sense strand
ggacaucaaggaaggcauu

SEQ ID NO: 1470398 - RNA, 19 nt, Homo sapiens
  misc_RNA (1)...(19): siRNA sense strand
ucaaugagaggacaaagga

SEQ ID NO: 1470399 - RNA, 19 nt, Homo sapiens
  misc_RNA (1)...(19): siRNA sense strand
ugagauugcccgcaucaaa

SEQ ID NO: 1470400 - RNA, 19 nt, Homo sapiens
  misc_RNA (1)...(19): siRNA sense strand
ugaagcauguguaugagau

SEQ ID NO: 1470401 - RNA, 19 nt, Homo sapiens
  misc_RNA (1)...(19): siRNA sense strand
gcauuccucugccuaccaa

SEQ ID NO: 1470402 - RNA, 19 nt, Homo sapiens
  misc_RNA (1)...(19): siRNA sense strand
gacaaaggacaucaaggaa

SEQ ID NO: 1470403 - RNA, 19 nt, Homo sapiens
  misc_RNA (1)...(19): siRNA sense strand
gcuugcagcuuuccagaag

SEQ ID NO: 1470404 - RNA, 19 nt, Homo sapiens
  misc_RNA (1)...(19): siRNA sense strand
aagaagaagcugccaagaa

SEQ ID NO: 1470405 - RNA, 19 nt, Homo sapiens
  misc_RNA (1)...(19): siRNA sense strand
gagaggcguuuccaucaac

SEQ ID NO: 1470406 - RNA, 19 nt, Homo sapiens
  misc_RNA (1)...(19): siRNA sense strand
gagauugcccgcaucaaag

SEQ ID NO: 1470407 - RNA, 19 nt, Homo sapiens
  misc_RNA (1)...(19): siRNA sense strand
ccuugaagcauguguauga

SEQ ID NO: 1470408 - RNA, 19 nt, Homo sapiens
  misc_RNA (1)...(19): siRNA sense strand
gcauucgcguggugaagga

SEQ ID NO: 1470409 - RNA, 19 nt, Homo sapiens
  misc_RNA (1)...(19): siRNA sense strand
ucagaaggaggcagauuug

SEQ ID NO: 1470410 - RNA, 19 nt, Homo sapiens
  misc_RNA (1)...(19): siRNA sense strand
agagaggcguuuccaucaa

SEQ ID NO: 1470411 - RNA, 19 nt, Homo sapiens
  misc_RNA (1)...(19): siRNA sense strand
gcguuuccaucaaccaguu

SEQ ID NO: 1470412 - RNA, 19 nt, Homo sapiens
  misc_RNA (1)...(19): siRNA sense strand
uggcaggccuggugaccuu

SEQ ID NO: 1470413 - RNA, 19 nt, Homo sapiens
  misc_RNA (1)...(19): siRNA sense strand
gaagcauguguaugagauu

SEQ ID NO: 1470414 - RNA, 19 nt, Homo sapiens
  misc_RNA (1)...(19): siRNA sense strand
cauuugcccugcaggaugu

SEQ ID NO: 1470415 - RNA, 19 nt, Homo sapiens
  misc_RNA (1)...(19): siRNA sense strand
gaagaagcugccaagaagu

SEQ ID NO: 1470416 - RNA, 19 nt, Homo sapiens
  misc_RNA (1)...(19): siRNA sense strand
ugcaaggaguucaaugaga

SEQ ID NO: 1470417 - RNA, 19 nt, Homo sapiens
  misc_RNA (1)...(19): siRNA sense strand
gaccuugaagcauguguau

SEQ ID NO: 1470418 - RNA, 19 nt, Homo sapiens
  misc_RNA (1)...(19): siRNA sense strand
aagcauguguaugagauug

SEQ ID NO: 1470419 - RNA, 19 nt, Homo sapiens
  misc_RNA (1)...(19): siRNA sense strand
cuaccaagauuuuagugaa

SEQ ID NO: 1470420 - RNA, 19 nt, Homo sapiens
  misc_RNA (1)...(19): siRNA sense strand
gcccacuguuuccuacuuc

SEQ ID NO: 1470421 - RNA, 19 nt, Homo sapiens
  misc_RNA (1)...(19): siRNA sense strand
gaggacaaaggacaucaag

SEQ ID NO: 1470422 - RNA, 19 nt, Homo sapiens
  misc_RNA (1)...(19): siRNA sense strand
caagaagaagcugccaaga

SEQ ID NO: 1470423 - RNA, 19 nt, Homo sapiens
  misc_RNA (1)...(19): siRNA sense strand
gcucagaaggaggcagauu

SEQ ID NO: 1470424 - RNA, 19 nt, Homo sapiens
  misc_RNA (1)...(19): siRNA sense strand
aagaagcugccaagaagug

SEQ ID NO: 1470425 - RNA, 19 nt, Homo sapiens
  misc_RNA (1)...(19): siRNA sense strand
cucagaaggaggcagauuu

SEQ ID NO: 1470426 - RNA, 19 nt, Homo sapiens
  misc_RNA (1)...(19): siRNA sense strand
uugcagcuuuccagaagga

SEQ ID NO: 1470427 - RNA, 19 nt, Homo sapiens
  misc_RNA (1)...(19): siRNA sense strand
ggacaaaggacaucaagga

SEQ ID NO: 1470428 - RNA, 19 nt, Homo sapiens
  misc_RNA (1)...(19): siRNA sense strand
agaagaagcugccaagaag

SEQ ID NO: 1470429 - RNA, 19 nt, Homo sapiens
  misc_RNA (1)...(19): siRNA sense strand
ggacaucaaggaaggcauu

SEQ ID NO: 1470430 - RNA, 19 nt, Homo sapiens
  misc_RNA (1)...(19): siRNA sense strand
ucaaugagaggacaaagga

SEQ ID NO: 1470431 - RNA, 19 nt, Homo sapiens
  misc_RNA (1)...(19): siRNA sense strand
ugagauugcccgcaucaaa

SEQ ID NO: 1470432 - RNA, 19 nt, Homo sapiens
  misc_RNA (1)...(19): siRNA sense strand
ugaagcauguguaugagau

SEQ ID NO: 1470433 - RNA, 19 nt, Homo sapiens
  misc_RNA (1)...(19): siRNA sense strand
gcauuccucugccuaccaa

SEQ ID NO: 1470434 - RNA, 19 nt, Homo sapiens
  misc_RNA (1)...(19): siRNA sense strand
gacaaaggacaucaaggaa

SEQ ID NO: 1470435 - RNA, 19 nt, Homo sapiens
  misc_RNA (1)...(19): siRNA sense strand
gcuugcagcuuuccagaag

SEQ ID NO: 1470436 - RNA, 19 nt, Homo sapiens
  misc_RNA (1)...(19): siRNA sense strand
aagaagaagcugccaagaa

SEQ ID NO: 1470437 - RNA, 19 nt, Homo sapiens
  misc_RNA (1)...(19): siRNA sense strand
gagaggcguuuccaucaac

SEQ ID NO: 1470438 - RNA, 19 nt, Homo sapiens
  misc_RNA (1)...(19): siRNA sense strand
gagauugcccgcaucaaag

SEQ ID NO: 1470439 - RNA, 19 nt, Homo sapiens
  misc_RNA (1)...(19): siRNA sense strand
ccuugaagcauguguauga

SEQ ID NO: 1470440 - RNA, 19 nt, Homo sapiens
  misc_RNA (1)...(19): siRNA sense strand
gcauucgcguggugaagga

SEQ ID NO: 1470441 - RNA, 19 nt, Homo sapiens
  misc_RNA (1)...(19): siRNA sense strand
ucagaaggaggcagauuug

SEQ ID NO: 1470442 - RNA, 19 nt, Homo sapiens
  misc_RNA (1)...(19): siRNA sense strand
agagaggcguuuccaucaa

SEQ ID NO: 1470443 - RNA, 19 nt, Homo sapiens
  misc_RNA (1)...(19): siRNA sense strand
gcguuuccaucaaccaguu

SEQ ID NO: 1470444 - RNA, 19 nt, Homo sapiens
  misc_RNA (1)...(19): siRNA sense strand
uggcaggccuggugaccuu

SEQ ID NO: 1470445 - RNA, 19 nt, Homo sapiens
  misc_RNA (1)...(19): siRNA sense strand
gaagcauguguaugagauu

SEQ ID NO: 1470446 - RNA, 19 nt, Homo sapiens
  misc_RNA (1)...(19): siRNA sense strand
cauuugcccugcaggaugu

SEQ ID NO: 1470447 - RNA, 19 nt, Homo sapiens
  misc_RNA (1)...(19): siRNA sense strand
gaagaagcugccaagaagu

SEQ ID NO: 1470448 - RNA, 19 nt, Homo sapiens
  misc_RNA (1)...(19): siRNA sense strand
ugcaaggaguucaaugaga

SEQ ID NO: 1470449 - RNA, 19 nt, Homo sapiens
  misc_RNA (1)...(19): siRNA sense strand
gaccuugaagcauguguau

SEQ ID NO: 1470450 - RNA, 19 nt, Homo sapiens
  misc_RNA (1)...(19): siRNA sense strand
aagcauguguaugagauug

SEQ ID NO: 1470451 - RNA, 19 nt, Homo sapiens
  misc_RNA (1)...(19): siRNA sense strand
cuaccaagauuuuagugaa

SEQ ID NO: 1470452 - RNA, 19 nt, Homo sapiens
  misc_RNA (1)...(19): siRNA sense strand
gcccacuguuuccuacuuc

SEQ ID NO: 1470453 - RNA, 19 nt, Homo sapiens
  misc_RNA (1)...(19): siRNA sense strand
gaggacaaaggacaucaag

SEQ ID NO: 1470454 - RNA, 19 nt, Homo sapiens
  misc_RNA (1)...(19): siRNA sense strand
caagaagaagcugccaaga

SEQ ID NO: 1470455 - RNA, 19 nt, Homo sapiens
  misc_RNA (1)...(19): siRNA sense strand
gcucagaaggaggcagauu

SEQ ID NO: 1470456 - RNA, 19 nt, Homo sapiens
  misc_RNA (1)...(19): siRNA sense strand
aagaagcugccaagaagug

SEQ ID NO: 1470457 - RNA, 19 nt, Homo sapiens
  misc_RNA (1)...(19): siRNA sense strand
cucagaaggaggcagauuu

SEQ ID NO: 1470458 - RNA, 19 nt, Homo sapiens
  misc_RNA (1)...(19): siRNA sense strand
uugcagcuuuccagaagga

SEQ ID NO: 1470459 - RNA, 19 nt, Homo sapiens
  misc_RNA (1)...(19): siRNA sense strand
ggacaaaggacaucaagga

SEQ ID NO: 1470460 - RNA, 19 nt, Homo sapiens
  misc_RNA (1)...(19): siRNA sense strand
ggacaucaaggaaggcauu

SEQ ID NO: 1470461 - RNA, 19 nt, Homo sapiens
  misc_RNA (1)...(19): siRNA sense strand
ucaaugagaggacaaagga

SEQ ID NO: 1470462 - RNA, 19 nt, Homo sapiens
  misc_RNA (1)...(19): siRNA sense strand
ugagauugcccgcaucaaa

SEQ ID NO: 1470463 - RNA, 19 nt, Homo sapiens
  misc_RNA (1)...(19): siRNA sense strand
ugaagcauguguaugagau

SEQ ID NO: 1470464 - RNA, 19 nt, Homo sapiens
  misc_RNA (1)...(19): siRNA sense strand
gcauuccucugccuaccaa

SEQ ID NO: 1470465 - RNA, 19 nt, Homo sapiens
  misc_RNA (1)...(19): siRNA sense strand
gacaaaggacaucaaggaa

SEQ ID NO: 1470466 - RNA, 19 nt, Homo sapiens
  misc_RNA (1)...(19): siRNA sense strand
gagaggcguuuccaucaac

SEQ ID NO: 1470467 - RNA, 19 nt, Homo sapiens
  misc_RNA (1)...(19): siRNA sense strand
gagauugcccgcaucaaag

SEQ ID NO: 1470468 - RNA, 19 nt, Homo sapiens
  misc_RNA (1)...(19): siRNA sense strand
ccuugaagcauguguauga

SEQ ID NO: 1470469 - RNA, 19 nt, Homo sapiens
  misc_RNA (1)...(19): siRNA sense strand
gcauucgcguggugaagga

SEQ ID NO: 1470470 - RNA, 19 nt, Homo sapiens
  misc_RNA (1)...(19): siRNA sense strand
agagaggcguuuccaucaa

SEQ ID NO: 1470471 - RNA, 19 nt, Homo sapiens
  misc_RNA (1)...(19): siRNA sense strand
gcguuuccaucaaccaguu

SEQ ID NO: 1470472 - RNA, 19 nt, Homo sapiens
  misc_RNA (1)...(19): siRNA sense strand
uggcaggccuggugaccuu

SEQ ID NO: 1470473 - RNA, 19 nt, Homo sapiens
  misc_RNA (1)...(19): siRNA sense strand
gaagcauguguaugagauu

SEQ ID NO: 1470474 - RNA, 19 nt, Homo sapiens
  misc_RNA (1)...(19): siRNA sense strand
ugcaaggaguucaaugaga

SEQ ID NO: 1470475 - RNA, 19 nt, Homo sapiens
  misc_RNA (1)...(19): siRNA sense strand
cauuugcccugcaggaugu

SEQ ID NO: 1470476 - RNA, 19 nt, Homo sapiens
  misc_RNA (1)...(19): siRNA sense strand
gaccuugaagcauguguau

SEQ ID NO: 1470477 - RNA, 19 nt, Homo sapiens
  misc_RNA (1)...(19): siRNA sense strand
aagcauguguaugagauug

SEQ ID NO: 1470478 - RNA, 19 nt, Homo sapiens
  misc_RNA (1)...(19): siRNA sense strand
cuaccaagauuuuagugaa

SEQ ID NO: 1470479 - RNA, 19 nt, Homo sapiens
  misc_RNA (1)...(19): siRNA sense strand
gcccacuguuuccuacuuc

SEQ ID NO: 1470480 - RNA, 19 nt, Homo sapiens
  misc_RNA (1)...(19): siRNA sense strand
gaggacaaaggacaucaag

SEQ ID NO: 1470481 - RNA, 19 nt, Homo sapiens
  misc_RNA (1)...(19): siRNA sense strand
ggaggcacauggagaaauu

SEQ ID NO: 1470482 - RNA, 19 nt, Homo sapiens
  misc_RNA (1)...(19): siRNA sense strand
gcgcguagguaauggauuu

SEQ ID NO: 1470483 - RNA, 19 nt, Homo sapiens
  misc_RNA (1)...(19): siRNA sense strand
gagaggaguucauuacuuc

SEQ ID NO: 1470484 - RNA, 19 nt, Homo sapiens
  misc_RNA (1)...(19): siRNA sense strand
ggagaggaguucauuacuu

SEQ ID NO: 1470485 - RNA, 19 nt, Homo sapiens
  misc_RNA (1)...(19): siRNA sense strand
gccauggcaucuaaauuua

SEQ ID NO: 1470486 - RNA, 19 nt, Homo sapiens
  misc_RNA (1)...(19): siRNA sense strand
acucagggcccauuaauua

SEQ ID NO: 1470487 - RNA, 19 nt, Homo sapiens
  misc_RNA (1)...(19): siRNA sense strand
ggccauggcaucuaaauuu

SEQ ID NO: 1470488 - RNA, 19 nt, Homo sapiens
  misc_RNA (1)...(19): siRNA sense strand
ucagguguauacaauguua

SEQ ID NO: 1470489 - RNA, 19 nt, Homo sapiens
  misc_RNA (1)...(19): siRNA sense strand
gaaagaaugccaaggaagu

SEQ ID NO: 1470490 - RNA, 19 nt, Homo sapiens
  misc_RNA (1)...(19): siRNA sense strand
ggaggaggcuauagcaauc

SEQ ID NO: 1470491 - RNA, 19 nt, Homo sapiens
  misc_RNA (1)...(19): siRNA sense strand
ggaugaccuugccagaaua

SEQ ID NO: 1470492 - RNA, 19 nt, Homo sapiens
  misc_RNA (1)...(19): siRNA sense strand
gaaggaggcacauggagaa

SEQ ID NO: 1470493 - RNA, 19 nt, Homo sapiens
  misc_RNA (1)...(19): siRNA sense strand
ugaaugaugccguuucuaa

SEQ ID NO: 1470494 - RNA, 19 nt, Homo sapiens
  misc_RNA (1)...(19): siRNA sense strand
gaagugguacaauuuaaug

SEQ ID NO: 1470495 - RNA, 19 nt, Homo sapiens
  misc_RNA (1)...(19): siRNA sense strand
guuauucccuguucucgaa

SEQ ID NO: 1470496 - RNA, 19 nt, Homo sapiens
  misc_RNA (1)...(19): siRNA sense strand
gaaugaugccguuucuaaa

SEQ ID NO: 1470497 - RNA, 19 nt, Homo sapiens
  misc_RNA (1)...(19): siRNA sense strand
gaacucaaguauguguguu

SEQ ID NO: 1470498 - RNA, 19 nt, Homo sapiens
  misc_RNA (1)...(19): siRNA sense strand
cggccuugcuccauuuaua

SEQ ID NO: 1470499 - RNA, 19 nt, Homo sapiens
  misc_RNA (1)...(19): siRNA sense strand
cggaagugguacaauuuaa

SEQ ID NO: 1470500 - RNA, 19 nt, Homo sapiens
  misc_RNA (1)...(19): siRNA sense strand
ccaaguauggcauugauga

SEQ ID NO: 1470501 - RNA, 19 nt, Homo sapiens
  misc_RNA (1)...(19): siRNA sense strand
gcacucaugaagagacuuu

SEQ ID NO: 1470502 - RNA, 19 nt, Homo sapiens
  misc_RNA (1)...(19): siRNA sense strand
gauguuggguuagcagguu

SEQ ID NO: 1470503 - RNA, 19 nt, Homo sapiens
  misc_RNA (1)...(19): siRNA sense strand
gggaggcaauuuguacuga

SEQ ID NO: 1470504 - RNA, 19 nt, Homo sapiens
  misc_RNA (1)...(19): siRNA sense strand
ggaagugguacaauuuaau

SEQ ID NO: 1470505 - RNA, 19 nt, Homo sapiens
  misc_RNA (1)...(19): siRNA sense strand
caaggagaggaguucauua

SEQ ID NO: 1470506 - RNA, 19 nt, Homo sapiens
  misc_RNA (1)...(19): siRNA sense strand
gaacuacucagggcccauu

SEQ ID NO: 1470507 - RNA, 19 nt, Homo sapiens
  misc_RNA (1)...(19): siRNA sense strand
cgucaacgaaggauuaauu

SEQ ID NO: 1470508 - RNA, 19 nt, Homo sapiens
  misc_RNA (1)...(19): siRNA sense strand
gagaaacaggugaaugaug

SEQ ID NO: 1470509 - RNA, 19 nt, Homo sapiens
  misc_RNA (1)...(19): siRNA sense strand
ucgaaagaaugccaaggaa

SEQ ID NO: 1470510 - RNA, 19 nt, Homo sapiens
  misc_RNA (1)...(19): siRNA sense strand
gcugugcacucaugaagag

SEQ ID NO: 1470511 - RNA, 19 nt, Homo sapiens
  misc_RNA (1)...(19): siRNA sense strand
ccgaggccaugaagaagaa

SEQ ID NO: 1470512 - RNA, 19 nt, Homo sapiens
  misc_RNA (1)...(19): siRNA sense strand
guauggcauugaugaguau

SEQ ID NO: 1470513 - RNA, 19 nt, Homo sapiens
  misc_RNA (1)...(19): siRNA sense strand
aguauggcauugaugagua

SEQ ID NO: 1470514 - RNA, 19 nt, Homo sapiens
  misc_RNA (1)...(19): siRNA sense strand
gaccuugccagaauaauca

SEQ ID NO: 1470515 - RNA, 19 nt, Homo sapiens
  misc_RNA (1)...(19): siRNA sense strand
aggaugaccuugccagaau

SEQ ID NO: 1470516 - RNA, 19 nt, Homo sapiens
  misc_RNA (1)...(19): siRNA sense strand
uggagaaacaggugaauga

SEQ ID NO: 1470517 - RNA, 19 nt, Homo sapiens
  misc_RNA (1)...(19): siRNA sense strand
ggaggcaauuuguacugau

SEQ ID NO: 1470518 - RNA, 19 nt, Homo sapiens
  misc_RNA (1)...(19): siRNA sense strand
ccaaggagaggaguucauu

SEQ ID NO: 1470519 - RNA, 19 nt, Homo sapiens
  misc_RNA (1)...(19): siRNA sense strand
uagaaaagguggagaaaca

SEQ ID NO: 1470520 - RNA, 19 nt, Homo sapiens
  misc_RNA (1)...(19): siRNA sense strand
ggacagacuuguguuugcu

SEQ ID NO: 1470521 - RNA, 19 nt, Homo sapiens
  misc_RNA (1)...(19): siRNA sense strand
gcagcaaacucugugaaaa

SEQ ID NO: 1470522 - RNA, 19 nt, Homo sapiens
  misc_RNA (1)...(19): siRNA sense strand
gaggcaauuuguacugauc

SEQ ID NO: 1470523 - RNA, 19 nt, Homo sapiens
  misc_RNA (1)...(19): siRNA sense strand
aaagaaugccaaggaagua

SEQ ID NO: 1470524 - RNA, 19 nt, Homo sapiens
  misc_RNA (1)...(19): siRNA sense strand
ggugaagccugccgaagac

SEQ ID NO: 1470525 - RNA, 19 nt, Homo sapiens
  misc_RNA (1)...(19): siRNA sense strand
gaugaccuugccagaauaa

SEQ ID NO: 1470526 - RNA, 19 nt, Homo sapiens
  misc_RNA (1)...(19): siRNA sense strand
uggcaccaguuaucaaguu

SEQ ID NO: 1470527 - RNA, 19 nt, Homo sapiens
  misc_RNA (1)...(19): siRNA sense strand
caacguggaccaggcugua

SEQ ID NO: 1470528 - RNA, 19 nt, Homo sapiens
  misc_RNA (1)...(19): siRNA sense strand
guucaacaacuacaggaaa

SEQ ID NO: 1470529 - RNA, 19 nt, Homo sapiens
  misc_RNA (1)...(19): siRNA sense strand
agaauaaucacagcugaaa

SEQ ID NO: 1470530 - RNA, 19 nt, Homo sapiens
  misc_RNA (1)...(19): siRNA sense strand
acaauguuauucccuguuc

SEQ ID NO: 1470531 - RNA, 19 nt, Homo sapiens
  misc_RNA (1)...(19): siRNA sense strand
ggugaaugaugccguuucu

SEQ ID NO: 1470532 - RNA, 19 nt, Homo sapiens
  misc_RNA (1)...(19): siRNA sense strand
gcuguacugucguggugaa

SEQ ID NO: 1470533 - RNA, 19 nt, Homo sapiens
  misc_RNA (1)...(19): siRNA sense strand
uggcgucaacgaaggauua

SEQ ID NO: 1470534 - RNA, 19 nt, Homo sapiens
  misc_RNA (1)...(19): siRNA sense strand
ggaaaacgacaccaacuug

SEQ ID NO: 1470535 - RNA, 19 nt, Homo sapiens
  misc_RNA (1)...(19): siRNA sense strand
gcaccacgcagcaaacucu

SEQ ID NO: 1470536 - RNA, 19 nt, Homo sapiens
  misc_RNA (1)...(19): siRNA sense strand
caacgaaggauuaauuucc

SEQ ID NO: 1470537 - RNA, 19 nt, Homo sapiens
  misc_RNA (1)...(19): siRNA sense strand
ugggauuccuucaggugua

SEQ ID NO: 1470538 - RNA, 19 nt, Homo sapiens
  misc_RNA (1)...(19): siRNA sense strand
ggaacucaaguaugugugu

SEQ ID NO: 1470539 - RNA, 19 nt, Homo sapiens
  misc_RNA (1)...(19): siRNA sense strand
cuucagguguauacaaugu

SEQ ID NO: 1470540 - RNA, 19 nt, Homo sapiens
  misc_RNA (1)...(19): siRNA sense strand
gggauuccuucagguguau

SEQ ID NO: 1470541 - RNA, 19 nt, Homo sapiens
  misc_RNA (1)...(19): siRNA sense strand
ucggaagugguacaauuua

SEQ ID NO: 1470542 - RNA, 19 nt, Homo sapiens
  misc_RNA (1)...(19): siRNA sense strand
uaauggauuugaggaagga

SEQ ID NO: 1470543 - RNA, 19 nt, Homo sapiens
  misc_RNA (1)...(19): siRNA sense strand
ugaaaagggucucuaugga

SEQ ID NO: 1470544 - RNA, 19 nt, Homo sapiens
  misc_RNA (1)...(19): siRNA sense strand
ggagaaacaggugaaugau

SEQ ID NO: 1470545 - RNA, 19 nt, Homo sapiens
  misc_RNA (1)...(19): siRNA sense strand
guccaaguauggcauugau

SEQ ID NO: 1470546 - RNA, 19 nt, Homo sapiens
  misc_RNA (1)...(19): siRNA sense strand
caacaacuacaggaaagau

SEQ ID NO: 1470547 - RNA, 19 nt, Homo sapiens
  misc_RNA (1)...(19): siRNA sense strand
gucaacgaaggauuaauuu

SEQ ID NO: 1470548 - RNA, 19 nt, Homo sapiens
  misc_RNA (1)...(19): siRNA sense strand
uaggaacacuggacagacu

SEQ ID NO: 1470549 - RNA, 19 nt, Homo sapiens
  misc_RNA (1)...(19): siRNA sense strand
ccucugguguccaaaauuu

SEQ ID NO: 1470550 - RNA, 19 nt, Homo sapiens
  misc_RNA (1)...(19): siRNA sense strand
cgcagcugauguuggguua

SEQ ID NO: 1470551 - RNA, 19 nt, Homo sapiens
  misc_RNA (1)...(19): siRNA sense strand
aggcguggcugcagucauc

SEQ ID NO: 1470552 - RNA, 19 nt, Homo sapiens
  misc_RNA (1)...(19): siRNA sense strand
aauaaucacagcugaaagu

SEQ ID NO: 1470553 - RNA, 19 nt, Homo sapiens
  misc_RNA (1)...(19): siRNA sense strand
uuuacugguucaacaacua

SEQ ID NO: 1470554 - RNA, 19 nt, Homo sapiens
  misc_RNA (1)...(19): siRNA sense strand
ggaacacuggacagacuug

SEQ ID NO: 1470555 - RNA, 19 nt, Homo sapiens
  misc_RNA (1)...(19): siRNA sense strand
auacagaggaggaggcuau

SEQ ID NO: 1470556 - RNA, 19 nt, Homo sapiens
  misc_RNA (1)...(19): siRNA sense strand
cagaauaaucacagcugaa

SEQ ID NO: 1470557 - RNA, 19 nt, Homo sapiens
  misc_RNA (1)...(19): siRNA sense strand
gaggaggaggcuauagcaa

SEQ ID NO: 1470558 - RNA, 19 nt, Homo sapiens
  misc_RNA (1)...(19): siRNA sense strand
uggcagagcagcuggaagu

SEQ ID NO: 1470559 - RNA, 19 nt, Homo sapiens
  misc_RNA (1)...(19): siRNA sense strand
gaauaaucacagcugaaag

SEQ ID NO: 1470560 - RNA, 19 nt, Homo sapiens
  misc_RNA (1)...(19): siRNA sense strand
gggccauggcaucuaaauu

SEQ ID NO: 1470561 - RNA, 19 nt, Homo sapiens
  misc_RNA (1)...(19): siRNA sense strand
ggcaccaguuaucaaguuc

SEQ ID NO: 1470562 - RNA, 19 nt, Homo sapiens
  misc_RNA (1)...(19): siRNA sense strand
ggaaguaggggaggcaauu

SEQ ID NO: 1470563 - RNA, 19 nt, Homo sapiens
  misc_RNA (1)...(19): siRNA sense strand
guaucuggaacucaaguau

SEQ ID NO: 1470564 - RNA, 19 nt, Homo sapiens
  misc_RNA (1)...(19): siRNA sense strand
cgagagggguccaaguaug

SEQ ID NO: 1470565 - RNA, 19 nt, Homo sapiens
  misc_RNA (1)...(19): siRNA sense strand
gcuggaagugggcaugguu

SEQ ID NO: 1470566 - RNA, 19 nt, Homo sapiens
  misc_RNA (1)...(19): siRNA sense strand
caccaguuaucaaguucga

SEQ ID NO: 1470567 - RNA, 19 nt, Homo sapiens
  misc_RNA (1)...(19): siRNA sense strand
cuacucagggcccauuaau

SEQ ID NO: 1470568 - RNA, 19 nt, Homo sapiens
  misc_RNA (1)...(19): siRNA sense strand
ucgccgaggccaugaagaa

SEQ ID NO: 1470569 - RNA, 19 nt, Homo sapiens
  misc_RNA (1)...(19): siRNA sense strand
gaacacuggacagacuugu

SEQ ID NO: 1470570 - RNA, 19 nt, Homo sapiens
  misc_RNA (1)...(19): siRNA sense strand
cuugcuccauuuauaguau

SEQ ID NO: 1470571 - RNA, 19 nt, Homo sapiens
  misc_RNA (1)...(19): siRNA sense strand
gccgaggccaugaagaaga

SEQ ID NO: 1470572 - RNA, 19 nt, Homo sapiens
  misc_RNA (1)...(19): siRNA sense strand
ugaccuugccagaauaauc

SEQ ID NO: 1470573 - RNA, 19 nt, Homo sapiens
  misc_RNA (1)...(19): siRNA sense strand
ucaacgaaggauuaauuuc

SEQ ID NO: 1470574 - RNA, 19 nt, Homo sapiens
  misc_RNA (1)...(19): siRNA sense strand
ggaggcacauggagaaauu

SEQ ID NO: 1470575 - RNA, 19 nt, Homo sapiens
  misc_RNA (1)...(19): siRNA sense strand
gcgcguagguaauggauuu

SEQ ID NO: 1470576 - RNA, 19 nt, Homo sapiens
  misc_RNA (1)...(19): siRNA sense strand
gagaggaguucauuacuuc

SEQ ID NO: 1470577 - RNA, 19 nt, Homo sapiens
  misc_RNA (1)...(19): siRNA sense strand
ggagaggaguucauuacuu

SEQ ID NO: 1470578 - RNA, 19 nt, Homo sapiens
  misc_RNA (1)...(19): siRNA sense strand
gccauggcaucuaaauuua

SEQ ID NO: 1470579 - RNA, 19 nt, Homo sapiens
  misc_RNA (1)...(19): siRNA sense strand
acucagggcccauuaauua

SEQ ID NO: 1470580 - RNA, 19 nt, Homo sapiens
  misc_RNA (1)...(19): siRNA sense strand
ggccauggcaucuaaauuu

SEQ ID NO: 1470581 - RNA, 19 nt, Homo sapiens
  misc_RNA (1)...(19): siRNA sense strand
ucagguguauacaauguua

SEQ ID NO: 1470582 - RNA, 19 nt, Homo sapiens
  misc_RNA (1)...(19): siRNA sense strand
gaaagaaugccaaggaagu

SEQ ID NO: 1470583 - RNA, 19 nt, Homo sapiens
  misc_RNA (1)...(19): siRNA sense strand
ggaggaggcuauagcaauc

SEQ ID NO: 1470584 - RNA, 19 nt, Homo sapiens
  misc_RNA (1)...(19): siRNA sense strand
ggaugaccuugccagaaua

SEQ ID NO: 1470585 - RNA, 19 nt, Homo sapiens
  misc_RNA (1)...(19): siRNA sense strand
gaaggaggcacauggagaa

SEQ ID NO: 1470586 - RNA, 19 nt, Homo sapiens
  misc_RNA (1)...(19): siRNA sense strand
ugaaugaugccguuucuaa

SEQ ID NO: 1470587 - RNA, 19 nt, Homo sapiens
  misc_RNA (1)...(19): siRNA sense strand
gaagugguacaauuuaaug

SEQ ID NO: 1470588 - RNA, 19 nt, Homo sapiens
  misc_RNA (1)...(19): siRNA sense strand
guuauucccuguucucgaa

SEQ ID NO: 1470589 - RNA, 19 nt, Homo sapiens
  misc_RNA (1)...(19): siRNA sense strand
gaaugaugccguuucuaaa

SEQ ID NO: 1470590 - RNA, 19 nt, Homo sapiens
  misc_RNA (1)...(19): siRNA sense strand
gaacucaaguauguguguu

SEQ ID NO: 1470591 - RNA, 19 nt, Homo sapiens
  misc_RNA (1)...(19): siRNA sense strand
cggccuugcuccauuuaua

SEQ ID NO: 1470592 - RNA, 19 nt, Homo sapiens
  misc_RNA (1)...(19): siRNA sense strand
cggaagugguacaauuuaa

SEQ ID NO: 1470593 - RNA, 19 nt, Homo sapiens
  misc_RNA (1)...(19): siRNA sense strand
ccaaguauggcauugauga

SEQ ID NO: 1470594 - RNA, 19 nt, Homo sapiens
  misc_RNA (1)...(19): siRNA sense strand
gcacucaugaagagacuuu

SEQ ID NO: 1470595 - RNA, 19 nt, Homo sapiens
  misc_RNA (1)...(19): siRNA sense strand
gauguuggguuagcagguu

SEQ ID NO: 1470596 - RNA, 19 nt, Homo sapiens
  misc_RNA (1)...(19): siRNA sense strand
gggaggcaauuuguacuga

SEQ ID NO: 1470597 - RNA, 19 nt, Homo sapiens
  misc_RNA (1)...(19): siRNA sense strand
ggaagugguacaauuuaau

SEQ ID NO: 1470598 - RNA, 19 nt, Homo sapiens
  misc_RNA (1)...(19): siRNA sense strand
caaggagaggaguucauua

SEQ ID NO: 1470599 - RNA, 19 nt, Homo sapiens
  misc_RNA (1)...(19): siRNA sense strand
gaacuacucagggcccauu

SEQ ID NO: 1470600 - RNA, 19 nt, Homo sapiens
  misc_RNA (1)...(19): siRNA sense strand
cgucaacgaaggauuaauu

SEQ ID NO: 1470601 - RNA, 19 nt, Homo sapiens
  misc_RNA (1)...(19): siRNA sense strand
gagaaacaggugaaugaug

SEQ ID NO: 1470602 - RNA, 19 nt, Homo sapiens
  misc_RNA (1)...(19): siRNA sense strand
ucgaaagaaugccaaggaa

SEQ ID NO: 1470603 - RNA, 19 nt, Homo sapiens
  misc_RNA (1)...(19): siRNA sense strand
gcugugcacucaugaagag

SEQ ID NO: 1470604 - RNA, 19 nt, Homo sapiens
  misc_RNA (1)...(19): siRNA sense strand
ccgaggccaugaagaagaa

SEQ ID NO: 1470605 - RNA, 19 nt, Homo sapiens
  misc_RNA (1)...(19): siRNA sense strand
guauggcauugaugaguau

SEQ ID NO: 1470606 - RNA, 19 nt, Homo sapiens
  misc_RNA (1)...(19): siRNA sense strand
aguauggcauugaugagua

SEQ ID NO: 1470607 - RNA, 19 nt, Homo sapiens
  misc_RNA (1)...(19): siRNA sense strand
gaccuugccagaauaauca

SEQ ID NO: 1470608 - RNA, 19 nt, Homo sapiens
  misc_RNA (1)...(19): siRNA sense strand
aggaugaccuugccagaau

SEQ ID NO: 1470609 - RNA, 19 nt, Homo sapiens
  misc_RNA (1)...(19): siRNA sense strand
uggagaaacaggugaauga

SEQ ID NO: 1470610 - RNA, 19 nt, Homo sapiens
  misc_RNA (1)...(19): siRNA sense strand
ggaggcaauuuguacugau

SEQ ID NO: 1470611 - RNA, 19 nt, Homo sapiens
  misc_RNA (1)...(19): siRNA sense strand
ccaaggagaggaguucauu

SEQ ID NO: 1470612 - RNA, 19 nt, Homo sapiens
  misc_RNA (1)...(19): siRNA sense strand
uagaaaagguggagaaaca

SEQ ID NO: 1470613 - RNA, 19 nt, Homo sapiens
  misc_RNA (1)...(19): siRNA sense strand
ggacagacuuguguuugcu

SEQ ID NO: 1470614 - RNA, 19 nt, Homo sapiens
  misc_RNA (1)...(19): siRNA sense strand
gcagcaaacucugugaaaa

SEQ ID NO: 1470615 - RNA, 19 nt, Homo sapiens
  misc_RNA (1)...(19): siRNA sense strand
gaggcaauuuguacugauc

SEQ ID NO: 1470616 - RNA, 19 nt, Homo sapiens
  misc_RNA (1)...(19): siRNA sense strand
aaagaaugccaaggaagua

SEQ ID NO: 1470617 - RNA, 19 nt, Homo sapiens
  misc_RNA (1)...(19): siRNA sense strand
ggugaagccugccgaagac

SEQ ID NO: 1470618 - RNA, 19 nt, Homo sapiens
  misc_RNA (1)...(19): siRNA sense strand
gaugaccuugccagaauaa

SEQ ID NO: 1470619 - RNA, 19 nt, Homo sapiens
  misc_RNA (1)...(19): siRNA sense strand
uggcaccaguuaucaaguu

SEQ ID NO: 1470620 - RNA, 19 nt, Homo sapiens
  misc_RNA (1)...(19): siRNA sense strand
caacguggaccaggcugua

SEQ ID NO: 1470621 - RNA, 19 nt, Homo sapiens
  misc_RNA (1)...(19): siRNA sense strand
guucaacaacuacaggaaa

SEQ ID NO: 1470622 - RNA, 19 nt, Homo sapiens
  misc_RNA (1)...(19): siRNA sense strand
agaauaaucacagcugaaa

SEQ ID NO: 1470623 - RNA, 19 nt, Homo sapiens
  misc_RNA (1)...(19): siRNA sense strand
acaauguuauucccuguuc

SEQ ID NO: 1470624 - RNA, 19 nt, Homo sapiens
  misc_RNA (1)...(19): siRNA sense strand
ggugaaugaugccguuucu

SEQ ID NO: 1470625 - RNA, 19 nt, Homo sapiens
  misc_RNA (1)...(19): siRNA sense strand
gcuguacugucguggugaa

SEQ ID NO: 1470626 - RNA, 19 nt, Homo sapiens
  misc_RNA (1)...(19): siRNA sense strand
uggcgucaacgaaggauua

SEQ ID NO: 1470627 - RNA, 19 nt, Homo sapiens
  misc_RNA (1)...(19): siRNA sense strand
ggaaaacgacaccaacuug

SEQ ID NO: 1470628 - RNA, 19 nt, Homo sapiens
  misc_RNA (1)...(19): siRNA sense strand
gcaccacgcagcaaacucu

SEQ ID NO: 1470629 - RNA, 19 nt, Homo sapiens
  misc_RNA (1)...(19): siRNA sense strand
caacgaaggauuaauuucc

SEQ ID NO: 1470630 - RNA, 19 nt, Homo sapiens
  misc_RNA (1)...(19): siRNA sense strand
ugggauuccuucaggugua

SEQ ID NO: 1470631 - RNA, 19 nt, Homo sapiens
  misc_RNA (1)...(19): siRNA sense strand
ggaacucaaguaugugugu

SEQ ID NO: 1470632 - RNA, 19 nt, Homo sapiens
  misc_RNA (1)...(19): siRNA sense strand
cuucagguguauacaaugu

SEQ ID NO: 1470633 - RNA, 19 nt, Homo sapiens
  misc_RNA (1)...(19): siRNA sense strand
gggauuccuucagguguau

SEQ ID NO: 1470634 - RNA, 19 nt, Homo sapiens
  misc_RNA (1)...(19): siRNA sense strand
ucggaagugguacaauuua

SEQ ID NO: 1470635 - RNA, 19 nt, Homo sapiens
  misc_RNA (1)...(19): siRNA sense strand
uaauggauuugaggaagga

SEQ ID NO: 1470636 - RNA, 19 nt, Homo sapiens
  misc_RNA (1)...(19): siRNA sense strand
ugaaaagggucucuaugga

SEQ ID NO: 1470637 - RNA, 19 nt, Homo sapiens
  misc_RNA (1)...(19): siRNA sense strand
ggagaaacaggugaaugau

SEQ ID NO: 1470638 - RNA, 19 nt, Homo sapiens
  misc_RNA (1)...(19): siRNA sense strand
guccaaguauggcauugau

SEQ ID NO: 1470639 - RNA, 19 nt, Homo sapiens
  misc_RNA (1)...(19): siRNA sense strand
caacaacuacaggaaagau

SEQ ID NO: 1470640 - RNA, 19 nt, Homo sapiens
  misc_RNA (1)...(19): siRNA sense strand
gucaacgaaggauuaauuu

SEQ ID NO: 1470641 - RNA, 19 nt, Homo sapiens
  misc_RNA (1)...(19): siRNA sense strand
uaggaacacuggacagacu

SEQ ID NO: 1470642 - RNA, 19 nt, Homo sapiens
  misc_RNA (1)...(19): siRNA sense strand
ccucugguguccaaaauuu

SEQ ID NO: 1470643 - RNA, 19 nt, Homo sapiens
  misc_RNA (1)...(19): siRNA sense strand
cgcagcugauguuggguua

SEQ ID NO: 1470644 - RNA, 19 nt, Homo sapiens
  misc_RNA (1)...(19): siRNA sense strand
aggcguggcugcagucauc

SEQ ID NO: 1470645 - RNA, 19 nt, Homo sapiens
  misc_RNA (1)...(19): siRNA sense strand
aauaaucacagcugaaagu

SEQ ID NO: 1470646 - RNA, 19 nt, Homo sapiens
  misc_RNA (1)...(19): siRNA sense strand
uuuacugguucaacaacua

SEQ ID NO: 1470647 - RNA, 19 nt, Homo sapiens
  misc_RNA (1)...(19): siRNA sense strand
ggaacacuggacagacuug

SEQ ID NO: 1470648 - RNA, 19 nt, Homo sapiens
  misc_RNA (1)...(19): siRNA sense strand
auacagaggaggaggcuau

SEQ ID NO: 1470649 - RNA, 19 nt, Homo sapiens
  misc_RNA (1)...(19): siRNA sense strand
cagaauaaucacagcugaa

SEQ ID NO: 1470650 - RNA, 19 nt, Homo sapiens
  misc_RNA (1)...(19): siRNA sense strand
gaggaggaggcuauagcaa

SEQ ID NO: 1470651 - RNA, 19 nt, Homo sapiens
  misc_RNA (1)...(19): siRNA sense strand
uggcagagcagcuggaagu

SEQ ID NO: 1470652 - RNA, 19 nt, Homo sapiens
  misc_RNA (1)...(19): siRNA sense strand
gaauaaucacagcugaaag

SEQ ID NO: 1470653 - RNA, 19 nt, Homo sapiens
  misc_RNA (1)...(19): siRNA sense strand
gggccauggcaucuaaauu

SEQ ID NO: 1470654 - RNA, 19 nt, Homo sapiens
  misc_RNA (1)...(19): siRNA sense strand
ggcaccaguuaucaaguuc

SEQ ID NO: 1470655 - RNA, 19 nt, Homo sapiens
  misc_RNA (1)...(19): siRNA sense strand
ggaaguaggggaggcaauu

SEQ ID NO: 1470656 - RNA, 19 nt, Homo sapiens
  misc_RNA (1)...(19): siRNA sense strand
guaucuggaacucaaguau

SEQ ID NO: 1470657 - RNA, 19 nt, Homo sapiens
  misc_RNA (1)...(19): siRNA sense strand
cgagagggguccaaguaug

SEQ ID NO: 1470658 - RNA, 19 nt, Homo sapiens
  misc_RNA (1)...(19): siRNA sense strand
gcuggaagugggcaugguu

SEQ ID NO: 1470659 - RNA, 19 nt, Homo sapiens
  misc_RNA (1)...(19): siRNA sense strand
caccaguuaucaaguucga

SEQ ID NO: 1470660 - RNA, 19 nt, Homo sapiens
  misc_RNA (1)...(19): siRNA sense strand
cuacucagggcccauuaau

SEQ ID NO: 1470661 - RNA, 19 nt, Homo sapiens
  misc_RNA (1)...(19): siRNA sense strand
ucgccgaggccaugaagaa

SEQ ID NO: 1470662 - RNA, 19 nt, Homo sapiens
  misc_RNA (1)...(19): siRNA sense strand
gaacacuggacagacuugu

SEQ ID NO: 1470663 - RNA, 19 nt, Homo sapiens
  misc_RNA (1)...(19): siRNA sense strand
cuugcuccauuuauaguau

SEQ ID NO: 1470664 - RNA, 19 nt, Homo sapiens
  misc_RNA (1)...(19): siRNA sense strand
gccgaggccaugaagaaga

SEQ ID NO: 1470665 - RNA, 19 nt, Homo sapiens
  misc_RNA (1)...(19): siRNA sense strand
ugaccuugccagaauaauc

SEQ ID NO: 1470666 - RNA, 19 nt, Homo sapiens
  misc_RNA (1)...(19): siRNA sense strand
ucaacgaaggauuaauuuc

SEQ ID NO: 1470667 - RNA, 19 nt, Homo sapiens
  misc_RNA (1)...(19): siRNA sense strand
ggaaacaccuuaucagaaa

SEQ ID NO: 1470668 - RNA, 19 nt, Homo sapiens
  misc_RNA (1)...(19): siRNA sense strand
ggcagcagcuaucauauua

SEQ ID NO: 1470669 - RNA, 19 nt, Homo sapiens
  misc_RNA (1)...(19): siRNA sense strand
caucuuaaguugcaucaua

SEQ ID NO: 1470670 - RNA, 19 nt, Homo sapiens
  misc_RNA (1)...(19): siRNA sense strand
ggaugacgauggcauuuaa

SEQ ID NO: 1470671 - RNA, 19 nt, Homo sapiens
  misc_RNA (1)...(19): siRNA sense strand
gcaaagcaguagccaaaga

SEQ ID NO: 1470672 - RNA, 19 nt, Homo sapiens
  misc_RNA (1)...(19): siRNA sense strand
ggccauagguuuaaugaug

SEQ ID NO: 1470673 - RNA, 19 nt, Homo sapiens
  misc_RNA (1)...(19): siRNA sense strand
gaacaucucaccaaucuag

SEQ ID NO: 1470674 - RNA, 19 nt, Homo sapiens
  misc_RNA (1)...(19): siRNA sense strand
gaggaaguauuacaaagug

SEQ ID NO: 1470675 - RNA, 19 nt, Homo sapiens
  misc_RNA (1)...(19): siRNA sense strand
gaagagaagagcaagaaga

SEQ ID NO: 1470676 - RNA, 19 nt, Homo sapiens
  misc_RNA (1)...(19): siRNA sense strand
agacgaaggucauuuagug

SEQ ID NO: 1470677 - RNA, 19 nt, Homo sapiens
  misc_RNA (1)...(19): siRNA sense strand
ugaaggaaguguggaagua

SEQ ID NO: 1470678 - RNA, 19 nt, Homo sapiens
  misc_RNA (1)...(19): siRNA sense strand
aaagagagcccaaaccauu

SEQ ID NO: 1470679 - RNA, 19 nt, Homo sapiens
  misc_RNA (1)...(19): siRNA sense strand
ucuagaagcuccuauguuc

SEQ ID NO: 1470680 - RNA, 19 nt, Homo sapiens
  misc_RNA (1)...(19): siRNA sense strand
gacgauuacuucacaaaga

SEQ ID NO: 1470681 - RNA, 19 nt, Homo sapiens
  misc_RNA (1)...(19): siRNA sense strand
aaugaugucuuggaaguua

SEQ ID NO: 1470682 - RNA, 19 nt, Homo sapiens
  misc_RNA (1)...(19): siRNA sense strand
gauggcagcuguaaugucu

SEQ ID NO: 1470683 - RNA, 19 nt, Homo sapiens
  misc_RNA (1)...(19): siRNA sense strand
gaaguuaagaggaaguauu

SEQ ID NO: 1470684 - RNA, 19 nt, Homo sapiens
  misc_RNA (1)...(19): siRNA sense strand
cauuauagcugagaagaga

SEQ ID NO: 1470685 - RNA, 19 nt, Homo sapiens
  misc_RNA (1)...(19): siRNA sense strand
cagcuacuuugcacuuaua

SEQ ID NO: 1470686 - RNA, 19 nt, Homo sapiens
  misc_RNA (1)...(19): siRNA sense strand
caacguccauucuuucaca

SEQ ID NO: 1470687 - RNA, 19 nt, Homo sapiens
  misc_RNA (1)...(19): siRNA sense strand
gauauuuggcucugucuuu

SEQ ID NO: 1470688 - RNA, 19 nt, Homo sapiens
  misc_RNA (1)...(19): siRNA sense strand
uauauucucucgugguuga

SEQ ID NO: 1470689 - RNA, 19 nt, Homo sapiens
  misc_RNA (1)...(19): siRNA sense strand
gggaaacaccuuaucagaa

SEQ ID NO: 1470690 - RNA, 19 nt, Homo sapiens
  misc_RNA (1)...(19): siRNA sense strand
gcgagacgaaggucauuua

SEQ ID NO: 1470691 - RNA, 19 nt, Homo sapiens
  misc_RNA (1)...(19): siRNA sense strand
gaaauucucuggggccaua

SEQ ID NO: 1470692 - RNA, 19 nt, Homo sapiens
  misc_RNA (1)...(19): siRNA sense strand
gcucauagccuuucaucau

SEQ ID NO: 1470693 - RNA, 19 nt, Homo sapiens
  misc_RNA (1)...(19): siRNA sense strand
gagaagagaagagcaagaa

SEQ ID NO: 1470694 - RNA, 19 nt, Homo sapiens
  misc_RNA (1)...(19): siRNA sense strand
caucauggcgaucuauuaa

SEQ ID NO: 1470695 - RNA, 19 nt, Homo sapiens
  misc_RNA (1)...(19): siRNA sense strand
gcuguaaugucuacuucaa

SEQ ID NO: 1470696 - RNA, 19 nt, Homo sapiens
  misc_RNA (1)...(19): siRNA sense strand
aaagauggcagcuguaaug

SEQ ID NO: 1470697 - RNA, 19 nt, Homo sapiens
  misc_RNA (1)...(19): siRNA sense strand
gcuaucauauuaucaaugc

SEQ ID NO: 1470698 - RNA, 19 nt, Homo sapiens
  misc_RNA (1)...(19): siRNA sense strand
cagcagcuaucauauuauc

SEQ ID NO: 1470699 - RNA, 19 nt, Homo sapiens
  misc_RNA (1)...(19): siRNA sense strand
ucauggcgaucuauuaaau

SEQ ID NO: 1470700 - RNA, 19 nt, Homo sapiens
  misc_RNA (1)...(19): siRNA sense strand
acacaugaauauagggaaa

SEQ ID NO: 1470701 - RNA, 19 nt, Homo sapiens
  misc_RNA (1)...(19): siRNA sense strand
caaguggcgccauauguuu

SEQ ID NO: 1470702 - RNA, 19 nt, Homo sapiens
  misc_RNA (1)...(19): siRNA sense strand
gaauauagggaaacaccuu

SEQ ID NO: 1470703 - RNA, 19 nt, Homo sapiens
  misc_RNA (1)...(19): siRNA sense strand
aaggaaguguggaaguaua

SEQ ID NO: 1470704 - RNA, 19 nt, Homo sapiens
  misc_RNA (1)...(19): siRNA sense strand
gauccuccaguccaucuua

SEQ ID NO: 1470705 - RNA, 19 nt, Homo sapiens
  misc_RNA (1)...(19): siRNA sense strand
gcagcuaucauauuaucaa

SEQ ID NO: 1470706 - RNA, 19 nt, Homo sapiens
  misc_RNA (1)...(19): siRNA sense strand
ggcaacugcucgaaagaga

SEQ ID NO: 1470707 - RNA, 19 nt, Homo sapiens
  misc_RNA (1)...(19): siRNA sense strand
ggaaguauuacaaagugaa

SEQ ID NO: 1470708 - RNA, 19 nt, Homo sapiens
  misc_RNA (1)...(19): siRNA sense strand
uuaaugaugucuuggaagu

SEQ ID NO: 1470709 - RNA, 19 nt, Homo sapiens
  misc_RNA (1)...(19): siRNA sense strand
uggaacaucucaccaaucu

SEQ ID NO: 1470710 - RNA, 19 nt, Homo sapiens
  misc_RNA (1)...(19): siRNA sense strand
gacaccaaguggcgccaua

SEQ ID NO: 1470711 - RNA, 19 nt, Homo sapiens
  misc_RNA (1)...(19): siRNA sense strand
gaaacaccuuaucagaaag

SEQ ID NO: 1470712 - RNA, 19 nt, Homo sapiens
  misc_RNA (1)...(19): siRNA sense strand
gaaggaaguguggaaguau

SEQ ID NO: 1470713 - RNA, 19 nt, Homo sapiens
  misc_RNA (1)...(19): siRNA sense strand
uuacaaagugaacugcuua

SEQ ID NO: 1470714 - RNA, 19 nt, Homo sapiens
  misc_RNA (1)...(19): siRNA sense strand
gccauagguuuaaugaugu

SEQ ID NO: 1470715 - RNA, 19 nt, Homo sapiens
  misc_RNA (1)...(19): siRNA sense strand
ccgcaaagcaguagccaaa

SEQ ID NO: 1470716 - RNA, 19 nt, Homo sapiens
  misc_RNA (1)...(19): siRNA sense strand
gggaagcuuugccucaugu

SEQ ID NO: 1470717 - RNA, 19 nt, Homo sapiens
  misc_RNA (1)...(19): siRNA sense strand
ccaaguggcgccauauguu

SEQ ID NO: 1470718 - RNA, 19 nt, Homo sapiens
  misc_RNA (1)...(19): siRNA sense strand
caaauuagucaacgaccaa

SEQ ID NO: 1470719 - RNA, 19 nt, Homo sapiens
  misc_RNA (1)...(19): siRNA sense strand
gaaagagagcccaaaccau

SEQ ID NO: 1470720 - RNA, 19 nt, Homo sapiens
  misc_RNA (1)...(19): siRNA sense strand
cagcagcuccacauagaaa

SEQ ID NO: 1470721 - RNA, 19 nt, Homo sapiens
  misc_RNA (1)...(19): siRNA sense strand
ccaaaccaccauaggauau

SEQ ID NO: 1470722 - RNA, 19 nt, Homo sapiens
  misc_RNA (1)...(19): siRNA sense strand
gguuaucgcuguguuacug

SEQ ID NO: 1470723 - RNA, 19 nt, Homo sapiens
  misc_RNA (1)...(19): siRNA sense strand
uaugagagaugggaagcuu

SEQ ID NO: 1470724 - RNA, 19 nt, Homo sapiens
  misc_RNA (1)...(19): siRNA sense strand
guaacuauuguccaugaaa

SEQ ID NO: 1470725 - RNA, 19 nt, Homo sapiens
  misc_RNA (1)...(19): siRNA sense strand
uugacaacguccauucuuu

SEQ ID NO: 1470726 - RNA, 19 nt, Homo sapiens
  misc_RNA (1)...(19): siRNA sense strand
ucuccugacuuuaaacaga

SEQ ID NO: 1470727 - RNA, 19 nt, Homo sapiens
  misc_RNA (1)...(19): siRNA sense strand
ccacuuccgccacacauga

SEQ ID NO: 1470728 - RNA, 19 nt, Homo sapiens
  misc_RNA (1)...(19): siRNA sense strand
guuuaaugaugucuuggaa

SEQ ID NO: 1470729 - RNA, 19 nt, Homo sapiens
  misc_RNA (1)...(19): siRNA sense strand
cgguaacuauuguccauga

SEQ ID NO: 1470730 - RNA, 19 nt, Homo sapiens
  misc_RNA (1)...(19): siRNA sense strand
caacuucuccgcuauacag

SEQ ID NO: 1470731 - RNA, 19 nt, Homo sapiens
  misc_RNA (1)...(19): siRNA sense strand
cgaaagagagcccaaacca

SEQ ID NO: 1470732 - RNA, 19 nt, Homo sapiens
  misc_RNA (1)...(19): siRNA sense strand
ggaggaugacgauggcauu

SEQ ID NO: 1470733 - RNA, 19 nt, Homo sapiens
  misc_RNA (1)...(19): siRNA sense strand
gguagaaggaacaguuaga

SEQ ID NO: 1470734 - RNA, 19 nt, Homo sapiens
  misc_RNA (1)...(19): siRNA sense strand
cagcuguaaugucuacuuc

SEQ ID NO: 1470735 - RNA, 19 nt, Homo sapiens
  misc_RNA (1)...(19): siRNA sense strand
acaaagauggcagcuguaa

SEQ ID NO: 1470736 - RNA, 19 nt, Homo sapiens
  misc_RNA (1)...(19): siRNA sense strand
gguaacuauuguccaugaa

SEQ ID NO: 1470737 - RNA, 19 nt, Homo sapiens
  misc_RNA (1)...(19): siRNA sense strand
uguagaaucccaaauguag

SEQ ID NO: 1470738 - RNA, 19 nt, Homo sapiens
  misc_RNA (1)...(19): siRNA sense strand
ucaucauggcgaucuauua

SEQ ID NO: 1470739 - RNA, 19 nt, Homo sapiens
  misc_RNA (1)...(19): siRNA sense strand
uagguuuaaugaugucuug

SEQ ID NO: 1470740 - RNA, 19 nt, Homo sapiens
  misc_RNA (1)...(19): siRNA sense strand
caaagcaguagccaaagau

SEQ ID NO: 1470741 - RNA, 19 nt, Homo sapiens
  misc_RNA (1)...(19): siRNA sense strand
ugacaacguccauucuuuc

SEQ ID NO: 1470742 - RNA, 19 nt, Homo sapiens
  misc_RNA (1)...(19): siRNA sense strand
aagcucuccugacuuuaaa

SEQ ID NO: 1470743 - RNA, 19 nt, Homo sapiens
  misc_RNA (1)...(19): siRNA sense strand
gaggaugacgauggcauuu

SEQ ID NO: 1470744 - RNA, 19 nt, Homo sapiens
  misc_RNA (1)...(19): siRNA sense strand
gugguagaaggaacaguua

SEQ ID NO: 1470745 - RNA, 19 nt, Homo sapiens
  misc_RNA (1)...(19): siRNA sense strand
ucagcuacuuugcacuuau

SEQ ID NO: 1470746 - RNA, 19 nt, Homo sapiens
  misc_RNA (1)...(19): siRNA sense strand
cuuauauucucucgugguu

SEQ ID NO: 1470747 - RNA, 19 nt, Homo sapiens
  misc_RNA (1)...(19): siRNA sense strand
ucuguagaaucccaaaugu

SEQ ID NO: 1470748 - RNA, 19 nt, Homo sapiens
  misc_RNA (1)...(19): siRNA sense strand
accagcagcuccacauaga

SEQ ID NO: 1470749 - RNA, 19 nt, Homo sapiens
  misc_RNA (1)...(19): siRNA sense strand
cggcagcagcuaucauauu

SEQ ID NO: 1470750 - RNA, 19 nt, Homo sapiens
  misc_RNA (1)...(19): siRNA sense strand
aagaggaaguauuacaaag

SEQ ID NO: 1470751 - RNA, 19 nt, Homo sapiens
  misc_RNA (1)...(19): siRNA sense strand
ugagagaugggaagcuuug

SEQ ID NO: 1470752 - RNA, 19 nt, Homo sapiens
  misc_RNA (1)...(19): siRNA sense strand
gacaacguccauucuuuca

SEQ ID NO: 1470753 - RNA, 19 nt, Homo sapiens
  misc_RNA (1)...(19): siRNA sense strand
cucauagccuuucaucaug

SEQ ID NO: 1470754 - RNA, 19 nt, Homo sapiens
  misc_RNA (1)...(19): siRNA sense strand
aauauagggaaacaccuua

SEQ ID NO: 1470755 - RNA, 19 nt, Homo sapiens
  misc_RNA (1)...(19): siRNA sense strand
gaccagcagcuccacauag

SEQ ID NO: 1470756 - RNA, 19 nt, Homo sapiens
  misc_RNA (1)...(19): siRNA sense strand
caaagugaacugcuuacag

SEQ ID NO: 1470757 - RNA, 19 nt, Homo sapiens
  misc_RNA (1)...(19): siRNA sense strand
gaagagcaagaagacgauu

SEQ ID NO: 1470758 - RNA, 19 nt, Homo sapiens
  misc_RNA (1)...(19): siRNA sense strand
guuaagaggaaguauuaca

SEQ ID NO: 1470759 - RNA, 19 nt, Homo sapiens
  misc_RNA (1)...(19): siRNA sense strand
acgauuacuucacaaagau

SEQ ID NO: 1470760 - RNA, 19 nt, Homo sapiens
  misc_RNA (1)...(19): siRNA sense strand
uccaguccaucuuaaguug

SEQ ID NO: 1470761 - RNA, 19 nt, Homo sapiens
  misc_RNA (1)...(19): siRNA sense strand
gacccaaaccaccauagga

SEQ ID NO: 1470762 - RNA, 19 nt, Homo sapiens
  misc_RNA (1)...(19): siRNA sense strand
gcccaacuucuccgcuaua

SEQ ID NO: 1470763 - RNA, 19 nt, Homo sapiens
  misc_RNA (1)...(19): siRNA sense strand
gcaauuggacuggaaagac

SEQ ID NO: 1470764 - RNA, 19 nt, Homo sapiens
  misc_RNA (1)...(19): siRNA sense strand
uacggcagcagcuaucaua

SEQ ID NO: 1470765 - RNA, 19 nt, Homo sapiens
  misc_RNA (1)...(19): siRNA sense strand
aagcaguagccaaagauaa

SEQ ID NO: 1470766 - RNA, 19 nt, Homo sapiens
  misc_RNA (1)...(19): siRNA sense strand
ugacgauggcauuuaaaga

SEQ ID NO: 1470767 - RNA, 19 nt, Homo sapiens
  misc_RNA (1)...(19): siRNA sense strand
ggaaacaccuuaucagaaa

SEQ ID NO: 1470768 - RNA, 19 nt, Homo sapiens
  misc_RNA (1)...(19): siRNA sense strand
ggcagcagcuaucauauua

SEQ ID NO: 1470769 - RNA, 19 nt, Homo sapiens
  misc_RNA (1)...(19): siRNA sense strand
caucuuaaguugcaucaua

SEQ ID NO: 1470770 - RNA, 19 nt, Homo sapiens
  misc_RNA (1)...(19): siRNA sense strand
ggaugacgauggcauuuaa

SEQ ID NO: 1470771 - RNA, 19 nt, Homo sapiens
  misc_RNA (1)...(19): siRNA sense strand
gcaaagcaguagccaaaga

SEQ ID NO: 1470772 - RNA, 19 nt, Homo sapiens
  misc_RNA (1)...(19): siRNA sense strand
ggccauagguuuaaugaug

SEQ ID NO: 1470773 - RNA, 19 nt, Homo sapiens
  misc_RNA (1)...(19): siRNA sense strand
gaacaucucaccaaucuag

SEQ ID NO: 1470774 - RNA, 19 nt, Homo sapiens
  misc_RNA (1)...(19): siRNA sense strand
gaggaaguauuacaaagug

SEQ ID NO: 1470775 - RNA, 19 nt, Homo sapiens
  misc_RNA (1)...(19): siRNA sense strand
gaagagaagagcaagaaga

SEQ ID NO: 1470776 - RNA, 19 nt, Homo sapiens
  misc_RNA (1)...(19): siRNA sense strand
agacgaaggucauuuagug

SEQ ID NO: 1470777 - RNA, 19 nt, Homo sapiens
  misc_RNA (1)...(19): siRNA sense strand
ugaaggaaguguggaagua

SEQ ID NO: 1470778 - RNA, 19 nt, Homo sapiens
  misc_RNA (1)...(19): siRNA sense strand
aaagagagcccaaaccauu

SEQ ID NO: 1470779 - RNA, 19 nt, Homo sapiens
  misc_RNA (1)...(19): siRNA sense strand
ucuagaagcuccuauguuc

SEQ ID NO: 1470780 - RNA, 19 nt, Homo sapiens
  misc_RNA (1)...(19): siRNA sense strand
gacgauuacuucacaaaga

SEQ ID NO: 1470781 - RNA, 19 nt, Homo sapiens
  misc_RNA (1)...(19): siRNA sense strand
aaugaugucuuggaaguua

SEQ ID NO: 1470782 - RNA, 19 nt, Homo sapiens
  misc_RNA (1)...(19): siRNA sense strand
gauggcagcuguaaugucu

SEQ ID NO: 1470783 - RNA, 19 nt, Homo sapiens
  misc_RNA (1)...(19): siRNA sense strand
gaaguuaagaggaaguauu

SEQ ID NO: 1470784 - RNA, 19 nt, Homo sapiens
  misc_RNA (1)...(19): siRNA sense strand
cauuauagcugagaagaga

SEQ ID NO: 1470785 - RNA, 19 nt, Homo sapiens
  misc_RNA (1)...(19): siRNA sense strand
cagcuacuuugcacuuaua

SEQ ID NO: 1470786 - RNA, 19 nt, Homo sapiens
  misc_RNA (1)...(19): siRNA sense strand
caacguccauucuuucaca

SEQ ID NO: 1470787 - RNA, 19 nt, Homo sapiens
  misc_RNA (1)...(19): siRNA sense strand
gauauuuggcucugucuuu

SEQ ID NO: 1470788 - RNA, 19 nt, Homo sapiens
  misc_RNA (1)...(19): siRNA sense strand
uauauucucucgugguuga

SEQ ID NO: 1470789 - RNA, 19 nt, Homo sapiens
  misc_RNA (1)...(19): siRNA sense strand
gggaaacaccuuaucagaa

SEQ ID NO: 1470790 - RNA, 19 nt, Homo sapiens
  misc_RNA (1)...(19): siRNA sense strand
gcgagacgaaggucauuua

SEQ ID NO: 1470791 - RNA, 19 nt, Homo sapiens
  misc_RNA (1)...(19): siRNA sense strand
gaaauucucuggggccaua

SEQ ID NO: 1470792 - RNA, 19 nt, Homo sapiens
  misc_RNA (1)...(19): siRNA sense strand
gcucauagccuuucaucau

SEQ ID NO: 1470793 - RNA, 19 nt, Homo sapiens
  misc_RNA (1)...(19): siRNA sense strand
gagaagagaagagcaagaa

SEQ ID NO: 1470794 - RNA, 19 nt, Homo sapiens
  misc_RNA (1)...(19): siRNA sense strand
caucauggcgaucuauuaa

SEQ ID NO: 1470795 - RNA, 19 nt, Homo sapiens
  misc_RNA (1)...(19): siRNA sense strand
gcuguaaugucuacuucaa

SEQ ID NO: 1470796 - RNA, 19 nt, Homo sapiens
  misc_RNA (1)...(19): siRNA sense strand
aaagauggcagcuguaaug

SEQ ID NO: 1470797 - RNA, 19 nt, Homo sapiens
  misc_RNA (1)...(19): siRNA sense strand
gcuaucauauuaucaaugc

SEQ ID NO: 1470798 - RNA, 19 nt, Homo sapiens
  misc_RNA (1)...(19): siRNA sense strand
cagcagcuaucauauuauc

SEQ ID NO: 1470799 - RNA, 19 nt, Homo sapiens
  misc_RNA (1)...(19): siRNA sense strand
ucauggcgaucuauuaaau

SEQ ID NO: 1470800 - RNA, 19 nt, Homo sapiens
  misc_RNA (1)...(19): siRNA sense strand
acacaugaauauagggaaa

SEQ ID NO: 1470801 - RNA, 19 nt, Homo sapiens
  misc_RNA (1)...(19): siRNA sense strand
caaguggcgccauauguuu

SEQ ID NO: 1470802 - RNA, 19 nt, Homo sapiens
  misc_RNA (1)...(19): siRNA sense strand
gaauauagggaaacaccuu

SEQ ID NO: 1470803 - RNA, 19 nt, Homo sapiens
  misc_RNA (1)...(19): siRNA sense strand
aaggaaguguggaaguaua

SEQ ID NO: 1470804 - RNA, 19 nt, Homo sapiens
  misc_RNA (1)...(19): siRNA sense strand
gauccuccaguccaucuua

SEQ ID NO: 1470805 - RNA, 19 nt, Homo sapiens
  misc_RNA (1)...(19): siRNA sense strand
gcagcuaucauauuaucaa

SEQ ID NO: 1470806 - RNA, 19 nt, Homo sapiens
  misc_RNA (1)...(19): siRNA sense strand
ggcaacugcucgaaagaga

SEQ ID NO: 1470807 - RNA, 19 nt, Homo sapiens
  misc_RNA (1)...(19): siRNA sense strand
ggaaguauuacaaagugaa

SEQ ID NO: 1470808 - RNA, 19 nt, Homo sapiens
  misc_RNA (1)...(19): siRNA sense strand
uuaaugaugucuuggaagu

SEQ ID NO: 1470809 - RNA, 19 nt, Homo sapiens
  misc_RNA (1)...(19): siRNA sense strand
uggaacaucucaccaaucu

SEQ ID NO: 1470810 - RNA, 19 nt, Homo sapiens
  misc_RNA (1)...(19): siRNA sense strand
gacaccaaguggcgccaua

SEQ ID NO: 1470811 - RNA, 19 nt, Homo sapiens
  misc_RNA (1)...(19): siRNA sense strand
gaaacaccuuaucagaaag

SEQ ID NO: 1470812 - RNA, 19 nt, Homo sapiens
  misc_RNA (1)...(19): siRNA sense strand
gaaggaaguguggaaguau

SEQ ID NO: 1470813 - RNA, 19 nt, Homo sapiens
  misc_RNA (1)...(19): siRNA sense strand
uuacaaagugaacugcuua

SEQ ID NO: 1470814 - RNA, 19 nt, Homo sapiens
  misc_RNA (1)...(19): siRNA sense strand
gccauagguuuaaugaugu

SEQ ID NO: 1470815 - RNA, 19 nt, Homo sapiens
  misc_RNA (1)...(19): siRNA sense strand
ccgcaaagcaguagccaaa

SEQ ID NO: 1470816 - RNA, 19 nt, Homo sapiens
  misc_RNA (1)...(19): siRNA sense strand
gggaagcuuugccucaugu

SEQ ID NO: 1470817 - RNA, 19 nt, Homo sapiens
  misc_RNA (1)...(19): siRNA sense strand
ccaaguggcgccauauguu

SEQ ID NO: 1470818 - RNA, 19 nt, Homo sapiens
  misc_RNA (1)...(19): siRNA sense strand
caaauuagucaacgaccaa

SEQ ID NO: 1470819 - RNA, 19 nt, Homo sapiens
  misc_RNA (1)...(19): siRNA sense strand
gaaagagagcccaaaccau

SEQ ID NO: 1470820 - RNA, 19 nt, Homo sapiens
  misc_RNA (1)...(19): siRNA sense strand
cagcagcuccacauagaaa

SEQ ID NO: 1470821 - RNA, 19 nt, Homo sapiens
  misc_RNA (1)...(19): siRNA sense strand
ccaaaccaccauaggauau

SEQ ID NO: 1470822 - RNA, 19 nt, Homo sapiens
  misc_RNA (1)...(19): siRNA sense strand
gguuaucgcuguguuacug

SEQ ID NO: 1470823 - RNA, 19 nt, Homo sapiens
  misc_RNA (1)...(19): siRNA sense strand
uaugagagaugggaagcuu

SEQ ID NO: 1470824 - RNA, 19 nt, Homo sapiens
  misc_RNA (1)...(19): siRNA sense strand
guaacuauuguccaugaaa

SEQ ID NO: 1470825 - RNA, 19 nt, Homo sapiens
  misc_RNA (1)...(19): siRNA sense strand
uugacaacguccauucuuu

SEQ ID NO: 1470826 - RNA, 19 nt, Homo sapiens
  misc_RNA (1)...(19): siRNA sense strand
ucuccugacuuuaaacaga

SEQ ID NO: 1470827 - RNA, 19 nt, Homo sapiens
  misc_RNA (1)...(19): siRNA sense strand
ccacuuccgccacacauga

SEQ ID NO: 1470828 - RNA, 19 nt, Homo sapiens
  misc_RNA (1)...(19): siRNA sense strand
guuuaaugaugucuuggaa

SEQ ID NO: 1470829 - RNA, 19 nt, Homo sapiens
  misc_RNA (1)...(19): siRNA sense strand
cgguaacuauuguccauga

SEQ ID NO: 1470830 - RNA, 19 nt, Homo sapiens
  misc_RNA (1)...(19): siRNA sense strand
caacuucuccgcuauacag

SEQ ID NO: 1470831 - RNA, 19 nt, Homo sapiens
  misc_RNA (1)...(19): siRNA sense strand
cgaaagagagcccaaacca

SEQ ID NO: 1470832 - RNA, 19 nt, Homo sapiens
  misc_RNA (1)...(19): siRNA sense strand
ggaggaugacgauggcauu

SEQ ID NO: 1470833 - RNA, 19 nt, Homo sapiens
  misc_RNA (1)...(19): siRNA sense strand
gguagaaggaacaguuaga

SEQ ID NO: 1470834 - RNA, 19 nt, Homo sapiens
  misc_RNA (1)...(19): siRNA sense strand
cagcuguaaugucuacuuc

SEQ ID NO: 1470835 - RNA, 19 nt, Homo sapiens
  misc_RNA (1)...(19): siRNA sense strand
acaaagauggcagcuguaa

SEQ ID NO: 1470836 - RNA, 19 nt, Homo sapiens
  misc_RNA (1)...(19): siRNA sense strand
gguaacuauuguccaugaa

SEQ ID NO: 1470837 - RNA, 19 nt, Homo sapiens
  misc_RNA (1)...(19): siRNA sense strand
uguagaaucccaaauguag

SEQ ID NO: 1470838 - RNA, 19 nt, Homo sapiens
  misc_RNA (1)...(19): siRNA sense strand
ucaucauggcgaucuauua

SEQ ID NO: 1470839 - RNA, 19 nt, Homo sapiens
  misc_RNA (1)...(19): siRNA sense strand
uagguuuaaugaugucuug

SEQ ID NO: 1470840 - RNA, 19 nt, Homo sapiens
  misc_RNA (1)...(19): siRNA sense strand
caaagcaguagccaaagau

SEQ ID NO: 1470841 - RNA, 19 nt, Homo sapiens
  misc_RNA (1)...(19): siRNA sense strand
ugacaacguccauucuuuc

SEQ ID NO: 1470842 - RNA, 19 nt, Homo sapiens
  misc_RNA (1)...(19): siRNA sense strand
aagcucuccugacuuuaaa

SEQ ID NO: 1470843 - RNA, 19 nt, Homo sapiens
  misc_RNA (1)...(19): siRNA sense strand
gaggaugacgauggcauuu

SEQ ID NO: 1470844 - RNA, 19 nt, Homo sapiens
  misc_RNA (1)...(19): siRNA sense strand
gugguagaaggaacaguua

SEQ ID NO: 1470845 - RNA, 19 nt, Homo sapiens
  misc_RNA (1)...(19): siRNA sense strand
ucagcuacuuugcacuuau

SEQ ID NO: 1470846 - RNA, 19 nt, Homo sapiens
  misc_RNA (1)...(19): siRNA sense strand
cuuauauucucucgugguu

SEQ ID NO: 1470847 - RNA, 19 nt, Homo sapiens
  misc_RNA (1)...(19): siRNA sense strand
ucuguagaaucccaaaugu

SEQ ID NO: 1470848 - RNA, 19 nt, Homo sapiens
  misc_RNA (1)...(19): siRNA sense strand
accagcagcuccacauaga

SEQ ID NO: 1470849 - RNA, 19 nt, Homo sapiens
  misc_RNA (1)...(19): siRNA sense strand
cggcagcagcuaucauauu

SEQ ID NO: 1470850 - RNA, 19 nt, Homo sapiens
  misc_RNA (1)...(19): siRNA sense strand
aagaggaaguauuacaaag

SEQ ID NO: 1470851 - RNA, 19 nt, Homo sapiens
  misc_RNA (1)...(19): siRNA sense strand
ugagagaugggaagcuuug

SEQ ID NO: 1470852 - RNA, 19 nt, Homo sapiens
  misc_RNA (1)...(19): siRNA sense strand
gacaacguccauucuuuca

SEQ ID NO: 1470853 - RNA, 19 nt, Homo sapiens
  misc_RNA (1)...(19): siRNA sense strand
cucauagccuuucaucaug

SEQ ID NO: 1470854 - RNA, 19 nt, Homo sapiens
  misc_RNA (1)...(19): siRNA sense strand
aauauagggaaacaccuua

SEQ ID NO: 1470855 - RNA, 19 nt, Homo sapiens
  misc_RNA (1)...(19): siRNA sense strand
gaccagcagcuccacauag

SEQ ID NO: 1470856 - RNA, 19 nt, Homo sapiens
  misc_RNA (1)...(19): siRNA sense strand
caaagugaacugcuuacag

SEQ ID NO: 1470857 - RNA, 19 nt, Homo sapiens
  misc_RNA (1)...(19): siRNA sense strand
gaagagcaagaagacgauu

SEQ ID NO: 1470858 - RNA, 19 nt, Homo sapiens
  misc_RNA (1)...(19): siRNA sense strand
guuaagaggaaguauuaca

SEQ ID NO: 1470859 - RNA, 19 nt, Homo sapiens
  misc_RNA (1)...(19): siRNA sense strand
acgauuacuucacaaagau

SEQ ID NO: 1470860 - RNA, 19 nt, Homo sapiens
  misc_RNA (1)...(19): siRNA sense strand
uccaguccaucuuaaguug

SEQ ID NO: 1470861 - RNA, 19 nt, Homo sapiens
  misc_RNA (1)...(19): siRNA sense strand
gacccaaaccaccauagga

SEQ ID NO: 1470862 - RNA, 19 nt, Homo sapiens
  misc_RNA (1)...(19): siRNA sense strand
gcccaacuucuccgcuaua

SEQ ID NO: 1470863 - RNA, 19 nt, Homo sapiens
  misc_RNA (1)...(19): siRNA sense strand
gcaauuggacuggaaagac

SEQ ID NO: 1470864 - RNA, 19 nt, Homo sapiens
  misc_RNA (1)...(19): siRNA sense strand
uacggcagcagcuaucaua

SEQ ID NO: 1470865 - RNA, 19 nt, Homo sapiens
  misc_RNA (1)...(19): siRNA sense strand
aagcaguagccaaagauaa

SEQ ID NO: 1470866 - RNA, 19 nt, Homo sapiens
  misc_RNA (1)...(19): siRNA sense strand
ugacgauggcauuuaaaga

SEQ ID NO: 1470867 - RNA, 19 nt, Homo sapiens
  misc_RNA (1)...(19): siRNA sense strand
ggaaacaccuuaucagaaa

SEQ ID NO: 1470868 - RNA, 19 nt, Homo sapiens
  misc_RNA (1)...(19): siRNA sense strand
ggcagcagcuaucauauua

SEQ ID NO: 1470869 - RNA, 19 nt, Homo sapiens
  misc_RNA (1)...(19): siRNA sense strand
caucuuaaguugcaucaua

SEQ ID NO: 1470870 - RNA, 19 nt, Homo sapiens
  misc_RNA (1)...(19): siRNA sense strand
ggaugacgauggcauuuaa

SEQ ID NO: 1470871 - RNA, 19 nt, Homo sapiens
  misc_RNA (1)...(19): siRNA sense strand
gcaaagcaguagccaaaga

SEQ ID NO: 1470872 - RNA, 19 nt, Homo sapiens
  misc_RNA (1)...(19): siRNA sense strand
ggccauagguuuaaugaug

SEQ ID NO: 1470873 - RNA, 19 nt, Homo sapiens
  misc_RNA (1)...(19): siRNA sense strand
gaacaucucaccaaucuag

SEQ ID NO: 1470874 - RNA, 19 nt, Homo sapiens
  misc_RNA (1)...(19): siRNA sense strand
gaggaaguauuacaaagug

SEQ ID NO: 1470875 - RNA, 19 nt, Homo sapiens
  misc_RNA (1)...(19): siRNA sense strand
gaagagaagagcaagaaga

SEQ ID NO: 1470876 - RNA, 19 nt, Homo sapiens
  misc_RNA (1)...(19): siRNA sense strand
agacgaaggucauuuagug

SEQ ID NO: 1470877 - RNA, 19 nt, Homo sapiens
  misc_RNA (1)...(19): siRNA sense strand
ugaaggaaguguggaagua

SEQ ID NO: 1470878 - RNA, 19 nt, Homo sapiens
  misc_RNA (1)...(19): siRNA sense strand
aaagagagcccaaaccauu

SEQ ID NO: 1470879 - RNA, 19 nt, Homo sapiens
  misc_RNA (1)...(19): siRNA sense strand
ucuagaagcuccuauguuc

SEQ ID NO: 1470880 - RNA, 19 nt, Homo sapiens
  misc_RNA (1)...(19): siRNA sense strand
gacgauuacuucacaaaga

SEQ ID NO: 1470881 - RNA, 19 nt, Homo sapiens
  misc_RNA (1)...(19): siRNA sense strand
aaugaugucuuggaaguua

SEQ ID NO: 1470882 - RNA, 19 nt, Homo sapiens
  misc_RNA (1)...(19): siRNA sense strand
gauggcagcuguaaugucu

SEQ ID NO: 1470883 - RNA, 19 nt, Homo sapiens
  misc_RNA (1)...(19): siRNA sense strand
gaaguuaagaggaaguauu

SEQ ID NO: 1470884 - RNA, 19 nt, Homo sapiens
  misc_RNA (1)...(19): siRNA sense strand
cauuauagcugagaagaga

SEQ ID NO: 1470885 - RNA, 19 nt, Homo sapiens
  misc_RNA (1)...(19): siRNA sense strand
cagcuacuuugcacuuaua

SEQ ID NO: 1470886 - RNA, 19 nt, Homo sapiens
  misc_RNA (1)...(19): siRNA sense strand
caacguccauucuuucaca

SEQ ID NO: 1470887 - RNA, 19 nt, Homo sapiens
  misc_RNA (1)...(19): siRNA sense strand
gauauuuggcucugucuuu

SEQ ID NO: 1470888 - RNA, 19 nt, Homo sapiens
  misc_RNA (1)...(19): siRNA sense strand
uauauucucucgugguuga

SEQ ID NO: 1470889 - RNA, 19 nt, Homo sapiens
  misc_RNA (1)...(19): siRNA sense strand
gggaaacaccuuaucagaa

SEQ ID NO: 1470890 - RNA, 19 nt, Homo sapiens
  misc_RNA (1)...(19): siRNA sense strand
gcgagacgaaggucauuua

SEQ ID NO: 1470891 - RNA, 19 nt, Homo sapiens
  misc_RNA (1)...(19): siRNA sense strand
gaaauucucuggggccaua

SEQ ID NO: 1470892 - RNA, 19 nt, Homo sapiens
  misc_RNA (1)...(19): siRNA sense strand
gcucauagccuuucaucau

SEQ ID NO: 1470893 - RNA, 19 nt, Homo sapiens
  misc_RNA (1)...(19): siRNA sense strand
gagaagagaagagcaagaa

SEQ ID NO: 1470894 - RNA, 19 nt, Homo sapiens
  misc_RNA (1)...(19): siRNA sense strand
caucauggcgaucuauuaa

SEQ ID NO: 1470895 - RNA, 19 nt, Homo sapiens
  misc_RNA (1)...(19): siRNA sense strand
gcuguaaugucuacuucaa

SEQ ID NO: 1470896 - RNA, 19 nt, Homo sapiens
  misc_RNA (1)...(19): siRNA sense strand
aaagauggcagcuguaaug

SEQ ID NO: 1470897 - RNA, 19 nt, Homo sapiens
  misc_RNA (1)...(19): siRNA sense strand
gcuaucauauuaucaaugc

SEQ ID NO: 1470898 - RNA, 19 nt, Homo sapiens
  misc_RNA (1)...(19): siRNA sense strand
cagcagcuaucauauuauc

SEQ ID NO: 1470899 - RNA, 19 nt, Homo sapiens
  misc_RNA (1)...(19): siRNA sense strand
ucauggcgaucuauuaaau

SEQ ID NO: 1470900 - RNA, 19 nt, Homo sapiens
  misc_RNA (1)...(19): siRNA sense strand
acacaugaauauagggaaa

SEQ ID NO: 1470901 - RNA, 19 nt, Homo sapiens
  misc_RNA (1)...(19): siRNA sense strand
caaguggcgccauauguuu

SEQ ID NO: 1470902 - RNA, 19 nt, Homo sapiens
  misc_RNA (1)...(19): siRNA sense strand
gaauauagggaaacaccuu

SEQ ID NO: 1470903 - RNA, 19 nt, Homo sapiens
  misc_RNA (1)...(19): siRNA sense strand
aaggaaguguggaaguaua

SEQ ID NO: 1470904 - RNA, 19 nt, Homo sapiens
  misc_RNA (1)...(19): siRNA sense strand
gauccuccaguccaucuua

SEQ ID NO: 1470905 - RNA, 19 nt, Homo sapiens
  misc_RNA (1)...(19): siRNA sense strand
gcagcuaucauauuaucaa

SEQ ID NO: 1470906 - RNA, 19 nt, Homo sapiens
  misc_RNA (1)...(19): siRNA sense strand
ggcaacugcucgaaagaga

SEQ ID NO: 1470907 - RNA, 19 nt, Homo sapiens
  misc_RNA (1)...(19): siRNA sense strand
ggaaguauuacaaagugaa

SEQ ID NO: 1470908 - RNA, 19 nt, Homo sapiens
  misc_RNA (1)...(19): siRNA sense strand
uuaaugaugucuuggaagu

SEQ ID NO: 1470909 - RNA, 19 nt, Homo sapiens
  misc_RNA (1)...(19): siRNA sense strand
uggaacaucucaccaaucu

SEQ ID NO: 1470910 - RNA, 19 nt, Homo sapiens
  misc_RNA (1)...(19): siRNA sense strand
gacaccaaguggcgccaua

SEQ ID NO: 1470911 - RNA, 19 nt, Homo sapiens
  misc_RNA (1)...(19): siRNA sense strand
gaaacaccuuaucagaaag

SEQ ID NO: 1470912 - RNA, 19 nt, Homo sapiens
  misc_RNA (1)...(19): siRNA sense strand
gaaggaaguguggaaguau

SEQ ID NO: 1470913 - RNA, 19 nt, Homo sapiens
  misc_RNA (1)...(19): siRNA sense strand
uuacaaagugaacugcuua

SEQ ID NO: 1470914 - RNA, 19 nt, Homo sapiens
  misc_RNA (1)...(19): siRNA sense strand
gccauagguuuaaugaugu

SEQ ID NO: 1470915 - RNA, 19 nt, Homo sapiens
  misc_RNA (1)...(19): siRNA sense strand
ccgcaaagcaguagccaaa

SEQ ID NO: 1470916 - RNA, 19 nt, Homo sapiens
  misc_RNA (1)...(19): siRNA sense strand
gggaagcuuugccucaugu

SEQ ID NO: 1470917 - RNA, 19 nt, Homo sapiens
  misc_RNA (1)...(19): siRNA sense strand
ccaaguggcgccauauguu

SEQ ID NO: 1470918 - RNA, 19 nt, Homo sapiens
  misc_RNA (1)...(19): siRNA sense strand
caaauuagucaacgaccaa

SEQ ID NO: 1470919 - RNA, 19 nt, Homo sapiens
  misc_RNA (1)...(19): siRNA sense strand
gaaagagagcccaaaccau

SEQ ID NO: 1470920 - RNA, 19 nt, Homo sapiens
  misc_RNA (1)...(19): siRNA sense strand
cagcagcuccacauagaaa

SEQ ID NO: 1470921 - RNA, 19 nt, Homo sapiens
  misc_RNA (1)...(19): siRNA sense strand
ccaaaccaccauaggauau

SEQ ID NO: 1470922 - RNA, 19 nt, Homo sapiens
  misc_RNA (1)...(19): siRNA sense strand
gguuaucgcuguguuacug

SEQ ID NO: 1470923 - RNA, 19 nt, Homo sapiens
  misc_RNA (1)...(19): siRNA sense strand
uaugagagaugggaagcuu

SEQ ID NO: 1470924 - RNA, 19 nt, Homo sapiens
  misc_RNA (1)...(19): siRNA sense strand
guaacuauuguccaugaaa

SEQ ID NO: 1470925 - RNA, 19 nt, Homo sapiens
  misc_RNA (1)...(19): siRNA sense strand
uugacaacguccauucuuu

SEQ ID NO: 1470926 - RNA, 19 nt, Homo sapiens
  misc_RNA (1)...(19): siRNA sense strand
ucuccugacuuuaaacaga

SEQ ID NO: 1470927 - RNA, 19 nt, Homo sapiens
  misc_RNA (1)...(19): siRNA sense strand
ccacuuccgccacacauga

SEQ ID NO: 1470928 - RNA, 19 nt, Homo sapiens
  misc_RNA (1)...(19): siRNA sense strand
guuuaaugaugucuuggaa

SEQ ID NO: 1470929 - RNA, 19 nt, Homo sapiens
  misc_RNA (1)...(19): siRNA sense strand
cgguaacuauuguccauga

SEQ ID NO: 1470930 - RNA, 19 nt, Homo sapiens
  misc_RNA (1)...(19): siRNA sense strand
caacuucuccgcuauacag

SEQ ID NO: 1470931 - RNA, 19 nt, Homo sapiens
  misc_RNA (1)...(19): siRNA sense strand
cgaaagagagcccaaacca

SEQ ID NO: 1470932 - RNA, 19 nt, Homo sapiens
  misc_RNA (1)...(19): siRNA sense strand
ggaggaugacgauggcauu

SEQ ID NO: 1470933 - RNA, 19 nt, Homo sapiens
  misc_RNA (1)...(19): siRNA sense strand
gguagaaggaacaguuaga

SEQ ID NO: 1470934 - RNA, 19 nt, Homo sapiens
  misc_RNA (1)...(19): siRNA sense strand
cagcuguaaugucuacuuc

SEQ ID NO: 1470935 - RNA, 19 nt, Homo sapiens
  misc_RNA (1)...(19): siRNA sense strand
acaaagauggcagcuguaa

SEQ ID NO: 1470936 - RNA, 19 nt, Homo sapiens
  misc_RNA (1)...(19): siRNA sense strand
gguaacuauuguccaugaa

SEQ ID NO: 1470937 - RNA, 19 nt, Homo sapiens
  misc_RNA (1)...(19): siRNA sense strand
uguagaaucccaaauguag

SEQ ID NO: 1470938 - RNA, 19 nt, Homo sapiens
  misc_RNA (1)...(19): siRNA sense strand
ucaucauggcgaucuauua

SEQ ID NO: 1470939 - RNA, 19 nt, Homo sapiens
  misc_RNA (1)...(19): siRNA sense strand
uagguuuaaugaugucuug

SEQ ID NO: 1470940 - RNA, 19 nt, Homo sapiens
  misc_RNA (1)...(19): siRNA sense strand
caaagcaguagccaaagau

SEQ ID NO: 1470941 - RNA, 19 nt, Homo sapiens
  misc_RNA (1)...(19): siRNA sense strand
ugacaacguccauucuuuc

SEQ ID NO: 1470942 - RNA, 19 nt, Homo sapiens
  misc_RNA (1)...(19): siRNA sense strand
aagcucuccugacuuuaaa

SEQ ID NO: 1470943 - RNA, 19 nt, Homo sapiens
  misc_RNA (1)...(19): siRNA sense strand
gaggaugacgauggcauuu

SEQ ID NO: 1470944 - RNA, 19 nt, Homo sapiens
  misc_RNA (1)...(19): siRNA sense strand
gugguagaaggaacaguua

SEQ ID NO: 1470945 - RNA, 19 nt, Homo sapiens
  misc_RNA (1)...(19): siRNA sense strand
ucagcuacuuugcacuuau

SEQ ID NO: 1470946 - RNA, 19 nt, Homo sapiens
  misc_RNA (1)...(19): siRNA sense strand
cuuauauucucucgugguu

SEQ ID NO: 1470947 - RNA, 19 nt, Homo sapiens
  misc_RNA (1)...(19): siRNA sense strand
ucuguagaaucccaaaugu

SEQ ID NO: 1470948 - RNA, 19 nt, Homo sapiens
  misc_RNA (1)...(19): siRNA sense strand
accagcagcuccacauaga

SEQ ID NO: 1470949 - RNA, 19 nt, Homo sapiens
  misc_RNA (1)...(19): siRNA sense strand
cggcagcagcuaucauauu

SEQ ID NO: 1470950 - RNA, 19 nt, Homo sapiens
  misc_RNA (1)...(19): siRNA sense strand
aagaggaaguauuacaaag

SEQ ID NO: 1470951 - RNA, 19 nt, Homo sapiens
  misc_RNA (1)...(19): siRNA sense strand
ugagagaugggaagcuuug

SEQ ID NO: 1470952 - RNA, 19 nt, Homo sapiens
  misc_RNA (1)...(19): siRNA sense strand
gacaacguccauucuuuca

SEQ ID NO: 1470953 - RNA, 19 nt, Homo sapiens
  misc_RNA (1)...(19): siRNA sense strand
cucauagccuuucaucaug

SEQ ID NO: 1470954 - RNA, 19 nt, Homo sapiens
  misc_RNA (1)...(19): siRNA sense strand
aauauagggaaacaccuua

SEQ ID NO: 1470955 - RNA, 19 nt, Homo sapiens
  misc_RNA (1)...(19): siRNA sense strand
gaccagcagcuccacauag

SEQ ID NO: 1470956 - RNA, 19 nt, Homo sapiens
  misc_RNA (1)...(19): siRNA sense strand
caaagugaacugcuuacag

SEQ ID NO: 1470957 - RNA, 19 nt, Homo sapiens
  misc_RNA (1)...(19): siRNA sense strand
gaagagcaagaagacgauu

SEQ ID NO: 1470958 - RNA, 19 nt, Homo sapiens
  misc_RNA (1)...(19): siRNA sense strand
guuaagaggaaguauuaca

SEQ ID NO: 1470959 - RNA, 19 nt, Homo sapiens
  misc_RNA (1)...(19): siRNA sense strand
acgauuacuucacaaagau

SEQ ID NO: 1470960 - RNA, 19 nt, Homo sapiens
  misc_RNA (1)...(19): siRNA sense strand
uccaguccaucuuaaguug

SEQ ID NO: 1470961 - RNA, 19 nt, Homo sapiens
  misc_RNA (1)...(19): siRNA sense strand
gacccaaaccaccauagga

SEQ ID NO: 1470962 - RNA, 19 nt, Homo sapiens
  misc_RNA (1)...(19): siRNA sense strand
gcccaacuucuccgcuaua

SEQ ID NO: 1470963 - RNA, 19 nt, Homo sapiens
  misc_RNA (1)...(19): siRNA sense strand
gcaauuggacuggaaagac

SEQ ID NO: 1470964 - RNA, 19 nt, Homo sapiens
  misc_RNA (1)...(19): siRNA sense strand
uacggcagcagcuaucaua

SEQ ID NO: 1470965 - RNA, 19 nt, Homo sapiens
  misc_RNA (1)...(19): siRNA sense strand
aagcaguagccaaagauaa

SEQ ID NO: 1470966 - RNA, 19 nt, Homo sapiens
  misc_RNA (1)...(19): siRNA sense strand
ugacgauggcauuuaaaga

SEQ ID NO: 1470967 - RNA, 19 nt, Homo sapiens
  misc_RNA (1)...(19): siRNA sense strand
gaagacaccuguacuguug

SEQ ID NO: 1470968 - RNA, 19 nt, Homo sapiens
  misc_RNA (1)...(19): siRNA sense strand
ggaaagcgaucaucuaaug

SEQ ID NO: 1470969 - RNA, 19 nt, Homo sapiens
  misc_RNA (1)...(19): siRNA sense strand
ggacccaaauaaaucauua

SEQ ID NO: 1470970 - RNA, 19 nt, Homo sapiens
  misc_RNA (1)...(19): siRNA sense strand
caagaggccuucuauguga

SEQ ID NO: 1470971 - RNA, 19 nt, Homo sapiens
  misc_RNA (1)...(19): siRNA sense strand
ugacgaagcuauuacauug

SEQ ID NO: 1470972 - RNA, 19 nt, Homo sapiens
  misc_RNA (1)...(19): siRNA sense strand
gagggaagcucacgagaga

SEQ ID NO: 1470973 - RNA, 19 nt, Homo sapiens
  misc_RNA (1)...(19): siRNA sense strand
gaaagcuucuugcuaucua

SEQ ID NO: 1470974 - RNA, 19 nt, Homo sapiens
  misc_RNA (1)...(19): siRNA sense strand
guagaugaguuaaugauga

SEQ ID NO: 1470975 - RNA, 19 nt, Homo sapiens
  misc_RNA (1)...(19): siRNA sense strand
uaacucaacuggacccaaa

SEQ ID NO: 1470976 - RNA, 19 nt, Homo sapiens
  misc_RNA (1)...(19): siRNA sense strand
ggacgaggaugaacgugaa

SEQ ID NO: 1470977 - RNA, 19 nt, Homo sapiens
  misc_RNA (1)...(19): siRNA sense strand
gagcaagauuucucacuau

SEQ ID NO: 1470978 - RNA, 19 nt, Homo sapiens
  misc_RNA (1)...(19): siRNA sense strand
cugaauccauuguuucuua

SEQ ID NO: 1470979 - RNA, 19 nt, Homo sapiens
  misc_RNA (1)...(19): siRNA sense strand
cuaaugaaguguugaaugu

SEQ ID NO: 1470980 - RNA, 19 nt, Homo sapiens
  misc_RNA (1)...(19): siRNA sense strand
caacuggacccaaauaaau

SEQ ID NO: 1470981 - RNA, 19 nt, Homo sapiens
  misc_RNA (1)...(19): siRNA sense strand
caagauuucucacuaugug

SEQ ID NO: 1470982 - RNA, 19 nt, Homo sapiens
  misc_RNA (1)...(19): siRNA sense strand
gcagaacaguuucguuugg

SEQ ID NO: 1470983 - RNA, 19 nt, Homo sapiens
  misc_RNA (1)...(19): siRNA sense strand
agacagaaauguugaugug

SEQ ID NO: 1470984 - RNA, 19 nt, Homo sapiens
  misc_RNA (1)...(19): siRNA sense strand
ucagauaccuguguccaaa

SEQ ID NO: 1470985 - RNA, 19 nt, Homo sapiens
  misc_RNA (1)...(19): siRNA sense strand
cagaaauguugauguggua

SEQ ID NO: 1470986 - RNA, 19 nt, Homo sapiens
  misc_RNA (1)...(19): siRNA sense strand
gaacgugaagccagagaaa

SEQ ID NO: 1470987 - RNA, 19 nt, Homo sapiens
  misc_RNA (1)...(19): siRNA sense strand
ugauugccauccuguauuu

SEQ ID NO: 1470988 - RNA, 19 nt, Homo sapiens
  misc_RNA (1)...(19): siRNA sense strand
gagaaaaugugaagagaga

SEQ ID NO: 1470989 - RNA, 19 nt, Homo sapiens
  misc_RNA (1)...(19): siRNA sense strand
gaacacaacaguagaugag

SEQ ID NO: 1470990 - RNA, 19 nt, Homo sapiens
  misc_RNA (1)...(19): siRNA sense strand
aaacaacagucuuuauguc

SEQ ID NO: 1470991 - RNA, 19 nt, Homo sapiens
  misc_RNA (1)...(19): siRNA sense strand
agagagagauggcagaaca

SEQ ID NO: 1470992 - RNA, 19 nt, Homo sapiens
  misc_RNA (1)...(19): siRNA sense strand
gaagagagagcaagaugag

SEQ ID NO: 1470993 - RNA, 19 nt, Homo sapiens
  misc_RNA (1)...(19): siRNA sense strand
agagcaagauuucucacua

SEQ ID NO: 1470994 - RNA, 19 nt, Homo sapiens
  misc_RNA (1)...(19): siRNA sense strand
gaauacagagacagaaaug

SEQ ID NO: 1470995 - RNA, 19 nt, Homo sapiens
  misc_RNA (1)...(19): siRNA sense strand
caaagaacaagaagaggaa

SEQ ID NO: 1470996 - RNA, 19 nt, Homo sapiens
  misc_RNA (1)...(19): siRNA sense strand
gcuauuacauugcuugaac

SEQ ID NO: 1470997 - RNA, 19 nt, Homo sapiens
  misc_RNA (1)...(19): siRNA sense strand
uaaaguuguucccucaaga

SEQ ID NO: 1470998 - RNA, 19 nt, Homo sapiens
  misc_RNA (1)...(19): siRNA sense strand
ggagagacguaacucaacu

SEQ ID NO: 1470999 - RNA, 19 nt, Homo sapiens
  misc_RNA (1)...(19): siRNA sense strand
gaacuucagauaccugugu

SEQ ID NO: 1471000 - RNA, 19 nt, Homo sapiens
  misc_RNA (1)...(19): siRNA sense strand
ggagcagauucgcaaagaa

SEQ ID NO: 1471001 - RNA, 19 nt, Homo sapiens
  misc_RNA (1)...(19): siRNA sense strand
agagauggcagaacaguuu

SEQ ID NO: 1471002 - RNA, 19 nt, Homo sapiens
  misc_RNA (1)...(19): siRNA sense strand
ccaacaacaggaagauaua

SEQ ID NO: 1471003 - RNA, 19 nt, Homo sapiens
  misc_RNA (1)...(19): siRNA sense strand
ccuaaaaucucuacacuug

SEQ ID NO: 1471004 - RNA, 19 nt, Homo sapiens
  misc_RNA (1)...(19): siRNA sense strand
caacaacaggaagauauaa

SEQ ID NO: 1471005 - RNA, 19 nt, Homo sapiens
  misc_RNA (1)...(19): siRNA sense strand
aaugaaguguugaauguga

SEQ ID NO: 1471006 - RNA, 19 nt, Homo sapiens
  misc_RNA (1)...(19): siRNA sense strand
gacaaaggacuccaacaga

SEQ ID NO: 1471007 - RNA, 19 nt, Homo sapiens
  misc_RNA (1)...(19): siRNA sense strand
caacagucuuuauguccuu

SEQ ID NO: 1471008 - RNA, 19 nt, Homo sapiens
  misc_RNA (1)...(19): siRNA sense strand
guaaaguuguucccucaag

SEQ ID NO: 1471009 - RNA, 19 nt, Homo sapiens
  misc_RNA (1)...(19): siRNA sense strand
gagauuaaacagauucuag

SEQ ID NO: 1471010 - RNA, 19 nt, Homo sapiens
  misc_RNA (1)...(19): siRNA sense strand
ggaagacaguacgguccua

SEQ ID NO: 1471011 - RNA, 19 nt, Homo sapiens
  misc_RNA (1)...(19): siRNA sense strand
gaagacgggagauguggaa

SEQ ID NO: 1471012 - RNA, 19 nt, Homo sapiens
  misc_RNA (1)...(19): siRNA sense strand
ccaggcagauuguagaaag

SEQ ID NO: 1471013 - RNA, 19 nt, Homo sapiens
  misc_RNA (1)...(19): siRNA sense strand
uuacugagcaccuuuccua

SEQ ID NO: 1471014 - RNA, 19 nt, Homo sapiens
  misc_RNA (1)...(19): siRNA sense strand
acacaacaguagaugaguu

SEQ ID NO: 1471015 - RNA, 19 nt, Homo sapiens
  misc_RNA (1)...(19): siRNA sense strand
cuaucuaccuccaccauga

SEQ ID NO: 1471016 - RNA, 19 nt, Homo sapiens
  misc_RNA (1)...(19): siRNA sense strand
cacaacaguagaugaguua

SEQ ID NO: 1471017 - RNA, 19 nt, Homo sapiens
  misc_RNA (1)...(19): siRNA sense strand
caagggaacacaacaguag

SEQ ID NO: 1471018 - RNA, 19 nt, Homo sapiens
  misc_RNA (1)...(19): siRNA sense strand
caacagagcaagauuucuc

SEQ ID NO: 1471019 - RNA, 19 nt, Homo sapiens
  misc_RNA (1)...(19): siRNA sense strand
gcuuugugcugaauccauu

SEQ ID NO: 1471020 - RNA, 19 nt, Homo sapiens
  misc_RNA (1)...(19): siRNA sense strand
aaacauugacgaagcuauu

SEQ ID NO: 1471021 - RNA, 19 nt, Homo sapiens
  misc_RNA (1)...(19): siRNA sense strand
gaagacaguacgguccuaa

SEQ ID NO: 1471022 - RNA, 19 nt, Homo sapiens
  misc_RNA (1)...(19): siRNA sense strand
gaucuucacagcccaacaa

SEQ ID NO: 1471023 - RNA, 19 nt, Homo sapiens
  misc_RNA (1)...(19): siRNA sense strand
ucaagaggccuucuaugug

SEQ ID NO: 1471024 - RNA, 19 nt, Homo sapiens
  misc_RNA (1)...(19): siRNA sense strand
aacaguagaugaguuaaug

SEQ ID NO: 1471025 - RNA, 19 nt, Homo sapiens
  misc_RNA (1)...(19): siRNA sense strand
ggaacacaacaguagauga

SEQ ID NO: 1471026 - RNA, 19 nt, Homo sapiens
  misc_RNA (1)...(19): siRNA sense strand
uaugugcaauagacacuuu

SEQ ID NO: 1471027 - RNA, 19 nt, Homo sapiens
  misc_RNA (1)...(19): siRNA sense strand
caacauggaccgggagaug

SEQ ID NO: 1471028 - RNA, 19 nt, Homo sapiens
  misc_RNA (1)...(19): siRNA sense strand
uggcagaacaguuucguuu

SEQ ID NO: 1471029 - RNA, 19 nt, Homo sapiens
  misc_RNA (1)...(19): siRNA sense strand
ggcauguacuggcauugaa

SEQ ID NO: 1471030 - RNA, 19 nt, Homo sapiens
  misc_RNA (1)...(19): siRNA sense strand
ugugaaagcccgagauaga

SEQ ID NO: 1471031 - RNA, 19 nt, Homo sapiens
  misc_RNA (1)...(19): siRNA sense strand
ugaaagcccgagauagaaa

SEQ ID NO: 1471032 - RNA, 19 nt, Homo sapiens
  misc_RNA (1)...(19): siRNA sense strand
ucaacuggacccaaauaaa

SEQ ID NO: 1471033 - RNA, 19 nt, Homo sapiens
  misc_RNA (1)...(19): siRNA sense strand
ugggaaagcgaucaucuaa

SEQ ID NO: 1471034 - RNA, 19 nt, Homo sapiens
  misc_RNA (1)...(19): siRNA sense strand
cuugggaucugacaaagga

SEQ ID NO: 1471035 - RNA, 19 nt, Homo sapiens
  misc_RNA (1)...(19): siRNA sense strand
ggagagauuaaacagauuc

SEQ ID NO: 1471036 - RNA, 19 nt, Homo sapiens
  misc_RNA (1)...(19): siRNA sense strand
ccuaucgccuuucacuuga

SEQ ID NO: 1471037 - RNA, 19 nt, Homo sapiens
  misc_RNA (1)...(19): siRNA sense strand
gguguaauaccacaggaaa

SEQ ID NO: 1471038 - RNA, 19 nt, Homo sapiens
  misc_RNA (1)...(19): siRNA sense strand
gcaagauuucucacuaugu

SEQ ID NO: 1471039 - RNA, 19 nt, Homo sapiens
  misc_RNA (1)...(19): siRNA sense strand
ccaccaccuucaucaucua

SEQ ID NO: 1471040 - RNA, 19 nt, Homo sapiens
  misc_RNA (1)...(19): siRNA sense strand
gcagcuaucaaugguguaa

SEQ ID NO: 1471041 - RNA, 19 nt, Homo sapiens
  misc_RNA (1)...(19): siRNA sense strand
gggaagcucacgagagaga

SEQ ID NO: 1471042 - RNA, 19 nt, Homo sapiens
  misc_RNA (1)...(19): siRNA sense strand
uuuauuggcucauuagaag

SEQ ID NO: 1471043 - RNA, 19 nt, Homo sapiens
  misc_RNA (1)...(19): siRNA sense strand
auacagagacagaaauguu

SEQ ID NO: 1471044 - RNA, 19 nt, Homo sapiens
  misc_RNA (1)...(19): siRNA sense strand
uauuggagguaaaguuguu

SEQ ID NO: 1471045 - RNA, 19 nt, Homo sapiens
  misc_RNA (1)...(19): siRNA sense strand
gccuaucgccuuucacuug

SEQ ID NO: 1471046 - RNA, 19 nt, Homo sapiens
  misc_RNA (1)...(19): siRNA sense strand
gggcuugggaucugacaaa

SEQ ID NO: 1471047 - RNA, 19 nt, Homo sapiens
  misc_RNA (1)...(19): siRNA sense strand
ccaaaaugcuguuaaaagg

SEQ ID NO: 1471048 - RNA, 19 nt, Homo sapiens
  misc_RNA (1)...(19): siRNA sense strand
uuggagagauuaaacagau

SEQ ID NO: 1471049 - RNA, 19 nt, Homo sapiens
  misc_RNA (1)...(19): siRNA sense strand
ugaagacaccuguacuguu

SEQ ID NO: 1471050 - RNA, 19 nt, Homo sapiens
  misc_RNA (1)...(19): siRNA sense strand
ggacuuaguggcagcuauc

SEQ ID NO: 1471051 - RNA, 19 nt, Homo sapiens
  misc_RNA (1)...(19): siRNA sense strand
cagaacaguuucguuugga

SEQ ID NO: 1471052 - RNA, 19 nt, Homo sapiens
  misc_RNA (1)...(19): siRNA sense strand
gcauguacuggcauugaaa

SEQ ID NO: 1471053 - RNA, 19 nt, Homo sapiens
  misc_RNA (1)...(19): siRNA sense strand
agcuaucaaugguguaaua

SEQ ID NO: 1471054 - RNA, 19 nt, Homo sapiens
  misc_RNA (1)...(19): siRNA sense strand
caaaccauucggacucaaa

SEQ ID NO: 1471055 - RNA, 19 nt, Homo sapiens
  misc_RNA (1)...(19): siRNA sense strand
cugagcaccuuuccuagga

SEQ ID NO: 1471056 - RNA, 19 nt, Homo sapiens
  misc_RNA (1)...(19): siRNA sense strand
gcuccuacuuccucuucuu

SEQ ID NO: 1471057 - RNA, 19 nt, Homo sapiens
  misc_RNA (1)...(19): siRNA sense strand
caacaguagaugaguuaau

SEQ ID NO: 1471058 - RNA, 19 nt, Homo sapiens
  misc_RNA (1)...(19): siRNA sense strand
ggugauugccauccuguau

SEQ ID NO: 1471059 - RNA, 19 nt, Homo sapiens
  misc_RNA (1)...(19): siRNA sense strand
gaugaaaguguguuaacca

SEQ ID NO: 1471060 - RNA, 19 nt, Homo sapiens
  misc_RNA (1)...(19): siRNA sense strand
gugaaagcccgagauagaa

SEQ ID NO: 1471061 - RNA, 19 nt, Homo sapiens
  misc_RNA (1)...(19): siRNA sense strand
uaugugaaagcccgagaua

SEQ ID NO: 1471062 - RNA, 19 nt, Homo sapiens
  misc_RNA (1)...(19): siRNA sense strand
gagcagauucgcaaagaac

SEQ ID NO: 1471063 - RNA, 19 nt, Homo sapiens
  misc_RNA (1)...(19): siRNA sense strand
ucuacaaagugaauaugga

SEQ ID NO: 1471064 - RNA, 19 nt, Homo sapiens
  misc_RNA (1)...(19): siRNA sense strand
uggagcagauucgcaaaga

SEQ ID NO: 1471065 - RNA, 19 nt, Homo sapiens
  misc_RNA (1)...(19): siRNA sense strand
cagcaacaagcuccagauu

SEQ ID NO: 1471066 - RNA, 19 nt, Homo sapiens
  misc_RNA (1)...(19): siRNA sense strand
gcagauucgcaaagaacaa

SEQ ID NO: 1471067 - RNA, 19 nt, Homo sapiens
  misc_RNA (1)...(19): siRNA sense strand
gaagacaccuguacuguug

SEQ ID NO: 1471068 - RNA, 19 nt, Homo sapiens
  misc_RNA (1)...(19): siRNA sense strand
ggaaagcgaucaucuaaug

SEQ ID NO: 1471069 - RNA, 19 nt, Homo sapiens
  misc_RNA (1)...(19): siRNA sense strand
ggacccaaauaaaucauua

SEQ ID NO: 1471070 - RNA, 19 nt, Homo sapiens
  misc_RNA (1)...(19): siRNA sense strand
caagaggccuucuauguga

SEQ ID NO: 1471071 - RNA, 19 nt, Homo sapiens
  misc_RNA (1)...(19): siRNA sense strand
ugacgaagcuauuacauug

SEQ ID NO: 1471072 - RNA, 19 nt, Homo sapiens
  misc_RNA (1)...(19): siRNA sense strand
gagggaagcucacgagaga

SEQ ID NO: 1471073 - RNA, 19 nt, Homo sapiens
  misc_RNA (1)...(19): siRNA sense strand
gaaagcuucuugcuaucua

SEQ ID NO: 1471074 - RNA, 19 nt, Homo sapiens
  misc_RNA (1)...(19): siRNA sense strand
guagaugaguuaaugauga

SEQ ID NO: 1471075 - RNA, 19 nt, Homo sapiens
  misc_RNA (1)...(19): siRNA sense strand
uaacucaacuggacccaaa

SEQ ID NO: 1471076 - RNA, 19 nt, Homo sapiens
  misc_RNA (1)...(19): siRNA sense strand
ggacgaggaugaacgugaa

SEQ ID NO: 1471077 - RNA, 19 nt, Homo sapiens
  misc_RNA (1)...(19): siRNA sense strand
gagcaagauuucucacuau

SEQ ID NO: 1471078 - RNA, 19 nt, Homo sapiens
  misc_RNA (1)...(19): siRNA sense strand
cugaauccauuguuucuua

SEQ ID NO: 1471079 - RNA, 19 nt, Homo sapiens
  misc_RNA (1)...(19): siRNA sense strand
cuaaugaaguguugaaugu

SEQ ID NO: 1471080 - RNA, 19 nt, Homo sapiens
  misc_RNA (1)...(19): siRNA sense strand
caacuggacccaaauaaau

SEQ ID NO: 1471081 - RNA, 19 nt, Homo sapiens
  misc_RNA (1)...(19): siRNA sense strand
caagauuucucacuaugug

SEQ ID NO: 1471082 - RNA, 19 nt, Homo sapiens
  misc_RNA (1)...(19): siRNA sense strand
gcagaacaguuucguuugg

SEQ ID NO: 1471083 - RNA, 19 nt, Homo sapiens
  misc_RNA (1)...(19): siRNA sense strand
agacagaaauguugaugug

SEQ ID NO: 1471084 - RNA, 19 nt, Homo sapiens
  misc_RNA (1)...(19): siRNA sense strand
ucagauaccuguguccaaa

SEQ ID NO: 1471085 - RNA, 19 nt, Homo sapiens
  misc_RNA (1)...(19): siRNA sense strand
cagaaauguugauguggua

SEQ ID NO: 1471086 - RNA, 19 nt, Homo sapiens
  misc_RNA (1)...(19): siRNA sense strand
gaacgugaagccagagaaa

SEQ ID NO: 1471087 - RNA, 19 nt, Homo sapiens
  misc_RNA (1)...(19): siRNA sense strand
ugauugccauccuguauuu

SEQ ID NO: 1471088 - RNA, 19 nt, Homo sapiens
  misc_RNA (1)...(19): siRNA sense strand
gagaaaaugugaagagaga

SEQ ID NO: 1471089 - RNA, 19 nt, Homo sapiens
  misc_RNA (1)...(19): siRNA sense strand
gaacacaacaguagaugag

SEQ ID NO: 1471090 - RNA, 19 nt, Homo sapiens
  misc_RNA (1)...(19): siRNA sense strand
aaacaacagucuuuauguc

SEQ ID NO: 1471091 - RNA, 19 nt, Homo sapiens
  misc_RNA (1)...(19): siRNA sense strand
agagagagauggcagaaca

SEQ ID NO: 1471092 - RNA, 19 nt, Homo sapiens
  misc_RNA (1)...(19): siRNA sense strand
gaagagagagcaagaugag

SEQ ID NO: 1471093 - RNA, 19 nt, Homo sapiens
  misc_RNA (1)...(19): siRNA sense strand
agagcaagauuucucacua

SEQ ID NO: 1471094 - RNA, 19 nt, Homo sapiens
  misc_RNA (1)...(19): siRNA sense strand
gaauacagagacagaaaug

SEQ ID NO: 1471095 - RNA, 19 nt, Homo sapiens
  misc_RNA (1)...(19): siRNA sense strand
caaagaacaagaagaggaa

SEQ ID NO: 1471096 - RNA, 19 nt, Homo sapiens
  misc_RNA (1)...(19): siRNA sense strand
gcuauuacauugcuugaac

SEQ ID NO: 1471097 - RNA, 19 nt, Homo sapiens
  misc_RNA (1)...(19): siRNA sense strand
uaaaguuguucccucaaga

SEQ ID NO: 1471098 - RNA, 19 nt, Homo sapiens
  misc_RNA (1)...(19): siRNA sense strand
ggagagacguaacucaacu

SEQ ID NO: 1471099 - RNA, 19 nt, Homo sapiens
  misc_RNA (1)...(19): siRNA sense strand
gaacuucagauaccugugu

SEQ ID NO: 1471100 - RNA, 19 nt, Homo sapiens
  misc_RNA (1)...(19): siRNA sense strand
ggagcagauucgcaaagaa

SEQ ID NO: 1471101 - RNA, 19 nt, Homo sapiens
  misc_RNA (1)...(19): siRNA sense strand
agagauggcagaacaguuu

SEQ ID NO: 1471102 - RNA, 19 nt, Homo sapiens
  misc_RNA (1)...(19): siRNA sense strand
ccaacaacaggaagauaua

SEQ ID NO: 1471103 - RNA, 19 nt, Homo sapiens
  misc_RNA (1)...(19): siRNA sense strand
ccuaaaaucucuacacuug

SEQ ID NO: 1471104 - RNA, 19 nt, Homo sapiens
  misc_RNA (1)...(19): siRNA sense strand
caacaacaggaagauauaa

SEQ ID NO: 1471105 - RNA, 19 nt, Homo sapiens
  misc_RNA (1)...(19): siRNA sense strand
aaugaaguguugaauguga

SEQ ID NO: 1471106 - RNA, 19 nt, Homo sapiens
  misc_RNA (1)...(19): siRNA sense strand
gacaaaggacuccaacaga

SEQ ID NO: 1471107 - RNA, 19 nt, Homo sapiens
  misc_RNA (1)...(19): siRNA sense strand
caacagucuuuauguccuu

SEQ ID NO: 1471108 - RNA, 19 nt, Homo sapiens
  misc_RNA (1)...(19): siRNA sense strand
guaaaguuguucccucaag

SEQ ID NO: 1471109 - RNA, 19 nt, Homo sapiens
  misc_RNA (1)...(19): siRNA sense strand
gagauuaaacagauucuag

SEQ ID NO: 1471110 - RNA, 19 nt, Homo sapiens
  misc_RNA (1)...(19): siRNA sense strand
ggaagacaguacgguccua

SEQ ID NO: 1471111 - RNA, 19 nt, Homo sapiens
  misc_RNA (1)...(19): siRNA sense strand
gaagacgggagauguggaa

SEQ ID NO: 1471112 - RNA, 19 nt, Homo sapiens
  misc_RNA (1)...(19): siRNA sense strand
ccaggcagauuguagaaag

SEQ ID NO: 1471113 - RNA, 19 nt, Homo sapiens
  misc_RNA (1)...(19): siRNA sense strand
uuacugagcaccuuuccua

SEQ ID NO: 1471114 - RNA, 19 nt, Homo sapiens
  misc_RNA (1)...(19): siRNA sense strand
acacaacaguagaugaguu

SEQ ID NO: 1471115 - RNA, 19 nt, Homo sapiens
  misc_RNA (1)...(19): siRNA sense strand
cuaucuaccuccaccauga

SEQ ID NO: 1471116 - RNA, 19 nt, Homo sapiens
  misc_RNA (1)...(19): siRNA sense strand
cacaacaguagaugaguua

SEQ ID NO: 1471117 - RNA, 19 nt, Homo sapiens
  misc_RNA (1)...(19): siRNA sense strand
caagggaacacaacaguag

SEQ ID NO: 1471118 - RNA, 19 nt, Homo sapiens
  misc_RNA (1)...(19): siRNA sense strand
caacagagcaagauuucuc

SEQ ID NO: 1471119 - RNA, 19 nt, Homo sapiens
  misc_RNA (1)...(19): siRNA sense strand
gcuuugugcugaauccauu

SEQ ID NO: 1471120 - RNA, 19 nt, Homo sapiens
  misc_RNA (1)...(19): siRNA sense strand
aaacauugacgaagcuauu

SEQ ID NO: 1471121 - RNA, 19 nt, Homo sapiens
  misc_RNA (1)...(19): siRNA sense strand
gaagacaguacgguccuaa

SEQ ID NO: 1471122 - RNA, 19 nt, Homo sapiens
  misc_RNA (1)...(19): siRNA sense strand
gaucuucacagcccaacaa

SEQ ID NO: 1471123 - RNA, 19 nt, Homo sapiens
  misc_RNA (1)...(19): siRNA sense strand
ucaagaggccuucuaugug

SEQ ID NO: 1471124 - RNA, 19 nt, Homo sapiens
  misc_RNA (1)...(19): siRNA sense strand
aacaguagaugaguuaaug

SEQ ID NO: 1471125 - RNA, 19 nt, Homo sapiens
  misc_RNA (1)...(19): siRNA sense strand
ggaacacaacaguagauga

SEQ ID NO: 1471126 - RNA, 19 nt, Homo sapiens
  misc_RNA (1)...(19): siRNA sense strand
uaugugcaauagacacuuu

SEQ ID NO: 1471127 - RNA, 19 nt, Homo sapiens
  misc_RNA (1)...(19): siRNA sense strand
caacauggaccgggagaug

SEQ ID NO: 1471128 - RNA, 19 nt, Homo sapiens
  misc_RNA (1)...(19): siRNA sense strand
uggcagaacaguuucguuu

SEQ ID NO: 1471129 - RNA, 19 nt, Homo sapiens
  misc_RNA (1)...(19): siRNA sense strand
ggcauguacuggcauugaa

SEQ ID NO: 1471130 - RNA, 19 nt, Homo sapiens
  misc_RNA (1)...(19): siRNA sense strand
ugugaaagcccgagauaga

SEQ ID NO: 1471131 - RNA, 19 nt, Homo sapiens
  misc_RNA (1)...(19): siRNA sense strand
ugaaagcccgagauagaaa

SEQ ID NO: 1471132 - RNA, 19 nt, Homo sapiens
  misc_RNA (1)...(19): siRNA sense strand
ucaacuggacccaaauaaa

SEQ ID NO: 1471133 - RNA, 19 nt, Homo sapiens
  misc_RNA (1)...(19): siRNA sense strand
ugggaaagcgaucaucuaa

SEQ ID NO: 1471134 - RNA, 19 nt, Homo sapiens
  misc_RNA (1)...(19): siRNA sense strand
cuugggaucugacaaagga

SEQ ID NO: 1471135 - RNA, 19 nt, Homo sapiens
  misc_RNA (1)...(19): siRNA sense strand
ggagagauuaaacagauuc

SEQ ID NO: 1471136 - RNA, 19 nt, Homo sapiens
  misc_RNA (1)...(19): siRNA sense strand
ccuaucgccuuucacuuga

SEQ ID NO: 1471137 - RNA, 19 nt, Homo sapiens
  misc_RNA (1)...(19): siRNA sense strand
gguguaauaccacaggaaa

SEQ ID NO: 1471138 - RNA, 19 nt, Homo sapiens
  misc_RNA (1)...(19): siRNA sense strand
gcaagauuucucacuaugu

SEQ ID NO: 1471139 - RNA, 19 nt, Homo sapiens
  misc_RNA (1)...(19): siRNA sense strand
ccaccaccuucaucaucua

SEQ ID NO: 1471140 - RNA, 19 nt, Homo sapiens
  misc_RNA (1)...(19): siRNA sense strand
gcagcuaucaaugguguaa

SEQ ID NO: 1471141 - RNA, 19 nt, Homo sapiens
  misc_RNA (1)...(19): siRNA sense strand
gggaagcucacgagagaga

SEQ ID NO: 1471142 - RNA, 19 nt, Homo sapiens
  misc_RNA (1)...(19): siRNA sense strand
uuuauuggcucauuagaag

SEQ ID NO: 1471143 - RNA, 19 nt, Homo sapiens
  misc_RNA (1)...(19): siRNA sense strand
auacagagacagaaauguu

SEQ ID NO: 1471144 - RNA, 19 nt, Homo sapiens
  misc_RNA (1)...(19): siRNA sense strand
uauuggagguaaaguuguu

SEQ ID NO: 1471145 - RNA, 19 nt, Homo sapiens
  misc_RNA (1)...(19): siRNA sense strand
gccuaucgccuuucacuug

SEQ ID NO: 1471146 - RNA, 19 nt, Homo sapiens
  misc_RNA (1)...(19): siRNA sense strand
gggcuugggaucugacaaa

SEQ ID NO: 1471147 - RNA, 19 nt, Homo sapiens
  misc_RNA (1)...(19): siRNA sense strand
ccaaaaugcuguuaaaagg

SEQ ID NO: 1471148 - RNA, 19 nt, Homo sapiens
  misc_RNA (1)...(19): siRNA sense strand
uuggagagauuaaacagau

SEQ ID NO: 1471149 - RNA, 19 nt, Homo sapiens
  misc_RNA (1)...(19): siRNA sense strand
ugaagacaccuguacuguu

SEQ ID NO: 1471150 - RNA, 19 nt, Homo sapiens
  misc_RNA (1)...(19): siRNA sense strand
ggacuuaguggcagcuauc

SEQ ID NO: 1471151 - RNA, 19 nt, Homo sapiens
  misc_RNA (1)...(19): siRNA sense strand
cagaacaguuucguuugga

SEQ ID NO: 1471152 - RNA, 19 nt, Homo sapiens
  misc_RNA (1)...(19): siRNA sense strand
gcauguacuggcauugaaa

SEQ ID NO: 1471153 - RNA, 19 nt, Homo sapiens
  misc_RNA (1)...(19): siRNA sense strand
agcuaucaaugguguaaua

SEQ ID NO: 1471154 - RNA, 19 nt, Homo sapiens
  misc_RNA (1)...(19): siRNA sense strand
caaaccauucggacucaaa

SEQ ID NO: 1471155 - RNA, 19 nt, Homo sapiens
  misc_RNA (1)...(19): siRNA sense strand
cugagcaccuuuccuagga

SEQ ID NO: 1471156 - RNA, 19 nt, Homo sapiens
  misc_RNA (1)...(19): siRNA sense strand
gcuccuacuuccucuucuu

SEQ ID NO: 1471157 - RNA, 19 nt, Homo sapiens
  misc_RNA (1)...(19): siRNA sense strand
caacaguagaugaguuaau

SEQ ID NO: 1471158 - RNA, 19 nt, Homo sapiens
  misc_RNA (1)...(19): siRNA sense strand
ggugauugccauccuguau

SEQ ID NO: 1471159 - RNA, 19 nt, Homo sapiens
  misc_RNA (1)...(19): siRNA sense strand
gaugaaaguguguuaacca

SEQ ID NO: 1471160 - RNA, 19 nt, Homo sapiens
  misc_RNA (1)...(19): siRNA sense strand
gugaaagcccgagauagaa

SEQ ID NO: 1471161 - RNA, 19 nt, Homo sapiens
  misc_RNA (1)...(19): siRNA sense strand
uaugugaaagcccgagaua

SEQ ID NO: 1471162 - RNA, 19 nt, Homo sapiens
  misc_RNA (1)...(19): siRNA sense strand
gagcagauucgcaaagaac

SEQ ID NO: 1471163 - RNA, 19 nt, Homo sapiens
  misc_RNA (1)...(19): siRNA sense strand
ucuacaaagugaauaugga

SEQ ID NO: 1471164 - RNA, 19 nt, Homo sapiens
  misc_RNA (1)...(19): siRNA sense strand
uggagcagauucgcaaaga

SEQ ID NO: 1471165 - RNA, 19 nt, Homo sapiens
  misc_RNA (1)...(19): siRNA sense strand
cagcaacaagcuccagauu

SEQ ID NO: 1471166 - RNA, 19 nt, Homo sapiens
  misc_RNA (1)...(19): siRNA sense strand
gcagauucgcaaagaacaa

SEQ ID NO: 1471167 - RNA, 19 nt, Homo sapiens
  misc_RNA (1)...(19): siRNA sense strand
gaagacaccuguacuguug

SEQ ID NO: 1471168 - RNA, 19 nt, Homo sapiens
  misc_RNA (1)...(19): siRNA sense strand
ggaaagcgaucaucuaaug

SEQ ID NO: 1471169 - RNA, 19 nt, Homo sapiens
  misc_RNA (1)...(19): siRNA sense strand
ggacccaaauaaaucauua

SEQ ID NO: 1471170 - RNA, 19 nt, Homo sapiens
  misc_RNA (1)...(19): siRNA sense strand
caagaggccuucuauguga

SEQ ID NO: 1471171 - RNA, 19 nt, Homo sapiens
  misc_RNA (1)...(19): siRNA sense strand
ugacgaagcuauuacauug

SEQ ID NO: 1471172 - RNA, 19 nt, Homo sapiens
  misc_RNA (1)...(19): siRNA sense strand
gagggaagcucacgagaga

SEQ ID NO: 1471173 - RNA, 19 nt, Homo sapiens
  misc_RNA (1)...(19): siRNA sense strand
gaaagcuucuugcuaucua

SEQ ID NO: 1471174 - RNA, 19 nt, Homo sapiens
  misc_RNA (1)...(19): siRNA sense strand
guagaugaguuaaugauga

SEQ ID NO: 1471175 - RNA, 19 nt, Homo sapiens
  misc_RNA (1)...(19): siRNA sense strand
uaacucaacuggacccaaa

SEQ ID NO: 1471176 - RNA, 19 nt, Homo sapiens
  misc_RNA (1)...(19): siRNA sense strand
ggacgaggaugaacgugaa

SEQ ID NO: 1471177 - RNA, 19 nt, Homo sapiens
  misc_RNA (1)...(19): siRNA sense strand
gagcaagauuucucacuau

SEQ ID NO: 1471178 - RNA, 19 nt, Homo sapiens
  misc_RNA (1)...(19): siRNA sense strand
cugaauccauuguuucuua

SEQ ID NO: 1471179 - RNA, 19 nt, Homo sapiens
  misc_RNA (1)...(19): siRNA sense strand
cuaaugaaguguugaaugu

SEQ ID NO: 1471180 - RNA, 19 nt, Homo sapiens
  misc_RNA (1)...(19): siRNA sense strand
caacuggacccaaauaaau

SEQ ID NO: 1471181 - RNA, 19 nt, Homo sapiens
  misc_RNA (1)...(19): siRNA sense strand
caagauuucucacuaugug

SEQ ID NO: 1471182 - RNA, 19 nt, Homo sapiens
  misc_RNA (1)...(19): siRNA sense strand
gcagaacaguuucguuugg

SEQ ID NO: 1471183 - RNA, 19 nt, Homo sapiens
  misc_RNA (1)...(19): siRNA sense strand
agacagaaauguugaugug

SEQ ID NO: 1471184 - RNA, 19 nt, Homo sapiens
  misc_RNA (1)...(19): siRNA sense strand
ucagauaccuguguccaaa

SEQ ID NO: 1471185 - RNA, 19 nt, Homo sapiens
  misc_RNA (1)...(19): siRNA sense strand
cagaaauguugauguggua

SEQ ID NO: 1471186 - RNA, 19 nt, Homo sapiens
  misc_RNA (1)...(19): siRNA sense strand
gaacgugaagccagagaaa

SEQ ID NO: 1471187 - RNA, 19 nt, Homo sapiens
  misc_RNA (1)...(19): siRNA sense strand
ugauugccauccuguauuu

SEQ ID NO: 1471188 - RNA, 19 nt, Homo sapiens
  misc_RNA (1)...(19): siRNA sense strand
gagaaaaugugaagagaga

SEQ ID NO: 1471189 - RNA, 19 nt, Homo sapiens
  misc_RNA (1)...(19): siRNA sense strand
gaacacaacaguagaugag

SEQ ID NO: 1471190 - RNA, 19 nt, Homo sapiens
  misc_RNA (1)...(19): siRNA sense strand
aaacaacagucuuuauguc

SEQ ID NO: 1471191 - RNA, 19 nt, Homo sapiens
  misc_RNA (1)...(19): siRNA sense strand
agagagagauggcagaaca

SEQ ID NO: 1471192 - RNA, 19 nt, Homo sapiens
  misc_RNA (1)...(19): siRNA sense strand
gaagagagagcaagaugag

SEQ ID NO: 1471193 - RNA, 19 nt, Homo sapiens
  misc_RNA (1)...(19): siRNA sense strand
agagcaagauuucucacua

SEQ ID NO: 1471194 - RNA, 19 nt, Homo sapiens
  misc_RNA (1)...(19): siRNA sense strand
gaauacagagacagaaaug

SEQ ID NO: 1471195 - RNA, 19 nt, Homo sapiens
  misc_RNA (1)...(19): siRNA sense strand
caaagaacaagaagaggaa

SEQ ID NO: 1471196 - RNA, 19 nt, Homo sapiens
  misc_RNA (1)...(19): siRNA sense strand
gcuauuacauugcuugaac

SEQ ID NO: 1471197 - RNA, 19 nt, Homo sapiens
  misc_RNA (1)...(19): siRNA sense strand
uaaaguuguucccucaaga

SEQ ID NO: 1471198 - RNA, 19 nt, Homo sapiens
  misc_RNA (1)...(19): siRNA sense strand
ggagagacguaacucaacu

SEQ ID NO: 1471199 - RNA, 19 nt, Homo sapiens
  misc_RNA (1)...(19): siRNA sense strand
gaacuucagauaccugugu

SEQ ID NO: 1471200 - RNA, 19 nt, Homo sapiens
  misc_RNA (1)...(19): siRNA sense strand
ggagcagauucgcaaagaa

SEQ ID NO: 1471201 - RNA, 19 nt, Homo sapiens
  misc_RNA (1)...(19): siRNA sense strand
agagauggcagaacaguuu

SEQ ID NO: 1471202 - RNA, 19 nt, Homo sapiens
  misc_RNA (1)...(19): siRNA sense strand
ccaacaacaggaagauaua

SEQ ID NO: 1471203 - RNA, 19 nt, Homo sapiens
  misc_RNA (1)...(19): siRNA sense strand
ccuaaaaucucuacacuug

SEQ ID NO: 1471204 - RNA, 19 nt, Homo sapiens
  misc_RNA (1)...(19): siRNA sense strand
caacaacaggaagauauaa

SEQ ID NO: 1471205 - RNA, 19 nt, Homo sapiens
  misc_RNA (1)...(19): siRNA sense strand
aaugaaguguugaauguga

SEQ ID NO: 1471206 - RNA, 19 nt, Homo sapiens
  misc_RNA (1)...(19): siRNA sense strand
gacaaaggacuccaacaga

SEQ ID NO: 1471207 - RNA, 19 nt, Homo sapiens
  misc_RNA (1)...(19): siRNA sense strand
caacagucuuuauguccuu

SEQ ID NO: 1471208 - RNA, 19 nt, Homo sapiens
  misc_RNA (1)...(19): siRNA sense strand
guaaaguuguucccucaag

SEQ ID NO: 1471209 - RNA, 19 nt, Homo sapiens
  misc_RNA (1)...(19): siRNA sense strand
gagauuaaacagauucuag

SEQ ID NO: 1471210 - RNA, 19 nt, Homo sapiens
  misc_RNA (1)...(19): siRNA sense strand
ggaagacaguacgguccua

SEQ ID NO: 1471211 - RNA, 19 nt, Homo sapiens
  misc_RNA (1)...(19): siRNA sense strand
gaagacgggagauguggaa

SEQ ID NO: 1471212 - RNA, 19 nt, Homo sapiens
  misc_RNA (1)...(19): siRNA sense strand
ccaggcagauuguagaaag

SEQ ID NO: 1471213 - RNA, 19 nt, Homo sapiens
  misc_RNA (1)...(19): siRNA sense strand
uuacugagcaccuuuccua

SEQ ID NO: 1471214 - RNA, 19 nt, Homo sapiens
  misc_RNA (1)...(19): siRNA sense strand
acacaacaguagaugaguu

SEQ ID NO: 1471215 - RNA, 19 nt, Homo sapiens
  misc_RNA (1)...(19): siRNA sense strand
cuaucuaccuccaccauga

SEQ ID NO: 1471216 - RNA, 19 nt, Homo sapiens
  misc_RNA (1)...(19): siRNA sense strand
cacaacaguagaugaguua

SEQ ID NO: 1471217 - RNA, 19 nt, Homo sapiens
  misc_RNA (1)...(19): siRNA sense strand
caagggaacacaacaguag

SEQ ID NO: 1471218 - RNA, 19 nt, Homo sapiens
  misc_RNA (1)...(19): siRNA sense strand
caacagagcaagauuucuc

SEQ ID NO: 1471219 - RNA, 19 nt, Homo sapiens
  misc_RNA (1)...(19): siRNA sense strand
gcuuugugcugaauccauu

SEQ ID NO: 1471220 - RNA, 19 nt, Homo sapiens
  misc_RNA (1)...(19): siRNA sense strand
aaacauugacgaagcuauu

SEQ ID NO: 1471221 - RNA, 19 nt, Homo sapiens
  misc_RNA (1)...(19): siRNA sense strand
gaagacaguacgguccuaa

SEQ ID NO: 1471222 - RNA, 19 nt, Homo sapiens
  misc_RNA (1)...(19): siRNA sense strand
gaucuucacagcccaacaa

SEQ ID NO: 1471223 - RNA, 19 nt, Homo sapiens
  misc_RNA (1)...(19): siRNA sense strand
ucaagaggccuucuaugug

SEQ ID NO: 1471224 - RNA, 19 nt, Homo sapiens
  misc_RNA (1)...(19): siRNA sense strand
aacaguagaugaguuaaug

SEQ ID NO: 1471225 - RNA, 19 nt, Homo sapiens
  misc_RNA (1)...(19): siRNA sense strand
ggaacacaacaguagauga

SEQ ID NO: 1471226 - RNA, 19 nt, Homo sapiens
  misc_RNA (1)...(19): siRNA sense strand
uaugugcaauagacacuuu

SEQ ID NO: 1471227 - RNA, 19 nt, Homo sapiens
  misc_RNA (1)...(19): siRNA sense strand
caacauggaccgggagaug

SEQ ID NO: 1471228 - RNA, 19 nt, Homo sapiens
  misc_RNA (1)...(19): siRNA sense strand
uggcagaacaguuucguuu

SEQ ID NO: 1471229 - RNA, 19 nt, Homo sapiens
  misc_RNA (1)...(19): siRNA sense strand
ggcauguacuggcauugaa

SEQ ID NO: 1471230 - RNA, 19 nt, Homo sapiens
  misc_RNA (1)...(19): siRNA sense strand
ugugaaagcccgagauaga

SEQ ID NO: 1471231 - RNA, 19 nt, Homo sapiens
  misc_RNA (1)...(19): siRNA sense strand
ugaaagcccgagauagaaa

SEQ ID NO: 1471232 - RNA, 19 nt, Homo sapiens
  misc_RNA (1)...(19): siRNA sense strand
ucaacuggacccaaauaaa

SEQ ID NO: 1471233 - RNA, 19 nt, Homo sapiens
  misc_RNA (1)...(19): siRNA sense strand
ugggaaagcgaucaucuaa

SEQ ID NO: 1471234 - RNA, 19 nt, Homo sapiens
  misc_RNA (1)...(19): siRNA sense strand
cuugggaucugacaaagga

SEQ ID NO: 1471235 - RNA, 19 nt, Homo sapiens
  misc_RNA (1)...(19): siRNA sense strand
ggagagauuaaacagauuc

SEQ ID NO: 1471236 - RNA, 19 nt, Homo sapiens
  misc_RNA (1)...(19): siRNA sense strand
ccuaucgccuuucacuuga

SEQ ID NO: 1471237 - RNA, 19 nt, Homo sapiens
  misc_RNA (1)...(19): siRNA sense strand
gguguaauaccacaggaaa

SEQ ID NO: 1471238 - RNA, 19 nt, Homo sapiens
  misc_RNA (1)...(19): siRNA sense strand
gcaagauuucucacuaugu

SEQ ID NO: 1471239 - RNA, 19 nt, Homo sapiens
  misc_RNA (1)...(19): siRNA sense strand
ccaccaccuucaucaucua

SEQ ID NO: 1471240 - RNA, 19 nt, Homo sapiens
  misc_RNA (1)...(19): siRNA sense strand
gcagcuaucaaugguguaa

SEQ ID NO: 1471241 - RNA, 19 nt, Homo sapiens
  misc_RNA (1)...(19): siRNA sense strand
gggaagcucacgagagaga

SEQ ID NO: 1471242 - RNA, 19 nt, Homo sapiens
  misc_RNA (1)...(19): siRNA sense strand
uuuauuggcucauuagaag

SEQ ID NO: 1471243 - RNA, 19 nt, Homo sapiens
  misc_RNA (1)...(19): siRNA sense strand
auacagagacagaaauguu

SEQ ID NO: 1471244 - RNA, 19 nt, Homo sapiens
  misc_RNA (1)...(19): siRNA sense strand
uauuggagguaaaguuguu

SEQ ID NO: 1471245 - RNA, 19 nt, Homo sapiens
  misc_RNA (1)...(19): siRNA sense strand
gccuaucgccuuucacuug

SEQ ID NO: 1471246 - RNA, 19 nt, Homo sapiens
  misc_RNA (1)...(19): siRNA sense strand
gggcuugggaucugacaaa

SEQ ID NO: 1471247 - RNA, 19 nt, Homo sapiens
  misc_RNA (1)...(19): siRNA sense strand
ccaaaaugcuguuaaaagg

SEQ ID NO: 1471248 - RNA, 19 nt, Homo sapiens
  misc_RNA (1)...(19): siRNA sense strand
uuggagagauuaaacagau

SEQ ID NO: 1471249 - RNA, 19 nt, Homo sapiens
  misc_RNA (1)...(19): siRNA sense strand
ugaagacaccuguacuguu

SEQ ID NO: 1471250 - RNA, 19 nt, Homo sapiens
  misc_RNA (1)...(19): siRNA sense strand
ggacuuaguggcagcuauc

SEQ ID NO: 1471251 - RNA, 19 nt, Homo sapiens
  misc_RNA (1)...(19): siRNA sense strand
cagaacaguuucguuugga

SEQ ID NO: 1471252 - RNA, 19 nt, Homo sapiens
  misc_RNA (1)...(19): siRNA sense strand
gcauguacuggcauugaaa

SEQ ID NO: 1471253 - RNA, 19 nt, Homo sapiens
  misc_RNA (1)...(19): siRNA sense strand
agcuaucaaugguguaaua

SEQ ID NO: 1471254 - RNA, 19 nt, Homo sapiens
  misc_RNA (1)...(19): siRNA sense strand
caaaccauucggacucaaa

SEQ ID NO: 1471255 - RNA, 19 nt, Homo sapiens
  misc_RNA (1)...(19): siRNA sense strand
cugagcaccuuuccuagga

SEQ ID NO: 1471256 - RNA, 19 nt, Homo sapiens
  misc_RNA (1)...(19): siRNA sense strand
gcuccuacuuccucuucuu

SEQ ID NO: 1471257 - RNA, 19 nt, Homo sapiens
  misc_RNA (1)...(19): siRNA sense strand
caacaguagaugaguuaau

SEQ ID NO: 1471258 - RNA, 19 nt, Homo sapiens
  misc_RNA (1)...(19): siRNA sense strand
ggugauugccauccuguau

SEQ ID NO: 1471259 - RNA, 19 nt, Homo sapiens
  misc_RNA (1)...(19): siRNA sense strand
gaugaaaguguguuaacca

SEQ ID NO: 1471260 - RNA, 19 nt, Homo sapiens
  misc_RNA (1)...(19): siRNA sense strand
gugaaagcccgagauagaa

SEQ ID NO: 1471261 - RNA, 19 nt, Homo sapiens
  misc_RNA (1)...(19): siRNA sense strand
uaugugaaagcccgagaua

SEQ ID NO: 1471262 - RNA, 19 nt, Homo sapiens
  misc_RNA (1)...(19): siRNA sense strand
gagcagauucgcaaagaac

SEQ ID NO: 1471263 - RNA, 19 nt, Homo sapiens
  misc_RNA (1)...(19): siRNA sense strand
ucuacaaagugaauaugga

SEQ ID NO: 1471264 - RNA, 19 nt, Homo sapiens
  misc_RNA (1)...(19): siRNA sense strand
uggagcagauucgcaaaga

SEQ ID NO: 1471265 - RNA, 19 nt, Homo sapiens
  misc_RNA (1)...(19): siRNA sense strand
cagcaacaagcuccagauu

SEQ ID NO: 1471266 - RNA, 19 nt, Homo sapiens
  misc_RNA (1)...(19): siRNA sense strand
gcagauucgcaaagaacaa

SEQ ID NO: 1471267 - RNA, 19 nt, Homo sapiens
  misc_RNA (1)...(19): siRNA sense strand
gaagacaccuguacuguug

SEQ ID NO: 1471268 - RNA, 19 nt, Homo sapiens
  misc_RNA (1)...(19): siRNA sense strand
ggaaagcgaucaucuaaug

SEQ ID NO: 1471269 - RNA, 19 nt, Homo sapiens
  misc_RNA (1)...(19): siRNA sense strand
ggacccaaauaaaucauua

SEQ ID NO: 1471270 - RNA, 19 nt, Homo sapiens
  misc_RNA (1)...(19): siRNA sense strand
caagaggccuucuauguga

SEQ ID NO: 1471271 - RNA, 19 nt, Homo sapiens
  misc_RNA (1)...(19): siRNA sense strand
ugacgaagcuauuacauug

SEQ ID NO: 1471272 - RNA, 19 nt, Homo sapiens
  misc_RNA (1)...(19): siRNA sense strand
gagggaagcucacgagaga

SEQ ID NO: 1471273 - RNA, 19 nt, Homo sapiens
  misc_RNA (1)...(19): siRNA sense strand
gaaagcuucuugcuaucua

SEQ ID NO: 1471274 - RNA, 19 nt, Homo sapiens
  misc_RNA (1)...(19): siRNA sense strand
guagaugaguuaaugauga

SEQ ID NO: 1471275 - RNA, 19 nt, Homo sapiens
  misc_RNA (1)...(19): siRNA sense strand
uaacucaacuggacccaaa

SEQ ID NO: 1471276 - RNA, 19 nt, Homo sapiens
  misc_RNA (1)...(19): siRNA sense strand
ggacgaggaugaacgugaa

SEQ ID NO: 1471277 - RNA, 19 nt, Homo sapiens
  misc_RNA (1)...(19): siRNA sense strand
gagcaagauuucucacuau

SEQ ID NO: 1471278 - RNA, 19 nt, Homo sapiens
  misc_RNA (1)...(19): siRNA sense strand
cugaauccauuguuucuua

SEQ ID NO: 1471279 - RNA, 19 nt, Homo sapiens
  misc_RNA (1)...(19): siRNA sense strand
cuaaugaaguguugaaugu

SEQ ID NO: 1471280 - RNA, 19 nt, Homo sapiens
  misc_RNA (1)...(19): siRNA sense strand
caacuggacccaaauaaau

SEQ ID NO: 1471281 - RNA, 19 nt, Homo sapiens
  misc_RNA (1)...(19): siRNA sense strand
caagauuucucacuaugug

SEQ ID NO: 1471282 - RNA, 19 nt, Homo sapiens
  misc_RNA (1)...(19): siRNA sense strand
gcagaacaguuucguuugg

SEQ ID NO: 1471283 - RNA, 19 nt, Homo sapiens
  misc_RNA (1)...(19): siRNA sense strand
agacagaaauguugaugug

SEQ ID NO: 1471284 - RNA, 19 nt, Homo sapiens
  misc_RNA (1)...(19): siRNA sense strand
ucagauaccuguguccaaa

SEQ ID NO: 1471285 - RNA, 19 nt, Homo sapiens
  misc_RNA (1)...(19): siRNA sense strand
cagaaauguugauguggua

SEQ ID NO: 1471286 - RNA, 19 nt, Homo sapiens
  misc_RNA (1)...(19): siRNA sense strand
gaacgugaagccagagaaa

SEQ ID NO: 1471287 - RNA, 19 nt, Homo sapiens
  misc_RNA (1)...(19): siRNA sense strand
ugauugccauccuguauuu

SEQ ID NO: 1471288 - RNA, 19 nt, Homo sapiens
  misc_RNA (1)...(19): siRNA sense strand
gagaaaaugugaagagaga

SEQ ID NO: 1471289 - RNA, 19 nt, Homo sapiens
  misc_RNA (1)...(19): siRNA sense strand
gaacacaacaguagaugag

SEQ ID NO: 1471290 - RNA, 19 nt, Homo sapiens
  misc_RNA (1)...(19): siRNA sense strand
aaacaacagucuuuauguc

SEQ ID NO: 1471291 - RNA, 19 nt, Homo sapiens
  misc_RNA (1)...(19): siRNA sense strand
agagagagauggcagaaca

SEQ ID NO: 1471292 - RNA, 19 nt, Homo sapiens
  misc_RNA (1)...(19): siRNA sense strand
gaagagagagcaagaugag

SEQ ID NO: 1471293 - RNA, 19 nt, Homo sapiens
  misc_RNA (1)...(19): siRNA sense strand
agagcaagauuucucacua

SEQ ID NO: 1471294 - RNA, 19 nt, Homo sapiens
  misc_RNA (1)...(19): siRNA sense strand
gaauacagagacagaaaug

SEQ ID NO: 1471295 - RNA, 19 nt, Homo sapiens
  misc_RNA (1)...(19): siRNA sense strand
caaagaacaagaagaggaa

SEQ ID NO: 1471296 - RNA, 19 nt, Homo sapiens
  misc_RNA (1)...(19): siRNA sense strand
gcuauuacauugcuugaac

SEQ ID NO: 1471297 - RNA, 19 nt, Homo sapiens
  misc_RNA (1)...(19): siRNA sense strand
uaaaguuguucccucaaga

SEQ ID NO: 1471298 - RNA, 19 nt, Homo sapiens
  misc_RNA (1)...(19): siRNA sense strand
ggagagacguaacucaacu

SEQ ID NO: 1471299 - RNA, 19 nt, Homo sapiens
  misc_RNA (1)...(19): siRNA sense strand
gaacuucagauaccugugu

SEQ ID NO: 1471300 - RNA, 19 nt, Homo sapiens
  misc_RNA (1)...(19): siRNA sense strand
ggagcagauucgcaaagaa

SEQ ID NO: 1471301 - RNA, 19 nt, Homo sapiens
  misc_RNA (1)...(19): siRNA sense strand
agagauggcagaacaguuu

SEQ ID NO: 1471302 - RNA, 19 nt, Homo sapiens
  misc_RNA (1)...(19): siRNA sense strand
ccaacaacaggaagauaua

SEQ ID NO: 1471303 - RNA, 19 nt, Homo sapiens
  misc_RNA (1)...(19): siRNA sense strand
ccuaaaaucucuacacuug

SEQ ID NO: 1471304 - RNA, 19 nt, Homo sapiens
  misc_RNA (1)...(19): siRNA sense strand
caacaacaggaagauauaa

SEQ ID NO: 1471305 - RNA, 19 nt, Homo sapiens
  misc_RNA (1)...(19): siRNA sense strand
aaugaaguguugaauguga

SEQ ID NO: 1471306 - RNA, 19 nt, Homo sapiens
  misc_RNA (1)...(19): siRNA sense strand
gacaaaggacuccaacaga

SEQ ID NO: 1471307 - RNA, 19 nt, Homo sapiens
  misc_RNA (1)...(19): siRNA sense strand
caacagucuuuauguccuu

SEQ ID NO: 1471308 - RNA, 19 nt, Homo sapiens
  misc_RNA (1)...(19): siRNA sense strand
guaaaguuguucccucaag

SEQ ID NO: 1471309 - RNA, 19 nt, Homo sapiens
  misc_RNA (1)...(19): siRNA sense strand
gagauuaaacagauucuag

SEQ ID NO: 1471310 - RNA, 19 nt, Homo sapiens
  misc_RNA (1)...(19): siRNA sense strand
ggaagacaguacgguccua

SEQ ID NO: 1471311 - RNA, 19 nt, Homo sapiens
  misc_RNA (1)...(19): siRNA sense strand
gaagacgggagauguggaa

SEQ ID NO: 1471312 - RNA, 19 nt, Homo sapiens
  misc_RNA (1)...(19): siRNA sense strand
ccaggcagauuguagaaag

SEQ ID NO: 1471313 - RNA, 19 nt, Homo sapiens
  misc_RNA (1)...(19): siRNA sense strand
uuacugagcaccuuuccua

SEQ ID NO: 1471314 - RNA, 19 nt, Homo sapiens
  misc_RNA (1)...(19): siRNA sense strand
acacaacaguagaugaguu

SEQ ID NO: 1471315 - RNA, 19 nt, Homo sapiens
  misc_RNA (1)...(19): siRNA sense strand
cuaucuaccuccaccauga

SEQ ID NO: 1471316 - RNA, 19 nt, Homo sapiens
  misc_RNA (1)...(19): siRNA sense strand
cacaacaguagaugaguua

SEQ ID NO: 1471317 - RNA, 19 nt, Homo sapiens
  misc_RNA (1)...(19): siRNA sense strand
caagggaacacaacaguag

SEQ ID NO: 1471318 - RNA, 19 nt, Homo sapiens
  misc_RNA (1)...(19): siRNA sense strand
caacagagcaagauuucuc

SEQ ID NO: 1471319 - RNA, 19 nt, Homo sapiens
  misc_RNA (1)...(19): siRNA sense strand
gcuuugugcugaauccauu

SEQ ID NO: 1471320 - RNA, 19 nt, Homo sapiens
  misc_RNA (1)...(19): siRNA sense strand
aaacauugacgaagcuauu

SEQ ID NO: 1471321 - RNA, 19 nt, Homo sapiens
  misc_RNA (1)...(19): siRNA sense strand
gaagacaguacgguccuaa

SEQ ID NO: 1471322 - RNA, 19 nt, Homo sapiens
  misc_RNA (1)...(19): siRNA sense strand
gaucuucacagcccaacaa

SEQ ID NO: 1471323 - RNA, 19 nt, Homo sapiens
  misc_RNA (1)...(19): siRNA sense strand
ucaagaggccuucuaugug

SEQ ID NO: 1471324 - RNA, 19 nt, Homo sapiens
  misc_RNA (1)...(19): siRNA sense strand
aacaguagaugaguuaaug

SEQ ID NO: 1471325 - RNA, 19 nt, Homo sapiens
  misc_RNA (1)...(19): siRNA sense strand
ggaacacaacaguagauga

SEQ ID NO: 1471326 - RNA, 19 nt, Homo sapiens
  misc_RNA (1)...(19): siRNA sense strand
uaugugcaauagacacuuu

SEQ ID NO: 1471327 - RNA, 19 nt, Homo sapiens
  misc_RNA (1)...(19): siRNA sense strand
caacauggaccgggagaug

SEQ ID NO: 1471328 - RNA, 19 nt, Homo sapiens
  misc_RNA (1)...(19): siRNA sense strand
uggcagaacaguuucguuu

SEQ ID NO: 1471329 - RNA, 19 nt, Homo sapiens
  misc_RNA (1)...(19): siRNA sense strand
ggcauguacuggcauugaa

SEQ ID NO: 1471330 - RNA, 19 nt, Homo sapiens
  misc_RNA (1)...(19): siRNA sense strand
ugugaaagcccgagauaga

SEQ ID NO: 1471331 - RNA, 19 nt, Homo sapiens
  misc_RNA (1)...(19): siRNA sense strand
ugaaagcccgagauagaaa

SEQ ID NO: 1471332 - RNA, 19 nt, Homo sapiens
  misc_RNA (1)...(19): siRNA sense strand
ucaacuggacccaaauaaa

SEQ ID NO: 1471333 - RNA, 19 nt, Homo sapiens
  misc_RNA (1)...(19): siRNA sense strand
ugggaaagcgaucaucuaa

SEQ ID NO: 1471334 - RNA, 19 nt, Homo sapiens
  misc_RNA (1)...(19): siRNA sense strand
cuugggaucugacaaagga

SEQ ID NO: 1471335 - RNA, 19 nt, Homo sapiens
  misc_RNA (1)...(19): siRNA sense strand
ggagagauuaaacagauuc

SEQ ID NO: 1471336 - RNA, 19 nt, Homo sapiens
  misc_RNA (1)...(19): siRNA sense strand
ccuaucgccuuucacuuga

SEQ ID NO: 1471337 - RNA, 19 nt, Homo sapiens
  misc_RNA (1)...(19): siRNA sense strand
gguguaauaccacaggaaa

SEQ ID NO: 1471338 - RNA, 19 nt, Homo sapiens
  misc_RNA (1)...(19): siRNA sense strand
gcaagauuucucacuaugu

SEQ ID NO: 1471339 - RNA, 19 nt, Homo sapiens
  misc_RNA (1)...(19): siRNA sense strand
ccaccaccuucaucaucua

SEQ ID NO: 1471340 - RNA, 19 nt, Homo sapiens
  misc_RNA (1)...(19): siRNA sense strand
gcagcuaucaaugguguaa

SEQ ID NO: 1471341 - RNA, 19 nt, Homo sapiens
  misc_RNA (1)...(19): siRNA sense strand
gggaagcucacgagagaga

SEQ ID NO: 1471342 - RNA, 19 nt, Homo sapiens
  misc_RNA (1)...(19): siRNA sense strand
uuuauuggcucauuagaag

SEQ ID NO: 1471343 - RNA, 19 nt, Homo sapiens
  misc_RNA (1)...(19): siRNA sense strand
auacagagacagaaauguu

SEQ ID NO: 1471344 - RNA, 19 nt, Homo sapiens
  misc_RNA (1)...(19): siRNA sense strand
uauuggagguaaaguuguu

SEQ ID NO: 1471345 - RNA, 19 nt, Homo sapiens
  misc_RNA (1)...(19): siRNA sense strand
gccuaucgccuuucacuug

SEQ ID NO: 1471346 - RNA, 19 nt, Homo sapiens
  misc_RNA (1)...(19): siRNA sense strand
gggcuugggaucugacaaa

SEQ ID NO: 1471347 - RNA, 19 nt, Homo sapiens
  misc_RNA (1)...(19): siRNA sense strand
ccaaaaugcuguuaaaagg

SEQ ID NO: 1471348 - RNA, 19 nt, Homo sapiens
  misc_RNA (1)...(19): siRNA sense strand
uuggagagauuaaacagau

SEQ ID NO: 1471349 - RNA, 19 nt, Homo sapiens
  misc_RNA (1)...(19): siRNA sense strand
ugaagacaccuguacuguu

SEQ ID NO: 1471350 - RNA, 19 nt, Homo sapiens
  misc_RNA (1)...(19): siRNA sense strand
ggacuuaguggcagcuauc

SEQ ID NO: 1471351 - RNA, 19 nt, Homo sapiens
  misc_RNA (1)...(19): siRNA sense strand
cagaacaguuucguuugga

SEQ ID NO: 1471352 - RNA, 19 nt, Homo sapiens
  misc_RNA (1)...(19): siRNA sense strand
gcauguacuggcauugaaa

SEQ ID NO: 1471353 - RNA, 19 nt, Homo sapiens
  misc_RNA (1)...(19): siRNA sense strand
agcuaucaaugguguaaua

SEQ ID NO: 1471354 - RNA, 19 nt, Homo sapiens
  misc_RNA (1)...(19): siRNA sense strand
caaaccauucggacucaaa

SEQ ID NO: 1471355 - RNA, 19 nt, Homo sapiens
  misc_RNA (1)...(19): siRNA sense strand
cugagcaccuuuccuagga

SEQ ID NO: 1471356 - RNA, 19 nt, Homo sapiens
  misc_RNA (1)...(19): siRNA sense strand
gcuccuacuuccucuucuu

SEQ ID NO: 1471357 - RNA, 19 nt, Homo sapiens
  misc_RNA (1)...(19): siRNA sense strand
caacaguagaugaguuaau

SEQ ID NO: 1471358 - RNA, 19 nt, Homo sapiens
  misc_RNA (1)...(19): siRNA sense strand
ggugauugccauccuguau

SEQ ID NO: 1471359 - RNA, 19 nt, Homo sapiens
  misc_RNA (1)...(19): siRNA sense strand
gaugaaaguguguuaacca

SEQ ID NO: 1471360 - RNA, 19 nt, Homo sapiens
  misc_RNA (1)...(19): siRNA sense strand
gugaaagcccgagauagaa

SEQ ID NO: 1471361 - RNA, 19 nt, Homo sapiens
  misc_RNA (1)...(19): siRNA sense strand
uaugugaaagcccgagaua

SEQ ID NO: 1471362 - RNA, 19 nt, Homo sapiens
  misc_RNA (1)...(19): siRNA sense strand
gagcagauucgcaaagaac

SEQ ID NO: 1471363 - RNA, 19 nt, Homo sapiens
  misc_RNA (1)...(19): siRNA sense strand
ucuacaaagugaauaugga

SEQ ID NO: 1471364 - RNA, 19 nt, Homo sapiens
  misc_RNA (1)...(19): siRNA sense strand
uggagcagauucgcaaaga

SEQ ID NO: 1471365 - RNA, 19 nt, Homo sapiens
  misc_RNA (1)...(19): siRNA sense strand
cagcaacaagcuccagauu

SEQ ID NO: 1471366 - RNA, 19 nt, Homo sapiens
  misc_RNA (1)...(19): siRNA sense strand
gcagauucgcaaagaacaa

SEQ ID NO: 1471367 - RNA, 19 nt, Homo sapiens
  misc_RNA (1)...(19): siRNA sense strand
gcacuggccuuaugccuuu

SEQ ID NO: 1471368 - RNA, 19 nt, Homo sapiens
  misc_RNA (1)...(19): siRNA sense strand
ggagauauauugugccuau

SEQ ID NO: 1471369 - RNA, 19 nt, Homo sapiens
  misc_RNA (1)...(19): siRNA sense strand
gaagagaugaagcagcuaa

SEQ ID NO: 1471370 - RNA, 19 nt, Homo sapiens
  misc_RNA (1)...(19): siRNA sense strand
ggagguaacugcuuauagc

SEQ ID NO: 1471371 - RNA, 19 nt, Homo sapiens
  misc_RNA (1)...(19): siRNA sense strand
gaagaugccucugauuggu

SEQ ID NO: 1471372 - RNA, 19 nt, Homo sapiens
  misc_RNA (1)...(19): siRNA sense strand
guguuugacuucaccuuua

SEQ ID NO: 1471373 - RNA, 19 nt, Homo sapiens
  misc_RNA (1)...(19): siRNA sense strand
gcagauugaugacauacuc

SEQ ID NO: 1471374 - RNA, 19 nt, Homo sapiens
  misc_RNA (1)...(19): siRNA sense strand
gcacguggccuggagguaa

SEQ ID NO: 1471375 - RNA, 19 nt, Homo sapiens
  misc_RNA (1)...(19): siRNA sense strand
uggaguaucuggaccugua

SEQ ID NO: 1471376 - RNA, 19 nt, Homo sapiens
  misc_RNA (1)...(19): siRNA sense strand
ggaaugccacccauacuug

SEQ ID NO: 1471377 - RNA, 19 nt, Homo sapiens
  misc_RNA (1)...(19): siRNA sense strand
aaaagcagcuguuaaguau

SEQ ID NO: 1471378 - RNA, 19 nt, Homo sapiens
  misc_RNA (1)...(19): siRNA sense strand
gagaugaagcagcuaaaug

SEQ ID NO: 1471379 - RNA, 19 nt, Homo sapiens
  misc_RNA (1)...(19): siRNA sense strand
gccuggagguaacugcuua

SEQ ID NO: 1471380 - RNA, 19 nt, Homo sapiens
  misc_RNA (1)...(19): siRNA sense strand
gaaugcugaugggacuaua

SEQ ID NO: 1471381 - RNA, 19 nt, Homo sapiens
  misc_RNA (1)...(19): siRNA sense strand
uauauugugccuaugcuua

SEQ ID NO: 1471382 - RNA, 19 nt, Homo sapiens
  misc_RNA (1)...(19): siRNA sense strand
gcuaaaugcccugaacaaa

SEQ ID NO: 1471383 - RNA, 19 nt, Homo sapiens
  misc_RNA (1)...(19): siRNA sense strand
uggaggcacugguggcuaa

SEQ ID NO: 1471384 - RNA, 19 nt, Homo sapiens
  misc_RNA (1)...(19): siRNA sense strand
gcagcuaaaugcccugaac

SEQ ID NO: 1471385 - RNA, 19 nt, Homo sapiens
  misc_RNA (1)...(19): siRNA sense strand
uaaaagcagcuguuaagua

SEQ ID NO: 1471386 - RNA, 19 nt, Homo sapiens
  misc_RNA (1)...(19): siRNA sense strand
ggcauuggcugaaaaguau

SEQ ID NO: 1471387 - RNA, 19 nt, Homo sapiens
  misc_RNA (1)...(19): siRNA sense strand
aagcagcuguuaaguaugc

SEQ ID NO: 1471388 - RNA, 19 nt, Homo sapiens
  misc_RNA (1)...(19): siRNA sense strand
cugaugcacuggccuuaug

SEQ ID NO: 1471389 - RNA, 19 nt, Homo sapiens
  misc_RNA (1)...(19): siRNA sense strand
ugauugugcugcuaucuac

SEQ ID NO: 1471390 - RNA, 19 nt, Homo sapiens
  misc_RNA (1)...(19): siRNA sense strand
uaucacuccuucucgaauc

SEQ ID NO: 1471391 - RNA, 19 nt, Homo sapiens
  misc_RNA (1)...(19): siRNA sense strand
gaggagcuguuugugacau

SEQ ID NO: 1471392 - RNA, 19 nt, Homo sapiens
  misc_RNA (1)...(19): siRNA sense strand
gauauauugugccuaugcu

SEQ ID NO: 1471393 - RNA, 19 nt, Homo sapiens
  misc_RNA (1)...(19): siRNA sense strand
ucucgaauccuucagaaca

SEQ ID NO: 1471394 - RNA, 19 nt, Homo sapiens
  misc_RNA (1)...(19): siRNA sense strand
cuaaaugcccugaacaaaa

SEQ ID NO: 1471395 - RNA, 19 nt, Homo sapiens
  misc_RNA (1)...(19): siRNA sense strand
cuucaacagucggcagauu

SEQ ID NO: 1471396 - RNA, 19 nt, Homo sapiens
  misc_RNA (1)...(19): siRNA sense strand
ccuuugggcuccucugauc

SEQ ID NO: 1471397 - RNA, 19 nt, Homo sapiens
  misc_RNA (1)...(19): siRNA sense strand
gacaaccccuuccccaaga

SEQ ID NO: 1471398 - RNA, 19 nt, Homo sapiens
  misc_RNA (1)...(19): siRNA sense strand
gagauauauugugccuaug

SEQ ID NO: 1471399 - RNA, 19 nt, Homo sapiens
  misc_RNA (1)...(19): siRNA sense strand
gguaaaagcagcuguuaag

SEQ ID NO: 1471400 - RNA, 19 nt, Homo sapiens
  misc_RNA (1)...(19): siRNA sense strand
acagucggcagauugauga

SEQ ID NO: 1471401 - RNA, 19 nt, Homo sapiens
  misc_RNA (1)...(19): siRNA sense strand
cugaugggacuauaugcua

SEQ ID NO: 1471402 - RNA, 19 nt, Homo sapiens
  misc_RNA (1)...(19): siRNA sense strand
ucggcagauugaugacaua

SEQ ID NO: 1471403 - RNA, 19 nt, Homo sapiens
  misc_RNA (1)...(19): siRNA sense strand
gcuacgacuccacccacua

SEQ ID NO: 1471404 - RNA, 19 nt, Homo sapiens
  misc_RNA (1)...(19): siRNA sense strand
uugaugacauacucagugu

SEQ ID NO: 1471405 - RNA, 19 nt, Homo sapiens
  misc_RNA (1)...(19): siRNA sense strand
cgacuccacccacuacaag

SEQ ID NO: 1471406 - RNA, 19 nt, Homo sapiens
  misc_RNA (1)...(19): siRNA sense strand
gcccagaagagaugaagca

SEQ ID NO: 1471407 - RNA, 19 nt, Homo sapiens
  misc_RNA (1)...(19): siRNA sense strand
guccuggcauuggcugaaa

SEQ ID NO: 1471408 - RNA, 19 nt, Homo sapiens
  misc_RNA (1)...(19): siRNA sense strand
agaagaugccucugauugg

SEQ ID NO: 1471409 - RNA, 19 nt, Homo sapiens
  misc_RNA (1)...(19): siRNA sense strand
uggaaugccacccauacuu

SEQ ID NO: 1471410 - RNA, 19 nt, Homo sapiens
  misc_RNA (1)...(19): siRNA sense strand
cgggaggagcuguuuguga

SEQ ID NO: 1471411 - RNA, 19 nt, Homo sapiens
  misc_RNA (1)...(19): siRNA sense strand
ggucuggguaccuggaaga

SEQ ID NO: 1471412 - RNA, 19 nt, Homo sapiens
  misc_RNA (1)...(19): siRNA sense strand
gcuaccgccacauugauug

SEQ ID NO: 1471413 - RNA, 19 nt, Homo sapiens
  misc_RNA (1)...(19): siRNA sense strand
agaugaagcagcuaaaugc

SEQ ID NO: 1471414 - RNA, 19 nt, Homo sapiens
  misc_RNA (1)...(19): siRNA sense strand
gcacuggccuuaugccuuu

SEQ ID NO: 1471415 - RNA, 19 nt, Homo sapiens
  misc_RNA (1)...(19): siRNA sense strand
ggagauauauugugccuau

SEQ ID NO: 1471416 - RNA, 19 nt, Homo sapiens
  misc_RNA (1)...(19): siRNA sense strand
gaagagaugaagcagcuaa

SEQ ID NO: 1471417 - RNA, 19 nt, Homo sapiens
  misc_RNA (1)...(19): siRNA sense strand
ggagguaacugcuuauagc

SEQ ID NO: 1471418 - RNA, 19 nt, Homo sapiens
  misc_RNA (1)...(19): siRNA sense strand
gaagaugccucugauuggu

SEQ ID NO: 1471419 - RNA, 19 nt, Homo sapiens
  misc_RNA (1)...(19): siRNA sense strand
guguuugacuucaccuuua

SEQ ID NO: 1471420 - RNA, 19 nt, Homo sapiens
  misc_RNA (1)...(19): siRNA sense strand
gcagauugaugacauacuc

SEQ ID NO: 1471421 - RNA, 19 nt, Homo sapiens
  misc_RNA (1)...(19): siRNA sense strand
gcacguggccuggagguaa

SEQ ID NO: 1471422 - RNA, 19 nt, Homo sapiens
  misc_RNA (1)...(19): siRNA sense strand
uggaguaucuggaccugua

SEQ ID NO: 1471423 - RNA, 19 nt, Homo sapiens
  misc_RNA (1)...(19): siRNA sense strand
ggaaugccacccauacuug

SEQ ID NO: 1471424 - RNA, 19 nt, Homo sapiens
  misc_RNA (1)...(19): siRNA sense strand
aaaagcagcuguuaaguau

SEQ ID NO: 1471425 - RNA, 19 nt, Homo sapiens
  misc_RNA (1)...(19): siRNA sense strand
gagaugaagcagcuaaaug

SEQ ID NO: 1471426 - RNA, 19 nt, Homo sapiens
  misc_RNA (1)...(19): siRNA sense strand
gccuggagguaacugcuua

SEQ ID NO: 1471427 - RNA, 19 nt, Homo sapiens
  misc_RNA (1)...(19): siRNA sense strand
gaaugcugaugggacuaua

SEQ ID NO: 1471428 - RNA, 19 nt, Homo sapiens
  misc_RNA (1)...(19): siRNA sense strand
uauauugugccuaugcuua

SEQ ID NO: 1471429 - RNA, 19 nt, Homo sapiens
  misc_RNA (1)...(19): siRNA sense strand
gcuaaaugcccugaacaaa

SEQ ID NO: 1471430 - RNA, 19 nt, Homo sapiens
  misc_RNA (1)...(19): siRNA sense strand
uggaggcacugguggcuaa

SEQ ID NO: 1471431 - RNA, 19 nt, Homo sapiens
  misc_RNA (1)...(19): siRNA sense strand
gcagcuaaaugcccugaac

SEQ ID NO: 1471432 - RNA, 19 nt, Homo sapiens
  misc_RNA (1)...(19): siRNA sense strand
uaaaagcagcuguuaagua

SEQ ID NO: 1471433 - RNA, 19 nt, Homo sapiens
  misc_RNA (1)...(19): siRNA sense strand
ggcauuggcugaaaaguau

SEQ ID NO: 1471434 - RNA, 19 nt, Homo sapiens
  misc_RNA (1)...(19): siRNA sense strand
aagcagcuguuaaguaugc

SEQ ID NO: 1471435 - RNA, 19 nt, Homo sapiens
  misc_RNA (1)...(19): siRNA sense strand
cugaugcacuggccuuaug

SEQ ID NO: 1471436 - RNA, 19 nt, Homo sapiens
  misc_RNA (1)...(19): siRNA sense strand
ugauugugcugcuaucuac

SEQ ID NO: 1471437 - RNA, 19 nt, Homo sapiens
  misc_RNA (1)...(19): siRNA sense strand
uaucacuccuucucgaauc

SEQ ID NO: 1471438 - RNA, 19 nt, Homo sapiens
  misc_RNA (1)...(19): siRNA sense strand
gaggagcuguuugugacau

SEQ ID NO: 1471439 - RNA, 19 nt, Homo sapiens
  misc_RNA (1)...(19): siRNA sense strand
gauauauugugccuaugcu

SEQ ID NO: 1471440 - RNA, 19 nt, Homo sapiens
  misc_RNA (1)...(19): siRNA sense strand
ucucgaauccuucagaaca

SEQ ID NO: 1471441 - RNA, 19 nt, Homo sapiens
  misc_RNA (1)...(19): siRNA sense strand
cuaaaugcccugaacaaaa

SEQ ID NO: 1471442 - RNA, 19 nt, Homo sapiens
  misc_RNA (1)...(19): siRNA sense strand
cuucaacagucggcagauu

SEQ ID NO: 1471443 - RNA, 19 nt, Homo sapiens
  misc_RNA (1)...(19): siRNA sense strand
ccuuugggcuccucugauc

SEQ ID NO: 1471444 - RNA, 19 nt, Homo sapiens
  misc_RNA (1)...(19): siRNA sense strand
gacaaccccuuccccaaga

SEQ ID NO: 1471445 - RNA, 19 nt, Homo sapiens
  misc_RNA (1)...(19): siRNA sense strand
gagauauauugugccuaug

SEQ ID NO: 1471446 - RNA, 19 nt, Homo sapiens
  misc_RNA (1)...(19): siRNA sense strand
gguaaaagcagcuguuaag

SEQ ID NO: 1471447 - RNA, 19 nt, Homo sapiens
  misc_RNA (1)...(19): siRNA sense strand
acagucggcagauugauga

SEQ ID NO: 1471448 - RNA, 19 nt, Homo sapiens
  misc_RNA (1)...(19): siRNA sense strand
cugaugggacuauaugcua

SEQ ID NO: 1471449 - RNA, 19 nt, Homo sapiens
  misc_RNA (1)...(19): siRNA sense strand
ucggcagauugaugacaua

SEQ ID NO: 1471450 - RNA, 19 nt, Homo sapiens
  misc_RNA (1)...(19): siRNA sense strand
gcuacgacuccacccacua

SEQ ID NO: 1471451 - RNA, 19 nt, Homo sapiens
  misc_RNA (1)...(19): siRNA sense strand
uugaugacauacucagugu

SEQ ID NO: 1471452 - RNA, 19 nt, Homo sapiens
  misc_RNA (1)...(19): siRNA sense strand
cgacuccacccacuacaag

SEQ ID NO: 1471453 - RNA, 19 nt, Homo sapiens
  misc_RNA (1)...(19): siRNA sense strand
gcccagaagagaugaagca

SEQ ID NO: 1471454 - RNA, 19 nt, Homo sapiens
  misc_RNA (1)...(19): siRNA sense strand
guccuggcauuggcugaaa

SEQ ID NO: 1471455 - RNA, 19 nt, Homo sapiens
  misc_RNA (1)...(19): siRNA sense strand
agaagaugccucugauugg

SEQ ID NO: 1471456 - RNA, 19 nt, Homo sapiens
  misc_RNA (1)...(19): siRNA sense strand
uggaaugccacccauacuu

SEQ ID NO: 1471457 - RNA, 19 nt, Homo sapiens
  misc_RNA (1)...(19): siRNA sense strand
cgggaggagcuguuuguga

SEQ ID NO: 1471458 - RNA, 19 nt, Homo sapiens
  misc_RNA (1)...(19): siRNA sense strand
ggucuggguaccuggaaga

SEQ ID NO: 1471459 - RNA, 19 nt, Homo sapiens
  misc_RNA (1)...(19): siRNA sense strand
gcuaccgccacauugauug

SEQ ID NO: 1471460 - RNA, 19 nt, Homo sapiens
  misc_RNA (1)...(19): siRNA sense strand
agaugaagcagcuaaaugc

SEQ ID NO: 1471461 - RNA, 19 nt, Homo sapiens
  misc_RNA (1)...(19): siRNA sense strand
gaacacagaguuucaugaa

SEQ ID NO: 1471462 - RNA, 19 nt, Homo sapiens
  misc_RNA (1)...(19): siRNA sense strand
gaaaccaaauugcacaaau

SEQ ID NO: 1471463 - RNA, 19 nt, Homo sapiens
  misc_RNA (1)...(19): siRNA sense strand
agaaacacaucgaguauau

SEQ ID NO: 1471464 - RNA, 19 nt, Homo sapiens
  misc_RNA (1)...(19): siRNA sense strand
caacugcccuuacauugug

SEQ ID NO: 1471465 - RNA, 19 nt, Homo sapiens
  misc_RNA (1)...(19): siRNA sense strand
ugagaagacuaucaucauu

SEQ ID NO: 1471466 - RNA, 19 nt, Homo sapiens
  misc_RNA (1)...(19): siRNA sense strand
ucgaguauaugcuauugua

SEQ ID NO: 1471467 - RNA, 19 nt, Homo sapiens
  misc_RNA (1)...(19): siRNA sense strand
gcagaaacacaucgaguau

SEQ ID NO: 1471468 - RNA, 19 nt, Homo sapiens
  misc_RNA (1)...(19): siRNA sense strand
aaacaugcccgacccaauu

SEQ ID NO: 1471469 - RNA, 19 nt, Homo sapiens
  misc_RNA (1)...(19): siRNA sense strand
gagcugcacugugaugaga

SEQ ID NO: 1471470 - RNA, 19 nt, Homo sapiens
  misc_RNA (1)...(19): siRNA sense strand
gaaggaacaacaagaagug

SEQ ID NO: 1471471 - RNA, 19 nt, Homo sapiens
  misc_RNA (1)...(19): siRNA sense strand
gagaagacuaucaucauug

SEQ ID NO: 1471472 - RNA, 19 nt, Homo sapiens
  misc_RNA (1)...(19): siRNA sense strand
gcccuuacauugugcaguu

SEQ ID NO: 1471473 - RNA, 19 nt, Homo sapiens
  misc_RNA (1)...(19): siRNA sense strand
gcacaaauucacugacugu

SEQ ID NO: 1471474 - RNA, 19 nt, Homo sapiens
  misc_RNA (1)...(19): siRNA sense strand
uggagaagauaccugguuu

SEQ ID NO: 1471475 - RNA, 19 nt, Homo sapiens
  misc_RNA (1)...(19): siRNA sense strand
aaaaggagcuggagaagau

SEQ ID NO: 1471476 - RNA, 19 nt, Homo sapiens
  misc_RNA (1)...(19): siRNA sense strand
caugagguaugcagaaaca

SEQ ID NO: 1471477 - RNA, 19 nt, Homo sapiens
  misc_RNA (1)...(19): siRNA sense strand
ggaaggaacaacaagaagu

SEQ ID NO: 1471478 - RNA, 19 nt, Homo sapiens
  misc_RNA (1)...(19): siRNA sense strand
gccaugagguaugcagaaa

SEQ ID NO: 1471479 - RNA, 19 nt, Homo sapiens
  misc_RNA (1)...(19): siRNA sense strand
acacaucgaguauaugcua

SEQ ID NO: 1471480 - RNA, 19 nt, Homo sapiens
  misc_RNA (1)...(19): siRNA sense strand
caacaagaaguggccgaua

SEQ ID NO: 1471481 - RNA, 19 nt, Homo sapiens
  misc_RNA (1)...(19): siRNA sense strand
caucgaguauaugcuauug

SEQ ID NO: 1471482 - RNA, 19 nt, Homo sapiens
  misc_RNA (1)...(19): siRNA sense strand
ccaauuacagcacgagaga

SEQ ID NO: 1471483 - RNA, 19 nt, Homo sapiens
  misc_RNA (1)...(19): siRNA sense strand
ggaaaccaaauugcacaaa

SEQ ID NO: 1471484 - RNA, 19 nt, Homo sapiens
  misc_RNA (1)...(19): siRNA sense strand
gcaucuggcugcccuucau

SEQ ID NO: 1471485 - RNA, 19 nt, Homo sapiens
  misc_RNA (1)...(19): siRNA sense strand
ugaacugauuacuguugua

SEQ ID NO: 1471486 - RNA, 19 nt, Homo sapiens
  misc_RNA (1)...(19): siRNA sense strand
cagaaacacaucgaguaua

SEQ ID NO: 1471487 - RNA, 19 nt, Homo sapiens
  misc_RNA (1)...(19): siRNA sense strand
agaagacuaucaucauugg

SEQ ID NO: 1471488 - RNA, 19 nt, Homo sapiens
  misc_RNA (1)...(19): siRNA sense strand
aacaagaaguggccgauag

SEQ ID NO: 1471489 - RNA, 19 nt, Homo sapiens
  misc_RNA (1)...(19): siRNA sense strand
uucaugaacugauuacugu

SEQ ID NO: 1471490 - RNA, 19 nt, Homo sapiens
  misc_RNA (1)...(19): siRNA sense strand
gcacugugaugagaagacu

SEQ ID NO: 1471491 - RNA, 19 nt, Homo sapiens
  misc_RNA (1)...(19): siRNA sense strand
ggccaacugcccuuacauu

SEQ ID NO: 1471492 - RNA, 19 nt, Homo sapiens
  misc_RNA (1)...(19): siRNA sense strand
gccaacugcccuuacauug

SEQ ID NO: 1471493 - RNA, 19 nt, Homo sapiens
  misc_RNA (1)...(19): siRNA sense strand
ccaacugcccuuacauugu

SEQ ID NO: 1471494 - RNA, 19 nt, Homo sapiens
  misc_RNA (1)...(19): siRNA sense strand
gaaacacaucgaguauaug

SEQ ID NO: 1471495 - RNA, 19 nt, Homo sapiens
  misc_RNA (1)...(19): siRNA sense strand
uaucaucauuggccacagu

SEQ ID NO: 1471496 - RNA, 19 nt, Homo sapiens
  misc_RNA (1)...(19): siRNA sense strand
caugaacugauuacuguug

SEQ ID NO: 1471497 - RNA, 19 nt, Homo sapiens
  misc_RNA (1)...(19): siRNA sense strand
aaacacaucgaguauaugc

SEQ ID NO: 1471498 - RNA, 19 nt, Homo sapiens
  misc_RNA (1)...(19): siRNA sense strand
ugcagaaacacaucgagua

SEQ ID NO: 1471499 - RNA, 19 nt, Homo sapiens
  misc_RNA (1)...(19): siRNA sense strand
cacugacuguggccacuuu

SEQ ID NO: 1471500 - RNA, 19 nt, Homo sapiens
  misc_RNA (1)...(19): siRNA sense strand
aacaugcccgacccaauua

SEQ ID NO: 1471501 - RNA, 19 nt, Homo sapiens
  misc_RNA (1)...(19): siRNA sense strand
uagcaaggcagugauuguu

SEQ ID NO: 1471502 - RNA, 19 nt, Homo sapiens
  misc_RNA (1)...(19): siRNA sense strand
ggagaagauaccugguuuc

SEQ ID NO: 1471503 - RNA, 19 nt, Homo sapiens
  misc_RNA (1)...(19): siRNA sense strand
gaaaaugagcgugcaagug

SEQ ID NO: 1471504 - RNA, 19 nt, Homo sapiens
  misc_RNA (1)...(19): siRNA sense strand
ggccaugagguaugcagaa

SEQ ID NO: 1471505 - RNA, 19 nt, Homo sapiens
  misc_RNA (1)...(19): siRNA sense strand
gacuguggccacuuucaga

SEQ ID NO: 1471506 - RNA, 19 nt, Homo sapiens
  misc_RNA (1)...(19): siRNA sense strand
gcugcacugugaugagaag

SEQ ID NO: 1471507 - RNA, 19 nt, Homo sapiens
  misc_RNA (1)...(19): siRNA sense strand
gagaagauaccugguuucc

SEQ ID NO: 1471508 - RNA, 19 nt, Homo sapiens
  misc_RNA (1)...(19): siRNA sense strand
cagaacacagaguuucaug

SEQ ID NO: 1471509 - RNA, 19 nt, Homo sapiens
  misc_RNA (1)...(19): siRNA sense strand
gaacacagaguuucaugaa

SEQ ID NO: 1471510 - RNA, 19 nt, Homo sapiens
  misc_RNA (1)...(19): siRNA sense strand
gaaaccaaauugcacaaau

SEQ ID NO: 1471511 - RNA, 19 nt, Homo sapiens
  misc_RNA (1)...(19): siRNA sense strand
agaaacacaucgaguauau

SEQ ID NO: 1471512 - RNA, 19 nt, Homo sapiens
  misc_RNA (1)...(19): siRNA sense strand
caacugcccuuacauugug

SEQ ID NO: 1471513 - RNA, 19 nt, Homo sapiens
  misc_RNA (1)...(19): siRNA sense strand
ugagaagacuaucaucauu

SEQ ID NO: 1471514 - RNA, 19 nt, Homo sapiens
  misc_RNA (1)...(19): siRNA sense strand
ucgaguauaugcuauugua

SEQ ID NO: 1471515 - RNA, 19 nt, Homo sapiens
  misc_RNA (1)...(19): siRNA sense strand
gcagaaacacaucgaguau

SEQ ID NO: 1471516 - RNA, 19 nt, Homo sapiens
  misc_RNA (1)...(19): siRNA sense strand
aaacaugcccgacccaauu

SEQ ID NO: 1471517 - RNA, 19 nt, Homo sapiens
  misc_RNA (1)...(19): siRNA sense strand
gagcugcacugugaugaga

SEQ ID NO: 1471518 - RNA, 19 nt, Homo sapiens
  misc_RNA (1)...(19): siRNA sense strand
gaaggaacaacaagaagug

SEQ ID NO: 1471519 - RNA, 19 nt, Homo sapiens
  misc_RNA (1)...(19): siRNA sense strand
gagaagacuaucaucauug

SEQ ID NO: 1471520 - RNA, 19 nt, Homo sapiens
  misc_RNA (1)...(19): siRNA sense strand
gcccuuacauugugcaguu

SEQ ID NO: 1471521 - RNA, 19 nt, Homo sapiens
  misc_RNA (1)...(19): siRNA sense strand
gcacaaauucacugacugu

SEQ ID NO: 1471522 - RNA, 19 nt, Homo sapiens
  misc_RNA (1)...(19): siRNA sense strand
uggagaagauaccugguuu

SEQ ID NO: 1471523 - RNA, 19 nt, Homo sapiens
  misc_RNA (1)...(19): siRNA sense strand
aaaaggagcuggagaagau

SEQ ID NO: 1471524 - RNA, 19 nt, Homo sapiens
  misc_RNA (1)...(19): siRNA sense strand
caugagguaugcagaaaca

SEQ ID NO: 1471525 - RNA, 19 nt, Homo sapiens
  misc_RNA (1)...(19): siRNA sense strand
ggaaggaacaacaagaagu

SEQ ID NO: 1471526 - RNA, 19 nt, Homo sapiens
  misc_RNA (1)...(19): siRNA sense strand
gccaugagguaugcagaaa

SEQ ID NO: 1471527 - RNA, 19 nt, Homo sapiens
  misc_RNA (1)...(19): siRNA sense strand
acacaucgaguauaugcua

SEQ ID NO: 1471528 - RNA, 19 nt, Homo sapiens
  misc_RNA (1)...(19): siRNA sense strand
caacaagaaguggccgaua

SEQ ID NO: 1471529 - RNA, 19 nt, Homo sapiens
  misc_RNA (1)...(19): siRNA sense strand
caucgaguauaugcuauug

SEQ ID NO: 1471530 - RNA, 19 nt, Homo sapiens
  misc_RNA (1)...(19): siRNA sense strand
ccaauuacagcacgagaga

SEQ ID NO: 1471531 - RNA, 19 nt, Homo sapiens
  misc_RNA (1)...(19): siRNA sense strand
ggaaaccaaauugcacaaa

SEQ ID NO: 1471532 - RNA, 19 nt, Homo sapiens
  misc_RNA (1)...(19): siRNA sense strand
gcaucuggcugcccuucau

SEQ ID NO: 1471533 - RNA, 19 nt, Homo sapiens
  misc_RNA (1)...(19): siRNA sense strand
ugaacugauuacuguugua

SEQ ID NO: 1471534 - RNA, 19 nt, Homo sapiens
  misc_RNA (1)...(19): siRNA sense strand
cagaaacacaucgaguaua

SEQ ID NO: 1471535 - RNA, 19 nt, Homo sapiens
  misc_RNA (1)...(19): siRNA sense strand
agaagacuaucaucauugg

SEQ ID NO: 1471536 - RNA, 19 nt, Homo sapiens
  misc_RNA (1)...(19): siRNA sense strand
aacaagaaguggccgauag

SEQ ID NO: 1471537 - RNA, 19 nt, Homo sapiens
  misc_RNA (1)...(19): siRNA sense strand
uucaugaacugauuacugu

SEQ ID NO: 1471538 - RNA, 19 nt, Homo sapiens
  misc_RNA (1)...(19): siRNA sense strand
gcacugugaugagaagacu

SEQ ID NO: 1471539 - RNA, 19 nt, Homo sapiens
  misc_RNA (1)...(19): siRNA sense strand
ggccaacugcccuuacauu

SEQ ID NO: 1471540 - RNA, 19 nt, Homo sapiens
  misc_RNA (1)...(19): siRNA sense strand
gccaacugcccuuacauug

SEQ ID NO: 1471541 - RNA, 19 nt, Homo sapiens
  misc_RNA (1)...(19): siRNA sense strand
ccaacugcccuuacauugu

SEQ ID NO: 1471542 - RNA, 19 nt, Homo sapiens
  misc_RNA (1)...(19): siRNA sense strand
gaaacacaucgaguauaug

SEQ ID NO: 1471543 - RNA, 19 nt, Homo sapiens
  misc_RNA (1)...(19): siRNA sense strand
uaucaucauuggccacagu

SEQ ID NO: 1471544 - RNA, 19 nt, Homo sapiens
  misc_RNA (1)...(19): siRNA sense strand
caugaacugauuacuguug

SEQ ID NO: 1471545 - RNA, 19 nt, Homo sapiens
  misc_RNA (1)...(19): siRNA sense strand
aaacacaucgaguauaugc

SEQ ID NO: 1471546 - RNA, 19 nt, Homo sapiens
  misc_RNA (1)...(19): siRNA sense strand
ugcagaaacacaucgagua

SEQ ID NO: 1471547 - RNA, 19 nt, Homo sapiens
  misc_RNA (1)...(19): siRNA sense strand
cacugacuguggccacuuu

SEQ ID NO: 1471548 - RNA, 19 nt, Homo sapiens
  misc_RNA (1)...(19): siRNA sense strand
aacaugcccgacccaauua

SEQ ID NO: 1471549 - RNA, 19 nt, Homo sapiens
  misc_RNA (1)...(19): siRNA sense strand
uagcaaggcagugauuguu

SEQ ID NO: 1471550 - RNA, 19 nt, Homo sapiens
  misc_RNA (1)...(19): siRNA sense strand
ggagaagauaccugguuuc

SEQ ID NO: 1471551 - RNA, 19 nt, Homo sapiens
  misc_RNA (1)...(19): siRNA sense strand
gaaaaugagcgugcaagug

SEQ ID NO: 1471552 - RNA, 19 nt, Homo sapiens
  misc_RNA (1)...(19): siRNA sense strand
ggccaugagguaugcagaa

SEQ ID NO: 1471553 - RNA, 19 nt, Homo sapiens
  misc_RNA (1)...(19): siRNA sense strand
gacuguggccacuuucaga

SEQ ID NO: 1471554 - RNA, 19 nt, Homo sapiens
  misc_RNA (1)...(19): siRNA sense strand
gcugcacugugaugagaag

SEQ ID NO: 1471555 - RNA, 19 nt, Homo sapiens
  misc_RNA (1)...(19): siRNA sense strand
gagaagauaccugguuucc

SEQ ID NO: 1471556 - RNA, 19 nt, Homo sapiens
  misc_RNA (1)...(19): siRNA sense strand
cagaacacagaguuucaug

SEQ ID NO: 1471557 - RNA, 19 nt, Homo sapiens
  misc_RNA (1)...(19): siRNA sense strand
gaacacagaguuucaugaa

SEQ ID NO: 1471558 - RNA, 19 nt, Homo sapiens
  misc_RNA (1)...(19): siRNA sense strand
gaaaccaaauugcacaaau

SEQ ID NO: 1471559 - RNA, 19 nt, Homo sapiens
  misc_RNA (1)...(19): siRNA sense strand
agaaacacaucgaguauau

SEQ ID NO: 1471560 - RNA, 19 nt, Homo sapiens
  misc_RNA (1)...(19): siRNA sense strand
caacugcccuuacauugug

SEQ ID NO: 1471561 - RNA, 19 nt, Homo sapiens
  misc_RNA (1)...(19): siRNA sense strand
ugagaagacuaucaucauu

SEQ ID NO: 1471562 - RNA, 19 nt, Homo sapiens
  misc_RNA (1)...(19): siRNA sense strand
ucgaguauaugcuauugua

SEQ ID NO: 1471563 - RNA, 19 nt, Homo sapiens
  misc_RNA (1)...(19): siRNA sense strand
gcagaaacacaucgaguau

SEQ ID NO: 1471564 - RNA, 19 nt, Homo sapiens
  misc_RNA (1)...(19): siRNA sense strand
aaacaugcccgacccaauu

SEQ ID NO: 1471565 - RNA, 19 nt, Homo sapiens
  misc_RNA (1)...(19): siRNA sense strand
gagcugcacugugaugaga

SEQ ID NO: 1471566 - RNA, 19 nt, Homo sapiens
  misc_RNA (1)...(19): siRNA sense strand
gaaggaacaacaagaagug

SEQ ID NO: 1471567 - RNA, 19 nt, Homo sapiens
  misc_RNA (1)...(19): siRNA sense strand
gagaagacuaucaucauug

SEQ ID NO: 1471568 - RNA, 19 nt, Homo sapiens
  misc_RNA (1)...(19): siRNA sense strand
gcccuuacauugugcaguu

SEQ ID NO: 1471569 - RNA, 19 nt, Homo sapiens
  misc_RNA (1)...(19): siRNA sense strand
gcacaaauucacugacugu

SEQ ID NO: 1471570 - RNA, 19 nt, Homo sapiens
  misc_RNA (1)...(19): siRNA sense strand
uggagaagauaccugguuu

SEQ ID NO: 1471571 - RNA, 19 nt, Homo sapiens
  misc_RNA (1)...(19): siRNA sense strand
aaaaggagcuggagaagau

SEQ ID NO: 1471572 - RNA, 19 nt, Homo sapiens
  misc_RNA (1)...(19): siRNA sense strand
caugagguaugcagaaaca

SEQ ID NO: 1471573 - RNA, 19 nt, Homo sapiens
  misc_RNA (1)...(19): siRNA sense strand
ggaaggaacaacaagaagu

SEQ ID NO: 1471574 - RNA, 19 nt, Homo sapiens
  misc_RNA (1)...(19): siRNA sense strand
gccaugagguaugcagaaa

SEQ ID NO: 1471575 - RNA, 19 nt, Homo sapiens
  misc_RNA (1)...(19): siRNA sense strand
acacaucgaguauaugcua

SEQ ID NO: 1471576 - RNA, 19 nt, Homo sapiens
  misc_RNA (1)...(19): siRNA sense strand
caacaagaaguggccgaua

SEQ ID NO: 1471577 - RNA, 19 nt, Homo sapiens
  misc_RNA (1)...(19): siRNA sense strand
caucgaguauaugcuauug

SEQ ID NO: 1471578 - RNA, 19 nt, Homo sapiens
  misc_RNA (1)...(19): siRNA sense strand
ccaauuacagcacgagaga

SEQ ID NO: 1471579 - RNA, 19 nt, Homo sapiens
  misc_RNA (1)...(19): siRNA sense strand
ggaaaccaaauugcacaaa

SEQ ID NO: 1471580 - RNA, 19 nt, Homo sapiens
  misc_RNA (1)...(19): siRNA sense strand
gcaucuggcugcccuucau

SEQ ID NO: 1471581 - RNA, 19 nt, Homo sapiens
  misc_RNA (1)...(19): siRNA sense strand
ugaacugauuacuguugua

SEQ ID NO: 1471582 - RNA, 19 nt, Homo sapiens
  misc_RNA (1)...(19): siRNA sense strand
cagaaacacaucgaguaua

SEQ ID NO: 1471583 - RNA, 19 nt, Homo sapiens
  misc_RNA (1)...(19): siRNA sense strand
agaagacuaucaucauugg

SEQ ID NO: 1471584 - RNA, 19 nt, Homo sapiens
  misc_RNA (1)...(19): siRNA sense strand
aacaagaaguggccgauag

SEQ ID NO: 1471585 - RNA, 19 nt, Homo sapiens
  misc_RNA (1)...(19): siRNA sense strand
uucaugaacugauuacugu

SEQ ID NO: 1471586 - RNA, 19 nt, Homo sapiens
  misc_RNA (1)...(19): siRNA sense strand
gcacugugaugagaagacu

SEQ ID NO: 1471587 - RNA, 19 nt, Homo sapiens
  misc_RNA (1)...(19): siRNA sense strand
ggccaacugcccuuacauu

SEQ ID NO: 1471588 - RNA, 19 nt, Homo sapiens
  misc_RNA (1)...(19): siRNA sense strand
gccaacugcccuuacauug

SEQ ID NO: 1471589 - RNA, 19 nt, Homo sapiens
  misc_RNA (1)...(19): siRNA sense strand
ccaacugcccuuacauugu

SEQ ID NO: 1471590 - RNA, 19 nt, Homo sapiens
  misc_RNA (1)...(19): siRNA sense strand
gaaacacaucgaguauaug

SEQ ID NO: 1471591 - RNA, 19 nt, Homo sapiens
  misc_RNA (1)...(19): siRNA sense strand
uaucaucauuggccacagu

SEQ ID NO: 1471592 - RNA, 19 nt, Homo sapiens
  misc_RNA (1)...(19): siRNA sense strand
caugaacugauuacuguug

SEQ ID NO: 1471593 - RNA, 19 nt, Homo sapiens
  misc_RNA (1)...(19): siRNA sense strand
aaacacaucgaguauaugc

SEQ ID NO: 1471594 - RNA, 19 nt, Homo sapiens
  misc_RNA (1)...(19): siRNA sense strand
ugcagaaacacaucgagua

SEQ ID NO: 1471595 - RNA, 19 nt, Homo sapiens
  misc_RNA (1)...(19): siRNA sense strand
cacugacuguggccacuuu

SEQ ID NO: 1471596 - RNA, 19 nt, Homo sapiens
  misc_RNA (1)...(19): siRNA sense strand
aacaugcccgacccaauua

SEQ ID NO: 1471597 - RNA, 19 nt, Homo sapiens
  misc_RNA (1)...(19): siRNA sense strand
uagcaaggcagugauuguu

SEQ ID NO: 1471598 - RNA, 19 nt, Homo sapiens
  misc_RNA (1)...(19): siRNA sense strand
ggagaagauaccugguuuc

SEQ ID NO: 1471599 - RNA, 19 nt, Homo sapiens
  misc_RNA (1)...(19): siRNA sense strand
gaaaaugagcgugcaagug

SEQ ID NO: 1471600 - RNA, 19 nt, Homo sapiens
  misc_RNA (1)...(19): siRNA sense strand
ggccaugagguaugcagaa

SEQ ID NO: 1471601 - RNA, 19 nt, Homo sapiens
  misc_RNA (1)...(19): siRNA sense strand
gacuguggccacuuucaga

SEQ ID NO: 1471602 - RNA, 19 nt, Homo sapiens
  misc_RNA (1)...(19): siRNA sense strand
gcugcacugugaugagaag

SEQ ID NO: 1471603 - RNA, 19 nt, Homo sapiens
  misc_RNA (1)...(19): siRNA sense strand
gagaagauaccugguuucc

SEQ ID NO: 1471604 - RNA, 19 nt, Homo sapiens
  misc_RNA (1)...(19): siRNA sense strand
cagaacacagaguuucaug

SEQ ID NO: 1471605 - RNA, 19 nt, Homo sapiens
  misc_RNA (1)...(19): siRNA sense strand
gaacacagaguuucaugaa

SEQ ID NO: 1471606 - RNA, 19 nt, Homo sapiens
  misc_RNA (1)...(19): siRNA sense strand
gaaaccaaauugcacaaau

SEQ ID NO: 1471607 - RNA, 19 nt, Homo sapiens
  misc_RNA (1)...(19): siRNA sense strand
agaaacacaucgaguauau

SEQ ID NO: 1471608 - RNA, 19 nt, Homo sapiens
  misc_RNA (1)...(19): siRNA sense strand
caacugcccuuacauugug

SEQ ID NO: 1471609 - RNA, 19 nt, Homo sapiens
  misc_RNA (1)...(19): siRNA sense strand
ugagaagacuaucaucauu

SEQ ID NO: 1471610 - RNA, 19 nt, Homo sapiens
  misc_RNA (1)...(19): siRNA sense strand
ucgaguauaugcuauugua

SEQ ID NO: 1471611 - RNA, 19 nt, Homo sapiens
  misc_RNA (1)...(19): siRNA sense strand
gcagaaacacaucgaguau

SEQ ID NO: 1471612 - RNA, 19 nt, Homo sapiens
  misc_RNA (1)...(19): siRNA sense strand
aaacaugcccgacccaauu

SEQ ID NO: 1471613 - RNA, 19 nt, Homo sapiens
  misc_RNA (1)...(19): siRNA sense strand
gagcugcacugugaugaga

SEQ ID NO: 1471614 - RNA, 19 nt, Homo sapiens
  misc_RNA (1)...(19): siRNA sense strand
gaaggaacaacaagaagug

SEQ ID NO: 1471615 - RNA, 19 nt, Homo sapiens
  misc_RNA (1)...(19): siRNA sense strand
gagaagacuaucaucauug

SEQ ID NO: 1471616 - RNA, 19 nt, Homo sapiens
  misc_RNA (1)...(19): siRNA sense strand
gcccuuacauugugcaguu

SEQ ID NO: 1471617 - RNA, 19 nt, Homo sapiens
  misc_RNA (1)...(19): siRNA sense strand
gcacaaauucacugacugu

SEQ ID NO: 1471618 - RNA, 19 nt, Homo sapiens
  misc_RNA (1)...(19): siRNA sense strand
uggagaagauaccugguuu

SEQ ID NO: 1471619 - RNA, 19 nt, Homo sapiens
  misc_RNA (1)...(19): siRNA sense strand
aaaaggagcuggagaagau

SEQ ID NO: 1471620 - RNA, 19 nt, Homo sapiens
  misc_RNA (1)...(19): siRNA sense strand
caugagguaugcagaaaca

SEQ ID NO: 1471621 - RNA, 19 nt, Homo sapiens
  misc_RNA (1)...(19): siRNA sense strand
ggaaggaacaacaagaagu

SEQ ID NO: 1471622 - RNA, 19 nt, Homo sapiens
  misc_RNA (1)...(19): siRNA sense strand
gccaugagguaugcagaaa

SEQ ID NO: 1471623 - RNA, 19 nt, Homo sapiens
  misc_RNA (1)...(19): siRNA sense strand
acacaucgaguauaugcua

SEQ ID NO: 1471624 - RNA, 19 nt, Homo sapiens
  misc_RNA (1)...(19): siRNA sense strand
caacaagaaguggccgaua

SEQ ID NO: 1471625 - RNA, 19 nt, Homo sapiens
  misc_RNA (1)...(19): siRNA sense strand
caucgaguauaugcuauug

SEQ ID NO: 1471626 - RNA, 19 nt, Homo sapiens
  misc_RNA (1)...(19): siRNA sense strand
ccaauuacagcacgagaga

SEQ ID NO: 1471627 - RNA, 19 nt, Homo sapiens
  misc_RNA (1)...(19): siRNA sense strand
ggaaaccaaauugcacaaa

SEQ ID NO: 1471628 - RNA, 19 nt, Homo sapiens
  misc_RNA (1)...(19): siRNA sense strand
gcaucuggcugcccuucau

SEQ ID NO: 1471629 - RNA, 19 nt, Homo sapiens
  misc_RNA (1)...(19): siRNA sense strand
ugaacugauuacuguugua

SEQ ID NO: 1471630 - RNA, 19 nt, Homo sapiens
  misc_RNA (1)...(19): siRNA sense strand
cagaaacacaucgaguaua

SEQ ID NO: 1471631 - RNA, 19 nt, Homo sapiens
  misc_RNA (1)...(19): siRNA sense strand
agaagacuaucaucauugg

SEQ ID NO: 1471632 - RNA, 19 nt, Homo sapiens
  misc_RNA (1)...(19): siRNA sense strand
aacaagaaguggccgauag

SEQ ID NO: 1471633 - RNA, 19 nt, Homo sapiens
  misc_RNA (1)...(19): siRNA sense strand
uucaugaacugauuacugu

SEQ ID NO: 1471634 - RNA, 19 nt, Homo sapiens
  misc_RNA (1)...(19): siRNA sense strand
gcacugugaugagaagacu

SEQ ID NO: 1471635 - RNA, 19 nt, Homo sapiens
  misc_RNA (1)...(19): siRNA sense strand
ggccaacugcccuuacauu

SEQ ID NO: 1471636 - RNA, 19 nt, Homo sapiens
  misc_RNA (1)...(19): siRNA sense strand
gccaacugcccuuacauug

SEQ ID NO: 1471637 - RNA, 19 nt, Homo sapiens
  misc_RNA (1)...(19): siRNA sense strand
ccaacugcccuuacauugu

SEQ ID NO: 1471638 - RNA, 19 nt, Homo sapiens
  misc_RNA (1)...(19): siRNA sense strand
gaaacacaucgaguauaug

SEQ ID NO: 1471639 - RNA, 19 nt, Homo sapiens
  misc_RNA (1)...(19): siRNA sense strand
uaucaucauuggccacagu

SEQ ID NO: 1471640 - RNA, 19 nt, Homo sapiens
  misc_RNA (1)...(19): siRNA sense strand
caugaacugauuacuguug

SEQ ID NO: 1471641 - RNA, 19 nt, Homo sapiens
  misc_RNA (1)...(19): siRNA sense strand
aaacacaucgaguauaugc

SEQ ID NO: 1471642 - RNA, 19 nt, Homo sapiens
  misc_RNA (1)...(19): siRNA sense strand
ugcagaaacacaucgagua

SEQ ID NO: 1471643 - RNA, 19 nt, Homo sapiens
  misc_RNA (1)...(19): siRNA sense strand
cacugacuguggccacuuu

SEQ ID NO: 1471644 - RNA, 19 nt, Homo sapiens
  misc_RNA (1)...(19): siRNA sense strand
aacaugcccgacccaauua

SEQ ID NO: 1471645 - RNA, 19 nt, Homo sapiens
  misc_RNA (1)...(19): siRNA sense strand
uagcaaggcagugauuguu

SEQ ID NO: 1471646 - RNA, 19 nt, Homo sapiens
  misc_RNA (1)...(19): siRNA sense strand
ggagaagauaccugguuuc

SEQ ID NO: 1471647 - RNA, 19 nt, Homo sapiens
  misc_RNA (1)...(19): siRNA sense strand
gaaaaugagcgugcaagug

SEQ ID NO: 1471648 - RNA, 19 nt, Homo sapiens
  misc_RNA (1)...(19): siRNA sense strand
ggccaugagguaugcagaa

SEQ ID NO: 1471649 - RNA, 19 nt, Homo sapiens
  misc_RNA (1)...(19): siRNA sense strand
gacuguggccacuuucaga

SEQ ID NO: 1471650 - RNA, 19 nt, Homo sapiens
  misc_RNA (1)...(19): siRNA sense strand
gcugcacugugaugagaag

SEQ ID NO: 1471651 - RNA, 19 nt, Homo sapiens
  misc_RNA (1)...(19): siRNA sense strand
gagaagauaccugguuucc

SEQ ID NO: 1471652 - RNA, 19 nt, Homo sapiens
  misc_RNA (1)...(19): siRNA sense strand
cagaacacagaguuucaug

SEQ ID NO: 1471653 - RNA, 19 nt, Homo sapiens
  misc_RNA (1)...(19): siRNA sense strand
gaagaucacuacaacaauu

SEQ ID NO: 1471654 - RNA, 19 nt, Homo sapiens
  misc_RNA (1)...(19): siRNA sense strand
caugaaagcugccuuggaa

SEQ ID NO: 1471655 - RNA, 19 nt, Homo sapiens
  misc_RNA (1)...(19): siRNA sense strand
gaagaaccaugaggaggaa

SEQ ID NO: 1471656 - RNA, 19 nt, Homo sapiens
  misc_RNA (1)...(19): siRNA sense strand
gagcccagcuggcgcauau

SEQ ID NO: 1471657 - RNA, 19 nt, Homo sapiens
  misc_RNA (1)...(19): siRNA sense strand
gcagaugacuuccgaacca

SEQ ID NO: 1471658 - RNA, 19 nt, Homo sapiens
  misc_RNA (1)...(19): siRNA sense strand
gaacaggcucugcgcauga

SEQ ID NO: 1471659 - RNA, 19 nt, Homo sapiens
  misc_RNA (1)...(19): siRNA sense strand
ggaccgaccuggagaugca

SEQ ID NO: 1471660 - RNA, 19 nt, Homo sapiens
  misc_RNA (1)...(19): siRNA sense strand
gagcuggccuaccugaaga

SEQ ID NO: 1471661 - RNA, 19 nt, Homo sapiens
  misc_RNA (1)...(19): siRNA sense strand
cagccggacugaagaauug

SEQ ID NO: 1471662 - RNA, 19 nt, Homo sapiens
  misc_RNA (1)...(19): siRNA sense strand
gaagacacacuggcagaaa

SEQ ID NO: 1471663 - RNA, 19 nt, Homo sapiens
  misc_RNA (1)...(19): siRNA sense strand
uggccuaccugaagaagaa

SEQ ID NO: 1471664 - RNA, 19 nt, Homo sapiens
  misc_RNA (1)...(19): siRNA sense strand
ucgaaggccugaaggaaga

SEQ ID NO: 1471665 - RNA, 19 nt, Homo sapiens
  misc_RNA (1)...(19): siRNA sense strand
agauugagcugcagucaca

SEQ ID NO: 1471666 - RNA, 19 nt, Homo sapiens
  misc_RNA (1)...(19): siRNA sense strand
auugagaacuccaggauug

SEQ ID NO: 1471667 - RNA, 19 nt, Homo sapiens
  misc_RNA (1)...(19): siRNA sense strand
ucgccaagauccugaguga

SEQ ID NO: 1471668 - RNA, 19 nt, Homo sapiens
  misc_RNA (1)...(19): siRNA sense strand
gaucgaaggccugaaggaa

SEQ ID NO: 1471669 - RNA, 19 nt, Homo sapiens
  misc_RNA (1)...(19): siRNA sense strand
gccaagauccugagugaca

SEQ ID NO: 1471670 - RNA, 19 nt, Homo sapiens
  misc_RNA (1)...(19): siRNA sense strand
ggaagaucacuacaacaau

SEQ ID NO: 1471671 - RNA, 19 nt, Homo sapiens
  misc_RNA (1)...(19): siRNA sense strand
acaggaagaucacuacaac

SEQ ID NO: 1471672 - RNA, 19 nt, Homo sapiens
  misc_RNA (1)...(19): siRNA sense strand
agucacagcugagcaugaa

SEQ ID NO: 1471673 - RNA, 19 nt, Homo sapiens
  misc_RNA (1)...(19): siRNA sense strand
ugaaagcugccuuggaaga

SEQ ID NO: 1471674 - RNA, 19 nt, Homo sapiens
  misc_RNA (1)...(19): siRNA sense strand
ggaagacacacuggcagaa

SEQ ID NO: 1471675 - RNA, 19 nt, Homo sapiens
  misc_RNA (1)...(19): siRNA sense strand
gcagguccgagguuacuga

SEQ ID NO: 1471676 - RNA, 19 nt, Homo sapiens
  misc_RNA (1)...(19): siRNA sense strand
ggauuguccugcagaucga

SEQ ID NO: 1471677 - RNA, 19 nt, Homo sapiens
  misc_RNA (1)...(19): siRNA sense strand
gacaggaagaucacuacaa

SEQ ID NO: 1471678 - RNA, 19 nt, Homo sapiens
  misc_RNA (1)...(19): siRNA sense strand
gcagaucgaaggccugaag

SEQ ID NO: 1471679 - RNA, 19 nt, Homo sapiens
  misc_RNA (1)...(19): siRNA sense strand
gcaacgagaagcuaaccau

SEQ ID NO: 1471680 - RNA, 19 nt, Homo sapiens
  misc_RNA (1)...(19): siRNA sense strand
agcaggagauugccaccua

SEQ ID NO: 1471681 - RNA, 19 nt, Homo sapiens
  misc_RNA (1)...(19): siRNA sense strand
gcaugaaagcugccuugga

SEQ ID NO: 1471682 - RNA, 19 nt, Homo sapiens
  misc_RNA (1)...(19): siRNA sense strand
ggaccugcgggacaagauu

SEQ ID NO: 1471683 - RNA, 19 nt, Homo sapiens
  misc_RNA (1)...(19): siRNA sense strand
gcgacuacagccacuacua

SEQ ID NO: 1471684 - RNA, 19 nt, Homo sapiens
  misc_RNA (1)...(19): siRNA sense strand
gaaccggaaggaugcugaa

SEQ ID NO: 1471685 - RNA, 19 nt, Homo sapiens
  misc_RNA (1)...(19): siRNA sense strand
gauagugagcggcagaauc

SEQ ID NO: 1471686 - RNA, 19 nt, Homo sapiens
  misc_RNA (1)...(19): siRNA sense strand
aggaagaucacuacaacaa

SEQ ID NO: 1471687 - RNA, 19 nt, Homo sapiens
  misc_RNA (1)...(19): siRNA sense strand
auagugagcggcagaauca

SEQ ID NO: 1471688 - RNA, 19 nt, Homo sapiens
  misc_RNA (1)...(19): siRNA sense strand
aggaagagcuggccuaccu

SEQ ID NO: 1471689 - RNA, 19 nt, Homo sapiens
  misc_RNA (1)...(19): siRNA sense strand
uucagggucuugagauuga

SEQ ID NO: 1471690 - RNA, 19 nt, Homo sapiens
  misc_RNA (1)...(19): siRNA sense strand
gacaugcgaagccaauaug

SEQ ID NO: 1471691 - RNA, 19 nt, Homo sapiens
  misc_RNA (1)...(19): siRNA sense strand
ugacaugcgaagccaauau

SEQ ID NO: 1471692 - RNA, 19 nt, Homo sapiens
  misc_RNA (1)...(19): siRNA sense strand
acgagaagcuaaccaugca

SEQ ID NO: 1471693 - RNA, 19 nt, Homo sapiens
  misc_RNA (1)...(19): siRNA sense strand
ugaagauccgcgacuggua

SEQ ID NO: 1471694 - RNA, 19 nt, Homo sapiens
  misc_RNA (1)...(19): siRNA sense strand
gaugagcagguccgagguu

SEQ ID NO: 1471695 - RNA, 19 nt, Homo sapiens
  misc_RNA (1)...(19): siRNA sense strand
cagaugacuuccgaaccaa

SEQ ID NO: 1471696 - RNA, 19 nt, Homo sapiens
  misc_RNA (1)...(19): siRNA sense strand
ggacaggaagaucacuaca

SEQ ID NO: 1471697 - RNA, 19 nt, Homo sapiens
  misc_RNA (1)...(19): siRNA sense strand
ccuucagggucuugagauu

SEQ ID NO: 1471698 - RNA, 19 nt, Homo sapiens
  misc_RNA (1)...(19): siRNA sense strand
gaaccaugaggaggaaauc

SEQ ID NO: 1471699 - RNA, 19 nt, Homo sapiens
  misc_RNA (1)...(19): siRNA sense strand
gaaagcugccuuggaagac

SEQ ID NO: 1471700 - RNA, 19 nt, Homo sapiens
  misc_RNA (1)...(19): siRNA sense strand
cgacuacagccacuacuac

SEQ ID NO: 1471701 - RNA, 19 nt, Homo sapiens
  misc_RNA (1)...(19): siRNA sense strand
augagcagguccgagguua

SEQ ID NO: 1471702 - RNA, 19 nt, Homo sapiens
  misc_RNA (1)...(19): siRNA sense strand
ccaagauccugagugacau

SEQ ID NO: 1471703 - RNA, 19 nt, Homo sapiens
  misc_RNA (1)...(19): siRNA sense strand
caugaggaggaaaucagua

SEQ ID NO: 1471704 - RNA, 19 nt, Homo sapiens
  misc_RNA (1)...(19): siRNA sense strand
ggucauggccgagcagaac

SEQ ID NO: 1471705 - RNA, 19 nt, Homo sapiens
  misc_RNA (1)...(19): siRNA sense strand
aaagcugccuuggaagaca

SEQ ID NO: 1471706 - RNA, 19 nt, Homo sapiens
  misc_RNA (1)...(19): siRNA sense strand
gaagcuaaccaugcagaac

SEQ ID NO: 1471707 - RNA, 19 nt, Homo sapiens
  misc_RNA (1)...(19): siRNA sense strand
ccagccggacugaagaauu

SEQ ID NO: 1471708 - RNA, 19 nt, Homo sapiens
  misc_RNA (1)...(19): siRNA sense strand
gcgggcaacgagaagcuaa

SEQ ID NO: 1471709 - RNA, 19 nt, Homo sapiens
  misc_RNA (1)...(19): siRNA sense strand
ggcgaugugcgagcugaua

SEQ ID NO: 1471710 - RNA, 19 nt, Homo sapiens
  misc_RNA (1)...(19): siRNA sense strand
gagcagguccgagguuacu

SEQ ID NO: 1471711 - RNA, 19 nt, Homo sapiens
  misc_RNA (1)...(19): siRNA sense strand
gaacugagcagccaggaua

SEQ ID NO: 1471712 - RNA, 19 nt, Homo sapiens
  misc_RNA (1)...(19): siRNA sense strand
aaaccuggcuugaaguaua

SEQ ID NO: 1471713 - RNA, 19 nt, Homo sapiens
  misc_RNA (1)...(19): siRNA sense strand
uggaagagcugguggauga

SEQ ID NO: 1471714 - RNA, 19 nt, Homo sapiens
  misc_RNA (1)...(19): siRNA sense strand
gcaaugugguucccaguga

SEQ ID NO: 1471715 - RNA, 19 nt, Homo sapiens
  misc_RNA (1)...(19): siRNA sense strand
aaacaaaccuggcuugaag

SEQ ID NO: 1471716 - RNA, 19 nt, Homo sapiens
  misc_RNA (1)...(19): siRNA sense strand
guaccucccacaaggauua

SEQ ID NO: 1471717 - RNA, 19 nt, Homo sapiens
  misc_RNA (1)...(19): siRNA sense strand
gagggucugugccuuguug

SEQ ID NO: 1471718 - RNA, 19 nt, Homo sapiens
  misc_RNA (1)...(19): siRNA sense strand
aguauaagccugcaguuaa

SEQ ID NO: 1471719 - RNA, 19 nt, Homo sapiens
  misc_RNA (1)...(19): siRNA sense strand
uaaggucuuugacuuugaa

SEQ ID NO: 1471720 - RNA, 19 nt, Homo sapiens
  misc_RNA (1)...(19): siRNA sense strand
gcaguuaaccagauugagu

SEQ ID NO: 1471721 - RNA, 19 nt, Homo sapiens
  misc_RNA (1)...(19): siRNA sense strand
guauaagccugcaguuaac

SEQ ID NO: 1471722 - RNA, 19 nt, Homo sapiens
  misc_RNA (1)...(19): siRNA sense strand
gaagggcuggugaaagcua

SEQ ID NO: 1471723 - RNA, 19 nt, Homo sapiens
  misc_RNA (1)...(19): siRNA sense strand
cagaacgcauugcugagaa

SEQ ID NO: 1471724 - RNA, 19 nt, Homo sapiens
  misc_RNA (1)...(19): siRNA sense strand
gcauugcugagaacuuuaa

SEQ ID NO: 1471725 - RNA, 19 nt, Homo sapiens
  misc_RNA (1)...(19): siRNA sense strand
acgcauugcugagaacuuu

SEQ ID NO: 1471726 - RNA, 19 nt, Homo sapiens
  misc_RNA (1)...(19): siRNA sense strand
aggagaaguuaauccagua

SEQ ID NO: 1471727 - RNA, 19 nt, Homo sapiens
  misc_RNA (1)...(19): siRNA sense strand
uaaacaaaccuggcuugaa

SEQ ID NO: 1471728 - RNA, 19 nt, Homo sapiens
  misc_RNA (1)...(19): siRNA sense strand
aaccuggcuugaaguauaa

SEQ ID NO: 1471729 - RNA, 19 nt, Homo sapiens
  misc_RNA (1)...(19): siRNA sense strand
ccgugaagguggccauuga

SEQ ID NO: 1471730 - RNA, 19 nt, Homo sapiens
  misc_RNA (1)...(19): siRNA sense strand
uaccuggaccucuaccuua

SEQ ID NO: 1471731 - RNA, 19 nt, Homo sapiens
  misc_RNA (1)...(19): siRNA sense strand
gcccauguguaccagaaug

SEQ ID NO: 1471732 - RNA, 19 nt, Homo sapiens
  misc_RNA (1)...(19): siRNA sense strand
ugagaacuuuaaggucuuu

SEQ ID NO: 1471733 - RNA, 19 nt, Homo sapiens
  misc_RNA (1)...(19): siRNA sense strand
uggacuaccuggaccucua

SEQ ID NO: 1471734 - RNA, 19 nt, Homo sapiens
  misc_RNA (1)...(19): siRNA sense strand
ggaugaagggcuggugaaa

SEQ ID NO: 1471735 - RNA, 19 nt, Homo sapiens
  misc_RNA (1)...(19): siRNA sense strand
gaaguauaagccugcaguu

SEQ ID NO: 1471736 - RNA, 19 nt, Homo sapiens
  misc_RNA (1)...(19): siRNA sense strand
acaaaccuggcuugaagua

SEQ ID NO: 1471737 - RNA, 19 nt, Homo sapiens
  misc_RNA (1)...(19): siRNA sense strand
uuuaaggucuuugacuuug

SEQ ID NO: 1471738 - RNA, 19 nt, Homo sapiens
  misc_RNA (1)...(19): siRNA sense strand
caucgacugugcccaugug

SEQ ID NO: 1471739 - RNA, 19 nt, Homo sapiens
  misc_RNA (1)...(19): siRNA sense strand
uuaaggucuuugacuuuga

SEQ ID NO: 1471740 - RNA, 19 nt, Homo sapiens
  misc_RNA (1)...(19): siRNA sense strand
ugacugaggccgugaaggu

SEQ ID NO: 1471741 - RNA, 19 nt, Homo sapiens
  misc_RNA (1)...(19): siRNA sense strand
ccagaacgcauugcugaga

SEQ ID NO: 1471742 - RNA, 19 nt, Homo sapiens
  misc_RNA (1)...(19): siRNA sense strand
ucagggagcagguggugaa

SEQ ID NO: 1471743 - RNA, 19 nt, Homo sapiens
  misc_RNA (1)...(19): siRNA sense strand
ucgcagccaagcacaauaa

SEQ ID NO: 1471744 - RNA, 19 nt, Homo sapiens
  misc_RNA (1)...(19): siRNA sense strand
gaucgcagccaagcacaau

SEQ ID NO: 1471745 - RNA, 19 nt, Homo sapiens
  misc_RNA (1)...(19): siRNA sense strand
ucacucaggagaaguuaau

SEQ ID NO: 1471746 - RNA, 19 nt, Homo sapiens
  misc_RNA (1)...(19): siRNA sense strand
aaguauaagccugcaguua

SEQ ID NO: 1471747 - RNA, 19 nt, Homo sapiens
  misc_RNA (1)...(19): siRNA sense strand
gugcccauguguaccagaa

SEQ ID NO: 1471748 - RNA, 19 nt, Homo sapiens
  misc_RNA (1)...(19): siRNA sense strand
ggguggccauucaggagaa

SEQ ID NO: 1471749 - RNA, 19 nt, Homo sapiens
  misc_RNA (1)...(19): siRNA sense strand
agaaguuaauccaguacug

SEQ ID NO: 1471750 - RNA, 19 nt, Homo sapiens
  misc_RNA (1)...(19): siRNA sense strand
cgacugugcccauguguac

SEQ ID NO: 1471751 - RNA, 19 nt, Homo sapiens
  misc_RNA (1)...(19): siRNA sense strand
acuuuaaggucuuugacuu

SEQ ID NO: 1471752 - RNA, 19 nt, Homo sapiens
  misc_RNA (1)...(19): siRNA sense strand
caagccgucuccugcucaa

SEQ ID NO: 1471753 - RNA, 19 nt, Homo sapiens
  misc_RNA (1)...(19): siRNA sense strand
gauugagugccacccauau

SEQ ID NO: 1471754 - RNA, 19 nt, Homo sapiens
  misc_RNA (1)...(19): siRNA sense strand
ggucuuugacuuugaacug

SEQ ID NO: 1471755 - RNA, 19 nt, Homo sapiens
  misc_RNA (1)...(19): siRNA sense strand
ccagugacaccaacauucu

SEQ ID NO: 1471756 - RNA, 19 nt, Homo sapiens
  misc_RNA (1)...(19): siRNA sense strand
gaagagcugguggaugaag

SEQ ID NO: 1471757 - RNA, 19 nt, Homo sapiens
  misc_RNA (1)...(19): siRNA sense strand
gagcuguaccucccacaag

SEQ ID NO: 1471758 - RNA, 19 nt, Homo sapiens
  misc_RNA (1)...(19): siRNA sense strand
gucuuugacuuugaacuga

SEQ ID NO: 1471759 - RNA, 19 nt, Homo sapiens
  misc_RNA (1)...(19): siRNA sense strand
ugaaagcuauuggcaucuc

SEQ ID NO: 1471760 - RNA, 19 nt, Homo sapiens
  misc_RNA (1)...(19): siRNA sense strand
cuggaccucuaccuuauuc

SEQ ID NO: 1471761 - RNA, 19 nt, Homo sapiens
  misc_RNA (1)...(19): siRNA sense strand
gaugaagggcuggugaaag

SEQ ID NO: 1471762 - RNA, 19 nt, Homo sapiens
  misc_RNA (1)...(19): siRNA sense strand
ggaugagucgggcaaugug

SEQ ID NO: 1471763 - RNA, 19 nt, Homo sapiens
  misc_RNA (1)...(19): siRNA sense strand
ucacuggccgacuggcuuu

SEQ ID NO: 1471764 - RNA, 19 nt, Homo sapiens
  misc_RNA (1)...(19): siRNA sense strand
augaagggcuggugaaagc

SEQ ID NO: 1471765 - RNA, 19 nt, Homo sapiens
  misc_RNA (1)...(19): siRNA sense strand
gaacuuuaaggucuuugac

SEQ ID NO: 1471766 - RNA, 19 nt, Homo sapiens
  misc_RNA (1)...(19): siRNA sense strand
guaccagaaugagaaugag

SEQ ID NO: 1471767 - RNA, 19 nt, Homo sapiens
  misc_RNA (1)...(19): siRNA sense strand
uguaccagaaugagaauga

SEQ ID NO: 1471768 - RNA, 19 nt, Homo sapiens
  misc_RNA (1)...(19): siRNA sense strand
gccugcaguuaaccagauu

SEQ ID NO: 1471769 - RNA, 19 nt, Homo sapiens
  misc_RNA (1)...(19): siRNA sense strand
gagugccacccauaucuca

SEQ ID NO: 1471770 - RNA, 19 nt, Homo sapiens
  misc_RNA (1)...(19): siRNA sense strand
uuaaacaaaccuggcuuga

SEQ ID NO: 1471771 - RNA, 19 nt, Homo sapiens
  misc_RNA (1)...(19): siRNA sense strand
cuuuaaggucuuugacuuu

SEQ ID NO: 1471772 - RNA, 19 nt, Homo sapiens
  misc_RNA (1)...(19): siRNA sense strand
cugagaacuuuaaggucuu

SEQ ID NO: 1471773 - RNA, 19 nt, Homo sapiens
  misc_RNA (1)...(19): siRNA sense strand
cuacaaggcugaacucuuu

SEQ ID NO: 1471774 - RNA, 19 nt, Homo sapiens
  misc_RNA (1)...(19): siRNA sense strand
ccaagaaccugaccauaga

SEQ ID NO: 1471775 - RNA, 19 nt, Homo sapiens
  misc_RNA (1)...(19): siRNA sense strand
gaauuucucucuauugauc

SEQ ID NO: 1471776 - RNA, 19 nt, Homo sapiens
  misc_RNA (1)...(19): siRNA sense strand
ggacacacaugcuggacaa

SEQ ID NO: 1471777 - RNA, 19 nt, Homo sapiens
  misc_RNA (1)...(19): siRNA sense strand
gacaauggcucugcgguuu

SEQ ID NO: 1471778 - RNA, 19 nt, Homo sapiens
  misc_RNA (1)...(19): siRNA sense strand
caugauaccuucccagaug

SEQ ID NO: 1471779 - RNA, 19 nt, Homo sapiens
  misc_RNA (1)...(19): siRNA sense strand
gcucugcgguuuccacaaa

SEQ ID NO: 1471780 - RNA, 19 nt, Homo sapiens
  misc_RNA (1)...(19): siRNA sense strand
gugaauuucucucuauuga

SEQ ID NO: 1471781 - RNA, 19 nt, Homo sapiens
  misc_RNA (1)...(19): siRNA sense strand
uaaccugccucaccaucua

SEQ ID NO: 1471782 - RNA, 19 nt, Homo sapiens
  misc_RNA (1)...(19): siRNA sense strand
caacauucgucaucuacug

SEQ ID NO: 1471783 - RNA, 19 nt, Homo sapiens
  misc_RNA (1)...(19): siRNA sense strand
ucagaaagguggccaggau

SEQ ID NO: 1471784 - RNA, 19 nt, Homo sapiens
  misc_RNA (1)...(19): siRNA sense strand
cccgguggcugauuauuaa

SEQ ID NO: 1471785 - RNA, 19 nt, Homo sapiens
  misc_RNA (1)...(19): siRNA sense strand
gaugacagcagauggcauu

SEQ ID NO: 1471786 - RNA, 19 nt, Homo sapiens
  misc_RNA (1)...(19): siRNA sense strand
gaaagguggccaggauaaa

SEQ ID NO: 1471787 - RNA, 19 nt, Homo sapiens
  misc_RNA (1)...(19): siRNA sense strand
ggcguuaucuccauugcuu

SEQ ID NO: 1471788 - RNA, 19 nt, Homo sapiens
  misc_RNA (1)...(19): siRNA sense strand
gcccgguggcugauuauua

SEQ ID NO: 1471789 - RNA, 19 nt, Homo sapiens
  misc_RNA (1)...(19): siRNA sense strand
ccauagaggugcugauguc

SEQ ID NO: 1471790 - RNA, 19 nt, Homo sapiens
  misc_RNA (1)...(19): siRNA sense strand
gccaagaaccugaccauag

SEQ ID NO: 1471791 - RNA, 19 nt, Homo sapiens
  misc_RNA (1)...(19): siRNA sense strand
cuauugaucuccuacuaug

SEQ ID NO: 1471792 - RNA, 19 nt, Homo sapiens
  misc_RNA (1)...(19): siRNA sense strand
caggauaaauggccacaag

SEQ ID NO: 1471793 - RNA, 19 nt, Homo sapiens
  misc_RNA (1)...(19): siRNA sense strand
ggauaaauggccacaagga

SEQ ID NO: 1471794 - RNA, 19 nt, Homo sapiens
  misc_RNA (1)...(19): siRNA sense strand
gguggugaauuucucucua

SEQ ID NO: 1471795 - RNA, 19 nt, Homo sapiens
  misc_RNA (1)...(19): siRNA sense strand
ccaugcugguggugaauuu

SEQ ID NO: 1471796 - RNA, 19 nt, Homo sapiens
  misc_RNA (1)...(19): siRNA sense strand
guggugaauuucucucuau

SEQ ID NO: 1471797 - RNA, 19 nt, Homo sapiens
  misc_RNA (1)...(19): siRNA sense strand
gccggcaucuuucugaguu

SEQ ID NO: 1471798 - RNA, 19 nt, Homo sapiens
  misc_RNA (1)...(19): siRNA sense strand
cagcaucagugcccuucuu

SEQ ID NO: 1471799 - RNA, 19 nt, Homo sapiens
  misc_RNA (1)...(19): siRNA sense strand
gggcaaaccagaccaagca

SEQ ID NO: 1471800 - RNA, 19 nt, Homo sapiens
  misc_RNA (1)...(19): siRNA sense strand
aaagggauguuuugggaua

SEQ ID NO: 1471801 - RNA, 19 nt, Homo sapiens
  misc_RNA (1)...(19): siRNA sense strand
ggcaagaggccgucacugu

SEQ ID NO: 1471802 - RNA, 19 nt, Homo sapiens
  misc_RNA (1)...(19): siRNA sense strand
ggaaaguaccucgcucuag

SEQ ID NO: 1471803 - RNA, 19 nt, Homo sapiens
  misc_RNA (1)...(19): siRNA sense strand
ugaguucacugacacugau

SEQ ID NO: 1471804 - RNA, 19 nt, Homo sapiens
  misc_RNA (1)...(19): siRNA sense strand
agaaagguggccaggauaa

SEQ ID NO: 1471805 - RNA, 19 nt, Homo sapiens
  misc_RNA (1)...(19): siRNA sense strand
caaaccagaccaagcacuu

SEQ ID NO: 1471806 - RNA, 19 nt, Homo sapiens
  misc_RNA (1)...(19): siRNA sense strand
gcgccaugcugguggugaa

SEQ ID NO: 1471807 - RNA, 19 nt, Homo sapiens
  misc_RNA (1)...(19): siRNA sense strand
cagaaagguggccaggaua

SEQ ID NO: 1471808 - RNA, 19 nt, Homo sapiens
  misc_RNA (1)...(19): siRNA sense strand
ggacuuccgcucccugaca

SEQ ID NO: 1471809 - RNA, 19 nt, Homo sapiens
  misc_RNA (1)...(19): siRNA sense strand
gaccauagaggugcugaug

SEQ ID NO: 1471810 - RNA, 19 nt, Homo sapiens
  misc_RNA (1)...(19): siRNA sense strand
gcacuucaggagcucagaa

SEQ ID NO: 1471811 - RNA, 19 nt, Homo sapiens
  misc_RNA (1)...(19): siRNA sense strand
ggugaauuucucucuauug

SEQ ID NO: 1471812 - RNA, 19 nt, Homo sapiens
  misc_RNA (1)...(19): siRNA sense strand
cuggugggcuccuuuaucu

SEQ ID NO: 1471813 - RNA, 19 nt, Homo sapiens
  misc_RNA (1)...(19): siRNA sense strand
ggccgucacuguggaaagu

SEQ ID NO: 1471814 - RNA, 19 nt, Homo sapiens
  misc_RNA (1)...(19): siRNA sense strand
ccucuccucuauggcguua

SEQ ID NO: 1471815 - RNA, 19 nt, Homo sapiens
  misc_RNA (1)...(19): siRNA sense strand
caccgaugcuggacacaca

SEQ ID NO: 1471816 - RNA, 19 nt, Homo sapiens
  misc_RNA (1)...(19): siRNA sense strand
acuaugggcuggucuucga

SEQ ID NO: 1471817 - RNA, 19 nt, Homo sapiens
  misc_RNA (1)...(19): siRNA sense strand
gcuggugccgcaagauuug

SEQ ID NO: 1471818 - RNA, 19 nt, Homo sapiens
  misc_RNA (1)...(19): siRNA sense strand
cacacaugcuggacaaugg

SEQ ID NO: 1471819 - RNA, 19 nt, Homo sapiens
  misc_RNA (1)...(19): siRNA sense strand
cuaagccaguccaucuuca

SEQ ID NO: 1471820 - RNA, 19 nt, Homo sapiens
  misc_RNA (1)...(19): siRNA sense strand
gccaguccaucuucauguc

SEQ ID NO: 1471821 - RNA, 19 nt, Homo sapiens
  misc_RNA (1)...(19): siRNA sense strand
ggagagccagaaaucaaca

SEQ ID NO: 1471822 - RNA, 19 nt, Homo sapiens
  misc_RNA (1)...(19): siRNA sense strand
ggccaagaaccugaccaua

SEQ ID NO: 1471823 - RNA, 19 nt, Homo sapiens
  misc_RNA (1)...(19): siRNA sense strand
gauccuggugggcuccuuu

SEQ ID NO: 1471824 - RNA, 19 nt, Homo sapiens
  misc_RNA (1)...(19): siRNA sense strand
gccacaaggaggccaagaa

SEQ ID NO: 1471825 - RNA, 19 nt, Homo sapiens
  misc_RNA (1)...(19): siRNA sense strand
aaagguggccaggauaaau

SEQ ID NO: 1471826 - RNA, 19 nt, Homo sapiens
  misc_RNA (1)...(19): siRNA sense strand
caucagugcccuucuuugc

SEQ ID NO: 1471827 - RNA, 19 nt, Homo sapiens
  misc_RNA (1)...(19): siRNA sense strand
ccacaaggaggccaagaac

SEQ ID NO: 1471828 - RNA, 19 nt, Homo sapiens
  misc_RNA (1)...(19): siRNA sense strand
guggacggcugggucuaug

SEQ ID NO: 1471829 - RNA, 19 nt, Homo sapiens
  misc_RNA (1)...(19): siRNA sense strand
uggugaauuucucucuauu

SEQ ID NO: 1471830 - RNA, 19 nt, Homo sapiens
  misc_RNA (1)...(19): siRNA sense strand
ccuccucuccuaccgguuu

SEQ ID NO: 1471831 - RNA, 19 nt, Homo sapiens
  misc_RNA (1)...(19): siRNA sense strand
gcugccuccucuccucuau

SEQ ID NO: 1471832 - RNA, 19 nt, Homo sapiens
  misc_RNA (1)...(19): siRNA sense strand
ccugggccgugacaucuuc

SEQ ID NO: 1471833 - RNA, 19 nt, Homo sapiens
  misc_RNA (1)...(19): siRNA sense strand
gcaucagugcccuucuuug

SEQ ID NO: 1471834 - RNA, 19 nt, Homo sapiens
  misc_RNA (1)...(19): siRNA sense strand
cucuauugaucuccuacua

SEQ ID NO: 1471835 - RNA, 19 nt, Homo sapiens
  misc_RNA (1)...(19): siRNA sense strand
ggacugaggugaucaagua

SEQ ID NO: 1471836 - RNA, 19 nt, Homo sapiens
  misc_RNA (1)...(19): siRNA sense strand
ggaagaagaagaacuauaa

SEQ ID NO: 1471837 - RNA, 19 nt, Homo sapiens
  misc_RNA (1)...(19): siRNA sense strand
gcaggaggcuggacaagaa

SEQ ID NO: 1471838 - RNA, 19 nt, Homo sapiens
  misc_RNA (1)...(19): siRNA sense strand
gaaggucucccaugaguuu

SEQ ID NO: 1471839 - RNA, 19 nt, Homo sapiens
  misc_RNA (1)...(19): siRNA sense strand
gggaagggcuugauuacga

SEQ ID NO: 1471840 - RNA, 19 nt, Homo sapiens
  misc_RNA (1)...(19): siRNA sense strand
gcagauggaucgaguacga

SEQ ID NO: 1471841 - RNA, 19 nt, Homo sapiens
  misc_RNA (1)...(19): siRNA sense strand
ggacagaaaccgcgaucaa

SEQ ID NO: 1471842 - RNA, 19 nt, Homo sapiens
  misc_RNA (1)...(19): siRNA sense strand
cgacagugauaagauguuu

SEQ ID NO: 1471843 - RNA, 19 nt, Homo sapiens
  misc_RNA (1)...(19): siRNA sense strand
gcucagguguggaugguau

SEQ ID NO: 1471844 - RNA, 19 nt, Homo sapiens
  misc_RNA (1)...(19): siRNA sense strand
ggaagggcuugauuacgau

SEQ ID NO: 1471845 - RNA, 19 nt, Homo sapiens
  misc_RNA (1)...(19): siRNA sense strand
ccaagaagcagaggaagaa

SEQ ID NO: 1471846 - RNA, 19 nt, Homo sapiens
  misc_RNA (1)...(19): siRNA sense strand
cauguucaccguuggaaua

SEQ ID NO: 1471847 - RNA, 19 nt, Homo sapiens
  misc_RNA (1)...(19): siRNA sense strand
ccacaggacugaggugauc

SEQ ID NO: 1471848 - RNA, 19 nt, Homo sapiens
  misc_RNA (1)...(19): siRNA sense strand
aaagagaccuuggccaaag

SEQ ID NO: 1471849 - RNA, 19 nt, Homo sapiens
  misc_RNA (1)...(19): siRNA sense strand
cuacgacagugauaagaug

SEQ ID NO: 1471850 - RNA, 19 nt, Homo sapiens
  misc_RNA (1)...(19): siRNA sense strand
caagauaaaccgagacuac

SEQ ID NO: 1471851 - RNA, 19 nt, Homo sapiens
  misc_RNA (1)...(19): siRNA sense strand
gcacgaucgucuccagcaa

SEQ ID NO: 1471852 - RNA, 19 nt, Homo sapiens
  misc_RNA (1)...(19): siRNA sense strand
gcaguucguucccuuucga

SEQ ID NO: 1471853 - RNA, 19 nt, Homo sapiens
  misc_RNA (1)...(19): siRNA sense strand
gugcaguauuucaagcaua

SEQ ID NO: 1471854 - RNA, 19 nt, Homo sapiens
  misc_RNA (1)...(19): siRNA sense strand
ggucaugugcuacgacuau

SEQ ID NO: 1471855 - RNA, 19 nt, Homo sapiens
  misc_RNA (1)...(19): siRNA sense strand
ugcaguauuucaagcauaa

SEQ ID NO: 1471856 - RNA, 19 nt, Homo sapiens
  misc_RNA (1)...(19): siRNA sense strand
cuacuggaccgggauguua

SEQ ID NO: 1471857 - RNA, 19 nt, Homo sapiens
  misc_RNA (1)...(19): siRNA sense strand
ccucgacccuuccucuuug

SEQ ID NO: 1471858 - RNA, 19 nt, Homo sapiens
  misc_RNA (1)...(19): siRNA sense strand
gaauaucugucggccaucu

SEQ ID NO: 1471859 - RNA, 19 nt, Homo sapiens
  misc_RNA (1)...(19): siRNA sense strand
agaggaagaagaagaacua

SEQ ID NO: 1471860 - RNA, 19 nt, Homo sapiens
  misc_RNA (1)...(19): siRNA sense strand
ggacggccacgcaguacuu

SEQ ID NO: 1471861 - RNA, 19 nt, Homo sapiens
  misc_RNA (1)...(19): siRNA sense strand
acuggaaggucucccauga

SEQ ID NO: 1471862 - RNA, 19 nt, Homo sapiens
  misc_RNA (1)...(19): siRNA sense strand
cugcgauccugcaagauaa

SEQ ID NO: 1471863 - RNA, 19 nt, Homo sapiens
  misc_RNA (1)...(19): siRNA sense strand
ggacuacgacagugauaag

SEQ ID NO: 1471864 - RNA, 19 nt, Homo sapiens
  misc_RNA (1)...(19): siRNA sense strand
agaaguucgugcuugacua

SEQ ID NO: 1471865 - RNA, 19 nt, Homo sapiens
  misc_RNA (1)...(19): siRNA sense strand
gcagaucauucaggacuac

SEQ ID NO: 1471866 - RNA, 19 nt, Homo sapiens
  misc_RNA (1)...(19): siRNA sense strand
ccauccaggucaugugcua

SEQ ID NO: 1471867 - RNA, 19 nt, Homo sapiens
  misc_RNA (1)...(19): siRNA sense strand
uggaaggucucccaugagu

SEQ ID NO: 1471868 - RNA, 19 nt, Homo sapiens
  misc_RNA (1)...(19): siRNA sense strand
ccugcgauccugcaagaua

SEQ ID NO: 1471869 - RNA, 19 nt, Homo sapiens
  misc_RNA (1)...(19): siRNA sense strand
cagaaaccgcgaucaacaa

SEQ ID NO: 1471870 - RNA, 19 nt, Homo sapiens
  misc_RNA (1)...(19): siRNA sense strand
ucuacgguccuaccaauuu

SEQ ID NO: 1471871 - RNA, 19 nt, Homo sapiens
  misc_RNA (1)...(19): siRNA sense strand
ggcagaucauucaggacua

SEQ ID NO: 1471872 - RNA, 19 nt, Homo sapiens
  misc_RNA (1)...(19): siRNA sense strand
agaagcagaggaagaagaa

SEQ ID NO: 1471873 - RNA, 19 nt, Homo sapiens
  misc_RNA (1)...(19): siRNA sense strand
gaaguucgugcuugacuac

SEQ ID NO: 1471874 - RNA, 19 nt, Homo sapiens
  misc_RNA (1)...(19): siRNA sense strand
gagacuacuccuuccuuga

SEQ ID NO: 1471875 - RNA, 19 nt, Homo sapiens
  misc_RNA (1)...(19): siRNA sense strand
ggaccucuuugggaaguca

SEQ ID NO: 1471876 - RNA, 19 nt, Homo sapiens
  misc_RNA (1)...(19): siRNA sense strand
gcuacgacuaugacaauga

SEQ ID NO: 1471877 - RNA, 19 nt, Homo sapiens
  misc_RNA (1)...(19): siRNA sense strand
cuacgguccuaccaauuuc

SEQ ID NO: 1471878 - RNA, 19 nt, Homo sapiens
  misc_RNA (1)...(19): siRNA sense strand
cgacaaccgcgucaucaca

SEQ ID NO: 1471879 - RNA, 19 nt, Homo sapiens
  misc_RNA (1)...(19): siRNA sense strand
caaguugugcaguauuuca

SEQ ID NO: 1471880 - RNA, 19 nt, Homo sapiens
  misc_RNA (1)...(19): siRNA sense strand
cccaugaguuugccaucaa

SEQ ID NO: 1471881 - RNA, 19 nt, Homo sapiens
  misc_RNA (1)...(19): siRNA sense strand
gugcuacgacuaugacaau

SEQ ID NO: 1471882 - RNA, 19 nt, Homo sapiens
  misc_RNA (1)...(19): siRNA sense strand
gaguacgacaggacagaaa

SEQ ID NO: 1471883 - RNA, 19 nt, Homo sapiens
  misc_RNA (1)...(19): siRNA sense strand
gaucgucuccagcaagaag

SEQ ID NO: 1471884 - RNA, 19 nt, Homo sapiens
  misc_RNA (1)...(19): siRNA sense strand
gcucaaguucgcgcucuuu

SEQ ID NO: 1471885 - RNA, 19 nt, Homo sapiens
  misc_RNA (1)...(19): siRNA sense strand
acagaaaccgcgaucaaca

SEQ ID NO: 1471886 - RNA, 19 nt, Homo sapiens
  misc_RNA (1)...(19): siRNA sense strand
ggaaggucucccaugaguu

SEQ ID NO: 1471887 - RNA, 19 nt, Homo sapiens
  misc_RNA (1)...(19): siRNA sense strand
gagaacaauggcagaugga

SEQ ID NO: 1471888 - RNA, 19 nt, Homo sapiens
  misc_RNA (1)...(19): siRNA sense strand
cuuccaagcugcccauguc

SEQ ID NO: 1471889 - RNA, 19 nt, Homo sapiens
  misc_RNA (1)...(19): siRNA sense strand
ccagcaagaagaucacuag

SEQ ID NO: 1471890 - RNA, 19 nt, Homo sapiens
  misc_RNA (1)...(19): siRNA sense strand
cuucuacgguccuaccaau

SEQ ID NO: 1471891 - RNA, 19 nt, Homo sapiens
  misc_RNA (1)...(19): siRNA sense strand
aagcagaggaagaagaaga

SEQ ID NO: 1471892 - RNA, 19 nt, Homo sapiens
  misc_RNA (1)...(19): siRNA sense strand
caaccgcgucaucacacua

SEQ ID NO: 1471893 - RNA, 19 nt, Homo sapiens
  misc_RNA (1)...(19): siRNA sense strand
ggccucugcugcugcugaa

SEQ ID NO: 1471894 - RNA, 19 nt, Homo sapiens
  misc_RNA (1)...(19): siRNA sense strand
ggaguucgagugcaucaac

SEQ ID NO: 1471895 - RNA, 19 nt, Homo sapiens
  misc_RNA (1)...(19): siRNA sense strand
guacuucauccuccucauc

SEQ ID NO: 1471896 - RNA, 19 nt, Homo sapiens
  misc_RNA (1)...(19): siRNA sense strand
gcccaggcguacucagcuu

SEQ ID NO: 1471897 - RNA, 19 nt, Homo sapiens
  misc_RNA (1)...(19): siRNA sense strand
uaugggcaccaacgaauau

SEQ ID NO: 1471898 - RNA, 19 nt, Homo sapiens
  misc_RNA (1)...(19): siRNA sense strand
cuaugggcaccaacgaaua

SEQ ID NO: 1471899 - RNA, 19 nt, Homo sapiens
  misc_RNA (1)...(19): siRNA sense strand
acgaucgucuccagcaaga

SEQ ID NO: 1471900 - RNA, 19 nt, Homo sapiens
  misc_RNA (1)...(19): siRNA sense strand
ugcacuauaucaacccuau

SEQ ID NO: 1471901 - RNA, 19 nt, Homo sapiens
  misc_RNA (1)...(19): siRNA sense strand
gcaagauaaaccgagacua

SEQ ID NO: 1471902 - RNA, 19 nt, Homo sapiens
  misc_RNA (1)...(19): siRNA sense strand
gcaagguggagcugucagu

SEQ ID NO: 1471903 - RNA, 19 nt, Homo sapiens
  misc_RNA (1)...(19): siRNA sense strand
aggaagaagaagaacuaua

SEQ ID NO: 1471904 - RNA, 19 nt, Homo sapiens
  misc_RNA (1)...(19): siRNA sense strand
cuacgacuaugacaaugac

SEQ ID NO: 1471905 - RNA, 19 nt, Homo sapiens
  misc_RNA (1)...(19): siRNA sense strand
aaaccgcgaucaacaaccu

SEQ ID NO: 1471906 - RNA, 19 nt, Homo sapiens
  misc_RNA (1)...(19): siRNA sense strand
agaccucagugucacagau

SEQ ID NO: 1471907 - RNA, 19 nt, Homo sapiens
  misc_RNA (1)...(19): siRNA sense strand
gcccauguccaucaucauc

SEQ ID NO: 1471908 - RNA, 19 nt, Homo sapiens
  misc_RNA (1)...(19): siRNA sense strand
cuuccucuuugcacuauau

SEQ ID NO: 1471909 - RNA, 19 nt, Homo sapiens
  misc_RNA (1)...(19): siRNA sense strand
guucaccguuggaauagac

SEQ ID NO: 1471910 - RNA, 19 nt, Homo sapiens
  misc_RNA (1)...(19): siRNA sense strand
caaguucgcgcucuuugac

SEQ ID NO: 1471911 - RNA, 19 nt, Homo sapiens
  misc_RNA (1)...(19): siRNA sense strand
gcuguugggcagaucauuc

SEQ ID NO: 1471912 - RNA, 19 nt, Homo sapiens
  misc_RNA (1)...(19): siRNA sense strand
gcuggacgagcaugacuuc

SEQ ID NO: 1471913 - RNA, 19 nt, Homo sapiens
  misc_RNA (1)...(19): siRNA sense strand
gaccucagugucacagaug

SEQ ID NO: 1471914 - RNA, 19 nt, Homo sapiens
  misc_RNA (1)...(19): siRNA sense strand
gagacgauggcaaguggau

SEQ ID NO: 1471915 - RNA, 19 nt, Homo sapiens
  misc_RNA (1)...(19): siRNA sense strand
ggcaggaggcuggacaaga

SEQ ID NO: 1471916 - RNA, 19 nt, Homo sapiens
  misc_RNA (1)...(19): siRNA sense strand
guuccagaccucaguguca

SEQ ID NO: 1471917 - RNA, 19 nt, Homo sapiens
  misc_RNA (1)...(19): siRNA sense strand
gaggauggguuucuuaaua

SEQ ID NO: 1471918 - RNA, 19 nt, Homo sapiens
  misc_RNA (1)...(19): siRNA sense strand
gcacuggccuuucccuaua

SEQ ID NO: 1471919 - RNA, 19 nt, Homo sapiens
  misc_RNA (1)...(19): siRNA sense strand
gaagcaagauccuggugua

SEQ ID NO: 1471920 - RNA, 19 nt, Homo sapiens
  misc_RNA (1)...(19): siRNA sense strand
ggaaagaacuaggaagaug

SEQ ID NO: 1471921 - RNA, 19 nt, Homo sapiens
  misc_RNA (1)...(19): siRNA sense strand
gcaagauccugguguauag

SEQ ID NO: 1471922 - RNA, 19 nt, Homo sapiens
  misc_RNA (1)...(19): siRNA sense strand
ccaacugccuuacgaauug

SEQ ID NO: 1471923 - RNA, 19 nt, Homo sapiens
  misc_RNA (1)...(19): siRNA sense strand
gaugugccuuucuuugaua

SEQ ID NO: 1471924 - RNA, 19 nt, Homo sapiens
  misc_RNA (1)...(19): siRNA sense strand
gcagccaaaugucuccuuu

SEQ ID NO: 1471925 - RNA, 19 nt, Homo sapiens
  misc_RNA (1)...(19): siRNA sense strand
ugagcacgaugcaagaaua

SEQ ID NO: 1471926 - RNA, 19 nt, Homo sapiens
  misc_RNA (1)...(19): siRNA sense strand
ggauggguuucuuaauauu

SEQ ID NO: 1471927 - RNA, 19 nt, Homo sapiens
  misc_RNA (1)...(19): siRNA sense strand
ugaaugaugugccuuucuu

SEQ ID NO: 1471928 - RNA, 19 nt, Homo sapiens
  misc_RNA (1)...(19): siRNA sense strand
gaaagaacuaggaagaugu

SEQ ID NO: 1471929 - RNA, 19 nt, Homo sapiens
  misc_RNA (1)...(19): siRNA sense strand
cagcaucucugacuauucu

SEQ ID NO: 1471930 - RNA, 19 nt, Homo sapiens
  misc_RNA (1)...(19): siRNA sense strand
ggacaggaaagaacuagga

SEQ ID NO: 1471931 - RNA, 19 nt, Homo sapiens
  misc_RNA (1)...(19): siRNA sense strand
gcauguuccugacacaguu

SEQ ID NO: 1471932 - RNA, 19 nt, Homo sapiens
  misc_RNA (1)...(19): siRNA sense strand
ugagcgagcuggagcaugu

SEQ ID NO: 1471933 - RNA, 19 nt, Homo sapiens
  misc_RNA (1)...(19): siRNA sense strand
aggaugaggugcuguggua

SEQ ID NO: 1471934 - RNA, 19 nt, Homo sapiens
  misc_RNA (1)...(19): siRNA sense strand
gaaggugauugcagaggau

SEQ ID NO: 1471935 - RNA, 19 nt, Homo sapiens
  misc_RNA (1)...(19): siRNA sense strand
cgaaccaacuggaagaauc

SEQ ID NO: 1471936 - RNA, 19 nt, Homo sapiens
  misc_RNA (1)...(19): siRNA sense strand
ucaguaccuugaaauaguu

SEQ ID NO: 1471937 - RNA, 19 nt, Homo sapiens
  misc_RNA (1)...(19): siRNA sense strand
ugaaauaguuccagaaacc

SEQ ID NO: 1471938 - RNA, 19 nt, Homo sapiens
  misc_RNA (1)...(19): siRNA sense strand
ggccacagcuucugcuuuu

SEQ ID NO: 1471939 - RNA, 19 nt, Homo sapiens
  misc_RNA (1)...(19): siRNA sense strand
aggauggguuucuuaauau

SEQ ID NO: 1471940 - RNA, 19 nt, Homo sapiens
  misc_RNA (1)...(19): siRNA sense strand
caggaaagaacuaggaaga

SEQ ID NO: 1471941 - RNA, 19 nt, Homo sapiens
  misc_RNA (1)...(19): siRNA sense strand
gaaugaugugccuuucuuu

SEQ ID NO: 1471942 - RNA, 19 nt, Homo sapiens
  misc_RNA (1)...(19): siRNA sense strand
ggaaugcagccaaaugucu

SEQ ID NO: 1471943 - RNA, 19 nt, Homo sapiens
  misc_RNA (1)...(19): siRNA sense strand
aaacagcucguuggcagua

SEQ ID NO: 1471944 - RNA, 19 nt, Homo sapiens
  misc_RNA (1)...(19): siRNA sense strand
ucacgaugguguggucauu

SEQ ID NO: 1471945 - RNA, 19 nt, Homo sapiens
  misc_RNA (1)...(19): siRNA sense strand
ggaaaguacccuguucauc

SEQ ID NO: 1471946 - RNA, 19 nt, Homo sapiens
  misc_RNA (1)...(19): siRNA sense strand
aguagcagcuuaugaggau

SEQ ID NO: 1471947 - RNA, 19 nt, Homo sapiens
  misc_RNA (1)...(19): siRNA sense strand
ugaugugccuuucuuugau

SEQ ID NO: 1471948 - RNA, 19 nt, Homo sapiens
  misc_RNA (1)...(19): siRNA sense strand
gaagcuggguaacguucuc

SEQ ID NO: 1471949 - RNA, 19 nt, Homo sapiens
  misc_RNA (1)...(19): siRNA sense strand
ugugugaugugcauucuca

SEQ ID NO: 1471950 - RNA, 19 nt, Homo sapiens
  misc_RNA (1)...(19): siRNA sense strand
gaccuggacagcuucacua

SEQ ID NO: 1471951 - RNA, 19 nt, Homo sapiens
  misc_RNA (1)...(19): siRNA sense strand
ugauguaccugcucaaagc

SEQ ID NO: 1471952 - RNA, 19 nt, Homo sapiens
  misc_RNA (1)...(19): siRNA sense strand
uucaguaucuggacaggaa

SEQ ID NO: 1471953 - RNA, 19 nt, Homo sapiens
  misc_RNA (1)...(19): siRNA sense strand
gauagcugcggaauuugaa

SEQ ID NO: 1471954 - RNA, 19 nt, Homo sapiens
  misc_RNA (1)...(19): siRNA sense strand
gcaagaauacaggcacuag

SEQ ID NO: 1471955 - RNA, 19 nt, Homo sapiens
  misc_RNA (1)...(19): siRNA sense strand
gauagcagcaucucugacu

SEQ ID NO: 1471956 - RNA, 19 nt, Homo sapiens
  misc_RNA (1)...(19): siRNA sense strand
guacgaaggaagcaagauc

SEQ ID NO: 1471957 - RNA, 19 nt, Homo sapiens
  misc_RNA (1)...(19): siRNA sense strand
ggucauugcgggauauaca

SEQ ID NO: 1471958 - RNA, 19 nt, Homo sapiens
  misc_RNA (1)...(19): siRNA sense strand
aaaguacccuguucaucgu

SEQ ID NO: 1471959 - RNA, 19 nt, Homo sapiens
  misc_RNA (1)...(19): siRNA sense strand
uaugaggauggguuucuua

SEQ ID NO: 1471960 - RNA, 19 nt, Homo sapiens
  misc_RNA (1)...(19): siRNA sense strand
gccgaagacuccgccagaa

SEQ ID NO: 1471961 - RNA, 19 nt, Homo sapiens
  misc_RNA (1)...(19): siRNA sense strand
gggauuaucggaugaacca

SEQ ID NO: 1471962 - RNA, 19 nt, Homo sapiens
  misc_RNA (1)...(19): siRNA sense strand
gaaccaacuggaagaaucg

SEQ ID NO: 1471963 - RNA, 19 nt, Homo sapiens
  misc_RNA (1)...(19): siRNA sense strand
aaaugaaugaugugccuuu

SEQ ID NO: 1471964 - RNA, 19 nt, Homo sapiens
  misc_RNA (1)...(19): siRNA sense strand
caacuggaagaaucgcaaa

SEQ ID NO: 1471965 - RNA, 19 nt, Homo sapiens
  misc_RNA (1)...(19): siRNA sense strand
ggagcauguuccugacaca

SEQ ID NO: 1471966 - RNA, 19 nt, Homo sapiens
  misc_RNA (1)...(19): siRNA sense strand
cuggacagcuucacuacuc

SEQ ID NO: 1471967 - RNA, 19 nt, Homo sapiens
  misc_RNA (1)...(19): siRNA sense strand
aagguacccuguggcagua

SEQ ID NO: 1471968 - RNA, 19 nt, Homo sapiens
  misc_RNA (1)...(19): siRNA sense strand
cagaggacgaggaggauga

SEQ ID NO: 1471969 - RNA, 19 nt, Homo sapiens
  misc_RNA (1)...(19): siRNA sense strand
cacuggccuuucccuauaa

SEQ ID NO: 1471970 - RNA, 19 nt, Homo sapiens
  misc_RNA (1)...(19): siRNA sense strand
gaaauaguuccagaaacca

SEQ ID NO: 1471971 - RNA, 19 nt, Homo sapiens
  misc_RNA (1)...(19): siRNA sense strand
gacaggaaagaacuaggaa

SEQ ID NO: 1471972 - RNA, 19 nt, Homo sapiens
  misc_RNA (1)...(19): siRNA sense strand
guaacguucuccgugacuu

SEQ ID NO: 1471973 - RNA, 19 nt, Homo sapiens
  misc_RNA (1)...(19): siRNA sense strand
gaaugaaaugaaugaugug

SEQ ID NO: 1471974 - RNA, 19 nt, Homo sapiens
  misc_RNA (1)...(19): siRNA sense strand
ggauggguguacgaaggaa

SEQ ID NO: 1471975 - RNA, 19 nt, Homo sapiens
  misc_RNA (1)...(19): siRNA sense strand
gaugugcacaggugagcaa

SEQ ID NO: 1471976 - RNA, 19 nt, Homo sapiens
  misc_RNA (1)...(19): siRNA sense strand
ggaggaugagccuggaaug

SEQ ID NO: 1471977 - RNA, 19 nt, Homo sapiens
  misc_RNA (1)...(19): siRNA sense strand
ggacgacuacagccuggau

SEQ ID NO: 1471978 - RNA, 19 nt, Homo sapiens
  misc_RNA (1)...(19): siRNA sense strand
cauggccacucacuacuac

SEQ ID NO: 1471979 - RNA, 19 nt, Homo sapiens
  misc_RNA (1)...(19): siRNA sense strand
ccauggccacucacuacua

SEQ ID NO: 1471980 - RNA, 19 nt, Homo sapiens
  misc_RNA (1)...(19): siRNA sense strand
ggcaaucaauauauuucag

SEQ ID NO: 1471981 - RNA, 19 nt, Homo sapiens
  misc_RNA (1)...(19): siRNA sense strand
acuacagccuggaugaguu

SEQ ID NO: 1471982 - RNA, 19 nt, Homo sapiens
  misc_RNA (1)...(19): siRNA sense strand
cuugaaauaguuccagaaa

SEQ ID NO: 1471983 - RNA, 19 nt, Homo sapiens
  misc_RNA (1)...(19): siRNA sense strand
uagcagcaucucugacuau

SEQ ID NO: 1471984 - RNA, 19 nt, Homo sapiens
  misc_RNA (1)...(19): siRNA sense strand
ggcaguagcagcuuaugag

SEQ ID NO: 1471985 - RNA, 19 nt, Homo sapiens
  misc_RNA (1)...(19): siRNA sense strand
cguuggcaguagcagcuua

SEQ ID NO: 1471986 - RNA, 19 nt, Homo sapiens
  misc_RNA (1)...(19): siRNA sense strand
uuacgaaccaacuggaaga

SEQ ID NO: 1471987 - RNA, 19 nt, Homo sapiens
  misc_RNA (1)...(19): siRNA sense strand
gcaucucugacuauucuug

SEQ ID NO: 1471988 - RNA, 19 nt, Homo sapiens
  misc_RNA (1)...(19): siRNA sense strand
ugaugugcauucucacgau

SEQ ID NO: 1471989 - RNA, 19 nt, Homo sapiens
  misc_RNA (1)...(19): siRNA sense strand
gcaagacguggaaggugau

SEQ ID NO: 1471990 - RNA, 19 nt, Homo sapiens
  misc_RNA (1)...(19): siRNA sense strand
gaugaggugcugugguaca

SEQ ID NO: 1471991 - RNA, 19 nt, Homo sapiens
  misc_RNA (1)...(19): siRNA sense strand
agcaagauccugguguaua

SEQ ID NO: 1471992 - RNA, 19 nt, Homo sapiens
  misc_RNA (1)...(19): siRNA sense strand
agauagcugcggaauuuga

SEQ ID NO: 1471993 - RNA, 19 nt, Homo sapiens
  misc_RNA (1)...(19): siRNA sense strand
gcacgaugcaagaauacag

SEQ ID NO: 1471994 - RNA, 19 nt, Homo sapiens
  misc_RNA (1)...(19): siRNA sense strand
gaccggaaaguacccuguu

SEQ ID NO: 1471995 - RNA, 19 nt, Homo sapiens
  misc_RNA (1)...(19): siRNA sense strand
gaauuugaaguuccgaaac

SEQ ID NO: 1471996 - RNA, 19 nt, Homo sapiens
  misc_RNA (1)...(19): siRNA sense strand
aaagaacuaggaagaugug

SEQ ID NO: 1471997 - RNA, 19 nt, Homo sapiens
  misc_RNA (1)...(19): siRNA sense strand
gugcacaggugagcaagac

SEQ ID NO: 1471998 - RNA, 19 nt, Homo sapiens
  misc_RNA (1)...(19): siRNA sense strand
cgaccucgcacuggccuuu

SEQ ID NO: 1471999 - RNA, 19 nt, Homo sapiens
  misc_RNA (1)...(19): siRNA sense strand
gugacgccauggccacuca

SEQ ID NO: 1472000 - RNA, 19 nt, Homo sapiens
  misc_RNA (1)...(19): siRNA sense strand
cuggagaucugauguaccu

SEQ ID NO: 1472001 - RNA, 19 nt, Homo sapiens
  misc_RNA (1)...(19): siRNA sense strand
gcugcggaauuugaaguuc

SEQ ID NO: 1472002 - RNA, 19 nt, Homo sapiens
  misc_RNA (1)...(19): siRNA sense strand
caacugccuuacgaauugg

SEQ ID NO: 1472003 - RNA, 19 nt, Homo sapiens
  misc_RNA (1)...(19): siRNA sense strand
auagcagcaucucugacua

SEQ ID NO: 1472004 - RNA, 19 nt, Homo sapiens
  misc_RNA (1)...(19): siRNA sense strand
gggauggguguacgaagga

SEQ ID NO: 1472005 - RNA, 19 nt, Homo sapiens
  misc_RNA (1)...(19): siRNA sense strand
cgccagaacccuccuuuac

SEQ ID NO: 1472006 - RNA, 19 nt, Homo sapiens
  misc_RNA (1)...(19): siRNA sense strand
aaugaugugccuuucuuug

SEQ ID NO: 1472007 - RNA, 19 nt, Homo sapiens
  misc_RNA (1)...(19): siRNA sense strand
acgccgaccuggacagcuu

SEQ ID NO: 1472008 - RNA, 19 nt, Homo sapiens
  misc_RNA (1)...(19): siRNA sense strand
gaagcugugggagguguau

SEQ ID NO: 1472009 - RNA, 19 nt, Homo sapiens
  misc_RNA (1)...(19): siRNA sense strand
auuaucggaugaaccagaa

SEQ ID NO: 1472010 - RNA, 19 nt, Homo sapiens
  misc_RNA (1)...(19): siRNA sense strand
ugguguccgugugggauua

SEQ ID NO: 1472011 - RNA, 19 nt, Homo sapiens
  misc_RNA (1)...(19): siRNA sense strand
cacgaccuccgcaguggua

SEQ ID NO: 1472012 - RNA, 19 nt, Homo sapiens
  misc_RNA (1)...(19): siRNA sense strand
ccgccagaacccuccuuua

SEQ ID NO: 1472013 - RNA, 19 nt, Homo sapiens
  misc_RNA (1)...(19): siRNA sense strand
guguggucauugcgggaua

SEQ ID NO: 1472014 - RNA, 19 nt, Homo sapiens
  misc_RNA (1)...(19): siRNA sense strand
gaggauggguuucuuaaua

SEQ ID NO: 1472015 - RNA, 19 nt, Homo sapiens
  misc_RNA (1)...(19): siRNA sense strand
gcacuggccuuucccuaua

SEQ ID NO: 1472016 - RNA, 19 nt, Homo sapiens
  misc_RNA (1)...(19): siRNA sense strand
gaagcaagauccuggugua

SEQ ID NO: 1472017 - RNA, 19 nt, Homo sapiens
  misc_RNA (1)...(19): siRNA sense strand
ggaaagaacuaggaagaug

SEQ ID NO: 1472018 - RNA, 19 nt, Homo sapiens
  misc_RNA (1)...(19): siRNA sense strand
gcaagauccugguguauag

SEQ ID NO: 1472019 - RNA, 19 nt, Homo sapiens
  misc_RNA (1)...(19): siRNA sense strand
ccaacugccuuacgaauug

SEQ ID NO: 1472020 - RNA, 19 nt, Homo sapiens
  misc_RNA (1)...(19): siRNA sense strand
gaugugccuuucuuugaua

SEQ ID NO: 1472021 - RNA, 19 nt, Homo sapiens
  misc_RNA (1)...(19): siRNA sense strand
gcagccaaaugucuccuuu

SEQ ID NO: 1472022 - RNA, 19 nt, Homo sapiens
  misc_RNA (1)...(19): siRNA sense strand
ugagcacgaugcaagaaua

SEQ ID NO: 1472023 - RNA, 19 nt, Homo sapiens
  misc_RNA (1)...(19): siRNA sense strand
ggauggguuucuuaauauu

SEQ ID NO: 1472024 - RNA, 19 nt, Homo sapiens
  misc_RNA (1)...(19): siRNA sense strand
ugaaugaugugccuuucuu

SEQ ID NO: 1472025 - RNA, 19 nt, Homo sapiens
  misc_RNA (1)...(19): siRNA sense strand
gaaagaacuaggaagaugu

SEQ ID NO: 1472026 - RNA, 19 nt, Homo sapiens
  misc_RNA (1)...(19): siRNA sense strand
cagcaucucugacuauucu

SEQ ID NO: 1472027 - RNA, 19 nt, Homo sapiens
  misc_RNA (1)...(19): siRNA sense strand
ggacaggaaagaacuagga

SEQ ID NO: 1472028 - RNA, 19 nt, Homo sapiens
  misc_RNA (1)...(19): siRNA sense strand
gcauguuccugacacaguu

SEQ ID NO: 1472029 - RNA, 19 nt, Homo sapiens
  misc_RNA (1)...(19): siRNA sense strand
ugagcgagcuggagcaugu

SEQ ID NO: 1472030 - RNA, 19 nt, Homo sapiens
  misc_RNA (1)...(19): siRNA sense strand
aggaugaggugcuguggua

SEQ ID NO: 1472031 - RNA, 19 nt, Homo sapiens
  misc_RNA (1)...(19): siRNA sense strand
gaaggugauugcagaggau

SEQ ID NO: 1472032 - RNA, 19 nt, Homo sapiens
  misc_RNA (1)...(19): siRNA sense strand
cgaaccaacuggaagaauc

SEQ ID NO: 1472033 - RNA, 19 nt, Homo sapiens
  misc_RNA (1)...(19): siRNA sense strand
ucaguaccuugaaauaguu

SEQ ID NO: 1472034 - RNA, 19 nt, Homo sapiens
  misc_RNA (1)...(19): siRNA sense strand
ugaaauaguuccagaaacc

SEQ ID NO: 1472035 - RNA, 19 nt, Homo sapiens
  misc_RNA (1)...(19): siRNA sense strand
ggccacagcuucugcuuuu

SEQ ID NO: 1472036 - RNA, 19 nt, Homo sapiens
  misc_RNA (1)...(19): siRNA sense strand
aggauggguuucuuaauau

SEQ ID NO: 1472037 - RNA, 19 nt, Homo sapiens
  misc_RNA (1)...(19): siRNA sense strand
caggaaagaacuaggaaga

SEQ ID NO: 1472038 - RNA, 19 nt, Homo sapiens
  misc_RNA (1)...(19): siRNA sense strand
gaaugaugugccuuucuuu

SEQ ID NO: 1472039 - RNA, 19 nt, Homo sapiens
  misc_RNA (1)...(19): siRNA sense strand
ggaaugcagccaaaugucu

SEQ ID NO: 1472040 - RNA, 19 nt, Homo sapiens
  misc_RNA (1)...(19): siRNA sense strand
aaacagcucguuggcagua

SEQ ID NO: 1472041 - RNA, 19 nt, Homo sapiens
  misc_RNA (1)...(19): siRNA sense strand
ucacgaugguguggucauu

SEQ ID NO: 1472042 - RNA, 19 nt, Homo sapiens
  misc_RNA (1)...(19): siRNA sense strand
ggaaaguacccuguucauc

SEQ ID NO: 1472043 - RNA, 19 nt, Homo sapiens
  misc_RNA (1)...(19): siRNA sense strand
aguagcagcuuaugaggau

SEQ ID NO: 1472044 - RNA, 19 nt, Homo sapiens
  misc_RNA (1)...(19): siRNA sense strand
ugaugugccuuucuuugau

SEQ ID NO: 1472045 - RNA, 19 nt, Homo sapiens
  misc_RNA (1)...(19): siRNA sense strand
gaagcuggguaacguucuc

SEQ ID NO: 1472046 - RNA, 19 nt, Homo sapiens
  misc_RNA (1)...(19): siRNA sense strand
ugugugaugugcauucuca

SEQ ID NO: 1472047 - RNA, 19 nt, Homo sapiens
  misc_RNA (1)...(19): siRNA sense strand
gaccuggacagcuucacua

SEQ ID NO: 1472048 - RNA, 19 nt, Homo sapiens
  misc_RNA (1)...(19): siRNA sense strand
ugauguaccugcucaaagc

SEQ ID NO: 1472049 - RNA, 19 nt, Homo sapiens
  misc_RNA (1)...(19): siRNA sense strand
uucaguaucuggacaggaa

SEQ ID NO: 1472050 - RNA, 19 nt, Homo sapiens
  misc_RNA (1)...(19): siRNA sense strand
gauagcugcggaauuugaa

SEQ ID NO: 1472051 - RNA, 19 nt, Homo sapiens
  misc_RNA (1)...(19): siRNA sense strand
gcaagaauacaggcacuag

SEQ ID NO: 1472052 - RNA, 19 nt, Homo sapiens
  misc_RNA (1)...(19): siRNA sense strand
gauagcagcaucucugacu

SEQ ID NO: 1472053 - RNA, 19 nt, Homo sapiens
  misc_RNA (1)...(19): siRNA sense strand
guacgaaggaagcaagauc

SEQ ID NO: 1472054 - RNA, 19 nt, Homo sapiens
  misc_RNA (1)...(19): siRNA sense strand
ggucauugcgggauauaca

SEQ ID NO: 1472055 - RNA, 19 nt, Homo sapiens
  misc_RNA (1)...(19): siRNA sense strand
aaaguacccuguucaucgu

SEQ ID NO: 1472056 - RNA, 19 nt, Homo sapiens
  misc_RNA (1)...(19): siRNA sense strand
uaugaggauggguuucuua

SEQ ID NO: 1472057 - RNA, 19 nt, Homo sapiens
  misc_RNA (1)...(19): siRNA sense strand
gccgaagacuccgccagaa

SEQ ID NO: 1472058 - RNA, 19 nt, Homo sapiens
  misc_RNA (1)...(19): siRNA sense strand
gggauuaucggaugaacca

SEQ ID NO: 1472059 - RNA, 19 nt, Homo sapiens
  misc_RNA (1)...(19): siRNA sense strand
gaaccaacuggaagaaucg

SEQ ID NO: 1472060 - RNA, 19 nt, Homo sapiens
  misc_RNA (1)...(19): siRNA sense strand
aaaugaaugaugugccuuu

SEQ ID NO: 1472061 - RNA, 19 nt, Homo sapiens
  misc_RNA (1)...(19): siRNA sense strand
caacuggaagaaucgcaaa

SEQ ID NO: 1472062 - RNA, 19 nt, Homo sapiens
  misc_RNA (1)...(19): siRNA sense strand
ggagcauguuccugacaca

SEQ ID NO: 1472063 - RNA, 19 nt, Homo sapiens
  misc_RNA (1)...(19): siRNA sense strand
cuggacagcuucacuacuc

SEQ ID NO: 1472064 - RNA, 19 nt, Homo sapiens
  misc_RNA (1)...(19): siRNA sense strand
aagguacccuguggcagua

SEQ ID NO: 1472065 - RNA, 19 nt, Homo sapiens
  misc_RNA (1)...(19): siRNA sense strand
cagaggacgaggaggauga

SEQ ID NO: 1472066 - RNA, 19 nt, Homo sapiens
  misc_RNA (1)...(19): siRNA sense strand
cacuggccuuucccuauaa

SEQ ID NO: 1472067 - RNA, 19 nt, Homo sapiens
  misc_RNA (1)...(19): siRNA sense strand
gaaauaguuccagaaacca

SEQ ID NO: 1472068 - RNA, 19 nt, Homo sapiens
  misc_RNA (1)...(19): siRNA sense strand
gacaggaaagaacuaggaa

SEQ ID NO: 1472069 - RNA, 19 nt, Homo sapiens
  misc_RNA (1)...(19): siRNA sense strand
guaacguucuccgugacuu

SEQ ID NO: 1472070 - RNA, 19 nt, Homo sapiens
  misc_RNA (1)...(19): siRNA sense strand
gaaugaaaugaaugaugug

SEQ ID NO: 1472071 - RNA, 19 nt, Homo sapiens
  misc_RNA (1)...(19): siRNA sense strand
ggauggguguacgaaggaa

SEQ ID NO: 1472072 - RNA, 19 nt, Homo sapiens
  misc_RNA (1)...(19): siRNA sense strand
gaugugcacaggugagcaa

SEQ ID NO: 1472073 - RNA, 19 nt, Homo sapiens
  misc_RNA (1)...(19): siRNA sense strand
ggaggaugagccuggaaug

SEQ ID NO: 1472074 - RNA, 19 nt, Homo sapiens
  misc_RNA (1)...(19): siRNA sense strand
ggacgacuacagccuggau

SEQ ID NO: 1472075 - RNA, 19 nt, Homo sapiens
  misc_RNA (1)...(19): siRNA sense strand
cauggccacucacuacuac

SEQ ID NO: 1472076 - RNA, 19 nt, Homo sapiens
  misc_RNA (1)...(19): siRNA sense strand
ccauggccacucacuacua

SEQ ID NO: 1472077 - RNA, 19 nt, Homo sapiens
  misc_RNA (1)...(19): siRNA sense strand
ggcaaucaauauauuucag

SEQ ID NO: 1472078 - RNA, 19 nt, Homo sapiens
  misc_RNA (1)...(19): siRNA sense strand
acuacagccuggaugaguu

SEQ ID NO: 1472079 - RNA, 19 nt, Homo sapiens
  misc_RNA (1)...(19): siRNA sense strand
cuugaaauaguuccagaaa

SEQ ID NO: 1472080 - RNA, 19 nt, Homo sapiens
  misc_RNA (1)...(19): siRNA sense strand
uagcagcaucucugacuau

SEQ ID NO: 1472081 - RNA, 19 nt, Homo sapiens
  misc_RNA (1)...(19): siRNA sense strand
ggcaguagcagcuuaugag

SEQ ID NO: 1472082 - RNA, 19 nt, Homo sapiens
  misc_RNA (1)...(19): siRNA sense strand
cguuggcaguagcagcuua

SEQ ID NO: 1472083 - RNA, 19 nt, Homo sapiens
  misc_RNA (1)...(19): siRNA sense strand
uuacgaaccaacuggaaga

SEQ ID NO: 1472084 - RNA, 19 nt, Homo sapiens
  misc_RNA (1)...(19): siRNA sense strand
gcaucucugacuauucuug

SEQ ID NO: 1472085 - RNA, 19 nt, Homo sapiens
  misc_RNA (1)...(19): siRNA sense strand
ugaugugcauucucacgau

SEQ ID NO: 1472086 - RNA, 19 nt, Homo sapiens
  misc_RNA (1)...(19): siRNA sense strand
gcaagacguggaaggugau

SEQ ID NO: 1472087 - RNA, 19 nt, Homo sapiens
  misc_RNA (1)...(19): siRNA sense strand
gaugaggugcugugguaca

SEQ ID NO: 1472088 - RNA, 19 nt, Homo sapiens
  misc_RNA (1)...(19): siRNA sense strand
agcaagauccugguguaua

SEQ ID NO: 1472089 - RNA, 19 nt, Homo sapiens
  misc_RNA (1)...(19): siRNA sense strand
agauagcugcggaauuuga

SEQ ID NO: 1472090 - RNA, 19 nt, Homo sapiens
  misc_RNA (1)...(19): siRNA sense strand
gcacgaugcaagaauacag

SEQ ID NO: 1472091 - RNA, 19 nt, Homo sapiens
  misc_RNA (1)...(19): siRNA sense strand
gaccggaaaguacccuguu

SEQ ID NO: 1472092 - RNA, 19 nt, Homo sapiens
  misc_RNA (1)...(19): siRNA sense strand
gaauuugaaguuccgaaac

SEQ ID NO: 1472093 - RNA, 19 nt, Homo sapiens
  misc_RNA (1)...(19): siRNA sense strand
aaagaacuaggaagaugug

SEQ ID NO: 1472094 - RNA, 19 nt, Homo sapiens
  misc_RNA (1)...(19): siRNA sense strand
gugcacaggugagcaagac

SEQ ID NO: 1472095 - RNA, 19 nt, Homo sapiens
  misc_RNA (1)...(19): siRNA sense strand
cgaccucgcacuggccuuu

SEQ ID NO: 1472096 - RNA, 19 nt, Homo sapiens
  misc_RNA (1)...(19): siRNA sense strand
gugacgccauggccacuca

SEQ ID NO: 1472097 - RNA, 19 nt, Homo sapiens
  misc_RNA (1)...(19): siRNA sense strand
cuggagaucugauguaccu

SEQ ID NO: 1472098 - RNA, 19 nt, Homo sapiens
  misc_RNA (1)...(19): siRNA sense strand
gcugcggaauuugaaguuc

SEQ ID NO: 1472099 - RNA, 19 nt, Homo sapiens
  misc_RNA (1)...(19): siRNA sense strand
caacugccuuacgaauugg

SEQ ID NO: 1472100 - RNA, 19 nt, Homo sapiens
  misc_RNA (1)...(19): siRNA sense strand
auagcagcaucucugacua

SEQ ID NO: 1472101 - RNA, 19 nt, Homo sapiens
  misc_RNA (1)...(19): siRNA sense strand
gggauggguguacgaagga

SEQ ID NO: 1472102 - RNA, 19 nt, Homo sapiens
  misc_RNA (1)...(19): siRNA sense strand
cgccagaacccuccuuuac

SEQ ID NO: 1472103 - RNA, 19 nt, Homo sapiens
  misc_RNA (1)...(19): siRNA sense strand
aaugaugugccuuucuuug

SEQ ID NO: 1472104 - RNA, 19 nt, Homo sapiens
  misc_RNA (1)...(19): siRNA sense strand
acgccgaccuggacagcuu

SEQ ID NO: 1472105 - RNA, 19 nt, Homo sapiens
  misc_RNA (1)...(19): siRNA sense strand
gaagcugugggagguguau

SEQ ID NO: 1472106 - RNA, 19 nt, Homo sapiens
  misc_RNA (1)...(19): siRNA sense strand
auuaucggaugaaccagaa

SEQ ID NO: 1472107 - RNA, 19 nt, Homo sapiens
  misc_RNA (1)...(19): siRNA sense strand
ugguguccgugugggauua

SEQ ID NO: 1472108 - RNA, 19 nt, Homo sapiens
  misc_RNA (1)...(19): siRNA sense strand
cacgaccuccgcaguggua

SEQ ID NO: 1472109 - RNA, 19 nt, Homo sapiens
  misc_RNA (1)...(19): siRNA sense strand
ccgccagaacccuccuuua

SEQ ID NO: 1472110 - RNA, 19 nt, Homo sapiens
  misc_RNA (1)...(19): siRNA sense strand
guguggucauugcgggaua

SEQ ID NO: 1472111 - RNA, 19 nt, Homo sapiens
  misc_RNA (1)...(19): siRNA sense strand
uagaagagcuguuggauga

SEQ ID NO: 1472112 - RNA, 19 nt, Homo sapiens
  misc_RNA (1)...(19): siRNA sense strand
guauguacauugaccauua

SEQ ID NO: 1472113 - RNA, 19 nt, Homo sapiens
  misc_RNA (1)...(19): siRNA sense strand
gagcgugugugacaguauu

SEQ ID NO: 1472114 - RNA, 19 nt, Homo sapiens
  misc_RNA (1)...(19): siRNA sense strand
caauaaggacgcagacuug

SEQ ID NO: 1472115 - RNA, 19 nt, Homo sapiens
  misc_RNA (1)...(19): siRNA sense strand
gagcugagcgugugugaca

SEQ ID NO: 1472116 - RNA, 19 nt, Homo sapiens
  misc_RNA (1)...(19): siRNA sense strand
caucauuggcugacacuuu

SEQ ID NO: 1472117 - RNA, 19 nt, Homo sapiens
  misc_RNA (1)...(19): siRNA sense strand
guagucaagugccuuugga

SEQ ID NO: 1472118 - RNA, 19 nt, Homo sapiens
  misc_RNA (1)...(19): siRNA sense strand
aaggccaacugaagcaaua

SEQ ID NO: 1472119 - RNA, 19 nt, Homo sapiens
  misc_RNA (1)...(19): siRNA sense strand
ccuagaugcugcaaacaug

SEQ ID NO: 1472120 - RNA, 19 nt, Homo sapiens
  misc_RNA (1)...(19): siRNA sense strand
gcaaacauccgaggacaag

SEQ ID NO: 1472121 - RNA, 19 nt, Homo sapiens
  misc_RNA (1)...(19): siRNA sense strand
ucauaaggauagacacuuc

SEQ ID NO: 1472122 - RNA, 19 nt, Homo sapiens
  misc_RNA (1)...(19): siRNA sense strand
gaacuacccagucguacgu

SEQ ID NO: 1472123 - RNA, 19 nt, Homo sapiens
  misc_RNA (1)...(19): siRNA sense strand
gcccaaggcagguucaaga

SEQ ID NO: 1472124 - RNA, 19 nt, Homo sapiens
  misc_RNA (1)...(19): siRNA sense strand
aaaggucccuguaucaaaa

SEQ ID NO: 1472125 - RNA, 19 nt, Homo sapiens
  misc_RNA (1)...(19): siRNA sense strand
caugaaagaagcaaacauc

SEQ ID NO: 1472126 - RNA, 19 nt, Homo sapiens
  misc_RNA (1)...(19): siRNA sense strand
ccagggugaugcucaguag

SEQ ID NO: 1472127 - RNA, 19 nt, Homo sapiens
  misc_RNA (1)...(19): siRNA sense strand
gaugcucaguagucaagug

SEQ ID NO: 1472128 - RNA, 19 nt, Homo sapiens
  misc_RNA (1)...(19): siRNA sense strand
uuaccuagaugcugcaaac

SEQ ID NO: 1472129 - RNA, 19 nt, Homo sapiens
  misc_RNA (1)...(19): siRNA sense strand
gauagaagagcuguuggau

SEQ ID NO: 1472130 - RNA, 19 nt, Homo sapiens
  misc_RNA (1)...(19): siRNA sense strand
ggcuggcgauucauaagga

SEQ ID NO: 1472131 - RNA, 19 nt, Homo sapiens
  misc_RNA (1)...(19): siRNA sense strand
uaaggacgcagacuuguac

SEQ ID NO: 1472132 - RNA, 19 nt, Homo sapiens
  misc_RNA (1)...(19): siRNA sense strand
gaaaaggucccuguaucaa

SEQ ID NO: 1472133 - RNA, 19 nt, Homo sapiens
  misc_RNA (1)...(19): siRNA sense strand
ucuuucugcuggaggaaua

SEQ ID NO: 1472134 - RNA, 19 nt, Homo sapiens
  misc_RNA (1)...(19): siRNA sense strand
acaauaaggacgcagacuu

SEQ ID NO: 1472135 - RNA, 19 nt, Homo sapiens
  misc_RNA (1)...(19): siRNA sense strand
gccgaacuacccagucgua

SEQ ID NO: 1472136 - RNA, 19 nt, Homo sapiens
  misc_RNA (1)...(19): siRNA sense strand
agugcaaucccauggguua

SEQ ID NO: 1472137 - RNA, 19 nt, Homo sapiens
  misc_RNA (1)...(19): siRNA sense strand
auaaggacgcagacuugua

SEQ ID NO: 1472138 - RNA, 19 nt, Homo sapiens
  misc_RNA (1)...(19): siRNA sense strand
agacugcaguggacauguc

SEQ ID NO: 1472139 - RNA, 19 nt, Homo sapiens
  misc_RNA (1)...(19): siRNA sense strand
gggugaugcucaguaguca

SEQ ID NO: 1472140 - RNA, 19 nt, Homo sapiens
  misc_RNA (1)...(19): siRNA sense strand
auacuuugguugcaugaag

SEQ ID NO: 1472141 - RNA, 19 nt, Homo sapiens
  misc_RNA (1)...(19): siRNA sense strand
ucaguagucaagugccuuu

SEQ ID NO: 1472142 - RNA, 19 nt, Homo sapiens
  misc_RNA (1)...(19): siRNA sense strand
aaaguucggcccaaugaag

SEQ ID NO: 1472143 - RNA, 19 nt, Homo sapiens
  misc_RNA (1)...(19): siRNA sense strand
gacggucacaguccuugaa

SEQ ID NO: 1472144 - RNA, 19 nt, Homo sapiens
  misc_RNA (1)...(19): siRNA sense strand
uaaggauagacacuucuug

SEQ ID NO: 1472145 - RNA, 19 nt, Homo sapiens
  misc_RNA (1)...(19): siRNA sense strand
aaacauccgaggacaaggu

SEQ ID NO: 1472146 - RNA, 19 nt, Homo sapiens
  misc_RNA (1)...(19): siRNA sense strand
guacauugaccauuaaaag

SEQ ID NO: 1472147 - RNA, 19 nt, Homo sapiens
  misc_RNA (1)...(19): siRNA sense strand
guacacguccagggugaug

SEQ ID NO: 1472148 - RNA, 19 nt, Homo sapiens
  misc_RNA (1)...(19): siRNA sense strand
aucauuggcugacacuuuc

SEQ ID NO: 1472149 - RNA, 19 nt, Homo sapiens
  misc_RNA (1)...(19): siRNA sense strand
gcaaucccauggguuacac

SEQ ID NO: 1472150 - RNA, 19 nt, Homo sapiens
  misc_RNA (1)...(19): siRNA sense strand
ugugugacaguauuaguga

SEQ ID NO: 1472151 - RNA, 19 nt, Homo sapiens
  misc_RNA (1)...(19): siRNA sense strand
uagaagagcuguuggauga

SEQ ID NO: 1472152 - RNA, 19 nt, Homo sapiens
  misc_RNA (1)...(19): siRNA sense strand
guauguacauugaccauua

SEQ ID NO: 1472153 - RNA, 19 nt, Homo sapiens
  misc_RNA (1)...(19): siRNA sense strand
gagcgugugugacaguauu

SEQ ID NO: 1472154 - RNA, 19 nt, Homo sapiens
  misc_RNA (1)...(19): siRNA sense strand
caauaaggacgcagacuug

SEQ ID NO: 1472155 - RNA, 19 nt, Homo sapiens
  misc_RNA (1)...(19): siRNA sense strand
gagcugagcgugugugaca

SEQ ID NO: 1472156 - RNA, 19 nt, Homo sapiens
  misc_RNA (1)...(19): siRNA sense strand
caucauuggcugacacuuu

SEQ ID NO: 1472157 - RNA, 19 nt, Homo sapiens
  misc_RNA (1)...(19): siRNA sense strand
guagucaagugccuuugga

SEQ ID NO: 1472158 - RNA, 19 nt, Homo sapiens
  misc_RNA (1)...(19): siRNA sense strand
aaggccaacugaagcaaua

SEQ ID NO: 1472159 - RNA, 19 nt, Homo sapiens
  misc_RNA (1)...(19): siRNA sense strand
ccuagaugcugcaaacaug

SEQ ID NO: 1472160 - RNA, 19 nt, Homo sapiens
  misc_RNA (1)...(19): siRNA sense strand
gcaaacauccgaggacaag

SEQ ID NO: 1472161 - RNA, 19 nt, Homo sapiens
  misc_RNA (1)...(19): siRNA sense strand
ucauaaggauagacacuuc

SEQ ID NO: 1472162 - RNA, 19 nt, Homo sapiens
  misc_RNA (1)...(19): siRNA sense strand
gaacuacccagucguacgu

SEQ ID NO: 1472163 - RNA, 19 nt, Homo sapiens
  misc_RNA (1)...(19): siRNA sense strand
gcccaaggcagguucaaga

SEQ ID NO: 1472164 - RNA, 19 nt, Homo sapiens
  misc_RNA (1)...(19): siRNA sense strand
aaaggucccuguaucaaaa

SEQ ID NO: 1472165 - RNA, 19 nt, Homo sapiens
  misc_RNA (1)...(19): siRNA sense strand
caugaaagaagcaaacauc

SEQ ID NO: 1472166 - RNA, 19 nt, Homo sapiens
  misc_RNA (1)...(19): siRNA sense strand
ccagggugaugcucaguag

SEQ ID NO: 1472167 - RNA, 19 nt, Homo sapiens
  misc_RNA (1)...(19): siRNA sense strand
gaugcucaguagucaagug

SEQ ID NO: 1472168 - RNA, 19 nt, Homo sapiens
  misc_RNA (1)...(19): siRNA sense strand
uuaccuagaugcugcaaac

SEQ ID NO: 1472169 - RNA, 19 nt, Homo sapiens
  misc_RNA (1)...(19): siRNA sense strand
gauagaagagcuguuggau

SEQ ID NO: 1472170 - RNA, 19 nt, Homo sapiens
  misc_RNA (1)...(19): siRNA sense strand
ggcuggcgauucauaagga

SEQ ID NO: 1472171 - RNA, 19 nt, Homo sapiens
  misc_RNA (1)...(19): siRNA sense strand
uaaggacgcagacuuguac

SEQ ID NO: 1472172 - RNA, 19 nt, Homo sapiens
  misc_RNA (1)...(19): siRNA sense strand
gaaaaggucccuguaucaa

SEQ ID NO: 1472173 - RNA, 19 nt, Homo sapiens
  misc_RNA (1)...(19): siRNA sense strand
ucuuucugcuggaggaaua

SEQ ID NO: 1472174 - RNA, 19 nt, Homo sapiens
  misc_RNA (1)...(19): siRNA sense strand
acaauaaggacgcagacuu

SEQ ID NO: 1472175 - RNA, 19 nt, Homo sapiens
  misc_RNA (1)...(19): siRNA sense strand
gccgaacuacccagucgua

SEQ ID NO: 1472176 - RNA, 19 nt, Homo sapiens
  misc_RNA (1)...(19): siRNA sense strand
agugcaaucccauggguua

SEQ ID NO: 1472177 - RNA, 19 nt, Homo sapiens
  misc_RNA (1)...(19): siRNA sense strand
auaaggacgcagacuugua

SEQ ID NO: 1472178 - RNA, 19 nt, Homo sapiens
  misc_RNA (1)...(19): siRNA sense strand
agacugcaguggacauguc

SEQ ID NO: 1472179 - RNA, 19 nt, Homo sapiens
  misc_RNA (1)...(19): siRNA sense strand
auacuuugguugcaugaag

SEQ ID NO: 1472180 - RNA, 19 nt, Homo sapiens
  misc_RNA (1)...(19): siRNA sense strand
gggugaugcucaguaguca

SEQ ID NO: 1472181 - RNA, 19 nt, Homo sapiens
  misc_RNA (1)...(19): siRNA sense strand
ucaguagucaagugccuuu

SEQ ID NO: 1472182 - RNA, 19 nt, Homo sapiens
  misc_RNA (1)...(19): siRNA sense strand
aaaguucggcccaaugaag

SEQ ID NO: 1472183 - RNA, 19 nt, Homo sapiens
  misc_RNA (1)...(19): siRNA sense strand
gacggucacaguccuugaa

SEQ ID NO: 1472184 - RNA, 19 nt, Homo sapiens
  misc_RNA (1)...(19): siRNA sense strand
caggugagaagagugauga

SEQ ID NO: 1472185 - RNA, 19 nt, Homo sapiens
  misc_RNA (1)...(19): siRNA sense strand
uaaggauagacacuucuug

SEQ ID NO: 1472186 - RNA, 19 nt, Homo sapiens
  misc_RNA (1)...(19): siRNA sense strand
aaacauccgaggacaaggu

SEQ ID NO: 1472187 - RNA, 19 nt, Homo sapiens
  misc_RNA (1)...(19): siRNA sense strand
guacauugaccauuaaaag

SEQ ID NO: 1472188 - RNA, 19 nt, Homo sapiens
  misc_RNA (1)...(19): siRNA sense strand
aucauuggcugacacuuuc

SEQ ID NO: 1472189 - RNA, 19 nt, Homo sapiens
  misc_RNA (1)...(19): siRNA sense strand
gcaaucccauggguuacac

SEQ ID NO: 1472190 - RNA, 19 nt, Homo sapiens
  misc_RNA (1)...(19): siRNA sense strand
ugugugacaguauuaguga

SEQ ID NO: 1472191 - RNA, 19 nt, Homo sapiens
  misc_RNA (1)...(19): siRNA sense strand
guacacguccagggugaug

SEQ ID NO: 1472192 - RNA, 19 nt, Homo sapiens
  misc_RNA (1)...(19): siRNA sense strand
uagaagagcuguuggauga

SEQ ID NO: 1472193 - RNA, 19 nt, Homo sapiens
  misc_RNA (1)...(19): siRNA sense strand
guauguacauugaccauua

SEQ ID NO: 1472194 - RNA, 19 nt, Homo sapiens
  misc_RNA (1)...(19): siRNA sense strand
gagcgugugugacaguauu

SEQ ID NO: 1472195 - RNA, 19 nt, Homo sapiens
  misc_RNA (1)...(19): siRNA sense strand
caauaaggacgcagacuug

SEQ ID NO: 1472196 - RNA, 19 nt, Homo sapiens
  misc_RNA (1)...(19): siRNA sense strand
gagcugagcgugugugaca

SEQ ID NO: 1472197 - RNA, 19 nt, Homo sapiens
  misc_RNA (1)...(19): siRNA sense strand
caucauuggcugacacuuu

SEQ ID NO: 1472198 - RNA, 19 nt, Homo sapiens
  misc_RNA (1)...(19): siRNA sense strand
guagucaagugccuuugga

SEQ ID NO: 1472199 - RNA, 19 nt, Homo sapiens
  misc_RNA (1)...(19): siRNA sense strand
aaggccaacugaagcaaua

SEQ ID NO: 1472200 - RNA, 19 nt, Homo sapiens
  misc_RNA (1)...(19): siRNA sense strand
ccuagaugcugcaaacaug

SEQ ID NO: 1472201 - RNA, 19 nt, Homo sapiens
  misc_RNA (1)...(19): siRNA sense strand
gcaaacauccgaggacaag

SEQ ID NO: 1472202 - RNA, 19 nt, Homo sapiens
  misc_RNA (1)...(19): siRNA sense strand
ucauaaggauagacacuuc

SEQ ID NO: 1472203 - RNA, 19 nt, Homo sapiens
  misc_RNA (1)...(19): siRNA sense strand
gaacuacccagucguacgu

SEQ ID NO: 1472204 - RNA, 19 nt, Homo sapiens
  misc_RNA (1)...(19): siRNA sense strand
gcccaaggcagguucaaga

SEQ ID NO: 1472205 - RNA, 19 nt, Homo sapiens
  misc_RNA (1)...(19): siRNA sense strand
aaaggucccuguaucaaaa

SEQ ID NO: 1472206 - RNA, 19 nt, Homo sapiens
  misc_RNA (1)...(19): siRNA sense strand
caugaaagaagcaaacauc

SEQ ID NO: 1472207 - RNA, 19 nt, Homo sapiens
  misc_RNA (1)...(19): siRNA sense strand
ccagggugaugcucaguag

SEQ ID NO: 1472208 - RNA, 19 nt, Homo sapiens
  misc_RNA (1)...(19): siRNA sense strand
gaugcucaguagucaagug

SEQ ID NO: 1472209 - RNA, 19 nt, Homo sapiens
  misc_RNA (1)...(19): siRNA sense strand
uuaccuagaugcugcaaac

SEQ ID NO: 1472210 - RNA, 19 nt, Homo sapiens
  misc_RNA (1)...(19): siRNA sense strand
gauagaagagcuguuggau

SEQ ID NO: 1472211 - RNA, 19 nt, Homo sapiens
  misc_RNA (1)...(19): siRNA sense strand
ggcuggcgauucauaagga

SEQ ID NO: 1472212 - RNA, 19 nt, Homo sapiens
  misc_RNA (1)...(19): siRNA sense strand
uaaggacgcagacuuguac

SEQ ID NO: 1472213 - RNA, 19 nt, Homo sapiens
  misc_RNA (1)...(19): siRNA sense strand
gaaaaggucccuguaucaa

SEQ ID NO: 1472214 - RNA, 19 nt, Homo sapiens
  misc_RNA (1)...(19): siRNA sense strand
ucuuucugcuggaggaaua

SEQ ID NO: 1472215 - RNA, 19 nt, Homo sapiens
  misc_RNA (1)...(19): siRNA sense strand
acaauaaggacgcagacuu

SEQ ID NO: 1472216 - RNA, 19 nt, Homo sapiens
  misc_RNA (1)...(19): siRNA sense strand
gccgaacuacccagucgua

SEQ ID NO: 1472217 - RNA, 19 nt, Homo sapiens
  misc_RNA (1)...(19): siRNA sense strand
agugcaaucccauggguua

SEQ ID NO: 1472218 - RNA, 19 nt, Homo sapiens
  misc_RNA (1)...(19): siRNA sense strand
auaaggacgcagacuugua

SEQ ID NO: 1472219 - RNA, 19 nt, Homo sapiens
  misc_RNA (1)...(19): siRNA sense strand
agacugcaguggacauguc

SEQ ID NO: 1472220 - RNA, 19 nt, Homo sapiens
  misc_RNA (1)...(19): siRNA sense strand
gggugaugcucaguaguca

SEQ ID NO: 1472221 - RNA, 19 nt, Homo sapiens
  misc_RNA (1)...(19): siRNA sense strand
auacuuugguugcaugaag

SEQ ID NO: 1472222 - RNA, 19 nt, Homo sapiens
  misc_RNA (1)...(19): siRNA sense strand
ucaguagucaagugccuuu

SEQ ID NO: 1472223 - RNA, 19 nt, Homo sapiens
  misc_RNA (1)...(19): siRNA sense strand
aaaguucggcccaaugaag

SEQ ID NO: 1472224 - RNA, 19 nt, Homo sapiens
  misc_RNA (1)...(19): siRNA sense strand
gacggucacaguccuugaa

SEQ ID NO: 1472225 - RNA, 19 nt, Homo sapiens
  misc_RNA (1)...(19): siRNA sense strand
uaaggauagacacuucuug

SEQ ID NO: 1472226 - RNA, 19 nt, Homo sapiens
  misc_RNA (1)...(19): siRNA sense strand
aaacauccgaggacaaggu

SEQ ID NO: 1472227 - RNA, 19 nt, Homo sapiens
  misc_RNA (1)...(19): siRNA sense strand
guacauugaccauuaaaag

SEQ ID NO: 1472228 - RNA, 19 nt, Homo sapiens
  misc_RNA (1)...(19): siRNA sense strand
guacacguccagggugaug

SEQ ID NO: 1472229 - RNA, 19 nt, Homo sapiens
  misc_RNA (1)...(19): siRNA sense strand
aucauuggcugacacuuuc

SEQ ID NO: 1472230 - RNA, 19 nt, Homo sapiens
  misc_RNA (1)...(19): siRNA sense strand
gcaaucccauggguuacac

SEQ ID NO: 1472231 - RNA, 19 nt, Homo sapiens
  misc_RNA (1)...(19): siRNA sense strand
ugugugacaguauuaguga

SEQ ID NO: 1472232 - RNA, 19 nt, Homo sapiens
  misc_RNA (1)...(19): siRNA sense strand
uagaagagcuguuggauga

SEQ ID NO: 1472233 - RNA, 19 nt, Homo sapiens
  misc_RNA (1)...(19): siRNA sense strand
guauguacauugaccauua

SEQ ID NO: 1472234 - RNA, 19 nt, Homo sapiens
  misc_RNA (1)...(19): siRNA sense strand
gagcgugugugacaguauu

SEQ ID NO: 1472235 - RNA, 19 nt, Homo sapiens
  misc_RNA (1)...(19): siRNA sense strand
caauaaggacgcagacuug

SEQ ID NO: 1472236 - RNA, 19 nt, Homo sapiens
  misc_RNA (1)...(19): siRNA sense strand
gagcugagcgugugugaca

SEQ ID NO: 1472237 - RNA, 19 nt, Homo sapiens
  misc_RNA (1)...(19): siRNA sense strand
caucauuggcugacacuuu

SEQ ID NO: 1472238 - RNA, 19 nt, Homo sapiens
  misc_RNA (1)...(19): siRNA sense strand
guagucaagugccuuugga

SEQ ID NO: 1472239 - RNA, 19 nt, Homo sapiens
  misc_RNA (1)...(19): siRNA sense strand
aaggccaacugaagcaaua

SEQ ID NO: 1472240 - RNA, 19 nt, Homo sapiens
  misc_RNA (1)...(19): siRNA sense strand
ccuagaugcugcaaacaug

SEQ ID NO: 1472241 - RNA, 19 nt, Homo sapiens
  misc_RNA (1)...(19): siRNA sense strand
gcaaacauccgaggacaag

SEQ ID NO: 1472242 - RNA, 19 nt, Homo sapiens
  misc_RNA (1)...(19): siRNA sense strand
ucauaaggauagacacuuc

SEQ ID NO: 1472243 - RNA, 19 nt, Homo sapiens
  misc_RNA (1)...(19): siRNA sense strand
gaacuacccagucguacgu

SEQ ID NO: 1472244 - RNA, 19 nt, Homo sapiens
  misc_RNA (1)...(19): siRNA sense strand
gcccaaggcagguucaaga

SEQ ID NO: 1472245 - RNA, 19 nt, Homo sapiens
  misc_RNA (1)...(19): siRNA sense strand
aaaggucccuguaucaaaa

SEQ ID NO: 1472246 - RNA, 19 nt, Homo sapiens
  misc_RNA (1)...(19): siRNA sense strand
caugaaagaagcaaacauc

SEQ ID NO: 1472247 - RNA, 19 nt, Homo sapiens
  misc_RNA (1)...(19): siRNA sense strand
ccagggugaugcucaguag

SEQ ID NO: 1472248 - RNA, 19 nt, Homo sapiens
  misc_RNA (1)...(19): siRNA sense strand
gaugcucaguagucaagug

SEQ ID NO: 1472249 - RNA, 19 nt, Homo sapiens
  misc_RNA (1)...(19): siRNA sense strand
uuaccuagaugcugcaaac

SEQ ID NO: 1472250 - RNA, 19 nt, Homo sapiens
  misc_RNA (1)...(19): siRNA sense strand
gauagaagagcuguuggau

SEQ ID NO: 1472251 - RNA, 19 nt, Homo sapiens
  misc_RNA (1)...(19): siRNA sense strand
ggcuggcgauucauaagga

SEQ ID NO: 1472252 - RNA, 19 nt, Homo sapiens
  misc_RNA (1)...(19): siRNA sense strand
uaaggacgcagacuuguac

SEQ ID NO: 1472253 - RNA, 19 nt, Homo sapiens
  misc_RNA (1)...(19): siRNA sense strand
gaaaaggucccuguaucaa

SEQ ID NO: 1472254 - RNA, 19 nt, Homo sapiens
  misc_RNA (1)...(19): siRNA sense strand
ucuuucugcuggaggaaua

SEQ ID NO: 1472255 - RNA, 19 nt, Homo sapiens
  misc_RNA (1)...(19): siRNA sense strand
acaauaaggacgcagacuu

SEQ ID NO: 1472256 - RNA, 19 nt, Homo sapiens
  misc_RNA (1)...(19): siRNA sense strand
gccgaacuacccagucgua

SEQ ID NO: 1472257 - RNA, 19 nt, Homo sapiens
  misc_RNA (1)...(19): siRNA sense strand
agugcaaucccauggguua

SEQ ID NO: 1472258 - RNA, 19 nt, Homo sapiens
  misc_RNA (1)...(19): siRNA sense strand
auaaggacgcagacuugua

SEQ ID NO: 1472259 - RNA, 19 nt, Homo sapiens
  misc_RNA (1)...(19): siRNA sense strand
agacugcaguggacauguc

SEQ ID NO: 1472260 - RNA, 19 nt, Homo sapiens
  misc_RNA (1)...(19): siRNA sense strand
gggugaugcucaguaguca

SEQ ID NO: 1472261 - RNA, 19 nt, Homo sapiens
  misc_RNA (1)...(19): siRNA sense strand
auacuuugguugcaugaag

SEQ ID NO: 1472262 - RNA, 19 nt, Homo sapiens
  misc_RNA (1)...(19): siRNA sense strand
ucaguagucaagugccuuu

SEQ ID NO: 1472263 - RNA, 19 nt, Homo sapiens
  misc_RNA (1)...(19): siRNA sense strand
aaaguucggcccaaugaag

SEQ ID NO: 1472264 - RNA, 19 nt, Homo sapiens
  misc_RNA (1)...(19): siRNA sense strand
gacggucacaguccuugaa

SEQ ID NO: 1472265 - RNA, 19 nt, Homo sapiens
  misc_RNA (1)...(19): siRNA sense strand
uaaggauagacacuucuug

SEQ ID NO: 1472266 - RNA, 19 nt, Homo sapiens
  misc_RNA (1)...(19): siRNA sense strand
aaacauccgaggacaaggu

SEQ ID NO: 1472267 - RNA, 19 nt, Homo sapiens
  misc_RNA (1)...(19): siRNA sense strand
guacauugaccauuaaaag

SEQ ID NO: 1472268 - RNA, 19 nt, Homo sapiens
  misc_RNA (1)...(19): siRNA sense strand
guacacguccagggugaug

SEQ ID NO: 1472269 - RNA, 19 nt, Homo sapiens
  misc_RNA (1)...(19): siRNA sense strand
aucauuggcugacacuuuc

SEQ ID NO: 1472270 - RNA, 19 nt, Homo sapiens
  misc_RNA (1)...(19): siRNA sense strand
gcaaucccauggguuacac

SEQ ID NO: 1472271 - RNA, 19 nt, Homo sapiens
  misc_RNA (1)...(19): siRNA sense strand
ugugugacaguauuaguga

SEQ ID NO: 1472272 - RNA, 19 nt, Homo sapiens
  misc_RNA (1)...(19): siRNA sense strand
uagaagagcuguuggauga

SEQ ID NO: 1472273 - RNA, 19 nt, Homo sapiens
  misc_RNA (1)...(19): siRNA sense strand
guauguacauugaccauua

SEQ ID NO: 1472274 - RNA, 19 nt, Homo sapiens
  misc_RNA (1)...(19): siRNA sense strand
gagcgugugugacaguauu

SEQ ID NO: 1472275 - RNA, 19 nt, Homo sapiens
  misc_RNA (1)...(19): siRNA sense strand
caauaaggacgcagacuug

SEQ ID NO: 1472276 - RNA, 19 nt, Homo sapiens
  misc_RNA (1)...(19): siRNA sense strand
gagcugagcgugugugaca

SEQ ID NO: 1472277 - RNA, 19 nt, Homo sapiens
  misc_RNA (1)...(19): siRNA sense strand
caucauuggcugacacuuu

SEQ ID NO: 1472278 - RNA, 19 nt, Homo sapiens
  misc_RNA (1)...(19): siRNA sense strand
guagucaagugccuuugga

SEQ ID NO: 1472279 - RNA, 19 nt, Homo sapiens
  misc_RNA (1)...(19): siRNA sense strand
aaggccaacugaagcaaua

SEQ ID NO: 1472280 - RNA, 19 nt, Homo sapiens
  misc_RNA (1)...(19): siRNA sense strand
ccuagaugcugcaaacaug

SEQ ID NO: 1472281 - RNA, 19 nt, Homo sapiens
  misc_RNA (1)...(19): siRNA sense strand
gcaaacauccgaggacaag

SEQ ID NO: 1472282 - RNA, 19 nt, Homo sapiens
  misc_RNA (1)...(19): siRNA sense strand
ucauaaggauagacacuuc

SEQ ID NO: 1472283 - RNA, 19 nt, Homo sapiens
  misc_RNA (1)...(19): siRNA sense strand
gaacuacccagucguacgu

SEQ ID NO: 1472284 - RNA, 19 nt, Homo sapiens
  misc_RNA (1)...(19): siRNA sense strand
gcccaaggcagguucaaga

SEQ ID NO: 1472285 - RNA, 19 nt, Homo sapiens
  misc_RNA (1)...(19): siRNA sense strand
aaaggucccuguaucaaaa

SEQ ID NO: 1472286 - RNA, 19 nt, Homo sapiens
  misc_RNA (1)...(19): siRNA sense strand
caugaaagaagcaaacauc

SEQ ID NO: 1472287 - RNA, 19 nt, Homo sapiens
  misc_RNA (1)...(19): siRNA sense strand
ccagggugaugcucaguag

SEQ ID NO: 1472288 - RNA, 19 nt, Homo sapiens
  misc_RNA (1)...(19): siRNA sense strand
gaugcucaguagucaagug

SEQ ID NO: 1472289 - RNA, 19 nt, Homo sapiens
  misc_RNA (1)...(19): siRNA sense strand
uuaccuagaugcugcaaac

SEQ ID NO: 1472290 - RNA, 19 nt, Homo sapiens
  misc_RNA (1)...(19): siRNA sense strand
gauagaagagcuguuggau

SEQ ID NO: 1472291 - RNA, 19 nt, Homo sapiens
  misc_RNA (1)...(19): siRNA sense strand
ggcuggcgauucauaagga

SEQ ID NO: 1472292 - RNA, 19 nt, Homo sapiens
  misc_RNA (1)...(19): siRNA sense strand
uaaggacgcagacuuguac

SEQ ID NO: 1472293 - RNA, 19 nt, Homo sapiens
  misc_RNA (1)...(19): siRNA sense strand
gaaaaggucccuguaucaa

SEQ ID NO: 1472294 - RNA, 19 nt, Homo sapiens
  misc_RNA (1)...(19): siRNA sense strand
ucuuucugcuggaggaaua

SEQ ID NO: 1472295 - RNA, 19 nt, Homo sapiens
  misc_RNA (1)...(19): siRNA sense strand
acaauaaggacgcagacuu

SEQ ID NO: 1472296 - RNA, 19 nt, Homo sapiens
  misc_RNA (1)...(19): siRNA sense strand
gccgaacuacccagucgua

SEQ ID NO: 1472297 - RNA, 19 nt, Homo sapiens
  misc_RNA (1)...(19): siRNA sense strand
agugcaaucccauggguua

SEQ ID NO: 1472298 - RNA, 19 nt, Homo sapiens
  misc_RNA (1)...(19): siRNA sense strand
auaaggacgcagacuugua

SEQ ID NO: 1472299 - RNA, 19 nt, Homo sapiens
  misc_RNA (1)...(19): siRNA sense strand
agacugcaguggacauguc

SEQ ID NO: 1472300 - RNA, 19 nt, Homo sapiens
  misc_RNA (1)...(19): siRNA sense strand
auacuuugguugcaugaag

SEQ ID NO: 1472301 - RNA, 19 nt, Homo sapiens
  misc_RNA (1)...(19): siRNA sense strand
gggugaugcucaguaguca

SEQ ID NO: 1472302 - RNA, 19 nt, Homo sapiens
  misc_RNA (1)...(19): siRNA sense strand
ucaguagucaagugccuuu

SEQ ID NO: 1472303 - RNA, 19 nt, Homo sapiens
  misc_RNA (1)...(19): siRNA sense strand
aaaguucggcccaaugaag

SEQ ID NO: 1472304 - RNA, 19 nt, Homo sapiens
  misc_RNA (1)...(19): siRNA sense strand
gacggucacaguccuugaa

SEQ ID NO: 1472305 - RNA, 19 nt, Homo sapiens
  misc_RNA (1)...(19): siRNA sense strand
caggugagaagagugauga

SEQ ID NO: 1472306 - RNA, 19 nt, Homo sapiens
  misc_RNA (1)...(19): siRNA sense strand
uaaggauagacacuucuug

SEQ ID NO: 1472307 - RNA, 19 nt, Homo sapiens
  misc_RNA (1)...(19): siRNA sense strand
aaacauccgaggacaaggu

SEQ ID NO: 1472308 - RNA, 19 nt, Homo sapiens
  misc_RNA (1)...(19): siRNA sense strand
guacauugaccauuaaaag

SEQ ID NO: 1472309 - RNA, 19 nt, Homo sapiens
  misc_RNA (1)...(19): siRNA sense strand
aucauuggcugacacuuuc

SEQ ID NO: 1472310 - RNA, 19 nt, Homo sapiens
  misc_RNA (1)...(19): siRNA sense strand
gcaaucccauggguuacac

SEQ ID NO: 1472311 - RNA, 19 nt, Homo sapiens
  misc_RNA (1)...(19): siRNA sense strand
ugugugacaguauuaguga

SEQ ID NO: 1472312 - RNA, 19 nt, Homo sapiens
  misc_RNA (1)...(19): siRNA sense strand
guacacguccagggugaug

SEQ ID NO: 1472313 - RNA, 19 nt, Homo sapiens
  misc_RNA (1)...(19): siRNA sense strand
uagaagagcuguuggauga

SEQ ID NO: 1472314 - RNA, 19 nt, Homo sapiens
  misc_RNA (1)...(19): siRNA sense strand
guauguacauugaccauua

SEQ ID NO: 1472315 - RNA, 19 nt, Homo sapiens
  misc_RNA (1)...(19): siRNA sense strand
gagcgugugugacaguauu

SEQ ID NO: 1472316 - RNA, 19 nt, Homo sapiens
  misc_RNA (1)...(19): siRNA sense strand
caauaaggacgcagacuug

SEQ ID NO: 1472317 - RNA, 19 nt, Homo sapiens
  misc_RNA (1)...(19): siRNA sense strand
gagcugagcgugugugaca

SEQ ID NO: 1472318 - RNA, 19 nt, Homo sapiens
  misc_RNA (1)...(19): siRNA sense strand
caucauuggcugacacuuu

SEQ ID NO: 1472319 - RNA, 19 nt, Homo sapiens
  misc_RNA (1)...(19): siRNA sense strand
guagucaagugccuuugga

SEQ ID NO: 1472320 - RNA, 19 nt, Homo sapiens
  misc_RNA (1)...(19): siRNA sense strand
aaggccaacugaagcaaua

SEQ ID NO: 1472321 - RNA, 19 nt, Homo sapiens
  misc_RNA (1)...(19): siRNA sense strand
ccuagaugcugcaaacaug

SEQ ID NO: 1472322 - RNA, 19 nt, Homo sapiens
  misc_RNA (1)...(19): siRNA sense strand
gcaaacauccgaggacaag

SEQ ID NO: 1472323 - RNA, 19 nt, Homo sapiens
  misc_RNA (1)...(19): siRNA sense strand
ucauaaggauagacacuuc

SEQ ID NO: 1472324 - RNA, 19 nt, Homo sapiens
  misc_RNA (1)...(19): siRNA sense strand
gaacuacccagucguacgu

SEQ ID NO: 1472325 - RNA, 19 nt, Homo sapiens
  misc_RNA (1)...(19): siRNA sense strand
gcccaaggcagguucaaga

SEQ ID NO: 1472326 - RNA, 19 nt, Homo sapiens
  misc_RNA (1)...(19): siRNA sense strand
aaaggucccuguaucaaaa

SEQ ID NO: 1472327 - RNA, 19 nt, Homo sapiens
  misc_RNA (1)...(19): siRNA sense strand
caugaaagaagcaaacauc

SEQ ID NO: 1472328 - RNA, 19 nt, Homo sapiens
  misc_RNA (1)...(19): siRNA sense strand
ccagggugaugcucaguag

SEQ ID NO: 1472329 - RNA, 19 nt, Homo sapiens
  misc_RNA (1)...(19): siRNA sense strand
gaugcucaguagucaagug

SEQ ID NO: 1472330 - RNA, 19 nt, Homo sapiens
  misc_RNA (1)...(19): siRNA sense strand
uuaccuagaugcugcaaac

SEQ ID NO: 1472331 - RNA, 19 nt, Homo sapiens
  misc_RNA (1)...(19): siRNA sense strand
gauagaagagcuguuggau

SEQ ID NO: 1472332 - RNA, 19 nt, Homo sapiens
  misc_RNA (1)...(19): siRNA sense strand
ggcuggcgauucauaagga

SEQ ID NO: 1472333 - RNA, 19 nt, Homo sapiens
  misc_RNA (1)...(19): siRNA sense strand
uaaggacgcagacuuguac

SEQ ID NO: 1472334 - RNA, 19 nt, Homo sapiens
  misc_RNA (1)...(19): siRNA sense strand
gaaaaggucccuguaucaa

SEQ ID NO: 1472335 - RNA, 19 nt, Homo sapiens
  misc_RNA (1)...(19): siRNA sense strand
ucuuucugcuggaggaaua

SEQ ID NO: 1472336 - RNA, 19 nt, Homo sapiens
  misc_RNA (1)...(19): siRNA sense strand
acaauaaggacgcagacuu

SEQ ID NO: 1472337 - RNA, 19 nt, Homo sapiens
  misc_RNA (1)...(19): siRNA sense strand
gccgaacuacccagucgua

SEQ ID NO: 1472338 - RNA, 19 nt, Homo sapiens
  misc_RNA (1)...(19): siRNA sense strand
agugcaaucccauggguua

SEQ ID NO: 1472339 - RNA, 19 nt, Homo sapiens
  misc_RNA (1)...(19): siRNA sense strand
auaaggacgcagacuugua

SEQ ID NO: 1472340 - RNA, 19 nt, Homo sapiens
  misc_RNA (1)...(19): siRNA sense strand
agacugcaguggacauguc

SEQ ID NO: 1472341 - RNA, 19 nt, Homo sapiens
  misc_RNA (1)...(19): siRNA sense strand
gggugaugcucaguaguca

SEQ ID NO: 1472342 - RNA, 19 nt, Homo sapiens
  misc_RNA (1)...(19): siRNA sense strand
auacuuugguugcaugaag

SEQ ID NO: 1472343 - RNA, 19 nt, Homo sapiens
  misc_RNA (1)...(19): siRNA sense strand
ucaguagucaagugccuuu

SEQ ID NO: 1472344 - RNA, 19 nt, Homo sapiens
  misc_RNA (1)...(19): siRNA sense strand
aaaguucggcccaaugaag

SEQ ID NO: 1472345 - RNA, 19 nt, Homo sapiens
  misc_RNA (1)...(19): siRNA sense strand
gacggucacaguccuugaa

SEQ ID NO: 1472346 - RNA, 19 nt, Homo sapiens
  misc_RNA (1)...(19): siRNA sense strand
uaaggauagacacuucuug

SEQ ID NO: 1472347 - RNA, 19 nt, Homo sapiens
  misc_RNA (1)...(19): siRNA sense strand
aaacauccgaggacaaggu

SEQ ID NO: 1472348 - RNA, 19 nt, Homo sapiens
  misc_RNA (1)...(19): siRNA sense strand
guacauugaccauuaaaag

SEQ ID NO: 1472349 - RNA, 19 nt, Homo sapiens
  misc_RNA (1)...(19): siRNA sense strand
guacacguccagggugaug

SEQ ID NO: 1472350 - RNA, 19 nt, Homo sapiens
  misc_RNA (1)...(19): siRNA sense strand
aucauuggcugacacuuuc

SEQ ID NO: 1472351 - RNA, 19 nt, Homo sapiens
  misc_RNA (1)...(19): siRNA sense strand
gcaaucccauggguuacac

SEQ ID NO: 1472352 - RNA, 19 nt, Homo sapiens
  misc_RNA (1)...(19): siRNA sense strand
ugugugacaguauuaguga

SEQ ID NO: 1472353 - RNA, 19 nt, Homo sapiens
  misc_RNA (1)...(19): siRNA sense strand
uagaagagcuguuggauga

SEQ ID NO: 1472354 - RNA, 19 nt, Homo sapiens
  misc_RNA (1)...(19): siRNA sense strand
guauguacauugaccauua

SEQ ID NO: 1472355 - RNA, 19 nt, Homo sapiens
  misc_RNA (1)...(19): siRNA sense strand
gagcgugugugacaguauu

SEQ ID NO: 1472356 - RNA, 19 nt, Homo sapiens
  misc_RNA (1)...(19): siRNA sense strand
caauaaggacgcagacuug

SEQ ID NO: 1472357 - RNA, 19 nt, Homo sapiens
  misc_RNA (1)...(19): siRNA sense strand
gagcugagcgugugugaca

SEQ ID NO: 1472358 - RNA, 19 nt, Homo sapiens
  misc_RNA (1)...(19): siRNA sense strand
caucauuggcugacacuuu

SEQ ID NO: 1472359 - RNA, 19 nt, Homo sapiens
  misc_RNA (1)...(19): siRNA sense strand
guagucaagugccuuugga

SEQ ID NO: 1472360 - RNA, 19 nt, Homo sapiens
  misc_RNA (1)...(19): siRNA sense strand
aaggccaacugaagcaaua

SEQ ID NO: 1472361 - RNA, 19 nt, Homo sapiens
  misc_RNA (1)...(19): siRNA sense strand
ccuagaugcugcaaacaug

SEQ ID NO: 1472362 - RNA, 19 nt, Homo sapiens
  misc_RNA (1)...(19): siRNA sense strand
gcaaacauccgaggacaag

SEQ ID NO: 1472363 - RNA, 19 nt, Homo sapiens
  misc_RNA (1)...(19): siRNA sense strand
ucauaaggauagacacuuc

SEQ ID NO: 1472364 - RNA, 19 nt, Homo sapiens
  misc_RNA (1)...(19): siRNA sense strand
gaacuacccagucguacgu

SEQ ID NO: 1472365 - RNA, 19 nt, Homo sapiens
  misc_RNA (1)...(19): siRNA sense strand
gcccaaggcagguucaaga

SEQ ID NO: 1472366 - RNA, 19 nt, Homo sapiens
  misc_RNA (1)...(19): siRNA sense strand
aaaggucccuguaucaaaa

SEQ ID NO: 1472367 - RNA, 19 nt, Homo sapiens
  misc_RNA (1)...(19): siRNA sense strand
caugaaagaagcaaacauc

SEQ ID NO: 1472368 - RNA, 19 nt, Homo sapiens
  misc_RNA (1)...(19): siRNA sense strand
ccagggugaugcucaguag

SEQ ID NO: 1472369 - RNA, 19 nt, Homo sapiens
  misc_RNA (1)...(19): siRNA sense strand
gaugcucaguagucaagug

SEQ ID NO: 1472370 - RNA, 19 nt, Homo sapiens
  misc_RNA (1)...(19): siRNA sense strand
uuaccuagaugcugcaaac

SEQ ID NO: 1472371 - RNA, 19 nt, Homo sapiens
  misc_RNA (1)...(19): siRNA sense strand
gauagaagagcuguuggau

SEQ ID NO: 1472372 - RNA, 19 nt, Homo sapiens
  misc_RNA (1)...(19): siRNA sense strand
ggcuggcgauucauaagga

SEQ ID NO: 1472373 - RNA, 19 nt, Homo sapiens
  misc_RNA (1)...(19): siRNA sense strand
uaaggacgcagacuuguac

SEQ ID NO: 1472374 - RNA, 19 nt, Homo sapiens
  misc_RNA (1)...(19): siRNA sense strand
gaaaaggucccuguaucaa

SEQ ID NO: 1472375 - RNA, 19 nt, Homo sapiens
  misc_RNA (1)...(19): siRNA sense strand
ucuuucugcuggaggaaua

SEQ ID NO: 1472376 - RNA, 19 nt, Homo sapiens
  misc_RNA (1)...(19): siRNA sense strand
acaauaaggacgcagacuu

SEQ ID NO: 1472377 - RNA, 19 nt, Homo sapiens
  misc_RNA (1)...(19): siRNA sense strand
gccgaacuacccagucgua

SEQ ID NO: 1472378 - RNA, 19 nt, Homo sapiens
  misc_RNA (1)...(19): siRNA sense strand
agugcaaucccauggguua

SEQ ID NO: 1472379 - RNA, 19 nt, Homo sapiens
  misc_RNA (1)...(19): siRNA sense strand
auaaggacgcagacuugua

SEQ ID NO: 1472380 - RNA, 19 nt, Homo sapiens
  misc_RNA (1)...(19): siRNA sense strand
agacugcaguggacauguc

SEQ ID NO: 1472381 - RNA, 19 nt, Homo sapiens
  misc_RNA (1)...(19): siRNA sense strand
gggugaugcucaguaguca

SEQ ID NO: 1472382 - RNA, 19 nt, Homo sapiens
  misc_RNA (1)...(19): siRNA sense strand
auacuuugguugcaugaag

SEQ ID NO: 1472383 - RNA, 19 nt, Homo sapiens
  misc_RNA (1)...(19): siRNA sense strand
ucaguagucaagugccuuu

SEQ ID NO: 1472384 - RNA, 19 nt, Homo sapiens
  misc_RNA (1)...(19): siRNA sense strand
aaaguucggcccaaugaag

SEQ ID NO: 1472385 - RNA, 19 nt, Homo sapiens
  misc_RNA (1)...(19): siRNA sense strand
gacggucacaguccuugaa

SEQ ID NO: 1472386 - RNA, 19 nt, Homo sapiens
  misc_RNA (1)...(19): siRNA sense strand
uaaggauagacacuucuug

SEQ ID NO: 1472387 - RNA, 19 nt, Homo sapiens
  misc_RNA (1)...(19): siRNA sense strand
aaacauccgaggacaaggu

SEQ ID NO: 1472388 - RNA, 19 nt, Homo sapiens
  misc_RNA (1)...(19): siRNA sense strand
guacauugaccauuaaaag

SEQ ID NO: 1472389 - RNA, 19 nt, Homo sapiens
  misc_RNA (1)...(19): siRNA sense strand
guacacguccagggugaug

SEQ ID NO: 1472390 - RNA, 19 nt, Homo sapiens
  misc_RNA (1)...(19): siRNA sense strand
aucauuggcugacacuuuc

SEQ ID NO: 1472391 - RNA, 19 nt, Homo sapiens
  misc_RNA (1)...(19): siRNA sense strand
gcaaucccauggguuacac

SEQ ID NO: 1472392 - RNA, 19 nt, Homo sapiens
  misc_RNA (1)...(19): siRNA sense strand
ugugugacaguauuaguga

SEQ ID NO: 1472393 - RNA, 19 nt, Homo sapiens
  misc_RNA (1)...(19): siRNA sense strand
uagaagagcuguuggauga

SEQ ID NO: 1472394 - RNA, 19 nt, Homo sapiens
  misc_RNA (1)...(19): siRNA sense strand
guauguacauugaccauua

SEQ ID NO: 1472395 - RNA, 19 nt, Homo sapiens
  misc_RNA (1)...(19): siRNA sense strand
gagcgugugugacaguauu

SEQ ID NO: 1472396 - RNA, 19 nt, Homo sapiens
  misc_RNA (1)...(19): siRNA sense strand
caauaaggacgcagacuug

SEQ ID NO: 1472397 - RNA, 19 nt, Homo sapiens
  misc_RNA (1)...(19): siRNA sense strand
gagcugagcgugugugaca

SEQ ID NO: 1472398 - RNA, 19 nt, Homo sapiens
  misc_RNA (1)...(19): siRNA sense strand
caucauuggcugacacuuu

SEQ ID NO: 1472399 - RNA, 19 nt, Homo sapiens
  misc_RNA (1)...(19): siRNA sense strand
guagucaagugccuuugga

SEQ ID NO: 1472400 - RNA, 19 nt, Homo sapiens
  misc_RNA (1)...(19): siRNA sense strand
aaggccaacugaagcaaua

SEQ ID NO: 1472401 - RNA, 19 nt, Homo sapiens
  misc_RNA (1)...(19): siRNA sense strand
ccuagaugcugcaaacaug

SEQ ID NO: 1472402 - RNA, 19 nt, Homo sapiens
  misc_RNA (1)...(19): siRNA sense strand
gcaaacauccgaggacaag

SEQ ID NO: 1472403 - RNA, 19 nt, Homo sapiens
  misc_RNA (1)...(19): siRNA sense strand
ucauaaggauagacacuuc

SEQ ID NO: 1472404 - RNA, 19 nt, Homo sapiens
  misc_RNA (1)...(19): siRNA sense strand
gaacuacccagucguacgu

SEQ ID NO: 1472405 - RNA, 19 nt, Homo sapiens
  misc_RNA (1)...(19): siRNA sense strand
gcccaaggcagguucaaga

SEQ ID NO: 1472406 - RNA, 19 nt, Homo sapiens
  misc_RNA (1)...(19): siRNA sense strand
aaaggucccuguaucaaaa

SEQ ID NO: 1472407 - RNA, 19 nt, Homo sapiens
  misc_RNA (1)...(19): siRNA sense strand
caugaaagaagcaaacauc

SEQ ID NO: 1472408 - RNA, 19 nt, Homo sapiens
  misc_RNA (1)...(19): siRNA sense strand
ccagggugaugcucaguag

SEQ ID NO: 1472409 - RNA, 19 nt, Homo sapiens
  misc_RNA (1)...(19): siRNA sense strand
gaugcucaguagucaagug

SEQ ID NO: 1472410 - RNA, 19 nt, Homo sapiens
  misc_RNA (1)...(19): siRNA sense strand
uuaccuagaugcugcaaac

SEQ ID NO: 1472411 - RNA, 19 nt, Homo sapiens
  misc_RNA (1)...(19): siRNA sense strand
gauagaagagcuguuggau

SEQ ID NO: 1472412 - RNA, 19 nt, Homo sapiens
  misc_RNA (1)...(19): siRNA sense strand
ggcuggcgauucauaagga

SEQ ID NO: 1472413 - RNA, 19 nt, Homo sapiens
  misc_RNA (1)...(19): siRNA sense strand
uaaggacgcagacuuguac

SEQ ID NO: 1472414 - RNA, 19 nt, Homo sapiens
  misc_RNA (1)...(19): siRNA sense strand
gaaaaggucccuguaucaa

SEQ ID NO: 1472415 - RNA, 19 nt, Homo sapiens
  misc_RNA (1)...(19): siRNA sense strand
ucuuucugcuggaggaaua

SEQ ID NO: 1472416 - RNA, 19 nt, Homo sapiens
  misc_RNA (1)...(19): siRNA sense strand
acaauaaggacgcagacuu

SEQ ID NO: 1472417 - RNA, 19 nt, Homo sapiens
  misc_RNA (1)...(19): siRNA sense strand
gccgaacuacccagucgua

SEQ ID NO: 1472418 - RNA, 19 nt, Homo sapiens
  misc_RNA (1)...(19): siRNA sense strand
agugcaaucccauggguua

SEQ ID NO: 1472419 - RNA, 19 nt, Homo sapiens
  misc_RNA (1)...(19): siRNA sense strand
auaaggacgcagacuugua

SEQ ID NO: 1472420 - RNA, 19 nt, Homo sapiens
  misc_RNA (1)...(19): siRNA sense strand
agacugcaguggacauguc

SEQ ID NO: 1472421 - RNA, 19 nt, Homo sapiens
  misc_RNA (1)...(19): siRNA sense strand
auacuuugguugcaugaag

SEQ ID NO: 1472422 - RNA, 19 nt, Homo sapiens
  misc_RNA (1)...(19): siRNA sense strand
gggugaugcucaguaguca

SEQ ID NO: 1472423 - RNA, 19 nt, Homo sapiens
  misc_RNA (1)...(19): siRNA sense strand
ucaguagucaagugccuuu

SEQ ID NO: 1472424 - RNA, 19 nt, Homo sapiens
  misc_RNA (1)...(19): siRNA sense strand
aaaguucggcccaaugaag

SEQ ID NO: 1472425 - RNA, 19 nt, Homo sapiens
  misc_RNA (1)...(19): siRNA sense strand
gacggucacaguccuugaa

SEQ ID NO: 1472426 - RNA, 19 nt, Homo sapiens
  misc_RNA (1)...(19): siRNA sense strand
caggugagaagagugauga

SEQ ID NO: 1472427 - RNA, 19 nt, Homo sapiens
  misc_RNA (1)...(19): siRNA sense strand
uaaggauagacacuucuug

SEQ ID NO: 1472428 - RNA, 19 nt, Homo sapiens
  misc_RNA (1)...(19): siRNA sense strand
aaacauccgaggacaaggu

SEQ ID NO: 1472429 - RNA, 19 nt, Homo sapiens
  misc_RNA (1)...(19): siRNA sense strand
guacauugaccauuaaaag

SEQ ID NO: 1472430 - RNA, 19 nt, Homo sapiens
  misc_RNA (1)...(19): siRNA sense strand
aucauuggcugacacuuuc

SEQ ID NO: 1472431 - RNA, 19 nt, Homo sapiens
  misc_RNA (1)...(19): siRNA sense strand
gcaaucccauggguuacac

SEQ ID NO: 1472432 - RNA, 19 nt, Homo sapiens
  misc_RNA (1)...(19): siRNA sense strand
ugugugacaguauuaguga

SEQ ID NO: 1472433 - RNA, 19 nt, Homo sapiens
  misc_RNA (1)...(19): siRNA sense strand
guacacguccagggugaug

SEQ ID NO: 1472434 - RNA, 19 nt, Homo sapiens
  misc_RNA (1)...(19): siRNA sense strand
uagaagagcuguuggauga

SEQ ID NO: 1472435 - RNA, 19 nt, Homo sapiens
  misc_RNA (1)...(19): siRNA sense strand
guauguacauugaccauua

SEQ ID NO: 1472436 - RNA, 19 nt, Homo sapiens
  misc_RNA (1)...(19): siRNA sense strand
gagcgugugugacaguauu

SEQ ID NO: 1472437 - RNA, 19 nt, Homo sapiens
  misc_RNA (1)...(19): siRNA sense strand
caauaaggacgcagacuug

SEQ ID NO: 1472438 - RNA, 19 nt, Homo sapiens
  misc_RNA (1)...(19): siRNA sense strand
gagcugagcgugugugaca

SEQ ID NO: 1472439 - RNA, 19 nt, Homo sapiens
  misc_RNA (1)...(19): siRNA sense strand
caucauuggcugacacuuu

SEQ ID NO: 1472440 - RNA, 19 nt, Homo sapiens
  misc_RNA (1)...(19): siRNA sense strand
guagucaagugccuuugga

SEQ ID NO: 1472441 - RNA, 19 nt, Homo sapiens
  misc_RNA (1)...(19): siRNA sense strand
aaggccaacugaagcaaua

SEQ ID NO: 1472442 - RNA, 19 nt, Homo sapiens
  misc_RNA (1)...(19): siRNA sense strand
ccuagaugcugcaaacaug

SEQ ID NO: 1472443 - RNA, 19 nt, Homo sapiens
  misc_RNA (1)...(19): siRNA sense strand
gcaaacauccgaggacaag

SEQ ID NO: 1472444 - RNA, 19 nt, Homo sapiens
  misc_RNA (1)...(19): siRNA sense strand
ucauaaggauagacacuuc

SEQ ID NO: 1472445 - RNA, 19 nt, Homo sapiens
  misc_RNA (1)...(19): siRNA sense strand
gaacuacccagucguacgu

SEQ ID NO: 1472446 - RNA, 19 nt, Homo sapiens
  misc_RNA (1)...(19): siRNA sense strand
gcccaaggcagguucaaga

SEQ ID NO: 1472447 - RNA, 19 nt, Homo sapiens
  misc_RNA (1)...(19): siRNA sense strand
aaaggucccuguaucaaaa

SEQ ID NO: 1472448 - RNA, 19 nt, Homo sapiens
  misc_RNA (1)...(19): siRNA sense strand
caugaaagaagcaaacauc

SEQ ID NO: 1472449 - RNA, 19 nt, Homo sapiens
  misc_RNA (1)...(19): siRNA sense strand
ccagggugaugcucaguag

SEQ ID NO: 1472450 - RNA, 19 nt, Homo sapiens
  misc_RNA (1)...(19): siRNA sense strand
gaugcucaguagucaagug

SEQ ID NO: 1472451 - RNA, 19 nt, Homo sapiens
  misc_RNA (1)...(19): siRNA sense strand
uuaccuagaugcugcaaac

SEQ ID NO: 1472452 - RNA, 19 nt, Homo sapiens
  misc_RNA (1)...(19): siRNA sense strand
gauagaagagcuguuggau

SEQ ID NO: 1472453 - RNA, 19 nt, Homo sapiens
  misc_RNA (1)...(19): siRNA sense strand
ggcuggcgauucauaagga

SEQ ID NO: 1472454 - RNA, 19 nt, Homo sapiens
  misc_RNA (1)...(19): siRNA sense strand
uaaggacgcagacuuguac

SEQ ID NO: 1472455 - RNA, 19 nt, Homo sapiens
  misc_RNA (1)...(19): siRNA sense strand
gaaaaggucccuguaucaa

SEQ ID NO: 1472456 - RNA, 19 nt, Homo sapiens
  misc_RNA (1)...(19): siRNA sense strand
ucuuucugcuggaggaaua

SEQ ID NO: 1472457 - RNA, 19 nt, Homo sapiens
  misc_RNA (1)...(19): siRNA sense strand
acaauaaggacgcagacuu

SEQ ID NO: 1472458 - RNA, 19 nt, Homo sapiens
  misc_RNA (1)...(19): siRNA sense strand
gccgaacuacccagucgua

SEQ ID NO: 1472459 - RNA, 19 nt, Homo sapiens
  misc_RNA (1)...(19): siRNA sense strand
agugcaaucccauggguua

SEQ ID NO: 1472460 - RNA, 19 nt, Homo sapiens
  misc_RNA (1)...(19): siRNA sense strand
auaaggacgcagacuugua

SEQ ID NO: 1472461 - RNA, 19 nt, Homo sapiens
  misc_RNA (1)...(19): siRNA sense strand
agacugcaguggacauguc

SEQ ID NO: 1472462 - RNA, 19 nt, Homo sapiens
  misc_RNA (1)...(19): siRNA sense strand
gggugaugcucaguaguca

SEQ ID NO: 1472463 - RNA, 19 nt, Homo sapiens
  misc_RNA (1)...(19): siRNA sense strand
auacuuugguugcaugaag

SEQ ID NO: 1472464 - RNA, 19 nt, Homo sapiens
  misc_RNA (1)...(19): siRNA sense strand
ucaguagucaagugccuuu

SEQ ID NO: 1472465 - RNA, 19 nt, Homo sapiens
  misc_RNA (1)...(19): siRNA sense strand
aaaguucggcccaaugaag

SEQ ID NO: 1472466 - RNA, 19 nt, Homo sapiens
  misc_RNA (1)...(19): siRNA sense strand
gacggucacaguccuugaa

SEQ ID NO: 1472467 - RNA, 19 nt, Homo sapiens
  misc_RNA (1)...(19): siRNA sense strand
uaaggauagacacuucuug

SEQ ID NO: 1472468 - RNA, 19 nt, Homo sapiens
  misc_RNA (1)...(19): siRNA sense strand
aaacauccgaggacaaggu

SEQ ID NO: 1472469 - RNA, 19 nt, Homo sapiens
  misc_RNA (1)...(19): siRNA sense strand
guacauugaccauuaaaag

SEQ ID NO: 1472470 - RNA, 19 nt, Homo sapiens
  misc_RNA (1)...(19): siRNA sense strand
guacacguccagggugaug

SEQ ID NO: 1472471 - RNA, 19 nt, Homo sapiens
  misc_RNA (1)...(19): siRNA sense strand
aucauuggcugacacuuuc

SEQ ID NO: 1472472 - RNA, 19 nt, Homo sapiens
  misc_RNA (1)...(19): siRNA sense strand
gcaaucccauggguuacac

SEQ ID NO: 1472473 - RNA, 19 nt, Homo sapiens
  misc_RNA (1)...(19): siRNA sense strand
ugugugacaguauuaguga

SEQ ID NO: 1472474 - RNA, 19 nt, Homo sapiens
  misc_RNA (1)...(19): siRNA sense strand
uagaagagcuguuggauga

SEQ ID NO: 1472475 - RNA, 19 nt, Homo sapiens
  misc_RNA (1)...(19): siRNA sense strand
guauguacauugaccauua

SEQ ID NO: 1472476 - RNA, 19 nt, Homo sapiens
  misc_RNA (1)...(19): siRNA sense strand
gagcgugugugacaguauu

SEQ ID NO: 1472477 - RNA, 19 nt, Homo sapiens
  misc_RNA (1)...(19): siRNA sense strand
caauaaggacgcagacuug

SEQ ID NO: 1472478 - RNA, 19 nt, Homo sapiens
  misc_RNA (1)...(19): siRNA sense strand
gagcugagcgugugugaca

SEQ ID NO: 1472479 - RNA, 19 nt, Homo sapiens
  misc_RNA (1)...(19): siRNA sense strand
caucauuggcugacacuuu

SEQ ID NO: 1472480 - RNA, 19 nt, Homo sapiens
  misc_RNA (1)...(19): siRNA sense strand
guagucaagugccuuugga

SEQ ID NO: 1472481 - RNA, 19 nt, Homo sapiens
  misc_RNA (1)...(19): siRNA sense strand
aaggccaacugaagcaaua

SEQ ID NO: 1472482 - RNA, 19 nt, Homo sapiens
  misc_RNA (1)...(19): siRNA sense strand
ccuagaugcugcaaacaug

SEQ ID NO: 1472483 - RNA, 19 nt, Homo sapiens
  misc_RNA (1)...(19): siRNA sense strand
gcaaacauccgaggacaag

SEQ ID NO: 1472484 - RNA, 19 nt, Homo sapiens
  misc_RNA (1)...(19): siRNA sense strand
ucauaaggauagacacuuc

SEQ ID NO: 1472485 - RNA, 19 nt, Homo sapiens
  misc_RNA (1)...(19): siRNA sense strand
gaacuacccagucguacgu

SEQ ID NO: 1472486 - RNA, 19 nt, Homo sapiens
  misc_RNA (1)...(19): siRNA sense strand
gcccaaggcagguucaaga

SEQ ID NO: 1472487 - RNA, 19 nt, Homo sapiens
  misc_RNA (1)...(19): siRNA sense strand
aaaggucccuguaucaaaa

SEQ ID NO: 1472488 - RNA, 19 nt, Homo sapiens
  misc_RNA (1)...(19): siRNA sense strand
caugaaagaagcaaacauc

SEQ ID NO: 1472489 - RNA, 19 nt, Homo sapiens
  misc_RNA (1)...(19): siRNA sense strand
ccagggugaugcucaguag

SEQ ID NO: 1472490 - RNA, 19 nt, Homo sapiens
  misc_RNA (1)...(19): siRNA sense strand
gaugcucaguagucaagug

SEQ ID NO: 1472491 - RNA, 19 nt, Homo sapiens
  misc_RNA (1)...(19): siRNA sense strand
uuaccuagaugcugcaaac

SEQ ID NO: 1472492 - RNA, 19 nt, Homo sapiens
  misc_RNA (1)...(19): siRNA sense strand
gauagaagagcuguuggau

SEQ ID NO: 1472493 - RNA, 19 nt, Homo sapiens
  misc_RNA (1)...(19): siRNA sense strand
ggcuggcgauucauaagga

SEQ ID NO: 1472494 - RNA, 19 nt, Homo sapiens
  misc_RNA (1)...(19): siRNA sense strand
uaaggacgcagacuuguac

SEQ ID NO: 1472495 - RNA, 19 nt, Homo sapiens
  misc_RNA (1)...(19): siRNA sense strand
gaaaaggucccuguaucaa

SEQ ID NO: 1472496 - RNA, 19 nt, Homo sapiens
  misc_RNA (1)...(19): siRNA sense strand
ucuuucugcuggaggaaua

SEQ ID NO: 1472497 - RNA, 19 nt, Homo sapiens
  misc_RNA (1)...(19): siRNA sense strand
acaauaaggacgcagacuu

SEQ ID NO: 1472498 - RNA, 19 nt, Homo sapiens
  misc_RNA (1)...(19): siRNA sense strand
gccgaacuacccagucgua

SEQ ID NO: 1472499 - RNA, 19 nt, Homo sapiens
  misc_RNA (1)...(19): siRNA sense strand
agugcaaucccauggguua

SEQ ID NO: 1472500 - RNA, 19 nt, Homo sapiens
  misc_RNA (1)...(19): siRNA sense strand
auaaggacgcagacuugua

SEQ ID NO: 1472501 - RNA, 19 nt, Homo sapiens
  misc_RNA (1)...(19): siRNA sense strand
agacugcaguggacauguc

SEQ ID NO: 1472502 - RNA, 19 nt, Homo sapiens
  misc_RNA (1)...(19): siRNA sense strand
gggugaugcucaguaguca

SEQ ID NO: 1472503 - RNA, 19 nt, Homo sapiens
  misc_RNA (1)...(19): siRNA sense strand
auacuuugguugcaugaag

SEQ ID NO: 1472504 - RNA, 19 nt, Homo sapiens
  misc_RNA (1)...(19): siRNA sense strand
ucaguagucaagugccuuu

SEQ ID NO: 1472505 - RNA, 19 nt, Homo sapiens
  misc_RNA (1)...(19): siRNA sense strand
aaaguucggcccaaugaag

SEQ ID NO: 1472506 - RNA, 19 nt, Homo sapiens
  misc_RNA (1)...(19): siRNA sense strand
gacggucacaguccuugaa

SEQ ID NO: 1472507 - RNA, 19 nt, Homo sapiens
  misc_RNA (1)...(19): siRNA sense strand
uaaggauagacacuucuug

SEQ ID NO: 1472508 - RNA, 19 nt, Homo sapiens
  misc_RNA (1)...(19): siRNA sense strand
aaacauccgaggacaaggu

SEQ ID NO: 1472509 - RNA, 19 nt, Homo sapiens
  misc_RNA (1)...(19): siRNA sense strand
guacauugaccauuaaaag

SEQ ID NO: 1472510 - RNA, 19 nt, Homo sapiens
  misc_RNA (1)...(19): siRNA sense strand
guacacguccagggugaug

SEQ ID NO: 1472511 - RNA, 19 nt, Homo sapiens
  misc_RNA (1)...(19): siRNA sense strand
aucauuggcugacacuuuc

SEQ ID NO: 1472512 - RNA, 19 nt, Homo sapiens
  misc_RNA (1)...(19): siRNA sense strand
gcaaucccauggguuacac

SEQ ID NO: 1472513 - RNA, 19 nt, Homo sapiens
  misc_RNA (1)...(19): siRNA sense strand
ugugugacaguauuaguga

SEQ ID NO: 1472514 - RNA, 19 nt, Homo sapiens
  misc_RNA (1)...(19): siRNA sense strand
uagaagagcuguuggauga

SEQ ID NO: 1472515 - RNA, 19 nt, Homo sapiens
  misc_RNA (1)...(19): siRNA sense strand
guauguacauugaccauua

SEQ ID NO: 1472516 - RNA, 19 nt, Homo sapiens
  misc_RNA (1)...(19): siRNA sense strand
gagcgugugugacaguauu

SEQ ID NO: 1472517 - RNA, 19 nt, Homo sapiens
  misc_RNA (1)...(19): siRNA sense strand
caauaaggacgcagacuug

SEQ ID NO: 1472518 - RNA, 19 nt, Homo sapiens
  misc_RNA (1)...(19): siRNA sense strand
gagcugagcgugugugaca

SEQ ID NO: 1472519 - RNA, 19 nt, Homo sapiens
  misc_RNA (1)...(19): siRNA sense strand
caucauuggcugacacuuu

SEQ ID NO: 1472520 - RNA, 19 nt, Homo sapiens
  misc_RNA (1)...(19): siRNA sense strand
guagucaagugccuuugga

SEQ ID NO: 1472521 - RNA, 19 nt, Homo sapiens
  misc_RNA (1)...(19): siRNA sense strand
aaggccaacugaagcaaua

SEQ ID NO: 1472522 - RNA, 19 nt, Homo sapiens
  misc_RNA (1)...(19): siRNA sense strand
ccuagaugcugcaaacaug

SEQ ID NO: 1472523 - RNA, 19 nt, Homo sapiens
  misc_RNA (1)...(19): siRNA sense strand
gcaaacauccgaggacaag

SEQ ID NO: 1472524 - RNA, 19 nt, Homo sapiens
  misc_RNA (1)...(19): siRNA sense strand
ucauaaggauagacacuuc

SEQ ID NO: 1472525 - RNA, 19 nt, Homo sapiens
  misc_RNA (1)...(19): siRNA sense strand
gaacuacccagucguacgu

SEQ ID NO: 1472526 - RNA, 19 nt, Homo sapiens
  misc_RNA (1)...(19): siRNA sense strand
gcccaaggcagguucaaga

SEQ ID NO: 1472527 - RNA, 19 nt, Homo sapiens
  misc_RNA (1)...(19): siRNA sense strand
aaaggucccuguaucaaaa

SEQ ID NO: 1472528 - RNA, 19 nt, Homo sapiens
  misc_RNA (1)...(19): siRNA sense strand
caugaaagaagcaaacauc

SEQ ID NO: 1472529 - RNA, 19 nt, Homo sapiens
  misc_RNA (1)...(19): siRNA sense strand
ccagggugaugcucaguag

SEQ ID NO: 1472530 - RNA, 19 nt, Homo sapiens
  misc_RNA (1)...(19): siRNA sense strand
gaugcucaguagucaagug

SEQ ID NO: 1472531 - RNA, 19 nt, Homo sapiens
  misc_RNA (1)...(19): siRNA sense strand
uuaccuagaugcugcaaac

SEQ ID NO: 1472532 - RNA, 19 nt, Homo sapiens
  misc_RNA (1)...(19): siRNA sense strand
gauagaagagcuguuggau

SEQ ID NO: 1472533 - RNA, 19 nt, Homo sapiens
  misc_RNA (1)...(19): siRNA sense strand
ggcuggcgauucauaagga

SEQ ID NO: 1472534 - RNA, 19 nt, Homo sapiens
  misc_RNA (1)...(19): siRNA sense strand
uaaggacgcagacuuguac

SEQ ID NO: 1472535 - RNA, 19 nt, Homo sapiens
  misc_RNA (1)...(19): siRNA sense strand
gaaaaggucccuguaucaa

SEQ ID NO: 1472536 - RNA, 19 nt, Homo sapiens
  misc_RNA (1)...(19): siRNA sense strand
ucuuucugcuggaggaaua

SEQ ID NO: 1472537 - RNA, 19 nt, Homo sapiens
  misc_RNA (1)...(19): siRNA sense strand
acaauaaggacgcagacuu

SEQ ID NO: 1472538 - RNA, 19 nt, Homo sapiens
  misc_RNA (1)...(19): siRNA sense strand
gccgaacuacccagucgua

SEQ ID NO: 1472539 - RNA, 19 nt, Homo sapiens
  misc_RNA (1)...(19): siRNA sense strand
agugcaaucccauggguua

SEQ ID NO: 1472540 - RNA, 19 nt, Homo sapiens
  misc_RNA (1)...(19): siRNA sense strand
auaaggacgcagacuugua

SEQ ID NO: 1472541 - RNA, 19 nt, Homo sapiens
  misc_RNA (1)...(19): siRNA sense strand
agacugcaguggacauguc

SEQ ID NO: 1472542 - RNA, 19 nt, Homo sapiens
  misc_RNA (1)...(19): siRNA sense strand
auacuuugguugcaugaag

SEQ ID NO: 1472543 - RNA, 19 nt, Homo sapiens
  misc_RNA (1)...(19): siRNA sense strand
gggugaugcucaguaguca

SEQ ID NO: 1472544 - RNA, 19 nt, Homo sapiens
  misc_RNA (1)...(19): siRNA sense strand
ucaguagucaagugccuuu

SEQ ID NO: 1472545 - RNA, 19 nt, Homo sapiens
  misc_RNA (1)...(19): siRNA sense strand
aaaguucggcccaaugaag

SEQ ID NO: 1472546 - RNA, 19 nt, Homo sapiens
  misc_RNA (1)...(19): siRNA sense strand
gacggucacaguccuugaa

SEQ ID NO: 1472547 - RNA, 19 nt, Homo sapiens
  misc_RNA (1)...(19): siRNA sense strand
caggugagaagagugauga

SEQ ID NO: 1472548 - RNA, 19 nt, Homo sapiens
  misc_RNA (1)...(19): siRNA sense strand
uaaggauagacacuucuug

SEQ ID NO: 1472549 - RNA, 19 nt, Homo sapiens
  misc_RNA (1)...(19): siRNA sense strand
aaacauccgaggacaaggu

SEQ ID NO: 1472550 - RNA, 19 nt, Homo sapiens
  misc_RNA (1)...(19): siRNA sense strand
guacauugaccauuaaaag

SEQ ID NO: 1472551 - RNA, 19 nt, Homo sapiens
  misc_RNA (1)...(19): siRNA sense strand
aucauuggcugacacuuuc

SEQ ID NO: 1472552 - RNA, 19 nt, Homo sapiens
  misc_RNA (1)...(19): siRNA sense strand
gcaaucccauggguuacac

SEQ ID NO: 1472553 - RNA, 19 nt, Homo sapiens
  misc_RNA (1)...(19): siRNA sense strand
ugugugacaguauuaguga

SEQ ID NO: 1472554 - RNA, 19 nt, Homo sapiens
  misc_RNA (1)...(19): siRNA sense strand
guacacguccagggugaug

SEQ ID NO: 1472555 - RNA, 19 nt, Homo sapiens
  misc_RNA (1)...(19): siRNA sense strand
uagaagagcuguuggauga

SEQ ID NO: 1472556 - RNA, 19 nt, Homo sapiens
  misc_RNA (1)...(19): siRNA sense strand
guauguacauugaccauua

SEQ ID NO: 1472557 - RNA, 19 nt, Homo sapiens
  misc_RNA (1)...(19): siRNA sense strand
gagcgugugugacaguauu

SEQ ID NO: 1472558 - RNA, 19 nt, Homo sapiens
  misc_RNA (1)...(19): siRNA sense strand
caauaaggacgcagacuug

SEQ ID NO: 1472559 - RNA, 19 nt, Homo sapiens
  misc_RNA (1)...(19): siRNA sense strand
gagcugagcgugugugaca

SEQ ID NO: 1472560 - RNA, 19 nt, Homo sapiens
  misc_RNA (1)...(19): siRNA sense strand
caucauuggcugacacuuu

SEQ ID NO: 1472561 - RNA, 19 nt, Homo sapiens
  misc_RNA (1)...(19): siRNA sense strand
guagucaagugccuuugga

SEQ ID NO: 1472562 - RNA, 19 nt, Homo sapiens
  misc_RNA (1)...(19): siRNA sense strand
aaggccaacugaagcaaua

SEQ ID NO: 1472563 - RNA, 19 nt, Homo sapiens
  misc_RNA (1)...(19): siRNA sense strand
ccuagaugcugcaaacaug

SEQ ID NO: 1472564 - RNA, 19 nt, Homo sapiens
  misc_RNA (1)...(19): siRNA sense strand
gcaaacauccgaggacaag

SEQ ID NO: 1472565 - RNA, 19 nt, Homo sapiens
  misc_RNA (1)...(19): siRNA sense strand
ucauaaggauagacacuuc

SEQ ID NO: 1472566 - RNA, 19 nt, Homo sapiens
  misc_RNA (1)...(19): siRNA sense strand
gaacuacccagucguacgu

SEQ ID NO: 1472567 - RNA, 19 nt, Homo sapiens
  misc_RNA (1)...(19): siRNA sense strand
gcccaaggcagguucaaga

SEQ ID NO: 1472568 - RNA, 19 nt, Homo sapiens
  misc_RNA (1)...(19): siRNA sense strand
aaaggucccuguaucaaaa

SEQ ID NO: 1472569 - RNA, 19 nt, Homo sapiens
  misc_RNA (1)...(19): siRNA sense strand
caugaaagaagcaaacauc

SEQ ID NO: 1472570 - RNA, 19 nt, Homo sapiens
  misc_RNA (1)...(19): siRNA sense strand
ccagggugaugcucaguag

SEQ ID NO: 1472571 - RNA, 19 nt, Homo sapiens
  misc_RNA (1)...(19): siRNA sense strand
gaugcucaguagucaagug

SEQ ID NO: 1472572 - RNA, 19 nt, Homo sapiens
  misc_RNA (1)...(19): siRNA sense strand
uuaccuagaugcugcaaac

SEQ ID NO: 1472573 - RNA, 19 nt, Homo sapiens
  misc_RNA (1)...(19): siRNA sense strand
gauagaagagcuguuggau

SEQ ID NO: 1472574 - RNA, 19 nt, Homo sapiens
  misc_RNA (1)...(19): siRNA sense strand
ggcuggcgauucauaagga

SEQ ID NO: 1472575 - RNA, 19 nt, Homo sapiens
  misc_RNA (1)...(19): siRNA sense strand
uaaggacgcagacuuguac

SEQ ID NO: 1472576 - RNA, 19 nt, Homo sapiens
  misc_RNA (1)...(19): siRNA sense strand
gaaaaggucccuguaucaa

SEQ ID NO: 1472577 - RNA, 19 nt, Homo sapiens
  misc_RNA (1)...(19): siRNA sense strand
ucuuucugcuggaggaaua

SEQ ID NO: 1472578 - RNA, 19 nt, Homo sapiens
  misc_RNA (1)...(19): siRNA sense strand
acaauaaggacgcagacuu

SEQ ID NO: 1472579 - RNA, 19 nt, Homo sapiens
  misc_RNA (1)...(19): siRNA sense strand
gccgaacuacccagucgua

SEQ ID NO: 1472580 - RNA, 19 nt, Homo sapiens
  misc_RNA (1)...(19): siRNA sense strand
agugcaaucccauggguua

SEQ ID NO: 1472581 - RNA, 19 nt, Homo sapiens
  misc_RNA (1)...(19): siRNA sense strand
auaaggacgcagacuugua

SEQ ID NO: 1472582 - RNA, 19 nt, Homo sapiens
  misc_RNA (1)...(19): siRNA sense strand
agacugcaguggacauguc

SEQ ID NO: 1472583 - RNA, 19 nt, Homo sapiens
  misc_RNA (1)...(19): siRNA sense strand
gggugaugcucaguaguca

SEQ ID NO: 1472584 - RNA, 19 nt, Homo sapiens
  misc_RNA (1)...(19): siRNA sense strand
auacuuugguugcaugaag

SEQ ID NO: 1472585 - RNA, 19 nt, Homo sapiens
  misc_RNA (1)...(19): siRNA sense strand
ucaguagucaagugccuuu

SEQ ID NO: 1472586 - RNA, 19 nt, Homo sapiens
  misc_RNA (1)...(19): siRNA sense strand
aaaguucggcccaaugaag

SEQ ID NO: 1472587 - RNA, 19 nt, Homo sapiens
  misc_RNA (1)...(19): siRNA sense strand
gacggucacaguccuugaa

SEQ ID NO: 1472588 - RNA, 19 nt, Homo sapiens
  misc_RNA (1)...(19): siRNA sense strand
uaaggauagacacuucuug

SEQ ID NO: 1472589 - RNA, 19 nt, Homo sapiens
  misc_RNA (1)...(19): siRNA sense strand
aaacauccgaggacaaggu

SEQ ID NO: 1472590 - RNA, 19 nt, Homo sapiens
  misc_RNA (1)...(19): siRNA sense strand
guacauugaccauuaaaag

SEQ ID NO: 1472591 - RNA, 19 nt, Homo sapiens
  misc_RNA (1)...(19): siRNA sense strand
guacacguccagggugaug

SEQ ID NO: 1472592 - RNA, 19 nt, Homo sapiens
  misc_RNA (1)...(19): siRNA sense strand
aucauuggcugacacuuuc

SEQ ID NO: 1472593 - RNA, 19 nt, Homo sapiens
  misc_RNA (1)...(19): siRNA sense strand
gcaaucccauggguuacac

SEQ ID NO: 1472594 - RNA, 19 nt, Homo sapiens
  misc_RNA (1)...(19): siRNA sense strand
ugugugacaguauuaguga

SEQ ID NO: 1472595 - RNA, 19 nt, Homo sapiens
  misc_RNA (1)...(19): siRNA sense strand
uagaagagcuguuggauga

SEQ ID NO: 1472596 - RNA, 19 nt, Homo sapiens
  misc_RNA (1)...(19): siRNA sense strand
guauguacauugaccauua

SEQ ID NO: 1472597 - RNA, 19 nt, Homo sapiens
  misc_RNA (1)...(19): siRNA sense strand
gagcgugugugacaguauu

SEQ ID NO: 1472598 - RNA, 19 nt, Homo sapiens
  misc_RNA (1)...(19): siRNA sense strand
caauaaggacgcagacuug

SEQ ID NO: 1472599 - RNA, 19 nt, Homo sapiens
  misc_RNA (1)...(19): siRNA sense strand
gagcugagcgugugugaca

SEQ ID NO: 1472600 - RNA, 19 nt, Homo sapiens
  misc_RNA (1)...(19): siRNA sense strand
caucauuggcugacacuuu

SEQ ID NO: 1472601 - RNA, 19 nt, Homo sapiens
  misc_RNA (1)...(19): siRNA sense strand
guagucaagugccuuugga

SEQ ID NO: 1472602 - RNA, 19 nt, Homo sapiens
  misc_RNA (1)...(19): siRNA sense strand
aaggccaacugaagcaaua

SEQ ID NO: 1472603 - RNA, 19 nt, Homo sapiens
  misc_RNA (1)...(19): siRNA sense strand
ccuagaugcugcaaacaug

SEQ ID NO: 1472604 - RNA, 19 nt, Homo sapiens
  misc_RNA (1)...(19): siRNA sense strand
gcaaacauccgaggacaag

SEQ ID NO: 1472605 - RNA, 19 nt, Homo sapiens
  misc_RNA (1)...(19): siRNA sense strand
ucauaaggauagacacuuc

SEQ ID NO: 1472606 - RNA, 19 nt, Homo sapiens
  misc_RNA (1)...(19): siRNA sense strand
gaacuacccagucguacgu

SEQ ID NO: 1472607 - RNA, 19 nt, Homo sapiens
  misc_RNA (1)...(19): siRNA sense strand
gcccaaggcagguucaaga

SEQ ID NO: 1472608 - RNA, 19 nt, Homo sapiens
  misc_RNA (1)...(19): siRNA sense strand
aaaggucccuguaucaaaa

SEQ ID NO: 1472609 - RNA, 19 nt, Homo sapiens
  misc_RNA (1)...(19): siRNA sense strand
caugaaagaagcaaacauc

SEQ ID NO: 1472610 - RNA, 19 nt, Homo sapiens
  misc_RNA (1)...(19): siRNA sense strand
ccagggugaugcucaguag

SEQ ID NO: 1472611 - RNA, 19 nt, Homo sapiens
  misc_RNA (1)...(19): siRNA sense strand
gaugcucaguagucaagug

SEQ ID NO: 1472612 - RNA, 19 nt, Homo sapiens
  misc_RNA (1)...(19): siRNA sense strand
uuaccuagaugcugcaaac

SEQ ID NO: 1472613 - RNA, 19 nt, Homo sapiens
  misc_RNA (1)...(19): siRNA sense strand
gauagaagagcuguuggau

SEQ ID NO: 1472614 - RNA, 19 nt, Homo sapiens
  misc_RNA (1)...(19): siRNA sense strand
ggcuggcgauucauaagga

SEQ ID NO: 1472615 - RNA, 19 nt, Homo sapiens
  misc_RNA (1)...(19): siRNA sense strand
uaaggacgcagacuuguac

SEQ ID NO: 1472616 - RNA, 19 nt, Homo sapiens
  misc_RNA (1)...(19): siRNA sense strand
gaaaaggucccuguaucaa

SEQ ID NO: 1472617 - RNA, 19 nt, Homo sapiens
  misc_RNA (1)...(19): siRNA sense strand
ucuuucugcuggaggaaua

SEQ ID NO: 1472618 - RNA, 19 nt, Homo sapiens
  misc_RNA (1)...(19): siRNA sense strand
acaauaaggacgcagacuu

SEQ ID NO: 1472619 - RNA, 19 nt, Homo sapiens
  misc_RNA (1)...(19): siRNA sense strand
gccgaacuacccagucgua

SEQ ID NO: 1472620 - RNA, 19 nt, Homo sapiens
  misc_RNA (1)...(19): siRNA sense strand
agugcaaucccauggguua

SEQ ID NO: 1472621 - RNA, 19 nt, Homo sapiens
  misc_RNA (1)...(19): siRNA sense strand
auaaggacgcagacuugua

SEQ ID NO: 1472622 - RNA, 19 nt, Homo sapiens
  misc_RNA (1)...(19): siRNA sense strand
agacugcaguggacauguc

SEQ ID NO: 1472623 - RNA, 19 nt, Homo sapiens
  misc_RNA (1)...(19): siRNA sense strand
gggugaugcucaguaguca

SEQ ID NO: 1472624 - RNA, 19 nt, Homo sapiens
  misc_RNA (1)...(19): siRNA sense strand
auacuuugguugcaugaag

SEQ ID NO: 1472625 - RNA, 19 nt, Homo sapiens
  misc_RNA (1)...(19): siRNA sense strand
ucaguagucaagugccuuu

SEQ ID NO: 1472626 - RNA, 19 nt, Homo sapiens
  misc_RNA (1)...(19): siRNA sense strand
aaaguucggcccaaugaag

SEQ ID NO: 1472627 - RNA, 19 nt, Homo sapiens
  misc_RNA (1)...(19): siRNA sense strand
gacggucacaguccuugaa

SEQ ID NO: 1472628 - RNA, 19 nt, Homo sapiens
  misc_RNA (1)...(19): siRNA sense strand
uaaggauagacacuucuug

SEQ ID NO: 1472629 - RNA, 19 nt, Homo sapiens
  misc_RNA (1)...(19): siRNA sense strand
aaacauccgaggacaaggu

SEQ ID NO: 1472630 - RNA, 19 nt, Homo sapiens
  misc_RNA (1)...(19): siRNA sense strand
guacauugaccauuaaaag

SEQ ID NO: 1472631 - RNA, 19 nt, Homo sapiens
  misc_RNA (1)...(19): siRNA sense strand
guacacguccagggugaug

SEQ ID NO: 1472632 - RNA, 19 nt, Homo sapiens
  misc_RNA (1)...(19): siRNA sense strand
aucauuggcugacacuuuc

SEQ ID NO: 1472633 - RNA, 19 nt, Homo sapiens
  misc_RNA (1)...(19): siRNA sense strand
gcaaucccauggguuacac

SEQ ID NO: 1472634 - RNA, 19 nt, Homo sapiens
  misc_RNA (1)...(19): siRNA sense strand
ugugugacaguauuaguga

SEQ ID NO: 1472635 - RNA, 19 nt, Homo sapiens
  misc_RNA (1)...(19): siRNA sense strand
uagaagagcuguuggauga

SEQ ID NO: 1472636 - RNA, 19 nt, Homo sapiens
  misc_RNA (1)...(19): siRNA sense strand
guauguacauugaccauua

SEQ ID NO: 1472637 - RNA, 19 nt, Homo sapiens
  misc_RNA (1)...(19): siRNA sense strand
gagcgugugugacaguauu

SEQ ID NO: 1472638 - RNA, 19 nt, Homo sapiens
  misc_RNA (1)...(19): siRNA sense strand
caauaaggacgcagacuug

SEQ ID NO: 1472639 - RNA, 19 nt, Homo sapiens
  misc_RNA (1)...(19): siRNA sense strand
gagcugagcgugugugaca

SEQ ID NO: 1472640 - RNA, 19 nt, Homo sapiens
  misc_RNA (1)...(19): siRNA sense strand
caucauuggcugacacuuu

SEQ ID NO: 1472641 - RNA, 19 nt, Homo sapiens
  misc_RNA (1)...(19): siRNA sense strand
guagucaagugccuuugga

SEQ ID NO: 1472642 - RNA, 19 nt, Homo sapiens
  misc_RNA (1)...(19): siRNA sense strand
aaggccaacugaagcaaua

SEQ ID NO: 1472643 - RNA, 19 nt, Homo sapiens
  misc_RNA (1)...(19): siRNA sense strand
ccuagaugcugcaaacaug

SEQ ID NO: 1472644 - RNA, 19 nt, Homo sapiens
  misc_RNA (1)...(19): siRNA sense strand
gcaaacauccgaggacaag

SEQ ID NO: 1472645 - RNA, 19 nt, Homo sapiens
  misc_RNA (1)...(19): siRNA sense strand
ucauaaggauagacacuuc

SEQ ID NO: 1472646 - RNA, 19 nt, Homo sapiens
  misc_RNA (1)...(19): siRNA sense strand
gaacuacccagucguacgu

SEQ ID NO: 1472647 - RNA, 19 nt, Homo sapiens
  misc_RNA (1)...(19): siRNA sense strand
gcccaaggcagguucaaga

SEQ ID NO: 1472648 - RNA, 19 nt, Homo sapiens
  misc_RNA (1)...(19): siRNA sense strand
aaaggucccuguaucaaaa

SEQ ID NO: 1472649 - RNA, 19 nt, Homo sapiens
  misc_RNA (1)...(19): siRNA sense strand
caugaaagaagcaaacauc

SEQ ID NO: 1472650 - RNA, 19 nt, Homo sapiens
  misc_RNA (1)...(19): siRNA sense strand
ccagggugaugcucaguag

SEQ ID NO: 1472651 - RNA, 19 nt, Homo sapiens
  misc_RNA (1)...(19): siRNA sense strand
gaugcucaguagucaagug

SEQ ID NO: 1472652 - RNA, 19 nt, Homo sapiens
  misc_RNA (1)...(19): siRNA sense strand
uuaccuagaugcugcaaac

SEQ ID NO: 1472653 - RNA, 19 nt, Homo sapiens
  misc_RNA (1)...(19): siRNA sense strand
gauagaagagcuguuggau

SEQ ID NO: 1472654 - RNA, 19 nt, Homo sapiens
  misc_RNA (1)...(19): siRNA sense strand
ggcuggcgauucauaagga

SEQ ID NO: 1472655 - RNA, 19 nt, Homo sapiens
  misc_RNA (1)...(19): siRNA sense strand
uaaggacgcagacuuguac

SEQ ID NO: 1472656 - RNA, 19 nt, Homo sapiens
  misc_RNA (1)...(19): siRNA sense strand
gaaaaggucccuguaucaa

SEQ ID NO: 1472657 - RNA, 19 nt, Homo sapiens
  misc_RNA (1)...(19): siRNA sense strand
ucuuucugcuggaggaaua

SEQ ID NO: 1472658 - RNA, 19 nt, Homo sapiens
  misc_RNA (1)...(19): siRNA sense strand
acaauaaggacgcagacuu

SEQ ID NO: 1472659 - RNA, 19 nt, Homo sapiens
  misc_RNA (1)...(19): siRNA sense strand
gccgaacuacccagucgua

SEQ ID NO: 1472660 - RNA, 19 nt, Homo sapiens
  misc_RNA (1)...(19): siRNA sense strand
agugcaaucccauggguua

SEQ ID NO: 1472661 - RNA, 19 nt, Homo sapiens
  misc_RNA (1)...(19): siRNA sense strand
auaaggacgcagacuugua

SEQ ID NO: 1472662 - RNA, 19 nt, Homo sapiens
  misc_RNA (1)...(19): siRNA sense strand
agacugcaguggacauguc

SEQ ID NO: 1472663 - RNA, 19 nt, Homo sapiens
  misc_RNA (1)...(19): siRNA sense strand
auacuuugguugcaugaag

SEQ ID NO: 1472664 - RNA, 19 nt, Homo sapiens
  misc_RNA (1)...(19): siRNA sense strand
gggugaugcucaguaguca

SEQ ID NO: 1472665 - RNA, 19 nt, Homo sapiens
  misc_RNA (1)...(19): siRNA sense strand
ucaguagucaagugccuuu

SEQ ID NO: 1472666 - RNA, 19 nt, Homo sapiens
  misc_RNA (1)...(19): siRNA sense strand
aaaguucggcccaaugaag

SEQ ID NO: 1472667 - RNA, 19 nt, Homo sapiens
  misc_RNA (1)...(19): siRNA sense strand
gacggucacaguccuugaa

SEQ ID NO: 1472668 - RNA, 19 nt, Homo sapiens
  misc_RNA (1)...(19): siRNA sense strand
caggugagaagagugauga

SEQ ID NO: 1472669 - RNA, 19 nt, Homo sapiens
  misc_RNA (1)...(19): siRNA sense strand
uaaggauagacacuucuug

SEQ ID NO: 1472670 - RNA, 19 nt, Homo sapiens
  misc_RNA (1)...(19): siRNA sense strand
aaacauccgaggacaaggu

SEQ ID NO: 1472671 - RNA, 19 nt, Homo sapiens
  misc_RNA (1)...(19): siRNA sense strand
guacauugaccauuaaaag

SEQ ID NO: 1472672 - RNA, 19 nt, Homo sapiens
  misc_RNA (1)...(19): siRNA sense strand
aucauuggcugacacuuuc

SEQ ID NO: 1472673 - RNA, 19 nt, Homo sapiens
  misc_RNA (1)...(19): siRNA sense strand
gcaaucccauggguuacac

SEQ ID NO: 1472674 - RNA, 19 nt, Homo sapiens
  misc_RNA (1)...(19): siRNA sense strand
ugugugacaguauuaguga

SEQ ID NO: 1472675 - RNA, 19 nt, Homo sapiens
  misc_RNA (1)...(19): siRNA sense strand
guacacguccagggugaug

SEQ ID NO: 1472676 - RNA, 19 nt, Homo sapiens
  misc_RNA (1)...(19): siRNA sense strand
uagaagagcuguuggauga

SEQ ID NO: 1472677 - RNA, 19 nt, Homo sapiens
  misc_RNA (1)...(19): siRNA sense strand
guauguacauugaccauua

SEQ ID NO: 1472678 - RNA, 19 nt, Homo sapiens
  misc_RNA (1)...(19): siRNA sense strand
gagcgugugugacaguauu

SEQ ID NO: 1472679 - RNA, 19 nt, Homo sapiens
  misc_RNA (1)...(19): siRNA sense strand
caauaaggacgcagacuug

SEQ ID NO: 1472680 - RNA, 19 nt, Homo sapiens
  misc_RNA (1)...(19): siRNA sense strand
gagcugagcgugugugaca

SEQ ID NO: 1472681 - RNA, 19 nt, Homo sapiens
  misc_RNA (1)...(19): siRNA sense strand
caucauuggcugacacuuu

SEQ ID NO: 1472682 - RNA, 19 nt, Homo sapiens
  misc_RNA (1)...(19): siRNA sense strand
guagucaagugccuuugga

SEQ ID NO: 1472683 - RNA, 19 nt, Homo sapiens
  misc_RNA (1)...(19): siRNA sense strand
aaggccaacugaagcaaua

SEQ ID NO: 1472684 - RNA, 19 nt, Homo sapiens
  misc_RNA (1)...(19): siRNA sense strand
ccuagaugcugcaaacaug

SEQ ID NO: 1472685 - RNA, 19 nt, Homo sapiens
  misc_RNA (1)...(19): siRNA sense strand
gcaaacauccgaggacaag

SEQ ID NO: 1472686 - RNA, 19 nt, Homo sapiens
  misc_RNA (1)...(19): siRNA sense strand
ucauaaggauagacacuuc

SEQ ID NO: 1472687 - RNA, 19 nt, Homo sapiens
  misc_RNA (1)...(19): siRNA sense strand
gaacuacccagucguacgu

SEQ ID NO: 1472688 - RNA, 19 nt, Homo sapiens
  misc_RNA (1)...(19): siRNA sense strand
gcccaaggcagguucaaga

SEQ ID NO: 1472689 - RNA, 19 nt, Homo sapiens
  misc_RNA (1)...(19): siRNA sense strand
aaaggucccuguaucaaaa

SEQ ID NO: 1472690 - RNA, 19 nt, Homo sapiens
  misc_RNA (1)...(19): siRNA sense strand
caugaaagaagcaaacauc

SEQ ID NO: 1472691 - RNA, 19 nt, Homo sapiens
  misc_RNA (1)...(19): siRNA sense strand
ccagggugaugcucaguag

SEQ ID NO: 1472692 - RNA, 19 nt, Homo sapiens
  misc_RNA (1)...(19): siRNA sense strand
gaugcucaguagucaagug

SEQ ID NO: 1472693 - RNA, 19 nt, Homo sapiens
  misc_RNA (1)...(19): siRNA sense strand
uuaccuagaugcugcaaac

SEQ ID NO: 1472694 - RNA, 19 nt, Homo sapiens
  misc_RNA (1)...(19): siRNA sense strand
gauagaagagcuguuggau

SEQ ID NO: 1472695 - RNA, 19 nt, Homo sapiens
  misc_RNA (1)...(19): siRNA sense strand
ggcuggcgauucauaagga

SEQ ID NO: 1472696 - RNA, 19 nt, Homo sapiens
  misc_RNA (1)...(19): siRNA sense strand
uaaggacgcagacuuguac

SEQ ID NO: 1472697 - RNA, 19 nt, Homo sapiens
  misc_RNA (1)...(19): siRNA sense strand
gaaaaggucccuguaucaa

SEQ ID NO: 1472698 - RNA, 19 nt, Homo sapiens
  misc_RNA (1)...(19): siRNA sense strand
ucuuucugcuggaggaaua

SEQ ID NO: 1472699 - RNA, 19 nt, Homo sapiens
  misc_RNA (1)...(19): siRNA sense strand
acaauaaggacgcagacuu

SEQ ID NO: 1472700 - RNA, 19 nt, Homo sapiens
  misc_RNA (1)...(19): siRNA sense strand
gccgaacuacccagucgua

SEQ ID NO: 1472701 - RNA, 19 nt, Homo sapiens
  misc_RNA (1)...(19): siRNA sense strand
agugcaaucccauggguua

SEQ ID NO: 1472702 - RNA, 19 nt, Homo sapiens
  misc_RNA (1)...(19): siRNA sense strand
auaaggacgcagacuugua

SEQ ID NO: 1472703 - RNA, 19 nt, Homo sapiens
  misc_RNA (1)...(19): siRNA sense strand
agacugcaguggacauguc

SEQ ID NO: 1472704 - RNA, 19 nt, Homo sapiens
  misc_RNA (1)...(19): siRNA sense strand
gggugaugcucaguaguca

SEQ ID NO: 1472705 - RNA, 19 nt, Homo sapiens
  misc_RNA (1)...(19): siRNA sense strand
auacuuugguugcaugaag

SEQ ID NO: 1472706 - RNA, 19 nt, Homo sapiens
  misc_RNA (1)...(19): siRNA sense strand
ucaguagucaagugccuuu

SEQ ID NO: 1472707 - RNA, 19 nt, Homo sapiens
  misc_RNA (1)...(19): siRNA sense strand
aaaguucggcccaaugaag

SEQ ID NO: 1472708 - RNA, 19 nt, Homo sapiens
  misc_RNA (1)...(19): siRNA sense strand
gacggucacaguccuugaa

SEQ ID NO: 1472709 - RNA, 19 nt, Homo sapiens
  misc_RNA (1)...(19): siRNA sense strand
uaaggauagacacuucuug

SEQ ID NO: 1472710 - RNA, 19 nt, Homo sapiens
  misc_RNA (1)...(19): siRNA sense strand
aaacauccgaggacaaggu

SEQ ID NO: 1472711 - RNA, 19 nt, Homo sapiens
  misc_RNA (1)...(19): siRNA sense strand
guacauugaccauuaaaag

SEQ ID NO: 1472712 - RNA, 19 nt, Homo sapiens
  misc_RNA (1)...(19): siRNA sense strand
guacacguccagggugaug

SEQ ID NO: 1472713 - RNA, 19 nt, Homo sapiens
  misc_RNA (1)...(19): siRNA sense strand
aucauuggcugacacuuuc

SEQ ID NO: 1472714 - RNA, 19 nt, Homo sapiens
  misc_RNA (1)...(19): siRNA sense strand
gcaaucccauggguuacac

SEQ ID NO: 1472715 - RNA, 19 nt, Homo sapiens
  misc_RNA (1)...(19): siRNA sense strand
ugugugacaguauuaguga

SEQ ID NO: 1472716 - RNA, 19 nt, Homo sapiens
  misc_RNA (1)...(19): siRNA sense strand
uagaagagcuguuggauga

SEQ ID NO: 1472717 - RNA, 19 nt, Homo sapiens
  misc_RNA (1)...(19): siRNA sense strand
guauguacauugaccauua

SEQ ID NO: 1472718 - RNA, 19 nt, Homo sapiens
  misc_RNA (1)...(19): siRNA sense strand
gagcgugugugacaguauu

SEQ ID NO: 1472719 - RNA, 19 nt, Homo sapiens
  misc_RNA (1)...(19): siRNA sense strand
caauaaggacgcagacuug

SEQ ID NO: 1472720 - RNA, 19 nt, Homo sapiens
  misc_RNA (1)...(19): siRNA sense strand
gagcugagcgugugugaca

SEQ ID NO: 1472721 - RNA, 19 nt, Homo sapiens
  misc_RNA (1)...(19): siRNA sense strand
caucauuggcugacacuuu

SEQ ID NO: 1472722 - RNA, 19 nt, Homo sapiens
  misc_RNA (1)...(19): siRNA sense strand
guagucaagugccuuugga

SEQ ID NO: 1472723 - RNA, 19 nt, Homo sapiens
  misc_RNA (1)...(19): siRNA sense strand
aaggccaacugaagcaaua

SEQ ID NO: 1472724 - RNA, 19 nt, Homo sapiens
  misc_RNA (1)...(19): siRNA sense strand
ccuagaugcugcaaacaug

SEQ ID NO: 1472725 - RNA, 19 nt, Homo sapiens
  misc_RNA (1)...(19): siRNA sense strand
gcaaacauccgaggacaag

SEQ ID NO: 1472726 - RNA, 19 nt, Homo sapiens
  misc_RNA (1)...(19): siRNA sense strand
ucauaaggauagacacuuc

SEQ ID NO: 1472727 - RNA, 19 nt, Homo sapiens
  misc_RNA (1)...(19): siRNA sense strand
gaacuacccagucguacgu

SEQ ID NO: 1472728 - RNA, 19 nt, Homo sapiens
  misc_RNA (1)...(19): siRNA sense strand
gcccaaggcagguucaaga

SEQ ID NO: 1472729 - RNA, 19 nt, Homo sapiens
  misc_RNA (1)...(19): siRNA sense strand
aaaggucccuguaucaaaa

SEQ ID NO: 1472730 - RNA, 19 nt, Homo sapiens
  misc_RNA (1)...(19): siRNA sense strand
caugaaagaagcaaacauc

SEQ ID NO: 1472731 - RNA, 19 nt, Homo sapiens
  misc_RNA (1)...(19): siRNA sense strand
ccagggugaugcucaguag

SEQ ID NO: 1472732 - RNA, 19 nt, Homo sapiens
  misc_RNA (1)...(19): siRNA sense strand
gaugcucaguagucaagug

SEQ ID NO: 1472733 - RNA, 19 nt, Homo sapiens
  misc_RNA (1)...(19): siRNA sense strand
uuaccuagaugcugcaaac

SEQ ID NO: 1472734 - RNA, 19 nt, Homo sapiens
  misc_RNA (1)...(19): siRNA sense strand
gauagaagagcuguuggau

SEQ ID NO: 1472735 - RNA, 19 nt, Homo sapiens
  misc_RNA (1)...(19): siRNA sense strand
ggcuggcgauucauaagga

SEQ ID NO: 1472736 - RNA, 19 nt, Homo sapiens
  misc_RNA (1)...(19): siRNA sense strand
uaaggacgcagacuuguac

SEQ ID NO: 1472737 - RNA, 19 nt, Homo sapiens
  misc_RNA (1)...(19): siRNA sense strand
gaaaaggucccuguaucaa

SEQ ID NO: 1472738 - RNA, 19 nt, Homo sapiens
  misc_RNA (1)...(19): siRNA sense strand
ucuuucugcuggaggaaua

SEQ ID NO: 1472739 - RNA, 19 nt, Homo sapiens
  misc_RNA (1)...(19): siRNA sense strand
acaauaaggacgcagacuu

SEQ ID NO: 1472740 - RNA, 19 nt, Homo sapiens
  misc_RNA (1)...(19): siRNA sense strand
gccgaacuacccagucgua

SEQ ID NO: 1472741 - RNA, 19 nt, Homo sapiens
  misc_RNA (1)...(19): siRNA sense strand
agugcaaucccauggguua

SEQ ID NO: 1472742 - RNA, 19 nt, Homo sapiens
  misc_RNA (1)...(19): siRNA sense strand
auaaggacgcagacuugua

SEQ ID NO: 1472743 - RNA, 19 nt, Homo sapiens
  misc_RNA (1)...(19): siRNA sense strand
agacugcaguggacauguc

SEQ ID NO: 1472744 - RNA, 19 nt, Homo sapiens
  misc_RNA (1)...(19): siRNA sense strand
gggugaugcucaguaguca

SEQ ID NO: 1472745 - RNA, 19 nt, Homo sapiens
  misc_RNA (1)...(19): siRNA sense strand
auacuuugguugcaugaag

SEQ ID NO: 1472746 - RNA, 19 nt, Homo sapiens
  misc_RNA (1)...(19): siRNA sense strand
ucaguagucaagugccuuu

SEQ ID NO: 1472747 - RNA, 19 nt, Homo sapiens
  misc_RNA (1)...(19): siRNA sense strand
aaaguucggcccaaugaag

SEQ ID NO: 1472748 - RNA, 19 nt, Homo sapiens
  misc_RNA (1)...(19): siRNA sense strand
gacggucacaguccuugaa

SEQ ID NO: 1472749 - RNA, 19 nt, Homo sapiens
  misc_RNA (1)...(19): siRNA sense strand
uaaggauagacacuucuug

SEQ ID NO: 1472750 - RNA, 19 nt, Homo sapiens
  misc_RNA (1)...(19): siRNA sense strand
aaacauccgaggacaaggu

SEQ ID NO: 1472751 - RNA, 19 nt, Homo sapiens
  misc_RNA (1)...(19): siRNA sense strand
guacauugaccauuaaaag

SEQ ID NO: 1472752 - RNA, 19 nt, Homo sapiens
  misc_RNA (1)...(19): siRNA sense strand
guacacguccagggugaug

SEQ ID NO: 1472753 - RNA, 19 nt, Homo sapiens
  misc_RNA (1)...(19): siRNA sense strand
aucauuggcugacacuuuc

SEQ ID NO: 1472754 - RNA, 19 nt, Homo sapiens
  misc_RNA (1)...(19): siRNA sense strand
gcaaucccauggguuacac

SEQ ID NO: 1472755 - RNA, 19 nt, Homo sapiens
  misc_RNA (1)...(19): siRNA sense strand
ugugugacaguauuaguga

SEQ ID NO: 1472756 - RNA, 19 nt, Homo sapiens
  misc_RNA (1)...(19): siRNA sense strand
uagaagagcuguuggauga

SEQ ID NO: 1472757 - RNA, 19 nt, Homo sapiens
  misc_RNA (1)...(19): siRNA sense strand
guauguacauugaccauua

SEQ ID NO: 1472758 - RNA, 19 nt, Homo sapiens
  misc_RNA (1)...(19): siRNA sense strand
gagcgugugugacaguauu

SEQ ID NO: 1472759 - RNA, 19 nt, Homo sapiens
  misc_RNA (1)...(19): siRNA sense strand
caauaaggacgcagacuug

SEQ ID NO: 1472760 - RNA, 19 nt, Homo sapiens
  misc_RNA (1)...(19): siRNA sense strand
gagcugagcgugugugaca

SEQ ID NO: 1472761 - RNA, 19 nt, Homo sapiens
  misc_RNA (1)...(19): siRNA sense strand
caucauuggcugacacuuu

SEQ ID NO: 1472762 - RNA, 19 nt, Homo sapiens
  misc_RNA (1)...(19): siRNA sense strand
guagucaagugccuuugga

SEQ ID NO: 1472763 - RNA, 19 nt, Homo sapiens
  misc_RNA (1)...(19): siRNA sense strand
aaggccaacugaagcaaua

SEQ ID NO: 1472764 - RNA, 19 nt, Homo sapiens
  misc_RNA (1)...(19): siRNA sense strand
ccuagaugcugcaaacaug

SEQ ID NO: 1472765 - RNA, 19 nt, Homo sapiens
  misc_RNA (1)...(19): siRNA sense strand
gcaaacauccgaggacaag

SEQ ID NO: 1472766 - RNA, 19 nt, Homo sapiens
  misc_RNA (1)...(19): siRNA sense strand
ucauaaggauagacacuuc

SEQ ID NO: 1472767 - RNA, 19 nt, Homo sapiens
  misc_RNA (1)...(19): siRNA sense strand
gaacuacccagucguacgu

SEQ ID NO: 1472768 - RNA, 19 nt, Homo sapiens
  misc_RNA (1)...(19): siRNA sense strand
gcccaaggcagguucaaga

SEQ ID NO: 1472769 - RNA, 19 nt, Homo sapiens
  misc_RNA (1)...(19): siRNA sense strand
aaaggucccuguaucaaaa

SEQ ID NO: 1472770 - RNA, 19 nt, Homo sapiens
  misc_RNA (1)...(19): siRNA sense strand
caugaaagaagcaaacauc

SEQ ID NO: 1472771 - RNA, 19 nt, Homo sapiens
  misc_RNA (1)...(19): siRNA sense strand
ccagggugaugcucaguag

SEQ ID NO: 1472772 - RNA, 19 nt, Homo sapiens
  misc_RNA (1)...(19): siRNA sense strand
gaugcucaguagucaagug

SEQ ID NO: 1472773 - RNA, 19 nt, Homo sapiens
  misc_RNA (1)...(19): siRNA sense strand
uuaccuagaugcugcaaac

SEQ ID NO: 1472774 - RNA, 19 nt, Homo sapiens
  misc_RNA (1)...(19): siRNA sense strand
gauagaagagcuguuggau

SEQ ID NO: 1472775 - RNA, 19 nt, Homo sapiens
  misc_RNA (1)...(19): siRNA sense strand
ggcuggcgauucauaagga

SEQ ID NO: 1472776 - RNA, 19 nt, Homo sapiens
  misc_RNA (1)...(19): siRNA sense strand
uaaggacgcagacuuguac

SEQ ID NO: 1472777 - RNA, 19 nt, Homo sapiens
  misc_RNA (1)...(19): siRNA sense strand
gaaaaggucccuguaucaa

SEQ ID NO: 1472778 - RNA, 19 nt, Homo sapiens
  misc_RNA (1)...(19): siRNA sense strand
ucuuucugcuggaggaaua

SEQ ID NO: 1472779 - RNA, 19 nt, Homo sapiens
  misc_RNA (1)...(19): siRNA sense strand
acaauaaggacgcagacuu

SEQ ID NO: 1472780 - RNA, 19 nt, Homo sapiens
  misc_RNA (1)...(19): siRNA sense strand
gccgaacuacccagucgua

SEQ ID NO: 1472781 - RNA, 19 nt, Homo sapiens
  misc_RNA (1)...(19): siRNA sense strand
agugcaaucccauggguua

SEQ ID NO: 1472782 - RNA, 19 nt, Homo sapiens
  misc_RNA (1)...(19): siRNA sense strand
auaaggacgcagacuugua

SEQ ID NO: 1472783 - RNA, 19 nt, Homo sapiens
  misc_RNA (1)...(19): siRNA sense strand
agacugcaguggacauguc

SEQ ID NO: 1472784 - RNA, 19 nt, Homo sapiens
  misc_RNA (1)...(19): siRNA sense strand
auacuuugguugcaugaag

SEQ ID NO: 1472785 - RNA, 19 nt, Homo sapiens
  misc_RNA (1)...(19): siRNA sense strand
gggugaugcucaguaguca

SEQ ID NO: 1472786 - RNA, 19 nt, Homo sapiens
  misc_RNA (1)...(19): siRNA sense strand
ucaguagucaagugccuuu

SEQ ID NO: 1472787 - RNA, 19 nt, Homo sapiens
  misc_RNA (1)...(19): siRNA sense strand
aaaguucggcccaaugaag

SEQ ID NO: 1472788 - RNA, 19 nt, Homo sapiens
  misc_RNA (1)...(19): siRNA sense strand
gacggucacaguccuugaa

SEQ ID NO: 1472789 - RNA, 19 nt, Homo sapiens
  misc_RNA (1)...(19): siRNA sense strand
caggugagaagagugauga

SEQ ID NO: 1472790 - RNA, 19 nt, Homo sapiens
  misc_RNA (1)...(19): siRNA sense strand
uaaggauagacacuucuug

SEQ ID NO: 1472791 - RNA, 19 nt, Homo sapiens
  misc_RNA (1)...(19): siRNA sense strand
aaacauccgaggacaaggu

SEQ ID NO: 1472792 - RNA, 19 nt, Homo sapiens
  misc_RNA (1)...(19): siRNA sense strand
guacauugaccauuaaaag

SEQ ID NO: 1472793 - RNA, 19 nt, Homo sapiens
  misc_RNA (1)...(19): siRNA sense strand
aucauuggcugacacuuuc

SEQ ID NO: 1472794 - RNA, 19 nt, Homo sapiens
  misc_RNA (1)...(19): siRNA sense strand
gcaaucccauggguuacac

SEQ ID NO: 1472795 - RNA, 19 nt, Homo sapiens
  misc_RNA (1)...(19): siRNA sense strand
ugugugacaguauuaguga

SEQ ID NO: 1472796 - RNA, 19 nt, Homo sapiens
  misc_RNA (1)...(19): siRNA sense strand
guacacguccagggugaug

SEQ ID NO: 1472797 - RNA, 19 nt, Homo sapiens
  misc_RNA (1)...(19): siRNA sense strand
uagaagagcuguuggauga

SEQ ID NO: 1472798 - RNA, 19 nt, Homo sapiens
  misc_RNA (1)...(19): siRNA sense strand
guauguacauugaccauua

SEQ ID NO: 1472799 - RNA, 19 nt, Homo sapiens
  misc_RNA (1)...(19): siRNA sense strand
gagcgugugugacaguauu

SEQ ID NO: 1472800 - RNA, 19 nt, Homo sapiens
  misc_RNA (1)...(19): siRNA sense strand
caauaaggacgcagacuug

SEQ ID NO: 1472801 - RNA, 19 nt, Homo sapiens
  misc_RNA (1)...(19): siRNA sense strand
gagcugagcgugugugaca

SEQ ID NO: 1472802 - RNA, 19 nt, Homo sapiens
  misc_RNA (1)...(19): siRNA sense strand
caucauuggcugacacuuu

SEQ ID NO: 1472803 - RNA, 19 nt, Homo sapiens
  misc_RNA (1)...(19): siRNA sense strand
guagucaagugccuuugga

SEQ ID NO: 1472804 - RNA, 19 nt, Homo sapiens
  misc_RNA (1)...(19): siRNA sense strand
aaggccaacugaagcaaua

SEQ ID NO: 1472805 - RNA, 19 nt, Homo sapiens
  misc_RNA (1)...(19): siRNA sense strand
ccuagaugcugcaaacaug

SEQ ID NO: 1472806 - RNA, 19 nt, Homo sapiens
  misc_RNA (1)...(19): siRNA sense strand
gcaaacauccgaggacaag

SEQ ID NO: 1472807 - RNA, 19 nt, Homo sapiens
  misc_RNA (1)...(19): siRNA sense strand
ucauaaggauagacacuuc

SEQ ID NO: 1472808 - RNA, 19 nt, Homo sapiens
  misc_RNA (1)...(19): siRNA sense strand
gaacuacccagucguacgu

SEQ ID NO: 1472809 - RNA, 19 nt, Homo sapiens
  misc_RNA (1)...(19): siRNA sense strand
gcccaaggcagguucaaga

SEQ ID NO: 1472810 - RNA, 19 nt, Homo sapiens
  misc_RNA (1)...(19): siRNA sense strand
aaaggucccuguaucaaaa

SEQ ID NO: 1472811 - RNA, 19 nt, Homo sapiens
  misc_RNA (1)...(19): siRNA sense strand
caugaaagaagcaaacauc

SEQ ID NO: 1472812 - RNA, 19 nt, Homo sapiens
  misc_RNA (1)...(19): siRNA sense strand
ccagggugaugcucaguag

SEQ ID NO: 1472813 - RNA, 19 nt, Homo sapiens
  misc_RNA (1)...(19): siRNA sense strand
gaugcucaguagucaagug

SEQ ID NO: 1472814 - RNA, 19 nt, Homo sapiens
  misc_RNA (1)...(19): siRNA sense strand
uuaccuagaugcugcaaac

SEQ ID NO: 1472815 - RNA, 19 nt, Homo sapiens
  misc_RNA (1)...(19): siRNA sense strand
gauagaagagcuguuggau

SEQ ID NO: 1472816 - RNA, 19 nt, Homo sapiens
  misc_RNA (1)...(19): siRNA sense strand
ggcuggcgauucauaagga

SEQ ID NO: 1472817 - RNA, 19 nt, Homo sapiens
  misc_RNA (1)...(19): siRNA sense strand
uaaggacgcagacuuguac

SEQ ID NO: 1472818 - RNA, 19 nt, Homo sapiens
  misc_RNA (1)...(19): siRNA sense strand
gaaaaggucccuguaucaa

SEQ ID NO: 1472819 - RNA, 19 nt, Homo sapiens
  misc_RNA (1)...(19): siRNA sense strand
ucuuucugcuggaggaaua

SEQ ID NO: 1472820 - RNA, 19 nt, Homo sapiens
  misc_RNA (1)...(19): siRNA sense strand
acaauaaggacgcagacuu

SEQ ID NO: 1472821 - RNA, 19 nt, Homo sapiens
  misc_RNA (1)...(19): siRNA sense strand
gccgaacuacccagucgua

SEQ ID NO: 1472822 - RNA, 19 nt, Homo sapiens
  misc_RNA (1)...(19): siRNA sense strand
agugcaaucccauggguua

SEQ ID NO: 1472823 - RNA, 19 nt, Homo sapiens
  misc_RNA (1)...(19): siRNA sense strand
auaaggacgcagacuugua

SEQ ID NO: 1472824 - RNA, 19 nt, Homo sapiens
  misc_RNA (1)...(19): siRNA sense strand
agacugcaguggacauguc

SEQ ID NO: 1472825 - RNA, 19 nt, Homo sapiens
  misc_RNA (1)...(19): siRNA sense strand
gggugaugcucaguaguca

SEQ ID NO: 1472826 - RNA, 19 nt, Homo sapiens
  misc_RNA (1)...(19): siRNA sense strand
auacuuugguugcaugaag

SEQ ID NO: 1472827 - RNA, 19 nt, Homo sapiens
  misc_RNA (1)...(19): siRNA sense strand
ucaguagucaagugccuuu

SEQ ID NO: 1472828 - RNA, 19 nt, Homo sapiens
  misc_RNA (1)...(19): siRNA sense strand
aaaguucggcccaaugaag

SEQ ID NO: 1472829 - RNA, 19 nt, Homo sapiens
  misc_RNA (1)...(19): siRNA sense strand
gacggucacaguccuugaa

SEQ ID NO: 1472830 - RNA, 19 nt, Homo sapiens
  misc_RNA (1)...(19): siRNA sense strand
uaaggauagacacuucuug

SEQ ID NO: 1472831 - RNA, 19 nt, Homo sapiens
  misc_RNA (1)...(19): siRNA sense strand
aaacauccgaggacaaggu

SEQ ID NO: 1472832 - RNA, 19 nt, Homo sapiens
  misc_RNA (1)...(19): siRNA sense strand
guacauugaccauuaaaag

SEQ ID NO: 1472833 - RNA, 19 nt, Homo sapiens
  misc_RNA (1)...(19): siRNA sense strand
guacacguccagggugaug

SEQ ID NO: 1472834 - RNA, 19 nt, Homo sapiens
  misc_RNA (1)...(19): siRNA sense strand
aucauuggcugacacuuuc

SEQ ID NO: 1472835 - RNA, 19 nt, Homo sapiens
  misc_RNA (1)...(19): siRNA sense strand
gcaaucccauggguuacac

SEQ ID NO: 1472836 - RNA, 19 nt, Homo sapiens
  misc_RNA (1)...(19): siRNA sense strand
ugugugacaguauuaguga

SEQ ID NO: 1472837 - RNA, 19 nt, Homo sapiens
  misc_RNA (1)...(19): siRNA sense strand
uagaagagcuguuggauga

SEQ ID NO: 1472838 - RNA, 19 nt, Homo sapiens
  misc_RNA (1)...(19): siRNA sense strand
guauguacauugaccauua

SEQ ID NO: 1472839 - RNA, 19 nt, Homo sapiens
  misc_RNA (1)...(19): siRNA sense strand
gagcgugugugacaguauu

SEQ ID NO: 1472840 - RNA, 19 nt, Homo sapiens
  misc_RNA (1)...(19): siRNA sense strand
caauaaggacgcagacuug

SEQ ID NO: 1472841 - RNA, 19 nt, Homo sapiens
  misc_RNA (1)...(19): siRNA sense strand
gagcugagcgugugugaca

SEQ ID NO: 1472842 - RNA, 19 nt, Homo sapiens
  misc_RNA (1)...(19): siRNA sense strand
caucauuggcugacacuuu

SEQ ID NO: 1472843 - RNA, 19 nt, Homo sapiens
  misc_RNA (1)...(19): siRNA sense strand
guagucaagugccuuugga

SEQ ID NO: 1472844 - RNA, 19 nt, Homo sapiens
  misc_RNA (1)...(19): siRNA sense strand
aaggccaacugaagcaaua

SEQ ID NO: 1472845 - RNA, 19 nt, Homo sapiens
  misc_RNA (1)...(19): siRNA sense strand
ccuagaugcugcaaacaug

SEQ ID NO: 1472846 - RNA, 19 nt, Homo sapiens
  misc_RNA (1)...(19): siRNA sense strand
gcaaacauccgaggacaag

SEQ ID NO: 1472847 - RNA, 19 nt, Homo sapiens
  misc_RNA (1)...(19): siRNA sense strand
ucauaaggauagacacuuc

SEQ ID NO: 1472848 - RNA, 19 nt, Homo sapiens
  misc_RNA (1)...(19): siRNA sense strand
gaacuacccagucguacgu

SEQ ID NO: 1472849 - RNA, 19 nt, Homo sapiens
  misc_RNA (1)...(19): siRNA sense strand
gcccaaggcagguucaaga

SEQ ID NO: 1472850 - RNA, 19 nt, Homo sapiens
  misc_RNA (1)...(19): siRNA sense strand
aaaggucccuguaucaaaa

SEQ ID NO: 1472851 - RNA, 19 nt, Homo sapiens
  misc_RNA (1)...(19): siRNA sense strand
caugaaagaagcaaacauc

SEQ ID NO: 1472852 - RNA, 19 nt, Homo sapiens
  misc_RNA (1)...(19): siRNA sense strand
ccagggugaugcucaguag

SEQ ID NO: 1472853 - RNA, 19 nt, Homo sapiens
  misc_RNA (1)...(19): siRNA sense strand
gaugcucaguagucaagug

SEQ ID NO: 1472854 - RNA, 19 nt, Homo sapiens
  misc_RNA (1)...(19): siRNA sense strand
uuaccuagaugcugcaaac

SEQ ID NO: 1472855 - RNA, 19 nt, Homo sapiens
  misc_RNA (1)...(19): siRNA sense strand
gauagaagagcuguuggau

SEQ ID NO: 1472856 - RNA, 19 nt, Homo sapiens
  misc_RNA (1)...(19): siRNA sense strand
ggcuggcgauucauaagga

SEQ ID NO: 1472857 - RNA, 19 nt, Homo sapiens
  misc_RNA (1)...(19): siRNA sense strand
uaaggacgcagacuuguac

SEQ ID NO: 1472858 - RNA, 19 nt, Homo sapiens
  misc_RNA (1)...(19): siRNA sense strand
gaaaaggucccuguaucaa

SEQ ID NO: 1472859 - RNA, 19 nt, Homo sapiens
  misc_RNA (1)...(19): siRNA sense strand
ucuuucugcuggaggaaua

SEQ ID NO: 1472860 - RNA, 19 nt, Homo sapiens
  misc_RNA (1)...(19): siRNA sense strand
acaauaaggacgcagacuu

SEQ ID NO: 1472861 - RNA, 19 nt, Homo sapiens
  misc_RNA (1)...(19): siRNA sense strand
gccgaacuacccagucgua

SEQ ID NO: 1472862 - RNA, 19 nt, Homo sapiens
  misc_RNA (1)...(19): siRNA sense strand
agugcaaucccauggguua

SEQ ID NO: 1472863 - RNA, 19 nt, Homo sapiens
  misc_RNA (1)...(19): siRNA sense strand
auaaggacgcagacuugua

SEQ ID NO: 1472864 - RNA, 19 nt, Homo sapiens
  misc_RNA (1)...(19): siRNA sense strand
agacugcaguggacauguc

SEQ ID NO: 1472865 - RNA, 19 nt, Homo sapiens
  misc_RNA (1)...(19): siRNA sense strand
gggugaugcucaguaguca

SEQ ID NO: 1472866 - RNA, 19 nt, Homo sapiens
  misc_RNA (1)...(19): siRNA sense strand
auacuuugguugcaugaag

SEQ ID NO: 1472867 - RNA, 19 nt, Homo sapiens
  misc_RNA (1)...(19): siRNA sense strand
ucaguagucaagugccuuu

SEQ ID NO: 1472868 - RNA, 19 nt, Homo sapiens
  misc_RNA (1)...(19): siRNA sense strand
aaaguucggcccaaugaag

SEQ ID NO: 1472869 - RNA, 19 nt, Homo sapiens
  misc_RNA (1)...(19): siRNA sense strand
gacggucacaguccuugaa

SEQ ID NO: 1472870 - RNA, 19 nt, Homo sapiens
  misc_RNA (1)...(19): siRNA sense strand
uaaggauagacacuucuug

SEQ ID NO: 1472871 - RNA, 19 nt, Homo sapiens
  misc_RNA (1)...(19): siRNA sense strand
aaacauccgaggacaaggu

SEQ ID NO: 1472872 - RNA, 19 nt, Homo sapiens
  misc_RNA (1)...(19): siRNA sense strand
guacauugaccauuaaaag

SEQ ID NO: 1472873 - RNA, 19 nt, Homo sapiens
  misc_RNA (1)...(19): siRNA sense strand
guacacguccagggugaug

SEQ ID NO: 1472874 - RNA, 19 nt, Homo sapiens
  misc_RNA (1)...(19): siRNA sense strand
aucauuggcugacacuuuc

SEQ ID NO: 1472875 - RNA, 19 nt, Homo sapiens
  misc_RNA (1)...(19): siRNA sense strand
gcaaucccauggguuacac

SEQ ID NO: 1472876 - RNA, 19 nt, Homo sapiens
  misc_RNA (1)...(19): siRNA sense strand
ugugugacaguauuaguga

SEQ ID NO: 1472877 - RNA, 19 nt, Homo sapiens
  misc_RNA (1)...(19): siRNA sense strand
uagaagagcuguuggauga

SEQ ID NO: 1472878 - RNA, 19 nt, Homo sapiens
  misc_RNA (1)...(19): siRNA sense strand
guauguacauugaccauua

SEQ ID NO: 1472879 - RNA, 19 nt, Homo sapiens
  misc_RNA (1)...(19): siRNA sense strand
gagcgugugugacaguauu

SEQ ID NO: 1472880 - RNA, 19 nt, Homo sapiens
  misc_RNA (1)...(19): siRNA sense strand
caauaaggacgcagacuug

SEQ ID NO: 1472881 - RNA, 19 nt, Homo sapiens
  misc_RNA (1)...(19): siRNA sense strand
gagcugagcgugugugaca

SEQ ID NO: 1472882 - RNA, 19 nt, Homo sapiens
  misc_RNA (1)...(19): siRNA sense strand
caucauuggcugacacuuu

SEQ ID NO: 1472883 - RNA, 19 nt, Homo sapiens
  misc_RNA (1)...(19): siRNA sense strand
guagucaagugccuuugga

SEQ ID NO: 1472884 - RNA, 19 nt, Homo sapiens
  misc_RNA (1)...(19): siRNA sense strand
aaggccaacugaagcaaua

SEQ ID NO: 1472885 - RNA, 19 nt, Homo sapiens
  misc_RNA (1)...(19): siRNA sense strand
ccuagaugcugcaaacaug

SEQ ID NO: 1472886 - RNA, 19 nt, Homo sapiens
  misc_RNA (1)...(19): siRNA sense strand
gcaaacauccgaggacaag

SEQ ID NO: 1472887 - RNA, 19 nt, Homo sapiens
  misc_RNA (1)...(19): siRNA sense strand
ucauaaggauagacacuuc

SEQ ID NO: 1472888 - RNA, 19 nt, Homo sapiens
  misc_RNA (1)...(19): siRNA sense strand
gaacuacccagucguacgu

SEQ ID NO: 1472889 - RNA, 19 nt, Homo sapiens
  misc_RNA (1)...(19): siRNA sense strand
gcccaaggcagguucaaga

SEQ ID NO: 1472890 - RNA, 19 nt, Homo sapiens
  misc_RNA (1)...(19): siRNA sense strand
aaaggucccuguaucaaaa

SEQ ID NO: 1472891 - RNA, 19 nt, Homo sapiens
  misc_RNA (1)...(19): siRNA sense strand
caugaaagaagcaaacauc

SEQ ID NO: 1472892 - RNA, 19 nt, Homo sapiens
  misc_RNA (1)...(19): siRNA sense strand
ccagggugaugcucaguag

SEQ ID NO: 1472893 - RNA, 19 nt, Homo sapiens
  misc_RNA (1)...(19): siRNA sense strand
gaugcucaguagucaagug

SEQ ID NO: 1472894 - RNA, 19 nt, Homo sapiens
  misc_RNA (1)...(19): siRNA sense strand
uuaccuagaugcugcaaac

SEQ ID NO: 1472895 - RNA, 19 nt, Homo sapiens
  misc_RNA (1)...(19): siRNA sense strand
gauagaagagcuguuggau

SEQ ID NO: 1472896 - RNA, 19 nt, Homo sapiens
  misc_RNA (1)...(19): siRNA sense strand
ggcuggcgauucauaagga

SEQ ID NO: 1472897 - RNA, 19 nt, Homo sapiens
  misc_RNA (1)...(19): siRNA sense strand
uaaggacgcagacuuguac

SEQ ID NO: 1472898 - RNA, 19 nt, Homo sapiens
  misc_RNA (1)...(19): siRNA sense strand
gaaaaggucccuguaucaa

SEQ ID NO: 1472899 - RNA, 19 nt, Homo sapiens
  misc_RNA (1)...(19): siRNA sense strand
ucuuucugcuggaggaaua

SEQ ID NO: 1472900 - RNA, 19 nt, Homo sapiens
  misc_RNA (1)...(19): siRNA sense strand
acaauaaggacgcagacuu

SEQ ID NO: 1472901 - RNA, 19 nt, Homo sapiens
  misc_RNA (1)...(19): siRNA sense strand
gccgaacuacccagucgua

SEQ ID NO: 1472902 - RNA, 19 nt, Homo sapiens
  misc_RNA (1)...(19): siRNA sense strand
agugcaaucccauggguua

SEQ ID NO: 1472903 - RNA, 19 nt, Homo sapiens
  misc_RNA (1)...(19): siRNA sense strand
auaaggacgcagacuugua

SEQ ID NO: 1472904 - RNA, 19 nt, Homo sapiens
  misc_RNA (1)...(19): siRNA sense strand
agacugcaguggacauguc

SEQ ID NO: 1472905 - RNA, 19 nt, Homo sapiens
  misc_RNA (1)...(19): siRNA sense strand
auacuuugguugcaugaag

SEQ ID NO: 1472906 - RNA, 19 nt, Homo sapiens
  misc_RNA (1)...(19): siRNA sense strand
gggugaugcucaguaguca

SEQ ID NO: 1472907 - RNA, 19 nt, Homo sapiens
  misc_RNA (1)...(19): siRNA sense strand
ucaguagucaagugccuuu

SEQ ID NO: 1472908 - RNA, 19 nt, Homo sapiens
  misc_RNA (1)...(19): siRNA sense strand
aaaguucggcccaaugaag

SEQ ID NO: 1472909 - RNA, 19 nt, Homo sapiens
  misc_RNA (1)...(19): siRNA sense strand
gacggucacaguccuugaa

SEQ ID NO: 1472910 - RNA, 19 nt, Homo sapiens
  misc_RNA (1)...(19): siRNA sense strand
caggugagaagagugauga

SEQ ID NO: 1472911 - RNA, 19 nt, Homo sapiens
  misc_RNA (1)...(19): siRNA sense strand
uaaggauagacacuucuug

SEQ ID NO: 1472912 - RNA, 19 nt, Homo sapiens
  misc_RNA (1)...(19): siRNA sense strand
aaacauccgaggacaaggu

SEQ ID NO: 1472913 - RNA, 19 nt, Homo sapiens
  misc_RNA (1)...(19): siRNA sense strand
guacauugaccauuaaaag

SEQ ID NO: 1472914 - RNA, 19 nt, Homo sapiens
  misc_RNA (1)...(19): siRNA sense strand
aucauuggcugacacuuuc

SEQ ID NO: 1472915 - RNA, 19 nt, Homo sapiens
  misc_RNA (1)...(19): siRNA sense strand
gcaaucccauggguuacac

SEQ ID NO: 1472916 - RNA, 19 nt, Homo sapiens
  misc_RNA (1)...(19): siRNA sense strand
ugugugacaguauuaguga

SEQ ID NO: 1472917 - RNA, 19 nt, Homo sapiens
  misc_RNA (1)...(19): siRNA sense strand
guacacguccagggugaug

SEQ ID NO: 1472918 - RNA, 19 nt, Homo sapiens
  misc_RNA (1)...(19): siRNA sense strand
uagaagagcuguuggauga

SEQ ID NO: 1472919 - RNA, 19 nt, Homo sapiens
  misc_RNA (1)...(19): siRNA sense strand
guauguacauugaccauua

SEQ ID NO: 1472920 - RNA, 19 nt, Homo sapiens
  misc_RNA (1)...(19): siRNA sense strand
gagcgugugugacaguauu

SEQ ID NO: 1472921 - RNA, 19 nt, Homo sapiens
  misc_RNA (1)...(19): siRNA sense strand
caauaaggacgcagacuug

SEQ ID NO: 1472922 - RNA, 19 nt, Homo sapiens
  misc_RNA (1)...(19): siRNA sense strand
gagcugagcgugugugaca

SEQ ID NO: 1472923 - RNA, 19 nt, Homo sapiens
  misc_RNA (1)...(19): siRNA sense strand
caucauuggcugacacuuu

SEQ ID NO: 1472924 - RNA, 19 nt, Homo sapiens
  misc_RNA (1)...(19): siRNA sense strand
guagucaagugccuuugga

SEQ ID NO: 1472925 - RNA, 19 nt, Homo sapiens
  misc_RNA (1)...(19): siRNA sense strand
aaggccaacugaagcaaua

SEQ ID NO: 1472926 - RNA, 19 nt, Homo sapiens
  misc_RNA (1)...(19): siRNA sense strand
ccuagaugcugcaaacaug

SEQ ID NO: 1472927 - RNA, 19 nt, Homo sapiens
  misc_RNA (1)...(19): siRNA sense strand
gcaaacauccgaggacaag

SEQ ID NO: 1472928 - RNA, 19 nt, Homo sapiens
  misc_RNA (1)...(19): siRNA sense strand
ucauaaggauagacacuuc

SEQ ID NO: 1472929 - RNA, 19 nt, Homo sapiens
  misc_RNA (1)...(19): siRNA sense strand
gaacuacccagucguacgu

SEQ ID NO: 1472930 - RNA, 19 nt, Homo sapiens
  misc_RNA (1)...(19): siRNA sense strand
gcccaaggcagguucaaga

SEQ ID NO: 1472931 - RNA, 19 nt, Homo sapiens
  misc_RNA (1)...(19): siRNA sense strand
aaaggucccuguaucaaaa

SEQ ID NO: 1472932 - RNA, 19 nt, Homo sapiens
  misc_RNA (1)...(19): siRNA sense strand
caugaaagaagcaaacauc

SEQ ID NO: 1472933 - RNA, 19 nt, Homo sapiens
  misc_RNA (1)...(19): siRNA sense strand
ccagggugaugcucaguag

SEQ ID NO: 1472934 - RNA, 19 nt, Homo sapiens
  misc_RNA (1)...(19): siRNA sense strand
gaugcucaguagucaagug

SEQ ID NO: 1472935 - RNA, 19 nt, Homo sapiens
  misc_RNA (1)...(19): siRNA sense strand
uuaccuagaugcugcaaac

SEQ ID NO: 1472936 - RNA, 19 nt, Homo sapiens
  misc_RNA (1)...(19): siRNA sense strand
gauagaagagcuguuggau

SEQ ID NO: 1472937 - RNA, 19 nt, Homo sapiens
  misc_RNA (1)...(19): siRNA sense strand
ggcuggcgauucauaagga

SEQ ID NO: 1472938 - RNA, 19 nt, Homo sapiens
  misc_RNA (1)...(19): siRNA sense strand
uaaggacgcagacuuguac

SEQ ID NO: 1472939 - RNA, 19 nt, Homo sapiens
  misc_RNA (1)...(19): siRNA sense strand
gaaaaggucccuguaucaa

SEQ ID NO: 1472940 - RNA, 19 nt, Homo sapiens
  misc_RNA (1)...(19): siRNA sense strand
ucuuucugcuggaggaaua

SEQ ID NO: 1472941 - RNA, 19 nt, Homo sapiens
  misc_RNA (1)...(19): siRNA sense strand
acaauaaggacgcagacuu

SEQ ID NO: 1472942 - RNA, 19 nt, Homo sapiens
  misc_RNA (1)...(19): siRNA sense strand
gccgaacuacccagucgua

SEQ ID NO: 1472943 - RNA, 19 nt, Homo sapiens
  misc_RNA (1)...(19): siRNA sense strand
agugcaaucccauggguua

SEQ ID NO: 1472944 - RNA, 19 nt, Homo sapiens
  misc_RNA (1)...(19): siRNA sense strand
auaaggacgcagacuugua

SEQ ID NO: 1472945 - RNA, 19 nt, Homo sapiens
  misc_RNA (1)...(19): siRNA sense strand
agacugcaguggacauguc

SEQ ID NO: 1472946 - RNA, 19 nt, Homo sapiens
  misc_RNA (1)...(19): siRNA sense strand
gggugaugcucaguaguca

SEQ ID NO: 1472947 - RNA, 19 nt, Homo sapiens
  misc_RNA (1)...(19): siRNA sense strand
auacuuugguugcaugaag

SEQ ID NO: 1472948 - RNA, 19 nt, Homo sapiens
  misc_RNA (1)...(19): siRNA sense strand
ucaguagucaagugccuuu

SEQ ID NO: 1472949 - RNA, 19 nt, Homo sapiens
  misc_RNA (1)...(19): siRNA sense strand
aaaguucggcccaaugaag

SEQ ID NO: 1472950 - RNA, 19 nt, Homo sapiens
  misc_RNA (1)...(19): siRNA sense strand
gacggucacaguccuugaa

SEQ ID NO: 1472951 - RNA, 19 nt, Homo sapiens
  misc_RNA (1)...(19): siRNA sense strand
uaaggauagacacuucuug

SEQ ID NO: 1472952 - RNA, 19 nt, Homo sapiens
  misc_RNA (1)...(19): siRNA sense strand
aaacauccgaggacaaggu

SEQ ID NO: 1472953 - RNA, 19 nt, Homo sapiens
  misc_RNA (1)...(19): siRNA sense strand
guacauugaccauuaaaag

SEQ ID NO: 1472954 - RNA, 19 nt, Homo sapiens
  misc_RNA (1)...(19): siRNA sense strand
guacacguccagggugaug

SEQ ID NO: 1472955 - RNA, 19 nt, Homo sapiens
  misc_RNA (1)...(19): siRNA sense strand
aucauuggcugacacuuuc

SEQ ID NO: 1472956 - RNA, 19 nt, Homo sapiens
  misc_RNA (1)...(19): siRNA sense strand
gcaaucccauggguuacac

SEQ ID NO: 1472957 - RNA, 19 nt, Homo sapiens
  misc_RNA (1)...(19): siRNA sense strand
ugugugacaguauuaguga

SEQ ID NO: 1472958 - RNA, 19 nt, Homo sapiens
  misc_RNA (1)...(19): siRNA sense strand
uagaagagcuguuggauga

SEQ ID NO: 1472959 - RNA, 19 nt, Homo sapiens
  misc_RNA (1)...(19): siRNA sense strand
guauguacauugaccauua

SEQ ID NO: 1472960 - RNA, 19 nt, Homo sapiens
  misc_RNA (1)...(19): siRNA sense strand
gagcgugugugacaguauu

SEQ ID NO: 1472961 - RNA, 19 nt, Homo sapiens
  misc_RNA (1)...(19): siRNA sense strand
caauaaggacgcagacuug

SEQ ID NO: 1472962 - RNA, 19 nt, Homo sapiens
  misc_RNA (1)...(19): siRNA sense strand
gagcugagcgugugugaca

SEQ ID NO: 1472963 - RNA, 19 nt, Homo sapiens
  misc_RNA (1)...(19): siRNA sense strand
caucauuggcugacacuuu

SEQ ID NO: 1472964 - RNA, 19 nt, Homo sapiens
  misc_RNA (1)...(19): siRNA sense strand
guagucaagugccuuugga

SEQ ID NO: 1472965 - RNA, 19 nt, Homo sapiens
  misc_RNA (1)...(19): siRNA sense strand
aaggccaacugaagcaaua

SEQ ID NO: 1472966 - RNA, 19 nt, Homo sapiens
  misc_RNA (1)...(19): siRNA sense strand
ccuagaugcugcaaacaug

SEQ ID NO: 1472967 - RNA, 19 nt, Homo sapiens
  misc_RNA (1)...(19): siRNA sense strand
gcaaacauccgaggacaag

SEQ ID NO: 1472968 - RNA, 19 nt, Homo sapiens
  misc_RNA (1)...(19): siRNA sense strand
ucauaaggauagacacuuc

SEQ ID NO: 1472969 - RNA, 19 nt, Homo sapiens
  misc_RNA (1)...(19): siRNA sense strand
gaacuacccagucguacgu

SEQ ID NO: 1472970 - RNA, 19 nt, Homo sapiens
  misc_RNA (1)...(19): siRNA sense strand
gcccaaggcagguucaaga

SEQ ID NO: 1472971 - RNA, 19 nt, Homo sapiens
  misc_RNA (1)...(19): siRNA sense strand
aaaggucccuguaucaaaa

SEQ ID NO: 1472972 - RNA, 19 nt, Homo sapiens
  misc_RNA (1)...(19): siRNA sense strand
caugaaagaagcaaacauc

SEQ ID NO: 1472973 - RNA, 19 nt, Homo sapiens
  misc_RNA (1)...(19): siRNA sense strand
ccagggugaugcucaguag

SEQ ID NO: 1472974 - RNA, 19 nt, Homo sapiens
  misc_RNA (1)...(19): siRNA sense strand
gaugcucaguagucaagug

SEQ ID NO: 1472975 - RNA, 19 nt, Homo sapiens
  misc_RNA (1)...(19): siRNA sense strand
uuaccuagaugcugcaaac

SEQ ID NO: 1472976 - RNA, 19 nt, Homo sapiens
  misc_RNA (1)...(19): siRNA sense strand
gauagaagagcuguuggau

SEQ ID NO: 1472977 - RNA, 19 nt, Homo sapiens
  misc_RNA (1)...(19): siRNA sense strand
ggcuggcgauucauaagga

SEQ ID NO: 1472978 - RNA, 19 nt, Homo sapiens
  misc_RNA (1)...(19): siRNA sense strand
uaaggacgcagacuuguac

SEQ ID NO: 1472979 - RNA, 19 nt, Homo sapiens
  misc_RNA (1)...(19): siRNA sense strand
gaaaaggucccuguaucaa

SEQ ID NO: 1472980 - RNA, 19 nt, Homo sapiens
  misc_RNA (1)...(19): siRNA sense strand
ucuuucugcuggaggaaua

SEQ ID NO: 1472981 - RNA, 19 nt, Homo sapiens
  misc_RNA (1)...(19): siRNA sense strand
acaauaaggacgcagacuu

SEQ ID NO: 1472982 - RNA, 19 nt, Homo sapiens
  misc_RNA (1)...(19): siRNA sense strand
gccgaacuacccagucgua

SEQ ID NO: 1472983 - RNA, 19 nt, Homo sapiens
  misc_RNA (1)...(19): siRNA sense strand
agugcaaucccauggguua

SEQ ID NO: 1472984 - RNA, 19 nt, Homo sapiens
  misc_RNA (1)...(19): siRNA sense strand
auaaggacgcagacuugua

SEQ ID NO: 1472985 - RNA, 19 nt, Homo sapiens
  misc_RNA (1)...(19): siRNA sense strand
agacugcaguggacauguc

SEQ ID NO: 1472986 - RNA, 19 nt, Homo sapiens
  misc_RNA (1)...(19): siRNA sense strand
gggugaugcucaguaguca

SEQ ID NO: 1472987 - RNA, 19 nt, Homo sapiens
  misc_RNA (1)...(19): siRNA sense strand
auacuuugguugcaugaag

SEQ ID NO: 1472988 - RNA, 19 nt, Homo sapiens
  misc_RNA (1)...(19): siRNA sense strand
ucaguagucaagugccuuu

SEQ ID NO: 1472989 - RNA, 19 nt, Homo sapiens
  misc_RNA (1)...(19): siRNA sense strand
aaaguucggcccaaugaag

SEQ ID NO: 1472990 - RNA, 19 nt, Homo sapiens
  misc_RNA (1)...(19): siRNA sense strand
gacggucacaguccuugaa

SEQ ID NO: 1472991 - RNA, 19 nt, Homo sapiens
  misc_RNA (1)...(19): siRNA sense strand
uaaggauagacacuucuug

SEQ ID NO: 1472992 - RNA, 19 nt, Homo sapiens
  misc_RNA (1)...(19): siRNA sense strand
aaacauccgaggacaaggu

SEQ ID NO: 1472993 - RNA, 19 nt, Homo sapiens
  misc_RNA (1)...(19): siRNA sense strand
guacauugaccauuaaaag

SEQ ID NO: 1472994 - RNA, 19 nt, Homo sapiens
  misc_RNA (1)...(19): siRNA sense strand
guacacguccagggugaug

SEQ ID NO: 1472995 - RNA, 19 nt, Homo sapiens
  misc_RNA (1)...(19): siRNA sense strand
aucauuggcugacacuuuc

SEQ ID NO: 1472996 - RNA, 19 nt, Homo sapiens
  misc_RNA (1)...(19): siRNA sense strand
gcaaucccauggguuacac

SEQ ID NO: 1472997 - RNA, 19 nt, Homo sapiens
  misc_RNA (1)...(19): siRNA sense strand
ugugugacaguauuaguga

SEQ ID NO: 1472998 - RNA, 19 nt, Homo sapiens
  misc_RNA (1)...(19): siRNA sense strand
uagaagagcuguuggauga

SEQ ID NO: 1472999 - RNA, 19 nt, Homo sapiens
  misc_RNA (1)...(19): siRNA sense strand
guauguacauugaccauua

SEQ ID NO: 1473000 - RNA, 19 nt, Homo sapiens
  misc_RNA (1)...(19): siRNA sense strand
gagcgugugugacaguauu

SEQ ID NO: 1473001 - RNA, 19 nt, Homo sapiens
  misc_RNA (1)...(19): siRNA sense strand
caauaaggacgcagacuug

SEQ ID NO: 1473002 - RNA, 19 nt, Homo sapiens
  misc_RNA (1)...(19): siRNA sense strand
gagcugagcgugugugaca

SEQ ID NO: 1473003 - RNA, 19 nt, Homo sapiens
  misc_RNA (1)...(19): siRNA sense strand
caucauuggcugacacuuu

SEQ ID NO: 1473004 - RNA, 19 nt, Homo sapiens
  misc_RNA (1)...(19): siRNA sense strand
guagucaagugccuuugga

SEQ ID NO: 1473005 - RNA, 19 nt, Homo sapiens
  misc_RNA (1)...(19): siRNA sense strand
aaggccaacugaagcaaua

SEQ ID NO: 1473006 - RNA, 19 nt, Homo sapiens
  misc_RNA (1)...(19): siRNA sense strand
ccuagaugcugcaaacaug

SEQ ID NO: 1473007 - RNA, 19 nt, Homo sapiens
  misc_RNA (1)...(19): siRNA sense strand
gcaaacauccgaggacaag

SEQ ID NO: 1473008 - RNA, 19 nt, Homo sapiens
  misc_RNA (1)...(19): siRNA sense strand
ucauaaggauagacacuuc

SEQ ID NO: 1473009 - RNA, 19 nt, Homo sapiens
  misc_RNA (1)...(19): siRNA sense strand
gaacuacccagucguacgu

SEQ ID NO: 1473010 - RNA, 19 nt, Homo sapiens
  misc_RNA (1)...(19): siRNA sense strand
gcccaaggcagguucaaga

SEQ ID NO: 1473011 - RNA, 19 nt, Homo sapiens
  misc_RNA (1)...(19): siRNA sense strand
aaaggucccuguaucaaaa

SEQ ID NO: 1473012 - RNA, 19 nt, Homo sapiens
  misc_RNA (1)...(19): siRNA sense strand
caugaaagaagcaaacauc

SEQ ID NO: 1473013 - RNA, 19 nt, Homo sapiens
  misc_RNA (1)...(19): siRNA sense strand
ccagggugaugcucaguag

SEQ ID NO: 1473014 - RNA, 19 nt, Homo sapiens
  misc_RNA (1)...(19): siRNA sense strand
gaugcucaguagucaagug

SEQ ID NO: 1473015 - RNA, 19 nt, Homo sapiens
  misc_RNA (1)...(19): siRNA sense strand
uuaccuagaugcugcaaac

SEQ ID NO: 1473016 - RNA, 19 nt, Homo sapiens
  misc_RNA (1)...(19): siRNA sense strand
gauagaagagcuguuggau

SEQ ID NO: 1473017 - RNA, 19 nt, Homo sapiens
  misc_RNA (1)...(19): siRNA sense strand
ggcuggcgauucauaagga

SEQ ID NO: 1473018 - RNA, 19 nt, Homo sapiens
  misc_RNA (1)...(19): siRNA sense strand
uaaggacgcagacuuguac

SEQ ID NO: 1473019 - RNA, 19 nt, Homo sapiens
  misc_RNA (1)...(19): siRNA sense strand
gaaaaggucccuguaucaa

SEQ ID NO: 1473020 - RNA, 19 nt, Homo sapiens
  misc_RNA (1)...(19): siRNA sense strand
ucuuucugcuggaggaaua

SEQ ID NO: 1473021 - RNA, 19 nt, Homo sapiens
  misc_RNA (1)...(19): siRNA sense strand
acaauaaggacgcagacuu

SEQ ID NO: 1473022 - RNA, 19 nt, Homo sapiens
  misc_RNA (1)...(19): siRNA sense strand
gccgaacuacccagucgua

SEQ ID NO: 1473023 - RNA, 19 nt, Homo sapiens
  misc_RNA (1)...(19): siRNA sense strand
agugcaaucccauggguua

SEQ ID NO: 1473024 - RNA, 19 nt, Homo sapiens
  misc_RNA (1)...(19): siRNA sense strand
auaaggacgcagacuugua

SEQ ID NO: 1473025 - RNA, 19 nt, Homo sapiens
  misc_RNA (1)...(19): siRNA sense strand
agacugcaguggacauguc

SEQ ID NO: 1473026 - RNA, 19 nt, Homo sapiens
  misc_RNA (1)...(19): siRNA sense strand
auacuuugguugcaugaag

SEQ ID NO: 1473027 - RNA, 19 nt, Homo sapiens
  misc_RNA (1)...(19): siRNA sense strand
gggugaugcucaguaguca

SEQ ID NO: 1473028 - RNA, 19 nt, Homo sapiens
  misc_RNA (1)...(19): siRNA sense strand
ucaguagucaagugccuuu

SEQ ID NO: 1473029 - RNA, 19 nt, Homo sapiens
  misc_RNA (1)...(19): siRNA sense strand
aaaguucggcccaaugaag

SEQ ID NO: 1473030 - RNA, 19 nt, Homo sapiens
  misc_RNA (1)...(19): siRNA sense strand
gacggucacaguccuugaa

SEQ ID NO: 1473031 - RNA, 19 nt, Homo sapiens
  misc_RNA (1)...(19): siRNA sense strand
caggugagaagagugauga

SEQ ID NO: 1473032 - RNA, 19 nt, Homo sapiens
  misc_RNA (1)...(19): siRNA sense strand
uaaggauagacacuucuug

SEQ ID NO: 1473033 - RNA, 19 nt, Homo sapiens
  misc_RNA (1)...(19): siRNA sense strand
aaacauccgaggacaaggu

SEQ ID NO: 1473034 - RNA, 19 nt, Homo sapiens
  misc_RNA (1)...(19): siRNA sense strand
guacauugaccauuaaaag

SEQ ID NO: 1473035 - RNA, 19 nt, Homo sapiens
  misc_RNA (1)...(19): siRNA sense strand
aucauuggcugacacuuuc

SEQ ID NO: 1473036 - RNA, 19 nt, Homo sapiens
  misc_RNA (1)...(19): siRNA sense strand
gcaaucccauggguuacac

SEQ ID NO: 1473037 - RNA, 19 nt, Homo sapiens
  misc_RNA (1)...(19): siRNA sense strand
ugugugacaguauuaguga

SEQ ID NO: 1473038 - RNA, 19 nt, Homo sapiens
  misc_RNA (1)...(19): siRNA sense strand
guacacguccagggugaug

SEQ ID NO: 1473039 - RNA, 19 nt, Homo sapiens
  misc_RNA (1)...(19): siRNA sense strand
uagaagagcuguuggauga

SEQ ID NO: 1473040 - RNA, 19 nt, Homo sapiens
  misc_RNA (1)...(19): siRNA sense strand
guauguacauugaccauua

SEQ ID NO: 1473041 - RNA, 19 nt, Homo sapiens
  misc_RNA (1)...(19): siRNA sense strand
gagcgugugugacaguauu

SEQ ID NO: 1473042 - RNA, 19 nt, Homo sapiens
  misc_RNA (1)...(19): siRNA sense strand
caauaaggacgcagacuug

SEQ ID NO: 1473043 - RNA, 19 nt, Homo sapiens
  misc_RNA (1)...(19): siRNA sense strand
gagcugagcgugugugaca

SEQ ID NO: 1473044 - RNA, 19 nt, Homo sapiens
  misc_RNA (1)...(19): siRNA sense strand
caucauuggcugacacuuu

SEQ ID NO: 1473045 - RNA, 19 nt, Homo sapiens
  misc_RNA (1)...(19): siRNA sense strand
guagucaagugccuuugga

SEQ ID NO: 1473046 - RNA, 19 nt, Homo sapiens
  misc_RNA (1)...(19): siRNA sense strand
aaggccaacugaagcaaua

SEQ ID NO: 1473047 - RNA, 19 nt, Homo sapiens
  misc_RNA (1)...(19): siRNA sense strand
ccuagaugcugcaaacaug

SEQ ID NO: 1473048 - RNA, 19 nt, Homo sapiens
  misc_RNA (1)...(19): siRNA sense strand
gcaaacauccgaggacaag

SEQ ID NO: 1473049 - RNA, 19 nt, Homo sapiens
  misc_RNA (1)...(19): siRNA sense strand
ucauaaggauagacacuuc

SEQ ID NO: 1473050 - RNA, 19 nt, Homo sapiens
  misc_RNA (1)...(19): siRNA sense strand
gaacuacccagucguacgu

SEQ ID NO: 1473051 - RNA, 19 nt, Homo sapiens
  misc_RNA (1)...(19): siRNA sense strand
gcccaaggcagguucaaga

SEQ ID NO: 1473052 - RNA, 19 nt, Homo sapiens
  misc_RNA (1)...(19): siRNA sense strand
aaaggucccuguaucaaaa

SEQ ID NO: 1473053 - RNA, 19 nt, Homo sapiens
  misc_RNA (1)...(19): siRNA sense strand
caugaaagaagcaaacauc

SEQ ID NO: 1473054 - RNA, 19 nt, Homo sapiens
  misc_RNA (1)...(19): siRNA sense strand
ccagggugaugcucaguag

SEQ ID NO: 1473055 - RNA, 19 nt, Homo sapiens
  misc_RNA (1)...(19): siRNA sense strand
gaugcucaguagucaagug

SEQ ID NO: 1473056 - RNA, 19 nt, Homo sapiens
  misc_RNA (1)...(19): siRNA sense strand
uuaccuagaugcugcaaac

SEQ ID NO: 1473057 - RNA, 19 nt, Homo sapiens
  misc_RNA (1)...(19): siRNA sense strand
gauagaagagcuguuggau

SEQ ID NO: 1473058 - RNA, 19 nt, Homo sapiens
  misc_RNA (1)...(19): siRNA sense strand
ggcuggcgauucauaagga

SEQ ID NO: 1473059 - RNA, 19 nt, Homo sapiens
  misc_RNA (1)...(19): siRNA sense strand
uaaggacgcagacuuguac

SEQ ID NO: 1473060 - RNA, 19 nt, Homo sapiens
  misc_RNA (1)...(19): siRNA sense strand
gaaaaggucccuguaucaa

SEQ ID NO: 1473061 - RNA, 19 nt, Homo sapiens
  misc_RNA (1)...(19): siRNA sense strand
ucuuucugcuggaggaaua

SEQ ID NO: 1473062 - RNA, 19 nt, Homo sapiens
  misc_RNA (1)...(19): siRNA sense strand
acaauaaggacgcagacuu

SEQ ID NO: 1473063 - RNA, 19 nt, Homo sapiens
  misc_RNA (1)...(19): siRNA sense strand
gccgaacuacccagucgua

SEQ ID NO: 1473064 - RNA, 19 nt, Homo sapiens
  misc_RNA (1)...(19): siRNA sense strand
agugcaaucccauggguua

SEQ ID NO: 1473065 - RNA, 19 nt, Homo sapiens
  misc_RNA (1)...(19): siRNA sense strand
auaaggacgcagacuugua

SEQ ID NO: 1473066 - RNA, 19 nt, Homo sapiens
  misc_RNA (1)...(19): siRNA sense strand
agacugcaguggacauguc

SEQ ID NO: 1473067 - RNA, 19 nt, Homo sapiens
  misc_RNA (1)...(19): siRNA sense strand
gggugaugcucaguaguca

SEQ ID NO: 1473068 - RNA, 19 nt, Homo sapiens
  misc_RNA (1)...(19): siRNA sense strand
auacuuugguugcaugaag

SEQ ID NO: 1473069 - RNA, 19 nt, Homo sapiens
  misc_RNA (1)...(19): siRNA sense strand
ucaguagucaagugccuuu

SEQ ID NO: 1473070 - RNA, 19 nt, Homo sapiens
  misc_RNA (1)...(19): siRNA sense strand
aaaguucggcccaaugaag

SEQ ID NO: 1473071 - RNA, 19 nt, Homo sapiens
  misc_RNA (1)...(19): siRNA sense strand
gacggucacaguccuugaa

SEQ ID NO: 1473072 - RNA, 19 nt, Homo sapiens
  misc_RNA (1)...(19): siRNA sense strand
uaaggauagacacuucuug

SEQ ID NO: 1473073 - RNA, 19 nt, Homo sapiens
  misc_RNA (1)...(19): siRNA sense strand
aaacauccgaggacaaggu

SEQ ID NO: 1473074 - RNA, 19 nt, Homo sapiens
  misc_RNA (1)...(19): siRNA sense strand
guacauugaccauuaaaag

SEQ ID NO: 1473075 - RNA, 19 nt, Homo sapiens
  misc_RNA (1)...(19): siRNA sense strand
guacacguccagggugaug

SEQ ID NO: 1473076 - RNA, 19 nt, Homo sapiens
  misc_RNA (1)...(19): siRNA sense strand
aucauuggcugacacuuuc

SEQ ID NO: 1473077 - RNA, 19 nt, Homo sapiens
  misc_RNA (1)...(19): siRNA sense strand
gcaaucccauggguuacac

SEQ ID NO: 1473078 - RNA, 19 nt, Homo sapiens
  misc_RNA (1)...(19): siRNA sense strand
ugugugacaguauuaguga

SEQ ID NO: 1473079 - RNA, 19 nt, Homo sapiens
  misc_RNA (1)...(19): siRNA sense strand
ccaagaggcugaagaaagu

SEQ ID NO: 1473080 - RNA, 19 nt, Homo sapiens
  misc_RNA (1)...(19): siRNA sense strand
ccaaauauaugccaacaac

SEQ ID NO: 1473081 - RNA, 19 nt, Homo sapiens
  misc_RNA (1)...(19): siRNA sense strand
gaccugugcuccaaguuug

SEQ ID NO: 1473082 - RNA, 19 nt, Homo sapiens
  misc_RNA (1)...(19): siRNA sense strand
gauccugggccaaauauau

SEQ ID NO: 1473083 - RNA, 19 nt, Homo sapiens
  misc_RNA (1)...(19): siRNA sense strand
ggaccugugcuccaaguuu

SEQ ID NO: 1473084 - RNA, 19 nt, Homo sapiens
  misc_RNA (1)...(19): siRNA sense strand
gggcagccaucuacgacaa

SEQ ID NO: 1473085 - RNA, 19 nt, Homo sapiens
  misc_RNA (1)...(19): siRNA sense strand
ggaagccacagcuguuuga

SEQ ID NO: 1473086 - RNA, 19 nt, Homo sapiens
  misc_RNA (1)...(19): siRNA sense strand
gugagauccuggacaagaa

SEQ ID NO: 1473087 - RNA, 19 nt, Homo sapiens
  misc_RNA (1)...(19): siRNA sense strand
acagugagauccuggacaa

SEQ ID NO: 1473088 - RNA, 19 nt, Homo sapiens
  misc_RNA (1)...(19): siRNA sense strand
gggccaaguucaagaucaa

SEQ ID NO: 1473089 - RNA, 19 nt, Homo sapiens
  misc_RNA (1)...(19): siRNA sense strand
cgacaaguacaaggaauuu

SEQ ID NO: 1473090 - RNA, 19 nt, Homo sapiens
  misc_RNA (1)...(19): siRNA sense strand
cgagaguucuacagugaga

SEQ ID NO: 1473091 - RNA, 19 nt, Homo sapiens
  misc_RNA (1)...(19): siRNA sense strand
cuuaugggcucgacuuuua

SEQ ID NO: 1473092 - RNA, 19 nt, Homo sapiens
  misc_RNA (1)...(19): siRNA sense strand
ccacucccgugcacuauag

SEQ ID NO: 1473093 - RNA, 19 nt, Homo sapiens
  misc_RNA (1)...(19): siRNA sense strand
ggaggaggccauugagaag

SEQ ID NO: 1473094 - RNA, 19 nt, Homo sapiens
  misc_RNA (1)...(19): siRNA sense strand
aaauauaugccaacaacga

SEQ ID NO: 1473095 - RNA, 19 nt, Homo sapiens
  misc_RNA (1)...(19): siRNA sense strand
gaggaccugugcuccaagu

SEQ ID NO: 1473096 - RNA, 19 nt, Homo sapiens
  misc_RNA (1)...(19): siRNA sense strand
gcccauucccaucuacuuu

SEQ ID NO: 1473097 - RNA, 19 nt, Homo sapiens
  misc_RNA (1)...(19): siRNA sense strand
ggaggagaaggacccugua

SEQ ID NO: 1473098 - RNA, 19 nt, Homo sapiens
  misc_RNA (1)...(19): siRNA sense strand
agcgagaguucuacaguga

SEQ ID NO: 1473099 - RNA, 19 nt, Homo sapiens
  misc_RNA (1)...(19): siRNA sense strand
ggccaaauauaugccaaca

SEQ ID NO: 1473100 - RNA, 19 nt, Homo sapiens
  misc_RNA (1)...(19): siRNA sense strand
uggaggaggccauugagaa

SEQ ID NO: 1473101 - RNA, 19 nt, Homo sapiens
  misc_RNA (1)...(19): siRNA sense strand
gcagccaucuacgacaagu

SEQ ID NO: 1473102 - RNA, 19 nt, Homo sapiens
  misc_RNA (1)...(19): siRNA sense strand
cuacgacaaguacaaggaa

SEQ ID NO: 1473103 - RNA, 19 nt, Homo sapiens
  misc_RNA (1)...(19): siRNA sense strand
gcuggauccugggccaaau

SEQ ID NO: 1473104 - RNA, 19 nt, Homo sapiens
  misc_RNA (1)...(19): siRNA sense strand
ucuccaagaggcugaagaa

SEQ ID NO: 1473105 - RNA, 19 nt, Homo sapiens
  misc_RNA (1)...(19): siRNA sense strand
gaaaagacacagagaagga

SEQ ID NO: 1473106 - RNA, 19 nt, Homo sapiens
  misc_RNA (1)...(19): siRNA sense strand
gaagaaaagacacagagaa

SEQ ID NO: 1473107 - RNA, 19 nt, Homo sapiens
  misc_RNA (1)...(19): siRNA sense strand
gcaagaaguuugaggauga

SEQ ID NO: 1473108 - RNA, 19 nt, Homo sapiens
  misc_RNA (1)...(19): siRNA sense strand
gguaauagauggucuggaa

SEQ ID NO: 1473109 - RNA, 19 nt, Homo sapiens
  misc_RNA (1)...(19): siRNA sense strand
gugaauaucuuaagcacaa

SEQ ID NO: 1473110 - RNA, 19 nt, Homo sapiens
  misc_RNA (1)...(19): siRNA sense strand
ggaagaggaggcaacagua

SEQ ID NO: 1473111 - RNA, 19 nt, Homo sapiens
  misc_RNA (1)...(19): siRNA sense strand
uagaugaguuggagaaguu

SEQ ID NO: 1473112 - RNA, 19 nt, Homo sapiens
  misc_RNA (1)...(19): siRNA sense strand
caauggaucucaguucuuc

SEQ ID NO: 1473113 - RNA, 19 nt, Homo sapiens
  misc_RNA (1)...(19): siRNA sense strand
gaagaggaggcaacaguau

SEQ ID NO: 1473114 - RNA, 19 nt, Homo sapiens
  misc_RNA (1)...(19): siRNA sense strand
gaggaugaauacagugaau

SEQ ID NO: 1473115 - RNA, 19 nt, Homo sapiens
  misc_RNA (1)...(19): siRNA sense strand
gcacaauguuagagguguu

SEQ ID NO: 1473116 - RNA, 19 nt, Homo sapiens
  misc_RNA (1)...(19): siRNA sense strand
ggaugaauacagugaauau

SEQ ID NO: 1473117 - RNA, 19 nt, Homo sapiens
  misc_RNA (1)...(19): siRNA sense strand
caccguauuuggaaaggua

SEQ ID NO: 1473118 - RNA, 19 nt, Homo sapiens
  misc_RNA (1)...(19): siRNA sense strand
caagaaguuugaggaugaa

SEQ ID NO: 1473119 - RNA, 19 nt, Homo sapiens
  misc_RNA (1)...(19): siRNA sense strand
uuggagaaguugccaguaa

SEQ ID NO: 1473120 - RNA, 19 nt, Homo sapiens
  misc_RNA (1)...(19): siRNA sense strand
ggaucucaguucuucauca

SEQ ID NO: 1473121 - RNA, 19 nt, Homo sapiens
  misc_RNA (1)...(19): siRNA sense strand
agacauaccgaccucuuaa

SEQ ID NO: 1473122 - RNA, 19 nt, Homo sapiens
  misc_RNA (1)...(19): siRNA sense strand
uggagaaguugccaguaaa

SEQ ID NO: 1473123 - RNA, 19 nt, Homo sapiens
  misc_RNA (1)...(19): siRNA sense strand
caguaaaugagaagacaua

SEQ ID NO: 1473124 - RNA, 19 nt, Homo sapiens
  misc_RNA (1)...(19): siRNA sense strand
gaaguuugaggaugaauac

SEQ ID NO: 1473125 - RNA, 19 nt, Homo sapiens
  misc_RNA (1)...(19): siRNA sense strand
agaaguugccaguaaauga

SEQ ID NO: 1473126 - RNA, 19 nt, Homo sapiens
  misc_RNA (1)...(19): siRNA sense strand
caacccauuugcucaguag

SEQ ID NO: 1473127 - RNA, 19 nt, Homo sapiens
  misc_RNA (1)...(19): siRNA sense strand
uagauggucuggaaacucu

SEQ ID NO: 1473128 - RNA, 19 nt, Homo sapiens
  misc_RNA (1)...(19): siRNA sense strand
acagauguaggugauauua

SEQ ID NO: 1473129 - RNA, 19 nt, Homo sapiens
  misc_RNA (1)...(19): siRNA sense strand
uguuagagguguuguaucu

SEQ ID NO: 1473130 - RNA, 19 nt, Homo sapiens
  misc_RNA (1)...(19): siRNA sense strand
gaaguugccaguaaaugag

SEQ ID NO: 1473131 - RNA, 19 nt, Homo sapiens
  misc_RNA (1)...(19): siRNA sense strand
ggagaaguugccaguaaau

SEQ ID NO: 1473132 - RNA, 19 nt, Homo sapiens
  misc_RNA (1)...(19): siRNA sense strand
agaggaggcaacaguauuu

SEQ ID NO: 1473133 - RNA, 19 nt, Homo sapiens
  misc_RNA (1)...(19): siRNA sense strand
auaccgaccucuuaaugau

SEQ ID NO: 1473134 - RNA, 19 nt, Homo sapiens
  misc_RNA (1)...(19): siRNA sense strand
ccaacccauuugcucagua

SEQ ID NO: 1473135 - RNA, 19 nt, Homo sapiens
  misc_RNA (1)...(19): siRNA sense strand
cauaccgaccucuuaauga

SEQ ID NO: 1473136 - RNA, 19 nt, Homo sapiens
  misc_RNA (1)...(19): siRNA sense strand
gccaguaaaugagaagaca

SEQ ID NO: 1473137 - RNA, 19 nt, Homo sapiens
  misc_RNA (1)...(19): siRNA sense strand
gaucucaguucuucaucac

SEQ ID NO: 1473138 - RNA, 19 nt, Homo sapiens
  misc_RNA (1)...(19): siRNA sense strand
gagaaguugccaguaaaug

SEQ ID NO: 1473139 - RNA, 19 nt, Homo sapiens
  misc_RNA (1)...(19): siRNA sense strand
gaauaucuuaagcacaaug

SEQ ID NO: 1473140 - RNA, 19 nt, Homo sapiens
  misc_RNA (1)...(19): siRNA sense strand
guaauagauggucuggaaa

SEQ ID NO: 1473141 - RNA, 19 nt, Homo sapiens
  misc_RNA (1)...(19): siRNA sense strand
cuucaucaccuauggcaaa

SEQ ID NO: 1473142 - RNA, 19 nt, Homo sapiens
  misc_RNA (1)...(19): siRNA sense strand
guaucuauggcuaauaaug

SEQ ID NO: 1473143 - RNA, 19 nt, Homo sapiens
  misc_RNA (1)...(19): siRNA sense strand
guacacauuaaggacauaa

SEQ ID NO: 1473144 - RNA, 19 nt, Homo sapiens
  misc_RNA (1)...(19): siRNA sense strand
ucuggaaacucuagaugag

SEQ ID NO: 1473145 - RNA, 19 nt, Homo sapiens
  misc_RNA (1)...(19): siRNA sense strand
guuugaggaugaauacagu

SEQ ID NO: 1473146 - RNA, 19 nt, Homo sapiens
  misc_RNA (1)...(19): siRNA sense strand
cagauguaggugauauuaa

SEQ ID NO: 1473147 - RNA, 19 nt, Homo sapiens
  misc_RNA (1)...(19): siRNA sense strand
agaaguuugaggaugaaua

SEQ ID NO: 1473148 - RNA, 19 nt, Homo sapiens
  misc_RNA (1)...(19): siRNA sense strand
cacauuaaggacauaacua

SEQ ID NO: 1473149 - RNA, 19 nt, Homo sapiens
  misc_RNA (1)...(19): siRNA sense strand
gcuaauaauggcccgaaca

SEQ ID NO: 1473150 - RNA, 19 nt, Homo sapiens
  misc_RNA (1)...(19): siRNA sense strand
ugacacugcauacagaugu

SEQ ID NO: 1473151 - RNA, 19 nt, Homo sapiens
  misc_RNA (1)...(19): siRNA sense strand
caucaccuauggcaaacag

SEQ ID NO: 1473152 - RNA, 19 nt, Homo sapiens
  misc_RNA (1)...(19): siRNA sense strand
aagaggaggcaacaguauu

SEQ ID NO: 1473153 - RNA, 19 nt, Homo sapiens
  misc_RNA (1)...(19): siRNA sense strand
gaggaggcaacaguauuug

SEQ ID NO: 1473154 - RNA, 19 nt, Homo sapiens
  misc_RNA (1)...(19): siRNA sense strand
ggucuggaaacucuagaug

SEQ ID NO: 1473155 - RNA, 19 nt, Homo sapiens
  misc_RNA (1)...(19): siRNA sense strand
gggcaagaaguuugaggau

SEQ ID NO: 1473156 - RNA, 19 nt, Homo sapiens
  misc_RNA (1)...(19): siRNA sense strand
cuagaugaguuggagaagu

SEQ ID NO: 1473157 - RNA, 19 nt, Homo sapiens
  misc_RNA (1)...(19): siRNA sense strand
uaucuauggcuaauaaugg

SEQ ID NO: 1473158 - RNA, 19 nt, Homo sapiens
  misc_RNA (1)...(19): siRNA sense strand
ccaauggaucucaguucuu

SEQ ID NO: 1473159 - RNA, 19 nt, Homo sapiens
  misc_RNA (1)...(19): siRNA sense strand
caauguuagagguguugua

SEQ ID NO: 1473160 - RNA, 19 nt, Homo sapiens
  misc_RNA (1)...(19): siRNA sense strand
acauaccgaccucuuaaug

SEQ ID NO: 1473161 - RNA, 19 nt, Homo sapiens
  misc_RNA (1)...(19): siRNA sense strand
cagccacauuuggacauga

SEQ ID NO: 1473162 - RNA, 19 nt, Homo sapiens
  misc_RNA (1)...(19): siRNA sense strand
gacauaccgaccucuuaau

SEQ ID NO: 1473163 - RNA, 19 nt, Homo sapiens
  misc_RNA (1)...(19): siRNA sense strand
gcaagaaguuugaggauga

SEQ ID NO: 1473164 - RNA, 19 nt, Homo sapiens
  misc_RNA (1)...(19): siRNA sense strand
gguaauagauggucuggaa

SEQ ID NO: 1473165 - RNA, 19 nt, Homo sapiens
  misc_RNA (1)...(19): siRNA sense strand
gugaauaucuuaagcacaa

SEQ ID NO: 1473166 - RNA, 19 nt, Homo sapiens
  misc_RNA (1)...(19): siRNA sense strand
ggaagaggaggcaacagua

SEQ ID NO: 1473167 - RNA, 19 nt, Homo sapiens
  misc_RNA (1)...(19): siRNA sense strand
uagaugaguuggagaaguu

SEQ ID NO: 1473168 - RNA, 19 nt, Homo sapiens
  misc_RNA (1)...(19): siRNA sense strand
caauggaucucaguucuuc

SEQ ID NO: 1473169 - RNA, 19 nt, Homo sapiens
  misc_RNA (1)...(19): siRNA sense strand
gaagaggaggcaacaguau

SEQ ID NO: 1473170 - RNA, 19 nt, Homo sapiens
  misc_RNA (1)...(19): siRNA sense strand
gaggaugaauacagugaau

SEQ ID NO: 1473171 - RNA, 19 nt, Homo sapiens
  misc_RNA (1)...(19): siRNA sense strand
gcacaauguuagagguguu

SEQ ID NO: 1473172 - RNA, 19 nt, Homo sapiens
  misc_RNA (1)...(19): siRNA sense strand
ggaugaauacagugaauau

SEQ ID NO: 1473173 - RNA, 19 nt, Homo sapiens
  misc_RNA (1)...(19): siRNA sense strand
caccguauuuggaaaggua

SEQ ID NO: 1473174 - RNA, 19 nt, Homo sapiens
  misc_RNA (1)...(19): siRNA sense strand
caagaaguuugaggaugaa

SEQ ID NO: 1473175 - RNA, 19 nt, Homo sapiens
  misc_RNA (1)...(19): siRNA sense strand
uuggagaaguugccaguaa

SEQ ID NO: 1473176 - RNA, 19 nt, Homo sapiens
  misc_RNA (1)...(19): siRNA sense strand
ggaucucaguucuucauca

SEQ ID NO: 1473177 - RNA, 19 nt, Homo sapiens
  misc_RNA (1)...(19): siRNA sense strand
agacauaccgaccucuuaa

SEQ ID NO: 1473178 - RNA, 19 nt, Homo sapiens
  misc_RNA (1)...(19): siRNA sense strand
uggagaaguugccaguaaa

SEQ ID NO: 1473179 - RNA, 19 nt, Homo sapiens
  misc_RNA (1)...(19): siRNA sense strand
caguaaaugagaagacaua

SEQ ID NO: 1473180 - RNA, 19 nt, Homo sapiens
  misc_RNA (1)...(19): siRNA sense strand
gaaguuugaggaugaauac

SEQ ID NO: 1473181 - RNA, 19 nt, Homo sapiens
  misc_RNA (1)...(19): siRNA sense strand
agaaguugccaguaaauga

SEQ ID NO: 1473182 - RNA, 19 nt, Homo sapiens
  misc_RNA (1)...(19): siRNA sense strand
caacccauuugcucaguag

SEQ ID NO: 1473183 - RNA, 19 nt, Homo sapiens
  misc_RNA (1)...(19): siRNA sense strand
uagauggucuggaaacucu

SEQ ID NO: 1473184 - RNA, 19 nt, Homo sapiens
  misc_RNA (1)...(19): siRNA sense strand
acagauguaggugauauua

SEQ ID NO: 1473185 - RNA, 19 nt, Homo sapiens
  misc_RNA (1)...(19): siRNA sense strand
uguuagagguguuguaucu

SEQ ID NO: 1473186 - RNA, 19 nt, Homo sapiens
  misc_RNA (1)...(19): siRNA sense strand
gaaguugccaguaaaugag

SEQ ID NO: 1473187 - RNA, 19 nt, Homo sapiens
  misc_RNA (1)...(19): siRNA sense strand
ggagaaguugccaguaaau

SEQ ID NO: 1473188 - RNA, 19 nt, Homo sapiens
  misc_RNA (1)...(19): siRNA sense strand
agaggaggcaacaguauuu

SEQ ID NO: 1473189 - RNA, 19 nt, Homo sapiens
  misc_RNA (1)...(19): siRNA sense strand
auaccgaccucuuaaugau

SEQ ID NO: 1473190 - RNA, 19 nt, Homo sapiens
  misc_RNA (1)...(19): siRNA sense strand
ccaacccauuugcucagua

SEQ ID NO: 1473191 - RNA, 19 nt, Homo sapiens
  misc_RNA (1)...(19): siRNA sense strand
cauaccgaccucuuaauga

SEQ ID NO: 1473192 - RNA, 19 nt, Homo sapiens
  misc_RNA (1)...(19): siRNA sense strand
gccaguaaaugagaagaca

SEQ ID NO: 1473193 - RNA, 19 nt, Homo sapiens
  misc_RNA (1)...(19): siRNA sense strand
gaucucaguucuucaucac

SEQ ID NO: 1473194 - RNA, 19 nt, Homo sapiens
  misc_RNA (1)...(19): siRNA sense strand
gagaaguugccaguaaaug

SEQ ID NO: 1473195 - RNA, 19 nt, Homo sapiens
  misc_RNA (1)...(19): siRNA sense strand
gaauaucuuaagcacaaug

SEQ ID NO: 1473196 - RNA, 19 nt, Homo sapiens
  misc_RNA (1)...(19): siRNA sense strand
guaauagauggucuggaaa

SEQ ID NO: 1473197 - RNA, 19 nt, Homo sapiens
  misc_RNA (1)...(19): siRNA sense strand
cuucaucaccuauggcaaa

SEQ ID NO: 1473198 - RNA, 19 nt, Homo sapiens
  misc_RNA (1)...(19): siRNA sense strand
guaucuauggcuaauaaug

SEQ ID NO: 1473199 - RNA, 19 nt, Homo sapiens
  misc_RNA (1)...(19): siRNA sense strand
guacacauuaaggacauaa

SEQ ID NO: 1473200 - RNA, 19 nt, Homo sapiens
  misc_RNA (1)...(19): siRNA sense strand
ucuggaaacucuagaugag

SEQ ID NO: 1473201 - RNA, 19 nt, Homo sapiens
  misc_RNA (1)...(19): siRNA sense strand
guuugaggaugaauacagu

SEQ ID NO: 1473202 - RNA, 19 nt, Homo sapiens
  misc_RNA (1)...(19): siRNA sense strand
cagauguaggugauauuaa

SEQ ID NO: 1473203 - RNA, 19 nt, Homo sapiens
  misc_RNA (1)...(19): siRNA sense strand
agaaguuugaggaugaaua

SEQ ID NO: 1473204 - RNA, 19 nt, Homo sapiens
  misc_RNA (1)...(19): siRNA sense strand
cacauuaaggacauaacua

SEQ ID NO: 1473205 - RNA, 19 nt, Homo sapiens
  misc_RNA (1)...(19): siRNA sense strand
gcuaauaauggcccgaaca

SEQ ID NO: 1473206 - RNA, 19 nt, Homo sapiens
  misc_RNA (1)...(19): siRNA sense strand
ugacacugcauacagaugu

SEQ ID NO: 1473207 - RNA, 19 nt, Homo sapiens
  misc_RNA (1)...(19): siRNA sense strand
caucaccuauggcaaacag

SEQ ID NO: 1473208 - RNA, 19 nt, Homo sapiens
  misc_RNA (1)...(19): siRNA sense strand
aagaggaggcaacaguauu

SEQ ID NO: 1473209 - RNA, 19 nt, Homo sapiens
  misc_RNA (1)...(19): siRNA sense strand
gaggaggcaacaguauuug

SEQ ID NO: 1473210 - RNA, 19 nt, Homo sapiens
  misc_RNA (1)...(19): siRNA sense strand
ggucuggaaacucuagaug

SEQ ID NO: 1473211 - RNA, 19 nt, Homo sapiens
  misc_RNA (1)...(19): siRNA sense strand
gggcaagaaguuugaggau

SEQ ID NO: 1473212 - RNA, 19 nt, Homo sapiens
  misc_RNA (1)...(19): siRNA sense strand
cuagaugaguuggagaagu

SEQ ID NO: 1473213 - RNA, 19 nt, Homo sapiens
  misc_RNA (1)...(19): siRNA sense strand
uaucuauggcuaauaaugg

SEQ ID NO: 1473214 - RNA, 19 nt, Homo sapiens
  misc_RNA (1)...(19): siRNA sense strand
ccaauggaucucaguucuu

SEQ ID NO: 1473215 - RNA, 19 nt, Homo sapiens
  misc_RNA (1)...(19): siRNA sense strand
caauguuagagguguugua

SEQ ID NO: 1473216 - RNA, 19 nt, Homo sapiens
  misc_RNA (1)...(19): siRNA sense strand
acauaccgaccucuuaaug

SEQ ID NO: 1473217 - RNA, 19 nt, Homo sapiens
  misc_RNA (1)...(19): siRNA sense strand
cagccacauuuggacauga

SEQ ID NO: 1473218 - RNA, 19 nt, Homo sapiens
  misc_RNA (1)...(19): siRNA sense strand
gacauaccgaccucuuaau

SEQ ID NO: 1473219 - RNA, 19 nt, Homo sapiens
  misc_RNA (1)...(19): siRNA sense strand
gcaagaaguuugaggauga

SEQ ID NO: 1473220 - RNA, 19 nt, Homo sapiens
  misc_RNA (1)...(19): siRNA sense strand
gguaauagauggucuggaa

SEQ ID NO: 1473221 - RNA, 19 nt, Homo sapiens
  misc_RNA (1)...(19): siRNA sense strand
gugaauaucuuaagcacaa

SEQ ID NO: 1473222 - RNA, 19 nt, Homo sapiens
  misc_RNA (1)...(19): siRNA sense strand
ggaagaggaggcaacagua

SEQ ID NO: 1473223 - RNA, 19 nt, Homo sapiens
  misc_RNA (1)...(19): siRNA sense strand
uagaugaguuggagaaguu

SEQ ID NO: 1473224 - RNA, 19 nt, Homo sapiens
  misc_RNA (1)...(19): siRNA sense strand
caauggaucucaguucuuc

SEQ ID NO: 1473225 - RNA, 19 nt, Homo sapiens
  misc_RNA (1)...(19): siRNA sense strand
gaagaggaggcaacaguau

SEQ ID NO: 1473226 - RNA, 19 nt, Homo sapiens
  misc_RNA (1)...(19): siRNA sense strand
gaggaugaauacagugaau

SEQ ID NO: 1473227 - RNA, 19 nt, Homo sapiens
  misc_RNA (1)...(19): siRNA sense strand
gcacaauguuagagguguu

SEQ ID NO: 1473228 - RNA, 19 nt, Homo sapiens
  misc_RNA (1)...(19): siRNA sense strand
ggaugaauacagugaauau

SEQ ID NO: 1473229 - RNA, 19 nt, Homo sapiens
  misc_RNA (1)...(19): siRNA sense strand
caccguauuuggaaaggua

SEQ ID NO: 1473230 - RNA, 19 nt, Homo sapiens
  misc_RNA (1)...(19): siRNA sense strand
caagaaguuugaggaugaa

SEQ ID NO: 1473231 - RNA, 19 nt, Homo sapiens
  misc_RNA (1)...(19): siRNA sense strand
uuggagaaguugccaguaa

SEQ ID NO: 1473232 - RNA, 19 nt, Homo sapiens
  misc_RNA (1)...(19): siRNA sense strand
ggaucucaguucuucauca

SEQ ID NO: 1473233 - RNA, 19 nt, Homo sapiens
  misc_RNA (1)...(19): siRNA sense strand
agacauaccgaccucuuaa

SEQ ID NO: 1473234 - RNA, 19 nt, Homo sapiens
  misc_RNA (1)...(19): siRNA sense strand
uggagaaguugccaguaaa

SEQ ID NO: 1473235 - RNA, 19 nt, Homo sapiens
  misc_RNA (1)...(19): siRNA sense strand
caguaaaugagaagacaua

SEQ ID NO: 1473236 - RNA, 19 nt, Homo sapiens
  misc_RNA (1)...(19): siRNA sense strand
gaaguuugaggaugaauac

SEQ ID NO: 1473237 - RNA, 19 nt, Homo sapiens
  misc_RNA (1)...(19): siRNA sense strand
agaaguugccaguaaauga

SEQ ID NO: 1473238 - RNA, 19 nt, Homo sapiens
  misc_RNA (1)...(19): siRNA sense strand
caacccauuugcucaguag

SEQ ID NO: 1473239 - RNA, 19 nt, Homo sapiens
  misc_RNA (1)...(19): siRNA sense strand
uagauggucuggaaacucu

SEQ ID NO: 1473240 - RNA, 19 nt, Homo sapiens
  misc_RNA (1)...(19): siRNA sense strand
acagauguaggugauauua

SEQ ID NO: 1473241 - RNA, 19 nt, Homo sapiens
  misc_RNA (1)...(19): siRNA sense strand
uguuagagguguuguaucu

SEQ ID NO: 1473242 - RNA, 19 nt, Homo sapiens
  misc_RNA (1)...(19): siRNA sense strand
gaaguugccaguaaaugag

SEQ ID NO: 1473243 - RNA, 19 nt, Homo sapiens
  misc_RNA (1)...(19): siRNA sense strand
ggagaaguugccaguaaau

SEQ ID NO: 1473244 - RNA, 19 nt, Homo sapiens
  misc_RNA (1)...(19): siRNA sense strand
agaggaggcaacaguauuu

SEQ ID NO: 1473245 - RNA, 19 nt, Homo sapiens
  misc_RNA (1)...(19): siRNA sense strand
auaccgaccucuuaaugau

SEQ ID NO: 1473246 - RNA, 19 nt, Homo sapiens
  misc_RNA (1)...(19): siRNA sense strand
ccaacccauuugcucagua

SEQ ID NO: 1473247 - RNA, 19 nt, Homo sapiens
  misc_RNA (1)...(19): siRNA sense strand
cauaccgaccucuuaauga

SEQ ID NO: 1473248 - RNA, 19 nt, Homo sapiens
  misc_RNA (1)...(19): siRNA sense strand
gccaguaaaugagaagaca

SEQ ID NO: 1473249 - RNA, 19 nt, Homo sapiens
  misc_RNA (1)...(19): siRNA sense strand
gaucucaguucuucaucac

SEQ ID NO: 1473250 - RNA, 19 nt, Homo sapiens
  misc_RNA (1)...(19): siRNA sense strand
gagaaguugccaguaaaug

SEQ ID NO: 1473251 - RNA, 19 nt, Homo sapiens
  misc_RNA (1)...(19): siRNA sense strand
gaauaucuuaagcacaaug

SEQ ID NO: 1473252 - RNA, 19 nt, Homo sapiens
  misc_RNA (1)...(19): siRNA sense strand
guaauagauggucuggaaa

SEQ ID NO: 1473253 - RNA, 19 nt, Homo sapiens
  misc_RNA (1)...(19): siRNA sense strand
cuucaucaccuauggcaaa

SEQ ID NO: 1473254 - RNA, 19 nt, Homo sapiens
  misc_RNA (1)...(19): siRNA sense strand
guaucuauggcuaauaaug

SEQ ID NO: 1473255 - RNA, 19 nt, Homo sapiens
  misc_RNA (1)...(19): siRNA sense strand
guacacauuaaggacauaa

SEQ ID NO: 1473256 - RNA, 19 nt, Homo sapiens
  misc_RNA (1)...(19): siRNA sense strand
ucuggaaacucuagaugag

SEQ ID NO: 1473257 - RNA, 19 nt, Homo sapiens
  misc_RNA (1)...(19): siRNA sense strand
guuugaggaugaauacagu

SEQ ID NO: 1473258 - RNA, 19 nt, Homo sapiens
  misc_RNA (1)...(19): siRNA sense strand
cagauguaggugauauuaa

SEQ ID NO: 1473259 - RNA, 19 nt, Homo sapiens
  misc_RNA (1)...(19): siRNA sense strand
agaaguuugaggaugaaua

SEQ ID NO: 1473260 - RNA, 19 nt, Homo sapiens
  misc_RNA (1)...(19): siRNA sense strand
cacauuaaggacauaacua

SEQ ID NO: 1473261 - RNA, 19 nt, Homo sapiens
  misc_RNA (1)...(19): siRNA sense strand
gcuaauaauggcccgaaca

SEQ ID NO: 1473262 - RNA, 19 nt, Homo sapiens
  misc_RNA (1)...(19): siRNA sense strand
ugacacugcauacagaugu

SEQ ID NO: 1473263 - RNA, 19 nt, Homo sapiens
  misc_RNA (1)...(19): siRNA sense strand
caucaccuauggcaaacag

SEQ ID NO: 1473264 - RNA, 19 nt, Homo sapiens
  misc_RNA (1)...(19): siRNA sense strand
aagaggaggcaacaguauu

SEQ ID NO: 1473265 - RNA, 19 nt, Homo sapiens
  misc_RNA (1)...(19): siRNA sense strand
gaggaggcaacaguauuug

SEQ ID NO: 1473266 - RNA, 19 nt, Homo sapiens
  misc_RNA (1)...(19): siRNA sense strand
ggucuggaaacucuagaug

SEQ ID NO: 1473267 - RNA, 19 nt, Homo sapiens
  misc_RNA (1)...(19): siRNA sense strand
gggcaagaaguuugaggau

SEQ ID NO: 1473268 - RNA, 19 nt, Homo sapiens
  misc_RNA (1)...(19): siRNA sense strand
cuagaugaguuggagaagu

SEQ ID NO: 1473269 - RNA, 19 nt, Homo sapiens
  misc_RNA (1)...(19): siRNA sense strand
uaucuauggcuaauaaugg

SEQ ID NO: 1473270 - RNA, 19 nt, Homo sapiens
  misc_RNA (1)...(19): siRNA sense strand
ccaauggaucucaguucuu

SEQ ID NO: 1473271 - RNA, 19 nt, Homo sapiens
  misc_RNA (1)...(19): siRNA sense strand
caauguuagagguguugua

SEQ ID NO: 1473272 - RNA, 19 nt, Homo sapiens
  misc_RNA (1)...(19): siRNA sense strand
acauaccgaccucuuaaug

SEQ ID NO: 1473273 - RNA, 19 nt, Homo sapiens
  misc_RNA (1)...(19): siRNA sense strand
cagccacauuuggacauga

SEQ ID NO: 1473274 - RNA, 19 nt, Homo sapiens
  misc_RNA (1)...(19): siRNA sense strand
gacauaccgaccucuuaau

SEQ ID NO: 1473275 - RNA, 19 nt, Homo sapiens
  misc_RNA (1)...(19): siRNA sense strand
ccaagaagaucaaacacaa

SEQ ID NO: 1473276 - RNA, 19 nt, Homo sapiens
  misc_RNA (1)...(19): siRNA sense strand
gaaaagugcugcucacauu

SEQ ID NO: 1473277 - RNA, 19 nt, Homo sapiens
  misc_RNA (1)...(19): siRNA sense strand
ggaguggacuucugcaaug

SEQ ID NO: 1473278 - RNA, 19 nt, Homo sapiens
  misc_RNA (1)...(19): siRNA sense strand
gcacagcgcuggcauuuug

SEQ ID NO: 1473279 - RNA, 19 nt, Homo sapiens
  misc_RNA (1)...(19): siRNA sense strand
ccaagugccugcaggauga

SEQ ID NO: 1473280 - RNA, 19 nt, Homo sapiens
  misc_RNA (1)...(19): siRNA sense strand
cagaacggccugcauguua

SEQ ID NO: 1473281 - RNA, 19 nt, Homo sapiens
  misc_RNA (1)...(19): siRNA sense strand
gcauggaucccuuucaaga

SEQ ID NO: 1473282 - RNA, 19 nt, Homo sapiens
  misc_RNA (1)...(19): siRNA sense strand
aaagagaggcucaccugua

SEQ ID NO: 1473283 - RNA, 19 nt, Homo sapiens
  misc_RNA (1)...(19): siRNA sense strand
gccugcauguuaauuguua

SEQ ID NO: 1473284 - RNA, 19 nt, Homo sapiens
  misc_RNA (1)...(19): siRNA sense strand
ucaagaacccugcaugcua

SEQ ID NO: 1473285 - RNA, 19 nt, Homo sapiens
  misc_RNA (1)...(19): siRNA sense strand
ggacucauguaacacagau

SEQ ID NO: 1473286 - RNA, 19 nt, Homo sapiens
  misc_RNA (1)...(19): siRNA sense strand
gaacuuccggacucaugua

SEQ ID NO: 1473287 - RNA, 19 nt, Homo sapiens
  misc_RNA (1)...(19): siRNA sense strand
gaaugccaacaacuucuua

SEQ ID NO: 1473288 - RNA, 19 nt, Homo sapiens
  misc_RNA (1)...(19): siRNA sense strand
gugcauggaucccuuucaa

SEQ ID NO: 1473289 - RNA, 19 nt, Homo sapiens
  misc_RNA (1)...(19): siRNA sense strand
agaacggccugcauguuaa

SEQ ID NO: 1473290 - RNA, 19 nt, Homo sapiens
  misc_RNA (1)...(19): siRNA sense strand
cugcaaugcugaccaagaa

SEQ ID NO: 1473291 - RNA, 19 nt, Homo sapiens
  misc_RNA (1)...(19): siRNA sense strand
gcugcacacccuucaaaua

SEQ ID NO: 1473292 - RNA, 19 nt, Homo sapiens
  misc_RNA (1)...(19): siRNA sense strand
guaccaagauugauaaacc

SEQ ID NO: 1473293 - RNA, 19 nt, Homo sapiens
  misc_RNA (1)...(19): siRNA sense strand
gaugaggagugcccauugg

SEQ ID NO: 1473294 - RNA, 19 nt, Homo sapiens
  misc_RNA (1)...(19): siRNA sense strand
gcaaugcugaccaagaaga

SEQ ID NO: 1473295 - RNA, 19 nt, Homo sapiens
  misc_RNA (1)...(19): siRNA sense strand
gcaaggaauaccagaagug

SEQ ID NO: 1473296 - RNA, 19 nt, Homo sapiens
  misc_RNA (1)...(19): siRNA sense strand
gcacuuuccucuccauagc

SEQ ID NO: 1473297 - RNA, 19 nt, Homo sapiens
  misc_RNA (1)...(19): siRNA sense strand
gaauccagguguggcuuug

SEQ ID NO: 1473298 - RNA, 19 nt, Homo sapiens
  misc_RNA (1)...(19): siRNA sense strand
gcacacccuucaaauacag

SEQ ID NO: 1473299 - RNA, 19 nt, Homo sapiens
  misc_RNA (1)...(19): siRNA sense strand
caagaagaucaaacacaaa

SEQ ID NO: 1473300 - RNA, 19 nt, Homo sapiens
  misc_RNA (1)...(19): siRNA sense strand
gaagugcauggaucccuuu

SEQ ID NO: 1473301 - RNA, 19 nt, Homo sapiens
  misc_RNA (1)...(19): siRNA sense strand
gaagaucaaacacaaacca

SEQ ID NO: 1473302 - RNA, 19 nt, Homo sapiens
  misc_RNA (1)...(19): siRNA sense strand
aagagaggcucaccuguac

SEQ ID NO: 1473303 - RNA, 19 nt, Homo sapiens
  misc_RNA (1)...(19): siRNA sense strand
gcgaagggaaugccaacaa

SEQ ID NO: 1473304 - RNA, 19 nt, Homo sapiens
  misc_RNA (1)...(19): siRNA sense strand
ggaaugccaacaacuucuu

SEQ ID NO: 1473305 - RNA, 19 nt, Homo sapiens
  misc_RNA (1)...(19): siRNA sense strand
gauggacaaugcccacucu

SEQ ID NO: 1473306 - RNA, 19 nt, Homo sapiens
  misc_RNA (1)...(19): siRNA sense strand
gaacggccugcauguuaau

SEQ ID NO: 1473307 - RNA, 19 nt, Homo sapiens
  misc_RNA (1)...(19): siRNA sense strand
gcgcuggcauuuugacuuu

SEQ ID NO: 1473308 - RNA, 19 nt, Homo sapiens
  misc_RNA (1)...(19): siRNA sense strand
ggaugaggagugcccauug

SEQ ID NO: 1473309 - RNA, 19 nt, Homo sapiens
  misc_RNA (1)...(19): siRNA sense strand
cuauguaccaagauugaua

SEQ ID NO: 1473310 - RNA, 19 nt, Homo sapiens
  misc_RNA (1)...(19): siRNA sense strand
cgaagggaaugccaacaac

SEQ ID NO: 1473311 - RNA, 19 nt, Homo sapiens
  misc_RNA (1)...(19): siRNA sense strand
ugaccaagaagaucaaaca

SEQ ID NO: 1473312 - RNA, 19 nt, Homo sapiens
  misc_RNA (1)...(19): siRNA sense strand
gcucaccuguaccacugaa

SEQ ID NO: 1473313 - RNA, 19 nt, Homo sapiens
  misc_RNA (1)...(19): siRNA sense strand
gcauggaaacuguaaucau

SEQ ID NO: 1473314 - RNA, 19 nt, Homo sapiens
  misc_RNA (1)...(19): siRNA sense strand
auuguggacugaaauguau

SEQ ID NO: 1473315 - RNA, 19 nt, Homo sapiens
  misc_RNA (1)...(19): siRNA sense strand
cugcuucucucccuugcuu

SEQ ID NO: 1473316 - RNA, 19 nt, Homo sapiens
  misc_RNA (1)...(19): siRNA sense strand
gaacugaaggagggcacuu

SEQ ID NO: 1473317 - RNA, 19 nt, Homo sapiens
  misc_RNA (1)...(19): siRNA sense strand
ggaguguccaccuucaugu

SEQ ID NO: 1473318 - RNA, 19 nt, Homo sapiens
  misc_RNA (1)...(19): siRNA sense strand
ugugaggcauggaaacugu

SEQ ID NO: 1473319 - RNA, 19 nt, Homo sapiens
  misc_RNA (1)...(19): siRNA sense strand
cauggaucccuuucaagaa

SEQ ID NO: 1473320 - RNA, 19 nt, Homo sapiens
  misc_RNA (1)...(19): siRNA sense strand
acucauguaacacagauuu

SEQ ID NO: 1473321 - RNA, 19 nt, Homo sapiens
  misc_RNA (1)...(19): siRNA sense strand
ggagugcccauugguggaa

SEQ ID NO: 1473322 - RNA, 19 nt, Homo sapiens
  misc_RNA (1)...(19): siRNA sense strand
cuuccggacucauguaaca

SEQ ID NO: 1473323 - RNA, 19 nt, Homo sapiens
  misc_RNA (1)...(19): siRNA sense strand
gaagggaaugccaacaacu

SEQ ID NO: 1473324 - RNA, 19 nt, Homo sapiens
  misc_RNA (1)...(19): siRNA sense strand
uaccagaagugcugcuuuu

SEQ ID NO: 1473325 - RNA, 19 nt, Homo sapiens
  misc_RNA (1)...(19): siRNA sense strand
gcuggcauuuugacuuuaa

SEQ ID NO: 1473326 - RNA, 19 nt, Homo sapiens
  misc_RNA (1)...(19): siRNA sense strand
cggccugcauguuaauugu

SEQ ID NO: 1473327 - RNA, 19 nt, Homo sapiens
  misc_RNA (1)...(19): siRNA sense strand
gagaggcucaccuguacca

SEQ ID NO: 1473328 - RNA, 19 nt, Homo sapiens
  misc_RNA (1)...(19): siRNA sense strand
aaagugcugcucacauugu

SEQ ID NO: 1473329 - RNA, 19 nt, Homo sapiens
  misc_RNA (1)...(19): siRNA sense strand
aaugcccacucuucccuuu

SEQ ID NO: 1473330 - RNA, 19 nt, Homo sapiens
  misc_RNA (1)...(19): siRNA sense strand
ccaggguuaugucccaaag

SEQ ID NO: 1473331 - RNA, 19 nt, Homo sapiens
  misc_RNA (1)...(19): siRNA sense strand
uguuaaggauggacaaugc

SEQ ID NO: 1473332 - RNA, 19 nt, Homo sapiens
  misc_RNA (1)...(19): siRNA sense strand
cugcacacccuucaaauac

SEQ ID NO: 1473333 - RNA, 19 nt, Homo sapiens
  misc_RNA (1)...(19): siRNA sense strand
acacagauuuugacugcaa

SEQ ID NO: 1473334 - RNA, 19 nt, Homo sapiens
  misc_RNA (1)...(19): siRNA sense strand
ccgcugcacacccuucaaa

SEQ ID NO: 1473335 - RNA, 19 nt, Homo sapiens
  misc_RNA (1)...(19): siRNA sense strand
ugaggcauggaaacuguaa

SEQ ID NO: 1473336 - RNA, 19 nt, Homo sapiens
  misc_RNA (1)...(19): siRNA sense strand
cuucugcaaugcugaccaa

SEQ ID NO: 1473337 - RNA, 19 nt, Homo sapiens
  misc_RNA (1)...(19): siRNA sense strand
cuggaggaauguagcuuuc

SEQ ID NO: 1473338 - RNA, 19 nt, Homo sapiens
  misc_RNA (1)...(19): siRNA sense strand
gauuuugacugcaaggaau

SEQ ID NO: 1473339 - RNA, 19 nt, Homo sapiens
  misc_RNA (1)...(19): siRNA sense strand
ccaagaagaucaaacacaa

SEQ ID NO: 1473340 - RNA, 19 nt, Homo sapiens
  misc_RNA (1)...(19): siRNA sense strand
gaaaagugcugcucacauu

SEQ ID NO: 1473341 - RNA, 19 nt, Homo sapiens
  misc_RNA (1)...(19): siRNA sense strand
ggaguggacuucugcaaug

SEQ ID NO: 1473342 - RNA, 19 nt, Homo sapiens
  misc_RNA (1)...(19): siRNA sense strand
gcacagcgcuggcauuuug

SEQ ID NO: 1473343 - RNA, 19 nt, Homo sapiens
  misc_RNA (1)...(19): siRNA sense strand
ccaagugccugcaggauga

SEQ ID NO: 1473344 - RNA, 19 nt, Homo sapiens
  misc_RNA (1)...(19): siRNA sense strand
cagaacggccugcauguua

SEQ ID NO: 1473345 - RNA, 19 nt, Homo sapiens
  misc_RNA (1)...(19): siRNA sense strand
gcauggaucccuuucaaga

SEQ ID NO: 1473346 - RNA, 19 nt, Homo sapiens
  misc_RNA (1)...(19): siRNA sense strand
aaagagaggcucaccugua

SEQ ID NO: 1473347 - RNA, 19 nt, Homo sapiens
  misc_RNA (1)...(19): siRNA sense strand
gccugcauguuaauuguua

SEQ ID NO: 1473348 - RNA, 19 nt, Homo sapiens
  misc_RNA (1)...(19): siRNA sense strand
ucaagaacccugcaugcua

SEQ ID NO: 1473349 - RNA, 19 nt, Homo sapiens
  misc_RNA (1)...(19): siRNA sense strand
ggacucauguaacacagau

SEQ ID NO: 1473350 - RNA, 19 nt, Homo sapiens
  misc_RNA (1)...(19): siRNA sense strand
gaacuuccggacucaugua

SEQ ID NO: 1473351 - RNA, 19 nt, Homo sapiens
  misc_RNA (1)...(19): siRNA sense strand
gaaugccaacaacuucuua

SEQ ID NO: 1473352 - RNA, 19 nt, Homo sapiens
  misc_RNA (1)...(19): siRNA sense strand
gugcauggaucccuuucaa

SEQ ID NO: 1473353 - RNA, 19 nt, Homo sapiens
  misc_RNA (1)...(19): siRNA sense strand
agaacggccugcauguuaa

SEQ ID NO: 1473354 - RNA, 19 nt, Homo sapiens
  misc_RNA (1)...(19): siRNA sense strand
cugcaaugcugaccaagaa

SEQ ID NO: 1473355 - RNA, 19 nt, Homo sapiens
  misc_RNA (1)...(19): siRNA sense strand
gcugcacacccuucaaaua

SEQ ID NO: 1473356 - RNA, 19 nt, Homo sapiens
  misc_RNA (1)...(19): siRNA sense strand
guaccaagauugauaaacc

SEQ ID NO: 1473357 - RNA, 19 nt, Homo sapiens
  misc_RNA (1)...(19): siRNA sense strand
gaugaggagugcccauugg

SEQ ID NO: 1473358 - RNA, 19 nt, Homo sapiens
  misc_RNA (1)...(19): siRNA sense strand
gcaaugcugaccaagaaga

SEQ ID NO: 1473359 - RNA, 19 nt, Homo sapiens
  misc_RNA (1)...(19): siRNA sense strand
gcaaggaauaccagaagug

SEQ ID NO: 1473360 - RNA, 19 nt, Homo sapiens
  misc_RNA (1)...(19): siRNA sense strand
gcacuuuccucuccauagc

SEQ ID NO: 1473361 - RNA, 19 nt, Homo sapiens
  misc_RNA (1)...(19): siRNA sense strand
gaauccagguguggcuuug

SEQ ID NO: 1473362 - RNA, 19 nt, Homo sapiens
  misc_RNA (1)...(19): siRNA sense strand
gcacacccuucaaauacag

SEQ ID NO: 1473363 - RNA, 19 nt, Homo sapiens
  misc_RNA (1)...(19): siRNA sense strand
caagaagaucaaacacaaa

SEQ ID NO: 1473364 - RNA, 19 nt, Homo sapiens
  misc_RNA (1)...(19): siRNA sense strand
gaagugcauggaucccuuu

SEQ ID NO: 1473365 - RNA, 19 nt, Homo sapiens
  misc_RNA (1)...(19): siRNA sense strand
gaagaucaaacacaaacca

SEQ ID NO: 1473366 - RNA, 19 nt, Homo sapiens
  misc_RNA (1)...(19): siRNA sense strand
aagagaggcucaccuguac

SEQ ID NO: 1473367 - RNA, 19 nt, Homo sapiens
  misc_RNA (1)...(19): siRNA sense strand
gcgaagggaaugccaacaa

SEQ ID NO: 1473368 - RNA, 19 nt, Homo sapiens
  misc_RNA (1)...(19): siRNA sense strand
ggaaugccaacaacuucuu

SEQ ID NO: 1473369 - RNA, 19 nt, Homo sapiens
  misc_RNA (1)...(19): siRNA sense strand
gauggacaaugcccacucu

SEQ ID NO: 1473370 - RNA, 19 nt, Homo sapiens
  misc_RNA (1)...(19): siRNA sense strand
gaacggccugcauguuaau

SEQ ID NO: 1473371 - RNA, 19 nt, Homo sapiens
  misc_RNA (1)...(19): siRNA sense strand
gcgcuggcauuuugacuuu

SEQ ID NO: 1473372 - RNA, 19 nt, Homo sapiens
  misc_RNA (1)...(19): siRNA sense strand
ggaugaggagugcccauug

SEQ ID NO: 1473373 - RNA, 19 nt, Homo sapiens
  misc_RNA (1)...(19): siRNA sense strand
cuauguaccaagauugaua

SEQ ID NO: 1473374 - RNA, 19 nt, Homo sapiens
  misc_RNA (1)...(19): siRNA sense strand
cgaagggaaugccaacaac

SEQ ID NO: 1473375 - RNA, 19 nt, Homo sapiens
  misc_RNA (1)...(19): siRNA sense strand
ugaccaagaagaucaaaca

SEQ ID NO: 1473376 - RNA, 19 nt, Homo sapiens
  misc_RNA (1)...(19): siRNA sense strand
gcucaccuguaccacugaa

SEQ ID NO: 1473377 - RNA, 19 nt, Homo sapiens
  misc_RNA (1)...(19): siRNA sense strand
gcauggaaacuguaaucau

SEQ ID NO: 1473378 - RNA, 19 nt, Homo sapiens
  misc_RNA (1)...(19): siRNA sense strand
auuguggacugaaauguau

SEQ ID NO: 1473379 - RNA, 19 nt, Homo sapiens
  misc_RNA (1)...(19): siRNA sense strand
cugcuucucucccuugcuu

SEQ ID NO: 1473380 - RNA, 19 nt, Homo sapiens
  misc_RNA (1)...(19): siRNA sense strand
gaacugaaggagggcacuu

SEQ ID NO: 1473381 - RNA, 19 nt, Homo sapiens
  misc_RNA (1)...(19): siRNA sense strand
ggaguguccaccuucaugu

SEQ ID NO: 1473382 - RNA, 19 nt, Homo sapiens
  misc_RNA (1)...(19): siRNA sense strand
ugugaggcauggaaacugu

SEQ ID NO: 1473383 - RNA, 19 nt, Homo sapiens
  misc_RNA (1)...(19): siRNA sense strand
cauggaucccuuucaagaa

SEQ ID NO: 1473384 - RNA, 19 nt, Homo sapiens
  misc_RNA (1)...(19): siRNA sense strand
acucauguaacacagauuu

SEQ ID NO: 1473385 - RNA, 19 nt, Homo sapiens
  misc_RNA (1)...(19): siRNA sense strand
ggagugcccauugguggaa

SEQ ID NO: 1473386 - RNA, 19 nt, Homo sapiens
  misc_RNA (1)...(19): siRNA sense strand
cuuccggacucauguaaca

SEQ ID NO: 1473387 - RNA, 19 nt, Homo sapiens
  misc_RNA (1)...(19): siRNA sense strand
gaagggaaugccaacaacu

SEQ ID NO: 1473388 - RNA, 19 nt, Homo sapiens
  misc_RNA (1)...(19): siRNA sense strand
uaccagaagugcugcuuuu

SEQ ID NO: 1473389 - RNA, 19 nt, Homo sapiens
  misc_RNA (1)...(19): siRNA sense strand
gcuggcauuuugacuuuaa

SEQ ID NO: 1473390 - RNA, 19 nt, Homo sapiens
  misc_RNA (1)...(19): siRNA sense strand
cggccugcauguuaauugu

SEQ ID NO: 1473391 - RNA, 19 nt, Homo sapiens
  misc_RNA (1)...(19): siRNA sense strand
gagaggcucaccuguacca

SEQ ID NO: 1473392 - RNA, 19 nt, Homo sapiens
  misc_RNA (1)...(19): siRNA sense strand
aaagugcugcucacauugu

SEQ ID NO: 1473393 - RNA, 19 nt, Homo sapiens
  misc_RNA (1)...(19): siRNA sense strand
aaugcccacucuucccuuu

SEQ ID NO: 1473394 - RNA, 19 nt, Homo sapiens
  misc_RNA (1)...(19): siRNA sense strand
ccaggguuaugucccaaag

SEQ ID NO: 1473395 - RNA, 19 nt, Homo sapiens
  misc_RNA (1)...(19): siRNA sense strand
uguuaaggauggacaaugc

SEQ ID NO: 1473396 - RNA, 19 nt, Homo sapiens
  misc_RNA (1)...(19): siRNA sense strand
cugcacacccuucaaauac

SEQ ID NO: 1473397 - RNA, 19 nt, Homo sapiens
  misc_RNA (1)...(19): siRNA sense strand
acacagauuuugacugcaa

SEQ ID NO: 1473398 - RNA, 19 nt, Homo sapiens
  misc_RNA (1)...(19): siRNA sense strand
ccgcugcacacccuucaaa

SEQ ID NO: 1473399 - RNA, 19 nt, Homo sapiens
  misc_RNA (1)...(19): siRNA sense strand
ugaggcauggaaacuguaa

SEQ ID NO: 1473400 - RNA, 19 nt, Homo sapiens
  misc_RNA (1)...(19): siRNA sense strand
cuucugcaaugcugaccaa

SEQ ID NO: 1473401 - RNA, 19 nt, Homo sapiens
  misc_RNA (1)...(19): siRNA sense strand
cuggaggaauguagcuuuc

SEQ ID NO: 1473402 - RNA, 19 nt, Homo sapiens
  misc_RNA (1)...(19): siRNA sense strand
gauuuugacugcaaggaau

SEQ ID NO: 1473403 - RNA, 19 nt, Homo sapiens
  misc_RNA (1)...(19): siRNA sense strand
gcaagaaguuugaggauga

SEQ ID NO: 1473404 - RNA, 19 nt, Homo sapiens
  misc_RNA (1)...(19): siRNA sense strand
gguaauagauggucuggaa

SEQ ID NO: 1473405 - RNA, 19 nt, Homo sapiens
  misc_RNA (1)...(19): siRNA sense strand
gugaauaucuuaagcacaa

SEQ ID NO: 1473406 - RNA, 19 nt, Homo sapiens
  misc_RNA (1)...(19): siRNA sense strand
ggaagaggaggcaacagua

SEQ ID NO: 1473407 - RNA, 19 nt, Homo sapiens
  misc_RNA (1)...(19): siRNA sense strand
uagaugaguuggagaaguu

SEQ ID NO: 1473408 - RNA, 19 nt, Homo sapiens
  misc_RNA (1)...(19): siRNA sense strand
caauggaucucaguucuuc

SEQ ID NO: 1473409 - RNA, 19 nt, Homo sapiens
  misc_RNA (1)...(19): siRNA sense strand
gaagaggaggcaacaguau

SEQ ID NO: 1473410 - RNA, 19 nt, Homo sapiens
  misc_RNA (1)...(19): siRNA sense strand
gaggaugaauacagugaau

SEQ ID NO: 1473411 - RNA, 19 nt, Homo sapiens
  misc_RNA (1)...(19): siRNA sense strand
gcacaauguuagagguguu

SEQ ID NO: 1473412 - RNA, 19 nt, Homo sapiens
  misc_RNA (1)...(19): siRNA sense strand
ggaugaauacagugaauau

SEQ ID NO: 1473413 - RNA, 19 nt, Homo sapiens
  misc_RNA (1)...(19): siRNA sense strand
caccguauuuggaaaggua

SEQ ID NO: 1473414 - RNA, 19 nt, Homo sapiens
  misc_RNA (1)...(19): siRNA sense strand
caagaaguuugaggaugaa

SEQ ID NO: 1473415 - RNA, 19 nt, Homo sapiens
  misc_RNA (1)...(19): siRNA sense strand
uuggagaaguugccaguaa

SEQ ID NO: 1473416 - RNA, 19 nt, Homo sapiens
  misc_RNA (1)...(19): siRNA sense strand
ggaucucaguucuucauca

SEQ ID NO: 1473417 - RNA, 19 nt, Homo sapiens
  misc_RNA (1)...(19): siRNA sense strand
agacauaccgaccucuuaa

SEQ ID NO: 1473418 - RNA, 19 nt, Homo sapiens
  misc_RNA (1)...(19): siRNA sense strand
uggagaaguugccaguaaa

SEQ ID NO: 1473419 - RNA, 19 nt, Homo sapiens
  misc_RNA (1)...(19): siRNA sense strand
caguaaaugagaagacaua

SEQ ID NO: 1473420 - RNA, 19 nt, Homo sapiens
  misc_RNA (1)...(19): siRNA sense strand
gaaguuugaggaugaauac

SEQ ID NO: 1473421 - RNA, 19 nt, Homo sapiens
  misc_RNA (1)...(19): siRNA sense strand
agaaguugccaguaaauga

SEQ ID NO: 1473422 - RNA, 19 nt, Homo sapiens
  misc_RNA (1)...(19): siRNA sense strand
caacccauuugcucaguag

SEQ ID NO: 1473423 - RNA, 19 nt, Homo sapiens
  misc_RNA (1)...(19): siRNA sense strand
uagauggucuggaaacucu

SEQ ID NO: 1473424 - RNA, 19 nt, Homo sapiens
  misc_RNA (1)...(19): siRNA sense strand
acagauguaggugauauua

SEQ ID NO: 1473425 - RNA, 19 nt, Homo sapiens
  misc_RNA (1)...(19): siRNA sense strand
uguuagagguguuguaucu

SEQ ID NO: 1473426 - RNA, 19 nt, Homo sapiens
  misc_RNA (1)...(19): siRNA sense strand
gaaguugccaguaaaugag

SEQ ID NO: 1473427 - RNA, 19 nt, Homo sapiens
  misc_RNA (1)...(19): siRNA sense strand
ggagaaguugccaguaaau

SEQ ID NO: 1473428 - RNA, 19 nt, Homo sapiens
  misc_RNA (1)...(19): siRNA sense strand
agaggaggcaacaguauuu

SEQ ID NO: 1473429 - RNA, 19 nt, Homo sapiens
  misc_RNA (1)...(19): siRNA sense strand
auaccgaccucuuaaugau

SEQ ID NO: 1473430 - RNA, 19 nt, Homo sapiens
  misc_RNA (1)...(19): siRNA sense strand
ccaacccauuugcucagua

SEQ ID NO: 1473431 - RNA, 19 nt, Homo sapiens
  misc_RNA (1)...(19): siRNA sense strand
cauaccgaccucuuaauga

SEQ ID NO: 1473432 - RNA, 19 nt, Homo sapiens
  misc_RNA (1)...(19): siRNA sense strand
gccaguaaaugagaagaca

SEQ ID NO: 1473433 - RNA, 19 nt, Homo sapiens
  misc_RNA (1)...(19): siRNA sense strand
gaucucaguucuucaucac

SEQ ID NO: 1473434 - RNA, 19 nt, Homo sapiens
  misc_RNA (1)...(19): siRNA sense strand
gagaaguugccaguaaaug

SEQ ID NO: 1473435 - RNA, 19 nt, Homo sapiens
  misc_RNA (1)...(19): siRNA sense strand
gaauaucuuaagcacaaug

SEQ ID NO: 1473436 - RNA, 19 nt, Homo sapiens
  misc_RNA (1)...(19): siRNA sense strand
guaauagauggucuggaaa

SEQ ID NO: 1473437 - RNA, 19 nt, Homo sapiens
  misc_RNA (1)...(19): siRNA sense strand
cuucaucaccuauggcaaa

SEQ ID NO: 1473438 - RNA, 19 nt, Homo sapiens
  misc_RNA (1)...(19): siRNA sense strand
guaucuauggcuaauaaug

SEQ ID NO: 1473439 - RNA, 19 nt, Homo sapiens
  misc_RNA (1)...(19): siRNA sense strand
guacacauuaaggacauaa

SEQ ID NO: 1473440 - RNA, 19 nt, Homo sapiens
  misc_RNA (1)...(19): siRNA sense strand
ucuggaaacucuagaugag

SEQ ID NO: 1473441 - RNA, 19 nt, Homo sapiens
  misc_RNA (1)...(19): siRNA sense strand
guuugaggaugaauacagu

SEQ ID NO: 1473442 - RNA, 19 nt, Homo sapiens
  misc_RNA (1)...(19): siRNA sense strand
cagauguaggugauauuaa

SEQ ID NO: 1473443 - RNA, 19 nt, Homo sapiens
  misc_RNA (1)...(19): siRNA sense strand
agaaguuugaggaugaaua

SEQ ID NO: 1473444 - RNA, 19 nt, Homo sapiens
  misc_RNA (1)...(19): siRNA sense strand
cacauuaaggacauaacua

SEQ ID NO: 1473445 - RNA, 19 nt, Homo sapiens
  misc_RNA (1)...(19): siRNA sense strand
gcuaauaauggcccgaaca

SEQ ID NO: 1473446 - RNA, 19 nt, Homo sapiens
  misc_RNA (1)...(19): siRNA sense strand
ugacacugcauacagaugu

SEQ ID NO: 1473447 - RNA, 19 nt, Homo sapiens
  misc_RNA (1)...(19): siRNA sense strand
caucaccuauggcaaacag

SEQ ID NO: 1473448 - RNA, 19 nt, Homo sapiens
  misc_RNA (1)...(19): siRNA sense strand
aagaggaggcaacaguauu

SEQ ID NO: 1473449 - RNA, 19 nt, Homo sapiens
  misc_RNA (1)...(19): siRNA sense strand
gaggaggcaacaguauuug

SEQ ID NO: 1473450 - RNA, 19 nt, Homo sapiens
  misc_RNA (1)...(19): siRNA sense strand
ggucuggaaacucuagaug

SEQ ID NO: 1473451 - RNA, 19 nt, Homo sapiens
  misc_RNA (1)...(19): siRNA sense strand
gggcaagaaguuugaggau

SEQ ID NO: 1473452 - RNA, 19 nt, Homo sapiens
  misc_RNA (1)...(19): siRNA sense strand
cuagaugaguuggagaagu

SEQ ID NO: 1473453 - RNA, 19 nt, Homo sapiens
  misc_RNA (1)...(19): siRNA sense strand
uaucuauggcuaauaaugg

SEQ ID NO: 1473454 - RNA, 19 nt, Homo sapiens
  misc_RNA (1)...(19): siRNA sense strand
ccaauggaucucaguucuu

SEQ ID NO: 1473455 - RNA, 19 nt, Homo sapiens
  misc_RNA (1)...(19): siRNA sense strand
caauguuagagguguugua

SEQ ID NO: 1473456 - RNA, 19 nt, Homo sapiens
  misc_RNA (1)...(19): siRNA sense strand
acauaccgaccucuuaaug

SEQ ID NO: 1473457 - RNA, 19 nt, Homo sapiens
  misc_RNA (1)...(19): siRNA sense strand
cagccacauuuggacauga

SEQ ID NO: 1473458 - RNA, 19 nt, Homo sapiens
  misc_RNA (1)...(19): siRNA sense strand
gacauaccgaccucuuaau

SEQ ID NO: 1473459 - RNA, 19 nt, Homo sapiens
  misc_RNA (1)...(19): siRNA sense strand
gcaagaaguuugaggauga

SEQ ID NO: 1473460 - RNA, 19 nt, Homo sapiens
  misc_RNA (1)...(19): siRNA sense strand
gguaauagauggucuggaa

SEQ ID NO: 1473461 - RNA, 19 nt, Homo sapiens
  misc_RNA (1)...(19): siRNA sense strand
gugaauaucuuaagcacaa

SEQ ID NO: 1473462 - RNA, 19 nt, Homo sapiens
  misc_RNA (1)...(19): siRNA sense strand
ggaagaggaggcaacagua

SEQ ID NO: 1473463 - RNA, 19 nt, Homo sapiens
  misc_RNA (1)...(19): siRNA sense strand
uagaugaguuggagaaguu

SEQ ID NO: 1473464 - RNA, 19 nt, Homo sapiens
  misc_RNA (1)...(19): siRNA sense strand
caauggaucucaguucuuc

SEQ ID NO: 1473465 - RNA, 19 nt, Homo sapiens
  misc_RNA (1)...(19): siRNA sense strand
gaagaggaggcaacaguau

SEQ ID NO: 1473466 - RNA, 19 nt, Homo sapiens
  misc_RNA (1)...(19): siRNA sense strand
gaggaugaauacagugaau

SEQ ID NO: 1473467 - RNA, 19 nt, Homo sapiens
  misc_RNA (1)...(19): siRNA sense strand
gcacaauguuagagguguu

SEQ ID NO: 1473468 - RNA, 19 nt, Homo sapiens
  misc_RNA (1)...(19): siRNA sense strand
ggaugaauacagugaauau

SEQ ID NO: 1473469 - RNA, 19 nt, Homo sapiens
  misc_RNA (1)...(19): siRNA sense strand
caccguauuuggaaaggua

SEQ ID NO: 1473470 - RNA, 19 nt, Homo sapiens
  misc_RNA (1)...(19): siRNA sense strand
caagaaguuugaggaugaa

SEQ ID NO: 1473471 - RNA, 19 nt, Homo sapiens
  misc_RNA (1)...(19): siRNA sense strand
uuggagaaguugccaguaa

SEQ ID NO: 1473472 - RNA, 19 nt, Homo sapiens
  misc_RNA (1)...(19): siRNA sense strand
ggaucucaguucuucauca

SEQ ID NO: 1473473 - RNA, 19 nt, Homo sapiens
  misc_RNA (1)...(19): siRNA sense strand
agacauaccgaccucuuaa

SEQ ID NO: 1473474 - RNA, 19 nt, Homo sapiens
  misc_RNA (1)...(19): siRNA sense strand
uggagaaguugccaguaaa

SEQ ID NO: 1473475 - RNA, 19 nt, Homo sapiens
  misc_RNA (1)...(19): siRNA sense strand
caguaaaugagaagacaua

SEQ ID NO: 1473476 - RNA, 19 nt, Homo sapiens
  misc_RNA (1)...(19): siRNA sense strand
gaaguuugaggaugaauac

SEQ ID NO: 1473477 - RNA, 19 nt, Homo sapiens
  misc_RNA (1)...(19): siRNA sense strand
agaaguugccaguaaauga

SEQ ID NO: 1473478 - RNA, 19 nt, Homo sapiens
  misc_RNA (1)...(19): siRNA sense strand
caacccauuugcucaguag

SEQ ID NO: 1473479 - RNA, 19 nt, Homo sapiens
  misc_RNA (1)...(19): siRNA sense strand
uagauggucuggaaacucu

SEQ ID NO: 1473480 - RNA, 19 nt, Homo sapiens
  misc_RNA (1)...(19): siRNA sense strand
acagauguaggugauauua

SEQ ID NO: 1473481 - RNA, 19 nt, Homo sapiens
  misc_RNA (1)...(19): siRNA sense strand
uguuagagguguuguaucu

SEQ ID NO: 1473482 - RNA, 19 nt, Homo sapiens
  misc_RNA (1)...(19): siRNA sense strand
gaaguugccaguaaaugag

SEQ ID NO: 1473483 - RNA, 19 nt, Homo sapiens
  misc_RNA (1)...(19): siRNA sense strand
ggagaaguugccaguaaau

SEQ ID NO: 1473484 - RNA, 19 nt, Homo sapiens
  misc_RNA (1)...(19): siRNA sense strand
agaggaggcaacaguauuu

SEQ ID NO: 1473485 - RNA, 19 nt, Homo sapiens
  misc_RNA (1)...(19): siRNA sense strand
auaccgaccucuuaaugau

SEQ ID NO: 1473486 - RNA, 19 nt, Homo sapiens
  misc_RNA (1)...(19): siRNA sense strand
ccaacccauuugcucagua

SEQ ID NO: 1473487 - RNA, 19 nt, Homo sapiens
  misc_RNA (1)...(19): siRNA sense strand
cauaccgaccucuuaauga

SEQ ID NO: 1473488 - RNA, 19 nt, Homo sapiens
  misc_RNA (1)...(19): siRNA sense strand
gccaguaaaugagaagaca

SEQ ID NO: 1473489 - RNA, 19 nt, Homo sapiens
  misc_RNA (1)...(19): siRNA sense strand
gaucucaguucuucaucac

SEQ ID NO: 1473490 - RNA, 19 nt, Homo sapiens
  misc_RNA (1)...(19): siRNA sense strand
gagaaguugccaguaaaug

SEQ ID NO: 1473491 - RNA, 19 nt, Homo sapiens
  misc_RNA (1)...(19): siRNA sense strand
gaauaucuuaagcacaaug

SEQ ID NO: 1473492 - RNA, 19 nt, Homo sapiens
  misc_RNA (1)...(19): siRNA sense strand
guaauagauggucuggaaa

SEQ ID NO: 1473493 - RNA, 19 nt, Homo sapiens
  misc_RNA (1)...(19): siRNA sense strand
cuucaucaccuauggcaaa

SEQ ID NO: 1473494 - RNA, 19 nt, Homo sapiens
  misc_RNA (1)...(19): siRNA sense strand
guaucuauggcuaauaaug

SEQ ID NO: 1473495 - RNA, 19 nt, Homo sapiens
  misc_RNA (1)...(19): siRNA sense strand
guacacauuaaggacauaa

SEQ ID NO: 1473496 - RNA, 19 nt, Homo sapiens
  misc_RNA (1)...(19): siRNA sense strand
ucuggaaacucuagaugag

SEQ ID NO: 1473497 - RNA, 19 nt, Homo sapiens
  misc_RNA (1)...(19): siRNA sense strand
guuugaggaugaauacagu

SEQ ID NO: 1473498 - RNA, 19 nt, Homo sapiens
  misc_RNA (1)...(19): siRNA sense strand
cagauguaggugauauuaa

SEQ ID NO: 1473499 - RNA, 19 nt, Homo sapiens
  misc_RNA (1)...(19): siRNA sense strand
agaaguuugaggaugaaua

SEQ ID NO: 1473500 - RNA, 19 nt, Homo sapiens
  misc_RNA (1)...(19): siRNA sense strand
cacauuaaggacauaacua

SEQ ID NO: 1473501 - RNA, 19 nt, Homo sapiens
  misc_RNA (1)...(19): siRNA sense strand
gcuaauaauggcccgaaca

SEQ ID NO: 1473502 - RNA, 19 nt, Homo sapiens
  misc_RNA (1)...(19): siRNA sense strand
ugacacugcauacagaugu

SEQ ID NO: 1473503 - RNA, 19 nt, Homo sapiens
  misc_RNA (1)...(19): siRNA sense strand
caucaccuauggcaaacag

SEQ ID NO: 1473504 - RNA, 19 nt, Homo sapiens
  misc_RNA (1)...(19): siRNA sense strand
aagaggaggcaacaguauu

SEQ ID NO: 1473505 - RNA, 19 nt, Homo sapiens
  misc_RNA (1)...(19): siRNA sense strand
gaggaggcaacaguauuug

SEQ ID NO: 1473506 - RNA, 19 nt, Homo sapiens
  misc_RNA (1)...(19): siRNA sense strand
ggucuggaaacucuagaug

SEQ ID NO: 1473507 - RNA, 19 nt, Homo sapiens
  misc_RNA (1)...(19): siRNA sense strand
gggcaagaaguuugaggau

SEQ ID NO: 1473508 - RNA, 19 nt, Homo sapiens
  misc_RNA (1)...(19): siRNA sense strand
cuagaugaguuggagaagu

SEQ ID NO: 1473509 - RNA, 19 nt, Homo sapiens
  misc_RNA (1)...(19): siRNA sense strand
uaucuauggcuaauaaugg

SEQ ID NO: 1473510 - RNA, 19 nt, Homo sapiens
  misc_RNA (1)...(19): siRNA sense strand
ccaauggaucucaguucuu

SEQ ID NO: 1473511 - RNA, 19 nt, Homo sapiens
  misc_RNA (1)...(19): siRNA sense strand
caauguuagagguguugua

SEQ ID NO: 1473512 - RNA, 19 nt, Homo sapiens
  misc_RNA (1)...(19): siRNA sense strand
acauaccgaccucuuaaug

SEQ ID NO: 1473513 - RNA, 19 nt, Homo sapiens
  misc_RNA (1)...(19): siRNA sense strand
cagccacauuuggacauga

SEQ ID NO: 1473514 - RNA, 19 nt, Homo sapiens
  misc_RNA (1)...(19): siRNA sense strand
gacauaccgaccucuuaau

SEQ ID NO: 1473515 - RNA, 19 nt, Homo sapiens
  misc_RNA (1)...(19): siRNA sense strand
gcaagaaguuugaggauga

SEQ ID NO: 1473516 - RNA, 19 nt, Homo sapiens
  misc_RNA (1)...(19): siRNA sense strand
gguaauagauggucuggaa

SEQ ID NO: 1473517 - RNA, 19 nt, Homo sapiens
  misc_RNA (1)...(19): siRNA sense strand
gugaauaucuuaagcacaa

SEQ ID NO: 1473518 - RNA, 19 nt, Homo sapiens
  misc_RNA (1)...(19): siRNA sense strand
ggaagaggaggcaacagua

SEQ ID NO: 1473519 - RNA, 19 nt, Homo sapiens
  misc_RNA (1)...(19): siRNA sense strand
uagaugaguuggagaaguu

SEQ ID NO: 1473520 - RNA, 19 nt, Homo sapiens
  misc_RNA (1)...(19): siRNA sense strand
caauggaucucaguucuuc

SEQ ID NO: 1473521 - RNA, 19 nt, Homo sapiens
  misc_RNA (1)...(19): siRNA sense strand
gaagaggaggcaacaguau

SEQ ID NO: 1473522 - RNA, 19 nt, Homo sapiens
  misc_RNA (1)...(19): siRNA sense strand
gaggaugaauacagugaau

SEQ ID NO: 1473523 - RNA, 19 nt, Homo sapiens
  misc_RNA (1)...(19): siRNA sense strand
gcacaauguuagagguguu

SEQ ID NO: 1473524 - RNA, 19 nt, Homo sapiens
  misc_RNA (1)...(19): siRNA sense strand
ggaugaauacagugaauau

SEQ ID NO: 1473525 - RNA, 19 nt, Homo sapiens
  misc_RNA (1)...(19): siRNA sense strand
caccguauuuggaaaggua

SEQ ID NO: 1473526 - RNA, 19 nt, Homo sapiens
  misc_RNA (1)...(19): siRNA sense strand
caagaaguuugaggaugaa

SEQ ID NO: 1473527 - RNA, 19 nt, Homo sapiens
  misc_RNA (1)...(19): siRNA sense strand
uuggagaaguugccaguaa

SEQ ID NO: 1473528 - RNA, 19 nt, Homo sapiens
  misc_RNA (1)...(19): siRNA sense strand
ggaucucaguucuucauca

SEQ ID NO: 1473529 - RNA, 19 nt, Homo sapiens
  misc_RNA (1)...(19): siRNA sense strand
agacauaccgaccucuuaa

SEQ ID NO: 1473530 - RNA, 19 nt, Homo sapiens
  misc_RNA (1)...(19): siRNA sense strand
uggagaaguugccaguaaa

SEQ ID NO: 1473531 - RNA, 19 nt, Homo sapiens
  misc_RNA (1)...(19): siRNA sense strand
caguaaaugagaagacaua

SEQ ID NO: 1473532 - RNA, 19 nt, Homo sapiens
  misc_RNA (1)...(19): siRNA sense strand
gaaguuugaggaugaauac

SEQ ID NO: 1473533 - RNA, 19 nt, Homo sapiens
  misc_RNA (1)...(19): siRNA sense strand
agaaguugccaguaaauga

SEQ ID NO: 1473534 - RNA, 19 nt, Homo sapiens
  misc_RNA (1)...(19): siRNA sense strand
caacccauuugcucaguag

SEQ ID NO: 1473535 - RNA, 19 nt, Homo sapiens
  misc_RNA (1)...(19): siRNA sense strand
uagauggucuggaaacucu

SEQ ID NO: 1473536 - RNA, 19 nt, Homo sapiens
  misc_RNA (1)...(19): siRNA sense strand
acagauguaggugauauua

SEQ ID NO: 1473537 - RNA, 19 nt, Homo sapiens
  misc_RNA (1)...(19): siRNA sense strand
uguuagagguguuguaucu

SEQ ID NO: 1473538 - RNA, 19 nt, Homo sapiens
  misc_RNA (1)...(19): siRNA sense strand
gaaguugccaguaaaugag

SEQ ID NO: 1473539 - RNA, 19 nt, Homo sapiens
  misc_RNA (1)...(19): siRNA sense strand
ggagaaguugccaguaaau

SEQ ID NO: 1473540 - RNA, 19 nt, Homo sapiens
  misc_RNA (1)...(19): siRNA sense strand
agaggaggcaacaguauuu

SEQ ID NO: 1473541 - RNA, 19 nt, Homo sapiens
  misc_RNA (1)...(19): siRNA sense strand
auaccgaccucuuaaugau

SEQ ID NO: 1473542 - RNA, 19 nt, Homo sapiens
  misc_RNA (1)...(19): siRNA sense strand
ccaacccauuugcucagua

SEQ ID NO: 1473543 - RNA, 19 nt, Homo sapiens
  misc_RNA (1)...(19): siRNA sense strand
cauaccgaccucuuaauga

SEQ ID NO: 1473544 - RNA, 19 nt, Homo sapiens
  misc_RNA (1)...(19): siRNA sense strand
gccaguaaaugagaagaca

SEQ ID NO: 1473545 - RNA, 19 nt, Homo sapiens
  misc_RNA (1)...(19): siRNA sense strand
gaucucaguucuucaucac

SEQ ID NO: 1473546 - RNA, 19 nt, Homo sapiens
  misc_RNA (1)...(19): siRNA sense strand
gagaaguugccaguaaaug

SEQ ID NO: 1473547 - RNA, 19 nt, Homo sapiens
  misc_RNA (1)...(19): siRNA sense strand
gaauaucuuaagcacaaug

SEQ ID NO: 1473548 - RNA, 19 nt, Homo sapiens
  misc_RNA (1)...(19): siRNA sense strand
guaauagauggucuggaaa

SEQ ID NO: 1473549 - RNA, 19 nt, Homo sapiens
  misc_RNA (1)...(19): siRNA sense strand
cuucaucaccuauggcaaa

SEQ ID NO: 1473550 - RNA, 19 nt, Homo sapiens
  misc_RNA (1)...(19): siRNA sense strand
guaucuauggcuaauaaug

SEQ ID NO: 1473551 - RNA, 19 nt, Homo sapiens
  misc_RNA (1)...(19): siRNA sense strand
guacacauuaaggacauaa

SEQ ID NO: 1473552 - RNA, 19 nt, Homo sapiens
  misc_RNA (1)...(19): siRNA sense strand
ucuggaaacucuagaugag

SEQ ID NO: 1473553 - RNA, 19 nt, Homo sapiens
  misc_RNA (1)...(19): siRNA sense strand
guuugaggaugaauacagu

SEQ ID NO: 1473554 - RNA, 19 nt, Homo sapiens
  misc_RNA (1)...(19): siRNA sense strand
cagauguaggugauauuaa

SEQ ID NO: 1473555 - RNA, 19 nt, Homo sapiens
  misc_RNA (1)...(19): siRNA sense strand
agaaguuugaggaugaaua

SEQ ID NO: 1473556 - RNA, 19 nt, Homo sapiens
  misc_RNA (1)...(19): siRNA sense strand
cacauuaaggacauaacua

SEQ ID NO: 1473557 - RNA, 19 nt, Homo sapiens
  misc_RNA (1)...(19): siRNA sense strand
gcuaauaauggcccgaaca

SEQ ID NO: 1473558 - RNA, 19 nt, Homo sapiens
  misc_RNA (1)...(19): siRNA sense strand
ugacacugcauacagaugu

SEQ ID NO: 1473559 - RNA, 19 nt, Homo sapiens
  misc_RNA (1)...(19): siRNA sense strand
caucaccuauggcaaacag

SEQ ID NO: 1473560 - RNA, 19 nt, Homo sapiens
  misc_RNA (1)...(19): siRNA sense strand
aagaggaggcaacaguauu

SEQ ID NO: 1473561 - RNA, 19 nt, Homo sapiens
  misc_RNA (1)...(19): siRNA sense strand
gaggaggcaacaguauuug

SEQ ID NO: 1473562 - RNA, 19 nt, Homo sapiens
  misc_RNA (1)...(19): siRNA sense strand
ggucuggaaacucuagaug

SEQ ID NO: 1473563 - RNA, 19 nt, Homo sapiens
  misc_RNA (1)...(19): siRNA sense strand
gggcaagaaguuugaggau

SEQ ID NO: 1473564 - RNA, 19 nt, Homo sapiens
  misc_RNA (1)...(19): siRNA sense strand
cuagaugaguuggagaagu

SEQ ID NO: 1473565 - RNA, 19 nt, Homo sapiens
  misc_RNA (1)...(19): siRNA sense strand
uaucuauggcuaauaaugg

SEQ ID NO: 1473566 - RNA, 19 nt, Homo sapiens
  misc_RNA (1)...(19): siRNA sense strand
ccaauggaucucaguucuu

SEQ ID NO: 1473567 - RNA, 19 nt, Homo sapiens
  misc_RNA (1)...(19): siRNA sense strand
caauguuagagguguugua

SEQ ID NO: 1473568 - RNA, 19 nt, Homo sapiens
  misc_RNA (1)...(19): siRNA sense strand
acauaccgaccucuuaaug

SEQ ID NO: 1473569 - RNA, 19 nt, Homo sapiens
  misc_RNA (1)...(19): siRNA sense strand
cagccacauuuggacauga

SEQ ID NO: 1473570 - RNA, 19 nt, Homo sapiens
  misc_RNA (1)...(19): siRNA sense strand
gacauaccgaccucuuaau

SEQ ID NO: 1473571 - RNA, 19 nt, Homo sapiens
  misc_RNA (1)...(19): siRNA sense strand
gaggcuggcuggcagguuu

SEQ ID NO: 1473572 - RNA, 19 nt, Homo sapiens
  misc_RNA (1)...(19): siRNA sense strand
ugaugaagcuccucagaau

SEQ ID NO: 1473573 - RNA, 19 nt, Homo sapiens
  misc_RNA (1)...(19): siRNA sense strand
gcaugaagcagacugaaga

SEQ ID NO: 1473574 - RNA, 19 nt, Homo sapiens
  misc_RNA (1)...(19): siRNA sense strand
gguuacagguucuggacua

SEQ ID NO: 1473575 - RNA, 19 nt, Homo sapiens
  misc_RNA (1)...(19): siRNA sense strand
gaacggugcuccagaugcu

SEQ ID NO: 1473576 - RNA, 19 nt, Homo sapiens
  misc_RNA (1)...(19): siRNA sense strand
ccaaacaccugcacaagac

SEQ ID NO: 1473577 - RNA, 19 nt, Homo sapiens
  misc_RNA (1)...(19): siRNA sense strand
gaugaagcuccucagaaua

SEQ ID NO: 1473578 - RNA, 19 nt, Homo sapiens
  misc_RNA (1)...(19): siRNA sense strand
agggagagcugacugaguu

SEQ ID NO: 1473579 - RNA, 19 nt, Homo sapiens
  misc_RNA (1)...(19): siRNA sense strand
ggaggcaccuucgccagaa

SEQ ID NO: 1473580 - RNA, 19 nt, Homo sapiens
  misc_RNA (1)...(19): siRNA sense strand
ccaagcuucuucccuauca

SEQ ID NO: 1473581 - RNA, 19 nt, Homo sapiens
  misc_RNA (1)...(19): siRNA sense strand
ggcuagaggugcugaagga

SEQ ID NO: 1473582 - RNA, 19 nt, Homo sapiens
  misc_RNA (1)...(19): siRNA sense strand
gaauacuccuccagcaacu

SEQ ID NO: 1473583 - RNA, 19 nt, Homo sapiens
  misc_RNA (1)...(19): siRNA sense strand
gcucaucacucagccuaag

SEQ ID NO: 1473584 - RNA, 19 nt, Homo sapiens
  misc_RNA (1)...(19): siRNA sense strand
cacacacucuucuccaaug

SEQ ID NO: 1473585 - RNA, 19 nt, Homo sapiens
  misc_RNA (1)...(19): siRNA sense strand
ccucaagccucccaaacca

SEQ ID NO: 1473586 - RNA, 19 nt, Homo sapiens
  misc_RNA (1)...(19): siRNA sense strand
cugcccagcugguguguga

SEQ ID NO: 1473587 - RNA, 19 nt, Homo sapiens
  misc_RNA (1)...(19): siRNA sense strand
uggcuccucuccacaagaa

SEQ ID NO: 1473588 - RNA, 19 nt, Homo sapiens
  misc_RNA (1)...(19): siRNA sense strand
cugcagagccucccuaagu

SEQ ID NO: 1473589 - RNA, 19 nt, Homo sapiens
  misc_RNA (1)...(19): siRNA sense strand
cgguguauguggauuaugu

SEQ ID NO: 1473590 - RNA, 19 nt, Homo sapiens
  misc_RNA (1)...(19): siRNA sense strand
gcagagccucccuaagugu

SEQ ID NO: 1473591 - RNA, 19 nt, Homo sapiens
  misc_RNA (1)...(19): siRNA sense strand
uaugaggacugugacuguu

SEQ ID NO: 1473592 - RNA, 19 nt, Homo sapiens
  misc_RNA (1)...(19): siRNA sense strand
cagaauacuccuccagcaa

SEQ ID NO: 1473593 - RNA, 19 nt, Homo sapiens
  misc_RNA (1)...(19): siRNA sense strand
ggagucagcgagcgguuuc

SEQ ID NO: 1473594 - RNA, 19 nt, Homo sapiens
  misc_RNA (1)...(19): siRNA sense strand
caagcgagagcagauguga

SEQ ID NO: 1473595 - RNA, 19 nt, Homo sapiens
  misc_RNA (1)...(19): siRNA sense strand
aggcugcgcuuccacaaag

SEQ ID NO: 1473596 - RNA, 19 nt, Homo sapiens
  misc_RNA (1)...(19): siRNA sense strand
caauggcuccucuccacaa

SEQ ID NO: 1473597 - RNA, 19 nt, Homo sapiens
  misc_RNA (1)...(19): siRNA sense strand
ucaggagaaugcccagaag

SEQ ID NO: 1473598 - RNA, 19 nt, Homo sapiens
  misc_RNA (1)...(19): siRNA sense strand
cagcuggugugugaaguca

SEQ ID NO: 1473599 - RNA, 19 nt, Homo sapiens
  misc_RNA (1)...(19): siRNA sense strand
uaagagugggcagcgguua

SEQ ID NO: 1473600 - RNA, 19 nt, Homo sapiens
  misc_RNA (1)...(19): siRNA sense strand
gggagagcugacugaguua

SEQ ID NO: 1473601 - RNA, 19 nt, Homo sapiens
  misc_RNA (1)...(19): siRNA sense strand
caccaucuaugaggacugu

SEQ ID NO: 1473602 - RNA, 19 nt, Homo sapiens
  misc_RNA (1)...(19): siRNA sense strand
gagaacggugcuccagaug

SEQ ID NO: 1473603 - RNA, 19 nt, Homo sapiens
  misc_RNA (1)...(19): siRNA sense strand
cccaaacaccugcacaaga

SEQ ID NO: 1473604 - RNA, 19 nt, Homo sapiens
  misc_RNA (1)...(19): siRNA sense strand
ugcagagccucccuaagug

SEQ ID NO: 1473605 - RNA, 19 nt, Homo sapiens
  misc_RNA (1)...(19): siRNA sense strand
acacacucuucuccaaugu

SEQ ID NO: 1473606 - RNA, 19 nt, Homo sapiens
  misc_RNA (1)...(19): siRNA sense strand
cacaagaacuaccccgaaa

SEQ ID NO: 1473607 - RNA, 19 nt, Homo sapiens
  misc_RNA (1)...(19): siRNA sense strand
ccacacacucuucuccaau

SEQ ID NO: 1473608 - RNA, 19 nt, Homo sapiens
  misc_RNA (1)...(19): siRNA sense strand
uugaucugcuuucugaaga

SEQ ID NO: 1473609 - RNA, 19 nt, Homo sapiens
  misc_RNA (1)...(19): siRNA sense strand
gcacaagaccccugaaggu

SEQ ID NO: 1473610 - RNA, 19 nt, Homo sapiens
  misc_RNA (1)...(19): siRNA sense strand
guuacagguucuggacuau

SEQ ID NO: 1473611 - RNA, 19 nt, Homo sapiens
  misc_RNA (1)...(19): siRNA sense strand
gaucaccacacacucuucu

SEQ ID NO: 1473612 - RNA, 19 nt, Homo sapiens
  misc_RNA (1)...(19): siRNA sense strand
gaccuacagccgccucaug

SEQ ID NO: 1473613 - RNA, 19 nt, Homo sapiens
  misc_RNA (1)...(19): siRNA sense strand
cgagagcagaugugaaugg

SEQ ID NO: 1473614 - RNA, 19 nt, Homo sapiens
  misc_RNA (1)...(19): siRNA sense strand
gaauauccugcgccagaca

SEQ ID NO: 1473615 - RNA, 19 nt, Homo sapiens
  misc_RNA (1)...(19): siRNA sense strand
aucuugaucugcuuucuga

SEQ ID NO: 1473616 - RNA, 19 nt, Homo sapiens
  misc_RNA (1)...(19): siRNA sense strand
cuggaguccuggcucagaa

SEQ ID NO: 1473617 - RNA, 19 nt, Homo sapiens
  misc_RNA (1)...(19): siRNA sense strand
gucaggagaaugcccagaa

SEQ ID NO: 1473618 - RNA, 19 nt, Homo sapiens
  misc_RNA (1)...(19): siRNA sense strand
ccguuguccucacauccua

SEQ ID NO: 1473619 - RNA, 19 nt, Homo sapiens
  misc_RNA (1)...(19): siRNA sense strand
ggaguccuggcucagaaug

SEQ ID NO: 1473620 - RNA, 19 nt, Homo sapiens
  misc_RNA (1)...(19): siRNA sense strand
ggaccuguaucuccacguu

SEQ ID NO: 1473621 - RNA, 19 nt, Homo sapiens
  misc_RNA (1)...(19): siRNA sense strand
guaaagaaggcaacacaug

SEQ ID NO: 1473622 - RNA, 19 nt, Homo sapiens
  misc_RNA (1)...(19): siRNA sense strand
gaaccaggcaguaaagaag

SEQ ID NO: 1473623 - RNA, 19 nt, Homo sapiens
  misc_RNA (1)...(19): siRNA sense strand
ggggaacucuguccuaaaa

SEQ ID NO: 1473624 - RNA, 19 nt, Homo sapiens
  misc_RNA (1)...(19): siRNA sense strand
aguggaaccucguguguga

SEQ ID NO: 1473625 - RNA, 19 nt, Homo sapiens
  misc_RNA (1)...(19): siRNA sense strand
ucaccugcaucaccaucua

SEQ ID NO: 1473626 - RNA, 19 nt, Homo sapiens
  misc_RNA (1)...(19): siRNA sense strand
gcccgacccuuggugauga

SEQ ID NO: 1473627 - RNA, 19 nt, Homo sapiens
  misc_RNA (1)...(19): siRNA sense strand
gugcagaaccaggcaguaa

SEQ ID NO: 1473628 - RNA, 19 nt, Homo sapiens
  misc_RNA (1)...(19): siRNA sense strand
gcagaaccaggcaguaaag

SEQ ID NO: 1473629 - RNA, 19 nt, Homo sapiens
  misc_RNA (1)...(19): siRNA sense strand
guggauggcugggucuaug

SEQ ID NO: 1473630 - RNA, 19 nt, Homo sapiens
  misc_RNA (1)...(19): siRNA sense strand
ccacaggcaggcuggauug

SEQ ID NO: 1473631 - RNA, 19 nt, Homo sapiens
  misc_RNA (1)...(19): siRNA sense strand
ggaacucuguccuaaaauc

SEQ ID NO: 1473632 - RNA, 19 nt, Homo sapiens
  misc_RNA (1)...(19): siRNA sense strand
caucuucaccuccacaauc

SEQ ID NO: 1473633 - RNA, 19 nt, Homo sapiens
  misc_RNA (1)...(19): siRNA sense strand
caaguggaaccucgugugu

SEQ ID NO: 1473634 - RNA, 19 nt, Homo sapiens
  misc_RNA (1)...(19): siRNA sense strand
gacccuuggugaugaccuu

SEQ ID NO: 1473635 - RNA, 19 nt, Homo sapiens
  misc_RNA (1)...(19): siRNA sense strand
gaaccucgugugugacucu

SEQ ID NO: 1473636 - RNA, 19 nt, Homo sapiens
  misc_RNA (1)...(19): siRNA sense strand
ccuaaaauccacacaguuu

SEQ ID NO: 1473637 - RNA, 19 nt, Homo sapiens
  misc_RNA (1)...(19): siRNA sense strand
caacaucuuccugcuccaa

SEQ ID NO: 1473638 - RNA, 19 nt, Homo sapiens
  misc_RNA (1)...(19): siRNA sense strand
uccaagaugugcagaacca

SEQ ID NO: 1473639 - RNA, 19 nt, Homo sapiens
  misc_RNA (1)...(19): siRNA sense strand
gccuuuggcuucaccuucu

SEQ ID NO: 1473640 - RNA, 19 nt, Homo sapiens
  misc_RNA (1)...(19): siRNA sense strand
agaaccaggcaguaaagaa

SEQ ID NO: 1473641 - RNA, 19 nt, Homo sapiens
  misc_RNA (1)...(19): siRNA sense strand
caguaaagaaggcaacaca

SEQ ID NO: 1473642 - RNA, 19 nt, Homo sapiens
  misc_RNA (1)...(19): siRNA sense strand
cuaccuggcugggauucug

SEQ ID NO: 1473643 - RNA, 19 nt, Homo sapiens
  misc_RNA (1)...(19): siRNA sense strand
ccacugugcucaggaugac

SEQ ID NO: 1473644 - RNA, 19 nt, Homo sapiens
  misc_RNA (1)...(19): siRNA sense strand
ggaccuguaucuccacguu

SEQ ID NO: 1473645 - RNA, 19 nt, Homo sapiens
  misc_RNA (1)...(19): siRNA sense strand
guaaagaaggcaacacaug

SEQ ID NO: 1473646 - RNA, 19 nt, Homo sapiens
  misc_RNA (1)...(19): siRNA sense strand
gaaccaggcaguaaagaag

SEQ ID NO: 1473647 - RNA, 19 nt, Homo sapiens
  misc_RNA (1)...(19): siRNA sense strand
ggggaacucuguccuaaaa

SEQ ID NO: 1473648 - RNA, 19 nt, Homo sapiens
  misc_RNA (1)...(19): siRNA sense strand
ucaccugcaucaccaucua

SEQ ID NO: 1473649 - RNA, 19 nt, Homo sapiens
  misc_RNA (1)...(19): siRNA sense strand
gcccgacccuuggugauga

SEQ ID NO: 1473650 - RNA, 19 nt, Homo sapiens
  misc_RNA (1)...(19): siRNA sense strand
gugcagaaccaggcaguaa

SEQ ID NO: 1473651 - RNA, 19 nt, Homo sapiens
  misc_RNA (1)...(19): siRNA sense strand
gcagaaccaggcaguaaag

SEQ ID NO: 1473652 - RNA, 19 nt, Homo sapiens
  misc_RNA (1)...(19): siRNA sense strand
ccacaggcaggcuggauug

SEQ ID NO: 1473653 - RNA, 19 nt, Homo sapiens
  misc_RNA (1)...(19): siRNA sense strand
ggaacucuguccuaaaauc

SEQ ID NO: 1473654 - RNA, 19 nt, Homo sapiens
  misc_RNA (1)...(19): siRNA sense strand
gacccuuggugaugaccuu

SEQ ID NO: 1473655 - RNA, 19 nt, Homo sapiens
  misc_RNA (1)...(19): siRNA sense strand
ccuaaaauccacacaguuu

SEQ ID NO: 1473656 - RNA, 19 nt, Homo sapiens
  misc_RNA (1)...(19): siRNA sense strand
caacaucuuccugcuccaa

SEQ ID NO: 1473657 - RNA, 19 nt, Homo sapiens
  misc_RNA (1)...(19): siRNA sense strand
uccaagaugugcagaacca

SEQ ID NO: 1473658 - RNA, 19 nt, Homo sapiens
  misc_RNA (1)...(19): siRNA sense strand
gccuuuggcuucaccuucu

SEQ ID NO: 1473659 - RNA, 19 nt, Homo sapiens
  misc_RNA (1)...(19): siRNA sense strand
agaaccaggcaguaaagaa

SEQ ID NO: 1473660 - RNA, 19 nt, Homo sapiens
  misc_RNA (1)...(19): siRNA sense strand
caguaaagaaggcaacaca

SEQ ID NO: 1473661 - RNA, 19 nt, Homo sapiens
  misc_RNA (1)...(19): siRNA sense strand
ccacugugcucaggaugac

SEQ ID NO: 1473662 - RNA, 19 nt, Homo sapiens
  misc_RNA (1)...(19): siRNA sense strand
uagaagagcuguuggauga

SEQ ID NO: 1473663 - RNA, 19 nt, Homo sapiens
  misc_RNA (1)...(19): siRNA sense strand
guauguacauugaccauua

SEQ ID NO: 1473664 - RNA, 19 nt, Homo sapiens
  misc_RNA (1)...(19): siRNA sense strand
gagcgugugugacaguauu

SEQ ID NO: 1473665 - RNA, 19 nt, Homo sapiens
  misc_RNA (1)...(19): siRNA sense strand
caauaaggacgcagacuug

SEQ ID NO: 1473666 - RNA, 19 nt, Homo sapiens
  misc_RNA (1)...(19): siRNA sense strand
gagcugagcgugugugaca

SEQ ID NO: 1473667 - RNA, 19 nt, Homo sapiens
  misc_RNA (1)...(19): siRNA sense strand
caucauuggcugacacuuu

SEQ ID NO: 1473668 - RNA, 19 nt, Homo sapiens
  misc_RNA (1)...(19): siRNA sense strand
guagucaagugccuuugga

SEQ ID NO: 1473669 - RNA, 19 nt, Homo sapiens
  misc_RNA (1)...(19): siRNA sense strand
aaggccaacugaagcaaua

SEQ ID NO: 1473670 - RNA, 19 nt, Homo sapiens
  misc_RNA (1)...(19): siRNA sense strand
ccuagaugcugcaaacaug

SEQ ID NO: 1473671 - RNA, 19 nt, Homo sapiens
  misc_RNA (1)...(19): siRNA sense strand
gcaaacauccgaggacaag

SEQ ID NO: 1473672 - RNA, 19 nt, Homo sapiens
  misc_RNA (1)...(19): siRNA sense strand
ucauaaggauagacacuuc

SEQ ID NO: 1473673 - RNA, 19 nt, Homo sapiens
  misc_RNA (1)...(19): siRNA sense strand
gaacuacccagucguacgu

SEQ ID NO: 1473674 - RNA, 19 nt, Homo sapiens
  misc_RNA (1)...(19): siRNA sense strand
gcccaaggcagguucaaga

SEQ ID NO: 1473675 - RNA, 19 nt, Homo sapiens
  misc_RNA (1)...(19): siRNA sense strand
aaaggucccuguaucaaaa

SEQ ID NO: 1473676 - RNA, 19 nt, Homo sapiens
  misc_RNA (1)...(19): siRNA sense strand
caugaaagaagcaaacauc

SEQ ID NO: 1473677 - RNA, 19 nt, Homo sapiens
  misc_RNA (1)...(19): siRNA sense strand
ccagggugaugcucaguag

SEQ ID NO: 1473678 - RNA, 19 nt, Homo sapiens
  misc_RNA (1)...(19): siRNA sense strand
gaugcucaguagucaagug

SEQ ID NO: 1473679 - RNA, 19 nt, Homo sapiens
  misc_RNA (1)...(19): siRNA sense strand
uuaccuagaugcugcaaac

SEQ ID NO: 1473680 - RNA, 19 nt, Homo sapiens
  misc_RNA (1)...(19): siRNA sense strand
gauagaagagcuguuggau

SEQ ID NO: 1473681 - RNA, 19 nt, Homo sapiens
  misc_RNA (1)...(19): siRNA sense strand
ggcuggcgauucauaagga

SEQ ID NO: 1473682 - RNA, 19 nt, Homo sapiens
  misc_RNA (1)...(19): siRNA sense strand
uaaggacgcagacuuguac

SEQ ID NO: 1473683 - RNA, 19 nt, Homo sapiens
  misc_RNA (1)...(19): siRNA sense strand
gaaaaggucccuguaucaa

SEQ ID NO: 1473684 - RNA, 19 nt, Homo sapiens
  misc_RNA (1)...(19): siRNA sense strand
ucuuucugcuggaggaaua

SEQ ID NO: 1473685 - RNA, 19 nt, Homo sapiens
  misc_RNA (1)...(19): siRNA sense strand
acaauaaggacgcagacuu

SEQ ID NO: 1473686 - RNA, 19 nt, Homo sapiens
  misc_RNA (1)...(19): siRNA sense strand
gccgaacuacccagucgua

SEQ ID NO: 1473687 - RNA, 19 nt, Homo sapiens
  misc_RNA (1)...(19): siRNA sense strand
agugcaaucccauggguua

SEQ ID NO: 1473688 - RNA, 19 nt, Homo sapiens
  misc_RNA (1)...(19): siRNA sense strand
auaaggacgcagacuugua

SEQ ID NO: 1473689 - RNA, 19 nt, Homo sapiens
  misc_RNA (1)...(19): siRNA sense strand
agacugcaguggacauguc

SEQ ID NO: 1473690 - RNA, 19 nt, Homo sapiens
  misc_RNA (1)...(19): siRNA sense strand
gggugaugcucaguaguca

SEQ ID NO: 1473691 - RNA, 19 nt, Homo sapiens
  misc_RNA (1)...(19): siRNA sense strand
auacuuugguugcaugaag

SEQ ID NO: 1473692 - RNA, 19 nt, Homo sapiens
  misc_RNA (1)...(19): siRNA sense strand
ucaguagucaagugccuuu

SEQ ID NO: 1473693 - RNA, 19 nt, Homo sapiens
  misc_RNA (1)...(19): siRNA sense strand
aaaguucggcccaaugaag

SEQ ID NO: 1473694 - RNA, 19 nt, Homo sapiens
  misc_RNA (1)...(19): siRNA sense strand
gacggucacaguccuugaa

SEQ ID NO: 1473695 - RNA, 19 nt, Homo sapiens
  misc_RNA (1)...(19): siRNA sense strand
uaaggauagacacuucuug

SEQ ID NO: 1473696 - RNA, 19 nt, Homo sapiens
  misc_RNA (1)...(19): siRNA sense strand
aaacauccgaggacaaggu

SEQ ID NO: 1473697 - RNA, 19 nt, Homo sapiens
  misc_RNA (1)...(19): siRNA sense strand
guacauugaccauuaaaag

SEQ ID NO: 1473698 - RNA, 19 nt, Homo sapiens
  misc_RNA (1)...(19): siRNA sense strand
guacacguccagggugaug

SEQ ID NO: 1473699 - RNA, 19 nt, Homo sapiens
  misc_RNA (1)...(19): siRNA sense strand
aucauuggcugacacuuuc

SEQ ID NO: 1473700 - RNA, 19 nt, Homo sapiens
  misc_RNA (1)...(19): siRNA sense strand
gcaaucccauggguuacac

SEQ ID NO: 1473701 - RNA, 19 nt, Homo sapiens
  misc_RNA (1)...(19): siRNA sense strand
ugugugacaguauuaguga

SEQ ID NO: 1473702 - RNA, 19 nt, Homo sapiens
  misc_RNA (1)...(19): siRNA sense strand
uagaagagcuguuggauga

SEQ ID NO: 1473703 - RNA, 19 nt, Homo sapiens
  misc_RNA (1)...(19): siRNA sense strand
guauguacauugaccauua

SEQ ID NO: 1473704 - RNA, 19 nt, Homo sapiens
  misc_RNA (1)...(19): siRNA sense strand
gagcgugugugacaguauu

SEQ ID NO: 1473705 - RNA, 19 nt, Homo sapiens
  misc_RNA (1)...(19): siRNA sense strand
caauaaggacgcagacuug

SEQ ID NO: 1473706 - RNA, 19 nt, Homo sapiens
  misc_RNA (1)...(19): siRNA sense strand
gagcugagcgugugugaca

SEQ ID NO: 1473707 - RNA, 19 nt, Homo sapiens
  misc_RNA (1)...(19): siRNA sense strand
caucauuggcugacacuuu

SEQ ID NO: 1473708 - RNA, 19 nt, Homo sapiens
  misc_RNA (1)...(19): siRNA sense strand
guagucaagugccuuugga

SEQ ID NO: 1473709 - RNA, 19 nt, Homo sapiens
  misc_RNA (1)...(19): siRNA sense strand
aaggccaacugaagcaaua

SEQ ID NO: 1473710 - RNA, 19 nt, Homo sapiens
  misc_RNA (1)...(19): siRNA sense strand
ccuagaugcugcaaacaug

SEQ ID NO: 1473711 - RNA, 19 nt, Homo sapiens
  misc_RNA (1)...(19): siRNA sense strand
gcaaacauccgaggacaag

SEQ ID NO: 1473712 - RNA, 19 nt, Homo sapiens
  misc_RNA (1)...(19): siRNA sense strand
ucauaaggauagacacuuc

SEQ ID NO: 1473713 - RNA, 19 nt, Homo sapiens
  misc_RNA (1)...(19): siRNA sense strand
gaacuacccagucguacgu

SEQ ID NO: 1473714 - RNA, 19 nt, Homo sapiens
  misc_RNA (1)...(19): siRNA sense strand
gcccaaggcagguucaaga

SEQ ID NO: 1473715 - RNA, 19 nt, Homo sapiens
  misc_RNA (1)...(19): siRNA sense strand
aaaggucccuguaucaaaa

SEQ ID NO: 1473716 - RNA, 19 nt, Homo sapiens
  misc_RNA (1)...(19): siRNA sense strand
caugaaagaagcaaacauc

SEQ ID NO: 1473717 - RNA, 19 nt, Homo sapiens
  misc_RNA (1)...(19): siRNA sense strand
ccagggugaugcucaguag

SEQ ID NO: 1473718 - RNA, 19 nt, Homo sapiens
  misc_RNA (1)...(19): siRNA sense strand
gaugcucaguagucaagug

SEQ ID NO: 1473719 - RNA, 19 nt, Homo sapiens
  misc_RNA (1)...(19): siRNA sense strand
uuaccuagaugcugcaaac

SEQ ID NO: 1473720 - RNA, 19 nt, Homo sapiens
  misc_RNA (1)...(19): siRNA sense strand
gauagaagagcuguuggau

SEQ ID NO: 1473721 - RNA, 19 nt, Homo sapiens
  misc_RNA (1)...(19): siRNA sense strand
ggcuggcgauucauaagga

SEQ ID NO: 1473722 - RNA, 19 nt, Homo sapiens
  misc_RNA (1)...(19): siRNA sense strand
uaaggacgcagacuuguac

SEQ ID NO: 1473723 - RNA, 19 nt, Homo sapiens
  misc_RNA (1)...(19): siRNA sense strand
gaaaaggucccuguaucaa

SEQ ID NO: 1473724 - RNA, 19 nt, Homo sapiens
  misc_RNA (1)...(19): siRNA sense strand
ucuuucugcuggaggaaua

SEQ ID NO: 1473725 - RNA, 19 nt, Homo sapiens
  misc_RNA (1)...(19): siRNA sense strand
acaauaaggacgcagacuu

SEQ ID NO: 1473726 - RNA, 19 nt, Homo sapiens
  misc_RNA (1)...(19): siRNA sense strand
gccgaacuacccagucgua

SEQ ID NO: 1473727 - RNA, 19 nt, Homo sapiens
  misc_RNA (1)...(19): siRNA sense strand
agugcaaucccauggguua

SEQ ID NO: 1473728 - RNA, 19 nt, Homo sapiens
  misc_RNA (1)...(19): siRNA sense strand
auaaggacgcagacuugua

SEQ ID NO: 1473729 - RNA, 19 nt, Homo sapiens
  misc_RNA (1)...(19): siRNA sense strand
agacugcaguggacauguc

SEQ ID NO: 1473730 - RNA, 19 nt, Homo sapiens
  misc_RNA (1)...(19): siRNA sense strand
auacuuugguugcaugaag

SEQ ID NO: 1473731 - RNA, 19 nt, Homo sapiens
  misc_RNA (1)...(19): siRNA sense strand
gggugaugcucaguaguca

SEQ ID NO: 1473732 - RNA, 19 nt, Homo sapiens
  misc_RNA (1)...(19): siRNA sense strand
ucaguagucaagugccuuu

SEQ ID NO: 1473733 - RNA, 19 nt, Homo sapiens
  misc_RNA (1)...(19): siRNA sense strand
aaaguucggcccaaugaag

SEQ ID NO: 1473734 - RNA, 19 nt, Homo sapiens
  misc_RNA (1)...(19): siRNA sense strand
gacggucacaguccuugaa

SEQ ID NO: 1473735 - RNA, 19 nt, Homo sapiens
  misc_RNA (1)...(19): siRNA sense strand
caggugagaagagugauga

SEQ ID NO: 1473736 - RNA, 19 nt, Homo sapiens
  misc_RNA (1)...(19): siRNA sense strand
uaaggauagacacuucuug

SEQ ID NO: 1473737 - RNA, 19 nt, Homo sapiens
  misc_RNA (1)...(19): siRNA sense strand
aaacauccgaggacaaggu

SEQ ID NO: 1473738 - RNA, 19 nt, Homo sapiens
  misc_RNA (1)...(19): siRNA sense strand
guacauugaccauuaaaag

SEQ ID NO: 1473739 - RNA, 19 nt, Homo sapiens
  misc_RNA (1)...(19): siRNA sense strand
aucauuggcugacacuuuc

SEQ ID NO: 1473740 - RNA, 19 nt, Homo sapiens
  misc_RNA (1)...(19): siRNA sense strand
gcaaucccauggguuacac

SEQ ID NO: 1473741 - RNA, 19 nt, Homo sapiens
  misc_RNA (1)...(19): siRNA sense strand
ugugugacaguauuaguga

SEQ ID NO: 1473742 - RNA, 19 nt, Homo sapiens
  misc_RNA (1)...(19): siRNA sense strand
guacacguccagggugaug

SEQ ID NO: 1473743 - RNA, 19 nt, Homo sapiens
  misc_RNA (1)...(19): siRNA sense strand
uagaagagcuguuggauga

SEQ ID NO: 1473744 - RNA, 19 nt, Homo sapiens
  misc_RNA (1)...(19): siRNA sense strand
guauguacauugaccauua

SEQ ID NO: 1473745 - RNA, 19 nt, Homo sapiens
  misc_RNA (1)...(19): siRNA sense strand
gagcgugugugacaguauu

SEQ ID NO: 1473746 - RNA, 19 nt, Homo sapiens
  misc_RNA (1)...(19): siRNA sense strand
caauaaggacgcagacuug

SEQ ID NO: 1473747 - RNA, 19 nt, Homo sapiens
  misc_RNA (1)...(19): siRNA sense strand
gagcugagcgugugugaca

SEQ ID NO: 1473748 - RNA, 19 nt, Homo sapiens
  misc_RNA (1)...(19): siRNA sense strand
caucauuggcugacacuuu

SEQ ID NO: 1473749 - RNA, 19 nt, Homo sapiens
  misc_RNA (1)...(19): siRNA sense strand
guagucaagugccuuugga

SEQ ID NO: 1473750 - RNA, 19 nt, Homo sapiens
  misc_RNA (1)...(19): siRNA sense strand
aaggccaacugaagcaaua

SEQ ID NO: 1473751 - RNA, 19 nt, Homo sapiens
  misc_RNA (1)...(19): siRNA sense strand
ccuagaugcugcaaacaug

SEQ ID NO: 1473752 - RNA, 19 nt, Homo sapiens
  misc_RNA (1)...(19): siRNA sense strand
gcaaacauccgaggacaag

SEQ ID NO: 1473753 - RNA, 19 nt, Homo sapiens
  misc_RNA (1)...(19): siRNA sense strand
ucauaaggauagacacuuc

SEQ ID NO: 1473754 - RNA, 19 nt, Homo sapiens
  misc_RNA (1)...(19): siRNA sense strand
gaacuacccagucguacgu

SEQ ID NO: 1473755 - RNA, 19 nt, Homo sapiens
  misc_RNA (1)...(19): siRNA sense strand
gcccaaggcagguucaaga

SEQ ID NO: 1473756 - RNA, 19 nt, Homo sapiens
  misc_RNA (1)...(19): siRNA sense strand
aaaggucccuguaucaaaa

SEQ ID NO: 1473757 - RNA, 19 nt, Homo sapiens
  misc_RNA (1)...(19): siRNA sense strand
caugaaagaagcaaacauc

SEQ ID NO: 1473758 - RNA, 19 nt, Homo sapiens
  misc_RNA (1)...(19): siRNA sense strand
ccagggugaugcucaguag

SEQ ID NO: 1473759 - RNA, 19 nt, Homo sapiens
  misc_RNA (1)...(19): siRNA sense strand
gaugcucaguagucaagug

SEQ ID NO: 1473760 - RNA, 19 nt, Homo sapiens
  misc_RNA (1)...(19): siRNA sense strand
uuaccuagaugcugcaaac

SEQ ID NO: 1473761 - RNA, 19 nt, Homo sapiens
  misc_RNA (1)...(19): siRNA sense strand
gauagaagagcuguuggau

SEQ ID NO: 1473762 - RNA, 19 nt, Homo sapiens
  misc_RNA (1)...(19): siRNA sense strand
ggcuggcgauucauaagga

SEQ ID NO: 1473763 - RNA, 19 nt, Homo sapiens
  misc_RNA (1)...(19): siRNA sense strand
uaaggacgcagacuuguac

SEQ ID NO: 1473764 - RNA, 19 nt, Homo sapiens
  misc_RNA (1)...(19): siRNA sense strand
gaaaaggucccuguaucaa

SEQ ID NO: 1473765 - RNA, 19 nt, Homo sapiens
  misc_RNA (1)...(19): siRNA sense strand
ucuuucugcuggaggaaua

SEQ ID NO: 1473766 - RNA, 19 nt, Homo sapiens
  misc_RNA (1)...(19): siRNA sense strand
acaauaaggacgcagacuu

SEQ ID NO: 1473767 - RNA, 19 nt, Homo sapiens
  misc_RNA (1)...(19): siRNA sense strand
gccgaacuacccagucgua

SEQ ID NO: 1473768 - RNA, 19 nt, Homo sapiens
  misc_RNA (1)...(19): siRNA sense strand
agugcaaucccauggguua

SEQ ID NO: 1473769 - RNA, 19 nt, Homo sapiens
  misc_RNA (1)...(19): siRNA sense strand
auaaggacgcagacuugua

SEQ ID NO: 1473770 - RNA, 19 nt, Homo sapiens
  misc_RNA (1)...(19): siRNA sense strand
agacugcaguggacauguc

SEQ ID NO: 1473771 - RNA, 19 nt, Homo sapiens
  misc_RNA (1)...(19): siRNA sense strand
gggugaugcucaguaguca

SEQ ID NO: 1473772 - RNA, 19 nt, Homo sapiens
  misc_RNA (1)...(19): siRNA sense strand
auacuuugguugcaugaag

SEQ ID NO: 1473773 - RNA, 19 nt, Homo sapiens
  misc_RNA (1)...(19): siRNA sense strand
ucaguagucaagugccuuu

SEQ ID NO: 1473774 - RNA, 19 nt, Homo sapiens
  misc_RNA (1)...(19): siRNA sense strand
aaaguucggcccaaugaag

SEQ ID NO: 1473775 - RNA, 19 nt, Homo sapiens
  misc_RNA (1)...(19): siRNA sense strand
gacggucacaguccuugaa

SEQ ID NO: 1473776 - RNA, 19 nt, Homo sapiens
  misc_RNA (1)...(19): siRNA sense strand
uaaggauagacacuucuug

SEQ ID NO: 1473777 - RNA, 19 nt, Homo sapiens
  misc_RNA (1)...(19): siRNA sense strand
aaacauccgaggacaaggu

SEQ ID NO: 1473778 - RNA, 19 nt, Homo sapiens
  misc_RNA (1)...(19): siRNA sense strand
guacauugaccauuaaaag

SEQ ID NO: 1473779 - RNA, 19 nt, Homo sapiens
  misc_RNA (1)...(19): siRNA sense strand
guacacguccagggugaug

SEQ ID NO: 1473780 - RNA, 19 nt, Homo sapiens
  misc_RNA (1)...(19): siRNA sense strand
aucauuggcugacacuuuc

SEQ ID NO: 1473781 - RNA, 19 nt, Homo sapiens
  misc_RNA (1)...(19): siRNA sense strand
gcaaucccauggguuacac

SEQ ID NO: 1473782 - RNA, 19 nt, Homo sapiens
  misc_RNA (1)...(19): siRNA sense strand
ugugugacaguauuaguga

SEQ ID NO: 1473783 - RNA, 19 nt, Homo sapiens
  misc_RNA (1)...(19): siRNA sense strand
uagaagagcuguuggauga

SEQ ID NO: 1473784 - RNA, 19 nt, Homo sapiens
  misc_RNA (1)...(19): siRNA sense strand
guauguacauugaccauua

SEQ ID NO: 1473785 - RNA, 19 nt, Homo sapiens
  misc_RNA (1)...(19): siRNA sense strand
gagcgugugugacaguauu

SEQ ID NO: 1473786 - RNA, 19 nt, Homo sapiens
  misc_RNA (1)...(19): siRNA sense strand
caauaaggacgcagacuug

SEQ ID NO: 1473787 - RNA, 19 nt, Homo sapiens
  misc_RNA (1)...(19): siRNA sense strand
gagcugagcgugugugaca

SEQ ID NO: 1473788 - RNA, 19 nt, Homo sapiens
  misc_RNA (1)...(19): siRNA sense strand
caucauuggcugacacuuu

SEQ ID NO: 1473789 - RNA, 19 nt, Homo sapiens
  misc_RNA (1)...(19): siRNA sense strand
guagucaagugccuuugga

SEQ ID NO: 1473790 - RNA, 19 nt, Homo sapiens
  misc_RNA (1)...(19): siRNA sense strand
aaggccaacugaagcaaua

SEQ ID NO: 1473791 - RNA, 19 nt, Homo sapiens
  misc_RNA (1)...(19): siRNA sense strand
ccuagaugcugcaaacaug

SEQ ID NO: 1473792 - RNA, 19 nt, Homo sapiens
  misc_RNA (1)...(19): siRNA sense strand
gcaaacauccgaggacaag

SEQ ID NO: 1473793 - RNA, 19 nt, Homo sapiens
  misc_RNA (1)...(19): siRNA sense strand
ucauaaggauagacacuuc

SEQ ID NO: 1473794 - RNA, 19 nt, Homo sapiens
  misc_RNA (1)...(19): siRNA sense strand
gaacuacccagucguacgu

SEQ ID NO: 1473795 - RNA, 19 nt, Homo sapiens
  misc_RNA (1)...(19): siRNA sense strand
gcccaaggcagguucaaga

SEQ ID NO: 1473796 - RNA, 19 nt, Homo sapiens
  misc_RNA (1)...(19): siRNA sense strand
aaaggucccuguaucaaaa

SEQ ID NO: 1473797 - RNA, 19 nt, Homo sapiens
  misc_RNA (1)...(19): siRNA sense strand
caugaaagaagcaaacauc

SEQ ID NO: 1473798 - RNA, 19 nt, Homo sapiens
  misc_RNA (1)...(19): siRNA sense strand
ccagggugaugcucaguag

SEQ ID NO: 1473799 - RNA, 19 nt, Homo sapiens
  misc_RNA (1)...(19): siRNA sense strand
gaugcucaguagucaagug

SEQ ID NO: 1473800 - RNA, 19 nt, Homo sapiens
  misc_RNA (1)...(19): siRNA sense strand
uuaccuagaugcugcaaac

SEQ ID NO: 1473801 - RNA, 19 nt, Homo sapiens
  misc_RNA (1)...(19): siRNA sense strand
gauagaagagcuguuggau

SEQ ID NO: 1473802 - RNA, 19 nt, Homo sapiens
  misc_RNA (1)...(19): siRNA sense strand
ggcuggcgauucauaagga

SEQ ID NO: 1473803 - RNA, 19 nt, Homo sapiens
  misc_RNA (1)...(19): siRNA sense strand
uaaggacgcagacuuguac

SEQ ID NO: 1473804 - RNA, 19 nt, Homo sapiens
  misc_RNA (1)...(19): siRNA sense strand
gaaaaggucccuguaucaa

SEQ ID NO: 1473805 - RNA, 19 nt, Homo sapiens
  misc_RNA (1)...(19): siRNA sense strand
ucuuucugcuggaggaaua

SEQ ID NO: 1473806 - RNA, 19 nt, Homo sapiens
  misc_RNA (1)...(19): siRNA sense strand
acaauaaggacgcagacuu

SEQ ID NO: 1473807 - RNA, 19 nt, Homo sapiens
  misc_RNA (1)...(19): siRNA sense strand
gccgaacuacccagucgua

SEQ ID NO: 1473808 - RNA, 19 nt, Homo sapiens
  misc_RNA (1)...(19): siRNA sense strand
agugcaaucccauggguua

SEQ ID NO: 1473809 - RNA, 19 nt, Homo sapiens
  misc_RNA (1)...(19): siRNA sense strand
auaaggacgcagacuugua

SEQ ID NO: 1473810 - RNA, 19 nt, Homo sapiens
  misc_RNA (1)...(19): siRNA sense strand
agacugcaguggacauguc

SEQ ID NO: 1473811 - RNA, 19 nt, Homo sapiens
  misc_RNA (1)...(19): siRNA sense strand
gggugaugcucaguaguca

SEQ ID NO: 1473812 - RNA, 19 nt, Homo sapiens
  misc_RNA (1)...(19): siRNA sense strand
auacuuugguugcaugaag

SEQ ID NO: 1473813 - RNA, 19 nt, Homo sapiens
  misc_RNA (1)...(19): siRNA sense strand
ucaguagucaagugccuuu

SEQ ID NO: 1473814 - RNA, 19 nt, Homo sapiens
  misc_RNA (1)...(19): siRNA sense strand
aaaguucggcccaaugaag

SEQ ID NO: 1473815 - RNA, 19 nt, Homo sapiens
  misc_RNA (1)...(19): siRNA sense strand
gacggucacaguccuugaa

SEQ ID NO: 1473816 - RNA, 19 nt, Homo sapiens
  misc_RNA (1)...(19): siRNA sense strand
uaaggauagacacuucuug

SEQ ID NO: 1473817 - RNA, 19 nt, Homo sapiens
  misc_RNA (1)...(19): siRNA sense strand
aaacauccgaggacaaggu

SEQ ID NO: 1473818 - RNA, 19 nt, Homo sapiens
  misc_RNA (1)...(19): siRNA sense strand
guacauugaccauuaaaag

SEQ ID NO: 1473819 - RNA, 19 nt, Homo sapiens
  misc_RNA (1)...(19): siRNA sense strand
guacacguccagggugaug

SEQ ID NO: 1473820 - RNA, 19 nt, Homo sapiens
  misc_RNA (1)...(19): siRNA sense strand
aucauuggcugacacuuuc

SEQ ID NO: 1473821 - RNA, 19 nt, Homo sapiens
  misc_RNA (1)...(19): siRNA sense strand
gcaaucccauggguuacac

SEQ ID NO: 1473822 - RNA, 19 nt, Homo sapiens
  misc_RNA (1)...(19): siRNA sense strand
ugugugacaguauuaguga

SEQ ID NO: 1473823 - RNA, 19 nt, Homo sapiens
  misc_RNA (1)...(19): siRNA sense strand
uagaagagcuguuggauga

SEQ ID NO: 1473824 - RNA, 19 nt, Homo sapiens
  misc_RNA (1)...(19): siRNA sense strand
guauguacauugaccauua

SEQ ID NO: 1473825 - RNA, 19 nt, Homo sapiens
  misc_RNA (1)...(19): siRNA sense strand
gagcgugugugacaguauu

SEQ ID NO: 1473826 - RNA, 19 nt, Homo sapiens
  misc_RNA (1)...(19): siRNA sense strand
caauaaggacgcagacuug

SEQ ID NO: 1473827 - RNA, 19 nt, Homo sapiens
  misc_RNA (1)...(19): siRNA sense strand
gagcugagcgugugugaca

SEQ ID NO: 1473828 - RNA, 19 nt, Homo sapiens
  misc_RNA (1)...(19): siRNA sense strand
caucauuggcugacacuuu

SEQ ID NO: 1473829 - RNA, 19 nt, Homo sapiens
  misc_RNA (1)...(19): siRNA sense strand
guagucaagugccuuugga

SEQ ID NO: 1473830 - RNA, 19 nt, Homo sapiens
  misc_RNA (1)...(19): siRNA sense strand
aaggccaacugaagcaaua

SEQ ID NO: 1473831 - RNA, 19 nt, Homo sapiens
  misc_RNA (1)...(19): siRNA sense strand
ccuagaugcugcaaacaug

SEQ ID NO: 1473832 - RNA, 19 nt, Homo sapiens
  misc_RNA (1)...(19): siRNA sense strand
gcaaacauccgaggacaag

SEQ ID NO: 1473833 - RNA, 19 nt, Homo sapiens
  misc_RNA (1)...(19): siRNA sense strand
ucauaaggauagacacuuc

SEQ ID NO: 1473834 - RNA, 19 nt, Homo sapiens
  misc_RNA (1)...(19): siRNA sense strand
gaacuacccagucguacgu

SEQ ID NO: 1473835 - RNA, 19 nt, Homo sapiens
  misc_RNA (1)...(19): siRNA sense strand
gcccaaggcagguucaaga

SEQ ID NO: 1473836 - RNA, 19 nt, Homo sapiens
  misc_RNA (1)...(19): siRNA sense strand
aaaggucccuguaucaaaa

SEQ ID NO: 1473837 - RNA, 19 nt, Homo sapiens
  misc_RNA (1)...(19): siRNA sense strand
caugaaagaagcaaacauc

SEQ ID NO: 1473838 - RNA, 19 nt, Homo sapiens
  misc_RNA (1)...(19): siRNA sense strand
ccagggugaugcucaguag

SEQ ID NO: 1473839 - RNA, 19 nt, Homo sapiens
  misc_RNA (1)...(19): siRNA sense strand
gaugcucaguagucaagug

SEQ ID NO: 1473840 - RNA, 19 nt, Homo sapiens
  misc_RNA (1)...(19): siRNA sense strand
uuaccuagaugcugcaaac

SEQ ID NO: 1473841 - RNA, 19 nt, Homo sapiens
  misc_RNA (1)...(19): siRNA sense strand
gauagaagagcuguuggau

SEQ ID NO: 1473842 - RNA, 19 nt, Homo sapiens
  misc_RNA (1)...(19): siRNA sense strand
ggcuggcgauucauaagga

SEQ ID NO: 1473843 - RNA, 19 nt, Homo sapiens
  misc_RNA (1)...(19): siRNA sense strand
uaaggacgcagacuuguac

SEQ ID NO: 1473844 - RNA, 19 nt, Homo sapiens
  misc_RNA (1)...(19): siRNA sense strand
gaaaaggucccuguaucaa

SEQ ID NO: 1473845 - RNA, 19 nt, Homo sapiens
  misc_RNA (1)...(19): siRNA sense strand
ucuuucugcuggaggaaua

SEQ ID NO: 1473846 - RNA, 19 nt, Homo sapiens
  misc_RNA (1)...(19): siRNA sense strand
acaauaaggacgcagacuu

SEQ ID NO: 1473847 - RNA, 19 nt, Homo sapiens
  misc_RNA (1)...(19): siRNA sense strand
gccgaacuacccagucgua

SEQ ID NO: 1473848 - RNA, 19 nt, Homo sapiens
  misc_RNA (1)...(19): siRNA sense strand
agugcaaucccauggguua

SEQ ID NO: 1473849 - RNA, 19 nt, Homo sapiens
  misc_RNA (1)...(19): siRNA sense strand
auaaggacgcagacuugua

SEQ ID NO: 1473850 - RNA, 19 nt, Homo sapiens
  misc_RNA (1)...(19): siRNA sense strand
agacugcaguggacauguc

SEQ ID NO: 1473851 - RNA, 19 nt, Homo sapiens
  misc_RNA (1)...(19): siRNA sense strand
auacuuugguugcaugaag

SEQ ID NO: 1473852 - RNA, 19 nt, Homo sapiens
  misc_RNA (1)...(19): siRNA sense strand
gggugaugcucaguaguca

SEQ ID NO: 1473853 - RNA, 19 nt, Homo sapiens
  misc_RNA (1)...(19): siRNA sense strand
ucaguagucaagugccuuu

SEQ ID NO: 1473854 - RNA, 19 nt, Homo sapiens
  misc_RNA (1)...(19): siRNA sense strand
aaaguucggcccaaugaag

SEQ ID NO: 1473855 - RNA, 19 nt, Homo sapiens
  misc_RNA (1)...(19): siRNA sense strand
gacggucacaguccuugaa

SEQ ID NO: 1473856 - RNA, 19 nt, Homo sapiens
  misc_RNA (1)...(19): siRNA sense strand
caggugagaagagugauga

SEQ ID NO: 1473857 - RNA, 19 nt, Homo sapiens
  misc_RNA (1)...(19): siRNA sense strand
uaaggauagacacuucuug

SEQ ID NO: 1473858 - RNA, 19 nt, Homo sapiens
  misc_RNA (1)...(19): siRNA sense strand
aaacauccgaggacaaggu

SEQ ID NO: 1473859 - RNA, 19 nt, Homo sapiens
  misc_RNA (1)...(19): siRNA sense strand
guacauugaccauuaaaag

SEQ ID NO: 1473860 - RNA, 19 nt, Homo sapiens
  misc_RNA (1)...(19): siRNA sense strand
aucauuggcugacacuuuc

SEQ ID NO: 1473861 - RNA, 19 nt, Homo sapiens
  misc_RNA (1)...(19): siRNA sense strand
gcaaucccauggguuacac

SEQ ID NO: 1473862 - RNA, 19 nt, Homo sapiens
  misc_RNA (1)...(19): siRNA sense strand
ugugugacaguauuaguga

SEQ ID NO: 1473863 - RNA, 19 nt, Homo sapiens
  misc_RNA (1)...(19): siRNA sense strand
guacacguccagggugaug

SEQ ID NO: 1473864 - RNA, 19 nt, Homo sapiens
  misc_RNA (1)...(19): siRNA sense strand
uagaagagcuguuggauga

SEQ ID NO: 1473865 - RNA, 19 nt, Homo sapiens
  misc_RNA (1)...(19): siRNA sense strand
guauguacauugaccauua

SEQ ID NO: 1473866 - RNA, 19 nt, Homo sapiens
  misc_RNA (1)...(19): siRNA sense strand
gagcgugugugacaguauu

SEQ ID NO: 1473867 - RNA, 19 nt, Homo sapiens
  misc_RNA (1)...(19): siRNA sense strand
caauaaggacgcagacuug

SEQ ID NO: 1473868 - RNA, 19 nt, Homo sapiens
  misc_RNA (1)...(19): siRNA sense strand
gagcugagcgugugugaca

SEQ ID NO: 1473869 - RNA, 19 nt, Homo sapiens
  misc_RNA (1)...(19): siRNA sense strand
caucauuggcugacacuuu

SEQ ID NO: 1473870 - RNA, 19 nt, Homo sapiens
  misc_RNA (1)...(19): siRNA sense strand
guagucaagugccuuugga

SEQ ID NO: 1473871 - RNA, 19 nt, Homo sapiens
  misc_RNA (1)...(19): siRNA sense strand
aaggccaacugaagcaaua

SEQ ID NO: 1473872 - RNA, 19 nt, Homo sapiens
  misc_RNA (1)...(19): siRNA sense strand
ccuagaugcugcaaacaug

SEQ ID NO: 1473873 - RNA, 19 nt, Homo sapiens
  misc_RNA (1)...(19): siRNA sense strand
gcaaacauccgaggacaag

SEQ ID NO: 1473874 - RNA, 19 nt, Homo sapiens
  misc_RNA (1)...(19): siRNA sense strand
ucauaaggauagacacuuc

SEQ ID NO: 1473875 - RNA, 19 nt, Homo sapiens
  misc_RNA (1)...(19): siRNA sense strand
gaacuacccagucguacgu

SEQ ID NO: 1473876 - RNA, 19 nt, Homo sapiens
  misc_RNA (1)...(19): siRNA sense strand
gcccaaggcagguucaaga

SEQ ID NO: 1473877 - RNA, 19 nt, Homo sapiens
  misc_RNA (1)...(19): siRNA sense strand
aaaggucccuguaucaaaa

SEQ ID NO: 1473878 - RNA, 19 nt, Homo sapiens
  misc_RNA (1)...(19): siRNA sense strand
caugaaagaagcaaacauc

SEQ ID NO: 1473879 - RNA, 19 nt, Homo sapiens
  misc_RNA (1)...(19): siRNA sense strand
ccagggugaugcucaguag

SEQ ID NO: 1473880 - RNA, 19 nt, Homo sapiens
  misc_RNA (1)...(19): siRNA sense strand
gaugcucaguagucaagug

SEQ ID NO: 1473881 - RNA, 19 nt, Homo sapiens
  misc_RNA (1)...(19): siRNA sense strand
uuaccuagaugcugcaaac

SEQ ID NO: 1473882 - RNA, 19 nt, Homo sapiens
  misc_RNA (1)...(19): siRNA sense strand
gauagaagagcuguuggau

SEQ ID NO: 1473883 - RNA, 19 nt, Homo sapiens
  misc_RNA (1)...(19): siRNA sense strand
ggcuggcgauucauaagga

SEQ ID NO: 1473884 - RNA, 19 nt, Homo sapiens
  misc_RNA (1)...(19): siRNA sense strand
uaaggacgcagacuuguac

SEQ ID NO: 1473885 - RNA, 19 nt, Homo sapiens
  misc_RNA (1)...(19): siRNA sense strand
gaaaaggucccuguaucaa

SEQ ID NO: 1473886 - RNA, 19 nt, Homo sapiens
  misc_RNA (1)...(19): siRNA sense strand
ucuuucugcuggaggaaua

SEQ ID NO: 1473887 - RNA, 19 nt, Homo sapiens
  misc_RNA (1)...(19): siRNA sense strand
acaauaaggacgcagacuu

SEQ ID NO: 1473888 - RNA, 19 nt, Homo sapiens
  misc_RNA (1)...(19): siRNA sense strand
gccgaacuacccagucgua

SEQ ID NO: 1473889 - RNA, 19 nt, Homo sapiens
  misc_RNA (1)...(19): siRNA sense strand
agugcaaucccauggguua

SEQ ID NO: 1473890 - RNA, 19 nt, Homo sapiens
  misc_RNA (1)...(19): siRNA sense strand
auaaggacgcagacuugua

SEQ ID NO: 1473891 - RNA, 19 nt, Homo sapiens
  misc_RNA (1)...(19): siRNA sense strand
agacugcaguggacauguc

SEQ ID NO: 1473892 - RNA, 19 nt, Homo sapiens
  misc_RNA (1)...(19): siRNA sense strand
gggugaugcucaguaguca

SEQ ID NO: 1473893 - RNA, 19 nt, Homo sapiens
  misc_RNA (1)...(19): siRNA sense strand
auacuuugguugcaugaag

SEQ ID NO: 1473894 - RNA, 19 nt, Homo sapiens
  misc_RNA (1)...(19): siRNA sense strand
ucaguagucaagugccuuu

SEQ ID NO: 1473895 - RNA, 19 nt, Homo sapiens
  misc_RNA (1)...(19): siRNA sense strand
aaaguucggcccaaugaag

SEQ ID NO: 1473896 - RNA, 19 nt, Homo sapiens
  misc_RNA (1)...(19): siRNA sense strand
gacggucacaguccuugaa

SEQ ID NO: 1473897 - RNA, 19 nt, Homo sapiens
  misc_RNA (1)...(19): siRNA sense strand
uaaggauagacacuucuug

SEQ ID NO: 1473898 - RNA, 19 nt, Homo sapiens
  misc_RNA (1)...(19): siRNA sense strand
aaacauccgaggacaaggu

SEQ ID NO: 1473899 - RNA, 19 nt, Homo sapiens
  misc_RNA (1)...(19): siRNA sense strand
guacauugaccauuaaaag

SEQ ID NO: 1473900 - RNA, 19 nt, Homo sapiens
  misc_RNA (1)...(19): siRNA sense strand
guacacguccagggugaug

SEQ ID NO: 1473901 - RNA, 19 nt, Homo sapiens
  misc_RNA (1)...(19): siRNA sense strand
aucauuggcugacacuuuc

SEQ ID NO: 1473902 - RNA, 19 nt, Homo sapiens
  misc_RNA (1)...(19): siRNA sense strand
gcaaucccauggguuacac

SEQ ID NO: 1473903 - RNA, 19 nt, Homo sapiens
  misc_RNA (1)...(19): siRNA sense strand
ugugugacaguauuaguga

SEQ ID NO: 1473904 - RNA, 19 nt, Homo sapiens
  misc_RNA (1)...(19): siRNA sense strand
uagaagagcuguuggauga

SEQ ID NO: 1473905 - RNA, 19 nt, Homo sapiens
  misc_RNA (1)...(19): siRNA sense strand
guauguacauugaccauua

SEQ ID NO: 1473906 - RNA, 19 nt, Homo sapiens
  misc_RNA (1)...(19): siRNA sense strand
gagcgugugugacaguauu

SEQ ID NO: 1473907 - RNA, 19 nt, Homo sapiens
  misc_RNA (1)...(19): siRNA sense strand
caauaaggacgcagacuug

SEQ ID NO: 1473908 - RNA, 19 nt, Homo sapiens
  misc_RNA (1)...(19): siRNA sense strand
gagcugagcgugugugaca

SEQ ID NO: 1473909 - RNA, 19 nt, Homo sapiens
  misc_RNA (1)...(19): siRNA sense strand
caucauuggcugacacuuu

SEQ ID NO: 1473910 - RNA, 19 nt, Homo sapiens
  misc_RNA (1)...(19): siRNA sense strand
guagucaagugccuuugga

SEQ ID NO: 1473911 - RNA, 19 nt, Homo sapiens
  misc_RNA (1)...(19): siRNA sense strand
aaggccaacugaagcaaua

SEQ ID NO: 1473912 - RNA, 19 nt, Homo sapiens
  misc_RNA (1)...(19): siRNA sense strand
ccuagaugcugcaaacaug

SEQ ID NO: 1473913 - RNA, 19 nt, Homo sapiens
  misc_RNA (1)...(19): siRNA sense strand
gcaaacauccgaggacaag

SEQ ID NO: 1473914 - RNA, 19 nt, Homo sapiens
  misc_RNA (1)...(19): siRNA sense strand
ucauaaggauagacacuuc

SEQ ID NO: 1473915 - RNA, 19 nt, Homo sapiens
  misc_RNA (1)...(19): siRNA sense strand
gaacuacccagucguacgu

SEQ ID NO: 1473916 - RNA, 19 nt, Homo sapiens
  misc_RNA (1)...(19): siRNA sense strand
gcccaaggcagguucaaga

SEQ ID NO: 1473917 - RNA, 19 nt, Homo sapiens
  misc_RNA (1)...(19): siRNA sense strand
aaaggucccuguaucaaaa

SEQ ID NO: 1473918 - RNA, 19 nt, Homo sapiens
  misc_RNA (1)...(19): siRNA sense strand
caugaaagaagcaaacauc

SEQ ID NO: 1473919 - RNA, 19 nt, Homo sapiens
  misc_RNA (1)...(19): siRNA sense strand
ccagggugaugcucaguag

SEQ ID NO: 1473920 - RNA, 19 nt, Homo sapiens
  misc_RNA (1)...(19): siRNA sense strand
gaugcucaguagucaagug

SEQ ID NO: 1473921 - RNA, 19 nt, Homo sapiens
  misc_RNA (1)...(19): siRNA sense strand
uuaccuagaugcugcaaac

SEQ ID NO: 1473922 - RNA, 19 nt, Homo sapiens
  misc_RNA (1)...(19): siRNA sense strand
gauagaagagcuguuggau

SEQ ID NO: 1473923 - RNA, 19 nt, Homo sapiens
  misc_RNA (1)...(19): siRNA sense strand
ggcuggcgauucauaagga

SEQ ID NO: 1473924 - RNA, 19 nt, Homo sapiens
  misc_RNA (1)...(19): siRNA sense strand
uaaggacgcagacuuguac

SEQ ID NO: 1473925 - RNA, 19 nt, Homo sapiens
  misc_RNA (1)...(19): siRNA sense strand
gaaaaggucccuguaucaa

SEQ ID NO: 1473926 - RNA, 19 nt, Homo sapiens
  misc_RNA (1)...(19): siRNA sense strand
ucuuucugcuggaggaaua

SEQ ID NO: 1473927 - RNA, 19 nt, Homo sapiens
  misc_RNA (1)...(19): siRNA sense strand
acaauaaggacgcagacuu

SEQ ID NO: 1473928 - RNA, 19 nt, Homo sapiens
  misc_RNA (1)...(19): siRNA sense strand
gccgaacuacccagucgua

SEQ ID NO: 1473929 - RNA, 19 nt, Homo sapiens
  misc_RNA (1)...(19): siRNA sense strand
agugcaaucccauggguua

SEQ ID NO: 1473930 - RNA, 19 nt, Homo sapiens
  misc_RNA (1)...(19): siRNA sense strand
auaaggacgcagacuugua

SEQ ID NO: 1473931 - RNA, 19 nt, Homo sapiens
  misc_RNA (1)...(19): siRNA sense strand
agacugcaguggacauguc

SEQ ID NO: 1473932 - RNA, 19 nt, Homo sapiens
  misc_RNA (1)...(19): siRNA sense strand
gggugaugcucaguaguca

SEQ ID NO: 1473933 - RNA, 19 nt, Homo sapiens
  misc_RNA (1)...(19): siRNA sense strand
auacuuugguugcaugaag

SEQ ID NO: 1473934 - RNA, 19 nt, Homo sapiens
  misc_RNA (1)...(19): siRNA sense strand
ucaguagucaagugccuuu

SEQ ID NO: 1473935 - RNA, 19 nt, Homo sapiens
  misc_RNA (1)...(19): siRNA sense strand
aaaguucggcccaaugaag

SEQ ID NO: 1473936 - RNA, 19 nt, Homo sapiens
  misc_RNA (1)...(19): siRNA sense strand
gacggucacaguccuugaa

SEQ ID NO: 1473937 - RNA, 19 nt, Homo sapiens
  misc_RNA (1)...(19): siRNA sense strand
uaaggauagacacuucuug

SEQ ID NO: 1473938 - RNA, 19 nt, Homo sapiens
  misc_RNA (1)...(19): siRNA sense strand
aaacauccgaggacaaggu

SEQ ID NO: 1473939 - RNA, 19 nt, Homo sapiens
  misc_RNA (1)...(19): siRNA sense strand
guacauugaccauuaaaag

SEQ ID NO: 1473940 - RNA, 19 nt, Homo sapiens
  misc_RNA (1)...(19): siRNA sense strand
guacacguccagggugaug

SEQ ID NO: 1473941 - RNA, 19 nt, Homo sapiens
  misc_RNA (1)...(19): siRNA sense strand
aucauuggcugacacuuuc

SEQ ID NO: 1473942 - RNA, 19 nt, Homo sapiens
  misc_RNA (1)...(19): siRNA sense strand
gcaaucccauggguuacac

SEQ ID NO: 1473943 - RNA, 19 nt, Homo sapiens
  misc_RNA (1)...(19): siRNA sense strand
ugugugacaguauuaguga

SEQ ID NO: 1473944 - RNA, 19 nt, Homo sapiens
  misc_RNA (1)...(19): siRNA sense strand
uagaagagcuguuggauga

SEQ ID NO: 1473945 - RNA, 19 nt, Homo sapiens
  misc_RNA (1)...(19): siRNA sense strand
guauguacauugaccauua

SEQ ID NO: 1473946 - RNA, 19 nt, Homo sapiens
  misc_RNA (1)...(19): siRNA sense strand
gagcgugugugacaguauu

SEQ ID NO: 1473947 - RNA, 19 nt, Homo sapiens
  misc_RNA (1)...(19): siRNA sense strand
caauaaggacgcagacuug

SEQ ID NO: 1473948 - RNA, 19 nt, Homo sapiens
  misc_RNA (1)...(19): siRNA sense strand
gagcugagcgugugugaca

SEQ ID NO: 1473949 - RNA, 19 nt, Homo sapiens
  misc_RNA (1)...(19): siRNA sense strand
caucauuggcugacacuuu

SEQ ID NO: 1473950 - RNA, 19 nt, Homo sapiens
  misc_RNA (1)...(19): siRNA sense strand
guagucaagugccuuugga

SEQ ID NO: 1473951 - RNA, 19 nt, Homo sapiens
  misc_RNA (1)...(19): siRNA sense strand
aaggccaacugaagcaaua

SEQ ID NO: 1473952 - RNA, 19 nt, Homo sapiens
  misc_RNA (1)...(19): siRNA sense strand
ccuagaugcugcaaacaug

SEQ ID NO: 1473953 - RNA, 19 nt, Homo sapiens
  misc_RNA (1)...(19): siRNA sense strand
gcaaacauccgaggacaag

SEQ ID NO: 1473954 - RNA, 19 nt, Homo sapiens
  misc_RNA (1)...(19): siRNA sense strand
ucauaaggauagacacuuc

SEQ ID NO: 1473955 - RNA, 19 nt, Homo sapiens
  misc_RNA (1)...(19): siRNA sense strand
gaacuacccagucguacgu

SEQ ID NO: 1473956 - RNA, 19 nt, Homo sapiens
  misc_RNA (1)...(19): siRNA sense strand
gcccaaggcagguucaaga

SEQ ID NO: 1473957 - RNA, 19 nt, Homo sapiens
  misc_RNA (1)...(19): siRNA sense strand
aaaggucccuguaucaaaa

SEQ ID NO: 1473958 - RNA, 19 nt, Homo sapiens
  misc_RNA (1)...(19): siRNA sense strand
caugaaagaagcaaacauc

SEQ ID NO: 1473959 - RNA, 19 nt, Homo sapiens
  misc_RNA (1)...(19): siRNA sense strand
ccagggugaugcucaguag

SEQ ID NO: 1473960 - RNA, 19 nt, Homo sapiens
  misc_RNA (1)...(19): siRNA sense strand
gaugcucaguagucaagug

SEQ ID NO: 1473961 - RNA, 19 nt, Homo sapiens
  misc_RNA (1)...(19): siRNA sense strand
uuaccuagaugcugcaaac

SEQ ID NO: 1473962 - RNA, 19 nt, Homo sapiens
  misc_RNA (1)...(19): siRNA sense strand
gauagaagagcuguuggau

SEQ ID NO: 1473963 - RNA, 19 nt, Homo sapiens
  misc_RNA (1)...(19): siRNA sense strand
ggcuggcgauucauaagga

SEQ ID NO: 1473964 - RNA, 19 nt, Homo sapiens
  misc_RNA (1)...(19): siRNA sense strand
uaaggacgcagacuuguac

SEQ ID NO: 1473965 - RNA, 19 nt, Homo sapiens
  misc_RNA (1)...(19): siRNA sense strand
gaaaaggucccuguaucaa

SEQ ID NO: 1473966 - RNA, 19 nt, Homo sapiens
  misc_RNA (1)...(19): siRNA sense strand
ucuuucugcuggaggaaua

SEQ ID NO: 1473967 - RNA, 19 nt, Homo sapiens
  misc_RNA (1)...(19): siRNA sense strand
acaauaaggacgcagacuu

SEQ ID NO: 1473968 - RNA, 19 nt, Homo sapiens
  misc_RNA (1)...(19): siRNA sense strand
gccgaacuacccagucgua

SEQ ID NO: 1473969 - RNA, 19 nt, Homo sapiens
  misc_RNA (1)...(19): siRNA sense strand
agugcaaucccauggguua

SEQ ID NO: 1473970 - RNA, 19 nt, Homo sapiens
  misc_RNA (1)...(19): siRNA sense strand
auaaggacgcagacuugua

SEQ ID NO: 1473971 - RNA, 19 nt, Homo sapiens
  misc_RNA (1)...(19): siRNA sense strand
agacugcaguggacauguc

SEQ ID NO: 1473972 - RNA, 19 nt, Homo sapiens
  misc_RNA (1)...(19): siRNA sense strand
auacuuugguugcaugaag

SEQ ID NO: 1473973 - RNA, 19 nt, Homo sapiens
  misc_RNA (1)...(19): siRNA sense strand
gggugaugcucaguaguca

SEQ ID NO: 1473974 - RNA, 19 nt, Homo sapiens
  misc_RNA (1)...(19): siRNA sense strand
ucaguagucaagugccuuu

SEQ ID NO: 1473975 - RNA, 19 nt, Homo sapiens
  misc_RNA (1)...(19): siRNA sense strand
aaaguucggcccaaugaag

SEQ ID NO: 1473976 - RNA, 19 nt, Homo sapiens
  misc_RNA (1)...(19): siRNA sense strand
gacggucacaguccuugaa

SEQ ID NO: 1473977 - RNA, 19 nt, Homo sapiens
  misc_RNA (1)...(19): siRNA sense strand
caggugagaagagugauga

SEQ ID NO: 1473978 - RNA, 19 nt, Homo sapiens
  misc_RNA (1)...(19): siRNA sense strand
uaaggauagacacuucuug

SEQ ID NO: 1473979 - RNA, 19 nt, Homo sapiens
  misc_RNA (1)...(19): siRNA sense strand
aaacauccgaggacaaggu

SEQ ID NO: 1473980 - RNA, 19 nt, Homo sapiens
  misc_RNA (1)...(19): siRNA sense strand
guacauugaccauuaaaag

SEQ ID NO: 1473981 - RNA, 19 nt, Homo sapiens
  misc_RNA (1)...(19): siRNA sense strand
aucauuggcugacacuuuc

SEQ ID NO: 1473982 - RNA, 19 nt, Homo sapiens
  misc_RNA (1)...(19): siRNA sense strand
gcaaucccauggguuacac

SEQ ID NO: 1473983 - RNA, 19 nt, Homo sapiens
  misc_RNA (1)...(19): siRNA sense strand
ugugugacaguauuaguga

SEQ ID NO: 1473984 - RNA, 19 nt, Homo sapiens
  misc_RNA (1)...(19): siRNA sense strand
guacacguccagggugaug

SEQ ID NO: 1473985 - RNA, 19 nt, Homo sapiens
  misc_RNA (1)...(19): siRNA sense strand
uagaagagcuguuggauga

SEQ ID NO: 1473986 - RNA, 19 nt, Homo sapiens
  misc_RNA (1)...(19): siRNA sense strand
guauguacauugaccauua

SEQ ID NO: 1473987 - RNA, 19 nt, Homo sapiens
  misc_RNA (1)...(19): siRNA sense strand
gagcgugugugacaguauu

SEQ ID NO: 1473988 - RNA, 19 nt, Homo sapiens
  misc_RNA (1)...(19): siRNA sense strand
caauaaggacgcagacuug

SEQ ID NO: 1473989 - RNA, 19 nt, Homo sapiens
  misc_RNA (1)...(19): siRNA sense strand
gagcugagcgugugugaca

SEQ ID NO: 1473990 - RNA, 19 nt, Homo sapiens
  misc_RNA (1)...(19): siRNA sense strand
caucauuggcugacacuuu

SEQ ID NO: 1473991 - RNA, 19 nt, Homo sapiens
  misc_RNA (1)...(19): siRNA sense strand
guagucaagugccuuugga

SEQ ID NO: 1473992 - RNA, 19 nt, Homo sapiens
  misc_RNA (1)...(19): siRNA sense strand
aaggccaacugaagcaaua

SEQ ID NO: 1473993 - RNA, 19 nt, Homo sapiens
  misc_RNA (1)...(19): siRNA sense strand
ccuagaugcugcaaacaug

SEQ ID NO: 1473994 - RNA, 19 nt, Homo sapiens
  misc_RNA (1)...(19): siRNA sense strand
gcaaacauccgaggacaag

SEQ ID NO: 1473995 - RNA, 19 nt, Homo sapiens
  misc_RNA (1)...(19): siRNA sense strand
ucauaaggauagacacuuc

SEQ ID NO: 1473996 - RNA, 19 nt, Homo sapiens
  misc_RNA (1)...(19): siRNA sense strand
gaacuacccagucguacgu

SEQ ID NO: 1473997 - RNA, 19 nt, Homo sapiens
  misc_RNA (1)...(19): siRNA sense strand
gcccaaggcagguucaaga

SEQ ID NO: 1473998 - RNA, 19 nt, Homo sapiens
  misc_RNA (1)...(19): siRNA sense strand
aaaggucccuguaucaaaa

SEQ ID NO: 1473999 - RNA, 19 nt, Homo sapiens
  misc_RNA (1)...(19): siRNA sense strand
caugaaagaagcaaacauc

SEQ ID NO: 1474000 - RNA, 19 nt, Homo sapiens
  misc_RNA (1)...(19): siRNA sense strand
ccagggugaugcucaguag

SEQ ID NO: 1474001 - RNA, 19 nt, Homo sapiens
  misc_RNA (1)...(19): siRNA sense strand
gaugcucaguagucaagug

SEQ ID NO: 1474002 - RNA, 19 nt, Homo sapiens
  misc_RNA (1)...(19): siRNA sense strand
uuaccuagaugcugcaaac

SEQ ID NO: 1474003 - RNA, 19 nt, Homo sapiens
  misc_RNA (1)...(19): siRNA sense strand
gauagaagagcuguuggau

SEQ ID NO: 1474004 - RNA, 19 nt, Homo sapiens
  misc_RNA (1)...(19): siRNA sense strand
ggcuggcgauucauaagga

SEQ ID NO: 1474005 - RNA, 19 nt, Homo sapiens
  misc_RNA (1)...(19): siRNA sense strand
uaaggacgcagacuuguac

SEQ ID NO: 1474006 - RNA, 19 nt, Homo sapiens
  misc_RNA (1)...(19): siRNA sense strand
gaaaaggucccuguaucaa

SEQ ID NO: 1474007 - RNA, 19 nt, Homo sapiens
  misc_RNA (1)...(19): siRNA sense strand
ucuuucugcuggaggaaua

SEQ ID NO: 1474008 - RNA, 19 nt, Homo sapiens
  misc_RNA (1)...(19): siRNA sense strand
acaauaaggacgcagacuu

SEQ ID NO: 1474009 - RNA, 19 nt, Homo sapiens
  misc_RNA (1)...(19): siRNA sense strand
gccgaacuacccagucgua

SEQ ID NO: 1474010 - RNA, 19 nt, Homo sapiens
  misc_RNA (1)...(19): siRNA sense strand
agugcaaucccauggguua

SEQ ID NO: 1474011 - RNA, 19 nt, Homo sapiens
  misc_RNA (1)...(19): siRNA sense strand
auaaggacgcagacuugua

SEQ ID NO: 1474012 - RNA, 19 nt, Homo sapiens
  misc_RNA (1)...(19): siRNA sense strand
agacugcaguggacauguc

SEQ ID NO: 1474013 - RNA, 19 nt, Homo sapiens
  misc_RNA (1)...(19): siRNA sense strand
gggugaugcucaguaguca

SEQ ID NO: 1474014 - RNA, 19 nt, Homo sapiens
  misc_RNA (1)...(19): siRNA sense strand
auacuuugguugcaugaag

SEQ ID NO: 1474015 - RNA, 19 nt, Homo sapiens
  misc_RNA (1)...(19): siRNA sense strand
ucaguagucaagugccuuu

SEQ ID NO: 1474016 - RNA, 19 nt, Homo sapiens
  misc_RNA (1)...(19): siRNA sense strand
aaaguucggcccaaugaag

SEQ ID NO: 1474017 - RNA, 19 nt, Homo sapiens
  misc_RNA (1)...(19): siRNA sense strand
gacggucacaguccuugaa

SEQ ID NO: 1474018 - RNA, 19 nt, Homo sapiens
  misc_RNA (1)...(19): siRNA sense strand
uaaggauagacacuucuug

SEQ ID NO: 1474019 - RNA, 19 nt, Homo sapiens
  misc_RNA (1)...(19): siRNA sense strand
aaacauccgaggacaaggu

SEQ ID NO: 1474020 - RNA, 19 nt, Homo sapiens
  misc_RNA (1)...(19): siRNA sense strand
guacauugaccauuaaaag

SEQ ID NO: 1474021 - RNA, 19 nt, Homo sapiens
  misc_RNA (1)...(19): siRNA sense strand
guacacguccagggugaug

SEQ ID NO: 1474022 - RNA, 19 nt, Homo sapiens
  misc_RNA (1)...(19): siRNA sense strand
aucauuggcugacacuuuc

SEQ ID NO: 1474023 - RNA, 19 nt, Homo sapiens
  misc_RNA (1)...(19): siRNA sense strand
gcaaucccauggguuacac

SEQ ID NO: 1474024 - RNA, 19 nt, Homo sapiens
  misc_RNA (1)...(19): siRNA sense strand
ugugugacaguauuaguga

SEQ ID NO: 1474025 - RNA, 19 nt, Homo sapiens
  misc_RNA (1)...(19): siRNA sense strand
uagaagagcuguuggauga

SEQ ID NO: 1474026 - RNA, 19 nt, Homo sapiens
  misc_RNA (1)...(19): siRNA sense strand
guauguacauugaccauua

SEQ ID NO: 1474027 - RNA, 19 nt, Homo sapiens
  misc_RNA (1)...(19): siRNA sense strand
gagcgugugugacaguauu

SEQ ID NO: 1474028 - RNA, 19 nt, Homo sapiens
  misc_RNA (1)...(19): siRNA sense strand
caauaaggacgcagacuug

SEQ ID NO: 1474029 - RNA, 19 nt, Homo sapiens
  misc_RNA (1)...(19): siRNA sense strand
gagcugagcgugugugaca

SEQ ID NO: 1474030 - RNA, 19 nt, Homo sapiens
  misc_RNA (1)...(19): siRNA sense strand
caucauuggcugacacuuu

SEQ ID NO: 1474031 - RNA, 19 nt, Homo sapiens
  misc_RNA (1)...(19): siRNA sense strand
guagucaagugccuuugga

SEQ ID NO: 1474032 - RNA, 19 nt, Homo sapiens
  misc_RNA (1)...(19): siRNA sense strand
aaggccaacugaagcaaua

SEQ ID NO: 1474033 - RNA, 19 nt, Homo sapiens
  misc_RNA (1)...(19): siRNA sense strand
ccuagaugcugcaaacaug

SEQ ID NO: 1474034 - RNA, 19 nt, Homo sapiens
  misc_RNA (1)...(19): siRNA sense strand
gcaaacauccgaggacaag

SEQ ID NO: 1474035 - RNA, 19 nt, Homo sapiens
  misc_RNA (1)...(19): siRNA sense strand
ucauaaggauagacacuuc

SEQ ID NO: 1474036 - RNA, 19 nt, Homo sapiens
  misc_RNA (1)...(19): siRNA sense strand
gaacuacccagucguacgu

SEQ ID NO: 1474037 - RNA, 19 nt, Homo sapiens
  misc_RNA (1)...(19): siRNA sense strand
gcccaaggcagguucaaga

SEQ ID NO: 1474038 - RNA, 19 nt, Homo sapiens
  misc_RNA (1)...(19): siRNA sense strand
aaaggucccuguaucaaaa

SEQ ID NO: 1474039 - RNA, 19 nt, Homo sapiens
  misc_RNA (1)...(19): siRNA sense strand
caugaaagaagcaaacauc

SEQ ID NO: 1474040 - RNA, 19 nt, Homo sapiens
  misc_RNA (1)...(19): siRNA sense strand
ccagggugaugcucaguag

SEQ ID NO: 1474041 - RNA, 19 nt, Homo sapiens
  misc_RNA (1)...(19): siRNA sense strand
gaugcucaguagucaagug

SEQ ID NO: 1474042 - RNA, 19 nt, Homo sapiens
  misc_RNA (1)...(19): siRNA sense strand
uuaccuagaugcugcaaac

SEQ ID NO: 1474043 - RNA, 19 nt, Homo sapiens
  misc_RNA (1)...(19): siRNA sense strand
gauagaagagcuguuggau

SEQ ID NO: 1474044 - RNA, 19 nt, Homo sapiens
  misc_RNA (1)...(19): siRNA sense strand
ggcuggcgauucauaagga

SEQ ID NO: 1474045 - RNA, 19 nt, Homo sapiens
  misc_RNA (1)...(19): siRNA sense strand
uaaggacgcagacuuguac

SEQ ID NO: 1474046 - RNA, 19 nt, Homo sapiens
  misc_RNA (1)...(19): siRNA sense strand
gaaaaggucccuguaucaa

SEQ ID NO: 1474047 - RNA, 19 nt, Homo sapiens
  misc_RNA (1)...(19): siRNA sense strand
ucuuucugcuggaggaaua

SEQ ID NO: 1474048 - RNA, 19 nt, Homo sapiens
  misc_RNA (1)...(19): siRNA sense strand
acaauaaggacgcagacuu

SEQ ID NO: 1474049 - RNA, 19 nt, Homo sapiens
  misc_RNA (1)...(19): siRNA sense strand
gccgaacuacccagucgua

SEQ ID NO: 1474050 - RNA, 19 nt, Homo sapiens
  misc_RNA (1)...(19): siRNA sense strand
agugcaaucccauggguua

SEQ ID NO: 1474051 - RNA, 19 nt, Homo sapiens
  misc_RNA (1)...(19): siRNA sense strand
auaaggacgcagacuugua

SEQ ID NO: 1474052 - RNA, 19 nt, Homo sapiens
  misc_RNA (1)...(19): siRNA sense strand
agacugcaguggacauguc

SEQ ID NO: 1474053 - RNA, 19 nt, Homo sapiens
  misc_RNA (1)...(19): siRNA sense strand
gggugaugcucaguaguca

SEQ ID NO: 1474054 - RNA, 19 nt, Homo sapiens
  misc_RNA (1)...(19): siRNA sense strand
auacuuugguugcaugaag

SEQ ID NO: 1474055 - RNA, 19 nt, Homo sapiens
  misc_RNA (1)...(19): siRNA sense strand
ucaguagucaagugccuuu

SEQ ID NO: 1474056 - RNA, 19 nt, Homo sapiens
  misc_RNA (1)...(19): siRNA sense strand
aaaguucggcccaaugaag

SEQ ID NO: 1474057 - RNA, 19 nt, Homo sapiens
  misc_RNA (1)...(19): siRNA sense strand
gacggucacaguccuugaa

SEQ ID NO: 1474058 - RNA, 19 nt, Homo sapiens
  misc_RNA (1)...(19): siRNA sense strand
uaaggauagacacuucuug

SEQ ID NO: 1474059 - RNA, 19 nt, Homo sapiens
  misc_RNA (1)...(19): siRNA sense strand
aaacauccgaggacaaggu

SEQ ID NO: 1474060 - RNA, 19 nt, Homo sapiens
  misc_RNA (1)...(19): siRNA sense strand
guacauugaccauuaaaag

SEQ ID NO: 1474061 - RNA, 19 nt, Homo sapiens
  misc_RNA (1)...(19): siRNA sense strand
guacacguccagggugaug

SEQ ID NO: 1474062 - RNA, 19 nt, Homo sapiens
  misc_RNA (1)...(19): siRNA sense strand
aucauuggcugacacuuuc

SEQ ID NO: 1474063 - RNA, 19 nt, Homo sapiens
  misc_RNA (1)...(19): siRNA sense strand
gcaaucccauggguuacac

SEQ ID NO: 1474064 - RNA, 19 nt, Homo sapiens
  misc_RNA (1)...(19): siRNA sense strand
ugugugacaguauuaguga

SEQ ID NO: 1474065 - RNA, 19 nt, Homo sapiens
  misc_RNA (1)...(19): siRNA sense strand
uagaagagcuguuggauga

SEQ ID NO: 1474066 - RNA, 19 nt, Homo sapiens
  misc_RNA (1)...(19): siRNA sense strand
guauguacauugaccauua

SEQ ID NO: 1474067 - RNA, 19 nt, Homo sapiens
  misc_RNA (1)...(19): siRNA sense strand
gagcgugugugacaguauu

SEQ ID NO: 1474068 - RNA, 19 nt, Homo sapiens
  misc_RNA (1)...(19): siRNA sense strand
caauaaggacgcagacuug

SEQ ID NO: 1474069 - RNA, 19 nt, Homo sapiens
  misc_RNA (1)...(19): siRNA sense strand
gagcugagcgugugugaca

SEQ ID NO: 1474070 - RNA, 19 nt, Homo sapiens
  misc_RNA (1)...(19): siRNA sense strand
caucauuggcugacacuuu

SEQ ID NO: 1474071 - RNA, 19 nt, Homo sapiens
  misc_RNA (1)...(19): siRNA sense strand
guagucaagugccuuugga

SEQ ID NO: 1474072 - RNA, 19 nt, Homo sapiens
  misc_RNA (1)...(19): siRNA sense strand
aaggccaacugaagcaaua

SEQ ID NO: 1474073 - RNA, 19 nt, Homo sapiens
  misc_RNA (1)...(19): siRNA sense strand
ccuagaugcugcaaacaug

SEQ ID NO: 1474074 - RNA, 19 nt, Homo sapiens
  misc_RNA (1)...(19): siRNA sense strand
gcaaacauccgaggacaag

SEQ ID NO: 1474075 - RNA, 19 nt, Homo sapiens
  misc_RNA (1)...(19): siRNA sense strand
ucauaaggauagacacuuc

SEQ ID NO: 1474076 - RNA, 19 nt, Homo sapiens
  misc_RNA (1)...(19): siRNA sense strand
gaacuacccagucguacgu

SEQ ID NO: 1474077 - RNA, 19 nt, Homo sapiens
  misc_RNA (1)...(19): siRNA sense strand
gcccaaggcagguucaaga

SEQ ID NO: 1474078 - RNA, 19 nt, Homo sapiens
  misc_RNA (1)...(19): siRNA sense strand
aaaggucccuguaucaaaa

SEQ ID NO: 1474079 - RNA, 19 nt, Homo sapiens
  misc_RNA (1)...(19): siRNA sense strand
caugaaagaagcaaacauc

SEQ ID NO: 1474080 - RNA, 19 nt, Homo sapiens
  misc_RNA (1)...(19): siRNA sense strand
ccagggugaugcucaguag

SEQ ID NO: 1474081 - RNA, 19 nt, Homo sapiens
  misc_RNA (1)...(19): siRNA sense strand
gaugcucaguagucaagug

SEQ ID NO: 1474082 - RNA, 19 nt, Homo sapiens
  misc_RNA (1)...(19): siRNA sense strand
uuaccuagaugcugcaaac

SEQ ID NO: 1474083 - RNA, 19 nt, Homo sapiens
  misc_RNA (1)...(19): siRNA sense strand
gauagaagagcuguuggau

SEQ ID NO: 1474084 - RNA, 19 nt, Homo sapiens
  misc_RNA (1)...(19): siRNA sense strand
ggcuggcgauucauaagga

SEQ ID NO: 1474085 - RNA, 19 nt, Homo sapiens
  misc_RNA (1)...(19): siRNA sense strand
uaaggacgcagacuuguac

SEQ ID NO: 1474086 - RNA, 19 nt, Homo sapiens
  misc_RNA (1)...(19): siRNA sense strand
gaaaaggucccuguaucaa

SEQ ID NO: 1474087 - RNA, 19 nt, Homo sapiens
  misc_RNA (1)...(19): siRNA sense strand
ucuuucugcuggaggaaua

SEQ ID NO: 1474088 - RNA, 19 nt, Homo sapiens
  misc_RNA (1)...(19): siRNA sense strand
acaauaaggacgcagacuu

SEQ ID NO: 1474089 - RNA, 19 nt, Homo sapiens
  misc_RNA (1)...(19): siRNA sense strand
gccgaacuacccagucgua

SEQ ID NO: 1474090 - RNA, 19 nt, Homo sapiens
  misc_RNA (1)...(19): siRNA sense strand
agugcaaucccauggguua

SEQ ID NO: 1474091 - RNA, 19 nt, Homo sapiens
  misc_RNA (1)...(19): siRNA sense strand
auaaggacgcagacuugua

SEQ ID NO: 1474092 - RNA, 19 nt, Homo sapiens
  misc_RNA (1)...(19): siRNA sense strand
agacugcaguggacauguc

SEQ ID NO: 1474093 - RNA, 19 nt, Homo sapiens
  misc_RNA (1)...(19): siRNA sense strand
auacuuugguugcaugaag

SEQ ID NO: 1474094 - RNA, 19 nt, Homo sapiens
  misc_RNA (1)...(19): siRNA sense strand
gggugaugcucaguaguca

SEQ ID NO: 1474095 - RNA, 19 nt, Homo sapiens
  misc_RNA (1)...(19): siRNA sense strand
ucaguagucaagugccuuu

SEQ ID NO: 1474096 - RNA, 19 nt, Homo sapiens
  misc_RNA (1)...(19): siRNA sense strand
aaaguucggcccaaugaag

SEQ ID NO: 1474097 - RNA, 19 nt, Homo sapiens
  misc_RNA (1)...(19): siRNA sense strand
gacggucacaguccuugaa

SEQ ID NO: 1474098 - RNA, 19 nt, Homo sapiens
  misc_RNA (1)...(19): siRNA sense strand
caggugagaagagugauga

SEQ ID NO: 1474099 - RNA, 19 nt, Homo sapiens
  misc_RNA (1)...(19): siRNA sense strand
uaaggauagacacuucuug

SEQ ID NO: 1474100 - RNA, 19 nt, Homo sapiens
  misc_RNA (1)...(19): siRNA sense strand
aaacauccgaggacaaggu

SEQ ID NO: 1474101 - RNA, 19 nt, Homo sapiens
  misc_RNA (1)...(19): siRNA sense strand
guacauugaccauuaaaag

SEQ ID NO: 1474102 - RNA, 19 nt, Homo sapiens
  misc_RNA (1)...(19): siRNA sense strand
aucauuggcugacacuuuc

SEQ ID NO: 1474103 - RNA, 19 nt, Homo sapiens
  misc_RNA (1)...(19): siRNA sense strand
gcaaucccauggguuacac

SEQ ID NO: 1474104 - RNA, 19 nt, Homo sapiens
  misc_RNA (1)...(19): siRNA sense strand
ugugugacaguauuaguga

SEQ ID NO: 1474105 - RNA, 19 nt, Homo sapiens
  misc_RNA (1)...(19): siRNA sense strand
guacacguccagggugaug

SEQ ID NO: 1474106 - RNA, 19 nt, Homo sapiens
  misc_RNA (1)...(19): siRNA sense strand
uagaagagcuguuggauga

SEQ ID NO: 1474107 - RNA, 19 nt, Homo sapiens
  misc_RNA (1)...(19): siRNA sense strand
guauguacauugaccauua

SEQ ID NO: 1474108 - RNA, 19 nt, Homo sapiens
  misc_RNA (1)...(19): siRNA sense strand
gagcgugugugacaguauu

SEQ ID NO: 1474109 - RNA, 19 nt, Homo sapiens
  misc_RNA (1)...(19): siRNA sense strand
caauaaggacgcagacuug

SEQ ID NO: 1474110 - RNA, 19 nt, Homo sapiens
  misc_RNA (1)...(19): siRNA sense strand
gagcugagcgugugugaca

SEQ ID NO: 1474111 - RNA, 19 nt, Homo sapiens
  misc_RNA (1)...(19): siRNA sense strand
caucauuggcugacacuuu

SEQ ID NO: 1474112 - RNA, 19 nt, Homo sapiens
  misc_RNA (1)...(19): siRNA sense strand
guagucaagugccuuugga

SEQ ID NO: 1474113 - RNA, 19 nt, Homo sapiens
  misc_RNA (1)...(19): siRNA sense strand
aaggccaacugaagcaaua

SEQ ID NO: 1474114 - RNA, 19 nt, Homo sapiens
  misc_RNA (1)...(19): siRNA sense strand
ccuagaugcugcaaacaug

SEQ ID NO: 1474115 - RNA, 19 nt, Homo sapiens
  misc_RNA (1)...(19): siRNA sense strand
gcaaacauccgaggacaag

SEQ ID NO: 1474116 - RNA, 19 nt, Homo sapiens
  misc_RNA (1)...(19): siRNA sense strand
ucauaaggauagacacuuc

SEQ ID NO: 1474117 - RNA, 19 nt, Homo sapiens
  misc_RNA (1)...(19): siRNA sense strand
gaacuacccagucguacgu

SEQ ID NO: 1474118 - RNA, 19 nt, Homo sapiens
  misc_RNA (1)...(19): siRNA sense strand
gcccaaggcagguucaaga

SEQ ID NO: 1474119 - RNA, 19 nt, Homo sapiens
  misc_RNA (1)...(19): siRNA sense strand
aaaggucccuguaucaaaa

SEQ ID NO: 1474120 - RNA, 19 nt, Homo sapiens
  misc_RNA (1)...(19): siRNA sense strand
caugaaagaagcaaacauc

SEQ ID NO: 1474121 - RNA, 19 nt, Homo sapiens
  misc_RNA (1)...(19): siRNA sense strand
ccagggugaugcucaguag

SEQ ID NO: 1474122 - RNA, 19 nt, Homo sapiens
  misc_RNA (1)...(19): siRNA sense strand
gaugcucaguagucaagug

SEQ ID NO: 1474123 - RNA, 19 nt, Homo sapiens
  misc_RNA (1)...(19): siRNA sense strand
uuaccuagaugcugcaaac

SEQ ID NO: 1474124 - RNA, 19 nt, Homo sapiens
  misc_RNA (1)...(19): siRNA sense strand
gauagaagagcuguuggau

SEQ ID NO: 1474125 - RNA, 19 nt, Homo sapiens
  misc_RNA (1)...(19): siRNA sense strand
ggcuggcgauucauaagga

SEQ ID NO: 1474126 - RNA, 19 nt, Homo sapiens
  misc_RNA (1)...(19): siRNA sense strand
uaaggacgcagacuuguac

SEQ ID NO: 1474127 - RNA, 19 nt, Homo sapiens
  misc_RNA (1)...(19): siRNA sense strand
gaaaaggucccuguaucaa

SEQ ID NO: 1474128 - RNA, 19 nt, Homo sapiens
  misc_RNA (1)...(19): siRNA sense strand
ucuuucugcuggaggaaua

SEQ ID NO: 1474129 - RNA, 19 nt, Homo sapiens
  misc_RNA (1)...(19): siRNA sense strand
acaauaaggacgcagacuu

SEQ ID NO: 1474130 - RNA, 19 nt, Homo sapiens
  misc_RNA (1)...(19): siRNA sense strand
gccgaacuacccagucgua

SEQ ID NO: 1474131 - RNA, 19 nt, Homo sapiens
  misc_RNA (1)...(19): siRNA sense strand
agugcaaucccauggguua

SEQ ID NO: 1474132 - RNA, 19 nt, Homo sapiens
  misc_RNA (1)...(19): siRNA sense strand
auaaggacgcagacuugua

SEQ ID NO: 1474133 - RNA, 19 nt, Homo sapiens
  misc_RNA (1)...(19): siRNA sense strand
agacugcaguggacauguc

SEQ ID NO: 1474134 - RNA, 19 nt, Homo sapiens
  misc_RNA (1)...(19): siRNA sense strand
gggugaugcucaguaguca

SEQ ID NO: 1474135 - RNA, 19 nt, Homo sapiens
  misc_RNA (1)...(19): siRNA sense strand
auacuuugguugcaugaag

SEQ ID NO: 1474136 - RNA, 19 nt, Homo sapiens
  misc_RNA (1)...(19): siRNA sense strand
ucaguagucaagugccuuu

SEQ ID NO: 1474137 - RNA, 19 nt, Homo sapiens
  misc_RNA (1)...(19): siRNA sense strand
aaaguucggcccaaugaag

SEQ ID NO: 1474138 - RNA, 19 nt, Homo sapiens
  misc_RNA (1)...(19): siRNA sense strand
gacggucacaguccuugaa

SEQ ID NO: 1474139 - RNA, 19 nt, Homo sapiens
  misc_RNA (1)...(19): siRNA sense strand
uaaggauagacacuucuug

SEQ ID NO: 1474140 - RNA, 19 nt, Homo sapiens
  misc_RNA (1)...(19): siRNA sense strand
aaacauccgaggacaaggu

SEQ ID NO: 1474141 - RNA, 19 nt, Homo sapiens
  misc_RNA (1)...(19): siRNA sense strand
guacauugaccauuaaaag

SEQ ID NO: 1474142 - RNA, 19 nt, Homo sapiens
  misc_RNA (1)...(19): siRNA sense strand
guacacguccagggugaug

SEQ ID NO: 1474143 - RNA, 19 nt, Homo sapiens
  misc_RNA (1)...(19): siRNA sense strand
aucauuggcugacacuuuc

SEQ ID NO: 1474144 - RNA, 19 nt, Homo sapiens
  misc_RNA (1)...(19): siRNA sense strand
gcaaucccauggguuacac

SEQ ID NO: 1474145 - RNA, 19 nt, Homo sapiens
  misc_RNA (1)...(19): siRNA sense strand
ugugugacaguauuaguga

SEQ ID NO: 1474146 - RNA, 19 nt, Homo sapiens
  misc_RNA (1)...(19): siRNA sense strand
gacaacaacucgcuucaga

SEQ ID NO: 1474147 - RNA, 19 nt, Homo sapiens
  misc_RNA (1)...(19): siRNA sense strand
acaacucgcuucagacuuu

SEQ ID NO: 1474148 - RNA, 19 nt, Homo sapiens
  misc_RNA (1)...(19): siRNA sense strand
ggagacauguuggaacuca

SEQ ID NO: 1474149 - RNA, 19 nt, Homo sapiens
  misc_RNA (1)...(19): siRNA sense strand
gaggagacauguuggaacu

SEQ ID NO: 1474150 - RNA, 19 nt, Homo sapiens
  misc_RNA (1)...(19): siRNA sense strand
gcacucaggcucuccacaa

SEQ ID NO: 1474151 - RNA, 19 nt, Homo sapiens
  misc_RNA (1)...(19): siRNA sense strand
ggcugaaggugacguuuga

SEQ ID NO: 1474152 - RNA, 19 nt, Homo sapiens
  misc_RNA (1)...(19): siRNA sense strand
ucgcaacacucggcaguuu

SEQ ID NO: 1474153 - RNA, 19 nt, Homo sapiens
  misc_RNA (1)...(19): siRNA sense strand
gaaggugacguuugaggau

SEQ ID NO: 1474154 - RNA, 19 nt, Homo sapiens
  misc_RNA (1)...(19): siRNA sense strand
caacaacucgcuucagacu

SEQ ID NO: 1474155 - RNA, 19 nt, Homo sapiens
  misc_RNA (1)...(19): siRNA sense strand
gacccacucuuugguuugu

SEQ ID NO: 1474156 - RNA, 19 nt, Homo sapiens
  misc_RNA (1)...(19): siRNA sense strand
ugaggaugccacugacuuu

SEQ ID NO: 1474157 - RNA, 19 nt, Homo sapiens
  misc_RNA (1)...(19): siRNA sense strand
gcaacacucggcaguuugg

SEQ ID NO: 1474158 - RNA, 19 nt, Homo sapiens
  misc_RNA (1)...(19): siRNA sense strand
cgaccaggaugaggagaca

SEQ ID NO: 1474159 - RNA, 19 nt, Homo sapiens
  misc_RNA (1)...(19): siRNA sense strand
gaugaggagacauguugga

SEQ ID NO: 1474160 - RNA, 19 nt, Homo sapiens
  misc_RNA (1)...(19): siRNA sense strand
acacucggcaguuuggaaa

SEQ ID NO: 1474161 - RNA, 19 nt, Homo sapiens
  misc_RNA (1)...(19): siRNA sense strand
caacucgcuucagacuuuc

SEQ ID NO: 1474162 - RNA, 19 nt, Homo sapiens
  misc_RNA (1)...(19): siRNA sense strand
aggaugaggagacauguug

SEQ ID NO: 1474163 - RNA, 19 nt, Homo sapiens
  misc_RNA (1)...(19): siRNA sense strand
cucaggcucuccacaagau

SEQ ID NO: 1474164 - RNA, 19 nt, Homo sapiens
  misc_RNA (1)...(19): siRNA sense strand
gggugacgcuggaguuucc

SEQ ID NO: 1474165 - RNA, 19 nt, Homo sapiens
  misc_RNA (1)...(19): siRNA sense strand
acagugagcagggugaguu

SEQ ID NO: 1474166 - RNA, 19 nt, Homo sapiens
  misc_RNA (1)...(19): siRNA sense strand
gaucaucauugccguaugc

SEQ ID NO: 1474167 - RNA, 19 nt, Homo sapiens
  misc_RNA (1)...(19): siRNA sense strand
ccagaaguccugcuccaaa

SEQ ID NO: 1474168 - RNA, 19 nt, Homo sapiens
  misc_RNA (1)...(19): siRNA sense strand
cagaaguccugcuccaaag

SEQ ID NO: 1474169 - RNA, 19 nt, Homo sapiens
  misc_RNA (1)...(19): siRNA sense strand
gaaguccugcuccaaagug

SEQ ID NO: 1474170 - RNA, 19 nt, Homo sapiens
  misc_RNA (1)...(19): siRNA sense strand
gcucccaacucuaccucuu

SEQ ID NO: 1474171 - RNA, 19 nt, Homo sapiens
  misc_RNA (1)...(19): siRNA sense strand
gacugugcuugucaucauu

SEQ ID NO: 1474172 - RNA, 19 nt, Homo sapiens
  misc_RNA (1)...(19): siRNA sense strand
gugccucccugguguuucu

SEQ ID NO: 1474173 - RNA, 19 nt, Homo sapiens
  misc_RNA (1)...(19): siRNA sense strand
gaacaacgcagugguguga

SEQ ID NO: 1474174 - RNA, 19 nt, Homo sapiens
  misc_RNA (1)...(19): siRNA sense strand
gcagagcaacaaaggagua

SEQ ID NO: 1474175 - RNA, 19 nt, Homo sapiens
  misc_RNA (1)...(19): siRNA sense strand
gaucaucauugccguaugc

SEQ ID NO: 1474176 - RNA, 19 nt, Homo sapiens
  misc_RNA (1)...(19): siRNA sense strand
ccagaaguccugcuccaaa

SEQ ID NO: 1474177 - RNA, 19 nt, Homo sapiens
  misc_RNA (1)...(19): siRNA sense strand
ggaaaccacugagaaaaga

SEQ ID NO: 1474178 - RNA, 19 nt, Homo sapiens
  misc_RNA (1)...(19): siRNA sense strand
cagaaguccugcuccaaag

SEQ ID NO: 1474179 - RNA, 19 nt, Homo sapiens
  misc_RNA (1)...(19): siRNA sense strand
gaaguccugcuccaaagug

SEQ ID NO: 1474180 - RNA, 19 nt, Homo sapiens
  misc_RNA (1)...(19): siRNA sense strand
acaaaggaguagacgugaa

SEQ ID NO: 1474181 - RNA, 19 nt, Homo sapiens
  misc_RNA (1)...(19): siRNA sense strand
gcucccaacucuaccucuu

SEQ ID NO: 1474182 - RNA, 19 nt, Homo sapiens
  misc_RNA (1)...(19): siRNA sense strand
gacugugcuugucaucauu

SEQ ID NO: 1474183 - RNA, 19 nt, Homo sapiens
  misc_RNA (1)...(19): siRNA sense strand
caaaggaguagacgugaac

SEQ ID NO: 1474184 - RNA, 19 nt, Homo sapiens
  misc_RNA (1)...(19): siRNA sense strand
gaguaucccaugagugcuu

SEQ ID NO: 1474185 - RNA, 19 nt, Homo sapiens
  misc_RNA (1)...(19): siRNA sense strand
gugccucccugguguuucu

SEQ ID NO: 1474186 - RNA, 19 nt, Homo sapiens
  misc_RNA (1)...(19): siRNA sense strand
gagcaacaaaggaguagac

SEQ ID NO: 1474187 - RNA, 19 nt, Homo sapiens
  misc_RNA (1)...(19): siRNA sense strand
guugcugaguaucccauga

SEQ ID NO: 1474188 - RNA, 19 nt, Homo sapiens
  misc_RNA (1)...(19): siRNA sense strand
ggaaggagcugaagagaau

SEQ ID NO: 1474189 - RNA, 19 nt, Homo sapiens
  misc_RNA (1)...(19): siRNA sense strand
ccaaggagaacgacuuuga

SEQ ID NO: 1474190 - RNA, 19 nt, Homo sapiens
  misc_RNA (1)...(19): siRNA sense strand
agagggacgucuuccugua

SEQ ID NO: 1474191 - RNA, 19 nt, Homo sapiens
  misc_RNA (1)...(19): siRNA sense strand
ggagguagacgagcuguuc

SEQ ID NO: 1474192 - RNA, 19 nt, Homo sapiens
  misc_RNA (1)...(19): siRNA sense strand
gacgagcuguucgacguaa

SEQ ID NO: 1474193 - RNA, 19 nt, Homo sapiens
  misc_RNA (1)...(19): siRNA sense strand
gagcuggaccgagagauga

SEQ ID NO: 1474194 - RNA, 19 nt, Homo sapiens
  misc_RNA (1)...(19): siRNA sense strand
gcgcauguuugcugacuac

SEQ ID NO: 1474195 - RNA, 19 nt, Homo sapiens
  misc_RNA (1)...(19): siRNA sense strand
gcaggaggcgcuagacaag

SEQ ID NO: 1474196 - RNA, 19 nt, Homo sapiens
  misc_RNA (1)...(19): siRNA sense strand
agggacgucuuccuguaua

SEQ ID NO: 1474197 - RNA, 19 nt, Homo sapiens
  misc_RNA (1)...(19): siRNA sense strand
gagggacgucuuccuguau

SEQ ID NO: 1474198 - RNA, 19 nt, Homo sapiens
  misc_RNA (1)...(19): siRNA sense strand
ggccaaggagaacgacuuu

SEQ ID NO: 1474199 - RNA, 19 nt, Homo sapiens
  misc_RNA (1)...(19): siRNA sense strand
ggagugcacagccaugaca

SEQ ID NO: 1474200 - RNA, 19 nt, Homo sapiens
  misc_RNA (1)...(19): siRNA sense strand
uccaggagauggcugacaa

SEQ ID NO: 1474201 - RNA, 19 nt, Homo sapiens
  misc_RNA (1)...(19): siRNA sense strand
aggaggcgcuagacaagga

SEQ ID NO: 1474202 - RNA, 19 nt, Homo sapiens
  misc_RNA (1)...(19): siRNA sense strand
acaggcuggugcuacagua

SEQ ID NO: 1474203 - RNA, 19 nt, Homo sapiens
  misc_RNA (1)...(19): siRNA sense strand
ggacgucuuccuguauaga

SEQ ID NO: 1474204 - RNA, 19 nt, Homo sapiens
  misc_RNA (1)...(19): siRNA sense strand
gcugcaggaugccuacuac

SEQ ID NO: 1474205 - RNA, 19 nt, Homo sapiens
  misc_RNA (1)...(19): siRNA sense strand
gcuaccagcagugcauaaa

SEQ ID NO: 1474206 - RNA, 19 nt, Homo sapiens
  misc_RNA (1)...(19): siRNA sense strand
gguccuggaugagaucaag

SEQ ID NO: 1474207 - RNA, 19 nt, Homo sapiens
  misc_RNA (1)...(19): siRNA sense strand
ggucccaucccuucaucaa

SEQ ID NO: 1474208 - RNA, 19 nt, Homo sapiens
  misc_RNA (1)...(19): siRNA sense strand
cggaaggagcugaagagaa

SEQ ID NO: 1474209 - RNA, 19 nt, Homo sapiens
  misc_RNA (1)...(19): siRNA sense strand
gcagcuaccagcagugcau

SEQ ID NO: 1474210 - RNA, 19 nt, Homo sapiens
  misc_RNA (1)...(19): siRNA sense strand
gggacgucuuccuguauag

SEQ ID NO: 1474211 - RNA, 19 nt, Homo sapiens
  misc_RNA (1)...(19): siRNA sense strand
ccacccugcugcugcucaa

SEQ ID NO: 1474212 - RNA, 19 nt, Homo sapiens
  misc_RNA (1)...(19): siRNA sense strand
ucggugugguccuggauga

SEQ ID NO: 1474213 - RNA, 19 nt, Homo sapiens
  misc_RNA (1)...(19): siRNA sense strand
ucuguuggcucaugaaaua

SEQ ID NO: 1474214 - RNA, 19 nt, Homo sapiens
  misc_RNA (1)...(19): siRNA sense strand
caacacacccucuugcuaa

SEQ ID NO: 1474215 - RNA, 19 nt, Homo sapiens
  misc_RNA (1)...(19): siRNA sense strand
ugaaggagauacugaagga

SEQ ID NO: 1474216 - RNA, 19 nt, Homo sapiens
  misc_RNA (1)...(19): siRNA sense strand
gaaauagguuuuggaagua

SEQ ID NO: 1474217 - RNA, 19 nt, Homo sapiens
  misc_RNA (1)...(19): siRNA sense strand
uaaaggagcagaggaaaug

SEQ ID NO: 1474218 - RNA, 19 nt, Homo sapiens
  misc_RNA (1)...(19): siRNA sense strand
caaaagagcucuggucauc

SEQ ID NO: 1474219 - RNA, 19 nt, Homo sapiens
  misc_RNA (1)...(19): siRNA sense strand
gccgugauguggucauuug

SEQ ID NO: 1474220 - RNA, 19 nt, Homo sapiens
  misc_RNA (1)...(19): siRNA sense strand
ugaaauagguuuuggaagu

SEQ ID NO: 1474221 - RNA, 19 nt, Homo sapiens
  misc_RNA (1)...(19): siRNA sense strand
aaagagggaccauaugaug

SEQ ID NO: 1474222 - RNA, 19 nt, Homo sapiens
  misc_RNA (1)...(19): siRNA sense strand
gggaccagcuucgaguuug

SEQ ID NO: 1474223 - RNA, 19 nt, Homo sapiens
  misc_RNA (1)...(19): siRNA sense strand
gaggcgagcugggauuaag

SEQ ID NO: 1474224 - RNA, 19 nt, Homo sapiens
  misc_RNA (1)...(19): siRNA sense strand
cauuacaccuacucugaga

SEQ ID NO: 1474225 - RNA, 19 nt, Homo sapiens
  misc_RNA (1)...(19): siRNA sense strand
cauaugauguggugguucu

SEQ ID NO: 1474226 - RNA, 19 nt, Homo sapiens
  misc_RNA (1)...(19): siRNA sense strand
ccugauagccgccaucugu

SEQ ID NO: 1474227 - RNA, 19 nt, Homo sapiens
  misc_RNA (1)...(19): siRNA sense strand
gguggcggcucaagugaag

SEQ ID NO: 1474228 - RNA, 19 nt, Homo sapiens
  misc_RNA (1)...(19): siRNA sense strand
uugcaggccuggcuggaaa

SEQ ID NO: 1474229 - RNA, 19 nt, Homo sapiens
  misc_RNA (1)...(19): siRNA sense strand
gucauuacaccuacucuga

SEQ ID NO: 1474230 - RNA, 19 nt, Homo sapiens
  misc_RNA (1)...(19): siRNA sense strand
gcuaaaggagcagaggaaa

SEQ ID NO: 1474231 - RNA, 19 nt, Homo sapiens
  misc_RNA (1)...(19): siRNA sense strand
ggagacggucaucccugua

SEQ ID NO: 1474232 - RNA, 19 nt, Homo sapiens
  misc_RNA (1)...(19): siRNA sense strand
aaagagcucuggucauccu

SEQ ID NO: 1474233 - RNA, 19 nt, Homo sapiens
  misc_RNA (1)...(19): siRNA sense strand
ggaccagcuucgaguuugc

SEQ ID NO: 1474234 - RNA, 19 nt, Homo sapiens
  misc_RNA (1)...(19): siRNA sense strand
acaacacacccucuugcua

SEQ ID NO: 1474235 - RNA, 19 nt, Homo sapiens
  misc_RNA (1)...(19): siRNA sense strand
aaaccggaagggccugaua

SEQ ID NO: 1474236 - RNA, 19 nt, Homo sapiens
  misc_RNA (1)...(19): siRNA sense strand
gaugccagccuugaagaug

SEQ ID NO: 1474237 - RNA, 19 nt, Homo sapiens
  misc_RNA (1)...(19): siRNA sense strand
ggaaauggagacggucauc

SEQ ID NO: 1474238 - RNA, 19 nt, Homo sapiens
  misc_RNA (1)...(19): siRNA sense strand
aacacacccucuugcuaaa

SEQ ID NO: 1474239 - RNA, 19 nt, Homo sapiens
  misc_RNA (1)...(19): siRNA sense strand
ugagucugcugcugugaag

SEQ ID NO: 1474240 - RNA, 19 nt, Homo sapiens
  misc_RNA (1)...(19): siRNA sense strand
gcugugaaggagauacuga

SEQ ID NO: 1474241 - RNA, 19 nt, Homo sapiens
  misc_RNA (1)...(19): siRNA sense strand
gagacggucaucccuguag

SEQ ID NO: 1474242 - RNA, 19 nt, Homo sapiens
  misc_RNA (1)...(19): siRNA sense strand
gagguggcggcucaaguga

SEQ ID NO: 1474243 - RNA, 19 nt, Homo sapiens
  misc_RNA (1)...(19): siRNA sense strand
guggucauuuguccugaug

SEQ ID NO: 1474244 - RNA, 19 nt, Homo sapiens
  misc_RNA (1)...(19): siRNA sense strand
cuaaaggagcagaggaaau

SEQ ID NO: 1474245 - RNA, 19 nt, Homo sapiens
  misc_RNA (1)...(19): siRNA sense strand
ggcuaaaggagcagaggaa

SEQ ID NO: 1474246 - RNA, 19 nt, Homo sapiens
  misc_RNA (1)...(19): siRNA sense strand
agacggucaucccuguaga

SEQ ID NO: 1474247 - RNA, 19 nt, Homo sapiens
  misc_RNA (1)...(19): siRNA sense strand
agagggaccauaugaugug

SEQ ID NO: 1474248 - RNA, 19 nt, Homo sapiens
  misc_RNA (1)...(19): siRNA sense strand
gcuaaagacaaaaugauga

SEQ ID NO: 1474249 - RNA, 19 nt, Homo sapiens
  misc_RNA (1)...(19): siRNA sense strand
gcucuguuggcucaugaaa

SEQ ID NO: 1474250 - RNA, 19 nt, Homo sapiens
  misc_RNA (1)...(19): siRNA sense strand
guuacaacacacccucuug

SEQ ID NO: 1474251 - RNA, 19 nt, Homo sapiens
  misc_RNA (1)...(19): siRNA sense strand
ugaaacagcugggaguuaa

SEQ ID NO: 1474252 - RNA, 19 nt, Homo sapiens
  misc_RNA (1)...(19): siRNA sense strand
gcuacaagcuggugaucuu

SEQ ID NO: 1474253 - RNA, 19 nt, Homo sapiens
  misc_RNA (1)...(19): siRNA sense strand
caagguggcuggcuuugau

SEQ ID NO: 1474254 - RNA, 19 nt, Homo sapiens
  misc_RNA (1)...(19): siRNA sense strand
gaccggaagugcuccagaa

SEQ ID NO: 1474255 - RNA, 19 nt, Homo sapiens
  misc_RNA (1)...(19): siRNA sense strand
ggaaacgggucgccaucga

SEQ ID NO: 1474256 - RNA, 19 nt, Homo sapiens
  misc_RNA (1)...(19): siRNA sense strand
gaggaguucuuucucaagu

SEQ ID NO: 1474257 - RNA, 19 nt, Homo sapiens
  misc_RNA (1)...(19): siRNA sense strand
augcugagcugccgaagaa

SEQ ID NO: 1474258 - RNA, 19 nt, Homo sapiens
  misc_RNA (1)...(19): siRNA sense strand
gaaguccaccuuucucaag

SEQ ID NO: 1474259 - RNA, 19 nt, Homo sapiens
  misc_RNA (1)...(19): siRNA sense strand
ggacaguggcagugaaaca

SEQ ID NO: 1474260 - RNA, 19 nt, Homo sapiens
  misc_RNA (1)...(19): siRNA sense strand
gagaucccguuccggcuau

SEQ ID NO: 1474261 - RNA, 19 nt, Homo sapiens
  misc_RNA (1)...(19): siRNA sense strand
caaccgguuucgagagaug

SEQ ID NO: 1474262 - RNA, 19 nt, Homo sapiens
  misc_RNA (1)...(19): siRNA sense strand
gugaaacagcugggaguua

SEQ ID NO: 1474263 - RNA, 19 nt, Homo sapiens
  misc_RNA (1)...(19): siRNA sense strand
ccagaaucccagccagaua

SEQ ID NO: 1474264 - RNA, 19 nt, Homo sapiens
  misc_RNA (1)...(19): siRNA sense strand
gaagugcuccagaacucaa

SEQ ID NO: 1474265 - RNA, 19 nt, Homo sapiens
  misc_RNA (1)...(19): siRNA sense strand
ggaaguccaccuuucucaa

SEQ ID NO: 1474266 - RNA, 19 nt, Homo sapiens
  misc_RNA (1)...(19): siRNA sense strand
ccggauauguccacgugaa

SEQ ID NO: 1474267 - RNA, 19 nt, Homo sapiens
  misc_RNA (1)...(19): siRNA sense strand
gggacacacuguauuuggu

SEQ ID NO: 1474268 - RNA, 19 nt, Homo sapiens
  misc_RNA (1)...(19): siRNA sense strand
uggagaaguugcuaguguu

SEQ ID NO: 1474269 - RNA, 19 nt, Homo sapiens
  misc_RNA (1)...(19): siRNA sense strand
gcaagguggcuggcuuuga

SEQ ID NO: 1474270 - RNA, 19 nt, Homo sapiens
  misc_RNA (1)...(19): siRNA sense strand
ggagaaguugcuaguguuc

SEQ ID NO: 1474271 - RNA, 19 nt, Homo sapiens
  misc_RNA (1)...(19): siRNA sense strand
gcugggagaacuuggagaa

SEQ ID NO: 1474272 - RNA, 19 nt, Homo sapiens
  misc_RNA (1)...(19): siRNA sense strand
ugacggacuccucucauau

SEQ ID NO: 1474273 - RNA, 19 nt, Homo sapiens
  misc_RNA (1)...(19): siRNA sense strand
cggaagugcuccagaacuc

SEQ ID NO: 1474274 - RNA, 19 nt, Homo sapiens
  misc_RNA (1)...(19): siRNA sense strand
ccucuggugucccaagaug

SEQ ID NO: 1474275 - RNA, 19 nt, Homo sapiens
  misc_RNA (1)...(19): siRNA sense strand
caacgacggcacgcccaua

SEQ ID NO: 1474276 - RNA, 19 nt, Homo sapiens
  misc_RNA (1)...(19): siRNA sense strand
gggcaagguggcuggcuuu

SEQ ID NO: 1474277 - RNA, 19 nt, Homo sapiens
  misc_RNA (1)...(19): siRNA sense strand
aacaaccgguuucgagaga

SEQ ID NO: 1474278 - RNA, 19 nt, Homo sapiens
  misc_RNA (1)...(19): siRNA sense strand
uuggagaaguugcuagugu

SEQ ID NO: 1474279 - RNA, 19 nt, Homo sapiens
  misc_RNA (1)...(19): siRNA sense strand
cugcgccgaucgccuguuu

SEQ ID NO: 1474280 - RNA, 19 nt, Homo sapiens
  misc_RNA (1)...(19): siRNA sense strand
caagaugagaagagagaug

SEQ ID NO: 1474281 - RNA, 19 nt, Homo sapiens
  misc_RNA (1)...(19): siRNA sense strand
gccgggaaguccaccuuuc

SEQ ID NO: 1474282 - RNA, 19 nt, Homo sapiens
  misc_RNA (1)...(19): siRNA sense strand
gucccaagaugagaagaga

SEQ ID NO: 1474283 - RNA, 19 nt, Homo sapiens
  misc_RNA (1)...(19): siRNA sense strand
gggaaguccaccuuucuca

SEQ ID NO: 1474284 - RNA, 19 nt, Homo sapiens
  misc_RNA (1)...(19): siRNA sense strand
ugagacagcccugaagcaa

SEQ ID NO: 1474285 - RNA, 19 nt, Homo sapiens
  misc_RNA (1)...(19): siRNA sense strand
uggaggcugugguggagaa

SEQ ID NO: 1474286 - RNA, 19 nt, Homo sapiens
  misc_RNA (1)...(19): siRNA sense strand
ggaagugcuccagaacuca

SEQ ID NO: 1474287 - RNA, 19 nt, Homo sapiens
  misc_RNA (1)...(19): siRNA sense strand
gcugugugaccacguguga

SEQ ID NO: 1474288 - RNA, 19 nt, Homo sapiens
  misc_RNA (1)...(19): siRNA sense strand
cagaaucccagccagauac

SEQ ID NO: 1474289 - RNA, 19 nt, Homo sapiens
  misc_RNA (1)...(19): siRNA sense strand
gacggacuccucucauauc

SEQ ID NO: 1474290 - RNA, 19 nt, Homo sapiens
  misc_RNA (1)...(19): siRNA sense strand
gugacuggaggaucuugua

SEQ ID NO: 1474291 - RNA, 19 nt, Homo sapiens
  misc_RNA (1)...(19): siRNA sense strand
gagacccgcacaccagaau

SEQ ID NO: 1474292 - RNA, 19 nt, Homo sapiens
  misc_RNA (1)...(19): siRNA sense strand
ggauauguccacgugaaca

SEQ ID NO: 1474293 - RNA, 19 nt, Homo sapiens
  misc_RNA (1)...(19): siRNA sense strand
aaguccaccuuucucaaga

SEQ ID NO: 1474294 - RNA, 19 nt, Homo sapiens
  misc_RNA (1)...(19): siRNA sense strand
ggaaagagccuguauuuaa

SEQ ID NO: 1474295 - RNA, 19 nt, Homo sapiens
  misc_RNA (1)...(19): siRNA sense strand
ccaaagagaugauguguuu

SEQ ID NO: 1474296 - RNA, 19 nt, Homo sapiens
  misc_RNA (1)...(19): siRNA sense strand
gaaagagccuguauuuaac

SEQ ID NO: 1474297 - RNA, 19 nt, Homo sapiens
  misc_RNA (1)...(19): siRNA sense strand
gaagacaugaugaaugaua

SEQ ID NO: 1474298 - RNA, 19 nt, Homo sapiens
  misc_RNA (1)...(19): siRNA sense strand
gaggaaagagccuguauuu

SEQ ID NO: 1474299 - RNA, 19 nt, Homo sapiens
  misc_RNA (1)...(19): siRNA sense strand
gaacucuccuccuucauug

SEQ ID NO: 1474300 - RNA, 19 nt, Homo sapiens
  misc_RNA (1)...(19): siRNA sense strand
gaacaggucaugaucaguu

SEQ ID NO: 1474301 - RNA, 19 nt, Homo sapiens
  misc_RNA (1)...(19): siRNA sense strand
gaaccuuccucaagaacaa

SEQ ID NO: 1474302 - RNA, 19 nt, Homo sapiens
  misc_RNA (1)...(19): siRNA sense strand
gaagaaaguggccaucauu

SEQ ID NO: 1474303 - RNA, 19 nt, Homo sapiens
  misc_RNA (1)...(19): siRNA sense strand
uggaagacaugaugaauga

SEQ ID NO: 1474304 - RNA, 19 nt, Homo sapiens
  misc_RNA (1)...(19): siRNA sense strand
aaaagaaccuccugaagua

SEQ ID NO: 1474305 - RNA, 19 nt, Homo sapiens
  misc_RNA (1)...(19): siRNA sense strand
acagcaagauccaggaaua

SEQ ID NO: 1474306 - RNA, 19 nt, Homo sapiens
  misc_RNA (1)...(19): siRNA sense strand
ucucacagaucccaaauug

SEQ ID NO: 1474307 - RNA, 19 nt, Homo sapiens
  misc_RNA (1)...(19): siRNA sense strand
gaaaguggccaucauugga

SEQ ID NO: 1474308 - RNA, 19 nt, Homo sapiens
  misc_RNA (1)...(19): siRNA sense strand
ggaagaaaguggccaucau

SEQ ID NO: 1474309 - RNA, 19 nt, Homo sapiens
  misc_RNA (1)...(19): siRNA sense strand
uaaagaaccagguguauuc

SEQ ID NO: 1474310 - RNA, 19 nt, Homo sapiens
  misc_RNA (1)...(19): siRNA sense strand
guaauaaagggaacuugua

SEQ ID NO: 1474311 - RNA, 19 nt, Homo sapiens
  misc_RNA (1)...(19): siRNA sense strand
acagacagauuacauuguu

SEQ ID NO: 1474312 - RNA, 19 nt, Homo sapiens
  misc_RNA (1)...(19): siRNA sense strand
gagcccaccugcuuugaga

SEQ ID NO: 1474313 - RNA, 19 nt, Homo sapiens
  misc_RNA (1)...(19): siRNA sense strand
gcaagauccaggaauauau

SEQ ID NO: 1474314 - RNA, 19 nt, Homo sapiens
  misc_RNA (1)...(19): siRNA sense strand
gggcagggcuagcauuuac

SEQ ID NO: 1474315 - RNA, 19 nt, Homo sapiens
  misc_RNA (1)...(19): siRNA sense strand
cagcagggacuauaaagaa

SEQ ID NO: 1474316 - RNA, 19 nt, Homo sapiens
  misc_RNA (1)...(19): siRNA sense strand
gaaaagaaccuccugaagu

SEQ ID NO: 1474317 - RNA, 19 nt, Homo sapiens
  misc_RNA (1)...(19): siRNA sense strand
ccagguguauucaauggaa

SEQ ID NO: 1474318 - RNA, 19 nt, Homo sapiens
  misc_RNA (1)...(19): siRNA sense strand
ugcaauuccuauucuguua

SEQ ID NO: 1474319 - RNA, 19 nt, Homo sapiens
  misc_RNA (1)...(19): siRNA sense strand
cauugacuguguaaucuuu

SEQ ID NO: 1474320 - RNA, 19 nt, Homo sapiens
  misc_RNA (1)...(19): siRNA sense strand
gcaauuccuauucuguuaa

SEQ ID NO: 1474321 - RNA, 19 nt, Homo sapiens
  misc_RNA (1)...(19): siRNA sense strand
caaauuggccauggaaguu

SEQ ID NO: 1474322 - RNA, 19 nt, Homo sapiens
  misc_RNA (1)...(19): siRNA sense strand
gaccauauuugagggcauu

SEQ ID NO: 1474323 - RNA, 19 nt, Homo sapiens
  misc_RNA (1)...(19): siRNA sense strand
acauuuguauccaguguaa

SEQ ID NO: 1474324 - RNA, 19 nt, Homo sapiens
  misc_RNA (1)...(19): siRNA sense strand
gauccaggaauauaucauu

SEQ ID NO: 1474325 - RNA, 19 nt, Homo sapiens
  misc_RNA (1)...(19): siRNA sense strand
ccacugaaagggaugguaa

SEQ ID NO: 1474326 - RNA, 19 nt, Homo sapiens
  misc_RNA (1)...(19): siRNA sense strand
guacuuugccuucuaugga

SEQ ID NO: 1474327 - RNA, 19 nt, Homo sapiens
  misc_RNA (1)...(19): siRNA sense strand
agaaucggcugucuuugau

SEQ ID NO: 1474328 - RNA, 19 nt, Homo sapiens
  misc_RNA (1)...(19): siRNA sense strand
ggcugaagcucuuugcaau

SEQ ID NO: 1474329 - RNA, 19 nt, Homo sapiens
  misc_RNA (1)...(19): siRNA sense strand
uggaugaacucuccuccuu

SEQ ID NO: 1474330 - RNA, 19 nt, Homo sapiens
  misc_RNA (1)...(19): siRNA sense strand
cauuggagcuggugugagu

SEQ ID NO: 1474331 - RNA, 19 nt, Homo sapiens
  misc_RNA (1)...(19): siRNA sense strand
gaaccagguguauucaaug

SEQ ID NO: 1474332 - RNA, 19 nt, Homo sapiens
  misc_RNA (1)...(19): siRNA sense strand
agaaccagguguauucaau

SEQ ID NO: 1474333 - RNA, 19 nt, Homo sapiens
  misc_RNA (1)...(19): siRNA sense strand
ccacagcagggacuauaaa

SEQ ID NO: 1474334 - RNA, 19 nt, Homo sapiens
  misc_RNA (1)...(19): siRNA sense strand
gggcagcacaaguaauaaa

SEQ ID NO: 1474335 - RNA, 19 nt, Homo sapiens
  misc_RNA (1)...(19): siRNA sense strand
gcagaacaggucaugauca

SEQ ID NO: 1474336 - RNA, 19 nt, Homo sapiens
  misc_RNA (1)...(19): siRNA sense strand
gagggcagggcuagcauuu

SEQ ID NO: 1474337 - RNA, 19 nt, Homo sapiens
  misc_RNA (1)...(19): siRNA sense strand
gcgagaccauacagacaga

SEQ ID NO: 1474338 - RNA, 19 nt, Homo sapiens
  misc_RNA (1)...(19): siRNA sense strand
cugaagcucuuugcaauuc

SEQ ID NO: 1474339 - RNA, 19 nt, Homo sapiens
  misc_RNA (1)...(19): siRNA sense strand
ugucuuugaugcuguaaug

SEQ ID NO: 1474340 - RNA, 19 nt, Homo sapiens
  misc_RNA (1)...(19): siRNA sense strand
ccaggaauauaucauugca

SEQ ID NO: 1474341 - RNA, 19 nt, Homo sapiens
  misc_RNA (1)...(19): siRNA sense strand
guuaaucgcuguuuuccuu

SEQ ID NO: 1474342 - RNA, 19 nt, Homo sapiens
  misc_RNA (1)...(19): siRNA sense strand
cagacagauuacauuguuu

SEQ ID NO: 1474343 - RNA, 19 nt, Homo sapiens
  misc_RNA (1)...(19): siRNA sense strand
gcaacaggguauaguuuug

SEQ ID NO: 1474344 - RNA, 19 nt, Homo sapiens
  misc_RNA (1)...(19): siRNA sense strand
caugaucaguuccagaagu

SEQ ID NO: 1474345 - RNA, 19 nt, Homo sapiens
  misc_RNA (1)...(19): siRNA sense strand
cagaacaggucaugaucag

SEQ ID NO: 1474346 - RNA, 19 nt, Homo sapiens
  misc_RNA (1)...(19): siRNA sense strand
ucauguguaucccaaccua

SEQ ID NO: 1474347 - RNA, 19 nt, Homo sapiens
  misc_RNA (1)...(19): siRNA sense strand
aauuggccauggaaguuua

SEQ ID NO: 1474348 - RNA, 19 nt, Homo sapiens
  misc_RNA (1)...(19): siRNA sense strand
gggcauugacuguguaauc

SEQ ID NO: 1474349 - RNA, 19 nt, Homo sapiens
  misc_RNA (1)...(19): siRNA sense strand
cuugaugccuuuaaaugga

SEQ ID NO: 1474350 - RNA, 19 nt, Homo sapiens
  misc_RNA (1)...(19): siRNA sense strand
gguuguacaugaagcagau

SEQ ID NO: 1474351 - RNA, 19 nt, Homo sapiens
  misc_RNA (1)...(19): siRNA sense strand
ccugaaguacauacaauuu

SEQ ID NO: 1474352 - RNA, 19 nt, Homo sapiens
  misc_RNA (1)...(19): siRNA sense strand
ggcauugacuguguaaucu

SEQ ID NO: 1474353 - RNA, 19 nt, Homo sapiens
  misc_RNA (1)...(19): siRNA sense strand
caacagcaagauccaggaa

SEQ ID NO: 1474354 - RNA, 19 nt, Homo sapiens
  misc_RNA (1)...(19): siRNA sense strand
gcagggcuagcauuuacaa

SEQ ID NO: 1474355 - RNA, 19 nt, Homo sapiens
  misc_RNA (1)...(19): siRNA sense strand
ugagggcauugacugugua

SEQ ID NO: 1474356 - RNA, 19 nt, Homo sapiens
  misc_RNA (1)...(19): siRNA sense strand
cagcagaacaggucaugau

SEQ ID NO: 1474357 - RNA, 19 nt, Homo sapiens
  misc_RNA (1)...(19): siRNA sense strand
cuauaaagaaccaggugua

SEQ ID NO: 1474358 - RNA, 19 nt, Homo sapiens
  misc_RNA (1)...(19): siRNA sense strand
caagauccaggaauauauc

SEQ ID NO: 1474359 - RNA, 19 nt, Homo sapiens
  misc_RNA (1)...(19): siRNA sense strand
gggcugccauucccacagu

SEQ ID NO: 1474360 - RNA, 19 nt, Homo sapiens
  misc_RNA (1)...(19): siRNA sense strand
gcugaagcucuuugcaauu

SEQ ID NO: 1474361 - RNA, 19 nt, Homo sapiens
  misc_RNA (1)...(19): siRNA sense strand
cauacagacagauuacauu

SEQ ID NO: 1474362 - RNA, 19 nt, Homo sapiens
  misc_RNA (1)...(19): siRNA sense strand
agaccauacagacagauua

SEQ ID NO: 1474363 - RNA, 19 nt, Homo sapiens
  misc_RNA (1)...(19): siRNA sense strand
cugggcagcacaaguaaua

SEQ ID NO: 1474364 - RNA, 19 nt, Homo sapiens
  misc_RNA (1)...(19): siRNA sense strand
ugaaaacuauggcuugaug

SEQ ID NO: 1474365 - RNA, 19 nt, Homo sapiens
  misc_RNA (1)...(19): siRNA sense strand
caucaggagcugucuggaa

SEQ ID NO: 1474366 - RNA, 19 nt, Homo sapiens
  misc_RNA (1)...(19): siRNA sense strand
agacauuuguauccagugu

SEQ ID NO: 1474367 - RNA, 19 nt, Homo sapiens
  misc_RNA (1)...(19): siRNA sense strand
aaaccacuuuaaaggcaaa

SEQ ID NO: 1474368 - RNA, 19 nt, Homo sapiens
  misc_RNA (1)...(19): siRNA sense strand
gagaccauacagacagauu

SEQ ID NO: 1474369 - RNA, 19 nt, Homo sapiens
  misc_RNA (1)...(19): siRNA sense strand
gcuuugagaagagcaauga

SEQ ID NO: 1474370 - RNA, 19 nt, Homo sapiens
  misc_RNA (1)...(19): siRNA sense strand
auacagacagauuacauug

SEQ ID NO: 1474371 - RNA, 19 nt, Homo sapiens
  misc_RNA (1)...(19): siRNA sense strand
uacuuugccuucuauggaa

SEQ ID NO: 1474372 - RNA, 19 nt, Homo sapiens
  misc_RNA (1)...(19): siRNA sense strand
auaaagggaacuuguacuu

SEQ ID NO: 1474373 - RNA, 19 nt, Homo sapiens
  misc_RNA (1)...(19): siRNA sense strand
uagcagugauuggcuuugu

SEQ ID NO: 1474374 - RNA, 19 nt, Homo sapiens
  misc_RNA (1)...(19): siRNA sense strand
aggaaagagccuguauuua

SEQ ID NO: 1474375 - RNA, 19 nt, Homo sapiens
  misc_RNA (1)...(19): siRNA sense strand
guacaugaagcagaugaau

SEQ ID NO: 1474376 - RNA, 19 nt, Homo sapiens
  misc_RNA (1)...(19): siRNA sense strand
ucugacugguuguacauga

SEQ ID NO: 1474377 - RNA, 19 nt, Homo sapiens
  misc_RNA (1)...(19): siRNA sense strand
ggucugggacaaugguuau

SEQ ID NO: 1474378 - RNA, 19 nt, Homo sapiens
  misc_RNA (1)...(19): siRNA sense strand
gucaugaucaguuccagaa

SEQ ID NO: 1474379 - RNA, 19 nt, Homo sapiens
  misc_RNA (1)...(19): siRNA sense strand
gaaccuccugaaguacaua

SEQ ID NO: 1474380 - RNA, 19 nt, Homo sapiens
  misc_RNA (1)...(19): siRNA sense strand
uaauaaagggaacuuguac

SEQ ID NO: 1474381 - RNA, 19 nt, Homo sapiens
  misc_RNA (1)...(19): siRNA sense strand
gcucuuugcaauuccuauu

SEQ ID NO: 1474382 - RNA, 19 nt, Homo sapiens
  misc_RNA (1)...(19): siRNA sense strand
ggagggcagggcuagcauu

SEQ ID NO: 1474383 - RNA, 19 nt, Homo sapiens
  misc_RNA (1)...(19): siRNA sense strand
uccauuggcugaagcucuu

SEQ ID NO: 1474384 - RNA, 19 nt, Homo sapiens
  misc_RNA (1)...(19): siRNA sense strand
uauaaagaaccagguguau

SEQ ID NO: 1474385 - RNA, 19 nt, Homo sapiens
  misc_RNA (1)...(19): siRNA sense strand
gggaagaaaguggccauca

SEQ ID NO: 1474386 - RNA, 19 nt, Homo sapiens
  misc_RNA (1)...(19): siRNA sense strand
acuauggcuugaugccuuu

SEQ ID NO: 1474387 - RNA, 19 nt, Homo sapiens
  misc_RNA (1)...(19): siRNA sense strand
auaaagaaccagguguauu

SEQ ID NO: 1474388 - RNA, 19 nt, Homo sapiens
  misc_RNA (1)...(19): siRNA sense strand
gcuggagcccaccugcuuu

SEQ ID NO: 1474389 - RNA, 19 nt, Homo sapiens
  misc_RNA (1)...(19): siRNA sense strand
gcauugacuguguaaucuu

SEQ ID NO: 1474390 - RNA, 19 nt, Homo sapiens
  misc_RNA (1)...(19): siRNA sense strand
gaugagcucccagcaagca

SEQ ID NO: 1474391 - RNA, 19 nt, Homo sapiens
  misc_RNA (1)...(19): siRNA sense strand
ugaggaaagagccuguauu

SEQ ID NO: 1474392 - RNA, 19 nt, Homo sapiens
  misc_RNA (1)...(19): siRNA sense strand
ggcuugaugccuuuaaaug

SEQ ID NO: 1474393 - RNA, 19 nt, Homo sapiens
  misc_RNA (1)...(19): siRNA sense strand
gaccauacagacagauuac

SEQ ID NO: 1474394 - RNA, 19 nt, Homo sapiens
  misc_RNA (1)...(19): siRNA sense strand
ggaguuagcuagccagaua

SEQ ID NO: 1474395 - RNA, 19 nt, Homo sapiens
  misc_RNA (1)...(19): siRNA sense strand
gcaccaccgugacguauua

SEQ ID NO: 1474396 - RNA, 19 nt, Homo sapiens
  misc_RNA (1)...(19): siRNA sense strand
ccaaugaccuuuaucacua

SEQ ID NO: 1474397 - RNA, 19 nt, Homo sapiens
  misc_RNA (1)...(19): siRNA sense strand
ggacuucagugucagauuu

SEQ ID NO: 1474398 - RNA, 19 nt, Homo sapiens
  misc_RNA (1)...(19): siRNA sense strand
gcagaaagaauacagauaa

SEQ ID NO: 1474399 - RNA, 19 nt, Homo sapiens
  misc_RNA (1)...(19): siRNA sense strand
ccagauagauccucagaaa

SEQ ID NO: 1474400 - RNA, 19 nt, Homo sapiens
  misc_RNA (1)...(19): siRNA sense strand
ggacaugacuuucaagaag

SEQ ID NO: 1474401 - RNA, 19 nt, Homo sapiens
  misc_RNA (1)...(19): siRNA sense strand
ggagcuggaugaucugaua

SEQ ID NO: 1474402 - RNA, 19 nt, Homo sapiens
  misc_RNA (1)...(19): siRNA sense strand
ggacacgguuuccaauuug

SEQ ID NO: 1474403 - RNA, 19 nt, Homo sapiens
  misc_RNA (1)...(19): siRNA sense strand
gaucaauacuccaacaaau

SEQ ID NO: 1474404 - RNA, 19 nt, Homo sapiens
  misc_RNA (1)...(19): siRNA sense strand
gaaauugacuagccagaag

SEQ ID NO: 1474405 - RNA, 19 nt, Homo sapiens
  misc_RNA (1)...(19): siRNA sense strand
gaacaacguaucagauuga

SEQ ID NO: 1474406 - RNA, 19 nt, Homo sapiens
  misc_RNA (1)...(19): siRNA sense strand
aaaggaagcagaaagaaua

SEQ ID NO: 1474407 - RNA, 19 nt, Homo sapiens
  misc_RNA (1)...(19): siRNA sense strand
caaacaccuucaaaugaua

SEQ ID NO: 1474408 - RNA, 19 nt, Homo sapiens
  misc_RNA (1)...(19): siRNA sense strand
gaggauccuuucaauauug

SEQ ID NO: 1474409 - RNA, 19 nt, Homo sapiens
  misc_RNA (1)...(19): siRNA sense strand
ccaaacaccuucaaaugau

SEQ ID NO: 1474410 - RNA, 19 nt, Homo sapiens
  misc_RNA (1)...(19): siRNA sense strand
gaaguggaccauagaguaa

SEQ ID NO: 1474411 - RNA, 19 nt, Homo sapiens
  misc_RNA (1)...(19): siRNA sense strand
caaguauguugcaagaaua

SEQ ID NO: 1474412 - RNA, 19 nt, Homo sapiens
  misc_RNA (1)...(19): siRNA sense strand
ggagacauguccucauuca

SEQ ID NO: 1474413 - RNA, 19 nt, Homo sapiens
  misc_RNA (1)...(19): siRNA sense strand
gaacuuugcacaagcguuu

SEQ ID NO: 1474414 - RNA, 19 nt, Homo sapiens
  misc_RNA (1)...(19): siRNA sense strand
gaggcaccauugucacuua

SEQ ID NO: 1474415 - RNA, 19 nt, Homo sapiens
  misc_RNA (1)...(19): siRNA sense strand
caaauaugaugucugaugu

SEQ ID NO: 1474416 - RNA, 19 nt, Homo sapiens
  misc_RNA (1)...(19): siRNA sense strand
gcggagacauguccucauu

SEQ ID NO: 1474417 - RNA, 19 nt, Homo sapiens
  misc_RNA (1)...(19): siRNA sense strand
gaacuuagagacuucauca

SEQ ID NO: 1474418 - RNA, 19 nt, Homo sapiens
  misc_RNA (1)...(19): siRNA sense strand
agacauguccucauucaua

SEQ ID NO: 1474419 - RNA, 19 nt, Homo sapiens
  misc_RNA (1)...(19): siRNA sense strand
caucaaaccauaccaauau

SEQ ID NO: 1474420 - RNA, 19 nt, Homo sapiens
  misc_RNA (1)...(19): siRNA sense strand
gcaccauugucacuuauug

SEQ ID NO: 1474421 - RNA, 19 nt, Homo sapiens
  misc_RNA (1)...(19): siRNA sense strand
ggucagauaaguaguaauu

SEQ ID NO: 1474422 - RNA, 19 nt, Homo sapiens
  misc_RNA (1)...(19): siRNA sense strand
caacguaucagauugagaa

SEQ ID NO: 1474423 - RNA, 19 nt, Homo sapiens
  misc_RNA (1)...(19): siRNA sense strand
gcaagaauacuccaaauac

SEQ ID NO: 1474424 - RNA, 19 nt, Homo sapiens
  misc_RNA (1)...(19): siRNA sense strand
ggaaauacaaguucuucaa

SEQ ID NO: 1474425 - RNA, 19 nt, Homo sapiens
  misc_RNA (1)...(19): siRNA sense strand
gaaaggaagcagaaagaau

SEQ ID NO: 1474426 - RNA, 19 nt, Homo sapiens
  misc_RNA (1)...(19): siRNA sense strand
ucaacaggcuuucagauuc

SEQ ID NO: 1474427 - RNA, 19 nt, Homo sapiens
  misc_RNA (1)...(19): siRNA sense strand
caaacaaggucagauaagu

SEQ ID NO: 1474428 - RNA, 19 nt, Homo sapiens
  misc_RNA (1)...(19): siRNA sense strand
guaagugagccauguagua

SEQ ID NO: 1474429 - RNA, 19 nt, Homo sapiens
  misc_RNA (1)...(19): siRNA sense strand
cagaagaacuuagagacuu

SEQ ID NO: 1474430 - RNA, 19 nt, Homo sapiens
  misc_RNA (1)...(19): siRNA sense strand
caaugaccuuuaucacuaa

SEQ ID NO: 1474431 - RNA, 19 nt, Homo sapiens
  misc_RNA (1)...(19): siRNA sense strand
agaauugguucaagaagaa

SEQ ID NO: 1474432 - RNA, 19 nt, Homo sapiens
  misc_RNA (1)...(19): siRNA sense strand
ggagaacacucagaauugg

SEQ ID NO: 1474433 - RNA, 19 nt, Homo sapiens
  misc_RNA (1)...(19): siRNA sense strand
cagaauugguucaagaaga

SEQ ID NO: 1474434 - RNA, 19 nt, Homo sapiens
  misc_RNA (1)...(19): siRNA sense strand
guggugaagucauaguuaa

SEQ ID NO: 1474435 - RNA, 19 nt, Homo sapiens
  misc_RNA (1)...(19): siRNA sense strand
gauuccaucucaggaguua

SEQ ID NO: 1474436 - RNA, 19 nt, Homo sapiens
  misc_RNA (1)...(19): siRNA sense strand
aaacaaggucagauaagua

SEQ ID NO: 1474437 - RNA, 19 nt, Homo sapiens
  misc_RNA (1)...(19): siRNA sense strand
gaucucagccaggucuuua

SEQ ID NO: 1474438 - RNA, 19 nt, Homo sapiens
  misc_RNA (1)...(19): siRNA sense strand
uaugaugucugauguaagu

SEQ ID NO: 1474439 - RNA, 19 nt, Homo sapiens
  misc_RNA (1)...(19): siRNA sense strand
gcguuugguucucaguuua

SEQ ID NO: 1474440 - RNA, 19 nt, Homo sapiens
  misc_RNA (1)...(19): siRNA sense strand
gcuguucgcuggagcugaa

SEQ ID NO: 1474441 - RNA, 19 nt, Homo sapiens
  misc_RNA (1)...(19): siRNA sense strand
aagaggauccuuucaauau

SEQ ID NO: 1474442 - RNA, 19 nt, Homo sapiens
  misc_RNA (1)...(19): siRNA sense strand
uagaugaacugcagaagag

SEQ ID NO: 1474443 - RNA, 19 nt, Homo sapiens
  misc_RNA (1)...(19): siRNA sense strand
cacauguggugaagucaua

SEQ ID NO: 1474444 - RNA, 19 nt, Homo sapiens
  misc_RNA (1)...(19): siRNA sense strand
gaggacacauaguggagaa

SEQ ID NO: 1474445 - RNA, 19 nt, Homo sapiens
  misc_RNA (1)...(19): siRNA sense strand
cguaucagauugagaacuu

SEQ ID NO: 1474446 - RNA, 19 nt, Homo sapiens
  misc_RNA (1)...(19): siRNA sense strand
gcucuaaaugcugaaauua

SEQ ID NO: 1474447 - RNA, 19 nt, Homo sapiens
  misc_RNA (1)...(19): siRNA sense strand
caaagcaggacacuaaugu

SEQ ID NO: 1474448 - RNA, 19 nt, Homo sapiens
  misc_RNA (1)...(19): siRNA sense strand
caaggucagauaaguagua

SEQ ID NO: 1474449 - RNA, 19 nt, Homo sapiens
  misc_RNA (1)...(19): siRNA sense strand
uaacuuugugucaccauua

SEQ ID NO: 1474450 - RNA, 19 nt, Homo sapiens
  misc_RNA (1)...(19): siRNA sense strand
gaaauacaaguucuucaag

SEQ ID NO: 1474451 - RNA, 19 nt, Homo sapiens
  misc_RNA (1)...(19): siRNA sense strand
gaaguaccauauggagaga

SEQ ID NO: 1474452 - RNA, 19 nt, Homo sapiens
  misc_RNA (1)...(19): siRNA sense strand
ggacugauagauuguugaa

SEQ ID NO: 1474453 - RNA, 19 nt, Homo sapiens
  misc_RNA (1)...(19): siRNA sense strand
ucagauuucucaggguaua

SEQ ID NO: 1474454 - RNA, 19 nt, Homo sapiens
  misc_RNA (1)...(19): siRNA sense strand
gaaauaccuacuacagaga

SEQ ID NO: 1474455 - RNA, 19 nt, Homo sapiens
  misc_RNA (1)...(19): siRNA sense strand
ucagccaggucuuuauuug

SEQ ID NO: 1474456 - RNA, 19 nt, Homo sapiens
  misc_RNA (1)...(19): siRNA sense strand
agaaauccuugucuggaaa

SEQ ID NO: 1474457 - RNA, 19 nt, Homo sapiens
  misc_RNA (1)...(19): siRNA sense strand
gaaccugggucaucaaacc

SEQ ID NO: 1474458 - RNA, 19 nt, Homo sapiens
  misc_RNA (1)...(19): siRNA sense strand
gcacugaggagccaaagca

SEQ ID NO: 1474459 - RNA, 19 nt, Homo sapiens
  misc_RNA (1)...(19): siRNA sense strand
agauagauccucagaaaga

SEQ ID NO: 1474460 - RNA, 19 nt, Homo sapiens
  misc_RNA (1)...(19): siRNA sense strand
caggagaacacucagaauu

SEQ ID NO: 1474461 - RNA, 19 nt, Homo sapiens
  misc_RNA (1)...(19): siRNA sense strand
agaggauccuuucaauauu

SEQ ID NO: 1474462 - RNA, 19 nt, Homo sapiens
  misc_RNA (1)...(19): siRNA sense strand
caaaucagaaagccagaaa

SEQ ID NO: 1474463 - RNA, 19 nt, Homo sapiens
  misc_RNA (1)...(19): siRNA sense strand
gaugagguuuuacaaagua

SEQ ID NO: 1474464 - RNA, 19 nt, Homo sapiens
  misc_RNA (1)...(19): siRNA sense strand
gaauagaugaacugcagaa

SEQ ID NO: 1474465 - RNA, 19 nt, Homo sapiens
  misc_RNA (1)...(19): siRNA sense strand
gcgcacauguggugaaguc

SEQ ID NO: 1474466 - RNA, 19 nt, Homo sapiens
  misc_RNA (1)...(19): siRNA sense strand
gagaagccauuuggaugug

SEQ ID NO: 1474467 - RNA, 19 nt, Homo sapiens
  misc_RNA (1)...(19): siRNA sense strand
ggccaaagccagaaucuca

SEQ ID NO: 1474468 - RNA, 19 nt, Homo sapiens
  misc_RNA (1)...(19): siRNA sense strand
caacagugccuuuucuaua

SEQ ID NO: 1474469 - RNA, 19 nt, Homo sapiens
  misc_RNA (1)...(19): siRNA sense strand
gaccauagaguaaggacuu

SEQ ID NO: 1474470 - RNA, 19 nt, Homo sapiens
  misc_RNA (1)...(19): siRNA sense strand
agaaguggaccauagagua

SEQ ID NO: 1474471 - RNA, 19 nt, Homo sapiens
  misc_RNA (1)...(19): siRNA sense strand
caucagcaguugacaccuu

SEQ ID NO: 1474472 - RNA, 19 nt, Homo sapiens
  misc_RNA (1)...(19): siRNA sense strand
ugauaaagcaaguauguug

SEQ ID NO: 1474473 - RNA, 19 nt, Homo sapiens
  misc_RNA (1)...(19): siRNA sense strand
ggaucaauacuccaacaaa

SEQ ID NO: 1474474 - RNA, 19 nt, Homo sapiens
  misc_RNA (1)...(19): siRNA sense strand
gaaucaaagccaagaggaa

SEQ ID NO: 1474475 - RNA, 19 nt, Homo sapiens
  misc_RNA (1)...(19): siRNA sense strand
aguaaggacuucaguguca

SEQ ID NO: 1474476 - RNA, 19 nt, Homo sapiens
  misc_RNA (1)...(19): siRNA sense strand
agaacaacguaucagauug

SEQ ID NO: 1474477 - RNA, 19 nt, Homo sapiens
  misc_RNA (1)...(19): siRNA sense strand
uagaacaacguaucagauu

SEQ ID NO: 1474478 - RNA, 19 nt, Homo sapiens
  misc_RNA (1)...(19): siRNA sense strand
agacauaguaggacagaaa

SEQ ID NO: 1474479 - RNA, 19 nt, Homo sapiens
  misc_RNA (1)...(19): siRNA sense strand
gagaaaagccauauaagug

SEQ ID NO: 1474480 - RNA, 19 nt, Homo sapiens
  misc_RNA (1)...(19): siRNA sense strand
cauaauuggcacuggaaua

SEQ ID NO: 1474481 - RNA, 19 nt, Homo sapiens
  misc_RNA (1)...(19): siRNA sense strand
guccucaucucagaaauug

SEQ ID NO: 1474482 - RNA, 19 nt, Homo sapiens
  misc_RNA (1)...(19): siRNA sense strand
cccaaacaccuucaaauga

SEQ ID NO: 1474483 - RNA, 19 nt, Homo sapiens
  misc_RNA (1)...(19): siRNA sense strand
ucaauacuccaacaaauca

SEQ ID NO: 1474484 - RNA, 19 nt, Homo sapiens
  misc_RNA (1)...(19): siRNA sense strand
gcacuggaauagaugaacu

SEQ ID NO: 1474485 - RNA, 19 nt, Homo sapiens
  misc_RNA (1)...(19): siRNA sense strand
gcaaacaaggucagauaag

SEQ ID NO: 1474486 - RNA, 19 nt, Homo sapiens
  misc_RNA (1)...(19): siRNA sense strand
aaacuuagagucuucaaca

SEQ ID NO: 1474487 - RNA, 19 nt, Homo sapiens
  misc_RNA (1)...(19): siRNA sense strand
gacauguccucauucauac

SEQ ID NO: 1474488 - RNA, 19 nt, Homo sapiens
  misc_RNA (1)...(19): siRNA sense strand
aauacaaguucuucaagga

SEQ ID NO: 1474489 - RNA, 19 nt, Homo sapiens
  misc_RNA (1)...(19): siRNA sense strand
agacacaagaggacacaua

SEQ ID NO: 1474490 - RNA, 19 nt, Homo sapiens
  misc_RNA (1)...(19): siRNA sense strand
ucauaucugugaucacugu

SEQ ID NO: 1474491 - RNA, 19 nt, Homo sapiens
  misc_RNA (1)...(19): siRNA sense strand
acaaauaugaugucugaug

SEQ ID NO: 1474492 - RNA, 19 nt, Homo sapiens
  misc_RNA (1)...(19): siRNA sense strand
uucaaggacugauagauug

SEQ ID NO: 1474493 - RNA, 19 nt, Homo sapiens
  misc_RNA (1)...(19): siRNA sense strand
uaacucuaauggagaagug

SEQ ID NO: 1474494 - RNA, 19 nt, Homo sapiens
  misc_RNA (1)...(19): siRNA sense strand
gaacucaaguacagcaauu

SEQ ID NO: 1474495 - RNA, 19 nt, Homo sapiens
  misc_RNA (1)...(19): siRNA sense strand
gauguuaucuacucaguga

SEQ ID NO: 1474496 - RNA, 19 nt, Homo sapiens
  misc_RNA (1)...(19): siRNA sense strand
caaagagugugacaauuuc

SEQ ID NO: 1474497 - RNA, 19 nt, Homo sapiens
  misc_RNA (1)...(19): siRNA sense strand
caacaaagagugugacaau

SEQ ID NO: 1474498 - RNA, 19 nt, Homo sapiens
  misc_RNA (1)...(19): siRNA sense strand
acaaagagugugacaauuu

SEQ ID NO: 1474499 - RNA, 19 nt, Homo sapiens
  misc_RNA (1)...(19): siRNA sense strand
gaaguucugcuaugagcua

SEQ ID NO: 1474500 - RNA, 19 nt, Homo sapiens
  misc_RNA (1)...(19): siRNA sense strand
gagacccaauucccaguuu

SEQ ID NO: 1474501 - RNA, 19 nt, Homo sapiens
  misc_RNA (1)...(19): siRNA sense strand
gaucuggcgugauguuauc

SEQ ID NO: 1474502 - RNA, 19 nt, Homo sapiens
  misc_RNA (1)...(19): siRNA sense strand
gaagucaucauccugaaca

SEQ ID NO: 1474503 - RNA, 19 nt, Homo sapiens
  misc_RNA (1)...(19): siRNA sense strand
ggagaaggaagucaucauc

SEQ ID NO: 1474504 - RNA, 19 nt, Homo sapiens
  misc_RNA (1)...(19): siRNA sense strand
cgugguaccuggugggauu

SEQ ID NO: 1474505 - RNA, 19 nt, Homo sapiens
  misc_RNA (1)...(19): siRNA sense strand
gcacggacuauguguugaa

SEQ ID NO: 1474506 - RNA, 19 nt, Homo sapiens
  misc_RNA (1)...(19): siRNA sense strand
ucaagcaggaacucaagua

SEQ ID NO: 1474507 - RNA, 19 nt, Homo sapiens
  misc_RNA (1)...(19): siRNA sense strand
cggacuauguguugaagga

SEQ ID NO: 1474508 - RNA, 19 nt, Homo sapiens
  misc_RNA (1)...(19): siRNA sense strand
ccaauucccaguuucugaa

SEQ ID NO: 1474509 - RNA, 19 nt, Homo sapiens
  misc_RNA (1)...(19): siRNA sense strand
ugccugaucuggcgugaug

SEQ ID NO: 1474510 - RNA, 19 nt, Homo sapiens
  misc_RNA (1)...(19): siRNA sense strand
aaggcaaagucgacccaua

SEQ ID NO: 1474511 - RNA, 19 nt, Homo sapiens
  misc_RNA (1)...(19): siRNA sense strand
cgacaucggccuccucaag

SEQ ID NO: 1474512 - RNA, 19 nt, Homo sapiens
  misc_RNA (1)...(19): siRNA sense strand
ccuccuugcugcccucuga

SEQ ID NO: 1474513 - RNA, 19 nt, Homo sapiens
  misc_RNA (1)...(19): siRNA sense strand
gacaauuucuaccacaacu

SEQ ID NO: 1474514 - RNA, 19 nt, Homo sapiens
  misc_RNA (1)...(19): siRNA sense strand
gugacaauuucuaccacaa

SEQ ID NO: 1474515 - RNA, 19 nt, Homo sapiens
  misc_RNA (1)...(19): siRNA sense strand
caauuucuaccacaacuuc

SEQ ID NO: 1474516 - RNA, 19 nt, Homo sapiens
  misc_RNA (1)...(19): siRNA sense strand
aacaaagagugugacaauu

SEQ ID NO: 1474517 - RNA, 19 nt, Homo sapiens
  misc_RNA (1)...(19): siRNA sense strand
ccauggagggcacguggua

SEQ ID NO: 1474518 - RNA, 19 nt, Homo sapiens
  misc_RNA (1)...(19): siRNA sense strand
ggcgugauguuaucuacuc

SEQ ID NO: 1474519 - RNA, 19 nt, Homo sapiens
  misc_RNA (1)...(19): siRNA sense strand
uaccacaacuucaccaaaa

SEQ ID NO: 1474520 - RNA, 19 nt, Homo sapiens
  misc_RNA (1)...(19): siRNA sense strand
ggagacccaauucccaguu

SEQ ID NO: 1474521 - RNA, 19 nt, Homo sapiens
  misc_RNA (1)...(19): siRNA sense strand
ggaccauucaggagaagga

SEQ ID NO: 1474522 - RNA, 19 nt, Homo sapiens
  misc_RNA (1)...(19): siRNA sense strand
cauucccgcugcacuguga

SEQ ID NO: 1474523 - RNA, 19 nt, Homo sapiens
  misc_RNA (1)...(19): siRNA sense strand
guccguggauugaccagau

SEQ ID NO: 1474524 - RNA, 19 nt, Homo sapiens
  misc_RNA (1)...(19): siRNA sense strand
gaucugggacugccucaac

SEQ ID NO: 1474525 - RNA, 19 nt, Homo sapiens
  misc_RNA (1)...(19): siRNA sense strand
cccaguuucugaaggcaaa

SEQ ID NO: 1474526 - RNA, 19 nt, Homo sapiens
  misc_RNA (1)...(19): siRNA sense strand
ggaacucaaguacagcaau

SEQ ID NO: 1474527 - RNA, 19 nt, Homo sapiens
  misc_RNA (1)...(19): siRNA sense strand
caauggcacacacaucugu

SEQ ID NO: 1474528 - RNA, 19 nt, Homo sapiens
  misc_RNA (1)...(19): siRNA sense strand
ucaucauccugaacaacaa

SEQ ID NO: 1474529 - RNA, 19 nt, Homo sapiens
  misc_RNA (1)...(19): siRNA sense strand
gugauguuaucuacucagu

SEQ ID NO: 1474530 - RNA, 19 nt, Homo sapiens
  misc_RNA (1)...(19): siRNA sense strand
ugaacaacaaagaguguga

SEQ ID NO: 1474531 - RNA, 19 nt, Homo sapiens
  misc_RNA (1)...(19): siRNA sense strand
ucaagucccagaugaugug

SEQ ID NO: 1474532 - RNA, 19 nt, Homo sapiens
  misc_RNA (1)...(19): siRNA sense strand
gacggcauguggccucagu

SEQ ID NO: 1474533 - RNA, 19 nt, Homo sapiens
  misc_RNA (1)...(19): siRNA sense strand
caaaauccccacucugguu

SEQ ID NO: 1474534 - RNA, 19 nt, Homo sapiens
  misc_RNA (1)...(19): siRNA sense strand
uggcacggacuauguguug

SEQ ID NO: 1474535 - RNA, 19 nt, Homo sapiens
  misc_RNA (1)...(19): siRNA sense strand
uugcugaggucugcagguu

SEQ ID NO: 1474536 - RNA, 19 nt, Homo sapiens
  misc_RNA (1)...(19): siRNA sense strand
gcucaagcaggaacucaag

SEQ ID NO: 1474537 - RNA, 19 nt, Homo sapiens
  misc_RNA (1)...(19): siRNA sense strand
caucauccugaacaacaaa

SEQ ID NO: 1474538 - RNA, 19 nt, Homo sapiens
  misc_RNA (1)...(19): siRNA sense strand
ucaaguacagcaauuacgu

SEQ ID NO: 1474539 - RNA, 19 nt, Homo sapiens
  misc_RNA (1)...(19): siRNA sense strand
ccucaguuccggaccauuc

SEQ ID NO: 1474540 - RNA, 19 nt, Homo sapiens
  misc_RNA (1)...(19): siRNA sense strand
cuaccacaacuucaccaaa

SEQ ID NO: 1474541 - RNA, 19 nt, Homo sapiens
  misc_RNA (1)...(19): siRNA sense strand
caaaggaacuggauaauuu

SEQ ID NO: 1474542 - RNA, 19 nt, Homo sapiens
  misc_RNA (1)...(19): siRNA sense strand
ggaacaagcuaacuuacaa

SEQ ID NO: 1474543 - RNA, 19 nt, Homo sapiens
  misc_RNA (1)...(19): siRNA sense strand
gaaacaaggaugaaagaua

SEQ ID NO: 1474544 - RNA, 19 nt, Homo sapiens
  misc_RNA (1)...(19): siRNA sense strand
gaacuuugaugaggcuuua

SEQ ID NO: 1474545 - RNA, 19 nt, Homo sapiens
  misc_RNA (1)...(19): siRNA sense strand
aaagacagcucacagcaua

SEQ ID NO: 1474546 - RNA, 19 nt, Homo sapiens
  misc_RNA (1)...(19): siRNA sense strand
agacauaaguaccacauua

SEQ ID NO: 1474547 - RNA, 19 nt, Homo sapiens
  misc_RNA (1)...(19): siRNA sense strand
gauagaagcuuauagaaac

SEQ ID NO: 1474548 - RNA, 19 nt, Homo sapiens
  misc_RNA (1)...(19): siRNA sense strand
caucagaucuuccauugaa

SEQ ID NO: 1474549 - RNA, 19 nt, Homo sapiens
  misc_RNA (1)...(19): siRNA sense strand
ugaguuggcugaauaguaa

SEQ ID NO: 1474550 - RNA, 19 nt, Homo sapiens
  misc_RNA (1)...(19): siRNA sense strand
ggaccaaccuaaacaaguu

SEQ ID NO: 1474551 - RNA, 19 nt, Homo sapiens
  misc_RNA (1)...(19): siRNA sense strand
gaaggaaccauuugaacua

SEQ ID NO: 1474552 - RNA, 19 nt, Homo sapiens
  misc_RNA (1)...(19): siRNA sense strand
gcaaagagccagauaguca

SEQ ID NO: 1474553 - RNA, 19 nt, Homo sapiens
  misc_RNA (1)...(19): siRNA sense strand
ggaucaggcuucccuauga

SEQ ID NO: 1474554 - RNA, 19 nt, Homo sapiens
  misc_RNA (1)...(19): siRNA sense strand
gaucaugcaagauaaguua

SEQ ID NO: 1474555 - RNA, 19 nt, Homo sapiens
  misc_RNA (1)...(19): siRNA sense strand
ggugauaguuccaaaguga

SEQ ID NO: 1474556 - RNA, 19 nt, Homo sapiens
  misc_RNA (1)...(19): siRNA sense strand
gaucuuccauugaacauug

SEQ ID NO: 1474557 - RNA, 19 nt, Homo sapiens
  misc_RNA (1)...(19): siRNA sense strand
ggaagaugaucaugcaaga

SEQ ID NO: 1474558 - RNA, 19 nt, Homo sapiens
  misc_RNA (1)...(19): siRNA sense strand
uaacauccauggaaucuuc

SEQ ID NO: 1474559 - RNA, 19 nt, Homo sapiens
  misc_RNA (1)...(19): siRNA sense strand
ugaaagugauagaagcuua

SEQ ID NO: 1474560 - RNA, 19 nt, Homo sapiens
  misc_RNA (1)...(19): siRNA sense strand
gcagguugaucaagaagaa

SEQ ID NO: 1474561 - RNA, 19 nt, Homo sapiens
  misc_RNA (1)...(19): siRNA sense strand
gaguggaacugaaacuaaa

SEQ ID NO: 1474562 - RNA, 19 nt, Homo sapiens
  misc_RNA (1)...(19): siRNA sense strand
ugaaugaccuugauguuuc

SEQ ID NO: 1474563 - RNA, 19 nt, Homo sapiens
  misc_RNA (1)...(19): siRNA sense strand
ggacagaguggaacugaaa

SEQ ID NO: 1474564 - RNA, 19 nt, Homo sapiens
  misc_RNA (1)...(19): siRNA sense strand
gcaaaugcaucagaucuuc

SEQ ID NO: 1474565 - RNA, 19 nt, Homo sapiens
  misc_RNA (1)...(19): siRNA sense strand
ggauaagcuucaagaacua

SEQ ID NO: 1474566 - RNA, 19 nt, Homo sapiens
  misc_RNA (1)...(19): siRNA sense strand
gcacuggcguauggaauuu

SEQ ID NO: 1474567 - RNA, 19 nt, Homo sapiens
  misc_RNA (1)...(19): siRNA sense strand
gaaugccguugaagaauau

SEQ ID NO: 1474568 - RNA, 19 nt, Homo sapiens
  misc_RNA (1)...(19): siRNA sense strand
agaaugccguugaagaaua

SEQ ID NO: 1474569 - RNA, 19 nt, Homo sapiens
  misc_RNA (1)...(19): siRNA sense strand
gaaaugaugcuaagaaugc

SEQ ID NO: 1474570 - RNA, 19 nt, Homo sapiens
  misc_RNA (1)...(19): siRNA sense strand
ugaugaagcuguugcaaga

SEQ ID NO: 1474571 - RNA, 19 nt, Homo sapiens
  misc_RNA (1)...(19): siRNA sense strand
gauccaacuugucaugaaa

SEQ ID NO: 1474572 - RNA, 19 nt, Homo sapiens
  misc_RNA (1)...(19): siRNA sense strand
caaacaagaccgauuaaau

SEQ ID NO: 1474573 - RNA, 19 nt, Homo sapiens
  misc_RNA (1)...(19): siRNA sense strand
ggaaccauuugaacuagaa

SEQ ID NO: 1474574 - RNA, 19 nt, Homo sapiens
  misc_RNA (1)...(19): siRNA sense strand
gaugagaaaccaagaaaug

SEQ ID NO: 1474575 - RNA, 19 nt, Homo sapiens
  misc_RNA (1)...(19): siRNA sense strand
gaagaggaaauugaucaua

SEQ ID NO: 1474576 - RNA, 19 nt, Homo sapiens
  misc_RNA (1)...(19): siRNA sense strand
ggaacuggauaauuucugu

SEQ ID NO: 1474577 - RNA, 19 nt, Homo sapiens
  misc_RNA (1)...(19): siRNA sense strand
agacaaacaagaccgauua

SEQ ID NO: 1474578 - RNA, 19 nt, Homo sapiens
  misc_RNA (1)...(19): siRNA sense strand
ggagacagaaacuucauuu

SEQ ID NO: 1474579 - RNA, 19 nt, Homo sapiens
  misc_RNA (1)...(19): siRNA sense strand
gaucaggcuucccuaugaa

SEQ ID NO: 1474580 - RNA, 19 nt, Homo sapiens
  misc_RNA (1)...(19): siRNA sense strand
caagauaaguuagagaaag

SEQ ID NO: 1474581 - RNA, 19 nt, Homo sapiens
  misc_RNA (1)...(19): siRNA sense strand
ccagaagacuugaguaaac

SEQ ID NO: 1474582 - RNA, 19 nt, Homo sapiens
  misc_RNA (1)...(19): siRNA sense strand
uaagaaugccguugaagaa

SEQ ID NO: 1474583 - RNA, 19 nt, Homo sapiens
  misc_RNA (1)...(19): siRNA sense strand
gugaagacauuaguaguau

SEQ ID NO: 1474584 - RNA, 19 nt, Homo sapiens
  misc_RNA (1)...(19): siRNA sense strand
gcacagaacaaacuaaguc

SEQ ID NO: 1474585 - RNA, 19 nt, Homo sapiens
  misc_RNA (1)...(19): siRNA sense strand
gaaaccaagaaauguagua

SEQ ID NO: 1474586 - RNA, 19 nt, Homo sapiens
  misc_RNA (1)...(19): siRNA sense strand
caaacuaagucucacucaa

SEQ ID NO: 1474587 - RNA, 19 nt, Homo sapiens
  misc_RNA (1)...(19): siRNA sense strand
guacuuagaggaagagaga

SEQ ID NO: 1474588 - RNA, 19 nt, Homo sapiens
  misc_RNA (1)...(19): siRNA sense strand
guuuaagguugaugaauga

SEQ ID NO: 1474589 - RNA, 19 nt, Homo sapiens
  misc_RNA (1)...(19): siRNA sense strand
gcucacagcauacuaaauc

SEQ ID NO: 1474590 - RNA, 19 nt, Homo sapiens
  misc_RNA (1)...(19): siRNA sense strand
agaaguuccugaagacaaa

SEQ ID NO: 1474591 - RNA, 19 nt, Homo sapiens
  misc_RNA (1)...(19): siRNA sense strand
aagcagaaguuccugaaga

SEQ ID NO: 1474592 - RNA, 19 nt, Homo sapiens
  misc_RNA (1)...(19): siRNA sense strand
gccaagaucuucucaacag

SEQ ID NO: 1474593 - RNA, 19 nt, Homo sapiens
  misc_RNA (1)...(19): siRNA sense strand
gagacagaaacuucauuua

SEQ ID NO: 1474594 - RNA, 19 nt, Homo sapiens
  misc_RNA (1)...(19): siRNA sense strand
gcgcaucaguaauugagaa

SEQ ID NO: 1474595 - RNA, 19 nt, Homo sapiens
  misc_RNA (1)...(19): siRNA sense strand
guuccaaagugaagguuaa

SEQ ID NO: 1474596 - RNA, 19 nt, Homo sapiens
  misc_RNA (1)...(19): siRNA sense strand
gacauaaguaccacauuaa

SEQ ID NO: 1474597 - RNA, 19 nt, Homo sapiens
  misc_RNA (1)...(19): siRNA sense strand
gaaaaugccuaauggaagu

SEQ ID NO: 1474598 - RNA, 19 nt, Homo sapiens
  misc_RNA (1)...(19): siRNA sense strand
gaagacauuaguaguauag

SEQ ID NO: 1474599 - RNA, 19 nt, Homo sapiens
  misc_RNA (1)...(19): siRNA sense strand
cuacuaccuuugauccaua

SEQ ID NO: 1474600 - RNA, 19 nt, Homo sapiens
  misc_RNA (1)...(19): siRNA sense strand
gcugggcacugucuaugaa

SEQ ID NO: 1474601 - RNA, 19 nt, Homo sapiens
  misc_RNA (1)...(19): siRNA sense strand
agaaagaaaugaugcuaag

SEQ ID NO: 1474602 - RNA, 19 nt, Homo sapiens
  misc_RNA (1)...(19): siRNA sense strand
ccacaagaaggaaccauuu

SEQ ID NO: 1474603 - RNA, 19 nt, Homo sapiens
  misc_RNA (1)...(19): siRNA sense strand
uaauggaagugcaggaguu

SEQ ID NO: 1474604 - RNA, 19 nt, Homo sapiens
  misc_RNA (1)...(19): siRNA sense strand
aagaugaucaugcaagaua

SEQ ID NO: 1474605 - RNA, 19 nt, Homo sapiens
  misc_RNA (1)...(19): siRNA sense strand
caaagugaagguuaaaguu

SEQ ID NO: 1474606 - RNA, 19 nt, Homo sapiens
  misc_RNA (1)...(19): siRNA sense strand
gaagugccuuauccugaug

SEQ ID NO: 1474607 - RNA, 19 nt, Homo sapiens
  misc_RNA (1)...(19): siRNA sense strand
ugagaaaccaagaaaugua

SEQ ID NO: 1474608 - RNA, 19 nt, Homo sapiens
  misc_RNA (1)...(19): siRNA sense strand
caagaaggaaccauuugaa

SEQ ID NO: 1474609 - RNA, 19 nt, Homo sapiens
  misc_RNA (1)...(19): siRNA sense strand
gaacucgagccauuggaaa

SEQ ID NO: 1474610 - RNA, 19 nt, Homo sapiens
  misc_RNA (1)...(19): siRNA sense strand
gauuucaauuccuagcuuu

SEQ ID NO: 1474611 - RNA, 19 nt, Homo sapiens
  misc_RNA (1)...(19): siRNA sense strand
gagaaagaaagaaaugaug

SEQ ID NO: 1474612 - RNA, 19 nt, Homo sapiens
  misc_RNA (1)...(19): siRNA sense strand
caacgugaagacauuagua

SEQ ID NO: 1474613 - RNA, 19 nt, Homo sapiens
  misc_RNA (1)...(19): siRNA sense strand
guugcaggcuuaaauuguu

SEQ ID NO: 1474614 - RNA, 19 nt, Homo sapiens
  misc_RNA (1)...(19): siRNA sense strand
aaaugcagguugaucaaga

SEQ ID NO: 1474615 - RNA, 19 nt, Homo sapiens
  misc_RNA (1)...(19): siRNA sense strand
gaauugggagcuucacuau

SEQ ID NO: 1474616 - RNA, 19 nt, Homo sapiens
  misc_RNA (1)...(19): siRNA sense strand
gugaugaguucaagaccaa

SEQ ID NO: 1474617 - RNA, 19 nt, Homo sapiens
  misc_RNA (1)...(19): siRNA sense strand
cuuaaagucuuggcuacua

SEQ ID NO: 1474618 - RNA, 19 nt, Homo sapiens
  misc_RNA (1)...(19): siRNA sense strand
gaaauaguagcaaagucaa

SEQ ID NO: 1474619 - RNA, 19 nt, Homo sapiens
  misc_RNA (1)...(19): siRNA sense strand
uggauaagcuucaagaacu

SEQ ID NO: 1474620 - RNA, 19 nt, Homo sapiens
  misc_RNA (1)...(19): siRNA sense strand
gcaagauaaguuagagaaa

SEQ ID NO: 1474621 - RNA, 19 nt, Homo sapiens
  misc_RNA (1)...(19): siRNA sense strand
guagacaacuaggccaaga

SEQ ID NO: 1474622 - RNA, 19 nt, Homo sapiens
  misc_RNA (1)...(19): siRNA sense strand
cauuugaacuagaagcauu

SEQ ID NO: 1474623 - RNA, 19 nt, Homo sapiens
  misc_RNA (1)...(19): siRNA sense strand
cuacuucugugaugaguuc

SEQ ID NO: 1474624 - RNA, 19 nt, Homo sapiens
  misc_RNA (1)...(19): siRNA sense strand
gaguuaaggugcgguacuu

SEQ ID NO: 1474625 - RNA, 19 nt, Homo sapiens
  misc_RNA (1)...(19): siRNA sense strand
gaaagugauagaagcuuau

SEQ ID NO: 1474626 - RNA, 19 nt, Homo sapiens
  misc_RNA (1)...(19): siRNA sense strand
caagaagaagggcaucaaa

SEQ ID NO: 1474627 - RNA, 19 nt, Homo sapiens
  misc_RNA (1)...(19): siRNA sense strand
uaaaguucguguuaacauc

SEQ ID NO: 1474628 - RNA, 19 nt, Homo sapiens
  misc_RNA (1)...(19): siRNA sense strand
gcagugaaagaacaaauca

SEQ ID NO: 1474629 - RNA, 19 nt, Homo sapiens
  misc_RNA (1)...(19): siRNA sense strand
ccuaucaggucuugguuug

SEQ ID NO: 1474630 - RNA, 19 nt, Homo sapiens
  misc_RNA (1)...(19): siRNA sense strand
gaagagagaccuuuugcaa

SEQ ID NO: 1474631 - RNA, 19 nt, Homo sapiens
  misc_RNA (1)...(19): siRNA sense strand
uaagaugaaugcacagaac

SEQ ID NO: 1474632 - RNA, 19 nt, Homo sapiens
  misc_RNA (1)...(19): siRNA sense strand
caaagucagcugucucaga

SEQ ID NO: 1474633 - RNA, 19 nt, Homo sapiens
  misc_RNA (1)...(19): siRNA sense strand
ugaagugccuuauccugau

SEQ ID NO: 1474634 - RNA, 19 nt, Homo sapiens
  misc_RNA (1)...(19): siRNA sense strand
gcaagaggaugugcguuac

SEQ ID NO: 1474635 - RNA, 19 nt, Homo sapiens
  misc_RNA (1)...(19): siRNA sense strand
agagagaccuuuugcaauu

SEQ ID NO: 1474636 - RNA, 19 nt, Homo sapiens
  misc_RNA (1)...(19): siRNA sense strand
uagccuauguagacaacua

SEQ ID NO: 1474637 - RNA, 19 nt, Homo sapiens
  misc_RNA (1)...(19): siRNA sense strand
gaacacaauggcccaaugg

SEQ ID NO: 1474638 - RNA, 19 nt, Homo sapiens
  misc_RNA (1)...(19): siRNA sense strand
gaacuggauaauuucugua

SEQ ID NO: 1474639 - RNA, 19 nt, Homo sapiens
  misc_RNA (1)...(19): siRNA sense strand
ucaaaggaacuggauaauu

SEQ ID NO: 1474640 - RNA, 19 nt, Homo sapiens
  misc_RNA (1)...(19): siRNA sense strand
gaaagaaaugaugcuaaga

SEQ ID NO: 1474641 - RNA, 19 nt, Homo sapiens
  misc_RNA (1)...(19): siRNA sense strand
ucauacagguugccacaaa

SEQ ID NO: 1474642 - RNA, 19 nt, Homo sapiens
  misc_RNA (1)...(19): siRNA sense strand
gaucuggagucuggucuag

SEQ ID NO: 1474643 - RNA, 19 nt, Homo sapiens
  misc_RNA (1)...(19): siRNA sense strand
uaggaacgaucuggagucu

SEQ ID NO: 1474644 - RNA, 19 nt, Homo sapiens
  misc_RNA (1)...(19): siRNA sense strand
gaacaacugugcauucuua

SEQ ID NO: 1474645 - RNA, 19 nt, Homo sapiens
  misc_RNA (1)...(19): siRNA sense strand
gaacagauucuucgaguua

SEQ ID NO: 1474646 - RNA, 19 nt, Homo sapiens
  misc_RNA (1)...(19): siRNA sense strand
gaaagcaaguugaaguaga

SEQ ID NO: 1474647 - RNA, 19 nt, Homo sapiens
  misc_RNA (1)...(19): siRNA sense strand
uaaagacacugaugauguu

SEQ ID NO: 1474648 - RNA, 19 nt, Homo sapiens
  misc_RNA (1)...(19): siRNA sense strand
ggacaaggauuugcauuag

SEQ ID NO: 1474649 - RNA, 19 nt, Homo sapiens
  misc_RNA (1)...(19): siRNA sense strand
caaugauucuuguugguaa

SEQ ID NO: 1474650 - RNA, 19 nt, Homo sapiens
  misc_RNA (1)...(19): siRNA sense strand
gaccuagugcggcaaauua

SEQ ID NO: 1474651 - RNA, 19 nt, Homo sapiens
  misc_RNA (1)...(19): siRNA sense strand
gcaggaacggagcaauuua

SEQ ID NO: 1474652 - RNA, 19 nt, Homo sapiens
  misc_RNA (1)...(19): siRNA sense strand
ggaacaaggucaaaaucua

SEQ ID NO: 1474653 - RNA, 19 nt, Homo sapiens
  misc_RNA (1)...(19): siRNA sense strand
acaaggauuugcauuaguu

SEQ ID NO: 1474654 - RNA, 19 nt, Homo sapiens
  misc_RNA (1)...(19): siRNA sense strand
caucaugucagcugcuuua

SEQ ID NO: 1474655 - RNA, 19 nt, Homo sapiens
  misc_RNA (1)...(19): siRNA sense strand
gcaagacaauggaacaacu

SEQ ID NO: 1474656 - RNA, 19 nt, Homo sapiens
  misc_RNA (1)...(19): siRNA sense strand
ugaaguagaugcacaacag

SEQ ID NO: 1474657 - RNA, 19 nt, Homo sapiens
  misc_RNA (1)...(19): siRNA sense strand
guccacauuuaacgauuua

SEQ ID NO: 1474658 - RNA, 19 nt, Homo sapiens
  misc_RNA (1)...(19): siRNA sense strand
uuacagcaaugagggauuu

SEQ ID NO: 1474659 - RNA, 19 nt, Homo sapiens
  misc_RNA (1)...(19): siRNA sense strand
cagcacaguccacauuuaa

SEQ ID NO: 1474660 - RNA, 19 nt, Homo sapiens
  misc_RNA (1)...(19): siRNA sense strand
acagcacaguccacauuua

SEQ ID NO: 1474661 - RNA, 19 nt, Homo sapiens
  misc_RNA (1)...(19): siRNA sense strand
aaugagggauuuauacaug

SEQ ID NO: 1474662 - RNA, 19 nt, Homo sapiens
  misc_RNA (1)...(19): siRNA sense strand
aaaauacgauccuacgaua

SEQ ID NO: 1474663 - RNA, 19 nt, Homo sapiens
  misc_RNA (1)...(19): siRNA sense strand
gcaaugagggauuuauaca

SEQ ID NO: 1474664 - RNA, 19 nt, Homo sapiens
  misc_RNA (1)...(19): siRNA sense strand
aaagcaaguugaaguagau

SEQ ID NO: 1474665 - RNA, 19 nt, Homo sapiens
  misc_RNA (1)...(19): siRNA sense strand
ggagcaauuuacagcaaug

SEQ ID NO: 1474666 - RNA, 19 nt, Homo sapiens
  misc_RNA (1)...(19): siRNA sense strand
cagcaaugagggauuuaua

SEQ ID NO: 1474667 - RNA, 19 nt, Homo sapiens
  misc_RNA (1)...(19): siRNA sense strand
ggaagaugaaagaguugua

SEQ ID NO: 1474668 - RNA, 19 nt, Homo sapiens
  misc_RNA (1)...(19): siRNA sense strand
ucacagcacaguccacauu

SEQ ID NO: 1474669 - RNA, 19 nt, Homo sapiens
  misc_RNA (1)...(19): siRNA sense strand
uagaaagcaaguugaagua

SEQ ID NO: 1474670 - RNA, 19 nt, Homo sapiens
  misc_RNA (1)...(19): siRNA sense strand
gacaaggauuugcauuagu

SEQ ID NO: 1474671 - RNA, 19 nt, Homo sapiens
  misc_RNA (1)...(19): siRNA sense strand
caacaguguaugcuugaaa

SEQ ID NO: 1474672 - RNA, 19 nt, Homo sapiens
  misc_RNA (1)...(19): siRNA sense strand
cuuggaagaugaaagaguu

SEQ ID NO: 1474673 - RNA, 19 nt, Homo sapiens
  misc_RNA (1)...(19): siRNA sense strand
uuaaagacacugaugaugu

SEQ ID NO: 1474674 - RNA, 19 nt, Homo sapiens
  misc_RNA (1)...(19): siRNA sense strand
ugacuuggaagaugaaaga

SEQ ID NO: 1474675 - RNA, 19 nt, Homo sapiens
  misc_RNA (1)...(19): siRNA sense strand
ugcuuugacuguacaauuu

SEQ ID NO: 1474676 - RNA, 19 nt, Homo sapiens
  misc_RNA (1)...(19): siRNA sense strand
gcauuaguuuauuccauca

SEQ ID NO: 1474677 - RNA, 19 nt, Homo sapiens
  misc_RNA (1)...(19): siRNA sense strand
uggacaaggauuugcauua

SEQ ID NO: 1474678 - RNA, 19 nt, Homo sapiens
  misc_RNA (1)...(19): siRNA sense strand
ugagggauuuauacaugaa

SEQ ID NO: 1474679 - RNA, 19 nt, Homo sapiens
  misc_RNA (1)...(19): siRNA sense strand
gaagaugaaagaguuguag

SEQ ID NO: 1474680 - RNA, 19 nt, Homo sapiens
  misc_RNA (1)...(19): siRNA sense strand
uacaagaccugagagaaca

SEQ ID NO: 1474681 - RNA, 19 nt, Homo sapiens
  misc_RNA (1)...(19): siRNA sense strand
gaugauguuccaaugauuc

SEQ ID NO: 1474682 - RNA, 19 nt, Homo sapiens
  misc_RNA (1)...(19): siRNA sense strand
gaguuaaagacacugauga

SEQ ID NO: 1474683 - RNA, 19 nt, Homo sapiens
  misc_RNA (1)...(19): siRNA sense strand
guagaugcacaacagugua

SEQ ID NO: 1474684 - RNA, 19 nt, Homo sapiens
  misc_RNA (1)...(19): siRNA sense strand
gauguuccaaugauucuug

SEQ ID NO: 1474685 - RNA, 19 nt, Homo sapiens
  misc_RNA (1)...(19): siRNA sense strand
acagauucuucgaguuaaa

SEQ ID NO: 1474686 - RNA, 19 nt, Homo sapiens
  misc_RNA (1)...(19): siRNA sense strand
guguaugcuugaaaucuug

SEQ ID NO: 1474687 - RNA, 19 nt, Homo sapiens
  misc_RNA (1)...(19): siRNA sense strand
ugaugauguuccaaugauu

SEQ ID NO: 1474688 - RNA, 19 nt, Homo sapiens
  misc_RNA (1)...(19): siRNA sense strand
cuugaaaucuuggauacug

SEQ ID NO: 1474689 - RNA, 19 nt, Homo sapiens
  misc_RNA (1)...(19): siRNA sense strand
gaccugagagaacagauuc

SEQ ID NO: 1474690 - RNA, 19 nt, Homo sapiens
  misc_RNA (1)...(19): siRNA sense strand
aguauaagcuagucguucu

SEQ ID NO: 1474691 - RNA, 19 nt, Homo sapiens
  misc_RNA (1)...(19): siRNA sense strand
cugaugauguuccaaugau

SEQ ID NO: 1474692 - RNA, 19 nt, Homo sapiens
  misc_RNA (1)...(19): siRNA sense strand
aauacgauccuacgauaga

SEQ ID NO: 1474693 - RNA, 19 nt, Homo sapiens
  misc_RNA (1)...(19): siRNA sense strand
gaacaaggucaaaaucuag

SEQ ID NO: 1474694 - RNA, 19 nt, Homo sapiens
  misc_RNA (1)...(19): siRNA sense strand
gaaggaacaaggucaaaau

SEQ ID NO: 1474695 - RNA, 19 nt, Homo sapiens
  misc_RNA (1)...(19): siRNA sense strand
gcacaguccacauuuaacg

SEQ ID NO: 1474696 - RNA, 19 nt, Homo sapiens
  misc_RNA (1)...(19): siRNA sense strand
gauccuacgauagaagauu

SEQ ID NO: 1474697 - RNA, 19 nt, Homo sapiens
  misc_RNA (1)...(19): siRNA sense strand
caaggauuugcauuaguuu

SEQ ID NO: 1474698 - RNA, 19 nt, Homo sapiens
  misc_RNA (1)...(19): siRNA sense strand
ggaacaacugugcauucuu

SEQ ID NO: 1474699 - RNA, 19 nt, Homo sapiens
  misc_RNA (1)...(19): siRNA sense strand
agugugacuuggaagauga

SEQ ID NO: 1474700 - RNA, 19 nt, Homo sapiens
  misc_RNA (1)...(19): siRNA sense strand
gcucaggaggcguuggaaa

SEQ ID NO: 1474701 - RNA, 19 nt, Homo sapiens
  misc_RNA (1)...(19): siRNA sense strand
aacaguguaugcuugaaau

SEQ ID NO: 1474702 - RNA, 19 nt, Homo sapiens
  misc_RNA (1)...(19): siRNA sense strand
gaaguagaugcacaacagu

SEQ ID NO: 1474703 - RNA, 19 nt, Homo sapiens
  misc_RNA (1)...(19): siRNA sense strand
gcaaguugaaguagaugca

SEQ ID NO: 1474704 - RNA, 19 nt, Homo sapiens
  misc_RNA (1)...(19): siRNA sense strand
aguccacauuuaacgauuu

SEQ ID NO: 1474705 - RNA, 19 nt, Homo sapiens
  misc_RNA (1)...(19): siRNA sense strand
guuccaaugauucuuguug

SEQ ID NO: 1474706 - RNA, 19 nt, Homo sapiens
  misc_RNA (1)...(19): siRNA sense strand
gagcaauuuacagcaauga

SEQ ID NO: 1474707 - RNA, 19 nt, Homo sapiens
  misc_RNA (1)...(19): siRNA sense strand
ugcggcaaauuaacagaaa

SEQ ID NO: 1474708 - RNA, 19 nt, Homo sapiens
  misc_RNA (1)...(19): siRNA sense strand
uggaacaacugugcauucu

SEQ ID NO: 1474709 - RNA, 19 nt, Homo sapiens
  misc_RNA (1)...(19): siRNA sense strand
aguguaugcuugaaaucuu

SEQ ID NO: 1474710 - RNA, 19 nt, Homo sapiens
  misc_RNA (1)...(19): siRNA sense strand
caaugagggauuuauacau

SEQ ID NO: 1474711 - RNA, 19 nt, Homo sapiens
  misc_RNA (1)...(19): siRNA sense strand
gaucuuuuaugaccuagug

SEQ ID NO: 1474712 - RNA, 19 nt, Homo sapiens
  misc_RNA (1)...(19): siRNA sense strand
gggaaggaacaaggucaaa

SEQ ID NO: 1474713 - RNA, 19 nt, Homo sapiens
  misc_RNA (1)...(19): siRNA sense strand
guuaaagacacugaugaug

SEQ ID NO: 1474714 - RNA, 19 nt, Homo sapiens
  misc_RNA (1)...(19): siRNA sense strand
caguccacauuuaacgauu

SEQ ID NO: 1474715 - RNA, 19 nt, Homo sapiens
  misc_RNA (1)...(19): siRNA sense strand
caagacaauggaacaacug

SEQ ID NO: 1474716 - RNA, 19 nt, Homo sapiens
  misc_RNA (1)...(19): siRNA sense strand
cgaguuaaagacacugaug

SEQ ID NO: 1474717 - RNA, 19 nt, Homo sapiens
  misc_RNA (1)...(19): siRNA sense strand
aacagauucuucgaguuaa

SEQ ID NO: 1474718 - RNA, 19 nt, Homo sapiens
  misc_RNA (1)...(19): siRNA sense strand
uuacaagaccugagagaac

SEQ ID NO: 1474719 - RNA, 19 nt, Homo sapiens
  misc_RNA (1)...(19): siRNA sense strand
cgauuuacaagaccugaga

SEQ ID NO: 1474720 - RNA, 19 nt, Homo sapiens
  misc_RNA (1)...(19): siRNA sense strand
ccacauuuaacgauuuaca

SEQ ID NO: 1474721 - RNA, 19 nt, Homo sapiens
  misc_RNA (1)...(19): siRNA sense strand
auagaaagcaaguugaagu

SEQ ID NO: 1474722 - RNA, 19 nt, Homo sapiens
  misc_RNA (1)...(19): siRNA sense strand
ugagaucuuuuaugaccua

SEQ ID NO: 1474723 - RNA, 19 nt, Homo sapiens
  misc_RNA (1)...(19): siRNA sense strand
augagggauuuauacauga

SEQ ID NO: 1474724 - RNA, 19 nt, Homo sapiens
  misc_RNA (1)...(19): siRNA sense strand
acggagcaauuuacagcaa

SEQ ID NO: 1474725 - RNA, 19 nt, Homo sapiens
  misc_RNA (1)...(19): siRNA sense strand
cggagcaauuuacagcaau

SEQ ID NO: 1474726 - RNA, 19 nt, Homo sapiens
  misc_RNA (1)...(19): siRNA sense strand
cacagcacaguccacauuu

SEQ ID NO: 1474727 - RNA, 19 nt, Homo sapiens
  misc_RNA (1)...(19): siRNA sense strand
acacugaugauguuccaau

SEQ ID NO: 1474728 - RNA, 19 nt, Homo sapiens
  misc_RNA (1)...(19): siRNA sense strand
gcuuugacuguacaauuug

SEQ ID NO: 1474729 - RNA, 19 nt, Homo sapiens
  misc_RNA (1)...(19): siRNA sense strand
cacaacaguguaugcuuga

SEQ ID NO: 1474730 - RNA, 19 nt, Homo sapiens
  misc_RNA (1)...(19): siRNA sense strand
uagaugcacaacaguguau

SEQ ID NO: 1474731 - RNA, 19 nt, Homo sapiens
  misc_RNA (1)...(19): siRNA sense strand
auacgauccuacgauagaa

SEQ ID NO: 1474732 - RNA, 19 nt, Homo sapiens
  misc_RNA (1)...(19): siRNA sense strand
ugaccuagugcggcaaauu

SEQ ID NO: 1474733 - RNA, 19 nt, Homo sapiens
  misc_RNA (1)...(19): siRNA sense strand
gagggauuuauacaugaaa

SEQ ID NO: 1474734 - RNA, 19 nt, Homo sapiens
  misc_RNA (1)...(19): siRNA sense strand
ugcaggaacggagcaauuu

SEQ ID NO: 1474735 - RNA, 19 nt, Homo sapiens
  misc_RNA (1)...(19): siRNA sense strand
caaaaucuagcaagacaau

SEQ ID NO: 1474736 - RNA, 19 nt, Homo sapiens
  misc_RNA (1)...(19): siRNA sense strand
ggaaggaacaaggucaaaa

SEQ ID NO: 1474737 - RNA, 19 nt, Homo sapiens
  misc_RNA (1)...(19): siRNA sense strand
cagaggagcugcagcguuu

SEQ ID NO: 1474738 - RNA, 19 nt, Homo sapiens
  misc_RNA (1)...(19): siRNA sense strand
gcaggaagaugcagacaag

SEQ ID NO: 1474739 - RNA, 19 nt, Homo sapiens
  misc_RNA (1)...(19): siRNA sense strand
gcagacaaguguaccuuca

SEQ ID NO: 1474740 - RNA, 19 nt, Homo sapiens
  misc_RNA (1)...(19): siRNA sense strand
ugaccaaguuugaggcuaa

SEQ ID NO: 1474741 - RNA, 19 nt, Homo sapiens
  misc_RNA (1)...(19): siRNA sense strand
ggagaucgaggucaugauu

SEQ ID NO: 1474742 - RNA, 19 nt, Homo sapiens
  misc_RNA (1)...(19): siRNA sense strand
uccagaaacuucacuuuga

SEQ ID NO: 1474743 - RNA, 19 nt, Homo sapiens
  misc_RNA (1)...(19): siRNA sense strand
agacaaguguaccuucauu

SEQ ID NO: 1474744 - RNA, 19 nt, Homo sapiens
  misc_RNA (1)...(19): siRNA sense strand
gagaagccuuacagagaug

SEQ ID NO: 1474745 - RNA, 19 nt, Homo sapiens
  misc_RNA (1)...(19): siRNA sense strand
gaagaugcagacaagugua

SEQ ID NO: 1474746 - RNA, 19 nt, Homo sapiens
  misc_RNA (1)...(19): siRNA sense strand
ggaagaugcagacaagugu

SEQ ID NO: 1474747 - RNA, 19 nt, Homo sapiens
  misc_RNA (1)...(19): siRNA sense strand
aagagaagccuuacagaga

SEQ ID NO: 1474748 - RNA, 19 nt, Homo sapiens
  misc_RNA (1)...(19): siRNA sense strand
agagaagccuuacagagau

SEQ ID NO: 1474749 - RNA, 19 nt, Homo sapiens
  misc_RNA (1)...(19): siRNA sense strand
ggaagagaagccuuacaga

SEQ ID NO: 1474750 - RNA, 19 nt, Homo sapiens
  misc_RNA (1)...(19): siRNA sense strand
ccagaaacuucacuuugag

SEQ ID NO: 1474751 - RNA, 19 nt, Homo sapiens
  misc_RNA (1)...(19): siRNA sense strand
gaccaaguuugaggcuaaa

SEQ ID NO: 1474752 - RNA, 19 nt, Homo sapiens
  misc_RNA (1)...(19): siRNA sense strand
ccucacagaucuagaagac

SEQ ID NO: 1474753 - RNA, 19 nt, Homo sapiens
  misc_RNA (1)...(19): siRNA sense strand
acgaguggaugaaaucaga

SEQ ID NO: 1474754 - RNA, 19 nt, Homo sapiens
  misc_RNA (1)...(19): siRNA sense strand
gcagaccagccacguggaa

SEQ ID NO: 1474755 - RNA, 19 nt, Homo sapiens
  misc_RNA (1)...(19): siRNA sense strand
ccagccacguggaagagaa

SEQ ID NO: 1474756 - RNA, 19 nt, Homo sapiens
  misc_RNA (1)...(19): siRNA sense strand
gaggagcugcagcguuuga

SEQ ID NO: 1474757 - RNA, 19 nt, Homo sapiens
  misc_RNA (1)...(19): siRNA sense strand
caaguguaccuucauugug

SEQ ID NO: 1474758 - RNA, 19 nt, Homo sapiens
  misc_RNA (1)...(19): siRNA sense strand
gaaccucuuccucacagau

SEQ ID NO: 1474759 - RNA, 19 nt, Homo sapiens
  misc_RNA (1)...(19): siRNA sense strand
gagaucgaggucaugauug

SEQ ID NO: 1474760 - RNA, 19 nt, Homo sapiens
  misc_RNA (1)...(19): siRNA sense strand
gacaaguguaccuucauug

SEQ ID NO: 1474761 - RNA, 19 nt, Homo sapiens
  misc_RNA (1)...(19): siRNA sense strand
ugagugaguccgagcauca

SEQ ID NO: 1474762 - RNA, 19 nt, Homo sapiens
  misc_RNA (1)...(19): siRNA sense strand
ugggagaugugaaccucuu

SEQ ID NO: 1474763 - RNA, 19 nt, Homo sapiens
  misc_RNA (1)...(19): siRNA sense strand
gguugaaucagaacaccuu

SEQ ID NO: 1474764 - RNA, 19 nt, Homo sapiens
  misc_RNA (1)...(19): siRNA sense strand
guuccagaaacuucacuuu

SEQ ID NO: 1474765 - RNA, 19 nt, Homo sapiens
  misc_RNA (1)...(19): siRNA sense strand
gcagugcagcuggcaggaa

SEQ ID NO: 1474766 - RNA, 19 nt, Homo sapiens
  misc_RNA (1)...(19): siRNA sense strand
aaauugggcaaggaaauga

SEQ ID NO: 1474767 - RNA, 19 nt, Homo sapiens
  misc_RNA (1)...(19): siRNA sense strand
ugccagagcugcauucuua

SEQ ID NO: 1474768 - RNA, 19 nt, Homo sapiens
  misc_RNA (1)...(19): siRNA sense strand
gaagagaugcaucaacauu

SEQ ID NO: 1474769 - RNA, 19 nt, Homo sapiens
  misc_RNA (1)...(19): siRNA sense strand
gaacugccuucauccauca

SEQ ID NO: 1474770 - RNA, 19 nt, Homo sapiens
  misc_RNA (1)...(19): siRNA sense strand
gguggaggcucuauucaug

SEQ ID NO: 1474771 - RNA, 19 nt, Homo sapiens
  misc_RNA (1)...(19): siRNA sense strand
gagcaaguguggaagagau

SEQ ID NO: 1474772 - RNA, 19 nt, Homo sapiens
  misc_RNA (1)...(19): siRNA sense strand
cgacugcuguucacuguau

SEQ ID NO: 1474773 - RNA, 19 nt, Homo sapiens
  misc_RNA (1)...(19): siRNA sense strand
cacaagaacugccuucauc

SEQ ID NO: 1474774 - RNA, 19 nt, Homo sapiens
  misc_RNA (1)...(19): siRNA sense strand
gacccuaccuccuugucua

SEQ ID NO: 1474775 - RNA, 19 nt, Homo sapiens
  misc_RNA (1)...(19): siRNA sense strand
gagguggccuacucuauca

SEQ ID NO: 1474776 - RNA, 19 nt, Homo sapiens
  misc_RNA (1)...(19): siRNA sense strand
gaucaaucuuccuguccua

SEQ ID NO: 1474777 - RNA, 19 nt, Homo sapiens
  misc_RNA (1)...(19): siRNA sense strand
ugggagagccacugauuua

SEQ ID NO: 1474778 - RNA, 19 nt, Homo sapiens
  misc_RNA (1)...(19): siRNA sense strand
agagaugcaucaacauuug

SEQ ID NO: 1474779 - RNA, 19 nt, Homo sapiens
  misc_RNA (1)...(19): siRNA sense strand
gguaugggaugucucaaca

SEQ ID NO: 1474780 - RNA, 19 nt, Homo sapiens
  misc_RNA (1)...(19): siRNA sense strand
uggaagagaugcaucaaca

SEQ ID NO: 1474781 - RNA, 19 nt, Homo sapiens
  misc_RNA (1)...(19): siRNA sense strand
gaacgucuggcugugcuua

SEQ ID NO: 1474782 - RNA, 19 nt, Homo sapiens
  misc_RNA (1)...(19): siRNA sense strand
gcccagauguggacuugug

SEQ ID NO: 1474783 - RNA, 19 nt, Homo sapiens
  misc_RNA (1)...(19): siRNA sense strand
gagagccacugauuuacuc

SEQ ID NO: 1474784 - RNA, 19 nt, Homo sapiens
  misc_RNA (1)...(19): siRNA sense strand
gcaaagucagcaacgauug

SEQ ID NO: 1474785 - RNA, 19 nt, Homo sapiens
  misc_RNA (1)...(19): siRNA sense strand
cagaagaagagguguuuga

SEQ ID NO: 1474786 - RNA, 19 nt, Homo sapiens
  misc_RNA (1)...(19): siRNA sense strand
gaagaagagguguuugagu

SEQ ID NO: 1474787 - RNA, 19 nt, Homo sapiens
  misc_RNA (1)...(19): siRNA sense strand
uaugggaugucucaacaga

SEQ ID NO: 1474788 - RNA, 19 nt, Homo sapiens
  misc_RNA (1)...(19): siRNA sense strand
uauaugagcacaauaacga

SEQ ID NO: 1474789 - RNA, 19 nt, Homo sapiens
  misc_RNA (1)...(19): siRNA sense strand
ccacaucccgcuguacuuu

SEQ ID NO: 1474790 - RNA, 19 nt, Homo sapiens
  misc_RNA (1)...(19): siRNA sense strand
ggucaagucacccuauaug

SEQ ID NO: 1474791 - RNA, 19 nt, Homo sapiens
  misc_RNA (1)...(19): siRNA sense strand
gcacaagaacugccuucau

SEQ ID NO: 1474792 - RNA, 19 nt, Homo sapiens
  misc_RNA (1)...(19): siRNA sense strand
gaccauggcacaagaacug

SEQ ID NO: 1474793 - RNA, 19 nt, Homo sapiens
  misc_RNA (1)...(19): siRNA sense strand
caguggcccugcuagauga

SEQ ID NO: 1474794 - RNA, 19 nt, Homo sapiens
  misc_RNA (1)...(19): siRNA sense strand
gcuggaccauggcacaaga

SEQ ID NO: 1474795 - RNA, 19 nt, Homo sapiens
  misc_RNA (1)...(19): siRNA sense strand
caacgauuguggcagaucu

SEQ ID NO: 1474796 - RNA, 19 nt, Homo sapiens
  misc_RNA (1)...(19): siRNA sense strand
gcucaucacuuuccauccu

SEQ ID NO: 1474797 - RNA, 19 nt, Homo sapiens
  misc_RNA (1)...(19): siRNA sense strand
caaucuuccuguccuacaa

SEQ ID NO: 1474798 - RNA, 19 nt, Homo sapiens
  misc_RNA (1)...(19): siRNA sense strand
ugaaauugcaaacucagaa

SEQ ID NO: 1474799 - RNA, 19 nt, Homo sapiens
  misc_RNA (1)...(19): siRNA sense strand
gaaauugcaaacucagaag

SEQ ID NO: 1474800 - RNA, 19 nt, Homo sapiens
  misc_RNA (1)...(19): siRNA sense strand
ggugcuaaaugaaauugca

SEQ ID NO: 1474801 - RNA, 19 nt, Homo sapiens
  misc_RNA (1)...(19): siRNA sense strand
aagagaugcaucaacauuu

SEQ ID NO: 1474802 - RNA, 19 nt, Homo sapiens
  misc_RNA (1)...(19): siRNA sense strand
cuccuucccuguggcauua

SEQ ID NO: 1474803 - RNA, 19 nt, Homo sapiens
  misc_RNA (1)...(19): siRNA sense strand
caaggguacaggaugguaa

SEQ ID NO: 1474804 - RNA, 19 nt, Homo sapiens
  misc_RNA (1)...(19): siRNA sense strand
cguuggaggugcaaaguca

SEQ ID NO: 1474805 - RNA, 19 nt, Homo sapiens
  misc_RNA (1)...(19): siRNA sense strand
uggcgucucuggccuggaa

SEQ ID NO: 1474806 - RNA, 19 nt, Homo sapiens
  misc_RNA (1)...(19): siRNA sense strand
aaaccagucauccuccuuu

SEQ ID NO: 1474807 - RNA, 19 nt, Homo sapiens
  misc_RNA (1)...(19): siRNA sense strand
gacaaaggauccccuaaag

SEQ ID NO: 1474808 - RNA, 19 nt, Homo sapiens
  misc_RNA (1)...(19): siRNA sense strand
caaagucagcaacgauugu

SEQ ID NO: 1474809 - RNA, 19 nt, Homo sapiens
  misc_RNA (1)...(19): siRNA sense strand
ugaauuugcccaagucaca

SEQ ID NO: 1474810 - RNA, 19 nt, Homo sapiens
  misc_RNA (1)...(19): siRNA sense strand
gccgacugcuguucacugu

SEQ ID NO: 1474811 - RNA, 19 nt, Homo sapiens
  misc_RNA (1)...(19): siRNA sense strand
ugauuuacucccugucuuu

SEQ ID NO: 1474812 - RNA, 19 nt, Homo sapiens
  misc_RNA (1)...(19): siRNA sense strand
ggagagccacugauuuacu

SEQ ID NO: 1474813 - RNA, 19 nt, Homo sapiens
  misc_RNA (1)...(19): siRNA sense strand
ucagcugucuuucgagucu

SEQ ID NO: 1474814 - RNA, 19 nt, Homo sapiens
  misc_RNA (1)...(19): siRNA sense strand
ugugagagguggccuacuc

SEQ ID NO: 1474815 - RNA, 19 nt, Homo sapiens
  misc_RNA (1)...(19): siRNA sense strand
uggcugugcuuaugaaagg

SEQ ID NO: 1474816 - RNA, 19 nt, Homo sapiens
  misc_RNA (1)...(19): siRNA sense strand
acucaguccguguguauaa

SEQ ID NO: 1474817 - RNA, 19 nt, Homo sapiens
  misc_RNA (1)...(19): siRNA sense strand
cauccuuccuucaacaaag

SEQ ID NO: 1474818 - RNA, 19 nt, Homo sapiens
  misc_RNA (1)...(19): siRNA sense strand
ggaagagaugcaucaacau

SEQ ID NO: 1474819 - RNA, 19 nt, Homo sapiens
  misc_RNA (1)...(19): siRNA sense strand
ucaagucacccuauaugag

SEQ ID NO: 1474820 - RNA, 19 nt, Homo sapiens
  misc_RNA (1)...(19): siRNA sense strand
gaauuugcccaagucacaa

SEQ ID NO: 1474821 - RNA, 19 nt, Homo sapiens
  misc_RNA (1)...(19): siRNA sense strand
gucaagucacccuauauga

SEQ ID NO: 1474822 - RNA, 19 nt, Homo sapiens
  misc_RNA (1)...(19): siRNA sense strand
cccuauaugagcacaauaa

SEQ ID NO: 1474823 - RNA, 19 nt, Homo sapiens
  misc_RNA (1)...(19): siRNA sense strand
auacaccuguuaccagcuu

SEQ ID NO: 1474824 - RNA, 19 nt, Homo sapiens
  misc_RNA (1)...(19): siRNA sense strand
uugcccaagucacaaauug

SEQ ID NO: 1474825 - RNA, 19 nt, Homo sapiens
  misc_RNA (1)...(19): siRNA sense strand
gugcccaagugcugucuca

SEQ ID NO: 1474826 - RNA, 19 nt, Homo sapiens
  misc_RNA (1)...(19): siRNA sense strand
cuuugucaaugcccaguuu

SEQ ID NO: 1474827 - RNA, 19 nt, Homo sapiens
  misc_RNA (1)...(19): siRNA sense strand
gggagcaaguguggaagag

SEQ ID NO: 1474828 - RNA, 19 nt, Homo sapiens
  misc_RNA (1)...(19): siRNA sense strand
ccgcuguacuuugucaaug

SEQ ID NO: 1474829 - RNA, 19 nt, Homo sapiens
  misc_RNA (1)...(19): siRNA sense strand
caagaacugccuucaucca

SEQ ID NO: 1474830 - RNA, 19 nt, Homo sapiens
  misc_RNA (1)...(19): siRNA sense strand
gauuguggcagaucugucu

SEQ ID NO: 1474831 - RNA, 19 nt, Homo sapiens
  misc_RNA (1)...(19): siRNA sense strand
ucgcugaauuugcccaagu

SEQ ID NO: 1474832 - RNA, 19 nt, Homo sapiens
  misc_RNA (1)...(19): siRNA sense strand
guggaggcucuauucauga

SEQ ID NO: 1474833 - RNA, 19 nt, Homo sapiens
  misc_RNA (1)...(19): siRNA sense strand
ggugcaaagucagcaacga

SEQ ID NO: 1474834 - RNA, 19 nt, Homo sapiens
  misc_RNA (1)...(19): siRNA sense strand
ccuuagugccucugucuug

SEQ ID NO: 1474835 - RNA, 19 nt, Homo sapiens
  misc_RNA (1)...(19): siRNA sense strand
acaucccgcuguacuuugu

SEQ ID NO: 1474836 - RNA, 19 nt, Homo sapiens
  misc_RNA (1)...(19): siRNA sense strand
cacccuauaugagcacaau

SEQ ID NO: 1474837 - RNA, 19 nt, Homo sapiens
  misc_RNA (1)...(19): siRNA sense strand
ugacaaaggauccccuaaa

SEQ ID NO: 1474838 - RNA, 19 nt, Homo sapiens
  misc_RNA (1)...(19): siRNA sense strand
ccaaggguacaggauggua

SEQ ID NO: 1474839 - RNA, 19 nt, Homo sapiens
  misc_RNA (1)...(19): siRNA sense strand
gagaggcucacuccauggu

SEQ ID NO: 1474840 - RNA, 19 nt, Homo sapiens
  misc_RNA (1)...(19): siRNA sense strand
gugcaaagucagcaacgau

SEQ ID NO: 1474841 - RNA, 19 nt, Homo sapiens
  misc_RNA (1)...(19): siRNA sense strand
gagcuggugacgggcagua

SEQ ID NO: 1474842 - RNA, 19 nt, Homo sapiens
  misc_RNA (1)...(19): siRNA sense strand
gggcauacaccuguuacca

SEQ ID NO: 1474843 - RNA, 19 nt, Homo sapiens
  misc_RNA (1)...(19): siRNA sense strand
ggagcaaguguggaagaga

SEQ ID NO: 1474844 - RNA, 19 nt, Homo sapiens
  misc_RNA (1)...(19): siRNA sense strand
ugagacaacaauacagaca

SEQ ID NO: 1474845 - RNA, 19 nt, Homo sapiens
  misc_RNA (1)...(19): siRNA sense strand
gaugacagcugcagagacu

SEQ ID NO: 1474846 - RNA, 19 nt, Homo sapiens
  misc_RNA (1)...(19): siRNA sense strand
gagaagcgccagcgagaga

SEQ ID NO: 1474847 - RNA, 19 nt, Homo sapiens
  misc_RNA (1)...(19): siRNA sense strand
cagcaucgccuuccaaauc

SEQ ID NO: 1474848 - RNA, 19 nt, Homo sapiens
  misc_RNA (1)...(19): siRNA sense strand
cccauuaggugacagaagu

SEQ ID NO: 1474849 - RNA, 19 nt, Homo sapiens
  misc_RNA (1)...(19): siRNA sense strand
ggagaagacccuggaagag

SEQ ID NO: 1474850 - RNA, 19 nt, Homo sapiens
  misc_RNA (1)...(19): siRNA sense strand
cucaguggcuugacucuca

SEQ ID NO: 1474851 - RNA, 19 nt, Homo sapiens
  misc_RNA (1)...(19): siRNA sense strand
ggagacaccgcgaucacau

SEQ ID NO: 1474852 - RNA, 19 nt, Homo sapiens
  misc_RNA (1)...(19): siRNA sense strand
acagaagucagaaucgauu

SEQ ID NO: 1474853 - RNA, 19 nt, Homo sapiens
  misc_RNA (1)...(19): siRNA sense strand
gggagaggcuggaguuccu

SEQ ID NO: 1474854 - RNA, 19 nt, Homo sapiens
  misc_RNA (1)...(19): siRNA sense strand
ggugggagaggcuggaguu

SEQ ID NO: 1474855 - RNA, 19 nt, Homo sapiens
  misc_RNA (1)...(19): siRNA sense strand
aagcagugguuagaggaaa

SEQ ID NO: 1474856 - RNA, 19 nt, Homo sapiens
  misc_RNA (1)...(19): siRNA sense strand
gccagaaucuccccauuag

SEQ ID NO: 1474857 - RNA, 19 nt, Homo sapiens
  misc_RNA (1)...(19): siRNA sense strand
ccgaugaugggccucagua

SEQ ID NO: 1474858 - RNA, 19 nt, Homo sapiens
  misc_RNA (1)...(19): siRNA sense strand
gcaucgccuuccaaaucuu

SEQ ID NO: 1474859 - RNA, 19 nt, Homo sapiens
  misc_RNA (1)...(19): siRNA sense strand
gagacaccgcgaucacaug

SEQ ID NO: 1474860 - RNA, 19 nt, Homo sapiens
  misc_RNA (1)...(19): siRNA sense strand
gcauuccugcggcauguga

SEQ ID NO: 1474861 - RNA, 19 nt, Homo sapiens
  misc_RNA (1)...(19): siRNA sense strand
ugacagcugcagagacuuc

SEQ ID NO: 1474862 - RNA, 19 nt, Homo sapiens
  misc_RNA (1)...(19): siRNA sense strand
ggagagcaaaauaauguuu

SEQ ID NO: 1474863 - RNA, 19 nt, Homo sapiens
  misc_RNA (1)...(19): siRNA sense strand
gacagaagucagaaucgau

SEQ ID NO: 1474864 - RNA, 19 nt, Homo sapiens
  misc_RNA (1)...(19): siRNA sense strand
gaugaugggccucaguaac

SEQ ID NO: 1474865 - RNA, 19 nt, Homo sapiens
  misc_RNA (1)...(19): siRNA sense strand
cacaggagacagaggagaa

SEQ ID NO: 1474866 - RNA, 19 nt, Homo sapiens
  misc_RNA (1)...(19): siRNA sense strand
aggagaagacccuggaaga

SEQ ID NO: 1474867 - RNA, 19 nt, Homo sapiens
  misc_RNA (1)...(19): siRNA sense strand
agccacaggccgaaucuuu

SEQ ID NO: 1474868 - RNA, 19 nt, Homo sapiens
  misc_RNA (1)...(19): siRNA sense strand
aggcuggaguuccuucaga

SEQ ID NO: 1474869 - RNA, 19 nt, Homo sapiens
  misc_RNA (1)...(19): siRNA sense strand
ggaggagacaccgcgauca

SEQ ID NO: 1474870 - RNA, 19 nt, Homo sapiens
  misc_RNA (1)...(19): siRNA sense strand
ccacaggccgaaucuuucu

SEQ ID NO: 1474871 - RNA, 19 nt, Homo sapiens
  misc_RNA (1)...(19): siRNA sense strand
cgaugugaaugucgauacu

SEQ ID NO: 1474872 - RNA, 19 nt, Homo sapiens
  misc_RNA (1)...(19): siRNA sense strand
gccacaggccgaaucuuuc

SEQ ID NO: 1474873 - RNA, 19 nt, Homo sapiens
  misc_RNA (1)...(19): siRNA sense strand
aagcauuccugcggcaugu

SEQ ID NO: 1474874 - RNA, 19 nt, Homo sapiens
  misc_RNA (1)...(19): siRNA sense strand
caagcagugguuagaggaa

SEQ ID NO: 1474875 - RNA, 19 nt, Homo sapiens
  misc_RNA (1)...(19): siRNA sense strand
gaagaaagcugaaugaaaa

SEQ ID NO: 1474876 - RNA, 19 nt, Homo sapiens
  misc_RNA (1)...(19): siRNA sense strand
ggaagaaagcugaaugaaa

SEQ ID NO: 1474877 - RNA, 19 nt, Homo sapiens
  misc_RNA (1)...(19): siRNA sense strand
ccagauacauggaaagaug

SEQ ID NO: 1474878 - RNA, 19 nt, Homo sapiens
  misc_RNA (1)...(19): siRNA sense strand
gaaagauggugcuaggaau

SEQ ID NO: 1474879 - RNA, 19 nt, Homo sapiens
  misc_RNA (1)...(19): siRNA sense strand
ggaaagauggugcuaggaa

SEQ ID NO: 1474880 - RNA, 19 nt, Homo sapiens
  misc_RNA (1)...(19): siRNA sense strand
aaagaaacuugguacuguu

SEQ ID NO: 1474881 - RNA, 19 nt, Homo sapiens
  misc_RNA (1)...(19): siRNA sense strand
gaaacuugguacuguuauc

SEQ ID NO: 1474882 - RNA, 19 nt, Homo sapiens
  misc_RNA (1)...(19): siRNA sense strand
aagcaagauuugauccaua

SEQ ID NO: 1474883 - RNA, 19 nt, Homo sapiens
  misc_RNA (1)...(19): siRNA sense strand
ccagggcugugccuacaaa

SEQ ID NO: 1474884 - RNA, 19 nt, Homo sapiens
  misc_RNA (1)...(19): siRNA sense strand
aaagauggugcuaggaaua

SEQ ID NO: 1474885 - RNA, 19 nt, Homo sapiens
  misc_RNA (1)...(19): siRNA sense strand
cacagaaagugguggaaga

SEQ ID NO: 1474886 - RNA, 19 nt, Homo sapiens
  misc_RNA (1)...(19): siRNA sense strand
ccacuuguagaauuuguaa

SEQ ID NO: 1474887 - RNA, 19 nt, Homo sapiens
  misc_RNA (1)...(19): siRNA sense strand
agaaagugguggaagaaag

SEQ ID NO: 1474888 - RNA, 19 nt, Homo sapiens
  misc_RNA (1)...(19): siRNA sense strand
caagcaaacaucugucuag

SEQ ID NO: 1474889 - RNA, 19 nt, Homo sapiens
  misc_RNA (1)...(19): siRNA sense strand
aagaaacuugguacuguua

SEQ ID NO: 1474890 - RNA, 19 nt, Homo sapiens
  misc_RNA (1)...(19): siRNA sense strand
gcuaggaauaccacagaaa

SEQ ID NO: 1474891 - RNA, 19 nt, Homo sapiens
  misc_RNA (1)...(19): siRNA sense strand
agcaagauuugauccauau

SEQ ID NO: 1474892 - RNA, 19 nt, Homo sapiens
  misc_RNA (1)...(19): siRNA sense strand
gaaagugguggaagaaagc

SEQ ID NO: 1474893 - RNA, 19 nt, Homo sapiens
  misc_RNA (1)...(19): siRNA sense strand
aaaagaaacuugguacugu

SEQ ID NO: 1474894 - RNA, 19 nt, Homo sapiens
  misc_RNA (1)...(19): siRNA sense strand
gaaaagaaacuugguacug

SEQ ID NO: 1474895 - RNA, 19 nt, Homo sapiens
  misc_RNA (1)...(19): siRNA sense strand
guggaagaaagcugaauga

SEQ ID NO: 1474896 - RNA, 19 nt, Homo sapiens
  misc_RNA (1)...(19): siRNA sense strand
aaagcaagauuugauccau

SEQ ID NO: 1474897 - RNA, 19 nt, Homo sapiens
  misc_RNA (1)...(19): siRNA sense strand
caagauuugauccauaugg

SEQ ID NO: 1474898 - RNA, 19 nt, Homo sapiens
  misc_RNA (1)...(19): siRNA sense strand
gguggaagaaagcugaaug

SEQ ID NO: 1474899 - RNA, 19 nt, Homo sapiens
  misc_RNA (1)...(19): siRNA sense strand
gugcuaggaauaccacaga

SEQ ID NO: 1474900 - RNA, 19 nt, Homo sapiens
  misc_RNA (1)...(19): siRNA sense strand
aaacuugguacuguuauca

SEQ ID NO: 1474901 - RNA, 19 nt, Homo sapiens
  misc_RNA (1)...(19): siRNA sense strand
cagaaagugguggaagaaa

SEQ ID NO: 1474902 - RNA, 19 nt, Homo sapiens
  misc_RNA (1)...(19): siRNA sense strand
acagaaagugguggaagaa

SEQ ID NO: 1474903 - RNA, 19 nt, Homo sapiens
  misc_RNA (1)...(19): siRNA sense strand
ccauauggaaagaauaagu

SEQ ID NO: 1474904 - RNA, 19 nt, Homo sapiens
  misc_RNA (1)...(19): siRNA sense strand
cuaggaauaccacagaaag

SEQ ID NO: 1474905 - RNA, 19 nt, Homo sapiens
  misc_RNA (1)...(19): siRNA sense strand
aaacuacaagcaaacaucu

SEQ ID NO: 1474906 - RNA, 19 nt, Homo sapiens
  misc_RNA (1)...(19): siRNA sense strand
uaaaaguucugugcaccaa

SEQ ID NO: 1474907 - RNA, 19 nt, Homo sapiens
  misc_RNA (1)...(19): siRNA sense strand
gcagaauucuucccugaug

SEQ ID NO: 1474908 - RNA, 19 nt, Homo sapiens
  misc_RNA (1)...(19): siRNA sense strand
ggugggagcucuacuggaa

SEQ ID NO: 1474909 - RNA, 19 nt, Homo sapiens
  misc_RNA (1)...(19): siRNA sense strand
ggugguggcugguuacuac

SEQ ID NO: 1474910 - RNA, 19 nt, Homo sapiens
  misc_RNA (1)...(19): siRNA sense strand
ccugaugcaguacuuauua

SEQ ID NO: 1474911 - RNA, 19 nt, Homo sapiens
  misc_RNA (1)...(19): siRNA sense strand
caaugcagcugugaacgau

SEQ ID NO: 1474912 - RNA, 19 nt, Homo sapiens
  misc_RNA (1)...(19): siRNA sense strand
auucuucccugaugcagua

SEQ ID NO: 1474913 - RNA, 19 nt, Homo sapiens
  misc_RNA (1)...(19): siRNA sense strand
ggacuuugacugccaccuu

SEQ ID NO: 1474914 - RNA, 19 nt, Homo sapiens
  misc_RNA (1)...(19): siRNA sense strand
gaugcaguacuuauuaugu

SEQ ID NO: 1474915 - RNA, 19 nt, Homo sapiens
  misc_RNA (1)...(19): siRNA sense strand
gcugggucccuaaggauaa

SEQ ID NO: 1474916 - RNA, 19 nt, Homo sapiens
  misc_RNA (1)...(19): siRNA sense strand
gcagauggugggagcucua

SEQ ID NO: 1474917 - RNA, 19 nt, Homo sapiens
  misc_RNA (1)...(19): siRNA sense strand
ugggagcucuacuggaaga

SEQ ID NO: 1474918 - RNA, 19 nt, Homo sapiens
  misc_RNA (1)...(19): siRNA sense strand
ccaaugcagcugugaacga

SEQ ID NO: 1474919 - RNA, 19 nt, Homo sapiens
  misc_RNA (1)...(19): siRNA sense strand
ugcaguacuuauuauguug

SEQ ID NO: 1474920 - RNA, 19 nt, Homo sapiens
  misc_RNA (1)...(19): siRNA sense strand
cugaugcaguacuuauuau

SEQ ID NO: 1474921 - RNA, 19 nt, Homo sapiens
  misc_RNA (1)...(19): siRNA sense strand
uuacuaccaugccaaugca

SEQ ID NO: 1474922 - RNA, 19 nt, Homo sapiens
  misc_RNA (1)...(19): siRNA sense strand
cggcucaacacucaaauca

SEQ ID NO: 1474923 - RNA, 19 nt, Homo sapiens
  misc_RNA (1)...(19): siRNA sense strand
ccagcaccuuguggacuuu

SEQ ID NO: 1474924 - RNA, 19 nt, Homo sapiens
  misc_RNA (1)...(19): siRNA sense strand
ggcccuguccgucauguug

SEQ ID NO: 1474925 - RNA, 19 nt, Homo sapiens
  misc_RNA (1)...(19): siRNA sense strand
cagcggcucaacacucaaa

SEQ ID NO: 1474926 - RNA, 19 nt, Homo sapiens
  misc_RNA (1)...(19): siRNA sense strand
gucuggugguggcugguua

SEQ ID NO: 1474927 - RNA, 19 nt, Homo sapiens
  misc_RNA (1)...(19): siRNA sense strand
gcccuggccuacgugaaga

SEQ ID NO: 1474928 - RNA, 19 nt, Homo sapiens
  misc_RNA (1)...(19): siRNA sense strand
uggccuacgugaagaugug

SEQ ID NO: 1474929 - RNA, 19 nt, Homo sapiens
  misc_RNA (1)...(19): siRNA sense strand
gauggugggagcucuacug

SEQ ID NO: 1474930 - RNA, 19 nt, Homo sapiens
  misc_RNA (1)...(19): siRNA sense strand
augcagcugugaacgauca

SEQ ID NO: 1474931 - RNA, 19 nt, Homo sapiens
  misc_RNA (1)...(19): siRNA sense strand
gcagucaacgggcuguuuu

SEQ ID NO: 1474932 - RNA, 19 nt, Homo sapiens
  misc_RNA (1)...(19): siRNA sense strand
gaaaugaugugcagaguaa

SEQ ID NO: 1474933 - RNA, 19 nt, Homo sapiens
  misc_RNA (1)...(19): siRNA sense strand
caaacagacugaagugaaa

SEQ ID NO: 1474934 - RNA, 19 nt, Homo sapiens
  misc_RNA (1)...(19): siRNA sense strand
gagaaagcgugcuaaguug

SEQ ID NO: 1474935 - RNA, 19 nt, Homo sapiens
  misc_RNA (1)...(19): siRNA sense strand
agagaaaucuucagagaau

SEQ ID NO: 1474936 - RNA, 19 nt, Homo sapiens
  misc_RNA (1)...(19): siRNA sense strand
gcaagaaagacuagagaaa

SEQ ID NO: 1474937 - RNA, 19 nt, Homo sapiens
  misc_RNA (1)...(19): siRNA sense strand
cuaaaguccucaacaagaa

SEQ ID NO: 1474938 - RNA, 19 nt, Homo sapiens
  misc_RNA (1)...(19): siRNA sense strand
gauggagaaucaaguguug

SEQ ID NO: 1474939 - RNA, 19 nt, Homo sapiens
  misc_RNA (1)...(19): siRNA sense strand
gauccuacgugaugauuuc

SEQ ID NO: 1474940 - RNA, 19 nt, Homo sapiens
  misc_RNA (1)...(19): siRNA sense strand
gaagugaaaucagaagaag

SEQ ID NO: 1474941 - RNA, 19 nt, Homo sapiens
  misc_RNA (1)...(19): siRNA sense strand
uaucaacuguuuccaagaa

SEQ ID NO: 1474942 - RNA, 19 nt, Homo sapiens
  misc_RNA (1)...(19): siRNA sense strand
uaaggaagcuggaaguucu

SEQ ID NO: 1474943 - RNA, 19 nt, Homo sapiens
  misc_RNA (1)...(19): siRNA sense strand
ugagaaagcgugcuaaguu

SEQ ID NO: 1474944 - RNA, 19 nt, Homo sapiens
  misc_RNA (1)...(19): siRNA sense strand
caagugacucugauacaua

SEQ ID NO: 1474945 - RNA, 19 nt, Homo sapiens
  misc_RNA (1)...(19): siRNA sense strand
agagagaaaucuucagaga

SEQ ID NO: 1474946 - RNA, 19 nt, Homo sapiens
  misc_RNA (1)...(19): siRNA sense strand
gcaagugacucugauacau

SEQ ID NO: 1474947 - RNA, 19 nt, Homo sapiens
  misc_RNA (1)...(19): siRNA sense strand
gaagcuggaaguucuauga

SEQ ID NO: 1474948 - RNA, 19 nt, Homo sapiens
  misc_RNA (1)...(19): siRNA sense strand
gggcagaugcuauggcuaa

SEQ ID NO: 1474949 - RNA, 19 nt, Homo sapiens
  misc_RNA (1)...(19): siRNA sense strand
caaaugagacugcuucaag

SEQ ID NO: 1474950 - RNA, 19 nt, Homo sapiens
  misc_RNA (1)...(19): siRNA sense strand
ggaaaugaugugcagagua

SEQ ID NO: 1474951 - RNA, 19 nt, Homo sapiens
  misc_RNA (1)...(19): siRNA sense strand
caagaaaacuccugaaagu

SEQ ID NO: 1474952 - RNA, 19 nt, Homo sapiens
  misc_RNA (1)...(19): siRNA sense strand
gcuaaaguccucaacaaga

SEQ ID NO: 1474953 - RNA, 19 nt, Homo sapiens
  misc_RNA (1)...(19): siRNA sense strand
caauagaagcugacaguga

SEQ ID NO: 1474954 - RNA, 19 nt, Homo sapiens
  misc_RNA (1)...(19): siRNA sense strand
gaaaacuccugaaaguaaa

SEQ ID NO: 1474955 - RNA, 19 nt, Homo sapiens
  misc_RNA (1)...(19): siRNA sense strand
acaaagagacagagagaaa

SEQ ID NO: 1474956 - RNA, 19 nt, Homo sapiens
  misc_RNA (1)...(19): siRNA sense strand
gaagaaggcccagguugga

SEQ ID NO: 1474957 - RNA, 19 nt, Homo sapiens
  misc_RNA (1)...(19): siRNA sense strand
gaaagacugggacaaggaa

SEQ ID NO: 1474958 - RNA, 19 nt, Homo sapiens
  misc_RNA (1)...(19): siRNA sense strand
ccaaacagacugaagugaa

SEQ ID NO: 1474959 - RNA, 19 nt, Homo sapiens
  misc_RNA (1)...(19): siRNA sense strand
ggacgauccuacgugauga

SEQ ID NO: 1474960 - RNA, 19 nt, Homo sapiens
  misc_RNA (1)...(19): siRNA sense strand
gagagaaaucuucagagaa

SEQ ID NO: 1474961 - RNA, 19 nt, Homo sapiens
  misc_RNA (1)...(19): siRNA sense strand
gagaaaucuucagagaauu

SEQ ID NO: 1474962 - RNA, 19 nt, Homo sapiens
  misc_RNA (1)...(19): siRNA sense strand
aagugacucugauacauaa

SEQ ID NO: 1474963 - RNA, 19 nt, Homo sapiens
  misc_RNA (1)...(19): siRNA sense strand
gaugacagcagaccagaau

SEQ ID NO: 1474964 - RNA, 19 nt, Homo sapiens
  misc_RNA (1)...(19): siRNA sense strand
ggaaagugaugggccagau

SEQ ID NO: 1474965 - RNA, 19 nt, Homo sapiens
  misc_RNA (1)...(19): siRNA sense strand
aaucaaguguugggacuaa

SEQ ID NO: 1474966 - RNA, 19 nt, Homo sapiens
  misc_RNA (1)...(19): siRNA sense strand
cagaugcuauggcuaaagu

SEQ ID NO: 1474967 - RNA, 19 nt, Homo sapiens
  misc_RNA (1)...(19): siRNA sense strand
gguguggugcaauuauuua

SEQ ID NO: 1474968 - RNA, 19 nt, Homo sapiens
  misc_RNA (1)...(19): siRNA sense strand
gaguaaagccagauguugu

SEQ ID NO: 1474969 - RNA, 19 nt, Homo sapiens
  misc_RNA (1)...(19): siRNA sense strand
uggcuaaaguccucaacaa

SEQ ID NO: 1474970 - RNA, 19 nt, Homo sapiens
  misc_RNA (1)...(19): siRNA sense strand
uagcgucggugcuggaaga

SEQ ID NO: 1474971 - RNA, 19 nt, Homo sapiens
  misc_RNA (1)...(19): siRNA sense strand
ucaaguguugggacuaaua

SEQ ID NO: 1474972 - RNA, 19 nt, Homo sapiens
  misc_RNA (1)...(19): siRNA sense strand
gauggaaguacaaaugaga

SEQ ID NO: 1474973 - RNA, 19 nt, Homo sapiens
  misc_RNA (1)...(19): siRNA sense strand
gaaagcgugcuaaguugau

SEQ ID NO: 1474974 - RNA, 19 nt, Homo sapiens
  misc_RNA (1)...(19): siRNA sense strand
aaagcgugcuaaguugaua

SEQ ID NO: 1474975 - RNA, 19 nt, Homo sapiens
  misc_RNA (1)...(19): siRNA sense strand
gaaagugaugggccagaug

SEQ ID NO: 1474976 - RNA, 19 nt, Homo sapiens
  misc_RNA (1)...(19): siRNA sense strand
auaagaagcuggaaaagga

SEQ ID NO: 1474977 - RNA, 19 nt, Homo sapiens
  misc_RNA (1)...(19): siRNA sense strand
gaagaaaccaaaagccaaa

SEQ ID NO: 1474978 - RNA, 19 nt, Homo sapiens
  misc_RNA (1)...(19): siRNA sense strand
ggauggaaguacaaaugag

SEQ ID NO: 1474979 - RNA, 19 nt, Homo sapiens
  misc_RNA (1)...(19): siRNA sense strand
aaagccagauguuguccaa

SEQ ID NO: 1474980 - RNA, 19 nt, Homo sapiens
  misc_RNA (1)...(19): siRNA sense strand
gaugaugacgcaauagaag

SEQ ID NO: 1474981 - RNA, 19 nt, Homo sapiens
  misc_RNA (1)...(19): siRNA sense strand
agacaaagagacagagaga

SEQ ID NO: 1474982 - RNA, 19 nt, Homo sapiens
  misc_RNA (1)...(19): siRNA sense strand
ugaagugaaaucagaagaa

SEQ ID NO: 1474983 - RNA, 19 nt, Homo sapiens
  misc_RNA (1)...(19): siRNA sense strand
gaauguugaugaaaagguu

SEQ ID NO: 1474984 - RNA, 19 nt, Homo sapiens
  misc_RNA (1)...(19): siRNA sense strand
aauaugggcugggcagaug

SEQ ID NO: 1474985 - RNA, 19 nt, Homo sapiens
  misc_RNA (1)...(19): siRNA sense strand
caagaaagacuagagaaaa

SEQ ID NO: 1474986 - RNA, 19 nt, Homo sapiens
  misc_RNA (1)...(19): siRNA sense strand
agaaaacuccugaaaguaa

SEQ ID NO: 1474987 - RNA, 19 nt, Homo sapiens
  misc_RNA (1)...(19): siRNA sense strand
uaaaguccucaacaagaaa

SEQ ID NO: 1474988 - RNA, 19 nt, Homo sapiens
  misc_RNA (1)...(19): siRNA sense strand
agaaaucuucagagaauug

SEQ ID NO: 1474989 - RNA, 19 nt, Homo sapiens
  misc_RNA (1)...(19): siRNA sense strand
caaagagacagagagaaau

SEQ ID NO: 1474990 - RNA, 19 nt, Homo sapiens
  misc_RNA (1)...(19): siRNA sense strand
guuaaagcaagaaagacua

SEQ ID NO: 1474991 - RNA, 19 nt, Homo sapiens
  misc_RNA (1)...(19): siRNA sense strand
gggaaaugaugugcagagu

SEQ ID NO: 1474992 - RNA, 19 nt, Homo sapiens
  misc_RNA (1)...(19): siRNA sense strand
aaagugaugggccagauga

SEQ ID NO: 1474993 - RNA, 19 nt, Homo sapiens
  misc_RNA (1)...(19): siRNA sense strand
gcugagcccugugacaaag

SEQ ID NO: 1474994 - RNA, 19 nt, Homo sapiens
  misc_RNA (1)...(19): siRNA sense strand
agccagauguuguccaaga

SEQ ID NO: 1474995 - RNA, 19 nt, Homo sapiens
  misc_RNA (1)...(19): siRNA sense strand
caaguguugggacuaauau

SEQ ID NO: 1474996 - RNA, 19 nt, Homo sapiens
  misc_RNA (1)...(19): siRNA sense strand
ugaaagacugggacaagga

SEQ ID NO: 1474997 - RNA, 19 nt, Homo sapiens
  misc_RNA (1)...(19): siRNA sense strand
cagaguaaagccagauguu

SEQ ID NO: 1474998 - RNA, 19 nt, Homo sapiens
  misc_RNA (1)...(19): siRNA sense strand
caagcaggaagaaaccaaa

SEQ ID NO: 1474999 - RNA, 19 nt, Homo sapiens
  misc_RNA (1)...(19): siRNA sense strand
acagagagaaaucuucaga

SEQ ID NO: 1475000 - RNA, 19 nt, Homo sapiens
  misc_RNA (1)...(19): siRNA sense strand
agacagagagaaaucuuca

SEQ ID NO: 1475001 - RNA, 19 nt, Homo sapiens
  misc_RNA (1)...(19): siRNA sense strand
caagacaaagagacagaga

SEQ ID NO: 1475002 - RNA, 19 nt, Homo sapiens
  misc_RNA (1)...(19): siRNA sense strand
ggguguggugcaauuauuu

SEQ ID NO: 1475003 - RNA, 19 nt, Homo sapiens
  misc_RNA (1)...(19): siRNA sense strand
aaagagacagagagaaauc

SEQ ID NO: 1475004 - RNA, 19 nt, Homo sapiens
  misc_RNA (1)...(19): siRNA sense strand
gggcugggcagaugcuaug

SEQ ID NO: 1475005 - RNA, 19 nt, Homo sapiens
  misc_RNA (1)...(19): siRNA sense strand
caagggguguggugcaauu

SEQ ID NO: 1475006 - RNA, 19 nt, Homo sapiens
  misc_RNA (1)...(19): siRNA sense strand
gaagacgaggccacagaca

SEQ ID NO: 1475007 - RNA, 19 nt, Homo sapiens
  misc_RNA (1)...(19): siRNA sense strand
ugagcccugugacaaagaa

SEQ ID NO: 1475008 - RNA, 19 nt, Homo sapiens
  misc_RNA (1)...(19): siRNA sense strand
agaaagcgugcuaaguuga

SEQ ID NO: 1475009 - RNA, 19 nt, Homo sapiens
  misc_RNA (1)...(19): siRNA sense strand
gcagaguaaagccagaugu

SEQ ID NO: 1475010 - RNA, 19 nt, Homo sapiens
  misc_RNA (1)...(19): siRNA sense strand
gaaucaaguguugggacua

SEQ ID NO: 1475011 - RNA, 19 nt, Homo sapiens
  misc_RNA (1)...(19): siRNA sense strand
ggcagaugcuauggcuaaa

SEQ ID NO: 1475012 - RNA, 19 nt, Homo sapiens
  misc_RNA (1)...(19): siRNA sense strand
gagacagagagaaaucuuc

SEQ ID NO: 1475013 - RNA, 19 nt, Homo sapiens
  misc_RNA (1)...(19): siRNA sense strand
uaaaacagcgugauaagag

SEQ ID NO: 1475014 - RNA, 19 nt, Homo sapiens
  misc_RNA (1)...(19): siRNA sense strand
uggauggaaguacaaauga

SEQ ID NO: 1475015 - RNA, 19 nt, Homo sapiens
  misc_RNA (1)...(19): siRNA sense strand
ugauaucaacuguuuccaa

SEQ ID NO: 1475016 - RNA, 19 nt, Homo sapiens
  misc_RNA (1)...(19): siRNA sense strand
ugacagcagaccagaaucu

SEQ ID NO: 1475017 - RNA, 19 nt, Homo sapiens
  misc_RNA (1)...(19): siRNA sense strand
gggagcaucuaugaaagac

SEQ ID NO: 1475018 - RNA, 19 nt, Homo sapiens
  misc_RNA (1)...(19): siRNA sense strand
aggcuggagugggaaauga

SEQ ID NO: 1475019 - RNA, 19 nt, Homo sapiens
  misc_RNA (1)...(19): siRNA sense strand
ugaugaugacgcaauagaa

SEQ ID NO: 1475020 - RNA, 19 nt, Homo sapiens
  misc_RNA (1)...(19): siRNA sense strand
ggauggauggaaguacaaa

SEQ ID NO: 1475021 - RNA, 19 nt, Homo sapiens
  misc_RNA (1)...(19): siRNA sense strand
agaguaaagccagauguug

SEQ ID NO: 1475022 - RNA, 19 nt, Homo sapiens
  misc_RNA (1)...(19): siRNA sense strand
gacaaagagacagagagaa

SEQ ID NO: 1475023 - RNA, 19 nt, Homo sapiens
  misc_RNA (1)...(19): siRNA sense strand
aagcaagaaagacuagaga

SEQ ID NO: 1475024 - RNA, 19 nt, Homo sapiens
  misc_RNA (1)...(19): siRNA sense strand
ggaagcuguggaucggaaa

SEQ ID NO: 1475025 - RNA, 19 nt, Homo sapiens
  misc_RNA (1)...(19): siRNA sense strand
uggacgauccuacgugaug

SEQ ID NO: 1475026 - RNA, 19 nt, Homo sapiens
  misc_RNA (1)...(19): siRNA sense strand
gaagagaaagcuaauaaga

SEQ ID NO: 1475027 - RNA, 19 nt, Homo sapiens
  misc_RNA (1)...(19): siRNA sense strand
agagaaagcuaauaagaag

SEQ ID NO: 1475028 - RNA, 19 nt, Homo sapiens
  misc_RNA (1)...(19): siRNA sense strand
gcugcuggaucaaguauca

SEQ ID NO: 1475029 - RNA, 19 nt, Homo sapiens
  misc_RNA (1)...(19): siRNA sense strand
cugaagagaaagcuaauaa

SEQ ID NO: 1475030 - RNA, 19 nt, Homo sapiens
  misc_RNA (1)...(19): siRNA sense strand
gagagaagaggaagagucu

SEQ ID NO: 1475031 - RNA, 19 nt, Homo sapiens
  misc_RNA (1)...(19): siRNA sense strand
gucuuggucuuuggaaaua

SEQ ID NO: 1475032 - RNA, 19 nt, Homo sapiens
  misc_RNA (1)...(19): siRNA sense strand
uaagaaggcagagagaaga

SEQ ID NO: 1475033 - RNA, 19 nt, Homo sapiens
  misc_RNA (1)...(19): siRNA sense strand
gcagagagaagaggaagag

SEQ ID NO: 1475034 - RNA, 19 nt, Homo sapiens
  misc_RNA (1)...(19): siRNA sense strand
gagucuuggucuuuggaaa

SEQ ID NO: 1475035 - RNA, 19 nt, Homo sapiens
  misc_RNA (1)...(19): siRNA sense strand
ggucuuuggaaauaucuuu

SEQ ID NO: 1475036 - RNA, 19 nt, Homo sapiens
  misc_RNA (1)...(19): siRNA sense strand
ggagcugcuggaucaagua

SEQ ID NO: 1475037 - RNA, 19 nt, Homo sapiens
  misc_RNA (1)...(19): siRNA sense strand
uaauaagaaggcagagaga

SEQ ID NO: 1475038 - RNA, 19 nt, Homo sapiens
  misc_RNA (1)...(19): siRNA sense strand
gagcugcuggaucaaguau

SEQ ID NO: 1475039 - RNA, 19 nt, Homo sapiens
  misc_RNA (1)...(19): siRNA sense strand
gcuaauaagaaggcagaga

SEQ ID NO: 1475040 - RNA, 19 nt, Homo sapiens
  misc_RNA (1)...(19): siRNA sense strand
gaagagaaagcuaauaaga

SEQ ID NO: 1475041 - RNA, 19 nt, Homo sapiens
  misc_RNA (1)...(19): siRNA sense strand
agagaaagcuaauaagaag

SEQ ID NO: 1475042 - RNA, 19 nt, Homo sapiens
  misc_RNA (1)...(19): siRNA sense strand
gcugcuggaucaaguauca

SEQ ID NO: 1475043 - RNA, 19 nt, Homo sapiens
  misc_RNA (1)...(19): siRNA sense strand
cugaagagaaagcuaauaa

SEQ ID NO: 1475044 - RNA, 19 nt, Homo sapiens
  misc_RNA (1)...(19): siRNA sense strand
gagagaagaggaagagucu

SEQ ID NO: 1475045 - RNA, 19 nt, Homo sapiens
  misc_RNA (1)...(19): siRNA sense strand
gucuuggucuuuggaaaua

SEQ ID NO: 1475046 - RNA, 19 nt, Homo sapiens
  misc_RNA (1)...(19): siRNA sense strand
uaagaaggcagagagaaga

SEQ ID NO: 1475047 - RNA, 19 nt, Homo sapiens
  misc_RNA (1)...(19): siRNA sense strand
gcagagagaagaggaagag

SEQ ID NO: 1475048 - RNA, 19 nt, Homo sapiens
  misc_RNA (1)...(19): siRNA sense strand
gagucuuggucuuuggaaa

SEQ ID NO: 1475049 - RNA, 19 nt, Homo sapiens
  misc_RNA (1)...(19): siRNA sense strand
ggucuuuggaaauaucuuu

SEQ ID NO: 1475050 - RNA, 19 nt, Homo sapiens
  misc_RNA (1)...(19): siRNA sense strand
ggagcugcuggaucaagua

SEQ ID NO: 1475051 - RNA, 19 nt, Homo sapiens
  misc_RNA (1)...(19): siRNA sense strand
uaauaagaaggcagagaga

SEQ ID NO: 1475052 - RNA, 19 nt, Homo sapiens
  misc_RNA (1)...(19): siRNA sense strand
gagcugcuggaucaaguau

SEQ ID NO: 1475053 - RNA, 19 nt, Homo sapiens
  misc_RNA (1)...(19): siRNA sense strand
gcuaauaagaaggcagaga

SEQ ID NO: 1475054 - RNA, 19 nt, Homo sapiens
  misc_RNA (1)...(19): siRNA sense strand
uggaacagcugcagccauu

SEQ ID NO: 1475055 - RNA, 19 nt, Homo sapiens
  misc_RNA (1)...(19): siRNA sense strand
ccucaccuuucuacaagua

SEQ ID NO: 1475056 - RNA, 19 nt, Homo sapiens
  misc_RNA (1)...(19): siRNA sense strand
ggaaaccugggacaucuga

SEQ ID NO: 1475057 - RNA, 19 nt, Homo sapiens
  misc_RNA (1)...(19): siRNA sense strand
gaacagcugcagccauuuu

SEQ ID NO: 1475058 - RNA, 19 nt, Homo sapiens
  misc_RNA (1)...(19): siRNA sense strand
gaugugaggucuggaacag

SEQ ID NO: 1475059 - RNA, 19 nt, Homo sapiens
  misc_RNA (1)...(19): siRNA sense strand
ccugggacaucugaacuga

SEQ ID NO: 1475060 - RNA, 19 nt, Homo sapiens
  misc_RNA (1)...(19): siRNA sense strand
acucuucccucaccuuucu

SEQ ID NO: 1475061 - RNA, 19 nt, Homo sapiens
  misc_RNA (1)...(19): siRNA sense strand
ugggaaaccugggacaucu

SEQ ID NO: 1475062 - RNA, 19 nt, Homo sapiens
  misc_RNA (1)...(19): siRNA sense strand
ucccucaccuuucuacaag

SEQ ID NO: 1475063 - RNA, 19 nt, Homo sapiens
  misc_RNA (1)...(19): siRNA sense strand
cuacucuucccucaccuuu

SEQ ID NO: 1475064 - RNA, 19 nt, Homo sapiens
  misc_RNA (1)...(19): siRNA sense strand
ggaacagcugcagccauuu

SEQ ID NO: 1475065 - RNA, 19 nt, Homo sapiens
  misc_RNA (1)...(19): siRNA sense strand
uggaacagcugcagccauu

SEQ ID NO: 1475066 - RNA, 19 nt, Homo sapiens
  misc_RNA (1)...(19): siRNA sense strand
ccucaccuuucuacaagua

SEQ ID NO: 1475067 - RNA, 19 nt, Homo sapiens
  misc_RNA (1)...(19): siRNA sense strand
ggaaaccugggacaucuga

SEQ ID NO: 1475068 - RNA, 19 nt, Homo sapiens
  misc_RNA (1)...(19): siRNA sense strand
gaacagcugcagccauuuu

SEQ ID NO: 1475069 - RNA, 19 nt, Homo sapiens
  misc_RNA (1)...(19): siRNA sense strand
gaugugaggucuggaacag

SEQ ID NO: 1475070 - RNA, 19 nt, Homo sapiens
  misc_RNA (1)...(19): siRNA sense strand
ccugggacaucugaacuga

SEQ ID NO: 1475071 - RNA, 19 nt, Homo sapiens
  misc_RNA (1)...(19): siRNA sense strand
acucuucccucaccuuucu

SEQ ID NO: 1475072 - RNA, 19 nt, Homo sapiens
  misc_RNA (1)...(19): siRNA sense strand
ugggaaaccugggacaucu

SEQ ID NO: 1475073 - RNA, 19 nt, Homo sapiens
  misc_RNA (1)...(19): siRNA sense strand
ucccucaccuuucuacaag

SEQ ID NO: 1475074 - RNA, 19 nt, Homo sapiens
  misc_RNA (1)...(19): siRNA sense strand
cuacucuucccucaccuuu

SEQ ID NO: 1475075 - RNA, 19 nt, Homo sapiens
  misc_RNA (1)...(19): siRNA sense strand
ggaacagcugcagccauuu

SEQ ID NO: 1475076 - RNA, 19 nt, Homo sapiens
  misc_RNA (1)...(19): siRNA sense strand
gaauguagguggcagauau

SEQ ID NO: 1475077 - RNA, 19 nt, Homo sapiens
  misc_RNA (1)...(19): siRNA sense strand
gauaugagcuugccuuugg

SEQ ID NO: 1475078 - RNA, 19 nt, Homo sapiens
  misc_RNA (1)...(19): siRNA sense strand
ggaggccacuguacaagua

SEQ ID NO: 1475079 - RNA, 19 nt, Homo sapiens
  misc_RNA (1)...(19): siRNA sense strand
ccaaugagaucaacacugu

SEQ ID NO: 1475080 - RNA, 19 nt, Homo sapiens
  misc_RNA (1)...(19): siRNA sense strand
gcuaauaugcagucagaua

SEQ ID NO: 1475081 - RNA, 19 nt, Homo sapiens
  misc_RNA (1)...(19): siRNA sense strand
gaccuccacucaccaauga

SEQ ID NO: 1475082 - RNA, 19 nt, Homo sapiens
  misc_RNA (1)...(19): siRNA sense strand
gaaugucuccggccucuuu

SEQ ID NO: 1475083 - RNA, 19 nt, Homo sapiens
  misc_RNA (1)...(19): siRNA sense strand
gaaaggaggccacuguaca

SEQ ID NO: 1475084 - RNA, 19 nt, Homo sapiens
  misc_RNA (1)...(19): siRNA sense strand
cagcuaauaugcagucaga

SEQ ID NO: 1475085 - RNA, 19 nt, Homo sapiens
  misc_RNA (1)...(19): siRNA sense strand
cagaaaccauugaguagug

SEQ ID NO: 1475086 - RNA, 19 nt, Homo sapiens
  misc_RNA (1)...(19): siRNA sense strand
cuucccagcuccuuaauga

SEQ ID NO: 1475087 - RNA, 19 nt, Homo sapiens
  misc_RNA (1)...(19): siRNA sense strand
gguccuggcuggaguuucu

SEQ ID NO: 1475088 - RNA, 19 nt, Homo sapiens
  misc_RNA (1)...(19): siRNA sense strand
gugcagcuccugaccauga

SEQ ID NO: 1475089 - RNA, 19 nt, Homo sapiens
  misc_RNA (1)...(19): siRNA sense strand
aaagaaaggaggccacugu

SEQ ID NO: 1475090 - RNA, 19 nt, Homo sapiens
  misc_RNA (1)...(19): siRNA sense strand
ggaccuccacucaccaaug

SEQ ID NO: 1475091 - RNA, 19 nt, Homo sapiens
  misc_RNA (1)...(19): siRNA sense strand
gagcuugccuuugggaacu

SEQ ID NO: 1475092 - RNA, 19 nt, Homo sapiens
  misc_RNA (1)...(19): siRNA sense strand
cagauucguuuggagaaga

SEQ ID NO: 1475093 - RNA, 19 nt, Homo sapiens
  misc_RNA (1)...(19): siRNA sense strand
ugccuucgaugguguauca

SEQ ID NO: 1475094 - RNA, 19 nt, Homo sapiens
  misc_RNA (1)...(19): siRNA sense strand
aaaggaggccacuguacaa

SEQ ID NO: 1475095 - RNA, 19 nt, Homo sapiens
  misc_RNA (1)...(19): siRNA sense strand
cccagcuccuuaaugauuu

SEQ ID NO: 1475096 - RNA, 19 nt, Homo sapiens
  misc_RNA (1)...(19): siRNA sense strand
gcagucagauauaaaaguc

SEQ ID NO: 1475097 - RNA, 19 nt, Homo sapiens
  misc_RNA (1)...(19): siRNA sense strand
ucccagcuccuuaaugauu

SEQ ID NO: 1475098 - RNA, 19 nt, Homo sapiens
  misc_RNA (1)...(19): siRNA sense strand
cuccagaaaccauugagua

SEQ ID NO: 1475099 - RNA, 19 nt, Homo sapiens
  misc_RNA (1)...(19): siRNA sense strand
ccagcuccuuaaugauuug

SEQ ID NO: 1475100 - RNA, 19 nt, Homo sapiens
  misc_RNA (1)...(19): siRNA sense strand
ccucagggcagacuuucuu

SEQ ID NO: 1475101 - RNA, 19 nt, Homo sapiens
  misc_RNA (1)...(19): siRNA sense strand
aagaaaggaggccacugua

SEQ ID NO: 1475102 - RNA, 19 nt, Homo sapiens
  misc_RNA (1)...(19): siRNA sense strand
gagcaccccucaaagaaag

SEQ ID NO: 1475103 - RNA, 19 nt, Homo sapiens
  misc_RNA (1)...(19): siRNA sense strand
gagagcaccccucaaagaa

SEQ ID NO: 1475104 - RNA, 19 nt, Homo sapiens
  misc_RNA (1)...(19): siRNA sense strand
cagauaugagcuugccuuu

SEQ ID NO: 1475105 - RNA, 19 nt, Homo sapiens
  misc_RNA (1)...(19): siRNA sense strand
ccauucacgucugaguuga

SEQ ID NO: 1475106 - RNA, 19 nt, Homo sapiens
  misc_RNA (1)...(19): siRNA sense strand
gcccuucacagcuaauaug

SEQ ID NO: 1475107 - RNA, 19 nt, Homo sapiens
  misc_RNA (1)...(19): siRNA sense strand
gcucuugcccgaggcuauu

SEQ ID NO: 1475108 - RNA, 19 nt, Homo sapiens
  misc_RNA (1)...(19): siRNA sense strand
ccucaacuccuccaugucu

SEQ ID NO: 1475109 - RNA, 19 nt, Homo sapiens
  misc_RNA (1)...(19): siRNA sense strand
gauauaaaaguccagauuc

SEQ ID NO: 1475110 - RNA, 19 nt, Homo sapiens
  misc_RNA (1)...(19): siRNA sense strand
ccucuuuguucuccucugu

SEQ ID NO: 1475111 - RNA, 19 nt, Homo sapiens
  misc_RNA (1)...(19): siRNA sense strand
uaaaaguccagauucguuu

SEQ ID NO: 1475112 - RNA, 19 nt, Homo sapiens
  misc_RNA (1)...(19): siRNA sense strand
ccagaaaccauugaguagu

SEQ ID NO: 1475113 - RNA, 19 nt, Homo sapiens
  misc_RNA (1)...(19): siRNA sense strand
auucacgucugaguugauu

SEQ ID NO: 1475114 - RNA, 19 nt, Homo sapiens
  misc_RNA (1)...(19): siRNA sense strand
gaguagugccuucgauggu

SEQ ID NO: 1475115 - RNA, 19 nt, Homo sapiens
  misc_RNA (1)...(19): siRNA sense strand
ccagauucguuuggagaag

SEQ ID NO: 1475116 - RNA, 19 nt, Homo sapiens
  misc_RNA (1)...(19): siRNA sense strand
ucacgucugaguugauugu

SEQ ID NO: 1475117 - RNA, 19 nt, Homo sapiens
  misc_RNA (1)...(19): siRNA sense strand
gcuggccgcugucgagaaa

SEQ ID NO: 1475118 - RNA, 19 nt, Homo sapiens
  misc_RNA (1)...(19): siRNA sense strand
gcuacgaccugcuggaacu

SEQ ID NO: 1475119 - RNA, 19 nt, Homo sapiens
  misc_RNA (1)...(19): siRNA sense strand
guuugcagcccuaguguuu

SEQ ID NO: 1475120 - RNA, 19 nt, Homo sapiens
  misc_RNA (1)...(19): siRNA sense strand
uccagaagaauuccucuaa

SEQ ID NO: 1475121 - RNA, 19 nt, Homo sapiens
  misc_RNA (1)...(19): siRNA sense strand
cugcagcccucggugauug

SEQ ID NO: 1475122 - RNA, 19 nt, Homo sapiens
  misc_RNA (1)...(19): siRNA sense strand
ccucggugauugagaacug

SEQ ID NO: 1475123 - RNA, 19 nt, Homo sapiens
  misc_RNA (1)...(19): siRNA sense strand
ugccggagccauggaauuu

SEQ ID NO: 1475124 - RNA, 19 nt, Homo sapiens
  misc_RNA (1)...(19): siRNA sense strand
gggcuacgaccugcuggaa

SEQ ID NO: 1475125 - RNA, 19 nt, Homo sapiens
  misc_RNA (1)...(19): siRNA sense strand
gaagaauuccucuaaguuu

SEQ ID NO: 1475126 - RNA, 19 nt, Homo sapiens
  misc_RNA (1)...(19): siRNA sense strand
uaaaggcagucgacauuaa

SEQ ID NO: 1475127 - RNA, 19 nt, Homo sapiens
  misc_RNA (1)...(19): siRNA sense strand
cagaagaauuccucuaagu

SEQ ID NO: 1475128 - RNA, 19 nt, Homo sapiens
  misc_RNA (1)...(19): siRNA sense strand
gcuggccgcugucgagaaa

SEQ ID NO: 1475129 - RNA, 19 nt, Homo sapiens
  misc_RNA (1)...(19): siRNA sense strand
gacgaugcaugccauauac

SEQ ID NO: 1475130 - RNA, 19 nt, Homo sapiens
  misc_RNA (1)...(19): siRNA sense strand
uuaagaagccucugguuuc

SEQ ID NO: 1475131 - RNA, 19 nt, Homo sapiens
  misc_RNA (1)...(19): siRNA sense strand
ccagaagaauuccucuaag

SEQ ID NO: 1475132 - RNA, 19 nt, Homo sapiens
  misc_RNA (1)...(19): siRNA sense strand
agacgaugcaugccauaua

SEQ ID NO: 1475133 - RNA, 19 nt, Homo sapiens
  misc_RNA (1)...(19): siRNA sense strand
aagaauuccucuaaguuuc

SEQ ID NO: 1475134 - RNA, 19 nt, Homo sapiens
  misc_RNA (1)...(19): siRNA sense strand
agaagaauuccucuaaguu

SEQ ID NO: 1475135 - RNA, 19 nt, Homo sapiens
  misc_RNA (1)...(19): siRNA sense strand
accaggauguugccgguua

SEQ ID NO: 1475136 - RNA, 19 nt, Homo sapiens
  misc_RNA (1)...(19): siRNA sense strand
gcuacgaccugcuggaacu

SEQ ID NO: 1475137 - RNA, 19 nt, Homo sapiens
  misc_RNA (1)...(19): siRNA sense strand
guuugcagcccuaguguuu

SEQ ID NO: 1475138 - RNA, 19 nt, Homo sapiens
  misc_RNA (1)...(19): siRNA sense strand
uuaaaggcagucgacauua

SEQ ID NO: 1475139 - RNA, 19 nt, Homo sapiens
  misc_RNA (1)...(19): siRNA sense strand
gcagacgaugcaugccaua

SEQ ID NO: 1475140 - RNA, 19 nt, Homo sapiens
  misc_RNA (1)...(19): siRNA sense strand
uccagaagaauuccucuaa

SEQ ID NO: 1475141 - RNA, 19 nt, Homo sapiens
  misc_RNA (1)...(19): siRNA sense strand
uuuaaaggcagucgacauu

SEQ ID NO: 1475142 - RNA, 19 nt, Homo sapiens
  misc_RNA (1)...(19): siRNA sense strand
cugcagcccucggugauug

SEQ ID NO: 1475143 - RNA, 19 nt, Homo sapiens
  misc_RNA (1)...(19): siRNA sense strand
ccucuaaguuucauuucag

SEQ ID NO: 1475144 - RNA, 19 nt, Homo sapiens
  misc_RNA (1)...(19): siRNA sense strand
gaauuccucuaaguuucau

SEQ ID NO: 1475145 - RNA, 19 nt, Homo sapiens
  misc_RNA (1)...(19): siRNA sense strand
guaacaugcaggccuggaa

SEQ ID NO: 1475146 - RNA, 19 nt, Homo sapiens
  misc_RNA (1)...(19): siRNA sense strand
ugccauauacgaaaggaaa

SEQ ID NO: 1475147 - RNA, 19 nt, Homo sapiens
  misc_RNA (1)...(19): siRNA sense strand
gcugggagccauccugaag

SEQ ID NO: 1475148 - RNA, 19 nt, Homo sapiens
  misc_RNA (1)...(19): siRNA sense strand
auuaagaagccucugguuu

SEQ ID NO: 1475149 - RNA, 19 nt, Homo sapiens
  misc_RNA (1)...(19): siRNA sense strand
ugcagacccucgaacaugu

SEQ ID NO: 1475150 - RNA, 19 nt, Homo sapiens
  misc_RNA (1)...(19): siRNA sense strand
gaugcaugccauauacgaa

SEQ ID NO: 1475151 - RNA, 19 nt, Homo sapiens
  misc_RNA (1)...(19): siRNA sense strand
ccucggugauugagaacug

SEQ ID NO: 1475152 - RNA, 19 nt, Homo sapiens
  misc_RNA (1)...(19): siRNA sense strand
ugccggagccauggaauuu

SEQ ID NO: 1475153 - RNA, 19 nt, Homo sapiens
  misc_RNA (1)...(19): siRNA sense strand
cuacagcgccguggaugug

SEQ ID NO: 1475154 - RNA, 19 nt, Homo sapiens
  misc_RNA (1)...(19): siRNA sense strand
agaauuccucuaaguuuca

SEQ ID NO: 1475155 - RNA, 19 nt, Homo sapiens
  misc_RNA (1)...(19): siRNA sense strand
gggcuacgaccugcuggaa

SEQ ID NO: 1475156 - RNA, 19 nt, Homo sapiens
  misc_RNA (1)...(19): siRNA sense strand
ccaggauguugccgguuag

SEQ ID NO: 1475157 - RNA, 19 nt, Homo sapiens
  misc_RNA (1)...(19): siRNA sense strand
gcagacccucgaacaugug

SEQ ID NO: 1475158 - RNA, 19 nt, Homo sapiens
  misc_RNA (1)...(19): siRNA sense strand
gaacauggcagaaauuaug

SEQ ID NO: 1475159 - RNA, 19 nt, Homo sapiens
  misc_RNA (1)...(19): siRNA sense strand
gauaaaugauucucugcua

SEQ ID NO: 1475160 - RNA, 19 nt, Homo sapiens
  misc_RNA (1)...(19): siRNA sense strand
gaaauuuaaucgccaaugu

SEQ ID NO: 1475161 - RNA, 19 nt, Homo sapiens
  misc_RNA (1)...(19): siRNA sense strand
gguguaaucuucugcugua

SEQ ID NO: 1475162 - RNA, 19 nt, Homo sapiens
  misc_RNA (1)...(19): siRNA sense strand
acagauauccuuugcuuua

SEQ ID NO: 1475163 - RNA, 19 nt, Homo sapiens
  misc_RNA (1)...(19): siRNA sense strand
cugcaaauguuaugguuua

SEQ ID NO: 1475164 - RNA, 19 nt, Homo sapiens
  misc_RNA (1)...(19): siRNA sense strand
ccacagauauccuuugcuu

SEQ ID NO: 1475165 - RNA, 19 nt, Homo sapiens
  misc_RNA (1)...(19): siRNA sense strand
ugacauggauaaaugauuc

SEQ ID NO: 1475166 - RNA, 19 nt, Homo sapiens
  misc_RNA (1)...(19): siRNA sense strand
ucaagacucugcaaauguu

SEQ ID NO: 1475167 - RNA, 19 nt, Homo sapiens
  misc_RNA (1)...(19): siRNA sense strand
gagaacauggcagaaauua

SEQ ID NO: 1475168 - RNA, 19 nt, Homo sapiens
  misc_RNA (1)...(19): siRNA sense strand
ggugugacauggauaaaug

SEQ ID NO: 1475169 - RNA, 19 nt, Homo sapiens
  misc_RNA (1)...(19): siRNA sense strand
gguauaaggucauugucuu

SEQ ID NO: 1475170 - RNA, 19 nt, Homo sapiens
  misc_RNA (1)...(19): siRNA sense strand
caauagcuaugccgcaauu

SEQ ID NO: 1475171 - RNA, 19 nt, Homo sapiens
  misc_RNA (1)...(19): siRNA sense strand
caaagcucauguugaaauu

SEQ ID NO: 1475172 - RNA, 19 nt, Homo sapiens
  misc_RNA (1)...(19): siRNA sense strand
gcaaacaccauccuucuuc

SEQ ID NO: 1475173 - RNA, 19 nt, Homo sapiens
  misc_RNA (1)...(19): siRNA sense strand
ggacuuuacguucucauuu

SEQ ID NO: 1475174 - RNA, 19 nt, Homo sapiens
  misc_RNA (1)...(19): siRNA sense strand
caagucacaucuuaggauu

SEQ ID NO: 1475175 - RNA, 19 nt, Homo sapiens
  misc_RNA (1)...(19): siRNA sense strand
aggaugaucuuagguauaa

SEQ ID NO: 1475176 - RNA, 19 nt, Homo sapiens
  misc_RNA (1)...(19): siRNA sense strand
guccuuugaugcuaauuua

SEQ ID NO: 1475177 - RNA, 19 nt, Homo sapiens
  misc_RNA (1)...(19): siRNA sense strand
gaggcuacauggugauuau

SEQ ID NO: 1475178 - RNA, 19 nt, Homo sapiens
  misc_RNA (1)...(19): siRNA sense strand
cuccaaagcucauguugaa

SEQ ID NO: 1475179 - RNA, 19 nt, Homo sapiens
  misc_RNA (1)...(19): siRNA sense strand
caauauugguguccuuaga

SEQ ID NO: 1475180 - RNA, 19 nt, Homo sapiens
  misc_RNA (1)...(19): siRNA sense strand
uggcagaaauuaugcuauu

SEQ ID NO: 1475181 - RNA, 19 nt, Homo sapiens
  misc_RNA (1)...(19): siRNA sense strand
uaaguccauugacaugaua

SEQ ID NO: 1475182 - RNA, 19 nt, Homo sapiens
  misc_RNA (1)...(19): siRNA sense strand
ugagggaugucaccuuuau

SEQ ID NO: 1475183 - RNA, 19 nt, Homo sapiens
  misc_RNA (1)...(19): siRNA sense strand
cagauauccuuugcuuuaa

SEQ ID NO: 1475184 - RNA, 19 nt, Homo sapiens
  misc_RNA (1)...(19): siRNA sense strand
guucauugguguaaucuuc

SEQ ID NO: 1475185 - RNA, 19 nt, Homo sapiens
  misc_RNA (1)...(19): siRNA sense strand
ccauugacaugauaauuag

SEQ ID NO: 1475186 - RNA, 19 nt, Homo sapiens
  misc_RNA (1)...(19): siRNA sense strand
gcugauaaccaaauauuca

SEQ ID NO: 1475187 - RNA, 19 nt, Homo sapiens
  misc_RNA (1)...(19): siRNA sense strand
gauaauuagucaccugucu

SEQ ID NO: 1475188 - RNA, 19 nt, Homo sapiens
  misc_RNA (1)...(19): siRNA sense strand
ggaggugugacauggauaa

SEQ ID NO: 1475189 - RNA, 19 nt, Homo sapiens
  misc_RNA (1)...(19): siRNA sense strand
ccaaagcucauguugaaau

SEQ ID NO: 1475190 - RNA, 19 nt, Homo sapiens
  misc_RNA (1)...(19): siRNA sense strand
gcaaagcucaaacauccuu

SEQ ID NO: 1475191 - RNA, 19 nt, Homo sapiens
  misc_RNA (1)...(19): siRNA sense strand
caauguggcaguacuaaga

SEQ ID NO: 1475192 - RNA, 19 nt, Homo sapiens
  misc_RNA (1)...(19): siRNA sense strand
ucacaggucuaaguccauu

SEQ ID NO: 1475193 - RNA, 19 nt, Homo sapiens
  misc_RNA (1)...(19): siRNA sense strand
gggccagucuucuguuugu

SEQ ID NO: 1475194 - RNA, 19 nt, Homo sapiens
  misc_RNA (1)...(19): siRNA sense strand
gcaagucacaucuuaggau

SEQ ID NO: 1475195 - RNA, 19 nt, Homo sapiens
  misc_RNA (1)...(19): siRNA sense strand
caaacauccuucugcaagu

SEQ ID NO: 1475196 - RNA, 19 nt, Homo sapiens
  misc_RNA (1)...(19): siRNA sense strand
caacauguucauuggugua

SEQ ID NO: 1475197 - RNA, 19 nt, Homo sapiens
  misc_RNA (1)...(19): siRNA sense strand
guauaaggucauugucuuu

SEQ ID NO: 1475198 - RNA, 19 nt, Homo sapiens
  misc_RNA (1)...(19): siRNA sense strand
cuucuaagaugaucaaacu

SEQ ID NO: 1475199 - RNA, 19 nt, Homo sapiens
  misc_RNA (1)...(19): siRNA sense strand
cauuagaucucuugcuuuu

SEQ ID NO: 1475200 - RNA, 19 nt, Homo sapiens
  misc_RNA (1)...(19): siRNA sense strand
ucaggaugaucuuagguau

SEQ ID NO: 1475201 - RNA, 19 nt, Homo sapiens
  misc_RNA (1)...(19): siRNA sense strand
cuaaguccauugacaugau

SEQ ID NO: 1475202 - RNA, 19 nt, Homo sapiens
  misc_RNA (1)...(19): siRNA sense strand
acaauaagaggcuaucuca

SEQ ID NO: 1475203 - RNA, 19 nt, Homo sapiens
  misc_RNA (1)...(19): siRNA sense strand
uuugagggaugucaccuuu

SEQ ID NO: 1475204 - RNA, 19 nt, Homo sapiens
  misc_RNA (1)...(19): siRNA sense strand
caaacaccauccuucuucu

SEQ ID NO: 1475205 - RNA, 19 nt, Homo sapiens
  misc_RNA (1)...(19): siRNA sense strand
cacagaauacucaggauga

SEQ ID NO: 1475206 - RNA, 19 nt, Homo sapiens
  misc_RNA (1)...(19): siRNA sense strand
ucucauggguccucaacau

SEQ ID NO: 1475207 - RNA, 19 nt, Homo sapiens
  misc_RNA (1)...(19): siRNA sense strand
uaguguggcuccagguuau

SEQ ID NO: 1475208 - RNA, 19 nt, Homo sapiens
  misc_RNA (1)...(19): siRNA sense strand
aauaagaggcuaucucagu

SEQ ID NO: 1475209 - RNA, 19 nt, Homo sapiens
  misc_RNA (1)...(19): siRNA sense strand
gaugcuaauuuaugcugau

SEQ ID NO: 1475210 - RNA, 19 nt, Homo sapiens
  misc_RNA (1)...(19): siRNA sense strand
caagacucugcaaauguua

SEQ ID NO: 1475211 - RNA, 19 nt, Homo sapiens
  misc_RNA (1)...(19): siRNA sense strand
cucauuagaucucuugcuu

SEQ ID NO: 1475212 - RNA, 19 nt, Homo sapiens
  misc_RNA (1)...(19): siRNA sense strand
ucuuacugcuggugaguuu

SEQ ID NO: 1475213 - RNA, 19 nt, Homo sapiens
  misc_RNA (1)...(19): siRNA sense strand
caggaugaucuuagguaua

SEQ ID NO: 1475214 - RNA, 19 nt, Homo sapiens
  misc_RNA (1)...(19): siRNA sense strand
gacuuuacguucucauuuu

SEQ ID NO: 1475215 - RNA, 19 nt, Homo sapiens
  misc_RNA (1)...(19): siRNA sense strand
cauacuggguggacuuuac

SEQ ID NO: 1475216 - RNA, 19 nt, Homo sapiens
  misc_RNA (1)...(19): siRNA sense strand
cauguucauugguguaauc

SEQ ID NO: 1475217 - RNA, 19 nt, Homo sapiens
  misc_RNA (1)...(19): siRNA sense strand
caggaggugugacauggau

SEQ ID NO: 1475218 - RNA, 19 nt, Homo sapiens
  misc_RNA (1)...(19): siRNA sense strand
uuccacaucuucaccuuug

SEQ ID NO: 1475219 - RNA, 19 nt, Homo sapiens
  misc_RNA (1)...(19): siRNA sense strand
aaauauuugucuccuccaa

SEQ ID NO: 1475220 - RNA, 19 nt, Homo sapiens
  misc_RNA (1)...(19): siRNA sense strand
ggcagaaauuaugcuauuc

SEQ ID NO: 1475221 - RNA, 19 nt, Homo sapiens
  misc_RNA (1)...(19): siRNA sense strand
guucaugguccucucaaga

SEQ ID NO: 1475222 - RNA, 19 nt, Homo sapiens
  misc_RNA (1)...(19): siRNA sense strand
uugagaacauggcagaaau

SEQ ID NO: 1475223 - RNA, 19 nt, Homo sapiens
  misc_RNA (1)...(19): siRNA sense strand
aaacauccuucugcaaguc

SEQ ID NO: 1475224 - RNA, 19 nt, Homo sapiens
  misc_RNA (1)...(19): siRNA sense strand
ggcaauauugguguccuua

SEQ ID NO: 1475225 - RNA, 19 nt, Homo sapiens
  misc_RNA (1)...(19): siRNA sense strand
gagggaugucaccuuuaua

SEQ ID NO: 1475226 - RNA, 19 nt, Homo sapiens
  misc_RNA (1)...(19): siRNA sense strand
ugagaacauggcagaaauu

SEQ ID NO: 1475227 - RNA, 19 nt, Homo sapiens
  misc_RNA (1)...(19): siRNA sense strand
auucaagacucugcaaaug

SEQ ID NO: 1475228 - RNA, 19 nt, Homo sapiens
  misc_RNA (1)...(19): siRNA sense strand
uaaaugauucucugcuagu

SEQ ID NO: 1475229 - RNA, 19 nt, Homo sapiens
  misc_RNA (1)...(19): siRNA sense strand
gcuacauggugauuauuuu

SEQ ID NO: 1475230 - RNA, 19 nt, Homo sapiens
  misc_RNA (1)...(19): siRNA sense strand
ggcuacauggugauuauuu

SEQ ID NO: 1475231 - RNA, 19 nt, Homo sapiens
  misc_RNA (1)...(19): siRNA sense strand
ggucuaaguccauugacau

SEQ ID NO: 1475232 - RNA, 19 nt, Homo sapiens
  misc_RNA (1)...(19): siRNA sense strand
cuaguguggcuccagguua

SEQ ID NO: 1475233 - RNA, 19 nt, Homo sapiens
  misc_RNA (1)...(19): siRNA sense strand
ucuaagaugaucaaacuuc

SEQ ID NO: 1475234 - RNA, 19 nt, Homo sapiens
  misc_RNA (1)...(19): siRNA sense strand
ccacaucuucaccuuuguu

SEQ ID NO: 1475235 - RNA, 19 nt, Homo sapiens
  misc_RNA (1)...(19): siRNA sense strand
guaaucuucugcuguacac

SEQ ID NO: 1475236 - RNA, 19 nt, Homo sapiens
  misc_RNA (1)...(19): siRNA sense strand
cgcaauuaguccuuugaug

SEQ ID NO: 1475237 - RNA, 19 nt, Homo sapiens
  misc_RNA (1)...(19): siRNA sense strand
ucacaucuuaggauucuuc

SEQ ID NO: 1475238 - RNA, 19 nt, Homo sapiens
  misc_RNA (1)...(19): siRNA sense strand
cagcaaacaccauccuucu

SEQ ID NO: 1475239 - RNA, 19 nt, Homo sapiens
  misc_RNA (1)...(19): siRNA sense strand
gcaauauugguguccuuag

SEQ ID NO: 1475240 - RNA, 19 nt, Homo sapiens
  misc_RNA (1)...(19): siRNA sense strand
uggcaguacuaagaaguga

SEQ ID NO: 1475241 - RNA, 19 nt, Homo sapiens
  misc_RNA (1)...(19): siRNA sense strand
ugaguuuugucuucacaua

SEQ ID NO: 1475242 - RNA, 19 nt, Homo sapiens
  misc_RNA (1)...(19): siRNA sense strand
guccucaacauguucauug

SEQ ID NO: 1475243 - RNA, 19 nt, Homo sapiens
  misc_RNA (1)...(19): siRNA sense strand
ucacacuaaugacuuugag

SEQ ID NO: 1475244 - RNA, 19 nt, Homo sapiens
  misc_RNA (1)...(19): siRNA sense strand
aacaccauccuucuucuuu

SEQ ID NO: 1475245 - RNA, 19 nt, Homo sapiens
  misc_RNA (1)...(19): siRNA sense strand
aaaugauucucugcuagug

SEQ ID NO: 1475246 - RNA, 19 nt, Homo sapiens
  misc_RNA (1)...(19): siRNA sense strand
ucacauacuggguggacuu

SEQ ID NO: 1475247 - RNA, 19 nt, Homo sapiens
  misc_RNA (1)...(19): siRNA sense strand
acagaauacucaggaugau

SEQ ID NO: 1475248 - RNA, 19 nt, Homo sapiens
  misc_RNA (1)...(19): siRNA sense strand
gacaauaagaggcuaucuc

SEQ ID NO: 1475249 - RNA, 19 nt, Homo sapiens
  misc_RNA (1)...(19): siRNA sense strand
agucacaucuuaggauucu

SEQ ID NO: 1475250 - RNA, 19 nt, Homo sapiens
  misc_RNA (1)...(19): siRNA sense strand
uucugcaagucacaucuua

SEQ ID NO: 1475251 - RNA, 19 nt, Homo sapiens
  misc_RNA (1)...(19): siRNA sense strand
ccacauacugcugcucuuc

SEQ ID NO: 1475252 - RNA, 19 nt, Homo sapiens
  misc_RNA (1)...(19): siRNA sense strand
gaauuucagcaaacaccau

SEQ ID NO: 1475253 - RNA, 19 nt, Homo sapiens
  misc_RNA (1)...(19): siRNA sense strand
aauuaguccuuugaugcua

SEQ ID NO: 1475254 - RNA, 19 nt, Homo sapiens
  misc_RNA (1)...(19): siRNA sense strand
gcuauucucauuagaucuc

SEQ ID NO: 1475255 - RNA, 19 nt, Homo sapiens
  misc_RNA (1)...(19): siRNA sense strand
gcuaguguggcuccagguu

SEQ ID NO: 1475256 - RNA, 19 nt, Homo sapiens
  misc_RNA (1)...(19): siRNA sense strand
ccuccaaagcucauguuga

SEQ ID NO: 1475257 - RNA, 19 nt, Homo sapiens
  misc_RNA (1)...(19): siRNA sense strand
uagcuaugccgcaauuagu

SEQ ID NO: 1475258 - RNA, 19 nt, Homo sapiens
  misc_RNA (1)...(19): siRNA sense strand
gcauuaagaugucagagaa

SEQ ID NO: 1475259 - RNA, 19 nt, Homo sapiens
  misc_RNA (1)...(19): siRNA sense strand
ggacuuacgagaauggaaa

SEQ ID NO: 1475260 - RNA, 19 nt, Homo sapiens
  misc_RNA (1)...(19): siRNA sense strand
gaaagcagcccgucuucag

SEQ ID NO: 1475261 - RNA, 19 nt, Homo sapiens
  misc_RNA (1)...(19): siRNA sense strand
uuacgagaauggaaaggaa

SEQ ID NO: 1475262 - RNA, 19 nt, Homo sapiens
  misc_RNA (1)...(19): siRNA sense strand
gcacuucccaccuguaguc

SEQ ID NO: 1475263 - RNA, 19 nt, Homo sapiens
  misc_RNA (1)...(19): siRNA sense strand
gagggaggacuuacgagaa

SEQ ID NO: 1475264 - RNA, 19 nt, Homo sapiens
  misc_RNA (1)...(19): siRNA sense strand
cuucccaccuguagucuuu

SEQ ID NO: 1475265 - RNA, 19 nt, Homo sapiens
  misc_RNA (1)...(19): siRNA sense strand
guagugaucaagcucagaa

SEQ ID NO: 1475266 - RNA, 19 nt, Homo sapiens
  misc_RNA (1)...(19): siRNA sense strand
gacagugggagcauuaaga

SEQ ID NO: 1475267 - RNA, 19 nt, Homo sapiens
  misc_RNA (1)...(19): siRNA sense strand
gcugccaucgcuuaaauga

SEQ ID NO: 1475268 - RNA, 19 nt, Homo sapiens
  misc_RNA (1)...(19): siRNA sense strand
ugucagagaaugagcaguu

SEQ ID NO: 1475269 - RNA, 19 nt, Homo sapiens
  misc_RNA (1)...(19): siRNA sense strand
agggaggacuuacgagaau

SEQ ID NO: 1475270 - RNA, 19 nt, Homo sapiens
  misc_RNA (1)...(19): siRNA sense strand
ggaaagcagcccgucuuca

SEQ ID NO: 1475271 - RNA, 19 nt, Homo sapiens
  misc_RNA (1)...(19): siRNA sense strand
cugcugccaucgcuuaaau

SEQ ID NO: 1475272 - RNA, 19 nt, Homo sapiens
  misc_RNA (1)...(19): siRNA sense strand
cgguggagcuggaguucga

SEQ ID NO: 1475273 - RNA, 19 nt, Homo sapiens
  misc_RNA (1)...(19): siRNA sense strand
gggaggacuuacgagaaug

SEQ ID NO: 1475274 - RNA, 19 nt, Homo sapiens
  misc_RNA (1)...(19): siRNA sense strand
auuaagaugucagagaaug

SEQ ID NO: 1475275 - RNA, 19 nt, Homo sapiens
  misc_RNA (1)...(19): siRNA sense strand
ugggacagugggagcauua

SEQ ID NO: 1475276 - RNA, 19 nt, Homo sapiens
  misc_RNA (1)...(19): siRNA sense strand
gucagagaaugagcaguug

SEQ ID NO: 1475277 - RNA, 19 nt, Homo sapiens
  misc_RNA (1)...(19): siRNA sense strand
ggacagugggagcauuaag

SEQ ID NO: 1475278 - RNA, 19 nt, Homo sapiens
  misc_RNA (1)...(19): siRNA sense strand
ggaagccgaggugcagaga

SEQ ID NO: 1475279 - RNA, 19 nt, Homo sapiens
  misc_RNA (1)...(19): siRNA sense strand
cagagaaugagcaguugug

SEQ ID NO: 1475280 - RNA, 19 nt, Homo sapiens
  misc_RNA (1)...(19): siRNA sense strand
gagaauggaaaggaaagca

SEQ ID NO: 1475281 - RNA, 19 nt, Homo sapiens
  misc_RNA (1)...(19): siRNA sense strand
ggaggacuuacgagaaugg

SEQ ID NO: 1475282 - RNA, 19 nt, Homo sapiens
  misc_RNA (1)...(19): siRNA sense strand
uuaagaugucagagaauga

SEQ ID NO: 1475283 - RNA, 19 nt, Homo sapiens
  misc_RNA (1)...(19): siRNA sense strand
gugggagcauuaagauguc

SEQ ID NO: 1475284 - RNA, 19 nt, Homo sapiens
  misc_RNA (1)...(19): siRNA sense strand
gcccgaagaugacaugaaa

SEQ ID NO: 1475285 - RNA, 19 nt, Homo sapiens
  misc_RNA (1)...(19): siRNA sense strand
ucauugaguuucugucuuu

SEQ ID NO: 1475286 - RNA, 19 nt, Homo sapiens
  misc_RNA (1)...(19): siRNA sense strand
caugaaaccaggaagcuuu

SEQ ID NO: 1475287 - RNA, 19 nt, Homo sapiens
  misc_RNA (1)...(19): siRNA sense strand
agaauggccucaccagcaa

SEQ ID NO: 1475288 - RNA, 19 nt, Homo sapiens
  misc_RNA (1)...(19): siRNA sense strand
guccauaccugaaaacaau

SEQ ID NO: 1475289 - RNA, 19 nt, Homo sapiens
  misc_RNA (1)...(19): siRNA sense strand
uaucaugcgcacaaucauu

SEQ ID NO: 1475290 - RNA, 19 nt, Homo sapiens
  misc_RNA (1)...(19): siRNA sense strand
ggucauucagcgacaagaa

SEQ ID NO: 1475291 - RNA, 19 nt, Homo sapiens
  misc_RNA (1)...(19): siRNA sense strand
gaugacaugaaaccaggaa

SEQ ID NO: 1475292 - RNA, 19 nt, Homo sapiens
  misc_RNA (1)...(19): siRNA sense strand
aauaucaugcgcacaauca

SEQ ID NO: 1475293 - RNA, 19 nt, Homo sapiens
  misc_RNA (1)...(19): siRNA sense strand
aacaauaucaugcgcacaa

SEQ ID NO: 1475294 - RNA, 19 nt, Homo sapiens
  misc_RNA (1)...(19): siRNA sense strand
uugaguuucugucuuucuu

SEQ ID NO: 1475295 - RNA, 19 nt, Homo sapiens
  misc_RNA (1)...(19): siRNA sense strand
ugaagacgguggaggauug

SEQ ID NO: 1475296 - RNA, 19 nt, Homo sapiens
  misc_RNA (1)...(19): siRNA sense strand
uccaaagucugucaaugua

SEQ ID NO: 1475297 - RNA, 19 nt, Homo sapiens
  misc_RNA (1)...(19): siRNA sense strand
gcgcaaacccaggccguua

SEQ ID NO: 1475298 - RNA, 19 nt, Homo sapiens
  misc_RNA (1)...(19): siRNA sense strand
gagaagcggacucuguuug

SEQ ID NO: 1475299 - RNA, 19 nt, Homo sapiens
  misc_RNA (1)...(19): siRNA sense strand
gucgcacucuucacuauuu

SEQ ID NO: 1475300 - RNA, 19 nt, Homo sapiens
  misc_RNA (1)...(19): siRNA sense strand
ugaaugggcagccgcagua

SEQ ID NO: 1475301 - RNA, 19 nt, Homo sapiens
  misc_RNA (1)...(19): siRNA sense strand
gugugcuucuuguuuauaa

SEQ ID NO: 1475302 - RNA, 19 nt, Homo sapiens
  misc_RNA (1)...(19): siRNA sense strand
ggaagccgucggacugauu

SEQ ID NO: 1475303 - RNA, 19 nt, Homo sapiens
  misc_RNA (1)...(19): siRNA sense strand
cgacauggugugcuucuug

SEQ ID NO: 1475304 - RNA, 19 nt, Homo sapiens
  misc_RNA (1)...(19): siRNA sense strand
gacauggugugcuucuugu

SEQ ID NO: 1475305 - RNA, 19 nt, Homo sapiens
  misc_RNA (1)...(19): siRNA sense strand
gauuguggcagccuaguga

SEQ ID NO: 1475306 - RNA, 19 nt, Homo sapiens
  misc_RNA (1)...(19): siRNA sense strand
caccugcacuuuaguaguc

SEQ ID NO: 1475307 - RNA, 19 nt, Homo sapiens
  misc_RNA (1)...(19): siRNA sense strand
aaaggagacaguuguuuga

SEQ ID NO: 1475308 - RNA, 19 nt, Homo sapiens
  misc_RNA (1)...(19): siRNA sense strand
caguaugucaugcaaguuu

SEQ ID NO: 1475309 - RNA, 19 nt, Homo sapiens
  misc_RNA (1)...(19): siRNA sense strand
ggacuugcucucuccaugu

SEQ ID NO: 1475310 - RNA, 19 nt, Homo sapiens
  misc_RNA (1)...(19): siRNA sense strand
ucgcacucuucacuauuua

SEQ ID NO: 1475311 - RNA, 19 nt, Homo sapiens
  misc_RNA (1)...(19): siRNA sense strand
gaccaccugcacuuuagua

SEQ ID NO: 1475312 - RNA, 19 nt, Homo sapiens
  misc_RNA (1)...(19): siRNA sense strand
auggugugcuucuuguuua

SEQ ID NO: 1475313 - RNA, 19 nt, Homo sapiens
  misc_RNA (1)...(19): siRNA sense strand
gaagccgucggacugauug

SEQ ID NO: 1475314 - RNA, 19 nt, Homo sapiens
  misc_RNA (1)...(19): siRNA sense strand
caaacaccagcuacuguga

SEQ ID NO: 1475315 - RNA, 19 nt, Homo sapiens
  misc_RNA (1)...(19): siRNA sense strand
cauggugugcuucuuguuu

SEQ ID NO: 1475316 - RNA, 19 nt, Homo sapiens
  misc_RNA (1)...(19): siRNA sense strand
gacuugcucucuccaugug

SEQ ID NO: 1475317 - RNA, 19 nt, Homo sapiens
  misc_RNA (1)...(19): siRNA sense strand
ucaaaggagacaguuguuu

SEQ ID NO: 1475318 - RNA, 19 nt, Homo sapiens
  misc_RNA (1)...(19): siRNA sense strand
ucaagaggaacucaaagga

SEQ ID NO: 1475319 - RNA, 19 nt, Homo sapiens
  misc_RNA (1)...(19): siRNA sense strand
caacaguagugcggacucu

SEQ ID NO: 1475320 - RNA, 19 nt, Homo sapiens
  misc_RNA (1)...(19): siRNA sense strand
uccauucggucaagaggaa

SEQ ID NO: 1475321 - RNA, 19 nt, Homo sapiens
  misc_RNA (1)...(19): siRNA sense strand
gugauucuccucauuccaa

SEQ ID NO: 1475322 - RNA, 19 nt, Homo sapiens
  misc_RNA (1)...(19): siRNA sense strand
caugagaagcggacucugu

SEQ ID NO: 1475323 - RNA, 19 nt, Homo sapiens
  misc_RNA (1)...(19): siRNA sense strand
uuaguggaguggcugagaa

SEQ ID NO: 1475324 - RNA, 19 nt, Homo sapiens
  misc_RNA (1)...(19): siRNA sense strand
cgcaguaugucaugcaagu

SEQ ID NO: 1475325 - RNA, 19 nt, Homo sapiens
  misc_RNA (1)...(19): siRNA sense strand
aaacaccagcuacugugaa

SEQ ID NO: 1475326 - RNA, 19 nt, Homo sapiens
  misc_RNA (1)...(19): siRNA sense strand
ugauucuccucauuccaaa

SEQ ID NO: 1475327 - RNA, 19 nt, Homo sapiens
  misc_RNA (1)...(19): siRNA sense strand
cuucacuauuuaccucuuu

SEQ ID NO: 1475328 - RNA, 19 nt, Homo sapiens
  misc_RNA (1)...(19): siRNA sense strand
gcaaacccaggccguuagu

SEQ ID NO: 1475329 - RNA, 19 nt, Homo sapiens
  misc_RNA (1)...(19): siRNA sense strand
uggaccaccugcacuuuag

SEQ ID NO: 1475330 - RNA, 19 nt, Homo sapiens
  misc_RNA (1)...(19): siRNA sense strand
ggugugcuucuuguuuaua

SEQ ID NO: 1475331 - RNA, 19 nt, Homo sapiens
  misc_RNA (1)...(19): siRNA sense strand
ugagaagcggacucuguuu

SEQ ID NO: 1475332 - RNA, 19 nt, Homo sapiens
  misc_RNA (1)...(19): siRNA sense strand
ggaacucaaaggagacagu

SEQ ID NO: 1475333 - RNA, 19 nt, Homo sapiens
  misc_RNA (1)...(19): siRNA sense strand
gggcagccgcaguauguca

SEQ ID NO: 1475334 - RNA, 19 nt, Homo sapiens
  misc_RNA (1)...(19): siRNA sense strand
gaagacgguggaggauugu

SEQ ID NO: 1475335 - RNA, 19 nt, Homo sapiens
  misc_RNA (1)...(19): siRNA sense strand
acaguagugcggacucuug

SEQ ID NO: 1475336 - RNA, 19 nt, Homo sapiens
  misc_RNA (1)...(19): siRNA sense strand
ucaauguaccuucuaacca

SEQ ID NO: 1475337 - RNA, 19 nt, Homo sapiens
  misc_RNA (1)...(19): siRNA sense strand
gcaaugaugauaagcuuua

SEQ ID NO: 1475338 - RNA, 19 nt, Homo sapiens
  misc_RNA (1)...(19): siRNA sense strand
gcauuugccugaacgauga

SEQ ID NO: 1475339 - RNA, 19 nt, Homo sapiens
  misc_RNA (1)...(19): siRNA sense strand
ugaggaacccugucauuua

SEQ ID NO: 1475340 - RNA, 19 nt, Homo sapiens
  misc_RNA (1)...(19): siRNA sense strand
ccacugagaacaacuuuaa

SEQ ID NO: 1475341 - RNA, 19 nt, Homo sapiens
  misc_RNA (1)...(19): siRNA sense strand
gaaccgaacacaccuguau

SEQ ID NO: 1475342 - RNA, 19 nt, Homo sapiens
  misc_RNA (1)...(19): siRNA sense strand
gaggaacccugucauuuac

SEQ ID NO: 1475343 - RNA, 19 nt, Homo sapiens
  misc_RNA (1)...(19): siRNA sense strand
gcacagagcagggcuuguu

SEQ ID NO: 1475344 - RNA, 19 nt, Homo sapiens
  misc_RNA (1)...(19): siRNA sense strand
ugaaguccaccaaggauua

SEQ ID NO: 1475345 - RNA, 19 nt, Homo sapiens
  misc_RNA (1)...(19): siRNA sense strand
gcacagccacugagaacaa

SEQ ID NO: 1475346 - RNA, 19 nt, Homo sapiens
  misc_RNA (1)...(19): siRNA sense strand
ccaugaccaucucuucuaa

SEQ ID NO: 1475347 - RNA, 19 nt, Homo sapiens
  misc_RNA (1)...(19): siRNA sense strand
gcgcaaugaugauaagcuu

SEQ ID NO: 1475348 - RNA, 19 nt, Homo sapiens
  misc_RNA (1)...(19): siRNA sense strand
gcucuaugcugguguguac

SEQ ID NO: 1475349 - RNA, 19 nt, Homo sapiens
  misc_RNA (1)...(19): siRNA sense strand
gcacggaucaguacaacuc

SEQ ID NO: 1475350 - RNA, 19 nt, Homo sapiens
  misc_RNA (1)...(19): siRNA sense strand
ggugcucccuaccgccuua

SEQ ID NO: 1475351 - RNA, 19 nt, Homo sapiens
  misc_RNA (1)...(19): siRNA sense strand
caacuccaaugccaacaag

SEQ ID NO: 1475352 - RNA, 19 nt, Homo sapiens
  misc_RNA (1)...(19): siRNA sense strand
gugaggaacccugucauuu

SEQ ID NO: 1475353 - RNA, 19 nt, Homo sapiens
  misc_RNA (1)...(19): siRNA sense strand
ggagcgcaaugaugauaag

SEQ ID NO: 1475354 - RNA, 19 nt, Homo sapiens
  misc_RNA (1)...(19): siRNA sense strand
gaugauaagcuuuacuucu

SEQ ID NO: 1475355 - RNA, 19 nt, Homo sapiens
  misc_RNA (1)...(19): siRNA sense strand
gaaccuucacgccaucuau

SEQ ID NO: 1475356 - RNA, 19 nt, Homo sapiens
  misc_RNA (1)...(19): siRNA sense strand
gauaagcuuuacuucuucu

SEQ ID NO: 1475357 - RNA, 19 nt, Homo sapiens
  misc_RNA (1)...(19): siRNA sense strand
ugauaagcuuuacuucuuc

SEQ ID NO: 1475358 - RNA, 19 nt, Homo sapiens
  misc_RNA (1)...(19): siRNA sense strand
gcagccacccacucaugua

SEQ ID NO: 1475359 - RNA, 19 nt, Homo sapiens
  misc_RNA (1)...(19): siRNA sense strand
ucucugggcuucccuacug

SEQ ID NO: 1475360 - RNA, 19 nt, Homo sapiens
  misc_RNA (1)...(19): siRNA sense strand
gcauguacgugggcagcaa

SEQ ID NO: 1475361 - RNA, 19 nt, Homo sapiens
  misc_RNA (1)...(19): siRNA sense strand
agaaugccguggagucugu

SEQ ID NO: 1475362 - RNA, 19 nt, Homo sapiens
  misc_RNA (1)...(19): siRNA sense strand
ucauugugcugcccaagga

SEQ ID NO: 1475363 - RNA, 19 nt, Homo sapiens
  misc_RNA (1)...(19): siRNA sense strand
cauccaugcugagcucauu

SEQ ID NO: 1475364 - RNA, 19 nt, Homo sapiens
  misc_RNA (1)...(19): siRNA sense strand
gggcgaggauggcauugag

SEQ ID NO: 1475365 - RNA, 19 nt, Homo sapiens
  misc_RNA (1)...(19): siRNA sense strand
gcugguguguacaucgauu

SEQ ID NO: 1475366 - RNA, 19 nt, Homo sapiens
  misc_RNA (1)...(19): siRNA sense strand
caacaaguggagcacauuc

SEQ ID NO: 1475367 - RNA, 19 nt, Homo sapiens
  misc_RNA (1)...(19): siRNA sense strand
gcggagcgcaaugaugaua

SEQ ID NO: 1475368 - RNA, 19 nt, Homo sapiens
  misc_RNA (1)...(19): siRNA sense strand
gauauucgcauggucuuca

SEQ ID NO: 1475369 - RNA, 19 nt, Homo sapiens
  misc_RNA (1)...(19): siRNA sense strand
gaaguccaccaaggauuau

SEQ ID NO: 1475370 - RNA, 19 nt, Homo sapiens
  misc_RNA (1)...(19): siRNA sense strand
uauacagcauccuccaaga

SEQ ID NO: 1475371 - RNA, 19 nt, Homo sapiens
  misc_RNA (1)...(19): siRNA sense strand
ggaccacgaccgcauguac

SEQ ID NO: 1475372 - RNA, 19 nt, Homo sapiens
  misc_RNA (1)...(19): siRNA sense strand
ggacagugcagaaggucau

SEQ ID NO: 1475373 - RNA, 19 nt, Homo sapiens
  misc_RNA (1)...(19): siRNA sense strand
gggcaaguguccguacgau

SEQ ID NO: 1475374 - RNA, 19 nt, Homo sapiens
  misc_RNA (1)...(19): siRNA sense strand
gcaccgcccacuucuucaa

SEQ ID NO: 1475375 - RNA, 19 nt, Homo sapiens
  misc_RNA (1)...(19): siRNA sense strand
cagcaucggcccucaucaa

SEQ ID NO: 1475376 - RNA, 19 nt, Homo sapiens
  misc_RNA (1)...(19): siRNA sense strand
ucaaugaggagcucuaugc

SEQ ID NO: 1475377 - RNA, 19 nt, Homo sapiens
  misc_RNA (1)...(19): siRNA sense strand
uggaggagguggaggucuu

SEQ ID NO: 1475378 - RNA, 19 nt, Homo sapiens
  misc_RNA (1)...(19): siRNA sense strand
gcucugccgugugugucua

SEQ ID NO: 1475379 - RNA, 19 nt, Homo sapiens
  misc_RNA (1)...(19): siRNA sense strand
guccggcucucauucaaag

SEQ ID NO: 1475380 - RNA, 19 nt, Homo sapiens
  misc_RNA (1)...(19): siRNA sense strand
gcaucggcccucaucaaug

SEQ ID NO: 1475381 - RNA, 19 nt, Homo sapiens
  misc_RNA (1)...(19): siRNA sense strand
ggagguggaggucuucaag

SEQ ID NO: 1475382 - RNA, 19 nt, Homo sapiens
  misc_RNA (1)...(19): siRNA sense strand
ccuaccgccuuaccacuau

SEQ ID NO: 1475383 - RNA, 19 nt, Homo sapiens
  misc_RNA (1)...(19): siRNA sense strand
gaugaggugaucaacuuca

SEQ ID NO: 1475384 - RNA, 19 nt, Homo sapiens
  misc_RNA (1)...(19): siRNA sense strand
ucaagaccaugaccaucuc

SEQ ID NO: 1475385 - RNA, 19 nt, Homo sapiens
  misc_RNA (1)...(19): siRNA sense strand
caccauggacccagacuca

SEQ ID NO: 1475386 - RNA, 19 nt, Homo sapiens
  misc_RNA (1)...(19): siRNA sense strand
cguccaugcugcccucuuc

SEQ ID NO: 1475387 - RNA, 19 nt, Homo sapiens
  misc_RNA (1)...(19): siRNA sense strand
cguggagucugugcaguau

SEQ ID NO: 1475388 - RNA, 19 nt, Homo sapiens
  misc_RNA (1)...(19): siRNA sense strand
caggccugcucccgcuaua

SEQ ID NO: 1475389 - RNA, 19 nt, Homo sapiens
  misc_RNA (1)...(19): siRNA sense strand
ucuacuccauggcugauau

SEQ ID NO: 1475390 - RNA, 19 nt, Homo sapiens
  misc_RNA (1)...(19): siRNA sense strand
ugucauuuacgcugucuuu

SEQ ID NO: 1475391 - RNA, 19 nt, Homo sapiens
  misc_RNA (1)...(19): siRNA sense strand
ccacagcgcaucgaggaau

SEQ ID NO: 1475392 - RNA, 19 nt, Homo sapiens
  misc_RNA (1)...(19): siRNA sense strand
gcagcgcagccuuccuuga

SEQ ID NO: 1475393 - RNA, 19 nt, Homo sapiens
  misc_RNA (1)...(19): siRNA sense strand
gcacccgucaagaccauga

SEQ ID NO: 1475394 - RNA, 19 nt, Homo sapiens
  misc_RNA (1)...(19): siRNA sense strand
gcgggacagugcagaaggu

SEQ ID NO: 1475395 - RNA, 19 nt, Homo sapiens
  misc_RNA (1)...(19): siRNA sense strand
gaacuucgucaggcucauc

SEQ ID NO: 1475396 - RNA, 19 nt, Homo sapiens
  misc_RNA (1)...(19): siRNA sense strand
ggaugucaacggcgagugu

SEQ ID NO: 1475397 - RNA, 19 nt, Homo sapiens
  misc_RNA (1)...(19): siRNA sense strand
uggagucugugcaguaugg

SEQ ID NO: 1475398 - RNA, 19 nt, Homo sapiens
  misc_RNA (1)...(19): siRNA sense strand
ucauguaccaggccgugua

SEQ ID NO: 1475399 - RNA, 19 nt, Homo sapiens
  misc_RNA (1)...(19): siRNA sense strand
gcugagcucauuccugaca

SEQ ID NO: 1475400 - RNA, 19 nt, Homo sapiens
  misc_RNA (1)...(19): siRNA sense strand
acgccaggauuacaucuuc

SEQ ID NO: 1475401 - RNA, 19 nt, Homo sapiens
  misc_RNA (1)...(19): siRNA sense strand
caagaaugccguggagucu

SEQ ID NO: 1475402 - RNA, 19 nt, Homo sapiens
  misc_RNA (1)...(19): siRNA sense strand
agguggaggucuucaagga

SEQ ID NO: 1475403 - RNA, 19 nt, Homo sapiens
  misc_RNA (1)...(19): siRNA sense strand
ggaaccgaacacaccugua

SEQ ID NO: 1475404 - RNA, 19 nt, Homo sapiens
  misc_RNA (1)...(19): siRNA sense strand
gccguggguucaacuccaa

SEQ ID NO: 1475405 - RNA, 19 nt, Homo sapiens
  misc_RNA (1)...(19): siRNA sense strand
gcagugccguggguucaac

SEQ ID NO: 1475406 - RNA, 19 nt, Homo sapiens
  misc_RNA (1)...(19): siRNA sense strand
gucaacaaguggagcacau

SEQ ID NO: 1475407 - RNA, 19 nt, Homo sapiens
  misc_RNA (1)...(19): siRNA sense strand
gcgcacggaucaguacaac

SEQ ID NO: 1475408 - RNA, 19 nt, Homo sapiens
  misc_RNA (1)...(19): siRNA sense strand
gccaggauuacaucuucua

SEQ ID NO: 1475409 - RNA, 19 nt, Homo sapiens
  misc_RNA (1)...(19): siRNA sense strand
ggguccggcucucauucaa

SEQ ID NO: 1475410 - RNA, 19 nt, Homo sapiens
  misc_RNA (1)...(19): siRNA sense strand
gaccaugaccaucucuucu

SEQ ID NO: 1475411 - RNA, 19 nt, Homo sapiens
  misc_RNA (1)...(19): siRNA sense strand
ggaaccuucacgccaucua

SEQ ID NO: 1475412 - RNA, 19 nt, Homo sapiens
  misc_RNA (1)...(19): siRNA sense strand
cgugaggaacccugucauu

SEQ ID NO: 1475413 - RNA, 19 nt, Homo sapiens
  misc_RNA (1)...(19): siRNA sense strand
gcuugucgccggucuucuu

SEQ ID NO: 1475414 - RNA, 19 nt, Homo sapiens
  misc_RNA (1)...(19): siRNA sense strand
cgggacaggugccuacaac

SEQ ID NO: 1475415 - RNA, 19 nt, Homo sapiens
  misc_RNA (1)...(19): siRNA sense strand
cagcgcagccuuccuugag

SEQ ID NO: 1475416 - RNA, 19 nt, Homo sapiens
  misc_RNA (1)...(19): siRNA sense strand
cagcacccgucaagaccau

SEQ ID NO: 1475417 - RNA, 19 nt, Homo sapiens
  misc_RNA (1)...(19): siRNA sense strand
gcucaacacaaccgacuac

SEQ ID NO: 1475418 - RNA, 19 nt, Homo sapiens
  misc_RNA (1)...(19): siRNA sense strand
caacuuccugcucaacaca

SEQ ID NO: 1475419 - RNA, 19 nt, Homo sapiens
  misc_RNA (1)...(19): siRNA sense strand
cacagcgcaucgaggaaug

SEQ ID NO: 1475420 - RNA, 19 nt, Homo sapiens
  misc_RNA (1)...(19): siRNA sense strand
gcaagaggccaaacaguaa

SEQ ID NO: 1475421 - RNA, 19 nt, Homo sapiens
  misc_RNA (1)...(19): siRNA sense strand
ccaaauggcugcagcacuu

SEQ ID NO: 1475422 - RNA, 19 nt, Homo sapiens
  misc_RNA (1)...(19): siRNA sense strand
cagcauagguuacggcaaa

SEQ ID NO: 1475423 - RNA, 19 nt, Homo sapiens
  misc_RNA (1)...(19): siRNA sense strand
caauaaaccuuucaagagu

SEQ ID NO: 1475424 - RNA, 19 nt, Homo sapiens
  misc_RNA (1)...(19): siRNA sense strand
caacagcaacuacaaauug

SEQ ID NO: 1475425 - RNA, 19 nt, Homo sapiens
  misc_RNA (1)...(19): siRNA sense strand
uaacaagugugauggaguu

SEQ ID NO: 1475426 - RNA, 19 nt, Homo sapiens
  misc_RNA (1)...(19): siRNA sense strand
aaacauggaucuuuaccuu

SEQ ID NO: 1475427 - RNA, 19 nt, Homo sapiens
  misc_RNA (1)...(19): siRNA sense strand
gcaauaaaccuuucaagag

SEQ ID NO: 1475428 - RNA, 19 nt, Homo sapiens
  misc_RNA (1)...(19): siRNA sense strand
ggagagccgugauauguuc

SEQ ID NO: 1475429 - RNA, 19 nt, Homo sapiens
  misc_RNA (1)...(19): siRNA sense strand
ccaaggaacuagugaagga

SEQ ID NO: 1475430 - RNA, 19 nt, Homo sapiens
  misc_RNA (1)...(19): siRNA sense strand
gagagaagcgcaacaucua

SEQ ID NO: 1475431 - RNA, 19 nt, Homo sapiens
  misc_RNA (1)...(19): siRNA sense strand
gcugguggcuaauacagua

SEQ ID NO: 1475432 - RNA, 19 nt, Homo sapiens
  misc_RNA (1)...(19): siRNA sense strand
aaagacuacuugagcaaua

SEQ ID NO: 1475433 - RNA, 19 nt, Homo sapiens
  misc_RNA (1)...(19): siRNA sense strand
gagagaaggugugaaguca

SEQ ID NO: 1475434 - RNA, 19 nt, Homo sapiens
  misc_RNA (1)...(19): siRNA sense strand
acaaagagcuggagaacgu

SEQ ID NO: 1475435 - RNA, 19 nt, Homo sapiens
  misc_RNA (1)...(19): siRNA sense strand
uaauaggaaugggcaguua

SEQ ID NO: 1475436 - RNA, 19 nt, Homo sapiens
  misc_RNA (1)...(19): siRNA sense strand
gaagucaccugucuguucu

SEQ ID NO: 1475437 - RNA, 19 nt, Homo sapiens
  misc_RNA (1)...(19): siRNA sense strand
gcaagucucuagcacaaag

SEQ ID NO: 1475438 - RNA, 19 nt, Homo sapiens
  misc_RNA (1)...(19): siRNA sense strand
gcugggaaccuguugauaa

SEQ ID NO: 1475439 - RNA, 19 nt, Homo sapiens
  misc_RNA (1)...(19): siRNA sense strand
gggaaccuguugauaagaa

SEQ ID NO: 1475440 - RNA, 19 nt, Homo sapiens
  misc_RNA (1)...(19): siRNA sense strand
aaauauuacuggacccaua

SEQ ID NO: 1475441 - RNA, 19 nt, Homo sapiens
  misc_RNA (1)...(19): siRNA sense strand
gaaauugugggaauguauu

SEQ ID NO: 1475442 - RNA, 19 nt, Homo sapiens
  misc_RNA (1)...(19): siRNA sense strand
ucuccaaggucauuucuaa

SEQ ID NO: 1475443 - RNA, 19 nt, Homo sapiens
  misc_RNA (1)...(19): siRNA sense strand
gaagaaacccauugcuaca

SEQ ID NO: 1475444 - RNA, 19 nt, Homo sapiens
  misc_RNA (1)...(19): siRNA sense strand
guuacaaacugcuuaauac

SEQ ID NO: 1475445 - RNA, 19 nt, Homo sapiens
  misc_RNA (1)...(19): siRNA sense strand
gaagacaccauugcagaaa

SEQ ID NO: 1475446 - RNA, 19 nt, Homo sapiens
  misc_RNA (1)...(19): siRNA sense strand
gcaaugcugaugaugagua

SEQ ID NO: 1475447 - RNA, 19 nt, Homo sapiens
  misc_RNA (1)...(19): siRNA sense strand
gaaagagacugaggugacu

SEQ ID NO: 1475448 - RNA, 19 nt, Homo sapiens
  misc_RNA (1)...(19): siRNA sense strand
ggaaugggcaguuauugga

SEQ ID NO: 1475449 - RNA, 19 nt, Homo sapiens
  misc_RNA (1)...(19): siRNA sense strand
ggagccaccugaacauugu

SEQ ID NO: 1475450 - RNA, 19 nt, Homo sapiens
  misc_RNA (1)...(19): siRNA sense strand
gaguggcucucacggcuaa

SEQ ID NO: 1475451 - RNA, 19 nt, Homo sapiens
  misc_RNA (1)...(19): siRNA sense strand
ggaggaagacauugguaaa

SEQ ID NO: 1475452 - RNA, 19 nt, Homo sapiens
  misc_RNA (1)...(19): siRNA sense strand
gugauggaguuuguaauuu

SEQ ID NO: 1475453 - RNA, 19 nt, Homo sapiens
  misc_RNA (1)...(19): siRNA sense strand
ucagcaaacuguaggagaa

SEQ ID NO: 1475454 - RNA, 19 nt, Homo sapiens
  misc_RNA (1)...(19): siRNA sense strand
ggagggcuuccaaguguua

SEQ ID NO: 1475455 - RNA, 19 nt, Homo sapiens
  misc_RNA (1)...(19): siRNA sense strand
gcaccuuccuggccaacaa

SEQ ID NO: 1475456 - RNA, 19 nt, Homo sapiens
  misc_RNA (1)...(19): siRNA sense strand
gcacugacuuccucaacca

SEQ ID NO: 1475457 - RNA, 19 nt, Homo sapiens
  misc_RNA (1)...(19): siRNA sense strand
uauagacacuugcgcaaug

SEQ ID NO: 1475458 - RNA, 19 nt, Homo sapiens
  misc_RNA (1)...(19): siRNA sense strand
ggucauuucuaacaagugu

SEQ ID NO: 1475459 - RNA, 19 nt, Homo sapiens
  misc_RNA (1)...(19): siRNA sense strand
gaucaaaguccuagaagag

SEQ ID NO: 1475460 - RNA, 19 nt, Homo sapiens
  misc_RNA (1)...(19): siRNA sense strand
gaucguagcccuggccaaa

SEQ ID NO: 1475461 - RNA, 19 nt, Homo sapiens
  misc_RNA (1)...(19): siRNA sense strand
gaagaguacuaucccaacu

SEQ ID NO: 1475462 - RNA, 19 nt, Homo sapiens
  misc_RNA (1)...(19): siRNA sense strand
ggaaccuguugauaagaaa

SEQ ID NO: 1475463 - RNA, 19 nt, Homo sapiens
  misc_RNA (1)...(19): siRNA sense strand
ggagucagauggcagugau

SEQ ID NO: 1475464 - RNA, 19 nt, Homo sapiens
  misc_RNA (1)...(19): siRNA sense strand
caagugugauggaguuugu

SEQ ID NO: 1475465 - RNA, 19 nt, Homo sapiens
  misc_RNA (1)...(19): siRNA sense strand
guauuuggaugaugaugga

SEQ ID NO: 1475466 - RNA, 19 nt, Homo sapiens
  misc_RNA (1)...(19): siRNA sense strand
caaggacucugucaucaac

SEQ ID NO: 1475467 - RNA, 19 nt, Homo sapiens
  misc_RNA (1)...(19): siRNA sense strand
agacaccauugcagaaauu

SEQ ID NO: 1475468 - RNA, 19 nt, Homo sapiens
  misc_RNA (1)...(19): siRNA sense strand
gaagcaggguacaaacaag

SEQ ID NO: 1475469 - RNA, 19 nt, Homo sapiens
  misc_RNA (1)...(19): siRNA sense strand
ccacugaacugcccuucuc

SEQ ID NO: 1475470 - RNA, 19 nt, Homo sapiens
  misc_RNA (1)...(19): siRNA sense strand
ccaaggucauuucuaacaa

SEQ ID NO: 1475471 - RNA, 19 nt, Homo sapiens
  misc_RNA (1)...(19): siRNA sense strand
ccagcacacucaccuaugu

SEQ ID NO: 1475472 - RNA, 19 nt, Homo sapiens
  misc_RNA (1)...(19): siRNA sense strand
aagcaagucucuagcacaa

SEQ ID NO: 1475473 - RNA, 19 nt, Homo sapiens
  misc_RNA (1)...(19): siRNA sense strand
ccagugggcucagagagaa

SEQ ID NO: 1475474 - RNA, 19 nt, Homo sapiens
  misc_RNA (1)...(19): siRNA sense strand
guacauccagugacccuaa

SEQ ID NO: 1475475 - RNA, 19 nt, Homo sapiens
  misc_RNA (1)...(19): siRNA sense strand
gcgcaaugcugaugaugag

SEQ ID NO: 1475476 - RNA, 19 nt, Homo sapiens
  misc_RNA (1)...(19): siRNA sense strand
gaagacugccuuucagaag

SEQ ID NO: 1475477 - RNA, 19 nt, Homo sapiens
  misc_RNA (1)...(19): siRNA sense strand
ucauugccaucucuaacua

SEQ ID NO: 1475478 - RNA, 19 nt, Homo sapiens
  misc_RNA (1)...(19): siRNA sense strand
uaacugugacugugaauuc

SEQ ID NO: 1475479 - RNA, 19 nt, Homo sapiens
  misc_RNA (1)...(19): siRNA sense strand
gaagcggauucccgugguu

SEQ ID NO: 1475480 - RNA, 19 nt, Homo sapiens
  misc_RNA (1)...(19): siRNA sense strand
ccuucgagcuggcaauaaa

SEQ ID NO: 1475481 - RNA, 19 nt, Homo sapiens
  misc_RNA (1)...(19): siRNA sense strand
gccgugauauguuccaguu

SEQ ID NO: 1475482 - RNA, 19 nt, Homo sapiens
  misc_RNA (1)...(19): siRNA sense strand
caaagcccguuccacugaa

SEQ ID NO: 1475483 - RNA, 19 nt, Homo sapiens
  misc_RNA (1)...(19): siRNA sense strand
gaggaaagaaccagaugug

SEQ ID NO: 1475484 - RNA, 19 nt, Homo sapiens
  misc_RNA (1)...(19): siRNA sense strand
ggaagacauugguaaaaga

SEQ ID NO: 1475485 - RNA, 19 nt, Homo sapiens
  misc_RNA (1)...(19): siRNA sense strand
acauggaucuuuaccuuuc

SEQ ID NO: 1475486 - RNA, 19 nt, Homo sapiens
  misc_RNA (1)...(19): siRNA sense strand
aagcggaccugcucugugu

SEQ ID NO: 1475487 - RNA, 19 nt, Homo sapiens
  misc_RNA (1)...(19): siRNA sense strand
ggauucccgugguugugua

SEQ ID NO: 1475488 - RNA, 19 nt, Homo sapiens
  misc_RNA (1)...(19): siRNA sense strand
cagaaauugugggaaugua

SEQ ID NO: 1475489 - RNA, 19 nt, Homo sapiens
  misc_RNA (1)...(19): siRNA sense strand
gcaucacacugcuauaacu

SEQ ID NO: 1475490 - RNA, 19 nt, Homo sapiens
  misc_RNA (1)...(19): siRNA sense strand
guggaucacugacaaagag

SEQ ID NO: 1475491 - RNA, 19 nt, Homo sapiens
  misc_RNA (1)...(19): siRNA sense strand
ucaccugucuguucuaguc

SEQ ID NO: 1475492 - RNA, 19 nt, Homo sapiens
  misc_RNA (1)...(19): siRNA sense strand
gggaggaagacauugguaa

SEQ ID NO: 1475493 - RNA, 19 nt, Homo sapiens
  misc_RNA (1)...(19): siRNA sense strand
caaggucauuucuaacaag

SEQ ID NO: 1475494 - RNA, 19 nt, Homo sapiens
  misc_RNA (1)...(19): siRNA sense strand
uuucauaacuuccucuaca

SEQ ID NO: 1475495 - RNA, 19 nt, Homo sapiens
  misc_RNA (1)...(19): siRNA sense strand
ggcgugugaugcugacuuu

SEQ ID NO: 1475496 - RNA, 19 nt, Homo sapiens
  misc_RNA (1)...(19): siRNA sense strand
gccaacagcugaagaaacc

SEQ ID NO: 1475497 - RNA, 19 nt, Homo sapiens
  misc_RNA (1)...(19): siRNA sense strand
gaaagacuacuugagcaau

SEQ ID NO: 1475498 - RNA, 19 nt, Homo sapiens
  misc_RNA (1)...(19): siRNA sense strand
gcacuugucggugaugcua

SEQ ID NO: 1475499 - RNA, 19 nt, Homo sapiens
  misc_RNA (1)...(19): siRNA sense strand
ccagugacccuaaccugaa

SEQ ID NO: 1475500 - RNA, 19 nt, Homo sapiens
  misc_RNA (1)...(19): siRNA sense strand
gcccauuccugaucagcaa

SEQ ID NO: 1475501 - RNA, 19 nt, Homo sapiens
  misc_RNA (1)...(19): siRNA sense strand
ugaagucaccugucuguuc

SEQ ID NO: 1475502 - RNA, 19 nt, Homo sapiens
  misc_RNA (1)...(19): siRNA sense strand
cacaaaagcuguucuccaa

SEQ ID NO: 1475503 - RNA, 19 nt, Homo sapiens
  misc_RNA (1)...(19): siRNA sense strand
ucagccaggugagcacaua

SEQ ID NO: 1475504 - RNA, 19 nt, Homo sapiens
  misc_RNA (1)...(19): siRNA sense strand
acaaagcccguuccacuga

SEQ ID NO: 1475505 - RNA, 19 nt, Homo sapiens
  misc_RNA (1)...(19): siRNA sense strand
uaaccugaauaaccacugu

SEQ ID NO: 1475506 - RNA, 19 nt, Homo sapiens
  misc_RNA (1)...(19): siRNA sense strand
aggcggagcuugcaaggau

SEQ ID NO: 1475507 - RNA, 19 nt, Homo sapiens
  misc_RNA (1)...(19): siRNA sense strand
cgaagacaccauugcagaa

SEQ ID NO: 1475508 - RNA, 19 nt, Homo sapiens
  misc_RNA (1)...(19): siRNA sense strand
ucagugcacucuccaaggu

SEQ ID NO: 1475509 - RNA, 19 nt, Homo sapiens
  misc_RNA (1)...(19): siRNA sense strand
ccugaacauuguccugaaa

SEQ ID NO: 1475510 - RNA, 19 nt, Homo sapiens
  misc_RNA (1)...(19): siRNA sense strand
aagacuacuugagcaauaa

SEQ ID NO: 1475511 - RNA, 19 nt, Homo sapiens
  misc_RNA (1)...(19): siRNA sense strand
guggagagccgugauaugu

SEQ ID NO: 1475512 - RNA, 19 nt, Homo sapiens
  misc_RNA (1)...(19): siRNA sense strand
gcacuggagaguaccaaau

SEQ ID NO: 1475513 - RNA, 19 nt, Homo sapiens
  misc_RNA (1)...(19): siRNA sense strand
gacuuugauucuucucuga

SEQ ID NO: 1475514 - RNA, 19 nt, Homo sapiens
  misc_RNA (1)...(19): siRNA sense strand
gcuauaacugugacuguga

SEQ ID NO: 1475515 - RNA, 19 nt, Homo sapiens
  misc_RNA (1)...(19): siRNA sense strand
cgaagcaggguacaaacaa

SEQ ID NO: 1475516 - RNA, 19 nt, Homo sapiens
  misc_RNA (1)...(19): siRNA sense strand
gaaugggcaguuauuggaa

SEQ ID NO: 1475517 - RNA, 19 nt, Homo sapiens
  misc_RNA (1)...(19): siRNA sense strand
cagggucuguggcaaguau

SEQ ID NO: 1475518 - RNA, 19 nt, Homo sapiens
  misc_RNA (1)...(19): siRNA sense strand
uccaguggcuugauucugu

SEQ ID NO: 1475519 - RNA, 19 nt, Homo sapiens
  misc_RNA (1)...(19): siRNA sense strand
gguggaggcugugaaugug

SEQ ID NO: 1475520 - RNA, 19 nt, Homo sapiens
  misc_RNA (1)...(19): siRNA sense strand
gaacaaagcucagagauua

SEQ ID NO: 1475521 - RNA, 19 nt, Homo sapiens
  misc_RNA (1)...(19): siRNA sense strand
gcaagaagcuauagaugaa

SEQ ID NO: 1475522 - RNA, 19 nt, Homo sapiens
  misc_RNA (1)...(19): siRNA sense strand
caacaaagacucaauaaga

SEQ ID NO: 1475523 - RNA, 19 nt, Homo sapiens
  misc_RNA (1)...(19): siRNA sense strand
gaacaacaaagacucaaua

SEQ ID NO: 1475524 - RNA, 19 nt, Homo sapiens
  misc_RNA (1)...(19): siRNA sense strand
gaacagcuccgacaaguug

SEQ ID NO: 1475525 - RNA, 19 nt, Homo sapiens
  misc_RNA (1)...(19): siRNA sense strand
gcagagauggagaauauua

SEQ ID NO: 1475526 - RNA, 19 nt, Homo sapiens
  misc_RNA (1)...(19): siRNA sense strand
gacagaggcugaagacaaa

SEQ ID NO: 1475527 - RNA, 19 nt, Homo sapiens
  misc_RNA (1)...(19): siRNA sense strand
ccaaguggguuuauguuaa

SEQ ID NO: 1475528 - RNA, 19 nt, Homo sapiens
  misc_RNA (1)...(19): siRNA sense strand
gaagaaagaucaggaggau

SEQ ID NO: 1475529 - RNA, 19 nt, Homo sapiens
  misc_RNA (1)...(19): siRNA sense strand
gagaagacaaugaaagaua

SEQ ID NO: 1475530 - RNA, 19 nt, Homo sapiens
  misc_RNA (1)...(19): siRNA sense strand
ggaaagaauugcaugaagu

SEQ ID NO: 1475531 - RNA, 19 nt, Homo sapiens
  misc_RNA (1)...(19): siRNA sense strand
gcaagcuaaugaccaguua

SEQ ID NO: 1475532 - RNA, 19 nt, Homo sapiens
  misc_RNA (1)...(19): siRNA sense strand
aagcagagauggagaauau

SEQ ID NO: 1475533 - RNA, 19 nt, Homo sapiens
  misc_RNA (1)...(19): siRNA sense strand
gaagagcaguuaaagaaag

SEQ ID NO: 1475534 - RNA, 19 nt, Homo sapiens
  misc_RNA (1)...(19): siRNA sense strand
gagcaccaguuccaccuua

SEQ ID NO: 1475535 - RNA, 19 nt, Homo sapiens
  misc_RNA (1)...(19): siRNA sense strand
gaaggccaaugaccaguuu

SEQ ID NO: 1475536 - RNA, 19 nt, Homo sapiens
  misc_RNA (1)...(19): siRNA sense strand
gaaagagacugcugcuaag

SEQ ID NO: 1475537 - RNA, 19 nt, Homo sapiens
  misc_RNA (1)...(19): siRNA sense strand
gagauuacagacagaauua

SEQ ID NO: 1475538 - RNA, 19 nt, Homo sapiens
  misc_RNA (1)...(19): siRNA sense strand
ccaagaggaugcugagaaa

SEQ ID NO: 1475539 - RNA, 19 nt, Homo sapiens
  misc_RNA (1)...(19): siRNA sense strand
ugaagaaacucugcaacua

SEQ ID NO: 1475540 - RNA, 19 nt, Homo sapiens
  misc_RNA (1)...(19): siRNA sense strand
ggagauccuuucaguaaau

SEQ ID NO: 1475541 - RNA, 19 nt, Homo sapiens
  misc_RNA (1)...(19): siRNA sense strand
ggaguuauauuuggcuaaa

SEQ ID NO: 1475542 - RNA, 19 nt, Homo sapiens
  misc_RNA (1)...(19): siRNA sense strand
gaaagaauugcaugaaguu

SEQ ID NO: 1475543 - RNA, 19 nt, Homo sapiens
  misc_RNA (1)...(19): siRNA sense strand
gaacacagugggcacagua

SEQ ID NO: 1475544 - RNA, 19 nt, Homo sapiens
  misc_RNA (1)...(19): siRNA sense strand
gcugagaaaucuuguagga

SEQ ID NO: 1475545 - RNA, 19 nt, Homo sapiens
  misc_RNA (1)...(19): siRNA sense strand
uugaagaacugaagaagaa

SEQ ID NO: 1475546 - RNA, 19 nt, Homo sapiens
  misc_RNA (1)...(19): siRNA sense strand
acaggaagaugcugagaaa

SEQ ID NO: 1475547 - RNA, 19 nt, Homo sapiens
  misc_RNA (1)...(19): siRNA sense strand
aaagagggauguucaggaa

SEQ ID NO: 1475548 - RNA, 19 nt, Homo sapiens
  misc_RNA (1)...(19): siRNA sense strand
gcagaaagagguacauaau

SEQ ID NO: 1475549 - RNA, 19 nt, Homo sapiens
  misc_RNA (1)...(19): siRNA sense strand
ggaggaugaugaacaacaa

SEQ ID NO: 1475550 - RNA, 19 nt, Homo sapiens
  misc_RNA (1)...(19): siRNA sense strand
gaaacagaauggaaucucu

SEQ ID NO: 1475551 - RNA, 19 nt, Homo sapiens
  misc_RNA (1)...(19): siRNA sense strand
agaaagagacugcugcuaa

SEQ ID NO: 1475552 - RNA, 19 nt, Homo sapiens
  misc_RNA (1)...(19): siRNA sense strand
gaagaaacucugcaacuag

SEQ ID NO: 1475553 - RNA, 19 nt, Homo sapiens
  misc_RNA (1)...(19): siRNA sense strand
ggaaauaaagaucaguuug

SEQ ID NO: 1475554 - RNA, 19 nt, Homo sapiens
  misc_RNA (1)...(19): siRNA sense strand
agaaacaguucgugacuau

SEQ ID NO: 1475555 - RNA, 19 nt, Homo sapiens
  misc_RNA (1)...(19): siRNA sense strand
gaaauaaagaucaguuugg

SEQ ID NO: 1475556 - RNA, 19 nt, Homo sapiens
  misc_RNA (1)...(19): siRNA sense strand
guacauaaugcuggaaaua

SEQ ID NO: 1475557 - RNA, 19 nt, Homo sapiens
  misc_RNA (1)...(19): siRNA sense strand
gaggcaaaaugcaguauua

SEQ ID NO: 1475558 - RNA, 19 nt, Homo sapiens
  misc_RNA (1)...(19): siRNA sense strand
gaauggagauugugcuaac

SEQ ID NO: 1475559 - RNA, 19 nt, Homo sapiens
  misc_RNA (1)...(19): siRNA sense strand
ggaagaugcugagaaacug

SEQ ID NO: 1475560 - RNA, 19 nt, Homo sapiens
  misc_RNA (1)...(19): siRNA sense strand
gcugaaggcugagauacuu

SEQ ID NO: 1475561 - RNA, 19 nt, Homo sapiens
  misc_RNA (1)...(19): siRNA sense strand
caacaacacaaccaguuaa

SEQ ID NO: 1475562 - RNA, 19 nt, Homo sapiens
  misc_RNA (1)...(19): siRNA sense strand
ccaaagcuuuaggcuauaa

SEQ ID NO: 1475563 - RNA, 19 nt, Homo sapiens
  misc_RNA (1)...(19): siRNA sense strand
gagcaaguccagagagauu

SEQ ID NO: 1475564 - RNA, 19 nt, Homo sapiens
  misc_RNA (1)...(19): siRNA sense strand
ggaagagcaguuaaagaaa

SEQ ID NO: 1475565 - RNA, 19 nt, Homo sapiens
  misc_RNA (1)...(19): siRNA sense strand
uaagagaaaggaucacaaa

SEQ ID NO: 1475566 - RNA, 19 nt, Homo sapiens
  misc_RNA (1)...(19): siRNA sense strand
ugugauauguguuccaauu

SEQ ID NO: 1475567 - RNA, 19 nt, Homo sapiens
  misc_RNA (1)...(19): siRNA sense strand
agaaagagguacauaaugc

SEQ ID NO: 1475568 - RNA, 19 nt, Homo sapiens
  misc_RNA (1)...(19): siRNA sense strand
agaaagaucaggaggauga

SEQ ID NO: 1475569 - RNA, 19 nt, Homo sapiens
  misc_RNA (1)...(19): siRNA sense strand
gaagaacaaagcucagaga

SEQ ID NO: 1475570 - RNA, 19 nt, Homo sapiens
  misc_RNA (1)...(19): siRNA sense strand
aagcagauguugaggaaga

SEQ ID NO: 1475571 - RNA, 19 nt, Homo sapiens
  misc_RNA (1)...(19): siRNA sense strand
aaacuucgguccguuguga

SEQ ID NO: 1475572 - RNA, 19 nt, Homo sapiens
  misc_RNA (1)...(19): siRNA sense strand
uggaagagcaguuaaagaa

SEQ ID NO: 1475573 - RNA, 19 nt, Homo sapiens
  misc_RNA (1)...(19): siRNA sense strand
gaugacaccagaacaagaa

SEQ ID NO: 1475574 - RNA, 19 nt, Homo sapiens
  misc_RNA (1)...(19): siRNA sense strand
cuggaggccucaaagguua

SEQ ID NO: 1475575 - RNA, 19 nt, Homo sapiens
  misc_RNA (1)...(19): siRNA sense strand
gaaacucugcaacuagaaa

SEQ ID NO: 1475576 - RNA, 19 nt, Homo sapiens
  misc_RNA (1)...(19): siRNA sense strand
aauggaaucucuugcagaa

SEQ ID NO: 1475577 - RNA, 19 nt, Homo sapiens
  misc_RNA (1)...(19): siRNA sense strand
ucaggaggaugaugaacaa

SEQ ID NO: 1475578 - RNA, 19 nt, Homo sapiens
  misc_RNA (1)...(19): siRNA sense strand
ggaaauugcagcuuugaag

SEQ ID NO: 1475579 - RNA, 19 nt, Homo sapiens
  misc_RNA (1)...(19): siRNA sense strand
aagaaacucugcaacuaga

SEQ ID NO: 1475580 - RNA, 19 nt, Homo sapiens
  misc_RNA (1)...(19): siRNA sense strand
ggagagcacagucuacaga

SEQ ID NO: 1475581 - RNA, 19 nt, Homo sapiens
  misc_RNA (1)...(19): siRNA sense strand
uggcucaguucauuccuua

SEQ ID NO: 1475582 - RNA, 19 nt, Homo sapiens
  misc_RNA (1)...(19): siRNA sense strand
ccucaaagguuaaagaacu

SEQ ID NO: 1475583 - RNA, 19 nt, Homo sapiens
  misc_RNA (1)...(19): siRNA sense strand
aaacaguucgugacuauga

SEQ ID NO: 1475584 - RNA, 19 nt, Homo sapiens
  misc_RNA (1)...(19): siRNA sense strand
gaaugauacuaaacugaca

SEQ ID NO: 1475585 - RNA, 19 nt, Homo sapiens
  misc_RNA (1)...(19): siRNA sense strand
acagaaagauaaugacagu

SEQ ID NO: 1475586 - RNA, 19 nt, Homo sapiens
  misc_RNA (1)...(19): siRNA sense strand
ugacagaggcugaagacaa

SEQ ID NO: 1475587 - RNA, 19 nt, Homo sapiens
  misc_RNA (1)...(19): siRNA sense strand
ucuggaaucucagcguuua

SEQ ID NO: 1475588 - RNA, 19 nt, Homo sapiens
  misc_RNA (1)...(19): siRNA sense strand
gauccaagcagaacagugu

SEQ ID NO: 1475589 - RNA, 19 nt, Homo sapiens
  misc_RNA (1)...(19): siRNA sense strand
ccaguagugugugcuuuaa

SEQ ID NO: 1475590 - RNA, 19 nt, Homo sapiens
  misc_RNA (1)...(19): siRNA sense strand
gaacugaagaagaaagauc

SEQ ID NO: 1475591 - RNA, 19 nt, Homo sapiens
  misc_RNA (1)...(19): siRNA sense strand
gagaaacugcggaaagaau

SEQ ID NO: 1475592 - RNA, 19 nt, Homo sapiens
  misc_RNA (1)...(19): siRNA sense strand
gagcaaaauuuaaggaguu

SEQ ID NO: 1475593 - RNA, 19 nt, Homo sapiens
  misc_RNA (1)...(19): siRNA sense strand
aaccaaagaucaggaaaga

SEQ ID NO: 1475594 - RNA, 19 nt, Homo sapiens
  misc_RNA (1)...(19): siRNA sense strand
ugagagacaugcagcgaau

SEQ ID NO: 1475595 - RNA, 19 nt, Homo sapiens
  misc_RNA (1)...(19): siRNA sense strand
gaaacugcggaaagaauug

SEQ ID NO: 1475596 - RNA, 19 nt, Homo sapiens
  misc_RNA (1)...(19): siRNA sense strand
gacagcagcagaccacgua

SEQ ID NO: 1475597 - RNA, 19 nt, Homo sapiens
  misc_RNA (1)...(19): siRNA sense strand
ccuccgagaucuuacuuga

SEQ ID NO: 1475598 - RNA, 19 nt, Homo sapiens
  misc_RNA (1)...(19): siRNA sense strand
gccaaguggguuuauguua

SEQ ID NO: 1475599 - RNA, 19 nt, Homo sapiens
  misc_RNA (1)...(19): siRNA sense strand
ggacaaugacauguuuaaa

SEQ ID NO: 1475600 - RNA, 19 nt, Homo sapiens
  misc_RNA (1)...(19): siRNA sense strand
guauguagcuguuuugaau

SEQ ID NO: 1475601 - RNA, 19 nt, Homo sapiens
  misc_RNA (1)...(19): siRNA sense strand
ccagagagauuuuguaaag

SEQ ID NO: 1475602 - RNA, 19 nt, Homo sapiens
  misc_RNA (1)...(19): siRNA sense strand
gacaaugacauguuuaaag

SEQ ID NO: 1475603 - RNA, 19 nt, Homo sapiens
  misc_RNA (1)...(19): siRNA sense strand
caaagacucaauaagagaa

SEQ ID NO: 1475604 - RNA, 19 nt, Homo sapiens
  misc_RNA (1)...(19): siRNA sense strand
cagaacagcuccgacaagu

SEQ ID NO: 1475605 - RNA, 19 nt, Homo sapiens
  misc_RNA (1)...(19): siRNA sense strand
cuggagauccuuucaguaa

SEQ ID NO: 1475606 - RNA, 19 nt, Homo sapiens
  misc_RNA (1)...(19): siRNA sense strand
cagccugcaugugucauua

SEQ ID NO: 1475607 - RNA, 19 nt, Homo sapiens
  misc_RNA (1)...(19): siRNA sense strand
gaaagcacagccugcaugu

SEQ ID NO: 1475608 - RNA, 19 nt, Homo sapiens
  misc_RNA (1)...(19): siRNA sense strand
aaacuacagcugaugcuaa

SEQ ID NO: 1475609 - RNA, 19 nt, Homo sapiens
  misc_RNA (1)...(19): siRNA sense strand
gacaacaacacaaccaguu

SEQ ID NO: 1475610 - RNA, 19 nt, Homo sapiens
  misc_RNA (1)...(19): siRNA sense strand
auacuaaacugacagacau

SEQ ID NO: 1475611 - RNA, 19 nt, Homo sapiens
  misc_RNA (1)...(19): siRNA sense strand
cagcagaccacguagaaga

SEQ ID NO: 1475612 - RNA, 19 nt, Homo sapiens
  misc_RNA (1)...(19): siRNA sense strand
ugacguuucucuucagcaa

SEQ ID NO: 1475613 - RNA, 19 nt, Homo sapiens
  misc_RNA (1)...(19): siRNA sense strand
uagagaagacaaugaaaga

SEQ ID NO: 1475614 - RNA, 19 nt, Homo sapiens
  misc_RNA (1)...(19): siRNA sense strand
gguagacguugugauaugu

SEQ ID NO: 1475615 - RNA, 19 nt, Homo sapiens
  misc_RNA (1)...(19): siRNA sense strand
ggaaauaaacuugguagac

SEQ ID NO: 1475616 - RNA, 19 nt, Homo sapiens
  misc_RNA (1)...(19): siRNA sense strand
gcauggagagugccuaugu

SEQ ID NO: 1475617 - RNA, 19 nt, Homo sapiens
  misc_RNA (1)...(19): siRNA sense strand
auccaaagcuuuaggcuau

SEQ ID NO: 1475618 - RNA, 19 nt, Homo sapiens
  misc_RNA (1)...(19): siRNA sense strand
gaagaggagcauuuagaca

SEQ ID NO: 1475619 - RNA, 19 nt, Homo sapiens
  misc_RNA (1)...(19): siRNA sense strand
caaguggguuuauguuaac

SEQ ID NO: 1475620 - RNA, 19 nt, Homo sapiens
  misc_RNA (1)...(19): siRNA sense strand
gaagcugaauugcaggaua

SEQ ID NO: 1475621 - RNA, 19 nt, Homo sapiens
  misc_RNA (1)...(19): siRNA sense strand
caaaggaacuuggaacugu

SEQ ID NO: 1475622 - RNA, 19 nt, Homo sapiens
  misc_RNA (1)...(19): siRNA sense strand
gaucagagaagcagauauu

SEQ ID NO: 1475623 - RNA, 19 nt, Homo sapiens
  misc_RNA (1)...(19): siRNA sense strand
acuaacagaugaagaagua

SEQ ID NO: 1475624 - RNA, 19 nt, Homo sapiens
  misc_RNA (1)...(19): siRNA sense strand
aagaacagauugcugaauu

SEQ ID NO: 1475625 - RNA, 19 nt, Homo sapiens
  misc_RNA (1)...(19): siRNA sense strand
gaagaauucguacagauga

SEQ ID NO: 1475626 - RNA, 19 nt, Homo sapiens
  misc_RNA (1)...(19): siRNA sense strand
agaaguagaugaaaugauc

SEQ ID NO: 1475627 - RNA, 19 nt, Homo sapiens
  misc_RNA (1)...(19): siRNA sense strand
gaugaugacugcaaaauga

SEQ ID NO: 1475628 - RNA, 19 nt, Homo sapiens
  misc_RNA (1)...(19): siRNA sense strand
ugacuaugauggcuagaaa

SEQ ID NO: 1475629 - RNA, 19 nt, Homo sapiens
  misc_RNA (1)...(19): siRNA sense strand
uagaugaaaugaucagaga

SEQ ID NO: 1475630 - RNA, 19 nt, Homo sapiens
  misc_RNA (1)...(19): siRNA sense strand
gaacuuggaacugucauga

SEQ ID NO: 1475631 - RNA, 19 nt, Homo sapiens
  misc_RNA (1)...(19): siRNA sense strand
ugaaagauacagauaguga

SEQ ID NO: 1475632 - RNA, 19 nt, Homo sapiens
  misc_RNA (1)...(19): siRNA sense strand
gaaagauacagauagugaa

SEQ ID NO: 1475633 - RNA, 19 nt, Homo sapiens
  misc_RNA (1)...(19): siRNA sense strand
caacuaugaagaauucgua

SEQ ID NO: 1475634 - RNA, 19 nt, Homo sapiens
  misc_RNA (1)...(19): siRNA sense strand
caacagaagcugaauugca

SEQ ID NO: 1475635 - RNA, 19 nt, Homo sapiens
  misc_RNA (1)...(19): siRNA sense strand
gaagaaguagaugaaauga

SEQ ID NO: 1475636 - RNA, 19 nt, Homo sapiens
  misc_RNA (1)...(19): siRNA sense strand
ugcaggauaugaucaauga

SEQ ID NO: 1475637 - RNA, 19 nt, Homo sapiens
  misc_RNA (1)...(19): siRNA sense strand
gaacagauugcugaauuca

SEQ ID NO: 1475638 - RNA, 19 nt, Homo sapiens
  misc_RNA (1)...(19): siRNA sense strand
ggucagaacccaacagaag

SEQ ID NO: 1475639 - RNA, 19 nt, Homo sapiens
  misc_RNA (1)...(19): siRNA sense strand
ugacaaggauggcaauggu

SEQ ID NO: 1475640 - RNA, 19 nt, Homo sapiens
  misc_RNA (1)...(19): siRNA sense strand
agauacagauagugaagaa

SEQ ID NO: 1475641 - RNA, 19 nt, Homo sapiens
  misc_RNA (1)...(19): siRNA sense strand
agucaacuaugaagaauuc

SEQ ID NO: 1475642 - RNA, 19 nt, Homo sapiens
  misc_RNA (1)...(19): siRNA sense strand
caagucaacuaugaagaau

SEQ ID NO: 1475643 - RNA, 19 nt, Homo sapiens
  misc_RNA (1)...(19): siRNA sense strand
ggauggcaaugguuauauc

SEQ ID NO: 1475644 - RNA, 19 nt, Homo sapiens
  misc_RNA (1)...(19): siRNA sense strand
acagauugcugaauucaag

SEQ ID NO: 1475645 - RNA, 19 nt, Homo sapiens
  misc_RNA (1)...(19): siRNA sense strand
guacagaugaugacugcaa

SEQ ID NO: 1475646 - RNA, 19 nt, Homo sapiens
  misc_RNA (1)...(19): siRNA sense strand
acaaggauggcaaugguua

SEQ ID NO: 1475647 - RNA, 19 nt, Homo sapiens
  misc_RNA (1)...(19): siRNA sense strand
gaacccaacagaagcugaa

SEQ ID NO: 1475648 - RNA, 19 nt, Homo sapiens
  misc_RNA (1)...(19): siRNA sense strand
ugaagaaguagaugaaaug

SEQ ID NO: 1475649 - RNA, 19 nt, Homo sapiens
  misc_RNA (1)...(19): siRNA sense strand
cugaucagcugaccgaaga

SEQ ID NO: 1475650 - RNA, 19 nt, Homo sapiens
  misc_RNA (1)...(19): siRNA sense strand
ggacaagucaacuaugaag

SEQ ID NO: 1475651 - RNA, 19 nt, Homo sapiens
  misc_RNA (1)...(19): siRNA sense strand
aagcugaauugcaggauau

SEQ ID NO: 1475652 - RNA, 19 nt, Homo sapiens
  misc_RNA (1)...(19): siRNA sense strand
cagagaagcagauauugau

SEQ ID NO: 1475653 - RNA, 19 nt, Homo sapiens
  misc_RNA (1)...(19): siRNA sense strand
ucagagaagcagauauuga

SEQ ID NO: 1475654 - RNA, 19 nt, Homo sapiens
  misc_RNA (1)...(19): siRNA sense strand
agaagcagauauugaugga

SEQ ID NO: 1475655 - RNA, 19 nt, Homo sapiens
  misc_RNA (1)...(19): siRNA sense strand
acggacaagucaacuauga

SEQ ID NO: 1475656 - RNA, 19 nt, Homo sapiens
  misc_RNA (1)...(19): siRNA sense strand
ugaaguggaugcugauggu

SEQ ID NO: 1475657 - RNA, 19 nt, Homo sapiens
  misc_RNA (1)...(19): siRNA sense strand
uaucagugcagcagaacua

SEQ ID NO: 1475658 - RNA, 19 nt, Homo sapiens
  misc_RNA (1)...(19): siRNA sense strand
acaagucaacuaugaagaa

SEQ ID NO: 1475659 - RNA, 19 nt, Homo sapiens
  misc_RNA (1)...(19): siRNA sense strand
uaacagaugaagaaguaga

SEQ ID NO: 1475660 - RNA, 19 nt, Homo sapiens
  misc_RNA (1)...(19): siRNA sense strand
gaugaaaugaucagagaag

SEQ ID NO: 1475661 - RNA, 19 nt, Homo sapiens
  misc_RNA (1)...(19): siRNA sense strand
gaagaacagauugcugaau

SEQ ID NO: 1475662 - RNA, 19 nt, Homo sapiens
  misc_RNA (1)...(19): siRNA sense strand
uaugaucaaugaaguggau

SEQ ID NO: 1475663 - RNA, 19 nt, Homo sapiens
  misc_RNA (1)...(19): siRNA sense strand
agaaauccgugaggcauuc

SEQ ID NO: 1475664 - RNA, 19 nt, Homo sapiens
  misc_RNA (1)...(19): siRNA sense strand
ugaagaauucguacagaug

SEQ ID NO: 1475665 - RNA, 19 nt, Homo sapiens
  misc_RNA (1)...(19): siRNA sense strand
ugaggucacugggucagaa

SEQ ID NO: 1475666 - RNA, 19 nt, Homo sapiens
  misc_RNA (1)...(19): siRNA sense strand
gaauucguacagaugauga

SEQ ID NO: 1475667 - RNA, 19 nt, Homo sapiens
  misc_RNA (1)...(19): siRNA sense strand
agaacagauugcugaauuc

SEQ ID NO: 1475668 - RNA, 19 nt, Homo sapiens
  misc_RNA (1)...(19): siRNA sense strand
gaugaagaaguagaugaaa

SEQ ID NO: 1475669 - RNA, 19 nt, Homo sapiens
  misc_RNA (1)...(19): siRNA sense strand
uuauaucagugcagcagaa

SEQ ID NO: 1475670 - RNA, 19 nt, Homo sapiens
  misc_RNA (1)...(19): siRNA sense strand
uaugaagaauucguacaga

SEQ ID NO: 1475671 - RNA, 19 nt, Homo sapiens
  misc_RNA (1)...(19): siRNA sense strand
caugacaaacuuaggagaa

SEQ ID NO: 1475672 - RNA, 19 nt, Homo sapiens
  misc_RNA (1)...(19): siRNA sense strand
gagacggacaagucaacua

SEQ ID NO: 1475673 - RNA, 19 nt, Homo sapiens
  misc_RNA (1)...(19): siRNA sense strand
gaacugucaugaggucacu

SEQ ID NO: 1475674 - RNA, 19 nt, Homo sapiens
  misc_RNA (1)...(19): siRNA sense strand
auacagauagugaagaaga

SEQ ID NO: 1475675 - RNA, 19 nt, Homo sapiens
  misc_RNA (1)...(19): siRNA sense strand
uacagaugaugacugcaaa

SEQ ID NO: 1475676 - RNA, 19 nt, Homo sapiens
  misc_RNA (1)...(19): siRNA sense strand
gauggagacggacaaguca

SEQ ID NO: 1475677 - RNA, 19 nt, Homo sapiens
  misc_RNA (1)...(19): siRNA sense strand
gaaguagaugaaaugauca

SEQ ID NO: 1475678 - RNA, 19 nt, Homo sapiens
  misc_RNA (1)...(19): siRNA sense strand
ucacgucaugacaaacuua

SEQ ID NO: 1475679 - RNA, 19 nt, Homo sapiens
  misc_RNA (1)...(19): siRNA sense strand
uacagauagugaagaagaa

SEQ ID NO: 1475680 - RNA, 19 nt, Homo sapiens
  misc_RNA (1)...(19): siRNA sense strand
gaaguggaugcugauggua

SEQ ID NO: 1475681 - RNA, 19 nt, Homo sapiens
  misc_RNA (1)...(19): siRNA sense strand
cagaugaagaaguagauga

SEQ ID NO: 1475682 - RNA, 19 nt, Homo sapiens
  misc_RNA (1)...(19): siRNA sense strand
uggcaaugguuauaucagu

SEQ ID NO: 1475683 - RNA, 19 nt, Homo sapiens
  misc_RNA (1)...(19): siRNA sense strand
ccuucucccuauuugauaa

SEQ ID NO: 1475684 - RNA, 19 nt, Homo sapiens
  misc_RNA (1)...(19): siRNA sense strand
agacggacaagucaacuau

SEQ ID NO: 1475685 - RNA, 19 nt, Homo sapiens
  misc_RNA (1)...(19): siRNA sense strand
cccaacagaagcugaauug

SEQ ID NO: 1475686 - RNA, 19 nt, Homo sapiens
  misc_RNA (1)...(19): siRNA sense strand
gcugaccgaagaacagauu

SEQ ID NO: 1475687 - RNA, 19 nt, Homo sapiens
  misc_RNA (1)...(19): siRNA sense strand
ggauaugaucaaugaagug

SEQ ID NO: 1475688 - RNA, 19 nt, Homo sapiens
  misc_RNA (1)...(19): siRNA sense strand
gaauugcaggauaugauca

SEQ ID NO: 1475689 - RNA, 19 nt, Homo sapiens
  misc_RNA (1)...(19): siRNA sense strand
gauggcaaugguuauauca

SEQ ID NO: 1475690 - RNA, 19 nt, Homo sapiens
  misc_RNA (1)...(19): siRNA sense strand
augacaaacuuaggagaaa

SEQ ID NO: 1475691 - RNA, 19 nt, Homo sapiens
  misc_RNA (1)...(19): siRNA sense strand
cgaagaacagauugcugaa

SEQ ID NO: 1475692 - RNA, 19 nt, Homo sapiens
  misc_RNA (1)...(19): siRNA sense strand
gacaagucaacuaugaaga

SEQ ID NO: 1475693 - RNA, 19 nt, Homo sapiens
  misc_RNA (1)...(19): siRNA sense strand
ugaggcauuccgagucuuu

SEQ ID NO: 1475694 - RNA, 19 nt, Homo sapiens
  misc_RNA (1)...(19): siRNA sense strand
agaugaagaaguagaugaa

SEQ ID NO: 1475695 - RNA, 19 nt, Homo sapiens
  misc_RNA (1)...(19): siRNA sense strand
caggauaugaucaaugaag

SEQ ID NO: 1475696 - RNA, 19 nt, Homo sapiens
  misc_RNA (1)...(19): siRNA sense strand
aaagauacagauagugaag

SEQ ID NO: 1475697 - RNA, 19 nt, Homo sapiens
  misc_RNA (1)...(19): siRNA sense strand
cgucaugacaaacuuagga

SEQ ID NO: 1475698 - RNA, 19 nt, Homo sapiens
  misc_RNA (1)...(19): siRNA sense strand
aaggauggcaaugguuaua

SEQ ID NO: 1475699 - RNA, 19 nt, Homo sapiens
  misc_RNA (1)...(19): siRNA sense strand
caaggauggcaaugguuau

SEQ ID NO: 1475700 - RNA, 19 nt, Homo sapiens
  misc_RNA (1)...(19): siRNA sense strand
gacaaggauggcaaugguu

SEQ ID NO: 1475701 - RNA, 19 nt, Homo sapiens
  misc_RNA (1)...(19): siRNA sense strand
augaagaauucguacagau

SEQ ID NO: 1475702 - RNA, 19 nt, Homo sapiens
  misc_RNA (1)...(19): siRNA sense strand
ugaauugcaggauaugauc

SEQ ID NO: 1475703 - RNA, 19 nt, Homo sapiens
  misc_RNA (1)...(19): siRNA sense strand
aggauaugaucaaugaagu

SEQ ID NO: 1475704 - RNA, 19 nt, Homo sapiens
  misc_RNA (1)...(19): siRNA sense strand
ugauggagacggacaaguc

SEQ ID NO: 1475705 - RNA, 19 nt, Homo sapiens
  misc_RNA (1)...(19): siRNA sense strand
gcaccaucacaacaaagga

SEQ ID NO: 1475706 - RNA, 19 nt, Homo sapiens
  misc_RNA (1)...(19): siRNA sense strand
caccaucacaacaaaggaa

SEQ ID NO: 1475707 - RNA, 19 nt, Homo sapiens
  misc_RNA (1)...(19): siRNA sense strand
cgugaggcauuccgagucu

SEQ ID NO: 1475708 - RNA, 19 nt, Homo sapiens
  misc_RNA (1)...(19): siRNA sense strand
ggaacuuggaacugucaug

SEQ ID NO: 1475709 - RNA, 19 nt, Homo sapiens
  misc_RNA (1)...(19): siRNA sense strand
ugacaaacuuaggagaaaa

SEQ ID NO: 1475710 - RNA, 19 nt, Homo sapiens
  misc_RNA (1)...(19): siRNA sense strand
caaacuggauuucaauaug

SEQ ID NO: 1475711 - RNA, 19 nt, Homo sapiens
  misc_RNA (1)...(19): siRNA sense strand
gcagcaaacuggauuucaa

SEQ ID NO: 1475712 - RNA, 19 nt, Homo sapiens
  misc_RNA (1)...(19): siRNA sense strand
gaacaucaccauccaagug

SEQ ID NO: 1475713 - RNA, 19 nt, Homo sapiens
  misc_RNA (1)...(19): siRNA sense strand
cuaauaaccucuccauugu

SEQ ID NO: 1475714 - RNA, 19 nt, Homo sapiens
  misc_RNA (1)...(19): siRNA sense strand
ucaugugucucaucaagua

SEQ ID NO: 1475715 - RNA, 19 nt, Homo sapiens
  misc_RNA (1)...(19): siRNA sense strand
gaaaguguacgcccuguau

SEQ ID NO: 1475716 - RNA, 19 nt, Homo sapiens
  misc_RNA (1)...(19): siRNA sense strand
caaccaagcaagagcauuu

SEQ ID NO: 1475717 - RNA, 19 nt, Homo sapiens
  misc_RNA (1)...(19): siRNA sense strand
gaaggaggaaugagagauu

SEQ ID NO: 1475718 - RNA, 19 nt, Homo sapiens
  misc_RNA (1)...(19): siRNA sense strand
guccauaccucaauuucuu

SEQ ID NO: 1475719 - RNA, 19 nt, Homo sapiens
  misc_RNA (1)...(19): siRNA sense strand
ccaaggaagugaaagaagu

SEQ ID NO: 1475720 - RNA, 19 nt, Homo sapiens
  misc_RNA (1)...(19): siRNA sense strand
ggaaaauggagaagaauua

SEQ ID NO: 1475721 - RNA, 19 nt, Homo sapiens
  misc_RNA (1)...(19): siRNA sense strand
aauaaccucuccauuguga

SEQ ID NO: 1475722 - RNA, 19 nt, Homo sapiens
  misc_RNA (1)...(19): siRNA sense strand
ggaauacaaccaagcaaga

SEQ ID NO: 1475723 - RNA, 19 nt, Homo sapiens
  misc_RNA (1)...(19): siRNA sense strand
gcaaacuggauuucaauau

SEQ ID NO: 1475724 - RNA, 19 nt, Homo sapiens
  misc_RNA (1)...(19): siRNA sense strand
gggaacaccuggcugaagu

SEQ ID NO: 1475725 - RNA, 19 nt, Homo sapiens
  misc_RNA (1)...(19): siRNA sense strand
acacaacaguuucccaaga

SEQ ID NO: 1475726 - RNA, 19 nt, Homo sapiens
  misc_RNA (1)...(19): siRNA sense strand
ucacaauguuucuguugaa

SEQ ID NO: 1475727 - RNA, 19 nt, Homo sapiens
  misc_RNA (1)...(19): siRNA sense strand
gagagaaggaggaaugaga

SEQ ID NO: 1475728 - RNA, 19 nt, Homo sapiens
  misc_RNA (1)...(19): siRNA sense strand
acuaauaaccucuccauug

SEQ ID NO: 1475729 - RNA, 19 nt, Homo sapiens
  misc_RNA (1)...(19): siRNA sense strand
caagagcauuuuccugaua

SEQ ID NO: 1475730 - RNA, 19 nt, Homo sapiens
  misc_RNA (1)...(19): siRNA sense strand
uaaaugccaucaacacaac

SEQ ID NO: 1475731 - RNA, 19 nt, Homo sapiens
  misc_RNA (1)...(19): siRNA sense strand
ggaaugagagauugagaag

SEQ ID NO: 1475732 - RNA, 19 nt, Homo sapiens
  misc_RNA (1)...(19): siRNA sense strand
cccaagauccugaaacuga

SEQ ID NO: 1475733 - RNA, 19 nt, Homo sapiens
  misc_RNA (1)...(19): siRNA sense strand
ucacuucuguucagguguu

SEQ ID NO: 1475734 - RNA, 19 nt, Homo sapiens
  misc_RNA (1)...(19): siRNA sense strand
agaauuaaaugccaucaac

SEQ ID NO: 1475735 - RNA, 19 nt, Homo sapiens
  misc_RNA (1)...(19): siRNA sense strand
guguuguucugaaguauga

SEQ ID NO: 1475736 - RNA, 19 nt, Homo sapiens
  misc_RNA (1)...(19): siRNA sense strand
cacaacaguuucccaagau

SEQ ID NO: 1475737 - RNA, 19 nt, Homo sapiens
  misc_RNA (1)...(19): siRNA sense strand
gaauauauggcccgaguac

SEQ ID NO: 1475738 - RNA, 19 nt, Homo sapiens
  misc_RNA (1)...(19): siRNA sense strand
gccaucaacacaacaguuu

SEQ ID NO: 1475739 - RNA, 19 nt, Homo sapiens
  misc_RNA (1)...(19): siRNA sense strand
caauguuucuguugaagag

SEQ ID NO: 1475740 - RNA, 19 nt, Homo sapiens
  misc_RNA (1)...(19): siRNA sense strand
gaacaccuggcugaaguga

SEQ ID NO: 1475741 - RNA, 19 nt, Homo sapiens
  misc_RNA (1)...(19): siRNA sense strand
ggcacaaacucgcaucuac

SEQ ID NO: 1475742 - RNA, 19 nt, Homo sapiens
  misc_RNA (1)...(19): siRNA sense strand
uugaagagcuggcacaaac

SEQ ID NO: 1475743 - RNA, 19 nt, Homo sapiens
  misc_RNA (1)...(19): siRNA sense strand
gaaccggaccaucuuugau

SEQ ID NO: 1475744 - RNA, 19 nt, Homo sapiens
  misc_RNA (1)...(19): siRNA sense strand
ggaaaguguacgcccugua

SEQ ID NO: 1475745 - RNA, 19 nt, Homo sapiens
  misc_RNA (1)...(19): siRNA sense strand
ccuaguauaucugacuuug

SEQ ID NO: 1475746 - RNA, 19 nt, Homo sapiens
  misc_RNA (1)...(19): siRNA sense strand
gucacaauguuucuguuga

SEQ ID NO: 1475747 - RNA, 19 nt, Homo sapiens
  misc_RNA (1)...(19): siRNA sense strand
acugagcucuaugcuguua

SEQ ID NO: 1475748 - RNA, 19 nt, Homo sapiens
  misc_RNA (1)...(19): siRNA sense strand
gaccaucuuugauaucacu

SEQ ID NO: 1475749 - RNA, 19 nt, Homo sapiens
  misc_RNA (1)...(19): siRNA sense strand
gcagagagagaaggaggaa

SEQ ID NO: 1475750 - RNA, 19 nt, Homo sapiens
  misc_RNA (1)...(19): siRNA sense strand
gaccaaggaagugaaagaa

SEQ ID NO: 1475751 - RNA, 19 nt, Homo sapiens
  misc_RNA (1)...(19): siRNA sense strand
ggugcuggcuggucuuucu

SEQ ID NO: 1475752 - RNA, 19 nt, Homo sapiens
  misc_RNA (1)...(19): siRNA sense strand
gaauuaaaugccaucaaca

SEQ ID NO: 1475753 - RNA, 19 nt, Homo sapiens
  misc_RNA (1)...(19): siRNA sense strand
aaccggaccaucuuugaua

SEQ ID NO: 1475754 - RNA, 19 nt, Homo sapiens
  misc_RNA (1)...(19): siRNA sense strand
caauuucuuucagcucuug

SEQ ID NO: 1475755 - RNA, 19 nt, Homo sapiens
  misc_RNA (1)...(19): siRNA sense strand
aaauggugcugacuaugau

SEQ ID NO: 1475756 - RNA, 19 nt, Homo sapiens
  misc_RNA (1)...(19): siRNA sense strand
ggucacaauguuucuguug

SEQ ID NO: 1475757 - RNA, 19 nt, Homo sapiens
  misc_RNA (1)...(19): siRNA sense strand
gcacaaacucgcaucuacu

SEQ ID NO: 1475758 - RNA, 19 nt, Homo sapiens
  misc_RNA (1)...(19): siRNA sense strand
gaagagcuggcacaaacuc

SEQ ID NO: 1475759 - RNA, 19 nt, Homo sapiens
  misc_RNA (1)...(19): siRNA sense strand
uggcuggucuuucucacuu

SEQ ID NO: 1475760 - RNA, 19 nt, Homo sapiens
  misc_RNA (1)...(19): siRNA sense strand
gaaggauaauuugcucaac

SEQ ID NO: 1475761 - RNA, 19 nt, Homo sapiens
  misc_RNA (1)...(19): siRNA sense strand
gagagagaaggaggaauga

SEQ ID NO: 1475762 - RNA, 19 nt, Homo sapiens
  misc_RNA (1)...(19): siRNA sense strand
agagagagaaggaggaaug

SEQ ID NO: 1475763 - RNA, 19 nt, Homo sapiens
  misc_RNA (1)...(19): siRNA sense strand
cggaccaucuuugauauca

SEQ ID NO: 1475764 - RNA, 19 nt, Homo sapiens
  misc_RNA (1)...(19): siRNA sense strand
gagaaggaggaaugagaga

SEQ ID NO: 1475765 - RNA, 19 nt, Homo sapiens
  misc_RNA (1)...(19): siRNA sense strand
ugacuucccuacaccuagu

SEQ ID NO: 1475766 - RNA, 19 nt, Homo sapiens
  misc_RNA (1)...(19): siRNA sense strand
uggcugaagugacguuauc

SEQ ID NO: 1475767 - RNA, 19 nt, Homo sapiens
  misc_RNA (1)...(19): siRNA sense strand
uuaaaugccaucaacacaa

SEQ ID NO: 1475768 - RNA, 19 nt, Homo sapiens
  misc_RNA (1)...(19): siRNA sense strand
ugaccaaggaagugaaaga

SEQ ID NO: 1475769 - RNA, 19 nt, Homo sapiens
  misc_RNA (1)...(19): siRNA sense strand
gaauacaaccaagcaagag

SEQ ID NO: 1475770 - RNA, 19 nt, Homo sapiens
  misc_RNA (1)...(19): siRNA sense strand
cagcaaacuggauuucaau

SEQ ID NO: 1475771 - RNA, 19 nt, Homo sapiens
  misc_RNA (1)...(19): siRNA sense strand
cuacaccuaguauaucuga

SEQ ID NO: 1475772 - RNA, 19 nt, Homo sapiens
  misc_RNA (1)...(19): siRNA sense strand
ugccugaccuacugcuuug

SEQ ID NO: 1475773 - RNA, 19 nt, Homo sapiens
  misc_RNA (1)...(19): siRNA sense strand
aaguguacgcccuguauaa

SEQ ID NO: 1475774 - RNA, 19 nt, Homo sapiens
  misc_RNA (1)...(19): siRNA sense strand
aaggaggaaugagagauug

SEQ ID NO: 1475775 - RNA, 19 nt, Homo sapiens
  misc_RNA (1)...(19): siRNA sense strand
caucugacgagggcacaua

SEQ ID NO: 1475776 - RNA, 19 nt, Homo sapiens
  misc_RNA (1)...(19): siRNA sense strand
aaaguguacgcccuguaua

SEQ ID NO: 1475777 - RNA, 19 nt, Homo sapiens
  misc_RNA (1)...(19): siRNA sense strand
cuucaugugucucaucaag

SEQ ID NO: 1475778 - RNA, 19 nt, Homo sapiens
  misc_RNA (1)...(19): siRNA sense strand
aguguguuguucugaagua

SEQ ID NO: 1475779 - RNA, 19 nt, Homo sapiens
  misc_RNA (1)...(19): siRNA sense strand
acucgcaucuacuggcaaa

SEQ ID NO: 1475780 - RNA, 19 nt, Homo sapiens
  misc_RNA (1)...(19): siRNA sense strand
gcaagagcauuuuccugau

SEQ ID NO: 1475781 - RNA, 19 nt, Homo sapiens
  misc_RNA (1)...(19): siRNA sense strand
guuagcagcaaacuggauu

SEQ ID NO: 1475782 - RNA, 19 nt, Homo sapiens
  misc_RNA (1)...(19): siRNA sense strand
guuggaaaauggagaagaa

SEQ ID NO: 1475783 - RNA, 19 nt, Homo sapiens
  misc_RNA (1)...(19): siRNA sense strand
uacaagaaccggaccaucu

SEQ ID NO: 1475784 - RNA, 19 nt, Homo sapiens
  misc_RNA (1)...(19): siRNA sense strand
agaaaauggugcugacuau

SEQ ID NO: 1475785 - RNA, 19 nt, Homo sapiens
  misc_RNA (1)...(19): siRNA sense strand
auauauggcccgaguacaa

SEQ ID NO: 1475786 - RNA, 19 nt, Homo sapiens
  misc_RNA (1)...(19): siRNA sense strand
caaguguccauaccucaau

SEQ ID NO: 1475787 - RNA, 19 nt, Homo sapiens
  misc_RNA (1)...(19): siRNA sense strand
acuuugaaauuccaacuuc

SEQ ID NO: 1475788 - RNA, 19 nt, Homo sapiens
  misc_RNA (1)...(19): siRNA sense strand
cgaguguguuguucugaag

SEQ ID NO: 1475789 - RNA, 19 nt, Homo sapiens
  misc_RNA (1)...(19): siRNA sense strand
uaaccucuccauugugauc

SEQ ID NO: 1475790 - RNA, 19 nt, Homo sapiens
  misc_RNA (1)...(19): siRNA sense strand
gagagauugagaagggaaa

SEQ ID NO: 1475791 - RNA, 19 nt, Homo sapiens
  misc_RNA (1)...(19): siRNA sense strand
gaggaaugagagauugaga

SEQ ID NO: 1475792 - RNA, 19 nt, Homo sapiens
  misc_RNA (1)...(19): siRNA sense strand
ccaaguguccauaccucaa

SEQ ID NO: 1475793 - RNA, 19 nt, Homo sapiens
  misc_RNA (1)...(19): siRNA sense strand
uaagagugaaucagaccuu

SEQ ID NO: 1475794 - RNA, 19 nt, Homo sapiens
  misc_RNA (1)...(19): siRNA sense strand
caccuaguauaucugacuu

SEQ ID NO: 1475795 - RNA, 19 nt, Homo sapiens
  misc_RNA (1)...(19): siRNA sense strand
gcugacuucccuacaccua

SEQ ID NO: 1475796 - RNA, 19 nt, Homo sapiens
  misc_RNA (1)...(19): siRNA sense strand
uaucugacuuugaaauucc

SEQ ID NO: 1475797 - RNA, 19 nt, Homo sapiens
  misc_RNA (1)...(19): siRNA sense strand
ccaagaugcagagagagaa

SEQ ID NO: 1475798 - RNA, 19 nt, Homo sapiens
  misc_RNA (1)...(19): siRNA sense strand
cagggaacaucaccaucca

SEQ ID NO: 1475799 - RNA, 19 nt, Homo sapiens
  misc_RNA (1)...(19): siRNA sense strand
ucaauuucuuucagcucuu

SEQ ID NO: 1475800 - RNA, 19 nt, Homo sapiens
  misc_RNA (1)...(19): siRNA sense strand
gaagaauuaaaugccauca

SEQ ID NO: 1475801 - RNA, 19 nt, Homo sapiens
  misc_RNA (1)...(19): siRNA sense strand
caccucuccugguuggaaa

SEQ ID NO: 1475802 - RNA, 19 nt, Homo sapiens
  misc_RNA (1)...(19): siRNA sense strand
aaaauggugcugacuauga

SEQ ID NO: 1475803 - RNA, 19 nt, Homo sapiens
  misc_RNA (1)...(19): siRNA sense strand
uaugcugccugaccuacug

SEQ ID NO: 1475804 - RNA, 19 nt, Homo sapiens
  misc_RNA (1)...(19): siRNA sense strand
ugacaaccaaccacagcuu

SEQ ID NO: 1475805 - RNA, 19 nt, Homo sapiens
  misc_RNA (1)...(19): siRNA sense strand
acgaguguguuguucugaa

SEQ ID NO: 1475806 - RNA, 19 nt, Homo sapiens
  misc_RNA (1)...(19): siRNA sense strand
cgagggcacauacgagugu

SEQ ID NO: 1475807 - RNA, 19 nt, Homo sapiens
  misc_RNA (1)...(19): siRNA sense strand
agaaggauaauuugcucaa

SEQ ID NO: 1475808 - RNA, 19 nt, Homo sapiens
  misc_RNA (1)...(19): siRNA sense strand
cuuaaucucaguaaaugga

SEQ ID NO: 1475809 - RNA, 19 nt, Homo sapiens
  misc_RNA (1)...(19): siRNA sense strand
cacaaacucgcaucuacug

SEQ ID NO: 1475810 - RNA, 19 nt, Homo sapiens
  misc_RNA (1)...(19): siRNA sense strand
gcacuuugcugcugucuuc

SEQ ID NO: 1475811 - RNA, 19 nt, Homo sapiens
  misc_RNA (1)...(19): siRNA sense strand
acaaugcccucaccuacua

SEQ ID NO: 1475812 - RNA, 19 nt, Homo sapiens
  misc_RNA (1)...(19): siRNA sense strand
gaucaacccuaucaucuac

SEQ ID NO: 1475813 - RNA, 19 nt, Homo sapiens
  misc_RNA (1)...(19): siRNA sense strand
caaccaggaugugcagaaa

SEQ ID NO: 1475814 - RNA, 19 nt, Homo sapiens
  misc_RNA (1)...(19): siRNA sense strand
ucaggcaacgugaauguaa

SEQ ID NO: 1475815 - RNA, 19 nt, Homo sapiens
  misc_RNA (1)...(19): siRNA sense strand
gcaaccaggaugugcagaa

SEQ ID NO: 1475816 - RNA, 19 nt, Homo sapiens
  misc_RNA (1)...(19): siRNA sense strand
ggccauugccuucuucaug

SEQ ID NO: 1475817 - RNA, 19 nt, Homo sapiens
  misc_RNA (1)...(19): siRNA sense strand
uggauggccugaccacaug

SEQ ID NO: 1475818 - RNA, 19 nt, Homo sapiens
  misc_RNA (1)...(19): siRNA sense strand
uuuauccacucuccaagaa

SEQ ID NO: 1475819 - RNA, 19 nt, Homo sapiens
  misc_RNA (1)...(19): siRNA sense strand
gcucaggcaacgugaaugu

SEQ ID NO: 1475820 - RNA, 19 nt, Homo sapiens
  misc_RNA (1)...(19): siRNA sense strand
caccuacuauucagagaca

SEQ ID NO: 1475821 - RNA, 19 nt, Homo sapiens
  misc_RNA (1)...(19): siRNA sense strand
acaccuaucuuaccuugcu

SEQ ID NO: 1475822 - RNA, 19 nt, Homo sapiens
  misc_RNA (1)...(19): siRNA sense strand
gacacggaccuaugugaug

SEQ ID NO: 1475823 - RNA, 19 nt, Homo sapiens
  misc_RNA (1)...(19): siRNA sense strand
gcugucugcugcugcuguu

SEQ ID NO: 1475824 - RNA, 19 nt, Homo sapiens
  misc_RNA (1)...(19): siRNA sense strand
ccaccucucuacaccuauc

SEQ ID NO: 1475825 - RNA, 19 nt, Homo sapiens
  misc_RNA (1)...(19): siRNA sense strand
caacagugacacggaccua

SEQ ID NO: 1475826 - RNA, 19 nt, Homo sapiens
  misc_RNA (1)...(19): siRNA sense strand
gggauguggugcucugcau

SEQ ID NO: 1475827 - RNA, 19 nt, Homo sapiens
  misc_RNA (1)...(19): siRNA sense strand
cuccaccucucuacaccua

SEQ ID NO: 1475828 - RNA, 19 nt, Homo sapiens
  misc_RNA (1)...(19): siRNA sense strand
gcagcucuacgcccaaauc

SEQ ID NO: 1475829 - RNA, 19 nt, Homo sapiens
  misc_RNA (1)...(19): siRNA sense strand
ggccugguccugcacuuug

SEQ ID NO: 1475830 - RNA, 19 nt, Homo sapiens
  misc_RNA (1)...(19): siRNA sense strand
ccucucuacaccuaucuua

SEQ ID NO: 1475831 - RNA, 19 nt, Homo sapiens
  misc_RNA (1)...(19): siRNA sense strand
gcugguugcccuucacugu

SEQ ID NO: 1475832 - RNA, 19 nt, Homo sapiens
  misc_RNA (1)...(19): siRNA sense strand
cccagcagauugcccuuca

SEQ ID NO: 1475833 - RNA, 19 nt, Homo sapiens
  misc_RNA (1)...(19): siRNA sense strand
accgcuaccuuucucugua

SEQ ID NO: 1475834 - RNA, 19 nt, Homo sapiens
  misc_RNA (1)...(19): siRNA sense strand
caccacugcccucgccuaa

SEQ ID NO: 1475835 - RNA, 19 nt, Homo sapiens
  misc_RNA (1)...(19): siRNA sense strand
cguggugcuuggagccuuu

SEQ ID NO: 1475836 - RNA, 19 nt, Homo sapiens
  misc_RNA (1)...(19): siRNA sense strand
cuaccuuucucuguacaau

SEQ ID NO: 1475837 - RNA, 19 nt, Homo sapiens
  misc_RNA (1)...(19): siRNA sense strand
ugccugugcuggccuggaa

SEQ ID NO: 1475838 - RNA, 19 nt, Homo sapiens
  misc_RNA (1)...(19): siRNA sense strand
accaggaugugcagaaagu

SEQ ID NO: 1475839 - RNA, 19 nt, Homo sapiens
  misc_RNA (1)...(19): siRNA sense strand
caggcaacgugaauguaag

SEQ ID NO: 1475840 - RNA, 19 nt, Homo sapiens
  misc_RNA (1)...(19): siRNA sense strand
ugacacggaccuaugugau

SEQ ID NO: 1475841 - RNA, 19 nt, Homo sapiens
  misc_RNA (1)...(19): siRNA sense strand
gaucaucauugccguaugc

SEQ ID NO: 1475842 - RNA, 19 nt, Homo sapiens
  misc_RNA (1)...(19): siRNA sense strand
ccagaaguccugcuccaaa

SEQ ID NO: 1475843 - RNA, 19 nt, Homo sapiens
  misc_RNA (1)...(19): siRNA sense strand
cagaaguccugcuccaaag

SEQ ID NO: 1475844 - RNA, 19 nt, Homo sapiens
  misc_RNA (1)...(19): siRNA sense strand
gaaguccugcuccaaagug

SEQ ID NO: 1475845 - RNA, 19 nt, Homo sapiens
  misc_RNA (1)...(19): siRNA sense strand
gcucccaacucuaccucuu

SEQ ID NO: 1475846 - RNA, 19 nt, Homo sapiens
  misc_RNA (1)...(19): siRNA sense strand
gacugugcuugucaucauu

SEQ ID NO: 1475847 - RNA, 19 nt, Homo sapiens
  misc_RNA (1)...(19): siRNA sense strand
gugccucccugguguuucu

SEQ ID NO: 1475848 - RNA, 19 nt, Homo sapiens
  misc_RNA (1)...(19): siRNA sense strand
gaacaacgcagugguguga

SEQ ID NO: 1475849 - RNA, 19 nt, Homo sapiens
  misc_RNA (1)...(19): siRNA sense strand
gcagagcaacaaaggagua

SEQ ID NO: 1475850 - RNA, 19 nt, Homo sapiens
  misc_RNA (1)...(19): siRNA sense strand
gaucaucauugccguaugc

SEQ ID NO: 1475851 - RNA, 19 nt, Homo sapiens
  misc_RNA (1)...(19): siRNA sense strand
ccagaaguccugcuccaaa

SEQ ID NO: 1475852 - RNA, 19 nt, Homo sapiens
  misc_RNA (1)...(19): siRNA sense strand
ggaaaccacugagaaaaga

SEQ ID NO: 1475853 - RNA, 19 nt, Homo sapiens
  misc_RNA (1)...(19): siRNA sense strand
cagaaguccugcuccaaag

SEQ ID NO: 1475854 - RNA, 19 nt, Homo sapiens
  misc_RNA (1)...(19): siRNA sense strand
gaaguccugcuccaaagug

SEQ ID NO: 1475855 - RNA, 19 nt, Homo sapiens
  misc_RNA (1)...(19): siRNA sense strand
acaaaggaguagacgugaa

SEQ ID NO: 1475856 - RNA, 19 nt, Homo sapiens
  misc_RNA (1)...(19): siRNA sense strand
gcucccaacucuaccucuu

SEQ ID NO: 1475857 - RNA, 19 nt, Homo sapiens
  misc_RNA (1)...(19): siRNA sense strand
gacugugcuugucaucauu

SEQ ID NO: 1475858 - RNA, 19 nt, Homo sapiens
  misc_RNA (1)...(19): siRNA sense strand
caaaggaguagacgugaac

SEQ ID NO: 1475859 - RNA, 19 nt, Homo sapiens
  misc_RNA (1)...(19): siRNA sense strand
gaguaucccaugagugcuu

SEQ ID NO: 1475860 - RNA, 19 nt, Homo sapiens
  misc_RNA (1)...(19): siRNA sense strand
gugccucccugguguuucu

SEQ ID NO: 1475861 - RNA, 19 nt, Homo sapiens
  misc_RNA (1)...(19): siRNA sense strand
gagcaacaaaggaguagac

SEQ ID NO: 1475862 - RNA, 19 nt, Homo sapiens
  misc_RNA (1)...(19): siRNA sense strand
guugcugaguaucccauga

SEQ ID NO: 1475863 - RNA, 19 nt, Homo sapiens
  misc_RNA (1)...(19): siRNA sense strand
guaaauaccugccaugaug

SEQ ID NO: 1475864 - RNA, 19 nt, Homo sapiens
  misc_RNA (1)...(19): siRNA sense strand
gaaugacccugaagcagua

SEQ ID NO: 1475865 - RNA, 19 nt, Homo sapiens
  misc_RNA (1)...(19): siRNA sense strand
gaagagagacaagauuaua

SEQ ID NO: 1475866 - RNA, 19 nt, Homo sapiens
  misc_RNA (1)...(19): siRNA sense strand
gaacagggcaugacugaga

SEQ ID NO: 1475867 - RNA, 19 nt, Homo sapiens
  misc_RNA (1)...(19): siRNA sense strand
ggauauggguuugcuauug

SEQ ID NO: 1475868 - RNA, 19 nt, Homo sapiens
  misc_RNA (1)...(19): siRNA sense strand
ggacaggugugugugauga

SEQ ID NO: 1475869 - RNA, 19 nt, Homo sapiens
  misc_RNA (1)...(19): siRNA sense strand
ugacagaugugguaaauac

SEQ ID NO: 1475870 - RNA, 19 nt, Homo sapiens
  misc_RNA (1)...(19): siRNA sense strand
gaacauggcagccuuugau

SEQ ID NO: 1475871 - RNA, 19 nt, Homo sapiens
  misc_RNA (1)...(19): siRNA sense strand
gagacaagauuauagucaa

SEQ ID NO: 1475872 - RNA, 19 nt, Homo sapiens
  misc_RNA (1)...(19): siRNA sense strand
gaaaggaacggacacuguu

SEQ ID NO: 1475873 - RNA, 19 nt, Homo sapiens
  misc_RNA (1)...(19): siRNA sense strand
gaaugaugcucuggagaaa

SEQ ID NO: 1475874 - RNA, 19 nt, Homo sapiens
  misc_RNA (1)...(19): siRNA sense strand
ggaccuacaugugauuuau

SEQ ID NO: 1475875 - RNA, 19 nt, Homo sapiens
  misc_RNA (1)...(19): siRNA sense strand
caagaaagccauuaaacug

SEQ ID NO: 1475876 - RNA, 19 nt, Homo sapiens
  misc_RNA (1)...(19): siRNA sense strand
gggcaugacugagaccuuu

SEQ ID NO: 1475877 - RNA, 19 nt, Homo sapiens
  misc_RNA (1)...(19): siRNA sense strand
cagaugcgcugguagcuau

SEQ ID NO: 1475878 - RNA, 19 nt, Homo sapiens
  misc_RNA (1)...(19): siRNA sense strand
gaacggacacuguuaguac

SEQ ID NO: 1475879 - RNA, 19 nt, Homo sapiens
  misc_RNA (1)...(19): siRNA sense strand
gguguccgcuugcuaagaa

SEQ ID NO: 1475880 - RNA, 19 nt, Homo sapiens
  misc_RNA (1)...(19): siRNA sense strand
gaaccaauuuagaugaaag

SEQ ID NO: 1475881 - RNA, 19 nt, Homo sapiens
  misc_RNA (1)...(19): siRNA sense strand
gaaugugacagauguggua

SEQ ID NO: 1475882 - RNA, 19 nt, Homo sapiens
  misc_RNA (1)...(19): siRNA sense strand
gaaagccauuaaacugaga

SEQ ID NO: 1475883 - RNA, 19 nt, Homo sapiens
  misc_RNA (1)...(19): siRNA sense strand
gccaaggucuucaacacaa

SEQ ID NO: 1475884 - RNA, 19 nt, Homo sapiens
  misc_RNA (1)...(19): siRNA sense strand
gucaaccgcucuuccauga

SEQ ID NO: 1475885 - RNA, 19 nt, Homo sapiens
  misc_RNA (1)...(19): siRNA sense strand
gcaagaaagccauuaaacu

SEQ ID NO: 1475886 - RNA, 19 nt, Homo sapiens
  misc_RNA (1)...(19): siRNA sense strand
ccaaacugguuauggaaga

SEQ ID NO: 1475887 - RNA, 19 nt, Homo sapiens
  misc_RNA (1)...(19): siRNA sense strand
gauauggguuugcuauugg

SEQ ID NO: 1475888 - RNA, 19 nt, Homo sapiens
  misc_RNA (1)...(19): siRNA sense strand
ggaaaggaacggacacugu

SEQ ID NO: 1475889 - RNA, 19 nt, Homo sapiens
  misc_RNA (1)...(19): siRNA sense strand
gaaauugauguuugaggaa

SEQ ID NO: 1475890 - RNA, 19 nt, Homo sapiens
  misc_RNA (1)...(19): siRNA sense strand
ggacagccagugcucauug

SEQ ID NO: 1475891 - RNA, 19 nt, Homo sapiens
  misc_RNA (1)...(19): siRNA sense strand
caaugaguaugcugcuaaa

SEQ ID NO: 1475892 - RNA, 19 nt, Homo sapiens
  misc_RNA (1)...(19): siRNA sense strand
ucacaacauugccaaagug

SEQ ID NO: 1475893 - RNA, 19 nt, Homo sapiens
  misc_RNA (1)...(19): siRNA sense strand
uuagacaaauuggcagaua

SEQ ID NO: 1475894 - RNA, 19 nt, Homo sapiens
  misc_RNA (1)...(19): siRNA sense strand
gcuccugaguccuauaaga

SEQ ID NO: 1475895 - RNA, 19 nt, Homo sapiens
  misc_RNA (1)...(19): siRNA sense strand
uggagaaauugauguuuga

SEQ ID NO: 1475896 - RNA, 19 nt, Homo sapiens
  misc_RNA (1)...(19): siRNA sense strand
auaagaaugugacagaugu

SEQ ID NO: 1475897 - RNA, 19 nt, Homo sapiens
  misc_RNA (1)...(19): siRNA sense strand
caaccauuaugcagaaauc

SEQ ID NO: 1475898 - RNA, 19 nt, Homo sapiens
  misc_RNA (1)...(19): siRNA sense strand
ggaauugcgauccguguug

SEQ ID NO: 1475899 - RNA, 19 nt, Homo sapiens
  misc_RNA (1)...(19): siRNA sense strand
ggaacggacacuguuagua

SEQ ID NO: 1475900 - RNA, 19 nt, Homo sapiens
  misc_RNA (1)...(19): siRNA sense strand
gaagguguuuucuauguga

SEQ ID NO: 1475901 - RNA, 19 nt, Homo sapiens
  misc_RNA (1)...(19): siRNA sense strand
ccucauugcuguugauuac

SEQ ID NO: 1475902 - RNA, 19 nt, Homo sapiens
  misc_RNA (1)...(19): siRNA sense strand
ggagaaggccaugaagaga

SEQ ID NO: 1475903 - RNA, 19 nt, Homo sapiens
  misc_RNA (1)...(19): siRNA sense strand
ucaaugaguaugcugcuaa

SEQ ID NO: 1475904 - RNA, 19 nt, Homo sapiens
  misc_RNA (1)...(19): siRNA sense strand
gcucuuccaugaccuucuu

SEQ ID NO: 1475905 - RNA, 19 nt, Homo sapiens
  misc_RNA (1)...(19): siRNA sense strand
cuauugggcuuccugaugu

SEQ ID NO: 1475906 - RNA, 19 nt, Homo sapiens
  misc_RNA (1)...(19): siRNA sense strand
ugaaugaugcucuggagaa

SEQ ID NO: 1475907 - RNA, 19 nt, Homo sapiens
  misc_RNA (1)...(19): siRNA sense strand
agaaggccaugaagagaga

SEQ ID NO: 1475908 - RNA, 19 nt, Homo sapiens
  misc_RNA (1)...(19): siRNA sense strand
uggaugagauuuucaauga

SEQ ID NO: 1475909 - RNA, 19 nt, Homo sapiens
  misc_RNA (1)...(19): siRNA sense strand
gggaaccuguaguuauguu

SEQ ID NO: 1475910 - RNA, 19 nt, Homo sapiens
  misc_RNA (1)...(19): siRNA sense strand
aaaggaacggacacuguua

SEQ ID NO: 1475911 - RNA, 19 nt, Homo sapiens
  misc_RNA (1)...(19): siRNA sense strand
cuggagaaauugauguuug

SEQ ID NO: 1475912 - RNA, 19 nt, Homo sapiens
  misc_RNA (1)...(19): siRNA sense strand
augaugcucuggagaaauu

SEQ ID NO: 1475913 - RNA, 19 nt, Homo sapiens
  misc_RNA (1)...(19): siRNA sense strand
ggaauuguucaucgaucua

SEQ ID NO: 1475914 - RNA, 19 nt, Homo sapiens
  misc_RNA (1)...(19): siRNA sense strand
uagacaaauuggcagauau

SEQ ID NO: 1475915 - RNA, 19 nt, Homo sapiens
  misc_RNA (1)...(19): siRNA sense strand
ggaggaggccuuggagaug

SEQ ID NO: 1475916 - RNA, 19 nt, Homo sapiens
  misc_RNA (1)...(19): siRNA sense strand
ccauuaaacugagaccaau

SEQ ID NO: 1475917 - RNA, 19 nt, Homo sapiens
  misc_RNA (1)...(19): siRNA sense strand
aagaaagccauuaaacuga

SEQ ID NO: 1475918 - RNA, 19 nt, Homo sapiens
  misc_RNA (1)...(19): siRNA sense strand
cacccaaacugguuaugga

SEQ ID NO: 1475919 - RNA, 19 nt, Homo sapiens
  misc_RNA (1)...(19): siRNA sense strand
ugauguccauucaggauau

SEQ ID NO: 1475920 - RNA, 19 nt, Homo sapiens
  misc_RNA (1)...(19): siRNA sense strand
aagacuaucugaagggaau

SEQ ID NO: 1475921 - RNA, 19 nt, Homo sapiens
  misc_RNA (1)...(19): siRNA sense strand
augaugagcugcaguucuu

SEQ ID NO: 1475922 - RNA, 19 nt, Homo sapiens
  misc_RNA (1)...(19): siRNA sense strand
caauugcugugaucaaagg

SEQ ID NO: 1475923 - RNA, 19 nt, Homo sapiens
  misc_RNA (1)...(19): siRNA sense strand
caugggaaccuguaguuau

SEQ ID NO: 1475924 - RNA, 19 nt, Homo sapiens
  misc_RNA (1)...(19): siRNA sense strand
ugauaugaaugacccugaa

SEQ ID NO: 1475925 - RNA, 19 nt, Homo sapiens
  misc_RNA (1)...(19): siRNA sense strand
cauggcagccuuugauaug

SEQ ID NO: 1475926 - RNA, 19 nt, Homo sapiens
  misc_RNA (1)...(19): siRNA sense strand
cagcaagaaagccauuaaa

SEQ ID NO: 1475927 - RNA, 19 nt, Homo sapiens
  misc_RNA (1)...(19): siRNA sense strand
gcugguagcuauggagaag

SEQ ID NO: 1475928 - RNA, 19 nt, Homo sapiens
  misc_RNA (1)...(19): siRNA sense strand
agucgcagcuauaaugaug

SEQ ID NO: 1475929 - RNA, 19 nt, Homo sapiens
  misc_RNA (1)...(19): siRNA sense strand
aggcaaccauuaugcagaa

SEQ ID NO: 1475930 - RNA, 19 nt, Homo sapiens
  misc_RNA (1)...(19): siRNA sense strand
cccagagggucaagacuau

SEQ ID NO: 1475931 - RNA, 19 nt, Homo sapiens
  misc_RNA (1)...(19): siRNA sense strand
augaagagagacaagauua

SEQ ID NO: 1475932 - RNA, 19 nt, Homo sapiens
  misc_RNA (1)...(19): siRNA sense strand
caaugaaugccaaagacuu

SEQ ID NO: 1475933 - RNA, 19 nt, Homo sapiens
  misc_RNA (1)...(19): siRNA sense strand
ccuauaagaaugugacaga

SEQ ID NO: 1475934 - RNA, 19 nt, Homo sapiens
  misc_RNA (1)...(19): siRNA sense strand
caaaaggugucaucccaau

SEQ ID NO: 1475935 - RNA, 19 nt, Homo sapiens
  misc_RNA (1)...(19): siRNA sense strand
gagaccaauugcugugauc

SEQ ID NO: 1475936 - RNA, 19 nt, Homo sapiens
  misc_RNA (1)...(19): siRNA sense strand
acugagaccuuuggaacaa

SEQ ID NO: 1475937 - RNA, 19 nt, Homo sapiens
  misc_RNA (1)...(19): siRNA sense strand
gaucggcaguuggcuugug

SEQ ID NO: 1475938 - RNA, 19 nt, Homo sapiens
  misc_RNA (1)...(19): siRNA sense strand
uugcugugaucaaaggaua

SEQ ID NO: 1475939 - RNA, 19 nt, Homo sapiens
  misc_RNA (1)...(19): siRNA sense strand
ugugacagaugugguaaau

SEQ ID NO: 1475940 - RNA, 19 nt, Homo sapiens
  misc_RNA (1)...(19): siRNA sense strand
cuacaugugauuuaugaug

SEQ ID NO: 1475941 - RNA, 19 nt, Homo sapiens
  misc_RNA (1)...(19): siRNA sense strand
gaacuaugccugggucaac

SEQ ID NO: 1475942 - RNA, 19 nt, Homo sapiens
  misc_RNA (1)...(19): siRNA sense strand
ggaacauggcagccuuuga

SEQ ID NO: 1475943 - RNA, 19 nt, Homo sapiens
  misc_RNA (1)...(19): siRNA sense strand
gguugaagguguuuucuau

SEQ ID NO: 1475944 - RNA, 19 nt, Homo sapiens
  misc_RNA (1)...(19): siRNA sense strand
gacuuggaccuacauguga

SEQ ID NO: 1475945 - RNA, 19 nt, Homo sapiens
  misc_RNA (1)...(19): siRNA sense strand
ccaauuuagaugaaaguga

SEQ ID NO: 1475946 - RNA, 19 nt, Homo sapiens
  misc_RNA (1)...(19): siRNA sense strand
uggcagccuuugauaugaa

SEQ ID NO: 1475947 - RNA, 19 nt, Homo sapiens
  misc_RNA (1)...(19): siRNA sense strand
gggagcaggcaaccauuau

SEQ ID NO: 1475948 - RNA, 19 nt, Homo sapiens
  misc_RNA (1)...(19): siRNA sense strand
ugacuuggaccuacaugug

SEQ ID NO: 1475949 - RNA, 19 nt, Homo sapiens
  misc_RNA (1)...(19): siRNA sense strand
ugaagagagacaagauuau

SEQ ID NO: 1475950 - RNA, 19 nt, Homo sapiens
  misc_RNA (1)...(19): siRNA sense strand
ggagcaggcaaccauuaug

SEQ ID NO: 1475951 - RNA, 19 nt, Homo sapiens
  misc_RNA (1)...(19): siRNA sense strand
gccauuaaacugagaccaa

SEQ ID NO: 1475952 - RNA, 19 nt, Homo sapiens
  misc_RNA (1)...(19): siRNA sense strand
ucagcaagaaagccauuaa

SEQ ID NO: 1475953 - RNA, 19 nt, Homo sapiens
  misc_RNA (1)...(19): siRNA sense strand
gaugagauuuucaaugagu

SEQ ID NO: 1475954 - RNA, 19 nt, Homo sapiens
  misc_RNA (1)...(19): siRNA sense strand
gaauuguucaucgaucuau

SEQ ID NO: 1475955 - RNA, 19 nt, Homo sapiens
  misc_RNA (1)...(19): siRNA sense strand
accaauugcugugaucaaa

SEQ ID NO: 1475956 - RNA, 19 nt, Homo sapiens
  misc_RNA (1)...(19): siRNA sense strand
uauaagaaugugacagaug

SEQ ID NO: 1475957 - RNA, 19 nt, Homo sapiens
  misc_RNA (1)...(19): siRNA sense strand
ccugaguccuauaagaaug

SEQ ID NO: 1475958 - RNA, 19 nt, Homo sapiens
  misc_RNA (1)...(19): siRNA sense strand
agacaaauuggcagauaug

SEQ ID NO: 1475959 - RNA, 19 nt, Homo sapiens
  misc_RNA (1)...(19): siRNA sense strand
caugaagagagacaagauu

SEQ ID NO: 1475960 - RNA, 19 nt, Homo sapiens
  misc_RNA (1)...(19): siRNA sense strand
uuugaggaauuaaggaaug

SEQ ID NO: 1475961 - RNA, 19 nt, Homo sapiens
  misc_RNA (1)...(19): siRNA sense strand
augggaaccuguaguuaug

SEQ ID NO: 1475962 - RNA, 19 nt, Homo sapiens
  misc_RNA (1)...(19): siRNA sense strand
ccaugggaaccuguaguua

SEQ ID NO: 1475963 - RNA, 19 nt, Homo sapiens
  misc_RNA (1)...(19): siRNA sense strand
gcaaagagcccaaacagau

SEQ ID NO: 1475964 - RNA, 19 nt, Homo sapiens
  misc_RNA (1)...(19): siRNA sense strand
caacgaauauggcuacagu

SEQ ID NO: 1475965 - RNA, 19 nt, Homo sapiens
  misc_RNA (1)...(19): siRNA sense strand
cgaaagcugugaccaaagu

SEQ ID NO: 1475966 - RNA, 19 nt, Homo sapiens
  misc_RNA (1)...(19): siRNA sense strand
caagggaaguguggaauuc

SEQ ID NO: 1475967 - RNA, 19 nt, Homo sapiens
  misc_RNA (1)...(19): siRNA sense strand
gggcaucaauggauuugga

SEQ ID NO: 1475968 - RNA, 19 nt, Homo sapiens
  misc_RNA (1)...(19): siRNA sense strand
gcccauggcuggcauccuu

SEQ ID NO: 1475969 - RNA, 19 nt, Homo sapiens
  misc_RNA (1)...(19): siRNA sense strand
ggacaaccaugagaucucu

SEQ ID NO: 1475970 - RNA, 19 nt, Homo sapiens
  misc_RNA (1)...(19): siRNA sense strand
ugguguacauguuuaagua

SEQ ID NO: 1475971 - RNA, 19 nt, Homo sapiens
  misc_RNA (1)...(19): siRNA sense strand
ccaugaacauugugagcaa

SEQ ID NO: 1475972 - RNA, 19 nt, Homo sapiens
  misc_RNA (1)...(19): siRNA sense strand
ugaccacaguccauuccua

SEQ ID NO: 1475973 - RNA, 19 nt, Homo sapiens
  misc_RNA (1)...(19): siRNA sense strand
caaugacaauuucgugaag

SEQ ID NO: 1475974 - RNA, 19 nt, Homo sapiens
  misc_RNA (1)...(19): siRNA sense strand
caugguacgacaacgaaua

SEQ ID NO: 1475975 - RNA, 19 nt, Homo sapiens
  misc_RNA (1)...(19): siRNA sense strand
ucaccaaugucaccguugu

SEQ ID NO: 1475976 - RNA, 19 nt, Homo sapiens
  misc_RNA (1)...(19): siRNA sense strand
caaagagcccaaacagauc

SEQ ID NO: 1475977 - RNA, 19 nt, Homo sapiens
  misc_RNA (1)...(19): siRNA sense strand
ugcgaaagcugugaccaaa

SEQ ID NO: 1475978 - RNA, 19 nt, Homo sapiens
  misc_RNA (1)...(19): siRNA sense strand
caaggaggcuguaaaagca

SEQ ID NO: 1475979 - RNA, 19 nt, Homo sapiens
  misc_RNA (1)...(19): siRNA sense strand
gcauggagaaggguguuaa

SEQ ID NO: 1475980 - RNA, 19 nt, Homo sapiens
  misc_RNA (1)...(19): siRNA sense strand
gauacccacucguccaucu

SEQ ID NO: 1475981 - RNA, 19 nt, Homo sapiens
  misc_RNA (1)...(19): siRNA sense strand
gacaacuggucguggacaa

SEQ ID NO: 1475982 - RNA, 19 nt, Homo sapiens
  misc_RNA (1)...(19): siRNA sense strand
ggugguggcugugaaugau

SEQ ID NO: 1475983 - RNA, 19 nt, Homo sapiens
  misc_RNA (1)...(19): siRNA sense strand
aggaaggccuggcgagaug

SEQ ID NO: 1475984 - RNA, 19 nt, Homo sapiens
  misc_RNA (1)...(19): siRNA sense strand
guguacauguuuaaguaug

SEQ ID NO: 1475985 - RNA, 19 nt, Homo sapiens
  misc_RNA (1)...(19): siRNA sense strand
ucaaugacaauuucgugaa

SEQ ID NO: 1475986 - RNA, 19 nt, Homo sapiens
  misc_RNA (1)...(19): siRNA sense strand
ggucgucucuacggacuuc

SEQ ID NO: 1475987 - RNA, 19 nt, Homo sapiens
  misc_RNA (1)...(19): siRNA sense strand
accaugagaucucugucua

SEQ ID NO: 1475988 - RNA, 19 nt, Homo sapiens
  misc_RNA (1)...(19): siRNA sense strand
gaaguguggaauucaggaa

SEQ ID NO: 1475989 - RNA, 19 nt, Homo sapiens
  misc_RNA (1)...(19): siRNA sense strand
cuccuaagauggugucugu

SEQ ID NO: 1475990 - RNA, 19 nt, Homo sapiens
  misc_RNA (1)...(19): siRNA sense strand
ugucaccguuguccaguug

SEQ ID NO: 1475991 - RNA, 19 nt, Homo sapiens
  misc_RNA (1)...(19): siRNA sense strand
ccgcuacuccuccuccuaa

SEQ ID NO: 1475992 - RNA, 19 nt, Homo sapiens
  misc_RNA (1)...(19): siRNA sense strand
cgacaucguccucaccaau

SEQ ID NO: 1475993 - RNA, 19 nt, Homo sapiens
  misc_RNA (1)...(19): siRNA sense strand
aggaugaggucgucucuac

SEQ ID NO: 1475994 - RNA, 19 nt, Homo sapiens
  misc_RNA (1)...(19): siRNA sense strand
gacaucguccucaccaaug

SEQ ID NO: 1475995 - RNA, 19 nt, Homo sapiens
  misc_RNA (1)...(19): siRNA sense strand
ccagagcccacaccaguca

SEQ ID NO: 1475996 - RNA, 19 nt, Homo sapiens
  misc_RNA (1)...(19): siRNA sense strand
uuaaggugguggcugugaa

SEQ ID NO: 1475997 - RNA, 19 nt, Homo sapiens
  misc_RNA (1)...(19): siRNA sense strand
guucagccgagacaaguga

SEQ ID NO: 1475998 - RNA, 19 nt, Homo sapiens
  misc_RNA (1)...(19): siRNA sense strand
ccagucagggaggaaauaa

SEQ ID NO: 1475999 - RNA, 19 nt, Homo sapiens
  misc_RNA (1)...(19): siRNA sense strand
ucauugacccggaauacau

SEQ ID NO: 1476000 - RNA, 19 nt, Homo sapiens
  misc_RNA (1)...(19): siRNA sense strand
gaucguggaaggguugaug

SEQ ID NO: 1476001 - RNA, 19 nt, Homo sapiens
  misc_RNA (1)...(19): siRNA sense strand
acaagggaaguguggaauu

SEQ ID NO: 1476002 - RNA, 19 nt, Homo sapiens
  misc_RNA (1)...(19): siRNA sense strand
gaccuccuccgcuacaugu

SEQ ID NO: 1476003 - RNA, 19 nt, Homo sapiens
  misc_RNA (1)...(19): siRNA sense strand
cuacuccuccuccuaagau

SEQ ID NO: 1476004 - RNA, 19 nt, Homo sapiens
  misc_RNA (1)...(19): siRNA sense strand
gugcaaagagcccaaacag

SEQ ID NO: 1476005 - RNA, 19 nt, Homo sapiens
  misc_RNA (1)...(19): siRNA sense strand
gguacgacaacgaauaugg

SEQ ID NO: 1476006 - RNA, 19 nt, Homo sapiens
  misc_RNA (1)...(19): siRNA sense strand
caucaaggaggcuguaaaa

SEQ ID NO: 1476007 - RNA, 19 nt, Homo sapiens
  misc_RNA (1)...(19): siRNA sense strand
aacccuggcuccaugaaca

SEQ ID NO: 1476008 - RNA, 19 nt, Homo sapiens
  misc_RNA (1)...(19): siRNA sense strand
gguguacauguuuaaguau

SEQ ID NO: 1476009 - RNA, 19 nt, Homo sapiens
  misc_RNA (1)...(19): siRNA sense strand
guacauguuuaaguaugac

SEQ ID NO: 1476010 - RNA, 19 nt, Homo sapiens
  misc_RNA (1)...(19): siRNA sense strand
gcaaauggccacaguguua

SEQ ID NO: 1476011 - RNA, 19 nt, Homo sapiens
  misc_RNA (1)...(19): siRNA sense strand
uaaaggaagcgaucaauua

SEQ ID NO: 1476012 - RNA, 19 nt, Homo sapiens
  misc_RNA (1)...(19): siRNA sense strand
gaacugaagggauaauaaa

SEQ ID NO: 1476013 - RNA, 19 nt, Homo sapiens
  misc_RNA (1)...(19): siRNA sense strand
gcuagcagcugcaggaauu

SEQ ID NO: 1476014 - RNA, 19 nt, Homo sapiens
  misc_RNA (1)...(19): siRNA sense strand
gacuguagaugaaaucgua

SEQ ID NO: 1476015 - RNA, 19 nt, Homo sapiens
  misc_RNA (1)...(19): siRNA sense strand
gcucgugacuguagaugaa

SEQ ID NO: 1476016 - RNA, 19 nt, Homo sapiens
  misc_RNA (1)...(19): siRNA sense strand
ggaacugaagggauaauaa

SEQ ID NO: 1476017 - RNA, 19 nt, Homo sapiens
  misc_RNA (1)...(19): siRNA sense strand
agucaaagcccaaggauuu

SEQ ID NO: 1476018 - RNA, 19 nt, Homo sapiens
  misc_RNA (1)...(19): siRNA sense strand
aggaagcgaucaauuacua

SEQ ID NO: 1476019 - RNA, 19 nt, Homo sapiens
  misc_RNA (1)...(19): siRNA sense strand
ggcagagaaugcaggcuua

SEQ ID NO: 1476020 - RNA, 19 nt, Homo sapiens
  misc_RNA (1)...(19): siRNA sense strand
gcugaucuagcucaauuua

SEQ ID NO: 1476021 - RNA, 19 nt, Homo sapiens
  misc_RNA (1)...(19): siRNA sense strand
ugugggaacugaagggaua

SEQ ID NO: 1476022 - RNA, 19 nt, Homo sapiens
  misc_RNA (1)...(19): siRNA sense strand
ggagaucauuuaccugagu

SEQ ID NO: 1476023 - RNA, 19 nt, Homo sapiens
  misc_RNA (1)...(19): siRNA sense strand
gcaagugccagaggguuua

SEQ ID NO: 1476024 - RNA, 19 nt, Homo sapiens
  misc_RNA (1)...(19): siRNA sense strand
gggaagcucugugggcaaa

SEQ ID NO: 1476025 - RNA, 19 nt, Homo sapiens
  misc_RNA (1)...(19): siRNA sense strand
guaaaggaagcgaucaauu

SEQ ID NO: 1476026 - RNA, 19 nt, Homo sapiens
  misc_RNA (1)...(19): siRNA sense strand
ggacaaacccaggcagaga

SEQ ID NO: 1476027 - RNA, 19 nt, Homo sapiens
  misc_RNA (1)...(19): siRNA sense strand
gaacuagacggcagcuuca

SEQ ID NO: 1476028 - RNA, 19 nt, Homo sapiens
  misc_RNA (1)...(19): siRNA sense strand
gaagcucugugggcaaaug

SEQ ID NO: 1476029 - RNA, 19 nt, Homo sapiens
  misc_RNA (1)...(19): siRNA sense strand
ccaagaagacaaagaaaca

SEQ ID NO: 1476030 - RNA, 19 nt, Homo sapiens
  misc_RNA (1)...(19): siRNA sense strand
ugaucuagcucaauuuagu

SEQ ID NO: 1476031 - RNA, 19 nt, Homo sapiens
  misc_RNA (1)...(19): siRNA sense strand
ggauggagaucauuuaccu

SEQ ID NO: 1476032 - RNA, 19 nt, Homo sapiens
  misc_RNA (1)...(19): siRNA sense strand
gaucuagcucaauuuagua

SEQ ID NO: 1476033 - RNA, 19 nt, Homo sapiens
  misc_RNA (1)...(19): siRNA sense strand
cugcugaucuagcucaauu

SEQ ID NO: 1476034 - RNA, 19 nt, Homo sapiens
  misc_RNA (1)...(19): siRNA sense strand
caagaucccagacugauuc

SEQ ID NO: 1476035 - RNA, 19 nt, Homo sapiens
  misc_RNA (1)...(19): siRNA sense strand
guauuugaaugggaaugua

SEQ ID NO: 1476036 - RNA, 19 nt, Homo sapiens
  misc_RNA (1)...(19): siRNA sense strand
cugaagggauaauaaaugu

SEQ ID NO: 1476037 - RNA, 19 nt, Homo sapiens
  misc_RNA (1)...(19): siRNA sense strand
gcacagccuucgugguucu

SEQ ID NO: 1476038 - RNA, 19 nt, Homo sapiens
  misc_RNA (1)...(19): siRNA sense strand
uaaaggaagcagauuggaa

SEQ ID NO: 1476039 - RNA, 19 nt, Homo sapiens
  misc_RNA (1)...(19): siRNA sense strand
gaagcgaucaauuacuaga

SEQ ID NO: 1476040 - RNA, 19 nt, Homo sapiens
  misc_RNA (1)...(19): siRNA sense strand
ggucuuggauggagaucau

SEQ ID NO: 1476041 - RNA, 19 nt, Homo sapiens
  misc_RNA (1)...(19): siRNA sense strand
caaauggccacaguguuaa

SEQ ID NO: 1476042 - RNA, 19 nt, Homo sapiens
  misc_RNA (1)...(19): siRNA sense strand
gauaaaggaagcagauugg

SEQ ID NO: 1476043 - RNA, 19 nt, Homo sapiens
  misc_RNA (1)...(19): siRNA sense strand
gcaaguaggccagcuagca

SEQ ID NO: 1476044 - RNA, 19 nt, Homo sapiens
  misc_RNA (1)...(19): siRNA sense strand
ugguuuggcugugguauuu

SEQ ID NO: 1476045 - RNA, 19 nt, Homo sapiens
  misc_RNA (1)...(19): siRNA sense strand
gugcagagcaggccgucua

SEQ ID NO: 1476046 - RNA, 19 nt, Homo sapiens
  misc_RNA (1)...(19): siRNA sense strand
ggaauccugacuccaagaa

SEQ ID NO: 1476047 - RNA, 19 nt, Homo sapiens
  misc_RNA (1)...(19): siRNA sense strand
gacaaacccaggcagagaa

SEQ ID NO: 1476048 - RNA, 19 nt, Homo sapiens
  misc_RNA (1)...(19): siRNA sense strand
ucacacuggcggacaagua

SEQ ID NO: 1476049 - RNA, 19 nt, Homo sapiens
  misc_RNA (1)...(19): siRNA sense strand
cggcacagccuucgugguu

SEQ ID NO: 1476050 - RNA, 19 nt, Homo sapiens
  misc_RNA (1)...(19): siRNA sense strand
aauccugacuccaagaaga

SEQ ID NO: 1476051 - RNA, 19 nt, Homo sapiens
  misc_RNA (1)...(19): siRNA sense strand
ggugggaaccuccuaaugg

SEQ ID NO: 1476052 - RNA, 19 nt, Homo sapiens
  misc_RNA (1)...(19): siRNA sense strand
gcacaccugcccucacugu

SEQ ID NO: 1476053 - RNA, 19 nt, Homo sapiens
  misc_RNA (1)...(19): siRNA sense strand
cagugggccugcauuccua

SEQ ID NO: 1476054 - RNA, 19 nt, Homo sapiens
  misc_RNA (1)...(19): siRNA sense strand
cugcugggcuaucaaggaa

SEQ ID NO: 1476055 - RNA, 19 nt, Homo sapiens
  misc_RNA (1)...(19): siRNA sense strand
gacggaagccuugcuggaa

SEQ ID NO: 1476056 - RNA, 19 nt, Homo sapiens
  misc_RNA (1)...(19): siRNA sense strand
gggcaaauggccacagugu

SEQ ID NO: 1476057 - RNA, 19 nt, Homo sapiens
  misc_RNA (1)...(19): siRNA sense strand
guuuggcugugguauuuga

SEQ ID NO: 1476058 - RNA, 19 nt, Homo sapiens
  misc_RNA (1)...(19): siRNA sense strand
ugauaaaggaagcagauug

SEQ ID NO: 1476059 - RNA, 19 nt, Homo sapiens
  misc_RNA (1)...(19): siRNA sense strand
caccuccuguggaaacaaa

SEQ ID NO: 1476060 - RNA, 19 nt, Homo sapiens
  misc_RNA (1)...(19): siRNA sense strand
uaaugggugugggaacuga

SEQ ID NO: 1476061 - RNA, 19 nt, Homo sapiens
  misc_RNA (1)...(19): siRNA sense strand
gaccaugaaaggagaaaca

SEQ ID NO: 1476062 - RNA, 19 nt, Homo sapiens
  misc_RNA (1)...(19): siRNA sense strand
ggacacccuaauagucaaa

SEQ ID NO: 1476063 - RNA, 19 nt, Homo sapiens
  misc_RNA (1)...(19): siRNA sense strand
gggaacugaagggauaaua

SEQ ID NO: 1476064 - RNA, 19 nt, Homo sapiens
  misc_RNA (1)...(19): siRNA sense strand
gcagcugcaggaauuaaug

SEQ ID NO: 1476065 - RNA, 19 nt, Homo sapiens
  misc_RNA (1)...(19): siRNA sense strand
aaaggaagcgaucaauuac

SEQ ID NO: 1476066 - RNA, 19 nt, Homo sapiens
  misc_RNA (1)...(19): siRNA sense strand
gggacacccuaauagucaa

SEQ ID NO: 1476067 - RNA, 19 nt, Homo sapiens
  misc_RNA (1)...(19): siRNA sense strand
ggccugcauuccuagcauu

SEQ ID NO: 1476068 - RNA, 19 nt, Homo sapiens
  misc_RNA (1)...(19): siRNA sense strand
agcgaucaauuacuagaaa

SEQ ID NO: 1476069 - RNA, 19 nt, Homo sapiens
  misc_RNA (1)...(19): siRNA sense strand
caagaaaagucccacacau

SEQ ID NO: 1476070 - RNA, 19 nt, Homo sapiens
  misc_RNA (1)...(19): siRNA sense strand
ccacacaucaggagaucug

SEQ ID NO: 1476071 - RNA, 19 nt, Homo sapiens
  misc_RNA (1)...(19): siRNA sense strand
ccugggcccugaaguaucu

SEQ ID NO: 1476072 - RNA, 19 nt, Homo sapiens
  misc_RNA (1)...(19): siRNA sense strand
ccugggcccuccauucugu

SEQ ID NO: 1476073 - RNA, 19 nt, Homo sapiens
  misc_RNA (1)...(19): siRNA sense strand
gaaaucguaguggccaaga

SEQ ID NO: 1476074 - RNA, 19 nt, Homo sapiens
  misc_RNA (1)...(19): siRNA sense strand
uggcugagguggugcuaca

SEQ ID NO: 1476075 - RNA, 19 nt, Homo sapiens
  misc_RNA (1)...(19): siRNA sense strand
cagacgugauggcagaaau

SEQ ID NO: 1476076 - RNA, 19 nt, Homo sapiens
  misc_RNA (1)...(19): siRNA sense strand
ggagcugggagaugguuug

SEQ ID NO: 1476077 - RNA, 19 nt, Homo sapiens
  misc_RNA (1)...(19): siRNA sense strand
ucaagaucccagacugauu

SEQ ID NO: 1476078 - RNA, 19 nt, Homo sapiens
  misc_RNA (1)...(19): siRNA sense strand
ugaugccuauuuccagcua

SEQ ID NO: 1476079 - RNA, 19 nt, Homo sapiens
  misc_RNA (1)...(19): siRNA sense strand
ggcccuccauucugugaug

SEQ ID NO: 1476080 - RNA, 19 nt, Homo sapiens
  misc_RNA (1)...(19): siRNA sense strand
caggguggcucucuuugcu

SEQ ID NO: 1476081 - RNA, 19 nt, Homo sapiens
  misc_RNA (1)...(19): siRNA sense strand
aaucguaguggccaagaaa

SEQ ID NO: 1476082 - RNA, 19 nt, Homo sapiens
  misc_RNA (1)...(19): siRNA sense strand
gacgugauggcagaaauga

SEQ ID NO: 1476083 - RNA, 19 nt, Homo sapiens
  misc_RNA (1)...(19): siRNA sense strand
gguccugcccauccaaaug

SEQ ID NO: 1476084 - RNA, 19 nt, Homo sapiens
  misc_RNA (1)...(19): siRNA sense strand
aaacccaggcagagaauag

SEQ ID NO: 1476085 - RNA, 19 nt, Homo sapiens
  misc_RNA (1)...(19): siRNA sense strand
uaauguggcagugguguug

SEQ ID NO: 1476086 - RNA, 19 nt, Homo sapiens
  misc_RNA (1)...(19): siRNA sense strand
ggaagcgaucaauuacuag

SEQ ID NO: 1476087 - RNA, 19 nt, Homo sapiens
  misc_RNA (1)...(19): siRNA sense strand
gcugggcuaucaaggaacu

SEQ ID NO: 1476088 - RNA, 19 nt, Homo sapiens
  misc_RNA (1)...(19): siRNA sense strand
cggaagccuugcuggaaca

SEQ ID NO: 1476089 - RNA, 19 nt, Homo sapiens
  misc_RNA (1)...(19): siRNA sense strand
cuucaagccugagcguguu

SEQ ID NO: 1476090 - RNA, 19 nt, Homo sapiens
  misc_RNA (1)...(19): siRNA sense strand
ugggacacccuaauaguca

SEQ ID NO: 1476091 - RNA, 19 nt, Homo sapiens
  misc_RNA (1)...(19): siRNA sense strand
ccauggaccacuugaccaa

SEQ ID NO: 1476092 - RNA, 19 nt, Homo sapiens
  misc_RNA (1)...(19): siRNA sense strand
uggcugugguauuugaaug

SEQ ID NO: 1476093 - RNA, 19 nt, Homo sapiens
  misc_RNA (1)...(19): siRNA sense strand
aaaucguaguggccaagaa

SEQ ID NO: 1476094 - RNA, 19 nt, Homo sapiens
  misc_RNA (1)...(19): siRNA sense strand
acugaagggauaauaaaug

SEQ ID NO: 1476095 - RNA, 19 nt, Homo sapiens
  misc_RNA (1)...(19): siRNA sense strand
cuaaaacuuuggcagagaa

SEQ ID NO: 1476096 - RNA, 19 nt, Homo sapiens
  misc_RNA (1)...(19): siRNA sense strand
gcgaucaauuacuagaaaa

SEQ ID NO: 1476097 - RNA, 19 nt, Homo sapiens
  misc_RNA (1)...(19): siRNA sense strand
cgugauggcagaaaugagu

SEQ ID NO: 1476098 - RNA, 19 nt, Homo sapiens
  misc_RNA (1)...(19): siRNA sense strand
gggccugcauuccuagcau

SEQ ID NO: 1476099 - RNA, 19 nt, Homo sapiens
  misc_RNA (1)...(19): siRNA sense strand
caaacccaggcagagaaua

SEQ ID NO: 1476100 - RNA, 19 nt, Homo sapiens
  misc_RNA (1)...(19): siRNA sense strand
uagcagcugcaggaauuaa

SEQ ID NO: 1476101 - RNA, 19 nt, Homo sapiens
  misc_RNA (1)...(19): siRNA sense strand
gauaaccacucaucccuua

SEQ ID NO: 1476102 - RNA, 19 nt, Homo sapiens
  misc_RNA (1)...(19): siRNA sense strand
gggcaucacuccaagcauu

SEQ ID NO: 1476103 - RNA, 19 nt, Homo sapiens
  misc_RNA (1)...(19): siRNA sense strand
gaaaggagacggugugaca

SEQ ID NO: 1476104 - RNA, 19 nt, Homo sapiens
  misc_RNA (1)...(19): siRNA sense strand
gagcccagcuggugaugaa

SEQ ID NO: 1476105 - RNA, 19 nt, Homo sapiens
  misc_RNA (1)...(19): siRNA sense strand
acucaucccuuauuuauuc

SEQ ID NO: 1476106 - RNA, 19 nt, Homo sapiens
  misc_RNA (1)...(19): siRNA sense strand
ggaaacugcggaugucauu

SEQ ID NO: 1476107 - RNA, 19 nt, Homo sapiens
  misc_RNA (1)...(19): siRNA sense strand
ccacucaucccuuauuuau

SEQ ID NO: 1476108 - RNA, 19 nt, Homo sapiens
  misc_RNA (1)...(19): siRNA sense strand
gaauaaacagcuggacaaa

SEQ ID NO: 1476109 - RNA, 19 nt, Homo sapiens
  misc_RNA (1)...(19): siRNA sense strand
gcaagaaaaugagcucuga

SEQ ID NO: 1476110 - RNA, 19 nt, Homo sapiens
  misc_RNA (1)...(19): siRNA sense strand
gagacggugugacagaaau

SEQ ID NO: 1476111 - RNA, 19 nt, Homo sapiens
  misc_RNA (1)...(19): siRNA sense strand
caagguggcguucaagaug

SEQ ID NO: 1476112 - RNA, 19 nt, Homo sapiens
  misc_RNA (1)...(19): siRNA sense strand
ugaauaaacagcuggacaa

SEQ ID NO: 1476113 - RNA, 19 nt, Homo sapiens
  misc_RNA (1)...(19): siRNA sense strand
auaaacagcuggacaaaau

SEQ ID NO: 1476114 - RNA, 19 nt, Homo sapiens
  misc_RNA (1)...(19): siRNA sense strand
uaaccacucaucccuuauu

SEQ ID NO: 1476115 - RNA, 19 nt, Homo sapiens
  misc_RNA (1)...(19): siRNA sense strand
gaguccggcugauugaaga

SEQ ID NO: 1476116 - RNA, 19 nt, Homo sapiens
  misc_RNA (1)...(19): siRNA sense strand
ggcaucacuccaagcauua

SEQ ID NO: 1476117 - RNA, 19 nt, Homo sapiens
  misc_RNA (1)...(19): siRNA sense strand
ggagacggugugacagaaa

SEQ ID NO: 1476118 - RNA, 19 nt, Homo sapiens
  misc_RNA (1)...(19): siRNA sense strand
acagaaauccggaugagau

SEQ ID NO: 1476119 - RNA, 19 nt, Homo sapiens
  misc_RNA (1)...(19): siRNA sense strand
ucacccagcuauguaagga

SEQ ID NO: 1476120 - RNA, 19 nt, Homo sapiens
  misc_RNA (1)...(19): siRNA sense strand
ugacagaaauccggaugag

SEQ ID NO: 1476121 - RNA, 19 nt, Homo sapiens
  misc_RNA (1)...(19): siRNA sense strand
aaccacucaucccuuauuu

SEQ ID NO: 1476122 - RNA, 19 nt, Homo sapiens
  misc_RNA (1)...(19): siRNA sense strand
ucacuccaagcauuacuaa

SEQ ID NO: 1476123 - RNA, 19 nt, Homo sapiens
  misc_RNA (1)...(19): siRNA sense strand
ucaggcggauugaggacaa

SEQ ID NO: 1476124 - RNA, 19 nt, Homo sapiens
  misc_RNA (1)...(19): siRNA sense strand
ccagcuauguaaggacuau

SEQ ID NO: 1476125 - RNA, 19 nt, Homo sapiens
  misc_RNA (1)...(19): siRNA sense strand
guugggaggugccaugacu

SEQ ID NO: 1476126 - RNA, 19 nt, Homo sapiens
  misc_RNA (1)...(19): siRNA sense strand
ggaguccggcugauugaag

SEQ ID NO: 1476127 - RNA, 19 nt, Homo sapiens
  misc_RNA (1)...(19): siRNA sense strand
gcccagcuggugaugaauu

SEQ ID NO: 1476128 - RNA, 19 nt, Homo sapiens
  misc_RNA (1)...(19): siRNA sense strand
ccaagguggcguucaagau

SEQ ID NO: 1476129 - RNA, 19 nt, Homo sapiens
  misc_RNA (1)...(19): siRNA sense strand
ugaaaaugaugaagaugug

SEQ ID NO: 1476130 - RNA, 19 nt, Homo sapiens
  misc_RNA (1)...(19): siRNA sense strand
guaaggacuaugaaaauga

SEQ ID NO: 1476131 - RNA, 19 nt, Homo sapiens
  misc_RNA (1)...(19): siRNA sense strand
gcucuucacccugaccuau

SEQ ID NO: 1476132 - RNA, 19 nt, Homo sapiens
  misc_RNA (1)...(19): siRNA sense strand
gcaccgagagcaagaaaau

SEQ ID NO: 1476133 - RNA, 19 nt, Homo sapiens
  misc_RNA (1)...(19): siRNA sense strand
gaaacugcggaugucauug

SEQ ID NO: 1476134 - RNA, 19 nt, Homo sapiens
  misc_RNA (1)...(19): siRNA sense strand
uuucuuggcucggucaaau

SEQ ID NO: 1476135 - RNA, 19 nt, Homo sapiens
  misc_RNA (1)...(19): siRNA sense strand
gaugaagaugugaauaaac

SEQ ID NO: 1476136 - RNA, 19 nt, Homo sapiens
  misc_RNA (1)...(19): siRNA sense strand
ugaauucucccucauuuug

SEQ ID NO: 1476137 - RNA, 19 nt, Homo sapiens
  misc_RNA (1)...(19): siRNA sense strand
ugggaggugccaugacuuu

SEQ ID NO: 1476138 - RNA, 19 nt, Homo sapiens
  misc_RNA (1)...(19): siRNA sense strand
gcggggagcuuuggagaug

SEQ ID NO: 1476139 - RNA, 19 nt, Homo sapiens
  misc_RNA (1)...(19): siRNA sense strand
aagguggcguucaagaugu

SEQ ID NO: 1476140 - RNA, 19 nt, Homo sapiens
  misc_RNA (1)...(19): siRNA sense strand
ggaggugccaugacuuucg

SEQ ID NO: 1476141 - RNA, 19 nt, Homo sapiens
  misc_RNA (1)...(19): siRNA sense strand
gguggacuuuguggaacuu

SEQ ID NO: 1476142 - RNA, 19 nt, Homo sapiens
  misc_RNA (1)...(19): siRNA sense strand
gcuauguaaggacuaugaa

SEQ ID NO: 1476143 - RNA, 19 nt, Homo sapiens
  misc_RNA (1)...(19): siRNA sense strand
gacagaaauccggaugaga

SEQ ID NO: 1476144 - RNA, 19 nt, Homo sapiens
  misc_RNA (1)...(19): siRNA sense strand
ggaacgauguguuuacugu

SEQ ID NO: 1476145 - RNA, 19 nt, Homo sapiens
  misc_RNA (1)...(19): siRNA sense strand
ggucuccucuagcuuauuu

SEQ ID NO: 1476146 - RNA, 19 nt, Homo sapiens
  misc_RNA (1)...(19): siRNA sense strand
ccaagacuaugaaggguuu

SEQ ID NO: 1476147 - RNA, 19 nt, Homo sapiens
  misc_RNA (1)...(19): siRNA sense strand
gaauauaucuuggcuaagc

SEQ ID NO: 1476148 - RNA, 19 nt, Homo sapiens
  misc_RNA (1)...(19): siRNA sense strand
ccaaggaccucgccagcaa

SEQ ID NO: 1476149 - RNA, 19 nt, Homo sapiens
  misc_RNA (1)...(19): siRNA sense strand
ccagagcuguccaggaauu

SEQ ID NO: 1476150 - RNA, 19 nt, Homo sapiens
  misc_RNA (1)...(19): siRNA sense strand
cuccagagcuguccaggaa

SEQ ID NO: 1476151 - RNA, 19 nt, Homo sapiens
  misc_RNA (1)...(19): siRNA sense strand
ccaaggaagccaaggagaa

SEQ ID NO: 1476152 - RNA, 19 nt, Homo sapiens
  misc_RNA (1)...(19): siRNA sense strand
ccaaggagaaggcaaagga

SEQ ID NO: 1476153 - RNA, 19 nt, Homo sapiens
  misc_RNA (1)...(19): siRNA sense strand
ccacagaaucagaccauga

SEQ ID NO: 1476154 - RNA, 19 nt, Homo sapiens
  misc_RNA (1)...(19): siRNA sense strand
gcaacgugaccaagacuau

SEQ ID NO: 1476155 - RNA, 19 nt, Homo sapiens
  misc_RNA (1)...(19): siRNA sense strand
cuacagagaaggccaagga

SEQ ID NO: 1476156 - RNA, 19 nt, Homo sapiens
  misc_RNA (1)...(19): siRNA sense strand
ugacuaccuucaccuggaa

SEQ ID NO: 1476157 - RNA, 19 nt, Homo sapiens
  misc_RNA (1)...(19): siRNA sense strand
gaggaacgauguguuuacu

SEQ ID NO: 1476158 - RNA, 19 nt, Homo sapiens
  misc_RNA (1)...(19): siRNA sense strand
gcacuggcagcuacagaga

SEQ ID NO: 1476159 - RNA, 19 nt, Homo sapiens
  misc_RNA (1)...(19): siRNA sense strand
guggaggaacgauguguuu

SEQ ID NO: 1476160 - RNA, 19 nt, Homo sapiens
  misc_RNA (1)...(19): siRNA sense strand
gcagcagcagcaacaguuu

SEQ ID NO: 1476161 - RNA, 19 nt, Homo sapiens
  misc_RNA (1)...(19): siRNA sense strand
ugugaacucugacaacagu

SEQ ID NO: 1476162 - RNA, 19 nt, Homo sapiens
  misc_RNA (1)...(19): siRNA sense strand
gcgacuauuuccugccaau

SEQ ID NO: 1476163 - RNA, 19 nt, Homo sapiens
  misc_RNA (1)...(19): siRNA sense strand
ggaggaacgauguguuuac

SEQ ID NO: 1476164 - RNA, 19 nt, Homo sapiens
  misc_RNA (1)...(19): siRNA sense strand
cagaaucagaccaugacua

SEQ ID NO: 1476165 - RNA, 19 nt, Homo sapiens
  misc_RNA (1)...(19): siRNA sense strand
gcagcaacaguuuguguag

SEQ ID NO: 1476166 - RNA, 19 nt, Homo sapiens
  misc_RNA (1)...(19): siRNA sense strand
guccaggaauuuggucuug

SEQ ID NO: 1476167 - RNA, 19 nt, Homo sapiens
  misc_RNA (1)...(19): siRNA sense strand
uaucuuggcuaagcugcaa

SEQ ID NO: 1476168 - RNA, 19 nt, Homo sapiens
  misc_RNA (1)...(19): siRNA sense strand
ccgaaucccuauagcaaac

SEQ ID NO: 1476169 - RNA, 19 nt, Homo sapiens
  misc_RNA (1)...(19): siRNA sense strand
caaggaagccaaggagaag

SEQ ID NO: 1476170 - RNA, 19 nt, Homo sapiens
  misc_RNA (1)...(19): siRNA sense strand
cgauguguuuacuguguga

SEQ ID NO: 1476171 - RNA, 19 nt, Homo sapiens
  misc_RNA (1)...(19): siRNA sense strand
ugaccaagaccaacaggau

SEQ ID NO: 1476172 - RNA, 19 nt, Homo sapiens
  misc_RNA (1)...(19): siRNA sense strand
acuauuuccugccaauguu

SEQ ID NO: 1476173 - RNA, 19 nt, Homo sapiens
  misc_RNA (1)...(19): siRNA sense strand
gacuauuuccugccaaugu

SEQ ID NO: 1476174 - RNA, 19 nt, Homo sapiens
  misc_RNA (1)...(19): siRNA sense strand
agaaucagaccaugacuac

SEQ ID NO: 1476175 - RNA, 19 nt, Homo sapiens
  misc_RNA (1)...(19): siRNA sense strand
aaagcaacgugaccaagac

SEQ ID NO: 1476176 - RNA, 19 nt, Homo sapiens
  misc_RNA (1)...(19): siRNA sense strand
cugggucuccucuagcuua

SEQ ID NO: 1476177 - RNA, 19 nt, Homo sapiens
  misc_RNA (1)...(19): siRNA sense strand
aacgauguguuuacugugu

SEQ ID NO: 1476178 - RNA, 19 nt, Homo sapiens
  misc_RNA (1)...(19): siRNA sense strand
gaaucccuauagcaaacau

SEQ ID NO: 1476179 - RNA, 19 nt, Homo sapiens
  misc_RNA (1)...(19): siRNA sense strand
ggugaccccugaccagaaa

SEQ ID NO: 1476180 - RNA, 19 nt, Homo sapiens
  misc_RNA (1)...(19): siRNA sense strand
caacgugaccaagacuaug

SEQ ID NO: 1476181 - RNA, 19 nt, Homo sapiens
  misc_RNA (1)...(19): siRNA sense strand
ugugugaacucugacaaca

SEQ ID NO: 1476182 - RNA, 19 nt, Homo sapiens
  misc_RNA (1)...(19): siRNA sense strand
uuuacugugugaacucuga

SEQ ID NO: 1476183 - RNA, 19 nt, Homo sapiens
  misc_RNA (1)...(19): siRNA sense strand
aagccugggucuccucuag

SEQ ID NO: 1476184 - RNA, 19 nt, Homo sapiens
  misc_RNA (1)...(19): siRNA sense strand
cggcgacuccugaccaaga

SEQ ID NO: 1476185 - RNA, 19 nt, Homo sapiens
  misc_RNA (1)...(19): siRNA sense strand
cagcagcaacaguuugugu

SEQ ID NO: 1476186 - RNA, 19 nt, Homo sapiens
  misc_RNA (1)...(19): siRNA sense strand
cagcagcagcaacaguuug

SEQ ID NO: 1476187 - RNA, 19 nt, Homo sapiens
  misc_RNA (1)...(19): siRNA sense strand
uggcagcgguacccgaauc

SEQ ID NO: 1476188 - RNA, 19 nt, Homo sapiens
  misc_RNA (1)...(19): siRNA sense strand
uggaggaacgauguguuua

SEQ ID NO: 1476189 - RNA, 19 nt, Homo sapiens
  misc_RNA (1)...(19): siRNA sense strand
gaaggguuuugaauauauc

SEQ ID NO: 1476190 - RNA, 19 nt, Homo sapiens
  misc_RNA (1)...(19): siRNA sense strand
cuauagcaaacaugucuug

SEQ ID NO: 1476191 - RNA, 19 nt, Homo sapiens
  misc_RNA (1)...(19): siRNA sense strand
gaaggaguuugcacagaaa

SEQ ID NO: 1476192 - RNA, 19 nt, Homo sapiens
  misc_RNA (1)...(19): siRNA sense strand
cgaaggaguuugcacagaa

SEQ ID NO: 1476193 - RNA, 19 nt, Homo sapiens
  misc_RNA (1)...(19): siRNA sense strand
ucacggugcuccugcagua

SEQ ID NO: 1476194 - RNA, 19 nt, Homo sapiens
  misc_RNA (1)...(19): siRNA sense strand
cgaccgagcugguggugaa

SEQ ID NO: 1476195 - RNA, 19 nt, Homo sapiens
  misc_RNA (1)...(19): siRNA sense strand
gcaaggguaugaaggaaag

SEQ ID NO: 1476196 - RNA, 19 nt, Homo sapiens
  misc_RNA (1)...(19): siRNA sense strand
gggcaggcaugaguuauga

SEQ ID NO: 1476197 - RNA, 19 nt, Homo sapiens
  misc_RNA (1)...(19): siRNA sense strand
gggaaggcgucaugaaaca

SEQ ID NO: 1476198 - RNA, 19 nt, Homo sapiens
  misc_RNA (1)...(19): siRNA sense strand
gggcagaauuugggaagaa

SEQ ID NO: 1476199 - RNA, 19 nt, Homo sapiens
  misc_RNA (1)...(19): siRNA sense strand
ggacaucggcaucuacugu

SEQ ID NO: 1476200 - RNA, 19 nt, Homo sapiens
  misc_RNA (1)...(19): siRNA sense strand
gcuccuggcugacauccuu

SEQ ID NO: 1476201 - RNA, 19 nt, Homo sapiens
  misc_RNA (1)...(19): siRNA sense strand
caucuggacccgcuucuuu

SEQ ID NO: 1476202 - RNA, 19 nt, Homo sapiens
  misc_RNA (1)...(19): siRNA sense strand
gcagaagccagagaagauu

SEQ ID NO: 1476203 - RNA, 19 nt, Homo sapiens
  misc_RNA (1)...(19): siRNA sense strand
gcgaaggaguuugcacaga

SEQ ID NO: 1476204 - RNA, 19 nt, Homo sapiens
  misc_RNA (1)...(19): siRNA sense strand
uggcugacauccuugaaga

SEQ ID NO: 1476205 - RNA, 19 nt, Homo sapiens
  misc_RNA (1)...(19): siRNA sense strand
augaggagcuggccaagga

SEQ ID NO: 1476206 - RNA, 19 nt, Homo sapiens
  misc_RNA (1)...(19): siRNA sense strand
gugggaaggcgucaugaaa

SEQ ID NO: 1476207 - RNA, 19 nt, Homo sapiens
  misc_RNA (1)...(19): siRNA sense strand
gaauuugggaagaaucuca

SEQ ID NO: 1476208 - RNA, 19 nt, Homo sapiens
  misc_RNA (1)...(19): siRNA sense strand
ggcagaagccagagaagau

SEQ ID NO: 1476209 - RNA, 19 nt, Homo sapiens
  misc_RNA (1)...(19): siRNA sense strand
ggcggaaguucgcgagaug

SEQ ID NO: 1476210 - RNA, 19 nt, Homo sapiens
  misc_RNA (1)...(19): siRNA sense strand
gcguggagguggccuacau

SEQ ID NO: 1476211 - RNA, 19 nt, Homo sapiens
  misc_RNA (1)...(19): siRNA sense strand
gggcagaagccagagaaga

SEQ ID NO: 1476212 - RNA, 19 nt, Homo sapiens
  misc_RNA (1)...(19): siRNA sense strand
cagaagccagagaagauuu

SEQ ID NO: 1476213 - RNA, 19 nt, Homo sapiens
  misc_RNA (1)...(19): siRNA sense strand
gaagaaucucauccacguu

SEQ ID NO: 1476214 - RNA, 19 nt, Homo sapiens
  misc_RNA (1)...(19): siRNA sense strand
cgagcccucuuccuuaugg

SEQ ID NO: 1476215 - RNA, 19 nt, Homo sapiens
  misc_RNA (1)...(19): siRNA sense strand
cccgagcccucuuccuuau

SEQ ID NO: 1476216 - RNA, 19 nt, Homo sapiens
  misc_RNA (1)...(19): siRNA sense strand
gagggcagaagccagagaa

SEQ ID NO: 1476217 - RNA, 19 nt, Homo sapiens
  misc_RNA (1)...(19): siRNA sense strand
ggcagaauuugggaagaau

SEQ ID NO: 1476218 - RNA, 19 nt, Homo sapiens
  misc_RNA (1)...(19): siRNA sense strand
ugaaacagguguggaugac

SEQ ID NO: 1476219 - RNA, 19 nt, Homo sapiens
  misc_RNA (1)...(19): siRNA sense strand
ucccaaaggacugcaauuu

SEQ ID NO: 1476220 - RNA, 19 nt, Homo sapiens
  misc_RNA (1)...(19): siRNA sense strand
ggacugcaauuuugacaac

SEQ ID NO: 1476221 - RNA, 19 nt, Homo sapiens
  misc_RNA (1)...(19): siRNA sense strand
ucaccuccauggucuuugg

SEQ ID NO: 1476222 - RNA, 19 nt, Homo sapiens
  misc_RNA (1)...(19): siRNA sense strand
ucccgagcccucuuccuua

SEQ ID NO: 1476223 - RNA, 19 nt, Homo sapiens
  misc_RNA (1)...(19): siRNA sense strand
gaggcucugaggucuguuu

SEQ ID NO: 1476224 - RNA, 19 nt, Homo sapiens
  misc_RNA (1)...(19): siRNA sense strand
ccgaggcucugaggucugu

SEQ ID NO: 1476225 - RNA, 19 nt, Homo sapiens
  misc_RNA (1)...(19): siRNA sense strand
ccucaucuccagcgacuuc

SEQ ID NO: 1476226 - RNA, 19 nt, Homo sapiens
  misc_RNA (1)...(19): siRNA sense strand
guucaccuccauggucuuu

SEQ ID NO: 1476227 - RNA, 19 nt, Homo sapiens
  misc_RNA (1)...(19): siRNA sense strand
gaggugaggaaggccauug

SEQ ID NO: 1476228 - RNA, 19 nt, Homo sapiens
  misc_RNA (1)...(19): siRNA sense strand
gaaacagguguggaugaca

SEQ ID NO: 1476229 - RNA, 19 nt, Homo sapiens
  misc_RNA (1)...(19): siRNA sense strand
cagaagagcucagcaaaua

SEQ ID NO: 1476230 - RNA, 19 nt, Homo sapiens
  misc_RNA (1)...(19): siRNA sense strand
gauaacaacuuugagguaa

SEQ ID NO: 1476231 - RNA, 19 nt, Homo sapiens
  misc_RNA (1)...(19): siRNA sense strand
ggacggagauucuucacuu

SEQ ID NO: 1476232 - RNA, 19 nt, Homo sapiens
  misc_RNA (1)...(19): siRNA sense strand
gcacggauguccagaucua

SEQ ID NO: 1476233 - RNA, 19 nt, Homo sapiens
  misc_RNA (1)...(19): siRNA sense strand
guacuaauguggccaacuu

SEQ ID NO: 1476234 - RNA, 19 nt, Homo sapiens
  misc_RNA (1)...(19): siRNA sense strand
gcagcuggauaacaacuuu

SEQ ID NO: 1476235 - RNA, 19 nt, Homo sapiens
  misc_RNA (1)...(19): siRNA sense strand
gaaggaacguacuaaugug

SEQ ID NO: 1476236 - RNA, 19 nt, Homo sapiens
  misc_RNA (1)...(19): siRNA sense strand
ggacagaagccucaaguuc

SEQ ID NO: 1476237 - RNA, 19 nt, Homo sapiens
  misc_RNA (1)...(19): siRNA sense strand
caaaguugcucacccaauc

SEQ ID NO: 1476238 - RNA, 19 nt, Homo sapiens
  misc_RNA (1)...(19): siRNA sense strand
ugaaagcuuugcaggauga

SEQ ID NO: 1476239 - RNA, 19 nt, Homo sapiens
  misc_RNA (1)...(19): siRNA sense strand
caacaggcauggacagaag

SEQ ID NO: 1476240 - RNA, 19 nt, Homo sapiens
  misc_RNA (1)...(19): siRNA sense strand
ggauaacaacuuugaggua

SEQ ID NO: 1476241 - RNA, 19 nt, Homo sapiens
  misc_RNA (1)...(19): siRNA sense strand
agaaguacauugcggagaa

SEQ ID NO: 1476242 - RNA, 19 nt, Homo sapiens
  misc_RNA (1)...(19): siRNA sense strand
agacaaagccacugugcua

SEQ ID NO: 1476243 - RNA, 19 nt, Homo sapiens
  misc_RNA (1)...(19): siRNA sense strand
gagguaaagucacugaucu

SEQ ID NO: 1476244 - RNA, 19 nt, Homo sapiens
  misc_RNA (1)...(19): siRNA sense strand
ggaaugaccccagagauua

SEQ ID NO: 1476245 - RNA, 19 nt, Homo sapiens
  misc_RNA (1)...(19): siRNA sense strand
ucagaagcuucaagacaaa

SEQ ID NO: 1476246 - RNA, 19 nt, Homo sapiens
  misc_RNA (1)...(19): siRNA sense strand
ugaaggaacguacuaaugu

SEQ ID NO: 1476247 - RNA, 19 nt, Homo sapiens
  misc_RNA (1)...(19): siRNA sense strand
ggacucaucuuuggaacag

SEQ ID NO: 1476248 - RNA, 19 nt, Homo sapiens
  misc_RNA (1)...(19): siRNA sense strand
gcucaucgacaucaaaguu

SEQ ID NO: 1476249 - RNA, 19 nt, Homo sapiens
  misc_RNA (1)...(19): siRNA sense strand
gacggagauucuucacuuu

SEQ ID NO: 1476250 - RNA, 19 nt, Homo sapiens
  misc_RNA (1)...(19): siRNA sense strand
gaucugcgcaagcuuaaga

SEQ ID NO: 1476251 - RNA, 19 nt, Homo sapiens
  misc_RNA (1)...(19): siRNA sense strand
ucaaaggccauaccaagaa

SEQ ID NO: 1476252 - RNA, 19 nt, Homo sapiens
  misc_RNA (1)...(19): siRNA sense strand
gaaguacauugcggagaau

SEQ ID NO: 1476253 - RNA, 19 nt, Homo sapiens
  misc_RNA (1)...(19): siRNA sense strand
ggagauucuucacuuuaca

SEQ ID NO: 1476254 - RNA, 19 nt, Homo sapiens
  misc_RNA (1)...(19): siRNA sense strand
ugagugggaugcagucaug

SEQ ID NO: 1476255 - RNA, 19 nt, Homo sapiens
  misc_RNA (1)...(19): siRNA sense strand
gcagacaacccgccaagag

SEQ ID NO: 1476256 - RNA, 19 nt, Homo sapiens
  misc_RNA (1)...(19): siRNA sense strand
gggcacggauguccagauc

SEQ ID NO: 1476257 - RNA, 19 nt, Homo sapiens
  misc_RNA (1)...(19): siRNA sense strand
gcgcaagcuuaagaacuuu

SEQ ID NO: 1476258 - RNA, 19 nt, Homo sapiens
  misc_RNA (1)...(19): siRNA sense strand
caaaggccauaccaagaag

SEQ ID NO: 1476259 - RNA, 19 nt, Homo sapiens
  misc_RNA (1)...(19): siRNA sense strand
cuaaucugcuccaucucua

SEQ ID NO: 1476260 - RNA, 19 nt, Homo sapiens
  misc_RNA (1)...(19): siRNA sense strand
caggaaccauggacucuca

SEQ ID NO: 1476261 - RNA, 19 nt, Homo sapiens
  misc_RNA (1)...(19): siRNA sense strand
cgggugagccaauggauuu

SEQ ID NO: 1476262 - RNA, 19 nt, Homo sapiens
  misc_RNA (1)...(19): siRNA sense strand
gaucaguacugggcuuucu

SEQ ID NO: 1476263 - RNA, 19 nt, Homo sapiens
  misc_RNA (1)...(19): siRNA sense strand
ucugaaagcuuugcaggau

SEQ ID NO: 1476264 - RNA, 19 nt, Homo sapiens
  misc_RNA (1)...(19): siRNA sense strand
agacuuugcagcuggauaa

SEQ ID NO: 1476265 - RNA, 19 nt, Homo sapiens
  misc_RNA (1)...(19): siRNA sense strand
aauccuggcuacccucaaa

SEQ ID NO: 1476266 - RNA, 19 nt, Homo sapiens
  misc_RNA (1)...(19): siRNA sense strand
ccacggagcgcaagaagag

SEQ ID NO: 1476267 - RNA, 19 nt, Homo sapiens
  misc_RNA (1)...(19): siRNA sense strand
uucagaagcuucaagacaa

SEQ ID NO: 1476268 - RNA, 19 nt, Homo sapiens
  misc_RNA (1)...(19): siRNA sense strand
gaucuacaucugcaaacaa

SEQ ID NO: 1476269 - RNA, 19 nt, Homo sapiens
  misc_RNA (1)...(19): siRNA sense strand
gaucugggacuugaaggaa

SEQ ID NO: 1476270 - RNA, 19 nt, Homo sapiens
  misc_RNA (1)...(19): siRNA sense strand
ugggugagcuggugggaau

SEQ ID NO: 1476271 - RNA, 19 nt, Homo sapiens
  misc_RNA (1)...(19): siRNA sense strand
gacaaagccacugugcuaa

SEQ ID NO: 1476272 - RNA, 19 nt, Homo sapiens
  misc_RNA (1)...(19): siRNA sense strand
ugcgcaagcuuaagaacuu

SEQ ID NO: 1476273 - RNA, 19 nt, Homo sapiens
  misc_RNA (1)...(19): siRNA sense strand
cggccauucugaaagcuuu

SEQ ID NO: 1476274 - RNA, 19 nt, Homo sapiens
  misc_RNA (1)...(19): siRNA sense strand
cccaaugccucuuguguac

SEQ ID NO: 1476275 - RNA, 19 nt, Homo sapiens
  misc_RNA (1)...(19): siRNA sense strand
gugccaaguucccaaccaa

SEQ ID NO: 1476276 - RNA, 19 nt, Homo sapiens
  misc_RNA (1)...(19): siRNA sense strand
gcaaacaauggacggagau

SEQ ID NO: 1476277 - RNA, 19 nt, Homo sapiens
  misc_RNA (1)...(19): siRNA sense strand
ccagaagagcucagcaaau

SEQ ID NO: 1476278 - RNA, 19 nt, Homo sapiens
  misc_RNA (1)...(19): siRNA sense strand
gccagaagagcucagcaaa

SEQ ID NO: 1476279 - RNA, 19 nt, Homo sapiens
  misc_RNA (1)...(19): siRNA sense strand
cuuugcagcuggauaacaa

SEQ ID NO: 1476280 - RNA, 19 nt, Homo sapiens
  misc_RNA (1)...(19): siRNA sense strand
gcagcucaucgacaucaaa

SEQ ID NO: 1476281 - RNA, 19 nt, Homo sapiens
  misc_RNA (1)...(19): siRNA sense strand
gggcaucacgccaaguuca

SEQ ID NO: 1476282 - RNA, 19 nt, Homo sapiens
  misc_RNA (1)...(19): siRNA sense strand
ucccuaaucugcuccaucu

SEQ ID NO: 1476283 - RNA, 19 nt, Homo sapiens
  misc_RNA (1)...(19): siRNA sense strand
acggagauucuucacuuua

SEQ ID NO: 1476284 - RNA, 19 nt, Homo sapiens
  misc_RNA (1)...(19): siRNA sense strand
caaugccucuuguguacag

SEQ ID NO: 1476285 - RNA, 19 nt, Homo sapiens
  misc_RNA (1)...(19): siRNA sense strand
ccccagagauuauucagaa

SEQ ID NO: 1476286 - RNA, 19 nt, Homo sapiens
  misc_RNA (1)...(19): siRNA sense strand
cggagauucuucacuuuac

SEQ ID NO: 1476287 - RNA, 19 nt, Homo sapiens
  misc_RNA (1)...(19): siRNA sense strand
cgaugccacuaucaggauu

SEQ ID NO: 1476288 - RNA, 19 nt, Homo sapiens
  misc_RNA (1)...(19): siRNA sense strand
gaagagcucagcaaauacc

SEQ ID NO: 1476289 - RNA, 19 nt, Homo sapiens
  misc_RNA (1)...(19): siRNA sense strand
gaaccauggacucucagau

SEQ ID NO: 1476290 - RNA, 19 nt, Homo sapiens
  misc_RNA (1)...(19): siRNA sense strand
gcucaucgagaaguacauu

SEQ ID NO: 1476291 - RNA, 19 nt, Homo sapiens
  misc_RNA (1)...(19): siRNA sense strand
gggaucugcgcaagcuuaa

SEQ ID NO: 1476292 - RNA, 19 nt, Homo sapiens
  misc_RNA (1)...(19): siRNA sense strand
ccggagcacccauguguau

SEQ ID NO: 1476293 - RNA, 19 nt, Homo sapiens
  misc_RNA (1)...(19): siRNA sense strand
ccaaguucaucgcuucaac

SEQ ID NO: 1476294 - RNA, 19 nt, Homo sapiens
  misc_RNA (1)...(19): siRNA sense strand
ugggaucugcgcaagcuua

SEQ ID NO: 1476295 - RNA, 19 nt, Homo sapiens
  misc_RNA (1)...(19): siRNA sense strand
gacggacucaucuuuggaa

SEQ ID NO: 1476296 - RNA, 19 nt, Homo sapiens
  misc_RNA (1)...(19): siRNA sense strand
ccaugagagugcugugaca

SEQ ID NO: 1476297 - RNA, 19 nt, Homo sapiens
  misc_RNA (1)...(19): siRNA sense strand
agucacugcugcccgagaa

SEQ ID NO: 1476298 - RNA, 19 nt, Homo sapiens
  misc_RNA (1)...(19): siRNA sense strand
cuccaucucuaacgaagug

SEQ ID NO: 1476299 - RNA, 19 nt, Homo sapiens
  misc_RNA (1)...(19): siRNA sense strand
gggaaugaccccagagauu

SEQ ID NO: 1476300 - RNA, 19 nt, Homo sapiens
  misc_RNA (1)...(19): siRNA sense strand
caaguucccaaccaagugu

SEQ ID NO: 1476301 - RNA, 19 nt, Homo sapiens
  misc_RNA (1)...(19): siRNA sense strand
aaaaugucguuguguuuga

SEQ ID NO: 1476302 - RNA, 19 nt, Homo sapiens
  misc_RNA (1)...(19): siRNA sense strand
ucacuagcaucgccuucuc

SEQ ID NO: 1476303 - RNA, 19 nt, Homo sapiens
  misc_RNA (1)...(19): siRNA sense strand
cauggacucucagaucaag

SEQ ID NO: 1476304 - RNA, 19 nt, Homo sapiens
  misc_RNA (1)...(19): siRNA sense strand
accauggacucucagauca

SEQ ID NO: 1476305 - RNA, 19 nt, Homo sapiens
  misc_RNA (1)...(19): siRNA sense strand
ggcgugugcucaccaaggu

SEQ ID NO: 1476306 - RNA, 19 nt, Homo sapiens
  misc_RNA (1)...(19): siRNA sense strand
cuacaucugcaaacaaugg

SEQ ID NO: 1476307 - RNA, 19 nt, Homo sapiens
  misc_RNA (1)...(19): siRNA sense strand
ggcggcucaucgagaagua

SEQ ID NO: 1476308 - RNA, 19 nt, Homo sapiens
  misc_RNA (1)...(19): siRNA sense strand
ccaaguucccaaccaagug

SEQ ID NO: 1476309 - RNA, 19 nt, Homo sapiens
  misc_RNA (1)...(19): siRNA sense strand
caaguucaucgcuucaaca

SEQ ID NO: 1476310 - RNA, 19 nt, Homo sapiens
  misc_RNA (1)...(19): siRNA sense strand
gcuccuccgaugaucagua

SEQ ID NO: 1476311 - RNA, 19 nt, Homo sapiens
  misc_RNA (1)...(19): siRNA sense strand
caaagccacugugcuaacc

SEQ ID NO: 1476312 - RNA, 19 nt, Homo sapiens
  misc_RNA (1)...(19): siRNA sense strand
caaacaauggacggagauu

SEQ ID NO: 1476313 - RNA, 19 nt, Homo sapiens
  misc_RNA (1)...(19): siRNA sense strand
ggaaccauggacucucaga

SEQ ID NO: 1476314 - RNA, 19 nt, Homo sapiens
  misc_RNA (1)...(19): siRNA sense strand
gaugccacuaucaggauuu

SEQ ID NO: 1476315 - RNA, 19 nt, Homo sapiens
  misc_RNA (1)...(19): siRNA sense strand
cagagauuauucagaagcu

SEQ ID NO: 1476316 - RNA, 19 nt, Homo sapiens
  misc_RNA (1)...(19): siRNA sense strand
uaaucugcuccaucucuaa

SEQ ID NO: 1476317 - RNA, 19 nt, Homo sapiens
  misc_RNA (1)...(19): siRNA sense strand
uugaaggaacguacuaaug

SEQ ID NO: 1476318 - RNA, 19 nt, Homo sapiens
  misc_RNA (1)...(19): siRNA sense strand
gcgggugagccaauggauu

SEQ ID NO: 1476319 - RNA, 19 nt, Homo sapiens
  misc_RNA (1)...(19): siRNA sense strand
ugagguaaagucacugauc

SEQ ID NO: 1476320 - RNA, 19 nt, Homo sapiens
  misc_RNA (1)...(19): siRNA sense strand
ggugagcuggugggaauga

SEQ ID NO: 1476321 - RNA, 19 nt, Homo sapiens
  misc_RNA (1)...(19): siRNA sense strand
ccacagauuugauuguuaa

SEQ ID NO: 1476322 - RNA, 19 nt, Homo sapiens
  misc_RNA (1)...(19): siRNA sense strand
gcaccuuugugucuucuua

SEQ ID NO: 1476323 - RNA, 19 nt, Homo sapiens
  misc_RNA (1)...(19): siRNA sense strand
gauuguagccaacuucuua

SEQ ID NO: 1476324 - RNA, 19 nt, Homo sapiens
  misc_RNA (1)...(19): siRNA sense strand
gcaaauggaacuacacaaa

SEQ ID NO: 1476325 - RNA, 19 nt, Homo sapiens
  misc_RNA (1)...(19): siRNA sense strand
gcucuugggugcaaacuug

SEQ ID NO: 1476326 - RNA, 19 nt, Homo sapiens
  misc_RNA (1)...(19): siRNA sense strand
gaacgaggauuugggauac

SEQ ID NO: 1476327 - RNA, 19 nt, Homo sapiens
  misc_RNA (1)...(19): siRNA sense strand
ucucuguucuucuccauua

SEQ ID NO: 1476328 - RNA, 19 nt, Homo sapiens
  misc_RNA (1)...(19): siRNA sense strand
gggcaaaacuuaaagagaa

SEQ ID NO: 1476329 - RNA, 19 nt, Homo sapiens
  misc_RNA (1)...(19): siRNA sense strand
gaacacuucagccuuaaug

SEQ ID NO: 1476330 - RNA, 19 nt, Homo sapiens
  misc_RNA (1)...(19): siRNA sense strand
gucagcagcuccaugguuu

SEQ ID NO: 1476331 - RNA, 19 nt, Homo sapiens
  misc_RNA (1)...(19): siRNA sense strand
caucaucuuucccauguau

SEQ ID NO: 1476332 - RNA, 19 nt, Homo sapiens
  misc_RNA (1)...(19): siRNA sense strand
gagcuucucuguucuucuc

SEQ ID NO: 1476333 - RNA, 19 nt, Homo sapiens
  misc_RNA (1)...(19): siRNA sense strand
aaauggaacuacacaaaca

SEQ ID NO: 1476334 - RNA, 19 nt, Homo sapiens
  misc_RNA (1)...(19): siRNA sense strand
guaugugacuggcaaaugg

SEQ ID NO: 1476335 - RNA, 19 nt, Homo sapiens
  misc_RNA (1)...(19): siRNA sense strand
gaacuacacaaacaucaca

SEQ ID NO: 1476336 - RNA, 19 nt, Homo sapiens
  misc_RNA (1)...(19): siRNA sense strand
ccaccugccucuugagugu

SEQ ID NO: 1476337 - RNA, 19 nt, Homo sapiens
  misc_RNA (1)...(19): siRNA sense strand
gacacugcgugcaauguug

SEQ ID NO: 1476338 - RNA, 19 nt, Homo sapiens
  misc_RNA (1)...(19): siRNA sense strand
uccauuaucucuccuuuua

SEQ ID NO: 1476339 - RNA, 19 nt, Homo sapiens
  misc_RNA (1)...(19): siRNA sense strand
guauacagguuuuguuuug

SEQ ID NO: 1476340 - RNA, 19 nt, Homo sapiens
  misc_RNA (1)...(19): siRNA sense strand
ugaacgaggauuugggaua

SEQ ID NO: 1476341 - RNA, 19 nt, Homo sapiens
  misc_RNA (1)...(19): siRNA sense strand
cagauuugauuguuaagca

SEQ ID NO: 1476342 - RNA, 19 nt, Homo sapiens
  misc_RNA (1)...(19): siRNA sense strand
guauggcucuuuuggauaa

SEQ ID NO: 1476343 - RNA, 19 nt, Homo sapiens
  misc_RNA (1)...(19): siRNA sense strand
gcagugggaaugaucuuau

SEQ ID NO: 1476344 - RNA, 19 nt, Homo sapiens
  misc_RNA (1)...(19): siRNA sense strand
guuaagcaccugauuguag

SEQ ID NO: 1476345 - RNA, 19 nt, Homo sapiens
  misc_RNA (1)...(19): siRNA sense strand
guuaagguccacagauuug

SEQ ID NO: 1476346 - RNA, 19 nt, Homo sapiens
  misc_RNA (1)...(19): siRNA sense strand
gguuaagguccacagauuu

SEQ ID NO: 1476347 - RNA, 19 nt, Homo sapiens
  misc_RNA (1)...(19): siRNA sense strand
gauaaucccaauaguuuac

SEQ ID NO: 1476348 - RNA, 19 nt, Homo sapiens
  misc_RNA (1)...(19): siRNA sense strand
guccacagauuugauuguu

SEQ ID NO: 1476349 - RNA, 19 nt, Homo sapiens
  misc_RNA (1)...(19): siRNA sense strand
guugguaaacaucaucuuu

SEQ ID NO: 1476350 - RNA, 19 nt, Homo sapiens
  misc_RNA (1)...(19): siRNA sense strand
gaguguauguuucccaacu

SEQ ID NO: 1476351 - RNA, 19 nt, Homo sapiens
  misc_RNA (1)...(19): siRNA sense strand
cuuaaugaguguauguuuc

SEQ ID NO: 1476352 - RNA, 19 nt, Homo sapiens
  misc_RNA (1)...(19): siRNA sense strand
ccaauaguuuacuggugaa

SEQ ID NO: 1476353 - RNA, 19 nt, Homo sapiens
  misc_RNA (1)...(19): siRNA sense strand
uacacucucuccugccuuu

SEQ ID NO: 1476354 - RNA, 19 nt, Homo sapiens
  misc_RNA (1)...(19): siRNA sense strand
ggaaauccaggugggcaaa

SEQ ID NO: 1476355 - RNA, 19 nt, Homo sapiens
  misc_RNA (1)...(19): siRNA sense strand
ggucagcagcuccaugguu

SEQ ID NO: 1476356 - RNA, 19 nt, Homo sapiens
  misc_RNA (1)...(19): siRNA sense strand
agguuaagguccacagauu

SEQ ID NO: 1476357 - RNA, 19 nt, Homo sapiens
  misc_RNA (1)...(19): siRNA sense strand
uccacagauuugauuguua

SEQ ID NO: 1476358 - RNA, 19 nt, Homo sapiens
  misc_RNA (1)...(19): siRNA sense strand
caaauggaacuacacaaac

SEQ ID NO: 1476359 - RNA, 19 nt, Homo sapiens
  misc_RNA (1)...(19): siRNA sense strand
gcagcuccaugguuugcau

SEQ ID NO: 1476360 - RNA, 19 nt, Homo sapiens
  misc_RNA (1)...(19): siRNA sense strand
ucuuagcucuccgcuguaa

SEQ ID NO: 1476361 - RNA, 19 nt, Homo sapiens
  misc_RNA (1)...(19): siRNA sense strand
cccagacaauggcagcuuu

SEQ ID NO: 1476362 - RNA, 19 nt, Homo sapiens
  misc_RNA (1)...(19): siRNA sense strand
cauguuggcuuuucuguuc

SEQ ID NO: 1476363 - RNA, 19 nt, Homo sapiens
  misc_RNA (1)...(19): siRNA sense strand
gauuugggauacuguucug

SEQ ID NO: 1476364 - RNA, 19 nt, Homo sapiens
  misc_RNA (1)...(19): siRNA sense strand
acggucagcuccaggaaau

SEQ ID NO: 1476365 - RNA, 19 nt, Homo sapiens
  misc_RNA (1)...(19): siRNA sense strand
gaucgugugcauguuggua

SEQ ID NO: 1476366 - RNA, 19 nt, Homo sapiens
  misc_RNA (1)...(19): siRNA sense strand
ggcaaaacuuaaagagaaa

SEQ ID NO: 1476367 - RNA, 19 nt, Homo sapiens
  misc_RNA (1)...(19): siRNA sense strand
cagcggguccagcacauug

SEQ ID NO: 1476368 - RNA, 19 nt, Homo sapiens
  misc_RNA (1)...(19): siRNA sense strand
gggagcuucucuguucuuc

SEQ ID NO: 1476369 - RNA, 19 nt, Homo sapiens
  misc_RNA (1)...(19): siRNA sense strand
gugagcaccuuugugucuu

SEQ ID NO: 1476370 - RNA, 19 nt, Homo sapiens
  misc_RNA (1)...(19): siRNA sense strand
ggcagugggaaugaucuua

SEQ ID NO: 1476371 - RNA, 19 nt, Homo sapiens
  misc_RNA (1)...(19): siRNA sense strand
guauguuucccaacucuca

SEQ ID NO: 1476372 - RNA, 19 nt, Homo sapiens
  misc_RNA (1)...(19): siRNA sense strand
cagugggaaugaucuuauc

SEQ ID NO: 1476373 - RNA, 19 nt, Homo sapiens
  misc_RNA (1)...(19): siRNA sense strand
gcagguuaagguccacaga

SEQ ID NO: 1476374 - RNA, 19 nt, Homo sapiens
  misc_RNA (1)...(19): siRNA sense strand
guuuacuggugaacacuuc

SEQ ID NO: 1476375 - RNA, 19 nt, Homo sapiens
  misc_RNA (1)...(19): siRNA sense strand
ucuccauuaucucuccuuu

SEQ ID NO: 1476376 - RNA, 19 nt, Homo sapiens
  misc_RNA (1)...(19): siRNA sense strand
ugagcaccuuugugucuuc

SEQ ID NO: 1476377 - RNA, 19 nt, Homo sapiens
  misc_RNA (1)...(19): siRNA sense strand
agacacugcgugcaauguu

SEQ ID NO: 1476378 - RNA, 19 nt, Homo sapiens
  misc_RNA (1)...(19): siRNA sense strand
caaguuuguauggcucuuu

SEQ ID NO: 1476379 - RNA, 19 nt, Homo sapiens
  misc_RNA (1)...(19): siRNA sense strand
cacagacacugcgugcaau

SEQ ID NO: 1476380 - RNA, 19 nt, Homo sapiens
  misc_RNA (1)...(19): siRNA sense strand
ccuuaaugaguguauguuu

SEQ ID NO: 1476381 - RNA, 19 nt, Homo sapiens
  misc_RNA (1)...(19): siRNA sense strand
gaagagaaagcuaauaaga

SEQ ID NO: 1476382 - RNA, 19 nt, Homo sapiens
  misc_RNA (1)...(19): siRNA sense strand
agagaaagcuaauaagaag

SEQ ID NO: 1476383 - RNA, 19 nt, Homo sapiens
  misc_RNA (1)...(19): siRNA sense strand
gcugcuggaucaaguauca

SEQ ID NO: 1476384 - RNA, 19 nt, Homo sapiens
  misc_RNA (1)...(19): siRNA sense strand
cugaagagaaagcuaauaa

SEQ ID NO: 1476385 - RNA, 19 nt, Homo sapiens
  misc_RNA (1)...(19): siRNA sense strand
gagagaagaggaagagucu

SEQ ID NO: 1476386 - RNA, 19 nt, Homo sapiens
  misc_RNA (1)...(19): siRNA sense strand
gucuuggucuuuggaaaua

SEQ ID NO: 1476387 - RNA, 19 nt, Homo sapiens
  misc_RNA (1)...(19): siRNA sense strand
uaagaaggcagagagaaga

SEQ ID NO: 1476388 - RNA, 19 nt, Homo sapiens
  misc_RNA (1)...(19): siRNA sense strand
gcagagagaagaggaagag

SEQ ID NO: 1476389 - RNA, 19 nt, Homo sapiens
  misc_RNA (1)...(19): siRNA sense strand
gagucuuggucuuuggaaa

SEQ ID NO: 1476390 - RNA, 19 nt, Homo sapiens
  misc_RNA (1)...(19): siRNA sense strand
ggucuuuggaaauaucuuu

SEQ ID NO: 1476391 - RNA, 19 nt, Homo sapiens
  misc_RNA (1)...(19): siRNA sense strand
ggagcugcuggaucaagua

SEQ ID NO: 1476392 - RNA, 19 nt, Homo sapiens
  misc_RNA (1)...(19): siRNA sense strand
uaauaagaaggcagagaga

SEQ ID NO: 1476393 - RNA, 19 nt, Homo sapiens
  misc_RNA (1)...(19): siRNA sense strand
gagcugcuggaucaaguau

SEQ ID NO: 1476394 - RNA, 19 nt, Homo sapiens
  misc_RNA (1)...(19): siRNA sense strand
gcuaauaagaaggcagaga

SEQ ID NO: 1476395 - RNA, 19 nt, Homo sapiens
  misc_RNA (1)...(19): siRNA sense strand
gaagagaaagcuaauaaga

SEQ ID NO: 1476396 - RNA, 19 nt, Homo sapiens
  misc_RNA (1)...(19): siRNA sense strand
agagaaagcuaauaagaag

SEQ ID NO: 1476397 - RNA, 19 nt, Homo sapiens
  misc_RNA (1)...(19): siRNA sense strand
gcugcuggaucaaguauca

SEQ ID NO: 1476398 - RNA, 19 nt, Homo sapiens
  misc_RNA (1)...(19): siRNA sense strand
cugaagagaaagcuaauaa

SEQ ID NO: 1476399 - RNA, 19 nt, Homo sapiens
  misc_RNA (1)...(19): siRNA sense strand
gagagaagaggaagagucu

SEQ ID NO: 1476400 - RNA, 19 nt, Homo sapiens
  misc_RNA (1)...(19): siRNA sense strand
gucuuggucuuuggaaaua

SEQ ID NO: 1476401 - RNA, 19 nt, Homo sapiens
  misc_RNA (1)...(19): siRNA sense strand
uaagaaggcagagagaaga

SEQ ID NO: 1476402 - RNA, 19 nt, Homo sapiens
  misc_RNA (1)...(19): siRNA sense strand
gcagagagaagaggaagag

SEQ ID NO: 1476403 - RNA, 19 nt, Homo sapiens
  misc_RNA (1)...(19): siRNA sense strand
gagucuuggucuuuggaaa

SEQ ID NO: 1476404 - RNA, 19 nt, Homo sapiens
  misc_RNA (1)...(19): siRNA sense strand
ggucuuuggaaauaucuuu

SEQ ID NO: 1476405 - RNA, 19 nt, Homo sapiens
  misc_RNA (1)...(19): siRNA sense strand
ggagcugcuggaucaagua

SEQ ID NO: 1476406 - RNA, 19 nt, Homo sapiens
  misc_RNA (1)...(19): siRNA sense strand
uaauaagaaggcagagaga

SEQ ID NO: 1476407 - RNA, 19 nt, Homo sapiens
  misc_RNA (1)...(19): siRNA sense strand
gagcugcuggaucaaguau

SEQ ID NO: 1476408 - RNA, 19 nt, Homo sapiens
  misc_RNA (1)...(19): siRNA sense strand
gcuaauaagaaggcagaga

SEQ ID NO: 1476409 - RNA, 19 nt, Homo sapiens
  misc_RNA (1)...(19): siRNA sense strand
uggaacagcugcagccauu

SEQ ID NO: 1476410 - RNA, 19 nt, Homo sapiens
  misc_RNA (1)...(19): siRNA sense strand
ccucaccuuucuacaagua

SEQ ID NO: 1476411 - RNA, 19 nt, Homo sapiens
  misc_RNA (1)...(19): siRNA sense strand
ggaaaccugggacaucuga

SEQ ID NO: 1476412 - RNA, 19 nt, Homo sapiens
  misc_RNA (1)...(19): siRNA sense strand
gaacagcugcagccauuuu

SEQ ID NO: 1476413 - RNA, 19 nt, Homo sapiens
  misc_RNA (1)...(19): siRNA sense strand
gaugugaggucuggaacag

SEQ ID NO: 1476414 - RNA, 19 nt, Homo sapiens
  misc_RNA (1)...(19): siRNA sense strand
ccugggacaucugaacuga

SEQ ID NO: 1476415 - RNA, 19 nt, Homo sapiens
  misc_RNA (1)...(19): siRNA sense strand
acucuucccucaccuuucu

SEQ ID NO: 1476416 - RNA, 19 nt, Homo sapiens
  misc_RNA (1)...(19): siRNA sense strand
ugggaaaccugggacaucu

SEQ ID NO: 1476417 - RNA, 19 nt, Homo sapiens
  misc_RNA (1)...(19): siRNA sense strand
ucccucaccuuucuacaag

SEQ ID NO: 1476418 - RNA, 19 nt, Homo sapiens
  misc_RNA (1)...(19): siRNA sense strand
cuacucuucccucaccuuu

SEQ ID NO: 1476419 - RNA, 19 nt, Homo sapiens
  misc_RNA (1)...(19): siRNA sense strand
ggaacagcugcagccauuu

SEQ ID NO: 1476420 - RNA, 19 nt, Homo sapiens
  misc_RNA (1)...(19): siRNA sense strand
uggaacagcugcagccauu

SEQ ID NO: 1476421 - RNA, 19 nt, Homo sapiens
  misc_RNA (1)...(19): siRNA sense strand
ccucaccuuucuacaagua

SEQ ID NO: 1476422 - RNA, 19 nt, Homo sapiens
  misc_RNA (1)...(19): siRNA sense strand
ggaaaccugggacaucuga

SEQ ID NO: 1476423 - RNA, 19 nt, Homo sapiens
  misc_RNA (1)...(19): siRNA sense strand
gaacagcugcagccauuuu

SEQ ID NO: 1476424 - RNA, 19 nt, Homo sapiens
  misc_RNA (1)...(19): siRNA sense strand
gaugugaggucuggaacag

SEQ ID NO: 1476425 - RNA, 19 nt, Homo sapiens
  misc_RNA (1)...(19): siRNA sense strand
ccugggacaucugaacuga

SEQ ID NO: 1476426 - RNA, 19 nt, Homo sapiens
  misc_RNA (1)...(19): siRNA sense strand
acucuucccucaccuuucu

SEQ ID NO: 1476427 - RNA, 19 nt, Homo sapiens
  misc_RNA (1)...(19): siRNA sense strand
ugggaaaccugggacaucu

SEQ ID NO: 1476428 - RNA, 19 nt, Homo sapiens
  misc_RNA (1)...(19): siRNA sense strand
ucccucaccuuucuacaag

SEQ ID NO: 1476429 - RNA, 19 nt, Homo sapiens
  misc_RNA (1)...(19): siRNA sense strand
cuacucuucccucaccuuu

SEQ ID NO: 1476430 - RNA, 19 nt, Homo sapiens
  misc_RNA (1)...(19): siRNA sense strand
ggaacagcugcagccauuu

SEQ ID NO: 1476431 - RNA, 19 nt, Homo sapiens
  misc_RNA (1)...(19): siRNA sense strand
ggagaaaccccaucauuuu

SEQ ID NO: 1476432 - RNA, 19 nt, Homo sapiens
  misc_RNA (1)...(19): siRNA sense strand
cacaagagcccauuagaga

SEQ ID NO: 1476433 - RNA, 19 nt, Homo sapiens
  misc_RNA (1)...(19): siRNA sense strand
uuagagaguuugucacuuc

SEQ ID NO: 1476434 - RNA, 19 nt, Homo sapiens
  misc_RNA (1)...(19): siRNA sense strand
ggagaggauuauaaauauc

SEQ ID NO: 1476435 - RNA, 19 nt, Homo sapiens
  misc_RNA (1)...(19): siRNA sense strand
gagaccaucuggagucauc

SEQ ID NO: 1476436 - RNA, 19 nt, Homo sapiens
  misc_RNA (1)...(19): siRNA sense strand
cuggagaggauuauaaaua

SEQ ID NO: 1476437 - RNA, 19 nt, Homo sapiens
  misc_RNA (1)...(19): siRNA sense strand
gacagcagcccaagccaaa

SEQ ID NO: 1476438 - RNA, 19 nt, Homo sapiens
  misc_RNA (1)...(19): siRNA sense strand
ggcaaggacugaaucacau

SEQ ID NO: 1476439 - RNA, 19 nt, Homo sapiens
  misc_RNA (1)...(19): siRNA sense strand
caagugcccaccacaggua

SEQ ID NO: 1476440 - RNA, 19 nt, Homo sapiens
  misc_RNA (1)...(19): siRNA sense strand
acccacagcuucuuccauu

SEQ ID NO: 1476441 - RNA, 19 nt, Homo sapiens
  misc_RNA (1)...(19): siRNA sense strand
ggagucaucccuacguugu

SEQ ID NO: 1476442 - RNA, 19 nt, Homo sapiens
  misc_RNA (1)...(19): siRNA sense strand
ucacauguccaucaggauu

SEQ ID NO: 1476443 - RNA, 19 nt, Homo sapiens
  misc_RNA (1)...(19): siRNA sense strand
caagagcccauuagagagu

SEQ ID NO: 1476444 - RNA, 19 nt, Homo sapiens
  misc_RNA (1)...(19): siRNA sense strand
gcaaggacugaaucacaug

SEQ ID NO: 1476445 - RNA, 19 nt, Homo sapiens
  misc_RNA (1)...(19): siRNA sense strand
ggaaggcaacaaggagaaa

SEQ ID NO: 1476446 - RNA, 19 nt, Homo sapiens
  misc_RNA (1)...(19): siRNA sense strand
ccacaagagcccauuagag

SEQ ID NO: 1476447 - RNA, 19 nt, Homo sapiens
  misc_RNA (1)...(19): siRNA sense strand
ccacagguacccacagcuu

SEQ ID NO: 1476448 - RNA, 19 nt, Homo sapiens
  misc_RNA (1)...(19): siRNA sense strand
caucacauccucagaagac

SEQ ID NO: 1476449 - RNA, 19 nt, Homo sapiens
  misc_RNA (1)...(19): siRNA sense strand
uagagaguuugucacuuca

SEQ ID NO: 1476450 - RNA, 19 nt, Homo sapiens
  misc_RNA (1)...(19): siRNA sense strand
ugaaucacauguccaucag

SEQ ID NO: 1476451 - RNA, 19 nt, Homo sapiens
  misc_RNA (1)...(19): siRNA sense strand
accuauugcuuaccagaaa

SEQ ID NO: 1476452 - RNA, 19 nt, Homo sapiens
  misc_RNA (1)...(19): siRNA sense strand
gccacaugcuggagaggau

SEQ ID NO: 1476453 - RNA, 19 nt, Homo sapiens
  misc_RNA (1)...(19): siRNA sense strand
gaccuauugcuuaccagaa

SEQ ID NO: 1476454 - RNA, 19 nt, Homo sapiens
  misc_RNA (1)...(19): siRNA sense strand
cacaugcuggagaggauua

SEQ ID NO: 1476455 - RNA, 19 nt, Homo sapiens
  misc_RNA (1)...(19): siRNA sense strand
uggcaaggacugaaucaca

SEQ ID NO: 1476456 - RNA, 19 nt, Homo sapiens
  misc_RNA (1)...(19): siRNA sense strand
gaccucuccuuggaccuau

SEQ ID NO: 1476457 - RNA, 19 nt, Homo sapiens
  misc_RNA (1)...(19): siRNA sense strand
gaaagaaaaggguguugca

SEQ ID NO: 1476458 - RNA, 19 nt, Homo sapiens
  misc_RNA (1)...(19): siRNA sense strand
caagggaaacagagaccau

SEQ ID NO: 1476459 - RNA, 19 nt, Homo sapiens
  misc_RNA (1)...(19): siRNA sense strand
cugaaucacauguccauca

SEQ ID NO: 1476460 - RNA, 19 nt, Homo sapiens
  misc_RNA (1)...(19): siRNA sense strand
gcuggaagauuacgacaaa

SEQ ID NO: 1476461 - RNA, 19 nt, Homo sapiens
  misc_RNA (1)...(19): siRNA sense strand
guucaaauguggagacuac

SEQ ID NO: 1476462 - RNA, 19 nt, Homo sapiens
  misc_RNA (1)...(19): siRNA sense strand
accucaagcuggaagauua

SEQ ID NO: 1476463 - RNA, 19 nt, Homo sapiens
  misc_RNA (1)...(19): siRNA sense strand
agaaacagaggcauccaaa

SEQ ID NO: 1476464 - RNA, 19 nt, Homo sapiens
  misc_RNA (1)...(19): siRNA sense strand
ggaagauuacgacaaagca

SEQ ID NO: 1476465 - RNA, 19 nt, Homo sapiens
  misc_RNA (1)...(19): siRNA sense strand
gaaacagaggcauccaaag

SEQ ID NO: 1476466 - RNA, 19 nt, Homo sapiens
  misc_RNA (1)...(19): siRNA sense strand
cagaaacagaggcauccaa

SEQ ID NO: 1476467 - RNA, 19 nt, Homo sapiens
  misc_RNA (1)...(19): siRNA sense strand
gcaaugagcuguucaaaug

SEQ ID NO: 1476468 - RNA, 19 nt, Homo sapiens
  misc_RNA (1)...(19): siRNA sense strand
gcuggaagauuacgacaaa

SEQ ID NO: 1476469 - RNA, 19 nt, Homo sapiens
  misc_RNA (1)...(19): siRNA sense strand
guucagcucuugcaacguu

SEQ ID NO: 1476470 - RNA, 19 nt, Homo sapiens
  misc_RNA (1)...(19): siRNA sense strand
gaagagaagggcacugaga

SEQ ID NO: 1476471 - RNA, 19 nt, Homo sapiens
  misc_RNA (1)...(19): siRNA sense strand
gggagagacugaccucaug

SEQ ID NO: 1476472 - RNA, 19 nt, Homo sapiens
  misc_RNA (1)...(19): siRNA sense strand
guucaaauguggagacuac

SEQ ID NO: 1476473 - RNA, 19 nt, Homo sapiens
  misc_RNA (1)...(19): siRNA sense strand
gagaaggugcgauacaugu

SEQ ID NO: 1476474 - RNA, 19 nt, Homo sapiens
  misc_RNA (1)...(19): siRNA sense strand
gagccaagcccuagagaag

SEQ ID NO: 1476475 - RNA, 19 nt, Homo sapiens
  misc_RNA (1)...(19): siRNA sense strand
accucaagcuggaagauua

SEQ ID NO: 1476476 - RNA, 19 nt, Homo sapiens
  misc_RNA (1)...(19): siRNA sense strand
ggagggcaaugagcuguuc

SEQ ID NO: 1476477 - RNA, 19 nt, Homo sapiens
  misc_RNA (1)...(19): siRNA sense strand
ggagaaggugcgauacaug

SEQ ID NO: 1476478 - RNA, 19 nt, Homo sapiens
  misc_RNA (1)...(19): siRNA sense strand
caggaggccuugcggaaca

SEQ ID NO: 1476479 - RNA, 19 nt, Homo sapiens
  misc_RNA (1)...(19): siRNA sense strand
agaaacagaggcauccaaa

SEQ ID NO: 1476480 - RNA, 19 nt, Homo sapiens
  misc_RNA (1)...(19): siRNA sense strand
cagaagagaagggcacuga

SEQ ID NO: 1476481 - RNA, 19 nt, Homo sapiens
  misc_RNA (1)...(19): siRNA sense strand
guacgcugguuggcauuug

SEQ ID NO: 1476482 - RNA, 19 nt, Homo sapiens
  misc_RNA (1)...(19): siRNA sense strand
ggaagauuacgacaaagca

SEQ ID NO: 1476483 - RNA, 19 nt, Homo sapiens
  misc_RNA (1)...(19): siRNA sense strand
gaaacagaggcauccaaag

SEQ ID NO: 1476484 - RNA, 19 nt, Homo sapiens
  misc_RNA (1)...(19): siRNA sense strand
aaugagcuguucaaaugug

SEQ ID NO: 1476485 - RNA, 19 nt, Homo sapiens
  misc_RNA (1)...(19): siRNA sense strand
ggcaaugagcuguucaaau

SEQ ID NO: 1476486 - RNA, 19 nt, Homo sapiens
  misc_RNA (1)...(19): siRNA sense strand
agagaagggcacugagaaa

SEQ ID NO: 1476487 - RNA, 19 nt, Homo sapiens
  misc_RNA (1)...(19): siRNA sense strand
ggagccaagcccuagagaa

SEQ ID NO: 1476488 - RNA, 19 nt, Homo sapiens
  misc_RNA (1)...(19): siRNA sense strand
uggagcagcugcggaagga

SEQ ID NO: 1476489 - RNA, 19 nt, Homo sapiens
  misc_RNA (1)...(19): siRNA sense strand
gagcccaagaacaaaguuu

SEQ ID NO: 1476490 - RNA, 19 nt, Homo sapiens
  misc_RNA (1)...(19): siRNA sense strand
gaccugcagagauguguga

SEQ ID NO: 1476491 - RNA, 19 nt, Homo sapiens
  misc_RNA (1)...(19): siRNA sense strand
gccaagcccuagagaagcu

SEQ ID NO: 1476492 - RNA, 19 nt, Homo sapiens
  misc_RNA (1)...(19): siRNA sense strand
aagagaagggcacugagaa

SEQ ID NO: 1476493 - RNA, 19 nt, Homo sapiens
  misc_RNA (1)...(19): siRNA sense strand
guaaugggguucagcucuu

SEQ ID NO: 1476494 - RNA, 19 nt, Homo sapiens
  misc_RNA (1)...(19): siRNA sense strand
gggcaaugagcuguucaaa

SEQ ID NO: 1476495 - RNA, 19 nt, Homo sapiens
  misc_RNA (1)...(19): siRNA sense strand
gagaagggcacugagaaaa

SEQ ID NO: 1476496 - RNA, 19 nt, Homo sapiens
  misc_RNA (1)...(19): siRNA sense strand
agagaugugugagcuugga

SEQ ID NO: 1476497 - RNA, 19 nt, Homo sapiens
  misc_RNA (1)...(19): siRNA sense strand
uccuugaccugcagagaug

SEQ ID NO: 1476498 - RNA, 19 nt, Homo sapiens
  misc_RNA (1)...(19): siRNA sense strand
cagaaacagaggcauccaa

SEQ ID NO: 1476499 - RNA, 19 nt, Homo sapiens
  misc_RNA (1)...(19): siRNA sense strand
gacggaugccaaaguggaa

SEQ ID NO: 1476500 - RNA, 19 nt, Homo sapiens
  misc_RNA (1)...(19): siRNA sense strand
agacagacuucuugauuua

SEQ ID NO: 1476501 - RNA, 19 nt, Homo sapiens
  misc_RNA (1)...(19): siRNA sense strand
acacaagacuguucucuaa

SEQ ID NO: 1476502 - RNA, 19 nt, Homo sapiens
  misc_RNA (1)...(19): siRNA sense strand
gagacagacuucuugauuu

SEQ ID NO: 1476503 - RNA, 19 nt, Homo sapiens
  misc_RNA (1)...(19): siRNA sense strand
gaaccaaggucagucauau

SEQ ID NO: 1476504 - RNA, 19 nt, Homo sapiens
  misc_RNA (1)...(19): siRNA sense strand
gaagagaacagcucaugaa

SEQ ID NO: 1476505 - RNA, 19 nt, Homo sapiens
  misc_RNA (1)...(19): siRNA sense strand
gaaauucggaugcuggaua

SEQ ID NO: 1476506 - RNA, 19 nt, Homo sapiens
  misc_RNA (1)...(19): siRNA sense strand
ggagacagacuucuugauu

SEQ ID NO: 1476507 - RNA, 19 nt, Homo sapiens
  misc_RNA (1)...(19): siRNA sense strand
caagacuguucucuaauuu

SEQ ID NO: 1476508 - RNA, 19 nt, Homo sapiens
  misc_RNA (1)...(19): siRNA sense strand
gagagaagauggagaagag

SEQ ID NO: 1476509 - RNA, 19 nt, Homo sapiens
  misc_RNA (1)...(19): siRNA sense strand
caaggucagucauaugaaa

SEQ ID NO: 1476510 - RNA, 19 nt, Homo sapiens
  misc_RNA (1)...(19): siRNA sense strand
gguauucacauucuuguua

SEQ ID NO: 1476511 - RNA, 19 nt, Homo sapiens
  misc_RNA (1)...(19): siRNA sense strand
gaugaaacgcuuacuuauu

SEQ ID NO: 1476512 - RNA, 19 nt, Homo sapiens
  misc_RNA (1)...(19): siRNA sense strand
acaagacuguucucuaauu

SEQ ID NO: 1476513 - RNA, 19 nt, Homo sapiens
  misc_RNA (1)...(19): siRNA sense strand
gaucagaugguucagaauu

SEQ ID NO: 1476514 - RNA, 19 nt, Homo sapiens
  misc_RNA (1)...(19): siRNA sense strand
ucacagagaugaggcuuga

SEQ ID NO: 1476515 - RNA, 19 nt, Homo sapiens
  misc_RNA (1)...(19): siRNA sense strand
cagcaugagugaugucuug

SEQ ID NO: 1476516 - RNA, 19 nt, Homo sapiens
  misc_RNA (1)...(19): siRNA sense strand
gcaaucuacuuggaagaaa

SEQ ID NO: 1476517 - RNA, 19 nt, Homo sapiens
  misc_RNA (1)...(19): siRNA sense strand
gcaaagcgaggcaguuguu

SEQ ID NO: 1476518 - RNA, 19 nt, Homo sapiens
  misc_RNA (1)...(19): siRNA sense strand
ccucagaaguugcucgaaa

SEQ ID NO: 1476519 - RNA, 19 nt, Homo sapiens
  misc_RNA (1)...(19): siRNA sense strand
gauccagguugacgccuuu

SEQ ID NO: 1476520 - RNA, 19 nt, Homo sapiens
  misc_RNA (1)...(19): siRNA sense strand
gugaucagaugguucagaa

SEQ ID NO: 1476521 - RNA, 19 nt, Homo sapiens
  misc_RNA (1)...(19): siRNA sense strand
uaauaucccucuccaccaa

SEQ ID NO: 1476522 - RNA, 19 nt, Homo sapiens
  misc_RNA (1)...(19): siRNA sense strand
ugagugaugucuuggcauu

SEQ ID NO: 1476523 - RNA, 19 nt, Homo sapiens
  misc_RNA (1)...(19): siRNA sense strand
aaaggaggauuuaguucaa

SEQ ID NO: 1476524 - RNA, 19 nt, Homo sapiens
  misc_RNA (1)...(19): siRNA sense strand
gcacccacccuuucaguau

SEQ ID NO: 1476525 - RNA, 19 nt, Homo sapiens
  misc_RNA (1)...(19): siRNA sense strand
caaaggaggauuuaguuca

SEQ ID NO: 1476526 - RNA, 19 nt, Homo sapiens
  misc_RNA (1)...(19): siRNA sense strand
gacaaaggaggauuuaguu

SEQ ID NO: 1476527 - RNA, 19 nt, Homo sapiens
  misc_RNA (1)...(19): siRNA sense strand
gaccucuggugaacaaauu

SEQ ID NO: 1476528 - RNA, 19 nt, Homo sapiens
  misc_RNA (1)...(19): siRNA sense strand
ccacaauccucacagagau

SEQ ID NO: 1476529 - RNA, 19 nt, Homo sapiens
  misc_RNA (1)...(19): siRNA sense strand
aaauucggaugcuggauaa

SEQ ID NO: 1476530 - RNA, 19 nt, Homo sapiens
  misc_RNA (1)...(19): siRNA sense strand
cagauucucuuccuacaca

SEQ ID NO: 1476531 - RNA, 19 nt, Homo sapiens
  misc_RNA (1)...(19): siRNA sense strand
caaauucagccuucagcua

SEQ ID NO: 1476532 - RNA, 19 nt, Homo sapiens
  misc_RNA (1)...(19): siRNA sense strand
ggacuuugccagcagacua

SEQ ID NO: 1476533 - RNA, 19 nt, Homo sapiens
  misc_RNA (1)...(19): siRNA sense strand
ggagauggagcuucacaga

SEQ ID NO: 1476534 - RNA, 19 nt, Homo sapiens
  misc_RNA (1)...(19): siRNA sense strand
caucauaaggguuguauuc

SEQ ID NO: 1476535 - RNA, 19 nt, Homo sapiens
  misc_RNA (1)...(19): siRNA sense strand
agaaaugauugccucagaa

SEQ ID NO: 1476536 - RNA, 19 nt, Homo sapiens
  misc_RNA (1)...(19): siRNA sense strand
ucagggagauggagcuuca

SEQ ID NO: 1476537 - RNA, 19 nt, Homo sapiens
  misc_RNA (1)...(19): siRNA sense strand
gaaacgcuuacuuauuuga

SEQ ID NO: 1476538 - RNA, 19 nt, Homo sapiens
  misc_RNA (1)...(19): siRNA sense strand
uuaaucagguuuacagaca

SEQ ID NO: 1476539 - RNA, 19 nt, Homo sapiens
  misc_RNA (1)...(19): siRNA sense strand
gauggaauucggcucuaua

SEQ ID NO: 1476540 - RNA, 19 nt, Homo sapiens
  misc_RNA (1)...(19): siRNA sense strand
ccaguuaaaugcgguugaa

SEQ ID NO: 1476541 - RNA, 19 nt, Homo sapiens
  misc_RNA (1)...(19): siRNA sense strand
aagaugcaguugaacauga

SEQ ID NO: 1476542 - RNA, 19 nt, Homo sapiens
  misc_RNA (1)...(19): siRNA sense strand
gaucaucuacacucagcua

SEQ ID NO: 1476543 - RNA, 19 nt, Homo sapiens
  misc_RNA (1)...(19): siRNA sense strand
gaugcuggauaaucggaaa

SEQ ID NO: 1476544 - RNA, 19 nt, Homo sapiens
  misc_RNA (1)...(19): siRNA sense strand
gaaaugauugccucagaag

SEQ ID NO: 1476545 - RNA, 19 nt, Homo sapiens
  misc_RNA (1)...(19): siRNA sense strand
gagaagagaacagcucaug

SEQ ID NO: 1476546 - RNA, 19 nt, Homo sapiens
  misc_RNA (1)...(19): siRNA sense strand
gagaagauggagaagagaa

SEQ ID NO: 1476547 - RNA, 19 nt, Homo sapiens
  misc_RNA (1)...(19): siRNA sense strand
gaaugaaaauggagaauac

SEQ ID NO: 1476548 - RNA, 19 nt, Homo sapiens
  misc_RNA (1)...(19): siRNA sense strand
aaacgcaccucugcuuuca

SEQ ID NO: 1476549 - RNA, 19 nt, Homo sapiens
  misc_RNA (1)...(19): siRNA sense strand
ggacgaauccaagccaguu

SEQ ID NO: 1476550 - RNA, 19 nt, Homo sapiens
  misc_RNA (1)...(19): siRNA sense strand
caacgucaccagcaguaaa

SEQ ID NO: 1476551 - RNA, 19 nt, Homo sapiens
  misc_RNA (1)...(19): siRNA sense strand
uccaaugucugugggaaua

SEQ ID NO: 1476552 - RNA, 19 nt, Homo sapiens
  misc_RNA (1)...(19): siRNA sense strand
aagaaaugauugccucaga

SEQ ID NO: 1476553 - RNA, 19 nt, Homo sapiens
  misc_RNA (1)...(19): siRNA sense strand
ugccugagaucaauggaaa

SEQ ID NO: 1476554 - RNA, 19 nt, Homo sapiens
  misc_RNA (1)...(19): siRNA sense strand
agugaaagcugaaaguagu

SEQ ID NO: 1476555 - RNA, 19 nt, Homo sapiens
  misc_RNA (1)...(19): siRNA sense strand
ugaaacgcuuacuuauuug

SEQ ID NO: 1476556 - RNA, 19 nt, Homo sapiens
  misc_RNA (1)...(19): siRNA sense strand
ccaccaaauuaaucagguu

SEQ ID NO: 1476557 - RNA, 19 nt, Homo sapiens
  misc_RNA (1)...(19): siRNA sense strand
ugacaaaggaggauuuagu

SEQ ID NO: 1476558 - RNA, 19 nt, Homo sapiens
  misc_RNA (1)...(19): siRNA sense strand
aauugaagaugcaguugaa

SEQ ID NO: 1476559 - RNA, 19 nt, Homo sapiens
  misc_RNA (1)...(19): siRNA sense strand
cauaaggguuguauuccau

SEQ ID NO: 1476560 - RNA, 19 nt, Homo sapiens
  misc_RNA (1)...(19): siRNA sense strand
ggaauaauugacacaagga

SEQ ID NO: 1476561 - RNA, 19 nt, Homo sapiens
  misc_RNA (1)...(19): siRNA sense strand
caaucuacuuggaagaaau

SEQ ID NO: 1476562 - RNA, 19 nt, Homo sapiens
  misc_RNA (1)...(19): siRNA sense strand
gcuugagccuauaauugaa

SEQ ID NO: 1476563 - RNA, 19 nt, Homo sapiens
  misc_RNA (1)...(19): siRNA sense strand
uaaggguuguauuccauga

SEQ ID NO: 1476564 - RNA, 19 nt, Homo sapiens
  misc_RNA (1)...(19): siRNA sense strand
guauucacauucuuguuag

SEQ ID NO: 1476565 - RNA, 19 nt, Homo sapiens
  misc_RNA (1)...(19): siRNA sense strand
aacuugcgcugguguuuaa

SEQ ID NO: 1476566 - RNA, 19 nt, Homo sapiens
  misc_RNA (1)...(19): siRNA sense strand
cuacuuggaagaaaugauu

SEQ ID NO: 1476567 - RNA, 19 nt, Homo sapiens
  misc_RNA (1)...(19): siRNA sense strand
gaagaugcaguugaacaug

SEQ ID NO: 1476568 - RNA, 19 nt, Homo sapiens
  misc_RNA (1)...(19): siRNA sense strand
gcgcuuacagcaugaguga

SEQ ID NO: 1476569 - RNA, 19 nt, Homo sapiens
  misc_RNA (1)...(19): siRNA sense strand
uaaaggugcagacaggaaa

SEQ ID NO: 1476570 - RNA, 19 nt, Homo sapiens
  misc_RNA (1)...(19): siRNA sense strand
acagacuucuugauuuaga

SEQ ID NO: 1476571 - RNA, 19 nt, Homo sapiens
  misc_RNA (1)...(19): siRNA sense strand
acgcaccucugcuuucauu

SEQ ID NO: 1476572 - RNA, 19 nt, Homo sapiens
  misc_RNA (1)...(19): siRNA sense strand
aguaucagccguccuauga

SEQ ID NO: 1476573 - RNA, 19 nt, Homo sapiens
  misc_RNA (1)...(19): siRNA sense strand
gcaccucugcuuucauuca

SEQ ID NO: 1476574 - RNA, 19 nt, Homo sapiens
  misc_RNA (1)...(19): siRNA sense strand
gaacaaauucagccuucag

SEQ ID NO: 1476575 - RNA, 19 nt, Homo sapiens
  misc_RNA (1)...(19): siRNA sense strand
ccacauaauuuugaaguga

SEQ ID NO: 1476576 - RNA, 19 nt, Homo sapiens
  misc_RNA (1)...(19): siRNA sense strand
augaugaaacgcuuacuua

SEQ ID NO: 1476577 - RNA, 19 nt, Homo sapiens
  misc_RNA (1)...(19): siRNA sense strand
ggucagucauaugaaauuc

SEQ ID NO: 1476578 - RNA, 19 nt, Homo sapiens
  misc_RNA (1)...(19): siRNA sense strand
ugacagacggcuacaauac

SEQ ID NO: 1476579 - RNA, 19 nt, Homo sapiens
  misc_RNA (1)...(19): siRNA sense strand
ccaaauuaaucagguuuac

SEQ ID NO: 1476580 - RNA, 19 nt, Homo sapiens
  misc_RNA (1)...(19): siRNA sense strand
aauccaagccaguuaaaug

SEQ ID NO: 1476581 - RNA, 19 nt, Homo sapiens
  misc_RNA (1)...(19): siRNA sense strand
gacgaauccaagccaguua

SEQ ID NO: 1476582 - RNA, 19 nt, Homo sapiens
  misc_RNA (1)...(19): siRNA sense strand
ccaggagacagacuucuug

SEQ ID NO: 1476583 - RNA, 19 nt, Homo sapiens
  misc_RNA (1)...(19): siRNA sense strand
gcuuacagcaugagugaug

SEQ ID NO: 1476584 - RNA, 19 nt, Homo sapiens
  misc_RNA (1)...(19): siRNA sense strand
cagcuacgauccaggaaac

SEQ ID NO: 1476585 - RNA, 19 nt, Homo sapiens
  misc_RNA (1)...(19): siRNA sense strand
acacagagcaucagcaacu

SEQ ID NO: 1476586 - RNA, 19 nt, Homo sapiens
  misc_RNA (1)...(19): siRNA sense strand
gcgcugguguuuaauaucc

SEQ ID NO: 1476587 - RNA, 19 nt, Homo sapiens
  misc_RNA (1)...(19): siRNA sense strand
aaugauugccucagaaguu

SEQ ID NO: 1476588 - RNA, 19 nt, Homo sapiens
  misc_RNA (1)...(19): siRNA sense strand
aaacugaccgagagaagau

SEQ ID NO: 1476589 - RNA, 19 nt, Homo sapiens
  misc_RNA (1)...(19): siRNA sense strand
caaugucugugggaauaau

SEQ ID NO: 1476590 - RNA, 19 nt, Homo sapiens
  misc_RNA (1)...(19): siRNA sense strand
ccaccgguauucacauucu

SEQ ID NO: 1476591 - RNA, 19 nt, Homo sapiens
  misc_RNA (1)...(19): siRNA sense strand
ccagacagcaauucuucuu

SEQ ID NO: 1476592 - RNA, 19 nt, Homo sapiens
  misc_RNA (1)...(19): siRNA sense strand
ucauaaggguuguauucca

SEQ ID NO: 1476593 - RNA, 19 nt, Homo sapiens
  misc_RNA (1)...(19): siRNA sense strand
uucaggugccgacuuauua

SEQ ID NO: 1476594 - RNA, 19 nt, Homo sapiens
  misc_RNA (1)...(19): siRNA sense strand
cagccuaugugaauaacag

SEQ ID NO: 1476595 - RNA, 19 nt, Homo sapiens
  misc_RNA (1)...(19): siRNA sense strand
gaagauggagaagagaaca

SEQ ID NO: 1476596 - RNA, 19 nt, Homo sapiens
  misc_RNA (1)...(19): siRNA sense strand
ugaaccaaggucagucaua

SEQ ID NO: 1476597 - RNA, 19 nt, Homo sapiens
  misc_RNA (1)...(19): siRNA sense strand
gacagacggcuacaauaca

SEQ ID NO: 1476598 - RNA, 19 nt, Homo sapiens
  misc_RNA (1)...(19): siRNA sense strand
caugacagacggcuacaau

SEQ ID NO: 1476599 - RNA, 19 nt, Homo sapiens
  misc_RNA (1)...(19): siRNA sense strand
gacagggucccaccgguau

SEQ ID NO: 1476600 - RNA, 19 nt, Homo sapiens
  misc_RNA (1)...(19): siRNA sense strand
cagcugcacuggcaagaaa

SEQ ID NO: 1476601 - RNA, 19 nt, Homo sapiens
  misc_RNA (1)...(19): siRNA sense strand
aaacugcccuguucucugu

SEQ ID NO: 1476602 - RNA, 19 nt, Homo sapiens
  misc_RNA (1)...(19): siRNA sense strand
gaacucaggguagagaauu

SEQ ID NO: 1476603 - RNA, 19 nt, Homo sapiens
  misc_RNA (1)...(19): siRNA sense strand
ccaugaaacugcccuguuc

SEQ ID NO: 1476604 - RNA, 19 nt, Homo sapiens
  misc_RNA (1)...(19): siRNA sense strand
cagagugccuuuccagguu

SEQ ID NO: 1476605 - RNA, 19 nt, Homo sapiens
  misc_RNA (1)...(19): siRNA sense strand
gauugaagaccuggcuuua

SEQ ID NO: 1476606 - RNA, 19 nt, Homo sapiens
  misc_RNA (1)...(19): siRNA sense strand
caagacaggcauaaagaau

SEQ ID NO: 1476607 - RNA, 19 nt, Homo sapiens
  misc_RNA (1)...(19): siRNA sense strand
gagggaggcccauggcauu

SEQ ID NO: 1476608 - RNA, 19 nt, Homo sapiens
  misc_RNA (1)...(19): siRNA sense strand
gggcuccguucccguugua

SEQ ID NO: 1476609 - RNA, 19 nt, Homo sapiens
  misc_RNA (1)...(19): siRNA sense strand
gcauuguggugacggaugu

SEQ ID NO: 1476610 - RNA, 19 nt, Homo sapiens
  misc_RNA (1)...(19): siRNA sense strand
caaguccuguggccaugaa

SEQ ID NO: 1476611 - RNA, 19 nt, Homo sapiens
  misc_RNA (1)...(19): siRNA sense strand
ugacggauguggccuuucu

SEQ ID NO: 1476612 - RNA, 19 nt, Homo sapiens
  misc_RNA (1)...(19): siRNA sense strand
uaccaggccugcagguuug

SEQ ID NO: 1476613 - RNA, 19 nt, Homo sapiens
  misc_RNA (1)...(19): siRNA sense strand
agacaggcauaaagaaugg

SEQ ID NO: 1476614 - RNA, 19 nt, Homo sapiens
  misc_RNA (1)...(19): siRNA sense strand
gccaagacaggcauaaaga

SEQ ID NO: 1476615 - RNA, 19 nt, Homo sapiens
  misc_RNA (1)...(19): siRNA sense strand
ggauggcuccaacuucuug

SEQ ID NO: 1476616 - RNA, 19 nt, Homo sapiens
  misc_RNA (1)...(19): siRNA sense strand
ggugacggauguggccuuu

SEQ ID NO: 1476617 - RNA, 19 nt, Homo sapiens
  misc_RNA (1)...(19): siRNA sense strand
ccaagacaggcauaaagaa

SEQ ID NO: 1476618 - RNA, 19 nt, Homo sapiens
  misc_RNA (1)...(19): siRNA sense strand
ggcacuggcuggugacauc

SEQ ID NO: 1476619 - RNA, 19 nt, Homo sapiens
  misc_RNA (1)...(19): siRNA sense strand
ggaggcccauggcauugug

SEQ ID NO: 1476620 - RNA, 19 nt, Homo sapiens
  misc_RNA (1)...(19): siRNA sense strand
cuaccaggccugcagguuu

SEQ ID NO: 1476621 - RNA, 19 nt, Homo sapiens
  misc_RNA (1)...(19): siRNA sense strand
uaaagaauggcgugcacuu

SEQ ID NO: 1476622 - RNA, 19 nt, Homo sapiens
  misc_RNA (1)...(19): siRNA sense strand
aggaucagcuggugacaca

SEQ ID NO: 1476623 - RNA, 19 nt, Homo sapiens
  misc_RNA (1)...(19): siRNA sense strand
guugccagcugcaucuguu

SEQ ID NO: 1476624 - RNA, 19 nt, Homo sapiens
  misc_RNA (1)...(19): siRNA sense strand
ggaguucaaagcccacgaa

SEQ ID NO: 1476625 - RNA, 19 nt, Homo sapiens
  misc_RNA (1)...(19): siRNA sense strand
agagugccuuuccagguuu

SEQ ID NO: 1476626 - RNA, 19 nt, Homo sapiens
  misc_RNA (1)...(19): siRNA sense strand
gugucgggcuuauuauugu

SEQ ID NO: 1476627 - RNA, 19 nt, Homo sapiens
  misc_RNA (1)...(19): siRNA sense strand
gagacacgggccaccauga

SEQ ID NO: 1476628 - RNA, 19 nt, Homo sapiens
  misc_RNA (1)...(19): siRNA sense strand
uugaagaccuggcuuuagg

SEQ ID NO: 1476629 - RNA, 19 nt, Homo sapiens
  misc_RNA (1)...(19): siRNA sense strand
ccgauccacugcagaaagu

SEQ ID NO: 1476630 - RNA, 19 nt, Homo sapiens
  misc_RNA (1)...(19): siRNA sense strand
ggcuagaacucaggguaga

SEQ ID NO: 1476631 - RNA, 19 nt, Homo sapiens
  misc_RNA (1)...(19): siRNA sense strand
gcuccgauccacugcagaa

SEQ ID NO: 1476632 - RNA, 19 nt, Homo sapiens
  misc_RNA (1)...(19): siRNA sense strand
gauccacugcagaaaguug

SEQ ID NO: 1476633 - RNA, 19 nt, Homo sapiens
  misc_RNA (1)...(19): siRNA sense strand
ugggauggcuccaacuucu

SEQ ID NO: 1476634 - RNA, 19 nt, Homo sapiens
  misc_RNA (1)...(19): siRNA sense strand
ccugauggcaaguugguaa

SEQ ID NO: 1476635 - RNA, 19 nt, Homo sapiens
  misc_RNA (1)...(19): siRNA sense strand
gaccuuaaggccucugugu

SEQ ID NO: 1476636 - RNA, 19 nt, Homo sapiens
  misc_RNA (1)...(19): siRNA sense strand
gagcaggggccucgacaaa

SEQ ID NO: 1476637 - RNA, 19 nt, Homo sapiens
  misc_RNA (1)...(19): siRNA sense strand
aagaauggcgugcacuuuc

SEQ ID NO: 1476638 - RNA, 19 nt, Homo sapiens
  misc_RNA (1)...(19): siRNA sense strand
ccacgauaauacccugcuu

SEQ ID NO: 1476639 - RNA, 19 nt, Homo sapiens
  misc_RNA (1)...(19): siRNA sense strand
ugcagaaaguugugugcuu

SEQ ID NO: 1476640 - RNA, 19 nt, Homo sapiens
  misc_RNA (1)...(19): siRNA sense strand
agacacgggccaccaugaa

SEQ ID NO: 1476641 - RNA, 19 nt, Homo sapiens
  misc_RNA (1)...(19): siRNA sense strand
ggauguggccuuucuaccu

SEQ ID NO: 1476642 - RNA, 19 nt, Homo sapiens
  misc_RNA (1)...(19): siRNA sense strand
agaaaguugugugcuucaa

SEQ ID NO: 1476643 - RNA, 19 nt, Homo sapiens
  misc_RNA (1)...(19): siRNA sense strand
cugugugucgggcuuauua

SEQ ID NO: 1476644 - RNA, 19 nt, Homo sapiens
  misc_RNA (1)...(19): siRNA sense strand
gcuugccacuggaggaaca

SEQ ID NO: 1476645 - RNA, 19 nt, Homo sapiens
  misc_RNA (1)...(19): siRNA sense strand
gugcuucaaccacgauaau

SEQ ID NO: 1476646 - RNA, 19 nt, Homo sapiens
  misc_RNA (1)...(19): siRNA sense strand
aagacaggcauaaagaaug

SEQ ID NO: 1476647 - RNA, 19 nt, Homo sapiens
  misc_RNA (1)...(19): siRNA sense strand
guugccaucuacauagcuu

SEQ ID NO: 1476648 - RNA, 19 nt, Homo sapiens
  misc_RNA (1)...(19): siRNA sense strand
cagagaaggccgguuccaa

SEQ ID NO: 1476649 - RNA, 19 nt, Homo sapiens
  misc_RNA (1)...(19): siRNA sense strand
ugaauccggcaccuuccua

SEQ ID NO: 1476650 - RNA, 19 nt, Homo sapiens
  misc_RNA (1)...(19): siRNA sense strand
uugcugcacucccaugaca

SEQ ID NO: 1476651 - RNA, 19 nt, Homo sapiens
  misc_RNA (1)...(19): siRNA sense strand
gaagagaguuugaagagaa

SEQ ID NO: 1476652 - RNA, 19 nt, Homo sapiens
  misc_RNA (1)...(19): siRNA sense strand
ugaaggagaucaccaguaa

SEQ ID NO: 1476653 - RNA, 19 nt, Homo sapiens
  misc_RNA (1)...(19): siRNA sense strand
acaaagaccuugaugaaga

SEQ ID NO: 1476654 - RNA, 19 nt, Homo sapiens
  misc_RNA (1)...(19): siRNA sense strand
guacaaagaccuugaugaa

SEQ ID NO: 1476655 - RNA, 19 nt, Homo sapiens
  misc_RNA (1)...(19): siRNA sense strand
gaagaagcuuugacaagug

SEQ ID NO: 1476656 - RNA, 19 nt, Homo sapiens
  misc_RNA (1)...(19): siRNA sense strand
gcagaaaugcugaaaguga

SEQ ID NO: 1476657 - RNA, 19 nt, Homo sapiens
  misc_RNA (1)...(19): siRNA sense strand
ugaaacaacuggaaacugu

SEQ ID NO: 1476658 - RNA, 19 nt, Homo sapiens
  misc_RNA (1)...(19): siRNA sense strand
aaacagaacugaaacaacu

SEQ ID NO: 1476659 - RNA, 19 nt, Homo sapiens
  misc_RNA (1)...(19): siRNA sense strand
gaacugaaacaacuggaaa

SEQ ID NO: 1476660 - RNA, 19 nt, Homo sapiens
  misc_RNA (1)...(19): siRNA sense strand
ggacagcuguagaauugga

SEQ ID NO: 1476661 - RNA, 19 nt, Homo sapiens
  misc_RNA (1)...(19): siRNA sense strand
ggucaaaggugaaaagauu

SEQ ID NO: 1476662 - RNA, 19 nt, Homo sapiens
  misc_RNA (1)...(19): siRNA sense strand
cagaaaugcugaaagugaa

SEQ ID NO: 1476663 - RNA, 19 nt, Homo sapiens
  misc_RNA (1)...(19): siRNA sense strand
gacaagugcuucugauaca

SEQ ID NO: 1476664 - RNA, 19 nt, Homo sapiens
  misc_RNA (1)...(19): siRNA sense strand
gauaacgaauacaaaguuc

SEQ ID NO: 1476665 - RNA, 19 nt, Homo sapiens
  misc_RNA (1)...(19): siRNA sense strand
gaagagaacuaaagaaaac

SEQ ID NO: 1476666 - RNA, 19 nt, Homo sapiens
  misc_RNA (1)...(19): siRNA sense strand
caaagaccuugaugaagau

SEQ ID NO: 1476667 - RNA, 19 nt, Homo sapiens
  misc_RNA (1)...(19): siRNA sense strand
gagcaucuccuuucauauc

SEQ ID NO: 1476668 - RNA, 19 nt, Homo sapiens
  misc_RNA (1)...(19): siRNA sense strand
agaagaagcuuugacaagu

SEQ ID NO: 1476669 - RNA, 19 nt, Homo sapiens
  misc_RNA (1)...(19): siRNA sense strand
gcacugccauuccguaagg

SEQ ID NO: 1476670 - RNA, 19 nt, Homo sapiens
  misc_RNA (1)...(19): siRNA sense strand
aaagaagcauuggagcaua

SEQ ID NO: 1476671 - RNA, 19 nt, Homo sapiens
  misc_RNA (1)...(19): siRNA sense strand
gaaagaagcauuggagcau

SEQ ID NO: 1476672 - RNA, 19 nt, Homo sapiens
  misc_RNA (1)...(19): siRNA sense strand
cagcuaaugcuauaacaaa

SEQ ID NO: 1476673 - RNA, 19 nt, Homo sapiens
  misc_RNA (1)...(19): siRNA sense strand
ggggacagcuguagaauug

SEQ ID NO: 1476674 - RNA, 19 nt, Homo sapiens
  misc_RNA (1)...(19): siRNA sense strand
aagaagcauuggagcauaa

SEQ ID NO: 1476675 - RNA, 19 nt, Homo sapiens
  misc_RNA (1)...(19): siRNA sense strand
gagacgaguugaaggagau

SEQ ID NO: 1476676 - RNA, 19 nt, Homo sapiens
  misc_RNA (1)...(19): siRNA sense strand
agaaaccuguacagacuuu

SEQ ID NO: 1476677 - RNA, 19 nt, Homo sapiens
  misc_RNA (1)...(19): siRNA sense strand
agaagaaccagacaucaaa

SEQ ID NO: 1476678 - RNA, 19 nt, Homo sapiens
  misc_RNA (1)...(19): siRNA sense strand
ggaaauggccaagaugcuu

SEQ ID NO: 1476679 - RNA, 19 nt, Homo sapiens
  misc_RNA (1)...(19): siRNA sense strand
ccacagggccauuugauag

SEQ ID NO: 1476680 - RNA, 19 nt, Homo sapiens
  misc_RNA (1)...(19): siRNA sense strand
acaaugacuuagugcguaa

SEQ ID NO: 1476681 - RNA, 19 nt, Homo sapiens
  misc_RNA (1)...(19): siRNA sense strand
gggaugcacaauuugauaa

SEQ ID NO: 1476682 - RNA, 19 nt, Homo sapiens
  misc_RNA (1)...(19): siRNA sense strand
agaauuagaagaagcuuug

SEQ ID NO: 1476683 - RNA, 19 nt, Homo sapiens
  misc_RNA (1)...(19): siRNA sense strand
uaagagacgaguugaagga

SEQ ID NO: 1476684 - RNA, 19 nt, Homo sapiens
  misc_RNA (1)...(19): siRNA sense strand
cagaagaaccagacaucaa

SEQ ID NO: 1476685 - RNA, 19 nt, Homo sapiens
  misc_RNA (1)...(19): siRNA sense strand
guuaagagauaaugaaacc

SEQ ID NO: 1476686 - RNA, 19 nt, Homo sapiens
  misc_RNA (1)...(19): siRNA sense strand
ggcacugauugaugcguua

SEQ ID NO: 1476687 - RNA, 19 nt, Homo sapiens
  misc_RNA (1)...(19): siRNA sense strand
caccaaauccaaccaaugu

SEQ ID NO: 1476688 - RNA, 19 nt, Homo sapiens
  misc_RNA (1)...(19): siRNA sense strand
gcucaucuuguugaaguua

SEQ ID NO: 1476689 - RNA, 19 nt, Homo sapiens
  misc_RNA (1)...(19): siRNA sense strand
guaauauaaugggaaguag

SEQ ID NO: 1476690 - RNA, 19 nt, Homo sapiens
  misc_RNA (1)...(19): siRNA sense strand
auugaugcguuaagagaua

SEQ ID NO: 1476691 - RNA, 19 nt, Homo sapiens
  misc_RNA (1)...(19): siRNA sense strand
uugcagaaaugcugaaagu

SEQ ID NO: 1476692 - RNA, 19 nt, Homo sapiens
  misc_RNA (1)...(19): siRNA sense strand
uaaagacagggaagacuau

SEQ ID NO: 1476693 - RNA, 19 nt, Homo sapiens
  misc_RNA (1)...(19): siRNA sense strand
guagaagagaguuugaaga

SEQ ID NO: 1476694 - RNA, 19 nt, Homo sapiens
  misc_RNA (1)...(19): siRNA sense strand
ggaaguaguaaugguguug

SEQ ID NO: 1476695 - RNA, 19 nt, Homo sapiens
  misc_RNA (1)...(19): siRNA sense strand
gaaacagaacugaaacaac

SEQ ID NO: 1476696 - RNA, 19 nt, Homo sapiens
  misc_RNA (1)...(19): siRNA sense strand
gcagaagaaccagacauca

SEQ ID NO: 1476697 - RNA, 19 nt, Homo sapiens
  misc_RNA (1)...(19): siRNA sense strand
gucucuugauccagaauua

SEQ ID NO: 1476698 - RNA, 19 nt, Homo sapiens
  misc_RNA (1)...(19): siRNA sense strand
gaaguaguaaugguguuga

SEQ ID NO: 1476699 - RNA, 19 nt, Homo sapiens
  misc_RNA (1)...(19): siRNA sense strand
agaagagaguuugaagaga

SEQ ID NO: 1476700 - RNA, 19 nt, Homo sapiens
  misc_RNA (1)...(19): siRNA sense strand
ccaaauccaaccaauguag

SEQ ID NO: 1476701 - RNA, 19 nt, Homo sapiens
  misc_RNA (1)...(19): siRNA sense strand
gaugagccaccaaauccaa

SEQ ID NO: 1476702 - RNA, 19 nt, Homo sapiens
  misc_RNA (1)...(19): siRNA sense strand
gcaggguuccggcagaaga

SEQ ID NO: 1476703 - RNA, 19 nt, Homo sapiens
  misc_RNA (1)...(19): siRNA sense strand
uagaagagaguuugaagag

SEQ ID NO: 1476704 - RNA, 19 nt, Homo sapiens
  misc_RNA (1)...(19): siRNA sense strand
gaagaaccagacaucaaag

SEQ ID NO: 1476705 - RNA, 19 nt, Homo sapiens
  misc_RNA (1)...(19): siRNA sense strand
caaauccaaccaauguaga

SEQ ID NO: 1476706 - RNA, 19 nt, Homo sapiens
  misc_RNA (1)...(19): siRNA sense strand
gggaaguaguaaugguguu

SEQ ID NO: 1476707 - RNA, 19 nt, Homo sapiens
  misc_RNA (1)...(19): siRNA sense strand
guacagacuuuuacagaag

SEQ ID NO: 1476708 - RNA, 19 nt, Homo sapiens
  misc_RNA (1)...(19): siRNA sense strand
uagaagaagcuuugacaag

SEQ ID NO: 1476709 - RNA, 19 nt, Homo sapiens
  misc_RNA (1)...(19): siRNA sense strand
uuucaaauguggucaaagg

SEQ ID NO: 1476710 - RNA, 19 nt, Homo sapiens
  misc_RNA (1)...(19): siRNA sense strand
auaaagacagggaagacua

SEQ ID NO: 1476711 - RNA, 19 nt, Homo sapiens
  misc_RNA (1)...(19): siRNA sense strand
gcagcuaaugcuauaacaa

SEQ ID NO: 1476712 - RNA, 19 nt, Homo sapiens
  misc_RNA (1)...(19): siRNA sense strand
ccacgaaccagagcagcua

SEQ ID NO: 1476713 - RNA, 19 nt, Homo sapiens
  misc_RNA (1)...(19): siRNA sense strand
gcguuaagagauaaugaaa

SEQ ID NO: 1476714 - RNA, 19 nt, Homo sapiens
  misc_RNA (1)...(19): siRNA sense strand
uaacgaauacaaaguucug

SEQ ID NO: 1476715 - RNA, 19 nt, Homo sapiens
  misc_RNA (1)...(19): siRNA sense strand
gauccagaauuagaagaag

SEQ ID NO: 1476716 - RNA, 19 nt, Homo sapiens
  misc_RNA (1)...(19): siRNA sense strand
ugaugaagaugagcuccuu

SEQ ID NO: 1476717 - RNA, 19 nt, Homo sapiens
  misc_RNA (1)...(19): siRNA sense strand
ugacaagugcuucugauac

SEQ ID NO: 1476718 - RNA, 19 nt, Homo sapiens
  misc_RNA (1)...(19): siRNA sense strand
gcuguagaauuggaaaugg

SEQ ID NO: 1476719 - RNA, 19 nt, Homo sapiens
  misc_RNA (1)...(19): siRNA sense strand
gcacugauugaugcguuaa

SEQ ID NO: 1476720 - RNA, 19 nt, Homo sapiens
  misc_RNA (1)...(19): siRNA sense strand
caaugacccuguugcuacu

SEQ ID NO: 1476721 - RNA, 19 nt, Homo sapiens
  misc_RNA (1)...(19): siRNA sense strand
ugugugaccucgcagcaau

SEQ ID NO: 1476722 - RNA, 19 nt, Homo sapiens
  misc_RNA (1)...(19): siRNA sense strand
gggauucuggcacugauug

SEQ ID NO: 1476723 - RNA, 19 nt, Homo sapiens
  misc_RNA (1)...(19): siRNA sense strand
gaugagcuccuugggaauc

SEQ ID NO: 1476724 - RNA, 19 nt, Homo sapiens
  misc_RNA (1)...(19): siRNA sense strand
ugauugaugcguuaagaga

SEQ ID NO: 1476725 - RNA, 19 nt, Homo sapiens
  misc_RNA (1)...(19): siRNA sense strand
caauguagaagagaguuug

SEQ ID NO: 1476726 - RNA, 19 nt, Homo sapiens
  misc_RNA (1)...(19): siRNA sense strand
auaaugggaaguaguaaug

SEQ ID NO: 1476727 - RNA, 19 nt, Homo sapiens
  misc_RNA (1)...(19): siRNA sense strand
gugcguaagagacgaguug

SEQ ID NO: 1476728 - RNA, 19 nt, Homo sapiens
  misc_RNA (1)...(19): siRNA sense strand
ccaccaaauccaaccaaug

SEQ ID NO: 1476729 - RNA, 19 nt, Homo sapiens
  misc_RNA (1)...(19): siRNA sense strand
gaaccagagcagcuaaugc

SEQ ID NO: 1476730 - RNA, 19 nt, Homo sapiens
  misc_RNA (1)...(19): siRNA sense strand
agaaacagaacugaaacaa

SEQ ID NO: 1476731 - RNA, 19 nt, Homo sapiens
  misc_RNA (1)...(19): siRNA sense strand
gaauuagaagaagcuuuga

SEQ ID NO: 1476732 - RNA, 19 nt, Homo sapiens
  misc_RNA (1)...(19): siRNA sense strand
uucuugggaugcacaauuu

SEQ ID NO: 1476733 - RNA, 19 nt, Homo sapiens
  misc_RNA (1)...(19): siRNA sense strand
agacagggaagacuaugug

SEQ ID NO: 1476734 - RNA, 19 nt, Homo sapiens
  misc_RNA (1)...(19): siRNA sense strand
acaaucagaggcagcaguu

SEQ ID NO: 1476735 - RNA, 19 nt, Homo sapiens
  misc_RNA (1)...(19): siRNA sense strand
gaaaugcugaaagugaaca

SEQ ID NO: 1476736 - RNA, 19 nt, Homo sapiens
  misc_RNA (1)...(19): siRNA sense strand
ccggagcaaugacccuguu

SEQ ID NO: 1476737 - RNA, 19 nt, Homo sapiens
  misc_RNA (1)...(19): siRNA sense strand
ccaauguagaagagaguuu

SEQ ID NO: 1476738 - RNA, 19 nt, Homo sapiens
  misc_RNA (1)...(19): siRNA sense strand
ugggaugcacaauuugaua

SEQ ID NO: 1476739 - RNA, 19 nt, Homo sapiens
  misc_RNA (1)...(19): siRNA sense strand
cagcaauucuugggaugca

SEQ ID NO: 1476740 - RNA, 19 nt, Homo sapiens
  misc_RNA (1)...(19): siRNA sense strand
ggcagaagaaccagacauc

SEQ ID NO: 1476741 - RNA, 19 nt, Homo sapiens
  misc_RNA (1)...(19): siRNA sense strand
gcaucuccuuucauaucug

SEQ ID NO: 1476742 - RNA, 19 nt, Homo sapiens
  misc_RNA (1)...(19): siRNA sense strand
aagcauuggagcauaaaga

SEQ ID NO: 1476743 - RNA, 19 nt, Homo sapiens
  misc_RNA (1)...(19): siRNA sense strand
gccaccaaauccaaccaau

SEQ ID NO: 1476744 - RNA, 19 nt, Homo sapiens
  misc_RNA (1)...(19): siRNA sense strand
ugaccucgcagcaauucuu

SEQ ID NO: 1476745 - RNA, 19 nt, Homo sapiens
  misc_RNA (1)...(19): siRNA sense strand
ugcacaauuugauaacgaa

SEQ ID NO: 1476746 - RNA, 19 nt, Homo sapiens
  misc_RNA (1)...(19): siRNA sense strand
cguaagagacgaguugaag

SEQ ID NO: 1476747 - RNA, 19 nt, Homo sapiens
  misc_RNA (1)...(19): siRNA sense strand
guuugaagagaacuaaaga

SEQ ID NO: 1476748 - RNA, 19 nt, Homo sapiens
  misc_RNA (1)...(19): siRNA sense strand
aaauccaaccaauguagaa

SEQ ID NO: 1476749 - RNA, 19 nt, Homo sapiens
  misc_RNA (1)...(19): siRNA sense strand
acugauugaugcguuaaga

SEQ ID NO: 1476750 - RNA, 19 nt, Homo sapiens
  misc_RNA (1)...(19): siRNA sense strand
augcucaucuuguugaagu

SEQ ID NO: 1476751 - RNA, 19 nt, Homo sapiens
  misc_RNA (1)...(19): siRNA sense strand
gaacuaacagcacgacuua

SEQ ID NO: 1476752 - RNA, 19 nt, Homo sapiens
  misc_RNA (1)...(19): siRNA sense strand
uaaagcagcugaaagaaga

SEQ ID NO: 1476753 - RNA, 19 nt, Homo sapiens
  misc_RNA (1)...(19): siRNA sense strand
ccagagagcuuaaugacaa

SEQ ID NO: 1476754 - RNA, 19 nt, Homo sapiens
  misc_RNA (1)...(19): siRNA sense strand
caaagaggcugaugaagau

SEQ ID NO: 1476755 - RNA, 19 nt, Homo sapiens
  misc_RNA (1)...(19): siRNA sense strand
gaaaagcacuuggaaauuu

SEQ ID NO: 1476756 - RNA, 19 nt, Homo sapiens
  misc_RNA (1)...(19): siRNA sense strand
gagaauggaugaacagaga

SEQ ID NO: 1476757 - RNA, 19 nt, Homo sapiens
  misc_RNA (1)...(19): siRNA sense strand
gcaauaggauggaugauca

SEQ ID NO: 1476758 - RNA, 19 nt, Homo sapiens
  misc_RNA (1)...(19): siRNA sense strand
cagauuagaugaucaaaga

SEQ ID NO: 1476759 - RNA, 19 nt, Homo sapiens
  misc_RNA (1)...(19): siRNA sense strand
gggcaaugcuuauuucuau

SEQ ID NO: 1476760 - RNA, 19 nt, Homo sapiens
  misc_RNA (1)...(19): siRNA sense strand
gaaagagaauggaugaaca

SEQ ID NO: 1476761 - RNA, 19 nt, Homo sapiens
  misc_RNA (1)...(19): siRNA sense strand
caagagcacuuuacaaucu

SEQ ID NO: 1476762 - RNA, 19 nt, Homo sapiens
  misc_RNA (1)...(19): siRNA sense strand
gaucagagauguugcuuac

SEQ ID NO: 1476763 - RNA, 19 nt, Homo sapiens
  misc_RNA (1)...(19): siRNA sense strand
ccacuaaaguucuccaaga

SEQ ID NO: 1476764 - RNA, 19 nt, Homo sapiens
  misc_RNA (1)...(19): siRNA sense strand
gaaagaagagcauauagca

SEQ ID NO: 1476765 - RNA, 19 nt, Homo sapiens
  misc_RNA (1)...(19): siRNA sense strand
guacuuagccaccugauga

SEQ ID NO: 1476766 - RNA, 19 nt, Homo sapiens
  misc_RNA (1)...(19): siRNA sense strand
gaauguguaucaugccaaa

SEQ ID NO: 1476767 - RNA, 19 nt, Homo sapiens
  misc_RNA (1)...(19): siRNA sense strand
aaacagagacacugacuuu

SEQ ID NO: 1476768 - RNA, 19 nt, Homo sapiens
  misc_RNA (1)...(19): siRNA sense strand
caacaaagaggcugaugaa

SEQ ID NO: 1476769 - RNA, 19 nt, Homo sapiens
  misc_RNA (1)...(19): siRNA sense strand
ggaaacaccuuaaaaguuc

SEQ ID NO: 1476770 - RNA, 19 nt, Homo sapiens
  misc_RNA (1)...(19): siRNA sense strand
gcacaaauaacuccauaau

SEQ ID NO: 1476771 - RNA, 19 nt, Homo sapiens
  misc_RNA (1)...(19): siRNA sense strand
ucagagauguugcuuacaa

SEQ ID NO: 1476772 - RNA, 19 nt, Homo sapiens
  misc_RNA (1)...(19): siRNA sense strand
gaaaaccuaucauuaguga

SEQ ID NO: 1476773 - RNA, 19 nt, Homo sapiens
  misc_RNA (1)...(19): siRNA sense strand
gaaaagaacugccauacag

SEQ ID NO: 1476774 - RNA, 19 nt, Homo sapiens
  misc_RNA (1)...(19): siRNA sense strand
ggucugagcuacagcacaa

SEQ ID NO: 1476775 - RNA, 19 nt, Homo sapiens
  misc_RNA (1)...(19): siRNA sense strand
ggacgugccuuuggaaauc

SEQ ID NO: 1476776 - RNA, 19 nt, Homo sapiens
  misc_RNA (1)...(19): siRNA sense strand
cuucagggaugcaguuaua

SEQ ID NO: 1476777 - RNA, 19 nt, Homo sapiens
  misc_RNA (1)...(19): siRNA sense strand
acagugaaauucuugcuaa

SEQ ID NO: 1476778 - RNA, 19 nt, Homo sapiens
  misc_RNA (1)...(19): siRNA sense strand
gaacgucuauguaaaucag

SEQ ID NO: 1476779 - RNA, 19 nt, Homo sapiens
  misc_RNA (1)...(19): siRNA sense strand
ccauacagcuucaacaaca

SEQ ID NO: 1476780 - RNA, 19 nt, Homo sapiens
  misc_RNA (1)...(19): siRNA sense strand
gaacugccauacagcuuca

SEQ ID NO: 1476781 - RNA, 19 nt, Homo sapiens
  misc_RNA (1)...(19): siRNA sense strand
cagcacaaauaacuccaua

SEQ ID NO: 1476782 - RNA, 19 nt, Homo sapiens
  misc_RNA (1)...(19): siRNA sense strand
gagcagcgucuccuuauug

SEQ ID NO: 1476783 - RNA, 19 nt, Homo sapiens
  misc_RNA (1)...(19): siRNA sense strand
uagaagcacagucuuguua

SEQ ID NO: 1476784 - RNA, 19 nt, Homo sapiens
  misc_RNA (1)...(19): siRNA sense strand
ccaaagcauuagaauauca

SEQ ID NO: 1476785 - RNA, 19 nt, Homo sapiens
  misc_RNA (1)...(19): siRNA sense strand
aaacacacauuaccuccuu

SEQ ID NO: 1476786 - RNA, 19 nt, Homo sapiens
  misc_RNA (1)...(19): siRNA sense strand
gaaggguucuuugacuuau

SEQ ID NO: 1476787 - RNA, 19 nt, Homo sapiens
  misc_RNA (1)...(19): siRNA sense strand
gaaauugauagcaguuuga

SEQ ID NO: 1476788 - RNA, 19 nt, Homo sapiens
  misc_RNA (1)...(19): siRNA sense strand
uagaauaucaccaucauga

SEQ ID NO: 1476789 - RNA, 19 nt, Homo sapiens
  misc_RNA (1)...(19): siRNA sense strand
ggauaaaaguggugaacua

SEQ ID NO: 1476790 - RNA, 19 nt, Homo sapiens
  misc_RNA (1)...(19): siRNA sense strand
gaaggaagagcauguugga

SEQ ID NO: 1476791 - RNA, 19 nt, Homo sapiens
  misc_RNA (1)...(19): siRNA sense strand
caagaagacacuacuguug

SEQ ID NO: 1476792 - RNA, 19 nt, Homo sapiens
  misc_RNA (1)...(19): siRNA sense strand
gcauauagcaaccuuggaa

SEQ ID NO: 1476793 - RNA, 19 nt, Homo sapiens
  misc_RNA (1)...(19): siRNA sense strand
caagaugccaguaauucua

SEQ ID NO: 1476794 - RNA, 19 nt, Homo sapiens
  misc_RNA (1)...(19): siRNA sense strand
gaagcgaaagcuaguggua

SEQ ID NO: 1476795 - RNA, 19 nt, Homo sapiens
  misc_RNA (1)...(19): siRNA sense strand
acaaagaggcugaugaaga

SEQ ID NO: 1476796 - RNA, 19 nt, Homo sapiens
  misc_RNA (1)...(19): siRNA sense strand
gaugacuaaugacaacaaa

SEQ ID NO: 1476797 - RNA, 19 nt, Homo sapiens
  misc_RNA (1)...(19): siRNA sense strand
gggcuaguuucaguaauuu

SEQ ID NO: 1476798 - RNA, 19 nt, Homo sapiens
  misc_RNA (1)...(19): siRNA sense strand
cucaagagcugaaugauag

SEQ ID NO: 1476799 - RNA, 19 nt, Homo sapiens
  misc_RNA (1)...(19): siRNA sense strand
gaagcacagucuuguuaca

SEQ ID NO: 1476800 - RNA, 19 nt, Homo sapiens
  misc_RNA (1)...(19): siRNA sense strand
ccuuggaaaugcauauaua

SEQ ID NO: 1476801 - RNA, 19 nt, Homo sapiens
  misc_RNA (1)...(19): siRNA sense strand
gagaugaaggguucuuuga

SEQ ID NO: 1476802 - RNA, 19 nt, Homo sapiens
  misc_RNA (1)...(19): siRNA sense strand
gaugaaggguucuuugacu

SEQ ID NO: 1476803 - RNA, 19 nt, Homo sapiens
  misc_RNA (1)...(19): siRNA sense strand
caagagagguuggggauaa

SEQ ID NO: 1476804 - RNA, 19 nt, Homo sapiens
  misc_RNA (1)...(19): siRNA sense strand
ccagagggcuaguuucagu

SEQ ID NO: 1476805 - RNA, 19 nt, Homo sapiens
  misc_RNA (1)...(19): siRNA sense strand
aaacgaauuccuccacuaa

SEQ ID NO: 1476806 - RNA, 19 nt, Homo sapiens
  misc_RNA (1)...(19): siRNA sense strand
ugaaauugauagcaguuug

SEQ ID NO: 1476807 - RNA, 19 nt, Homo sapiens
  misc_RNA (1)...(19): siRNA sense strand
gagaagcaagagcacuuua

SEQ ID NO: 1476808 - RNA, 19 nt, Homo sapiens
  misc_RNA (1)...(19): siRNA sense strand
uaggauggaugaucagaga

SEQ ID NO: 1476809 - RNA, 19 nt, Homo sapiens
  misc_RNA (1)...(19): siRNA sense strand
agaccgagcuguagaagca

SEQ ID NO: 1476810 - RNA, 19 nt, Homo sapiens
  misc_RNA (1)...(19): siRNA sense strand
gcugaaagaagagcauaua

SEQ ID NO: 1476811 - RNA, 19 nt, Homo sapiens
  misc_RNA (1)...(19): siRNA sense strand
uaucauuagugacugcuuu

SEQ ID NO: 1476812 - RNA, 19 nt, Homo sapiens
  misc_RNA (1)...(19): siRNA sense strand
ugaaggguucuuugacuua

SEQ ID NO: 1476813 - RNA, 19 nt, Homo sapiens
  misc_RNA (1)...(19): siRNA sense strand
uagaauuggugaaggaaga

SEQ ID NO: 1476814 - RNA, 19 nt, Homo sapiens
  misc_RNA (1)...(19): siRNA sense strand
ggagauaaagcagcugaaa

SEQ ID NO: 1476815 - RNA, 19 nt, Homo sapiens
  misc_RNA (1)...(19): siRNA sense strand
acaaagagaucaaaacaga

SEQ ID NO: 1476816 - RNA, 19 nt, Homo sapiens
  misc_RNA (1)...(19): siRNA sense strand
caaaccuucugcaaagcua

SEQ ID NO: 1476817 - RNA, 19 nt, Homo sapiens
  misc_RNA (1)...(19): siRNA sense strand
gaaaucaugaucaagcaau

SEQ ID NO: 1476818 - RNA, 19 nt, Homo sapiens
  misc_RNA (1)...(19): siRNA sense strand
ugccaaagcauuagaauau

SEQ ID NO: 1476819 - RNA, 19 nt, Homo sapiens
  misc_RNA (1)...(19): siRNA sense strand
agauguugcuuacaagaaa

SEQ ID NO: 1476820 - RNA, 19 nt, Homo sapiens
  misc_RNA (1)...(19): siRNA sense strand
ugacgaagccauaguuugu

SEQ ID NO: 1476821 - RNA, 19 nt, Homo sapiens
  misc_RNA (1)...(19): siRNA sense strand
gccuagagcuggccuugga

SEQ ID NO: 1476822 - RNA, 19 nt, Homo sapiens
  misc_RNA (1)...(19): siRNA sense strand
cugaagcacuuagcaauug

SEQ ID NO: 1476823 - RNA, 19 nt, Homo sapiens
  misc_RNA (1)...(19): siRNA sense strand
agauaaagcagcugaaaga

SEQ ID NO: 1476824 - RNA, 19 nt, Homo sapiens
  misc_RNA (1)...(19): siRNA sense strand
gcaagagcacuuuacaauc

SEQ ID NO: 1476825 - RNA, 19 nt, Homo sapiens
  misc_RNA (1)...(19): siRNA sense strand
gaagcaagagcacuuuaca

SEQ ID NO: 1476826 - RNA, 19 nt, Homo sapiens
  misc_RNA (1)...(19): siRNA sense strand
cacaaaggguccgacagua

SEQ ID NO: 1476827 - RNA, 19 nt, Homo sapiens
  misc_RNA (1)...(19): siRNA sense strand
ugucaaggauccagauuag

SEQ ID NO: 1476828 - RNA, 19 nt, Homo sapiens
  misc_RNA (1)...(19): siRNA sense strand
ggaagcuucuugccuagag

SEQ ID NO: 1476829 - RNA, 19 nt, Homo sapiens
  misc_RNA (1)...(19): siRNA sense strand
ugacuaaugacaacaaaga

SEQ ID NO: 1476830 - RNA, 19 nt, Homo sapiens
  misc_RNA (1)...(19): siRNA sense strand
aggguucuuugacuuauua

SEQ ID NO: 1476831 - RNA, 19 nt, Homo sapiens
  misc_RNA (1)...(19): siRNA sense strand
ugauagaauuggugaagga

SEQ ID NO: 1476832 - RNA, 19 nt, Homo sapiens
  misc_RNA (1)...(19): siRNA sense strand
gcuuaaagaccgagcugua

SEQ ID NO: 1476833 - RNA, 19 nt, Homo sapiens
  misc_RNA (1)...(19): siRNA sense strand
uaggagaauuuccagaaga

SEQ ID NO: 1476834 - RNA, 19 nt, Homo sapiens
  misc_RNA (1)...(19): siRNA sense strand
cagcgacaccuagauauuu

SEQ ID NO: 1476835 - RNA, 19 nt, Homo sapiens
  misc_RNA (1)...(19): siRNA sense strand
gacacugacuuugggcuaa

SEQ ID NO: 1476836 - RNA, 19 nt, Homo sapiens
  misc_RNA (1)...(19): siRNA sense strand
gaccagagggcuaguuuca

SEQ ID NO: 1476837 - RNA, 19 nt, Homo sapiens
  misc_RNA (1)...(19): siRNA sense strand
cagauacuauuggagauga

SEQ ID NO: 1476838 - RNA, 19 nt, Homo sapiens
  misc_RNA (1)...(19): siRNA sense strand
ucucagaccuucaaauggu

SEQ ID NO: 1476839 - RNA, 19 nt, Homo sapiens
  misc_RNA (1)...(19): siRNA sense strand
gaaagcuagugguaaucug

SEQ ID NO: 1476840 - RNA, 19 nt, Homo sapiens
  misc_RNA (1)...(19): siRNA sense strand
ggaaauuucaagagagguu

SEQ ID NO: 1476841 - RNA, 19 nt, Homo sapiens
  misc_RNA (1)...(19): siRNA sense strand
acacagcacuaggaaauca

SEQ ID NO: 1476842 - RNA, 19 nt, Homo sapiens
  misc_RNA (1)...(19): siRNA sense strand
gaaacugccucggaauacu

SEQ ID NO: 1476843 - RNA, 19 nt, Homo sapiens
  misc_RNA (1)...(19): siRNA sense strand
guaggagaauuuccagaag

SEQ ID NO: 1476844 - RNA, 19 nt, Homo sapiens
  misc_RNA (1)...(19): siRNA sense strand
gaauuccuccacuaaaguu

SEQ ID NO: 1476845 - RNA, 19 nt, Homo sapiens
  misc_RNA (1)...(19): siRNA sense strand
gagcugaaugauagaauug

SEQ ID NO: 1476846 - RNA, 19 nt, Homo sapiens
  misc_RNA (1)...(19): siRNA sense strand
ggagaugaaggguucuuug

SEQ ID NO: 1476847 - RNA, 19 nt, Homo sapiens
  misc_RNA (1)...(19): siRNA sense strand
acacuuagcgcuauuuaca

SEQ ID NO: 1476848 - RNA, 19 nt, Homo sapiens
  misc_RNA (1)...(19): siRNA sense strand
aguaccagaugaagacuuu

SEQ ID NO: 1476849 - RNA, 19 nt, Homo sapiens
  misc_RNA (1)...(19): siRNA sense strand
ucaaggauccagauuagau

SEQ ID NO: 1476850 - RNA, 19 nt, Homo sapiens
  misc_RNA (1)...(19): siRNA sense strand
gagauguugcuuacaagaa

SEQ ID NO: 1476851 - RNA, 19 nt, Homo sapiens
  misc_RNA (1)...(19): siRNA sense strand
gaaagaagaccaugaagaa

SEQ ID NO: 1476852 - RNA, 19 nt, Homo sapiens
  misc_RNA (1)...(19): siRNA sense strand
gaaauaaaguguaguccuu

SEQ ID NO: 1476853 - RNA, 19 nt, Homo sapiens
  misc_RNA (1)...(19): siRNA sense strand
acaaagagcuacuccauaa

SEQ ID NO: 1476854 - RNA, 19 nt, Homo sapiens
  misc_RNA (1)...(19): siRNA sense strand
caaguggucugaacugaua

SEQ ID NO: 1476855 - RNA, 19 nt, Homo sapiens
  misc_RNA (1)...(19): siRNA sense strand
gaauucgaauggacaguua

SEQ ID NO: 1476856 - RNA, 19 nt, Homo sapiens
  misc_RNA (1)...(19): siRNA sense strand
caauauggcuucuacucua

SEQ ID NO: 1476857 - RNA, 19 nt, Homo sapiens
  misc_RNA (1)...(19): siRNA sense strand
gaggaaaccagcauagaua

SEQ ID NO: 1476858 - RNA, 19 nt, Homo sapiens
  misc_RNA (1)...(19): siRNA sense strand
gaagcaagccugcauccua

SEQ ID NO: 1476859 - RNA, 19 nt, Homo sapiens
  misc_RNA (1)...(19): siRNA sense strand
cauccuagcuagcaucuuu

SEQ ID NO: 1476860 - RNA, 19 nt, Homo sapiens
  misc_RNA (1)...(19): siRNA sense strand
aagaauagcuugaaagaag

SEQ ID NO: 1476861 - RNA, 19 nt, Homo sapiens
  misc_RNA (1)...(19): siRNA sense strand
caggagauguuucuucaaa

SEQ ID NO: 1476862 - RNA, 19 nt, Homo sapiens
  misc_RNA (1)...(19): siRNA sense strand
ccaaugauguagcaaauuc

SEQ ID NO: 1476863 - RNA, 19 nt, Homo sapiens
  misc_RNA (1)...(19): siRNA sense strand
ucuaguggcuucaguauug

SEQ ID NO: 1476864 - RNA, 19 nt, Homo sapiens
  misc_RNA (1)...(19): siRNA sense strand
ccacugcuuucuggaauua

SEQ ID NO: 1476865 - RNA, 19 nt, Homo sapiens
  misc_RNA (1)...(19): siRNA sense strand
gcagugcaguugccuaaug

SEQ ID NO: 1476866 - RNA, 19 nt, Homo sapiens
  misc_RNA (1)...(19): siRNA sense strand
gaacgagaaauaaagugua

SEQ ID NO: 1476867 - RNA, 19 nt, Homo sapiens
  misc_RNA (1)...(19): siRNA sense strand
gaaagaggaaaccagcaua

SEQ ID NO: 1476868 - RNA, 19 nt, Homo sapiens
  misc_RNA (1)...(19): siRNA sense strand
gcaauaauagcuauacuuc

SEQ ID NO: 1476869 - RNA, 19 nt, Homo sapiens
  misc_RNA (1)...(19): siRNA sense strand
uaauggcucucuagaagaa

SEQ ID NO: 1476870 - RNA, 19 nt, Homo sapiens
  misc_RNA (1)...(19): siRNA sense strand
gcaugccucuggauucauu

SEQ ID NO: 1476871 - RNA, 19 nt, Homo sapiens
  misc_RNA (1)...(19): siRNA sense strand
ggauaagccugaagucucu

SEQ ID NO: 1476872 - RNA, 19 nt, Homo sapiens
  misc_RNA (1)...(19): siRNA sense strand
gugcauucauccuccauaa

SEQ ID NO: 1476873 - RNA, 19 nt, Homo sapiens
  misc_RNA (1)...(19): siRNA sense strand
uaucagugcugccaucaug

SEQ ID NO: 1476874 - RNA, 19 nt, Homo sapiens
  misc_RNA (1)...(19): siRNA sense strand
ugauugacguggagaugua

SEQ ID NO: 1476875 - RNA, 19 nt, Homo sapiens
  misc_RNA (1)...(19): siRNA sense strand
gaaagccccuuaauggaaa

SEQ ID NO: 1476876 - RNA, 19 nt, Homo sapiens
  misc_RNA (1)...(19): siRNA sense strand
gggcuucauuauugcauuu

SEQ ID NO: 1476877 - RNA, 19 nt, Homo sapiens
  misc_RNA (1)...(19): siRNA sense strand
gaagaguuauccagaccau

SEQ ID NO: 1476878 - RNA, 19 nt, Homo sapiens
  misc_RNA (1)...(19): siRNA sense strand
ggaacccauuguauuguug

SEQ ID NO: 1476879 - RNA, 19 nt, Homo sapiens
  misc_RNA (1)...(19): siRNA sense strand
gcgaagaaauggagaagcu

SEQ ID NO: 1476880 - RNA, 19 nt, Homo sapiens
  misc_RNA (1)...(19): siRNA sense strand
gaauaaaccucuuuuccau

SEQ ID NO: 1476881 - RNA, 19 nt, Homo sapiens
  misc_RNA (1)...(19): siRNA sense strand
cuccauaaauuacaucuug

SEQ ID NO: 1476882 - RNA, 19 nt, Homo sapiens
  misc_RNA (1)...(19): siRNA sense strand
gauaugucauccucagaau

SEQ ID NO: 1476883 - RNA, 19 nt, Homo sapiens
  misc_RNA (1)...(19): siRNA sense strand
gaaguaauggcucucuaga

SEQ ID NO: 1476884 - RNA, 19 nt, Homo sapiens
  misc_RNA (1)...(19): siRNA sense strand
gcagauccaguuccuaaug

SEQ ID NO: 1476885 - RNA, 19 nt, Homo sapiens
  misc_RNA (1)...(19): siRNA sense strand
cacaggagauguuucuuca

SEQ ID NO: 1476886 - RNA, 19 nt, Homo sapiens
  misc_RNA (1)...(19): siRNA sense strand
aagcugacauggccuaaug

SEQ ID NO: 1476887 - RNA, 19 nt, Homo sapiens
  misc_RNA (1)...(19): siRNA sense strand
agaagaccaugaagaaaca

SEQ ID NO: 1476888 - RNA, 19 nt, Homo sapiens
  misc_RNA (1)...(19): siRNA sense strand
gcaaugacguaagcaaugc

SEQ ID NO: 1476889 - RNA, 19 nt, Homo sapiens
  misc_RNA (1)...(19): siRNA sense strand
cauucaaacuuggagauuu

SEQ ID NO: 1476890 - RNA, 19 nt, Homo sapiens
  misc_RNA (1)...(19): siRNA sense strand
ugaaagaagaccaugaaga

SEQ ID NO: 1476891 - RNA, 19 nt, Homo sapiens
  misc_RNA (1)...(19): siRNA sense strand
aaagugggcucuguugugu

SEQ ID NO: 1476892 - RNA, 19 nt, Homo sapiens
  misc_RNA (1)...(19): siRNA sense strand
ucugguugcuuuauauuug

SEQ ID NO: 1476893 - RNA, 19 nt, Homo sapiens
  misc_RNA (1)...(19): siRNA sense strand
ggccucugguugcuuuaua

SEQ ID NO: 1476894 - RNA, 19 nt, Homo sapiens
  misc_RNA (1)...(19): siRNA sense strand
aguaauggcucucuagaag

SEQ ID NO: 1476895 - RNA, 19 nt, Homo sapiens
  misc_RNA (1)...(19): siRNA sense strand
agagcuacuccauaaauua

SEQ ID NO: 1476896 - RNA, 19 nt, Homo sapiens
  misc_RNA (1)...(19): siRNA sense strand
guacaaagagcuacuccau

SEQ ID NO: 1476897 - RNA, 19 nt, Homo sapiens
  misc_RNA (1)...(19): siRNA sense strand
acaagcauccuguuucuga

SEQ ID NO: 1476898 - RNA, 19 nt, Homo sapiens
  misc_RNA (1)...(19): siRNA sense strand
uaaaguguaguccuucuga

SEQ ID NO: 1476899 - RNA, 19 nt, Homo sapiens
  misc_RNA (1)...(19): siRNA sense strand
gcaacgcugauuaccagua

SEQ ID NO: 1476900 - RNA, 19 nt, Homo sapiens
  misc_RNA (1)...(19): siRNA sense strand
agaauagcuugaaagaaga

SEQ ID NO: 1476901 - RNA, 19 nt, Homo sapiens
  misc_RNA (1)...(19): siRNA sense strand
aaaguugucuguuggugau

SEQ ID NO: 1476902 - RNA, 19 nt, Homo sapiens
  misc_RNA (1)...(19): siRNA sense strand
aagagcuacuccauaaauu

SEQ ID NO: 1476903 - RNA, 19 nt, Homo sapiens
  misc_RNA (1)...(19): siRNA sense strand
aaagagcuacuccauaaau

SEQ ID NO: 1476904 - RNA, 19 nt, Homo sapiens
  misc_RNA (1)...(19): siRNA sense strand
cuagcuagcaucuuugaaa

SEQ ID NO: 1476905 - RNA, 19 nt, Homo sapiens
  misc_RNA (1)...(19): siRNA sense strand
ggaaguaauggcucucuag

SEQ ID NO: 1476906 - RNA, 19 nt, Homo sapiens
  misc_RNA (1)...(19): siRNA sense strand
ccaagaagcgaauucgaau

SEQ ID NO: 1476907 - RNA, 19 nt, Homo sapiens
  misc_RNA (1)...(19): siRNA sense strand
gaaaccagcauagauagca

SEQ ID NO: 1476908 - RNA, 19 nt, Homo sapiens
  misc_RNA (1)...(19): siRNA sense strand
caacgcugauuaccaguac

SEQ ID NO: 1476909 - RNA, 19 nt, Homo sapiens
  misc_RNA (1)...(19): siRNA sense strand
gcauuugucuuggcauucu

SEQ ID NO: 1476910 - RNA, 19 nt, Homo sapiens
  misc_RNA (1)...(19): siRNA sense strand
caucauggcaaucuucaga

SEQ ID NO: 1476911 - RNA, 19 nt, Homo sapiens
  misc_RNA (1)...(19): siRNA sense strand
uggcgucucuuucguaaca

SEQ ID NO: 1476912 - RNA, 19 nt, Homo sapiens
  misc_RNA (1)...(19): siRNA sense strand
uaaagugggcucuguugug

SEQ ID NO: 1476913 - RNA, 19 nt, Homo sapiens
  misc_RNA (1)...(19): siRNA sense strand
auccugggcuucauuauug

SEQ ID NO: 1476914 - RNA, 19 nt, Homo sapiens
  misc_RNA (1)...(19): siRNA sense strand
ccuauaccauggcaauaug

SEQ ID NO: 1476915 - RNA, 19 nt, Homo sapiens
  misc_RNA (1)...(19): siRNA sense strand
aaauugugaugucuugguu

SEQ ID NO: 1476916 - RNA, 19 nt, Homo sapiens
  misc_RNA (1)...(19): siRNA sense strand
gcugugggcucagguguag

SEQ ID NO: 1476917 - RNA, 19 nt, Homo sapiens
  misc_RNA (1)...(19): siRNA sense strand
caaagagcuacuccauaaa

SEQ ID NO: 1476918 - RNA, 19 nt, Homo sapiens
  misc_RNA (1)...(19): siRNA sense strand
ccuaaugguuugcgagcuu

SEQ ID NO: 1476919 - RNA, 19 nt, Homo sapiens
  misc_RNA (1)...(19): siRNA sense strand
gcaacucguggcuucguuu

SEQ ID NO: 1476920 - RNA, 19 nt, Homo sapiens
  misc_RNA (1)...(19): siRNA sense strand
gcuguugacuggcgucucu

SEQ ID NO: 1476921 - RNA, 19 nt, Homo sapiens
  misc_RNA (1)...(19): siRNA sense strand
cgugggagccaaugaugua

SEQ ID NO: 1476922 - RNA, 19 nt, Homo sapiens
  misc_RNA (1)...(19): siRNA sense strand
gagcuacuccauaaauuac

SEQ ID NO: 1476923 - RNA, 19 nt, Homo sapiens
  misc_RNA (1)...(19): siRNA sense strand
gcauagauagcaccgugaa

SEQ ID NO: 1476924 - RNA, 19 nt, Homo sapiens
  misc_RNA (1)...(19): siRNA sense strand
gucccaggaugaagagaaa

SEQ ID NO: 1476925 - RNA, 19 nt, Homo sapiens
  misc_RNA (1)...(19): siRNA sense strand
ccauaaggcagauccaguu

SEQ ID NO: 1476926 - RNA, 19 nt, Homo sapiens
  misc_RNA (1)...(19): siRNA sense strand
gagccaaugauguagcaaa

SEQ ID NO: 1476927 - RNA, 19 nt, Homo sapiens
  misc_RNA (1)...(19): siRNA sense strand
gccgucagcaaccaaauaa

SEQ ID NO: 1476928 - RNA, 19 nt, Homo sapiens
  misc_RNA (1)...(19): siRNA sense strand
gcuagcaucuuugaaacag

SEQ ID NO: 1476929 - RNA, 19 nt, Homo sapiens
  misc_RNA (1)...(19): siRNA sense strand
aauauuggccuucccauca

SEQ ID NO: 1476930 - RNA, 19 nt, Homo sapiens
  misc_RNA (1)...(19): siRNA sense strand
aauauggcuucuacucuau

SEQ ID NO: 1476931 - RNA, 19 nt, Homo sapiens
  misc_RNA (1)...(19): siRNA sense strand
acaccaauauggcuucuac

SEQ ID NO: 1476932 - RNA, 19 nt, Homo sapiens
  misc_RNA (1)...(19): siRNA sense strand
guaauggcucucuagaaga

SEQ ID NO: 1476933 - RNA, 19 nt, Homo sapiens
  misc_RNA (1)...(19): siRNA sense strand
cccuuaaggcgcaauaaua

SEQ ID NO: 1476934 - RNA, 19 nt, Homo sapiens
  misc_RNA (1)...(19): siRNA sense strand
gcaguuuucugugcccuua

SEQ ID NO: 1476935 - RNA, 19 nt, Homo sapiens
  misc_RNA (1)...(19): siRNA sense strand
gcauucauccuccauaagg

SEQ ID NO: 1476936 - RNA, 19 nt, Homo sapiens
  misc_RNA (1)...(19): siRNA sense strand
ggcaaugacguaagcaaug

SEQ ID NO: 1476937 - RNA, 19 nt, Homo sapiens
  misc_RNA (1)...(19): siRNA sense strand
uacaaagagcuacuccaua

SEQ ID NO: 1476938 - RNA, 19 nt, Homo sapiens
  misc_RNA (1)...(19): siRNA sense strand
aaagaagaccaugaagaaa

SEQ ID NO: 1476939 - RNA, 19 nt, Homo sapiens
  misc_RNA (1)...(19): siRNA sense strand
cauccugggcuucauuauu

SEQ ID NO: 1476940 - RNA, 19 nt, Homo sapiens
  misc_RNA (1)...(19): siRNA sense strand
ggagauguuucuucaaaag

SEQ ID NO: 1476941 - RNA, 19 nt, Homo sapiens
  misc_RNA (1)...(19): siRNA sense strand
uggaacccauuguauuguu

SEQ ID NO: 1476942 - RNA, 19 nt, Homo sapiens
  misc_RNA (1)...(19): siRNA sense strand
cucagucagugcuauguuu

SEQ ID NO: 1476943 - RNA, 19 nt, Homo sapiens
  misc_RNA (1)...(19): siRNA sense strand
uuuauggccugguuuguca

SEQ ID NO: 1476944 - RNA, 19 nt, Homo sapiens
  misc_RNA (1)...(19): siRNA sense strand
agaacagucucauucaaac

SEQ ID NO: 1476945 - RNA, 19 nt, Homo sapiens
  misc_RNA (1)...(19): siRNA sense strand
cagauccaguuccuaaugg

SEQ ID NO: 1476946 - RNA, 19 nt, Homo sapiens
  misc_RNA (1)...(19): siRNA sense strand
aggcagauccaguuccuaa

SEQ ID NO: 1476947 - RNA, 19 nt, Homo sapiens
  misc_RNA (1)...(19): siRNA sense strand
gcauccuguuucugaggua

SEQ ID NO: 1476948 - RNA, 19 nt, Homo sapiens
  misc_RNA (1)...(19): siRNA sense strand
uaugucauccucagaaugu

SEQ ID NO: 1476949 - RNA, 19 nt, Homo sapiens
  misc_RNA (1)...(19): siRNA sense strand
gguccaagaaggcuguuga

SEQ ID NO: 1476950 - RNA, 19 nt, Homo sapiens
  misc_RNA (1)...(19): siRNA sense strand
gggagccaaugauguagca

SEQ ID NO: 1476951 - RNA, 19 nt, Homo sapiens
  misc_RNA (1)...(19): siRNA sense strand
gcacaggcauugaaacuga

SEQ ID NO: 1476952 - RNA, 19 nt, Homo sapiens
  misc_RNA (1)...(19): siRNA sense strand
caagucauauugcuucuaa

SEQ ID NO: 1476953 - RNA, 19 nt, Homo sapiens
  misc_RNA (1)...(19): siRNA sense strand
gggaagaaaugagagauaa

SEQ ID NO: 1476954 - RNA, 19 nt, Homo sapiens
  misc_RNA (1)...(19): siRNA sense strand
ggaaguuggagaagaauua

SEQ ID NO: 1476955 - RNA, 19 nt, Homo sapiens
  misc_RNA (1)...(19): siRNA sense strand
guaagaaggaaaccaaaua

SEQ ID NO: 1476956 - RNA, 19 nt, Homo sapiens
  misc_RNA (1)...(19): siRNA sense strand
gcaagaaagcguaagauug

SEQ ID NO: 1476957 - RNA, 19 nt, Homo sapiens
  misc_RNA (1)...(19): siRNA sense strand
ucucagagcuuuacgaugu

SEQ ID NO: 1476958 - RNA, 19 nt, Homo sapiens
  misc_RNA (1)...(19): siRNA sense strand
gaacuaaugaugacuaauc

SEQ ID NO: 1476959 - RNA, 19 nt, Homo sapiens
  misc_RNA (1)...(19): siRNA sense strand
ggaaagauaugaugaugcu

SEQ ID NO: 1476960 - RNA, 19 nt, Homo sapiens
  misc_RNA (1)...(19): siRNA sense strand
uaacaggcaugagauuuga

SEQ ID NO: 1476961 - RNA, 19 nt, Homo sapiens
  misc_RNA (1)...(19): siRNA sense strand
gcaguaugcugaaguuaag

SEQ ID NO: 1476962 - RNA, 19 nt, Homo sapiens
  misc_RNA (1)...(19): siRNA sense strand
gcgaaggucucagagcuuu

SEQ ID NO: 1476963 - RNA, 19 nt, Homo sapiens
  misc_RNA (1)...(19): siRNA sense strand
gaaguaagaaggaaaccaa

SEQ ID NO: 1476964 - RNA, 19 nt, Homo sapiens
  misc_RNA (1)...(19): siRNA sense strand
gaacaacagaaauaugaga

SEQ ID NO: 1476965 - RNA, 19 nt, Homo sapiens
  misc_RNA (1)...(19): siRNA sense strand
gaaggaaaccaaauauucu

SEQ ID NO: 1476966 - RNA, 19 nt, Homo sapiens
  misc_RNA (1)...(19): siRNA sense strand
gcagaacuuuacaucaaug

SEQ ID NO: 1476967 - RNA, 19 nt, Homo sapiens
  misc_RNA (1)...(19): siRNA sense strand
gagcuuuguuuggacuuua

SEQ ID NO: 1476968 - RNA, 19 nt, Homo sapiens
  misc_RNA (1)...(19): siRNA sense strand
gaaauagugagcaaauugu

SEQ ID NO: 1476969 - RNA, 19 nt, Homo sapiens
  misc_RNA (1)...(19): siRNA sense strand
gcagaucacccagucuuaa

SEQ ID NO: 1476970 - RNA, 19 nt, Homo sapiens
  misc_RNA (1)...(19): siRNA sense strand
gcaugaacuugcagaacuu

SEQ ID NO: 1476971 - RNA, 19 nt, Homo sapiens
  misc_RNA (1)...(19): siRNA sense strand
uaacacugcugcaagaaag

SEQ ID NO: 1476972 - RNA, 19 nt, Homo sapiens
  misc_RNA (1)...(19): siRNA sense strand
caagaagccuggcaugaac

SEQ ID NO: 1476973 - RNA, 19 nt, Homo sapiens
  misc_RNA (1)...(19): siRNA sense strand
uaugagagcuuuguuugga

SEQ ID NO: 1476974 - RNA, 19 nt, Homo sapiens
  misc_RNA (1)...(19): siRNA sense strand
acagaaauaugagagcuuu

SEQ ID NO: 1476975 - RNA, 19 nt, Homo sapiens
  misc_RNA (1)...(19): siRNA sense strand
gcugggagaugauauuugg

SEQ ID NO: 1476976 - RNA, 19 nt, Homo sapiens
  misc_RNA (1)...(19): siRNA sense strand
gggaugacuuggcauuguu

SEQ ID NO: 1476977 - RNA, 19 nt, Homo sapiens
  misc_RNA (1)...(19): siRNA sense strand
gaaugaguaucuggaacaa

SEQ ID NO: 1476978 - RNA, 19 nt, Homo sapiens
  misc_RNA (1)...(19): siRNA sense strand
caagaaagcguaagauugc

SEQ ID NO: 1476979 - RNA, 19 nt, Homo sapiens
  misc_RNA (1)...(19): siRNA sense strand
caagaaauagugagcaaau

SEQ ID NO: 1476980 - RNA, 19 nt, Homo sapiens
  misc_RNA (1)...(19): siRNA sense strand
gaaguuggagaagaauuaa

SEQ ID NO: 1476981 - RNA, 19 nt, Homo sapiens
  misc_RNA (1)...(19): siRNA sense strand
uugcagaacuuuacaucaa

SEQ ID NO: 1476982 - RNA, 19 nt, Homo sapiens
  misc_RNA (1)...(19): siRNA sense strand
uugaagccauggaaagaua

SEQ ID NO: 1476983 - RNA, 19 nt, Homo sapiens
  misc_RNA (1)...(19): siRNA sense strand
ucacagagucaagcgauua

SEQ ID NO: 1476984 - RNA, 19 nt, Homo sapiens
  misc_RNA (1)...(19): siRNA sense strand
cuucuaagcugggagauga

SEQ ID NO: 1476985 - RNA, 19 nt, Homo sapiens
  misc_RNA (1)...(19): siRNA sense strand
ggaagaaaugagagauaaa

SEQ ID NO: 1476986 - RNA, 19 nt, Homo sapiens
  misc_RNA (1)...(19): siRNA sense strand
ccaagaagccuggcaugaa

SEQ ID NO: 1476987 - RNA, 19 nt, Homo sapiens
  misc_RNA (1)...(19): siRNA sense strand
augaguaucuggaacaauu

SEQ ID NO: 1476988 - RNA, 19 nt, Homo sapiens
  misc_RNA (1)...(19): siRNA sense strand
agaaggaaaccaaauauuc

SEQ ID NO: 1476989 - RNA, 19 nt, Homo sapiens
  misc_RNA (1)...(19): siRNA sense strand
ggugaugauugcagcacua

SEQ ID NO: 1476990 - RNA, 19 nt, Homo sapiens
  misc_RNA (1)...(19): siRNA sense strand
uugggcagcuagucaaaua

SEQ ID NO: 1476991 - RNA, 19 nt, Homo sapiens
  misc_RNA (1)...(19): siRNA sense strand
gcgauuaacaggcaugaga

SEQ ID NO: 1476992 - RNA, 19 nt, Homo sapiens
  misc_RNA (1)...(19): siRNA sense strand
gaaauaugagagcuuuguu

SEQ ID NO: 1476993 - RNA, 19 nt, Homo sapiens
  misc_RNA (1)...(19): siRNA sense strand
caaugaacaugacuaugca

SEQ ID NO: 1476994 - RNA, 19 nt, Homo sapiens
  misc_RNA (1)...(19): siRNA sense strand
agaaauagugagcaaauug

SEQ ID NO: 1476995 - RNA, 19 nt, Homo sapiens
  misc_RNA (1)...(19): siRNA sense strand
gaacaugacuaugcaaaag

SEQ ID NO: 1476996 - RNA, 19 nt, Homo sapiens
  misc_RNA (1)...(19): siRNA sense strand
gaaaauggagagaagaaaa

SEQ ID NO: 1476997 - RNA, 19 nt, Homo sapiens
  misc_RNA (1)...(19): siRNA sense strand
gaaacugaacaacagaaau

SEQ ID NO: 1476998 - RNA, 19 nt, Homo sapiens
  misc_RNA (1)...(19): siRNA sense strand
ggcaugaacuugcagaacu

SEQ ID NO: 1476999 - RNA, 19 nt, Homo sapiens
  misc_RNA (1)...(19): siRNA sense strand
acaagaagauccaacuaac

SEQ ID NO: 1477000 - RNA, 19 nt, Homo sapiens
  misc_RNA (1)...(19): siRNA sense strand
uguggaaguuggagaagaa

SEQ ID NO: 1477001 - RNA, 19 nt, Homo sapiens
  misc_RNA (1)...(19): siRNA sense strand
gggcagcuagucaaauaaa

SEQ ID NO: 1477002 - RNA, 19 nt, Homo sapiens
  misc_RNA (1)...(19): siRNA sense strand
gaggaacuaaugaugacua

SEQ ID NO: 1477003 - RNA, 19 nt, Homo sapiens
  misc_RNA (1)...(19): siRNA sense strand
uucgggagcugaaugagua

SEQ ID NO: 1477004 - RNA, 19 nt, Homo sapiens
  misc_RNA (1)...(19): siRNA sense strand
gauaugaugaugcuauaca

SEQ ID NO: 1477005 - RNA, 19 nt, Homo sapiens
  misc_RNA (1)...(19): siRNA sense strand
uacaagaagauccaacuaa

SEQ ID NO: 1477006 - RNA, 19 nt, Homo sapiens
  misc_RNA (1)...(19): siRNA sense strand
cgaugucacuugggaagaa

SEQ ID NO: 1477007 - RNA, 19 nt, Homo sapiens
  misc_RNA (1)...(19): siRNA sense strand
gcauugaaacugaacaaca

SEQ ID NO: 1477008 - RNA, 19 nt, Homo sapiens
  misc_RNA (1)...(19): siRNA sense strand
gaacuuuacaucaaugaac

SEQ ID NO: 1477009 - RNA, 19 nt, Homo sapiens
  misc_RNA (1)...(19): siRNA sense strand
gauugcagcacuagacuau

SEQ ID NO: 1477010 - RNA, 19 nt, Homo sapiens
  misc_RNA (1)...(19): siRNA sense strand
cugaacaacagaaauauga

SEQ ID NO: 1477011 - RNA, 19 nt, Homo sapiens
  misc_RNA (1)...(19): siRNA sense strand
caagaagauccaacuaaca

SEQ ID NO: 1477012 - RNA, 19 nt, Homo sapiens
  misc_RNA (1)...(19): siRNA sense strand
cauauugcuucuaauccaa

SEQ ID NO: 1477013 - RNA, 19 nt, Homo sapiens
  misc_RNA (1)...(19): siRNA sense strand
gaugucacuugggaagaaa

SEQ ID NO: 1477014 - RNA, 19 nt, Homo sapiens
  misc_RNA (1)...(19): siRNA sense strand
ugaugaugcuauacagcua

SEQ ID NO: 1477015 - RNA, 19 nt, Homo sapiens
  misc_RNA (1)...(19): siRNA sense strand
gaacuugcagaacuuuaca

SEQ ID NO: 1477016 - RNA, 19 nt, Homo sapiens
  misc_RNA (1)...(19): siRNA sense strand
gagcaaauuguggaaguug

SEQ ID NO: 1477017 - RNA, 19 nt, Homo sapiens
  misc_RNA (1)...(19): siRNA sense strand
ucaaugaacaugacuaugc

SEQ ID NO: 1477018 - RNA, 19 nt, Homo sapiens
  misc_RNA (1)...(19): siRNA sense strand
gcagcuagucaaauaaaca

SEQ ID NO: 1477019 - RNA, 19 nt, Homo sapiens
  misc_RNA (1)...(19): siRNA sense strand
cauugaaacugaacaacag

SEQ ID NO: 1477020 - RNA, 19 nt, Homo sapiens
  misc_RNA (1)...(19): siRNA sense strand
gcaaauuguggaaguugga

SEQ ID NO: 1477021 - RNA, 19 nt, Homo sapiens
  misc_RNA (1)...(19): siRNA sense strand
uaaacagagcuuaucaguu

SEQ ID NO: 1477022 - RNA, 19 nt, Homo sapiens
  misc_RNA (1)...(19): siRNA sense strand
gagaagaaaacucaagaaa

SEQ ID NO: 1477023 - RNA, 19 nt, Homo sapiens
  misc_RNA (1)...(19): siRNA sense strand
gauuaacaggcaugagauu

SEQ ID NO: 1477024 - RNA, 19 nt, Homo sapiens
  misc_RNA (1)...(19): siRNA sense strand
ggaaaccaaauauucucuu

SEQ ID NO: 1477025 - RNA, 19 nt, Homo sapiens
  misc_RNA (1)...(19): siRNA sense strand
caacaugaaauaugcuagu

SEQ ID NO: 1477026 - RNA, 19 nt, Homo sapiens
  misc_RNA (1)...(19): siRNA sense strand
guaagauugccauucgaaa

SEQ ID NO: 1477027 - RNA, 19 nt, Homo sapiens
  misc_RNA (1)...(19): siRNA sense strand
caucaaugaacaugacuau

SEQ ID NO: 1477028 - RNA, 19 nt, Homo sapiens
  misc_RNA (1)...(19): siRNA sense strand
uuggaaacauugcagauca

SEQ ID NO: 1477029 - RNA, 19 nt, Homo sapiens
  misc_RNA (1)...(19): siRNA sense strand
ucgaagacauguuggaaac

SEQ ID NO: 1477030 - RNA, 19 nt, Homo sapiens
  misc_RNA (1)...(19): siRNA sense strand
gugagcaaauuguggaagu

SEQ ID NO: 1477031 - RNA, 19 nt, Homo sapiens
  misc_RNA (1)...(19): siRNA sense strand
acacaaccacuuauacugu

SEQ ID NO: 1477032 - RNA, 19 nt, Homo sapiens
  misc_RNA (1)...(19): siRNA sense strand
gagauuugaagccauggaa

SEQ ID NO: 1477033 - RNA, 19 nt, Homo sapiens
  misc_RNA (1)...(19): siRNA sense strand
gacaacaugaaauaugcua

SEQ ID NO: 1477034 - RNA, 19 nt, Homo sapiens
  misc_RNA (1)...(19): siRNA sense strand
ucauauugcuucuaaucca

SEQ ID NO: 1477035 - RNA, 19 nt, Homo sapiens
  misc_RNA (1)...(19): siRNA sense strand
aauaugagagcuuuguuug

SEQ ID NO: 1477036 - RNA, 19 nt, Homo sapiens
  misc_RNA (1)...(19): siRNA sense strand
aggaacuaaugaugacuaa

SEQ ID NO: 1477037 - RNA, 19 nt, Homo sapiens
  misc_RNA (1)...(19): siRNA sense strand
ggaugacuuggcauuguuu

SEQ ID NO: 1477038 - RNA, 19 nt, Homo sapiens
  misc_RNA (1)...(19): siRNA sense strand
uuaacaggcaugagauuug

SEQ ID NO: 1477039 - RNA, 19 nt, Homo sapiens
  misc_RNA (1)...(19): siRNA sense strand
ugaaacugaacaacagaaa

SEQ ID NO: 1477040 - RNA, 19 nt, Homo sapiens
  misc_RNA (1)...(19): siRNA sense strand
uagaggaacuaaugaugac

SEQ ID NO: 1477041 - RNA, 19 nt, Homo sapiens
  misc_RNA (1)...(19): siRNA sense strand
uaagcugggagaugauauu

SEQ ID NO: 1477042 - RNA, 19 nt, Homo sapiens
  misc_RNA (1)...(19): siRNA sense strand
uuacaucaaugaacaugac

SEQ ID NO: 1477043 - RNA, 19 nt, Homo sapiens
  misc_RNA (1)...(19): siRNA sense strand
gauaggauuuuacaagaag

SEQ ID NO: 1477044 - RNA, 19 nt, Homo sapiens
  misc_RNA (1)...(19): siRNA sense strand
ugagcaaauuguggaaguu

SEQ ID NO: 1477045 - RNA, 19 nt, Homo sapiens
  misc_RNA (1)...(19): siRNA sense strand
uauaugaacaggugaugau

SEQ ID NO: 1477046 - RNA, 19 nt, Homo sapiens
  misc_RNA (1)...(19): siRNA sense strand
uaauccacacaaccacuua

SEQ ID NO: 1477047 - RNA, 19 nt, Homo sapiens
  misc_RNA (1)...(19): siRNA sense strand
ccacacaaccacuuauacu

SEQ ID NO: 1477048 - RNA, 19 nt, Homo sapiens
  misc_RNA (1)...(19): siRNA sense strand
ggucgaaguaagaaggaaa

SEQ ID NO: 1477049 - RNA, 19 nt, Homo sapiens
  misc_RNA (1)...(19): siRNA sense strand
aaaccucgaacuuucaaga

SEQ ID NO: 1477050 - RNA, 19 nt, Homo sapiens
  misc_RNA (1)...(19): siRNA sense strand
augcugaaguuaaguauac

SEQ ID NO: 1477051 - RNA, 19 nt, Homo sapiens
  misc_RNA (1)...(19): siRNA sense strand
gcaauggacuuaauuauuc

SEQ ID NO: 1477052 - RNA, 19 nt, Homo sapiens
  misc_RNA (1)...(19): siRNA sense strand
gaaaggaaaugcaacaaga

SEQ ID NO: 1477053 - RNA, 19 nt, Homo sapiens
  misc_RNA (1)...(19): siRNA sense strand
gaagaaagcuuuacugacu

SEQ ID NO: 1477054 - RNA, 19 nt, Homo sapiens
  misc_RNA (1)...(19): siRNA sense strand
gaaagcagguuaacaggaa

SEQ ID NO: 1477055 - RNA, 19 nt, Homo sapiens
  misc_RNA (1)...(19): siRNA sense strand
gcaauuaucacuacucaua

SEQ ID NO: 1477056 - RNA, 19 nt, Homo sapiens
  misc_RNA (1)...(19): siRNA sense strand
gaaaugggaaugccaaaua

SEQ ID NO: 1477057 - RNA, 19 nt, Homo sapiens
  misc_RNA (1)...(19): siRNA sense strand
gcagaaagcacuugaugua

SEQ ID NO: 1477058 - RNA, 19 nt, Homo sapiens
  misc_RNA (1)...(19): siRNA sense strand
uaagggaucuggcuucuuu

SEQ ID NO: 1477059 - RNA, 19 nt, Homo sapiens
  misc_RNA (1)...(19): siRNA sense strand
cagcaaagcuugauaagau

SEQ ID NO: 1477060 - RNA, 19 nt, Homo sapiens
  misc_RNA (1)...(19): siRNA sense strand
caugaaagcugcugaaaug

SEQ ID NO: 1477061 - RNA, 19 nt, Homo sapiens
  misc_RNA (1)...(19): siRNA sense strand
acacagaagucucuugaua

SEQ ID NO: 1477062 - RNA, 19 nt, Homo sapiens
  misc_RNA (1)...(19): siRNA sense strand
gaaagcacuugauguagaa

SEQ ID NO: 1477063 - RNA, 19 nt, Homo sapiens
  misc_RNA (1)...(19): siRNA sense strand
aaacagaacugaauaaguc

SEQ ID NO: 1477064 - RNA, 19 nt, Homo sapiens
  misc_RNA (1)...(19): siRNA sense strand
gaauuaagcccuaaaggaa

SEQ ID NO: 1477065 - RNA, 19 nt, Homo sapiens
  misc_RNA (1)...(19): siRNA sense strand
gauggucccuucucaguaa

SEQ ID NO: 1477066 - RNA, 19 nt, Homo sapiens
  misc_RNA (1)...(19): siRNA sense strand
uggaauaacugaacaagaa

SEQ ID NO: 1477067 - RNA, 19 nt, Homo sapiens
  misc_RNA (1)...(19): siRNA sense strand
gaaaguggacauaccuaua

SEQ ID NO: 1477068 - RNA, 19 nt, Homo sapiens
  misc_RNA (1)...(19): siRNA sense strand
ggacauaccuauacgaacu

SEQ ID NO: 1477069 - RNA, 19 nt, Homo sapiens
  misc_RNA (1)...(19): siRNA sense strand
ugaaguggcugacugugua

SEQ ID NO: 1477070 - RNA, 19 nt, Homo sapiens
  misc_RNA (1)...(19): siRNA sense strand
ggaugcagcugaaagaaug

SEQ ID NO: 1477071 - RNA, 19 nt, Homo sapiens
  misc_RNA (1)...(19): siRNA sense strand
caaagaagaugugguuuua

SEQ ID NO: 1477072 - RNA, 19 nt, Homo sapiens
  misc_RNA (1)...(19): siRNA sense strand
gaacaagaaaggcaacauu

SEQ ID NO: 1477073 - RNA, 19 nt, Homo sapiens
  misc_RNA (1)...(19): siRNA sense strand
ggaaagggaacaagaaaga

SEQ ID NO: 1477074 - RNA, 19 nt, Homo sapiens
  misc_RNA (1)...(19): siRNA sense strand
uaacaaugcaguggaauua

SEQ ID NO: 1477075 - RNA, 19 nt, Homo sapiens
  misc_RNA (1)...(19): siRNA sense strand
gauguuagcuuuugaagaa

SEQ ID NO: 1477076 - RNA, 19 nt, Homo sapiens
  misc_RNA (1)...(19): siRNA sense strand
gcacacauaaugaacagua

SEQ ID NO: 1477077 - RNA, 19 nt, Homo sapiens
  misc_RNA (1)...(19): siRNA sense strand
caaauucugccaugcaaua

SEQ ID NO: 1477078 - RNA, 19 nt, Homo sapiens
  misc_RNA (1)...(19): siRNA sense strand
caaagaaagcgaggaguua

SEQ ID NO: 1477079 - RNA, 19 nt, Homo sapiens
  misc_RNA (1)...(19): siRNA sense strand
gaauagacuuagcuagaga

SEQ ID NO: 1477080 - RNA, 19 nt, Homo sapiens
  misc_RNA (1)...(19): siRNA sense strand
ggaagagacuagaagaaca

SEQ ID NO: 1477081 - RNA, 19 nt, Homo sapiens
  misc_RNA (1)...(19): siRNA sense strand
agacuuagcuagagauuca

SEQ ID NO: 1477082 - RNA, 19 nt, Homo sapiens
  misc_RNA (1)...(19): siRNA sense strand
gaacaagaaagacugcaaa

SEQ ID NO: 1477083 - RNA, 19 nt, Homo sapiens
  misc_RNA (1)...(19): siRNA sense strand
gagagaggcgcacacauaa

SEQ ID NO: 1477084 - RNA, 19 nt, Homo sapiens
  misc_RNA (1)...(19): siRNA sense strand
caauauagcuuuguuucug

SEQ ID NO: 1477085 - RNA, 19 nt, Homo sapiens
  misc_RNA (1)...(19): siRNA sense strand
caagcggacucacuccaua

SEQ ID NO: 1477086 - RNA, 19 nt, Homo sapiens
  misc_RNA (1)...(19): siRNA sense strand
ggaucuggcuucuuuaaca

SEQ ID NO: 1477087 - RNA, 19 nt, Homo sapiens
  misc_RNA (1)...(19): siRNA sense strand
caagaguccuucagccaaa

SEQ ID NO: 1477088 - RNA, 19 nt, Homo sapiens
  misc_RNA (1)...(19): siRNA sense strand
caacuucgacaaacuguaa

SEQ ID NO: 1477089 - RNA, 19 nt, Homo sapiens
  misc_RNA (1)...(19): siRNA sense strand
ccucugaguuggacauuaa

SEQ ID NO: 1477090 - RNA, 19 nt, Homo sapiens
  misc_RNA (1)...(19): siRNA sense strand
gaagcaagaaagcagguua

SEQ ID NO: 1477091 - RNA, 19 nt, Homo sapiens
  misc_RNA (1)...(19): siRNA sense strand
ugagagaggcgcacacaua

SEQ ID NO: 1477092 - RNA, 19 nt, Homo sapiens
  misc_RNA (1)...(19): siRNA sense strand
caucugaagucaaagaaga

SEQ ID NO: 1477093 - RNA, 19 nt, Homo sapiens
  misc_RNA (1)...(19): siRNA sense strand
agaaagcacuugauguaga

SEQ ID NO: 1477094 - RNA, 19 nt, Homo sapiens
  misc_RNA (1)...(19): siRNA sense strand
aaaugggaaugccaaauaa

SEQ ID NO: 1477095 - RNA, 19 nt, Homo sapiens
  misc_RNA (1)...(19): siRNA sense strand
guacgguauucaugacaua

SEQ ID NO: 1477096 - RNA, 19 nt, Homo sapiens
  misc_RNA (1)...(19): siRNA sense strand
gaaauuaugccaaaguuac

SEQ ID NO: 1477097 - RNA, 19 nt, Homo sapiens
  misc_RNA (1)...(19): siRNA sense strand
ggaauagacuuagcuagag

SEQ ID NO: 1477098 - RNA, 19 nt, Homo sapiens
  misc_RNA (1)...(19): siRNA sense strand
caaagaaagcggccaaaug

SEQ ID NO: 1477099 - RNA, 19 nt, Homo sapiens
  misc_RNA (1)...(19): siRNA sense strand
agaagucucuugauaggaa

SEQ ID NO: 1477100 - RNA, 19 nt, Homo sapiens
  misc_RNA (1)...(19): siRNA sense strand
caagccagccaguauguua

SEQ ID NO: 1477101 - RNA, 19 nt, Homo sapiens
  misc_RNA (1)...(19): siRNA sense strand
caaaugugcccgaaauuau

SEQ ID NO: 1477102 - RNA, 19 nt, Homo sapiens
  misc_RNA (1)...(19): siRNA sense strand
caacaggaucuaccacuuu

SEQ ID NO: 1477103 - RNA, 19 nt, Homo sapiens
  misc_RNA (1)...(19): siRNA sense strand
aaagaaagcggccaaaugu

SEQ ID NO: 1477104 - RNA, 19 nt, Homo sapiens
  misc_RNA (1)...(19): siRNA sense strand
uuaaagagaggcauuguuu

SEQ ID NO: 1477105 - RNA, 19 nt, Homo sapiens
  misc_RNA (1)...(19): siRNA sense strand
cagauaagcugaagcaacu

SEQ ID NO: 1477106 - RNA, 19 nt, Homo sapiens
  misc_RNA (1)...(19): siRNA sense strand
ucaaauaguucugguuuca

SEQ ID NO: 1477107 - RNA, 19 nt, Homo sapiens
  misc_RNA (1)...(19): siRNA sense strand
gacaaaccaagccuuaaua

SEQ ID NO: 1477108 - RNA, 19 nt, Homo sapiens
  misc_RNA (1)...(19): siRNA sense strand
ccagaucccuauguaauga

SEQ ID NO: 1477109 - RNA, 19 nt, Homo sapiens
  misc_RNA (1)...(19): siRNA sense strand
gucagaaacuugaauguuc

SEQ ID NO: 1477110 - RNA, 19 nt, Homo sapiens
  misc_RNA (1)...(19): siRNA sense strand
caagcaagcagcaugagua

SEQ ID NO: 1477111 - RNA, 19 nt, Homo sapiens
  misc_RNA (1)...(19): siRNA sense strand
gaucuggcuucuuuaacaa

SEQ ID NO: 1477112 - RNA, 19 nt, Homo sapiens
  misc_RNA (1)...(19): siRNA sense strand
gaaagaguguuagcucagu

SEQ ID NO: 1477113 - RNA, 19 nt, Homo sapiens
  misc_RNA (1)...(19): siRNA sense strand
gauaagauagcugggauuu

SEQ ID NO: 1477114 - RNA, 19 nt, Homo sapiens
  misc_RNA (1)...(19): siRNA sense strand
ggccaaauguugcgacaau

SEQ ID NO: 1477115 - RNA, 19 nt, Homo sapiens
  misc_RNA (1)...(19): siRNA sense strand
caacacagaagucucuuga

SEQ ID NO: 1477116 - RNA, 19 nt, Homo sapiens
  misc_RNA (1)...(19): siRNA sense strand
gagaggcgcacacauaaug

SEQ ID NO: 1477117 - RNA, 19 nt, Homo sapiens
  misc_RNA (1)...(19): siRNA sense strand
ggagauucuugacaauguu

SEQ ID NO: 1477118 - RNA, 19 nt, Homo sapiens
  misc_RNA (1)...(19): siRNA sense strand
gaaugcaccuguucauagg

SEQ ID NO: 1477119 - RNA, 19 nt, Homo sapiens
  misc_RNA (1)...(19): siRNA sense strand
gaacagcacgcccagcaau

SEQ ID NO: 1477120 - RNA, 19 nt, Homo sapiens
  misc_RNA (1)...(19): siRNA sense strand
ggcaauggacuuaauuauu

SEQ ID NO: 1477121 - RNA, 19 nt, Homo sapiens
  misc_RNA (1)...(19): siRNA sense strand
gaacaggcaauggacuuaa

SEQ ID NO: 1477122 - RNA, 19 nt, Homo sapiens
  misc_RNA (1)...(19): siRNA sense strand
caucccagaucccuaugua

SEQ ID NO: 1477123 - RNA, 19 nt, Homo sapiens
  misc_RNA (1)...(19): siRNA sense strand
uaagauagcugggauuuug

SEQ ID NO: 1477124 - RNA, 19 nt, Homo sapiens
  misc_RNA (1)...(19): siRNA sense strand
uaacaggaagaaagcuuua

SEQ ID NO: 1477125 - RNA, 19 nt, Homo sapiens
  misc_RNA (1)...(19): siRNA sense strand
acaaaugugcccgaaauua

SEQ ID NO: 1477126 - RNA, 19 nt, Homo sapiens
  misc_RNA (1)...(19): siRNA sense strand
gcaaugugauaguuccaau

SEQ ID NO: 1477127 - RNA, 19 nt, Homo sapiens
  misc_RNA (1)...(19): siRNA sense strand
uaaugagucuucagaaucu

SEQ ID NO: 1477128 - RNA, 19 nt, Homo sapiens
  misc_RNA (1)...(19): siRNA sense strand
gaaacaaugcugucucaag

SEQ ID NO: 1477129 - RNA, 19 nt, Homo sapiens
  misc_RNA (1)...(19): siRNA sense strand
gcaggaaagggaacaagaa

SEQ ID NO: 1477130 - RNA, 19 nt, Homo sapiens
  misc_RNA (1)...(19): siRNA sense strand
gaacuggccaucccacugu

SEQ ID NO: 1477131 - RNA, 19 nt, Homo sapiens
  misc_RNA (1)...(19): siRNA sense strand
ugagagucauuuagacaaa

SEQ ID NO: 1477132 - RNA, 19 nt, Homo sapiens
  misc_RNA (1)...(19): siRNA sense strand
caagaaagcagguuaacag

SEQ ID NO: 1477133 - RNA, 19 nt, Homo sapiens
  misc_RNA (1)...(19): siRNA sense strand
ggaauaacugaacaagaaa

SEQ ID NO: 1477134 - RNA, 19 nt, Homo sapiens
  misc_RNA (1)...(19): siRNA sense strand
gaagacaacauucauuagg

SEQ ID NO: 1477135 - RNA, 19 nt, Homo sapiens
  misc_RNA (1)...(19): siRNA sense strand
guaaugagucuucagaauc

SEQ ID NO: 1477136 - RNA, 19 nt, Homo sapiens
  misc_RNA (1)...(19): siRNA sense strand
gauaggaagaaauacauga

SEQ ID NO: 1477137 - RNA, 19 nt, Homo sapiens
  misc_RNA (1)...(19): siRNA sense strand
gcaaaaggauuucuuacuc

SEQ ID NO: 1477138 - RNA, 19 nt, Homo sapiens
  misc_RNA (1)...(19): siRNA sense strand
cauaacaaguggaauaacu

SEQ ID NO: 1477139 - RNA, 19 nt, Homo sapiens
  misc_RNA (1)...(19): siRNA sense strand
aaccaagccuuaauaaauc

SEQ ID NO: 1477140 - RNA, 19 nt, Homo sapiens
  misc_RNA (1)...(19): siRNA sense strand
caaaccaagccuuaauaaa

SEQ ID NO: 1477141 - RNA, 19 nt, Homo sapiens
  misc_RNA (1)...(19): siRNA sense strand
ggaggaguaugagaaguuc

SEQ ID NO: 1477142 - RNA, 19 nt, Homo sapiens
  misc_RNA (1)...(19): siRNA sense strand
ucagucagaagcaccauua

SEQ ID NO: 1477143 - RNA, 19 nt, Homo sapiens
  misc_RNA (1)...(19): siRNA sense strand
acaaugcaguggaauuaga

SEQ ID NO: 1477144 - RNA, 19 nt, Homo sapiens
  misc_RNA (1)...(19): siRNA sense strand
gaaagcgaggaguuacuaa

SEQ ID NO: 1477145 - RNA, 19 nt, Homo sapiens
  misc_RNA (1)...(19): siRNA sense strand
aaacccuucuccuuuauug

SEQ ID NO: 1477146 - RNA, 19 nt, Homo sapiens
  misc_RNA (1)...(19): siRNA sense strand
guaugucaaucuucaggaa

SEQ ID NO: 1477147 - RNA, 19 nt, Homo sapiens
  misc_RNA (1)...(19): siRNA sense strand
ucagguaugucaaucuuca

SEQ ID NO: 1477148 - RNA, 19 nt, Homo sapiens
  misc_RNA (1)...(19): siRNA sense strand
cgaaauuaugccaaaguua

SEQ ID NO: 1477149 - RNA, 19 nt, Homo sapiens
  misc_RNA (1)...(19): siRNA sense strand
ugucauaacaaguggaaua

SEQ ID NO: 1477150 - RNA, 19 nt, Homo sapiens
  misc_RNA (1)...(19): siRNA sense strand
agaaagcggccaaauguug

SEQ ID NO: 1477151 - RNA, 19 nt, Homo sapiens
  misc_RNA (1)...(19): siRNA sense strand
gcacaaagacaaaugauua

SEQ ID NO: 1477152 - RNA, 19 nt, Homo sapiens
  misc_RNA (1)...(19): siRNA sense strand
gauauuggaugcaaauuug

SEQ ID NO: 1477153 - RNA, 19 nt, Homo sapiens
  misc_RNA (1)...(19): siRNA sense strand
gaagcuacaugcucacaaa

SEQ ID NO: 1477154 - RNA, 19 nt, Homo sapiens
  misc_RNA (1)...(19): siRNA sense strand
gaacaccucugcacugauc

SEQ ID NO: 1477155 - RNA, 19 nt, Homo sapiens
  misc_RNA (1)...(19): siRNA sense strand
ccacagaucugauucucaa

SEQ ID NO: 1477156 - RNA, 19 nt, Homo sapiens
  misc_RNA (1)...(19): siRNA sense strand
ugaacacgcugguaaauau

SEQ ID NO: 1477157 - RNA, 19 nt, Homo sapiens
  misc_RNA (1)...(19): siRNA sense strand
ccacauucauuacauauug

SEQ ID NO: 1477158 - RNA, 19 nt, Homo sapiens
  misc_RNA (1)...(19): siRNA sense strand
acaaauacaucaggucuuu

SEQ ID NO: 1477159 - RNA, 19 nt, Homo sapiens
  misc_RNA (1)...(19): siRNA sense strand
ggaaguaggagcagaauuc

SEQ ID NO: 1477160 - RNA, 19 nt, Homo sapiens
  misc_RNA (1)...(19): siRNA sense strand
gcaauaggcaugaucuuau

SEQ ID NO: 1477161 - RNA, 19 nt, Homo sapiens
  misc_RNA (1)...(19): siRNA sense strand
guuauacucucuaaaggaa

SEQ ID NO: 1477162 - RNA, 19 nt, Homo sapiens
  misc_RNA (1)...(19): siRNA sense strand
uuccuaagcuggucagaua

SEQ ID NO: 1477163 - RNA, 19 nt, Homo sapiens
  misc_RNA (1)...(19): siRNA sense strand
ggaauuucuuucuucucua

SEQ ID NO: 1477164 - RNA, 19 nt, Homo sapiens
  misc_RNA (1)...(19): siRNA sense strand
gggaauuucuuucuucucu

SEQ ID NO: 1477165 - RNA, 19 nt, Homo sapiens
  misc_RNA (1)...(19): siRNA sense strand
aaagauucccucagugaua

SEQ ID NO: 1477166 - RNA, 19 nt, Homo sapiens
  misc_RNA (1)...(19): siRNA sense strand
guugaaagauucccucagu

SEQ ID NO: 1477167 - RNA, 19 nt, Homo sapiens
  misc_RNA (1)...(19): siRNA sense strand
cacaaacaauggcugcuuu

SEQ ID NO: 1477168 - RNA, 19 nt, Homo sapiens
  misc_RNA (1)...(19): siRNA sense strand
gaacacgcugguaaauauu

SEQ ID NO: 1477169 - RNA, 19 nt, Homo sapiens
  misc_RNA (1)...(19): siRNA sense strand
gaauuucuuucuucucuac

SEQ ID NO: 1477170 - RNA, 19 nt, Homo sapiens
  misc_RNA (1)...(19): siRNA sense strand
aaaggaaucccacaaacaa

SEQ ID NO: 1477171 - RNA, 19 nt, Homo sapiens
  misc_RNA (1)...(19): siRNA sense strand
ugaaagauucccucaguga

SEQ ID NO: 1477172 - RNA, 19 nt, Homo sapiens
  misc_RNA (1)...(19): siRNA sense strand
cagcauaaauagcacaaag

SEQ ID NO: 1477173 - RNA, 19 nt, Homo sapiens
  misc_RNA (1)...(19): siRNA sense strand
gcuacaugcucacaaauac

SEQ ID NO: 1477174 - RNA, 19 nt, Homo sapiens
  misc_RNA (1)...(19): siRNA sense strand
ggcaugaucuuauuaucuc

SEQ ID NO: 1477175 - RNA, 19 nt, Homo sapiens
  misc_RNA (1)...(19): siRNA sense strand
gcaaguggaacagcauaaa

SEQ ID NO: 1477176 - RNA, 19 nt, Homo sapiens
  misc_RNA (1)...(19): siRNA sense strand
ccacuauaguuuccuuugu

SEQ ID NO: 1477177 - RNA, 19 nt, Homo sapiens
  misc_RNA (1)...(19): siRNA sense strand
ggaaggaauccacaguuuc

SEQ ID NO: 1477178 - RNA, 19 nt, Homo sapiens
  misc_RNA (1)...(19): siRNA sense strand
gaaagauucccucagugau

SEQ ID NO: 1477179 - RNA, 19 nt, Homo sapiens
  misc_RNA (1)...(19): siRNA sense strand
gauuauggauauuguucug

SEQ ID NO: 1477180 - RNA, 19 nt, Homo sapiens
  misc_RNA (1)...(19): siRNA sense strand
guccugugcuggauucuga

SEQ ID NO: 1477181 - RNA, 19 nt, Homo sapiens
  misc_RNA (1)...(19): siRNA sense strand
cacuauaguuuccuuuguu

SEQ ID NO: 1477182 - RNA, 19 nt, Homo sapiens
  misc_RNA (1)...(19): siRNA sense strand
ucuccuccaucuuuacaua

SEQ ID NO: 1477183 - RNA, 19 nt, Homo sapiens
  misc_RNA (1)...(19): siRNA sense strand
uaaaggaaucccacaaaca

SEQ ID NO: 1477184 - RNA, 19 nt, Homo sapiens
  misc_RNA (1)...(19): siRNA sense strand
ggaggaaguaggagcagaa

SEQ ID NO: 1477185 - RNA, 19 nt, Homo sapiens
  misc_RNA (1)...(19): siRNA sense strand
uuacuguucuucuacaugu

SEQ ID NO: 1477186 - RNA, 19 nt, Homo sapiens
  misc_RNA (1)...(19): siRNA sense strand
caaagacaaaugauuaugg

SEQ ID NO: 1477187 - RNA, 19 nt, Homo sapiens
  misc_RNA (1)...(19): siRNA sense strand
aaguggaacagcauaaaua

SEQ ID NO: 1477188 - RNA, 19 nt, Homo sapiens
  misc_RNA (1)...(19): siRNA sense strand
gcacugaucacugccuguu

SEQ ID NO: 1477189 - RNA, 19 nt, Homo sapiens
  misc_RNA (1)...(19): siRNA sense strand
uuucuucucuaccacuaua

SEQ ID NO: 1477190 - RNA, 19 nt, Homo sapiens
  misc_RNA (1)...(19): siRNA sense strand
cuaaaggaaucccacaaac

SEQ ID NO: 1477191 - RNA, 19 nt, Homo sapiens
  misc_RNA (1)...(19): siRNA sense strand
gagcaccuuguguuacuuu

SEQ ID NO: 1477192 - RNA, 19 nt, Homo sapiens
  misc_RNA (1)...(19): siRNA sense strand
ggauauuguucuggaggaa

SEQ ID NO: 1477193 - RNA, 19 nt, Homo sapiens
  misc_RNA (1)...(19): siRNA sense strand
aagauucccucagugauau

SEQ ID NO: 1477194 - RNA, 19 nt, Homo sapiens
  misc_RNA (1)...(19): siRNA sense strand
ucagugauauuggaugcaa

SEQ ID NO: 1477195 - RNA, 19 nt, Homo sapiens
  misc_RNA (1)...(19): siRNA sense strand
ucgcucuccuccaucuuua

SEQ ID NO: 1477196 - RNA, 19 nt, Homo sapiens
  misc_RNA (1)...(19): siRNA sense strand
caaguggaacagcauaaau

SEQ ID NO: 1477197 - RNA, 19 nt, Homo sapiens
  misc_RNA (1)...(19): siRNA sense strand
ugcaauaggcaugaucuua

SEQ ID NO: 1477198 - RNA, 19 nt, Homo sapiens
  misc_RNA (1)...(19): siRNA sense strand
ucaagcaccugaccauagc

SEQ ID NO: 1477199 - RNA, 19 nt, Homo sapiens
  misc_RNA (1)...(19): siRNA sense strand
uugaacaccucugcacuga

SEQ ID NO: 1477200 - RNA, 19 nt, Homo sapiens
  misc_RNA (1)...(19): siRNA sense strand
gugagcaccuuguguuacu

SEQ ID NO: 1477201 - RNA, 19 nt, Homo sapiens
  misc_RNA (1)...(19): siRNA sense strand
gcauaaauagcacaaagac

SEQ ID NO: 1477202 - RNA, 19 nt, Homo sapiens
  misc_RNA (1)...(19): siRNA sense strand
ucuaaaggaaucccacaaa

SEQ ID NO: 1477203 - RNA, 19 nt, Homo sapiens
  misc_RNA (1)...(19): siRNA sense strand
gguuauacucucuaaagga

SEQ ID NO: 1477204 - RNA, 19 nt, Homo sapiens
  misc_RNA (1)...(19): siRNA sense strand
uauacucucuaaaggaauc

SEQ ID NO: 1477205 - RNA, 19 nt, Homo sapiens
  misc_RNA (1)...(19): siRNA sense strand
cagcagguccagcacauuc

SEQ ID NO: 1477206 - RNA, 19 nt, Homo sapiens
  misc_RNA (1)...(19): siRNA sense strand
gcaugaucuuauuaucuca

SEQ ID NO: 1477207 - RNA, 19 nt, Homo sapiens
  misc_RNA (1)...(19): siRNA sense strand
ggaaucccacaaacaaugg

SEQ ID NO: 1477208 - RNA, 19 nt, Homo sapiens
  misc_RNA (1)...(19): siRNA sense strand
uggaacagcauaaauagca

SEQ ID NO: 1477209 - RNA, 19 nt, Homo sapiens
  misc_RNA (1)...(19): siRNA sense strand
cagaucugauucucaagca

SEQ ID NO: 1477210 - RNA, 19 nt, Homo sapiens
  misc_RNA (1)...(19): siRNA sense strand
cugaacacgcugguaaaua

SEQ ID NO: 1477211 - RNA, 19 nt, Homo sapiens
  misc_RNA (1)...(19): siRNA sense strand
cuccaaggauuuugcaaua

SEQ ID NO: 1477212 - RNA, 19 nt, Homo sapiens
  misc_RNA (1)...(19): siRNA sense strand
ccacaaacaauggcugcuu

SEQ ID NO: 1477213 - RNA, 19 nt, Homo sapiens
  misc_RNA (1)...(19): siRNA sense strand
aacacgcugguaaauauua

SEQ ID NO: 1477214 - RNA, 19 nt, Homo sapiens
  misc_RNA (1)...(19): siRNA sense strand
uggaugcaaauuuguguuu

SEQ ID NO: 1477215 - RNA, 19 nt, Homo sapiens
  misc_RNA (1)...(19): siRNA sense strand
ggaugcaaauuuguguuuu

SEQ ID NO: 1477216 - RNA, 19 nt, Homo sapiens
  misc_RNA (1)...(19): siRNA sense strand
cuaccacuauaguuuccuu

SEQ ID NO: 1477217 - RNA, 19 nt, Homo sapiens
  misc_RNA (1)...(19): siRNA sense strand
ggcaaguggaacagcauaa

SEQ ID NO: 1477218 - RNA, 19 nt, Homo sapiens
  misc_RNA (1)...(19): siRNA sense strand
caccagagguauguuacag

SEQ ID NO: 1477219 - RNA, 19 nt, Homo sapiens
  misc_RNA (1)...(19): siRNA sense strand
caccuuguguuacuuuacu

SEQ ID NO: 1477220 - RNA, 19 nt, Homo sapiens
  misc_RNA (1)...(19): siRNA sense strand
uuucaccagagguauguua

SEQ ID NO: 1477221 - RNA, 19 nt, Homo sapiens
  misc_RNA (1)...(19): siRNA sense strand
cccaguugguggcuguuga

SEQ ID NO: 1477222 - RNA, 19 nt, Homo sapiens
  misc_RNA (1)...(19): siRNA sense strand
gcagcagguccagcacauu

SEQ ID NO: 1477223 - RNA, 19 nt, Homo sapiens
  misc_RNA (1)...(19): siRNA sense strand
gcacugcccuccguaaaug

SEQ ID NO: 1477224 - RNA, 19 nt, Homo sapiens
  misc_RNA (1)...(19): siRNA sense strand
cgucugcacucacggaaug

SEQ ID NO: 1477225 - RNA, 19 nt, Homo sapiens
  misc_RNA (1)...(19): siRNA sense strand
ggacgucugcacucacagu

SEQ ID NO: 1477226 - RNA, 19 nt, Homo sapiens
  misc_RNA (1)...(19): siRNA sense strand
ggacgucugcacucacagu

SEQ ID NO: 1477227 - RNA, 19 nt, Homo sapiens
  misc_RNA (1)...(19): siRNA sense strand
ggacgucugcacucacagu

SEQ ID NO: 1477228 - RNA, 19 nt, Homo sapiens
  misc_RNA (1)...(19): siRNA sense strand
ggacgucugcacucacagu

SEQ ID NO: 1477229 - RNA, 19 nt, Homo sapiens
  misc_RNA (1)...(19): siRNA sense strand
ggacgucugcacucacagu

SEQ ID NO: 1477230 - RNA, 19 nt, Homo sapiens
  misc_RNA (1)...(19): siRNA sense strand
ggacgucugcacucacagu

SEQ ID NO: 1477231 - RNA, 19 nt, Homo sapiens
  misc_RNA (1)...(19): siRNA sense strand
ggacgucugcacucacagu

SEQ ID NO: 1477232 - RNA, 19 nt, Homo sapiens
  misc_RNA (1)...(19): siRNA sense strand
ggacgucugcacucacagu

SEQ ID NO: 1477233 - RNA, 19 nt, Homo sapiens
  misc_RNA (1)...(19): siRNA sense strand
ggacgucugcacucacagu

SEQ ID NO: 1477234 - RNA, 19 nt, Homo sapiens
  misc_RNA (1)...(19): siRNA sense strand
cgggacgucugcacacagu

SEQ ID NO: 1477235 - RNA, 19 nt, Homo sapiens
  misc_RNA (1)...(19): siRNA sense strand
acaauggacuuucauagug

SEQ ID NO: 1477236 - RNA, 19 nt, Homo sapiens
  misc_RNA (1)...(19): siRNA sense strand
ggacuugaccaaugcauuc

SEQ ID NO: 1477237 - RNA, 19 nt, Homo sapiens
  misc_RNA (1)...(19): siRNA sense strand
ggaacaguuugccuucaug

SEQ ID NO: 1477238 - RNA, 19 nt, Homo sapiens
  misc_RNA (1)...(19): siRNA sense strand
caauggacuuucauagugu

SEQ ID NO: 1477239 - RNA, 19 nt, Homo sapiens
  misc_RNA (1)...(19): siRNA sense strand
ccaaugcauucuucucaau

SEQ ID NO: 1477240 - RNA, 19 nt, Homo sapiens
  misc_RNA (1)...(19): siRNA sense strand
gggcgacaauggacuuuca

SEQ ID NO: 1477241 - RNA, 19 nt, Homo sapiens
  misc_RNA (1)...(19): siRNA sense strand
gacaauggacuuucauagu

SEQ ID NO: 1477242 - RNA, 19 nt, Homo sapiens
  misc_RNA (1)...(19): siRNA sense strand
gaccaaugcauucuucuca

SEQ ID NO: 1477243 - RNA, 19 nt, Homo sapiens
  misc_RNA (1)...(19): siRNA sense strand
gcgacaauggacuuucaua

SEQ ID NO: 1477244 - RNA, 19 nt, Homo sapiens
  misc_RNA (1)...(19): siRNA sense strand
cgacaauggacuuucauag

SEQ ID NO: 1477245 - RNA, 19 nt, Homo sapiens
  misc_RNA (1)...(19): siRNA sense strand
ggacuugauggaccguuug

SEQ ID NO: 1477246 - RNA, 19 nt, Homo sapiens
  misc_RNA (1)...(19): siRNA sense strand
gauggaccguuugacaaca

SEQ ID NO: 1477247 - RNA, 19 nt, Homo sapiens
  misc_RNA (1)...(19): siRNA sense strand
uugcaugccugaggacauu

SEQ ID NO: 1477248 - RNA, 19 nt, Homo sapiens
  misc_RNA (1)...(19): siRNA sense strand
ggagggcgacaauggacuu

SEQ ID NO: 1477249 - RNA, 19 nt, Homo sapiens
  misc_RNA (1)...(19): siRNA sense strand
agagagccaggaacaguuu

SEQ ID NO: 1477250 - RNA, 19 nt, Homo sapiens
  misc_RNA (1)...(19): siRNA sense strand
aaugcauucuucucaauca

SEQ ID NO: 1477251 - RNA, 19 nt, Homo sapiens
  misc_RNA (1)...(19): siRNA sense strand
gcugcagggcuauauguau

SEQ ID NO: 1477252 - RNA, 19 nt, Homo sapiens
  misc_RNA (1)...(19): siRNA sense strand
ccagagagccaggaacagu

SEQ ID NO: 1477253 - RNA, 19 nt, Homo sapiens
  misc_RNA (1)...(19): siRNA sense strand
cagagagccaggaacaguu

SEQ ID NO: 1477254 - RNA, 19 nt, Homo sapiens
  misc_RNA (1)...(19): siRNA sense strand
guuaaccucuaguucuuuu

SEQ ID NO: 1477255 - RNA, 19 nt, Homo sapiens
  misc_RNA (1)...(19): siRNA sense strand
ggacuuucauaguguugcu

SEQ ID NO: 1477256 - RNA, 19 nt, Homo sapiens
  misc_RNA (1)...(19): siRNA sense strand
uggacuugauggaccguuu

SEQ ID NO: 1477257 - RNA, 19 nt, Homo sapiens
  misc_RNA (1)...(19): siRNA sense strand
gcagcugugccaccuguca

SEQ ID NO: 1477258 - RNA, 19 nt, Homo sapiens
  misc_RNA (1)...(19): siRNA sense strand
caggaacaguuugccuuca

SEQ ID NO: 1477259 - RNA, 19 nt, Homo sapiens
  misc_RNA (1)...(19): siRNA sense strand
uauguuaaccucuaguucu

SEQ ID NO: 1477260 - RNA, 19 nt, Homo sapiens
  misc_RNA (1)...(19): siRNA sense strand
ggaugaugaggcugaaaca

SEQ ID NO: 1477261 - RNA, 19 nt, Homo sapiens
  misc_RNA (1)...(19): siRNA sense strand
cuugaccaaugcauucuuc

SEQ ID NO: 1477262 - RNA, 19 nt, Homo sapiens
  misc_RNA (1)...(19): siRNA sense strand
gaacacagaugccacagau

SEQ ID NO: 1477263 - RNA, 19 nt, Homo sapiens
  misc_RNA (1)...(19): siRNA sense strand
cgagagaugucuucaaugu

SEQ ID NO: 1477264 - RNA, 19 nt, Homo sapiens
  misc_RNA (1)...(19): siRNA sense strand
gcaauugcucuauuucuuu

SEQ ID NO: 1477265 - RNA, 19 nt, Homo sapiens
  misc_RNA (1)...(19): siRNA sense strand
ccaaguuccucuuuaccua

SEQ ID NO: 1477266 - RNA, 19 nt, Homo sapiens
  misc_RNA (1)...(19): siRNA sense strand
aaacuucaaucauccuuug

SEQ ID NO: 1477267 - RNA, 19 nt, Homo sapiens
  misc_RNA (1)...(19): siRNA sense strand
gcaccaaguuccucuuuac

SEQ ID NO: 1477268 - RNA, 19 nt, Homo sapiens
  misc_RNA (1)...(19): siRNA sense strand
acacagaugccacagauaa

SEQ ID NO: 1477269 - RNA, 19 nt, Homo sapiens
  misc_RNA (1)...(19): siRNA sense strand
agagaugucuucaaugugu

SEQ ID NO: 1477270 - RNA, 19 nt, Homo sapiens
  misc_RNA (1)...(19): siRNA sense strand
ccaacaucuuugacacuua

SEQ ID NO: 1477271 - RNA, 19 nt, Homo sapiens
  misc_RNA (1)...(19): siRNA sense strand
gcucaaagucuucuauugu

SEQ ID NO: 1477272 - RNA, 19 nt, Homo sapiens
  misc_RNA (1)...(19): siRNA sense strand
aaagacauauccaaguuca

SEQ ID NO: 1477273 - RNA, 19 nt, Homo sapiens
  misc_RNA (1)...(19): siRNA sense strand
caacaucuuugacacuuac

SEQ ID NO: 1477274 - RNA, 19 nt, Homo sapiens
  misc_RNA (1)...(19): siRNA sense strand
ugccacagauaaagacaua

SEQ ID NO: 1477275 - RNA, 19 nt, Homo sapiens
  misc_RNA (1)...(19): siRNA sense strand
gugcaucacuggcauccuu

SEQ ID NO: 1477276 - RNA, 19 nt, Homo sapiens
  misc_RNA (1)...(19): siRNA sense strand
ggaugaugcuggagaacau

SEQ ID NO: 1477277 - RNA, 19 nt, Homo sapiens
  misc_RNA (1)...(19): siRNA sense strand
gagaugucuucaaugugua

SEQ ID NO: 1477278 - RNA, 19 nt, Homo sapiens
  misc_RNA (1)...(19): siRNA sense strand
caauugcucuauuucuuuc

SEQ ID NO: 1477279 - RNA, 19 nt, Homo sapiens
  misc_RNA (1)...(19): siRNA sense strand
uauauccucuucaaaguca

SEQ ID NO: 1477280 - RNA, 19 nt, Homo sapiens
  misc_RNA (1)...(19): siRNA sense strand
ccacggagaagaaguacuu

SEQ ID NO: 1477281 - RNA, 19 nt, Homo sapiens
  misc_RNA (1)...(19): siRNA sense strand
cagcaugaaggcucacaua

SEQ ID NO: 1477282 - RNA, 19 nt, Homo sapiens
  misc_RNA (1)...(19): siRNA sense strand
ucaaucauccuuuguucuu

SEQ ID NO: 1477283 - RNA, 19 nt, Homo sapiens
  misc_RNA (1)...(19): siRNA sense strand
caaguuccucuuuaccuaa

SEQ ID NO: 1477284 - RNA, 19 nt, Homo sapiens
  misc_RNA (1)...(19): siRNA sense strand
gcuacuuucucauccucua

SEQ ID NO: 1477285 - RNA, 19 nt, Homo sapiens
  misc_RNA (1)...(19): siRNA sense strand
ggcucaaagucuucuauug

SEQ ID NO: 1477286 - RNA, 19 nt, Homo sapiens
  misc_RNA (1)...(19): siRNA sense strand
gagacacacccuacacaug

SEQ ID NO: 1477287 - RNA, 19 nt, Homo sapiens
  misc_RNA (1)...(19): siRNA sense strand
caauauggucaaccuggua

SEQ ID NO: 1477288 - RNA, 19 nt, Homo sapiens
  misc_RNA (1)...(19): siRNA sense strand
gccaccagcuacuuucuca

SEQ ID NO: 1477289 - RNA, 19 nt, Homo sapiens
  misc_RNA (1)...(19): siRNA sense strand
ccauuccaaucucugguuu

SEQ ID NO: 1477290 - RNA, 19 nt, Homo sapiens
  misc_RNA (1)...(19): siRNA sense strand
ugcaauugcucuauuucuu

SEQ ID NO: 1477291 - RNA, 19 nt, Homo sapiens
  misc_RNA (1)...(19): siRNA sense strand
guaugugaauagcuccauu

SEQ ID NO: 1477292 - RNA, 19 nt, Homo sapiens
  misc_RNA (1)...(19): siRNA sense strand
ccgaauuguuuauaaccaa

SEQ ID NO: 1477293 - RNA, 19 nt, Homo sapiens
  misc_RNA (1)...(19): siRNA sense strand
ucaaagucaucacugucuu

SEQ ID NO: 1477294 - RNA, 19 nt, Homo sapiens
  misc_RNA (1)...(19): siRNA sense strand
caguguauauccucuucaa

SEQ ID NO: 1477295 - RNA, 19 nt, Homo sapiens
  misc_RNA (1)...(19): siRNA sense strand
ggugaccgcauuauguuga

SEQ ID NO: 1477296 - RNA, 19 nt, Homo sapiens
  misc_RNA (1)...(19): siRNA sense strand
uguauauccucuucaaagu

SEQ ID NO: 1477297 - RNA, 19 nt, Homo sapiens
  misc_RNA (1)...(19): siRNA sense strand
ccacguccaacaucuuuga

SEQ ID NO: 1477298 - RNA, 19 nt, Homo sapiens
  misc_RNA (1)...(19): siRNA sense strand
cucgagagaugucuucaau

SEQ ID NO: 1477299 - RNA, 19 nt, Homo sapiens
  misc_RNA (1)...(19): siRNA sense strand
uuucucauccucuacauuu

SEQ ID NO: 1477300 - RNA, 19 nt, Homo sapiens
  misc_RNA (1)...(19): siRNA sense strand
agucaucacugucuuucug

SEQ ID NO: 1477301 - RNA, 19 nt, Homo sapiens
  misc_RNA (1)...(19): siRNA sense strand
gcaugaaggcucacauagg

SEQ ID NO: 1477302 - RNA, 19 nt, Homo sapiens
  misc_RNA (1)...(19): siRNA sense strand
ucaaagucuucuauugucu

SEQ ID NO: 1477303 - RNA, 19 nt, Homo sapiens
  misc_RNA (1)...(19): siRNA sense strand
caaagucuucuauugucuu

SEQ ID NO: 1477304 - RNA, 19 nt, Homo sapiens
  misc_RNA (1)...(19): siRNA sense strand
ucuuagaauugcaaacuuc

SEQ ID NO: 1477305 - RNA, 19 nt, Homo sapiens
  misc_RNA (1)...(19): siRNA sense strand
uccaggcucuugcuacaga

SEQ ID NO: 1477306 - RNA, 19 nt, Homo sapiens
  misc_RNA (1)...(19): siRNA sense strand
cagcaccaaguuccucuuu

SEQ ID NO: 1477307 - RNA, 19 nt, Homo sapiens
  misc_RNA (1)...(19): siRNA sense strand
ccuuuguucuuccugauga

SEQ ID NO: 1477308 - RNA, 19 nt, Homo sapiens
  misc_RNA (1)...(19): siRNA sense strand
caaacuucaaucauccuuu

SEQ ID NO: 1477309 - RNA, 19 nt, Homo sapiens
  misc_RNA (1)...(19): siRNA sense strand
guguauauccucuucaaag

SEQ ID NO: 1477310 - RNA, 19 nt, Homo sapiens
  misc_RNA (1)...(19): siRNA sense strand
gcaaacuucaaucauccuu

SEQ ID NO: 1477311 - RNA, 19 nt, Homo sapiens
  misc_RNA (1)...(19): siRNA sense strand
gaagcgguuucagcaccaa

SEQ ID NO: 1477312 - RNA, 19 nt, Homo sapiens
  misc_RNA (1)...(19): siRNA sense strand
cugauccucucucucaaga

SEQ ID NO: 1477313 - RNA, 19 nt, Homo sapiens
  misc_RNA (1)...(19): siRNA sense strand
uaaagacauauccaaguuc

SEQ ID NO: 1477314 - RNA, 19 nt, Homo sapiens
  misc_RNA (1)...(19): siRNA sense strand
cuucaaucauccuuuguuc

SEQ ID NO: 1477315 - RNA, 19 nt, Homo sapiens
  misc_RNA (1)...(19): siRNA sense strand
cucaaagucuucuauuguc

SEQ ID NO: 1477316 - RNA, 19 nt, Homo sapiens
  misc_RNA (1)...(19): siRNA sense strand
aaccaaaacucaguguaua

SEQ ID NO: 1477317 - RNA, 19 nt, Homo sapiens
  misc_RNA (1)...(19): siRNA sense strand
cagaugccacagauaaaga

SEQ ID NO: 1477318 - RNA, 19 nt, Homo sapiens
  misc_RNA (1)...(19): siRNA sense strand
caaucauccuuuguucuuc

SEQ ID NO: 1477319 - RNA, 19 nt, Homo sapiens
  misc_RNA (1)...(19): siRNA sense strand
gagagaugucuucaaugug

SEQ ID NO: 1477320 - RNA, 19 nt, Homo sapiens
  misc_RNA (1)...(19): siRNA sense strand
ucacauaggggccaucaaa

SEQ ID NO: 1477321 - RNA, 19 nt, Homo sapiens
  misc_RNA (1)...(19): siRNA sense strand
cuacacaugggaagcaaug

SEQ ID NO: 1477322 - RNA, 19 nt, Homo sapiens
  misc_RNA (1)...(19): siRNA sense strand
agacauauccaaguucaag

SEQ ID NO: 1477323 - RNA, 19 nt, Homo sapiens
  misc_RNA (1)...(19): siRNA sense strand
agcaccaaguuccucuuua

SEQ ID NO: 1477324 - RNA, 19 nt, Homo sapiens
  misc_RNA (1)...(19): siRNA sense strand
uccaacaucuuugacacuu

SEQ ID NO: 1477325 - RNA, 19 nt, Homo sapiens
  misc_RNA (1)...(19): siRNA sense strand
cugcugauccucucucuca

SEQ ID NO: 1477326 - RNA, 19 nt, Homo sapiens
  misc_RNA (1)...(19): siRNA sense strand
cacagaugccacagauaaa

SEQ ID NO: 1477327 - RNA, 19 nt, Homo sapiens
  misc_RNA (1)...(19): siRNA sense strand
gcuacagauuuggaugaug

SEQ ID NO: 1477328 - RNA, 19 nt, Homo sapiens
  misc_RNA (1)...(19): siRNA sense strand
ucaaagccaccagcuacuu

SEQ ID NO: 1477329 - RNA, 19 nt, Homo sapiens
  misc_RNA (1)...(19): siRNA sense strand
uauggucaaccugguauuu

SEQ ID NO: 1477330 - RNA, 19 nt, Homo sapiens
  misc_RNA (1)...(19): siRNA sense strand
ugucaguguugguuuccuu

SEQ ID NO: 1477331 - RNA, 19 nt, Homo sapiens
  misc_RNA (1)...(19): siRNA sense strand
gcugaugccuuggcuucuc

SEQ ID NO: 1477332 - RNA, 19 nt, Homo sapiens
  misc_RNA (1)...(19): siRNA sense strand
cuucaucacggccaucuau

SEQ ID NO: 1477333 - RNA, 19 nt, Homo sapiens
  misc_RNA (1)...(19): siRNA sense strand
gucuuagaauugcaaacuu

SEQ ID NO: 1477334 - RNA, 19 nt, Homo sapiens
  misc_RNA (1)...(19): siRNA sense strand
guauauccucuucaaaguc

SEQ ID NO: 1477335 - RNA, 19 nt, Homo sapiens
  misc_RNA (1)...(19): siRNA sense strand
ucaauguguaugugaauag

SEQ ID NO: 1477336 - RNA, 19 nt, Homo sapiens
  misc_RNA (1)...(19): siRNA sense strand
gguggucuccggaauagag

SEQ ID NO: 1477337 - RNA, 19 nt, Homo sapiens
  misc_RNA (1)...(19): siRNA sense strand
ucaucacugucuuucugaa

SEQ ID NO: 1477338 - RNA, 19 nt, Homo sapiens
  misc_RNA (1)...(19): siRNA sense strand
uaaccaaaacucaguguau

SEQ ID NO: 1477339 - RNA, 19 nt, Homo sapiens
  misc_RNA (1)...(19): siRNA sense strand
uggaauauuuugugcaaga

SEQ ID NO: 1477340 - RNA, 19 nt, Homo sapiens
  misc_RNA (1)...(19): siRNA sense strand
ccaucaaagccaccagcua

SEQ ID NO: 1477341 - RNA, 19 nt, Homo sapiens
  misc_RNA (1)...(19): siRNA sense strand
gggaucuucguuccucuga

SEQ ID NO: 1477342 - RNA, 19 nt, Homo sapiens
  misc_RNA (1)...(19): siRNA sense strand
gcaacggugaacacagaug

SEQ ID NO: 1477343 - RNA, 19 nt, Homo sapiens
  misc_RNA (1)...(19): siRNA sense strand
cugccuggcucaaagucuu

SEQ ID NO: 1477344 - RNA, 19 nt, Homo sapiens
  misc_RNA (1)...(19): siRNA sense strand
gaugaugcuggagaacauu

SEQ ID NO: 1477345 - RNA, 19 nt, Homo sapiens
  misc_RNA (1)...(19): siRNA sense strand
gcacacaacugggagauga

SEQ ID NO: 1477346 - RNA, 19 nt, Homo sapiens
  misc_RNA (1)...(19): siRNA sense strand
ggacggcgcuccucaucuu

SEQ ID NO: 1477347 - RNA, 19 nt, Homo sapiens
  misc_RNA (1)...(19): siRNA sense strand
ggaguuaccucgucuuucu

SEQ ID NO: 1477348 - RNA, 19 nt, Homo sapiens
  misc_RNA (1)...(19): siRNA sense strand
ggaggaaggcuacuauuau

SEQ ID NO: 1477349 - RNA, 19 nt, Homo sapiens
  misc_RNA (1)...(19): siRNA sense strand
ccaaggccuuccaguauuu

SEQ ID NO: 1477350 - RNA, 19 nt, Homo sapiens
  misc_RNA (1)...(19): siRNA sense strand
gaaggaaaucuccaaagaa

SEQ ID NO: 1477351 - RNA, 19 nt, Homo sapiens
  misc_RNA (1)...(19): siRNA sense strand
agaaggaaaucuccaaaga

SEQ ID NO: 1477352 - RNA, 19 nt, Homo sapiens
  misc_RNA (1)...(19): siRNA sense strand
gaggaaggcuacuauuauc

SEQ ID NO: 1477353 - RNA, 19 nt, Homo sapiens
  misc_RNA (1)...(19): siRNA sense strand
ggagaugaauuaccaagag

SEQ ID NO: 1477354 - RNA, 19 nt, Homo sapiens
  misc_RNA (1)...(19): siRNA sense strand
ggauggaacuuguuugacu

SEQ ID NO: 1477355 - RNA, 19 nt, Homo sapiens
  misc_RNA (1)...(19): siRNA sense strand
acauggagcccuucuauuu

SEQ ID NO: 1477356 - RNA, 19 nt, Homo sapiens
  misc_RNA (1)...(19): siRNA sense strand
caacauggagcccuucuau

SEQ ID NO: 1477357 - RNA, 19 nt, Homo sapiens
  misc_RNA (1)...(19): siRNA sense strand
gaccugagccugaagaugu

SEQ ID NO: 1477358 - RNA, 19 nt, Homo sapiens
  misc_RNA (1)...(19): siRNA sense strand
cuacgaaguugcugcuuug

SEQ ID NO: 1477359 - RNA, 19 nt, Homo sapiens
  misc_RNA (1)...(19): siRNA sense strand
gaaggcuacuauuaucuca

SEQ ID NO: 1477360 - RNA, 19 nt, Homo sapiens
  misc_RNA (1)...(19): siRNA sense strand
gcugaaaggugggaacuuc

SEQ ID NO: 1477361 - RNA, 19 nt, Homo sapiens
  misc_RNA (1)...(19): siRNA sense strand
gcacugguuugaugagcuu

SEQ ID NO: 1477362 - RNA, 19 nt, Homo sapiens
  misc_RNA (1)...(19): siRNA sense strand
cgaaguugcugcuuugaag

SEQ ID NO: 1477363 - RNA, 19 nt, Homo sapiens
  misc_RNA (1)...(19): siRNA sense strand
ggaaaucuccaaagaagag

SEQ ID NO: 1477364 - RNA, 19 nt, Homo sapiens
  misc_RNA (1)...(19): siRNA sense strand
agagagcacugguuugaug

SEQ ID NO: 1477365 - RNA, 19 nt, Homo sapiens
  misc_RNA (1)...(19): siRNA sense strand
ggguggagcuguuccugaa

SEQ ID NO: 1477366 - RNA, 19 nt, Homo sapiens
  misc_RNA (1)...(19): siRNA sense strand
gucaacaacugguacauca

SEQ ID NO: 1477367 - RNA, 19 nt, Homo sapiens
  misc_RNA (1)...(19): siRNA sense strand
gauggaacuuguuugacuu

SEQ ID NO: 1477368 - RNA, 19 nt, Homo sapiens
  misc_RNA (1)...(19): siRNA sense strand
cauccucgguuucuacuug

SEQ ID NO: 1477369 - RNA, 19 nt, Homo sapiens
  misc_RNA (1)...(19): siRNA sense strand
gaaguggaaggccaagaaa

SEQ ID NO: 1477370 - RNA, 19 nt, Homo sapiens
  misc_RNA (1)...(19): siRNA sense strand
ggagacauuuaugcugaaa

SEQ ID NO: 1477371 - RNA, 19 nt, Homo sapiens
  misc_RNA (1)...(19): siRNA sense strand
acaacugggagaugaauua

SEQ ID NO: 1477372 - RNA, 19 nt, Homo sapiens
  misc_RNA (1)...(19): siRNA sense strand
aaggaaaucuccaaagaag

SEQ ID NO: 1477373 - RNA, 19 nt, Homo sapiens
  misc_RNA (1)...(19): siRNA sense strand
gacgaucauugucgccuuu

SEQ ID NO: 1477374 - RNA, 19 nt, Homo sapiens
  misc_RNA (1)...(19): siRNA sense strand
gaaccaggacucggaaguu

SEQ ID NO: 1477375 - RNA, 19 nt, Homo sapiens
  misc_RNA (1)...(19): siRNA sense strand
uggaggaaggcuacuauua

SEQ ID NO: 1477376 - RNA, 19 nt, Homo sapiens
  misc_RNA (1)...(19): siRNA sense strand
uaccucgucuuucuaacua

SEQ ID NO: 1477377 - RNA, 19 nt, Homo sapiens
  misc_RNA (1)...(19): siRNA sense strand
gcaacgugcuggacaccau

SEQ ID NO: 1477378 - RNA, 19 nt, Homo sapiens
  misc_RNA (1)...(19): siRNA sense strand
cugcugagguuguuuaagu

SEQ ID NO: 1477379 - RNA, 19 nt, Homo sapiens
  misc_RNA (1)...(19): siRNA sense strand
gagaaacgcaaguucaagu

SEQ ID NO: 1477380 - RNA, 19 nt, Homo sapiens
  misc_RNA (1)...(19): siRNA sense strand
caacauccucaacagcuuu

SEQ ID NO: 1477381 - RNA, 19 nt, Homo sapiens
  misc_RNA (1)...(19): siRNA sense strand
ccaucgagcuguauuucau

SEQ ID NO: 1477382 - RNA, 19 nt, Homo sapiens
  misc_RNA (1)...(19): siRNA sense strand
gagcagcagcgacaacuca

SEQ ID NO: 1477383 - RNA, 19 nt, Homo sapiens
  misc_RNA (1)...(19): siRNA sense strand
gguauuaauauccuuguga

SEQ ID NO: 1477384 - RNA, 19 nt, Homo sapiens
  misc_RNA (1)...(19): siRNA sense strand
guucaagucuuugcuacug

SEQ ID NO: 1477385 - RNA, 19 nt, Homo sapiens
  misc_RNA (1)...(19): siRNA sense strand
aaacgcaaguucaagucuu

SEQ ID NO: 1477386 - RNA, 19 nt, Homo sapiens
  misc_RNA (1)...(19): siRNA sense strand
gccagggagcgcuaucuua

SEQ ID NO: 1477387 - RNA, 19 nt, Homo sapiens
  misc_RNA (1)...(19): siRNA sense strand
cuccucaucuucaaaggua

SEQ ID NO: 1477388 - RNA, 19 nt, Homo sapiens
  misc_RNA (1)...(19): siRNA sense strand
cgagcuguauuucaucaug

SEQ ID NO: 1477389 - RNA, 19 nt, Homo sapiens
  misc_RNA (1)...(19): siRNA sense strand
caacaacugguacaucauc

SEQ ID NO: 1477390 - RNA, 19 nt, Homo sapiens
  misc_RNA (1)...(19): siRNA sense strand
guccaaggccuuccaguau

SEQ ID NO: 1477391 - RNA, 19 nt, Homo sapiens
  misc_RNA (1)...(19): siRNA sense strand
ucuacgaaguugcugcuuu

SEQ ID NO: 1477392 - RNA, 19 nt, Homo sapiens
  misc_RNA (1)...(19): siRNA sense strand
gcgagaacaacgacaaguu

SEQ ID NO: 1477393 - RNA, 19 nt, Homo sapiens
  misc_RNA (1)...(19): siRNA sense strand
gaacuacagccgcaagaac

SEQ ID NO: 1477394 - RNA, 19 nt, Homo sapiens
  misc_RNA (1)...(19): siRNA sense strand
gagagauaccagcaacauu

SEQ ID NO: 1477395 - RNA, 19 nt, Homo sapiens
  misc_RNA (1)...(19): siRNA sense strand
caaguucaagucuuugcua

SEQ ID NO: 1477396 - RNA, 19 nt, Homo sapiens
  misc_RNA (1)...(19): siRNA sense strand
agagauaccagcaacauuc

SEQ ID NO: 1477397 - RNA, 19 nt, Homo sapiens
  misc_RNA (1)...(19): siRNA sense strand
gaaggcgucaccucucaga

SEQ ID NO: 1477398 - RNA, 19 nt, Homo sapiens
  misc_RNA (1)...(19): siRNA sense strand
gaaaggugggaacuucuuc

SEQ ID NO: 1477399 - RNA, 19 nt, Homo sapiens
  misc_RNA (1)...(19): siRNA sense strand
uccaaggccuuccaguauu

SEQ ID NO: 1477400 - RNA, 19 nt, Homo sapiens
  misc_RNA (1)...(19): siRNA sense strand
uuaauauccuugugaaguc

SEQ ID NO: 1477401 - RNA, 19 nt, Homo sapiens
  misc_RNA (1)...(19): siRNA sense strand
uacgauaucuacgaaguug

SEQ ID NO: 1477402 - RNA, 19 nt, Homo sapiens
  misc_RNA (1)...(19): siRNA sense strand
ggagcuguuugcccugaug

SEQ ID NO: 1477403 - RNA, 19 nt, Homo sapiens
  misc_RNA (1)...(19): siRNA sense strand
caacugguacaucaucaug

SEQ ID NO: 1477404 - RNA, 19 nt, Homo sapiens
  misc_RNA (1)...(19): siRNA sense strand
ugagguuguuuaaguugaa

SEQ ID NO: 1477405 - RNA, 19 nt, Homo sapiens
  misc_RNA (1)...(19): siRNA sense strand
acagagagcacugguuuga

SEQ ID NO: 1477406 - RNA, 19 nt, Homo sapiens
  misc_RNA (1)...(19): siRNA sense strand
gcgaaccgcuauccagcau

SEQ ID NO: 1477407 - RNA, 19 nt, Homo sapiens
  misc_RNA (1)...(19): siRNA sense strand
cagcaucgucagucuguuu

SEQ ID NO: 1477408 - RNA, 19 nt, Homo sapiens
  misc_RNA (1)...(19): siRNA sense strand
ugaaguggaaggccaagaa

SEQ ID NO: 1477409 - RNA, 19 nt, Homo sapiens
  misc_RNA (1)...(19): siRNA sense strand
ggagagauaccagcaacau

SEQ ID NO: 1477410 - RNA, 19 nt, Homo sapiens
  misc_RNA (1)...(19): siRNA sense strand
uguuugagcucacaguugu

SEQ ID NO: 1477411 - RNA, 19 nt, Homo sapiens
  misc_RNA (1)...(19): siRNA sense strand
cugcugcuguucuucauga

SEQ ID NO: 1477412 - RNA, 19 nt, Homo sapiens
  misc_RNA (1)...(19): siRNA sense strand
agacauuuaugcugaaagg

SEQ ID NO: 1477413 - RNA, 19 nt, Homo sapiens
  misc_RNA (1)...(19): siRNA sense strand
ccaagaggcagcaaucuac

SEQ ID NO: 1477414 - RNA, 19 nt, Homo sapiens
  misc_RNA (1)...(19): siRNA sense strand
cagccaauuucccagaugu

SEQ ID NO: 1477415 - RNA, 19 nt, Homo sapiens
  misc_RNA (1)...(19): siRNA sense strand
ggaaggcuacuauuaucuc

SEQ ID NO: 1477416 - RNA, 19 nt, Homo sapiens
  misc_RNA (1)...(19): siRNA sense strand
aacgcaaguucaagucuuu

SEQ ID NO: 1477417 - RNA, 19 nt, Homo sapiens
  misc_RNA (1)...(19): siRNA sense strand
gaaacgcaaguucaagucu

SEQ ID NO: 1477418 - RNA, 19 nt, Homo sapiens
  misc_RNA (1)...(19): siRNA sense strand
gaucauugucgccuuuauc

SEQ ID NO: 1477419 - RNA, 19 nt, Homo sapiens
  misc_RNA (1)...(19): siRNA sense strand
ucacccugcucaucuuuua

SEQ ID NO: 1477420 - RNA, 19 nt, Homo sapiens
  misc_RNA (1)...(19): siRNA sense strand
gagagcacugguuugauga

SEQ ID NO: 1477421 - RNA, 19 nt, Homo sapiens
  misc_RNA (1)...(19): siRNA sense strand
caauuucccagaugugaug

SEQ ID NO: 1477422 - RNA, 19 nt, Homo sapiens
  misc_RNA (1)...(19): siRNA sense strand
aaccaggacucggaaguug

SEQ ID NO: 1477423 - RNA, 19 nt, Homo sapiens
  misc_RNA (1)...(19): siRNA sense strand
uggaaggcgucaccucuca

SEQ ID NO: 1477424 - RNA, 19 nt, Homo sapiens
  misc_RNA (1)...(19): siRNA sense strand
ggaacuucuucuccaagca

SEQ ID NO: 1477425 - RNA, 19 nt, Homo sapiens
  misc_RNA (1)...(19): siRNA sense strand
acaaucaccucuucuaccu

SEQ ID NO: 1477426 - RNA, 19 nt, Homo sapiens
  misc_RNA (1)...(19): siRNA sense strand
gcucccagaccguuaccua

SEQ ID NO: 1477427 - RNA, 19 nt, Homo sapiens
  misc_RNA (1)...(19): siRNA sense strand
ggaacuuguuugacuucuc

SEQ ID NO: 1477428 - RNA, 19 nt, Homo sapiens
  misc_RNA (1)...(19): siRNA sense strand
aggcuacuauuaucucaau

SEQ ID NO: 1477429 - RNA, 19 nt, Homo sapiens
  misc_RNA (1)...(19): siRNA sense strand
ccucgaggccuucgucuuc

SEQ ID NO: 1477430 - RNA, 19 nt, Homo sapiens
  misc_RNA (1)...(19): siRNA sense strand
ggagccgccucuacuucau

SEQ ID NO: 1477431 - RNA, 19 nt, Homo sapiens
  misc_RNA (1)...(19): siRNA sense strand
gcacugcgcugcauuuucc

SEQ ID NO: 1477432 - RNA, 19 nt, Homo sapiens
  misc_RNA (1)...(19): siRNA sense strand
ggagugguaugaggagcau

SEQ ID NO: 1477433 - RNA, 19 nt, Homo sapiens
  misc_RNA (1)...(19): siRNA sense strand
cauggagcccuucuauuuc

SEQ ID NO: 1477434 - RNA, 19 nt, Homo sapiens
  misc_RNA (1)...(19): siRNA sense strand
gugggaacuucuucuccaa

SEQ ID NO: 1477435 - RNA, 19 nt, Homo sapiens
  misc_RNA (1)...(19): siRNA sense strand
gcaguuugaaggccucaug

SEQ ID NO: 1477436 - RNA, 19 nt, Homo sapiens
  misc_RNA (1)...(19): siRNA sense strand
ggagaacagcaucgucagu

SEQ ID NO: 1477437 - RNA, 19 nt, Homo sapiens
  misc_RNA (1)...(19): siRNA sense strand
cugcuguucuucaugauca

SEQ ID NO: 1477438 - RNA, 19 nt, Homo sapiens
  misc_RNA (1)...(19): siRNA sense strand
acaacauccucaacagcuu

SEQ ID NO: 1477439 - RNA, 19 nt, Homo sapiens
  misc_RNA (1)...(19): siRNA sense strand
ugauggugguaguguuuga

SEQ ID NO: 1477440 - RNA, 19 nt, Homo sapiens
  misc_RNA (1)...(19): siRNA sense strand
gaaguugcugcuuugaagu

SEQ ID NO: 1477441 - RNA, 19 nt, Homo sapiens
  misc_RNA (1)...(19): siRNA sense strand
ccagggagcgcuaucuuac

SEQ ID NO: 1477442 - RNA, 19 nt, Homo sapiens
  misc_RNA (1)...(19): siRNA sense strand
uuugaacucugcaugaagu

SEQ ID NO: 1477443 - RNA, 19 nt, Homo sapiens
  misc_RNA (1)...(19): siRNA sense strand
gcugagguuguuuaaguug

SEQ ID NO: 1477444 - RNA, 19 nt, Homo sapiens
  misc_RNA (1)...(19): siRNA sense strand
uguuugaacucugcaugaa

SEQ ID NO: 1477445 - RNA, 19 nt, Homo sapiens
  misc_RNA (1)...(19): siRNA sense strand
gaaguuaccugcacuauuu

SEQ ID NO: 1477446 - RNA, 19 nt, Homo sapiens
  misc_RNA (1)...(19): siRNA sense strand
gaccaaggcugaaauaauu

SEQ ID NO: 1477447 - RNA, 19 nt, Homo sapiens
  misc_RNA (1)...(19): siRNA sense strand
gaagagcaauugaaagaaa

SEQ ID NO: 1477448 - RNA, 19 nt, Homo sapiens
  misc_RNA (1)...(19): siRNA sense strand
ccagaugccuuaaguauuu

SEQ ID NO: 1477449 - RNA, 19 nt, Homo sapiens
  misc_RNA (1)...(19): siRNA sense strand
gaacuuugaugaugauuug

SEQ ID NO: 1477450 - RNA, 19 nt, Homo sapiens
  misc_RNA (1)...(19): siRNA sense strand
gaagagaguuacccauauu

SEQ ID NO: 1477451 - RNA, 19 nt, Homo sapiens
  misc_RNA (1)...(19): siRNA sense strand
ggacaugaagccuuuauua

SEQ ID NO: 1477452 - RNA, 19 nt, Homo sapiens
  misc_RNA (1)...(19): siRNA sense strand
uaaagagccuggaagauuu

SEQ ID NO: 1477453 - RNA, 19 nt, Homo sapiens
  misc_RNA (1)...(19): siRNA sense strand
gaucaaagccuaauacaug

SEQ ID NO: 1477454 - RNA, 19 nt, Homo sapiens
  misc_RNA (1)...(19): siRNA sense strand
gaagguauuuggucgagua

SEQ ID NO: 1477455 - RNA, 19 nt, Homo sapiens
  misc_RNA (1)...(19): siRNA sense strand
ucaaagagcuugugcuaga

SEQ ID NO: 1477456 - RNA, 19 nt, Homo sapiens
  misc_RNA (1)...(19): siRNA sense strand
gaaguucucugugguguuu

SEQ ID NO: 1477457 - RNA, 19 nt, Homo sapiens
  misc_RNA (1)...(19): siRNA sense strand
aaagacagcuccaaugaaa

SEQ ID NO: 1477458 - RNA, 19 nt, Homo sapiens
  misc_RNA (1)...(19): siRNA sense strand
ggacagccauuuccucuga

SEQ ID NO: 1477459 - RNA, 19 nt, Homo sapiens
  misc_RNA (1)...(19): siRNA sense strand
caacaugccuuguaaaucu

SEQ ID NO: 1477460 - RNA, 19 nt, Homo sapiens
  misc_RNA (1)...(19): siRNA sense strand
gauuuaagcuuucagcauu

SEQ ID NO: 1477461 - RNA, 19 nt, Homo sapiens
  misc_RNA (1)...(19): siRNA sense strand
gaaagaacauugccgaagu

SEQ ID NO: 1477462 - RNA, 19 nt, Homo sapiens
  misc_RNA (1)...(19): siRNA sense strand
gcacuggcauucucauaaa

SEQ ID NO: 1477463 - RNA, 19 nt, Homo sapiens
  misc_RNA (1)...(19): siRNA sense strand
ugaaggagaugcuuauuau

SEQ ID NO: 1477464 - RNA, 19 nt, Homo sapiens
  misc_RNA (1)...(19): siRNA sense strand
gaaccuccauuucuucuau

SEQ ID NO: 1477465 - RNA, 19 nt, Homo sapiens
  misc_RNA (1)...(19): siRNA sense strand
ggaagagaguuacccauau

SEQ ID NO: 1477466 - RNA, 19 nt, Homo sapiens
  misc_RNA (1)...(19): siRNA sense strand
gaugggagauguauauuuc

SEQ ID NO: 1477467 - RNA, 19 nt, Homo sapiens
  misc_RNA (1)...(19): siRNA sense strand
gagauaccauuaugaaaga

SEQ ID NO: 1477468 - RNA, 19 nt, Homo sapiens
  misc_RNA (1)...(19): siRNA sense strand
gaacaucuccuugucauga

SEQ ID NO: 1477469 - RNA, 19 nt, Homo sapiens
  misc_RNA (1)...(19): siRNA sense strand
caaacuggcugauaugaau

SEQ ID NO: 1477470 - RNA, 19 nt, Homo sapiens
  misc_RNA (1)...(19): siRNA sense strand
ggagagagguauaaugauc

SEQ ID NO: 1477471 - RNA, 19 nt, Homo sapiens
  misc_RNA (1)...(19): siRNA sense strand
ggaaaugucccaguuaauu

SEQ ID NO: 1477472 - RNA, 19 nt, Homo sapiens
  misc_RNA (1)...(19): siRNA sense strand
ugaagacucucaacucgua

SEQ ID NO: 1477473 - RNA, 19 nt, Homo sapiens
  misc_RNA (1)...(19): siRNA sense strand
caaacaugguuccuugaua

SEQ ID NO: 1477474 - RNA, 19 nt, Homo sapiens
  misc_RNA (1)...(19): siRNA sense strand
gaaggaagaguagcaauuu

SEQ ID NO: 1477475 - RNA, 19 nt, Homo sapiens
  misc_RNA (1)...(19): siRNA sense strand
gagaaagcauccagcugua

SEQ ID NO: 1477476 - RNA, 19 nt, Homo sapiens
  misc_RNA (1)...(19): siRNA sense strand
ucccaaagcugauaaagaa

SEQ ID NO: 1477477 - RNA, 19 nt, Homo sapiens
  misc_RNA (1)...(19): siRNA sense strand
gaugccauguuucaaauuu

SEQ ID NO: 1477478 - RNA, 19 nt, Homo sapiens
  misc_RNA (1)...(19): siRNA sense strand
gaaagagggcuauuuagau

SEQ ID NO: 1477479 - RNA, 19 nt, Homo sapiens
  misc_RNA (1)...(19): siRNA sense strand
ggugaaagagggcuauuua

SEQ ID NO: 1477480 - RNA, 19 nt, Homo sapiens
  misc_RNA (1)...(19): siRNA sense strand
ccacaggacugcacauaug

SEQ ID NO: 1477481 - RNA, 19 nt, Homo sapiens
  misc_RNA (1)...(19): siRNA sense strand
caacuucccugaacuucuu

SEQ ID NO: 1477482 - RNA, 19 nt, Homo sapiens
  misc_RNA (1)...(19): siRNA sense strand
ggagauguauauuucuuug

SEQ ID NO: 1477483 - RNA, 19 nt, Homo sapiens
  misc_RNA (1)...(19): siRNA sense strand
ggacaauucaccauaguuu

SEQ ID NO: 1477484 - RNA, 19 nt, Homo sapiens
  misc_RNA (1)...(19): siRNA sense strand
ggugaacaguaauugcuua

SEQ ID NO: 1477485 - RNA, 19 nt, Homo sapiens
  misc_RNA (1)...(19): siRNA sense strand
caacucguaucucauuuga

SEQ ID NO: 1477486 - RNA, 19 nt, Homo sapiens
  misc_RNA (1)...(19): siRNA sense strand
aaagauggaugcuaggaaa

SEQ ID NO: 1477487 - RNA, 19 nt, Homo sapiens
  misc_RNA (1)...(19): siRNA sense strand
ggaauuugaugaacuugug

SEQ ID NO: 1477488 - RNA, 19 nt, Homo sapiens
  misc_RNA (1)...(19): siRNA sense strand
gaaagaaaccaucaccaau

SEQ ID NO: 1477489 - RNA, 19 nt, Homo sapiens
  misc_RNA (1)...(19): siRNA sense strand
ggaaagaaaccaucaccaa

SEQ ID NO: 1477490 - RNA, 19 nt, Homo sapiens
  misc_RNA (1)...(19): siRNA sense strand
gauggaagauuuguguaaa

SEQ ID NO: 1477491 - RNA, 19 nt, Homo sapiens
  misc_RNA (1)...(19): siRNA sense strand
caugaagccuuuauuacaa

SEQ ID NO: 1477492 - RNA, 19 nt, Homo sapiens
  misc_RNA (1)...(19): siRNA sense strand
caggaaaugucccaguuaa

SEQ ID NO: 1477493 - RNA, 19 nt, Homo sapiens
  misc_RNA (1)...(19): siRNA sense strand
cagaucauauugaaaggua

SEQ ID NO: 1477494 - RNA, 19 nt, Homo sapiens
  misc_RNA (1)...(19): siRNA sense strand
aaacauaugccuccuacua

SEQ ID NO: 1477495 - RNA, 19 nt, Homo sapiens
  misc_RNA (1)...(19): siRNA sense strand
gaacauugccgaagugaag

SEQ ID NO: 1477496 - RNA, 19 nt, Homo sapiens
  misc_RNA (1)...(19): siRNA sense strand
caaggaaggucaacguugu

SEQ ID NO: 1477497 - RNA, 19 nt, Homo sapiens
  misc_RNA (1)...(19): siRNA sense strand
acacuucccucucagcaua

SEQ ID NO: 1477498 - RNA, 19 nt, Homo sapiens
  misc_RNA (1)...(19): siRNA sense strand
gaauaaagagccuggaaga

SEQ ID NO: 1477499 - RNA, 19 nt, Homo sapiens
  misc_RNA (1)...(19): siRNA sense strand
gaaaccaucaccaaucaaa

SEQ ID NO: 1477500 - RNA, 19 nt, Homo sapiens
  misc_RNA (1)...(19): siRNA sense strand
uaucaaaguuggucagaga

SEQ ID NO: 1477501 - RNA, 19 nt, Homo sapiens
  misc_RNA (1)...(19): siRNA sense strand
gaacaacugaguacaacuu

SEQ ID NO: 1477502 - RNA, 19 nt, Homo sapiens
  misc_RNA (1)...(19): siRNA sense strand
gaaggaaaaugucgcuuaa

SEQ ID NO: 1477503 - RNA, 19 nt, Homo sapiens
  misc_RNA (1)...(19): siRNA sense strand
uaaagaaugugaagacucu

SEQ ID NO: 1477504 - RNA, 19 nt, Homo sapiens
  misc_RNA (1)...(19): siRNA sense strand
caacagaucauauugaaag

SEQ ID NO: 1477505 - RNA, 19 nt, Homo sapiens
  misc_RNA (1)...(19): siRNA sense strand
gaaacagucucuucgaaaa

SEQ ID NO: 1477506 - RNA, 19 nt, Homo sapiens
  misc_RNA (1)...(19): siRNA sense strand
gcacucaccauuaaaucua

SEQ ID NO: 1477507 - RNA, 19 nt, Homo sapiens
  misc_RNA (1)...(19): siRNA sense strand
caaauucacagguaaagaa

SEQ ID NO: 1477508 - RNA, 19 nt, Homo sapiens
  misc_RNA (1)...(19): siRNA sense strand
ugaagugucuagagaagaa

SEQ ID NO: 1477509 - RNA, 19 nt, Homo sapiens
  misc_RNA (1)...(19): siRNA sense strand
gaaauaauugcuagagaga

SEQ ID NO: 1477510 - RNA, 19 nt, Homo sapiens
  misc_RNA (1)...(19): siRNA sense strand
caucgugacucaaacuauu

SEQ ID NO: 1477511 - RNA, 19 nt, Homo sapiens
  misc_RNA (1)...(19): siRNA sense strand
aaacaugguuccuugauag

SEQ ID NO: 1477512 - RNA, 19 nt, Homo sapiens
  misc_RNA (1)...(19): siRNA sense strand
gcaauuucaccauuuguuu

SEQ ID NO: 1477513 - RNA, 19 nt, Homo sapiens
  misc_RNA (1)...(19): siRNA sense strand
ggaaggaagaguagcaauu

SEQ ID NO: 1477514 - RNA, 19 nt, Homo sapiens
  misc_RNA (1)...(19): siRNA sense strand
ccagaaaacuucauucauu

SEQ ID NO: 1477515 - RNA, 19 nt, Homo sapiens
  misc_RNA (1)...(19): siRNA sense strand
gcacuaacaacagaucaua

SEQ ID NO: 1477516 - RNA, 19 nt, Homo sapiens
  misc_RNA (1)...(19): siRNA sense strand
ucccugaacuucuuucuuu

SEQ ID NO: 1477517 - RNA, 19 nt, Homo sapiens
  misc_RNA (1)...(19): siRNA sense strand
gaaacuccaaaccauguua

SEQ ID NO: 1477518 - RNA, 19 nt, Homo sapiens
  misc_RNA (1)...(19): siRNA sense strand
guuaacugcuugcuugaaa

SEQ ID NO: 1477519 - RNA, 19 nt, Homo sapiens
  misc_RNA (1)...(19): siRNA sense strand
ggucagagacuuugagguu

SEQ ID NO: 1477520 - RNA, 19 nt, Homo sapiens
  misc_RNA (1)...(19): siRNA sense strand
ugacuuaaaugaugagcuu

SEQ ID NO: 1477521 - RNA, 19 nt, Homo sapiens
  misc_RNA (1)...(19): siRNA sense strand
gaacugcuuuaauucuuca

SEQ ID NO: 1477522 - RNA, 19 nt, Homo sapiens
  misc_RNA (1)...(19): siRNA sense strand
ggaggacaauucaccauag

SEQ ID NO: 1477523 - RNA, 19 nt, Homo sapiens
  misc_RNA (1)...(19): siRNA sense strand
gaagauauuuuccaccaaa

SEQ ID NO: 1477524 - RNA, 19 nt, Homo sapiens
  misc_RNA (1)...(19): siRNA sense strand
aaagagggcuauuuagauc

SEQ ID NO: 1477525 - RNA, 19 nt, Homo sapiens
  misc_RNA (1)...(19): siRNA sense strand
guugaaauccucuuuagaa

SEQ ID NO: 1477526 - RNA, 19 nt, Homo sapiens
  misc_RNA (1)...(19): siRNA sense strand
gaaugguacuucagaaucu

SEQ ID NO: 1477527 - RNA, 19 nt, Homo sapiens
  misc_RNA (1)...(19): siRNA sense strand
ggagauaccauuaugaaag

SEQ ID NO: 1477528 - RNA, 19 nt, Homo sapiens
  misc_RNA (1)...(19): siRNA sense strand
gagaauguaccaucgcuuu

SEQ ID NO: 1477529 - RNA, 19 nt, Homo sapiens
  misc_RNA (1)...(19): siRNA sense strand
ccagaaauguggaucaaag

SEQ ID NO: 1477530 - RNA, 19 nt, Homo sapiens
  misc_RNA (1)...(19): siRNA sense strand
gcuguaugaugccauguuu

SEQ ID NO: 1477531 - RNA, 19 nt, Homo sapiens
  misc_RNA (1)...(19): siRNA sense strand
aaacacagcuuuucaacuu

SEQ ID NO: 1477532 - RNA, 19 nt, Homo sapiens
  misc_RNA (1)...(19): siRNA sense strand
ggagaugcuuauuauuugu

SEQ ID NO: 1477533 - RNA, 19 nt, Homo sapiens
  misc_RNA (1)...(19): siRNA sense strand
gaguagcaauuucaccauu

SEQ ID NO: 1477534 - RNA, 19 nt, Homo sapiens
  misc_RNA (1)...(19): siRNA sense strand
ggacuuguaucacauuugc

SEQ ID NO: 1477535 - RNA, 19 nt, Homo sapiens
  misc_RNA (1)...(19): siRNA sense strand
ucaagaagguaauccuaug

SEQ ID NO: 1477536 - RNA, 19 nt, Homo sapiens
  misc_RNA (1)...(19): siRNA sense strand
ggagaugacccagaggaua

SEQ ID NO: 1477537 - RNA, 19 nt, Homo sapiens
  misc_RNA (1)...(19): siRNA sense strand
gaacaugauaaucuaguga

SEQ ID NO: 1477538 - RNA, 19 nt, Homo sapiens
  misc_RNA (1)...(19): siRNA sense strand
caaguuaggagcuguagaa

SEQ ID NO: 1477539 - RNA, 19 nt, Homo sapiens
  misc_RNA (1)...(19): siRNA sense strand
ucaaagacagcuccaauga

SEQ ID NO: 1477540 - RNA, 19 nt, Homo sapiens
  misc_RNA (1)...(19): siRNA sense strand
ugcaggagauggaagauuu

SEQ ID NO: 1477541 - RNA, 19 nt, Homo sapiens
  misc_RNA (1)...(19): siRNA sense strand
ccaccaaaguuccaagaug

SEQ ID NO: 1477542 - RNA, 19 nt, Homo sapiens
  misc_RNA (1)...(19): siRNA sense strand
ccuaauacaugaagcugaa

SEQ ID NO: 1477543 - RNA, 19 nt, Homo sapiens
  misc_RNA (1)...(19): siRNA sense strand
uuacuucacugguuaaaca

SEQ ID NO: 1477544 - RNA, 19 nt, Homo sapiens
  misc_RNA (1)...(19): siRNA sense strand
aaagagugaugauccuauu

SEQ ID NO: 1477545 - RNA, 19 nt, Homo sapiens
  misc_RNA (1)...(19): siRNA sense strand
gaggagcgaugguaucuug

SEQ ID NO: 1477546 - RNA, 19 nt, Homo sapiens
  misc_RNA (1)...(19): siRNA sense strand
ugaaucagaugaagaaguu

SEQ ID NO: 1477547 - RNA, 19 nt, Homo sapiens
  misc_RNA (1)...(19): siRNA sense strand
gcaagacguuuauccugaa

SEQ ID NO: 1477548 - RNA, 19 nt, Homo sapiens
  misc_RNA (1)...(19): siRNA sense strand
gaucauccaguacaacuuu

SEQ ID NO: 1477549 - RNA, 19 nt, Homo sapiens
  misc_RNA (1)...(19): siRNA sense strand
ggaaguuugagaagaauaa

SEQ ID NO: 1477550 - RNA, 19 nt, Homo sapiens
  misc_RNA (1)...(19): siRNA sense strand
caagggacuucgugaaugu

SEQ ID NO: 1477551 - RNA, 19 nt, Homo sapiens
  misc_RNA (1)...(19): siRNA sense strand
caaugaaucagaugaagaa

SEQ ID NO: 1477552 - RNA, 19 nt, Homo sapiens
  misc_RNA (1)...(19): siRNA sense strand
gaagacaacacccucaucu

SEQ ID NO: 1477553 - RNA, 19 nt, Homo sapiens
  misc_RNA (1)...(19): siRNA sense strand
ccaagggacuucgugaaug

SEQ ID NO: 1477554 - RNA, 19 nt, Homo sapiens
  misc_RNA (1)...(19): siRNA sense strand
gcgcagggaccgauacuug

SEQ ID NO: 1477555 - RNA, 19 nt, Homo sapiens
  misc_RNA (1)...(19): siRNA sense strand
acaacacccucaucuccua

SEQ ID NO: 1477556 - RNA, 19 nt, Homo sapiens
  misc_RNA (1)...(19): siRNA sense strand
agaaguugcugggaagaaa

SEQ ID NO: 1477557 - RNA, 19 nt, Homo sapiens
  misc_RNA (1)...(19): siRNA sense strand
agcaggagaucauccagua

SEQ ID NO: 1477558 - RNA, 19 nt, Homo sapiens
  misc_RNA (1)...(19): siRNA sense strand
ucaaggucauccucucuga

SEQ ID NO: 1477559 - RNA, 19 nt, Homo sapiens
  misc_RNA (1)...(19): siRNA sense strand
acacaggcauccguaagaa

SEQ ID NO: 1477560 - RNA, 19 nt, Homo sapiens
  misc_RNA (1)...(19): siRNA sense strand
ggauggugcuguggaacaa

SEQ ID NO: 1477561 - RNA, 19 nt, Homo sapiens
  misc_RNA (1)...(19): siRNA sense strand
gaagaggagcgaugguauc

SEQ ID NO: 1477562 - RNA, 19 nt, Homo sapiens
  misc_RNA (1)...(19): siRNA sense strand
ggagcugacccgagacuug

SEQ ID NO: 1477563 - RNA, 19 nt, Homo sapiens
  misc_RNA (1)...(19): siRNA sense strand
ucaucgaacugaauaccaa

SEQ ID NO: 1477564 - RNA, 19 nt, Homo sapiens
  misc_RNA (1)...(19): siRNA sense strand
gacaaugaaucagaugaag

SEQ ID NO: 1477565 - RNA, 19 nt, Homo sapiens
  misc_RNA (1)...(19): siRNA sense strand
acuggaaguuugagaagaa

SEQ ID NO: 1477566 - RNA, 19 nt, Homo sapiens
  misc_RNA (1)...(19): siRNA sense strand
gugcauuccucauugucaa

SEQ ID NO: 1477567 - RNA, 19 nt, Homo sapiens
  misc_RNA (1)...(19): siRNA sense strand
accuuugucuggauucuua

SEQ ID NO: 1477568 - RNA, 19 nt, Homo sapiens
  misc_RNA (1)...(19): siRNA sense strand
gaacuuggagcaggagauc

SEQ ID NO: 1477569 - RNA, 19 nt, Homo sapiens
  misc_RNA (1)...(19): siRNA sense strand
ggaccgauacuugucauca

SEQ ID NO: 1477570 - RNA, 19 nt, Homo sapiens
  misc_RNA (1)...(19): siRNA sense strand
ggacugcuccuaggcuaug

SEQ ID NO: 1477571 - RNA, 19 nt, Homo sapiens
  misc_RNA (1)...(19): siRNA sense strand
ccagugcauuccucauugu

SEQ ID NO: 1477572 - RNA, 19 nt, Homo sapiens
  misc_RNA (1)...(19): siRNA sense strand
ugacaaugaaucagaugaa

SEQ ID NO: 1477573 - RNA, 19 nt, Homo sapiens
  misc_RNA (1)...(19): siRNA sense strand
cggccaccauguuugaauu

SEQ ID NO: 1477574 - RNA, 19 nt, Homo sapiens
  misc_RNA (1)...(19): siRNA sense strand
cugcggagcucguguacca

SEQ ID NO: 1477575 - RNA, 19 nt, Homo sapiens
  misc_RNA (1)...(19): siRNA sense strand
gugcucaagucggccagua

SEQ ID NO: 1477576 - RNA, 19 nt, Homo sapiens
  misc_RNA (1)...(19): siRNA sense strand
caacacaggcauccguaag

SEQ ID NO: 1477577 - RNA, 19 nt, Homo sapiens
  misc_RNA (1)...(19): siRNA sense strand
ggaagacaacacccucauc

SEQ ID NO: 1477578 - RNA, 19 nt, Homo sapiens
  misc_RNA (1)...(19): siRNA sense strand
cgaacugaauaccaacaca

SEQ ID NO: 1477579 - RNA, 19 nt, Homo sapiens
  misc_RNA (1)...(19): siRNA sense strand
aaacuuccuucuucgacau

SEQ ID NO: 1477580 - RNA, 19 nt, Homo sapiens
  misc_RNA (1)...(19): siRNA sense strand
gaagaaguugcugggaaga

SEQ ID NO: 1477581 - RNA, 19 nt, Homo sapiens
  misc_RNA (1)...(19): siRNA sense strand
agaggauggugcuguggaa

SEQ ID NO: 1477582 - RNA, 19 nt, Homo sapiens
  misc_RNA (1)...(19): siRNA sense strand
cgagggacaguucuauuca

SEQ ID NO: 1477583 - RNA, 19 nt, Homo sapiens
  misc_RNA (1)...(19): siRNA sense strand
ucccugggcuccucacugu

SEQ ID NO: 1477584 - RNA, 19 nt, Homo sapiens
  misc_RNA (1)...(19): siRNA sense strand
gcgaagggccaucucugau

SEQ ID NO: 1477585 - RNA, 19 nt, Homo sapiens
  misc_RNA (1)...(19): siRNA sense strand
uccagugcauuccucauug

SEQ ID NO: 1477586 - RNA, 19 nt, Homo sapiens
  misc_RNA (1)...(19): siRNA sense strand
gccaccauguuugaauuug

SEQ ID NO: 1477587 - RNA, 19 nt, Homo sapiens
  misc_RNA (1)...(19): siRNA sense strand
uggaucaucgaacugaaua

SEQ ID NO: 1477588 - RNA, 19 nt, Homo sapiens
  misc_RNA (1)...(19): siRNA sense strand
caagacguuuauccugaag

SEQ ID NO: 1477589 - RNA, 19 nt, Homo sapiens
  misc_RNA (1)...(19): siRNA sense strand
ugaagaggagcgaugguau

SEQ ID NO: 1477590 - RNA, 19 nt, Homo sapiens
  misc_RNA (1)...(19): siRNA sense strand
gagaucauccaguacaacu

SEQ ID NO: 1477591 - RNA, 19 nt, Homo sapiens
  misc_RNA (1)...(19): siRNA sense strand
ggccaccauguuugaauuu

SEQ ID NO: 1477592 - RNA, 19 nt, Homo sapiens
  misc_RNA (1)...(19): siRNA sense strand
gaucgccaccucacacagu

SEQ ID NO: 1477593 - RNA, 19 nt, Homo sapiens
  misc_RNA (1)...(19): siRNA sense strand
gcagggaccgauacuuguc

SEQ ID NO: 1477594 - RNA, 19 nt, Homo sapiens
  misc_RNA (1)...(19): siRNA sense strand
guccagugcauuccucauu

SEQ ID NO: 1477595 - RNA, 19 nt, Homo sapiens
  misc_RNA (1)...(19): siRNA sense strand
gaccgauacuugucaucag

SEQ ID NO: 1477596 - RNA, 19 nt, Homo sapiens
  misc_RNA (1)...(19): siRNA sense strand
gaagcgaagggccaucucu

SEQ ID NO: 1477597 - RNA, 19 nt, Homo sapiens
  misc_RNA (1)...(19): siRNA sense strand
agaccugguuccuugacuu

SEQ ID NO: 1477598 - RNA, 19 nt, Homo sapiens
  misc_RNA (1)...(19): siRNA sense strand
acaaugaaucagaugaaga

SEQ ID NO: 1477599 - RNA, 19 nt, Homo sapiens
  misc_RNA (1)...(19): siRNA sense strand
caggagaucauccaguaca

SEQ ID NO: 1477600 - RNA, 19 nt, Homo sapiens
  misc_RNA (1)...(19): siRNA sense strand
caucuccuaugacgugucu

SEQ ID NO: 1477601 - RNA, 19 nt, Homo sapiens
  misc_RNA (1)...(19): siRNA sense strand
ccgagggacaguucuauuc

SEQ ID NO: 1477602 - RNA, 19 nt, Homo sapiens
  misc_RNA (1)...(19): siRNA sense strand
ccaacacaggcauccguaa

SEQ ID NO: 1477603 - RNA, 19 nt, Homo sapiens
  misc_RNA (1)...(19): siRNA sense strand
uugcagcgucugacaauga

SEQ ID NO: 1477604 - RNA, 19 nt, Homo sapiens
  misc_RNA (1)...(19): siRNA sense strand
cauguuugaauuugccuuu

SEQ ID NO: 1477605 - RNA, 19 nt, Homo sapiens
  misc_RNA (1)...(19): siRNA sense strand
caccauugaaguucccuuu

SEQ ID NO: 1477606 - RNA, 19 nt, Homo sapiens
  misc_RNA (1)...(19): siRNA sense strand
cauccaguacaacuuuaaa

SEQ ID NO: 1477607 - RNA, 19 nt, Homo sapiens
  misc_RNA (1)...(19): siRNA sense strand
ugucuggauucuuaauaca

SEQ ID NO: 1477608 - RNA, 19 nt, Homo sapiens
  misc_RNA (1)...(19): siRNA sense strand
gcaccuuugucuggauucu

SEQ ID NO: 1477609 - RNA, 19 nt, Homo sapiens
  misc_RNA (1)...(19): siRNA sense strand
ugcagcgucugacaaugaa

SEQ ID NO: 1477610 - RNA, 19 nt, Homo sapiens
  misc_RNA (1)...(19): siRNA sense strand
gagggacaguucuauucac

SEQ ID NO: 1477611 - RNA, 19 nt, Homo sapiens
  misc_RNA (1)...(19): siRNA sense strand
cguguacaccauugaaguu

SEQ ID NO: 1477612 - RNA, 19 nt, Homo sapiens
  misc_RNA (1)...(19): siRNA sense strand
caacacccucaucuccuau

SEQ ID NO: 1477613 - RNA, 19 nt, Homo sapiens
  misc_RNA (1)...(19): siRNA sense strand
gaccugguuccuugacuuc

SEQ ID NO: 1477614 - RNA, 19 nt, Homo sapiens
  misc_RNA (1)...(19): siRNA sense strand
ccaccauguuugaauuugc

SEQ ID NO: 1477615 - RNA, 19 nt, Homo sapiens
  misc_RNA (1)...(19): siRNA sense strand
uuucacggcaagacguuua

SEQ ID NO: 1477616 - RNA, 19 nt, Homo sapiens
  misc_RNA (1)...(19): siRNA sense strand
cugaagaggagcgauggua

SEQ ID NO: 1477617 - RNA, 19 nt, Homo sapiens
  misc_RNA (1)...(19): siRNA sense strand
gcagugguccuauuucuaa

SEQ ID NO: 1477618 - RNA, 19 nt, Homo sapiens
  misc_RNA (1)...(19): siRNA sense strand
gaacggcugugaagcuaug

SEQ ID NO: 1477619 - RNA, 19 nt, Homo sapiens
  misc_RNA (1)...(19): siRNA sense strand
aaacagauccucuugcauu

SEQ ID NO: 1477620 - RNA, 19 nt, Homo sapiens
  misc_RNA (1)...(19): siRNA sense strand
gaagcuaugcuacuacauu

SEQ ID NO: 1477621 - RNA, 19 nt, Homo sapiens
  misc_RNA (1)...(19): siRNA sense strand
ggaagcagugguccuauuu

SEQ ID NO: 1477622 - RNA, 19 nt, Homo sapiens
  misc_RNA (1)...(19): siRNA sense strand
ccacaacacuuacucaacu

SEQ ID NO: 1477623 - RNA, 19 nt, Homo sapiens
  misc_RNA (1)...(19): siRNA sense strand
guuacaaggucaccaguug

SEQ ID NO: 1477624 - RNA, 19 nt, Homo sapiens
  misc_RNA (1)...(19): siRNA sense strand
gaaggaagcaucacuaagc

SEQ ID NO: 1477625 - RNA, 19 nt, Homo sapiens
  misc_RNA (1)...(19): siRNA sense strand
ugucaaggcgugagaauaa

SEQ ID NO: 1477626 - RNA, 19 nt, Homo sapiens
  misc_RNA (1)...(19): siRNA sense strand
gggaacggcugugaagcua

SEQ ID NO: 1477627 - RNA, 19 nt, Homo sapiens
  misc_RNA (1)...(19): siRNA sense strand
gcagcaccaccuucaguua

SEQ ID NO: 1477628 - RNA, 19 nt, Homo sapiens
  misc_RNA (1)...(19): siRNA sense strand
aacagauccucuugcauua

SEQ ID NO: 1477629 - RNA, 19 nt, Homo sapiens
  misc_RNA (1)...(19): siRNA sense strand
caaggaaaaugcuuugaaa

SEQ ID NO: 1477630 - RNA, 19 nt, Homo sapiens
  misc_RNA (1)...(19): siRNA sense strand
ucuccuacccugaaaguua

SEQ ID NO: 1477631 - RNA, 19 nt, Homo sapiens
  misc_RNA (1)...(19): siRNA sense strand
ggaaggcucugcuccuacu

SEQ ID NO: 1477632 - RNA, 19 nt, Homo sapiens
  misc_RNA (1)...(19): siRNA sense strand
caacguaugguucuucuuc

SEQ ID NO: 1477633 - RNA, 19 nt, Homo sapiens
  misc_RNA (1)...(19): siRNA sense strand
cagauccucuugcauuaug

SEQ ID NO: 1477634 - RNA, 19 nt, Homo sapiens
  misc_RNA (1)...(19): siRNA sense strand
cgagugacguguugcugaa

SEQ ID NO: 1477635 - RNA, 19 nt, Homo sapiens
  misc_RNA (1)...(19): siRNA sense strand
acaaacagauccucuugca

SEQ ID NO: 1477636 - RNA, 19 nt, Homo sapiens
  misc_RNA (1)...(19): siRNA sense strand
gaggaaggaagcaucacua

SEQ ID NO: 1477637 - RNA, 19 nt, Homo sapiens
  misc_RNA (1)...(19): siRNA sense strand
aaacaaacagauccucuug

SEQ ID NO: 1477638 - RNA, 19 nt, Homo sapiens
  misc_RNA (1)...(19): siRNA sense strand
ucagaagccaugaaauuga

SEQ ID NO: 1477639 - RNA, 19 nt, Homo sapiens
  misc_RNA (1)...(19): siRNA sense strand
gaaaaugacgguuacauag

SEQ ID NO: 1477640 - RNA, 19 nt, Homo sapiens
  misc_RNA (1)...(19): siRNA sense strand
aagcuaugcuacuacauug

SEQ ID NO: 1477641 - RNA, 19 nt, Homo sapiens
  misc_RNA (1)...(19): siRNA sense strand
cuacauugaccgacuuaaa

SEQ ID NO: 1477642 - RNA, 19 nt, Homo sapiens
  misc_RNA (1)...(19): siRNA sense strand
cgggaaggcucugcuccua

SEQ ID NO: 1477643 - RNA, 19 nt, Homo sapiens
  misc_RNA (1)...(19): siRNA sense strand
ucucugagcauaauuguca

SEQ ID NO: 1477644 - RNA, 19 nt, Homo sapiens
  misc_RNA (1)...(19): siRNA sense strand
gugaagcuaugcuacuaca

SEQ ID NO: 1477645 - RNA, 19 nt, Homo sapiens
  misc_RNA (1)...(19): siRNA sense strand
uggaagcagugguccuauu

SEQ ID NO: 1477646 - RNA, 19 nt, Homo sapiens
  misc_RNA (1)...(19): siRNA sense strand
aaaugacgguuacauagag

SEQ ID NO: 1477647 - RNA, 19 nt, Homo sapiens
  misc_RNA (1)...(19): siRNA sense strand
ggucaccaguugaaaauga

SEQ ID NO: 1477648 - RNA, 19 nt, Homo sapiens
  misc_RNA (1)...(19): siRNA sense strand
gcaccaccuucaguuacaa

SEQ ID NO: 1477649 - RNA, 19 nt, Homo sapiens
  misc_RNA (1)...(19): siRNA sense strand
gacauucuccuacccugaa

SEQ ID NO: 1477650 - RNA, 19 nt, Homo sapiens
  misc_RNA (1)...(19): siRNA sense strand
gcauaauugucagccguau

SEQ ID NO: 1477651 - RNA, 19 nt, Homo sapiens
  misc_RNA (1)...(19): siRNA sense strand
ggaaggaagcaucacuaag

SEQ ID NO: 1477652 - RNA, 19 nt, Homo sapiens
  misc_RNA (1)...(19): siRNA sense strand
gugcaucccucagauuucu

SEQ ID NO: 1477653 - RNA, 19 nt, Homo sapiens
  misc_RNA (1)...(19): siRNA sense strand
ugaccgacuuaaacaagga

SEQ ID NO: 1477654 - RNA, 19 nt, Homo sapiens
  misc_RNA (1)...(19): siRNA sense strand
ucacuaagcacccuucaac

SEQ ID NO: 1477655 - RNA, 19 nt, Homo sapiens
  misc_RNA (1)...(19): siRNA sense strand
gaagcagugguccuauuuc

SEQ ID NO: 1477656 - RNA, 19 nt, Homo sapiens
  misc_RNA (1)...(19): siRNA sense strand
cagaagccaugaaauugac

SEQ ID NO: 1477657 - RNA, 19 nt, Homo sapiens
  misc_RNA (1)...(19): siRNA sense strand
cagugcaucccucagauuu

SEQ ID NO: 1477658 - RNA, 19 nt, Homo sapiens
  misc_RNA (1)...(19): siRNA sense strand
cuacuacauugaccgacuu

SEQ ID NO: 1477659 - RNA, 19 nt, Homo sapiens
  misc_RNA (1)...(19): siRNA sense strand
ugaaaaugacgguuacaua

SEQ ID NO: 1477660 - RNA, 19 nt, Homo sapiens
  misc_RNA (1)...(19): siRNA sense strand
aaaugagguuuacgagaca

SEQ ID NO: 1477661 - RNA, 19 nt, Homo sapiens
  misc_RNA (1)...(19): siRNA sense strand
gguggaagcagugguccua

SEQ ID NO: 1477662 - RNA, 19 nt, Homo sapiens
  misc_RNA (1)...(19): siRNA sense strand
ucaaggcgugagaauaauu

SEQ ID NO: 1477663 - RNA, 19 nt, Homo sapiens
  misc_RNA (1)...(19): siRNA sense strand
aaggaagcaucacuaagca

SEQ ID NO: 1477664 - RNA, 19 nt, Homo sapiens
  misc_RNA (1)...(19): siRNA sense strand
cugugaagcuaugcuacua

SEQ ID NO: 1477665 - RNA, 19 nt, Homo sapiens
  misc_RNA (1)...(19): siRNA sense strand
aagcagugguccuauuucu

SEQ ID NO: 1477666 - RNA, 19 nt, Homo sapiens
  misc_RNA (1)...(19): siRNA sense strand
gacagcauccacaacacuu

SEQ ID NO: 1477667 - RNA, 19 nt, Homo sapiens
  misc_RNA (1)...(19): siRNA sense strand
agauuucucugagcauaau

SEQ ID NO: 1477668 - RNA, 19 nt, Homo sapiens
  misc_RNA (1)...(19): siRNA sense strand
uuacucaacugaccaugcu

SEQ ID NO: 1477669 - RNA, 19 nt, Homo sapiens
  misc_RNA (1)...(19): siRNA sense strand
gauggugcaacguaugguu

SEQ ID NO: 1477670 - RNA, 19 nt, Homo sapiens
  misc_RNA (1)...(19): siRNA sense strand
gucaaggcgugagaauaau

SEQ ID NO: 1477671 - RNA, 19 nt, Homo sapiens
  misc_RNA (1)...(19): siRNA sense strand
acagcauccacaacacuua

SEQ ID NO: 1477672 - RNA, 19 nt, Homo sapiens
  misc_RNA (1)...(19): siRNA sense strand
gguccuauuucuaaaacaa

SEQ ID NO: 1477673 - RNA, 19 nt, Homo sapiens
  misc_RNA (1)...(19): siRNA sense strand
cagugguccuauuucuaaa

SEQ ID NO: 1477674 - RNA, 19 nt, Homo sapiens
  misc_RNA (1)...(19): siRNA sense strand
ccagugcaucccucagauu

SEQ ID NO: 1477675 - RNA, 19 nt, Homo sapiens
  misc_RNA (1)...(19): siRNA sense strand
aggaaggaagcaucacuaa

SEQ ID NO: 1477676 - RNA, 19 nt, Homo sapiens
  misc_RNA (1)...(19): siRNA sense strand
uacaaggucaccaguugaa

SEQ ID NO: 1477677 - RNA, 19 nt, Homo sapiens
  misc_RNA (1)...(19): siRNA sense strand
cacaacacuuacucaacug

SEQ ID NO: 1477678 - RNA, 19 nt, Homo sapiens
  misc_RNA (1)...(19): siRNA sense strand
uuacaaggucaccaguuga

SEQ ID NO: 1477679 - RNA, 19 nt, Homo sapiens
  misc_RNA (1)...(19): siRNA sense strand
gcugggaacggcugugaag

SEQ ID NO: 1477680 - RNA, 19 nt, Homo sapiens
  misc_RNA (1)...(19): siRNA sense strand
guaccuggcuguauuaugc

SEQ ID NO: 1477681 - RNA, 19 nt, Homo sapiens
  misc_RNA (1)...(19): siRNA sense strand
ggugagcaaugccuaccua

SEQ ID NO: 1477682 - RNA, 19 nt, Homo sapiens
  misc_RNA (1)...(19): siRNA sense strand
gagcaaugccuaccuauac

SEQ ID NO: 1477683 - RNA, 19 nt, Homo sapiens
  misc_RNA (1)...(19): siRNA sense strand
ccugguaccuggcuguauu

SEQ ID NO: 1477684 - RNA, 19 nt, Homo sapiens
  misc_RNA (1)...(19): siRNA sense strand
ggcaaagcccaccugguua

SEQ ID NO: 1477685 - RNA, 19 nt, Homo sapiens
  misc_RNA (1)...(19): siRNA sense strand
uggcaaagcccaccugguu

SEQ ID NO: 1477686 - RNA, 19 nt, Homo sapiens
  misc_RNA (1)...(19): siRNA sense strand
caagaggauccaaccauga

SEQ ID NO: 1477687 - RNA, 19 nt, Homo sapiens
  misc_RNA (1)...(19): siRNA sense strand
gcaaagcccaccugguuac

SEQ ID NO: 1477688 - RNA, 19 nt, Homo sapiens
  misc_RNA (1)...(19): siRNA sense strand
caaagagcagcuuggcaaa

SEQ ID NO: 1477689 - RNA, 19 nt, Homo sapiens
  misc_RNA (1)...(19): siRNA sense strand
gcuauaccaugcuacuucu

SEQ ID NO: 1477690 - RNA, 19 nt, Homo sapiens
  misc_RNA (1)...(19): siRNA sense strand
acccggugcuuaugucuuu

SEQ ID NO: 1477691 - RNA, 19 nt, Homo sapiens
  misc_RNA (1)...(19): siRNA sense strand
gcuuaugucuuuggcuuuc

SEQ ID NO: 1477692 - RNA, 19 nt, Homo sapiens
  misc_RNA (1)...(19): siRNA sense strand
ugagcaaugccuaccuaua

SEQ ID NO: 1477693 - RNA, 19 nt, Homo sapiens
  misc_RNA (1)...(19): siRNA sense strand
gcuuucuccuuccugauga

SEQ ID NO: 1477694 - RNA, 19 nt, Homo sapiens
  misc_RNA (1)...(19): siRNA sense strand
ggagaccgagucacacauc

SEQ ID NO: 1477695 - RNA, 19 nt, Homo sapiens
  misc_RNA (1)...(19): siRNA sense strand
gcacucccucucacggaaa

SEQ ID NO: 1477696 - RNA, 19 nt, Homo sapiens
  misc_RNA (1)...(19): siRNA sense strand
ccgaggcacuacugguguu

SEQ ID NO: 1477697 - RNA, 19 nt, Homo sapiens
  misc_RNA (1)...(19): siRNA sense strand
gagaccgagucacacaucu

SEQ ID NO: 1477698 - RNA, 19 nt, Homo sapiens
  misc_RNA (1)...(19): siRNA sense strand
gcccuguccucaccagcuu

SEQ ID NO: 1477699 - RNA, 19 nt, Homo sapiens
  misc_RNA (1)...(19): siRNA sense strand
ucacuggugcagccuggua

SEQ ID NO: 1477700 - RNA, 19 nt, Homo sapiens
  misc_RNA (1)...(19): siRNA sense strand
ccugggcuuuaccaucuuu

SEQ ID NO: 1477701 - RNA, 19 nt, Homo sapiens
  misc_RNA (1)...(19): siRNA sense strand
cucaagcuauaccaugcua

SEQ ID NO: 1477702 - RNA, 19 nt, Homo sapiens
  misc_RNA (1)...(19): siRNA sense strand
gaccgagucacacaucuac

SEQ ID NO: 1477703 - RNA, 19 nt, Homo sapiens
  misc_RNA (1)...(19): siRNA sense strand
ugaaccaggugagcaaugc

SEQ ID NO: 1477704 - RNA, 19 nt, Homo sapiens
  misc_RNA (1)...(19): siRNA sense strand
gaugaccgaggcacuacug

SEQ ID NO: 1477705 - RNA, 19 nt, Homo sapiens
  misc_RNA (1)...(19): siRNA sense strand
gcggagaccgagucacaca

SEQ ID NO: 1477706 - RNA, 19 nt, Homo sapiens
  misc_RNA (1)...(19): siRNA sense strand
ggguagugccagccucuug

SEQ ID NO: 1477707 - RNA, 19 nt, Homo sapiens
  misc_RNA (1)...(19): siRNA sense strand
gcaagaugcuuauugauuu

SEQ ID NO: 1477708 - RNA, 19 nt, Homo sapiens
  misc_RNA (1)...(19): siRNA sense strand
gcaaagagauuucuaucaa

SEQ ID NO: 1477709 - RNA, 19 nt, Homo sapiens
  misc_RNA (1)...(19): siRNA sense strand
gaaaugcgccuucuucuga

SEQ ID NO: 1477710 - RNA, 19 nt, Homo sapiens
  misc_RNA (1)...(19): siRNA sense strand
gcaaagaacagaaagagaa

SEQ ID NO: 1477711 - RNA, 19 nt, Homo sapiens
  misc_RNA (1)...(19): siRNA sense strand
gcacugaggagccugcuua

SEQ ID NO: 1477712 - RNA, 19 nt, Homo sapiens
  misc_RNA (1)...(19): siRNA sense strand
gagggaagcaacaugauua

SEQ ID NO: 1477713 - RNA, 19 nt, Homo sapiens
  misc_RNA (1)...(19): siRNA sense strand
ugaaguggauggcaagaaa

SEQ ID NO: 1477714 - RNA, 19 nt, Homo sapiens
  misc_RNA (1)...(19): siRNA sense strand
gaaccgaagauuccgauuu

SEQ ID NO: 1477715 - RNA, 19 nt, Homo sapiens
  misc_RNA (1)...(19): siRNA sense strand
gcugucaccugauuggaua

SEQ ID NO: 1477716 - RNA, 19 nt, Homo sapiens
  misc_RNA (1)...(19): siRNA sense strand
gaguaugacuuggaucuuu

SEQ ID NO: 1477717 - RNA, 19 nt, Homo sapiens
  misc_RNA (1)...(19): siRNA sense strand
agaggcagcuucgauauaa

SEQ ID NO: 1477718 - RNA, 19 nt, Homo sapiens
  misc_RNA (1)...(19): siRNA sense strand
gaaaggaugcugucucaca

SEQ ID NO: 1477719 - RNA, 19 nt, Homo sapiens
  misc_RNA (1)...(19): siRNA sense strand
gaugcccacuguaucauaa

SEQ ID NO: 1477720 - RNA, 19 nt, Homo sapiens
  misc_RNA (1)...(19): siRNA sense strand
gcacacagacaguucagaa

SEQ ID NO: 1477721 - RNA, 19 nt, Homo sapiens
  misc_RNA (1)...(19): siRNA sense strand
gaacacagacagaccuaug

SEQ ID NO: 1477722 - RNA, 19 nt, Homo sapiens
  misc_RNA (1)...(19): siRNA sense strand
aaauacagcugaucaugau

SEQ ID NO: 1477723 - RNA, 19 nt, Homo sapiens
  misc_RNA (1)...(19): siRNA sense strand
gggauaagcagauagaaga

SEQ ID NO: 1477724 - RNA, 19 nt, Homo sapiens
  misc_RNA (1)...(19): siRNA sense strand
gagaggcagcuucgauaua

SEQ ID NO: 1477725 - RNA, 19 nt, Homo sapiens
  misc_RNA (1)...(19): siRNA sense strand
gaugagauauaucgcaaag

SEQ ID NO: 1477726 - RNA, 19 nt, Homo sapiens
  misc_RNA (1)...(19): siRNA sense strand
gaaagcuacaacuucaaua

SEQ ID NO: 1477727 - RNA, 19 nt, Homo sapiens
  misc_RNA (1)...(19): siRNA sense strand
cagaggauuuggagaaguu

SEQ ID NO: 1477728 - RNA, 19 nt, Homo sapiens
  misc_RNA (1)...(19): siRNA sense strand
ugagauauaucgcaaaggu

SEQ ID NO: 1477729 - RNA, 19 nt, Homo sapiens
  misc_RNA (1)...(19): siRNA sense strand
uaggacaccuuacaggaaa

SEQ ID NO: 1477730 - RNA, 19 nt, Homo sapiens
  misc_RNA (1)...(19): siRNA sense strand
ggcaagaugcuuauugauu

SEQ ID NO: 1477731 - RNA, 19 nt, Homo sapiens
  misc_RNA (1)...(19): siRNA sense strand
caaagaacagaaagagaaa

SEQ ID NO: 1477732 - RNA, 19 nt, Homo sapiens
  misc_RNA (1)...(19): siRNA sense strand
cuuauaagcuaucgcaguu

SEQ ID NO: 1477733 - RNA, 19 nt, Homo sapiens
  misc_RNA (1)...(19): siRNA sense strand
caagaugcuuauugauuuc

SEQ ID NO: 1477734 - RNA, 19 nt, Homo sapiens
  misc_RNA (1)...(19): siRNA sense strand
aagaaaggaugcugucuca

SEQ ID NO: 1477735 - RNA, 19 nt, Homo sapiens
  misc_RNA (1)...(19): siRNA sense strand
cagcuucgauauaaggaaa

SEQ ID NO: 1477736 - RNA, 19 nt, Homo sapiens
  misc_RNA (1)...(19): siRNA sense strand
gcugggacgucucuauaug

SEQ ID NO: 1477737 - RNA, 19 nt, Homo sapiens
  misc_RNA (1)...(19): siRNA sense strand
ccaaauguguguggaaaca

SEQ ID NO: 1477738 - RNA, 19 nt, Homo sapiens
  misc_RNA (1)...(19): siRNA sense strand
uucgaaaucugcagucuuu

SEQ ID NO: 1477739 - RNA, 19 nt, Homo sapiens
  misc_RNA (1)...(19): siRNA sense strand
gaacguccacucucagauc

SEQ ID NO: 1477740 - RNA, 19 nt, Homo sapiens
  misc_RNA (1)...(19): siRNA sense strand
cuccauauccugaagaaua

SEQ ID NO: 1477741 - RNA, 19 nt, Homo sapiens
  misc_RNA (1)...(19): siRNA sense strand
ggacugagcaaagaacaga

SEQ ID NO: 1477742 - RNA, 19 nt, Homo sapiens
  misc_RNA (1)...(19): siRNA sense strand
gagccgggauaagcagaua

SEQ ID NO: 1477743 - RNA, 19 nt, Homo sapiens
  misc_RNA (1)...(19): siRNA sense strand
gcacagagccgggauaagc

SEQ ID NO: 1477744 - RNA, 19 nt, Homo sapiens
  misc_RNA (1)...(19): siRNA sense strand
cgccgucgcuuccaugaaa

SEQ ID NO: 1477745 - RNA, 19 nt, Homo sapiens
  misc_RNA (1)...(19): siRNA sense strand
caacgucuccuguauccuu

SEQ ID NO: 1477746 - RNA, 19 nt, Homo sapiens
  misc_RNA (1)...(19): siRNA sense strand
aacaagaucuacugccaaa

SEQ ID NO: 1477747 - RNA, 19 nt, Homo sapiens
  misc_RNA (1)...(19): siRNA sense strand
ucgcaaagguucaaucucu

SEQ ID NO: 1477748 - RNA, 19 nt, Homo sapiens
  misc_RNA (1)...(19): siRNA sense strand
ggccaaauguguguggaaa

SEQ ID NO: 1477749 - RNA, 19 nt, Homo sapiens
  misc_RNA (1)...(19): siRNA sense strand
aaacugagcaagugguuga

SEQ ID NO: 1477750 - RNA, 19 nt, Homo sapiens
  misc_RNA (1)...(19): siRNA sense strand
ggaagcaacaugauuaaaa

SEQ ID NO: 1477751 - RNA, 19 nt, Homo sapiens
  misc_RNA (1)...(19): siRNA sense strand
gaucccagcugcuuaaaau

SEQ ID NO: 1477752 - RNA, 19 nt, Homo sapiens
  misc_RNA (1)...(19): siRNA sense strand
uccgcuaccugcauaauuu

SEQ ID NO: 1477753 - RNA, 19 nt, Homo sapiens
  misc_RNA (1)...(19): siRNA sense strand
gagcacagagccgggauaa

SEQ ID NO: 1477754 - RNA, 19 nt, Homo sapiens
  misc_RNA (1)...(19): siRNA sense strand
cccuucagaugcucaaaua

SEQ ID NO: 1477755 - RNA, 19 nt, Homo sapiens
  misc_RNA (1)...(19): siRNA sense strand
ucaguuauuugcuuuccaa

SEQ ID NO: 1477756 - RNA, 19 nt, Homo sapiens
  misc_RNA (1)...(19): siRNA sense strand
agacagggcuauggcaaga

SEQ ID NO: 1477757 - RNA, 19 nt, Homo sapiens
  misc_RNA (1)...(19): siRNA sense strand
gaccacaagacauuauauu

SEQ ID NO: 1477758 - RNA, 19 nt, Homo sapiens
  misc_RNA (1)...(19): siRNA sense strand
ggagaggcagcuucgauau

SEQ ID NO: 1477759 - RNA, 19 nt, Homo sapiens
  misc_RNA (1)...(19): siRNA sense strand
cugagcaagugguugauuu

SEQ ID NO: 1477760 - RNA, 19 nt, Homo sapiens
  misc_RNA (1)...(19): siRNA sense strand
gaacacacgggaaccucuu

SEQ ID NO: 1477761 - RNA, 19 nt, Homo sapiens
  misc_RNA (1)...(19): siRNA sense strand
gauaagcagauagaagaaa

SEQ ID NO: 1477762 - RNA, 19 nt, Homo sapiens
  misc_RNA (1)...(19): siRNA sense strand
ggaaaugcgccuucuucug

SEQ ID NO: 1477763 - RNA, 19 nt, Homo sapiens
  misc_RNA (1)...(19): siRNA sense strand
ccucucagcugacgaaugc

SEQ ID NO: 1477764 - RNA, 19 nt, Homo sapiens
  misc_RNA (1)...(19): siRNA sense strand
agccagaguucucaagauu

SEQ ID NO: 1477765 - RNA, 19 nt, Homo sapiens
  misc_RNA (1)...(19): siRNA sense strand
ggaugcccacuguaucaua

SEQ ID NO: 1477766 - RNA, 19 nt, Homo sapiens
  misc_RNA (1)...(19): siRNA sense strand
aaagguccaacuccaauaa

SEQ ID NO: 1477767 - RNA, 19 nt, Homo sapiens
  misc_RNA (1)...(19): siRNA sense strand
gcaaagguucaaucucugu

SEQ ID NO: 1477768 - RNA, 19 nt, Homo sapiens
  misc_RNA (1)...(19): siRNA sense strand
cuauaugugugaauucugu

SEQ ID NO: 1477769 - RNA, 19 nt, Homo sapiens
  misc_RNA (1)...(19): siRNA sense strand
gaaauauauggaacacaga

SEQ ID NO: 1477770 - RNA, 19 nt, Homo sapiens
  misc_RNA (1)...(19): siRNA sense strand
ggcaguaguucagauggaa

SEQ ID NO: 1477771 - RNA, 19 nt, Homo sapiens
  misc_RNA (1)...(19): siRNA sense strand
agacagaccuaugggaaca

SEQ ID NO: 1477772 - RNA, 19 nt, Homo sapiens
  misc_RNA (1)...(19): siRNA sense strand
agcuacaacuucaauauga

SEQ ID NO: 1477773 - RNA, 19 nt, Homo sapiens
  misc_RNA (1)...(19): siRNA sense strand
ggaccacaagacauuauau

SEQ ID NO: 1477774 - RNA, 19 nt, Homo sapiens
  misc_RNA (1)...(19): siRNA sense strand
gaagcaacaugauuaaaac

SEQ ID NO: 1477775 - RNA, 19 nt, Homo sapiens
  misc_RNA (1)...(19): siRNA sense strand
gagcaaagaacagaaagag

SEQ ID NO: 1477776 - RNA, 19 nt, Homo sapiens
  misc_RNA (1)...(19): siRNA sense strand
gaaauucuggacugagcaa

SEQ ID NO: 1477777 - RNA, 19 nt, Homo sapiens
  misc_RNA (1)...(19): siRNA sense strand
ugaauccuguggacauugu

SEQ ID NO: 1477778 - RNA, 19 nt, Homo sapiens
  misc_RNA (1)...(19): siRNA sense strand
ucaaauacuggaagggaaa

SEQ ID NO: 1477779 - RNA, 19 nt, Homo sapiens
  misc_RNA (1)...(19): siRNA sense strand
gaaaacaugagagacauuu

SEQ ID NO: 1477780 - RNA, 19 nt, Homo sapiens
  misc_RNA (1)...(19): siRNA sense strand
ugaggagccugcuuacucu

SEQ ID NO: 1477781 - RNA, 19 nt, Homo sapiens
  misc_RNA (1)...(19): siRNA sense strand
uaugaagagccaaacgaua

SEQ ID NO: 1477782 - RNA, 19 nt, Homo sapiens
  misc_RNA (1)...(19): siRNA sense strand
ggauaagcagauagaagaa

SEQ ID NO: 1477783 - RNA, 19 nt, Homo sapiens
  misc_RNA (1)...(19): siRNA sense strand
gacaacaacaggcaugcaa

SEQ ID NO: 1477784 - RNA, 19 nt, Homo sapiens
  misc_RNA (1)...(19): siRNA sense strand
uauaagcuaucgcaguuac

SEQ ID NO: 1477785 - RNA, 19 nt, Homo sapiens
  misc_RNA (1)...(19): siRNA sense strand
cggagaggcagcuucgaua

SEQ ID NO: 1477786 - RNA, 19 nt, Homo sapiens
  misc_RNA (1)...(19): siRNA sense strand
ccugauugaugaguggaua

SEQ ID NO: 1477787 - RNA, 19 nt, Homo sapiens
  misc_RNA (1)...(19): siRNA sense strand
cuucuccgcuaccugcaua

SEQ ID NO: 1477788 - RNA, 19 nt, Homo sapiens
  misc_RNA (1)...(19): siRNA sense strand
gguucaaucucuguguuug

SEQ ID NO: 1477789 - RNA, 19 nt, Homo sapiens
  misc_RNA (1)...(19): siRNA sense strand
cacagacaguucagaaagu

SEQ ID NO: 1477790 - RNA, 19 nt, Homo sapiens
  misc_RNA (1)...(19): siRNA sense strand
caagauuccaguccuguuc

SEQ ID NO: 1477791 - RNA, 19 nt, Homo sapiens
  misc_RNA (1)...(19): siRNA sense strand
gaaggacucaggcagugau

SEQ ID NO: 1477792 - RNA, 19 nt, Homo sapiens
  misc_RNA (1)...(19): siRNA sense strand
ggcaaagagauuucuauca

SEQ ID NO: 1477793 - RNA, 19 nt, Homo sapiens
  misc_RNA (1)...(19): siRNA sense strand
ccugguaccauucuccaua

SEQ ID NO: 1477794 - RNA, 19 nt, Homo sapiens
  misc_RNA (1)...(19): siRNA sense strand
gaacucaggaagaaaagaa

SEQ ID NO: 1477795 - RNA, 19 nt, Homo sapiens
  misc_RNA (1)...(19): siRNA sense strand
ggcuauggcaagaugcuua

SEQ ID NO: 1477796 - RNA, 19 nt, Homo sapiens
  misc_RNA (1)...(19): siRNA sense strand
gaaugcaggcaguaguuca

SEQ ID NO: 1477797 - RNA, 19 nt, Homo sapiens
  misc_RNA (1)...(19): siRNA sense strand
ccaugaaagcuacaacuuc

SEQ ID NO: 1477798 - RNA, 19 nt, Homo sapiens
  misc_RNA (1)...(19): siRNA sense strand
gaagggaaaacaccuaguu

SEQ ID NO: 1477799 - RNA, 19 nt, Homo sapiens
  misc_RNA (1)...(19): siRNA sense strand
acagggcuauggcaagaug

SEQ ID NO: 1477800 - RNA, 19 nt, Homo sapiens
  misc_RNA (1)...(19): siRNA sense strand
caaucucuguguuugaagu

SEQ ID NO: 1477801 - RNA, 19 nt, Homo sapiens
  misc_RNA (1)...(19): siRNA sense strand
gccggcacauggccaaaug

SEQ ID NO: 1477802 - RNA, 19 nt, Homo sapiens
  misc_RNA (1)...(19): siRNA sense strand
cggcugggacgucucuaua

SEQ ID NO: 1477803 - RNA, 19 nt, Homo sapiens
  misc_RNA (1)...(19): siRNA sense strand
acagagggaagcaacauga

SEQ ID NO: 1477804 - RNA, 19 nt, Homo sapiens
  misc_RNA (1)...(19): siRNA sense strand
gcaggcaguaguucagaug

SEQ ID NO: 1477805 - RNA, 19 nt, Homo sapiens
  misc_RNA (1)...(19): siRNA sense strand
acagacaguucagaaagug

SEQ ID NO: 1477806 - RNA, 19 nt, Homo sapiens
  misc_RNA (1)...(19): siRNA sense strand
cccagaacguccacucuca

SEQ ID NO: 1477807 - RNA, 19 nt, Homo sapiens
  misc_RNA (1)...(19): siRNA sense strand
gaacaaaucgucauuggaa

SEQ ID NO: 1477808 - RNA, 19 nt, Homo sapiens
  misc_RNA (1)...(19): siRNA sense strand
gaacacaaacagcuucuua

SEQ ID NO: 1477809 - RNA, 19 nt, Homo sapiens
  misc_RNA (1)...(19): siRNA sense strand
ggacaucccuuuucuauaa

SEQ ID NO: 1477810 - RNA, 19 nt, Homo sapiens
  misc_RNA (1)...(19): siRNA sense strand
gaaacagggucuuuggauu

SEQ ID NO: 1477811 - RNA, 19 nt, Homo sapiens
  misc_RNA (1)...(19): siRNA sense strand
gaacagcaauucaagugau

SEQ ID NO: 1477812 - RNA, 19 nt, Homo sapiens
  misc_RNA (1)...(19): siRNA sense strand
gaguggaucucaaggcaua

SEQ ID NO: 1477813 - RNA, 19 nt, Homo sapiens
  misc_RNA (1)...(19): siRNA sense strand
uaacaaaggcuuauggauu

SEQ ID NO: 1477814 - RNA, 19 nt, Homo sapiens
  misc_RNA (1)...(19): siRNA sense strand
aacaaaggcuuauggauuu

SEQ ID NO: 1477815 - RNA, 19 nt, Homo sapiens
  misc_RNA (1)...(19): siRNA sense strand
acaaagagcugauaaacca

SEQ ID NO: 1477816 - RNA, 19 nt, Homo sapiens
  misc_RNA (1)...(19): siRNA sense strand
caaacaaaguggugcuaaa

SEQ ID NO: 1477817 - RNA, 19 nt, Homo sapiens
  misc_RNA (1)...(19): siRNA sense strand
caacacaccuaucucugaa

SEQ ID NO: 1477818 - RNA, 19 nt, Homo sapiens
  misc_RNA (1)...(19): siRNA sense strand
gaaagauggccuucauaaa

SEQ ID NO: 1477819 - RNA, 19 nt, Homo sapiens
  misc_RNA (1)...(19): siRNA sense strand
gcaaacaggacaucccuuu

SEQ ID NO: 1477820 - RNA, 19 nt, Homo sapiens
  misc_RNA (1)...(19): siRNA sense strand
caagaaacagcuucccaua

SEQ ID NO: 1477821 - RNA, 19 nt, Homo sapiens
  misc_RNA (1)...(19): siRNA sense strand
gaaacagcuucccauaaca

SEQ ID NO: 1477822 - RNA, 19 nt, Homo sapiens
  misc_RNA (1)...(19): siRNA sense strand
gaacaaagagcugauaaac

SEQ ID NO: 1477823 - RNA, 19 nt, Homo sapiens
  misc_RNA (1)...(19): siRNA sense strand
cacaaacagcuucuuaaua

SEQ ID NO: 1477824 - RNA, 19 nt, Homo sapiens
  misc_RNA (1)...(19): siRNA sense strand
agaaacagcuucccauaac

SEQ ID NO: 1477825 - RNA, 19 nt, Homo sapiens
  misc_RNA (1)...(19): siRNA sense strand
gauccgaagucguaauaca

SEQ ID NO: 1477826 - RNA, 19 nt, Homo sapiens
  misc_RNA (1)...(19): siRNA sense strand
ggaacaaagagcugauaaa

SEQ ID NO: 1477827 - RNA, 19 nt, Homo sapiens
  misc_RNA (1)...(19): siRNA sense strand
acagggcgcuggacgauga

SEQ ID NO: 1477828 - RNA, 19 nt, Homo sapiens
  misc_RNA (1)...(19): siRNA sense strand
ugauggaucuuaaucuuuc

SEQ ID NO: 1477829 - RNA, 19 nt, Homo sapiens
  misc_RNA (1)...(19): siRNA sense strand
gcaauucaagugauuacaa

SEQ ID NO: 1477830 - RNA, 19 nt, Homo sapiens
  misc_RNA (1)...(19): siRNA sense strand
gucaaccuguaaaugauua

SEQ ID NO: 1477831 - RNA, 19 nt, Homo sapiens
  misc_RNA (1)...(19): siRNA sense strand
caaacagcuucuuaauaug

SEQ ID NO: 1477832 - RNA, 19 nt, Homo sapiens
  misc_RNA (1)...(19): siRNA sense strand
ggaucaaauucaucuuaug

SEQ ID NO: 1477833 - RNA, 19 nt, Homo sapiens
  misc_RNA (1)...(19): siRNA sense strand
caggaucaaauucaucuua

SEQ ID NO: 1477834 - RNA, 19 nt, Homo sapiens
  misc_RNA (1)...(19): siRNA sense strand
ugacuucucuaugaauuug

SEQ ID NO: 1477835 - RNA, 19 nt, Homo sapiens
  misc_RNA (1)...(19): siRNA sense strand
gcauauucccuuuggcuuu

SEQ ID NO: 1477836 - RNA, 19 nt, Homo sapiens
  misc_RNA (1)...(19): siRNA sense strand
ggacaacacaccuaucucu

SEQ ID NO: 1477837 - RNA, 19 nt, Homo sapiens
  misc_RNA (1)...(19): siRNA sense strand
caugucaaccuguaaauga

SEQ ID NO: 1477838 - RNA, 19 nt, Homo sapiens
  misc_RNA (1)...(19): siRNA sense strand
ugauggagcccaacaagaa

SEQ ID NO: 1477839 - RNA, 19 nt, Homo sapiens
  misc_RNA (1)...(19): siRNA sense strand
aagccaagaucccagauau

SEQ ID NO: 1477840 - RNA, 19 nt, Homo sapiens
  misc_RNA (1)...(19): siRNA sense strand
caauauuucuucggaugaa

SEQ ID NO: 1477841 - RNA, 19 nt, Homo sapiens
  misc_RNA (1)...(19): siRNA sense strand
gggauccgaagucguaaua

SEQ ID NO: 1477842 - RNA, 19 nt, Homo sapiens
  misc_RNA (1)...(19): siRNA sense strand
gaacacguuucacucucau

SEQ ID NO: 1477843 - RNA, 19 nt, Homo sapiens
  misc_RNA (1)...(19): siRNA sense strand
gaauuuacaccugcuaugu

SEQ ID NO: 1477844 - RNA, 19 nt, Homo sapiens
  misc_RNA (1)...(19): siRNA sense strand
gcagugaccauuuggaaag

SEQ ID NO: 1477845 - RNA, 19 nt, Homo sapiens
  misc_RNA (1)...(19): siRNA sense strand
guuacuugguccagaauga

SEQ ID NO: 1477846 - RNA, 19 nt, Homo sapiens
  misc_RNA (1)...(19): siRNA sense strand
auuaacagcccacugaaua

SEQ ID NO: 1477847 - RNA, 19 nt, Homo sapiens
  misc_RNA (1)...(19): siRNA sense strand
cuuaauaugcagcguguua

SEQ ID NO: 1477848 - RNA, 19 nt, Homo sapiens
  misc_RNA (1)...(19): siRNA sense strand
gggaaugcgucacuauuuu

SEQ ID NO: 1477849 - RNA, 19 nt, Homo sapiens
  misc_RNA (1)...(19): siRNA sense strand
cagggucuuuggauucuuu

SEQ ID NO: 1477850 - RNA, 19 nt, Homo sapiens
  misc_RNA (1)...(19): siRNA sense strand
gcaauauuucuucggauga

SEQ ID NO: 1477851 - RNA, 19 nt, Homo sapiens
  misc_RNA (1)...(19): siRNA sense strand
uaacagcccacugaauauu

SEQ ID NO: 1477852 - RNA, 19 nt, Homo sapiens
  misc_RNA (1)...(19): siRNA sense strand
gauauaauucucccuucuu

SEQ ID NO: 1477853 - RNA, 19 nt, Homo sapiens
  misc_RNA (1)...(19): siRNA sense strand
ccacacagugcauguagaa

SEQ ID NO: 1477854 - RNA, 19 nt, Homo sapiens
  misc_RNA (1)...(19): siRNA sense strand
gaucuuaaucuuucagaca

SEQ ID NO: 1477855 - RNA, 19 nt, Homo sapiens
  misc_RNA (1)...(19): siRNA sense strand
aaagauggccuucauaaaa

SEQ ID NO: 1477856 - RNA, 19 nt, Homo sapiens
  misc_RNA (1)...(19): siRNA sense strand
ggaacagcaauucaaguga

SEQ ID NO: 1477857 - RNA, 19 nt, Homo sapiens
  misc_RNA (1)...(19): siRNA sense strand
caagaucccagauaugcaa

SEQ ID NO: 1477858 - RNA, 19 nt, Homo sapiens
  misc_RNA (1)...(19): siRNA sense strand
aaacagggucuuuggauuc

SEQ ID NO: 1477859 - RNA, 19 nt, Homo sapiens
  misc_RNA (1)...(19): siRNA sense strand
uggaagacuugaugaagau

SEQ ID NO: 1477860 - RNA, 19 nt, Homo sapiens
  misc_RNA (1)...(19): siRNA sense strand
gauggagcccaacaagaaa

SEQ ID NO: 1477861 - RNA, 19 nt, Homo sapiens
  misc_RNA (1)...(19): siRNA sense strand
aagaaacagcuucccauaa

SEQ ID NO: 1477862 - RNA, 19 nt, Homo sapiens
  misc_RNA (1)...(19): siRNA sense strand
gaaaacaacauggaagaaa

SEQ ID NO: 1477863 - RNA, 19 nt, Homo sapiens
  misc_RNA (1)...(19): siRNA sense strand
gaaaagaggaacacaaaca

SEQ ID NO: 1477864 - RNA, 19 nt, Homo sapiens
  misc_RNA (1)...(19): siRNA sense strand
gaagacuugaugaagauau

SEQ ID NO: 1477865 - RNA, 19 nt, Homo sapiens
  misc_RNA (1)...(19): siRNA sense strand
acaaaguggugcuaaaggu

SEQ ID NO: 1477866 - RNA, 19 nt, Homo sapiens
  misc_RNA (1)...(19): siRNA sense strand
acaaaggcagugaccauuu

SEQ ID NO: 1477867 - RNA, 19 nt, Homo sapiens
  misc_RNA (1)...(19): siRNA sense strand
ucucuguccuggcuuacua

SEQ ID NO: 1477868 - RNA, 19 nt, Homo sapiens
  misc_RNA (1)...(19): siRNA sense strand
guuuauccucguccaauua

SEQ ID NO: 1477869 - RNA, 19 nt, Homo sapiens
  misc_RNA (1)...(19): siRNA sense strand
cccuuuggcuuucuucauu

SEQ ID NO: 1477870 - RNA, 19 nt, Homo sapiens
  misc_RNA (1)...(19): siRNA sense strand
guagaaccgagccaagaaa

SEQ ID NO: 1477871 - RNA, 19 nt, Homo sapiens
  misc_RNA (1)...(19): siRNA sense strand
cauauucccuuuggcuuuc

SEQ ID NO: 1477872 - RNA, 19 nt, Homo sapiens
  misc_RNA (1)...(19): siRNA sense strand
ggaauuuacaccugcuaug

SEQ ID NO: 1477873 - RNA, 19 nt, Homo sapiens
  misc_RNA (1)...(19): siRNA sense strand
acacaaacagcuucuuaau

SEQ ID NO: 1477874 - RNA, 19 nt, Homo sapiens
  misc_RNA (1)...(19): siRNA sense strand
uuggaagacuugaugaaga

SEQ ID NO: 1477875 - RNA, 19 nt, Homo sapiens
  misc_RNA (1)...(19): siRNA sense strand
aauucucccuucuucauuu

SEQ ID NO: 1477876 - RNA, 19 nt, Homo sapiens
  misc_RNA (1)...(19): siRNA sense strand
gaucccagauaugcaaaca

SEQ ID NO: 1477877 - RNA, 19 nt, Homo sapiens
  misc_RNA (1)...(19): siRNA sense strand
aaacagcuucccauaacaa

SEQ ID NO: 1477878 - RNA, 19 nt, Homo sapiens
  misc_RNA (1)...(19): siRNA sense strand
gcagcguguuaaguguuua

SEQ ID NO: 1477879 - RNA, 19 nt, Homo sapiens
  misc_RNA (1)...(19): siRNA sense strand
cacccgugaugaaguauga

SEQ ID NO: 1477880 - RNA, 19 nt, Homo sapiens
  misc_RNA (1)...(19): siRNA sense strand
acaacacaccuaucucuga

SEQ ID NO: 1477881 - RNA, 19 nt, Homo sapiens
  misc_RNA (1)...(19): siRNA sense strand
cugcugauuuggagcguaa

SEQ ID NO: 1477882 - RNA, 19 nt, Homo sapiens
  misc_RNA (1)...(19): siRNA sense strand
gaaccgagccaagaaacag

SEQ ID NO: 1477883 - RNA, 19 nt, Homo sapiens
  misc_RNA (1)...(19): siRNA sense strand
ucuauuaacagcccacuga

SEQ ID NO: 1477884 - RNA, 19 nt, Homo sapiens
  misc_RNA (1)...(19): siRNA sense strand
cagacacccugcugaugga

SEQ ID NO: 1477885 - RNA, 19 nt, Homo sapiens
  misc_RNA (1)...(19): siRNA sense strand
gauaaaccagagugacuuc

SEQ ID NO: 1477886 - RNA, 19 nt, Homo sapiens
  misc_RNA (1)...(19): siRNA sense strand
ugggaaugcgucacuauuu

SEQ ID NO: 1477887 - RNA, 19 nt, Homo sapiens
  misc_RNA (1)...(19): siRNA sense strand
ggaagacuugaugaagaua

SEQ ID NO: 1477888 - RNA, 19 nt, Homo sapiens
  misc_RNA (1)...(19): siRNA sense strand
cuuuggcuuucuucauuua

SEQ ID NO: 1477889 - RNA, 19 nt, Homo sapiens
  misc_RNA (1)...(19): siRNA sense strand
acucucaugucaaccugua

SEQ ID NO: 1477890 - RNA, 19 nt, Homo sapiens
  misc_RNA (1)...(19): siRNA sense strand
ccaauuaucacguggaaaa

SEQ ID NO: 1477891 - RNA, 19 nt, Homo sapiens
  misc_RNA (1)...(19): siRNA sense strand
aaugcaaagugaacacguu

SEQ ID NO: 1477892 - RNA, 19 nt, Homo sapiens
  misc_RNA (1)...(19): siRNA sense strand
ccagugcacccgauaaugg

SEQ ID NO: 1477893 - RNA, 19 nt, Homo sapiens
  misc_RNA (1)...(19): siRNA sense strand
aaacaaaguggugcuaaag

SEQ ID NO: 1477894 - RNA, 19 nt, Homo sapiens
  misc_RNA (1)...(19): siRNA sense strand
gaggggauccgaagucgua

SEQ ID NO: 1477895 - RNA, 19 nt, Homo sapiens
  misc_RNA (1)...(19): siRNA sense strand
auauaauucucccuucuuc

SEQ ID NO: 1477896 - RNA, 19 nt, Homo sapiens
  misc_RNA (1)...(19): siRNA sense strand
ccuuuggcuuucuucauuu

SEQ ID NO: 1477897 - RNA, 19 nt, Homo sapiens
  misc_RNA (1)...(19): siRNA sense strand
aacagcccacugaauauua

SEQ ID NO: 1477898 - RNA, 19 nt, Homo sapiens
  misc_RNA (1)...(19): siRNA sense strand
aaacaacauggaagaaaca

SEQ ID NO: 1477899 - RNA, 19 nt, Homo sapiens
  misc_RNA (1)...(19): siRNA sense strand
aaacagcuucuuaauaugc

SEQ ID NO: 1477900 - RNA, 19 nt, Homo sapiens
  misc_RNA (1)...(19): siRNA sense strand
aacagcaauucaagugauu

SEQ ID NO: 1477901 - RNA, 19 nt, Homo sapiens
  misc_RNA (1)...(19): siRNA sense strand
uugcagagcccagcuagaa

SEQ ID NO: 1477902 - RNA, 19 nt, Homo sapiens
  misc_RNA (1)...(19): siRNA sense strand
acaaaucgucauuggaaga

SEQ ID NO: 1477903 - RNA, 19 nt, Homo sapiens
  misc_RNA (1)...(19): siRNA sense strand
gauggaucuuaaucuuuca

SEQ ID NO: 1477904 - RNA, 19 nt, Homo sapiens
  misc_RNA (1)...(19): siRNA sense strand
agugacuucucuaugaauu

SEQ ID NO: 1477905 - RNA, 19 nt, Homo sapiens
  misc_RNA (1)...(19): siRNA sense strand
guaggaacagcaauucaag

SEQ ID NO: 1477906 - RNA, 19 nt, Homo sapiens
  misc_RNA (1)...(19): siRNA sense strand
caagugauuacaaacaaag

SEQ ID NO: 1477907 - RNA, 19 nt, Homo sapiens
  misc_RNA (1)...(19): siRNA sense strand
gauagugacucggaucuua

SEQ ID NO: 1477908 - RNA, 19 nt, Homo sapiens
  misc_RNA (1)...(19): siRNA sense strand
gaagagugguuuccaguga

SEQ ID NO: 1477909 - RNA, 19 nt, Homo sapiens
  misc_RNA (1)...(19): siRNA sense strand
gaagaaagucugcaccaaa

SEQ ID NO: 1477910 - RNA, 19 nt, Homo sapiens
  misc_RNA (1)...(19): siRNA sense strand
ggaagaaagucugcaccaa

SEQ ID NO: 1477911 - RNA, 19 nt, Homo sapiens
  misc_RNA (1)...(19): siRNA sense strand
gaaagucugcaccaaaugu

SEQ ID NO: 1477912 - RNA, 19 nt, Homo sapiens
  misc_RNA (1)...(19): siRNA sense strand
acaaagggcuccccaagua

SEQ ID NO: 1477913 - RNA, 19 nt, Homo sapiens
  misc_RNA (1)...(19): siRNA sense strand
aagaaagucugcaccaaau

SEQ ID NO: 1477914 - RNA, 19 nt, Homo sapiens
  misc_RNA (1)...(19): siRNA sense strand
gaucugcagugagcaaaga

SEQ ID NO: 1477915 - RNA, 19 nt, Homo sapiens
  misc_RNA (1)...(19): siRNA sense strand
ggaaugaucaguggguuug

SEQ ID NO: 1477916 - RNA, 19 nt, Homo sapiens
  misc_RNA (1)...(19): siRNA sense strand
gcucgucgguguucugcaa

SEQ ID NO: 1477917 - RNA, 19 nt, Homo sapiens
  misc_RNA (1)...(19): siRNA sense strand
gcaaagacugcaggaagaa

SEQ ID NO: 1477918 - RNA, 19 nt, Homo sapiens
  misc_RNA (1)...(19): siRNA sense strand
aaagagaggucuggaagag

SEQ ID NO: 1477919 - RNA, 19 nt, Homo sapiens
  misc_RNA (1)...(19): siRNA sense strand
gcugguccgugcacaccua

SEQ ID NO: 1477920 - RNA, 19 nt, Homo sapiens
  misc_RNA (1)...(19): siRNA sense strand
uguguaagaucugcaguga

SEQ ID NO: 1477921 - RNA, 19 nt, Homo sapiens
  misc_RNA (1)...(19): siRNA sense strand
ccagugacagugauaguga

SEQ ID NO: 1477922 - RNA, 19 nt, Homo sapiens
  misc_RNA (1)...(19): siRNA sense strand
caaagagaggucuggaaga

SEQ ID NO: 1477923 - RNA, 19 nt, Homo sapiens
  misc_RNA (1)...(19): siRNA sense strand
gcagagcgagagcccagaa

SEQ ID NO: 1477924 - RNA, 19 nt, Homo sapiens
  misc_RNA (1)...(19): siRNA sense strand
ggaccggaaaggcgacaaa

SEQ ID NO: 1477925 - RNA, 19 nt, Homo sapiens
  misc_RNA (1)...(19): siRNA sense strand
gaacggccugucccagugu

SEQ ID NO: 1477926 - RNA, 19 nt, Homo sapiens
  misc_RNA (1)...(19): siRNA sense strand
gagaccagccgcaucuaca

SEQ ID NO: 1477927 - RNA, 19 nt, Homo sapiens
  misc_RNA (1)...(19): siRNA sense strand
caaagacugcaggaagaaa

SEQ ID NO: 1477928 - RNA, 19 nt, Homo sapiens
  misc_RNA (1)...(19): siRNA sense strand
gggaaugaucaguggguuu

SEQ ID NO: 1477929 - RNA, 19 nt, Homo sapiens
  misc_RNA (1)...(19): siRNA sense strand
gggccugguucuacaaagg

SEQ ID NO: 1477930 - RNA, 19 nt, Homo sapiens
  misc_RNA (1)...(19): siRNA sense strand
gcgacaaacccuggaagga

SEQ ID NO: 1477931 - RNA, 19 nt, Homo sapiens
  misc_RNA (1)...(19): siRNA sense strand
uaagaucugcagugagcaa

SEQ ID NO: 1477932 - RNA, 19 nt, Homo sapiens
  misc_RNA (1)...(19): siRNA sense strand
acaccuaccagacggagaa

SEQ ID NO: 1477933 - RNA, 19 nt, Homo sapiens
  misc_RNA (1)...(19): siRNA sense strand
gagcggcuggagaccauga

SEQ ID NO: 1477934 - RNA, 19 nt, Homo sapiens
  misc_RNA (1)...(19): siRNA sense strand
gaggacagacucccaucca

SEQ ID NO: 1477935 - RNA, 19 nt, Homo sapiens
  misc_RNA (1)...(19): siRNA sense strand
cggagaagcagaggaggaa

SEQ ID NO: 1477936 - RNA, 19 nt, Homo sapiens
  misc_RNA (1)...(19): siRNA sense strand
accaugaggcggaauguga

SEQ ID NO: 1477937 - RNA, 19 nt, Homo sapiens
  misc_RNA (1)...(19): siRNA sense strand
cggaagagcugaaggaauu

SEQ ID NO: 1477938 - RNA, 19 nt, Homo sapiens
  misc_RNA (1)...(19): siRNA sense strand
agagagagcuccagcagau

SEQ ID NO: 1477939 - RNA, 19 nt, Homo sapiens
  misc_RNA (1)...(19): siRNA sense strand
acacagagcccacggaugu

SEQ ID NO: 1477940 - RNA, 19 nt, Homo sapiens
  misc_RNA (1)...(19): siRNA sense strand
uuaacgaggugaagacaga

SEQ ID NO: 1477941 - RNA, 19 nt, Homo sapiens
  misc_RNA (1)...(19): siRNA sense strand
gcugggaucaggacuauga

SEQ ID NO: 1477942 - RNA, 19 nt, Homo sapiens
  misc_RNA (1)...(19): siRNA sense strand
agaugaagcuggaccuaga

SEQ ID NO: 1477943 - RNA, 19 nt, Homo sapiens
  misc_RNA (1)...(19): siRNA sense strand
ugaaggaugaccucucuuu

SEQ ID NO: 1477944 - RNA, 19 nt, Homo sapiens
  misc_RNA (1)...(19): siRNA sense strand
uccagcagcucaagcagaa

SEQ ID NO: 1477945 - RNA, 19 nt, Homo sapiens
  misc_RNA (1)...(19): siRNA sense strand
ggguacaagugcagcauca

SEQ ID NO: 1477946 - RNA, 19 nt, Homo sapiens
  misc_RNA (1)...(19): siRNA sense strand
gagcugaaggaauucuuug

SEQ ID NO: 1477947 - RNA, 19 nt, Homo sapiens
  misc_RNA (1)...(19): siRNA sense strand
cagcagauccgcauuaacg

SEQ ID NO: 1477948 - RNA, 19 nt, Homo sapiens
  misc_RNA (1)...(19): siRNA sense strand
ccacggaagagcugaagga

SEQ ID NO: 1477949 - RNA, 19 nt, Homo sapiens
  misc_RNA (1)...(19): siRNA sense strand
ggagaucgccaagaaaauu

SEQ ID NO: 1477950 - RNA, 19 nt, Homo sapiens
  misc_RNA (1)...(19): siRNA sense strand
gagguggccacaucaagga

SEQ ID NO: 1477951 - RNA, 19 nt, Homo sapiens
  misc_RNA (1)...(19): siRNA sense strand
ccuugagucuguaguguuc

SEQ ID NO: 1477952 - RNA, 19 nt, Homo sapiens
  misc_RNA (1)...(19): siRNA sense strand
ucuacaagcacacccauga

SEQ ID NO: 1477953 - RNA, 19 nt, Homo sapiens
  misc_RNA (1)...(19): siRNA sense strand
gcuaccacuucuuccucua

SEQ ID NO: 1477954 - RNA, 19 nt, Homo sapiens
  misc_RNA (1)...(19): siRNA sense strand
ccgcugggaucaggacuau

SEQ ID NO: 1477955 - RNA, 19 nt, Homo sapiens
  misc_RNA (1)...(19): siRNA sense strand
guuuggagguggccacauc

SEQ ID NO: 1477956 - RNA, 19 nt, Homo sapiens
  misc_RNA (1)...(19): siRNA sense strand
uccagcagauccgcauuaa

SEQ ID NO: 1477957 - RNA, 19 nt, Homo sapiens
  misc_RNA (1)...(19): siRNA sense strand
ccaagcaacacgccuucaa

SEQ ID NO: 1477958 - RNA, 19 nt, Homo sapiens
  misc_RNA (1)...(19): siRNA sense strand
guacaagugcagcaucaag

SEQ ID NO: 1477959 - RNA, 19 nt, Homo sapiens
  misc_RNA (1)...(19): siRNA sense strand
ucgggacugugaaggauga

SEQ ID NO: 1477960 - RNA, 19 nt, Homo sapiens
  misc_RNA (1)...(19): siRNA sense strand
gaaggaugaccucucuuuu

SEQ ID NO: 1477961 - RNA, 19 nt, Homo sapiens
  misc_RNA (1)...(19): siRNA sense strand
ugugaaggaugaccucucu

SEQ ID NO: 1477962 - RNA, 19 nt, Homo sapiens
  misc_RNA (1)...(19): siRNA sense strand
gaaaauggucaacuacauc

SEQ ID NO: 1477963 - RNA, 19 nt, Homo sapiens
  misc_RNA (1)...(19): siRNA sense strand
acagagaucaguguggaaa

SEQ ID NO: 1477964 - RNA, 19 nt, Homo sapiens
  misc_RNA (1)...(19): siRNA sense strand
gagcucuucgggacuguga

SEQ ID NO: 1477965 - RNA, 19 nt, Homo sapiens
  misc_RNA (1)...(19): siRNA sense strand
gcucuaccgccucgacuca

SEQ ID NO: 1477966 - RNA, 19 nt, Homo sapiens
  misc_RNA (1)...(19): siRNA sense strand
caagcaacacgccuucaag

SEQ ID NO: 1477967 - RNA, 19 nt, Homo sapiens
  misc_RNA (1)...(19): siRNA sense strand
ugaccucggcugagagaga

SEQ ID NO: 1477968 - RNA, 19 nt, Homo sapiens
  misc_RNA (1)...(19): siRNA sense strand
cgccucgacucacagaaug

SEQ ID NO: 1477969 - RNA, 19 nt, Homo sapiens
  misc_RNA (1)...(19): siRNA sense strand
ggagcaggacuuccaucug

SEQ ID NO: 1477970 - RNA, 19 nt, Homo sapiens
  misc_RNA (1)...(19): siRNA sense strand
agucuguaguguucaucua

SEQ ID NO: 1477971 - RNA, 19 nt, Homo sapiens
  misc_RNA (1)...(19): siRNA sense strand
gcucugugcggcucaucaa

SEQ ID NO: 1477972 - RNA, 19 nt, Homo sapiens
  misc_RNA (1)...(19): siRNA sense strand
cuagagcgggaaaccauug

SEQ ID NO: 1477973 - RNA, 19 nt, Homo sapiens
  misc_RNA (1)...(19): siRNA sense strand
ugaagacagagaucagugu

SEQ ID NO: 1477974 - RNA, 19 nt, Homo sapiens
  misc_RNA (1)...(19): siRNA sense strand
gaggugaagacagagauca

SEQ ID NO: 1477975 - RNA, 19 nt, Homo sapiens
  misc_RNA (1)...(19): siRNA sense strand
ccaucaacgugaaccauua

SEQ ID NO: 1477976 - RNA, 19 nt, Homo sapiens
  misc_RNA (1)...(19): siRNA sense strand
gcugaaggccgucguggaa

SEQ ID NO: 1477977 - RNA, 19 nt, Homo sapiens
  misc_RNA (1)...(19): siRNA sense strand
ccacgggccugguguucau

SEQ ID NO: 1477978 - RNA, 19 nt, Homo sapiens
  misc_RNA (1)...(19): siRNA sense strand
guagucaacaucuucauca

SEQ ID NO: 1477979 - RNA, 19 nt, Homo sapiens
  misc_RNA (1)...(19): siRNA sense strand
cagcuucgccuucuaugug

SEQ ID NO: 1477980 - RNA, 19 nt, Homo sapiens
  misc_RNA (1)...(19): siRNA sense strand
ucaaguacgaccuuaacaa

SEQ ID NO: 1477981 - RNA, 19 nt, Homo sapiens
  misc_RNA (1)...(19): siRNA sense strand
cugcucaucuuccuuguca

SEQ ID NO: 1477982 - RNA, 19 nt, Homo sapiens
  misc_RNA (1)...(19): siRNA sense strand
aagcuggacuuccucaaca

SEQ ID NO: 1477983 - RNA, 19 nt, Homo sapiens
  misc_RNA (1)...(19): siRNA sense strand
ugaaggccgucguggaaca

SEQ ID NO: 1477984 - RNA, 19 nt, Homo sapiens
  misc_RNA (1)...(19): siRNA sense strand
caaguacgaccuuaacaac

SEQ ID NO: 1477985 - RNA, 19 nt, Homo sapiens
  misc_RNA (1)...(19): siRNA sense strand
uuaacaacccggacaagca

SEQ ID NO: 1477986 - RNA, 19 nt, Homo sapiens
  misc_RNA (1)...(19): siRNA sense strand
gguagucaacaucuucauc

SEQ ID NO: 1477987 - RNA, 19 nt, Homo sapiens
  misc_RNA (1)...(19): siRNA sense strand
gaagagcaguguaccauca

SEQ ID NO: 1477988 - RNA, 19 nt, Homo sapiens
  misc_RNA (1)...(19): siRNA sense strand
gaagaaggacacuccauuu

SEQ ID NO: 1477989 - RNA, 19 nt, Homo sapiens
  misc_RNA (1)...(19): siRNA sense strand
ggaggccacuucaucagua

SEQ ID NO: 1477990 - RNA, 19 nt, Homo sapiens
  misc_RNA (1)...(19): siRNA sense strand
cgacguggcugaccugcua

SEQ ID NO: 1477991 - RNA, 19 nt, Homo sapiens
  misc_RNA (1)...(19): siRNA sense strand
gaaggacacuccauuucug

SEQ ID NO: 1477992 - RNA, 19 nt, Homo sapiens
  misc_RNA (1)...(19): siRNA sense strand
gaaccugcgucaaaugaau

SEQ ID NO: 1477993 - RNA, 19 nt, Homo sapiens
  misc_RNA (1)...(19): siRNA sense strand
ccaagaagcgccaucguaa

SEQ ID NO: 1477994 - RNA, 19 nt, Homo sapiens
  misc_RNA (1)...(19): siRNA sense strand
ggaagaaggacacuccauu

SEQ ID NO: 1477995 - RNA, 19 nt, Homo sapiens
  misc_RNA (1)...(19): siRNA sense strand
gaacccaccuuugccucua

SEQ ID NO: 1477996 - RNA, 19 nt, Homo sapiens
  misc_RNA (1)...(19): siRNA sense strand
gggcagcuaugcucaccua

SEQ ID NO: 1477997 - RNA, 19 nt, Homo sapiens
  misc_RNA (1)...(19): siRNA sense strand
ccacuuuccuccagaucua

SEQ ID NO: 1477998 - RNA, 19 nt, Homo sapiens
  misc_RNA (1)...(19): siRNA sense strand
ggaccugagugacaacaug

SEQ ID NO: 1477999 - RNA, 19 nt, Homo sapiens
  misc_RNA (1)...(19): siRNA sense strand
cagagucgcuggagaucaa

SEQ ID NO: 1478000 - RNA, 19 nt, Homo sapiens
  misc_RNA (1)...(19): siRNA sense strand
gggcugaggcugaagauga

SEQ ID NO: 1478001 - RNA, 19 nt, Homo sapiens
  misc_RNA (1)...(19): siRNA sense strand
ggaacaagaccccagauua

SEQ ID NO: 1478002 - RNA, 19 nt, Homo sapiens
  misc_RNA (1)...(19): siRNA sense strand
gaaugaagacucagaagag

SEQ ID NO: 1478003 - RNA, 19 nt, Homo sapiens
  misc_RNA (1)...(19): siRNA sense strand
guacccagcugagccugua

SEQ ID NO: 1478004 - RNA, 19 nt, Homo sapiens
  misc_RNA (1)...(19): siRNA sense strand
ccacaaaccaggcacauuc

SEQ ID NO: 1478005 - RNA, 19 nt, Homo sapiens
  misc_RNA (1)...(19): siRNA sense strand
guagaaauagccacaguug

SEQ ID NO: 1478006 - RNA, 19 nt, Homo sapiens
  misc_RNA (1)...(19): siRNA sense strand
gagcaaacgcagccucauu

SEQ ID NO: 1478007 - RNA, 19 nt, Homo sapiens
  misc_RNA (1)...(19): siRNA sense strand
ccagcgaacuugacaguag

SEQ ID NO: 1478008 - RNA, 19 nt, Homo sapiens
  misc_RNA (1)...(19): siRNA sense strand
cagcacguaugacaacuug

SEQ ID NO: 1478009 - RNA, 19 nt, Homo sapiens
  misc_RNA (1)...(19): siRNA sense strand
uggcauagcuuccagaacu

SEQ ID NO: 1478010 - RNA, 19 nt, Homo sapiens
  misc_RNA (1)...(19): siRNA sense strand
guaggcaucuuccgcaagu

SEQ ID NO: 1478011 - RNA, 19 nt, Homo sapiens
  misc_RNA (1)...(19): siRNA sense strand
gagaucaaccggcaguuug

SEQ ID NO: 1478012 - RNA, 19 nt, Homo sapiens
  misc_RNA (1)...(19): siRNA sense strand
caagcagaaugaagacuca

SEQ ID NO: 1478013 - RNA, 19 nt, Homo sapiens
  misc_RNA (1)...(19): siRNA sense strand
ggagaucaaccggcaguuu

SEQ ID NO: 1478014 - RNA, 19 nt, Homo sapiens
  misc_RNA (1)...(19): siRNA sense strand
caacuugccugagcuguac

SEQ ID NO: 1478015 - RNA, 19 nt, Homo sapiens
  misc_RNA (1)...(19): siRNA sense strand
gccaagaagcgccaucgua

SEQ ID NO: 1478016 - RNA, 19 nt, Homo sapiens
  misc_RNA (1)...(19): siRNA sense strand
ggaggaggccacuucauca

SEQ ID NO: 1478017 - RNA, 19 nt, Homo sapiens
  misc_RNA (1)...(19): siRNA sense strand
gaagaggaagagcagugua

SEQ ID NO: 1478018 - RNA, 19 nt, Homo sapiens
  misc_RNA (1)...(19): siRNA sense strand
aagcagagcccaagcauag

SEQ ID NO: 1478019 - RNA, 19 nt, Homo sapiens
  misc_RNA (1)...(19): siRNA sense strand
aguaagugcuggucuccua

SEQ ID NO: 1478020 - RNA, 19 nt, Homo sapiens
  misc_RNA (1)...(19): siRNA sense strand
gcagaaugaagacucagaa

SEQ ID NO: 1478021 - RNA, 19 nt, Homo sapiens
  misc_RNA (1)...(19): siRNA sense strand
ccauggaaguggcaaagau

SEQ ID NO: 1478022 - RNA, 19 nt, Homo sapiens
  misc_RNA (1)...(19): siRNA sense strand
aaugagaccucgccugaca

SEQ ID NO: 1478023 - RNA, 19 nt, Homo sapiens
  misc_RNA (1)...(19): siRNA sense strand
ggcugaggcugaagaugaa

SEQ ID NO: 1478024 - RNA, 19 nt, Homo sapiens
  misc_RNA (1)...(19): siRNA sense strand
aaagcaagcagaaugaaga

SEQ ID NO: 1478025 - RNA, 19 nt, Homo sapiens
  misc_RNA (1)...(19): siRNA sense strand
gagcaguguaccaucagua

SEQ ID NO: 1478026 - RNA, 19 nt, Homo sapiens
  misc_RNA (1)...(19): siRNA sense strand
gcucucggcucacacacau

SEQ ID NO: 1478027 - RNA, 19 nt, Homo sapiens
  misc_RNA (1)...(19): siRNA sense strand
gcaagcucaccaccacuuu

SEQ ID NO: 1478028 - RNA, 19 nt, Homo sapiens
  misc_RNA (1)...(19): siRNA sense strand
ggaccaaguaggcaucuuc

SEQ ID NO: 1478029 - RNA, 19 nt, Homo sapiens
  misc_RNA (1)...(19): siRNA sense strand
ccgcguucauggagaagua

SEQ ID NO: 1478030 - RNA, 19 nt, Homo sapiens
  misc_RNA (1)...(19): siRNA sense strand
gaaacuggagguucauuuu

SEQ ID NO: 1478031 - RNA, 19 nt, Homo sapiens
  misc_RNA (1)...(19): siRNA sense strand
ugucgcacaugaucaguga

SEQ ID NO: 1478032 - RNA, 19 nt, Homo sapiens
  misc_RNA (1)...(19): siRNA sense strand
uacagacccugcucuacuu

SEQ ID NO: 1478033 - RNA, 19 nt, Homo sapiens
  misc_RNA (1)...(19): siRNA sense strand
cagaaccugcgucaaauga

SEQ ID NO: 1478034 - RNA, 19 nt, Homo sapiens
  misc_RNA (1)...(19): siRNA sense strand
agaaauagccacaguugag

SEQ ID NO: 1478035 - RNA, 19 nt, Homo sapiens
  misc_RNA (1)...(19): siRNA sense strand
gaacaaccugugccagagu

SEQ ID NO: 1478036 - RNA, 19 nt, Homo sapiens
  misc_RNA (1)...(19): siRNA sense strand
gaacaagaccccagauuac

SEQ ID NO: 1478037 - RNA, 19 nt, Homo sapiens
  misc_RNA (1)...(19): siRNA sense strand
agugggaacuccaugaaug

SEQ ID NO: 1478038 - RNA, 19 nt, Homo sapiens
  misc_RNA (1)...(19): siRNA sense strand
cagcugagccuguaauggu

SEQ ID NO: 1478039 - RNA, 19 nt, Homo sapiens
  misc_RNA (1)...(19): siRNA sense strand
gacccugcucuacuucuua

SEQ ID NO: 1478040 - RNA, 19 nt, Homo sapiens
  misc_RNA (1)...(19): siRNA sense strand
ggcugaagaugaagaugau

SEQ ID NO: 1478041 - RNA, 19 nt, Homo sapiens
  misc_RNA (1)...(19): siRNA sense strand
ugaagacucagaagaggaa

SEQ ID NO: 1478042 - RNA, 19 nt, Homo sapiens
  misc_RNA (1)...(19): siRNA sense strand
caagcagagcccaagcaua

SEQ ID NO: 1478043 - RNA, 19 nt, Homo sapiens
  misc_RNA (1)...(19): siRNA sense strand
cuagggaccugagugacaa

SEQ ID NO: 1478044 - RNA, 19 nt, Homo sapiens
  misc_RNA (1)...(19): siRNA sense strand
gcagcuaugcucaccuaga

SEQ ID NO: 1478045 - RNA, 19 nt, Homo sapiens
  misc_RNA (1)...(19): siRNA sense strand
cagcuaugcucaccuagac

SEQ ID NO: 1478046 - RNA, 19 nt, Homo sapiens
  misc_RNA (1)...(19): siRNA sense strand
agaccucgccugacaaugu

SEQ ID NO: 1478047 - RNA, 19 nt, Homo sapiens
  misc_RNA (1)...(19): siRNA sense strand
cacuucaucaguagaaaua

SEQ ID NO: 1478048 - RNA, 19 nt, Homo sapiens
  misc_RNA (1)...(19): siRNA sense strand
ucaaugcccaaguucauga

SEQ ID NO: 1478049 - RNA, 19 nt, Homo sapiens
  misc_RNA (1)...(19): siRNA sense strand
aggaagcuccguuggcaua

SEQ ID NO: 1478050 - RNA, 19 nt, Homo sapiens
  misc_RNA (1)...(19): siRNA sense strand
guagugggaacuccaugaa

SEQ ID NO: 1478051 - RNA, 19 nt, Homo sapiens
  misc_RNA (1)...(19): siRNA sense strand
uagccugucuguggaagaa

SEQ ID NO: 1478052 - RNA, 19 nt, Homo sapiens
  misc_RNA (1)...(19): siRNA sense strand
agaaugaagacucagaaga

SEQ ID NO: 1478053 - RNA, 19 nt, Homo sapiens
  misc_RNA (1)...(19): siRNA sense strand
gccguucuccugacuggua

SEQ ID NO: 1478054 - RNA, 19 nt, Homo sapiens
  misc_RNA (1)...(19): siRNA sense strand
ggucaaugcccaaguucau

SEQ ID NO: 1478055 - RNA, 19 nt, Homo sapiens
  misc_RNA (1)...(19): siRNA sense strand
ggacacuccauuucugaca

SEQ ID NO: 1478056 - RNA, 19 nt, Homo sapiens
  misc_RNA (1)...(19): siRNA sense strand
gcagagcccaagcauaguc

SEQ ID NO: 1478057 - RNA, 19 nt, Homo sapiens
  misc_RNA (1)...(19): siRNA sense strand
ggguaagccugagccucua

SEQ ID NO: 1478058 - RNA, 19 nt, Homo sapiens
  misc_RNA (1)...(19): siRNA sense strand
ccaaguucaugaggaggaa

SEQ ID NO: 1478059 - RNA, 19 nt, Homo sapiens
  misc_RNA (1)...(19): siRNA sense strand
gcaagcagagcccaagcau

SEQ ID NO: 1478060 - RNA, 19 nt, Homo sapiens
  misc_RNA (1)...(19): siRNA sense strand
gagcuguaccacuauguca

SEQ ID NO: 1478061 - RNA, 19 nt, Homo sapiens
  misc_RNA (1)...(19): siRNA sense strand
agaucaaccuccugcacaa

SEQ ID NO: 1478062 - RNA, 19 nt, Homo sapiens
  misc_RNA (1)...(19): siRNA sense strand
gcaguuugcaggccagauc

SEQ ID NO: 1478063 - RNA, 19 nt, Homo sapiens
  misc_RNA (1)...(19): siRNA sense strand
gugggaacuccaugaauga

SEQ ID NO: 1478064 - RNA, 19 nt, Homo sapiens
  misc_RNA (1)...(19): siRNA sense strand
cagcgaacuugacaguagu

SEQ ID NO: 1478065 - RNA, 19 nt, Homo sapiens
  misc_RNA (1)...(19): siRNA sense strand
ucucugaggcggaaggaaa

SEQ ID NO: 1478066 - RNA, 19 nt, Homo sapiens
  misc_RNA (1)...(19): siRNA sense strand
caaugucucuaagaaggau

SEQ ID NO: 1478067 - RNA, 19 nt, Homo sapiens
  misc_RNA (1)...(19): siRNA sense strand
ccaccucaaugucucuaag

SEQ ID NO: 1478068 - RNA, 19 nt, Homo sapiens
  misc_RNA (1)...(19): siRNA sense strand
ucuggucaaugcccaaguu

SEQ ID NO: 1478069 - RNA, 19 nt, Homo sapiens
  misc_RNA (1)...(19): siRNA sense strand
uuaccgcguucauggagaa

SEQ ID NO: 1478070 - RNA, 19 nt, Homo sapiens
  misc_RNA (1)...(19): siRNA sense strand
caguagaaauagccacagu

SEQ ID NO: 1478071 - RNA, 19 nt, Homo sapiens
  misc_RNA (1)...(19): siRNA sense strand
gaggccacuucaucaguag

SEQ ID NO: 1478072 - RNA, 19 nt, Homo sapiens
  misc_RNA (1)...(19): siRNA sense strand
caaagcaagcagaaugaag

SEQ ID NO: 1478073 - RNA, 19 nt, Homo sapiens
  misc_RNA (1)...(19): siRNA sense strand
gucccagccucaacucaga

SEQ ID NO: 1478074 - RNA, 19 nt, Homo sapiens
  misc_RNA (1)...(19): siRNA sense strand
ccucaucuuuccgcaguug

SEQ ID NO: 1478075 - RNA, 19 nt, Homo sapiens
  misc_RNA (1)...(19): siRNA sense strand
uaauugugccucgaugaaa

SEQ ID NO: 1478076 - RNA, 19 nt, Homo sapiens
  misc_RNA (1)...(19): siRNA sense strand
ccaccucucugccagucau

SEQ ID NO: 1478077 - RNA, 19 nt, Homo sapiens
  misc_RNA (1)...(19): siRNA sense strand
acaacuugccugagcugua

SEQ ID NO: 1478078 - RNA, 19 nt, Homo sapiens
  misc_RNA (1)...(19): siRNA sense strand
caaagauccgggacuccuu

SEQ ID NO: 1478079 - RNA, 19 nt, Homo sapiens
  misc_RNA (1)...(19): siRNA sense strand
gcaaacgcagccucauugg

SEQ ID NO: 1478080 - RNA, 19 nt, Homo sapiens
  misc_RNA (1)...(19): siRNA sense strand
acccugcucuacuucuuaa

SEQ ID NO: 1478081 - RNA, 19 nt, Homo sapiens
  misc_RNA (1)...(19): siRNA sense strand
cuacagacccugcucuacu

SEQ ID NO: 1478082 - RNA, 19 nt, Homo sapiens
  misc_RNA (1)...(19): siRNA sense strand
aagaaggacacuccauuuc

SEQ ID NO: 1478083 - RNA, 19 nt, Homo sapiens
  misc_RNA (1)...(19): siRNA sense strand
uuucaaagcaagcagaaug

SEQ ID NO: 1478084 - RNA, 19 nt, Homo sapiens
  misc_RNA (1)...(19): siRNA sense strand
ugaagaugaugaggagagu

SEQ ID NO: 1478085 - RNA, 19 nt, Homo sapiens
  misc_RNA (1)...(19): siRNA sense strand
gccugagccucuacaugga

SEQ ID NO: 1478086 - RNA, 19 nt, Homo sapiens
  misc_RNA (1)...(19): siRNA sense strand
ucuccugacugguacaaca

SEQ ID NO: 1478087 - RNA, 19 nt, Homo sapiens
  misc_RNA (1)...(19): siRNA sense strand
gaggaaagcugaaaauaaa

SEQ ID NO: 1478088 - RNA, 19 nt, Homo sapiens
  misc_RNA (1)...(19): siRNA sense strand
gaaaggugcuugguucuuc

SEQ ID NO: 1478089 - RNA, 19 nt, Homo sapiens
  misc_RNA (1)...(19): siRNA sense strand
ggagaauucuuuagguugu

SEQ ID NO: 1478090 - RNA, 19 nt, Homo sapiens
  misc_RNA (1)...(19): siRNA sense strand
ggacuaaagcagacagugu

SEQ ID NO: 1478091 - RNA, 19 nt, Homo sapiens
  misc_RNA (1)...(19): siRNA sense strand
gcaaccugaucacacaaau

SEQ ID NO: 1478092 - RNA, 19 nt, Homo sapiens
  misc_RNA (1)...(19): siRNA sense strand
gacuaaagcagacaguguu

SEQ ID NO: 1478093 - RNA, 19 nt, Homo sapiens
  misc_RNA (1)...(19): siRNA sense strand
aaccugaucacacaaauga

SEQ ID NO: 1478094 - RNA, 19 nt, Homo sapiens
  misc_RNA (1)...(19): siRNA sense strand
cgaggaaagcugaaaauaa

SEQ ID NO: 1478095 - RNA, 19 nt, Homo sapiens
  misc_RNA (1)...(19): siRNA sense strand
ccacuaauucgacaucagu

SEQ ID NO: 1478096 - RNA, 19 nt, Homo sapiens
  misc_RNA (1)...(19): siRNA sense strand
ccaccucugccacuaauuc

SEQ ID NO: 1478097 - RNA, 19 nt, Homo sapiens
  misc_RNA (1)...(19): siRNA sense strand
uuggagaauucuuuagguu

SEQ ID NO: 1478098 - RNA, 19 nt, Homo sapiens
  misc_RNA (1)...(19): siRNA sense strand
gagaauucuuuagguuguc

SEQ ID NO: 1478099 - RNA, 19 nt, Homo sapiens
  misc_RNA (1)...(19): siRNA sense strand
guuccaggcacuuacagaa

SEQ ID NO: 1478100 - RNA, 19 nt, Homo sapiens
  misc_RNA (1)...(19): siRNA sense strand
caaccugaucacacaaaug

SEQ ID NO: 1478101 - RNA, 19 nt, Homo sapiens
  misc_RNA (1)...(19): siRNA sense strand
cuaauucgacaucaguuuc

SEQ ID NO: 1478102 - RNA, 19 nt, Homo sapiens
  misc_RNA (1)...(19): siRNA sense strand
gaacuccucuucuucauca

SEQ ID NO: 1478103 - RNA, 19 nt, Homo sapiens
  misc_RNA (1)...(19): siRNA sense strand
gaacagauacuccaacuuc

SEQ ID NO: 1478104 - RNA, 19 nt, Homo sapiens
  misc_RNA (1)...(19): siRNA sense strand
caacaucccuuucuuugau

SEQ ID NO: 1478105 - RNA, 19 nt, Homo sapiens
  misc_RNA (1)...(19): siRNA sense strand
agaagcaggugaacaauuu

SEQ ID NO: 1478106 - RNA, 19 nt, Homo sapiens
  misc_RNA (1)...(19): siRNA sense strand
gaacucaacucggugaaug

SEQ ID NO: 1478107 - RNA, 19 nt, Homo sapiens
  misc_RNA (1)...(19): siRNA sense strand
gaaccugccugcccuccua

SEQ ID NO: 1478108 - RNA, 19 nt, Homo sapiens
  misc_RNA (1)...(19): siRNA sense strand
gaacuccgcuacagggaau

SEQ ID NO: 1478109 - RNA, 19 nt, Homo sapiens
  misc_RNA (1)...(19): siRNA sense strand
gggcugagcugcaguuugg

SEQ ID NO: 1478110 - RNA, 19 nt, Homo sapiens
  misc_RNA (1)...(19): siRNA sense strand
caacaggccgcaccuauug

SEQ ID NO: 1478111 - RNA, 19 nt, Homo sapiens
  misc_RNA (1)...(19): siRNA sense strand
gggagauucuggaugauga

SEQ ID NO: 1478112 - RNA, 19 nt, Homo sapiens
  misc_RNA (1)...(19): siRNA sense strand
ugaagcagcugguggacuu

SEQ ID NO: 1478113 - RNA, 19 nt, Homo sapiens
  misc_RNA (1)...(19): siRNA sense strand
gcuaaggacucagaagaug

SEQ ID NO: 1478114 - RNA, 19 nt, Homo sapiens
  misc_RNA (1)...(19): siRNA sense strand
ccgcagacaugcucaauca

SEQ ID NO: 1478115 - RNA, 19 nt, Homo sapiens
  misc_RNA (1)...(19): siRNA sense strand
acaagaagccauugagaaa

SEQ ID NO: 1478116 - RNA, 19 nt, Homo sapiens
  misc_RNA (1)...(19): siRNA sense strand
gacggaaucuucugaacug

SEQ ID NO: 1478117 - RNA, 19 nt, Homo sapiens
  misc_RNA (1)...(19): siRNA sense strand
ugugagcacuuuaauauuc

SEQ ID NO: 1478118 - RNA, 19 nt, Homo sapiens
  misc_RNA (1)...(19): siRNA sense strand
caagcagcaucaugagaaa

SEQ ID NO: 1478119 - RNA, 19 nt, Homo sapiens
  misc_RNA (1)...(19): siRNA sense strand
ggccagaacuuggagaaga

SEQ ID NO: 1478120 - RNA, 19 nt, Homo sapiens
  misc_RNA (1)...(19): siRNA sense strand
gagcuggaguucaguaugg

SEQ ID NO: 1478121 - RNA, 19 nt, Homo sapiens
  misc_RNA (1)...(19): siRNA sense strand
ggugggaacuccucuucuu

SEQ ID NO: 1478122 - RNA, 19 nt, Homo sapiens
  misc_RNA (1)...(19): siRNA sense strand
ggaccaggccucagacaga

SEQ ID NO: 1478123 - RNA, 19 nt, Homo sapiens
  misc_RNA (1)...(19): siRNA sense strand
caacugccaugucuacaag

SEQ ID NO: 1478124 - RNA, 19 nt, Homo sapiens
  misc_RNA (1)...(19): siRNA sense strand
gaacucaagcucugaacug

SEQ ID NO: 1478125 - RNA, 19 nt, Homo sapiens
  misc_RNA (1)...(19): siRNA sense strand
ccugcaagcuguccugauu

SEQ ID NO: 1478126 - RNA, 19 nt, Homo sapiens
  misc_RNA (1)...(19): siRNA sense strand
uggcacagcugcagcaaug

SEQ ID NO: 1478127 - RNA, 19 nt, Homo sapiens
  misc_RNA (1)...(19): siRNA sense strand
ucaccucgcuccuggauca

SEQ ID NO: 1478128 - RNA, 19 nt, Homo sapiens
  misc_RNA (1)...(19): siRNA sense strand
gaagcucccuuuucucaaa

SEQ ID NO: 1478129 - RNA, 19 nt, Homo sapiens
  misc_RNA (1)...(19): siRNA sense strand
cucaagcucugaacuguuu

SEQ ID NO: 1478130 - RNA, 19 nt, Homo sapiens
  misc_RNA (1)...(19): siRNA sense strand
cuagugaggacucgaguua

SEQ ID NO: 1478131 - RNA, 19 nt, Homo sapiens
  misc_RNA (1)...(19): siRNA sense strand
gaucuugggcuuugaggaa

SEQ ID NO: 1478132 - RNA, 19 nt, Homo sapiens
  misc_RNA (1)...(19): siRNA sense strand
gaacuggccgugcccauag

SEQ ID NO: 1478133 - RNA, 19 nt, Homo sapiens
  misc_RNA (1)...(19): siRNA sense strand
cgacacuccuggccuguug

SEQ ID NO: 1478134 - RNA, 19 nt, Homo sapiens
  misc_RNA (1)...(19): siRNA sense strand
gagaagcaggugaacaauu

SEQ ID NO: 1478135 - RNA, 19 nt, Homo sapiens
  misc_RNA (1)...(19): siRNA sense strand
gacgugaagucccucauuc

SEQ ID NO: 1478136 - RNA, 19 nt, Homo sapiens
  misc_RNA (1)...(19): siRNA sense strand
uuacaugccuauccugaug

SEQ ID NO: 1478137 - RNA, 19 nt, Homo sapiens
  misc_RNA (1)...(19): siRNA sense strand
gaaccuagauggggagauu

SEQ ID NO: 1478138 - RNA, 19 nt, Homo sapiens
  misc_RNA (1)...(19): siRNA sense strand
gcaauaccuaugcuuugua

SEQ ID NO: 1478139 - RNA, 19 nt, Homo sapiens
  misc_RNA (1)...(19): siRNA sense strand
caacaagaagccauugaga

SEQ ID NO: 1478140 - RNA, 19 nt, Homo sapiens
  misc_RNA (1)...(19): siRNA sense strand
ccaagcagcaucaugagaa

SEQ ID NO: 1478141 - RNA, 19 nt, Homo sapiens
  misc_RNA (1)...(19): siRNA sense strand
gcaaacucaucaccaacau

SEQ ID NO: 1478142 - RNA, 19 nt, Homo sapiens
  misc_RNA (1)...(19): siRNA sense strand
ggacaugguguucaagugu

SEQ ID NO: 1478143 - RNA, 19 nt, Homo sapiens
  misc_RNA (1)...(19): siRNA sense strand
ggaagacauugaggacaug

SEQ ID NO: 1478144 - RNA, 19 nt, Homo sapiens
  misc_RNA (1)...(19): siRNA sense strand
ggagauagccaccacuuuu

SEQ ID NO: 1478145 - RNA, 19 nt, Homo sapiens
  misc_RNA (1)...(19): siRNA sense strand
gcaacugacucugcuugug

SEQ ID NO: 1478146 - RNA, 19 nt, Homo sapiens
  misc_RNA (1)...(19): siRNA sense strand
ggcaauaccuaugcuuugu

SEQ ID NO: 1478147 - RNA, 19 nt, Homo sapiens
  misc_RNA (1)...(19): siRNA sense strand
ucauggagccucacacuga

SEQ ID NO: 1478148 - RNA, 19 nt, Homo sapiens
  misc_RNA (1)...(19): siRNA sense strand
cagccaaaguggaagcaaa

SEQ ID NO: 1478149 - RNA, 19 nt, Homo sapiens
  misc_RNA (1)...(19): siRNA sense strand
gcaaguggcaauaccuaug

SEQ ID NO: 1478150 - RNA, 19 nt, Homo sapiens
  misc_RNA (1)...(19): siRNA sense strand
aagaagccauugagaaaca

SEQ ID NO: 1478151 - RNA, 19 nt, Homo sapiens
  misc_RNA (1)...(19): siRNA sense strand
cagcagcagugguggaugu

SEQ ID NO: 1478152 - RNA, 19 nt, Homo sapiens
  misc_RNA (1)...(19): siRNA sense strand
caucaacaucccuuucuuu

SEQ ID NO: 1478153 - RNA, 19 nt, Homo sapiens
  misc_RNA (1)...(19): siRNA sense strand
ggacaugguugaggcugau

SEQ ID NO: 1478154 - RNA, 19 nt, Homo sapiens
  misc_RNA (1)...(19): siRNA sense strand
ugcggaugcuggaugauua

SEQ ID NO: 1478155 - RNA, 19 nt, Homo sapiens
  misc_RNA (1)...(19): siRNA sense strand
agaaacaccuggauuuuga

SEQ ID NO: 1478156 - RNA, 19 nt, Homo sapiens
  misc_RNA (1)...(19): siRNA sense strand
gagugcggaugcuggauga

SEQ ID NO: 1478157 - RNA, 19 nt, Homo sapiens
  misc_RNA (1)...(19): siRNA sense strand
gcacaagagcgagaaggaa

SEQ ID NO: 1478158 - RNA, 19 nt, Homo sapiens
  misc_RNA (1)...(19): siRNA sense strand
gagaggugcuccaggaacu

SEQ ID NO: 1478159 - RNA, 19 nt, Homo sapiens
  misc_RNA (1)...(19): siRNA sense strand
caagaaguaugggccugaa

SEQ ID NO: 1478160 - RNA, 19 nt, Homo sapiens
  misc_RNA (1)...(19): siRNA sense strand
ucacuggaguauucaagga

SEQ ID NO: 1478161 - RNA, 19 nt, Homo sapiens
  misc_RNA (1)...(19): siRNA sense strand
ccacagcgacucaaugaca

SEQ ID NO: 1478162 - RNA, 19 nt, Homo sapiens
  misc_RNA (1)...(19): siRNA sense strand
gguugaggcugaugaguac

SEQ ID NO: 1478163 - RNA, 19 nt, Homo sapiens
  misc_RNA (1)...(19): siRNA sense strand
ggaaccagacccugcaugu

SEQ ID NO: 1478164 - RNA, 19 nt, Homo sapiens
  misc_RNA (1)...(19): siRNA sense strand
gaugagaucuaugccaacu

SEQ ID NO: 1478165 - RNA, 19 nt, Homo sapiens
  misc_RNA (1)...(19): siRNA sense strand
gauggaaaccgacgugaag

SEQ ID NO: 1478166 - RNA, 19 nt, Homo sapiens
  misc_RNA (1)...(19): siRNA sense strand
guccaaggaugagaucuau

SEQ ID NO: 1478167 - RNA, 19 nt, Homo sapiens
  misc_RNA (1)...(19): siRNA sense strand
ugacgaggcugcccaagcu

SEQ ID NO: 1478168 - RNA, 19 nt, Homo sapiens
  misc_RNA (1)...(19): siRNA sense strand
acacacgccucuucuacau

SEQ ID NO: 1478169 - RNA, 19 nt, Homo sapiens
  misc_RNA (1)...(19): siRNA sense strand
cagcaggguggcauugaua

SEQ ID NO: 1478170 - RNA, 19 nt, Homo sapiens
  misc_RNA (1)...(19): siRNA sense strand
ucuagaagcccaagaagau

SEQ ID NO: 1478171 - RNA, 19 nt, Homo sapiens
  misc_RNA (1)...(19): siRNA sense strand
ucacugagccaacaagaag

SEQ ID NO: 1478172 - RNA, 19 nt, Homo sapiens
  misc_RNA (1)...(19): siRNA sense strand
gaucaacugccaugucuac

SEQ ID NO: 1478173 - RNA, 19 nt, Homo sapiens
  misc_RNA (1)...(19): siRNA sense strand
gcagcucugucgucacaca

SEQ ID NO: 1478174 - RNA, 19 nt, Homo sapiens
  misc_RNA (1)...(19): siRNA sense strand
agauguggcuacugcugua

SEQ ID NO: 1478175 - RNA, 19 nt, Homo sapiens
  misc_RNA (1)...(19): siRNA sense strand
gcccaaaggcagaaacaga

SEQ ID NO: 1478176 - RNA, 19 nt, Homo sapiens
  misc_RNA (1)...(19): siRNA sense strand
guugaguaguccugauuau

SEQ ID NO: 1478177 - RNA, 19 nt, Homo sapiens
  misc_RNA (1)...(19): siRNA sense strand
aggaagaggaggagaauga

SEQ ID NO: 1478178 - RNA, 19 nt, Homo sapiens
  misc_RNA (1)...(19): siRNA sense strand
gauucuggaugaugagauc

SEQ ID NO: 1478179 - RNA, 19 nt, Homo sapiens
  misc_RNA (1)...(19): siRNA sense strand
gcuggaggcccaugacaga

SEQ ID NO: 1478180 - RNA, 19 nt, Homo sapiens
  misc_RNA (1)...(19): siRNA sense strand
gaugcuggaugauuaugag

SEQ ID NO: 1478181 - RNA, 19 nt, Homo sapiens
  misc_RNA (1)...(19): siRNA sense strand
gcccaugacagaacucuau

SEQ ID NO: 1478182 - RNA, 19 nt, Homo sapiens
  misc_RNA (1)...(19): siRNA sense strand
acugugagcacuuuaauau

SEQ ID NO: 1478183 - RNA, 19 nt, Homo sapiens
  misc_RNA (1)...(19): siRNA sense strand
gggacaugguguucaagug

SEQ ID NO: 1478184 - RNA, 19 nt, Homo sapiens
  misc_RNA (1)...(19): siRNA sense strand
cucagaagaugcagccaaa

SEQ ID NO: 1478185 - RNA, 19 nt, Homo sapiens
  misc_RNA (1)...(19): siRNA sense strand
ucuaugcugugccuuaugu

SEQ ID NO: 1478186 - RNA, 19 nt, Homo sapiens
  misc_RNA (1)...(19): siRNA sense strand
ucaacaggccgcaccuauu

SEQ ID NO: 1478187 - RNA, 19 nt, Homo sapiens
  misc_RNA (1)...(19): siRNA sense strand
gcacugccacccagagcuu

SEQ ID NO: 1478188 - RNA, 19 nt, Homo sapiens
  misc_RNA (1)...(19): siRNA sense strand
ccacgugagugagcaguuc

SEQ ID NO: 1478189 - RNA, 19 nt, Homo sapiens
  misc_RNA (1)...(19): siRNA sense strand
ccagaucgaagaccacaga

SEQ ID NO: 1478190 - RNA, 19 nt, Homo sapiens
  misc_RNA (1)...(19): siRNA sense strand
agaauuggcccaggacuug

SEQ ID NO: 1478191 - RNA, 19 nt, Homo sapiens
  misc_RNA (1)...(19): siRNA sense strand
gagacggaaucuucugaac

SEQ ID NO: 1478192 - RNA, 19 nt, Homo sapiens
  misc_RNA (1)...(19): siRNA sense strand
gaaccagacccugcaugug

SEQ ID NO: 1478193 - RNA, 19 nt, Homo sapiens
  misc_RNA (1)...(19): siRNA sense strand
acagauacuccaacuucua

SEQ ID NO: 1478194 - RNA, 19 nt, Homo sapiens
  misc_RNA (1)...(19): siRNA sense strand
ggaggaagaggaggagaau

SEQ ID NO: 1478195 - RNA, 19 nt, Homo sapiens
  misc_RNA (1)...(19): siRNA sense strand
ccaccacuuuugagcauua

SEQ ID NO: 1478196 - RNA, 19 nt, Homo sapiens
  misc_RNA (1)...(19): siRNA sense strand
ucaacucggugaaugugau

SEQ ID NO: 1478197 - RNA, 19 nt, Homo sapiens
  misc_RNA (1)...(19): siRNA sense strand
gaagcaugcccaccucuac

SEQ ID NO: 1478198 - RNA, 19 nt, Homo sapiens
  misc_RNA (1)...(19): siRNA sense strand
cuacccaucccuucuagaa

SEQ ID NO: 1478199 - RNA, 19 nt, Homo sapiens
  misc_RNA (1)...(19): siRNA sense strand
ccaucaacaucccuuucuu

SEQ ID NO: 1478200 - RNA, 19 nt, Homo sapiens
  misc_RNA (1)...(19): siRNA sense strand
gcacauugaccagcagauc

SEQ ID NO: 1478201 - RNA, 19 nt, Homo sapiens
  misc_RNA (1)...(19): siRNA sense strand
uggagaagcaggugaacaa

SEQ ID NO: 1478202 - RNA, 19 nt, Homo sapiens
  misc_RNA (1)...(19): siRNA sense strand
gaaggaagauauugcacua

SEQ ID NO: 1478203 - RNA, 19 nt, Homo sapiens
  misc_RNA (1)...(19): siRNA sense strand
aaaugaagcugccuguuua

SEQ ID NO: 1478204 - RNA, 19 nt, Homo sapiens
  misc_RNA (1)...(19): siRNA sense strand
gaacuuggcuuaccauacu

SEQ ID NO: 1478205 - RNA, 19 nt, Homo sapiens
  misc_RNA (1)...(19): siRNA sense strand
gaacacaucuuugcacauc

SEQ ID NO: 1478206 - RNA, 19 nt, Homo sapiens
  misc_RNA (1)...(19): siRNA sense strand
ggacgugacauuuaaauug

SEQ ID NO: 1478207 - RNA, 19 nt, Homo sapiens
  misc_RNA (1)...(19): siRNA sense strand
ggaaaucccaccuaaagaa

SEQ ID NO: 1478208 - RNA, 19 nt, Homo sapiens
  misc_RNA (1)...(19): siRNA sense strand
caaaugaagcugccuguuu

SEQ ID NO: 1478209 - RNA, 19 nt, Homo sapiens
  misc_RNA (1)...(19): siRNA sense strand
gaacacccguuauccuugu

SEQ ID NO: 1478210 - RNA, 19 nt, Homo sapiens
  misc_RNA (1)...(19): siRNA sense strand
ugaaggagccugugagaaa

SEQ ID NO: 1478211 - RNA, 19 nt, Homo sapiens
  misc_RNA (1)...(19): siRNA sense strand
ccaagcaguugucuccuaa

SEQ ID NO: 1478212 - RNA, 19 nt, Homo sapiens
  misc_RNA (1)...(19): siRNA sense strand
gaaaucccaccuaaagaaa

SEQ ID NO: 1478213 - RNA, 19 nt, Homo sapiens
  misc_RNA (1)...(19): siRNA sense strand
aagcaucgcucaagacgaa

SEQ ID NO: 1478214 - RNA, 19 nt, Homo sapiens
  misc_RNA (1)...(19): siRNA sense strand
ggaagauauugcacuaaau

SEQ ID NO: 1478215 - RNA, 19 nt, Homo sapiens
  misc_RNA (1)...(19): siRNA sense strand
ccaauucccuaaaucaugu

SEQ ID NO: 1478216 - RNA, 19 nt, Homo sapiens
  misc_RNA (1)...(19): siRNA sense strand
gacccaacguugaaacuau

SEQ ID NO: 1478217 - RNA, 19 nt, Homo sapiens
  misc_RNA (1)...(19): siRNA sense strand
ucucggacgugacauuuaa

SEQ ID NO: 1478218 - RNA, 19 nt, Homo sapiens
  misc_RNA (1)...(19): siRNA sense strand
ugacauggacuacgaaaga

SEQ ID NO: 1478219 - RNA, 19 nt, Homo sapiens
  misc_RNA (1)...(19): siRNA sense strand
gacagacgcuuugcauaug

SEQ ID NO: 1478220 - RNA, 19 nt, Homo sapiens
  misc_RNA (1)...(19): siRNA sense strand
ccagaaaccuuuacuucag

SEQ ID NO: 1478221 - RNA, 19 nt, Homo sapiens
  misc_RNA (1)...(19): siRNA sense strand
cgaaagacccaacguugaa

SEQ ID NO: 1478222 - RNA, 19 nt, Homo sapiens
  misc_RNA (1)...(19): siRNA sense strand
ggaccaggaacacaucuuu

SEQ ID NO: 1478223 - RNA, 19 nt, Homo sapiens
  misc_RNA (1)...(19): siRNA sense strand
gaaggaagaagaucacuac

SEQ ID NO: 1478224 - RNA, 19 nt, Homo sapiens
  misc_RNA (1)...(19): siRNA sense strand
uggauuaucucuauaccaa

SEQ ID NO: 1478225 - RNA, 19 nt, Homo sapiens
  misc_RNA (1)...(19): siRNA sense strand
gaaggagccugugagaaag

SEQ ID NO: 1478226 - RNA, 19 nt, Homo sapiens
  misc_RNA (1)...(19): siRNA sense strand
gaaaguggugcuucuggaa

SEQ ID NO: 1478227 - RNA, 19 nt, Homo sapiens
  misc_RNA (1)...(19): siRNA sense strand
acaccacacucacgcagua

SEQ ID NO: 1478228 - RNA, 19 nt, Homo sapiens
  misc_RNA (1)...(19): siRNA sense strand
aggaagauauugcacuaaa

SEQ ID NO: 1478229 - RNA, 19 nt, Homo sapiens
  misc_RNA (1)...(19): siRNA sense strand
gcauauggcaggucugaug

SEQ ID NO: 1478230 - RNA, 19 nt, Homo sapiens
  misc_RNA (1)...(19): siRNA sense strand
ucacaaugcccaccaguug

SEQ ID NO: 1478231 - RNA, 19 nt, Homo sapiens
  misc_RNA (1)...(19): siRNA sense strand
gacgugacauuuaaauugg

SEQ ID NO: 1478232 - RNA, 19 nt, Homo sapiens
  misc_RNA (1)...(19): siRNA sense strand
ugcaagcaguauuggauua

SEQ ID NO: 1478233 - RNA, 19 nt, Homo sapiens
  misc_RNA (1)...(19): siRNA sense strand
agacagacgcuuugcauau

SEQ ID NO: 1478234 - RNA, 19 nt, Homo sapiens
  misc_RNA (1)...(19): siRNA sense strand
gaaagacccaacguugaaa

SEQ ID NO: 1478235 - RNA, 19 nt, Homo sapiens
  misc_RNA (1)...(19): siRNA sense strand
aaauaagcaucgcucaaga

SEQ ID NO: 1478236 - RNA, 19 nt, Homo sapiens
  misc_RNA (1)...(19): siRNA sense strand
aaggaaagccaaucggaua

SEQ ID NO: 1478237 - RNA, 19 nt, Homo sapiens
  misc_RNA (1)...(19): siRNA sense strand
ccuggaagcuguuaaucga

SEQ ID NO: 1478238 - RNA, 19 nt, Homo sapiens
  misc_RNA (1)...(19): siRNA sense strand
gaacgagagaaggaagaua

SEQ ID NO: 1478239 - RNA, 19 nt, Homo sapiens
  misc_RNA (1)...(19): siRNA sense strand
gagaagcagagcagagauu

SEQ ID NO: 1478240 - RNA, 19 nt, Homo sapiens
  misc_RNA (1)...(19): siRNA sense strand
uaaagaaaguccagaaacc

SEQ ID NO: 1478241 - RNA, 19 nt, Homo sapiens
  misc_RNA (1)...(19): siRNA sense strand
gccgagagguagcaaagga

SEQ ID NO: 1478242 - RNA, 19 nt, Homo sapiens
  misc_RNA (1)...(19): siRNA sense strand
uaccucuucuuccaaauuu

SEQ ID NO: 1478243 - RNA, 19 nt, Homo sapiens
  misc_RNA (1)...(19): siRNA sense strand
ggaauuggcucaguuucac

SEQ ID NO: 1478244 - RNA, 19 nt, Homo sapiens
  misc_RNA (1)...(19): siRNA sense strand
ggaaagccaaucggauaaa

SEQ ID NO: 1478245 - RNA, 19 nt, Homo sapiens
  misc_RNA (1)...(19): siRNA sense strand
gcuaaucccaauucccuaa

SEQ ID NO: 1478246 - RNA, 19 nt, Homo sapiens
  misc_RNA (1)...(19): siRNA sense strand
ugugguaccugaaggaaga

SEQ ID NO: 1478247 - RNA, 19 nt, Homo sapiens
  misc_RNA (1)...(19): siRNA sense strand
gaaccaggagauuacgaaa

SEQ ID NO: 1478248 - RNA, 19 nt, Homo sapiens
  misc_RNA (1)...(19): siRNA sense strand
ggauguuguugaugaagug

SEQ ID NO: 1478249 - RNA, 19 nt, Homo sapiens
  misc_RNA (1)...(19): siRNA sense strand
ggaagacgcgcuugaucug

SEQ ID NO: 1478250 - RNA, 19 nt, Homo sapiens
  misc_RNA (1)...(19): siRNA sense strand
gaaagccaaucggauaaaa

SEQ ID NO: 1478251 - RNA, 19 nt, Homo sapiens
  misc_RNA (1)...(19): siRNA sense strand
gauaucaaugcaagcagua

SEQ ID NO: 1478252 - RNA, 19 nt, Homo sapiens
  misc_RNA (1)...(19): siRNA sense strand
guguaucucccgaacauaa

SEQ ID NO: 1478253 - RNA, 19 nt, Homo sapiens
  misc_RNA (1)...(19): siRNA sense strand
uaaauaagcaucgcucaag

SEQ ID NO: 1478254 - RNA, 19 nt, Homo sapiens
  misc_RNA (1)...(19): siRNA sense strand
uggcaggucugauguugug

SEQ ID NO: 1478255 - RNA, 19 nt, Homo sapiens
  misc_RNA (1)...(19): siRNA sense strand
guucaggaguugaccaaag

SEQ ID NO: 1478256 - RNA, 19 nt, Homo sapiens
  misc_RNA (1)...(19): siRNA sense strand
ugugggcgauugaccagua

SEQ ID NO: 1478257 - RNA, 19 nt, Homo sapiens
  misc_RNA (1)...(19): siRNA sense strand
ggacccugcuccaguuucu

SEQ ID NO: 1478258 - RNA, 19 nt, Homo sapiens
  misc_RNA (1)...(19): siRNA sense strand
aagcguguuugaccaguuu

SEQ ID NO: 1478259 - RNA, 19 nt, Homo sapiens
  misc_RNA (1)...(19): siRNA sense strand
caugugguauccagaaauc

SEQ ID NO: 1478260 - RNA, 19 nt, Homo sapiens
  misc_RNA (1)...(19): siRNA sense strand
cugcuccaguuucuuuaua

SEQ ID NO: 1478261 - RNA, 19 nt, Homo sapiens
  misc_RNA (1)...(19): siRNA sense strand
uagcaaggcccauaaagag

SEQ ID NO: 1478262 - RNA, 19 nt, Homo sapiens
  misc_RNA (1)...(19): siRNA sense strand
ggagugaaggagccuguga

SEQ ID NO: 1478263 - RNA, 19 nt, Homo sapiens
  misc_RNA (1)...(19): siRNA sense strand
caucuuugcacaucgaauu

SEQ ID NO: 1478264 - RNA, 19 nt, Homo sapiens
  misc_RNA (1)...(19): siRNA sense strand
caaaggaacuuggcuuacc

SEQ ID NO: 1478265 - RNA, 19 nt, Homo sapiens
  misc_RNA (1)...(19): siRNA sense strand
caacagugugggcgauuga

SEQ ID NO: 1478266 - RNA, 19 nt, Homo sapiens
  misc_RNA (1)...(19): siRNA sense strand
gcuccaaguuccguaagga

SEQ ID NO: 1478267 - RNA, 19 nt, Homo sapiens
  misc_RNA (1)...(19): siRNA sense strand
gaucuggacccgcuggaau

SEQ ID NO: 1478268 - RNA, 19 nt, Homo sapiens
  misc_RNA (1)...(19): siRNA sense strand
gcaagcaguauuggauuau

SEQ ID NO: 1478269 - RNA, 19 nt, Homo sapiens
  misc_RNA (1)...(19): siRNA sense strand
caccugcaauucuggaaau

SEQ ID NO: 1478270 - RNA, 19 nt, Homo sapiens
  misc_RNA (1)...(19): siRNA sense strand
acagggaaaugcaagucaa

SEQ ID NO: 1478271 - RNA, 19 nt, Homo sapiens
  misc_RNA (1)...(19): siRNA sense strand
gggaagacgcgcuugaucu

SEQ ID NO: 1478272 - RNA, 19 nt, Homo sapiens
  misc_RNA (1)...(19): siRNA sense strand
agacgaaaguggugcuucu

SEQ ID NO: 1478273 - RNA, 19 nt, Homo sapiens
  misc_RNA (1)...(19): siRNA sense strand
cugcagacaaccaggaaua

SEQ ID NO: 1478274 - RNA, 19 nt, Homo sapiens
  misc_RNA (1)...(19): siRNA sense strand
gggauguuguugaugaagu

SEQ ID NO: 1478275 - RNA, 19 nt, Homo sapiens
  misc_RNA (1)...(19): siRNA sense strand
guugaugaagugaguguuu

SEQ ID NO: 1478276 - RNA, 19 nt, Homo sapiens
  misc_RNA (1)...(19): siRNA sense strand
ggaagccgagggugcaguu

SEQ ID NO: 1478277 - RNA, 19 nt, Homo sapiens
  misc_RNA (1)...(19): siRNA sense strand
guccagaaaccuuuacuuc

SEQ ID NO: 1478278 - RNA, 19 nt, Homo sapiens
  misc_RNA (1)...(19): siRNA sense strand
gcaccugcaauucuggaaa

SEQ ID NO: 1478279 - RNA, 19 nt, Homo sapiens
  misc_RNA (1)...(19): siRNA sense strand
caagcguguuugaccaguu

SEQ ID NO: 1478280 - RNA, 19 nt, Homo sapiens
  misc_RNA (1)...(19): siRNA sense strand
uauggcaggucugauguug

SEQ ID NO: 1478281 - RNA, 19 nt, Homo sapiens
  misc_RNA (1)...(19): siRNA sense strand
ccaacagugugggcgauug

SEQ ID NO: 1478282 - RNA, 19 nt, Homo sapiens
  misc_RNA (1)...(19): siRNA sense strand
caccacaucugcaccaacu

SEQ ID NO: 1478283 - RNA, 19 nt, Homo sapiens
  misc_RNA (1)...(19): siRNA sense strand
gggcauugacggagaagug

SEQ ID NO: 1478284 - RNA, 19 nt, Homo sapiens
  misc_RNA (1)...(19): siRNA sense strand
acaagccgcugcugaucug

SEQ ID NO: 1478285 - RNA, 19 nt, Homo sapiens
  misc_RNA (1)...(19): siRNA sense strand
aaaggaacuuggcuuacca

SEQ ID NO: 1478286 - RNA, 19 nt, Homo sapiens
  misc_RNA (1)...(19): siRNA sense strand
aaguggugcuucuggaauu

SEQ ID NO: 1478287 - RNA, 19 nt, Homo sapiens
  misc_RNA (1)...(19): siRNA sense strand
ucucucaggcuuugggaua

SEQ ID NO: 1478288 - RNA, 19 nt, Homo sapiens
  misc_RNA (1)...(19): siRNA sense strand
cgaguggcgugggcauuga

SEQ ID NO: 1478289 - RNA, 19 nt, Homo sapiens
  misc_RNA (1)...(19): siRNA sense strand
acacaucuuugcacaucga

SEQ ID NO: 1478290 - RNA, 19 nt, Homo sapiens
  misc_RNA (1)...(19): siRNA sense strand
ggauguguuugacaaugca

SEQ ID NO: 1478291 - RNA, 19 nt, Homo sapiens
  misc_RNA (1)...(19): siRNA sense strand
ccuaaagaaaguccagaaa

SEQ ID NO: 1478292 - RNA, 19 nt, Homo sapiens
  misc_RNA (1)...(19): siRNA sense strand
cgagagaaggaagauauug

SEQ ID NO: 1478293 - RNA, 19 nt, Homo sapiens
  misc_RNA (1)...(19): siRNA sense strand
ugaaggaagaagaucacua

SEQ ID NO: 1478294 - RNA, 19 nt, Homo sapiens
  misc_RNA (1)...(19): siRNA sense strand
cagacaaccaggaauacuu

SEQ ID NO: 1478295 - RNA, 19 nt, Homo sapiens
  misc_RNA (1)...(19): siRNA sense strand
gcaccaacuacaacagugu

SEQ ID NO: 1478296 - RNA, 19 nt, Homo sapiens
  misc_RNA (1)...(19): siRNA sense strand
caagauaucaaugcaagca

SEQ ID NO: 1478297 - RNA, 19 nt, Homo sapiens
  misc_RNA (1)...(19): siRNA sense strand
ggagcguucucgggauguu

SEQ ID NO: 1478298 - RNA, 19 nt, Homo sapiens
  misc_RNA (1)...(19): siRNA sense strand
gaagcagagcagagauuuc

SEQ ID NO: 1478299 - RNA, 19 nt, Homo sapiens
  misc_RNA (1)...(19): siRNA sense strand
gaagacgcgcuugaucugu

SEQ ID NO: 1478300 - RNA, 19 nt, Homo sapiens
  misc_RNA (1)...(19): siRNA sense strand
gcaugccguucaggaguug

SEQ ID NO: 1478301 - RNA, 19 nt, Homo sapiens
  misc_RNA (1)...(19): siRNA sense strand
caagcaguauuggauuauc

SEQ ID NO: 1478302 - RNA, 19 nt, Homo sapiens
  misc_RNA (1)...(19): siRNA sense strand
gaaggaagauauugcacua

SEQ ID NO: 1478303 - RNA, 19 nt, Homo sapiens
  misc_RNA (1)...(19): siRNA sense strand
aaaugaagcugccuguuua

SEQ ID NO: 1478304 - RNA, 19 nt, Homo sapiens
  misc_RNA (1)...(19): siRNA sense strand
gaacuuggcuuaccauacu

SEQ ID NO: 1478305 - RNA, 19 nt, Homo sapiens
  misc_RNA (1)...(19): siRNA sense strand
gaacacaucuuugcacauc

SEQ ID NO: 1478306 - RNA, 19 nt, Homo sapiens
  misc_RNA (1)...(19): siRNA sense strand
ggacgugacauuuaaauug

SEQ ID NO: 1478307 - RNA, 19 nt, Homo sapiens
  misc_RNA (1)...(19): siRNA sense strand
ggaaaucccaccuaaagaa

SEQ ID NO: 1478308 - RNA, 19 nt, Homo sapiens
  misc_RNA (1)...(19): siRNA sense strand
caaaugaagcugccuguuu

SEQ ID NO: 1478309 - RNA, 19 nt, Homo sapiens
  misc_RNA (1)...(19): siRNA sense strand
gaacacccguuauccuugu

SEQ ID NO: 1478310 - RNA, 19 nt, Homo sapiens
  misc_RNA (1)...(19): siRNA sense strand
ugaaggagccugugagaaa

SEQ ID NO: 1478311 - RNA, 19 nt, Homo sapiens
  misc_RNA (1)...(19): siRNA sense strand
ccaagcaguugucuccuaa

SEQ ID NO: 1478312 - RNA, 19 nt, Homo sapiens
  misc_RNA (1)...(19): siRNA sense strand
gaaaucccaccuaaagaaa

SEQ ID NO: 1478313 - RNA, 19 nt, Homo sapiens
  misc_RNA (1)...(19): siRNA sense strand
aagcaucgcucaagacgaa

SEQ ID NO: 1478314 - RNA, 19 nt, Homo sapiens
  misc_RNA (1)...(19): siRNA sense strand
ggaagauauugcacuaaau

SEQ ID NO: 1478315 - RNA, 19 nt, Homo sapiens
  misc_RNA (1)...(19): siRNA sense strand
ccaauucccuaaaucaugu

SEQ ID NO: 1478316 - RNA, 19 nt, Homo sapiens
  misc_RNA (1)...(19): siRNA sense strand
gacccaacguugaaacuau

SEQ ID NO: 1478317 - RNA, 19 nt, Homo sapiens
  misc_RNA (1)...(19): siRNA sense strand
ucucggacgugacauuuaa

SEQ ID NO: 1478318 - RNA, 19 nt, Homo sapiens
  misc_RNA (1)...(19): siRNA sense strand
ugacauggacuacgaaaga

SEQ ID NO: 1478319 - RNA, 19 nt, Homo sapiens
  misc_RNA (1)...(19): siRNA sense strand
gacagacgcuuugcauaug

SEQ ID NO: 1478320 - RNA, 19 nt, Homo sapiens
  misc_RNA (1)...(19): siRNA sense strand
ccagaaaccuuuacuucag

SEQ ID NO: 1478321 - RNA, 19 nt, Homo sapiens
  misc_RNA (1)...(19): siRNA sense strand
cgaaagacccaacguugaa

SEQ ID NO: 1478322 - RNA, 19 nt, Homo sapiens
  misc_RNA (1)...(19): siRNA sense strand
ggaccaggaacacaucuuu

SEQ ID NO: 1478323 - RNA, 19 nt, Homo sapiens
  misc_RNA (1)...(19): siRNA sense strand
gaaggaagaagaucacuac

SEQ ID NO: 1478324 - RNA, 19 nt, Homo sapiens
  misc_RNA (1)...(19): siRNA sense strand
uggauuaucucuauaccaa

SEQ ID NO: 1478325 - RNA, 19 nt, Homo sapiens
  misc_RNA (1)...(19): siRNA sense strand
gaaggagccugugagaaag

SEQ ID NO: 1478326 - RNA, 19 nt, Homo sapiens
  misc_RNA (1)...(19): siRNA sense strand
gaaaguggugcuucuggaa

SEQ ID NO: 1478327 - RNA, 19 nt, Homo sapiens
  misc_RNA (1)...(19): siRNA sense strand
acaccacacucacgcagua

SEQ ID NO: 1478328 - RNA, 19 nt, Homo sapiens
  misc_RNA (1)...(19): siRNA sense strand
aggaagauauugcacuaaa

SEQ ID NO: 1478329 - RNA, 19 nt, Homo sapiens
  misc_RNA (1)...(19): siRNA sense strand
gcauauggcaggucugaug

SEQ ID NO: 1478330 - RNA, 19 nt, Homo sapiens
  misc_RNA (1)...(19): siRNA sense strand
ucacaaugcccaccaguug

SEQ ID NO: 1478331 - RNA, 19 nt, Homo sapiens
  misc_RNA (1)...(19): siRNA sense strand
gacgugacauuuaaauugg

SEQ ID NO: 1478332 - RNA, 19 nt, Homo sapiens
  misc_RNA (1)...(19): siRNA sense strand
ugcaagcaguauuggauua

SEQ ID NO: 1478333 - RNA, 19 nt, Homo sapiens
  misc_RNA (1)...(19): siRNA sense strand
agacagacgcuuugcauau

SEQ ID NO: 1478334 - RNA, 19 nt, Homo sapiens
  misc_RNA (1)...(19): siRNA sense strand
gaaagacccaacguugaaa

SEQ ID NO: 1478335 - RNA, 19 nt, Homo sapiens
  misc_RNA (1)...(19): siRNA sense strand
aaauaagcaucgcucaaga

SEQ ID NO: 1478336 - RNA, 19 nt, Homo sapiens
  misc_RNA (1)...(19): siRNA sense strand
aaggaaagccaaucggaua

SEQ ID NO: 1478337 - RNA, 19 nt, Homo sapiens
  misc_RNA (1)...(19): siRNA sense strand
ccuggaagcuguuaaucga

SEQ ID NO: 1478338 - RNA, 19 nt, Homo sapiens
  misc_RNA (1)...(19): siRNA sense strand
gaacgagagaaggaagaua

SEQ ID NO: 1478339 - RNA, 19 nt, Homo sapiens
  misc_RNA (1)...(19): siRNA sense strand
gagaagcagagcagagauu

SEQ ID NO: 1478340 - RNA, 19 nt, Homo sapiens
  misc_RNA (1)...(19): siRNA sense strand
uaaagaaaguccagaaacc

SEQ ID NO: 1478341 - RNA, 19 nt, Homo sapiens
  misc_RNA (1)...(19): siRNA sense strand
gccgagagguagcaaagga

SEQ ID NO: 1478342 - RNA, 19 nt, Homo sapiens
  misc_RNA (1)...(19): siRNA sense strand
uaccucuucuuccaaauuu

SEQ ID NO: 1478343 - RNA, 19 nt, Homo sapiens
  misc_RNA (1)...(19): siRNA sense strand
ggaauuggcucaguuucac

SEQ ID NO: 1478344 - RNA, 19 nt, Homo sapiens
  misc_RNA (1)...(19): siRNA sense strand
ggaaagccaaucggauaaa

SEQ ID NO: 1478345 - RNA, 19 nt, Homo sapiens
  misc_RNA (1)...(19): siRNA sense strand
gcuaaucccaauucccuaa

SEQ ID NO: 1478346 - RNA, 19 nt, Homo sapiens
  misc_RNA (1)...(19): siRNA sense strand
ugugguaccugaaggaaga

SEQ ID NO: 1478347 - RNA, 19 nt, Homo sapiens
  misc_RNA (1)...(19): siRNA sense strand
gaaccaggagauuacgaaa

SEQ ID NO: 1478348 - RNA, 19 nt, Homo sapiens
  misc_RNA (1)...(19): siRNA sense strand
ggauguuguugaugaagug

SEQ ID NO: 1478349 - RNA, 19 nt, Homo sapiens
  misc_RNA (1)...(19): siRNA sense strand
ggaagacgcgcuugaucug

SEQ ID NO: 1478350 - RNA, 19 nt, Homo sapiens
  misc_RNA (1)...(19): siRNA sense strand
gaaagccaaucggauaaaa

SEQ ID NO: 1478351 - RNA, 19 nt, Homo sapiens
  misc_RNA (1)...(19): siRNA sense strand
gauaucaaugcaagcagua

SEQ ID NO: 1478352 - RNA, 19 nt, Homo sapiens
  misc_RNA (1)...(19): siRNA sense strand
guguaucucccgaacauaa

SEQ ID NO: 1478353 - RNA, 19 nt, Homo sapiens
  misc_RNA (1)...(19): siRNA sense strand
uaaauaagcaucgcucaag

SEQ ID NO: 1478354 - RNA, 19 nt, Homo sapiens
  misc_RNA (1)...(19): siRNA sense strand
uggcaggucugauguugug

SEQ ID NO: 1478355 - RNA, 19 nt, Homo sapiens
  misc_RNA (1)...(19): siRNA sense strand
guucaggaguugaccaaag

SEQ ID NO: 1478356 - RNA, 19 nt, Homo sapiens
  misc_RNA (1)...(19): siRNA sense strand
ugugggcgauugaccagua

SEQ ID NO: 1478357 - RNA, 19 nt, Homo sapiens
  misc_RNA (1)...(19): siRNA sense strand
ggacccugcuccaguuucu

SEQ ID NO: 1478358 - RNA, 19 nt, Homo sapiens
  misc_RNA (1)...(19): siRNA sense strand
aagcguguuugaccaguuu

SEQ ID NO: 1478359 - RNA, 19 nt, Homo sapiens
  misc_RNA (1)...(19): siRNA sense strand
caugugguauccagaaauc

SEQ ID NO: 1478360 - RNA, 19 nt, Homo sapiens
  misc_RNA (1)...(19): siRNA sense strand
cugcuccaguuucuuuaua

SEQ ID NO: 1478361 - RNA, 19 nt, Homo sapiens
  misc_RNA (1)...(19): siRNA sense strand
uagcaaggcccauaaagag

SEQ ID NO: 1478362 - RNA, 19 nt, Homo sapiens
  misc_RNA (1)...(19): siRNA sense strand
ggagugaaggagccuguga

SEQ ID NO: 1478363 - RNA, 19 nt, Homo sapiens
  misc_RNA (1)...(19): siRNA sense strand
caucuuugcacaucgaauu

SEQ ID NO: 1478364 - RNA, 19 nt, Homo sapiens
  misc_RNA (1)...(19): siRNA sense strand
caaaggaacuuggcuuacc

SEQ ID NO: 1478365 - RNA, 19 nt, Homo sapiens
  misc_RNA (1)...(19): siRNA sense strand
caacagugugggcgauuga

SEQ ID NO: 1478366 - RNA, 19 nt, Homo sapiens
  misc_RNA (1)...(19): siRNA sense strand
gcuccaaguuccguaagga

SEQ ID NO: 1478367 - RNA, 19 nt, Homo sapiens
  misc_RNA (1)...(19): siRNA sense strand
gaucuggacccgcuggaau

SEQ ID NO: 1478368 - RNA, 19 nt, Homo sapiens
  misc_RNA (1)...(19): siRNA sense strand
gcaagcaguauuggauuau

SEQ ID NO: 1478369 - RNA, 19 nt, Homo sapiens
  misc_RNA (1)...(19): siRNA sense strand
caccugcaauucuggaaau

SEQ ID NO: 1478370 - RNA, 19 nt, Homo sapiens
  misc_RNA (1)...(19): siRNA sense strand
acagggaaaugcaagucaa

SEQ ID NO: 1478371 - RNA, 19 nt, Homo sapiens
  misc_RNA (1)...(19): siRNA sense strand
gggaagacgcgcuugaucu

SEQ ID NO: 1478372 - RNA, 19 nt, Homo sapiens
  misc_RNA (1)...(19): siRNA sense strand
agacgaaaguggugcuucu

SEQ ID NO: 1478373 - RNA, 19 nt, Homo sapiens
  misc_RNA (1)...(19): siRNA sense strand
cugcagacaaccaggaaua

SEQ ID NO: 1478374 - RNA, 19 nt, Homo sapiens
  misc_RNA (1)...(19): siRNA sense strand
gggauguuguugaugaagu

SEQ ID NO: 1478375 - RNA, 19 nt, Homo sapiens
  misc_RNA (1)...(19): siRNA sense strand
guugaugaagugaguguuu

SEQ ID NO: 1478376 - RNA, 19 nt, Homo sapiens
  misc_RNA (1)...(19): siRNA sense strand
ggaagccgagggugcaguu

SEQ ID NO: 1478377 - RNA, 19 nt, Homo sapiens
  misc_RNA (1)...(19): siRNA sense strand
guccagaaaccuuuacuuc

SEQ ID NO: 1478378 - RNA, 19 nt, Homo sapiens
  misc_RNA (1)...(19): siRNA sense strand
gcaccugcaauucuggaaa

SEQ ID NO: 1478379 - RNA, 19 nt, Homo sapiens
  misc_RNA (1)...(19): siRNA sense strand
caagcguguuugaccaguu

SEQ ID NO: 1478380 - RNA, 19 nt, Homo sapiens
  misc_RNA (1)...(19): siRNA sense strand
uauggcaggucugauguug

SEQ ID NO: 1478381 - RNA, 19 nt, Homo sapiens
  misc_RNA (1)...(19): siRNA sense strand
ccaacagugugggcgauug

SEQ ID NO: 1478382 - RNA, 19 nt, Homo sapiens
  misc_RNA (1)...(19): siRNA sense strand
caccacaucugcaccaacu

SEQ ID NO: 1478383 - RNA, 19 nt, Homo sapiens
  misc_RNA (1)...(19): siRNA sense strand
gggcauugacggagaagug

SEQ ID NO: 1478384 - RNA, 19 nt, Homo sapiens
  misc_RNA (1)...(19): siRNA sense strand
acaagccgcugcugaucug

SEQ ID NO: 1478385 - RNA, 19 nt, Homo sapiens
  misc_RNA (1)...(19): siRNA sense strand
aaaggaacuuggcuuacca

SEQ ID NO: 1478386 - RNA, 19 nt, Homo sapiens
  misc_RNA (1)...(19): siRNA sense strand
aaguggugcuucuggaauu

SEQ ID NO: 1478387 - RNA, 19 nt, Homo sapiens
  misc_RNA (1)...(19): siRNA sense strand
ucucucaggcuuugggaua

SEQ ID NO: 1478388 - RNA, 19 nt, Homo sapiens
  misc_RNA (1)...(19): siRNA sense strand
cgaguggcgugggcauuga

SEQ ID NO: 1478389 - RNA, 19 nt, Homo sapiens
  misc_RNA (1)...(19): siRNA sense strand
acacaucuuugcacaucga

SEQ ID NO: 1478390 - RNA, 19 nt, Homo sapiens
  misc_RNA (1)...(19): siRNA sense strand
ggauguguuugacaaugca

SEQ ID NO: 1478391 - RNA, 19 nt, Homo sapiens
  misc_RNA (1)...(19): siRNA sense strand
ccuaaagaaaguccagaaa

SEQ ID NO: 1478392 - RNA, 19 nt, Homo sapiens
  misc_RNA (1)...(19): siRNA sense strand
cgagagaaggaagauauug

SEQ ID NO: 1478393 - RNA, 19 nt, Homo sapiens
  misc_RNA (1)...(19): siRNA sense strand
ugaaggaagaagaucacua

SEQ ID NO: 1478394 - RNA, 19 nt, Homo sapiens
  misc_RNA (1)...(19): siRNA sense strand
cagacaaccaggaauacuu

SEQ ID NO: 1478395 - RNA, 19 nt, Homo sapiens
  misc_RNA (1)...(19): siRNA sense strand
gcaccaacuacaacagugu

SEQ ID NO: 1478396 - RNA, 19 nt, Homo sapiens
  misc_RNA (1)...(19): siRNA sense strand
caagauaucaaugcaagca

SEQ ID NO: 1478397 - RNA, 19 nt, Homo sapiens
  misc_RNA (1)...(19): siRNA sense strand
ggagcguucucgggauguu

SEQ ID NO: 1478398 - RNA, 19 nt, Homo sapiens
  misc_RNA (1)...(19): siRNA sense strand
gaagcagagcagagauuuc

SEQ ID NO: 1478399 - RNA, 19 nt, Homo sapiens
  misc_RNA (1)...(19): siRNA sense strand
gaagacgcgcuugaucugu

SEQ ID NO: 1478400 - RNA, 19 nt, Homo sapiens
  misc_RNA (1)...(19): siRNA sense strand
gcaugccguucaggaguug

SEQ ID NO: 1478401 - RNA, 19 nt, Homo sapiens
  misc_RNA (1)...(19): siRNA sense strand
caagcaguauuggauuauc

SEQ ID NO: 1478402 - RNA, 19 nt, Homo sapiens
  misc_RNA (1)...(19): siRNA sense strand
ggccaaaucugaaucauug

SEQ ID NO: 1478403 - RNA, 19 nt, Homo sapiens
  misc_RNA (1)...(19): siRNA sense strand
ccacaaaucuaccaugaga

SEQ ID NO: 1478404 - RNA, 19 nt, Homo sapiens
  misc_RNA (1)...(19): siRNA sense strand
gggauacgcugcaagagau

SEQ ID NO: 1478405 - RNA, 19 nt, Homo sapiens
  misc_RNA (1)...(19): siRNA sense strand
gguagaggcucaucagagu

SEQ ID NO: 1478406 - RNA, 19 nt, Homo sapiens
  misc_RNA (1)...(19): siRNA sense strand
caaaggcuaugaagcuguu

SEQ ID NO: 1478407 - RNA, 19 nt, Homo sapiens
  misc_RNA (1)...(19): siRNA sense strand
gagacaaggccaaaucuga

SEQ ID NO: 1478408 - RNA, 19 nt, Homo sapiens
  misc_RNA (1)...(19): siRNA sense strand
aaacaucauuugcgaggaa

SEQ ID NO: 1478409 - RNA, 19 nt, Homo sapiens
  misc_RNA (1)...(19): siRNA sense strand
gaaaggagacaaggccaaa

SEQ ID NO: 1478410 - RNA, 19 nt, Homo sapiens
  misc_RNA (1)...(19): siRNA sense strand
gaaauggcaacuacgaugu

SEQ ID NO: 1478411 - RNA, 19 nt, Homo sapiens
  misc_RNA (1)...(19): siRNA sense strand
gcaacuacgaugugaaugu

SEQ ID NO: 1478412 - RNA, 19 nt, Homo sapiens
  misc_RNA (1)...(19): siRNA sense strand
gagcucaggaaguuucuaa

SEQ ID NO: 1478413 - RNA, 19 nt, Homo sapiens
  misc_RNA (1)...(19): siRNA sense strand
acaaaucuaccaugagaaa

SEQ ID NO: 1478414 - RNA, 19 nt, Homo sapiens
  misc_RNA (1)...(19): siRNA sense strand
caacuacgaugugaauguc

SEQ ID NO: 1478415 - RNA, 19 nt, Homo sapiens
  misc_RNA (1)...(19): siRNA sense strand
agaagagcaugcugggaaa

SEQ ID NO: 1478416 - RNA, 19 nt, Homo sapiens
  misc_RNA (1)...(19): siRNA sense strand
gcugggaaauggcaacuac

SEQ ID NO: 1478417 - RNA, 19 nt, Homo sapiens
  misc_RNA (1)...(19): siRNA sense strand
aaacagcgcagggagcuuu

SEQ ID NO: 1478418 - RNA, 19 nt, Homo sapiens
  misc_RNA (1)...(19): siRNA sense strand
uggcagcacuucagaccaa

SEQ ID NO: 1478419 - RNA, 19 nt, Homo sapiens
  misc_RNA (1)...(19): siRNA sense strand
gaccaaaggcuaugaagcu

SEQ ID NO: 1478420 - RNA, 19 nt, Homo sapiens
  misc_RNA (1)...(19): siRNA sense strand
agacaaggccaaaucugaa

SEQ ID NO: 1478421 - RNA, 19 nt, Homo sapiens
  misc_RNA (1)...(19): siRNA sense strand
caagaugcccgaguggauu

SEQ ID NO: 1478422 - RNA, 19 nt, Homo sapiens
  misc_RNA (1)...(19): siRNA sense strand
aaucugcccuccagccuau

SEQ ID NO: 1478423 - RNA, 19 nt, Homo sapiens
  misc_RNA (1)...(19): siRNA sense strand
cagagguugucuccaaaca

SEQ ID NO: 1478424 - RNA, 19 nt, Homo sapiens
  misc_RNA (1)...(19): siRNA sense strand
uuccagagguugucuccaa

SEQ ID NO: 1478425 - RNA, 19 nt, Homo sapiens
  misc_RNA (1)...(19): siRNA sense strand
gacaaggccaaaucugaau

SEQ ID NO: 1478426 - RNA, 19 nt, Homo sapiens
  misc_RNA (1)...(19): siRNA sense strand
acuacaaccucgacuccaa

SEQ ID NO: 1478427 - RNA, 19 nt, Homo sapiens
  misc_RNA (1)...(19): siRNA sense strand
gcagggaugucggugucau

SEQ ID NO: 1478428 - RNA, 19 nt, Homo sapiens
  misc_RNA (1)...(19): siRNA sense strand
uagaggcucaucagaguug

SEQ ID NO: 1478429 - RNA, 19 nt, Homo sapiens
  misc_RNA (1)...(19): siRNA sense strand
ggagacaaggccaaaucug

SEQ ID NO: 1478430 - RNA, 19 nt, Homo sapiens
  misc_RNA (1)...(19): siRNA sense strand
caaccucgacuccaaacuc

SEQ ID NO: 1478431 - RNA, 19 nt, Homo sapiens
  misc_RNA (1)...(19): siRNA sense strand
gcacuggaucuguguucga

SEQ ID NO: 1478432 - RNA, 19 nt, Homo sapiens
  misc_RNA (1)...(19): siRNA sense strand
caaggccaaaucugaauca

SEQ ID NO: 1478433 - RNA, 19 nt, Homo sapiens
  misc_RNA (1)...(19): siRNA sense strand
uuggaggaccgauguguaa

SEQ ID NO: 1478434 - RNA, 19 nt, Homo sapiens
  misc_RNA (1)...(19): siRNA sense strand
cuacaaccucgacuccaaa

SEQ ID NO: 1478435 - RNA, 19 nt, Homo sapiens
  misc_RNA (1)...(19): siRNA sense strand
gaagagcaugcugggaaau

SEQ ID NO: 1478436 - RNA, 19 nt, Homo sapiens
  misc_RNA (1)...(19): siRNA sense strand
guuggaggaccgaugugua

SEQ ID NO: 1478437 - RNA, 19 nt, Homo sapiens
  misc_RNA (1)...(19): siRNA sense strand
ucaagaugcccgaguggau

SEQ ID NO: 1478438 - RNA, 19 nt, Homo sapiens
  misc_RNA (1)...(19): siRNA sense strand
gcccuccacgcccucaaua

SEQ ID NO: 1478439 - RNA, 19 nt, Homo sapiens
  misc_RNA (1)...(19): siRNA sense strand
ucauugcccucacuaacgu

SEQ ID NO: 1478440 - RNA, 19 nt, Homo sapiens
  misc_RNA (1)...(19): siRNA sense strand
cgggauacgcugcaagaga

SEQ ID NO: 1478441 - RNA, 19 nt, Homo sapiens
  misc_RNA (1)...(19): siRNA sense strand
gagguagaggcucaucaga

SEQ ID NO: 1478442 - RNA, 19 nt, Homo sapiens
  misc_RNA (1)...(19): siRNA sense strand
gauacgcugcaagagauuu

SEQ ID NO: 1478443 - RNA, 19 nt, Homo sapiens
  misc_RNA (1)...(19): siRNA sense strand
aauggcaacuacgauguga

SEQ ID NO: 1478444 - RNA, 19 nt, Homo sapiens
  misc_RNA (1)...(19): siRNA sense strand
gcucaggaaguuucuaaaa

SEQ ID NO: 1478445 - RNA, 19 nt, Homo sapiens
  misc_RNA (1)...(19): siRNA sense strand
aaccucgacuccaaacuca

SEQ ID NO: 1478446 - RNA, 19 nt, Homo sapiens
  misc_RNA (1)...(19): siRNA sense strand
aaaucuaccaugagaaaca

SEQ ID NO: 1478447 - RNA, 19 nt, Homo sapiens
  misc_RNA (1)...(19): siRNA sense strand
uccagagguugucuccaaa

SEQ ID NO: 1478448 - RNA, 19 nt, Homo sapiens
  misc_RNA (1)...(19): siRNA sense strand
guagaggcucaucagaguu

SEQ ID NO: 1478449 - RNA, 19 nt, Homo sapiens
  misc_RNA (1)...(19): siRNA sense strand
gaggaaagaacugugaacu

SEQ ID NO: 1478450 - RNA, 19 nt, Homo sapiens
  misc_RNA (1)...(19): siRNA sense strand
ggauacgcugcaagagauu

SEQ ID NO: 1478451 - RNA, 19 nt, Homo sapiens
  misc_RNA (1)...(19): siRNA sense strand
ugacaccucacaagaagag

SEQ ID NO: 1478452 - RNA, 19 nt, Homo sapiens
  misc_RNA (1)...(19): siRNA sense strand
gcgaggaaagaacugugaa

SEQ ID NO: 1478453 - RNA, 19 nt, Homo sapiens
  misc_RNA (1)...(19): siRNA sense strand
gggacaagcgcagggaugu

SEQ ID NO: 1478454 - RNA, 19 nt, Homo sapiens
  misc_RNA (1)...(19): siRNA sense strand
gaagaaaucucuagacuca

SEQ ID NO: 1478455 - RNA, 19 nt, Homo sapiens
  misc_RNA (1)...(19): siRNA sense strand
gaagaugacuaccagcaaa

SEQ ID NO: 1478456 - RNA, 19 nt, Homo sapiens
  misc_RNA (1)...(19): siRNA sense strand
gagaagagauugagaagca

SEQ ID NO: 1478457 - RNA, 19 nt, Homo sapiens
  misc_RNA (1)...(19): siRNA sense strand
gaaggaagaggaaaggaaa

SEQ ID NO: 1478458 - RNA, 19 nt, Homo sapiens
  misc_RNA (1)...(19): siRNA sense strand
agaaaucucuagacucaga

SEQ ID NO: 1478459 - RNA, 19 nt, Homo sapiens
  misc_RNA (1)...(19): siRNA sense strand
gagagaacgagaagagauu

SEQ ID NO: 1478460 - RNA, 19 nt, Homo sapiens
  misc_RNA (1)...(19): siRNA sense strand
gagugaggaugaagaagau

SEQ ID NO: 1478461 - RNA, 19 nt, Homo sapiens
  misc_RNA (1)...(19): siRNA sense strand
caaaagagcguuacaugaa

SEQ ID NO: 1478462 - RNA, 19 nt, Homo sapiens
  misc_RNA (1)...(19): siRNA sense strand
gcagaaggccagggaagaa

SEQ ID NO: 1478463 - RNA, 19 nt, Homo sapiens
  misc_RNA (1)...(19): siRNA sense strand
gaagaggaaaggaaagcaa

SEQ ID NO: 1478464 - RNA, 19 nt, Homo sapiens
  misc_RNA (1)...(19): siRNA sense strand
cagaugagagugaggauga

SEQ ID NO: 1478465 - RNA, 19 nt, Homo sapiens
  misc_RNA (1)...(19): siRNA sense strand
cagucacucucccugaaua

SEQ ID NO: 1478466 - RNA, 19 nt, Homo sapiens
  misc_RNA (1)...(19): siRNA sense strand
gaacgagaagagauugaga

SEQ ID NO: 1478467 - RNA, 19 nt, Homo sapiens
  misc_RNA (1)...(19): siRNA sense strand
ggagagaacgagaagagau

SEQ ID NO: 1478468 - RNA, 19 nt, Homo sapiens
  misc_RNA (1)...(19): siRNA sense strand
gaugccacauugucaggaa

SEQ ID NO: 1478469 - RNA, 19 nt, Homo sapiens
  misc_RNA (1)...(19): siRNA sense strand
ggaagaaggaagaggaaag

SEQ ID NO: 1478470 - RNA, 19 nt, Homo sapiens
  misc_RNA (1)...(19): siRNA sense strand
gcaaaagagcguuacauga

SEQ ID NO: 1478471 - RNA, 19 nt, Homo sapiens
  misc_RNA (1)...(19): siRNA sense strand
aaaagacgaugccacauug

SEQ ID NO: 1478472 - RNA, 19 nt, Homo sapiens
  misc_RNA (1)...(19): siRNA sense strand
gaggagagaacgagaagag

SEQ ID NO: 1478473 - RNA, 19 nt, Homo sapiens
  misc_RNA (1)...(19): siRNA sense strand
cacucucccugaauaagua

SEQ ID NO: 1478474 - RNA, 19 nt, Homo sapiens
  misc_RNA (1)...(19): siRNA sense strand
gaagaaagggaggccacaa

SEQ ID NO: 1478475 - RNA, 19 nt, Homo sapiens
  misc_RNA (1)...(19): siRNA sense strand
ggaugaagaagaugacuac

SEQ ID NO: 1478476 - RNA, 19 nt, Homo sapiens
  misc_RNA (1)...(19): siRNA sense strand
aaaagagcguuacaugaaa

SEQ ID NO: 1478477 - RNA, 19 nt, Homo sapiens
  misc_RNA (1)...(19): siRNA sense strand
gaaagggaggccacaaagg

SEQ ID NO: 1478478 - RNA, 19 nt, Homo sapiens
  misc_RNA (1)...(19): siRNA sense strand
gaagaaggaagaggaaagg

SEQ ID NO: 1478479 - RNA, 19 nt, Homo sapiens
  misc_RNA (1)...(19): siRNA sense strand
caaaagacgaugccacauu

SEQ ID NO: 1478480 - RNA, 19 nt, Homo sapiens
  misc_RNA (1)...(19): siRNA sense strand
uugaagggcucaucgacau

SEQ ID NO: 1478481 - RNA, 19 nt, Homo sapiens
  misc_RNA (1)...(19): siRNA sense strand
gaaaacgaaugcagucacu

SEQ ID NO: 1478482 - RNA, 19 nt, Homo sapiens
  misc_RNA (1)...(19): siRNA sense strand
gagaacgagaagagauuga

SEQ ID NO: 1478483 - RNA, 19 nt, Homo sapiens
  misc_RNA (1)...(19): siRNA sense strand
agagugaggaugaagaaga

SEQ ID NO: 1478484 - RNA, 19 nt, Homo sapiens
  misc_RNA (1)...(19): siRNA sense strand
gggcgaggcaguauacaag

SEQ ID NO: 1478485 - RNA, 19 nt, Homo sapiens
  misc_RNA (1)...(19): siRNA sense strand
aagaaagggaggccacaaa

SEQ ID NO: 1478486 - RNA, 19 nt, Homo sapiens
  misc_RNA (1)...(19): siRNA sense strand
ugagagugaggaugaagaa

SEQ ID NO: 1478487 - RNA, 19 nt, Homo sapiens
  misc_RNA (1)...(19): siRNA sense strand
agaaggaagaggaaaggaa

SEQ ID NO: 1478488 - RNA, 19 nt, Homo sapiens
  misc_RNA (1)...(19): siRNA sense strand
gcagucacucucccugaau

SEQ ID NO: 1478489 - RNA, 19 nt, Homo sapiens
  misc_RNA (1)...(19): siRNA sense strand
aaagagcguuacaugaaaa

SEQ ID NO: 1478490 - RNA, 19 nt, Homo sapiens
  misc_RNA (1)...(19): siRNA sense strand
gaucuggacgggccaaagg

SEQ ID NO: 1478491 - RNA, 19 nt, Homo sapiens
  misc_RNA (1)...(19): siRNA sense strand
uugagaagcagaaggcaaa

SEQ ID NO: 1478492 - RNA, 19 nt, Homo sapiens
  misc_RNA (1)...(19): siRNA sense strand
gugaggaugaagaagauga

SEQ ID NO: 1478493 - RNA, 19 nt, Homo sapiens
  misc_RNA (1)...(19): siRNA sense strand
uacaagcccugaggagauc

SEQ ID NO: 1478494 - RNA, 19 nt, Homo sapiens
  misc_RNA (1)...(19): siRNA sense strand
aagaggaaaggaaagcaaa

SEQ ID NO: 1478495 - RNA, 19 nt, Homo sapiens
  misc_RNA (1)...(19): siRNA sense strand
ugcagucacucucccugaa

SEQ ID NO: 1478496 - RNA, 19 nt, Homo sapiens
  misc_RNA (1)...(19): siRNA sense strand
aaacgaaugcagucacucu

SEQ ID NO: 1478497 - RNA, 19 nt, Homo sapiens
  misc_RNA (1)...(19): siRNA sense strand
auacaagcccugaggagau

SEQ ID NO: 1478498 - RNA, 19 nt, Homo sapiens
  misc_RNA (1)...(19): siRNA sense strand
agacgaugccacauuguca

SEQ ID NO: 1478499 - RNA, 19 nt, Homo sapiens
  misc_RNA (1)...(19): siRNA sense strand
gggaagaagaggagcaaaa

SEQ ID NO: 1478500 - RNA, 19 nt, Homo sapiens
  misc_RNA (1)...(19): siRNA sense strand
agaaagggaggccacaaag

SEQ ID NO: 1478501 - RNA, 19 nt, Homo sapiens
  misc_RNA (1)...(19): siRNA sense strand
ggaagaggaaaggaaagca

SEQ ID NO: 1478502 - RNA, 19 nt, Homo sapiens
  misc_RNA (1)...(19): siRNA sense strand
ccaagaaggugcccaagaa

SEQ ID NO: 1478503 - RNA, 19 nt, Homo sapiens
  misc_RNA (1)...(19): siRNA sense strand
gaucaacucuuucaacaag

SEQ ID NO: 1478504 - RNA, 19 nt, Homo sapiens
  misc_RNA (1)...(19): siRNA sense strand
gcgaaucccuugccaaaga

SEQ ID NO: 1478505 - RNA, 19 nt, Homo sapiens
  misc_RNA (1)...(19): siRNA sense strand
gaacagaugcuugcugaaa

SEQ ID NO: 1478506 - RNA, 19 nt, Homo sapiens
  misc_RNA (1)...(19): siRNA sense strand
gaauguaacuucacaacca

SEQ ID NO: 1478507 - RNA, 19 nt, Homo sapiens
  misc_RNA (1)...(19): siRNA sense strand
guacagcugccaccaaaua

SEQ ID NO: 1478508 - RNA, 19 nt, Homo sapiens
  misc_RNA (1)...(19): siRNA sense strand
ccacgaugaucaacucuuu

SEQ ID NO: 1478509 - RNA, 19 nt, Homo sapiens
  misc_RNA (1)...(19): siRNA sense strand
ugaaguggauggagcagua

SEQ ID NO: 1478510 - RNA, 19 nt, Homo sapiens
  misc_RNA (1)...(19): siRNA sense strand
ggagcgagaucaagaagug

SEQ ID NO: 1478511 - RNA, 19 nt, Homo sapiens
  misc_RNA (1)...(19): siRNA sense strand
gcucuccggugcccaguua

SEQ ID NO: 1478512 - RNA, 19 nt, Homo sapiens
  misc_RNA (1)...(19): siRNA sense strand
caaggucccugucccacua

SEQ ID NO: 1478513 - RNA, 19 nt, Homo sapiens
  misc_RNA (1)...(19): siRNA sense strand
uaaucaaacugucuuggaa

SEQ ID NO: 1478514 - RNA, 19 nt, Homo sapiens
  misc_RNA (1)...(19): siRNA sense strand
gaagacaaaggagcagaua

SEQ ID NO: 1478515 - RNA, 19 nt, Homo sapiens
  misc_RNA (1)...(19): siRNA sense strand
caaagaaaacgaagugaua

SEQ ID NO: 1478516 - RNA, 19 nt, Homo sapiens
  misc_RNA (1)...(19): siRNA sense strand
aaacacagggucagguuaa

SEQ ID NO: 1478517 - RNA, 19 nt, Homo sapiens
  misc_RNA (1)...(19): siRNA sense strand
ccaagaagcccgaggagau

SEQ ID NO: 1478518 - RNA, 19 nt, Homo sapiens
  misc_RNA (1)...(19): siRNA sense strand
caccaaauaucaaccuugu

SEQ ID NO: 1478519 - RNA, 19 nt, Homo sapiens
  misc_RNA (1)...(19): siRNA sense strand
gcgaagaggacuuggagaa

SEQ ID NO: 1478520 - RNA, 19 nt, Homo sapiens
  misc_RNA (1)...(19): siRNA sense strand
ccaggaguacgaccaguua

SEQ ID NO: 1478521 - RNA, 19 nt, Homo sapiens
  misc_RNA (1)...(19): siRNA sense strand
ggacaucacaaguaguaga

SEQ ID NO: 1478522 - RNA, 19 nt, Homo sapiens
  misc_RNA (1)...(19): siRNA sense strand
agucgagcguuguggauua

SEQ ID NO: 1478523 - RNA, 19 nt, Homo sapiens
  misc_RNA (1)...(19): siRNA sense strand
guucggacaucacaaguag

SEQ ID NO: 1478524 - RNA, 19 nt, Homo sapiens
  misc_RNA (1)...(19): siRNA sense strand
gcaauaaucaaacugucuu

SEQ ID NO: 1478525 - RNA, 19 nt, Homo sapiens
  misc_RNA (1)...(19): siRNA sense strand
agacagggccaaagagaaa

SEQ ID NO: 1478526 - RNA, 19 nt, Homo sapiens
  misc_RNA (1)...(19): siRNA sense strand
cuacgugugugcagaaugu

SEQ ID NO: 1478527 - RNA, 19 nt, Homo sapiens
  misc_RNA (1)...(19): siRNA sense strand
ggucaacaaccgucucuug

SEQ ID NO: 1478528 - RNA, 19 nt, Homo sapiens
  misc_RNA (1)...(19): siRNA sense strand
cagcgaaucccuugccaaa

SEQ ID NO: 1478529 - RNA, 19 nt, Homo sapiens
  misc_RNA (1)...(19): siRNA sense strand
ggaaguagacagggccaaa

SEQ ID NO: 1478530 - RNA, 19 nt, Homo sapiens
  misc_RNA (1)...(19): siRNA sense strand
gaagagacccuuggugacu

SEQ ID NO: 1478531 - RNA, 19 nt, Homo sapiens
  misc_RNA (1)...(19): siRNA sense strand
cagaggagcacaucagaau

SEQ ID NO: 1478532 - RNA, 19 nt, Homo sapiens
  misc_RNA (1)...(19): siRNA sense strand
acucugcccuggauacaaa

SEQ ID NO: 1478533 - RNA, 19 nt, Homo sapiens
  misc_RNA (1)...(19): siRNA sense strand
gaggagcacguuugcaaga

SEQ ID NO: 1478534 - RNA, 19 nt, Homo sapiens
  misc_RNA (1)...(19): siRNA sense strand
ucaagaagugguucaguga

SEQ ID NO: 1478535 - RNA, 19 nt, Homo sapiens
  misc_RNA (1)...(19): siRNA sense strand
caucacaaguaguagaaca

SEQ ID NO: 1478536 - RNA, 19 nt, Homo sapiens
  misc_RNA (1)...(19): siRNA sense strand
ugucggaacuggcugaauc

SEQ ID NO: 1478537 - RNA, 19 nt, Homo sapiens
  misc_RNA (1)...(19): siRNA sense strand
cccagaaguucaaagagaa

SEQ ID NO: 1478538 - RNA, 19 nt, Homo sapiens
  misc_RNA (1)...(19): siRNA sense strand
auacaacucugcccuggau

SEQ ID NO: 1478539 - RNA, 19 nt, Homo sapiens
  misc_RNA (1)...(19): siRNA sense strand
ucagauagaucagauagcu

SEQ ID NO: 1478540 - RNA, 19 nt, Homo sapiens
  misc_RNA (1)...(19): siRNA sense strand
caaaugccacgaugaucaa

SEQ ID NO: 1478541 - RNA, 19 nt, Homo sapiens
  misc_RNA (1)...(19): siRNA sense strand
guagacagggccaaagaga

SEQ ID NO: 1478542 - RNA, 19 nt, Homo sapiens
  misc_RNA (1)...(19): siRNA sense strand
gguccgaacugagauugug

SEQ ID NO: 1478543 - RNA, 19 nt, Homo sapiens
  misc_RNA (1)...(19): siRNA sense strand
gagaucgacuccugguucu

SEQ ID NO: 1478544 - RNA, 19 nt, Homo sapiens
  misc_RNA (1)...(19): siRNA sense strand
gcuccuccaagacacauua

SEQ ID NO: 1478545 - RNA, 19 nt, Homo sapiens
  misc_RNA (1)...(19): siRNA sense strand
gcagaacuggaucggcuaa

SEQ ID NO: 1478546 - RNA, 19 nt, Homo sapiens
  misc_RNA (1)...(19): siRNA sense strand
caacggcaccauccaguca

SEQ ID NO: 1478547 - RNA, 19 nt, Homo sapiens
  misc_RNA (1)...(19): siRNA sense strand
ucugggaucucggugagua

SEQ ID NO: 1478548 - RNA, 19 nt, Homo sapiens
  misc_RNA (1)...(19): siRNA sense strand
gaggagcacaucagaaucu

SEQ ID NO: 1478549 - RNA, 19 nt, Homo sapiens
  misc_RNA (1)...(19): siRNA sense strand
cgucaugccuucuguacag

SEQ ID NO: 1478550 - RNA, 19 nt, Homo sapiens
  misc_RNA (1)...(19): siRNA sense strand
gaucagauagcuggaguca

SEQ ID NO: 1478551 - RNA, 19 nt, Homo sapiens
  misc_RNA (1)...(19): siRNA sense strand
gucccugucccacuaaaua

SEQ ID NO: 1478552 - RNA, 19 nt, Homo sapiens
  misc_RNA (1)...(19): siRNA sense strand
gacaucacaaguaguagaa

SEQ ID NO: 1478553 - RNA, 19 nt, Homo sapiens
  misc_RNA (1)...(19): siRNA sense strand
gaacccaagcguccacaca

SEQ ID NO: 1478554 - RNA, 19 nt, Homo sapiens
  misc_RNA (1)...(19): siRNA sense strand
acaaaugccacgaugauca

SEQ ID NO: 1478555 - RNA, 19 nt, Homo sapiens
  misc_RNA (1)...(19): siRNA sense strand
gauacaaaugccacgauga

SEQ ID NO: 1478556 - RNA, 19 nt, Homo sapiens
  misc_RNA (1)...(19): siRNA sense strand
ggacaguugggcagcagaa

SEQ ID NO: 1478557 - RNA, 19 nt, Homo sapiens
  misc_RNA (1)...(19): siRNA sense strand
cuguacagcugccaccaaa

SEQ ID NO: 1478558 - RNA, 19 nt, Homo sapiens
  misc_RNA (1)...(19): siRNA sense strand
cagcagaacuugaaaacuc

SEQ ID NO: 1478559 - RNA, 19 nt, Homo sapiens
  misc_RNA (1)...(19): siRNA sense strand
gagauugugcguugguuca

SEQ ID NO: 1478560 - RNA, 19 nt, Homo sapiens
  misc_RNA (1)...(19): siRNA sense strand
ccacuaaauacuaccaaau

SEQ ID NO: 1478561 - RNA, 19 nt, Homo sapiens
  misc_RNA (1)...(19): siRNA sense strand
ucggacaucacaaguagua

SEQ ID NO: 1478562 - RNA, 19 nt, Homo sapiens
  misc_RNA (1)...(19): siRNA sense strand
ugacagcugccuccaaaca

SEQ ID NO: 1478563 - RNA, 19 nt, Homo sapiens
  misc_RNA (1)...(19): siRNA sense strand
ggagcacguuugcaagaac

SEQ ID NO: 1478564 - RNA, 19 nt, Homo sapiens
  misc_RNA (1)...(19): siRNA sense strand
aagcugagcaggagagaga

SEQ ID NO: 1478565 - RNA, 19 nt, Homo sapiens
  misc_RNA (1)...(19): siRNA sense strand
gaagugauagaggugaaau

SEQ ID NO: 1478566 - RNA, 19 nt, Homo sapiens
  misc_RNA (1)...(19): siRNA sense strand
cagaaggugugucggaacu

SEQ ID NO: 1478567 - RNA, 19 nt, Homo sapiens
  misc_RNA (1)...(19): siRNA sense strand
cagcugccaccaaauauca

SEQ ID NO: 1478568 - RNA, 19 nt, Homo sapiens
  misc_RNA (1)...(19): siRNA sense strand
ggacacgucaugccuucug

SEQ ID NO: 1478569 - RNA, 19 nt, Homo sapiens
  misc_RNA (1)...(19): siRNA sense strand
gugguuaugagugcaaaua

SEQ ID NO: 1478570 - RNA, 19 nt, Homo sapiens
  misc_RNA (1)...(19): siRNA sense strand
uagcaaggaaagcaacaaa

SEQ ID NO: 1478571 - RNA, 19 nt, Homo sapiens
  misc_RNA (1)...(19): siRNA sense strand
ggugcccaguuaacaaguu

SEQ ID NO: 1478572 - RNA, 19 nt, Homo sapiens
  misc_RNA (1)...(19): siRNA sense strand
ccagaaguucaaagagaaa

SEQ ID NO: 1478573 - RNA, 19 nt, Homo sapiens
  misc_RNA (1)...(19): siRNA sense strand
guucagugaccaccgauau

SEQ ID NO: 1478574 - RNA, 19 nt, Homo sapiens
  misc_RNA (1)...(19): siRNA sense strand
gccaggagcgagaucaaga

SEQ ID NO: 1478575 - RNA, 19 nt, Homo sapiens
  misc_RNA (1)...(19): siRNA sense strand
gaugaucaacucuuucaac

SEQ ID NO: 1478576 - RNA, 19 nt, Homo sapiens
  misc_RNA (1)...(19): siRNA sense strand
caaaagcggaugccaagaa

SEQ ID NO: 1478577 - RNA, 19 nt, Homo sapiens
  misc_RNA (1)...(19): siRNA sense strand
acaaguaguagaacaagau

SEQ ID NO: 1478578 - RNA, 19 nt, Homo sapiens
  misc_RNA (1)...(19): siRNA sense strand
ggcuaaggguggagaccaa

SEQ ID NO: 1478579 - RNA, 19 nt, Homo sapiens
  misc_RNA (1)...(19): siRNA sense strand
gaaaacacagggucagguu

SEQ ID NO: 1478580 - RNA, 19 nt, Homo sapiens
  misc_RNA (1)...(19): siRNA sense strand
gccagugaccgcaagaaga

SEQ ID NO: 1478581 - RNA, 19 nt, Homo sapiens
  misc_RNA (1)...(19): siRNA sense strand
aauguaacuucacaaccaa

SEQ ID NO: 1478582 - RNA, 19 nt, Homo sapiens
  misc_RNA (1)...(19): siRNA sense strand
cacaaguaguagaacaaga

SEQ ID NO: 1478583 - RNA, 19 nt, Homo sapiens
  misc_RNA (1)...(19): siRNA sense strand
caagaagcccgaggagauc

SEQ ID NO: 1478584 - RNA, 19 nt, Homo sapiens
  misc_RNA (1)...(19): siRNA sense strand
gccaagaaggugcccaaga

SEQ ID NO: 1478585 - RNA, 19 nt, Homo sapiens
  misc_RNA (1)...(19): siRNA sense strand
gaacaguccaucgaaacca

SEQ ID NO: 1478586 - RNA, 19 nt, Homo sapiens
  misc_RNA (1)...(19): siRNA sense strand
ggggaaagccaguccaaaa

SEQ ID NO: 1478587 - RNA, 19 nt, Homo sapiens
  misc_RNA (1)...(19): siRNA sense strand
ugacagacacagcugagau

SEQ ID NO: 1478588 - RNA, 19 nt, Homo sapiens
  misc_RNA (1)...(19): siRNA sense strand
cgcaaaaccugaacgaguu

SEQ ID NO: 1478589 - RNA, 19 nt, Homo sapiens
  misc_RNA (1)...(19): siRNA sense strand
ggccugguccgaacugaga

SEQ ID NO: 1478590 - RNA, 19 nt, Homo sapiens
  misc_RNA (1)...(19): siRNA sense strand
gaaguagacagggccaaag

SEQ ID NO: 1478591 - RNA, 19 nt, Homo sapiens
  misc_RNA (1)...(19): siRNA sense strand
cacauuaggacacgucaug

SEQ ID NO: 1478592 - RNA, 19 nt, Homo sapiens
  misc_RNA (1)...(19): siRNA sense strand
gcagcaucccaacgugauu

SEQ ID NO: 1478593 - RNA, 19 nt, Homo sapiens
  misc_RNA (1)...(19): siRNA sense strand
ccaguuagcggccaagacu

SEQ ID NO: 1478594 - RNA, 19 nt, Homo sapiens
  misc_RNA (1)...(19): siRNA sense strand
aaacgaaaaucuacaacuc

SEQ ID NO: 1478595 - RNA, 19 nt, Homo sapiens
  misc_RNA (1)...(19): siRNA sense strand
augaucaacucuuucaaca

SEQ ID NO: 1478596 - RNA, 19 nt, Homo sapiens
  misc_RNA (1)...(19): siRNA sense strand
auacaaaugccacgaugau

SEQ ID NO: 1478597 - RNA, 19 nt, Homo sapiens
  misc_RNA (1)...(19): siRNA sense strand
ccaaccaugucguguccau

SEQ ID NO: 1478598 - RNA, 19 nt, Homo sapiens
  misc_RNA (1)...(19): siRNA sense strand
ggccaaagagaaaggaauc

SEQ ID NO: 1478599 - RNA, 19 nt, Homo sapiens
  misc_RNA (1)...(19): siRNA sense strand
ccagaggagcacaucagaa

SEQ ID NO: 1478600 - RNA, 19 nt, Homo sapiens
  misc_RNA (1)...(19): siRNA sense strand
gcagcgagccagcaaaaga

SEQ ID NO: 1478601 - RNA, 19 nt, Homo sapiens
  misc_RNA (1)...(19): siRNA sense strand
caaguaguagaacaagaug

SEQ ID NO: 1478602 - RNA, 19 nt, Homo sapiens
  misc_RNA (1)...(19): siRNA sense strand
ucagaccgcuugaaucuua

SEQ ID NO: 1478603 - RNA, 19 nt, Homo sapiens
  misc_RNA (1)...(19): siRNA sense strand
gagcauaaucuccugaauc

SEQ ID NO: 1478604 - RNA, 19 nt, Homo sapiens
  misc_RNA (1)...(19): siRNA sense strand
uuucagaaccggagaauga

SEQ ID NO: 1478605 - RNA, 19 nt, Homo sapiens
  misc_RNA (1)...(19): siRNA sense strand
gcgaguuucuggucaacga

SEQ ID NO: 1478606 - RNA, 19 nt, Homo sapiens
  misc_RNA (1)...(19): siRNA sense strand
gggagacaccuucuacuuc

SEQ ID NO: 1478607 - RNA, 19 nt, Homo sapiens
  misc_RNA (1)...(19): siRNA sense strand
caagcucucuccuucuuuu

SEQ ID NO: 1478608 - RNA, 19 nt, Homo sapiens
  misc_RNA (1)...(19): siRNA sense strand
ggucaacgaguucaucaca

SEQ ID NO: 1478609 - RNA, 19 nt, Homo sapiens
  misc_RNA (1)...(19): siRNA sense strand
gcaagcucucuccuucuuu

SEQ ID NO: 1478610 - RNA, 19 nt, Homo sapiens
  misc_RNA (1)...(19): siRNA sense strand
gcaggucaagaucugguuu

SEQ ID NO: 1478611 - RNA, 19 nt, Homo sapiens
  misc_RNA (1)...(19): siRNA sense strand
gaagaagcgcaagcccuau

SEQ ID NO: 1478612 - RNA, 19 nt, Homo sapiens
  misc_RNA (1)...(19): siRNA sense strand
gcaagcccuauucgaaguu

SEQ ID NO: 1478613 - RNA, 19 nt, Homo sapiens
  misc_RNA (1)...(19): siRNA sense strand
caagcccuauucgaaguug

SEQ ID NO: 1478614 - RNA, 19 nt, Homo sapiens
  misc_RNA (1)...(19): siRNA sense strand
ggacggcaaggguuacuac

SEQ ID NO: 1478615 - RNA, 19 nt, Homo sapiens
  misc_RNA (1)...(19): siRNA sense strand
aacagccgcucucggaaga

SEQ ID NO: 1478616 - RNA, 19 nt, Homo sapiens
  misc_RNA (1)...(19): siRNA sense strand
gcucaacgagggcaacaag

SEQ ID NO: 1478617 - RNA, 19 nt, Homo sapiens
  misc_RNA (1)...(19): siRNA sense strand
ucucagaccgcuugaaucu

SEQ ID NO: 1478618 - RNA, 19 nt, Homo sapiens
  misc_RNA (1)...(19): siRNA sense strand
uggaggacggcaaggguua

SEQ ID NO: 1478619 - RNA, 19 nt, Homo sapiens
  misc_RNA (1)...(19): siRNA sense strand
agcaagcucucuccuucuu

SEQ ID NO: 1478620 - RNA, 19 nt, Homo sapiens
  misc_RNA (1)...(19): siRNA sense strand
gaauccgacuccaguucgu

SEQ ID NO: 1478621 - RNA, 19 nt, Homo sapiens
  misc_RNA (1)...(19): siRNA sense strand
ucuccugaaucccggguuu

SEQ ID NO: 1478622 - RNA, 19 nt, Homo sapiens
  misc_RNA (1)...(19): siRNA sense strand
cgagcauaaucuccugaau

SEQ ID NO: 1478623 - RNA, 19 nt, Homo sapiens
  misc_RNA (1)...(19): siRNA sense strand
cgggagacaccuucuacuu

SEQ ID NO: 1478624 - RNA, 19 nt, Homo sapiens
  misc_RNA (1)...(19): siRNA sense strand
gcagcccagugucucucaa

SEQ ID NO: 1478625 - RNA, 19 nt, Homo sapiens
  misc_RNA (1)...(19): siRNA sense strand
cgcaagcccuauucgaagu

SEQ ID NO: 1478626 - RNA, 19 nt, Homo sapiens
  misc_RNA (1)...(19): siRNA sense strand
aagaagcgcaagcccuauu

SEQ ID NO: 1478627 - RNA, 19 nt, Homo sapiens
  misc_RNA (1)...(19): siRNA sense strand
ucagaaccggagaaugaaa

SEQ ID NO: 1478628 - RNA, 19 nt, Homo sapiens
  misc_RNA (1)...(19): siRNA sense strand
agcauaaucuccugaaucc

SEQ ID NO: 1478629 - RNA, 19 nt, Homo sapiens
  misc_RNA (1)...(19): siRNA sense strand
gaggauaucuggaagaaau

SEQ ID NO: 1478630 - RNA, 19 nt, Homo sapiens
  misc_RNA (1)...(19): siRNA sense strand
cagagaagcuggccuccua

SEQ ID NO: 1478631 - RNA, 19 nt, Homo sapiens
  misc_RNA (1)...(19): siRNA sense strand
gaagaaaucgauguuguuu

SEQ ID NO: 1478632 - RNA, 19 nt, Homo sapiens
  misc_RNA (1)...(19): siRNA sense strand
gagaacaguugaaacacaa

SEQ ID NO: 1478633 - RNA, 19 nt, Homo sapiens
  misc_RNA (1)...(19): siRNA sense strand
acacaaacuugaacagcua

SEQ ID NO: 1478634 - RNA, 19 nt, Homo sapiens
  misc_RNA (1)...(19): siRNA sense strand
acaagaagaugaggaagaa

SEQ ID NO: 1478635 - RNA, 19 nt, Homo sapiens
  misc_RNA (1)...(19): siRNA sense strand
ggaagaaaucgauguuguu

SEQ ID NO: 1478636 - RNA, 19 nt, Homo sapiens
  misc_RNA (1)...(19): siRNA sense strand
gaaacgacgagaacaguug

SEQ ID NO: 1478637 - RNA, 19 nt, Homo sapiens
  misc_RNA (1)...(19): siRNA sense strand
ccacacaucagcacaacua

SEQ ID NO: 1478638 - RNA, 19 nt, Homo sapiens
  misc_RNA (1)...(19): siRNA sense strand
gcgaggauaucuggaagaa

SEQ ID NO: 1478639 - RNA, 19 nt, Homo sapiens
  misc_RNA (1)...(19): siRNA sense strand
ggaacaagaagaugaggaa

SEQ ID NO: 1478640 - RNA, 19 nt, Homo sapiens
  misc_RNA (1)...(19): siRNA sense strand
cgacgagaccuucaucaaa

SEQ ID NO: 1478641 - RNA, 19 nt, Homo sapiens
  misc_RNA (1)...(19): siRNA sense strand
gaacagcuacggaacucuu

SEQ ID NO: 1478642 - RNA, 19 nt, Homo sapiens
  misc_RNA (1)...(19): siRNA sense strand
gaacacacaacgucuugga

SEQ ID NO: 1478643 - RNA, 19 nt, Homo sapiens
  misc_RNA (1)...(19): siRNA sense strand
gacgagaccuucaucaaaa

SEQ ID NO: 1478644 - RNA, 19 nt, Homo sapiens
  misc_RNA (1)...(19): siRNA sense strand
gacagcagcucgcccaagu

SEQ ID NO: 1478645 - RNA, 19 nt, Homo sapiens
  misc_RNA (1)...(19): siRNA sense strand
cgagaacaguugaaacaca

SEQ ID NO: 1478646 - RNA, 19 nt, Homo sapiens
  misc_RNA (1)...(19): siRNA sense strand
ccgccaagcucgucucaga

SEQ ID NO: 1478647 - RNA, 19 nt, Homo sapiens
  misc_RNA (1)...(19): siRNA sense strand
ugagacagaucagcaacaa

SEQ ID NO: 1478648 - RNA, 19 nt, Homo sapiens
  misc_RNA (1)...(19): siRNA sense strand
ggaacuaugaccucgacua

SEQ ID NO: 1478649 - RNA, 19 nt, Homo sapiens
  misc_RNA (1)...(19): siRNA sense strand
gaacuaugaccucgacuac

SEQ ID NO: 1478650 - RNA, 19 nt, Homo sapiens
  misc_RNA (1)...(19): siRNA sense strand
gacgagaacaguugaaaca

SEQ ID NO: 1478651 - RNA, 19 nt, Homo sapiens
  misc_RNA (1)...(19): siRNA sense strand
ggaaacgacgagaacaguu

SEQ ID NO: 1478652 - RNA, 19 nt, Homo sapiens
  misc_RNA (1)...(19): siRNA sense strand
gcuuguaccugcaggaucu

SEQ ID NO: 1478653 - RNA, 19 nt, Homo sapiens
  misc_RNA (1)...(19): siRNA sense strand
acuaugaccucgacuacga

SEQ ID NO: 1478654 - RNA, 19 nt, Homo sapiens
  misc_RNA (1)...(19): siRNA sense strand
aacguuagcuucaccaaca

SEQ ID NO: 1478655 - RNA, 19 nt, Homo sapiens
  misc_RNA (1)...(19): siRNA sense strand
ucaccaacaggaacuauga

SEQ ID NO: 1478656 - RNA, 19 nt, Homo sapiens
  misc_RNA (1)...(19): siRNA sense strand
aaaucgauguuguuucugu

SEQ ID NO: 1478657 - RNA, 19 nt, Homo sapiens
  misc_RNA (1)...(19): siRNA sense strand
aggaagaaaucgauguugu

SEQ ID NO: 1478658 - RNA, 19 nt, Homo sapiens
  misc_RNA (1)...(19): siRNA sense strand
cagcgacucugaggaggaa

SEQ ID NO: 1478659 - RNA, 19 nt, Homo sapiens
  misc_RNA (1)...(19): siRNA sense strand
agcaaaagcucauuucuga

SEQ ID NO: 1478660 - RNA, 19 nt, Homo sapiens
  misc_RNA (1)...(19): siRNA sense strand
gcgaacacacaacgucuug

SEQ ID NO: 1478661 - RNA, 19 nt, Homo sapiens
  misc_RNA (1)...(19): siRNA sense strand
gugaccagaucccggaguu

SEQ ID NO: 1478662 - RNA, 19 nt, Homo sapiens
  misc_RNA (1)...(19): siRNA sense strand
cuaccaggcugcgcgcaaa

SEQ ID NO: 1478663 - RNA, 19 nt, Homo sapiens
  misc_RNA (1)...(19): siRNA sense strand
guugaaacacaaacuugaa

SEQ ID NO: 1478664 - RNA, 19 nt, Homo sapiens
  misc_RNA (1)...(19): siRNA sense strand
ggacgacgagaccuucauc

SEQ ID NO: 1478665 - RNA, 19 nt, Homo sapiens
  misc_RNA (1)...(19): siRNA sense strand
gaaacacaaacuugaacag

SEQ ID NO: 1478666 - RNA, 19 nt, Homo sapiens
  misc_RNA (1)...(19): siRNA sense strand
cgauguuguuucuguggaa

SEQ ID NO: 1478667 - RNA, 19 nt, Homo sapiens
  misc_RNA (1)...(19): siRNA sense strand
gaggaagaaaucgauguug

SEQ ID NO: 1478668 - RNA, 19 nt, Homo sapiens
  misc_RNA (1)...(19): siRNA sense strand
gucaagaggcgaacacaca

SEQ ID NO: 1478669 - RNA, 19 nt, Homo sapiens
  misc_RNA (1)...(19): siRNA sense strand
gggucaaguuggacagugu

SEQ ID NO: 1478670 - RNA, 19 nt, Homo sapiens
  misc_RNA (1)...(19): siRNA sense strand
ggaggaacaagaagaugag

SEQ ID NO: 1478671 - RNA, 19 nt, Homo sapiens
  misc_RNA (1)...(19): siRNA sense strand
aagaagaugaggaagaaau

SEQ ID NO: 1478672 - RNA, 19 nt, Homo sapiens
  misc_RNA (1)...(19): siRNA sense strand
ugaggaagaaaucgauguu

SEQ ID NO: 1478673 - RNA, 19 nt, Homo sapiens
  misc_RNA (1)...(19): siRNA sense strand
aaacgacgagaacaguuga

SEQ ID NO: 1478674 - RNA, 19 nt, Homo sapiens
  misc_RNA (1)...(19): siRNA sense strand
gcgacgaggaggagaacuu

SEQ ID NO: 1478675 - RNA, 19 nt, Homo sapiens
  misc_RNA (1)...(19): siRNA sense strand
ucaagaggcgaacacacaa

SEQ ID NO: 1478676 - RNA, 19 nt, Homo sapiens
  misc_RNA (1)...(19): siRNA sense strand
gaacaguugaaacacaaac

SEQ ID NO: 1478677 - RNA, 19 nt, Homo sapiens
  misc_RNA (1)...(19): siRNA sense strand
gagucuggaucaccuucug

SEQ ID NO: 1478678 - RNA, 19 nt, Homo sapiens
  misc_RNA (1)...(19): siRNA sense strand
ggauaucuggaagaaauuc

SEQ ID NO: 1478679 - RNA, 19 nt, Homo sapiens
  misc_RNA (1)...(19): siRNA sense strand
acucggugcagccguauuu

SEQ ID NO: 1478680 - RNA, 19 nt, Homo sapiens
  misc_RNA (1)...(19): siRNA sense strand
caaaagcucauuucugaag

SEQ ID NO: 1478681 - RNA, 19 nt, Homo sapiens
  misc_RNA (1)...(19): siRNA sense strand
ccagaucccggaguuggaa

SEQ ID NO: 1478682 - RNA, 19 nt, Homo sapiens
  misc_RNA (1)...(19): siRNA sense strand
cggugcagccguauuucua

SEQ ID NO: 1478683 - RNA, 19 nt, Homo sapiens
  misc_RNA (1)...(19): siRNA sense strand
ugaggaggaacaagaagau

SEQ ID NO: 1478684 - RNA, 19 nt, Homo sapiens
  misc_RNA (1)...(19): siRNA sense strand
caucauccaggacuguaug

SEQ ID NO: 1478685 - RNA, 19 nt, Homo sapiens
  misc_RNA (1)...(19): siRNA sense strand
ugaaacacaaacuugaaca

SEQ ID NO: 1478686 - RNA, 19 nt, Homo sapiens
  misc_RNA (1)...(19): siRNA sense strand
aaagcucauuucugaagag

SEQ ID NO: 1478687 - RNA, 19 nt, Homo sapiens
  misc_RNA (1)...(19): siRNA sense strand
gaucagcaacaaccgaaaa

SEQ ID NO: 1478688 - RNA, 19 nt, Homo sapiens
  misc_RNA (1)...(19): siRNA sense strand
aacaagaagaugaggaaga

SEQ ID NO: 1478689 - RNA, 19 nt, Homo sapiens
  misc_RNA (1)...(19): siRNA sense strand
gaaaucggcuggacagaug

SEQ ID NO: 1478690 - RNA, 19 nt, Homo sapiens
  misc_RNA (1)...(19): siRNA sense strand
gagaggagauuucaagaug

SEQ ID NO: 1478691 - RNA, 19 nt, Homo sapiens
  misc_RNA (1)...(19): siRNA sense strand
caacguagcugucaucaac

SEQ ID NO: 1478692 - RNA, 19 nt, Homo sapiens
  misc_RNA (1)...(19): siRNA sense strand
gcacaggauucccaaagaa

SEQ ID NO: 1478693 - RNA, 19 nt, Homo sapiens
  misc_RNA (1)...(19): siRNA sense strand
aaugagagcugcagugaaa

SEQ ID NO: 1478694 - RNA, 19 nt, Homo sapiens
  misc_RNA (1)...(19): siRNA sense strand
gaagagaucgccacacaga

SEQ ID NO: 1478695 - RNA, 19 nt, Homo sapiens
  misc_RNA (1)...(19): siRNA sense strand
ggaaguacuuggaagagau

SEQ ID NO: 1478696 - RNA, 19 nt, Homo sapiens
  misc_RNA (1)...(19): siRNA sense strand
gaaaugagagcugcaguga

SEQ ID NO: 1478697 - RNA, 19 nt, Homo sapiens
  misc_RNA (1)...(19): siRNA sense strand
gaaauacgccuaccucaac

SEQ ID NO: 1478698 - RNA, 19 nt, Homo sapiens
  misc_RNA (1)...(19): siRNA sense strand
ucacgcagcugggcuauga

SEQ ID NO: 1478699 - RNA, 19 nt, Homo sapiens
  misc_RNA (1)...(19): siRNA sense strand
ggagaaccgugcccggaaa

SEQ ID NO: 1478700 - RNA, 19 nt, Homo sapiens
  misc_RNA (1)...(19): siRNA sense strand
gauagaaacuuuggaacca

SEQ ID NO: 1478701 - RNA, 19 nt, Homo sapiens
  misc_RNA (1)...(19): siRNA sense strand
ggacggaggcucaaacauc

SEQ ID NO: 1478702 - RNA, 19 nt, Homo sapiens
  misc_RNA (1)...(19): siRNA sense strand
aaagaccaauugcaacgua

SEQ ID NO: 1478703 - RNA, 19 nt, Homo sapiens
  misc_RNA (1)...(19): siRNA sense strand
gcagaugacucaggaugug

SEQ ID NO: 1478704 - RNA, 19 nt, Homo sapiens
  misc_RNA (1)...(19): siRNA sense strand
gcagaugugugucaaacuc

SEQ ID NO: 1478705 - RNA, 19 nt, Homo sapiens
  misc_RNA (1)...(19): siRNA sense strand
ggaacggccagaucgauaa

SEQ ID NO: 1478706 - RNA, 19 nt, Homo sapiens
  misc_RNA (1)...(19): siRNA sense strand
gcugaaggagcaauugaua

SEQ ID NO: 1478707 - RNA, 19 nt, Homo sapiens
  misc_RNA (1)...(19): siRNA sense strand
uggaggagcuggccaggaa

SEQ ID NO: 1478708 - RNA, 19 nt, Homo sapiens
  misc_RNA (1)...(19): siRNA sense strand
ucagggaucugcaguccaa

SEQ ID NO: 1478709 - RNA, 19 nt, Homo sapiens
  misc_RNA (1)...(19): siRNA sense strand
gggagaagcacgaggaguu

SEQ ID NO: 1478710 - RNA, 19 nt, Homo sapiens
  misc_RNA (1)...(19): siRNA sense strand
gaagaccaccauccagaga

SEQ ID NO: 1478711 - RNA, 19 nt, Homo sapiens
  misc_RNA (1)...(19): siRNA sense strand
gagcagaugugugucaaac

SEQ ID NO: 1478712 - RNA, 19 nt, Homo sapiens
  misc_RNA (1)...(19): siRNA sense strand
gggaaguacuuggaagaga

SEQ ID NO: 1478713 - RNA, 19 nt, Homo sapiens
  misc_RNA (1)...(19): siRNA sense strand
uggaagagaucgccacaca

SEQ ID NO: 1478714 - RNA, 19 nt, Homo sapiens
  misc_RNA (1)...(19): siRNA sense strand
gggaggagcagaugugugu

SEQ ID NO: 1478715 - RNA, 19 nt, Homo sapiens
  misc_RNA (1)...(19): siRNA sense strand
ugaaaauccuggccaagua

SEQ ID NO: 1478716 - RNA, 19 nt, Homo sapiens
  misc_RNA (1)...(19): siRNA sense strand
aggaggccgugcagaaaua

SEQ ID NO: 1478717 - RNA, 19 nt, Homo sapiens
  misc_RNA (1)...(19): siRNA sense strand
acaccgcccugaacacuau

SEQ ID NO: 1478718 - RNA, 19 nt, Homo sapiens
  misc_RNA (1)...(19): siRNA sense strand
ccaagggccagaucaaaga

SEQ ID NO: 1478719 - RNA, 19 nt, Homo sapiens
  misc_RNA (1)...(19): siRNA sense strand
ccagagcuauggaguggau

SEQ ID NO: 1478720 - RNA, 19 nt, Homo sapiens
  misc_RNA (1)...(19): siRNA sense strand
gcuacuguguccaacaaug

SEQ ID NO: 1478721 - RNA, 19 nt, Homo sapiens
  misc_RNA (1)...(19): siRNA sense strand
gggccaagguguacuucau

SEQ ID NO: 1478722 - RNA, 19 nt, Homo sapiens
  misc_RNA (1)...(19): siRNA sense strand
cuacaccaccgacuucauu

SEQ ID NO: 1478723 - RNA, 19 nt, Homo sapiens
  misc_RNA (1)...(19): siRNA sense strand
auaaacccaucaccucuga

SEQ ID NO: 1478724 - RNA, 19 nt, Homo sapiens
  misc_RNA (1)...(19): siRNA sense strand
uaaggaggccgugcagaaa

SEQ ID NO: 1478725 - RNA, 19 nt, Homo sapiens
  misc_RNA (1)...(19): siRNA sense strand
gugcagcccuggagugucu

SEQ ID NO: 1478726 - RNA, 19 nt, Homo sapiens
  misc_RNA (1)...(19): siRNA sense strand
cgggcaaccugaacaccua

SEQ ID NO: 1478727 - RNA, 19 nt, Homo sapiens
  misc_RNA (1)...(19): siRNA sense strand
caggccagcuggaacaugu

SEQ ID NO: 1478728 - RNA, 19 nt, Homo sapiens
  misc_RNA (1)...(19): siRNA sense strand
ggacucaggccagcuggaa

SEQ ID NO: 1478729 - RNA, 19 nt, Homo sapiens
  misc_RNA (1)...(19): siRNA sense strand
ccaaguacaaggccagcua

SEQ ID NO: 1478730 - RNA, 19 nt, Homo sapiens
  misc_RNA (1)...(19): siRNA sense strand
uaccaccgaugauuccauu

SEQ ID NO: 1478731 - RNA, 19 nt, Homo sapiens
  misc_RNA (1)...(19): siRNA sense strand
ucaacgcgcugcugaucau

SEQ ID NO: 1478732 - RNA, 19 nt, Homo sapiens
  misc_RNA (1)...(19): siRNA sense strand
gcagacaccgcccugaaca

SEQ ID NO: 1478733 - RNA, 19 nt, Homo sapiens
  misc_RNA (1)...(19): siRNA sense strand
uggagcaccugacggagaa

SEQ ID NO: 1478734 - RNA, 19 nt, Homo sapiens
  misc_RNA (1)...(19): siRNA sense strand
gagcacaggauucccaaag

SEQ ID NO: 1478735 - RNA, 19 nt, Homo sapiens
  misc_RNA (1)...(19): siRNA sense strand
gaacgugcugggucacaug

SEQ ID NO: 1478736 - RNA, 19 nt, Homo sapiens
  misc_RNA (1)...(19): siRNA sense strand
uuuaccagcuguauucaga

SEQ ID NO: 1478737 - RNA, 19 nt, Homo sapiens
  misc_RNA (1)...(19): siRNA sense strand
gcaauugauacccaaaaua

SEQ ID NO: 1478738 - RNA, 19 nt, Homo sapiens
  misc_RNA (1)...(19): siRNA sense strand
guguuugacugcaggaaga

SEQ ID NO: 1478739 - RNA, 19 nt, Homo sapiens
  misc_RNA (1)...(19): siRNA sense strand
ucauuuaccagcuguauuc

SEQ ID NO: 1478740 - RNA, 19 nt, Homo sapiens
  misc_RNA (1)...(19): siRNA sense strand
gcuccauucuugggacaaa

SEQ ID NO: 1478741 - RNA, 19 nt, Homo sapiens
  misc_RNA (1)...(19): siRNA sense strand
ccgcuacuguguccaacaa

SEQ ID NO: 1478742 - RNA, 19 nt, Homo sapiens
  misc_RNA (1)...(19): siRNA sense strand
ccaccgaugauuccauuug

SEQ ID NO: 1478743 - RNA, 19 nt, Homo sapiens
  misc_RNA (1)...(19): siRNA sense strand
gagaggccuugugcucaga

SEQ ID NO: 1478744 - RNA, 19 nt, Homo sapiens
  misc_RNA (1)...(19): siRNA sense strand
aaacuacaccaccgacuuc

SEQ ID NO: 1478745 - RNA, 19 nt, Homo sapiens
  misc_RNA (1)...(19): siRNA sense strand
gccuugugcucagaaauga

SEQ ID NO: 1478746 - RNA, 19 nt, Homo sapiens
  misc_RNA (1)...(19): siRNA sense strand
gacgagaggagauuucaag

SEQ ID NO: 1478747 - RNA, 19 nt, Homo sapiens
  misc_RNA (1)...(19): siRNA sense strand
guacaaggccagcuaugac

SEQ ID NO: 1478748 - RNA, 19 nt, Homo sapiens
  misc_RNA (1)...(19): siRNA sense strand
caccgaugauuccauuugu

SEQ ID NO: 1478749 - RNA, 19 nt, Homo sapiens
  misc_RNA (1)...(19): siRNA sense strand
agaaauacgccuaccucaa

SEQ ID NO: 1478750 - RNA, 19 nt, Homo sapiens
  misc_RNA (1)...(19): siRNA sense strand
ccucuccauuugauagaaa

SEQ ID NO: 1478751 - RNA, 19 nt, Homo sapiens
  misc_RNA (1)...(19): siRNA sense strand
ccaccgacuucauuuacca

SEQ ID NO: 1478752 - RNA, 19 nt, Homo sapiens
  misc_RNA (1)...(19): siRNA sense strand
ggagaagcacgaggaguuc

SEQ ID NO: 1478753 - RNA, 19 nt, Homo sapiens
  misc_RNA (1)...(19): siRNA sense strand
ugacucaggaugugcagaa

SEQ ID NO: 1478754 - RNA, 19 nt, Homo sapiens
  misc_RNA (1)...(19): siRNA sense strand
acaccaccgacuucauuua

SEQ ID NO: 1478755 - RNA, 19 nt, Homo sapiens
  misc_RNA (1)...(19): siRNA sense strand
agagaucgccacacagaug

SEQ ID NO: 1478756 - RNA, 19 nt, Homo sapiens
  misc_RNA (1)...(19): siRNA sense strand
gaaguacuuggaagagauc

SEQ ID NO: 1478757 - RNA, 19 nt, Homo sapiens
  misc_RNA (1)...(19): siRNA sense strand
gguguuccuuccagaaucu

SEQ ID NO: 1478758 - RNA, 19 nt, Homo sapiens
  misc_RNA (1)...(19): siRNA sense strand
auaaggaggccgugcagaa

SEQ ID NO: 1478759 - RNA, 19 nt, Homo sapiens
  misc_RNA (1)...(19): siRNA sense strand
caagguguacuucaucuac

SEQ ID NO: 1478760 - RNA, 19 nt, Homo sapiens
  misc_RNA (1)...(19): siRNA sense strand
gaggagcagauguguguca

SEQ ID NO: 1478761 - RNA, 19 nt, Homo sapiens
  misc_RNA (1)...(19): siRNA sense strand
ggucaugguucccgcuacu

SEQ ID NO: 1478762 - RNA, 19 nt, Homo sapiens
  misc_RNA (1)...(19): siRNA sense strand
gcagcugggcuaugacaca

SEQ ID NO: 1478763 - RNA, 19 nt, Homo sapiens
  misc_RNA (1)...(19): siRNA sense strand
gccaagguguacuucaucu

SEQ ID NO: 1478764 - RNA, 19 nt, Homo sapiens
  misc_RNA (1)...(19): siRNA sense strand
gaacggccagaucgauaag

SEQ ID NO: 1478765 - RNA, 19 nt, Homo sapiens
  misc_RNA (1)...(19): siRNA sense strand
ccauuugugugcugggaau

SEQ ID NO: 1478766 - RNA, 19 nt, Homo sapiens
  misc_RNA (1)...(19): siRNA sense strand
gcacccucuccauuugaua

SEQ ID NO: 1478767 - RNA, 19 nt, Homo sapiens
  misc_RNA (1)...(19): siRNA sense strand
ccagcuguauucagaagag

SEQ ID NO: 1478768 - RNA, 19 nt, Homo sapiens
  misc_RNA (1)...(19): siRNA sense strand
ggacgagaggagauuucaa

SEQ ID NO: 1478769 - RNA, 19 nt, Homo sapiens
  misc_RNA (1)...(19): siRNA sense strand
aaauuuaccaccgaugauu

SEQ ID NO: 1478770 - RNA, 19 nt, Homo sapiens
  misc_RNA (1)...(19): siRNA sense strand
ggccuugugcucagaaaug

SEQ ID NO: 1478771 - RNA, 19 nt, Homo sapiens
  misc_RNA (1)...(19): siRNA sense strand
gaacaccuacaagcgacuu

SEQ ID NO: 1478772 - RNA, 19 nt, Homo sapiens
  misc_RNA (1)...(19): siRNA sense strand
cgagaggagauuucaagau

SEQ ID NO: 1478773 - RNA, 19 nt, Homo sapiens
  misc_RNA (1)...(19): siRNA sense strand
ucccaaagaccaauugcaa

SEQ ID NO: 1478774 - RNA, 19 nt, Homo sapiens
  misc_RNA (1)...(19): siRNA sense strand
caaguacaaggccagcuau

SEQ ID NO: 1478775 - RNA, 19 nt, Homo sapiens
  misc_RNA (1)...(19): siRNA sense strand
caagggccagaucaaagaa

SEQ ID NO: 1478776 - RNA, 19 nt, Homo sapiens
  misc_RNA (1)...(19): siRNA sense strand
gccaagggccagaucaaag

SEQ ID NO: 1478777 - RNA, 19 nt, Homo sapiens
  misc_RNA (1)...(19): siRNA sense strand
aaacccaucaccucugaga

SEQ ID NO: 1478778 - RNA, 19 nt, Homo sapiens
  misc_RNA (1)...(19): siRNA sense strand
ggugaugggacgacacugu

SEQ ID NO: 1478779 - RNA, 19 nt, Homo sapiens
  misc_RNA (1)...(19): siRNA sense strand
gaggccuugugcucagaaa

SEQ ID NO: 1478780 - RNA, 19 nt, Homo sapiens
  misc_RNA (1)...(19): siRNA sense strand
ggagcagaugugugucaaa

SEQ ID NO: 1478781 - RNA, 19 nt, Homo sapiens
  misc_RNA (1)...(19): siRNA sense strand
ugggcuccaucgacaauga

SEQ ID NO: 1478782 - RNA, 19 nt, Homo sapiens
  misc_RNA (1)...(19): siRNA sense strand
gggcacccucuccauuuga

SEQ ID NO: 1478783 - RNA, 19 nt, Homo sapiens
  misc_RNA (1)...(19): siRNA sense strand
ggguguuccuuccagaauc

SEQ ID NO: 1478784 - RNA, 19 nt, Homo sapiens
  misc_RNA (1)...(19): siRNA sense strand
ucaagcugccggaugauca

SEQ ID NO: 1478785 - RNA, 19 nt, Homo sapiens
  misc_RNA (1)...(19): siRNA sense strand
gauggacgagaggagauuu

SEQ ID NO: 1478786 - RNA, 19 nt, Homo sapiens
  misc_RNA (1)...(19): siRNA sense strand
gcaacguagcugucaucaa

SEQ ID NO: 1478787 - RNA, 19 nt, Homo sapiens
  misc_RNA (1)...(19): siRNA sense strand
gaagcacgaggaguucugu

SEQ ID NO: 1478788 - RNA, 19 nt, Homo sapiens
  misc_RNA (1)...(19): siRNA sense strand
ccaagguguacuucaucua

SEQ ID NO: 1478789 - RNA, 19 nt, Homo sapiens
  misc_RNA (1)...(19): siRNA sense strand
ggacuuggcgccucaauga

SEQ ID NO: 1478790 - RNA, 19 nt, Homo sapiens
  misc_RNA (1)...(19): siRNA sense strand
ggucuaaccggucucaaua

SEQ ID NO: 1478791 - RNA, 19 nt, Homo sapiens
  misc_RNA (1)...(19): siRNA sense strand
gcucugcccuucuggaaug

SEQ ID NO: 1478792 - RNA, 19 nt, Homo sapiens
  misc_RNA (1)...(19): siRNA sense strand
gcuacgagaugcuggcuau

SEQ ID NO: 1478793 - RNA, 19 nt, Homo sapiens
  misc_RNA (1)...(19): siRNA sense strand
gcuaugaguuugacaucug

SEQ ID NO: 1478794 - RNA, 19 nt, Homo sapiens
  misc_RNA (1)...(19): siRNA sense strand
cagcuacccuccugugaga

SEQ ID NO: 1478795 - RNA, 19 nt, Homo sapiens
  misc_RNA (1)...(19): siRNA sense strand
ucuaaccggucucaauaaa

SEQ ID NO: 1478796 - RNA, 19 nt, Homo sapiens
  misc_RNA (1)...(19): siRNA sense strand
ucuaugaauuggacaagaa

SEQ ID NO: 1478797 - RNA, 19 nt, Homo sapiens
  misc_RNA (1)...(19): siRNA sense strand
ucaaugagcggcacuaugg

SEQ ID NO: 1478798 - RNA, 19 nt, Homo sapiens
  misc_RNA (1)...(19): siRNA sense strand
gaagagacggugcgcaaag

SEQ ID NO: 1478799 - RNA, 19 nt, Homo sapiens
  misc_RNA (1)...(19): siRNA sense strand
uaaccggucucaauaaagc

SEQ ID NO: 1478800 - RNA, 19 nt, Homo sapiens
  misc_RNA (1)...(19): siRNA sense strand
augcagaccucacagaaga

SEQ ID NO: 1478801 - RNA, 19 nt, Homo sapiens
  misc_RNA (1)...(19): siRNA sense strand
gugagagucugaaggauac

SEQ ID NO: 1478802 - RNA, 19 nt, Homo sapiens
  misc_RNA (1)...(19): siRNA sense strand
caguaaggaucgcagguau

SEQ ID NO: 1478803 - RNA, 19 nt, Homo sapiens
  misc_RNA (1)...(19): siRNA sense strand
ggaaacguguacugauugc

SEQ ID NO: 1478804 - RNA, 19 nt, Homo sapiens
  misc_RNA (1)...(19): siRNA sense strand
gggaaacguguacugauug

SEQ ID NO: 1478805 - RNA, 19 nt, Homo sapiens
  misc_RNA (1)...(19): siRNA sense strand
uggagggucucucugaaga

SEQ ID NO: 1478806 - RNA, 19 nt, Homo sapiens
  misc_RNA (1)...(19): siRNA sense strand
gggcaaggccaagaaguga

SEQ ID NO: 1478807 - RNA, 19 nt, Homo sapiens
  misc_RNA (1)...(19): siRNA sense strand
ggggaaacguguacugauu

SEQ ID NO: 1478808 - RNA, 19 nt, Homo sapiens
  misc_RNA (1)...(19): siRNA sense strand
gaugcuggcuaugaguuug

SEQ ID NO: 1478809 - RNA, 19 nt, Homo sapiens
  misc_RNA (1)...(19): siRNA sense strand
gcgcauggaaccuggagaa

SEQ ID NO: 1478810 - RNA, 19 nt, Homo sapiens
  misc_RNA (1)...(19): siRNA sense strand
ugugagagucugaaggaua

SEQ ID NO: 1478811 - RNA, 19 nt, Homo sapiens
  misc_RNA (1)...(19): siRNA sense strand
uagaugccauugaucagau

SEQ ID NO: 1478812 - RNA, 19 nt, Homo sapiens
  misc_RNA (1)...(19): siRNA sense strand
gagcucugcccuucuggaa

SEQ ID NO: 1478813 - RNA, 19 nt, Homo sapiens
  misc_RNA (1)...(19): siRNA sense strand
gagaugcuggcuaugaguu

SEQ ID NO: 1478814 - RNA, 19 nt, Homo sapiens
  misc_RNA (1)...(19): siRNA sense strand
guaugcagaccucacagaa

SEQ ID NO: 1478815 - RNA, 19 nt, Homo sapiens
  misc_RNA (1)...(19): siRNA sense strand
ccuacaaacuggugcugau

SEQ ID NO: 1478816 - RNA, 19 nt, Homo sapiens
  misc_RNA (1)...(19): siRNA sense strand
ccucacagaagaucagcua

SEQ ID NO: 1478817 - RNA, 19 nt, Homo sapiens
  misc_RNA (1)...(19): siRNA sense strand
uaucaagcccaugcaguuu

SEQ ID NO: 1478818 - RNA, 19 nt, Homo sapiens
  misc_RNA (1)...(19): siRNA sense strand
ucaguaaggaucgcaggua

SEQ ID NO: 1478819 - RNA, 19 nt, Homo sapiens
  misc_RNA (1)...(19): siRNA sense strand
cugaagaggcuaucaugga

SEQ ID NO: 1478820 - RNA, 19 nt, Homo sapiens
  misc_RNA (1)...(19): siRNA sense strand
cuaucaagcccaugcaguu

SEQ ID NO: 1478821 - RNA, 19 nt, Homo sapiens
  misc_RNA (1)...(19): siRNA sense strand
gcccgaccauccuuucuac

SEQ ID NO: 1478822 - RNA, 19 nt, Homo sapiens
  misc_RNA (1)...(19): siRNA sense strand
guaaggaucgcagguaugc

SEQ ID NO: 1478823 - RNA, 19 nt, Homo sapiens
  misc_RNA (1)...(19): siRNA sense strand
ucaccucagugcagaagag

SEQ ID NO: 1478824 - RNA, 19 nt, Homo sapiens
  misc_RNA (1)...(19): siRNA sense strand
ucaagcccaugcaguuucu

SEQ ID NO: 1478825 - RNA, 19 nt, Homo sapiens
  misc_RNA (1)...(19): siRNA sense strand
acagcaacaucaguaagga

SEQ ID NO: 1478826 - RNA, 19 nt, Homo sapiens
  misc_RNA (1)...(19): siRNA sense strand
gguaugcagaccucacaga

SEQ ID NO: 1478827 - RNA, 19 nt, Homo sapiens
  misc_RNA (1)...(19): siRNA sense strand
gcgcaaagccauggaagcu

SEQ ID NO: 1478828 - RNA, 19 nt, Homo sapiens
  misc_RNA (1)...(19): siRNA sense strand
ucuggagggucucucugaa

SEQ ID NO: 1478829 - RNA, 19 nt, Homo sapiens
  misc_RNA (1)...(19): siRNA sense strand
gagagucugaaggauacua

SEQ ID NO: 1478830 - RNA, 19 nt, Homo sapiens
  misc_RNA (1)...(19): siRNA sense strand
gaguuugacaucugcuuca

SEQ ID NO: 1478831 - RNA, 19 nt, Homo sapiens
  misc_RNA (1)...(19): siRNA sense strand
gggucuaaccggucucaau

SEQ ID NO: 1478832 - RNA, 19 nt, Homo sapiens
  misc_RNA (1)...(19): siRNA sense strand
ccugugagagucugaagga

SEQ ID NO: 1478833 - RNA, 19 nt, Homo sapiens
  misc_RNA (1)...(19): siRNA sense strand
gcagaccucacagaagauc

SEQ ID NO: 1478834 - RNA, 19 nt, Homo sapiens
  misc_RNA (1)...(19): siRNA sense strand
cauccuuucuacagcaaca

SEQ ID NO: 1478835 - RNA, 19 nt, Homo sapiens
  misc_RNA (1)...(19): siRNA sense strand
uacgagaugcuggcuauga

SEQ ID NO: 1478836 - RNA, 19 nt, Homo sapiens
  misc_RNA (1)...(19): siRNA sense strand
gauaugguguguggagaua

SEQ ID NO: 1478837 - RNA, 19 nt, Homo sapiens
  misc_RNA (1)...(19): siRNA sense strand
gagggucucuucagaaugu

SEQ ID NO: 1478838 - RNA, 19 nt, Homo sapiens
  misc_RNA (1)...(19): siRNA sense strand
gaagugguccugcugaaga

SEQ ID NO: 1478839 - RNA, 19 nt, Homo sapiens
  misc_RNA (1)...(19): siRNA sense strand
ccaggaaacugcugagauc

SEQ ID NO: 1478840 - RNA, 19 nt, Homo sapiens
  misc_RNA (1)...(19): siRNA sense strand
ucaaacacguggagaagga

SEQ ID NO: 1478841 - RNA, 19 nt, Homo sapiens
  misc_RNA (1)...(19): siRNA sense strand
gaugggacccgaguguaua

SEQ ID NO: 1478842 - RNA, 19 nt, Homo sapiens
  misc_RNA (1)...(19): siRNA sense strand
ggauccugcuguaugauau

SEQ ID NO: 1478843 - RNA, 19 nt, Homo sapiens
  misc_RNA (1)...(19): siRNA sense strand
uaugguguguggagauauu

SEQ ID NO: 1478844 - RNA, 19 nt, Homo sapiens
  misc_RNA (1)...(19): siRNA sense strand
guggagauauuccuuucga

SEQ ID NO: 1478845 - RNA, 19 nt, Homo sapiens
  misc_RNA (1)...(19): siRNA sense strand
ggggagagcugccuaaugg

SEQ ID NO: 1478846 - RNA, 19 nt, Homo sapiens
  misc_RNA (1)...(19): siRNA sense strand
gggauccugcuguaugaua

SEQ ID NO: 1478847 - RNA, 19 nt, Homo sapiens
  misc_RNA (1)...(19): siRNA sense strand
ucgagaggcccgacaguuu

SEQ ID NO: 1478848 - RNA, 19 nt, Homo sapiens
  misc_RNA (1)...(19): siRNA sense strand
ggccaaccuucgaagaaau

SEQ ID NO: 1478849 - RNA, 19 nt, Homo sapiens
  misc_RNA (1)...(19): siRNA sense strand
ucgaagaaauccagaacca

SEQ ID NO: 1478850 - RNA, 19 nt, Homo sapiens
  misc_RNA (1)...(19): siRNA sense strand
cgagaggcccgacaguuuc

SEQ ID NO: 1478851 - RNA, 19 nt, Homo sapiens
  misc_RNA (1)...(19): siRNA sense strand
guguauagcccuccagagu

SEQ ID NO: 1478852 - RNA, 19 nt, Homo sapiens
  misc_RNA (1)...(19): siRNA sense strand
caucagauaggccaaccuu

SEQ ID NO: 1478853 - RNA, 19 nt, Homo sapiens
  misc_RNA (1)...(19): siRNA sense strand
guguggagauauuccuuuc

SEQ ID NO: 1478854 - RNA, 19 nt, Homo sapiens
  misc_RNA (1)...(19): siRNA sense strand
aggccaaccuucgaagaaa

SEQ ID NO: 1478855 - RNA, 19 nt, Homo sapiens
  misc_RNA (1)...(19): siRNA sense strand
ccgcgucuccgacaacuug

SEQ ID NO: 1478856 - RNA, 19 nt, Homo sapiens
  misc_RNA (1)...(19): siRNA sense strand
gagcaugacgaagagauca

SEQ ID NO: 1478857 - RNA, 19 nt, Homo sapiens
  misc_RNA (1)...(19): siRNA sense strand
uggaagugguccugcugaa

SEQ ID NO: 1478858 - RNA, 19 nt, Homo sapiens
  misc_RNA (1)...(19): siRNA sense strand
cgaugggacccgaguguau

SEQ ID NO: 1478859 - RNA, 19 nt, Homo sapiens
  misc_RNA (1)...(19): siRNA sense strand
ggguuucuccggcgucauu

SEQ ID NO: 1478860 - RNA, 19 nt, Homo sapiens
  misc_RNA (1)...(19): siRNA sense strand
gaaggugagcucggguuuc

SEQ ID NO: 1478861 - RNA, 19 nt, Homo sapiens
  misc_RNA (1)...(19): siRNA sense strand
gcucaaggacaccgucuac

SEQ ID NO: 1478862 - RNA, 19 nt, Homo sapiens
  misc_RNA (1)...(19): siRNA sense strand
aaggugagcucggguuucu

SEQ ID NO: 1478863 - RNA, 19 nt, Homo sapiens
  misc_RNA (1)...(19): siRNA sense strand
guggagaaggaccggauuu

SEQ ID NO: 1478864 - RNA, 19 nt, Homo sapiens
  misc_RNA (1)...(19): siRNA sense strand
ggaagugguccugcugaag

SEQ ID NO: 1478865 - RNA, 19 nt, Homo sapiens
  misc_RNA (1)...(19): siRNA sense strand
ccaucaaacacguggagaa

SEQ ID NO: 1478866 - RNA, 19 nt, Homo sapiens
  misc_RNA (1)...(19): siRNA sense strand
aagugguccugcugaagaa

SEQ ID NO: 1478867 - RNA, 19 nt, Homo sapiens
  misc_RNA (1)...(19): siRNA sense strand
cagauaggccaaccuucga

SEQ ID NO: 1478868 - RNA, 19 nt, Homo sapiens
  misc_RNA (1)...(19): siRNA sense strand
agauauuccuuucgagcau

SEQ ID NO: 1478869 - RNA, 19 nt, Homo sapiens
  misc_RNA (1)...(19): siRNA sense strand
caucaaacacguggagaag

SEQ ID NO: 1478870 - RNA, 19 nt, Homo sapiens
  misc_RNA (1)...(19): siRNA sense strand
gcucaagcucaucgacuuc

SEQ ID NO: 1478871 - RNA, 19 nt, Homo sapiens
  misc_RNA (1)...(19): siRNA sense strand
uaggccaaccuucgaagaa

SEQ ID NO: 1478872 - RNA, 19 nt, Homo sapiens
  misc_RNA (1)...(19): siRNA sense strand
cagaguggauccgcuacca

SEQ ID NO: 1478873 - RNA, 19 nt, Homo sapiens
  misc_RNA (1)...(19): siRNA sense strand
caacaugccugccucauug

SEQ ID NO: 1478874 - RNA, 19 nt, Homo sapiens
  misc_RNA (1)...(19): siRNA sense strand
gcccagaucuugccagcuu

SEQ ID NO: 1478875 - RNA, 19 nt, Homo sapiens
  misc_RNA (1)...(19): siRNA sense strand
uaucaugccugcccaccuu

SEQ ID NO: 1478876 - RNA, 19 nt, Homo sapiens
  misc_RNA (1)...(19): siRNA sense strand
gacaucaccaugacagauu

SEQ ID NO: 1478877 - RNA, 19 nt, Homo sapiens
  misc_RNA (1)...(19): siRNA sense strand
gcgccuaccuccgcaacaa

SEQ ID NO: 1478878 - RNA, 19 nt, Homo sapiens
  misc_RNA (1)...(19): siRNA sense strand
ucagaagguugggcuguga

SEQ ID NO: 1478879 - RNA, 19 nt, Homo sapiens
  misc_RNA (1)...(19): siRNA sense strand
ccaacaugccugccucauu

SEQ ID NO: 1478880 - RNA, 19 nt, Homo sapiens
  misc_RNA (1)...(19): siRNA sense strand
agacaggcguagaugaugu

SEQ ID NO: 1478881 - RNA, 19 nt, Homo sapiens
  misc_RNA (1)...(19): siRNA sense strand
ggacaucaccaugacagau

SEQ ID NO: 1478882 - RNA, 19 nt, Homo sapiens
  misc_RNA (1)...(19): siRNA sense strand
ggggaaugcuggcaggaua

SEQ ID NO: 1478883 - RNA, 19 nt, Homo sapiens
  misc_RNA (1)...(19): siRNA sense strand
gggaaugcuggcaggauaa

SEQ ID NO: 1478884 - RNA, 19 nt, Homo sapiens
  misc_RNA (1)...(19): siRNA sense strand
acaucaccaugacagauuu

SEQ ID NO: 1478885 - RNA, 19 nt, Homo sapiens
  misc_RNA (1)...(19): siRNA sense strand
aggcguagaugaugucaag

SEQ ID NO: 1478886 - RNA, 19 nt, Homo sapiens
  misc_RNA (1)...(19): siRNA sense strand
cagauuuccuggaggucaa

SEQ ID NO: 1478887 - RNA, 19 nt, Homo sapiens
  misc_RNA (1)...(19): siRNA sense strand
gccuucaacuggagcaugu

SEQ ID NO: 1478888 - RNA, 19 nt, Homo sapiens
  misc_RNA (1)...(19): siRNA sense strand
ucagacaggcguagaugau
